United States Patent Application Publication US 2015/0232836 A1 - sequence listing, part 27

SEQ ID NO: 1001334 - DNA, 15 bp, Homo sapiens
ttatgataaatagat

SEQ ID NO: 1001335 - DNA, 15 bp, Homo sapiens
gttatgataaataga

SEQ ID NO: 1001336 - DNA, 15 bp, Homo sapiens
tgttatgataaatag

SEQ ID NO: 1001337 - DNA, 15 bp, Homo sapiens
gtgttatgataaata

SEQ ID NO: 1001338 - DNA, 15 bp, Homo sapiens
agtgttatgataaat

SEQ ID NO: 1001339 - DNA, 15 bp, Homo sapiens
aagtgttatgataaa

SEQ ID NO: 1001340 - DNA, 15 bp, Homo sapiens
taagtgttatgataa

SEQ ID NO: 1001341 - DNA, 15 bp, Homo sapiens
gtaagtgttatgata

SEQ ID NO: 1001342 - DNA, 15 bp, Homo sapiens
agtaagtgttatgat

SEQ ID NO: 1001343 - DNA, 15 bp, Homo sapiens
cagtaagtgttatga

SEQ ID NO: 1001344 - DNA, 15 bp, Homo sapiens
acagtaagtgttatg

SEQ ID NO: 1001345 - DNA, 15 bp, Homo sapiens
aacagtaagtgttat

SEQ ID NO: 1001346 - DNA, 15 bp, Homo sapiens
aaacagtaagtgtta

SEQ ID NO: 1001347 - DNA, 15 bp, Homo sapiens
aaaacagtaagtgtt

SEQ ID NO: 1001348 - DNA, 15 bp, Homo sapiens
gaaaacagtaagtgt

SEQ ID NO: 1001349 - DNA, 15 bp, Homo sapiens
ggaaaacagtaagtg

SEQ ID NO: 1001350 - DNA, 15 bp, Homo sapiens
gggaaaacagtaagt

SEQ ID NO: 1001351 - DNA, 15 bp, Homo sapiens
ggggaaaacagtaag

SEQ ID NO: 1001352 - DNA, 15 bp, Homo sapiens
gggggaaaacagtaa

SEQ ID NO: 1001353 - DNA, 15 bp, Homo sapiens
ggggggaaaacagta

SEQ ID NO: 1001354 - DNA, 15 bp, Homo sapiens
aggggggaaaacagt

SEQ ID NO: 1001355 - DNA, 15 bp, Homo sapiens
aaggggggaaaacag

SEQ ID NO: 1001356 - DNA, 15 bp, Homo sapiens
taaggggggaaaaca

SEQ ID NO: 1001357 - DNA, 15 bp, Homo sapiens
ataaggggggaaaac

SEQ ID NO: 1001358 - DNA, 15 bp, Homo sapiens
cataaggggggaaaa

SEQ ID NO: 1001359 - DNA, 15 bp, Homo sapiens
tcataaggggggaaa

SEQ ID NO: 1001360 - DNA, 15 bp, Homo sapiens
atcataaggggggaa

SEQ ID NO: 1001361 - DNA, 15 bp, Homo sapiens
gatcataagggggga

SEQ ID NO: 1001362 - DNA, 15 bp, Homo sapiens
tgatcataagggggg

SEQ ID NO: 1001363 - DNA, 15 bp, Homo sapiens
atgatcataaggggg

SEQ ID NO: 1001364 - DNA, 15 bp, Homo sapiens
tatgatcataagggg

SEQ ID NO: 1001365 - DNA, 15 bp, Homo sapiens
ttatgatcataaggg

SEQ ID NO: 1001366 - DNA, 15 bp, Homo sapiens
tttatgatcataagg

SEQ ID NO: 1001367 - DNA, 15 bp, Homo sapiens
atttatgatcataag

SEQ ID NO: 1001368 - DNA, 15 bp, Homo sapiens
aatttatgatcataa

SEQ ID NO: 1001369 - DNA, 15 bp, Homo sapiens
gaatttatgatcata

SEQ ID NO: 1001370 - DNA, 15 bp, Homo sapiens
ggaatttatgatcat

SEQ ID NO: 1001371 - DNA, 15 bp, Homo sapiens
aggaatttatgatca

SEQ ID NO: 1001372 - DNA, 15 bp, Homo sapiens
taggaatttatgatc

SEQ ID NO: 1001373 - DNA, 15 bp, Homo sapiens
ctaggaatttatgat

SEQ ID NO: 1001374 - DNA, 15 bp, Homo sapiens
tctaggaatttatga

SEQ ID NO: 1001375 - DNA, 15 bp, Homo sapiens
gtctaggaatttatg

SEQ ID NO: 1001376 - DNA, 15 bp, Homo sapiens
tgtctaggaatttat

SEQ ID NO: 1001377 - DNA, 15 bp, Homo sapiens
ttgtctaggaattta

SEQ ID NO: 1001378 - DNA, 15 bp, Homo sapiens
gttgtctaggaattt

SEQ ID NO: 1001379 - DNA, 15 bp, Homo sapiens
tgttgtctaggaatt

SEQ ID NO: 1001380 - DNA, 15 bp, Homo sapiens
ctgttgtctaggaat

SEQ ID NO: 1001381 - DNA, 15 bp, Homo sapiens
cctgttgtctaggaa

SEQ ID NO: 1001382 - DNA, 15 bp, Homo sapiens
gcctgttgtctagga

SEQ ID NO: 1001383 - DNA, 15 bp, Homo sapiens
tgcctgttgtctagg

SEQ ID NO: 1001384 - DNA, 15 bp, Homo sapiens
atgcctgttgtctag

SEQ ID NO: 1001385 - DNA, 15 bp, Homo sapiens
aatgcctgttgtcta

SEQ ID NO: 1001386 - DNA, 15 bp, Homo sapiens
caatgcctgttgtct

SEQ ID NO: 1001387 - DNA, 15 bp, Homo sapiens
acaatgcctgttgtc

SEQ ID NO: 1001388 - DNA, 15 bp, Homo sapiens
tacaatgcctgttgt

SEQ ID NO: 1001389 - DNA, 15 bp, Homo sapiens
ttacaatgcctgttg

SEQ ID NO: 1001390 - DNA, 15 bp, Homo sapiens
ttttacaatgcctgt

SEQ ID NO: 1001391 - DNA, 15 bp, Homo sapiens
tttttacaatgcctg

SEQ ID NO: 1001392 - DNA, 15 bp, Homo sapiens
atttttacaatgcct

SEQ ID NO: 1001393 - DNA, 15 bp, Homo sapiens
tatttttacaatgcc

SEQ ID NO: 1001394 - DNA, 15 bp, Homo sapiens
ctatttttacaatgc

SEQ ID NO: 1001395 - DNA, 15 bp, Homo sapiens
actatttttacaatg

SEQ ID NO: 1001396 - DNA, 15 bp, Homo sapiens
aactatttttacaat

SEQ ID NO: 1001397 - DNA, 15 bp, Homo sapiens
taactatttttacaa

SEQ ID NO: 1001398 - DNA, 15 bp, Homo sapiens
ataactatttttaca

SEQ ID NO: 1001399 - DNA, 15 bp, Homo sapiens
tataactatttttac

SEQ ID NO: 1001400 - DNA, 15 bp, Homo sapiens
ctataactattttta

SEQ ID NO: 1001401 - DNA, 15 bp, Homo sapiens
actataactattttt

SEQ ID NO: 1001402 - DNA, 15 bp, Homo sapiens
tactataactatttt

SEQ ID NO: 1001403 - DNA, 15 bp, Homo sapiens
ctactataactattt

SEQ ID NO: 1001404 - DNA, 15 bp, Homo sapiens
actactataactatt

SEQ ID NO: 1001405 - DNA, 15 bp, Homo sapiens
aactactataactat

SEQ ID NO: 1001406 - DNA, 15 bp, Homo sapiens
caactactataacta

SEQ ID NO: 1001407 - DNA, 15 bp, Homo sapiens
tcaactactataact

SEQ ID NO: 1001408 - DNA, 15 bp, Homo sapiens
atcaactactataac

SEQ ID NO: 1001409 - DNA, 15 bp, Homo sapiens
tatcaactactataa

SEQ ID NO: 1001410 - DNA, 15 bp, Homo sapiens
atatcaactactata

SEQ ID NO: 1001411 - DNA, 15 bp, Homo sapiens
aatatcaactactat

SEQ ID NO: 1001412 - DNA, 15 bp, Homo sapiens
aaatatcaactacta

SEQ ID NO: 1001413 - DNA, 15 bp, Homo sapiens
taaatatcaactact

SEQ ID NO: 1001414 - DNA, 15 bp, Homo sapiens
ctaaatatcaactac

SEQ ID NO: 1001415 - DNA, 15 bp, Homo sapiens
cctaaatatcaacta

SEQ ID NO: 1001416 - DNA, 15 bp, Homo sapiens
tcctaaatatcaact

SEQ ID NO: 1001417 - DNA, 15 bp, Homo sapiens
ctcctaaatatcaac

SEQ ID NO: 1001418 - DNA, 15 bp, Homo sapiens
gctcctaaatatcaa

SEQ ID NO: 1001419 - DNA, 15 bp, Homo sapiens
tgctcctaaatatca

SEQ ID NO: 1001420 - DNA, 15 bp, Homo sapiens
gtgctcctaaatatc

SEQ ID NO: 1001421 - DNA, 15 bp, Homo sapiens
agtgctcctaaatat

SEQ ID NO: 1001422 - DNA, 15 bp, Homo sapiens
aagtgctcctaaata

SEQ ID NO: 1001423 - DNA, 15 bp, Homo sapiens
taagtgctcctaaat

SEQ ID NO: 1001424 - DNA, 15 bp, Homo sapiens
ttaagtgctcctaaa

SEQ ID NO: 1001425 - DNA, 15 bp, Homo sapiens
gttaagtgctcctaa

SEQ ID NO: 1001426 - DNA, 15 bp, Homo sapiens
agttaagtgctccta

SEQ ID NO: 1001427 - DNA, 15 bp, Homo sapiens
tagttaagtgctcct

SEQ ID NO: 1001428 - DNA, 15 bp, Homo sapiens
atagttaagtgctcc

SEQ ID NO: 1001429 - DNA, 15 bp, Homo sapiens
tatagttaagtgctc

SEQ ID NO: 1001430 - DNA, 15 bp, Homo sapiens
atatagttaagtgct

SEQ ID NO: 1001431 - DNA, 15 bp, Homo sapiens
aaggcctgatgtagg

SEQ ID NO: 1001432 - DNA, 15 bp, Homo sapiens
gaaggcctgatgtag

SEQ ID NO: 1001433 - DNA, 15 bp, Homo sapiens
tgaaggcctgatgta

SEQ ID NO: 1001434 - DNA, 15 bp, Homo sapiens
atgaaggcctgatgt

SEQ ID NO: 1001435 - DNA, 15 bp, Homo sapiens
gatgaaggcctgatg

SEQ ID NO: 1001436 - DNA, 15 bp, Homo sapiens
ggatgaaggcctgat

SEQ ID NO: 1001437 - DNA, 15 bp, Homo sapiens
aggatgaaggcctga

SEQ ID NO: 1001438 - DNA, 15 bp, Homo sapiens
caggatgaaggcctg

SEQ ID NO: 1001439 - DNA, 15 bp, Homo sapiens
tcaggatgaaggcct

SEQ ID NO: 1001440 - DNA, 15 bp, Homo sapiens
ctcaggatgaaggcc

SEQ ID NO: 1001441 - DNA, 15 bp, Homo sapiens
cctcaggatgaaggc

SEQ ID NO: 1001442 - DNA, 15 bp, Homo sapiens
tcctcaggatgaagg

SEQ ID NO: 1001443 - DNA, 15 bp, Homo sapiens
atcctcaggatgaag

SEQ ID NO: 1001444 - DNA, 15 bp, Homo sapiens
aatcctcaggatgaa

SEQ ID NO: 1001445 - DNA, 15 bp, Homo sapiens
aaatcctcaggatga

SEQ ID NO: 1001446 - DNA, 15 bp, Homo sapiens
aaaatcctcaggatg

SEQ ID NO: 1001447 - DNA, 15 bp, Homo sapiens
taaaatcctcaggat

SEQ ID NO: 1001448 - DNA, 15 bp, Homo sapiens
ataaaatcctcagga

SEQ ID NO: 1001449 - DNA, 15 bp, Homo sapiens
gataaaatcctcagg

SEQ ID NO: 1001450 - DNA, 15 bp, Homo sapiens
tgataaaatcctcag

SEQ ID NO: 1001451 - DNA, 15 bp, Homo sapiens
ttgataaaatcctca

SEQ ID NO: 1001452 - DNA, 15 bp, Homo sapiens
cttgataaaatcctc

SEQ ID NO: 1001453 - DNA, 15 bp, Homo sapiens
tcttgataaaatcct

SEQ ID NO: 1001454 - DNA, 15 bp, Homo sapiens
ttcttgataaaatcc

SEQ ID NO: 1001455 - DNA, 15 bp, Homo sapiens
tttcttgataaaatc

SEQ ID NO: 1001456 - DNA, 15 bp, Homo sapiens
ctttcttgataaaat

SEQ ID NO: 1001457 - DNA, 15 bp, Homo sapiens
tgctttcttgataaa

SEQ ID NO: 1001458 - DNA, 15 bp, Homo sapiens
ctgctttcttgataa

SEQ ID NO: 1001459 - DNA, 15 bp, Homo sapiens
tctgctttcttgata

SEQ ID NO: 1001460 - DNA, 15 bp, Homo sapiens
atctgctttcttgat

SEQ ID NO: 1001461 - DNA, 15 bp, Homo sapiens
aatctgctttcttga

SEQ ID NO: 1001462 - DNA, 15 bp, Homo sapiens
aaatctgctttcttg

SEQ ID NO: 1001463 - DNA, 15 bp, Homo sapiens
caaatctgctttctt

SEQ ID NO: 1001464 - DNA, 15 bp, Homo sapiens
ccaaatctgctttct

SEQ ID NO: 1001465 - DNA, 15 bp, Homo sapiens
gccaaatctgctttc

SEQ ID NO: 1001466 - DNA, 15 bp, Homo sapiens
tgccaaatctgcttt

SEQ ID NO: 1001467 - DNA, 15 bp, Homo sapiens
ctgccaaatctgctt

SEQ ID NO: 1001468 - DNA, 15 bp, Homo sapiens
actgccaaatctgct

SEQ ID NO: 1001469 - DNA, 15 bp, Homo sapiens
aactgccaaatctgc

SEQ ID NO: 1001470 - DNA, 15 bp, Homo sapiens
gaactgccaaatctg

SEQ ID NO: 1001471 - DNA, 15 bp, Homo sapiens
tgaactgccaaatct

SEQ ID NO: 1001472 - DNA, 15 bp, Homo sapiens
ttgaactgccaaatc

SEQ ID NO: 1001473 - DNA, 15 bp, Homo sapiens
tttgaactgccaaat

SEQ ID NO: 1001474 - DNA, 15 bp, Homo sapiens
ttttgaactgccaaa

SEQ ID NO: 1001475 - DNA, 15 bp, Homo sapiens
cttttgaactgccaa

SEQ ID NO: 1001476 - DNA, 15 bp, Homo sapiens
tcttttgaactgcca

SEQ ID NO: 1001477 - DNA, 15 bp, Homo sapiens
gtcttttgaactgcc

SEQ ID NO: 1001478 - DNA, 15 bp, Homo sapiens
agtcttttgaactgc

SEQ ID NO: 1001479 - DNA, 15 bp, Homo sapiens
gagtcttttgaactg

SEQ ID NO: 1001480 - DNA, 15 bp, Homo sapiens
ggagtcttttgaact

SEQ ID NO: 1001481 - DNA, 15 bp, Homo sapiens
aggagtcttttgaac

SEQ ID NO: 1001482 - DNA, 15 bp, Homo sapiens
caggagtcttttgaa

SEQ ID NO: 1001483 - DNA, 15 bp, Homo sapiens
tcaggagtcttttga

SEQ ID NO: 1001484 - DNA, 15 bp, Homo sapiens
ttcaggagtcttttg

SEQ ID NO: 1001485 - DNA, 15 bp, Homo sapiens
tttcaggagtctttt

SEQ ID NO: 1001486 - DNA, 15 bp, Homo sapiens
atttcaggagtcttt

SEQ ID NO: 1001487 - DNA, 15 bp, Homo sapiens
tcatttcaggagtct

SEQ ID NO: 1001488 - DNA, 15 bp, Homo sapiens
atcatttcaggagtc

SEQ ID NO: 1001489 - DNA, 15 bp, Homo sapiens
tatcatttcaggagt

SEQ ID NO: 1001490 - DNA, 15 bp, Homo sapiens
ttatcatttcaggag

SEQ ID NO: 1001491 - DNA, 15 bp, Homo sapiens
tttatcatttcagga

SEQ ID NO: 1001492 - DNA, 15 bp, Homo sapiens
atttatcatttcagg

SEQ ID NO: 1001493 - DNA, 15 bp, Homo sapiens
gatttatcatttcag

SEQ ID NO: 1001494 - DNA, 15 bp, Homo sapiens
tgatttatcatttca

SEQ ID NO: 1001495 - DNA, 15 bp, Homo sapiens
ctgatttatcatttc

SEQ ID NO: 1001496 - DNA, 15 bp, Homo sapiens
cctgatttatcattt

SEQ ID NO: 1001497 - DNA, 15 bp, Homo sapiens
ccctgatttatcatt

SEQ ID NO: 1001498 - DNA, 15 bp, Homo sapiens
tccctgatttatcat

SEQ ID NO: 1001499 - DNA, 15 bp, Homo sapiens
ttccctgatttatca

SEQ ID NO: 1001500 - DNA, 15 bp, Homo sapiens
gttccctgatttatc

SEQ ID NO: 1001501 - DNA, 15 bp, Homo sapiens
agttccctgatttat

SEQ ID NO: 1001502 - DNA, 15 bp, Homo sapiens
tagttccctgattta

SEQ ID NO: 1001503 - DNA, 15 bp, Homo sapiens
ttagttccctgattt

SEQ ID NO: 1001504 - DNA, 15 bp, Homo sapiens
gttagttccctgatt

SEQ ID NO: 1001505 - DNA, 15 bp, Homo sapiens
ggttagttccctgat

SEQ ID NO: 1001506 - DNA, 15 bp, Homo sapiens
tggttagttccctga

SEQ ID NO: 1001507 - DNA, 15 bp, Homo sapiens
ttggttagttccctg

SEQ ID NO: 1001508 - DNA, 15 bp, Homo sapiens
tttggttagttccct

SEQ ID NO: 1001509 - DNA, 15 bp, Homo sapiens
gtttggttagttccc

SEQ ID NO: 1001510 - DNA, 15 bp, Homo sapiens
cgtttggttagttcc

SEQ ID NO: 1001511 - DNA, 15 bp, Homo sapiens
ccgtttggttagttc

SEQ ID NO: 1001512 - DNA, 15 bp, Homo sapiens
tccgtttggttagtt

SEQ ID NO: 1001513 - DNA, 15 bp, Homo sapiens
ctccgtttggttagt

SEQ ID NO: 1001514 - DNA, 15 bp, Homo sapiens
gctccgtttggttag

SEQ ID NO: 1001515 - DNA, 15 bp, Homo sapiens
tgctccgtttggtta

SEQ ID NO: 1001516 - DNA, 15 bp, Homo sapiens
ctgctccgtttggtt

SEQ ID NO: 1001517 - DNA, 15 bp, Homo sapiens
tctgctccgtttggt

SEQ ID NO: 1001518 - DNA, 15 bp, Homo sapiens
ttctgctccgtttgg

SEQ ID NO: 1001519 - DNA, 15 bp, Homo sapiens
attctgctccgtttg

SEQ ID NO: 1001520 - DNA, 15 bp, Homo sapiens
cattctgctccgttt

SEQ ID NO: 1001521 - DNA, 15 bp, Homo sapiens
ccattctgctccgtt

SEQ ID NO: 1001522 - DNA, 15 bp, Homo sapiens
accattctgctccgt

SEQ ID NO: 1001523 - DNA, 15 bp, Homo sapiens
gaccattctgctccg

SEQ ID NO: 1001524 - DNA, 15 bp, Homo sapiens
tgaccattctgctcc

SEQ ID NO: 1001525 - DNA, 15 bp, Homo sapiens
ttgaccattctgctc

SEQ ID NO: 1001526 - DNA, 15 bp, Homo sapiens
cttgaccattctgct

SEQ ID NO: 1001527 - DNA, 15 bp, Homo sapiens
acttgaccattctgc

SEQ ID NO: 1001528 - DNA, 15 bp, Homo sapiens
cacttgaccattctg

SEQ ID NO: 1001529 - DNA, 15 bp, Homo sapiens
tcacttgaccattct

SEQ ID NO: 1001530 - DNA, 15 bp, Homo sapiens
atcacttgaccattc

SEQ ID NO: 1001531 - DNA, 15 bp, Homo sapiens
catcacttgaccatt

SEQ ID NO: 1001532 - DNA, 15 bp, Homo sapiens
tctcattctgaatag

SEQ ID NO: 1001533 - DNA, 15 bp, Homo sapiens
ttctcattctgaata

SEQ ID NO: 1001534 - DNA, 15 bp, Homo sapiens
tttctcattctgaat

SEQ ID NO: 1001535 - DNA, 15 bp, Homo sapiens
ttttctcattctgaa

SEQ ID NO: 1001536 - DNA, 15 bp, Homo sapiens
tttttctcattctga

SEQ ID NO: 1001537 - DNA, 15 bp, Homo sapiens
atttttctcattctg

SEQ ID NO: 1001538 - DNA, 15 bp, Homo sapiens
gatttttctcattct

SEQ ID NO: 1001539 - DNA, 15 bp, Homo sapiens
ggatttttctcattc

SEQ ID NO: 1001540 - DNA, 15 bp, Homo sapiens
aggatttttctcatt

SEQ ID NO: 1001541 - DNA, 15 bp, Homo sapiens
taggatttttctcat

SEQ ID NO: 1001542 - DNA, 15 bp, Homo sapiens
ttaggatttttctca

SEQ ID NO: 1001543 - DNA, 15 bp, Homo sapiens
gttaggatttttctc

SEQ ID NO: 1001544 - DNA, 15 bp, Homo sapiens
ggttaggatttttct

SEQ ID NO: 1001545 - DNA, 15 bp, Homo sapiens
gggttaggatttttc

SEQ ID NO: 1001546 - DNA, 15 bp, Homo sapiens
tgggttaggattttt

SEQ ID NO: 1001547 - DNA, 15 bp, Homo sapiens
ttgggttaggatttt

SEQ ID NO: 1001548 - DNA, 15 bp, Homo sapiens
attgggttaggattt

SEQ ID NO: 1001549 - DNA, 15 bp, Homo sapiens
tattgggttaggatt

SEQ ID NO: 1001550 - DNA, 15 bp, Homo sapiens
ctattgggttaggat

SEQ ID NO: 1001551 - DNA, 15 bp, Homo sapiens
tctattgggttagga

SEQ ID NO: 1001552 - DNA, 15 bp, Homo sapiens
ttctattgggttagg

SEQ ID NO: 1001553 - DNA, 15 bp, Homo sapiens
attctattgggttag

SEQ ID NO: 1001554 - DNA, 15 bp, Homo sapiens
gattctattgggtta

SEQ ID NO: 1001555 - DNA, 15 bp, Homo sapiens
tgattctattgggtt

SEQ ID NO: 1001556 - DNA, 15 bp, Homo sapiens
gtgattctattgggt

SEQ ID NO: 1001557 - DNA, 15 bp, Homo sapiens
agtgattctattggg

SEQ ID NO: 1001558 - DNA, 15 bp, Homo sapiens
gagtgattctattgg

SEQ ID NO: 1001559 - DNA, 15 bp, Homo sapiens
cgagtgattctattg

SEQ ID NO: 1001560 - DNA, 15 bp, Homo sapiens
tcgagtgattctatt

SEQ ID NO: 1001561 - DNA, 15 bp, Homo sapiens
ttcgagtgattctat

SEQ ID NO: 1001562 - DNA, 15 bp, Homo sapiens
tttcgagtgattcta

SEQ ID NO: 1001563 - DNA, 15 bp, Homo sapiens
ttttcgagtgattct

SEQ ID NO: 1001564 - DNA, 15 bp, Homo sapiens
tttttcgagtgattc

SEQ ID NO: 1001565 - DNA, 15 bp, Homo sapiens
ctttttcgagtgatt

SEQ ID NO: 1001566 - DNA, 15 bp, Homo sapiens
tctttttcgagtgat

SEQ ID NO: 1001567 - DNA, 15 bp, Homo sapiens
ttctttttcgagtga

SEQ ID NO: 1001568 - DNA, 15 bp, Homo sapiens
attctttttcgagtg

SEQ ID NO: 1001569 - DNA, 15 bp, Homo sapiens
gattctttttcgagt

SEQ ID NO: 1001570 - DNA, 15 bp, Homo sapiens
agattctttttcgag

SEQ ID NO: 1001571 - DNA, 15 bp, Homo sapiens
cagattctttttcga

SEQ ID NO: 1001572 - DNA, 15 bp, Homo sapiens
gcagattctttttcg

SEQ ID NO: 1001573 - DNA, 15 bp, Homo sapiens
agcagattctttttc

SEQ ID NO: 1001574 - DNA, 15 bp, Homo sapiens
aagcagattcttttt

SEQ ID NO: 1001575 - DNA, 15 bp, Homo sapiens
aaagcagattctttt

SEQ ID NO: 1001576 - DNA, 15 bp, Homo sapiens
gaaagcagattcttt

SEQ ID NO: 1001577 - DNA, 15 bp, Homo sapiens
tgaaagcagattctt

SEQ ID NO: 1001578 - DNA, 15 bp, Homo sapiens
ttgaaagcagattct

SEQ ID NO: 1001579 - DNA, 15 bp, Homo sapiens
tttgaaagcagattc

SEQ ID NO: 1001580 - DNA, 15 bp, Homo sapiens
ttttgaaagcagatt

SEQ ID NO: 1001581 - DNA, 15 bp, Homo sapiens
gttttgaaagcagat

SEQ ID NO: 1001582 - DNA, 15 bp, Homo sapiens
cgttttgaaagcaga

SEQ ID NO: 1001583 - DNA, 15 bp, Homo sapiens
tcgttttgaaagcag

SEQ ID NO: 1001584 - DNA, 15 bp, Homo sapiens
ttcgttttgaaagca

SEQ ID NO: 1001585 - DNA, 15 bp, Homo sapiens
tttcgttttgaaagc

SEQ ID NO: 1001586 - DNA, 15 bp, Homo sapiens
ctttcgttttgaaag

SEQ ID NO: 1001587 - DNA, 15 bp, Homo sapiens
gctttcgttttgaaa

SEQ ID NO: 1001588 - DNA, 15 bp, Homo sapiens
agctttcgttttgaa

SEQ ID NO: 1001589 - DNA, 15 bp, Homo sapiens
cagctttcgttttga

SEQ ID NO: 1001590 - DNA, 15 bp, Homo sapiens
tcagctttcgttttg

SEQ ID NO: 1001591 - DNA, 15 bp, Homo sapiens
ttcagctttcgtttt

SEQ ID NO: 1001592 - DNA, 15 bp, Homo sapiens
gttcagctttcgttt

SEQ ID NO: 1001593 - DNA, 15 bp, Homo sapiens
ggttcagctttcgtt

SEQ ID NO: 1001594 - DNA, 15 bp, Homo sapiens
aggttcagctttcgt

SEQ ID NO: 1001595 - DNA, 15 bp, Homo sapiens
taggttcagctttcg

SEQ ID NO: 1001596 - DNA, 15 bp, Homo sapiens
ataggttcagctttc

SEQ ID NO: 1001597 - DNA, 15 bp, Homo sapiens
tataggttcagcttt

SEQ ID NO: 1001598 - DNA, 15 bp, Homo sapiens
ttataggttcagctt

SEQ ID NO: 1001599 - DNA, 15 bp, Homo sapiens
cttataggttcagct

SEQ ID NO: 1001600 - DNA, 15 bp, Homo sapiens
gcttataggttcagc

SEQ ID NO: 1001601 - DNA, 15 bp, Homo sapiens
tgcttataggttcag

SEQ ID NO: 1001602 - DNA, 15 bp, Homo sapiens
ctgcttataggttca

SEQ ID NO: 1001603 - DNA, 15 bp, Homo sapiens
gctgcttataggttc

SEQ ID NO: 1001604 - DNA, 15 bp, Homo sapiens
tgctgcttataggtt

SEQ ID NO: 1001605 - DNA, 15 bp, Homo sapiens
ctgctgcttataggt

SEQ ID NO: 1001606 - DNA, 15 bp, Homo sapiens
actgctgcttatagg

SEQ ID NO: 1001607 - DNA, 15 bp, Homo sapiens
tactgctgcttatag

SEQ ID NO: 1001608 - DNA, 15 bp, Homo sapiens
atactgctgcttata

SEQ ID NO: 1001609 - DNA, 15 bp, Homo sapiens
tatactgctgcttat

SEQ ID NO: 1001610 - DNA, 15 bp, Homo sapiens
ttatactgctgctta

SEQ ID NO: 1001611 - DNA, 15 bp, Homo sapiens
cttatactgctgctt

SEQ ID NO: 1001612 - DNA, 15 bp, Homo sapiens
attcagtacaattag

SEQ ID NO: 1001613 - DNA, 15 bp, Homo sapiens
aattcagtacaatta

SEQ ID NO: 1001614 - DNA, 15 bp, Homo sapiens
caattcagtacaatt

SEQ ID NO: 1001615 - DNA, 15 bp, Homo sapiens
gcaattcagtacaat

SEQ ID NO: 1001616 - DNA, 15 bp, Homo sapiens
tgcaattcagtacaa

SEQ ID NO: 1001617 - DNA, 15 bp, Homo sapiens
ttgcaattcagtaca

SEQ ID NO: 1001618 - DNA, 15 bp, Homo sapiens
tttgcaattcagtac

SEQ ID NO: 1001619 - DNA, 15 bp, Homo sapiens
atttgcaattcagta

SEQ ID NO: 1001620 - DNA, 15 bp, Homo sapiens
aatttgcaattcagt

SEQ ID NO: 1001621 - DNA, 15 bp, Homo sapiens
caatttgcaattcag

SEQ ID NO: 1001622 - DNA, 15 bp, Homo sapiens
tcaatttgcaattca

SEQ ID NO: 1001623 - DNA, 15 bp, Homo sapiens
atcaatttgcaattc

SEQ ID NO: 1001624 - DNA, 15 bp, Homo sapiens
tatcaatttgcaatt

SEQ ID NO: 1001625 - DNA, 15 bp, Homo sapiens
ctatcaatttgcaat

SEQ ID NO: 1001626 - DNA, 15 bp, Homo sapiens
actatcaatttgcaa

SEQ ID NO: 1001627 - DNA, 15 bp, Homo sapiens
aactatcaatttgca

SEQ ID NO: 1001628 - DNA, 15 bp, Homo sapiens
caactatcaatttgc

SEQ ID NO: 1001629 - DNA, 15 bp, Homo sapiens
acaactatcaatttg

SEQ ID NO: 1001630 - DNA, 15 bp, Homo sapiens
aacaactatcaattt

SEQ ID NO: 1001631 - DNA, 15 bp, Homo sapiens
gaacaactatcaatt

SEQ ID NO: 1001632 - DNA, 15 bp, Homo sapiens
agaacaactatcaat

SEQ ID NO: 1001633 - DNA, 15 bp, Homo sapiens
tagaacaactatcaa

SEQ ID NO: 1001634 - DNA, 15 bp, Homo sapiens
ctagaacaactatca

SEQ ID NO: 1001635 - DNA, 15 bp, Homo sapiens
gctagaacaactatc

SEQ ID NO: 1001636 - DNA, 15 bp, Homo sapiens
tgctagaacaactat

SEQ ID NO: 1001637 - DNA, 15 bp, Homo sapiens
ctgctagaacaacta

SEQ ID NO: 1001638 - DNA, 15 bp, Homo sapiens
actgctagaacaact

SEQ ID NO: 1001639 - DNA, 15 bp, Homo sapiens
cactgctagaacaac

SEQ ID NO: 1001640 - DNA, 15 bp, Homo sapiens
tcactgctagaacaa

SEQ ID NO: 1001641 - DNA, 15 bp, Homo sapiens
ttcactgctagaaca

SEQ ID NO: 1001642 - DNA, 15 bp, Homo sapiens
cttcactgctagaac

SEQ ID NO: 1001643 - DNA, 15 bp, Homo sapiens
tcttcactgctagaa

SEQ ID NO: 1001644 - DNA, 15 bp, Homo sapiens
ctcttcactgctaga

SEQ ID NO: 1001645 - DNA, 15 bp, Homo sapiens
tctcttcactgctag

SEQ ID NO: 1001646 - DNA, 15 bp, Homo sapiens
atctcttcactgcta

SEQ ID NO: 1001647 - DNA, 15 bp, Homo sapiens
tatctcttcactgct

SEQ ID NO: 1001648 - DNA, 15 bp, Homo sapiens
ttatctcttcactgc

SEQ ID NO: 1001649 - DNA, 15 bp, Homo sapiens
tttatctcttcactg

SEQ ID NO: 1001650 - DNA, 15 bp, Homo sapiens
ctttatctcttcact

SEQ ID NO: 1001651 - DNA, 15 bp, Homo sapiens
tctttatctcttcac

SEQ ID NO: 1001652 - DNA, 15 bp, Homo sapiens
ttctttatctcttca

SEQ ID NO: 1001653 - DNA, 15 bp, Homo sapiens
tttctttatctcttc

SEQ ID NO: 1001654 - DNA, 15 bp, Homo sapiens
ttttctttatctctt

SEQ ID NO: 1001655 - DNA, 15 bp, Homo sapiens
tttttctttatctct

SEQ ID NO: 1001656 - DNA, 15 bp, Homo sapiens
ttttttctttatctc

SEQ ID NO: 1001657 - DNA, 15 bp, Homo sapiens
tttttttctttatct

SEQ ID NO: 1001658 - DNA, 15 bp, Homo sapiens
ttttttttctttatc

SEQ ID NO: 1001659 - DNA, 15 bp, Homo sapiens
cttttttttctttat

SEQ ID NO: 1001660 - DNA, 15 bp, Homo sapiens
acttttttttcttta

SEQ ID NO: 1001661 - DNA, 15 bp, Homo sapiens
gtacttttttttctt

SEQ ID NO: 1001662 - DNA, 15 bp, Homo sapiens
tgtacttttttttct

SEQ ID NO: 1001663 - DNA, 15 bp, Homo sapiens
ttgtacttttttttc

SEQ ID NO: 1001664 - DNA, 15 bp, Homo sapiens
gttgtactttttttt

SEQ ID NO: 1001665 - DNA, 15 bp, Homo sapiens
ggttgtacttttttt

SEQ ID NO: 1001666 - DNA, 15 bp, Homo sapiens
tggttgtactttttt

SEQ ID NO: 1001667 - DNA, 15 bp, Homo sapiens
ttggttgtacttttt

SEQ ID NO: 1001668 - DNA, 15 bp, Homo sapiens
tttggttgtactttt

SEQ ID NO: 1001669 - DNA, 15 bp, Homo sapiens
atttggttgtacttt

SEQ ID NO: 1001670 - DNA, 15 bp, Homo sapiens
catttggttgtactt

SEQ ID NO: 1001671 - DNA, 15 bp, Homo sapiens
gcatttggttgtact

SEQ ID NO: 1001672 - DNA, 15 bp, Homo sapiens
ggcatttggttgtac

SEQ ID NO: 1001673 - DNA, 15 bp, Homo sapiens
tggcatttggttgta

SEQ ID NO: 1001674 - DNA, 15 bp, Homo sapiens
ctggcatttggttgt

SEQ ID NO: 1001675 - DNA, 15 bp, Homo sapiens
actggcatttggttg

SEQ ID NO: 1001676 - DNA, 15 bp, Homo sapiens
gactggcatttggtt

SEQ ID NO: 1001677 - DNA, 15 bp, Homo sapiens
tgactggcatttggt

SEQ ID NO: 1001678 - DNA, 15 bp, Homo sapiens
ctgactggcatttgg

SEQ ID NO: 1001679 - DNA, 15 bp, Homo sapiens
cctgactggcatttg

SEQ ID NO: 1001680 - DNA, 15 bp, Homo sapiens
gcctgactggcattt

SEQ ID NO: 1001681 - DNA, 15 bp, Homo sapiens
tgcctgactggcatt

SEQ ID NO: 1001682 - DNA, 15 bp, Homo sapiens
gtgcctgactggcat

SEQ ID NO: 1001683 - DNA, 15 bp, Homo sapiens
tgtgcctgactggca

SEQ ID NO: 1001684 - DNA, 15 bp, Homo sapiens
ctgtgcctgactggc

SEQ ID NO: 1001685 - DNA, 15 bp, Homo sapiens
gctgtgcctgactgg

SEQ ID NO: 1001686 - DNA, 15 bp, Homo sapiens
tgctgtgcctgactg

SEQ ID NO: 1001687 - DNA, 15 bp, Homo sapiens
ctgctgtgcctgact

SEQ ID NO: 1001688 - DNA, 15 bp, Homo sapiens
tctgctgtgcctgac

SEQ ID NO: 1001689 - DNA, 15 bp, Homo sapiens
ttctgctgtgcctga

SEQ ID NO: 1001690 - DNA, 15 bp, Homo sapiens
tttctgctgtgcctg

SEQ ID NO: 1001691 - DNA, 15 bp, Homo sapiens
gtttctgctgtgcct

SEQ ID NO: 1001692 - DNA, 15 bp, Homo sapiens
ggtttctgctgtgcc

SEQ ID NO: 1001693 - DNA, 15 bp, Homo sapiens
aggtttctgctgtgc

SEQ ID NO: 1001694 - DNA, 15 bp, Homo sapiens
taggtttctgctgtg

SEQ ID NO: 1001695 - DNA, 15 bp, Homo sapiens
gtaggtttctgctgt

SEQ ID NO: 1001696 - DNA, 15 bp, Homo sapiens
tgtaggtttctgctg

SEQ ID NO: 1001697 - DNA, 15 bp, Homo sapiens
ttgtaggtttctgct

SEQ ID NO: 1001698 - DNA, 15 bp, Homo sapiens
gttgtaggtttctgc

SEQ ID NO: 1001699 - DNA, 15 bp, Homo sapiens
agttgtaggtttctg

SEQ ID NO: 1001700 - DNA, 15 bp, Homo sapiens
gagttgtaggtttct

SEQ ID NO: 1001701 - DNA, 15 bp, Homo sapiens
tgagttgtaggtttc

SEQ ID NO: 1001702 - DNA, 15 bp, Homo sapiens
atgagttgtaggttt

SEQ ID NO: 1001703 - DNA, 15 bp, Homo sapiens
catgagttgtaggtt

SEQ ID NO: 1001704 - DNA, 15 bp, Homo sapiens
ccatgagttgtaggt

SEQ ID NO: 1001705 - DNA, 15 bp, Homo sapiens
tccatgagttgtagg

SEQ ID NO: 1001706 - DNA, 15 bp, Homo sapiens
ttccatgagttgtag

SEQ ID NO: 1001707 - DNA, 15 bp, Homo sapiens
cttccatgagttgta

SEQ ID NO: 1001708 - DNA, 15 bp, Homo sapiens
ccttccatgagttgt

SEQ ID NO: 1001709 - DNA, 15 bp, Homo sapiens
accttccatgagttg

SEQ ID NO: 1001710 - DNA, 15 bp, Homo sapiens
taccttccatgagtt

SEQ ID NO: 1001711 - DNA, 15 bp, Homo sapiens
ttaccttccatgagt

SEQ ID NO: 1001712 - DNA, 15 bp, Homo sapiens
tttaccttccatgag

SEQ ID NO: 1001713 - DNA, 15 bp, Homo sapiens
ctttaccttccatga

SEQ ID NO: 1001714 - DNA, 15 bp, Homo sapiens
tctttaccttccatg

SEQ ID NO: 1001715 - DNA, 15 bp, Homo sapiens
ttctttaccttccat

SEQ ID NO: 1001716 - DNA, 15 bp, Homo sapiens
gttctttaccttcca

SEQ ID NO: 1001717 - DNA, 15 bp, Homo sapiens
ggttctttaccttcc

SEQ ID NO: 1001718 - DNA, 15 bp, Homo sapiens
aggttctttaccttc

SEQ ID NO: 1001719 - DNA, 15 bp, Homo sapiens
caggttctttacctt

SEQ ID NO: 1001720 - DNA, 15 bp, Homo sapiens
gcaggttctttacct

SEQ ID NO: 1001721 - DNA, 15 bp, Homo sapiens
tgcaggttctttacc

SEQ ID NO: 1001722 - DNA, 15 bp, Homo sapiens
ttgcaggttctttac

SEQ ID NO: 1001723 - DNA, 15 bp, Homo sapiens
gttgcaggttcttta

SEQ ID NO: 1001724 - DNA, 15 bp, Homo sapiens
agttgcaggttcttt

SEQ ID NO: 1001725 - DNA, 15 bp, Homo sapiens
cagttgcaggttctt

SEQ ID NO: 1001726 - DNA, 15 bp, Homo sapiens
ccagttgcaggttct

SEQ ID NO: 1001727 - DNA, 15 bp, Homo sapiens
tccagttgcaggttc

SEQ ID NO: 1001728 - DNA, 15 bp, Homo sapiens
ctccagttgcaggtt

SEQ ID NO: 1001729 - DNA, 15 bp, Homo sapiens
gctccagttgcaggt

SEQ ID NO: 1001730 - DNA, 15 bp, Homo sapiens
ggctccagttgcagg

SEQ ID NO: 1001731 - DNA, 15 bp, Homo sapiens
tggctccagttgcag

SEQ ID NO: 1001732 - DNA, 15 bp, Homo sapiens
ttggctccagttgca

SEQ ID NO: 1001733 - DNA, 15 bp, Homo sapiens
cttggctccagttgc

SEQ ID NO: 1001734 - DNA, 15 bp, Homo sapiens
tcttggctccagttg

SEQ ID NO: 1001735 - DNA, 15 bp, Homo sapiens
ttcttggctccagtt

SEQ ID NO: 1001736 - DNA, 15 bp, Homo sapiens
cttcttggctccagt

SEQ ID NO: 1001737 - DNA, 15 bp, Homo sapiens
tcttcttggctccag

SEQ ID NO: 1001738 - DNA, 15 bp, Homo sapiens
ctcttcttggctcca

SEQ ID NO: 1001739 - DNA, 15 bp, Homo sapiens
actcttcttggctcc

SEQ ID NO: 1001740 - DNA, 15 bp, Homo sapiens
tactcttcttggctc

SEQ ID NO: 1001741 - DNA, 15 bp, Homo sapiens
ttactcttcttggct

SEQ ID NO: 1001742 - DNA, 15 bp, Homo sapiens
gttactcttcttggc

SEQ ID NO: 1001743 - DNA, 15 bp, Homo sapiens
tgttactcttcttgg

SEQ ID NO: 1001744 - DNA, 15 bp, Homo sapiens
ttgttactcttcttg

SEQ ID NO: 1001745 - DNA, 15 bp, Homo sapiens
cttgttactcttctt

SEQ ID NO: 1001746 - DNA, 15 bp, Homo sapiens
gcttgttactcttct

SEQ ID NO: 1001747 - DNA, 15 bp, Homo sapiens
ggcttgttactcttc

SEQ ID NO: 1001748 - DNA, 15 bp, Homo sapiens
tggcttgttactctt

SEQ ID NO: 1001749 - DNA, 15 bp, Homo sapiens
ttggcttgttactct

SEQ ID NO: 1001750 - DNA, 15 bp, Homo sapiens
tttggcttgttactc

SEQ ID NO: 1001751 - DNA, 15 bp, Homo sapiens
atttggcttgttact

SEQ ID NO: 1001752 - DNA, 15 bp, Homo sapiens
catttggcttgttac

SEQ ID NO: 1001753 - DNA, 15 bp, Homo sapiens
tcatttggcttgtta

SEQ ID NO: 1001754 - DNA, 15 bp, Homo sapiens
ttcatttggcttgtt

SEQ ID NO: 1001755 - DNA, 15 bp, Homo sapiens
gttcatttggcttgt

SEQ ID NO: 1001756 - DNA, 15 bp, Homo sapiens
tgttcatttggcttg

SEQ ID NO: 1001757 - DNA, 15 bp, Homo sapiens
ctgttcatttggctt

SEQ ID NO: 1001758 - DNA, 15 bp, Homo sapiens
tctgttcatttggct

SEQ ID NO: 1001759 - DNA, 15 bp, Homo sapiens
gtctgttcatttggc

SEQ ID NO: 1001760 - DNA, 15 bp, Homo sapiens
tgtctgttcatttgg

SEQ ID NO: 1001761 - DNA, 15 bp, Homo sapiens
ttgtctgttcatttg

SEQ ID NO: 1001762 - DNA, 15 bp, Homo sapiens
cttgtctgttcattt

SEQ ID NO: 1001763 - DNA, 15 bp, Homo sapiens
acttgtctgttcatt

SEQ ID NO: 1001764 - DNA, 15 bp, Homo sapiens
tacttgtctgttcat

SEQ ID NO: 1001765 - DNA, 15 bp, Homo sapiens
ttacttgtctgttca

SEQ ID NO: 1001766 - DNA, 15 bp, Homo sapiens
tttacttgtctgttc

SEQ ID NO: 1001767 - DNA, 15 bp, Homo sapiens
ttttacttgtctgtt

SEQ ID NO: 1001768 - DNA, 15 bp, Homo sapiens
cttttacttgtctgt

SEQ ID NO: 1001769 - DNA, 15 bp, Homo sapiens
tcttttacttgtctg

SEQ ID NO: 1001770 - DNA, 15 bp, Homo sapiens
gtcttttacttgtct

SEQ ID NO: 1001771 - DNA, 15 bp, Homo sapiens
tgtcttttacttgtc

SEQ ID NO: 1001772 - DNA, 15 bp, Homo sapiens
atgtcttttacttgt

SEQ ID NO: 1001773 - DNA, 15 bp, Homo sapiens
catgtcttttacttg

SEQ ID NO: 1001774 - DNA, 15 bp, Homo sapiens
tcatgtcttttactt

SEQ ID NO: 1001775 - DNA, 15 bp, Homo sapiens
gtcatgtcttttact

SEQ ID NO: 1001776 - DNA, 15 bp, Homo sapiens
tgtcatgtcttttac

SEQ ID NO: 1001777 - DNA, 15 bp, Homo sapiens
ctgtcatgtctttta

SEQ ID NO: 1001778 - DNA, 15 bp, Homo sapiens
gctgtcatgtctttt

SEQ ID NO: 1001779 - DNA, 15 bp, Homo sapiens
cgctgtcatgtcttt

SEQ ID NO: 1001780 - DNA, 15 bp, Homo sapiens
tcgctgtcatgtctt

SEQ ID NO: 1001781 - DNA, 15 bp, Homo sapiens
atcgctgtcatgtct

SEQ ID NO: 1001782 - DNA, 15 bp, Homo sapiens
tatcgctgtcatgtc

SEQ ID NO: 1001783 - DNA, 15 bp, Homo sapiens
gtatcgctgtcatgt

SEQ ID NO: 1001784 - DNA, 15 bp, Homo sapiens
agtatcgctgtcatg

SEQ ID NO: 1001785 - DNA, 15 bp, Homo sapiens
aagtatcgctgtcat

SEQ ID NO: 1001786 - DNA, 15 bp, Homo sapiens
aaagtatcgctgtca

SEQ ID NO: 1001787 - DNA, 15 bp, Homo sapiens
gaaagtatcgctgtc

SEQ ID NO: 1001788 - DNA, 15 bp, Homo sapiens
ggaaagtatcgctgt

SEQ ID NO: 1001789 - DNA, 15 bp, Homo sapiens
gggaaagtatcgctg

SEQ ID NO: 1001790 - DNA, 15 bp, Homo sapiens
tgggaaagtatcgct

SEQ ID NO: 1001791 - DNA, 15 bp, Homo sapiens
ctgggaaagtatcgc

SEQ ID NO: 1001792 - DNA, 15 bp, Homo sapiens
tctgggaaagtatcg

SEQ ID NO: 1001793 - DNA, 15 bp, Homo sapiens
ctctgggaaagtatc

SEQ ID NO: 1001794 - DNA, 15 bp, Homo sapiens
gctctgggaaagtat

SEQ ID NO: 1001795 - DNA, 15 bp, Homo sapiens
agctctgggaaagta

SEQ ID NO: 1001796 - DNA, 15 bp, Homo sapiens
cagctctgggaaagt

SEQ ID NO: 1001797 - DNA, 15 bp, Homo sapiens
tcagctctgggaaag

SEQ ID NO: 1001798 - DNA, 15 bp, Homo sapiens
ttcagctctgggaaa

SEQ ID NO: 1001799 - DNA, 15 bp, Homo sapiens
cttcagctctgggaa

SEQ ID NO: 1001800 - DNA, 15 bp, Homo sapiens
acttcagctctggga

SEQ ID NO: 1001801 - DNA, 15 bp, Homo sapiens
aacttcagctctggg

SEQ ID NO: 1001802 - DNA, 15 bp, Homo sapiens
taacttcagctctgg

SEQ ID NO: 1001803 - DNA, 15 bp, Homo sapiens
ttaacttcagctctg

SEQ ID NO: 1001804 - DNA, 15 bp, Homo sapiens
gttaacttcagctct

SEQ ID NO: 1001805 - DNA, 15 bp, Homo sapiens
tgttaacttcagctc

SEQ ID NO: 1001806 - DNA, 15 bp, Homo sapiens
ttgttaacttcagct

SEQ ID NO: 1001807 - DNA, 15 bp, Homo sapiens
tttgttaacttcagc

SEQ ID NO: 1001808 - DNA, 15 bp, Homo sapiens
atttgttaacttcag

SEQ ID NO: 1001809 - DNA, 15 bp, Homo sapiens
aagttatctgaaatc

SEQ ID NO: 1001810 - DNA, 15 bp, Homo sapiens
taagttatctgaaat

SEQ ID NO: 1001811 - DNA, 15 bp, Homo sapiens
ctaagttatctgaaa

SEQ ID NO: 1001812 - DNA, 15 bp, Homo sapiens
tctaagttatctgaa

SEQ ID NO: 1001813 - DNA, 15 bp, Homo sapiens
ttctaagttatctga

SEQ ID NO: 1001814 - DNA, 15 bp, Homo sapiens
gttctaagttatctg

SEQ ID NO: 1001815 - DNA, 15 bp, Homo sapiens
tgttctaagttatct

SEQ ID NO: 1001816 - DNA, 15 bp, Homo sapiens
ctgttctaagttatc

SEQ ID NO: 1001817 - DNA, 15 bp, Homo sapiens
gctgttctaagttat

SEQ ID NO: 1001818 - DNA, 15 bp, Homo sapiens
ggctgttctaagtta

SEQ ID NO: 1001819 - DNA, 15 bp, Homo sapiens
aggctgttctaagtt

SEQ ID NO: 1001820 - DNA, 15 bp, Homo sapiens
taggctgttctaagt

SEQ ID NO: 1001821 - DNA, 15 bp, Homo sapiens
ataggctgttctaag

SEQ ID NO: 1001822 - DNA, 15 bp, Homo sapiens
cataggctgttctaa

SEQ ID NO: 1001823 - DNA, 15 bp, Homo sapiens
ccataggctgttcta

SEQ ID NO: 1001824 - DNA, 15 bp, Homo sapiens
cccataggctgttct

SEQ ID NO: 1001825 - DNA, 15 bp, Homo sapiens
tcccataggctgttc

SEQ ID NO: 1001826 - DNA, 15 bp, Homo sapiens
ttcccataggctgtt

SEQ ID NO: 1001827 - DNA, 15 bp, Homo sapiens
cttcccataggctgt

SEQ ID NO: 1001828 - DNA, 15 bp, Homo sapiens
acttcccataggctg

SEQ ID NO: 1001829 - DNA, 15 bp, Homo sapiens
tacttcccataggct

SEQ ID NO: 1001830 - DNA, 15 bp, Homo sapiens
ctacttcccataggc

SEQ ID NO: 1001831 - DNA, 15 bp, Homo sapiens
actacttcccatagg

SEQ ID NO: 1001832 - DNA, 15 bp, Homo sapiens
gactacttcccatag

SEQ ID NO: 1001833 - DNA, 15 bp, Homo sapiens
tgactacttcccata

SEQ ID NO: 1001834 - DNA, 15 bp, Homo sapiens
atgactacttcccat

SEQ ID NO: 1001835 - DNA, 15 bp, Homo sapiens
catgactacttccca

SEQ ID NO: 1001836 - DNA, 15 bp, Homo sapiens
gcatgactacttccc

SEQ ID NO: 1001837 - DNA, 15 bp, Homo sapiens
tgcatgactacttcc

SEQ ID NO: 1001838 - DNA, 15 bp, Homo sapiens
atgcatgactacttc

SEQ ID NO: 1001839 - DNA, 15 bp, Homo sapiens
gatgcatgactactt

SEQ ID NO: 1001840 - DNA, 15 bp, Homo sapiens
agatgcatgactact

SEQ ID NO: 1001841 - DNA, 15 bp, Homo sapiens
gagatgcatgactac

SEQ ID NO: 1001842 - DNA, 15 bp, Homo sapiens
tgagatgcatgacta

SEQ ID NO: 1001843 - DNA, 15 bp, Homo sapiens
ctgagatgcatgact

SEQ ID NO: 1001844 - DNA, 15 bp, Homo sapiens
cctgagatgcatgac

SEQ ID NO: 1001845 - DNA, 15 bp, Homo sapiens
acctgagatgcatga

SEQ ID NO: 1001846 - DNA, 15 bp, Homo sapiens
aacctgagatgcatg

SEQ ID NO: 1001847 - DNA, 15 bp, Homo sapiens
aaacctgagatgcat

SEQ ID NO: 1001848 - DNA, 15 bp, Homo sapiens
caaacctgagatgca

SEQ ID NO: 1001849 - DNA, 15 bp, Homo sapiens
acaaacctgagatgc

SEQ ID NO: 1001850 - DNA, 15 bp, Homo sapiens
aacaaacctgagatg

SEQ ID NO: 1001851 - DNA, 15 bp, Homo sapiens
gaacaaacctgagat

SEQ ID NO: 1001852 - DNA, 15 bp, Homo sapiens
agaacaaacctgaga

SEQ ID NO: 1001853 - DNA, 15 bp, Homo sapiens
cagaacaaacctgag

SEQ ID NO: 1001854 - DNA, 15 bp, Homo sapiens
tcagaacaaacctga

SEQ ID NO: 1001855 - DNA, 15 bp, Homo sapiens
ctcagaacaaacctg

SEQ ID NO: 1001856 - DNA, 15 bp, Homo sapiens
tctcagaacaaacct

SEQ ID NO: 1001857 - DNA, 15 bp, Homo sapiens
gtctcagaacaaacc

SEQ ID NO: 1001858 - DNA, 15 bp, Homo sapiens
tgtctcagaacaaac

SEQ ID NO: 1001859 - DNA, 15 bp, Homo sapiens
gtgtctcagaacaaa

SEQ ID NO: 1001860 - DNA, 15 bp, Homo sapiens
ggtgtctcagaacaa

SEQ ID NO: 1001861 - DNA, 15 bp, Homo sapiens
aggtgtctcagaaca

SEQ ID NO: 1001862 - DNA, 15 bp, Homo sapiens
caggtgtctcagaac

SEQ ID NO: 1001863 - DNA, 15 bp, Homo sapiens
tcaggtgtctcagaa

SEQ ID NO: 1001864 - DNA, 15 bp, Homo sapiens
atcaggtgtctcaga

SEQ ID NO: 1001865 - DNA, 15 bp, Homo sapiens
catcaggtgtctcag

SEQ ID NO: 1001866 - DNA, 15 bp, Homo sapiens
tcatcaggtgtctca

SEQ ID NO: 1001867 - DNA, 15 bp, Homo sapiens
gtcatcaggtgtctc

SEQ ID NO: 1001868 - DNA, 15 bp, Homo sapiens
ggtcatcaggtgtct

SEQ ID NO: 1001869 - DNA, 15 bp, Homo sapiens
aggtcatcaggtgtc

SEQ ID NO: 1001870 - DNA, 15 bp, Homo sapiens
caggtcatcaggtgt

SEQ ID NO: 1001871 - DNA, 15 bp, Homo sapiens
acaggtcatcaggtg

SEQ ID NO: 1001872 - DNA, 15 bp, Homo sapiens
aacaggtcatcaggt

SEQ ID NO: 1001873 - DNA, 15 bp, Homo sapiens
taacaggtcatcagg

SEQ ID NO: 1001874 - DNA, 15 bp, Homo sapiens
ctaacaggtcatcag

SEQ ID NO: 1001875 - DNA, 15 bp, Homo sapiens
tctaacaggtcatca

SEQ ID NO: 1001876 - DNA, 15 bp, Homo sapiens
atctaacaggtcatc

SEQ ID NO: 1001877 - DNA, 15 bp, Homo sapiens
catctaacaggtcat

SEQ ID NO: 1001878 - DNA, 15 bp, Homo sapiens
tcatctaacaggtca

SEQ ID NO: 1001879 - DNA, 15 bp, Homo sapiens
atcatctaacaggtc

SEQ ID NO: 1001880 - DNA, 15 bp, Homo sapiens
catcatctaacaggt

SEQ ID NO: 1001881 - DNA, 15 bp, Homo sapiens
ccatcatctaacagg

SEQ ID NO: 1001882 - DNA, 15 bp, Homo sapiens
accatcatctaacag

SEQ ID NO: 1001883 - DNA, 15 bp, Homo sapiens
caccatcatctaaca

SEQ ID NO: 1001884 - DNA, 15 bp, Homo sapiens
tcaccatcatctaac

SEQ ID NO: 1001885 - DNA, 15 bp, Homo sapiens
ttcaccatcatctaa

SEQ ID NO: 1001886 - DNA, 15 bp, Homo sapiens
tttcaccatcatcta

SEQ ID NO: 1001887 - DNA, 15 bp, Homo sapiens
atttcaccatcatct

SEQ ID NO: 1001888 - DNA, 15 bp, Homo sapiens
tatttcaccatcatc

SEQ ID NO: 1001889 - DNA, 15 bp, Homo sapiens
ttatttcaccatcat

SEQ ID NO: 1001890 - DNA, 15 bp, Homo sapiens
tttatttcaccatca

SEQ ID NO: 1001891 - DNA, 15 bp, Homo sapiens
ctttatttcaccatc

SEQ ID NO: 1001892 - DNA, 15 bp, Homo sapiens
cctttatttcaccat

SEQ ID NO: 1001893 - DNA, 15 bp, Homo sapiens
tcctttatttcacca

SEQ ID NO: 1001894 - DNA, 15 bp, Homo sapiens
ttcctttatttcacc

SEQ ID NO: 1001895 - DNA, 15 bp, Homo sapiens
cttcctttatttcac

SEQ ID NO: 1001896 - DNA, 15 bp, Homo sapiens
tcttcctttatttca

SEQ ID NO: 1001897 - DNA, 15 bp, Homo sapiens
atcttcctttatttc

SEQ ID NO: 1001898 - DNA, 15 bp, Homo sapiens
tatcttcctttattt

SEQ ID NO: 1001899 - DNA, 15 bp, Homo sapiens
gtatcttcctttatt

SEQ ID NO: 1001900 - DNA, 15 bp, Homo sapiens
agtatcttcctttat

SEQ ID NO: 1001901 - DNA, 15 bp, Homo sapiens
tagtatcttccttta

SEQ ID NO: 1001902 - DNA, 15 bp, Homo sapiens
ctagtatcttccttt

SEQ ID NO: 1001903 - DNA, 15 bp, Homo sapiens
actagtatcttcctt

SEQ ID NO: 1001904 - DNA, 15 bp, Homo sapiens
aactagtatcttcct

SEQ ID NO: 1001905 - DNA, 15 bp, Homo sapiens
aaactagtatcttcc

SEQ ID NO: 1001906 - DNA, 15 bp, Homo sapiens
aaaactagtatcttc

SEQ ID NO: 1001907 - DNA, 15 bp, Homo sapiens
caaaactagtatctt

SEQ ID NO: 1001908 - DNA, 15 bp, Homo sapiens
gcaaaactagtatct

SEQ ID NO: 1001909 - DNA, 15 bp, Homo sapiens
agcaaaactagtatc

SEQ ID NO: 1001910 - DNA, 15 bp, Homo sapiens
cagcaaaactagtat

SEQ ID NO: 1001911 - DNA, 15 bp, Homo sapiens
tcagcaaaactagta

SEQ ID NO: 1001912 - DNA, 15 bp, Homo sapiens
ttcagcaaaactagt

SEQ ID NO: 1001913 - DNA, 15 bp, Homo sapiens
tttcagcaaaactag

SEQ ID NO: 1001914 - DNA, 15 bp, Homo sapiens
ttttcagcaaaacta

SEQ ID NO: 1001915 - DNA, 15 bp, Homo sapiens
attttcagcaaaact

SEQ ID NO: 1001916 - DNA, 15 bp, Homo sapiens
cattttcagcaaaac

SEQ ID NO: 1001917 - DNA, 15 bp, Homo sapiens
tcattttcagcaaaa

SEQ ID NO: 1001918 - DNA, 15 bp, Homo sapiens
gtcattttcagcaaa

SEQ ID NO: 1001919 - DNA, 15 bp, Homo sapiens
tgtcattttcagcaa

SEQ ID NO: 1001920 - DNA, 15 bp, Homo sapiens
atgtcattttcagca

SEQ ID NO: 1001921 - DNA, 15 bp, Homo sapiens
aatgtcattttcagc

SEQ ID NO: 1001922 - DNA, 15 bp, Homo sapiens
taatgtcattttcag

SEQ ID NO: 1001923 - DNA, 15 bp, Homo sapiens
ttaatgtcattttca

SEQ ID NO: 1001924 - DNA, 15 bp, Homo sapiens
cttaatgtcattttc

SEQ ID NO: 1001925 - DNA, 15 bp, Homo sapiens
ccttaatgtcatttt

SEQ ID NO: 1001926 - DNA, 15 bp, Homo sapiens
tccttaatgtcattt

SEQ ID NO: 1001927 - DNA, 15 bp, Homo sapiens
ttccttaatgtcatt

SEQ ID NO: 1001928 - DNA, 15 bp, Homo sapiens
tttccttaatgtcat

SEQ ID NO: 1001929 - DNA, 15 bp, Homo sapiens
ctttccttaatgtca

SEQ ID NO: 1001930 - DNA, 15 bp, Homo sapiens
actttccttaatgtc

SEQ ID NO: 1001931 - DNA, 15 bp, Homo sapiens
aactttccttaatgt

SEQ ID NO: 1001932 - DNA, 15 bp, Homo sapiens
gaactttccttaatg

SEQ ID NO: 1001933 - DNA, 15 bp, Homo sapiens
agaactttccttaat

SEQ ID NO: 1001934 - DNA, 15 bp, Homo sapiens
cagaactttccttaa

SEQ ID NO: 1001935 - DNA, 15 bp, Homo sapiens
gcagaactttcctta

SEQ ID NO: 1001936 - DNA, 15 bp, Homo sapiens
agcagaactttcctt

SEQ ID NO: 1001937 - DNA, 15 bp, Homo sapiens
cagcagaactttcct

SEQ ID NO: 1001938 - DNA, 15 bp, Homo sapiens
acagcagaactttcc

SEQ ID NO: 1001939 - DNA, 15 bp, Homo sapiens
aacagcagaactttc

SEQ ID NO: 1001940 - DNA, 15 bp, Homo sapiens
aaacagcagaacttt

SEQ ID NO: 1001941 - DNA, 15 bp, Homo sapiens
aaaacagcagaactt

SEQ ID NO: 1001942 - DNA, 15 bp, Homo sapiens
aaaaacagcagaact

SEQ ID NO: 1001943 - DNA, 15 bp, Homo sapiens
taaaaacagcagaac

SEQ ID NO: 1001944 - DNA, 15 bp, Homo sapiens
ctaaaaacagcagaa

SEQ ID NO: 1001945 - DNA, 15 bp, Homo sapiens
gctaaaaacagcaga

SEQ ID NO: 1001946 - DNA, 15 bp, Homo sapiens
tgctaaaaacagcag

SEQ ID NO: 1001947 - DNA, 15 bp, Homo sapiens
ttgctaaaaacagca

SEQ ID NO: 1001948 - DNA, 15 bp, Homo sapiens
tttgctaaaaacagc

SEQ ID NO: 1001949 - DNA, 15 bp, Homo sapiens
ttttgctaaaaacag

SEQ ID NO: 1001950 - DNA, 15 bp, Homo sapiens
cttttgctaaaaaca

SEQ ID NO: 1001951 - DNA, 15 bp, Homo sapiens
gcttttgctaaaaac

SEQ ID NO: 1001952 - DNA, 15 bp, Homo sapiens
cgcttttgctaaaaa

SEQ ID NO: 1001953 - DNA, 15 bp, Homo sapiens
acgcttttgctaaaa

SEQ ID NO: 1001954 - DNA, 15 bp, Homo sapiens
gacgcttttgctaaa

SEQ ID NO: 1001955 - DNA, 15 bp, Homo sapiens
ggacgcttttgctaa

SEQ ID NO: 1001956 - DNA, 15 bp, Homo sapiens
tggacgcttttgcta

SEQ ID NO: 1001957 - DNA, 15 bp, Homo sapiens
ctggacgcttttgct

SEQ ID NO: 1001958 - DNA, 15 bp, Homo sapiens
tctggacgcttttgc

SEQ ID NO: 1001959 - DNA, 15 bp, Homo sapiens
ttctggacgcttttg

SEQ ID NO: 1001960 - DNA, 15 bp, Homo sapiens
tttctggacgctttt

SEQ ID NO: 1001961 - DNA, 15 bp, Homo sapiens
ctttctggacgcttt

SEQ ID NO: 1001962 - DNA, 15 bp, Homo sapiens
cctttctggacgctt

SEQ ID NO: 1001963 - DNA, 15 bp, Homo sapiens
tcctttctggacgct

SEQ ID NO: 1001964 - DNA, 15 bp, Homo sapiens
ctcctttctggacgc

SEQ ID NO: 1001965 - DNA, 15 bp, Homo sapiens
tctcctttctggacg

SEQ ID NO: 1001966 - DNA, 15 bp, Homo sapiens
ctctcctttctggac

SEQ ID NO: 1001967 - DNA, 15 bp, Homo sapiens
gctctcctttctgga

SEQ ID NO: 1001968 - DNA, 15 bp, Homo sapiens
agctctcctttctgg

SEQ ID NO: 1001969 - DNA, 15 bp, Homo sapiens
aagctctcctttctg

SEQ ID NO: 1001970 - DNA, 15 bp, Homo sapiens
taagctctcctttct

SEQ ID NO: 1001971 - DNA, 15 bp, Homo sapiens
ctaagctctcctttc

SEQ ID NO: 1001972 - DNA, 15 bp, Homo sapiens
gctaagctctccttt

SEQ ID NO: 1001973 - DNA, 15 bp, Homo sapiens
tgctaagctctcctt

SEQ ID NO: 1001974 - DNA, 15 bp, Homo sapiens
ctgctaagctctcct

SEQ ID NO: 1001975 - DNA, 15 bp, Homo sapiens
cctgctaagctctcc

SEQ ID NO: 1001976 - DNA, 15 bp, Homo sapiens
tcctgctaagctctc

SEQ ID NO: 1001977 - DNA, 15 bp, Homo sapiens
ctcctgctaagctct

SEQ ID NO: 1001978 - DNA, 15 bp, Homo sapiens
actcctgctaagctc

SEQ ID NO: 1001979 - DNA, 15 bp, Homo sapiens
gactcctgctaagct

SEQ ID NO: 1001980 - DNA, 15 bp, Homo sapiens
ggactcctgctaagc

SEQ ID NO: 1001981 - DNA, 15 bp, Homo sapiens
aggactcctgctaag

SEQ ID NO: 1001982 - DNA, 15 bp, Homo sapiens
taggactcctgctaa

SEQ ID NO: 1001983 - DNA, 15 bp, Homo sapiens
ctaggactcctgcta

SEQ ID NO: 1001984 - DNA, 15 bp, Homo sapiens
gctaggactcctgct

SEQ ID NO: 1001985 - DNA, 15 bp, Homo sapiens
ggctaggactcctgc

SEQ ID NO: 1001986 - DNA, 15 bp, Homo sapiens
gggctaggactcctg

SEQ ID NO: 1001987 - DNA, 15 bp, Homo sapiens
agggctaggactcct

SEQ ID NO: 1001988 - DNA, 15 bp, Homo sapiens
aagggctaggactcc

SEQ ID NO: 1001989 - DNA, 15 bp, Homo sapiens
aaagggctaggactc

SEQ ID NO: 1001990 - DNA, 15 bp, Homo sapiens
gaaagggctaggact

SEQ ID NO: 1001991 - DNA, 15 bp, Homo sapiens
tgaaagggctaggac

SEQ ID NO: 1001992 - DNA, 15 bp, Homo sapiens
gtgaaagggctagga

SEQ ID NO: 1001993 - DNA, 15 bp, Homo sapiens
ggtgaaagggctagg

SEQ ID NO: 1001994 - DNA, 15 bp, Homo sapiens
taagttctcttctga

SEQ ID NO: 1001995 - DNA, 15 bp, Homo sapiens
ataagttctcttctg

SEQ ID NO: 1001996 - DNA, 15 bp, Homo sapiens
gataagttctcttct

SEQ ID NO: 1001997 - DNA, 15 bp, Homo sapiens
agataagttctcttc

SEQ ID NO: 1001998 - DNA, 15 bp, Homo sapiens
tagataagttctctt

SEQ ID NO: 1001999 - DNA, 15 bp, Homo sapiens
ctagataagttctct

SEQ ID NO: 1002000 - DNA, 15 bp, Homo sapiens
actagataagttctc

SEQ ID NO: 1002001 - DNA, 15 bp, Homo sapiens
cactagataagttct

SEQ ID NO: 1002002 - DNA, 15 bp, Homo sapiens
tcactagataagttc

SEQ ID NO: 1002003 - DNA, 15 bp, Homo sapiens
ctcactagataagtt

SEQ ID NO: 1002004 - DNA, 15 bp, Homo sapiens
cctcactagataagt

SEQ ID NO: 1002005 - DNA, 15 bp, Homo sapiens
tcctcactagataag

SEQ ID NO: 1002006 - DNA, 15 bp, Homo sapiens
atcctcactagataa

SEQ ID NO: 1002007 - DNA, 15 bp, Homo sapiens
catcctcactagata

SEQ ID NO: 1002008 - DNA, 15 bp, Homo sapiens
tcatcctcactagat

SEQ ID NO: 1002009 - DNA, 15 bp, Homo sapiens
ttcatcctcactaga

SEQ ID NO: 1002010 - DNA, 15 bp, Homo sapiens
cttcatcctcactag

SEQ ID NO: 1002011 - DNA, 15 bp, Homo sapiens
tcttcatcctcacta

SEQ ID NO: 1002012 - DNA, 15 bp, Homo sapiens
ctcttcatcctcact

SEQ ID NO: 1002013 - DNA, 15 bp, Homo sapiens
gctcttcatcctcac

SEQ ID NO: 1002014 - DNA, 15 bp, Homo sapiens
agctcttcatcctca

SEQ ID NO: 1002015 - DNA, 15 bp, Homo sapiens
aagctcttcatcctc

SEQ ID NO: 1002016 - DNA, 15 bp, Homo sapiens
gaagctcttcatcct

SEQ ID NO: 1002017 - DNA, 15 bp, Homo sapiens
ggaagctcttcatcc

SEQ ID NO: 1002018 - DNA, 15 bp, Homo sapiens
gggaagctcttcatc

SEQ ID NO: 1002019 - DNA, 15 bp, Homo sapiens
agggaagctcttcat

SEQ ID NO: 1002020 - DNA, 15 bp, Homo sapiens
cagggaagctcttca

SEQ ID NO: 1002021 - DNA, 15 bp, Homo sapiens
gcagggaagctcttc

SEQ ID NO: 1002022 - DNA, 15 bp, Homo sapiens
agcagggaagctctt

SEQ ID NO: 1002023 - DNA, 15 bp, Homo sapiens
aagcagggaagctct

SEQ ID NO: 1002024 - DNA, 15 bp, Homo sapiens
gaagcagggaagctc

SEQ ID NO: 1002025 - DNA, 15 bp, Homo sapiens
ggaagcagggaagct

SEQ ID NO: 1002026 - DNA, 15 bp, Homo sapiens
tggaagcagggaagc

SEQ ID NO: 1002027 - DNA, 15 bp, Homo sapiens
ttggaagcagggaag

SEQ ID NO: 1002028 - DNA, 15 bp, Homo sapiens
gttggaagcagggaa

SEQ ID NO: 1002029 - DNA, 15 bp, Homo sapiens
tgttggaagcaggga

SEQ ID NO: 1002030 - DNA, 15 bp, Homo sapiens
gtgttggaagcaggg

SEQ ID NO: 1002031 - DNA, 15 bp, Homo sapiens
agtgttggaagcagg

SEQ ID NO: 1002032 - DNA, 15 bp, Homo sapiens
aagtgttggaagcag

SEQ ID NO: 1002033 - DNA, 15 bp, Homo sapiens
caagtgttggaagca

SEQ ID NO: 1002034 - DNA, 15 bp, Homo sapiens
acaagtgttggaagc

SEQ ID NO: 1002035 - DNA, 15 bp, Homo sapiens
aacaagtgttggaag

SEQ ID NO: 1002036 - DNA, 15 bp, Homo sapiens
taacaagtgttggaa

SEQ ID NO: 1002037 - DNA, 15 bp, Homo sapiens
ataacaagtgttgga

SEQ ID NO: 1002038 - DNA, 15 bp, Homo sapiens
aataacaagtgttgg

SEQ ID NO: 1002039 - DNA, 15 bp, Homo sapiens
aaataacaagtgttg

SEQ ID NO: 1002040 - DNA, 15 bp, Homo sapiens
caaataacaagtgtt

SEQ ID NO: 1002041 - DNA, 15 bp, Homo sapiens
ccaaataacaagtgt

SEQ ID NO: 1002042 - DNA, 15 bp, Homo sapiens
accaaataacaagtg

SEQ ID NO: 1002043 - DNA, 15 bp, Homo sapiens
taccaaataacaagt

SEQ ID NO: 1002044 - DNA, 15 bp, Homo sapiens
ttaccaaataacaag

SEQ ID NO: 1002045 - DNA, 15 bp, Homo sapiens
tttaccaaataacaa

SEQ ID NO: 1002046 - DNA, 15 bp, Homo sapiens
ctttaccaaataaca

SEQ ID NO: 1002047 - DNA, 15 bp, Homo sapiens
actttaccaaataac

SEQ ID NO: 1002048 - DNA, 15 bp, Homo sapiens
tactttaccaaataa

SEQ ID NO: 1002049 - DNA, 15 bp, Homo sapiens
ttactttaccaaata

SEQ ID NO: 1002050 - DNA, 15 bp, Homo sapiens
tttactttaccaaat

SEQ ID NO: 1002051 - DNA, 15 bp, Homo sapiens
gtttactttaccaaa

SEQ ID NO: 1002052 - DNA, 15 bp, Homo sapiens
tgtttactttaccaa

SEQ ID NO: 1002053 - DNA, 15 bp, Homo sapiens
ttgtttactttacca

SEQ ID NO: 1002054 - DNA, 15 bp, Homo sapiens
attgtttactttacc

SEQ ID NO: 1002055 - DNA, 15 bp, Homo sapiens
tattgtttactttac

SEQ ID NO: 1002056 - DNA, 15 bp, Homo sapiens
atattgtttacttta

SEQ ID NO: 1002057 - DNA, 15 bp, Homo sapiens
tatattgtttacttt

SEQ ID NO: 1002058 - DNA, 15 bp, Homo sapiens
gtatattgtttactt

SEQ ID NO: 1002059 - DNA, 15 bp, Homo sapiens
ggtatattgtttact

SEQ ID NO: 1002060 - DNA, 15 bp, Homo sapiens
aggtatattgtttac

SEQ ID NO: 1002061 - DNA, 15 bp, Homo sapiens
aaggtatattgttta

SEQ ID NO: 1002062 - DNA, 15 bp, Homo sapiens
gaaggtatattgttt

SEQ ID NO: 1002063 - DNA, 15 bp, Homo sapiens
agaaggtatattgtt

SEQ ID NO: 1002064 - DNA, 15 bp, Homo sapiens
gagaaggtatattgt

SEQ ID NO: 1002065 - DNA, 15 bp, Homo sapiens
tgagaaggtatattg

SEQ ID NO: 1002066 - DNA, 15 bp, Homo sapiens
ctgagaaggtatatt

SEQ ID NO: 1002067 - DNA, 15 bp, Homo sapiens
actgagaaggtatat

SEQ ID NO: 1002068 - DNA, 15 bp, Homo sapiens
gactgagaaggtata

SEQ ID NO: 1002069 - DNA, 15 bp, Homo sapiens
agactgagaaggtat

SEQ ID NO: 1002070 - DNA, 15 bp, Homo sapiens
tagactgagaaggta

SEQ ID NO: 1002071 - DNA, 15 bp, Homo sapiens
gtagactgagaaggt

SEQ ID NO: 1002072 - DNA, 15 bp, Homo sapiens
agtagactgagaagg

SEQ ID NO: 1002073 - DNA, 15 bp, Homo sapiens
tagtagactgagaag

SEQ ID NO: 1002074 - DNA, 15 bp, Homo sapiens
ctagtagactgagaa

SEQ ID NO: 1002075 - DNA, 15 bp, Homo sapiens
cctagtagactgaga

SEQ ID NO: 1002076 - DNA, 15 bp, Homo sapiens
gcctagtagactgag

SEQ ID NO: 1002077 - DNA, 15 bp, Homo sapiens
tgcctagtagactga

SEQ ID NO: 1002078 - DNA, 15 bp, Homo sapiens
atgcctagtagactg

SEQ ID NO: 1002079 - DNA, 15 bp, Homo sapiens
tatgcctagtagact

SEQ ID NO: 1002080 - DNA, 15 bp, Homo sapiens
ctatgcctagtagac

SEQ ID NO: 1002081 - DNA, 15 bp, Homo sapiens
gctatgcctagtaga

SEQ ID NO: 1002082 - DNA, 15 bp, Homo sapiens
tgctatgcctagtag

SEQ ID NO: 1002083 - DNA, 15 bp, Homo sapiens
gtgctatgcctagta

SEQ ID NO: 1002084 - DNA, 15 bp, Homo sapiens
ggtgctatgcctagt

SEQ ID NO: 1002085 - DNA, 15 bp, Homo sapiens
cggtgctatgcctag

SEQ ID NO: 1002086 - DNA, 15 bp, Homo sapiens
acggtgctatgccta

SEQ ID NO: 1002087 - DNA, 15 bp, Homo sapiens
aacggtgctatgcct

SEQ ID NO: 1002088 - DNA, 15 bp, Homo sapiens
caacggtgctatgcc

SEQ ID NO: 1002089 - DNA, 15 bp, Homo sapiens
gcaacggtgctatgc

SEQ ID NO: 1002090 - DNA, 15 bp, Homo sapiens
agcaacggtgctatg

SEQ ID NO: 1002091 - DNA, 15 bp, Homo sapiens
tagcaacggtgctat

SEQ ID NO: 1002092 - DNA, 15 bp, Homo sapiens
gtagcaacggtgcta

SEQ ID NO: 1002093 - DNA, 15 bp, Homo sapiens
ggtagcaacggtgct

SEQ ID NO: 1002094 - DNA, 15 bp, Homo sapiens
cggtagcaacggtgc

SEQ ID NO: 1002095 - DNA, 15 bp, Homo sapiens
tcggtagcaacggtg

SEQ ID NO: 1002096 - DNA, 15 bp, Homo sapiens
ctcggtagcaacggt

SEQ ID NO: 1002097 - DNA, 15 bp, Homo sapiens
actcggtagcaacgg

SEQ ID NO: 1002098 - DNA, 15 bp, Homo sapiens
cactcggtagcaacg

SEQ ID NO: 1002099 - DNA, 15 bp, Homo sapiens
acactcggtagcaac

SEQ ID NO: 1002100 - DNA, 15 bp, Homo sapiens
gacactcggtagcaa

SEQ ID NO: 1002101 - DNA, 15 bp, Homo sapiens
agacactcggtagca

SEQ ID NO: 1002102 - DNA, 15 bp, Homo sapiens
cagacactcggtagc

SEQ ID NO: 1002103 - DNA, 15 bp, Homo sapiens
acagacactcggtag

SEQ ID NO: 1002104 - DNA, 15 bp, Homo sapiens
gacagacactcggta

SEQ ID NO: 1002105 - DNA, 15 bp, Homo sapiens
agacagacactcggt

SEQ ID NO: 1002106 - DNA, 15 bp, Homo sapiens
tagacagacactcgg

SEQ ID NO: 1002107 - DNA, 15 bp, Homo sapiens
ttagacagacactcg

SEQ ID NO: 1002108 - DNA, 15 bp, Homo sapiens
cttagacagacactc

SEQ ID NO: 1002109 - DNA, 15 bp, Homo sapiens
tcttagacagacact

SEQ ID NO: 1002110 - DNA, 15 bp, Homo sapiens
ttcttagacagacac

SEQ ID NO: 1002111 - DNA, 15 bp, Homo sapiens
gttcttagacagaca

SEQ ID NO: 1002112 - DNA, 15 bp, Homo sapiens
tgttcttagacagac

SEQ ID NO: 1002113 - DNA, 15 bp, Homo sapiens
gtgttcttagacaga

SEQ ID NO: 1002114 - DNA, 15 bp, Homo sapiens
tgtgttcttagacag

SEQ ID NO: 1002115 - DNA, 15 bp, Homo sapiens
ctgtgttcttagaca

SEQ ID NO: 1002116 - DNA, 15 bp, Homo sapiens
tctgtgttcttagac

SEQ ID NO: 1002117 - DNA, 15 bp, Homo sapiens
ctctgtgttcttaga

SEQ ID NO: 1002118 - DNA, 15 bp, Homo sapiens
cctctgtgttcttag

SEQ ID NO: 1002119 - DNA, 15 bp, Homo sapiens
tcctctgtgttctta

SEQ ID NO: 1002120 - DNA, 15 bp, Homo sapiens
ctcctctgtgttctt

SEQ ID NO: 1002121 - DNA, 15 bp, Homo sapiens
tctcctctgtgttct

SEQ ID NO: 1002122 - DNA, 15 bp, Homo sapiens
ttctcctctgtgttc

SEQ ID NO: 1002123 - DNA, 15 bp, Homo sapiens
attctcctctgtgtt

SEQ ID NO: 1002124 - DNA, 15 bp, Homo sapiens
aattctcctctgtgt

SEQ ID NO: 1002125 - DNA, 15 bp, Homo sapiens
aaattctcctctgtg

SEQ ID NO: 1002126 - DNA, 15 bp, Homo sapiens
taaattctcctctgt

SEQ ID NO: 1002127 - DNA, 15 bp, Homo sapiens
ataaattctcctctg

SEQ ID NO: 1002128 - DNA, 15 bp, Homo sapiens
aataaattctcctct

SEQ ID NO: 1002129 - DNA, 15 bp, Homo sapiens
taataaattctcctc

SEQ ID NO: 1002130 - DNA, 15 bp, Homo sapiens
ataataaattctcct

SEQ ID NO: 1002131 - DNA, 15 bp, Homo sapiens
gataataaattctcc

SEQ ID NO: 1002132 - DNA, 15 bp, Homo sapiens
tgataataaattctc

SEQ ID NO: 1002133 - DNA, 15 bp, Homo sapiens
atgataataaattct

SEQ ID NO: 1002134 - DNA, 15 bp, Homo sapiens
aatgataataaattc

SEQ ID NO: 1002135 - DNA, 15 bp, Homo sapiens
caatgataataaatt

SEQ ID NO: 1002136 - DNA, 15 bp, Homo sapiens
tcaatgataataaat

SEQ ID NO: 1002137 - DNA, 15 bp, Homo sapiens
ttcaatgataataaa

SEQ ID NO: 1002138 - DNA, 15 bp, Homo sapiens
cttcaatgataataa

SEQ ID NO: 1002139 - DNA, 15 bp, Homo sapiens
tcttcaatgataata

SEQ ID NO: 1002140 - DNA, 15 bp, Homo sapiens
ttcttcaatgataat

SEQ ID NO: 1002141 - DNA, 15 bp, Homo sapiens
attcttcaatgataa

SEQ ID NO: 1002142 - DNA, 15 bp, Homo sapiens
tattcttcaatgata

SEQ ID NO: 1002143 - DNA, 15 bp, Homo sapiens
ctattcttcaatgat

SEQ ID NO: 1002144 - DNA, 15 bp, Homo sapiens
gctattcttcaatga

SEQ ID NO: 1002145 - DNA, 15 bp, Homo sapiens
agctattcttcaatg

SEQ ID NO: 1002146 - DNA, 15 bp, Homo sapiens
aagctattcttcaat

SEQ ID NO: 1002147 - DNA, 15 bp, Homo sapiens
taagctattcttcaa

SEQ ID NO: 1002148 - DNA, 15 bp, Homo sapiens
ttaagctattcttca

SEQ ID NO: 1002149 - DNA, 15 bp, Homo sapiens
tttaagctattcttc

SEQ ID NO: 1002150 - DNA, 15 bp, Homo sapiens
atttaagctattctt

SEQ ID NO: 1002151 - DNA, 15 bp, Homo sapiens
catttaagctattct

SEQ ID NO: 1002152 - DNA, 15 bp, Homo sapiens
tcatttaagctattc

SEQ ID NO: 1002153 - DNA, 15 bp, Homo sapiens
gtcatttaagctatt

SEQ ID NO: 1002154 - DNA, 15 bp, Homo sapiens
agtcatttaagctat

SEQ ID NO: 1002155 - DNA, 15 bp, Homo sapiens
cagtcatttaagcta

SEQ ID NO: 1002156 - DNA, 15 bp, Homo sapiens
gcagtcatttaagct

SEQ ID NO: 1002157 - DNA, 15 bp, Homo sapiens
tgcagtcatttaagc

SEQ ID NO: 1002158 - DNA, 15 bp, Homo sapiens
ctgcagtcatttaag

SEQ ID NO: 1002159 - DNA, 15 bp, Homo sapiens
actgcagtcatttaa

SEQ ID NO: 1002160 - DNA, 15 bp, Homo sapiens
tactgcagtcattta

SEQ ID NO: 1002161 - DNA, 15 bp, Homo sapiens
ttactgcagtcattt

SEQ ID NO: 1002162 - DNA, 15 bp, Homo sapiens
gttactgcagtcatt

SEQ ID NO: 1002163 - DNA, 15 bp, Homo sapiens
ggttactgcagtcat

SEQ ID NO: 1002164 - DNA, 15 bp, Homo sapiens
tggttactgcagtca

SEQ ID NO: 1002165 - DNA, 15 bp, Homo sapiens
ctggttactgcagtc

SEQ ID NO: 1002166 - DNA, 15 bp, Homo sapiens
cctggttactgcagt

SEQ ID NO: 1002167 - DNA, 15 bp, Homo sapiens
acctggttactgcag

SEQ ID NO: 1002168 - DNA, 15 bp, Homo sapiens
tacctggttactgca

SEQ ID NO: 1002169 - DNA, 15 bp, Homo sapiens
ttacctggttactgc

SEQ ID NO: 1002170 - DNA, 15 bp, Homo sapiens
attacctggttactg

SEQ ID NO: 1002171 - DNA, 15 bp, Homo sapiens
tattacctggttact

SEQ ID NO: 1002172 - DNA, 15 bp, Homo sapiens
atattacctggttac

SEQ ID NO: 1002173 - DNA, 15 bp, Homo sapiens
aatattacctggtta

SEQ ID NO: 1002174 - DNA, 15 bp, Homo sapiens
caatattacctggtt

SEQ ID NO: 1002175 - DNA, 15 bp, Homo sapiens
ccaatattacctggt

SEQ ID NO: 1002176 - DNA, 15 bp, Homo sapiens
gccaatattacctgg

SEQ ID NO: 1002177 - DNA, 15 bp, Homo sapiens
tgccaatattacctg

SEQ ID NO: 1002178 - DNA, 15 bp, Homo sapiens
ttgccaatattacct

SEQ ID NO: 1002179 - DNA, 15 bp, Homo sapiens
tttgccaatattacc

SEQ ID NO: 1002180 - DNA, 15 bp, Homo sapiens
ctttgccaatattac

SEQ ID NO: 1002181 - DNA, 15 bp, Homo sapiens
cctttgccaatatta

SEQ ID NO: 1002182 - DNA, 15 bp, Homo sapiens
gcctttgccaatatt

SEQ ID NO: 1002183 - DNA, 15 bp, Homo sapiens
tgcctttgccaatat

SEQ ID NO: 1002184 - DNA, 15 bp, Homo sapiens
atgcctttgccaata

SEQ ID NO: 1002185 - DNA, 15 bp, Homo sapiens
gatgcctttgccaat

SEQ ID NO: 1002186 - DNA, 15 bp, Homo sapiens
agatgcctttgccaa

SEQ ID NO: 1002187 - DNA, 15 bp, Homo sapiens
gagatgcctttgcca

SEQ ID NO: 1002188 - DNA, 15 bp, Homo sapiens
tgagatgcctttgcc

SEQ ID NO: 1002189 - DNA, 15 bp, Homo sapiens
ctgagatgcctttgc

SEQ ID NO: 1002190 - DNA, 15 bp, Homo sapiens
cctgagatgcctttg

SEQ ID NO: 1002191 - DNA, 15 bp, Homo sapiens
tcctgagatgccttt

SEQ ID NO: 1002192 - DNA, 15 bp, Homo sapiens
ttcctgagatgcctt

SEQ ID NO: 1002193 - DNA, 15 bp, Homo sapiens
gttcctgagatgcct

SEQ ID NO: 1002194 - DNA, 15 bp, Homo sapiens
tgttcctgagatgcc

SEQ ID NO: 1002195 - DNA, 15 bp, Homo sapiens
atgttcctgagatgc

SEQ ID NO: 1002196 - DNA, 15 bp, Homo sapiens
gatgttcctgagatg

SEQ ID NO: 1002197 - DNA, 15 bp, Homo sapiens
tgatgttcctgagat

SEQ ID NO: 1002198 - DNA, 15 bp, Homo sapiens
gtgatgttcctgaga

SEQ ID NO: 1002199 - DNA, 15 bp, Homo sapiens
ggtgatgttcctgag

SEQ ID NO: 1002200 - DNA, 15 bp, Homo sapiens
aggtgatgttcctga

SEQ ID NO: 1002201 - DNA, 15 bp, Homo sapiens
aaggtgatgttcctg

SEQ ID NO: 1002202 - DNA, 15 bp, Homo sapiens
taaggtgatgttcct

SEQ ID NO: 1002203 - DNA, 15 bp, Homo sapiens
ctaaggtgatgttcc

SEQ ID NO: 1002204 - DNA, 15 bp, Homo sapiens
actaaggtgatgttc

SEQ ID NO: 1002205 - DNA, 15 bp, Homo sapiens
cactaaggtgatgtt

SEQ ID NO: 1002206 - DNA, 15 bp, Homo sapiens
tcactaaggtgatgt

SEQ ID NO: 1002207 - DNA, 15 bp, Homo sapiens
ctcactaaggtgatg

SEQ ID NO: 1002208 - DNA, 15 bp, Homo sapiens
cctcactaaggtgat

SEQ ID NO: 1002209 - DNA, 15 bp, Homo sapiens
tcctcactaaggtga

SEQ ID NO: 1002210 - DNA, 15 bp, Homo sapiens
ttcctcactaaggtg

SEQ ID NO: 1002211 - DNA, 15 bp, Homo sapiens
tttcctcactaaggt

SEQ ID NO: 1002212 - DNA, 15 bp, Homo sapiens
gtttcctcactaagg

SEQ ID NO: 1002213 - DNA, 15 bp, Homo sapiens
tgtttcctcactaag

SEQ ID NO: 1002214 - DNA, 15 bp, Homo sapiens
ttgtttcctcactaa

SEQ ID NO: 1002215 - DNA, 15 bp, Homo sapiens
tttgtttcctcacta

SEQ ID NO: 1002216 - DNA, 15 bp, Homo sapiens
ttttgtttcctcact

SEQ ID NO: 1002217 - DNA, 15 bp, Homo sapiens
attttgtttcctcac

SEQ ID NO: 1002218 - DNA, 15 bp, Homo sapiens
cattttgtttcctca

SEQ ID NO: 1002219 - DNA, 15 bp, Homo sapiens
acattttgtttcctc

SEQ ID NO: 1002220 - DNA, 15 bp, Homo sapiens
aacattttgtttcct

SEQ ID NO: 1002221 - DNA, 15 bp, Homo sapiens
gctgtattagtcact

SEQ ID NO: 1002222 - DNA, 15 bp, Homo sapiens
ggctgtattagtcac

SEQ ID NO: 1002223 - DNA, 15 bp, Homo sapiens
aggctgtattagtca

SEQ ID NO: 1002224 - DNA, 15 bp, Homo sapiens
caggctgtattagtc

SEQ ID NO: 1002225 - DNA, 15 bp, Homo sapiens
acaggctgtattagt

SEQ ID NO: 1002226 - DNA, 15 bp, Homo sapiens
cacaggctgtattag

SEQ ID NO: 1002227 - DNA, 15 bp, Homo sapiens
tcacaggctgtatta

SEQ ID NO: 1002228 - DNA, 15 bp, Homo sapiens
ttcacaggctgtatt

SEQ ID NO: 1002229 - DNA, 15 bp, Homo sapiens
cttcacaggctgtat

SEQ ID NO: 1002230 - DNA, 15 bp, Homo sapiens
gcttcacaggctgta

SEQ ID NO: 1002231 - DNA, 15 bp, Homo sapiens
tgcttcacaggctgt

SEQ ID NO: 1002232 - DNA, 15 bp, Homo sapiens
atgcttcacaggctg

SEQ ID NO: 1002233 - DNA, 15 bp, Homo sapiens
aatgcttcacaggct

SEQ ID NO: 1002234 - DNA, 15 bp, Homo sapiens
aaatgcttcacaggc

SEQ ID NO: 1002235 - DNA, 15 bp, Homo sapiens
aaaatgcttcacagg

SEQ ID NO: 1002236 - DNA, 15 bp, Homo sapiens
caaaatgcttcacag

SEQ ID NO: 1002237 - DNA, 15 bp, Homo sapiens
ccaaaatgcttcaca

SEQ ID NO: 1002238 - DNA, 15 bp, Homo sapiens
accaaaatgcttcac

SEQ ID NO: 1002239 - DNA, 15 bp, Homo sapiens
gaccaaaatgcttca

SEQ ID NO: 1002240 - DNA, 15 bp, Homo sapiens
tgaccaaaatgcttc

SEQ ID NO: 1002241 - DNA, 15 bp, Homo sapiens
ctgaccaaaatgctt

SEQ ID NO: 1002242 - DNA, 15 bp, Homo sapiens
tctgaccaaaatgct

SEQ ID NO: 1002243 - DNA, 15 bp, Homo sapiens
atctgaccaaaatgc

SEQ ID NO: 1002244 - DNA, 15 bp, Homo sapiens
tatctgaccaaaatg

SEQ ID NO: 1002245 - DNA, 15 bp, Homo sapiens
atatctgaccaaaat

SEQ ID NO: 1002246 - DNA, 15 bp, Homo sapiens
gatatctgaccaaaa

SEQ ID NO: 1002247 - DNA, 15 bp, Homo sapiens
agatatctgaccaaa

SEQ ID NO: 1002248 - DNA, 15 bp, Homo sapiens
tagatatctgaccaa

SEQ ID NO: 1002249 - DNA, 15 bp, Homo sapiens
atagatatctgacca

SEQ ID NO: 1002250 - DNA, 15 bp, Homo sapiens
catagatatctgacc

SEQ ID NO: 1002251 - DNA, 15 bp, Homo sapiens
acatagatatctgac

SEQ ID NO: 1002252 - DNA, 15 bp, Homo sapiens
cacatagatatctga

SEQ ID NO: 1002253 - DNA, 15 bp, Homo sapiens
gcacatagatatctg

SEQ ID NO: 1002254 - DNA, 15 bp, Homo sapiens
agcacatagatatct

SEQ ID NO: 1002255 - DNA, 15 bp, Homo sapiens
aagcacatagatatc

SEQ ID NO: 1002256 - DNA, 15 bp, Homo sapiens
aaagcacatagatat

SEQ ID NO: 1002257 - DNA, 15 bp, Homo sapiens
gaaagcacatagata

SEQ ID NO: 1002258 - DNA, 15 bp, Homo sapiens
tgaaagcacatagat

SEQ ID NO: 1002259 - DNA, 15 bp, Homo sapiens
atgaaagcacataga

SEQ ID NO: 1002260 - DNA, 15 bp, Homo sapiens
aatgaaagcacatag

SEQ ID NO: 1002261 - DNA, 15 bp, Homo sapiens
gaatgaaagcacata

SEQ ID NO: 1002262 - DNA, 15 bp, Homo sapiens
ggaatgaaagcacat

SEQ ID NO: 1002263 - DNA, 15 bp, Homo sapiens
tggaatgaaagcaca

SEQ ID NO: 1002264 - DNA, 15 bp, Homo sapiens
ctggaatgaaagcac

SEQ ID NO: 1002265 - DNA, 15 bp, Homo sapiens
cctggaatgaaagca

SEQ ID NO: 1002266 - DNA, 15 bp, Homo sapiens
acctggaatgaaagc

SEQ ID NO: 1002267 - DNA, 15 bp, Homo sapiens
aacctggaatgaaag

SEQ ID NO: 1002268 - DNA, 15 bp, Homo sapiens
caacctggaatgaaa

SEQ ID NO: 1002269 - DNA, 15 bp, Homo sapiens
tcaacctggaatgaa

SEQ ID NO: 1002270 - DNA, 15 bp, Homo sapiens
gtcaacctggaatga

SEQ ID NO: 1002271 - DNA, 15 bp, Homo sapiens
agtcaacctggaatg

SEQ ID NO: 1002272 - DNA, 15 bp, Homo sapiens
cagtcaacctggaat

SEQ ID NO: 1002273 - DNA, 15 bp, Homo sapiens
tcagtcaacctggaa

SEQ ID NO: 1002274 - DNA, 15 bp, Homo sapiens
ctcagtcaacctgga

SEQ ID NO: 1002275 - DNA, 15 bp, Homo sapiens
cctcagtcaacctgg

SEQ ID NO: 1002276 - DNA, 15 bp, Homo sapiens
gcctcagtcaacctg

SEQ ID NO: 1002277 - DNA, 15 bp, Homo sapiens
tgcctcagtcaacct

SEQ ID NO: 1002278 - DNA, 15 bp, Homo sapiens
ttgcctcagtcaacc

SEQ ID NO: 1002279 - DNA, 15 bp, Homo sapiens
cttgcctcagtcaac

SEQ ID NO: 1002280 - DNA, 15 bp, Homo sapiens
tcttgcctcagtcaa

SEQ ID NO: 1002281 - DNA, 15 bp, Homo sapiens
gtcttgcctcagtca

SEQ ID NO: 1002282 - DNA, 15 bp, Homo sapiens
agtcttgcctcagtc

SEQ ID NO: 1002283 - DNA, 15 bp, Homo sapiens
aagtcttgcctcagt

SEQ ID NO: 1002284 - DNA, 15 bp, Homo sapiens
aaagtcttgcctcag

SEQ ID NO: 1002285 - DNA, 15 bp, Homo sapiens
caaagtcttgcctca

SEQ ID NO: 1002286 - DNA, 15 bp, Homo sapiens
ccaaagtcttgcctc

SEQ ID NO: 1002287 - DNA, 15 bp, Homo sapiens
gccaaagtcttgcct

SEQ ID NO: 1002288 - DNA, 15 bp, Homo sapiens
agccaaagtcttgcc

SEQ ID NO: 1002289 - DNA, 15 bp, Homo sapiens
tagccaaagtcttgc

SEQ ID NO: 1002290 - DNA, 15 bp, Homo sapiens
ctagccaaagtcttg

SEQ ID NO: 1002291 - DNA, 15 bp, Homo sapiens
cctagccaaagtctt

SEQ ID NO: 1002292 - DNA, 15 bp, Homo sapiens
ccctagccaaagtct

SEQ ID NO: 1002293 - DNA, 15 bp, Homo sapiens
accctagccaaagtc

SEQ ID NO: 1002294 - DNA, 15 bp, Homo sapiens
aaccctagccaaagt

SEQ ID NO: 1002295 - DNA, 15 bp, Homo sapiens
aaaccctagccaaag

SEQ ID NO: 1002296 - DNA, 15 bp, Homo sapiens
caaaccctagccaaa

SEQ ID NO: 1002297 - DNA, 15 bp, Homo sapiens
tcaaaccctagccaa

SEQ ID NO: 1002298 - DNA, 15 bp, Homo sapiens
atcaaaccctagcca

SEQ ID NO: 1002299 - DNA, 15 bp, Homo sapiens
gatcaaaccctagcc

SEQ ID NO: 1002300 - DNA, 15 bp, Homo sapiens
tgatcaaaccctagc

SEQ ID NO: 1002301 - DNA, 15 bp, Homo sapiens
ctgatcaaaccctag

SEQ ID NO: 1002302 - DNA, 15 bp, Homo sapiens
actgatcaaacccta

SEQ ID NO: 1002303 - DNA, 15 bp, Homo sapiens
cactgatcaaaccct

SEQ ID NO: 1002304 - DNA, 15 bp, Homo sapiens
tcactgatcaaaccc

SEQ ID NO: 1002305 - DNA, 15 bp, Homo sapiens
atcactgatcaaacc

SEQ ID NO: 1002306 - DNA, 15 bp, Homo sapiens
catcactgatcaaac

SEQ ID NO: 1002307 - DNA, 15 bp, Homo sapiens
acatcactgatcaaa

SEQ ID NO: 1002308 - DNA, 15 bp, Homo sapiens
tacatcactgatcaa

SEQ ID NO: 1002309 - DNA, 15 bp, Homo sapiens
ttacatcactgatca

SEQ ID NO: 1002310 - DNA, 15 bp, Homo sapiens
gttacatcactgatc

SEQ ID NO: 1002311 - DNA, 15 bp, Homo sapiens
agttacatcactgat

SEQ ID NO: 1002312 - DNA, 15 bp, Homo sapiens
tagttacatcactga

SEQ ID NO: 1002313 - DNA, 15 bp, Homo sapiens
gtagttacatcactg

SEQ ID NO: 1002314 - DNA, 15 bp, Homo sapiens
agtagttacatcact

SEQ ID NO: 1002315 - DNA, 15 bp, Homo sapiens
gagtagttacatcac

SEQ ID NO: 1002316 - DNA, 15 bp, Homo sapiens
tgagtagttacatca

SEQ ID NO: 1002317 - DNA, 15 bp, Homo sapiens
gtgagtagttacatc

SEQ ID NO: 1002318 - DNA, 15 bp, Homo sapiens
cgtgagtagttacat

SEQ ID NO: 1002319 - DNA, 15 bp, Homo sapiens
tcgtgagtagttaca

SEQ ID NO: 1002320 - DNA, 15 bp, Homo sapiens
ctcgtgagtagttac

SEQ ID NO: 1002321 - DNA, 15 bp, Homo sapiens
actcgtgagtagtta

SEQ ID NO: 1002322 - DNA, 15 bp, Homo sapiens
tactcgtgagtagtt

SEQ ID NO: 1002323 - DNA, 15 bp, Homo sapiens
gtactcgtgagtagt

SEQ ID NO: 1002324 - DNA, 15 bp, Homo sapiens
ggtactcgtgagtag

SEQ ID NO: 1002325 - DNA, 15 bp, Homo sapiens
tggtactcgtgagta

SEQ ID NO: 1002326 - DNA, 15 bp, Homo sapiens
gtggtactcgtgagt

SEQ ID NO: 1002327 - DNA, 15 bp, Homo sapiens
cgtggtactcgtgag

SEQ ID NO: 1002328 - DNA, 15 bp, Homo sapiens
acgtggtactcgtga

SEQ ID NO: 1002329 - DNA, 15 bp, Homo sapiens
cacgtggtactcgtg

SEQ ID NO: 1002330 - DNA, 15 bp, Homo sapiens
ccacgtggtactcgt

SEQ ID NO: 1002331 - DNA, 15 bp, Homo sapiens
accacgtggtactcg

SEQ ID NO: 1002332 - DNA, 15 bp, Homo sapiens
caccacgtggtactc

SEQ ID NO: 1002333 - DNA, 15 bp, Homo sapiens
ccaccacgtggtact

SEQ ID NO: 1002334 - DNA, 15 bp, Homo sapiens
gccaccacgtggtac

SEQ ID NO: 1002335 - DNA, 15 bp, Homo sapiens
tgccaccacgtggta

SEQ ID NO: 1002336 - DNA, 15 bp, Homo sapiens
ttgccaccacgtggt

SEQ ID NO: 1002337 - DNA, 15 bp, Homo sapiens
attgccaccacgtgg

SEQ ID NO: 1002338 - DNA, 15 bp, Homo sapiens
cattgccaccacgtg

SEQ ID NO: 1002339 - DNA, 15 bp, Homo sapiens
ccattgccaccacgt

SEQ ID NO: 1002340 - DNA, 15 bp, Homo sapiens
gccattgccaccacg

SEQ ID NO: 1002341 - DNA, 15 bp, Homo sapiens
tgccattgccaccac

SEQ ID NO: 1002342 - DNA, 15 bp, Homo sapiens
atgccattgccacca

SEQ ID NO: 1002343 - DNA, 15 bp, Homo sapiens
aatgccattgccacc

SEQ ID NO: 1002344 - DNA, 15 bp, Homo sapiens
caatgccattgccac

SEQ ID NO: 1002345 - DNA, 15 bp, Homo sapiens
gcaatgccattgcca

SEQ ID NO: 1002346 - DNA, 15 bp, Homo sapiens
agcaatgccattgcc

SEQ ID NO: 1002347 - DNA, 15 bp, Homo sapiens
cagcaatgccattgc

SEQ ID NO: 1002348 - DNA, 15 bp, Homo sapiens
gcagcaatgccattg

SEQ ID NO: 1002349 - DNA, 15 bp, Homo sapiens
tgcagcaatgccatt

SEQ ID NO: 1002350 - DNA, 15 bp, Homo sapiens
ctgcagcaatgccat

SEQ ID NO: 1002351 - DNA, 15 bp, Homo sapiens
tctgcagcaatgcca

SEQ ID NO: 1002352 - DNA, 15 bp, Homo sapiens
gtctgcagcaatgcc

SEQ ID NO: 1002353 - DNA, 15 bp, Homo sapiens
ggtctgcagcaatgc

SEQ ID NO: 1002354 - DNA, 15 bp, Homo sapiens
aggtctgcagcaatg

SEQ ID NO: 1002355 - DNA, 15 bp, Homo sapiens
aaggtctgcagcaat

SEQ ID NO: 1002356 - DNA, 15 bp, Homo sapiens
caaggtctgcagcaa

SEQ ID NO: 1002357 - DNA, 15 bp, Homo sapiens
ccaaggtctgcagca

SEQ ID NO: 1002358 - DNA, 15 bp, Homo sapiens
gccaaggtctgcagc

SEQ ID NO: 1002359 - DNA, 15 bp, Homo sapiens
tgccaaggtctgcag

SEQ ID NO: 1002360 - DNA, 15 bp, Homo sapiens
ctgccaaggtctgca

SEQ ID NO: 1002361 - DNA, 15 bp, Homo sapiens
gctgccaaggtctgc

SEQ ID NO: 1002362 - DNA, 15 bp, Homo sapiens
tgctgccaaggtctg

SEQ ID NO: 1002363 - DNA, 15 bp, Homo sapiens
ttgctgccaaggtct

SEQ ID NO: 1002364 - DNA, 15 bp, Homo sapiens
tttgctgccaaggtc

SEQ ID NO: 1002365 - DNA, 15 bp, Homo sapiens
ctttgctgccaaggt

SEQ ID NO: 1002366 - DNA, 15 bp, Homo sapiens
gctttgctgccaagg

SEQ ID NO: 1002367 - DNA, 15 bp, Homo sapiens
tgctttgctgccaag

SEQ ID NO: 1002368 - DNA, 15 bp, Homo sapiens
ctgctttgctgccaa

SEQ ID NO: 1002369 - DNA, 15 bp, Homo sapiens
actgctttgctgcca

SEQ ID NO: 1002370 - DNA, 15 bp, Homo sapiens
cactgctttgctgcc

SEQ ID NO: 1002371 - DNA, 15 bp, Homo sapiens
acactgctttgctgc

SEQ ID NO: 1002372 - DNA, 15 bp, Homo sapiens
aacactgctttgctg

SEQ ID NO: 1002373 - DNA, 15 bp, Homo sapiens
taacactgctttgct

SEQ ID NO: 1002374 - DNA, 15 bp, Homo sapiens
ctaacactgctttgc

SEQ ID NO: 1002375 - DNA, 15 bp, Homo sapiens
tctaacactgctttg

SEQ ID NO: 1002376 - DNA, 15 bp, Homo sapiens
ctctaacactgcttt

SEQ ID NO: 1002377 - DNA, 15 bp, Homo sapiens
actctaacactgctt

SEQ ID NO: 1002378 - DNA, 15 bp, Homo sapiens
tactctaacactgct

SEQ ID NO: 1002379 - DNA, 15 bp, Homo sapiens
ctactctaacactgc

SEQ ID NO: 1002380 - DNA, 15 bp, Homo sapiens
gctactctaacactg

SEQ ID NO: 1002381 - DNA, 15 bp, Homo sapiens
tgctactctaacact

SEQ ID NO: 1002382 - DNA, 15 bp, Homo sapiens
ctgctactctaacac

SEQ ID NO: 1002383 - DNA, 15 bp, Homo sapiens
actgctactctaaca

SEQ ID NO: 1002384 - DNA, 15 bp, Homo sapiens
tactgctactctaac

SEQ ID NO: 1002385 - DNA, 15 bp, Homo sapiens
ctactgctactctaa

SEQ ID NO: 1002386 - DNA, 15 bp, Homo sapiens
tctactgctactcta

SEQ ID NO: 1002387 - DNA, 15 bp, Homo sapiens
ttctactgctactct

SEQ ID NO: 1002388 - DNA, 15 bp, Homo sapiens
tttctactgctactc

SEQ ID NO: 1002389 - DNA, 15 bp, Homo sapiens
gtttctactgctact

SEQ ID NO: 1002390 - DNA, 15 bp, Homo sapiens
ggtttctactgctac

SEQ ID NO: 1002391 - DNA, 15 bp, Homo sapiens
aggtttctactgcta

SEQ ID NO: 1002392 - DNA, 15 bp, Homo sapiens
aaggtttctactgct

SEQ ID NO: 1002393 - DNA, 15 bp, Homo sapiens
aaaggtttctactgc

SEQ ID NO: 1002394 - DNA, 15 bp, Homo sapiens
caaaggtttctactg

SEQ ID NO: 1002395 - DNA, 15 bp, Homo sapiens
acaaaggtttctact

SEQ ID NO: 1002396 - DNA, 15 bp, Homo sapiens
cacaaaggtttctac

SEQ ID NO: 1002397 - DNA, 15 bp, Homo sapiens
tcacaaaggtttcta

SEQ ID NO: 1002398 - DNA, 15 bp, Homo sapiens
ttcacaaaggtttct

SEQ ID NO: 1002399 - DNA, 15 bp, Homo sapiens
cttcacaaaggtttc

SEQ ID NO: 1002400 - DNA, 15 bp, Homo sapiens
gcttcacaaaggttt

SEQ ID NO: 1002401 - DNA, 15 bp, Homo sapiens
agcttcacaaaggtt

SEQ ID NO: 1002402 - DNA, 15 bp, Homo sapiens
tagcttcacaaaggt

SEQ ID NO: 1002403 - DNA, 15 bp, Homo sapiens
ctagcttcacaaagg

SEQ ID NO: 1002404 - DNA, 15 bp, Homo sapiens
cctagcttcacaaag

SEQ ID NO: 1002405 - DNA, 15 bp, Homo sapiens
tcctagcttcacaaa

SEQ ID NO: 1002406 - DNA, 15 bp, Homo sapiens
ttcctagcttcacaa

SEQ ID NO: 1002407 - DNA, 15 bp, Homo sapiens
attcctagcttcaca

SEQ ID NO: 1002408 - DNA, 15 bp, Homo sapiens
tattcctagcttcac

SEQ ID NO: 1002409 - DNA, 15 bp, Homo sapiens
gtattcctagcttca

SEQ ID NO: 1002410 - DNA, 15 bp, Homo sapiens
tgtattcctagcttc

SEQ ID NO: 1002411 - DNA, 15 bp, Homo sapiens
atgtattcctagctt

SEQ ID NO: 1002412 - DNA, 15 bp, Homo sapiens
aatgtattcctagct

SEQ ID NO: 1002413 - DNA, 15 bp, Homo sapiens
aaatgtattcctagc

SEQ ID NO: 1002414 - DNA, 15 bp, Homo sapiens
aaaatgtattcctag

SEQ ID NO: 1002415 - DNA, 15 bp, Homo sapiens
gaaaatgtattccta

SEQ ID NO: 1002416 - DNA, 15 bp, Homo sapiens
agaaaatgtattcct

SEQ ID NO: 1002417 - DNA, 15 bp, Homo sapiens
cagaaaatgtattcc

SEQ ID NO: 1002418 - DNA, 15 bp, Homo sapiens
ccagaaaatgtattc

SEQ ID NO: 1002419 - DNA, 15 bp, Homo sapiens
accagaaaatgtatt

SEQ ID NO: 1002420 - DNA, 15 bp, Homo sapiens
gaccagaaaatgtat

SEQ ID NO: 1002421 - DNA, 15 bp, Homo sapiens
tgaccagaaaatgta

SEQ ID NO: 1002422 - DNA, 15 bp, Homo sapiens
atgaccagaaaatgt

SEQ ID NO: 1002423 - DNA, 15 bp, Homo sapiens
tatgaccagaaaatg

SEQ ID NO: 1002424 - DNA, 15 bp, Homo sapiens
ttatgaccagaaaat

SEQ ID NO: 1002425 - DNA, 15 bp, Homo sapiens
tttatgaccagaaaa

SEQ ID NO: 1002426 - DNA, 15 bp, Homo sapiens
ttttatgaccagaaa

SEQ ID NO: 1002427 - DNA, 15 bp, Homo sapiens
tttttatgaccagaa

SEQ ID NO: 1002428 - DNA, 15 bp, Homo sapiens
gtttttatgaccaga

SEQ ID NO: 1002429 - DNA, 15 bp, Homo sapiens
ggtttttatgaccag

SEQ ID NO: 1002430 - DNA, 15 bp, Homo sapiens
aggtttttatgacca

SEQ ID NO: 1002431 - DNA, 15 bp, Homo sapiens
gaggtttttatgacc

SEQ ID NO: 1002432 - DNA, 15 bp, Homo sapiens
ggaggtttttatgac

SEQ ID NO: 1002433 - DNA, 15 bp, Homo sapiens
aggaggtttttatga

SEQ ID NO: 1002434 - DNA, 15 bp, Homo sapiens
caggaggtttttatg

SEQ ID NO: 1002435 - DNA, 15 bp, Homo sapiens
tcaggaggtttttat

SEQ ID NO: 1002436 - DNA, 15 bp, Homo sapiens
ttcaggaggttttta

SEQ ID NO: 1002437 - DNA, 15 bp, Homo sapiens
tttcaggaggttttt

SEQ ID NO: 1002438 - DNA, 15 bp, Homo sapiens
ttttcaggaggtttt

SEQ ID NO: 1002439 - DNA, 15 bp, Homo sapiens
attttcaggaggttt

SEQ ID NO: 1002440 - DNA, 15 bp, Homo sapiens
aattttcaggaggtt

SEQ ID NO: 1002441 - DNA, 15 bp, Homo sapiens
caattttcaggaggt

SEQ ID NO: 1002442 - DNA, 15 bp, Homo sapiens
acaattttcaggagg

SEQ ID NO: 1002443 - DNA, 15 bp, Homo sapiens
cacaattttcaggag

SEQ ID NO: 1002444 - DNA, 15 bp, Homo sapiens
tcacaattttcagga

SEQ ID NO: 1002445 - DNA, 15 bp, Homo sapiens
ttcacaattttcagg

SEQ ID NO: 1002446 - DNA, 15 bp, Homo sapiens
gttcacaattttcag

SEQ ID NO: 1002447 - DNA, 15 bp, Homo sapiens
agttcacaattttca

SEQ ID NO: 1002448 - DNA, 15 bp, Homo sapiens
gagttcacaattttc

SEQ ID NO: 1002449 - DNA, 15 bp, Homo sapiens
tgagttcacaatttt

SEQ ID NO: 1002450 - DNA, 15 bp, Homo sapiens
ctgagttcacaattt

SEQ ID NO: 1002451 - DNA, 15 bp, Homo sapiens
actgagttcacaatt

SEQ ID NO: 1002452 - DNA, 15 bp, Homo sapiens
cactgagttcacaat

SEQ ID NO: 1002453 - DNA, 15 bp, Homo sapiens
acactgagttcacaa

SEQ ID NO: 1002454 - DNA, 15 bp, Homo sapiens
tacactgagttcaca

SEQ ID NO: 1002455 - DNA, 15 bp, Homo sapiens
ctacactgagttcac

SEQ ID NO: 1002456 - DNA, 15 bp, Homo sapiens
gctacactgagttca

SEQ ID NO: 1002457 - DNA, 15 bp, Homo sapiens
tgctacactgagttc

SEQ ID NO: 1002458 - DNA, 15 bp, Homo sapiens
ctgctacactgagtt

SEQ ID NO: 1002459 - DNA, 15 bp, Homo sapiens
cctgctacactgagt

SEQ ID NO: 1002460 - DNA, 15 bp, Homo sapiens
tcctgctacactgag

SEQ ID NO: 1002461 - DNA, 15 bp, Homo sapiens
ctcctgctacactga

SEQ ID NO: 1002462 - DNA, 15 bp, Homo sapiens
tctcctgctacactg

SEQ ID NO: 1002463 - DNA, 15 bp, Homo sapiens
ttctcctgctacact

SEQ ID NO: 1002464 - DNA, 15 bp, Homo sapiens
tttctcctgctacac

SEQ ID NO: 1002465 - DNA, 15 bp, Homo sapiens
ctttctcctgctaca

SEQ ID NO: 1002466 - DNA, 15 bp, Homo sapiens
tctttctcctgctac

SEQ ID NO: 1002467 - DNA, 15 bp, Homo sapiens
ttctttctcctgcta

SEQ ID NO: 1002468 - DNA, 15 bp, Homo sapiens
cttctttctcctgct

SEQ ID NO: 1002469 - DNA, 15 bp, Homo sapiens
tcttctttctcctgc

SEQ ID NO: 1002470 - DNA, 15 bp, Homo sapiens
atcttctttctcctg

SEQ ID NO: 1002471 - DNA, 15 bp, Homo sapiens
catcttctttctcct

SEQ ID NO: 1002472 - DNA, 15 bp, Homo sapiens
ccatcttctttctcc

SEQ ID NO: 1002473 - DNA, 15 bp, Homo sapiens
gccatcttctttctc

SEQ ID NO: 1002474 - DNA, 15 bp, Homo sapiens
agccatcttctttct

SEQ ID NO: 1002475 - DNA, 15 bp, Homo sapiens
aagccatcttctttc

SEQ ID NO: 1002476 - DNA, 15 bp, Homo sapiens
caagccatcttcttt

SEQ ID NO: 1002477 - DNA, 15 bp, Homo sapiens
acaagccatcttctt

SEQ ID NO: 1002478 - DNA, 15 bp, Homo sapiens
aacaagccatcttct

SEQ ID NO: 1002479 - DNA, 15 bp, Homo sapiens
aaacaagccatcttc

SEQ ID NO: 1002480 - DNA, 15 bp, Homo sapiens
aaaacaagccatctt

SEQ ID NO: 1002481 - DNA, 15 bp, Homo sapiens
aaaaacaagccatct

SEQ ID NO: 1002482 - DNA, 15 bp, Homo sapiens
taaaaacaagccatc

SEQ ID NO: 1002483 - DNA, 15 bp, Homo sapiens
ctaaaaacaagccat

SEQ ID NO: 1002484 - DNA, 15 bp, Homo sapiens
actaaaaacaagcca

SEQ ID NO: 1002485 - DNA, 15 bp, Homo sapiens
tactaaaaacaagcc

SEQ ID NO: 1002486 - DNA, 15 bp, Homo sapiens
ttactaaaaacaagc

SEQ ID NO: 1002487 - DNA, 15 bp, Homo sapiens
tttactaaaaacaag

SEQ ID NO: 1002488 - DNA, 15 bp, Homo sapiens
ctttactaaaaacaa

SEQ ID NO: 1002489 - DNA, 15 bp, Homo sapiens
cctttactaaaaaca

SEQ ID NO: 1002490 - DNA, 15 bp, Homo sapiens
ccctttactaaaaac

SEQ ID NO: 1002491 - DNA, 15 bp, Homo sapiens
gccctttactaaaaa

SEQ ID NO: 1002492 - DNA, 15 bp, Homo sapiens
tgccctttactaaaa

SEQ ID NO: 1002493 - DNA, 15 bp, Homo sapiens
ttgccctttactaaa

SEQ ID NO: 1002494 - DNA, 15 bp, Homo sapiens
tttgccctttactaa

SEQ ID NO: 1002495 - DNA, 15 bp, Homo sapiens
ctttgccctttacta

SEQ ID NO: 1002496 - DNA, 15 bp, Homo sapiens
actttgccctttact

SEQ ID NO: 1002497 - DNA, 15 bp, Homo sapiens
gactttgccctttac

SEQ ID NO: 1002498 - DNA, 15 bp, Homo sapiens
tgactttgcccttta

SEQ ID NO: 1002499 - DNA, 15 bp, Homo sapiens
atgactttgcccttt

SEQ ID NO: 1002500 - DNA, 15 bp, Homo sapiens
aatgactttgccctt

SEQ ID NO: 1002501 - DNA, 15 bp, Homo sapiens
aaatgactttgccct

SEQ ID NO: 1002502 - DNA, 15 bp, Homo sapiens
aaaatgactttgccc

SEQ ID NO: 1002503 - DNA, 15 bp, Homo sapiens
aaaaatgactttgcc

SEQ ID NO: 1002504 - DNA, 15 bp, Homo sapiens
taaaaatgactttgc

SEQ ID NO: 1002505 - DNA, 15 bp, Homo sapiens
ttaaaaatgactttg

SEQ ID NO: 1002506 - DNA, 15 bp, Homo sapiens
cttaaaaatgacttt

SEQ ID NO: 1002507 - DNA, 15 bp, Homo sapiens
ccttaaaaatgactt

SEQ ID NO: 1002508 - DNA, 15 bp, Homo sapiens
tccttaaaaatgact

SEQ ID NO: 1002509 - DNA, 15 bp, Homo sapiens
atccttaaaaatgac

SEQ ID NO: 1002510 - DNA, 15 bp, Homo sapiens
gatccttaaaaatga

SEQ ID NO: 1002511 - DNA, 15 bp, Homo sapiens
tgatccttaaaaatg

SEQ ID NO: 1002512 - DNA, 15 bp, Homo sapiens
ctgatccttaaaaat

SEQ ID NO: 1002513 - DNA, 15 bp, Homo sapiens
tctgatccttaaaaa

SEQ ID NO: 1002514 - DNA, 15 bp, Homo sapiens
ttctgatccttaaaa

SEQ ID NO: 1002515 - DNA, 15 bp, Homo sapiens
cttctgatccttaaa

SEQ ID NO: 1002516 - DNA, 15 bp, Homo sapiens
tcttctgatccttaa

SEQ ID NO: 1002517 - DNA, 15 bp, Homo sapiens
ttcttctgatcctta

SEQ ID NO: 1002518 - DNA, 15 bp, Homo sapiens
cttcttctgatcctt

SEQ ID NO: 1002519 - DNA, 15 bp, Homo sapiens
tcttcttctgatcct

SEQ ID NO: 1002520 - DNA, 15 bp, Homo sapiens
ttcttcttctgatcc

SEQ ID NO: 1002521 - DNA, 15 bp, Homo sapiens
tttcttcttctgatc

SEQ ID NO: 1002522 - DNA, 15 bp, Homo sapiens
gtttcttcttctgat

SEQ ID NO: 1002523 - DNA, 15 bp, Homo sapiens
cgtttcttcttctga

SEQ ID NO: 1002524 - DNA, 15 bp, Homo sapiens
ccgtttcttcttctg

SEQ ID NO: 1002525 - DNA, 15 bp, Homo sapiens
tccgtttcttcttct

SEQ ID NO: 1002526 - DNA, 15 bp, Homo sapiens
ctccgtttcttcttc

SEQ ID NO: 1002527 - DNA, 15 bp, Homo sapiens
tctccgtttcttctt

SEQ ID NO: 1002528 - DNA, 15 bp, Homo sapiens
ctctccgtttcttct

SEQ ID NO: 1002529 - DNA, 15 bp, Homo sapiens
actctccgtttcttc

SEQ ID NO: 1002530 - DNA, 15 bp, Homo sapiens
cactctccgtttctt

SEQ ID NO: 1002531 - DNA, 15 bp, Homo sapiens
tcactctccgtttct

SEQ ID NO: 1002532 - DNA, 15 bp, Homo sapiens
ttcactctccgtttc

SEQ ID NO: 1002533 - DNA, 15 bp, Homo sapiens
tttcactctccgttt

SEQ ID NO: 1002534 - DNA, 15 bp, Homo sapiens
gtttcactctccgtt

SEQ ID NO: 1002535 - DNA, 15 bp, Homo sapiens
tgtttcactctccgt

SEQ ID NO: 1002536 - DNA, 15 bp, Homo sapiens
ttgtttcactctccg

SEQ ID NO: 1002537 - DNA, 15 bp, Homo sapiens
attgtttcactctcc

SEQ ID NO: 1002538 - DNA, 15 bp, Homo sapiens
aagactgtatgaaat

SEQ ID NO: 1002539 - DNA, 15 bp, Homo sapiens
gaagactgtatgaaa

SEQ ID NO: 1002540 - DNA, 15 bp, Homo sapiens
tgaagactgtatgaa

SEQ ID NO: 1002541 - DNA, 15 bp, Homo sapiens
ttgaagactgtatga

SEQ ID NO: 1002542 - DNA, 15 bp, Homo sapiens
attgaagactgtatg

SEQ ID NO: 1002543 - DNA, 15 bp, Homo sapiens
cattgaagactgtat

SEQ ID NO: 1002544 - DNA, 15 bp, Homo sapiens
acattgaagactgta

SEQ ID NO: 1002545 - DNA, 15 bp, Homo sapiens
cacattgaagactgt

SEQ ID NO: 1002546 - DNA, 15 bp, Homo sapiens
ccacattgaagactg

SEQ ID NO: 1002547 - DNA, 15 bp, Homo sapiens
tccacattgaagact

SEQ ID NO: 1002548 - DNA, 15 bp, Homo sapiens
ctccacattgaagac

SEQ ID NO: 1002549 - DNA, 15 bp, Homo sapiens
cctccacattgaaga

SEQ ID NO: 1002550 - DNA, 15 bp, Homo sapiens
gcctccacattgaag

SEQ ID NO: 1002551 - DNA, 15 bp, Homo sapiens
tgcctccacattgaa

SEQ ID NO: 1002552 - DNA, 15 bp, Homo sapiens
ctgcctccacattga

SEQ ID NO: 1002553 - DNA, 15 bp, Homo sapiens
actgcctccacattg

SEQ ID NO: 1002554 - DNA, 15 bp, Homo sapiens
tactgcctccacatt

SEQ ID NO: 1002555 - DNA, 15 bp, Homo sapiens
ctactgcctccacat

SEQ ID NO: 1002556 - DNA, 15 bp, Homo sapiens
cctactgcctccaca

SEQ ID NO: 1002557 - DNA, 15 bp, Homo sapiens
ccctactgcctccac

SEQ ID NO: 1002558 - DNA, 15 bp, Homo sapiens
tccctactgcctcca

SEQ ID NO: 1002559 - DNA, 15 bp, Homo sapiens
atccctactgcctcc

SEQ ID NO: 1002560 - DNA, 15 bp, Homo sapiens
catccctactgcctc

SEQ ID NO: 1002561 - DNA, 15 bp, Homo sapiens
ccatccctactgcct

SEQ ID NO: 1002562 - DNA, 15 bp, Homo sapiens
tccatccctactgcc

SEQ ID NO: 1002563 - DNA, 15 bp, Homo sapiens
ctccatccctactgc

SEQ ID NO: 1002564 - DNA, 15 bp, Homo sapiens
tctccatccctactg

SEQ ID NO: 1002565 - DNA, 15 bp, Homo sapiens
ttctccatccctact

SEQ ID NO: 1002566 - DNA, 15 bp, Homo sapiens
tttctccatccctac

SEQ ID NO: 1002567 - DNA, 15 bp, Homo sapiens
ttttctccatcccta

SEQ ID NO: 1002568 - DNA, 15 bp, Homo sapiens
attttctccatccct

SEQ ID NO: 1002569 - DNA, 15 bp, Homo sapiens
tattttctccatccc

SEQ ID NO: 1002570 - DNA, 15 bp, Homo sapiens
ttattttctccatcc

SEQ ID NO: 1002571 - DNA, 15 bp, Homo sapiens
attattttctccatc

SEQ ID NO: 1002572 - DNA, 15 bp, Homo sapiens
cattattttctccat

SEQ ID NO: 1002573 - DNA, 15 bp, Homo sapiens
acattattttctcca

SEQ ID NO: 1002574 - DNA, 15 bp, Homo sapiens
tacattattttctcc

SEQ ID NO: 1002575 - DNA, 15 bp, Homo sapiens
gtacattattttctc

SEQ ID NO: 1002576 - DNA, 15 bp, Homo sapiens
agtacattattttct

SEQ ID NO: 1002577 - DNA, 15 bp, Homo sapiens
aagtacattattttc

SEQ ID NO: 1002578 - DNA, 15 bp, Homo sapiens
aaagtacattatttt

SEQ ID NO: 1002579 - DNA, 15 bp, Homo sapiens
caaagtacattattt

SEQ ID NO: 1002580 - DNA, 15 bp, Homo sapiens
acaaagtacattatt

SEQ ID NO: 1002581 - DNA, 15 bp, Homo sapiens
cacaaagtacattat

SEQ ID NO: 1002582 - DNA, 15 bp, Homo sapiens
gcacaaagtacatta

SEQ ID NO: 1002583 - DNA, 15 bp, Homo sapiens
agcacaaagtacatt

SEQ ID NO: 1002584 - DNA, 15 bp, Homo sapiens
gagcacaaagtacat

SEQ ID NO: 1002585 - DNA, 15 bp, Homo sapiens
agagcacaaagtaca

SEQ ID NO: 1002586 - DNA, 15 bp, Homo sapiens
gagagcacaaagtac

SEQ ID NO: 1002587 - DNA, 15 bp, Homo sapiens
ggagagcacaaagta

SEQ ID NO: 1002588 - DNA, 15 bp, Homo sapiens
cggagagcacaaagt

SEQ ID NO: 1002589 - DNA, 15 bp, Homo sapiens
ccggagagcacaaag

SEQ ID NO: 1002590 - DNA, 15 bp, Homo sapiens
accggagagcacaaa

SEQ ID NO: 1002591 - DNA, 15 bp, Homo sapiens
taccggagagcacaa

SEQ ID NO: 1002592 - DNA, 15 bp, Homo sapiens
gtaccggagagcaca

SEQ ID NO: 1002593 - DNA, 15 bp, Homo sapiens
agtaccggagagcac

SEQ ID NO: 1002594 - DNA, 15 bp, Homo sapiens
gagtaccggagagca

SEQ ID NO: 1002595 - DNA, 15 bp, Homo sapiens
agagtaccggagagc

SEQ ID NO: 1002596 - DNA, 15 bp, Homo sapiens
aagagtaccggagag

SEQ ID NO: 1002597 - DNA, 15 bp, Homo sapiens
aaagagtaccggaga

SEQ ID NO: 1002598 - DNA, 15 bp, Homo sapiens
gaaagagtaccggag

SEQ ID NO: 1002599 - DNA, 15 bp, Homo sapiens
agaaagagtaccgga

SEQ ID NO: 1002600 - DNA, 15 bp, Homo sapiens
aagaaagagtaccgg

SEQ ID NO: 1002601 - DNA, 15 bp, Homo sapiens
aaagaaagagtaccg

SEQ ID NO: 1002602 - DNA, 15 bp, Homo sapiens
gaaagaaagagtacc

SEQ ID NO: 1002603 - DNA, 15 bp, Homo sapiens
ggaaagaaagagtac

SEQ ID NO: 1002604 - DNA, 15 bp, Homo sapiens
aggaaagaaagagta

SEQ ID NO: 1002605 - DNA, 15 bp, Homo sapiens
taggaaagaaagagt

SEQ ID NO: 1002606 - DNA, 15 bp, Homo sapiens
ataggaaagaaagag

SEQ ID NO: 1002607 - DNA, 15 bp, Homo sapiens
aataggaaagaaaga

SEQ ID NO: 1002608 - DNA, 15 bp, Homo sapiens
caataggaaagaaag

SEQ ID NO: 1002609 - DNA, 15 bp, Homo sapiens
acaataggaaagaaa

SEQ ID NO: 1002610 - DNA, 15 bp, Homo sapiens
gacaataggaaagaa

SEQ ID NO: 1002611 - DNA, 15 bp, Homo sapiens
agacaataggaaaga

SEQ ID NO: 1002612 - DNA, 15 bp, Homo sapiens
cagacaataggaaag

SEQ ID NO: 1002613 - DNA, 15 bp, Homo sapiens
tcagacaataggaaa

SEQ ID NO: 1002614 - DNA, 15 bp, Homo sapiens
ctcagacaataggaa

SEQ ID NO: 1002615 - DNA, 15 bp, Homo sapiens
cctcagacaatagga

SEQ ID NO: 1002616 - DNA, 15 bp, Homo sapiens
ccctcagacaatagg

SEQ ID NO: 1002617 - DNA, 15 bp, Homo sapiens
cccctcagacaatag

SEQ ID NO: 1002618 - DNA, 15 bp, Homo sapiens
tcccctcagacaata

SEQ ID NO: 1002619 - DNA, 15 bp, Homo sapiens
atcccctcagacaat

SEQ ID NO: 1002620 - DNA, 15 bp, Homo sapiens
aatcccctcagacaa

SEQ ID NO: 1002621 - DNA, 15 bp, Homo sapiens
aaatcccctcagaca

SEQ ID NO: 1002622 - DNA, 15 bp, Homo sapiens
caaatcccctcagac

SEQ ID NO: 1002623 - DNA, 15 bp, Homo sapiens
ccaaatcccctcaga

SEQ ID NO: 1002624 - DNA, 15 bp, Homo sapiens
cccaaatcccctcag

SEQ ID NO: 1002625 - DNA, 15 bp, Homo sapiens
gcccaaatcccctca

SEQ ID NO: 1002626 - DNA, 15 bp, Homo sapiens
tgcccaaatcccctc

SEQ ID NO: 1002627 - DNA, 15 bp, Homo sapiens
atgcccaaatcccct

SEQ ID NO: 1002628 - DNA, 15 bp, Homo sapiens
tatgcccaaatcccc

SEQ ID NO: 1002629 - DNA, 15 bp, Homo sapiens
ttatgcccaaatccc

SEQ ID NO: 1002630 - DNA, 15 bp, Homo sapiens
attatgcccaaatcc

SEQ ID NO: 1002631 - DNA, 15 bp, Homo sapiens
aattatgcccaaatc

SEQ ID NO: 1002632 - DNA, 15 bp, Homo sapiens
aaattatgcccaaat

SEQ ID NO: 1002633 - DNA, 15 bp, Homo sapiens
taaattatgcccaaa

SEQ ID NO: 1002634 - DNA, 15 bp, Homo sapiens
ataaattatgcccaa

SEQ ID NO: 1002635 - DNA, 15 bp, Homo sapiens
aataaattatgccca

SEQ ID NO: 1002636 - DNA, 15 bp, Homo sapiens
aaataaattatgccc

SEQ ID NO: 1002637 - DNA, 15 bp, Homo sapiens
aaaataaattatgcc

SEQ ID NO: 1002638 - DNA, 15 bp, Homo sapiens
caaaataaattatgc

SEQ ID NO: 1002639 - DNA, 15 bp, Homo sapiens
gcaaaataaattatg

SEQ ID NO: 1002640 - DNA, 15 bp, Homo sapiens
agcaaaataaattat

SEQ ID NO: 1002641 - DNA, 15 bp, Homo sapiens
cagcaaaataaatta

SEQ ID NO: 1002642 - DNA, 15 bp, Homo sapiens
gcagcaaaataaatt

SEQ ID NO: 1002643 - DNA, 15 bp, Homo sapiens
tgcagcaaaataaat

SEQ ID NO: 1002644 - DNA, 15 bp, Homo sapiens
ctgcagcaaaataaa

SEQ ID NO: 1002645 - DNA, 15 bp, Homo sapiens
tctgcagcaaaataa

SEQ ID NO: 1002646 - DNA, 15 bp, Homo sapiens
ctctgcagcaaaata

SEQ ID NO: 1002647 - DNA, 15 bp, Homo sapiens
tctctgcagcaaaat

SEQ ID NO: 1002648 - DNA, 15 bp, Homo sapiens
atctctgcagcaaaa

SEQ ID NO: 1002649 - DNA, 15 bp, Homo sapiens
tatctctgcagcaaa

SEQ ID NO: 1002650 - DNA, 15 bp, Homo sapiens
ttatctctgcagcaa

SEQ ID NO: 1002651 - DNA, 15 bp, Homo sapiens
tttatctctgcagca

SEQ ID NO: 1002652 - DNA, 15 bp, Homo sapiens
ttttatctctgcagc

SEQ ID NO: 1002653 - DNA, 15 bp, Homo sapiens
tttttatctctgcag

SEQ ID NO: 1002654 - DNA, 15 bp, Homo sapiens
atttttatctctgca

SEQ ID NO: 1002655 - DNA, 15 bp, Homo sapiens
aatttttatctctgc

SEQ ID NO: 1002656 - DNA, 15 bp, Homo sapiens
aaatttttatctctg

SEQ ID NO: 1002657 - DNA, 15 bp, Homo sapiens
caaatttttatctct

SEQ ID NO: 1002658 - DNA, 15 bp, Homo sapiens
acaaatttttatctc

SEQ ID NO: 1002659 - DNA, 15 bp, Homo sapiens
aacaaatttttatct

SEQ ID NO: 1002660 - DNA, 15 bp, Homo sapiens
taacaaatttttatc

SEQ ID NO: 1002661 - DNA, 15 bp, Homo sapiens
ataacaaatttttat

SEQ ID NO: 1002662 - DNA, 15 bp, Homo sapiens
tataacaaattttta

SEQ ID NO: 1002663 - DNA, 15 bp, Homo sapiens
atataacaaattttt

SEQ ID NO: 1002664 - DNA, 15 bp, Homo sapiens
tatataacaaatttt

SEQ ID NO: 1002665 - DNA, 15 bp, Homo sapiens
atatataacaaattt

SEQ ID NO: 1002666 - DNA, 15 bp, Homo sapiens
tatatataacaaatt

SEQ ID NO: 1002667 - DNA, 15 bp, Homo sapiens
atatatataacaaat

SEQ ID NO: 1002668 - DNA, 15 bp, Homo sapiens
aatatatataacaaa

SEQ ID NO: 1002669 - DNA, 15 bp, Homo sapiens
aaatatatataacaa

SEQ ID NO: 1002670 - DNA, 15 bp, Homo sapiens
aaaatatatataaca

SEQ ID NO: 1002671 - DNA, 15 bp, Homo sapiens
aaaaatatatataac

SEQ ID NO: 1002672 - DNA, 15 bp, Homo sapiens
aaaaaatatatataa

SEQ ID NO: 1002673 - DNA, 15 bp, Homo sapiens
taaaaaatatatata

SEQ ID NO: 1002674 - DNA, 15 bp, Homo sapiens
ataaaaaatatatat

SEQ ID NO: 1002675 - DNA, 15 bp, Homo sapiens
gataaaaaatatata

SEQ ID NO: 1002676 - DNA, 15 bp, Homo sapiens
tgataaaaaatatat

SEQ ID NO: 1002677 - DNA, 15 bp, Homo sapiens
atgataaaaaatata

SEQ ID NO: 1002678 - DNA, 15 bp, Homo sapiens
aatgataaaaaatat

SEQ ID NO: 1002679 - DNA, 15 bp, Homo sapiens
gaatgataaaaaata

SEQ ID NO: 1002680 - DNA, 15 bp, Homo sapiens
tgaatgataaaaaat

SEQ ID NO: 1002681 - DNA, 15 bp, Homo sapiens
ctgaatgataaaaaa

SEQ ID NO: 1002682 - DNA, 15 bp, Homo sapiens
cctgaatgataaaaa

SEQ ID NO: 1002683 - DNA, 15 bp, Homo sapiens
ccctgaatgataaaa

SEQ ID NO: 1002684 - DNA, 15 bp, Homo sapiens
gccctgaatgataaa

SEQ ID NO: 1002685 - DNA, 15 bp, Homo sapiens
ggccctgaatgataa

SEQ ID NO: 1002686 - DNA, 15 bp, Homo sapiens
tggccctgaatgata

SEQ ID NO: 1002687 - DNA, 15 bp, Homo sapiens
ttggccctgaatgat

SEQ ID NO: 1002688 - DNA, 15 bp, Homo sapiens
cttggccctgaatga

SEQ ID NO: 1002689 - DNA, 15 bp, Homo sapiens
ccttggccctgaatg

SEQ ID NO: 1002690 - DNA, 15 bp, Homo sapiens
tccttggccctgaat

SEQ ID NO: 1002691 - DNA, 15 bp, Homo sapiens
ttccttggccctgaa

SEQ ID NO: 1002692 - DNA, 15 bp, Homo sapiens
attccttggccctga

SEQ ID NO: 1002693 - DNA, 15 bp, Homo sapiens
tattccttggccctg

SEQ ID NO: 1002694 - DNA, 15 bp, Homo sapiens
atattccttggccct

SEQ ID NO: 1002695 - DNA, 15 bp, Homo sapiens
tatattccttggccc

SEQ ID NO: 1002696 - DNA, 15 bp, Homo sapiens
ctatattccttggcc

SEQ ID NO: 1002697 - DNA, 15 bp, Homo sapiens
tctatattccttggc

SEQ ID NO: 1002698 - DNA, 15 bp, Homo sapiens
atctatattccttgg

SEQ ID NO: 1002699 - DNA, 15 bp, Homo sapiens
aatctatattccttg

SEQ ID NO: 1002700 - DNA, 15 bp, Homo sapiens
aaatctatattcctt

SEQ ID NO: 1002701 - DNA, 15 bp, Homo sapiens
aaaatctatattcct

SEQ ID NO: 1002702 - DNA, 15 bp, Homo sapiens
aaaaatctatattcc

SEQ ID NO: 1002703 - DNA, 15 bp, Homo sapiens
aaaaaatctatattc

SEQ ID NO: 1002704 - DNA, 15 bp, Homo sapiens
aaaaaaatctatatt

SEQ ID NO: 1002705 - DNA, 15 bp, Homo sapiens
aaaaaaaatctatat

SEQ ID NO: 1002706 - DNA, 15 bp, Homo sapiens
aaaaaaaaatctata

SEQ ID NO: 1002707 - DNA, 15 bp, Homo sapiens
aaaaaaaaaatctat

SEQ ID NO: 1002708 - DNA, 15 bp, Homo sapiens
gaaaaaaaaaatcta

SEQ ID NO: 1002709 - DNA, 15 bp, Homo sapiens
tgaaaaaaaaaatct

SEQ ID NO: 1002710 - DNA, 15 bp, Homo sapiens
ctgaaaaaaaaaatc

SEQ ID NO: 1002711 - DNA, 15 bp, Homo sapiens
gctgaaaaaaaaaat

SEQ ID NO: 1002712 - DNA, 15 bp, Homo sapiens
ggctgaaaaaaaaaa

SEQ ID NO: 1002713 - DNA, 15 bp, Homo sapiens
aggctgaaaaaaaaa

SEQ ID NO: 1002714 - DNA, 15 bp, Homo sapiens
aaggctgaaaaaaaa

SEQ ID NO: 1002715 - DNA, 15 bp, Homo sapiens
caaggctgaaaaaaa

SEQ ID NO: 1002716 - DNA, 15 bp, Homo sapiens
acaaggctgaaaaaa

SEQ ID NO: 1002717 - DNA, 15 bp, Homo sapiens
gacaaggctgaaaaa

SEQ ID NO: 1002718 - DNA, 15 bp, Homo sapiens
agacaaggctgaaaa

SEQ ID NO: 1002719 - DNA, 15 bp, Homo sapiens
gagacaaggctgaaa

SEQ ID NO: 1002720 - DNA, 15 bp, Homo sapiens
tgagacaaggctgaa

SEQ ID NO: 1002721 - DNA, 15 bp, Homo sapiens
ctgagacaaggctga

SEQ ID NO: 1002722 - DNA, 15 bp, Homo sapiens
gctgagacaaggctg

SEQ ID NO: 1002723 - DNA, 15 bp, Homo sapiens
agctgagacaaggct

SEQ ID NO: 1002724 - DNA, 15 bp, Homo sapiens
cagctgagacaaggc

SEQ ID NO: 1002725 - DNA, 15 bp, Homo sapiens
ccagctgagacaagg

SEQ ID NO: 1002726 - DNA, 15 bp, Homo sapiens
cccagctgagacaag

SEQ ID NO: 1002727 - DNA, 15 bp, Homo sapiens
acccagctgagacaa

SEQ ID NO: 1002728 - DNA, 15 bp, Homo sapiens
cacccagctgagaca

SEQ ID NO: 1002729 - DNA, 15 bp, Homo sapiens
acacccagctgagac

SEQ ID NO: 1002730 - DNA, 15 bp, Homo sapiens
gacacccagctgaga

SEQ ID NO: 1002731 - DNA, 15 bp, Homo sapiens
agacacccagctgag

SEQ ID NO: 1002732 - DNA, 15 bp, Homo sapiens
aagacacccagctga

SEQ ID NO: 1002733 - DNA, 15 bp, Homo sapiens
aaagacacccagctg

SEQ ID NO: 1002734 - DNA, 15 bp, Homo sapiens
taaagacacccagct

SEQ ID NO: 1002735 - DNA, 15 bp, Homo sapiens
ataaagacacccagc

SEQ ID NO: 1002736 - DNA, 15 bp, Homo sapiens
aataaagacacccag

SEQ ID NO: 1002737 - DNA, 15 bp, Homo sapiens
aaataaagacaccca

SEQ ID NO: 1002738 - DNA, 15 bp, Homo sapiens
taaataaagacaccc

SEQ ID NO: 1002739 - DNA, 15 bp, Homo sapiens
gtaaataaagacacc

SEQ ID NO: 1002740 - DNA, 15 bp, Homo sapiens
agtaaataaagacac

SEQ ID NO: 1002741 - DNA, 15 bp, Homo sapiens
gagtaaataaagaca

SEQ ID NO: 1002742 - DNA, 15 bp, Homo sapiens
agagtaaataaagac

SEQ ID NO: 1002743 - DNA, 15 bp, Homo sapiens
cagagtaaataaaga

SEQ ID NO: 1002744 - DNA, 15 bp, Homo sapiens
acagagtaaataaag

SEQ ID NO: 1002745 - DNA, 15 bp, Homo sapiens
gacagagtaaataaa

SEQ ID NO: 1002746 - DNA, 15 bp, Homo sapiens
agacagagtaaataa

SEQ ID NO: 1002747 - DNA, 15 bp, Homo sapiens
aagacagagtaaata

SEQ ID NO: 1002748 - DNA, 15 bp, Homo sapiens
taagacagagtaaat

SEQ ID NO: 1002749 - DNA, 15 bp, Homo sapiens
ttaagacagagtaaa

SEQ ID NO: 1002750 - DNA, 15 bp, Homo sapiens
tttaagacagagtaa

SEQ ID NO: 1002751 - DNA, 15 bp, Homo sapiens
ctttaagacagagta

SEQ ID NO: 1002752 - DNA, 15 bp, Homo sapiens
actttaagacagagt

SEQ ID NO: 1002753 - DNA, 15 bp, Homo sapiens
cactttaagacagag

SEQ ID NO: 1002754 - DNA, 15 bp, Homo sapiens
acactttaagacaga

SEQ ID NO: 1002755 - DNA, 15 bp, Homo sapiens
aacactttaagacag

SEQ ID NO: 1002756 - DNA, 15 bp, Homo sapiens
gaacactttaagaca

SEQ ID NO: 1002757 - DNA, 15 bp, Homo sapiens
ggaacactttaagac

SEQ ID NO: 1002758 - DNA, 15 bp, Homo sapiens
aggaacactttaaga

SEQ ID NO: 1002759 - DNA, 15 bp, Homo sapiens
aaggaacactttaag

SEQ ID NO: 1002760 - DNA, 15 bp, Homo sapiens
aaaggaacactttaa

SEQ ID NO: 1002761 - DNA, 15 bp, Homo sapiens
aaaaggaacacttta

SEQ ID NO: 1002762 - DNA, 15 bp, Homo sapiens
taaaaggaacacttt

SEQ ID NO: 1002763 - DNA, 15 bp, Homo sapiens
ataaaaggaacactt

SEQ ID NO: 1002764 - DNA, 15 bp, Homo sapiens
aataaaaggaacact

SEQ ID NO: 1002765 - DNA, 15 bp, Homo sapiens
taataaaaggaacac

SEQ ID NO: 1002766 - DNA, 15 bp, Homo sapiens
ataataaaaggaaca

SEQ ID NO: 1002767 - DNA, 15 bp, Homo sapiens
gataataaaaggaac

SEQ ID NO: 1002768 - DNA, 15 bp, Homo sapiens
tgataataaaaggaa

SEQ ID NO: 1002769 - DNA, 15 bp, Homo sapiens
atgataataaaagga

SEQ ID NO: 1002770 - DNA, 15 bp, Homo sapiens
aatgataataaaagg

SEQ ID NO: 1002771 - DNA, 15 bp, Homo sapiens
taatgataataaaag

SEQ ID NO: 1002772 - DNA, 15 bp, Homo sapiens
ataatgataataaaa

SEQ ID NO: 1002773 - DNA, 15 bp, Homo sapiens
aataatgataataaa

SEQ ID NO: 1002774 - DNA, 15 bp, Homo sapiens
taataatgataataa

SEQ ID NO: 1002775 - DNA, 15 bp, Homo sapiens
ataataatgataata

SEQ ID NO: 1002776 - DNA, 15 bp, Homo sapiens
aaataataatgataa

SEQ ID NO: 1002777 - DNA, 15 bp, Homo sapiens
aaaataataatgata

SEQ ID NO: 1002778 - DNA, 15 bp, Homo sapiens
aaaaataataatgat

SEQ ID NO: 1002779 - DNA, 15 bp, Homo sapiens
aaaaaataataatga

SEQ ID NO: 1002780 - DNA, 15 bp, Homo sapiens
taaaaaataataatg

SEQ ID NO: 1002781 - DNA, 15 bp, Homo sapiens
ttaaaaaataataat

SEQ ID NO: 1002782 - DNA, 15 bp, Homo sapiens
gattaaaaaataata

SEQ ID NO: 1002783 - DNA, 15 bp, Homo sapiens
tgattaaaaaataat

SEQ ID NO: 1002784 - DNA, 15 bp, Homo sapiens
atgattaaaaaataa

SEQ ID NO: 1002785 - DNA, 15 bp, Homo sapiens
aatgattaaaaaata

SEQ ID NO: 1002786 - DNA, 15 bp, Homo sapiens
caatgattaaaaaat

SEQ ID NO: 1002787 - DNA, 15 bp, Homo sapiens
tcaatgattaaaaaa

SEQ ID NO: 1002788 - DNA, 15 bp, Homo sapiens
ttcaatgattaaaaa

SEQ ID NO: 1002789 - DNA, 15 bp, Homo sapiens
attcaatgattaaaa

SEQ ID NO: 1002790 - DNA, 15 bp, Homo sapiens
aattcaatgattaaa

SEQ ID NO: 1002791 - DNA, 15 bp, Homo sapiens
gaattcaatgattaa

SEQ ID NO: 1002792 - DNA, 15 bp, Homo sapiens
ggaattcaatgatta

SEQ ID NO: 1002793 - DNA, 15 bp, Homo sapiens
tggaattcaatgatt

SEQ ID NO: 1002794 - DNA, 15 bp, Homo sapiens
atggaattcaatgat

SEQ ID NO: 1002795 - DNA, 15 bp, Homo sapiens
aatggaattcaatga

SEQ ID NO: 1002796 - DNA, 15 bp, Homo sapiens
aaatggaattcaatg

SEQ ID NO: 1002797 - DNA, 15 bp, Homo sapiens
tcagcctccctagta

SEQ ID NO: 1002798 - DNA, 15 bp, Homo sapiens
ctcagcctccctagt

SEQ ID NO: 1002799 - DNA, 15 bp, Homo sapiens
cctcagcctccctag

SEQ ID NO: 1002800 - DNA, 15 bp, Homo sapiens
gcctcagcctcccta

SEQ ID NO: 1002801 - DNA, 15 bp, Homo sapiens
tgcctcagcctccct

SEQ ID NO: 1002802 - DNA, 15 bp, Homo sapiens
tgccatctcggctca

SEQ ID NO: 1002803 - DNA, 15 bp, Homo sapiens
gtgccatctcggctc

SEQ ID NO: 1002804 - DNA, 15 bp, Homo sapiens
ggtgccatctcggct

SEQ ID NO: 1002805 - DNA, 15 bp, Homo sapiens
tggtgccatctcggc

SEQ ID NO: 1002806 - DNA, 15 bp, Homo sapiens
atggtgccatctcgg

SEQ ID NO: 1002807 - DNA, 15 bp, Homo sapiens
aatggtgccatctcg

SEQ ID NO: 1002808 - DNA, 15 bp, Homo sapiens
gggctggagtgcaat

SEQ ID NO: 1002809 - DNA, 15 bp, Homo sapiens
tgggctggagtgcaa

SEQ ID NO: 1002810 - DNA, 15 bp, Homo sapiens
gcctgggctggagtg

SEQ ID NO: 1002811 - DNA, 15 bp, Homo sapiens
cgcctgggctggagt

SEQ ID NO: 1002812 - DNA, 15 bp, Homo sapiens
tcgcctgggctggag

SEQ ID NO: 1002813 - DNA, 15 bp, Homo sapiens
gtcgcctgggctgga

SEQ ID NO: 1002814 - DNA, 15 bp, Homo sapiens
tgtcgcctgggctgg

SEQ ID NO: 1002815 - DNA, 15 bp, Homo sapiens
ctgtcgcctgggctg

SEQ ID NO: 1002816 - DNA, 15 bp, Homo sapiens
actgtcgcctgggct

SEQ ID NO: 1002817 - DNA, 15 bp, Homo sapiens
cactgtcgcctgggc

SEQ ID NO: 1002818 - DNA, 15 bp, Homo sapiens
gcactgtcgcctggg

SEQ ID NO: 1002819 - DNA, 15 bp, Homo sapiens
tgcactgtcgcctgg

SEQ ID NO: 1002820 - DNA, 15 bp, Homo sapiens
ttgcactgtcgcctg

SEQ ID NO: 1002821 - DNA, 15 bp, Homo sapiens
cttgcactgtcgcct

SEQ ID NO: 1002822 - DNA, 15 bp, Homo sapiens
tcttgcactgtcgcc

SEQ ID NO: 1002823 - DNA, 15 bp, Homo sapiens
gtcttgcactgtcgc

SEQ ID NO: 1002824 - DNA, 15 bp, Homo sapiens
agtcttgcactgtcg

SEQ ID NO: 1002825 - DNA, 15 bp, Homo sapiens
cagtcttgcactgtc

SEQ ID NO: 1002826 - DNA, 15 bp, Homo sapiens
gcagtcttgcactgt

SEQ ID NO: 1002827 - DNA, 15 bp, Homo sapiens
cgcagtcttgcactg

SEQ ID NO: 1002828 - DNA, 15 bp, Homo sapiens
acgcagtcttgcact

SEQ ID NO: 1002829 - DNA, 15 bp, Homo sapiens
gacgcagtcttgcac

SEQ ID NO: 1002830 - DNA, 15 bp, Homo sapiens
agacgcagtcttgca

SEQ ID NO: 1002831 - DNA, 15 bp, Homo sapiens
gagacgcagtcttgc

SEQ ID NO: 1002832 - DNA, 15 bp, Homo sapiens
tgagacgcagtcttg

SEQ ID NO: 1002833 - DNA, 15 bp, Homo sapiens
ttgagacgcagtctt

SEQ ID NO: 1002834 - DNA, 15 bp, Homo sapiens
tttgagacgcagtct

SEQ ID NO: 1002835 - DNA, 15 bp, Homo sapiens
ttttgagacgcagtc

SEQ ID NO: 1002836 - DNA, 15 bp, Homo sapiens
tttttgagacgcagt

SEQ ID NO: 1002837 - DNA, 15 bp, Homo sapiens
ttttttgagacgcag

SEQ ID NO: 1002838 - DNA, 15 bp, Homo sapiens
tttttttgagacgca

SEQ ID NO: 1002839 - DNA, 15 bp, Homo sapiens
ttttttttgagacgc

SEQ ID NO: 1002840 - DNA, 15 bp, Homo sapiens
gtgtttttttttttt

SEQ ID NO: 1002841 - DNA, 15 bp, Homo sapiens
tgtgttttttttttt

SEQ ID NO: 1002842 - DNA, 15 bp, Homo sapiens
gtgtgtttttttttt

SEQ ID NO: 1002843 - DNA, 15 bp, Homo sapiens
tgtgtgttttttttt

SEQ ID NO: 1002844 - DNA, 15 bp, Homo sapiens
ctgtgtgtttttttt

SEQ ID NO: 1002845 - DNA, 15 bp, Homo sapiens
tctgtgtgttttttt

SEQ ID NO: 1002846 - DNA, 15 bp, Homo sapiens
gtctgtgtgtttttt

SEQ ID NO: 1002847 - DNA, 15 bp, Homo sapiens
agtctgtgtgttttt

SEQ ID NO: 1002848 - DNA, 15 bp, Homo sapiens
aagtctgtgtgtttt

SEQ ID NO: 1002849 - DNA, 15 bp, Homo sapiens
caagtctgtgtgttt

SEQ ID NO: 1002850 - DNA, 15 bp, Homo sapiens
acaagtctgtgtgtt

SEQ ID NO: 1002851 - DNA, 15 bp, Homo sapiens
gacaagtctgtgtgt

SEQ ID NO: 1002852 - DNA, 15 bp, Homo sapiens
ggacaagtctgtgtg

SEQ ID NO: 1002853 - DNA, 15 bp, Homo sapiens
aggacaagtctgtgt

SEQ ID NO: 1002854 - DNA, 15 bp, Homo sapiens
taggacaagtctgtg

SEQ ID NO: 1002855 - DNA, 15 bp, Homo sapiens
gtaggacaagtctgt

SEQ ID NO: 1002856 - DNA, 15 bp, Homo sapiens
agtaggacaagtctg

SEQ ID NO: 1002857 - DNA, 15 bp, Homo sapiens
cagtaggacaagtct

SEQ ID NO: 1002858 - DNA, 15 bp, Homo sapiens
gcagtaggacaagtc

SEQ ID NO: 1002859 - DNA, 15 bp, Homo sapiens
ggcagtaggacaagt

SEQ ID NO: 1002860 - DNA, 15 bp, Homo sapiens
tggcagtaggacaag

SEQ ID NO: 1002861 - DNA, 15 bp, Homo sapiens
atggcagtaggacaa

SEQ ID NO: 1002862 - DNA, 15 bp, Homo sapiens
aatggcagtaggaca

SEQ ID NO: 1002863 - DNA, 15 bp, Homo sapiens
aaatggcagtaggac

SEQ ID NO: 1002864 - DNA, 15 bp, Homo sapiens
gaaatggcagtagga

SEQ ID NO: 1002865 - DNA, 15 bp, Homo sapiens
agaaatggcagtagg

SEQ ID NO: 1002866 - DNA, 15 bp, Homo sapiens
aagaaatggcagtag

SEQ ID NO: 1002867 - DNA, 15 bp, Homo sapiens
aaagaaatggcagta

SEQ ID NO: 1002868 - DNA, 15 bp, Homo sapiens
aaaagaaatggcagt

SEQ ID NO: 1002869 - DNA, 15 bp, Homo sapiens
gaaaagaaatggcag

SEQ ID NO: 1002870 - DNA, 15 bp, Homo sapiens
tgaaaagaaatggca

SEQ ID NO: 1002871 - DNA, 15 bp, Homo sapiens
gtgaaaagaaatggc

SEQ ID NO: 1002872 - DNA, 15 bp, Homo sapiens
agtgaaaagaaatgg

SEQ ID NO: 1002873 - DNA, 15 bp, Homo sapiens
gagtgaaaagaaatg

SEQ ID NO: 1002874 - DNA, 15 bp, Homo sapiens
agagtgaaaagaaat

SEQ ID NO: 1002875 - DNA, 15 bp, Homo sapiens
cagagtgaaaagaaa

SEQ ID NO: 1002876 - DNA, 15 bp, Homo sapiens
ccagagtgaaaagaa

SEQ ID NO: 1002877 - DNA, 15 bp, Homo sapiens
gccagagtgaaaaga

SEQ ID NO: 1002878 - DNA, 15 bp, Homo sapiens
cgccagagtgaaaag

SEQ ID NO: 1002879 - DNA, 15 bp, Homo sapiens
ccgccagagtgaaaa

SEQ ID NO: 1002880 - DNA, 15 bp, Homo sapiens
accgccagagtgaaa

SEQ ID NO: 1002881 - DNA, 15 bp, Homo sapiens
taccgccagagtgaa

SEQ ID NO: 1002882 - DNA, 15 bp, Homo sapiens
ttaccgccagagtga

SEQ ID NO: 1002883 - DNA, 15 bp, Homo sapiens
tttaccgccagagtg

SEQ ID NO: 1002884 - DNA, 15 bp, Homo sapiens
ctttaccgccagagt

SEQ ID NO: 1002885 - DNA, 15 bp, Homo sapiens
actttaccgccagag

SEQ ID NO: 1002886 - DNA, 15 bp, Homo sapiens
tactttaccgccaga

SEQ ID NO: 1002887 - DNA, 15 bp, Homo sapiens
ttactttaccgccag

SEQ ID NO: 1002888 - DNA, 15 bp, Homo sapiens
cttactttaccgcca

SEQ ID NO: 1002889 - DNA, 15 bp, Homo sapiens
tcttactttaccgcc

SEQ ID NO: 1002890 - DNA, 15 bp, Homo sapiens
ctcttactttaccgc

SEQ ID NO: 1002891 - DNA, 15 bp, Homo sapiens
tctcttactttaccg

SEQ ID NO: 1002892 - DNA, 15 bp, Homo sapiens
ctctcttactttacc

SEQ ID NO: 1002893 - DNA, 15 bp, Homo sapiens
actctcttactttac

SEQ ID NO: 1002894 - DNA, 15 bp, Homo sapiens
cactctcttacttta

SEQ ID NO: 1002895 - DNA, 15 bp, Homo sapiens
acactctcttacttt

SEQ ID NO: 1002896 - DNA, 15 bp, Homo sapiens
cacactctcttactt

SEQ ID NO: 1002897 - DNA, 15 bp, Homo sapiens
acacactctcttact

SEQ ID NO: 1002898 - DNA, 15 bp, Homo sapiens
cacacactctcttac

SEQ ID NO: 1002899 - DNA, 15 bp, Homo sapiens
acacacactctctta

SEQ ID NO: 1002900 - DNA, 15 bp, Homo sapiens
cacacacactctctt

SEQ ID NO: 1002901 - DNA, 15 bp, Homo sapiens
acacacacactctct

SEQ ID NO: 1002902 - DNA, 15 bp, Homo sapiens
cacacacacactctc

SEQ ID NO: 1002903 - DNA, 15 bp, Homo sapiens
acacacacacactct

SEQ ID NO: 1002904 - DNA, 15 bp, Homo sapiens
gaaacacacacacac

SEQ ID NO: 1002905 - DNA, 15 bp, Homo sapiens
agaaacacacacaca

SEQ ID NO: 1002906 - DNA, 15 bp, Homo sapiens
cagaaacacacacac

SEQ ID NO: 1002907 - DNA, 15 bp, Homo sapiens
acagaaacacacaca

SEQ ID NO: 1002908 - DNA, 15 bp, Homo sapiens
gacagaaacacacac

SEQ ID NO: 1002909 - DNA, 15 bp, Homo sapiens
ggacagaaacacaca

SEQ ID NO: 1002910 - DNA, 15 bp, Homo sapiens
cggacagaaacacac

SEQ ID NO: 1002911 - DNA, 15 bp, Homo sapiens
acggacagaaacaca

SEQ ID NO: 1002912 - DNA, 15 bp, Homo sapiens
gacggacagaaacac

SEQ ID NO: 1002913 - DNA, 15 bp, Homo sapiens
agacggacagaaaca

SEQ ID NO: 1002914 - DNA, 15 bp, Homo sapiens
cagacggacagaaac

SEQ ID NO: 1002915 - DNA, 15 bp, Homo sapiens
acagacggacagaaa

SEQ ID NO: 1002916 - DNA, 15 bp, Homo sapiens
gacagacggacagaa

SEQ ID NO: 1002917 - DNA, 15 bp, Homo sapiens
agacagacggacaga

SEQ ID NO: 1002918 - DNA, 15 bp, Homo sapiens
cagacagacggacag

SEQ ID NO: 1002919 - DNA, 15 bp, Homo sapiens
acagacagacggaca

SEQ ID NO: 1002920 - DNA, 15 bp, Homo sapiens
gacagacagacggac

SEQ ID NO: 1002921 - DNA, 15 bp, Homo sapiens
tgacagacagacgga

SEQ ID NO: 1002922 - DNA, 15 bp, Homo sapiens
ttgacagacagacgg

SEQ ID NO: 1002923 - DNA, 15 bp, Homo sapiens
cttgacagacagacg

SEQ ID NO: 1002924 - DNA, 15 bp, Homo sapiens
ccttgacagacagac

SEQ ID NO: 1002925 - DNA, 15 bp, Homo sapiens
cccttgacagacaga

SEQ ID NO: 1002926 - DNA, 15 bp, Homo sapiens
ccccttgacagacag

SEQ ID NO: 1002927 - DNA, 15 bp, Homo sapiens
cccccttgacagaca

SEQ ID NO: 1002928 - DNA, 15 bp, Homo sapiens
tcccccttgacagac

SEQ ID NO: 1002929 - DNA, 15 bp, Homo sapiens
ctcccccttgacaga

SEQ ID NO: 1002930 - DNA, 15 bp, Homo sapiens
cctcccccttgacag

SEQ ID NO: 1002931 - DNA, 15 bp, Homo sapiens
ccctcccccttgaca

SEQ ID NO: 1002932 - DNA, 15 bp, Homo sapiens
accctcccccttgac

SEQ ID NO: 1002933 - DNA, 15 bp, Homo sapiens
caccctcccccttga

SEQ ID NO: 1002934 - DNA, 15 bp, Homo sapiens
tcaccctcccccttg

SEQ ID NO: 1002935 - DNA, 15 bp, Homo sapiens
gtcaccctccccctt

SEQ ID NO: 1002936 - DNA, 15 bp, Homo sapiens
ggtcaccctccccct

SEQ ID NO: 1002937 - DNA, 15 bp, Homo sapiens
tggtcaccctccccc

SEQ ID NO: 1002938 - DNA, 15 bp, Homo sapiens
gtggtcaccctcccc

SEQ ID NO: 1002939 - DNA, 15 bp, Homo sapiens
agtggtcaccctccc

SEQ ID NO: 1002940 - DNA, 15 bp, Homo sapiens
aagtggtcaccctcc

SEQ ID NO: 1002941 - DNA, 15 bp, Homo sapiens
aaagtggtcaccctc

SEQ ID NO: 1002942 - DNA, 15 bp, Homo sapiens
gaaagtggtcaccct

SEQ ID NO: 1002943 - DNA, 15 bp, Homo sapiens
agaaagtggtcaccc

SEQ ID NO: 1002944 - DNA, 15 bp, Homo sapiens
tagaaagtggtcacc

SEQ ID NO: 1002945 - DNA, 15 bp, Homo sapiens
ttagaaagtggtcac

SEQ ID NO: 1002946 - DNA, 15 bp, Homo sapiens
tttagaaagtggtca

SEQ ID NO: 1002947 - DNA, 15 bp, Homo sapiens
ttttagaaagtggtc

SEQ ID NO: 1002948 - DNA, 15 bp, Homo sapiens
cttttagaaagtggt

SEQ ID NO: 1002949 - DNA, 15 bp, Homo sapiens
ccttttagaaagtgg

SEQ ID NO: 1002950 - DNA, 15 bp, Homo sapiens
gccttttagaaagtg

SEQ ID NO: 1002951 - DNA, 15 bp, Homo sapiens
ggccttttagaaagt

SEQ ID NO: 1002952 - DNA, 15 bp, Homo sapiens
tggccttttagaaag

SEQ ID NO: 1002953 - DNA, 15 bp, Homo sapiens
atggccttttagaaa

SEQ ID NO: 1002954 - DNA, 15 bp, Homo sapiens
gatggccttttagaa

SEQ ID NO: 1002955 - DNA, 15 bp, Homo sapiens
ggatggccttttaga

SEQ ID NO: 1002956 - DNA, 15 bp, Homo sapiens
cggatggccttttag

SEQ ID NO: 1002957 - DNA, 15 bp, Homo sapiens
acggatggcctttta

SEQ ID NO: 1002958 - DNA, 15 bp, Homo sapiens
cacggatggcctttt

SEQ ID NO: 1002959 - DNA, 15 bp, Homo sapiens
acacggatggccttt

SEQ ID NO: 1002960 - DNA, 15 bp, Homo sapiens
tacacggatggcctt

SEQ ID NO: 1002961 - DNA, 15 bp, Homo sapiens
atacacggatggcct

SEQ ID NO: 1002962 - DNA, 15 bp, Homo sapiens
aatacacggatggcc

SEQ ID NO: 1002963 - DNA, 15 bp, Homo sapiens
aaatacacggatggc

SEQ ID NO: 1002964 - DNA, 15 bp, Homo sapiens
aaaatacacggatgg

SEQ ID NO: 1002965 - DNA, 15 bp, Homo sapiens
aaaaatacacggatg

SEQ ID NO: 1002966 - DNA, 15 bp, Homo sapiens
taaaaatacacggat

SEQ ID NO: 1002967 - DNA, 15 bp, Homo sapiens
ctaaaaatacacgga

SEQ ID NO: 1002968 - DNA, 15 bp, Homo sapiens
gctaaaaatacacgg

SEQ ID NO: 1002969 - DNA, 15 bp, Homo sapiens
agctaaaaatacacg

SEQ ID NO: 1002970 - DNA, 15 bp, Homo sapiens
aagctaaaaatacac

SEQ ID NO: 1002971 - DNA, 15 bp, Homo sapiens
gaagctaaaaataca

SEQ ID NO: 1002972 - DNA, 15 bp, Homo sapiens
ggaagctaaaaatac

SEQ ID NO: 1002973 - DNA, 15 bp, Homo sapiens
aggaagctaaaaata

SEQ ID NO: 1002974 - DNA, 15 bp, Homo sapiens
caggaagctaaaaat

SEQ ID NO: 1002975 - DNA, 15 bp, Homo sapiens
tcaggaagctaaaaa

SEQ ID NO: 1002976 - DNA, 15 bp, Homo sapiens
atcaggaagctaaaa

SEQ ID NO: 1002977 - DNA, 15 bp, Homo sapiens
aatcaggaagctaaa

SEQ ID NO: 1002978 - DNA, 15 bp, Homo sapiens
aaatcaggaagctaa

SEQ ID NO: 1002979 - DNA, 15 bp, Homo sapiens
aaaatcaggaagcta

SEQ ID NO: 1002980 - DNA, 15 bp, Homo sapiens
aaaaatcaggaagct

SEQ ID NO: 1002981 - DNA, 15 bp, Homo sapiens
aaaaaatcaggaagc

SEQ ID NO: 1002982 - DNA, 15 bp, Homo sapiens
aaaaaaatcaggaag

SEQ ID NO: 1002983 - DNA, 15 bp, Homo sapiens
gaaaaaaatcaggaa

SEQ ID NO: 1002984 - DNA, 15 bp, Homo sapiens
agaaaaaaatcagga

SEQ ID NO: 1002985 - DNA, 15 bp, Homo sapiens
gagaaaaaaatcagg

SEQ ID NO: 1002986 - DNA, 15 bp, Homo sapiens
agagaaaaaaatcag

SEQ ID NO: 1002987 - DNA, 15 bp, Homo sapiens
tagagaaaaaaatca

SEQ ID NO: 1002988 - DNA, 15 bp, Homo sapiens
atagagaaaaaaatc

SEQ ID NO: 1002989 - DNA, 15 bp, Homo sapiens
gatagagaaaaaaat

SEQ ID NO: 1002990 - DNA, 15 bp, Homo sapiens
cgatagagaaaaaaa

SEQ ID NO: 1002991 - DNA, 15 bp, Homo sapiens
gcgatagagaaaaaa

SEQ ID NO: 1002992 - DNA, 15 bp, Homo sapiens
tgcgatagagaaaaa

SEQ ID NO: 1002993 - DNA, 15 bp, Homo sapiens
ctgcgatagagaaaa

SEQ ID NO: 1002994 - DNA, 15 bp, Homo sapiens
actgcgatagagaaa

SEQ ID NO: 1002995 - DNA, 15 bp, Homo sapiens
gactgcgatagagaa

SEQ ID NO: 1002996 - DNA, 15 bp, Homo sapiens
agactgcgatagaga

SEQ ID NO: 1002997 - DNA, 15 bp, Homo sapiens
gagactgcgatagag

SEQ ID NO: 1002998 - DNA, 15 bp, Homo sapiens
agagactgcgataga

SEQ ID NO: 1002999 - DNA, 15 bp, Homo sapiens
aagagactgcgatag

SEQ ID NO: 1003000 - DNA, 15 bp, Homo sapiens
aaagagactgcgata

SEQ ID NO: 1003001 - DNA, 15 bp, Homo sapiens
caaagagactgcgat

SEQ ID NO: 1003002 - DNA, 15 bp, Homo sapiens
tcaaagagactgcga

SEQ ID NO: 1003003 - DNA, 15 bp, Homo sapiens
ttcaaagagactgcg

SEQ ID NO: 1003004 - DNA, 15 bp, Homo sapiens
cttcaaagagactgc

SEQ ID NO: 1003005 - DNA, 15 bp, Homo sapiens
gcttcaaagagactg

SEQ ID NO: 1003006 - DNA, 15 bp, Homo sapiens
ggcttcaaagagact

SEQ ID NO: 1003007 - DNA, 15 bp, Homo sapiens
tggcttcaaagagac

SEQ ID NO: 1003008 - DNA, 15 bp, Homo sapiens
ctggcttcaaagaga

SEQ ID NO: 1003009 - DNA, 15 bp, Homo sapiens
cctggcttcaaagag

SEQ ID NO: 1003010 - DNA, 15 bp, Homo sapiens
acctggcttcaaaga

SEQ ID NO: 1003011 - DNA, 15 bp, Homo sapiens
cacctggcttcaaag

SEQ ID NO: 1003012 - DNA, 15 bp, Homo sapiens
tcacctggcttcaaa

SEQ ID NO: 1003013 - DNA, 15 bp, Homo sapiens
ttcacctggcttcaa

SEQ ID NO: 1003014 - DNA, 15 bp, Homo sapiens
attcacctggcttca

SEQ ID NO: 1003015 - DNA, 15 bp, Homo sapiens
aattcacctggcttc

SEQ ID NO: 1003016 - DNA, 15 bp, Homo sapiens
aaattcacctggctt

SEQ ID NO: 1003017 - DNA, 15 bp, Homo sapiens
aaaattcacctggct

SEQ ID NO: 1003018 - DNA, 15 bp, Homo sapiens
taaaattcacctggc

SEQ ID NO: 1003019 - DNA, 15 bp, Homo sapiens
ctaaaattcacctgg

SEQ ID NO: 1003020 - DNA, 15 bp, Homo sapiens
cctaaaattcacctg

SEQ ID NO: 1003021 - DNA, 15 bp, Homo sapiens
gcctaaaattcacct

SEQ ID NO: 1003022 - DNA, 15 bp, Homo sapiens
ggcctaaaattcacc

SEQ ID NO: 1003023 - DNA, 15 bp, Homo sapiens
aggcctaaaattcac

SEQ ID NO: 1003024 - DNA, 15 bp, Homo sapiens
aaggcctaaaattca

SEQ ID NO: 1003025 - DNA, 15 bp, Homo sapiens
caaggcctaaaattc

SEQ ID NO: 1003026 - DNA, 15 bp, Homo sapiens
ccaaggcctaaaatt

SEQ ID NO: 1003027 - DNA, 15 bp, Homo sapiens
gccaaggcctaaaat

SEQ ID NO: 1003028 - DNA, 15 bp, Homo sapiens
tgccaaggcctaaaa

SEQ ID NO: 1003029 - DNA, 15 bp, Homo sapiens
ttgccaaggcctaaa

SEQ ID NO: 1003030 - DNA, 15 bp, Homo sapiens
attgccaaggcctaa

SEQ ID NO: 1003031 - DNA, 15 bp, Homo sapiens
aattgccaaggccta

SEQ ID NO: 1003032 - DNA, 15 bp, Homo sapiens
aaattgccaaggcct

SEQ ID NO: 1003033 - DNA, 15 bp, Homo sapiens
aaaattgccaaggcc

SEQ ID NO: 1003034 - DNA, 15 bp, Homo sapiens
gaaaattgccaaggc

SEQ ID NO: 1003035 - DNA, 15 bp, Homo sapiens
agaaaattgccaagg

SEQ ID NO: 1003036 - DNA, 15 bp, Homo sapiens
aagaaaattgccaag

SEQ ID NO: 1003037 - DNA, 15 bp, Homo sapiens
aaagaaaattgccaa

SEQ ID NO: 1003038 - DNA, 15 bp, Homo sapiens
aaaagaaaattgcca

SEQ ID NO: 1003039 - DNA, 15 bp, Homo sapiens
aaaaagaaaattgcc

SEQ ID NO: 1003040 - DNA, 15 bp, Homo sapiens
taaaaagaaaattgc

SEQ ID NO: 1003041 - DNA, 15 bp, Homo sapiens
ataaaaagaaaattg

SEQ ID NO: 1003042 - DNA, 15 bp, Homo sapiens
aataaaaagaaaatt

SEQ ID NO: 1003043 - DNA, 15 bp, Homo sapiens
caataaaaagaaaat

SEQ ID NO: 1003044 - DNA, 15 bp, Homo sapiens
gcaataaaaagaaaa

SEQ ID NO: 1003045 - DNA, 15 bp, Homo sapiens
tgcaataaaaagaaa

SEQ ID NO: 1003046 - DNA, 15 bp, Homo sapiens
ttgcaataaaaagaa

SEQ ID NO: 1003047 - DNA, 15 bp, Homo sapiens
attgcaataaaaaga

SEQ ID NO: 1003048 - DNA, 15 bp, Homo sapiens
cattgcaataaaaag

SEQ ID NO: 1003049 - DNA, 15 bp, Homo sapiens
ccattgcaataaaaa

SEQ ID NO: 1003050 - DNA, 15 bp, Homo sapiens
cccattgcaataaaa

SEQ ID NO: 1003051 - DNA, 15 bp, Homo sapiens
tcccattgcaataaa

SEQ ID NO: 1003052 - DNA, 15 bp, Homo sapiens
ttcccattgcaataa

SEQ ID NO: 1003053 - DNA, 15 bp, Homo sapiens
cttcccattgcaata

SEQ ID NO: 1003054 - DNA, 15 bp, Homo sapiens
ccttcccattgcaat

SEQ ID NO: 1003055 - DNA, 15 bp, Homo sapiens
accttcccattgcaa

SEQ ID NO: 1003056 - DNA, 15 bp, Homo sapiens
gaccttcccattgca

SEQ ID NO: 1003057 - DNA, 15 bp, Homo sapiens
tgaccttcccattgc

SEQ ID NO: 1003058 - DNA, 15 bp, Homo sapiens
ttgaccttcccattg

SEQ ID NO: 1003059 - DNA, 15 bp, Homo sapiens
cttgaccttcccatt

SEQ ID NO: 1003060 - DNA, 15 bp, Homo sapiens
tcttgaccttcccat

SEQ ID NO: 1003061 - DNA, 15 bp, Homo sapiens
gtcttgaccttccca

SEQ ID NO: 1003062 - DNA, 15 bp, Homo sapiens
tgtcttgaccttccc

SEQ ID NO: 1003063 - DNA, 15 bp, Homo sapiens
gtgtcttgaccttcc

SEQ ID NO: 1003064 - DNA, 15 bp, Homo sapiens
agtgtcttgaccttc

SEQ ID NO: 1003065 - DNA, 15 bp, Homo sapiens
cagtgtcttgacctt

SEQ ID NO: 1003066 - DNA, 15 bp, Homo sapiens
tcagtgtcttgacct

SEQ ID NO: 1003067 - DNA, 15 bp, Homo sapiens
ctcagtgtcttgacc

SEQ ID NO: 1003068 - DNA, 15 bp, Homo sapiens
tctcagtgtcttgac

SEQ ID NO: 1003069 - DNA, 15 bp, Homo sapiens
ctctcagtgtcttga

SEQ ID NO: 1003070 - DNA, 15 bp, Homo sapiens
actctcagtgtcttg

SEQ ID NO: 1003071 - DNA, 15 bp, Homo sapiens
gactctcagtgtctt

SEQ ID NO: 1003072 - DNA, 15 bp, Homo sapiens
tgactctcagtgtct

SEQ ID NO: 1003073 - DNA, 15 bp, Homo sapiens
gtgactctcagtgtc

SEQ ID NO: 1003074 - DNA, 15 bp, Homo sapiens
ggtgactctcagtgt

SEQ ID NO: 1003075 - DNA, 15 bp, Homo sapiens
gggtgactctcagtg

SEQ ID NO: 1003076 - DNA, 15 bp, Homo sapiens
tgggtgactctcagt

SEQ ID NO: 1003077 - DNA, 15 bp, Homo sapiens
ttgggtgactctcag

SEQ ID NO: 1003078 - DNA, 15 bp, Homo sapiens
tttgggtgactctca

SEQ ID NO: 1003079 - DNA, 15 bp, Homo sapiens
ttttgggtgactctc

SEQ ID NO: 1003080 - DNA, 15 bp, Homo sapiens
gttttgggtgactct

SEQ ID NO: 1003081 - DNA, 15 bp, Homo sapiens
tgttttgggtgactc

SEQ ID NO: 1003082 - DNA, 15 bp, Homo sapiens
atgttttgggtgact

SEQ ID NO: 1003083 - DNA, 15 bp, Homo sapiens
tatgttttgggtgac

SEQ ID NO: 1003084 - DNA, 15 bp, Homo sapiens
atatgttttgggtga

SEQ ID NO: 1003085 - DNA, 15 bp, Homo sapiens
gatatgttttgggtg

SEQ ID NO: 1003086 - DNA, 15 bp, Homo sapiens
ggatatgttttgggt

SEQ ID NO: 1003087 - DNA, 15 bp, Homo sapiens
tggatatgttttggg

SEQ ID NO: 1003088 - DNA, 15 bp, Homo sapiens
atggatatgttttgg

SEQ ID NO: 1003089 - DNA, 15 bp, Homo sapiens
gatggatatgttttg

SEQ ID NO: 1003090 - DNA, 15 bp, Homo sapiens
ggatggatatgtttt

SEQ ID NO: 1003091 - DNA, 15 bp, Homo sapiens
tggatggatatgttt

SEQ ID NO: 1003092 - DNA, 15 bp, Homo sapiens
ttggatggatatgtt

SEQ ID NO: 1003093 - DNA, 15 bp, Homo sapiens
tttggatggatatgt

SEQ ID NO: 1003094 - DNA, 15 bp, Homo sapiens
ttttggatggatatg

SEQ ID NO: 1003095 - DNA, 15 bp, Homo sapiens
attttggatggatat

SEQ ID NO: 1003096 - DNA, 15 bp, Homo sapiens
cattttggatggata

SEQ ID NO: 1003097 - DNA, 15 bp, Homo sapiens
tcattttggatggat

SEQ ID NO: 1003098 - DNA, 15 bp, Homo sapiens
atcattttggatgga

SEQ ID NO: 1003099 - DNA, 15 bp, Homo sapiens
tatcattttggatgg

SEQ ID NO: 1003100 - DNA, 15 bp, Homo sapiens
gtatcattttggatg

SEQ ID NO: 1003101 - DNA, 15 bp, Homo sapiens
tgtatcattttggat

SEQ ID NO: 1003102 - DNA, 15 bp, Homo sapiens
ttgtatcattttgga

SEQ ID NO: 1003103 - DNA, 15 bp, Homo sapiens
attgtatcattttgg

SEQ ID NO: 1003104 - DNA, 15 bp, Homo sapiens
aattgtatcattttg

SEQ ID NO: 1003105 - DNA, 15 bp, Homo sapiens
aaattgtatcatttt

SEQ ID NO: 1003106 - DNA, 15 bp, Homo sapiens
aaaattgtatcattt

SEQ ID NO: 1003107 - DNA, 15 bp, Homo sapiens
taaaattgtatcatt

SEQ ID NO: 1003108 - DNA, 15 bp, Homo sapiens
ctaaaattgtatcat

SEQ ID NO: 1003109 - DNA, 15 bp, Homo sapiens
cctaaaattgtatca

SEQ ID NO: 1003110 - DNA, 15 bp, Homo sapiens
ccctaaaattgtatc

SEQ ID NO: 1003111 - DNA, 15 bp, Homo sapiens
accctaaaattgtat

SEQ ID NO: 1003112 - DNA, 15 bp, Homo sapiens
aaccctaaaattgta

SEQ ID NO: 1003113 - DNA, 15 bp, Homo sapiens
aaaccctaaaattgt

SEQ ID NO: 1003114 - DNA, 15 bp, Homo sapiens
taaaccctaaaattg

SEQ ID NO: 1003115 - DNA, 15 bp, Homo sapiens
ataaaccctaaaatt

SEQ ID NO: 1003116 - DNA, 15 bp, Homo sapiens
aataaaccctaaaat

SEQ ID NO: 1003117 - DNA, 15 bp, Homo sapiens
aaataaaccctaaaa

SEQ ID NO: 1003118 - DNA, 15 bp, Homo sapiens
aaaataaaccctaaa

SEQ ID NO: 1003119 - DNA, 15 bp, Homo sapiens
aaaaataaaccctaa

SEQ ID NO: 1003120 - DNA, 15 bp, Homo sapiens
taaaaataaacccta

SEQ ID NO: 1003121 - DNA, 15 bp, Homo sapiens
ttaaaaataaaccct

SEQ ID NO: 1003122 - DNA, 15 bp, Homo sapiens
cttaaaaataaaccc

SEQ ID NO: 1003123 - DNA, 15 bp, Homo sapiens
acttaaaaataaacc

SEQ ID NO: 1003124 - DNA, 15 bp, Homo sapiens
cacttaaaaataaac

SEQ ID NO: 1003125 - DNA, 15 bp, Homo sapiens
tcacttaaaaataaa

SEQ ID NO: 1003126 - DNA, 15 bp, Homo sapiens
atcacttaaaaataa

SEQ ID NO: 1003127 - DNA, 15 bp, Homo sapiens
tatcacttaaaaata

SEQ ID NO: 1003128 - DNA, 15 bp, Homo sapiens
gtatcacttaaaaat

SEQ ID NO: 1003129 - DNA, 15 bp, Homo sapiens
ggtatcacttaaaaa

SEQ ID NO: 1003130 - DNA, 15 bp, Homo sapiens
gggtatcacttaaaa

SEQ ID NO: 1003131 - DNA, 15 bp, Homo sapiens
tgggtatcacttaaa

SEQ ID NO: 1003132 - DNA, 15 bp, Homo sapiens
ttgggtatcacttaa

SEQ ID NO: 1003133 - DNA, 15 bp, Homo sapiens
cttgggtatcactta

SEQ ID NO: 1003134 - DNA, 15 bp, Homo sapiens
acttgggtatcactt

SEQ ID NO: 1003135 - DNA, 15 bp, Homo sapiens
aacttgggtatcact

SEQ ID NO: 1003136 - DNA, 15 bp, Homo sapiens
taacttgggtatcac

SEQ ID NO: 1003137 - DNA, 15 bp, Homo sapiens
ataacttgggtatca

SEQ ID NO: 1003138 - DNA, 15 bp, Homo sapiens
aataacttgggtatc

SEQ ID NO: 1003139 - DNA, 15 bp, Homo sapiens
aaataacttgggtat

SEQ ID NO: 1003140 - DNA, 15 bp, Homo sapiens
caaataacttgggta

SEQ ID NO: 1003141 - DNA, 15 bp, Homo sapiens
gcaaataacttgggt

SEQ ID NO: 1003142 - DNA, 15 bp, Homo sapiens
agcaaataacttggg

SEQ ID NO: 1003143 - DNA, 15 bp, Homo sapiens
tagcaaataacttgg

SEQ ID NO: 1003144 - DNA, 15 bp, Homo sapiens
ttagcaaataacttg

SEQ ID NO: 1003145 - DNA, 15 bp, Homo sapiens
cttagcaaataactt

SEQ ID NO: 1003146 - DNA, 15 bp, Homo sapiens
tcttagcaaataact

SEQ ID NO: 1003147 - DNA, 15 bp, Homo sapiens
ttcttagcaaataac

SEQ ID NO: 1003148 - DNA, 15 bp, Homo sapiens
gttcttagcaaataa

SEQ ID NO: 1003149 - DNA, 15 bp, Homo sapiens
ggttcttagcaaata

SEQ ID NO: 1003150 - DNA, 15 bp, Homo sapiens
aggttcttagcaaat

SEQ ID NO: 1003151 - DNA, 15 bp, Homo sapiens
taggttcttagcaaa

SEQ ID NO: 1003152 - DNA, 15 bp, Homo sapiens
ataggttcttagcaa

SEQ ID NO: 1003153 - DNA, 15 bp, Homo sapiens
cataggttcttagca

SEQ ID NO: 1003154 - DNA, 15 bp, Homo sapiens
gcataggttcttagc

SEQ ID NO: 1003155 - DNA, 15 bp, Homo sapiens
ggcataggttcttag

SEQ ID NO: 1003156 - DNA, 15 bp, Homo sapiens
tggcataggttctta

SEQ ID NO: 1003157 - DNA, 15 bp, Homo sapiens
ctggcataggttctt

SEQ ID NO: 1003158 - DNA, 15 bp, Homo sapiens
actggcataggttct

SEQ ID NO: 1003159 - DNA, 15 bp, Homo sapiens
cactggcataggttc

SEQ ID NO: 1003160 - DNA, 15 bp, Homo sapiens
acactggcataggtt

SEQ ID NO: 1003161 - DNA, 15 bp, Homo sapiens
cacactggcataggt

SEQ ID NO: 1003162 - DNA, 15 bp, Homo sapiens
acacactggcatagg

SEQ ID NO: 1003163 - DNA, 15 bp, Homo sapiens
aacacactggcatag

SEQ ID NO: 1003164 - DNA, 15 bp, Homo sapiens
aaacacactggcata

SEQ ID NO: 1003165 - DNA, 15 bp, Homo sapiens
taaacacactggcat

SEQ ID NO: 1003166 - DNA, 15 bp, Homo sapiens
ataaacacactggca

SEQ ID NO: 1003167 - DNA, 15 bp, Homo sapiens
cataaacacactggc

SEQ ID NO: 1003168 - DNA, 15 bp, Homo sapiens
tcataaacacactgg

SEQ ID NO: 1003169 - DNA, 15 bp, Homo sapiens
ctcataaacacactg

SEQ ID NO: 1003170 - DNA, 15 bp, Homo sapiens
tctcataaacacact

SEQ ID NO: 1003171 - DNA, 15 bp, Homo sapiens
ttctcataaacacac

SEQ ID NO: 1003172 - DNA, 15 bp, Homo sapiens
attctcataaacaca

SEQ ID NO: 1003173 - DNA, 15 bp, Homo sapiens
aattctcataaacac

SEQ ID NO: 1003174 - DNA, 15 bp, Homo sapiens
aaattctcataaaca

SEQ ID NO: 1003175 - DNA, 15 bp, Homo sapiens
caaattctcataaac

SEQ ID NO: 1003176 - DNA, 15 bp, Homo sapiens
gcaaattctcataaa

SEQ ID NO: 1003177 - DNA, 15 bp, Homo sapiens
tgcaaattctcataa

SEQ ID NO: 1003178 - DNA, 15 bp, Homo sapiens
gtgcaaattctcata

SEQ ID NO: 1003179 - DNA, 15 bp, Homo sapiens
agtgcaaattctcat

SEQ ID NO: 1003180 - DNA, 15 bp, Homo sapiens
cagtgcaaattctca

SEQ ID NO: 1003181 - DNA, 15 bp, Homo sapiens
acagtgcaaattctc

SEQ ID NO: 1003182 - DNA, 15 bp, Homo sapiens
gacagtgcaaattct

SEQ ID NO: 1003183 - DNA, 15 bp, Homo sapiens
ggacagtgcaaattc

SEQ ID NO: 1003184 - DNA, 15 bp, Homo sapiens
gggacagtgcaaatt

SEQ ID NO: 1003185 - DNA, 15 bp, Homo sapiens
tgggacagtgcaaat

SEQ ID NO: 1003186 - DNA, 15 bp, Homo sapiens
gtgggacagtgcaaa

SEQ ID NO: 1003187 - DNA, 15 bp, Homo sapiens
tgtgggacagtgcaa

SEQ ID NO: 1003188 - DNA, 15 bp, Homo sapiens
gtgtgggacagtgca

SEQ ID NO: 1003189 - DNA, 15 bp, Homo sapiens
agtgtgggacagtgc

SEQ ID NO: 1003190 - DNA, 15 bp, Homo sapiens
cagtgtgggacagtg

SEQ ID NO: 1003191 - DNA, 15 bp, Homo sapiens
acagtgtgggacagt

SEQ ID NO: 1003192 - DNA, 15 bp, Homo sapiens
aacagtgtgggacag

SEQ ID NO: 1003193 - DNA, 15 bp, Homo sapiens
caacagtgtgggaca

SEQ ID NO: 1003194 - DNA, 15 bp, Homo sapiens
gcaacagtgtgggac

SEQ ID NO: 1003195 - DNA, 15 bp, Homo sapiens
ggcaacagtgtggga

SEQ ID NO: 1003196 - DNA, 15 bp, Homo sapiens
tggcaacagtgtggg

SEQ ID NO: 1003197 - DNA, 15 bp, Homo sapiens
gtggcaacagtgtgg

SEQ ID NO: 1003198 - DNA, 15 bp, Homo sapiens
ggtggcaacagtgtg

SEQ ID NO: 1003199 - DNA, 15 bp, Homo sapiens
tggtggcaacagtgt

SEQ ID NO: 1003200 - DNA, 15 bp, Homo sapiens
ctggtggcaacagtg

SEQ ID NO: 1003201 - DNA, 15 bp, Homo sapiens
gctggtggcaacagt

SEQ ID NO: 1003202 - DNA, 15 bp, Homo sapiens
ggctggtggcaacag

SEQ ID NO: 1003203 - DNA, 15 bp, Homo sapiens
tggctggtggcaaca

SEQ ID NO: 1003204 - DNA, 15 bp, Homo sapiens
gtggctggtggcaac

SEQ ID NO: 1003205 - DNA, 15 bp, Homo sapiens
tgtggctggtggcaa

SEQ ID NO: 1003206 - DNA, 15 bp, Homo sapiens
atgtggctggtggca

SEQ ID NO: 1003207 - DNA, 15 bp, Homo sapiens
catgtggctggtggc

SEQ ID NO: 1003208 - DNA, 15 bp, Homo sapiens
ccatgtggctggtgg

SEQ ID NO: 1003209 - DNA, 15 bp, Homo sapiens
cccatgtggctggtg

SEQ ID NO: 1003210 - DNA, 15 bp, Homo sapiens
tcccatgtggctggt

SEQ ID NO: 1003211 - DNA, 15 bp, Homo sapiens
gtcccatgtggctgg

SEQ ID NO: 1003212 - DNA, 15 bp, Homo sapiens
agtcccatgtggctg

SEQ ID NO: 1003213 - DNA, 15 bp, Homo sapiens
cagtcccatgtggct

SEQ ID NO: 1003214 - DNA, 15 bp, Homo sapiens
acagtcccatgtggc

SEQ ID NO: 1003215 - DNA, 15 bp, Homo sapiens
aacagtcccatgtgg

SEQ ID NO: 1003216 - DNA, 15 bp, Homo sapiens
aaacagtcccatgtg

SEQ ID NO: 1003217 - DNA, 15 bp, Homo sapiens
taaacagtcccatgt

SEQ ID NO: 1003218 - DNA, 15 bp, Homo sapiens
ttaaacagtcccatg

SEQ ID NO: 1003219 - DNA, 15 bp, Homo sapiens
tttaaacagtcccat

SEQ ID NO: 1003220 - DNA, 15 bp, Homo sapiens
atttaaacagtccca

SEQ ID NO: 1003221 - DNA, 15 bp, Homo sapiens
aatttaaacagtccc

SEQ ID NO: 1003222 - DNA, 15 bp, Homo sapiens
aaatttaaacagtcc

SEQ ID NO: 1003223 - DNA, 15 bp, Homo sapiens
taaatttaaacagtc

SEQ ID NO: 1003224 - DNA, 15 bp, Homo sapiens
ttaaatttaaacagt

SEQ ID NO: 1003225 - DNA, 15 bp, Homo sapiens
tttaaatttaaacag

SEQ ID NO: 1003226 - DNA, 15 bp, Homo sapiens
atttaaatttaaaca

SEQ ID NO: 1003227 - DNA, 15 bp, Homo sapiens
aatttaaatttaaac

SEQ ID NO: 1003228 - DNA, 15 bp, Homo sapiens
aaatttaaatttaaa

SEQ ID NO: 1003229 - DNA, 15 bp, Homo sapiens
aaaatttaaatttaa

SEQ ID NO: 1003230 - DNA, 15 bp, Homo sapiens
taaaatttaaattta

SEQ ID NO: 1003231 - DNA, 15 bp, Homo sapiens
gtaaaatttaaattt

SEQ ID NO: 1003232 - DNA, 15 bp, Homo sapiens
tgtaaaatttaaatt

SEQ ID NO: 1003233 - DNA, 15 bp, Homo sapiens
ttgtaaaatttaaat

SEQ ID NO: 1003234 - DNA, 15 bp, Homo sapiens
tttgtaaaatttaaa

SEQ ID NO: 1003235 - DNA, 15 bp, Homo sapiens
atttgtaaaatttaa

SEQ ID NO: 1003236 - DNA, 15 bp, Homo sapiens
aatttgtaaaattta

SEQ ID NO: 1003237 - DNA, 15 bp, Homo sapiens
taatttgtaaaattt

SEQ ID NO: 1003238 - DNA, 15 bp, Homo sapiens
ctaatttgtaaaatt

SEQ ID NO: 1003239 - DNA, 15 bp, Homo sapiens
gctaatttgtaaaat

SEQ ID NO: 1003240 - DNA, 15 bp, Homo sapiens
ggctaatttgtaaaa

SEQ ID NO: 1003241 - DNA, 15 bp, Homo sapiens
tggctaatttgtaaa

SEQ ID NO: 1003242 - DNA, 15 bp, Homo sapiens
ctggctaatttgtaa

SEQ ID NO: 1003243 - DNA, 15 bp, Homo sapiens
actggctaatttgta

SEQ ID NO: 1003244 - DNA, 15 bp, Homo sapiens
gactggctaatttgt

SEQ ID NO: 1003245 - DNA, 15 bp, Homo sapiens
tgactggctaatttg

SEQ ID NO: 1003246 - DNA, 15 bp, Homo sapiens
atgactggctaattt

SEQ ID NO: 1003247 - DNA, 15 bp, Homo sapiens
catgactggctaatt

SEQ ID NO: 1003248 - DNA, 15 bp, Homo sapiens
ccatgactggctaat

SEQ ID NO: 1003249 - DNA, 15 bp, Homo sapiens
accatgactggctaa

SEQ ID NO: 1003250 - DNA, 15 bp, Homo sapiens
caccatgactggcta

SEQ ID NO: 1003251 - DNA, 15 bp, Homo sapiens
ccaccatgactggct

SEQ ID NO: 1003252 - DNA, 15 bp, Homo sapiens
accaccatgactggc

SEQ ID NO: 1003253 - DNA, 15 bp, Homo sapiens
caccaccatgactgg

SEQ ID NO: 1003254 - DNA, 15 bp, Homo sapiens
acaccaccatgactg

SEQ ID NO: 1003255 - DNA, 15 bp, Homo sapiens
cacaccaccatgact

SEQ ID NO: 1003256 - DNA, 15 bp, Homo sapiens
gcacaccaccatgac

SEQ ID NO: 1003257 - DNA, 15 bp, Homo sapiens
tgcacaccaccatga

SEQ ID NO: 1003258 - DNA, 15 bp, Homo sapiens
gtgcacaccaccatg

SEQ ID NO: 1003259 - DNA, 15 bp, Homo sapiens
agtgcacaccaccat

SEQ ID NO: 1003260 - DNA, 15 bp, Homo sapiens
aagtgcacaccacca

SEQ ID NO: 1003261 - DNA, 15 bp, Homo sapiens
caagtgcacaccacc

SEQ ID NO: 1003262 - DNA, 15 bp, Homo sapiens
acaagtgcacaccac

SEQ ID NO: 1003263 - DNA, 15 bp, Homo sapiens
tacaagtgcacacca

SEQ ID NO: 1003264 - DNA, 15 bp, Homo sapiens
ctacaagtgcacacc

SEQ ID NO: 1003265 - DNA, 15 bp, Homo sapiens
actacaagtgcacac

SEQ ID NO: 1003266 - DNA, 15 bp, Homo sapiens
gactacaagtgcaca

SEQ ID NO: 1003267 - DNA, 15 bp, Homo sapiens
ggactacaagtgcac

SEQ ID NO: 1003268 - DNA, 15 bp, Homo sapiens
gggactacaagtgca

SEQ ID NO: 1003269 - DNA, 15 bp, Homo sapiens
tgggactacaagtgc

SEQ ID NO: 1003270 - DNA, 15 bp, Homo sapiens
ctgggactacaagtg

SEQ ID NO: 1003271 - DNA, 15 bp, Homo sapiens
tagctgggactacaa

SEQ ID NO: 1003272 - DNA, 15 bp, Homo sapiens
taagtagctgggact

SEQ ID NO: 1003273 - DNA, 15 bp, Homo sapiens
ctaagtagctgggac

SEQ ID NO: 1003274 - DNA, 15 bp, Homo sapiens
aatcctcttgcctca

SEQ ID NO: 1003275 - DNA, 15 bp, Homo sapiens
tctgggctcaagcaa

SEQ ID NO: 1003276 - DNA, 15 bp, Homo sapiens
ttctgggctcaagca

SEQ ID NO: 1003277 - DNA, 15 bp, Homo sapiens
attgaacttctgggc

SEQ ID NO: 1003278 - DNA, 15 bp, Homo sapiens
tattgaacttctggg

SEQ ID NO: 1003279 - DNA, 15 bp, Homo sapiens
gtattgaacttctgg

SEQ ID NO: 1003280 - DNA, 15 bp, Homo sapiens
agtattgaacttctg

SEQ ID NO: 1003281 - DNA, 15 bp, Homo sapiens
cagtattgaacttct

SEQ ID NO: 1003282 - DNA, 15 bp, Homo sapiens
gcagtattgaacttc

SEQ ID NO: 1003283 - DNA, 15 bp, Homo sapiens
tgcagtattgaactt

SEQ ID NO: 1003284 - DNA, 15 bp, Homo sapiens
ctgcagtattgaact

SEQ ID NO: 1003285 - DNA, 15 bp, Homo sapiens
gctgcagtattgaac

SEQ ID NO: 1003286 - DNA, 15 bp, Homo sapiens
tgctgcagtattgaa

SEQ ID NO: 1003287 - DNA, 15 bp, Homo sapiens
ttgctgcagtattga

SEQ ID NO: 1003288 - DNA, 15 bp, Homo sapiens
cttgctgcagtattg

SEQ ID NO: 1003289 - DNA, 15 bp, Homo sapiens
gcttgctgcagtatt

SEQ ID NO: 1003290 - DNA, 15 bp, Homo sapiens
agcttgctgcagtat

SEQ ID NO: 1003291 - DNA, 15 bp, Homo sapiens
tagcttgctgcagta

SEQ ID NO: 1003292 - DNA, 15 bp, Homo sapiens
atagcttgctgcagt

SEQ ID NO: 1003293 - DNA, 15 bp, Homo sapiens
catagcttgctgcag

SEQ ID NO: 1003294 - DNA, 15 bp, Homo sapiens
tcatagcttgctgca

SEQ ID NO: 1003295 - DNA, 15 bp, Homo sapiens
atcatagcttgctgc

SEQ ID NO: 1003296 - DNA, 15 bp, Homo sapiens
gatcatagcttgctg

SEQ ID NO: 1003297 - DNA, 15 bp, Homo sapiens
cgatcatagcttgct

SEQ ID NO: 1003298 - DNA, 15 bp, Homo sapiens
acgatcatagcttgc

SEQ ID NO: 1003299 - DNA, 15 bp, Homo sapiens
cacgatcatagcttg

SEQ ID NO: 1003300 - DNA, 15 bp, Homo sapiens
gcacgatcatagctt

SEQ ID NO: 1003301 - DNA, 15 bp, Homo sapiens
ggcacgatcatagct

SEQ ID NO: 1003302 - DNA, 15 bp, Homo sapiens
tggcacgatcatagc

SEQ ID NO: 1003303 - DNA, 15 bp, Homo sapiens
gtggcacgatcatag

SEQ ID NO: 1003304 - DNA, 15 bp, Homo sapiens
agtggcacgatcata

SEQ ID NO: 1003305 - DNA, 15 bp, Homo sapiens
cagtggcacgatcat

SEQ ID NO: 1003306 - DNA, 15 bp, Homo sapiens
acagtggcacgatca

SEQ ID NO: 1003307 - DNA, 15 bp, Homo sapiens
tcaggctggagtaca

SEQ ID NO: 1003308 - DNA, 15 bp, Homo sapiens
ctcaggctggagtac

SEQ ID NO: 1003309 - DNA, 15 bp, Homo sapiens
actcaggctggagta

SEQ ID NO: 1003310 - DNA, 15 bp, Homo sapiens
cactcaggctggagt

SEQ ID NO: 1003311 - DNA, 15 bp, Homo sapiens
tcactcaggctggag

SEQ ID NO: 1003312 - DNA, 15 bp, Homo sapiens
tctgtcactcaggct

SEQ ID NO: 1003313 - DNA, 15 bp, Homo sapiens
ttctgtcactcaggc

SEQ ID NO: 1003314 - DNA, 15 bp, Homo sapiens
attctgtcactcagg

SEQ ID NO: 1003315 - DNA, 15 bp, Homo sapiens
cattctgtcactcag

SEQ ID NO: 1003316 - DNA, 15 bp, Homo sapiens
tcattctgtcactca

SEQ ID NO: 1003317 - DNA, 15 bp, Homo sapiens
ctcattctgtcactc

SEQ ID NO: 1003318 - DNA, 15 bp, Homo sapiens
tctcattctgtcact

SEQ ID NO: 1003319 - DNA, 15 bp, Homo sapiens
ggtctcattctgtca

SEQ ID NO: 1003320 - DNA, 15 bp, Homo sapiens
aggtctcattctgtc

SEQ ID NO: 1003321 - DNA, 15 bp, Homo sapiens
gaggtctcattctgt

SEQ ID NO: 1003322 - DNA, 15 bp, Homo sapiens
tgaggtctcattctg

SEQ ID NO: 1003323 - DNA, 15 bp, Homo sapiens
atgaggtctcattct

SEQ ID NO: 1003324 - DNA, 15 bp, Homo sapiens
gatgaggtctcattc

SEQ ID NO: 1003325 - DNA, 15 bp, Homo sapiens
agatgaggtctcatt

SEQ ID NO: 1003326 - DNA, 15 bp, Homo sapiens
gagatgaggtctcat

SEQ ID NO: 1003327 - DNA, 15 bp, Homo sapiens
agagatgaggtctca

SEQ ID NO: 1003328 - DNA, 15 bp, Homo sapiens
aagagatgaggtctc

SEQ ID NO: 1003329 - DNA, 15 bp, Homo sapiens
gaagagatgaggtct

SEQ ID NO: 1003330 - DNA, 15 bp, Homo sapiens
tgaagagatgaggtc

SEQ ID NO: 1003331 - DNA, 15 bp, Homo sapiens
ttgaagagatgaggt

SEQ ID NO: 1003332 - DNA, 15 bp, Homo sapiens
tttgaagagatgagg

SEQ ID NO: 1003333 - DNA, 15 bp, Homo sapiens
ttttgaagagatgag

SEQ ID NO: 1003334 - DNA, 15 bp, Homo sapiens
tttttgaagagatga

SEQ ID NO: 1003335 - DNA, 15 bp, Homo sapiens
ttttttgaagagatg

SEQ ID NO: 1003336 - DNA, 15 bp, Homo sapiens
tttttttgaagagat

SEQ ID NO: 1003337 - DNA, 15 bp, Homo sapiens
ttttttttgaagaga

SEQ ID NO: 1003338 - DNA, 15 bp, Homo sapiens
tttttttttgaagag

SEQ ID NO: 1003339 - DNA, 15 bp, Homo sapiens
ctttttttttgaaga

SEQ ID NO: 1003340 - DNA, 15 bp, Homo sapiens
tctttttttttgaag

SEQ ID NO: 1003341 - DNA, 15 bp, Homo sapiens
ttctttttttttgaa

SEQ ID NO: 1003342 - DNA, 15 bp, Homo sapiens
taatttttttctttt

SEQ ID NO: 1003343 - DNA, 15 bp, Homo sapiens
ttaatttttttcttt

SEQ ID NO: 1003344 - DNA, 15 bp, Homo sapiens
tttaatttttttctt

SEQ ID NO: 1003345 - DNA, 15 bp, Homo sapiens
ttttaatttttttct

SEQ ID NO: 1003346 - DNA, 15 bp, Homo sapiens
attttaatttttttc

SEQ ID NO: 1003347 - DNA, 15 bp, Homo sapiens
tcatattttaatttt

SEQ ID NO: 1003348 - DNA, 15 bp, Homo sapiens
ttcatattttaattt

SEQ ID NO: 1003349 - DNA, 15 bp, Homo sapiens
cttcatattttaatt

SEQ ID NO: 1003350 - DNA, 15 bp, Homo sapiens
acttcatattttaat

SEQ ID NO: 1003351 - DNA, 15 bp, Homo sapiens
aacttcatattttaa

SEQ ID NO: 1003352 - DNA, 15 bp, Homo sapiens
aaacttcatatttta

SEQ ID NO: 1003353 - DNA, 15 bp, Homo sapiens
taaacttcatatttt

SEQ ID NO: 1003354 - DNA, 15 bp, Homo sapiens
ctaaacttcatattt

SEQ ID NO: 1003355 - DNA, 15 bp, Homo sapiens
actaaacttcatatt

SEQ ID NO: 1003356 - DNA, 15 bp, Homo sapiens
aactaaacttcatat

SEQ ID NO: 1003357 - DNA, 15 bp, Homo sapiens
gaactaaacttcata

SEQ ID NO: 1003358 - DNA, 15 bp, Homo sapiens
agaactaaacttcat

SEQ ID NO: 1003359 - DNA, 15 bp, Homo sapiens
aagaactaaacttca

SEQ ID NO: 1003360 - DNA, 15 bp, Homo sapiens
gaagaactaaacttc

SEQ ID NO: 1003361 - DNA, 15 bp, Homo sapiens
tgaagaactaaactt

SEQ ID NO: 1003362 - DNA, 15 bp, Homo sapiens
atgaagaactaaact

SEQ ID NO: 1003363 - DNA, 15 bp, Homo sapiens
aatgaagaactaaac

SEQ ID NO: 1003364 - DNA, 15 bp, Homo sapiens
gaatgaagaactaaa

SEQ ID NO: 1003365 - DNA, 15 bp, Homo sapiens
tgaatgaagaactaa

SEQ ID NO: 1003366 - DNA, 15 bp, Homo sapiens
gtgaatgaagaacta

SEQ ID NO: 1003367 - DNA, 15 bp, Homo sapiens
ggtgaatgaagaact

SEQ ID NO: 1003368 - DNA, 15 bp, Homo sapiens
gggtgaatgaagaac

SEQ ID NO: 1003369 - DNA, 15 bp, Homo sapiens
agggtgaatgaagaa

SEQ ID NO: 1003370 - DNA, 15 bp, Homo sapiens
tagggtgaatgaaga

SEQ ID NO: 1003371 - DNA, 15 bp, Homo sapiens
ttagggtgaatgaag

SEQ ID NO: 1003372 - DNA, 15 bp, Homo sapiens
gttagggtgaatgaa

SEQ ID NO: 1003373 - DNA, 15 bp, Homo sapiens
ggttagggtgaatga

SEQ ID NO: 1003374 - DNA, 15 bp, Homo sapiens
tggttagggtgaatg

SEQ ID NO: 1003375 - DNA, 15 bp, Homo sapiens
gtggttagggtgaat

SEQ ID NO: 1003376 - DNA, 15 bp, Homo sapiens
tgtggttagggtgaa

SEQ ID NO: 1003377 - DNA, 15 bp, Homo sapiens
atgtggttagggtga

SEQ ID NO: 1003378 - DNA, 15 bp, Homo sapiens
gatgtggttagggtg

SEQ ID NO: 1003379 - DNA, 15 bp, Homo sapiens
agatgtggttagggt

SEQ ID NO: 1003380 - DNA, 15 bp, Homo sapiens
gagatgtggttaggg

SEQ ID NO: 1003381 - DNA, 15 bp, Homo sapiens
ggagatgtggttagg

SEQ ID NO: 1003382 - DNA, 15 bp, Homo sapiens
tggagatgtggttag

SEQ ID NO: 1003383 - DNA, 15 bp, Homo sapiens
ctggagatgtggtta

SEQ ID NO: 1003384 - DNA, 15 bp, Homo sapiens
actggagatgtggtt

SEQ ID NO: 1003385 - DNA, 15 bp, Homo sapiens
cactggagatgtggt

SEQ ID NO: 1003386 - DNA, 15 bp, Homo sapiens
gcactggagatgtgg

SEQ ID NO: 1003387 - DNA, 15 bp, Homo sapiens
agcactggagatgtg

SEQ ID NO: 1003388 - DNA, 15 bp, Homo sapiens
gagcactggagatgt

SEQ ID NO: 1003389 - DNA, 15 bp, Homo sapiens
tgagcactggagatg

SEQ ID NO: 1003390 - DNA, 15 bp, Homo sapiens
ttgagcactggagat

SEQ ID NO: 1003391 - DNA, 15 bp, Homo sapiens
attgagcactggaga

SEQ ID NO: 1003392 - DNA, 15 bp, Homo sapiens
tattgagcactggag

SEQ ID NO: 1003393 - DNA, 15 bp, Homo sapiens
ttattgagcactgga

SEQ ID NO: 1003394 - DNA, 15 bp, Homo sapiens
gttattgagcactgg

SEQ ID NO: 1003395 - DNA, 15 bp, Homo sapiens
agttattgagcactg

SEQ ID NO: 1003396 - DNA, 15 bp, Homo sapiens
tagttattgagcact

SEQ ID NO: 1003397 - DNA, 15 bp, Homo sapiens
atagttattgagcac

SEQ ID NO: 1003398 - DNA, 15 bp, Homo sapiens
tatagttattgagca

SEQ ID NO: 1003399 - DNA, 15 bp, Homo sapiens
atatagttattgagc

SEQ ID NO: 1003400 - DNA, 15 bp, Homo sapiens
catatagttattgag

SEQ ID NO: 1003401 - DNA, 15 bp, Homo sapiens
acatatagttattga

SEQ ID NO: 1003402 - DNA, 15 bp, Homo sapiens
cacatatagttattg

SEQ ID NO: 1003403 - DNA, 15 bp, Homo sapiens
tcacatatagttatt

SEQ ID NO: 1003404 - DNA, 15 bp, Homo sapiens
gtcacatatagttat

SEQ ID NO: 1003405 - DNA, 15 bp, Homo sapiens
agtcacatatagtta

SEQ ID NO: 1003406 - DNA, 15 bp, Homo sapiens
gagtcacatatagtt

SEQ ID NO: 1003407 - DNA, 15 bp, Homo sapiens
tgagtcacatatagt

SEQ ID NO: 1003408 - DNA, 15 bp, Homo sapiens
atgagtcacatatag

SEQ ID NO: 1003409 - DNA, 15 bp, Homo sapiens
catgagtcacatata

SEQ ID NO: 1003410 - DNA, 15 bp, Homo sapiens
ccatgagtcacatat

SEQ ID NO: 1003411 - DNA, 15 bp, Homo sapiens
gccatgagtcacata

SEQ ID NO: 1003412 - DNA, 15 bp, Homo sapiens
agccatgagtcacat

SEQ ID NO: 1003413 - DNA, 15 bp, Homo sapiens
tagccatgagtcaca

SEQ ID NO: 1003414 - DNA, 15 bp, Homo sapiens
gtagccatgagtcac

SEQ ID NO: 1003415 - DNA, 15 bp, Homo sapiens
ggtagccatgagtca

SEQ ID NO: 1003416 - DNA, 15 bp, Homo sapiens
aggtagccatgagtc

SEQ ID NO: 1003417 - DNA, 15 bp, Homo sapiens
aaggtagccatgagt

SEQ ID NO: 1003418 - DNA, 15 bp, Homo sapiens
taaggtagccatgag

SEQ ID NO: 1003419 - DNA, 15 bp, Homo sapiens
ataaggtagccatga

SEQ ID NO: 1003420 - DNA, 15 bp, Homo sapiens
aataaggtagccatg

SEQ ID NO: 1003421 - DNA, 15 bp, Homo sapiens
taataaggtagccat

SEQ ID NO: 1003422 - DNA, 15 bp, Homo sapiens
ctaataaggtagcca

SEQ ID NO: 1003423 - DNA, 15 bp, Homo sapiens
gctaataaggtagcc

SEQ ID NO: 1003424 - DNA, 15 bp, Homo sapiens
tgctaataaggtagc

SEQ ID NO: 1003425 - DNA, 15 bp, Homo sapiens
atgctaataaggtag

SEQ ID NO: 1003426 - DNA, 15 bp, Homo sapiens
tatgctaataaggta

SEQ ID NO: 1003427 - DNA, 15 bp, Homo sapiens
ctatgctaataaggt

SEQ ID NO: 1003428 - DNA, 15 bp, Homo sapiens
tctatgctaataagg

SEQ ID NO: 1003429 - DNA, 15 bp, Homo sapiens
atctatgctaataag

SEQ ID NO: 1003430 - DNA, 15 bp, Homo sapiens
tatctatgctaataa

SEQ ID NO: 1003431 - DNA, 15 bp, Homo sapiens
atatctatgctaata

SEQ ID NO: 1003432 - DNA, 15 bp, Homo sapiens
tatatctatgctaat

SEQ ID NO: 1003433 - DNA, 15 bp, Homo sapiens
ctatatctatgctaa

SEQ ID NO: 1003434 - DNA, 15 bp, Homo sapiens
tctatatctatgcta

SEQ ID NO: 1003435 - DNA, 15 bp, Homo sapiens
ttctatatctatgct

SEQ ID NO: 1003436 - DNA, 15 bp, Homo sapiens
gttctatatctatgc

SEQ ID NO: 1003437 - DNA, 15 bp, Homo sapiens
tgttctatatctatg

SEQ ID NO: 1003438 - DNA, 15 bp, Homo sapiens
atgttctatatctat

SEQ ID NO: 1003439 - DNA, 15 bp, Homo sapiens
aatgttctatatcta

SEQ ID NO: 1003440 - DNA, 15 bp, Homo sapiens
caatgttctatatct

SEQ ID NO: 1003441 - DNA, 15 bp, Homo sapiens
acaatgttctatatc

SEQ ID NO: 1003442 - DNA, 15 bp, Homo sapiens
cacaatgttctatat

SEQ ID NO: 1003443 - DNA, 15 bp, Homo sapiens
tcacaatgttctata

SEQ ID NO: 1003444 - DNA, 15 bp, Homo sapiens
gtcacaatgttctat

SEQ ID NO: 1003445 - DNA, 15 bp, Homo sapiens
agtcacaatgttcta

SEQ ID NO: 1003446 - DNA, 15 bp, Homo sapiens
tagtcacaatgttct

SEQ ID NO: 1003447 - DNA, 15 bp, Homo sapiens
atagtcacaatgttc

SEQ ID NO: 1003448 - DNA, 15 bp, Homo sapiens
gatagtcacaatgtt

SEQ ID NO: 1003449 - DNA, 15 bp, Homo sapiens
tgatagtcacaatgt

SEQ ID NO: 1003450 - DNA, 15 bp, Homo sapiens
gtgatagtcacaatg

SEQ ID NO: 1003451 - DNA, 15 bp, Homo sapiens
tgtgatagtcacaat

SEQ ID NO: 1003452 - DNA, 15 bp, Homo sapiens
ctgtgatagtcacaa

SEQ ID NO: 1003453 - DNA, 15 bp, Homo sapiens
tctgtgatagtcaca

SEQ ID NO: 1003454 - DNA, 15 bp, Homo sapiens
ttctgtgatagtcac

SEQ ID NO: 1003455 - DNA, 15 bp, Homo sapiens
tttctgtgatagtca

SEQ ID NO: 1003456 - DNA, 15 bp, Homo sapiens
ctttctgtgatagtc

SEQ ID NO: 1003457 - DNA, 15 bp, Homo sapiens
actttctgtgatagt

SEQ ID NO: 1003458 - DNA, 15 bp, Homo sapiens
aactttctgtgatag

SEQ ID NO: 1003459 - DNA, 15 bp, Homo sapiens
caactttctgtgata

SEQ ID NO: 1003460 - DNA, 15 bp, Homo sapiens
acaactttctgtgat

SEQ ID NO: 1003461 - DNA, 15 bp, Homo sapiens
aacaactttctgtga

SEQ ID NO: 1003462 - DNA, 15 bp, Homo sapiens
aaacaactttctgtg

SEQ ID NO: 1003463 - DNA, 15 bp, Homo sapiens
aaaacaactttctgt

SEQ ID NO: 1003464 - DNA, 15 bp, Homo sapiens
caaaacaactttctg

SEQ ID NO: 1003465 - DNA, 15 bp, Homo sapiens
tcaaaacaactttct

SEQ ID NO: 1003466 - DNA, 15 bp, Homo sapiens
ttcaaaacaactttc

SEQ ID NO: 1003467 - DNA, 15 bp, Homo sapiens
gttcaaaacaacttt

SEQ ID NO: 1003468 - DNA, 15 bp, Homo sapiens
tgttcaaaacaactt

SEQ ID NO: 1003469 - DNA, 15 bp, Homo sapiens
ctgttcaaaacaact

SEQ ID NO: 1003470 - DNA, 15 bp, Homo sapiens
actgttcaaaacaac

SEQ ID NO: 1003471 - DNA, 15 bp, Homo sapiens
cactgttcaaaacaa

SEQ ID NO: 1003472 - DNA, 15 bp, Homo sapiens
acactgttcaaaaca

SEQ ID NO: 1003473 - DNA, 15 bp, Homo sapiens
aacactgttcaaaac

SEQ ID NO: 1003474 - DNA, 15 bp, Homo sapiens
caacactgttcaaaa

SEQ ID NO: 1003475 - DNA, 15 bp, Homo sapiens
gcaacactgttcaaa

SEQ ID NO: 1003476 - DNA, 15 bp, Homo sapiens
ggcaacactgttcaa

SEQ ID NO: 1003477 - DNA, 15 bp, Homo sapiens
tggcaacactgttca

SEQ ID NO: 1003478 - DNA, 15 bp, Homo sapiens
ttggcaacactgttc

SEQ ID NO: 1003479 - DNA, 15 bp, Homo sapiens
cttggcaacactgtt

SEQ ID NO: 1003480 - DNA, 15 bp, Homo sapiens
gcttggcaacactgt

SEQ ID NO: 1003481 - DNA, 15 bp, Homo sapiens
ggcttggcaacactg

SEQ ID NO: 1003482 - DNA, 15 bp, Homo sapiens
gggcttggcaacact

SEQ ID NO: 1003483 - DNA, 15 bp, Homo sapiens
agggcttggcaacac

SEQ ID NO: 1003484 - DNA, 15 bp, Homo sapiens
cagggcttggcaaca

SEQ ID NO: 1003485 - DNA, 15 bp, Homo sapiens
acagggcttggcaac

SEQ ID NO: 1003486 - DNA, 15 bp, Homo sapiens
tacagggcttggcaa

SEQ ID NO: 1003487 - DNA, 15 bp, Homo sapiens
ttacagggcttggca

SEQ ID NO: 1003488 - DNA, 15 bp, Homo sapiens
cttacagggcttggc

SEQ ID NO: 1003489 - DNA, 15 bp, Homo sapiens
acttacagggcttgg

SEQ ID NO: 1003490 - DNA, 15 bp, Homo sapiens
cacttacagggcttg

SEQ ID NO: 1003491 - DNA, 15 bp, Homo sapiens
ccacttacagggctt

SEQ ID NO: 1003492 - DNA, 15 bp, Homo sapiens
tccacttacagggct

SEQ ID NO: 1003493 - DNA, 15 bp, Homo sapiens
ttccacttacagggc

SEQ ID NO: 1003494 - DNA, 15 bp, Homo sapiens
cttccacttacaggg

SEQ ID NO: 1003495 - DNA, 15 bp, Homo sapiens
tcttccacttacagg

SEQ ID NO: 1003496 - DNA, 15 bp, Homo sapiens
ctcttccacttacag

SEQ ID NO: 1003497 - DNA, 15 bp, Homo sapiens
cctcttccacttaca

SEQ ID NO: 1003498 - DNA, 15 bp, Homo sapiens
gcctcttccacttac

SEQ ID NO: 1003499 - DNA, 15 bp, Homo sapiens
tgcctcttccactta

SEQ ID NO: 1003500 - DNA, 15 bp, Homo sapiens
ctgcctcttccactt

SEQ ID NO: 1003501 - DNA, 15 bp, Homo sapiens
actgcctcttccact

SEQ ID NO: 1003502 - DNA, 15 bp, Homo sapiens
cactgcctcttccac

SEQ ID NO: 1003503 - DNA, 15 bp, Homo sapiens
gcactgcctcttcca

SEQ ID NO: 1003504 - DNA, 15 bp, Homo sapiens
tgcactgcctcttcc

SEQ ID NO: 1003505 - DNA, 15 bp, Homo sapiens
ctgcactgcctcttc

SEQ ID NO: 1003506 - DNA, 15 bp, Homo sapiens
actgcactgcctctt

SEQ ID NO: 1003507 - DNA, 15 bp, Homo sapiens
cactgcactgcctct

SEQ ID NO: 1003508 - DNA, 15 bp, Homo sapiens
acactgcactgcctc

SEQ ID NO: 1003509 - DNA, 15 bp, Homo sapiens
cacactgcactgcct

SEQ ID NO: 1003510 - DNA, 15 bp, Homo sapiens
tcacactgcactgcc

SEQ ID NO: 1003511 - DNA, 15 bp, Homo sapiens
atcacactgcactgc

SEQ ID NO: 1003512 - DNA, 15 bp, Homo sapiens
gatcacactgcactg

SEQ ID NO: 1003513 - DNA, 15 bp, Homo sapiens
agatcacactgcact

SEQ ID NO: 1003514 - DNA, 15 bp, Homo sapiens
cagatcacactgcac

SEQ ID NO: 1003515 - DNA, 15 bp, Homo sapiens
acagatcacactgca

SEQ ID NO: 1003516 - DNA, 15 bp, Homo sapiens
cacagatcacactgc

SEQ ID NO: 1003517 - DNA, 15 bp, Homo sapiens
acacagatcacactg

SEQ ID NO: 1003518 - DNA, 15 bp, Homo sapiens
gacacagatcacact

SEQ ID NO: 1003519 - DNA, 15 bp, Homo sapiens
agacacagatcacac

SEQ ID NO: 1003520 - DNA, 15 bp, Homo sapiens
aagacacagatcaca

SEQ ID NO: 1003521 - DNA, 15 bp, Homo sapiens
gaagacacagatcac

SEQ ID NO: 1003522 - DNA, 15 bp, Homo sapiens
tgaagacacagatca

SEQ ID NO: 1003523 - DNA, 15 bp, Homo sapiens
ctgaagacacagatc

SEQ ID NO: 1003524 - DNA, 15 bp, Homo sapiens
cctgaagacacagat

SEQ ID NO: 1003525 - DNA, 15 bp, Homo sapiens
tcctgaagacacaga

SEQ ID NO: 1003526 - DNA, 15 bp, Homo sapiens
ttcctgaagacacag

SEQ ID NO: 1003527 - DNA, 15 bp, Homo sapiens
tttcctgaagacaca

SEQ ID NO: 1003528 - DNA, 15 bp, Homo sapiens
gtttcctgaagacac

SEQ ID NO: 1003529 - DNA, 15 bp, Homo sapiens
ggtttcctgaagaca

SEQ ID NO: 1003530 - DNA, 15 bp, Homo sapiens
tggtttcctgaagac

SEQ ID NO: 1003531 - DNA, 15 bp, Homo sapiens
ctggtttcctgaaga

SEQ ID NO: 1003532 - DNA, 15 bp, Homo sapiens
cctggtttcctgaag

SEQ ID NO: 1003533 - DNA, 15 bp, Homo sapiens
acctggtttcctgaa

SEQ ID NO: 1003534 - DNA, 15 bp, Homo sapiens
tacctggtttcctga

SEQ ID NO: 1003535 - DNA, 15 bp, Homo sapiens
ctacctggtttcctg

SEQ ID NO: 1003536 - DNA, 15 bp, Homo sapiens
actacctggtttcct

SEQ ID NO: 1003537 - DNA, 15 bp, Homo sapiens
gactacctggtttcc

SEQ ID NO: 1003538 - DNA, 15 bp, Homo sapiens
tgactacctggtttc

SEQ ID NO: 1003539 - DNA, 15 bp, Homo sapiens
ctgactacctggttt

SEQ ID NO: 1003540 - DNA, 15 bp, Homo sapiens
tctgactacctggtt

SEQ ID NO: 1003541 - DNA, 15 bp, Homo sapiens
gtctgactacctggt

SEQ ID NO: 1003542 - DNA, 15 bp, Homo sapiens
agtctgactacctgg

SEQ ID NO: 1003543 - DNA, 15 bp, Homo sapiens
tagtctgactacctg

SEQ ID NO: 1003544 - DNA, 15 bp, Homo sapiens
ctagtctgactacct

SEQ ID NO: 1003545 - DNA, 15 bp, Homo sapiens
actagtctgactacc

SEQ ID NO: 1003546 - DNA, 15 bp, Homo sapiens
aactagtctgactac

SEQ ID NO: 1003547 - DNA, 15 bp, Homo sapiens
gaactagtctgacta

SEQ ID NO: 1003548 - DNA, 15 bp, Homo sapiens
tgaactagtctgact

SEQ ID NO: 1003549 - DNA, 15 bp, Homo sapiens
ttgaactagtctgac

SEQ ID NO: 1003550 - DNA, 15 bp, Homo sapiens
attgaactagtctga

SEQ ID NO: 1003551 - DNA, 15 bp, Homo sapiens
cattgaactagtctg

SEQ ID NO: 1003552 - DNA, 15 bp, Homo sapiens
tcattgaactagtct

SEQ ID NO: 1003553 - DNA, 15 bp, Homo sapiens
ctcattgaactagtc

SEQ ID NO: 1003554 - DNA, 15 bp, Homo sapiens
cctcattgaactagt

SEQ ID NO: 1003555 - DNA, 15 bp, Homo sapiens
tcctcattgaactag

SEQ ID NO: 1003556 - DNA, 15 bp, Homo sapiens
ctcctcattgaacta

SEQ ID NO: 1003557 - DNA, 15 bp, Homo sapiens
tctcctcattgaact

SEQ ID NO: 1003558 - DNA, 15 bp, Homo sapiens
ctctcctcattgaac

SEQ ID NO: 1003559 - DNA, 15 bp, Homo sapiens
cctctcctcattgaa

SEQ ID NO: 1003560 - DNA, 15 bp, Homo sapiens
gcctctcctcattga

SEQ ID NO: 1003561 - DNA, 15 bp, Homo sapiens
tgcctctcctcattg

SEQ ID NO: 1003562 - DNA, 15 bp, Homo sapiens
ctgcctctcctcatt

SEQ ID NO: 1003563 - DNA, 15 bp, Homo sapiens
tctgcctctcctcat

SEQ ID NO: 1003564 - DNA, 15 bp, Homo sapiens
ttctgcctctcctca

SEQ ID NO: 1003565 - DNA, 15 bp, Homo sapiens
gttctgcctctcctc

SEQ ID NO: 1003566 - DNA, 15 bp, Homo sapiens
ggttctgcctctcct

SEQ ID NO: 1003567 - DNA, 15 bp, Homo sapiens
aggttctgcctctcc

SEQ ID NO: 1003568 - DNA, 15 bp, Homo sapiens
caggttctgcctctc

SEQ ID NO: 1003569 - DNA, 15 bp, Homo sapiens
ccaggttctgcctct

SEQ ID NO: 1003570 - DNA, 15 bp, Homo sapiens
gccaggttctgcctc

SEQ ID NO: 1003571 - DNA, 15 bp, Homo sapiens
agccaggttctgcct

SEQ ID NO: 1003572 - DNA, 15 bp, Homo sapiens
aagccaggttctgcc

SEQ ID NO: 1003573 - DNA, 15 bp, Homo sapiens
gaagccaggttctgc

SEQ ID NO: 1003574 - DNA, 15 bp, Homo sapiens
tgaagccaggttctg

SEQ ID NO: 1003575 - DNA, 15 bp, Homo sapiens
gtgaagccaggttct

SEQ ID NO: 1003576 - DNA, 15 bp, Homo sapiens
agtgaagccaggttc

SEQ ID NO: 1003577 - DNA, 15 bp, Homo sapiens
aagtgaagccaggtt

SEQ ID NO: 1003578 - DNA, 15 bp, Homo sapiens
gaagtgaagccaggt

SEQ ID NO: 1003579 - DNA, 15 bp, Homo sapiens
agaagtgaagccagg

SEQ ID NO: 1003580 - DNA, 15 bp, Homo sapiens
tagaagtgaagccag

SEQ ID NO: 1003581 - DNA, 15 bp, Homo sapiens
ctagaagtgaagcca

SEQ ID NO: 1003582 - DNA, 15 bp, Homo sapiens
tctagaagtgaagcc

SEQ ID NO: 1003583 - DNA, 15 bp, Homo sapiens
atctagaagtgaagc

SEQ ID NO: 1003584 - DNA, 15 bp, Homo sapiens
aatctagaagtgaag

SEQ ID NO: 1003585 - DNA, 15 bp, Homo sapiens
taatctagaagtgaa

SEQ ID NO: 1003586 - DNA, 15 bp, Homo sapiens
ttaatctagaagtga

SEQ ID NO: 1003587 - DNA, 15 bp, Homo sapiens
tttaatctagaagtg

SEQ ID NO: 1003588 - DNA, 15 bp, Homo sapiens
ttttaatctagaagt

SEQ ID NO: 1003589 - DNA, 15 bp, Homo sapiens
tttttaatctagaag

SEQ ID NO: 1003590 - DNA, 15 bp, Homo sapiens
gtttttaatctagaa

SEQ ID NO: 1003591 - DNA, 15 bp, Homo sapiens
agtttttaatctaga

SEQ ID NO: 1003592 - DNA, 15 bp, Homo sapiens
cagtttttaatctag

SEQ ID NO: 1003593 - DNA, 15 bp, Homo sapiens
gcagtttttaatcta

SEQ ID NO: 1003594 - DNA, 15 bp, Homo sapiens
agcagtttttaatct

SEQ ID NO: 1003595 - DNA, 15 bp, Homo sapiens
aagcagtttttaatc

SEQ ID NO: 1003596 - DNA, 15 bp, Homo sapiens
taagcagtttttaat

SEQ ID NO: 1003597 - DNA, 15 bp, Homo sapiens
ctaagcagtttttaa

SEQ ID NO: 1003598 - DNA, 15 bp, Homo sapiens
cctaagcagttttta

SEQ ID NO: 1003599 - DNA, 15 bp, Homo sapiens
acctaagcagttttt

SEQ ID NO: 1003600 - DNA, 15 bp, Homo sapiens
cacctaagcagtttt

SEQ ID NO: 1003601 - DNA, 15 bp, Homo sapiens
ccacctaagcagttt

SEQ ID NO: 1003602 - DNA, 15 bp, Homo sapiens
gccacctaagcagtt

SEQ ID NO: 1003603 - DNA, 15 bp, Homo sapiens
ggccacctaagcagt

SEQ ID NO: 1003604 - DNA, 15 bp, Homo sapiens
aggccacctaagcag

SEQ ID NO: 1003605 - DNA, 15 bp, Homo sapiens
taggccacctaagca

SEQ ID NO: 1003606 - DNA, 15 bp, Homo sapiens
ttaggccacctaagc

SEQ ID NO: 1003607 - DNA, 15 bp, Homo sapiens
tttaggccacctaag

SEQ ID NO: 1003608 - DNA, 15 bp, Homo sapiens
ctttaggccacctaa

SEQ ID NO: 1003609 - DNA, 15 bp, Homo sapiens
tctttaggccaccta

SEQ ID NO: 1003610 - DNA, 15 bp, Homo sapiens
atctttaggccacct

SEQ ID NO: 1003611 - DNA, 15 bp, Homo sapiens
tatctttaggccacc

SEQ ID NO: 1003612 - DNA, 15 bp, Homo sapiens
gtatctttaggccac

SEQ ID NO: 1003613 - DNA, 15 bp, Homo sapiens
tgtatctttaggcca

SEQ ID NO: 1003614 - DNA, 15 bp, Homo sapiens
ttgtatctttaggcc

SEQ ID NO: 1003615 - DNA, 15 bp, Homo sapiens
attgtatctttaggc

SEQ ID NO: 1003616 - DNA, 15 bp, Homo sapiens
cattgtatctttagg

SEQ ID NO: 1003617 - DNA, 15 bp, Homo sapiens
ccattgtatctttag

SEQ ID NO: 1003618 - DNA, 15 bp, Homo sapiens
gccattgtatcttta

SEQ ID NO: 1003619 - DNA, 15 bp, Homo sapiens
ggccattgtatcttt

SEQ ID NO: 1003620 - DNA, 15 bp, Homo sapiens
tggccattgtatctt

SEQ ID NO: 1003621 - DNA, 15 bp, Homo sapiens
atggccattgtatct

SEQ ID NO: 1003622 - DNA, 15 bp, Homo sapiens
aatggccattgtatc

SEQ ID NO: 1003623 - DNA, 15 bp, Homo sapiens
gaatggccattgtat

SEQ ID NO: 1003624 - DNA, 15 bp, Homo sapiens
agaatggccattgta

SEQ ID NO: 1003625 - DNA, 15 bp, Homo sapiens
gagaatggccattgt

SEQ ID NO: 1003626 - DNA, 15 bp, Homo sapiens
tgagaatggccattg

SEQ ID NO: 1003627 - DNA, 15 bp, Homo sapiens
ctgagaatggccatt

SEQ ID NO: 1003628 - DNA, 15 bp, Homo sapiens
tctgagaatggccat

SEQ ID NO: 1003629 - DNA, 15 bp, Homo sapiens
ctctgagaatggcca

SEQ ID NO: 1003630 - DNA, 15 bp, Homo sapiens
actctgagaatggcc

SEQ ID NO: 1003631 - DNA, 15 bp, Homo sapiens
tactctgagaatggc

SEQ ID NO: 1003632 - DNA, 15 bp, Homo sapiens
ctactctgagaatgg

SEQ ID NO: 1003633 - DNA, 15 bp, Homo sapiens
actactctgagaatg

SEQ ID NO: 1003634 - DNA, 15 bp, Homo sapiens
cactactctgagaat

SEQ ID NO: 1003635 - DNA, 15 bp, Homo sapiens
tcactactctgagaa

SEQ ID NO: 1003636 - DNA, 15 bp, Homo sapiens
ctcactactctgaga

SEQ ID NO: 1003637 - DNA, 15 bp, Homo sapiens
tctcactactctgag

SEQ ID NO: 1003638 - DNA, 15 bp, Homo sapiens
ttctcactactctga

SEQ ID NO: 1003639 - DNA, 15 bp, Homo sapiens
cttctcactactctg

SEQ ID NO: 1003640 - DNA, 15 bp, Homo sapiens
ccttctcactactct

SEQ ID NO: 1003641 - DNA, 15 bp, Homo sapiens
tccttctcactactc

SEQ ID NO: 1003642 - DNA, 15 bp, Homo sapiens
ttccttctcactact

SEQ ID NO: 1003643 - DNA, 15 bp, Homo sapiens
cttccttctcactac

SEQ ID NO: 1003644 - DNA, 15 bp, Homo sapiens
ccttccttctcacta

SEQ ID NO: 1003645 - DNA, 15 bp, Homo sapiens
tccttccttctcact

SEQ ID NO: 1003646 - DNA, 15 bp, Homo sapiens
ttccttccttctcac

SEQ ID NO: 1003647 - DNA, 15 bp, Homo sapiens
gttccttccttctca

SEQ ID NO: 1003648 - DNA, 15 bp, Homo sapiens
tgttccttccttctc

SEQ ID NO: 1003649 - DNA, 15 bp, Homo sapiens
ctgttccttccttct

SEQ ID NO: 1003650 - DNA, 15 bp, Homo sapiens
tctgttccttccttc

SEQ ID NO: 1003651 - DNA, 15 bp, Homo sapiens
atctgttccttcctt

SEQ ID NO: 1003652 - DNA, 15 bp, Homo sapiens
catctgttccttcct

SEQ ID NO: 1003653 - DNA, 15 bp, Homo sapiens
acatctgttccttcc

SEQ ID NO: 1003654 - DNA, 15 bp, Homo sapiens
aacatctgttccttc

SEQ ID NO: 1003655 - DNA, 15 bp, Homo sapiens
aaacatctgttcctt

SEQ ID NO: 1003656 - DNA, 15 bp, Homo sapiens
taaacatctgttcct

SEQ ID NO: 1003657 - DNA, 15 bp, Homo sapiens
ctaaacatctgttcc

SEQ ID NO: 1003658 - DNA, 15 bp, Homo sapiens
cctaaacatctgttc

SEQ ID NO: 1003659 - DNA, 15 bp, Homo sapiens
ccctaaacatctgtt

SEQ ID NO: 1003660 - DNA, 15 bp, Homo sapiens
cccctaaacatctgt

SEQ ID NO: 1003661 - DNA, 15 bp, Homo sapiens
ccccctaaacatctg

SEQ ID NO: 1003662 - DNA, 15 bp, Homo sapiens
gccccctaaacatct

SEQ ID NO: 1003663 - DNA, 15 bp, Homo sapiens
agccccctaaacatc

SEQ ID NO: 1003664 - DNA, 15 bp, Homo sapiens
tagccccctaaacat

SEQ ID NO: 1003665 - DNA, 15 bp, Homo sapiens
ctagccccctaaaca

SEQ ID NO: 1003666 - DNA, 15 bp, Homo sapiens
tctagccccctaaac

SEQ ID NO: 1003667 - DNA, 15 bp, Homo sapiens
ttctagccccctaaa

SEQ ID NO: 1003668 - DNA, 15 bp, Homo sapiens
cttctagccccctaa

SEQ ID NO: 1003669 - DNA, 15 bp, Homo sapiens
tcttctagcccccta

SEQ ID NO: 1003670 - DNA, 15 bp, Homo sapiens
ttcttctagccccct

SEQ ID NO: 1003671 - DNA, 15 bp, Homo sapiens
tttcttctagccccc

SEQ ID NO: 1003672 - DNA, 15 bp, Homo sapiens
ctttcttctagcccc

SEQ ID NO: 1003673 - DNA, 15 bp, Homo sapiens
actttcttctagccc

SEQ ID NO: 1003674 - DNA, 15 bp, Homo sapiens
gactttcttctagcc

SEQ ID NO: 1003675 - DNA, 15 bp, Homo sapiens
tgactttcttctagc

SEQ ID NO: 1003676 - DNA, 15 bp, Homo sapiens
ctgactttcttctag

SEQ ID NO: 1003677 - DNA, 15 bp, Homo sapiens
tctgactttcttcta

SEQ ID NO: 1003678 - DNA, 15 bp, Homo sapiens
ctctgactttcttct

SEQ ID NO: 1003679 - DNA, 15 bp, Homo sapiens
tctctgactttcttc

SEQ ID NO: 1003680 - DNA, 15 bp, Homo sapiens
ctctctgactttctt

SEQ ID NO: 1003681 - DNA, 15 bp, Homo sapiens
cctctctgactttct

SEQ ID NO: 1003682 - DNA, 15 bp, Homo sapiens
ccctctctgactttc

SEQ ID NO: 1003683 - DNA, 15 bp, Homo sapiens
gccctctctgacttt

SEQ ID NO: 1003684 - DNA, 15 bp, Homo sapiens
ggccctctctgactt

SEQ ID NO: 1003685 - DNA, 15 bp, Homo sapiens
cggccctctctgact

SEQ ID NO: 1003686 - DNA, 15 bp, Homo sapiens
ccggccctctctgac

SEQ ID NO: 1003687 - DNA, 15 bp, Homo sapiens
cccggccctctctga

SEQ ID NO: 1003688 - DNA, 15 bp, Homo sapiens
gcccggccctctctg

SEQ ID NO: 1003689 - DNA, 15 bp, Homo sapiens
cgcccggccctctct

SEQ ID NO: 1003690 - DNA, 15 bp, Homo sapiens
gcgcccggccctctc

SEQ ID NO: 1003691 - DNA, 15 bp, Homo sapiens
tgcgcccggccctct

SEQ ID NO: 1003692 - DNA, 15 bp, Homo sapiens
ctgcgcccggccctc

SEQ ID NO: 1003693 - DNA, 15 bp, Homo sapiens
aagccactgcgcccg

SEQ ID NO: 1003694 - DNA, 15 bp, Homo sapiens
taagccactgcgccc

SEQ ID NO: 1003695 - DNA, 15 bp, Homo sapiens
ataagccactgcgcc

SEQ ID NO: 1003696 - DNA, 15 bp, Homo sapiens
cataagccactgcgc

SEQ ID NO: 1003697 - DNA, 15 bp, Homo sapiens
gcataagccactgcg

SEQ ID NO: 1003698 - DNA, 15 bp, Homo sapiens
ttggccttccaaagt

SEQ ID NO: 1003699 - DNA, 15 bp, Homo sapiens
cttggccttccaaag

SEQ ID NO: 1003700 - DNA, 15 bp, Homo sapiens
tcttggccttccaaa

SEQ ID NO: 1003701 - DNA, 15 bp, Homo sapiens
gtcttggccttccaa

SEQ ID NO: 1003702 - DNA, 15 bp, Homo sapiens
tgtcttggccttcca

SEQ ID NO: 1003703 - DNA, 15 bp, Homo sapiens
ctgtcttggccttcc

SEQ ID NO: 1003704 - DNA, 15 bp, Homo sapiens
cctgtcttggccttc

SEQ ID NO: 1003705 - DNA, 15 bp, Homo sapiens
gcctgtcttggcctt

SEQ ID NO: 1003706 - DNA, 15 bp, Homo sapiens
gatctgcctgtcttg

SEQ ID NO: 1003707 - DNA, 15 bp, Homo sapiens
tgatctgcctgtctt

SEQ ID NO: 1003708 - DNA, 15 bp, Homo sapiens
gtgatctgcctgtct

SEQ ID NO: 1003709 - DNA, 15 bp, Homo sapiens
cgtgatctgcctgtc

SEQ ID NO: 1003710 - DNA, 15 bp, Homo sapiens
tcgtgatctgcctgt

SEQ ID NO: 1003711 - DNA, 15 bp, Homo sapiens
cgcgcaccaccacgc

SEQ ID NO: 1003712 - DNA, 15 bp, Homo sapiens
gcgcgcaccaccacg

SEQ ID NO: 1003713 - DNA, 15 bp, Homo sapiens
ggcgcgcaccaccac

SEQ ID NO: 1003714 - DNA, 15 bp, Homo sapiens
aggcgcgcaccacca

SEQ ID NO: 1003715 - DNA, 15 bp, Homo sapiens
caggcgcgcaccacc

SEQ ID NO: 1003716 - DNA, 15 bp, Homo sapiens
acaggcgcgcaccac

SEQ ID NO: 1003717 - DNA, 15 bp, Homo sapiens
tacaggcgcgcacca

SEQ ID NO: 1003718 - DNA, 15 bp, Homo sapiens
ttacaggcgcgcacc

SEQ ID NO: 1003719 - DNA, 15 bp, Homo sapiens
attacaggcgcgcac

SEQ ID NO: 1003720 - DNA, 15 bp, Homo sapiens
gattacaggcgcgca

SEQ ID NO: 1003721 - DNA, 15 bp, Homo sapiens
ctgccttagcctcct

SEQ ID NO: 1003722 - DNA, 15 bp, Homo sapiens
agggttcaagcgatt

SEQ ID NO: 1003723 - DNA, 15 bp, Homo sapiens
cagggttcaagcgat

SEQ ID NO: 1003724 - DNA, 15 bp, Homo sapiens
ccagggttcaagcga

SEQ ID NO: 1003725 - DNA, 15 bp, Homo sapiens
tccagggttcaagcg

SEQ ID NO: 1003726 - DNA, 15 bp, Homo sapiens
ctccagggttcaagc

SEQ ID NO: 1003727 - DNA, 15 bp, Homo sapiens
cgatctgggctcact

SEQ ID NO: 1003728 - DNA, 15 bp, Homo sapiens
gcgatctgggctcac

SEQ ID NO: 1003729 - DNA, 15 bp, Homo sapiens
tgcgatctgggctca

SEQ ID NO: 1003730 - DNA, 15 bp, Homo sapiens
gtgcgatctgggctc

SEQ ID NO: 1003731 - DNA, 15 bp, Homo sapiens
ggtgcgatctgggct

SEQ ID NO: 1003732 - DNA, 15 bp, Homo sapiens
tggtgcgatctgggc

SEQ ID NO: 1003733 - DNA, 15 bp, Homo sapiens
gtggtgcgatctggg

SEQ ID NO: 1003734 - DNA, 15 bp, Homo sapiens
agtggtgcgatctgg

SEQ ID NO: 1003735 - DNA, 15 bp, Homo sapiens
tagtggtgcgatctg

SEQ ID NO: 1003736 - DNA, 15 bp, Homo sapiens
gtagtggtgcgatct

SEQ ID NO: 1003737 - DNA, 15 bp, Homo sapiens
cgtagtggtgcgatc

SEQ ID NO: 1003738 - DNA, 15 bp, Homo sapiens
gcgtagtggtgcgat

SEQ ID NO: 1003739 - DNA, 15 bp, Homo sapiens
agcgtagtggtgcga

SEQ ID NO: 1003740 - DNA, 15 bp, Homo sapiens
gagcgtagtggtgcg

SEQ ID NO: 1003741 - DNA, 15 bp, Homo sapiens
ggagcgtagtggtgc

SEQ ID NO: 1003742 - DNA, 15 bp, Homo sapiens
tggagcgtagtggtg

SEQ ID NO: 1003743 - DNA, 15 bp, Homo sapiens
ctggagcgtagtggt

SEQ ID NO: 1003744 - DNA, 15 bp, Homo sapiens
gctggagcgtagtgg

SEQ ID NO: 1003745 - DNA, 15 bp, Homo sapiens
ggctggagcgtagtg

SEQ ID NO: 1003746 - DNA, 15 bp, Homo sapiens
aggctggagcgtagt

SEQ ID NO: 1003747 - DNA, 15 bp, Homo sapiens
taggctggagcgtag

SEQ ID NO: 1003748 - DNA, 15 bp, Homo sapiens
ctaggctggagcgta

SEQ ID NO: 1003749 - DNA, 15 bp, Homo sapiens
cctaggctggagcgt

SEQ ID NO: 1003750 - DNA, 15 bp, Homo sapiens
acctaggctggagcg

SEQ ID NO: 1003751 - DNA, 15 bp, Homo sapiens
cacctaggctggagc

SEQ ID NO: 1003752 - DNA, 15 bp, Homo sapiens
tctctgtcacctagg

SEQ ID NO: 1003753 - DNA, 15 bp, Homo sapiens
ctctctgtcacctag

SEQ ID NO: 1003754 - DNA, 15 bp, Homo sapiens
tctctctgtcaccta

SEQ ID NO: 1003755 - DNA, 15 bp, Homo sapiens
ctctctctgtcacct

SEQ ID NO: 1003756 - DNA, 15 bp, Homo sapiens
agtctctctctgtca

SEQ ID NO: 1003757 - DNA, 15 bp, Homo sapiens
ggagtctctctctgt

SEQ ID NO: 1003758 - DNA, 15 bp, Homo sapiens
cggagtctctctctg

SEQ ID NO: 1003759 - DNA, 15 bp, Homo sapiens
acggagtctctctct

SEQ ID NO: 1003760 - DNA, 15 bp, Homo sapiens
gacggagtctctctc

SEQ ID NO: 1003761 - DNA, 15 bp, Homo sapiens
agacggagtctctct

SEQ ID NO: 1003762 - DNA, 15 bp, Homo sapiens
gagacggagtctctc

SEQ ID NO: 1003763 - DNA, 15 bp, Homo sapiens
tgacttttttttttt

SEQ ID NO: 1003764 - DNA, 15 bp, Homo sapiens
ctgactttttttttt

SEQ ID NO: 1003765 - DNA, 15 bp, Homo sapiens
tctgacttttttttt

SEQ ID NO: 1003766 - DNA, 15 bp, Homo sapiens
ctctgactttttttt

SEQ ID NO: 1003767 - DNA, 15 bp, Homo sapiens
cctctgacttttttt

SEQ ID NO: 1003768 - DNA, 15 bp, Homo sapiens
tcctctgactttttt

SEQ ID NO: 1003769 - DNA, 15 bp, Homo sapiens
ctcctctgacttttt

SEQ ID NO: 1003770 - DNA, 15 bp, Homo sapiens
tctcctctgactttt

SEQ ID NO: 1003771 - DNA, 15 bp, Homo sapiens
gtctcctctgacttt

SEQ ID NO: 1003772 - DNA, 15 bp, Homo sapiens
tgtctcctctgactt

SEQ ID NO: 1003773 - DNA, 15 bp, Homo sapiens
ttgtctcctctgact

SEQ ID NO: 1003774 - DNA, 15 bp, Homo sapiens
cttgtctcctctgac

SEQ ID NO: 1003775 - DNA, 15 bp, Homo sapiens
ccttgtctcctctga

SEQ ID NO: 1003776 - DNA, 15 bp, Homo sapiens
tccttgtctcctctg

SEQ ID NO: 1003777 - DNA, 15 bp, Homo sapiens
ctccttgtctcctct

SEQ ID NO: 1003778 - DNA, 15 bp, Homo sapiens
gctccttgtctcctc

SEQ ID NO: 1003779 - DNA, 15 bp, Homo sapiens
tgctccttgtctcct

SEQ ID NO: 1003780 - DNA, 15 bp, Homo sapiens
atgctccttgtctcc

SEQ ID NO: 1003781 - DNA, 15 bp, Homo sapiens
catgctccttgtctc

SEQ ID NO: 1003782 - DNA, 15 bp, Homo sapiens
acatgctccttgtct

SEQ ID NO: 1003783 - DNA, 15 bp, Homo sapiens
tacatgctccttgtc

SEQ ID NO: 1003784 - DNA, 15 bp, Homo sapiens
gtacatgctccttgt

SEQ ID NO: 1003785 - DNA, 15 bp, Homo sapiens
tgtacatgctccttg

SEQ ID NO: 1003786 - DNA, 15 bp, Homo sapiens
gtgtacatgctcctt

SEQ ID NO: 1003787 - DNA, 15 bp, Homo sapiens
ggtgtacatgctcct

SEQ ID NO: 1003788 - DNA, 15 bp, Homo sapiens
aggtgtacatgctcc

SEQ ID NO: 1003789 - DNA, 15 bp, Homo sapiens
taggtgtacatgctc

SEQ ID NO: 1003790 - DNA, 15 bp, Homo sapiens
ttaggtgtacatgct

SEQ ID NO: 1003791 - DNA, 15 bp, Homo sapiens
tttaggtgtacatgc

SEQ ID NO: 1003792 - DNA, 15 bp, Homo sapiens
ttttaggtgtacatg

SEQ ID NO: 1003793 - DNA, 15 bp, Homo sapiens
attttaggtgtacat

SEQ ID NO: 1003794 - DNA, 15 bp, Homo sapiens
gattttaggtgtaca

SEQ ID NO: 1003795 - DNA, 15 bp, Homo sapiens
tgattttaggtgtac

SEQ ID NO: 1003796 - DNA, 15 bp, Homo sapiens
ttgattttaggtgta

SEQ ID NO: 1003797 - DNA, 15 bp, Homo sapiens
gttgattttaggtgt

SEQ ID NO: 1003798 - DNA, 15 bp, Homo sapiens
tgttgattttaggtg

SEQ ID NO: 1003799 - DNA, 15 bp, Homo sapiens
atgttgattttaggt

SEQ ID NO: 1003800 - DNA, 15 bp, Homo sapiens
tatgttgattttagg

SEQ ID NO: 1003801 - DNA, 15 bp, Homo sapiens
ctatgttgattttag

SEQ ID NO: 1003802 - DNA, 15 bp, Homo sapiens
tctatgttgatttta

SEQ ID NO: 1003803 - DNA, 15 bp, Homo sapiens
gtctatgttgatttt

SEQ ID NO: 1003804 - DNA, 15 bp, Homo sapiens
ggtctatgttgattt

SEQ ID NO: 1003805 - DNA, 15 bp, Homo sapiens
gggtctatgttgatt

SEQ ID NO: 1003806 - DNA, 15 bp, Homo sapiens
ggggtctatgttgat

SEQ ID NO: 1003807 - DNA, 15 bp, Homo sapiens
aggggtctatgttga

SEQ ID NO: 1003808 - DNA, 15 bp, Homo sapiens
gaggggtctatgttg

SEQ ID NO: 1003809 - DNA, 15 bp, Homo sapiens
agaggggtctatgtt

SEQ ID NO: 1003810 - DNA, 15 bp, Homo sapiens
cagaggggtctatgt

SEQ ID NO: 1003811 - DNA, 15 bp, Homo sapiens
acagaggggtctatg

SEQ ID NO: 1003812 - DNA, 15 bp, Homo sapiens
aacagaggggtctat

SEQ ID NO: 1003813 - DNA, 15 bp, Homo sapiens
caacagaggggtcta

SEQ ID NO: 1003814 - DNA, 15 bp, Homo sapiens
tcaacagaggggtct

SEQ ID NO: 1003815 - DNA, 15 bp, Homo sapiens
atcaacagaggggtc

SEQ ID NO: 1003816 - DNA, 15 bp, Homo sapiens
catcaacagaggggt

SEQ ID NO: 1003817 - DNA, 15 bp, Homo sapiens
ccatcaacagagggg

SEQ ID NO: 1003818 - DNA, 15 bp, Homo sapiens
cccatcaacagaggg

SEQ ID NO: 1003819 - DNA, 15 bp, Homo sapiens
ccccatcaacagagg

SEQ ID NO: 1003820 - DNA, 15 bp, Homo sapiens
accccatcaacagag

SEQ ID NO: 1003821 - DNA, 15 bp, Homo sapiens
gaccccatcaacaga

SEQ ID NO: 1003822 - DNA, 15 bp, Homo sapiens
tgaccccatcaacag

SEQ ID NO: 1003823 - DNA, 15 bp, Homo sapiens
atgaccccatcaaca

SEQ ID NO: 1003824 - DNA, 15 bp, Homo sapiens
tatgaccccatcaac

SEQ ID NO: 1003825 - DNA, 15 bp, Homo sapiens
ctatgaccccatcaa

SEQ ID NO: 1003826 - DNA, 15 bp, Homo sapiens
actatgaccccatca

SEQ ID NO: 1003827 - DNA, 15 bp, Homo sapiens
cactatgaccccatc

SEQ ID NO: 1003828 - DNA, 15 bp, Homo sapiens
tcactatgaccccat

SEQ ID NO: 1003829 - DNA, 15 bp, Homo sapiens
ctcactatgacccca

SEQ ID NO: 1003830 - DNA, 15 bp, Homo sapiens
actcactatgacccc

SEQ ID NO: 1003831 - DNA, 15 bp, Homo sapiens
tactcactatgaccc

SEQ ID NO: 1003832 - DNA, 15 bp, Homo sapiens
gtactcactatgacc

SEQ ID NO: 1003833 - DNA, 15 bp, Homo sapiens
agtactcactatgac

SEQ ID NO: 1003834 - DNA, 15 bp, Homo sapiens
aagtactcactatga

SEQ ID NO: 1003835 - DNA, 15 bp, Homo sapiens
caagtactcactatg

SEQ ID NO: 1003836 - DNA, 15 bp, Homo sapiens
tcaagtactcactat

SEQ ID NO: 1003837 - DNA, 15 bp, Homo sapiens
ctcaagtactcacta

SEQ ID NO: 1003838 - DNA, 15 bp, Homo sapiens
cctcaagtactcact

SEQ ID NO: 1003839 - DNA, 15 bp, Homo sapiens
acctcaagtactcac

SEQ ID NO: 1003840 - DNA, 15 bp, Homo sapiens
tacctcaagtactca

SEQ ID NO: 1003841 - DNA, 15 bp, Homo sapiens
gtacctcaagtactc

SEQ ID NO: 1003842 - DNA, 15 bp, Homo sapiens
ggtacctcaagtact

SEQ ID NO: 1003843 - DNA, 15 bp, Homo sapiens
tggtacctcaagtac

SEQ ID NO: 1003844 - DNA, 15 bp, Homo sapiens
ttggtacctcaagta

SEQ ID NO: 1003845 - DNA, 15 bp, Homo sapiens
cttggtacctcaagt

SEQ ID NO: 1003846 - DNA, 15 bp, Homo sapiens
acttggtacctcaag

SEQ ID NO: 1003847 - DNA, 15 bp, Homo sapiens
gacttggtacctcaa

SEQ ID NO: 1003848 - DNA, 15 bp, Homo sapiens
agacttggtacctca

SEQ ID NO: 1003849 - DNA, 15 bp, Homo sapiens
cagacttggtacctc

SEQ ID NO: 1003850 - DNA, 15 bp, Homo sapiens
ccagacttggtacct

SEQ ID NO: 1003851 - DNA, 15 bp, Homo sapiens
tccagacttggtacc

SEQ ID NO: 1003852 - DNA, 15 bp, Homo sapiens
atccagacttggtac

SEQ ID NO: 1003853 - DNA, 15 bp, Homo sapiens
tatccagacttggta

SEQ ID NO: 1003854 - DNA, 15 bp, Homo sapiens
ttatccagacttggt

SEQ ID NO: 1003855 - DNA, 15 bp, Homo sapiens
tttatccagacttgg

SEQ ID NO: 1003856 - DNA, 15 bp, Homo sapiens
gtttatccagacttg

SEQ ID NO: 1003857 - DNA, 15 bp, Homo sapiens
tgtttatccagactt

SEQ ID NO: 1003858 - DNA, 15 bp, Homo sapiens
atgtttatccagact

SEQ ID NO: 1003859 - DNA, 15 bp, Homo sapiens
gatgtttatccagac

SEQ ID NO: 1003860 - DNA, 15 bp, Homo sapiens
tgatgtttatccaga

SEQ ID NO: 1003861 - DNA, 15 bp, Homo sapiens
ttgatgtttatccag

SEQ ID NO: 1003862 - DNA, 15 bp, Homo sapiens
tttgatgtttatcca

SEQ ID NO: 1003863 - DNA, 15 bp, Homo sapiens
gtttgatgtttatcc

SEQ ID NO: 1003864 - DNA, 15 bp, Homo sapiens
agtttgatgtttatc

SEQ ID NO: 1003865 - DNA, 15 bp, Homo sapiens
aagtttgatgtttat

SEQ ID NO: 1003866 - DNA, 15 bp, Homo sapiens
gaagtttgatgttta

SEQ ID NO: 1003867 - DNA, 15 bp, Homo sapiens
tgaagtttgatgttt

SEQ ID NO: 1003868 - DNA, 15 bp, Homo sapiens
ctgaagtttgatgtt

SEQ ID NO: 1003869 - DNA, 15 bp, Homo sapiens
gctgaagtttgatgt

SEQ ID NO: 1003870 - DNA, 15 bp, Homo sapiens
ggctgaagtttgatg

SEQ ID NO: 1003871 - DNA, 15 bp, Homo sapiens
tggctgaagtttgat

SEQ ID NO: 1003872 - DNA, 15 bp, Homo sapiens
ttggctgaagtttga

SEQ ID NO: 1003873 - DNA, 15 bp, Homo sapiens
attggctgaagtttg

SEQ ID NO: 1003874 - DNA, 15 bp, Homo sapiens
tattggctgaagttt

SEQ ID NO: 1003875 - DNA, 15 bp, Homo sapiens
ttattggctgaagtt

SEQ ID NO: 1003876 - DNA, 15 bp, Homo sapiens
gttattggctgaagt

SEQ ID NO: 1003877 - DNA, 15 bp, Homo sapiens
agttattggctgaag

SEQ ID NO: 1003878 - DNA, 15 bp, Homo sapiens
aagttattggctgaa

SEQ ID NO: 1003879 - DNA, 15 bp, Homo sapiens
aaagttattggctga

SEQ ID NO: 1003880 - DNA, 15 bp, Homo sapiens
caaagttattggctg

SEQ ID NO: 1003881 - DNA, 15 bp, Homo sapiens
tcaaagttattggct

SEQ ID NO: 1003882 - DNA, 15 bp, Homo sapiens
ctcaaagttattggc

SEQ ID NO: 1003883 - DNA, 15 bp, Homo sapiens
actcaaagttattgg

SEQ ID NO: 1003884 - DNA, 15 bp, Homo sapiens
aactcaaagttattg

SEQ ID NO: 1003885 - DNA, 15 bp, Homo sapiens
aaactcaaagttatt

SEQ ID NO: 1003886 - DNA, 15 bp, Homo sapiens
gaaactcaaagttat

SEQ ID NO: 1003887 - DNA, 15 bp, Homo sapiens
agaaactcaaagtta

SEQ ID NO: 1003888 - DNA, 15 bp, Homo sapiens
tagaaactcaaagtt

SEQ ID NO: 1003889 - DNA, 15 bp, Homo sapiens
ctagaaactcaaagt

SEQ ID NO: 1003890 - DNA, 15 bp, Homo sapiens
gctagaaactcaaag

SEQ ID NO: 1003891 - DNA, 15 bp, Homo sapiens
ggctagaaactcaaa

SEQ ID NO: 1003892 - DNA, 15 bp, Homo sapiens
tggctagaaactcaa

SEQ ID NO: 1003893 - DNA, 15 bp, Homo sapiens
atggctagaaactca

SEQ ID NO: 1003894 - DNA, 15 bp, Homo sapiens
gatggctagaaactc

SEQ ID NO: 1003895 - DNA, 15 bp, Homo sapiens
ggatggctagaaact

SEQ ID NO: 1003896 - DNA, 15 bp, Homo sapiens
tggatggctagaaac

SEQ ID NO: 1003897 - DNA, 15 bp, Homo sapiens
ttggatggctagaaa

SEQ ID NO: 1003898 - DNA, 15 bp, Homo sapiens
cttggatggctagaa

SEQ ID NO: 1003899 - DNA, 15 bp, Homo sapiens
gcttggatggctaga

SEQ ID NO: 1003900 - DNA, 15 bp, Homo sapiens
ggcttggatggctag

SEQ ID NO: 1003901 - DNA, 15 bp, Homo sapiens
aggcttggatggcta

SEQ ID NO: 1003902 - DNA, 15 bp, Homo sapiens
gaggcttggatggct

SEQ ID NO: 1003903 - DNA, 15 bp, Homo sapiens
agaggcttggatggc

SEQ ID NO: 1003904 - DNA, 15 bp, Homo sapiens
aagaggcttggatgg

SEQ ID NO: 1003905 - DNA, 15 bp, Homo sapiens
taagaggcttggatg

SEQ ID NO: 1003906 - DNA, 15 bp, Homo sapiens
ataagaggcttggat

SEQ ID NO: 1003907 - DNA, 15 bp, Homo sapiens
aataagaggcttgga

SEQ ID NO: 1003908 - DNA, 15 bp, Homo sapiens
taataagaggcttgg

SEQ ID NO: 1003909 - DNA, 15 bp, Homo sapiens
ttaataagaggcttg

SEQ ID NO: 1003910 - DNA, 15 bp, Homo sapiens
tttaataagaggctt

SEQ ID NO: 1003911 - DNA, 15 bp, Homo sapiens
gtttaataagaggct

SEQ ID NO: 1003912 - DNA, 15 bp, Homo sapiens
tgtttaataagaggc

SEQ ID NO: 1003913 - DNA, 15 bp, Homo sapiens
atgtttaataagagg

SEQ ID NO: 1003914 - DNA, 15 bp, Homo sapiens
tatgtttaataagag

SEQ ID NO: 1003915 - DNA, 15 bp, Homo sapiens
gtatgtttaataaga

SEQ ID NO: 1003916 - DNA, 15 bp, Homo sapiens
tgtatgtttaataag

SEQ ID NO: 1003917 - DNA, 15 bp, Homo sapiens
ctgtatgtttaataa

SEQ ID NO: 1003918 - DNA, 15 bp, Homo sapiens
tctgtatgtttaata

SEQ ID NO: 1003919 - DNA, 15 bp, Homo sapiens
ttctgtatgtttaat

SEQ ID NO: 1003920 - DNA, 15 bp, Homo sapiens
cttctgtatgtttaa

SEQ ID NO: 1003921 - DNA, 15 bp, Homo sapiens
ccttctgtatgttta

SEQ ID NO: 1003922 - DNA, 15 bp, Homo sapiens
tccttctgtatgttt

SEQ ID NO: 1003923 - DNA, 15 bp, Homo sapiens
gtccttctgtatgtt

SEQ ID NO: 1003924 - DNA, 15 bp, Homo sapiens
ggtccttctgtatgt

SEQ ID NO: 1003925 - DNA, 15 bp, Homo sapiens
aggtccttctgtatg

SEQ ID NO: 1003926 - DNA, 15 bp, Homo sapiens
aaggtccttctgtat

SEQ ID NO: 1003927 - DNA, 15 bp, Homo sapiens
aaaggtccttctgta

SEQ ID NO: 1003928 - DNA, 15 bp, Homo sapiens
aaaaggtccttctgt

SEQ ID NO: 1003929 - DNA, 15 bp, Homo sapiens
aaaaaggtccttctg

SEQ ID NO: 1003930 - DNA, 15 bp, Homo sapiens
aaaaaaggtccttct

SEQ ID NO: 1003931 - DNA, 15 bp, Homo sapiens
gaaaaaaggtccttc

SEQ ID NO: 1003932 - DNA, 15 bp, Homo sapiens
ggaaaaaaggtcctt

SEQ ID NO: 1003933 - DNA, 15 bp, Homo sapiens
gggaaaaaaggtcct

SEQ ID NO: 1003934 - DNA, 15 bp, Homo sapiens
agggaaaaaaggtcc

SEQ ID NO: 1003935 - DNA, 15 bp, Homo sapiens
aagggaaaaaaggtc

SEQ ID NO: 1003936 - DNA, 15 bp, Homo sapiens
caagggaaaaaaggt

SEQ ID NO: 1003937 - DNA, 15 bp, Homo sapiens
gcaagggaaaaaagg

SEQ ID NO: 1003938 - DNA, 15 bp, Homo sapiens
tgcaagggaaaaaag

SEQ ID NO: 1003939 - DNA, 15 bp, Homo sapiens
atgcaagggaaaaaa

SEQ ID NO: 1003940 - DNA, 15 bp, Homo sapiens
gatgcaagggaaaaa

SEQ ID NO: 1003941 - DNA, 15 bp, Homo sapiens
agatgcaagggaaaa

SEQ ID NO: 1003942 - DNA, 15 bp, Homo sapiens
tagatgcaagggaaa

SEQ ID NO: 1003943 - DNA, 15 bp, Homo sapiens
ttagatgcaagggaa

SEQ ID NO: 1003944 - DNA, 15 bp, Homo sapiens
gttagatgcaaggga

SEQ ID NO: 1003945 - DNA, 15 bp, Homo sapiens
tgttagatgcaaggg

SEQ ID NO: 1003946 - DNA, 15 bp, Homo sapiens
ttgttagatgcaagg

SEQ ID NO: 1003947 - DNA, 15 bp, Homo sapiens
cttgttagatgcaag

SEQ ID NO: 1003948 - DNA, 15 bp, Homo sapiens
acttgttagatgcaa

SEQ ID NO: 1003949 - DNA, 15 bp, Homo sapiens
aacttgttagatgca

SEQ ID NO: 1003950 - DNA, 15 bp, Homo sapiens
taacttgttagatgc

SEQ ID NO: 1003951 - DNA, 15 bp, Homo sapiens
ttaacttgttagatg

SEQ ID NO: 1003952 - DNA, 15 bp, Homo sapiens
tttaacttgttagat

SEQ ID NO: 1003953 - DNA, 15 bp, Homo sapiens
ctttaacttgttaga

SEQ ID NO: 1003954 - DNA, 15 bp, Homo sapiens
gctttaacttgttag

SEQ ID NO: 1003955 - DNA, 15 bp, Homo sapiens
tgctttaacttgtta

SEQ ID NO: 1003956 - DNA, 15 bp, Homo sapiens
gtgctttaacttgtt

SEQ ID NO: 1003957 - DNA, 15 bp, Homo sapiens
ggtgctttaacttgt

SEQ ID NO: 1003958 - DNA, 15 bp, Homo sapiens
aggtgctttaacttg

SEQ ID NO: 1003959 - DNA, 15 bp, Homo sapiens
caggtgctttaactt

SEQ ID NO: 1003960 - DNA, 15 bp, Homo sapiens
gcaggtgctttaact

SEQ ID NO: 1003961 - DNA, 15 bp, Homo sapiens
tgcaggtgctttaac

SEQ ID NO: 1003962 - DNA, 15 bp, Homo sapiens
ctgcaggtgctttaa

SEQ ID NO: 1003963 - DNA, 15 bp, Homo sapiens
tctgcaggtgcttta

SEQ ID NO: 1003964 - DNA, 15 bp, Homo sapiens
ctctgcaggtgcttt

SEQ ID NO: 1003965 - DNA, 15 bp, Homo sapiens
tctctgcaggtgctt

SEQ ID NO: 1003966 - DNA, 15 bp, Homo sapiens
atctctgcaggtgct

SEQ ID NO: 1003967 - DNA, 15 bp, Homo sapiens
gatctctgcaggtgc

SEQ ID NO: 1003968 - DNA, 15 bp, Homo sapiens
tgatctctgcaggtg

SEQ ID NO: 1003969 - DNA, 15 bp, Homo sapiens
atgatctctgcaggt

SEQ ID NO: 1003970 - DNA, 15 bp, Homo sapiens
aatgatctctgcagg

SEQ ID NO: 1003971 - DNA, 15 bp, Homo sapiens
taatgatctctgcag

SEQ ID NO: 1003972 - DNA, 15 bp, Homo sapiens
ctaatgatctctgca

SEQ ID NO: 1003973 - DNA, 15 bp, Homo sapiens
cctaatgatctctgc

SEQ ID NO: 1003974 - DNA, 15 bp, Homo sapiens
ccctaatgatctctg

SEQ ID NO: 1003975 - DNA, 15 bp, Homo sapiens
tccctaatgatctct

SEQ ID NO: 1003976 - DNA, 15 bp, Homo sapiens
ctccctaatgatctc

SEQ ID NO: 1003977 - DNA, 15 bp, Homo sapiens
cctccctaatgatct

SEQ ID NO: 1003978 - DNA, 15 bp, Homo sapiens
tcctccctaatgatc

SEQ ID NO: 1003979 - DNA, 15 bp, Homo sapiens
ctcctccctaatgat

SEQ ID NO: 1003980 - DNA, 15 bp, Homo sapiens
gctcctccctaatga

SEQ ID NO: 1003981 - DNA, 15 bp, Homo sapiens
ggctcctccctaatg

SEQ ID NO: 1003982 - DNA, 15 bp, Homo sapiens
aggctcctccctaat

SEQ ID NO: 1003983 - DNA, 15 bp, Homo sapiens
aaggctcctccctaa

SEQ ID NO: 1003984 - DNA, 15 bp, Homo sapiens
caaggctcctcccta

SEQ ID NO: 1003985 - DNA, 15 bp, Homo sapiens
ccaaggctcctccct

SEQ ID NO: 1003986 - DNA, 15 bp, Homo sapiens
gccaaggctcctccc

SEQ ID NO: 1003987 - DNA, 15 bp, Homo sapiens
ggccaaggctcctcc

SEQ ID NO: 1003988 - DNA, 15 bp, Homo sapiens
aggccaaggctcctc

SEQ ID NO: 1003989 - DNA, 15 bp, Homo sapiens
caggccaaggctcct

SEQ ID NO: 1003990 - DNA, 15 bp, Homo sapiens
tcaggccaaggctcc

SEQ ID NO: 1003991 - DNA, 15 bp, Homo sapiens
atcaggccaaggctc

SEQ ID NO: 1003992 - DNA, 15 bp, Homo sapiens
aatcaggccaaggct

SEQ ID NO: 1003993 - DNA, 15 bp, Homo sapiens
caatcaggccaaggc

SEQ ID NO: 1003994 - DNA, 15 bp, Homo sapiens
ccaatcaggccaagg

SEQ ID NO: 1003995 - DNA, 15 bp, Homo sapiens
accaatcaggccaag

SEQ ID NO: 1003996 - DNA, 15 bp, Homo sapiens
caccaatcaggccaa

SEQ ID NO: 1003997 - DNA, 15 bp, Homo sapiens
tcaccaatcaggcca

SEQ ID NO: 1003998 - DNA, 15 bp, Homo sapiens
gtcaccaatcaggcc

SEQ ID NO: 1003999 - DNA, 15 bp, Homo sapiens
tgtcaccaatcaggc

SEQ ID NO: 1004000 - DNA, 15 bp, Homo sapiens
ttgtcaccaatcagg

SEQ ID NO: 1004001 - DNA, 15 bp, Homo sapiens
tttgtcaccaatcag

SEQ ID NO: 1004002 - DNA, 15 bp, Homo sapiens
ttttgtcaccaatca

SEQ ID NO: 1004003 - DNA, 15 bp, Homo sapiens
cttttgtcaccaatc

SEQ ID NO: 1004004 - DNA, 15 bp, Homo sapiens
acttttgtcaccaat

SEQ ID NO: 1004005 - DNA, 15 bp, Homo sapiens
cacttttgtcaccaa

SEQ ID NO: 1004006 - DNA, 15 bp, Homo sapiens
tcacttttgtcacca

SEQ ID NO: 1004007 - DNA, 15 bp, Homo sapiens
ctcacttttgtcacc

SEQ ID NO: 1004008 - DNA, 15 bp, Homo sapiens
tctcacttttgtcac

SEQ ID NO: 1004009 - DNA, 15 bp, Homo sapiens
atctcacttttgtca

SEQ ID NO: 1004010 - DNA, 15 bp, Homo sapiens
catctcacttttgtc

SEQ ID NO: 1004011 - DNA, 15 bp, Homo sapiens
gcatctcacttttgt

SEQ ID NO: 1004012 - DNA, 15 bp, Homo sapiens
agcatctcacttttg

SEQ ID NO: 1004013 - DNA, 15 bp, Homo sapiens
gagcatctcactttt

SEQ ID NO: 1004014 - DNA, 15 bp, Homo sapiens
tgagcatctcacttt

SEQ ID NO: 1004015 - DNA, 15 bp, Homo sapiens
ctgagcatctcactt

SEQ ID NO: 1004016 - DNA, 15 bp, Homo sapiens
actgagcatctcact

SEQ ID NO: 1004017 - DNA, 15 bp, Homo sapiens
gactgagcatctcac

SEQ ID NO: 1004018 - DNA, 15 bp, Homo sapiens
ggactgagcatctca

SEQ ID NO: 1004019 - DNA, 15 bp, Homo sapiens
aggactgagcatctc

SEQ ID NO: 1004020 - DNA, 15 bp, Homo sapiens
aaggactgagcatct

SEQ ID NO: 1004021 - DNA, 15 bp, Homo sapiens
caaggactgagcatc

SEQ ID NO: 1004022 - DNA, 15 bp, Homo sapiens
tcaaggactgagcat

SEQ ID NO: 1004023 - DNA, 15 bp, Homo sapiens
ttcaaggactgagca

SEQ ID NO: 1004024 - DNA, 15 bp, Homo sapiens
attcaaggactgagc

SEQ ID NO: 1004025 - DNA, 15 bp, Homo sapiens
cattcaaggactgag

SEQ ID NO: 1004026 - DNA, 15 bp, Homo sapiens
tcattcaaggactga

SEQ ID NO: 1004027 - DNA, 15 bp, Homo sapiens
gtcattcaaggactg

SEQ ID NO: 1004028 - DNA, 15 bp, Homo sapiens
tgtcattcaaggact

SEQ ID NO: 1004029 - DNA, 15 bp, Homo sapiens
ttgtcattcaaggac

SEQ ID NO: 1004030 - DNA, 15 bp, Homo sapiens
tttgtcattcaagga

SEQ ID NO: 1004031 - DNA, 15 bp, Homo sapiens
ctttgtcattcaagg

SEQ ID NO: 1004032 - DNA, 15 bp, Homo sapiens
tctttgtcattcaag

SEQ ID NO: 1004033 - DNA, 15 bp, Homo sapiens
ttctttgtcattcaa

SEQ ID NO: 1004034 - DNA, 15 bp, Homo sapiens
attctttgtcattca

SEQ ID NO: 1004035 - DNA, 15 bp, Homo sapiens
cattctttgtcattc

SEQ ID NO: 1004036 - DNA, 15 bp, Homo sapiens
gcattctttgtcatt

SEQ ID NO: 1004037 - DNA, 15 bp, Homo sapiens
ggcattctttgtcat

SEQ ID NO: 1004038 - DNA, 15 bp, Homo sapiens
aggcattctttgtca

SEQ ID NO: 1004039 - DNA, 15 bp, Homo sapiens
caggcattctttgtc

SEQ ID NO: 1004040 - DNA, 15 bp, Homo sapiens
acaggcattctttgt

SEQ ID NO: 1004041 - DNA, 15 bp, Homo sapiens
tacaggcattctttg

SEQ ID NO: 1004042 - DNA, 15 bp, Homo sapiens
ctacaggcattcttt

SEQ ID NO: 1004043 - DNA, 15 bp, Homo sapiens
tctacaggcattctt

SEQ ID NO: 1004044 - DNA, 15 bp, Homo sapiens
ctctacaggcattct

SEQ ID NO: 1004045 - DNA, 15 bp, Homo sapiens
actctacaggcattc

SEQ ID NO: 1004046 - DNA, 15 bp, Homo sapiens
cactctacaggcatt

SEQ ID NO: 1004047 - DNA, 15 bp, Homo sapiens
gcactctacaggcat

SEQ ID NO: 1004048 - DNA, 15 bp, Homo sapiens
tgcactctacaggca

SEQ ID NO: 1004049 - DNA, 15 bp, Homo sapiens
ctgcactctacaggc

SEQ ID NO: 1004050 - DNA, 15 bp, Homo sapiens
cctgcactctacagg

SEQ ID NO: 1004051 - DNA, 15 bp, Homo sapiens
acctgcactctacag

SEQ ID NO: 1004052 - DNA, 15 bp, Homo sapiens
gacctgcactctaca

SEQ ID NO: 1004053 - DNA, 15 bp, Homo sapiens
tgacctgcactctac

SEQ ID NO: 1004054 - DNA, 15 bp, Homo sapiens
ttgacctgcactcta

SEQ ID NO: 1004055 - DNA, 15 bp, Homo sapiens
gttgacctgcactct

SEQ ID NO: 1004056 - DNA, 15 bp, Homo sapiens
agttgacctgcactc

SEQ ID NO: 1004057 - DNA, 15 bp, Homo sapiens
tagttgacctgcact

SEQ ID NO: 1004058 - DNA, 15 bp, Homo sapiens
gtagttgacctgcac

SEQ ID NO: 1004059 - DNA, 15 bp, Homo sapiens
tgtagttgacctgca

SEQ ID NO: 1004060 - DNA, 15 bp, Homo sapiens
atgtagttgacctgc

SEQ ID NO: 1004061 - DNA, 15 bp, Homo sapiens
tatgtagttgacctg

SEQ ID NO: 1004062 - DNA, 15 bp, Homo sapiens
atatgtagttgacct

SEQ ID NO: 1004063 - DNA, 15 bp, Homo sapiens
catatgtagttgacc

SEQ ID NO: 1004064 - DNA, 15 bp, Homo sapiens
gcatatgtagttgac

SEQ ID NO: 1004065 - DNA, 15 bp, Homo sapiens
tgcatatgtagttga

SEQ ID NO: 1004066 - DNA, 15 bp, Homo sapiens
gtgcatatgtagttg

SEQ ID NO: 1004067 - DNA, 15 bp, Homo sapiens
agtgcatatgtagtt

SEQ ID NO: 1004068 - DNA, 15 bp, Homo sapiens
aagtgcatatgtagt

SEQ ID NO: 1004069 - DNA, 15 bp, Homo sapiens
gaagtgcatatgtag

SEQ ID NO: 1004070 - DNA, 15 bp, Homo sapiens
tgaagtgcatatgta

SEQ ID NO: 1004071 - DNA, 15 bp, Homo sapiens
ttgaagtgcatatgt

SEQ ID NO: 1004072 - DNA, 15 bp, Homo sapiens
cttgaagtgcatatg

SEQ ID NO: 1004073 - DNA, 15 bp, Homo sapiens
tcttgaagtgcatat

SEQ ID NO: 1004074 - DNA, 15 bp, Homo sapiens
ttcttgaagtgcata

SEQ ID NO: 1004075 - DNA, 15 bp, Homo sapiens
cttcttgaagtgcat

SEQ ID NO: 1004076 - DNA, 15 bp, Homo sapiens
tcttcttgaagtgca

SEQ ID NO: 1004077 - DNA, 15 bp, Homo sapiens
atcttcttgaagtgc

SEQ ID NO: 1004078 - DNA, 15 bp, Homo sapiens
gatcttcttgaagtg

SEQ ID NO: 1004079 - DNA, 15 bp, Homo sapiens
agatcttcttgaagt

SEQ ID NO: 1004080 - DNA, 15 bp, Homo sapiens
aagatcttcttgaag

SEQ ID NO: 1004081 - DNA, 15 bp, Homo sapiens
gaagatcttcttgaa

SEQ ID NO: 1004082 - DNA, 15 bp, Homo sapiens
agaagatcttcttga

SEQ ID NO: 1004083 - DNA, 15 bp, Homo sapiens
cagaagatcttcttg

SEQ ID NO: 1004084 - DNA, 15 bp, Homo sapiens
tcagaagatcttctt

SEQ ID NO: 1004085 - DNA, 15 bp, Homo sapiens
ttcagaagatcttct

SEQ ID NO: 1004086 - DNA, 15 bp, Homo sapiens
tttcagaagatcttc

SEQ ID NO: 1004087 - DNA, 15 bp, Homo sapiens
atttcagaagatctt

SEQ ID NO: 1004088 - DNA, 15 bp, Homo sapiens
ggatttcagaagatc

SEQ ID NO: 1004089 - DNA, 15 bp, Homo sapiens
tggatttcagaagat

SEQ ID NO: 1004090 - DNA, 15 bp, Homo sapiens
ctggatttcagaaga

SEQ ID NO: 1004091 - DNA, 15 bp, Homo sapiens
actggatttcagaag

SEQ ID NO: 1004092 - DNA, 15 bp, Homo sapiens
tactggatttcagaa

SEQ ID NO: 1004093 - DNA, 15 bp, Homo sapiens
ctactggatttcaga

SEQ ID NO: 1004094 - DNA, 15 bp, Homo sapiens
actactggatttcag

SEQ ID NO: 1004095 - DNA, 15 bp, Homo sapiens
cactactggatttca

SEQ ID NO: 1004096 - DNA, 15 bp, Homo sapiens
acactactggatttc

SEQ ID NO: 1004097 - DNA, 15 bp, Homo sapiens
aacactactggattt

SEQ ID NO: 1004098 - DNA, 15 bp, Homo sapiens
gaacactactggatt

SEQ ID NO: 1004099 - DNA, 15 bp, Homo sapiens
agaacactactggat

SEQ ID NO: 1004100 - DNA, 15 bp, Homo sapiens
cagaacactactgga

SEQ ID NO: 1004101 - DNA, 15 bp, Homo sapiens
ccagaacactactgg

SEQ ID NO: 1004102 - DNA, 15 bp, Homo sapiens
tccagaacactactg

SEQ ID NO: 1004103 - DNA, 15 bp, Homo sapiens
gtccagaacactact

SEQ ID NO: 1004104 - DNA, 15 bp, Homo sapiens
tgtccagaacactac

SEQ ID NO: 1004105 - DNA, 15 bp, Homo sapiens
atgtccagaacacta

SEQ ID NO: 1004106 - DNA, 15 bp, Homo sapiens
aatgtccagaacact

SEQ ID NO: 1004107 - DNA, 15 bp, Homo sapiens
caatgtccagaacac

SEQ ID NO: 1004108 - DNA, 15 bp, Homo sapiens
ccaatgtccagaaca

SEQ ID NO: 1004109 - DNA, 15 bp, Homo sapiens
tccaatgtccagaac

SEQ ID NO: 1004110 - DNA, 15 bp, Homo sapiens
gtccaatgtccagaa

SEQ ID NO: 1004111 - DNA, 15 bp, Homo sapiens
agtccaatgtccaga

SEQ ID NO: 1004112 - DNA, 15 bp, Homo sapiens
cagtccaatgtccag

SEQ ID NO: 1004113 - DNA, 15 bp, Homo sapiens
gcagtccaatgtcca

SEQ ID NO: 1004114 - DNA, 15 bp, Homo sapiens
agcagtccaatgtcc

SEQ ID NO: 1004115 - DNA, 15 bp, Homo sapiens
aagcagtccaatgtc

SEQ ID NO: 1004116 - DNA, 15 bp, Homo sapiens
caagcagtccaatgt

SEQ ID NO: 1004117 - DNA, 15 bp, Homo sapiens
acaagcagtccaatg

SEQ ID NO: 1004118 - DNA, 15 bp, Homo sapiens
gacaagcagtccaat

SEQ ID NO: 1004119 - DNA, 15 bp, Homo sapiens
ggacaagcagtccaa

SEQ ID NO: 1004120 - DNA, 15 bp, Homo sapiens
gggacaagcagtcca

SEQ ID NO: 1004121 - DNA, 15 bp, Homo sapiens
agggacaagcagtcc

SEQ ID NO: 1004122 - DNA, 15 bp, Homo sapiens
cagggacaagcagtc

SEQ ID NO: 1004123 - DNA, 15 bp, Homo sapiens
ccagggacaagcagt

SEQ ID NO: 1004124 - DNA, 15 bp, Homo sapiens
cccagggacaagcag

SEQ ID NO: 1004125 - DNA, 15 bp, Homo sapiens
tcccagggacaagca

SEQ ID NO: 1004126 - DNA, 15 bp, Homo sapiens
ttcccagggacaagc

SEQ ID NO: 1004127 - DNA, 15 bp, Homo sapiens
cttcccagggacaag

SEQ ID NO: 1004128 - DNA, 15 bp, Homo sapiens
acttcccagggacaa

SEQ ID NO: 1004129 - DNA, 15 bp, Homo sapiens
tacttcccagggaca

SEQ ID NO: 1004130 - DNA, 15 bp, Homo sapiens
ctacttcccagggac

SEQ ID NO: 1004131 - DNA, 15 bp, Homo sapiens
gctacttcccaggga

SEQ ID NO: 1004132 - DNA, 15 bp, Homo sapiens
tgctacttcccaggg

SEQ ID NO: 1004133 - DNA, 15 bp, Homo sapiens
ctgctacttcccagg

SEQ ID NO: 1004134 - DNA, 15 bp, Homo sapiens
gctgctacttcccag

SEQ ID NO: 1004135 - DNA, 15 bp, Homo sapiens
tgctgctacttccca

SEQ ID NO: 1004136 - DNA, 15 bp, Homo sapiens
ctgctgctacttccc

SEQ ID NO: 1004137 - DNA, 15 bp, Homo sapiens
tctgctgctacttcc

SEQ ID NO: 1004138 - DNA, 15 bp, Homo sapiens
ttctgctgctacttc

SEQ ID NO: 1004139 - DNA, 15 bp, Homo sapiens
tttctgctgctactt

SEQ ID NO: 1004140 - DNA, 15 bp, Homo sapiens
atttctgctgctact

SEQ ID NO: 1004141 - DNA, 15 bp, Homo sapiens
gatttctgctgctac

SEQ ID NO: 1004142 - DNA, 15 bp, Homo sapiens
tgatttctgctgcta

SEQ ID NO: 1004143 - DNA, 15 bp, Homo sapiens
atgatttctgctgct

SEQ ID NO: 1004144 - DNA, 15 bp, Homo sapiens
gatgatttctgctgc

SEQ ID NO: 1004145 - DNA, 15 bp, Homo sapiens
tgatgatttctgctg

SEQ ID NO: 1004146 - DNA, 15 bp, Homo sapiens
ctgatgatttctgct

SEQ ID NO: 1004147 - DNA, 15 bp, Homo sapiens
cctgatgatttctgc

SEQ ID NO: 1004148 - DNA, 15 bp, Homo sapiens
acctgatgatttctg

SEQ ID NO: 1004149 - DNA, 15 bp, Homo sapiens
cacctgatgatttct

SEQ ID NO: 1004150 - DNA, 15 bp, Homo sapiens
ccacctgatgatttc

SEQ ID NO: 1004151 - DNA, 15 bp, Homo sapiens
accacctgatgattt

SEQ ID NO: 1004152 - DNA, 15 bp, Homo sapiens
caccacctgatgatt

SEQ ID NO: 1004153 - DNA, 15 bp, Homo sapiens
tcaccacctgatgat

SEQ ID NO: 1004154 - DNA, 15 bp, Homo sapiens
ttcaccacctgatga

SEQ ID NO: 1004155 - DNA, 15 bp, Homo sapiens
gttcaccacctgatg

SEQ ID NO: 1004156 - DNA, 15 bp, Homo sapiens
tgttcaccacctgat

SEQ ID NO: 1004157 - DNA, 15 bp, Homo sapiens
ctgttcaccacctga

SEQ ID NO: 1004158 - DNA, 15 bp, Homo sapiens
tctgttcaccacctg

SEQ ID NO: 1004159 - DNA, 15 bp, Homo sapiens
ttctgttcaccacct

SEQ ID NO: 1004160 - DNA, 15 bp, Homo sapiens
cttctgttcaccacc

SEQ ID NO: 1004161 - DNA, 15 bp, Homo sapiens
tcttctgttcaccac

SEQ ID NO: 1004162 - DNA, 15 bp, Homo sapiens
ttcttctgttcacca

SEQ ID NO: 1004163 - DNA, 15 bp, Homo sapiens
tttcttctgttcacc

SEQ ID NO: 1004164 - DNA, 15 bp, Homo sapiens
ttttcttctgttcac

SEQ ID NO: 1004165 - DNA, 15 bp, Homo sapiens
tttttcttctgttca

SEQ ID NO: 1004166 - DNA, 15 bp, Homo sapiens
ctttttcttctgttc

SEQ ID NO: 1004167 - DNA, 15 bp, Homo sapiens
tctttttcttctgtt

SEQ ID NO: 1004168 - DNA, 15 bp, Homo sapiens
ttctttttcttctgt

SEQ ID NO: 1004169 - DNA, 15 bp, Homo sapiens
tttctttttcttctg

SEQ ID NO: 1004170 - DNA, 15 bp, Homo sapiens
ttttctttttcttct

SEQ ID NO: 1004171 - DNA, 15 bp, Homo sapiens
cttttctttttcttc

SEQ ID NO: 1004172 - DNA, 15 bp, Homo sapiens
gcttttctttttctt

SEQ ID NO: 1004173 - DNA, 15 bp, Homo sapiens
agcttttctttttct

SEQ ID NO: 1004174 - DNA, 15 bp, Homo sapiens
gagcttttctttttc

SEQ ID NO: 1004175 - DNA, 15 bp, Homo sapiens
agagcttttcttttt

SEQ ID NO: 1004176 - DNA, 15 bp, Homo sapiens
aagagcttttctttt

SEQ ID NO: 1004177 - DNA, 15 bp, Homo sapiens
gaagagcttttcttt

SEQ ID NO: 1004178 - DNA, 15 bp, Homo sapiens
ggaagagcttttctt

SEQ ID NO: 1004179 - DNA, 15 bp, Homo sapiens
aggaagagcttttct

SEQ ID NO: 1004180 - DNA, 15 bp, Homo sapiens
aaggaagagcttttc

SEQ ID NO: 1004181 - DNA, 15 bp, Homo sapiens
aaaggaagagctttt

SEQ ID NO: 1004182 - DNA, 15 bp, Homo sapiens
aaaaggaagagcttt

SEQ ID NO: 1004183 - DNA, 15 bp, Homo sapiens
aaaaaggaagagctt

SEQ ID NO: 1004184 - DNA, 15 bp, Homo sapiens
caaaaaggaagagct

SEQ ID NO: 1004185 - DNA, 15 bp, Homo sapiens
tcaaaaaggaagagc

SEQ ID NO: 1004186 - DNA, 15 bp, Homo sapiens
ttcaaaaaggaagag

SEQ ID NO: 1004187 - DNA, 15 bp, Homo sapiens
tttcaaaaaggaaga

SEQ ID NO: 1004188 - DNA, 15 bp, Homo sapiens
ctttcaaaaaggaag

SEQ ID NO: 1004189 - DNA, 15 bp, Homo sapiens
actttcaaaaaggaa

SEQ ID NO: 1004190 - DNA, 15 bp, Homo sapiens
gactttcaaaaagga

SEQ ID NO: 1004191 - DNA, 15 bp, Homo sapiens
agactttcaaaaagg

SEQ ID NO: 1004192 - DNA, 15 bp, Homo sapiens
cagactttcaaaaag

SEQ ID NO: 1004193 - DNA, 15 bp, Homo sapiens
acagactttcaaaaa

SEQ ID NO: 1004194 - DNA, 15 bp, Homo sapiens
aacagactttcaaaa

SEQ ID NO: 1004195 - DNA, 15 bp, Homo sapiens
aaacagactttcaaa

SEQ ID NO: 1004196 - DNA, 15 bp, Homo sapiens
aaaacagactttcaa

SEQ ID NO: 1004197 - DNA, 15 bp, Homo sapiens
aaaaacagactttca

SEQ ID NO: 1004198 - DNA, 15 bp, Homo sapiens
aaaaaacagactttc

SEQ ID NO: 1004199 - DNA, 15 bp, Homo sapiens
caaaaaacagacttt

SEQ ID NO: 1004200 - DNA, 15 bp, Homo sapiens
tcaaaaaacagactt

SEQ ID NO: 1004201 - DNA, 15 bp, Homo sapiens
ttcaaaaaacagact

SEQ ID NO: 1004202 - DNA, 15 bp, Homo sapiens
attcaaaaaacagac

SEQ ID NO: 1004203 - DNA, 15 bp, Homo sapiens
tattcaaaaaacaga

SEQ ID NO: 1004204 - DNA, 15 bp, Homo sapiens
ttattcaaaaaacag

SEQ ID NO: 1004205 - DNA, 15 bp, Homo sapiens
tttattcaaaaaaca

SEQ ID NO: 1004206 - DNA, 15 bp, Homo sapiens
ttttattcaaaaaac

SEQ ID NO: 1004207 - DNA, 15 bp, Homo sapiens
cttttattcaaaaaa

SEQ ID NO: 1004208 - DNA, 15 bp, Homo sapiens
gcttttattcaaaaa

SEQ ID NO: 1004209 - DNA, 15 bp, Homo sapiens
ggcttttattcaaaa

SEQ ID NO: 1004210 - DNA, 15 bp, Homo sapiens
tggcttttattcaaa

SEQ ID NO: 1004211 - DNA, 15 bp, Homo sapiens
ttggcttttattcaa

SEQ ID NO: 1004212 - DNA, 15 bp, Homo sapiens
attggcttttattca

SEQ ID NO: 1004213 - DNA, 15 bp, Homo sapiens
tattggcttttattc

SEQ ID NO: 1004214 - DNA, 15 bp, Homo sapiens
atattggcttttatt

SEQ ID NO: 1004215 - DNA, 15 bp, Homo sapiens
aatattggcttttat

SEQ ID NO: 1004216 - DNA, 15 bp, Homo sapiens
gaatattggctttta

SEQ ID NO: 1004217 - DNA, 15 bp, Homo sapiens
agaatattggctttt

SEQ ID NO: 1004218 - DNA, 15 bp, Homo sapiens
aagaatattggcttt

SEQ ID NO: 1004219 - DNA, 15 bp, Homo sapiens
aaagaatattggctt

SEQ ID NO: 1004220 - DNA, 15 bp, Homo sapiens
aaaagaatattggct

SEQ ID NO: 1004221 - DNA, 15 bp, Homo sapiens
taaaagaatattggc

SEQ ID NO: 1004222 - DNA, 15 bp, Homo sapiens
ataaaagaatattgg

SEQ ID NO: 1004223 - DNA, 15 bp, Homo sapiens
tataaaagaatattg

SEQ ID NO: 1004224 - DNA, 15 bp, Homo sapiens
ttataaaagaatatt

SEQ ID NO: 1004225 - DNA, 15 bp, Homo sapiens
gttataaaagaatat

SEQ ID NO: 1004226 - DNA, 15 bp, Homo sapiens
agttataaaagaata

SEQ ID NO: 1004227 - DNA, 15 bp, Homo sapiens
tagttataaaagaat

SEQ ID NO: 1004228 - DNA, 15 bp, Homo sapiens
ctagttataaaagaa

SEQ ID NO: 1004229 - DNA, 15 bp, Homo sapiens
tctagttataaaaga

SEQ ID NO: 1004230 - DNA, 15 bp, Homo sapiens
atctagttataaaag

SEQ ID NO: 1004231 - DNA, 15 bp, Homo sapiens
aatctagttataaaa

SEQ ID NO: 1004232 - DNA, 15 bp, Homo sapiens
aaatctagttataaa

SEQ ID NO: 1004233 - DNA, 15 bp, Homo sapiens
aaaatctagttataa

SEQ ID NO: 1004234 - DNA, 15 bp, Homo sapiens
gaaaatctagttata

SEQ ID NO: 1004235 - DNA, 15 bp, Homo sapiens
ggaaaatctagttat

SEQ ID NO: 1004236 - DNA, 15 bp, Homo sapiens
aggaaaatctagtta

SEQ ID NO: 1004237 - DNA, 15 bp, Homo sapiens
aaggaaaatctagtt

SEQ ID NO: 1004238 - DNA, 15 bp, Homo sapiens
gaaggaaaatctagt

SEQ ID NO: 1004239 - DNA, 15 bp, Homo sapiens
agaaggaaaatctag

SEQ ID NO: 1004240 - DNA, 15 bp, Homo sapiens
gagaaggaaaatcta

SEQ ID NO: 1004241 - DNA, 15 bp, Homo sapiens
agagaaggaaaatct

SEQ ID NO: 1004242 - DNA, 15 bp, Homo sapiens
gagagaaggaaaatc

SEQ ID NO: 1004243 - DNA, 15 bp, Homo sapiens
ggagagaaggaaaat

SEQ ID NO: 1004244 - DNA, 15 bp, Homo sapiens
tggagagaaggaaaa

SEQ ID NO: 1004245 - DNA, 15 bp, Homo sapiens
atggagagaaggaaa

SEQ ID NO: 1004246 - DNA, 15 bp, Homo sapiens
aatggagagaaggaa

SEQ ID NO: 1004247 - DNA, 15 bp, Homo sapiens
gaatggagagaagga

SEQ ID NO: 1004248 - DNA, 15 bp, Homo sapiens
ggaatggagagaagg

SEQ ID NO: 1004249 - DNA, 15 bp, Homo sapiens
gggaatggagagaag

SEQ ID NO: 1004250 - DNA, 15 bp, Homo sapiens
ggggaatggagagaa

SEQ ID NO: 1004251 - DNA, 15 bp, Homo sapiens
aggggaatggagaga

SEQ ID NO: 1004252 - DNA, 15 bp, Homo sapiens
caggggaatggagag

SEQ ID NO: 1004253 - DNA, 15 bp, Homo sapiens
acaggggaatggaga

SEQ ID NO: 1004254 - DNA, 15 bp, Homo sapiens
gacaggggaatggag

SEQ ID NO: 1004255 - DNA, 15 bp, Homo sapiens
ggacaggggaatgga

SEQ ID NO: 1004256 - DNA, 15 bp, Homo sapiens
gggacaggggaatgg

SEQ ID NO: 1004257 - DNA, 15 bp, Homo sapiens
agggacaggggaatg

SEQ ID NO: 1004258 - DNA, 15 bp, Homo sapiens
gagggacaggggaat

SEQ ID NO: 1004259 - DNA, 15 bp, Homo sapiens
agagggacaggggaa

SEQ ID NO: 1004260 - DNA, 15 bp, Homo sapiens
gagagggacagggga

SEQ ID NO: 1004261 - DNA, 15 bp, Homo sapiens
agagagggacagggg

SEQ ID NO: 1004262 - DNA, 15 bp, Homo sapiens
gagagagggacaggg

SEQ ID NO: 1004263 - DNA, 15 bp, Homo sapiens
agagagagggacagg

SEQ ID NO: 1004264 - DNA, 15 bp, Homo sapiens
aagagagagggacag

SEQ ID NO: 1004265 - DNA, 15 bp, Homo sapiens
gaagagagagggaca

SEQ ID NO: 1004266 - DNA, 15 bp, Homo sapiens
ggaagagagagggac

SEQ ID NO: 1004267 - DNA, 15 bp, Homo sapiens
aggaagagagaggga

SEQ ID NO: 1004268 - DNA, 15 bp, Homo sapiens
gaggaagagagaggg

SEQ ID NO: 1004269 - DNA, 15 bp, Homo sapiens
gagaggaagagagag

SEQ ID NO: 1004270 - DNA, 15 bp, Homo sapiens
agagaggaagagaga

SEQ ID NO: 1004271 - DNA, 15 bp, Homo sapiens
aagagaggaagagag

SEQ ID NO: 1004272 - DNA, 15 bp, Homo sapiens
gaagagaggaagaga

SEQ ID NO: 1004273 - DNA, 15 bp, Homo sapiens
agaagagaggaagag

SEQ ID NO: 1004274 - DNA, 15 bp, Homo sapiens
aagaagagaggaaga

SEQ ID NO: 1004275 - DNA, 15 bp, Homo sapiens
gaagaagagaggaag

SEQ ID NO: 1004276 - DNA, 15 bp, Homo sapiens
ggaagaagagaggaa

SEQ ID NO: 1004277 - DNA, 15 bp, Homo sapiens
tggaagaagagagga

SEQ ID NO: 1004278 - DNA, 15 bp, Homo sapiens
ctggaagaagagagg

SEQ ID NO: 1004279 - DNA, 15 bp, Homo sapiens
tctggaagaagagag

SEQ ID NO: 1004280 - DNA, 15 bp, Homo sapiens
atctggaagaagaga

SEQ ID NO: 1004281 - DNA, 15 bp, Homo sapiens
gatctggaagaagag

SEQ ID NO: 1004282 - DNA, 15 bp, Homo sapiens
agatctggaagaaga

SEQ ID NO: 1004283 - DNA, 15 bp, Homo sapiens
aagatctggaagaag

SEQ ID NO: 1004284 - DNA, 15 bp, Homo sapiens
gaagatctggaagaa

SEQ ID NO: 1004285 - DNA, 15 bp, Homo sapiens
tgaagatctggaaga

SEQ ID NO: 1004286 - DNA, 15 bp, Homo sapiens
ctgaagatctggaag

SEQ ID NO: 1004287 - DNA, 15 bp, Homo sapiens
cctgaagatctggaa

SEQ ID NO: 1004288 - DNA, 15 bp, Homo sapiens
ccctgaagatctgga

SEQ ID NO: 1004289 - DNA, 15 bp, Homo sapiens
cccctgaagatctgg

SEQ ID NO: 1004290 - DNA, 15 bp, Homo sapiens
ccccctgaagatctg

SEQ ID NO: 1004291 - DNA, 15 bp, Homo sapiens
gccccctgaagatct

SEQ ID NO: 1004292 - DNA, 15 bp, Homo sapiens
agccccctgaagatc

SEQ ID NO: 1004293 - DNA, 15 bp, Homo sapiens
tagccccctgaagat

SEQ ID NO: 1004294 - DNA, 15 bp, Homo sapiens
ctagccccctgaaga

SEQ ID NO: 1004295 - DNA, 15 bp, Homo sapiens
tctagccccctgaag

SEQ ID NO: 1004296 - DNA, 15 bp, Homo sapiens
ttctagccccctgaa

SEQ ID NO: 1004297 - DNA, 15 bp, Homo sapiens
tttctagccccctga

SEQ ID NO: 1004298 - DNA, 15 bp, Homo sapiens
atttctagccccctg

SEQ ID NO: 1004299 - DNA, 15 bp, Homo sapiens
gatttctagccccct

SEQ ID NO: 1004300 - DNA, 15 bp, Homo sapiens
agatttctagccccc

SEQ ID NO: 1004301 - DNA, 15 bp, Homo sapiens
cagatttctagcccc

SEQ ID NO: 1004302 - DNA, 15 bp, Homo sapiens
acagatttctagccc

SEQ ID NO: 1004303 - DNA, 15 bp, Homo sapiens
aacagatttctagcc

SEQ ID NO: 1004304 - DNA, 15 bp, Homo sapiens
caacagatttctagc

SEQ ID NO: 1004305 - DNA, 15 bp, Homo sapiens
gcaacagatttctag

SEQ ID NO: 1004306 - DNA, 15 bp, Homo sapiens
agcaacagatttcta

SEQ ID NO: 1004307 - DNA, 15 bp, Homo sapiens
tagcaacagatttct

SEQ ID NO: 1004308 - DNA, 15 bp, Homo sapiens
atagcaacagatttc

SEQ ID NO: 1004309 - DNA, 15 bp, Homo sapiens
catagcaacagattt

SEQ ID NO: 1004310 - DNA, 15 bp, Homo sapiens
ccatagcaacagatt

SEQ ID NO: 1004311 - DNA, 15 bp, Homo sapiens
cccatagcaacagat

SEQ ID NO: 1004312 - DNA, 15 bp, Homo sapiens
gcccatagcaacaga

SEQ ID NO: 1004313 - DNA, 15 bp, Homo sapiens
ggcccatagcaacag

SEQ ID NO: 1004314 - DNA, 15 bp, Homo sapiens
gggcccatagcaaca

SEQ ID NO: 1004315 - DNA, 15 bp, Homo sapiens
agggcccatagcaac

SEQ ID NO: 1004316 - DNA, 15 bp, Homo sapiens
aagggcccatagcaa

SEQ ID NO: 1004317 - DNA, 15 bp, Homo sapiens
gaagggcccatagca

SEQ ID NO: 1004318 - DNA, 15 bp, Homo sapiens
tgaagggcccatagc

SEQ ID NO: 1004319 - DNA, 15 bp, Homo sapiens
gtgaagggcccatag

SEQ ID NO: 1004320 - DNA, 15 bp, Homo sapiens
ggtgaagggcccata

SEQ ID NO: 1004321 - DNA, 15 bp, Homo sapiens
tggtgaagggcccat

SEQ ID NO: 1004322 - DNA, 15 bp, Homo sapiens
ttggtgaagggccca

SEQ ID NO: 1004323 - DNA, 15 bp, Homo sapiens
gttggtgaagggccc

SEQ ID NO: 1004324 - DNA, 15 bp, Homo sapiens
tgttggtgaagggcc

SEQ ID NO: 1004325 - DNA, 15 bp, Homo sapiens
atgttggtgaagggc

SEQ ID NO: 1004326 - DNA, 15 bp, Homo sapiens
catgttggtgaaggg

SEQ ID NO: 1004327 - DNA, 15 bp, Homo sapiens
gcatgttggtgaagg

SEQ ID NO: 1004328 - DNA, 15 bp, Homo sapiens
ggcatgttggtgaag

SEQ ID NO: 1004329 - DNA, 15 bp, Homo sapiens
gggcatgttggtgaa

SEQ ID NO: 1004330 - DNA, 15 bp, Homo sapiens
tgggcatgttggtga

SEQ ID NO: 1004331 - DNA, 15 bp, Homo sapiens
gtgggcatgttggtg

SEQ ID NO: 1004332 - DNA, 15 bp, Homo sapiens
tgtgggcatgttggt

SEQ ID NO: 1004333 - DNA, 15 bp, Homo sapiens
ctgtgggcatgttgg

SEQ ID NO: 1004334 - DNA, 15 bp, Homo sapiens
cctgtgggcatgttg

SEQ ID NO: 1004335 - DNA, 15 bp, Homo sapiens
acctgtgggcatgtt

SEQ ID NO: 1004336 - DNA, 15 bp, Homo sapiens
tacctgtgggcatgt

SEQ ID NO: 1004337 - DNA, 15 bp, Homo sapiens
ttacctgtgggcatg

SEQ ID NO: 1004338 - DNA, 15 bp, Homo sapiens
cttacctgtgggcat

SEQ ID NO: 1004339 - DNA, 15 bp, Homo sapiens
tcttacctgtgggca

SEQ ID NO: 1004340 - DNA, 15 bp, Homo sapiens
ctcttacctgtgggc

SEQ ID NO: 1004341 - DNA, 15 bp, Homo sapiens
gctcttacctgtggg

SEQ ID NO: 1004342 - DNA, 15 bp, Homo sapiens
ggctcttacctgtgg

SEQ ID NO: 1004343 - DNA, 15 bp, Homo sapiens
aggctcttacctgtg

SEQ ID NO: 1004344 - DNA, 15 bp, Homo sapiens
caggctcttacctgt

SEQ ID NO: 1004345 - DNA, 15 bp, Homo sapiens
ccaggctcttacctg

SEQ ID NO: 1004346 - DNA, 15 bp, Homo sapiens
cccaggctcttacct

SEQ ID NO: 1004347 - DNA, 15 bp, Homo sapiens
tcccaggctcttacc

SEQ ID NO: 1004348 - DNA, 15 bp, Homo sapiens
ctcccaggctcttac

SEQ ID NO: 1004349 - DNA, 15 bp, Homo sapiens
tctcccaggctctta

SEQ ID NO: 1004350 - DNA, 15 bp, Homo sapiens
ttctcccaggctctt

SEQ ID NO: 1004351 - DNA, 15 bp, Homo sapiens
gttctcccaggctct

SEQ ID NO: 1004352 - DNA, 15 bp, Homo sapiens
ggttctcccaggctc

SEQ ID NO: 1004353 - DNA, 15 bp, Homo sapiens
gggttctcccaggct

SEQ ID NO: 1004354 - DNA, 15 bp, Homo sapiens
ggggttctcccaggc

SEQ ID NO: 1004355 - DNA, 15 bp, Homo sapiens
tggggttctcccagg

SEQ ID NO: 1004356 - DNA, 15 bp, Homo sapiens
ctggggttctcccag

SEQ ID NO: 1004357 - DNA, 15 bp, Homo sapiens
tctggggttctccca

SEQ ID NO: 1004358 - DNA, 15 bp, Homo sapiens
ctctggggttctccc

SEQ ID NO: 1004359 - DNA, 15 bp, Homo sapiens
actctggggttctcc

SEQ ID NO: 1004360 - DNA, 15 bp, Homo sapiens
aactctggggttctc

SEQ ID NO: 1004361 - DNA, 15 bp, Homo sapiens
gaactctggggttct

SEQ ID NO: 1004362 - DNA, 15 bp, Homo sapiens
ggaactctggggttc

SEQ ID NO: 1004363 - DNA, 15 bp, Homo sapiens
tggaactctggggtt

SEQ ID NO: 1004364 - DNA, 15 bp, Homo sapiens
tcaagacgcgcccag

SEQ ID NO: 1004365 - DNA, 15 bp, Homo sapiens
atcaagacgcgccca

SEQ ID NO: 1004366 - DNA, 15 bp, Homo sapiens
catcaagacgcgccc

SEQ ID NO: 1004367 - DNA, 15 bp, Homo sapiens
gcatcaagacgcgcc

SEQ ID NO: 1004368 - DNA, 15 bp, Homo sapiens
agcatcaagacgcgc

SEQ ID NO: 1004369 - DNA, 15 bp, Homo sapiens
gagcatcaagacgcg

SEQ ID NO: 1004370 - DNA, 15 bp, Homo sapiens
agagcatcaagacgc

SEQ ID NO: 1004371 - DNA, 15 bp, Homo sapiens
gagagcatcaagacg

SEQ ID NO: 1004372 - DNA, 15 bp, Homo sapiens
tgagagcatcaagac

SEQ ID NO: 1004373 - DNA, 15 bp, Homo sapiens
ttgagagcatcaaga

SEQ ID NO: 1004374 - DNA, 15 bp, Homo sapiens
gttgagagcatcaag

SEQ ID NO: 1004375 - DNA, 15 bp, Homo sapiens
tgttgagagcatcaa

SEQ ID NO: 1004376 - DNA, 15 bp, Homo sapiens
ctgttgagagcatca

SEQ ID NO: 1004377 - DNA, 15 bp, Homo sapiens
gctgttgagagcatc

SEQ ID NO: 1004378 - DNA, 15 bp, Homo sapiens
tgctgttgagagcat

SEQ ID NO: 1004379 - DNA, 15 bp, Homo sapiens
ctgctgttgagagca

SEQ ID NO: 1004380 - DNA, 15 bp, Homo sapiens
gctgctgttgagagc

SEQ ID NO: 1004381 - DNA, 15 bp, Homo sapiens
ggctgctgttgagag

SEQ ID NO: 1004382 - DNA, 15 bp, Homo sapiens
gggctgctgttgaga

SEQ ID NO: 1004383 - DNA, 15 bp, Homo sapiens
agggctgctgttgag

SEQ ID NO: 1004384 - DNA, 15 bp, Homo sapiens
gagggctgctgttga

SEQ ID NO: 1004385 - DNA, 15 bp, Homo sapiens
tgagggctgctgttg

SEQ ID NO: 1004386 - DNA, 15 bp, Homo sapiens
ctgagggctgctgtt

SEQ ID NO: 1004387 - DNA, 15 bp, Homo sapiens
cctgagggctgctgt

SEQ ID NO: 1004388 - DNA, 15 bp, Homo sapiens
tcctgagggctgctg

SEQ ID NO: 1004389 - DNA, 15 bp, Homo sapiens
atcctgagggctgct

SEQ ID NO: 1004390 - DNA, 15 bp, Homo sapiens
aatcctgagggctgc

SEQ ID NO: 1004391 - DNA, 15 bp, Homo sapiens
gaatcctgagggctg

SEQ ID NO: 1004392 - DNA, 15 bp, Homo sapiens
agaatcctgagggct

SEQ ID NO: 1004393 - DNA, 15 bp, Homo sapiens
cagaatcctgagggc

SEQ ID NO: 1004394 - DNA, 15 bp, Homo sapiens
ccagaatcctgaggg

SEQ ID NO: 1004395 - DNA, 15 bp, Homo sapiens
tccagaatcctgagg

SEQ ID NO: 1004396 - DNA, 15 bp, Homo sapiens
gtccagaatcctgag

SEQ ID NO: 1004397 - DNA, 15 bp, Homo sapiens
agtccagaatcctga

SEQ ID NO: 1004398 - DNA, 15 bp, Homo sapiens
cagtccagaatcctg

SEQ ID NO: 1004399 - DNA, 15 bp, Homo sapiens
acagtccagaatcct

SEQ ID NO: 1004400 - DNA, 15 bp, Homo sapiens
cacagtccagaatcc

SEQ ID NO: 1004401 - DNA, 15 bp, Homo sapiens
ccacagtccagaatc

SEQ ID NO: 1004402 - DNA, 15 bp, Homo sapiens
cccacagtccagaat

SEQ ID NO: 1004403 - DNA, 15 bp, Homo sapiens
acccacagtccagaa

SEQ ID NO: 1004404 - DNA, 15 bp, Homo sapiens
gacccacagtccaga

SEQ ID NO: 1004405 - DNA, 15 bp, Homo sapiens
ggacccacagtccag

SEQ ID NO: 1004406 - DNA, 15 bp, Homo sapiens
gggacccacagtcca

SEQ ID NO: 1004407 - DNA, 15 bp, Homo sapiens
tgggacccacagtcc

SEQ ID NO: 1004408 - DNA, 15 bp, Homo sapiens
gtgggacccacagtc

SEQ ID NO: 1004409 - DNA, 15 bp, Homo sapiens
tgtgggacccacagt

SEQ ID NO: 1004410 - DNA, 15 bp, Homo sapiens
atgtgggacccacag

SEQ ID NO: 1004411 - DNA, 15 bp, Homo sapiens
aatgtgggacccaca

SEQ ID NO: 1004412 - DNA, 15 bp, Homo sapiens
gaatgtgggacccac

SEQ ID NO: 1004413 - DNA, 15 bp, Homo sapiens
ggaatgtgggaccca

SEQ ID NO: 1004414 - DNA, 15 bp, Homo sapiens
tggaatgtgggaccc

SEQ ID NO: 1004415 - DNA, 15 bp, Homo sapiens
ctggaatgtgggacc

SEQ ID NO: 1004416 - DNA, 15 bp, Homo sapiens
tctggaatgtgggac

SEQ ID NO: 1004417 - DNA, 15 bp, Homo sapiens
atctggaatgtggga

SEQ ID NO: 1004418 - DNA, 15 bp, Homo sapiens
tatctggaatgtggg

SEQ ID NO: 1004419 - DNA, 15 bp, Homo sapiens
gtatctggaatgtgg

SEQ ID NO: 1004420 - DNA, 15 bp, Homo sapiens
ggtatctggaatgtg

SEQ ID NO: 1004421 - DNA, 15 bp, Homo sapiens
tggtatctggaatgt

SEQ ID NO: 1004422 - DNA, 15 bp, Homo sapiens
atggtatctggaatg

SEQ ID NO: 1004423 - DNA, 15 bp, Homo sapiens
aatggtatctggaat

SEQ ID NO: 1004424 - DNA, 15 bp, Homo sapiens
aaatggtatctggaa

SEQ ID NO: 1004425 - DNA, 15 bp, Homo sapiens
caaatggtatctgga

SEQ ID NO: 1004426 - DNA, 15 bp, Homo sapiens
acaaatggtatctgg

SEQ ID NO: 1004427 - DNA, 15 bp, Homo sapiens
cacaaatggtatctg

SEQ ID NO: 1004428 - DNA, 15 bp, Homo sapiens
ccacaaatggtatct

SEQ ID NO: 1004429 - DNA, 15 bp, Homo sapiens
tccacaaatggtatc

SEQ ID NO: 1004430 - DNA, 15 bp, Homo sapiens
ttccacaaatggtat

SEQ ID NO: 1004431 - DNA, 15 bp, Homo sapiens
attccacaaatggta

SEQ ID NO: 1004432 - DNA, 15 bp, Homo sapiens
cattccacaaatggt

SEQ ID NO: 1004433 - DNA, 15 bp, Homo sapiens
ccattccacaaatgg

SEQ ID NO: 1004434 - DNA, 15 bp, Homo sapiens
gccattccacaaatg

SEQ ID NO: 1004435 - DNA, 15 bp, Homo sapiens
agccattccacaaat

SEQ ID NO: 1004436 - DNA, 15 bp, Homo sapiens
cagccattccacaaa

SEQ ID NO: 1004437 - DNA, 15 bp, Homo sapiens
ccagccattccacaa

SEQ ID NO: 1004438 - DNA, 15 bp, Homo sapiens
tccagccattccaca

SEQ ID NO: 1004439 - DNA, 15 bp, Homo sapiens
atccagccattccac

SEQ ID NO: 1004440 - DNA, 15 bp, Homo sapiens
catccagccattcca

SEQ ID NO: 1004441 - DNA, 15 bp, Homo sapiens
tcatccagccattcc

SEQ ID NO: 1004442 - DNA, 15 bp, Homo sapiens
ctcatccagccattc

SEQ ID NO: 1004443 - DNA, 15 bp, Homo sapiens
tctcatccagccatt

SEQ ID NO: 1004444 - DNA, 15 bp, Homo sapiens
ttctcatccagccat

SEQ ID NO: 1004445 - DNA, 15 bp, Homo sapiens
tttctcatccagcca

SEQ ID NO: 1004446 - DNA, 15 bp, Homo sapiens
ttttctcatccagcc

SEQ ID NO: 1004447 - DNA, 15 bp, Homo sapiens
attttctcatccagc

SEQ ID NO: 1004448 - DNA, 15 bp, Homo sapiens
aattttctcatccag

SEQ ID NO: 1004449 - DNA, 15 bp, Homo sapiens
caattttctcatcca

SEQ ID NO: 1004450 - DNA, 15 bp, Homo sapiens
gcaattttctcatcc

SEQ ID NO: 1004451 - DNA, 15 bp, Homo sapiens
tgcaattttctcatc

SEQ ID NO: 1004452 - DNA, 15 bp, Homo sapiens
ttgcaattttctcat

SEQ ID NO: 1004453 - DNA, 15 bp, Homo sapiens
gttgcaattttctca

SEQ ID NO: 1004454 - DNA, 15 bp, Homo sapiens
tgttgcaattttctc

SEQ ID NO: 1004455 - DNA, 15 bp, Homo sapiens
ctgttgcaattttct

SEQ ID NO: 1004456 - DNA, 15 bp, Homo sapiens
gctgttgcaattttc

SEQ ID NO: 1004457 - DNA, 15 bp, Homo sapiens
tgctgttgcaatttt

SEQ ID NO: 1004458 - DNA, 15 bp, Homo sapiens
gtgctgttgcaattt

SEQ ID NO: 1004459 - DNA, 15 bp, Homo sapiens
ggtgctgttgcaatt

SEQ ID NO: 1004460 - DNA, 15 bp, Homo sapiens
gggtgctgttgcaat

SEQ ID NO: 1004461 - DNA, 15 bp, Homo sapiens
agggtgctgttgcaa

SEQ ID NO: 1004462 - DNA, 15 bp, Homo sapiens
gagggtgctgttgca

SEQ ID NO: 1004463 - DNA, 15 bp, Homo sapiens
tgagggtgctgttgc

SEQ ID NO: 1004464 - DNA, 15 bp, Homo sapiens
atgagggtgctgttg

SEQ ID NO: 1004465 - DNA, 15 bp, Homo sapiens
aatgagggtgctgtt

SEQ ID NO: 1004466 - DNA, 15 bp, Homo sapiens
aaatgagggtgctgt

SEQ ID NO: 1004467 - DNA, 15 bp, Homo sapiens
gaaatgagggtgctg

SEQ ID NO: 1004468 - DNA, 15 bp, Homo sapiens
ggaaatgagggtgct

SEQ ID NO: 1004469 - DNA, 15 bp, Homo sapiens
tggaaatgagggtgc

SEQ ID NO: 1004470 - DNA, 15 bp, Homo sapiens
ctggaaatgagggtg

SEQ ID NO: 1004471 - DNA, 15 bp, Homo sapiens
actggaaatgagggt

SEQ ID NO: 1004472 - DNA, 15 bp, Homo sapiens
aactggaaatgaggg

SEQ ID NO: 1004473 - DNA, 15 bp, Homo sapiens
taactggaaatgagg

SEQ ID NO: 1004474 - DNA, 15 bp, Homo sapiens
ttaactggaaatgag

SEQ ID NO: 1004475 - DNA, 15 bp, Homo sapiens
cttaactggaaatga

SEQ ID NO: 1004476 - DNA, 15 bp, Homo sapiens
ccttaactggaaatg

SEQ ID NO: 1004477 - DNA, 15 bp, Homo sapiens
cccttaactggaaat

SEQ ID NO: 1004478 - DNA, 15 bp, Homo sapiens
tcccttaactggaaa

SEQ ID NO: 1004479 - DNA, 15 bp, Homo sapiens
ttcccttaactggaa

SEQ ID NO: 1004480 - DNA, 15 bp, Homo sapiens
attcccttaactgga

SEQ ID NO: 1004481 - DNA, 15 bp, Homo sapiens
cattcccttaactgg

SEQ ID NO: 1004482 - DNA, 15 bp, Homo sapiens
ccattcccttaactg

SEQ ID NO: 1004483 - DNA, 15 bp, Homo sapiens
cccattcccttaact

SEQ ID NO: 1004484 - DNA, 15 bp, Homo sapiens
gcccattcccttaac

SEQ ID NO: 1004485 - DNA, 15 bp, Homo sapiens
cgcccattcccttaa

SEQ ID NO: 1004486 - DNA, 15 bp, Homo sapiens
ccgcccattccctta

SEQ ID NO: 1004487 - DNA, 15 bp, Homo sapiens
cccgcccattccctt

SEQ ID NO: 1004488 - DNA, 15 bp, Homo sapiens
acccgcccattccct

SEQ ID NO: 1004489 - DNA, 15 bp, Homo sapiens
aacccgcccattccc

SEQ ID NO: 1004490 - DNA, 15 bp, Homo sapiens
taacccgcccattcc

SEQ ID NO: 1004491 - DNA, 15 bp, Homo sapiens
gtaacccgcccattc

SEQ ID NO: 1004492 - DNA, 15 bp, Homo sapiens
ggtaacccgcccatt

SEQ ID NO: 1004493 - DNA, 15 bp, Homo sapiens
tggtaacccgcccat

SEQ ID NO: 1004494 - DNA, 15 bp, Homo sapiens
ctggtaacccgccca

SEQ ID NO: 1004495 - DNA, 15 bp, Homo sapiens
cctggtaacccgccc

SEQ ID NO: 1004496 - DNA, 15 bp, Homo sapiens
tcctggtaacccgcc

SEQ ID NO: 1004497 - DNA, 15 bp, Homo sapiens
ctcctggtaacccgc

SEQ ID NO: 1004498 - DNA, 15 bp, Homo sapiens
cctcctggtaacccg

SEQ ID NO: 1004499 - DNA, 15 bp, Homo sapiens
acctcctggtaaccc

SEQ ID NO: 1004500 - DNA, 15 bp, Homo sapiens
aacctcctggtaacc

SEQ ID NO: 1004501 - DNA, 15 bp, Homo sapiens
aaacctcctggtaac

SEQ ID NO: 1004502 - DNA, 15 bp, Homo sapiens
caaacctcctggtaa

SEQ ID NO: 1004503 - DNA, 15 bp, Homo sapiens
tcaaacctcctggta

SEQ ID NO: 1004504 - DNA, 15 bp, Homo sapiens
gtcaaacctcctggt

SEQ ID NO: 1004505 - DNA, 15 bp, Homo sapiens
tgtcaaacctcctgg

SEQ ID NO: 1004506 - DNA, 15 bp, Homo sapiens
gtgtcaaacctcctg

SEQ ID NO: 1004507 - DNA, 15 bp, Homo sapiens
agtgtcaaacctcct

SEQ ID NO: 1004508 - DNA, 15 bp, Homo sapiens
gagtgtcaaacctcc

SEQ ID NO: 1004509 - DNA, 15 bp, Homo sapiens
agagtgtcaaacctc

SEQ ID NO: 1004510 - DNA, 15 bp, Homo sapiens
aagagtgtcaaacct

SEQ ID NO: 1004511 - DNA, 15 bp, Homo sapiens
caagagtgtcaaacc

SEQ ID NO: 1004512 - DNA, 15 bp, Homo sapiens
tcaagagtgtcaaac

SEQ ID NO: 1004513 - DNA, 15 bp, Homo sapiens
ttcaagagtgtcaaa

SEQ ID NO: 1004514 - DNA, 15 bp, Homo sapiens
cttcaagagtgtcaa

SEQ ID NO: 1004515 - DNA, 15 bp, Homo sapiens
ccttcaagagtgtca

SEQ ID NO: 1004516 - DNA, 15 bp, Homo sapiens
cccttcaagagtgtc

SEQ ID NO: 1004517 - DNA, 15 bp, Homo sapiens
tcccttcaagagtgt

SEQ ID NO: 1004518 - DNA, 15 bp, Homo sapiens
ctcccttcaagagtg

SEQ ID NO: 1004519 - DNA, 15 bp, Homo sapiens
cctcccttcaagagt

SEQ ID NO: 1004520 - DNA, 15 bp, Homo sapiens
acctcccttcaagag

SEQ ID NO: 1004521 - DNA, 15 bp, Homo sapiens
aacctcccttcaaga

SEQ ID NO: 1004522 - DNA, 15 bp, Homo sapiens
taacctcccttcaag

SEQ ID NO: 1004523 - DNA, 15 bp, Homo sapiens
ttaacctcccttcaa

SEQ ID NO: 1004524 - DNA, 15 bp, Homo sapiens
gttaacctcccttca

SEQ ID NO: 1004525 - DNA, 15 bp, Homo sapiens
tgttaacctcccttc

SEQ ID NO: 1004526 - DNA, 15 bp, Homo sapiens
ttgttaacctccctt

SEQ ID NO: 1004527 - DNA, 15 bp, Homo sapiens
gttgttaacctccct

SEQ ID NO: 1004528 - DNA, 15 bp, Homo sapiens
agttgttaacctccc

SEQ ID NO: 1004529 - DNA, 15 bp, Homo sapiens
cagttgttaacctcc

SEQ ID NO: 1004530 - DNA, 15 bp, Homo sapiens
tcagttgttaacctc

SEQ ID NO: 1004531 - DNA, 15 bp, Homo sapiens
atcagttgttaacct

SEQ ID NO: 1004532 - DNA, 15 bp, Homo sapiens
catcagttgttaacc

SEQ ID NO: 1004533 - DNA, 15 bp, Homo sapiens
gcatcagttgttaac

SEQ ID NO: 1004534 - DNA, 15 bp, Homo sapiens
tgcatcagttgttaa

SEQ ID NO: 1004535 - DNA, 15 bp, Homo sapiens
ttgcatcagttgtta

SEQ ID NO: 1004536 - DNA, 15 bp, Homo sapiens
cttgcatcagttgtt

SEQ ID NO: 1004537 - DNA, 15 bp, Homo sapiens
tcttgcatcagttgt

SEQ ID NO: 1004538 - DNA, 15 bp, Homo sapiens
ttcttgcatcagttg

SEQ ID NO: 1004539 - DNA, 15 bp, Homo sapiens
cttcttgcatcagtt

SEQ ID NO: 1004540 - DNA, 15 bp, Homo sapiens
acttcttgcatcagt

SEQ ID NO: 1004541 - DNA, 15 bp, Homo sapiens
tacttcttgcatcag

SEQ ID NO: 1004542 - DNA, 15 bp, Homo sapiens
ttacttcttgcatca

SEQ ID NO: 1004543 - DNA, 15 bp, Homo sapiens
cttacttcttgcatc

SEQ ID NO: 1004544 - DNA, 15 bp, Homo sapiens
ccttacttcttgcat

SEQ ID NO: 1004545 - DNA, 15 bp, Homo sapiens
tccttacttcttgca

SEQ ID NO: 1004546 - DNA, 15 bp, Homo sapiens
ttccttacttcttgc

SEQ ID NO: 1004547 - DNA, 15 bp, Homo sapiens
attccttacttcttg

SEQ ID NO: 1004548 - DNA, 15 bp, Homo sapiens
gattccttacttctt

SEQ ID NO: 1004549 - DNA, 15 bp, Homo sapiens
cgattccttacttct

SEQ ID NO: 1004550 - DNA, 15 bp, Homo sapiens
acgattccttacttc

SEQ ID NO: 1004551 - DNA, 15 bp, Homo sapiens
cacgattccttactt

SEQ ID NO: 1004552 - DNA, 15 bp, Homo sapiens
acacgattccttact

SEQ ID NO: 1004553 - DNA, 15 bp, Homo sapiens
aacacgattccttac

SEQ ID NO: 1004554 - DNA, 15 bp, Homo sapiens
aaacacgattcctta

SEQ ID NO: 1004555 - DNA, 15 bp, Homo sapiens
caaacacgattcctt

SEQ ID NO: 1004556 - DNA, 15 bp, Homo sapiens
tcaaacacgattcct

SEQ ID NO: 1004557 - DNA, 15 bp, Homo sapiens
ctcaaacacgattcc

SEQ ID NO: 1004558 - DNA, 15 bp, Homo sapiens
actcaaacacgattc

SEQ ID NO: 1004559 - DNA, 15 bp, Homo sapiens
cactcaaacacgatt

SEQ ID NO: 1004560 - DNA, 15 bp, Homo sapiens
gcactcaaacacgat

SEQ ID NO: 1004561 - DNA, 15 bp, Homo sapiens
tgcactcaaacacga

SEQ ID NO: 1004562 - DNA, 15 bp, Homo sapiens
gtgcactcaaacacg

SEQ ID NO: 1004563 - DNA, 15 bp, Homo sapiens
tgtgcactcaaacac

SEQ ID NO: 1004564 - DNA, 15 bp, Homo sapiens
ctgtgcactcaaaca

SEQ ID NO: 1004565 - DNA, 15 bp, Homo sapiens
tctgtgcactcaaac

SEQ ID NO: 1004566 - DNA, 15 bp, Homo sapiens
gtctgtgcactcaaa

SEQ ID NO: 1004567 - DNA, 15 bp, Homo sapiens
agtctgtgcactcaa

SEQ ID NO: 1004568 - DNA, 15 bp, Homo sapiens
gagtctgtgcactca

SEQ ID NO: 1004569 - DNA, 15 bp, Homo sapiens
agagtctgtgcactc

SEQ ID NO: 1004570 - DNA, 15 bp, Homo sapiens
tagagtctgtgcact

SEQ ID NO: 1004571 - DNA, 15 bp, Homo sapiens
ctagagtctgtgcac

SEQ ID NO: 1004572 - DNA, 15 bp, Homo sapiens
gctagagtctgtgca

SEQ ID NO: 1004573 - DNA, 15 bp, Homo sapiens
tgctagagtctgtgc

SEQ ID NO: 1004574 - DNA, 15 bp, Homo sapiens
atgctagagtctgtg

SEQ ID NO: 1004575 - DNA, 15 bp, Homo sapiens
tatgctagagtctgt

SEQ ID NO: 1004576 - DNA, 15 bp, Homo sapiens
ttatgctagagtctg

SEQ ID NO: 1004577 - DNA, 15 bp, Homo sapiens
tttatgctagagtct

SEQ ID NO: 1004578 - DNA, 15 bp, Homo sapiens
gtttatgctagagtc

SEQ ID NO: 1004579 - DNA, 15 bp, Homo sapiens
tgtttatgctagagt

SEQ ID NO: 1004580 - DNA, 15 bp, Homo sapiens
gtgtttatgctagag

SEQ ID NO: 1004581 - DNA, 15 bp, Homo sapiens
tgtgtttatgctaga

SEQ ID NO: 1004582 - DNA, 15 bp, Homo sapiens
gtgtgtttatgctag

SEQ ID NO: 1004583 - DNA, 15 bp, Homo sapiens
ggtgtgtttatgcta

SEQ ID NO: 1004584 - DNA, 15 bp, Homo sapiens
aggtgtgtttatgct

SEQ ID NO: 1004585 - DNA, 15 bp, Homo sapiens
taggtgtgtttatgc

SEQ ID NO: 1004586 - DNA, 15 bp, Homo sapiens
gtaggtgtgtttatg

SEQ ID NO: 1004587 - DNA, 15 bp, Homo sapiens
ggtaggtgtgtttat

SEQ ID NO: 1004588 - DNA, 15 bp, Homo sapiens
aggtaggtgtgttta

SEQ ID NO: 1004589 - DNA, 15 bp, Homo sapiens
aaggtaggtgtgttt

SEQ ID NO: 1004590 - DNA, 15 bp, Homo sapiens
gaaggtaggtgtgtt

SEQ ID NO: 1004591 - DNA, 15 bp, Homo sapiens
tgaaggtaggtgtgt

SEQ ID NO: 1004592 - DNA, 15 bp, Homo sapiens
ttgaaggtaggtgtg

SEQ ID NO: 1004593 - DNA, 15 bp, Homo sapiens
attgaaggtaggtgt

SEQ ID NO: 1004594 - DNA, 15 bp, Homo sapiens
aattgaaggtaggtg

SEQ ID NO: 1004595 - DNA, 15 bp, Homo sapiens
aaattgaaggtaggt

SEQ ID NO: 1004596 - DNA, 15 bp, Homo sapiens
gaaattgaaggtagg

SEQ ID NO: 1004597 - DNA, 15 bp, Homo sapiens
agaaattgaaggtag

SEQ ID NO: 1004598 - DNA, 15 bp, Homo sapiens
tagaaattgaaggta

SEQ ID NO: 1004599 - DNA, 15 bp, Homo sapiens
ctagaaattgaaggt

SEQ ID NO: 1004600 - DNA, 15 bp, Homo sapiens
gctagaaattgaagg

SEQ ID NO: 1004601 - DNA, 15 bp, Homo sapiens
agctagaaattgaag

SEQ ID NO: 1004602 - DNA, 15 bp, Homo sapiens
gagctagaaattgaa

SEQ ID NO: 1004603 - DNA, 15 bp, Homo sapiens
agagctagaaattga

SEQ ID NO: 1004604 - DNA, 15 bp, Homo sapiens
cagagctagaaattg

SEQ ID NO: 1004605 - DNA, 15 bp, Homo sapiens
acagagctagaaatt

SEQ ID NO: 1004606 - DNA, 15 bp, Homo sapiens
gacagagctagaaat

SEQ ID NO: 1004607 - DNA, 15 bp, Homo sapiens
tgacagagctagaaa

SEQ ID NO: 1004608 - DNA, 15 bp, Homo sapiens
gtgacagagctagaa

SEQ ID NO: 1004609 - DNA, 15 bp, Homo sapiens
agtgacagagctaga

SEQ ID NO: 1004610 - DNA, 15 bp, Homo sapiens
cagtgacagagctag

SEQ ID NO: 1004611 - DNA, 15 bp, Homo sapiens
acagtgacagagcta

SEQ ID NO: 1004612 - DNA, 15 bp, Homo sapiens
gacagtgacagagct

SEQ ID NO: 1004613 - DNA, 15 bp, Homo sapiens
tgacagtgacagagc

SEQ ID NO: 1004614 - DNA, 15 bp, Homo sapiens
gtgacagtgacagag

SEQ ID NO: 1004615 - DNA, 15 bp, Homo sapiens
agtgacagtgacaga

SEQ ID NO: 1004616 - DNA, 15 bp, Homo sapiens
gagtgacagtgacag

SEQ ID NO: 1004617 - DNA, 15 bp, Homo sapiens
agagtgacagtgaca

SEQ ID NO: 1004618 - DNA, 15 bp, Homo sapiens
cagagtgacagtgac

SEQ ID NO: 1004619 - DNA, 15 bp, Homo sapiens
tcagagtgacagtga

SEQ ID NO: 1004620 - DNA, 15 bp, Homo sapiens
ttcagagtgacagtg

SEQ ID NO: 1004621 - DNA, 15 bp, Homo sapiens
attcagagtgacagt

SEQ ID NO: 1004622 - DNA, 15 bp, Homo sapiens
aattcagagtgacag

SEQ ID NO: 1004623 - DNA, 15 bp, Homo sapiens
aaattcagagtgaca

SEQ ID NO: 1004624 - DNA, 15 bp, Homo sapiens
taaattcagagtgac

SEQ ID NO: 1004625 - DNA, 15 bp, Homo sapiens
ataaattcagagtga

SEQ ID NO: 1004626 - DNA, 15 bp, Homo sapiens
gataaattcagagtg

SEQ ID NO: 1004627 - DNA, 15 bp, Homo sapiens
tgataaattcagagt

SEQ ID NO: 1004628 - DNA, 15 bp, Homo sapiens
gtgataaattcagag

SEQ ID NO: 1004629 - DNA, 15 bp, Homo sapiens
ggtgataaattcaga

SEQ ID NO: 1004630 - DNA, 15 bp, Homo sapiens
aggtgataaattcag

SEQ ID NO: 1004631 - DNA, 15 bp, Homo sapiens
gaggtgataaattca

SEQ ID NO: 1004632 - DNA, 15 bp, Homo sapiens
agaggtgataaattc

SEQ ID NO: 1004633 - DNA, 15 bp, Homo sapiens
cagaggtgataaatt

SEQ ID NO: 1004634 - DNA, 15 bp, Homo sapiens
gcagaggtgataaat

SEQ ID NO: 1004635 - DNA, 15 bp, Homo sapiens
tgcagaggtgataaa

SEQ ID NO: 1004636 - DNA, 15 bp, Homo sapiens
ttgcagaggtgataa

SEQ ID NO: 1004637 - DNA, 15 bp, Homo sapiens
gttgcagaggtgata

SEQ ID NO: 1004638 - DNA, 15 bp, Homo sapiens
tgttgcagaggtgat

SEQ ID NO: 1004639 - DNA, 15 bp, Homo sapiens
ctgttgcagaggtga

SEQ ID NO: 1004640 - DNA, 15 bp, Homo sapiens
cctgttgcagaggtg

SEQ ID NO: 1004641 - DNA, 15 bp, Homo sapiens
tcctgttgcagaggt

SEQ ID NO: 1004642 - DNA, 15 bp, Homo sapiens
gtcctgttgcagagg

SEQ ID NO: 1004643 - DNA, 15 bp, Homo sapiens
agtcctgttgcagag

SEQ ID NO: 1004644 - DNA, 15 bp, Homo sapiens
tagtcctgttgcaga

SEQ ID NO: 1004645 - DNA, 15 bp, Homo sapiens
ttagtcctgttgcag

SEQ ID NO: 1004646 - DNA, 15 bp, Homo sapiens
tttagtcctgttgca

SEQ ID NO: 1004647 - DNA, 15 bp, Homo sapiens
ctttagtcctgttgc

SEQ ID NO: 1004648 - DNA, 15 bp, Homo sapiens
gctttagtcctgttg

SEQ ID NO: 1004649 - DNA, 15 bp, Homo sapiens
ggctttagtcctgtt

SEQ ID NO: 1004650 - DNA, 15 bp, Homo sapiens
tggctttagtcctgt

SEQ ID NO: 1004651 - DNA, 15 bp, Homo sapiens
atggctttagtcctg

SEQ ID NO: 1004652 - DNA, 15 bp, Homo sapiens
gatggctttagtcct

SEQ ID NO: 1004653 - DNA, 15 bp, Homo sapiens
agatggctttagtcc

SEQ ID NO: 1004654 - DNA, 15 bp, Homo sapiens
tagatggctttagtc

SEQ ID NO: 1004655 - DNA, 15 bp, Homo sapiens
ttagatggctttagt

SEQ ID NO: 1004656 - DNA, 15 bp, Homo sapiens
attagatggctttag

SEQ ID NO: 1004657 - DNA, 15 bp, Homo sapiens
aattagatggcttta

SEQ ID NO: 1004658 - DNA, 15 bp, Homo sapiens
aaattagatggcttt

SEQ ID NO: 1004659 - DNA, 15 bp, Homo sapiens
taaattagatggctt

SEQ ID NO: 1004660 - DNA, 15 bp, Homo sapiens
ataaattagatggct

SEQ ID NO: 1004661 - DNA, 15 bp, Homo sapiens
aataaattagatggc

SEQ ID NO: 1004662 - DNA, 15 bp, Homo sapiens
caataaattagatgg

SEQ ID NO: 1004663 - DNA, 15 bp, Homo sapiens
ccaataaattagatg

SEQ ID NO: 1004664 - DNA, 15 bp, Homo sapiens
tccaataaattagat

SEQ ID NO: 1004665 - DNA, 15 bp, Homo sapiens
atccaataaattaga

SEQ ID NO: 1004666 - DNA, 15 bp, Homo sapiens
aatccaataaattag

SEQ ID NO: 1004667 - DNA, 15 bp, Homo sapiens
caatccaataaatta

SEQ ID NO: 1004668 - DNA, 15 bp, Homo sapiens
acaatccaataaatt

SEQ ID NO: 1004669 - DNA, 15 bp, Homo sapiens
cacaatccaataaat

SEQ ID NO: 1004670 - DNA, 15 bp, Homo sapiens
tcacaatccaataaa

SEQ ID NO: 1004671 - DNA, 15 bp, Homo sapiens
ctcacaatccaataa

SEQ ID NO: 1004672 - DNA, 15 bp, Homo sapiens
cctcacaatccaata

SEQ ID NO: 1004673 - DNA, 15 bp, Homo sapiens
tcctcacaatccaat

SEQ ID NO: 1004674 - DNA, 15 bp, Homo sapiens
gtcctcacaatccaa

SEQ ID NO: 1004675 - DNA, 15 bp, Homo sapiens
agtcctcacaatcca

SEQ ID NO: 1004676 - DNA, 15 bp, Homo sapiens
tagtcctcacaatcc

SEQ ID NO: 1004677 - DNA, 15 bp, Homo sapiens
ttagtcctcacaatc

SEQ ID NO: 1004678 - DNA, 15 bp, Homo sapiens
tttagtcctcacaat

SEQ ID NO: 1004679 - DNA, 15 bp, Homo sapiens
ttttagtcctcacaa

SEQ ID NO: 1004680 - DNA, 15 bp, Homo sapiens
cttttagtcctcaca

SEQ ID NO: 1004681 - DNA, 15 bp, Homo sapiens
tcttttagtcctcac

SEQ ID NO: 1004682 - DNA, 15 bp, Homo sapiens
atcttttagtcctca

SEQ ID NO: 1004683 - DNA, 15 bp, Homo sapiens
tatcttttagtcctc

SEQ ID NO: 1004684 - DNA, 15 bp, Homo sapiens
ttatcttttagtcct

SEQ ID NO: 1004685 - DNA, 15 bp, Homo sapiens
attatcttttagtcc

SEQ ID NO: 1004686 - DNA, 15 bp, Homo sapiens
tattatcttttagtc

SEQ ID NO: 1004687 - DNA, 15 bp, Homo sapiens
atattatcttttagt

SEQ ID NO: 1004688 - DNA, 15 bp, Homo sapiens
tatattatcttttag

SEQ ID NO: 1004689 - DNA, 15 bp, Homo sapiens
atatattatctttta

SEQ ID NO: 1004690 - DNA, 15 bp, Homo sapiens
cacatatattatctt

SEQ ID NO: 1004691 - DNA, 15 bp, Homo sapiens
ccacatatattatct

SEQ ID NO: 1004692 - DNA, 15 bp, Homo sapiens
cccacatatattatc

SEQ ID NO: 1004693 - DNA, 15 bp, Homo sapiens
gcccacatatattat

SEQ ID NO: 1004694 - DNA, 15 bp, Homo sapiens
tgcccacatatatta

SEQ ID NO: 1004695 - DNA, 15 bp, Homo sapiens
atgcccacatatatt

SEQ ID NO: 1004696 - DNA, 15 bp, Homo sapiens
aatgcccacatatat

SEQ ID NO: 1004697 - DNA, 15 bp, Homo sapiens
aaatgcccacatata

SEQ ID NO: 1004698 - DNA, 15 bp, Homo sapiens
taaatgcccacatat

SEQ ID NO: 1004699 - DNA, 15 bp, Homo sapiens
ctaaatgcccacata

SEQ ID NO: 1004700 - DNA, 15 bp, Homo sapiens
gctaaatgcccacat

SEQ ID NO: 1004701 - DNA, 15 bp, Homo sapiens
tgctaaatgcccaca

SEQ ID NO: 1004702 - DNA, 15 bp, Homo sapiens
gtgctaaatgcccac

SEQ ID NO: 1004703 - DNA, 15 bp, Homo sapiens
tgtgctaaatgccca

SEQ ID NO: 1004704 - DNA, 15 bp, Homo sapiens
ctgtgctaaatgccc

SEQ ID NO: 1004705 - DNA, 15 bp, Homo sapiens
actgtgctaaatgcc

SEQ ID NO: 1004706 - DNA, 15 bp, Homo sapiens
cactgtgctaaatgc

SEQ ID NO: 1004707 - DNA, 15 bp, Homo sapiens
acactgtgctaaatg

SEQ ID NO: 1004708 - DNA, 15 bp, Homo sapiens
gacactgtgctaaat

SEQ ID NO: 1004709 - DNA, 15 bp, Homo sapiens
cgacactgtgctaaa

SEQ ID NO: 1004710 - DNA, 15 bp, Homo sapiens
ccgacactgtgctaa

SEQ ID NO: 1004711 - DNA, 15 bp, Homo sapiens
cccgacactgtgcta

SEQ ID NO: 1004712 - DNA, 15 bp, Homo sapiens
gcccgacactgtgct

SEQ ID NO: 1004713 - DNA, 15 bp, Homo sapiens
tgcccgacactgtgc

SEQ ID NO: 1004714 - DNA, 15 bp, Homo sapiens
gtgcccgacactgtg

SEQ ID NO: 1004715 - DNA, 15 bp, Homo sapiens
tgtgcccgacactgt

SEQ ID NO: 1004716 - DNA, 15 bp, Homo sapiens
atgtgcccgacactg

SEQ ID NO: 1004717 - DNA, 15 bp, Homo sapiens
tatgtgcccgacact

SEQ ID NO: 1004718 - DNA, 15 bp, Homo sapiens
ctatgtgcccgacac

SEQ ID NO: 1004719 - DNA, 15 bp, Homo sapiens
actatgtgcccgaca

SEQ ID NO: 1004720 - DNA, 15 bp, Homo sapiens
aactatgtgcccgac

SEQ ID NO: 1004721 - DNA, 15 bp, Homo sapiens
gaactatgtgcccga

SEQ ID NO: 1004722 - DNA, 15 bp, Homo sapiens
cgaactatgtgcccg

SEQ ID NO: 1004723 - DNA, 15 bp, Homo sapiens
gcgaactatgtgccc

SEQ ID NO: 1004724 - DNA, 15 bp, Homo sapiens
ggcgaactatgtgcc

SEQ ID NO: 1004725 - DNA, 15 bp, Homo sapiens
aggcgaactatgtgc

SEQ ID NO: 1004726 - DNA, 15 bp, Homo sapiens
aaggcgaactatgtg

SEQ ID NO: 1004727 - DNA, 15 bp, Homo sapiens
gaaggcgaactatgt

SEQ ID NO: 1004728 - DNA, 15 bp, Homo sapiens
ggaaggcgaactatg

SEQ ID NO: 1004729 - DNA, 15 bp, Homo sapiens
cggaaggcgaactat

SEQ ID NO: 1004730 - DNA, 15 bp, Homo sapiens
acggaaggcgaacta

SEQ ID NO: 1004731 - DNA, 15 bp, Homo sapiens
tacggaaggcgaact

SEQ ID NO: 1004732 - DNA, 15 bp, Homo sapiens
ttacggaaggcgaac

SEQ ID NO: 1004733 - DNA, 15 bp, Homo sapiens
gttacggaaggcgaa

SEQ ID NO: 1004734 - DNA, 15 bp, Homo sapiens
ggttacggaaggcga

SEQ ID NO: 1004735 - DNA, 15 bp, Homo sapiens
tggttacggaaggcg

SEQ ID NO: 1004736 - DNA, 15 bp, Homo sapiens
ctggttacggaaggc

SEQ ID NO: 1004737 - DNA, 15 bp, Homo sapiens
actggttacggaagg

SEQ ID NO: 1004738 - DNA, 15 bp, Homo sapiens
tactggttacggaag

SEQ ID NO: 1004739 - DNA, 15 bp, Homo sapiens
ctactggttacggaa

SEQ ID NO: 1004740 - DNA, 15 bp, Homo sapiens
actactggttacgga

SEQ ID NO: 1004741 - DNA, 15 bp, Homo sapiens
tactactggttacgg

SEQ ID NO: 1004742 - DNA, 15 bp, Homo sapiens
ttactactggttacg

SEQ ID NO: 1004743 - DNA, 15 bp, Homo sapiens
gttactactggttac

SEQ ID NO: 1004744 - DNA, 15 bp, Homo sapiens
ggttactactggtta

SEQ ID NO: 1004745 - DNA, 15 bp, Homo sapiens
tggttactactggtt

SEQ ID NO: 1004746 - DNA, 15 bp, Homo sapiens
ctggttactactggt

SEQ ID NO: 1004747 - DNA, 15 bp, Homo sapiens
actggttactactgg

SEQ ID NO: 1004748 - DNA, 15 bp, Homo sapiens
tactggttactactg

SEQ ID NO: 1004749 - DNA, 15 bp, Homo sapiens
ttactggttactact

SEQ ID NO: 1004750 - DNA, 15 bp, Homo sapiens
gttactggttactac

SEQ ID NO: 1004751 - DNA, 15 bp, Homo sapiens
tgttactggttacta

SEQ ID NO: 1004752 - DNA, 15 bp, Homo sapiens
ctgttactggttact

SEQ ID NO: 1004753 - DNA, 15 bp, Homo sapiens
gctgttactggttac

SEQ ID NO: 1004754 - DNA, 15 bp, Homo sapiens
cgctgttactggtta

SEQ ID NO: 1004755 - DNA, 15 bp, Homo sapiens
ccgctgttactggtt

SEQ ID NO: 1004756 - DNA, 15 bp, Homo sapiens
cccgctgttactggt

SEQ ID NO: 1004757 - DNA, 15 bp, Homo sapiens
ccccgctgttactgg

SEQ ID NO: 1004758 - DNA, 15 bp, Homo sapiens
tccccgctgttactg

SEQ ID NO: 1004759 - DNA, 15 bp, Homo sapiens
ctccccgctgttact

SEQ ID NO: 1004760 - DNA, 15 bp, Homo sapiens
gctccccgctgttac

SEQ ID NO: 1004761 - DNA, 15 bp, Homo sapiens
agctccccgctgtta

SEQ ID NO: 1004762 - DNA, 15 bp, Homo sapiens
cagctccccgctgtt

SEQ ID NO: 1004763 - DNA, 15 bp, Homo sapiens
acagctccccgctgt

SEQ ID NO: 1004764 - DNA, 15 bp, Homo sapiens
aacagctccccgctg

SEQ ID NO: 1004765 - DNA, 15 bp, Homo sapiens
taacagctccccgct

SEQ ID NO: 1004766 - DNA, 15 bp, Homo sapiens
ctaacagctccccgc

SEQ ID NO: 1004767 - DNA, 15 bp, Homo sapiens
actaacagctccccg

SEQ ID NO: 1004768 - DNA, 15 bp, Homo sapiens
tactaacagctcccc

SEQ ID NO: 1004769 - DNA, 15 bp, Homo sapiens
ttactaacagctccc

SEQ ID NO: 1004770 - DNA, 15 bp, Homo sapiens
gttactaacagctcc

SEQ ID NO: 1004771 - DNA, 15 bp, Homo sapiens
agttactaacagctc

SEQ ID NO: 1004772 - DNA, 15 bp, Homo sapiens
tagttactaacagct

SEQ ID NO: 1004773 - DNA, 15 bp, Homo sapiens
atagttactaacagc

SEQ ID NO: 1004774 - DNA, 15 bp, Homo sapiens
tatagttactaacag

SEQ ID NO: 1004775 - DNA, 15 bp, Homo sapiens
ctatagttactaaca

SEQ ID NO: 1004776 - DNA, 15 bp, Homo sapiens
cctatagttactaac

SEQ ID NO: 1004777 - DNA, 15 bp, Homo sapiens
ccctatagttactaa

SEQ ID NO: 1004778 - DNA, 15 bp, Homo sapiens
gccctatagttacta

SEQ ID NO: 1004779 - DNA, 15 bp, Homo sapiens
agccctatagttact

SEQ ID NO: 1004780 - DNA, 15 bp, Homo sapiens
cagccctatagttac

SEQ ID NO: 1004781 - DNA, 15 bp, Homo sapiens
tcagccctatagtta

SEQ ID NO: 1004782 - DNA, 15 bp, Homo sapiens
ctcagccctatagtt

SEQ ID NO: 1004783 - DNA, 15 bp, Homo sapiens
cctcagccctatagt

SEQ ID NO: 1004784 - DNA, 15 bp, Homo sapiens
ccctcagccctatag

SEQ ID NO: 1004785 - DNA, 15 bp, Homo sapiens
cccctcagccctata

SEQ ID NO: 1004786 - DNA, 15 bp, Homo sapiens
acccctcagccctat

SEQ ID NO: 1004787 - DNA, 15 bp, Homo sapiens
cacccctcagcccta

SEQ ID NO: 1004788 - DNA, 15 bp, Homo sapiens
ccacccctcagccct

SEQ ID NO: 1004789 - DNA, 15 bp, Homo sapiens
cccacccctcagccc

SEQ ID NO: 1004790 - DNA, 15 bp, Homo sapiens
ccccacccctcagcc

SEQ ID NO: 1004791 - DNA, 15 bp, Homo sapiens
cccccacccctcagc

SEQ ID NO: 1004792 - DNA, 15 bp, Homo sapiens
tcccccacccctcag

SEQ ID NO: 1004793 - DNA, 15 bp, Homo sapiens
ttcccccacccctca

SEQ ID NO: 1004794 - DNA, 15 bp, Homo sapiens
cttcccccacccctc

SEQ ID NO: 1004795 - DNA, 15 bp, Homo sapiens
ccttcccccacccct

SEQ ID NO: 1004796 - DNA, 15 bp, Homo sapiens
tccttcccccacccc

SEQ ID NO: 1004797 - DNA, 15 bp, Homo sapiens
ttccttcccccaccc

SEQ ID NO: 1004798 - DNA, 15 bp, Homo sapiens
cttccttcccccacc

SEQ ID NO: 1004799 - DNA, 15 bp, Homo sapiens
gcttccttcccccac

SEQ ID NO: 1004800 - DNA, 15 bp, Homo sapiens
tgcttccttccccca

SEQ ID NO: 1004801 - DNA, 15 bp, Homo sapiens
ctgcttccttccccc

SEQ ID NO: 1004802 - DNA, 15 bp, Homo sapiens
actgcttccttcccc

SEQ ID NO: 1004803 - DNA, 15 bp, Homo sapiens
aactgcttccttccc

SEQ ID NO: 1004804 - DNA, 15 bp, Homo sapiens
taactgcttccttcc

SEQ ID NO: 1004805 - DNA, 15 bp, Homo sapiens
gtaactgcttccttc

SEQ ID NO: 1004806 - DNA, 15 bp, Homo sapiens
agtaactgcttcctt

SEQ ID NO: 1004807 - DNA, 15 bp, Homo sapiens
tagtaactgcttcct

SEQ ID NO: 1004808 - DNA, 15 bp, Homo sapiens
ttagtaactgcttcc

SEQ ID NO: 1004809 - DNA, 15 bp, Homo sapiens
tttagtaactgcttc

SEQ ID NO: 1004810 - DNA, 15 bp, Homo sapiens
ttttagtaactgctt

SEQ ID NO: 1004811 - DNA, 15 bp, Homo sapiens
gttttagtaactgct

SEQ ID NO: 1004812 - DNA, 15 bp, Homo sapiens
ggttttagtaactgc

SEQ ID NO: 1004813 - DNA, 15 bp, Homo sapiens
tggttttagtaactg

SEQ ID NO: 1004814 - DNA, 15 bp, Homo sapiens
ctggttttagtaact

SEQ ID NO: 1004815 - DNA, 15 bp, Homo sapiens
cctggttttagtaac

SEQ ID NO: 1004816 - DNA, 15 bp, Homo sapiens
gcctggttttagtaa

SEQ ID NO: 1004817 - DNA, 15 bp, Homo sapiens
cgcctggttttagta

SEQ ID NO: 1004818 - DNA, 15 bp, Homo sapiens
tcgcctggttttagt

SEQ ID NO: 1004819 - DNA, 15 bp, Homo sapiens
ctcgcctggttttag

SEQ ID NO: 1004820 - DNA, 15 bp, Homo sapiens
tctcgcctggtttta

SEQ ID NO: 1004821 - DNA, 15 bp, Homo sapiens
ctctcgcctggtttt

SEQ ID NO: 1004822 - DNA, 15 bp, Homo sapiens
gctctcgcctggttt

SEQ ID NO: 1004823 - DNA, 15 bp, Homo sapiens
cgctctcgcctggtt

SEQ ID NO: 1004824 - DNA, 15 bp, Homo sapiens
tcgctctcgcctggt

SEQ ID NO: 1004825 - DNA, 15 bp, Homo sapiens
ctcgctctcgcctgg

SEQ ID NO: 1004826 - DNA, 15 bp, Homo sapiens
tctcgctctcgcctg

SEQ ID NO: 1004827 - DNA, 15 bp, Homo sapiens
ctctcgctctcgcct

SEQ ID NO: 1004828 - DNA, 15 bp, Homo sapiens
gctctcgctctcgcc

SEQ ID NO: 1004829 - DNA, 15 bp, Homo sapiens
cgctctcgctctcgc

SEQ ID NO: 1004830 - DNA, 15 bp, Homo sapiens
ccgctctcgctctcg

SEQ ID NO: 1004831 - DNA, 15 bp, Homo sapiens
accgctctcgctctc

SEQ ID NO: 1004832 - DNA, 15 bp, Homo sapiens
taccgctctcgctct

SEQ ID NO: 1004833 - DNA, 15 bp, Homo sapiens
ctaccgctctcgctc

SEQ ID NO: 1004834 - DNA, 15 bp, Homo sapiens
gctaccgctctcgct

SEQ ID NO: 1004835 - DNA, 15 bp, Homo sapiens
agctaccgctctcgc

SEQ ID NO: 1004836 - DNA, 15 bp, Homo sapiens
cagctaccgctctcg

SEQ ID NO: 1004837 - DNA, 15 bp, Homo sapiens
acagctaccgctctc

SEQ ID NO: 1004838 - DNA, 15 bp, Homo sapiens
cacagctaccgctct

SEQ ID NO: 1004839 - DNA, 15 bp, Homo sapiens
ccacagctaccgctc

SEQ ID NO: 1004840 - DNA, 15 bp, Homo sapiens
gccacagctaccgct

SEQ ID NO: 1004841 - DNA, 15 bp, Homo sapiens
agccacagctaccgc

SEQ ID NO: 1004842 - DNA, 15 bp, Homo sapiens
cagccacagctaccg

SEQ ID NO: 1004843 - DNA, 15 bp, Homo sapiens
acagccacagctacc

SEQ ID NO: 1004844 - DNA, 15 bp, Homo sapiens
tacagccacagctac

SEQ ID NO: 1004845 - DNA, 15 bp, Homo sapiens
gtacagccacagcta

SEQ ID NO: 1004846 - DNA, 15 bp, Homo sapiens
cgtacagccacagct

SEQ ID NO: 1004847 - DNA, 15 bp, Homo sapiens
tcgtacagccacagc

SEQ ID NO: 1004848 - DNA, 15 bp, Homo sapiens
ctcgtacagccacag

SEQ ID NO: 1004849 - DNA, 15 bp, Homo sapiens
tctcgtacagccaca

SEQ ID NO: 1004850 - DNA, 15 bp, Homo sapiens
ctctcgtacagccac

SEQ ID NO: 1004851 - DNA, 15 bp, Homo sapiens
tctctcgtacagcca

SEQ ID NO: 1004852 - DNA, 15 bp, Homo sapiens
ctctctcgtacagcc

SEQ ID NO: 1004853 - DNA, 15 bp, Homo sapiens
actctctcgtacagc

SEQ ID NO: 1004854 - DNA, 15 bp, Homo sapiens
tactctctcgtacag

SEQ ID NO: 1004855 - DNA, 15 bp, Homo sapiens
ttactctctcgtaca

SEQ ID NO: 1004856 - DNA, 15 bp, Homo sapiens
gttactctctcgtac

SEQ ID NO: 1004857 - DNA, 15 bp, Homo sapiens
ggttactctctcgta

SEQ ID NO: 1004858 - DNA, 15 bp, Homo sapiens
tggttactctctcgt

SEQ ID NO: 1004859 - DNA, 15 bp, Homo sapiens
ttggttactctctcg

SEQ ID NO: 1004860 - DNA, 15 bp, Homo sapiens
gttggttactctctc

SEQ ID NO: 1004861 - DNA, 15 bp, Homo sapiens
agttggttactctct

SEQ ID NO: 1004862 - DNA, 15 bp, Homo sapiens
cagttggttactctc

SEQ ID NO: 1004863 - DNA, 15 bp, Homo sapiens
ccagttggttactct

SEQ ID NO: 1004864 - DNA, 15 bp, Homo sapiens
tccagttggttactc

SEQ ID NO: 1004865 - DNA, 15 bp, Homo sapiens
ttccagttggttact

SEQ ID NO: 1004866 - DNA, 15 bp, Homo sapiens
gttccagttggttac

SEQ ID NO: 1004867 - DNA, 15 bp, Homo sapiens
ggttccagttggtta

SEQ ID NO: 1004868 - DNA, 15 bp, Homo sapiens
cggttccagttggtt

SEQ ID NO: 1004869 - DNA, 15 bp, Homo sapiens
acggttccagttggt

SEQ ID NO: 1004870 - DNA, 15 bp, Homo sapiens
cacggttccagttgg

SEQ ID NO: 1004871 - DNA, 15 bp, Homo sapiens
acacggttccagttg

SEQ ID NO: 1004872 - DNA, 15 bp, Homo sapiens
gacacggttccagtt

SEQ ID NO: 1004873 - DNA, 15 bp, Homo sapiens
cgacacggttccagt

SEQ ID NO: 1004874 - DNA, 15 bp, Homo sapiens
acgacacggttccag

SEQ ID NO: 1004875 - DNA, 15 bp, Homo sapiens
aacgacacggttcca

SEQ ID NO: 1004876 - DNA, 15 bp, Homo sapiens
gaacgacacggttcc

SEQ ID NO: 1004877 - DNA, 15 bp, Homo sapiens
tgaacgacacggttc

SEQ ID NO: 1004878 - DNA, 15 bp, Homo sapiens
ctgaacgacacggtt

SEQ ID NO: 1004879 - DNA, 15 bp, Homo sapiens
actgaacgacacggt

SEQ ID NO: 1004880 - DNA, 15 bp, Homo sapiens
tactgaacgacacgg

SEQ ID NO: 1004881 - DNA, 15 bp, Homo sapiens
ctactgaacgacacg

SEQ ID NO: 1004882 - DNA, 15 bp, Homo sapiens
tctactgaacgacac

SEQ ID NO: 1004883 - DNA, 15 bp, Homo sapiens
ctctactgaacgaca

SEQ ID NO: 1004884 - DNA, 15 bp, Homo sapiens
cctctactgaacgac

SEQ ID NO: 1004885 - DNA, 15 bp, Homo sapiens
tcctctactgaacga

SEQ ID NO: 1004886 - DNA, 15 bp, Homo sapiens
ttcctctactgaacg

SEQ ID NO: 1004887 - DNA, 15 bp, Homo sapiens
tttcctctactgaac

SEQ ID NO: 1004888 - DNA, 15 bp, Homo sapiens
ctttcctctactgaa

SEQ ID NO: 1004889 - DNA, 15 bp, Homo sapiens
gctttcctctactga

SEQ ID NO: 1004890 - DNA, 15 bp, Homo sapiens
tgctttcctctactg

SEQ ID NO: 1004891 - DNA, 15 bp, Homo sapiens
ttgctttcctctact

SEQ ID NO: 1004892 - DNA, 15 bp, Homo sapiens
cttgctttcctctac

SEQ ID NO: 1004893 - DNA, 15 bp, Homo sapiens
gcttgctttcctcta

SEQ ID NO: 1004894 - DNA, 15 bp, Homo sapiens
tgcttgctttcctct

SEQ ID NO: 1004895 - DNA, 15 bp, Homo sapiens
ttgcttgctttcctc

SEQ ID NO: 1004896 - DNA, 15 bp, Homo sapiens
attgcttgctttcct

SEQ ID NO: 1004897 - DNA, 15 bp, Homo sapiens
cattgcttgctttcc

SEQ ID NO: 1004898 - DNA, 15 bp, Homo sapiens
gcattgcttgctttc

SEQ ID NO: 1004899 - DNA, 15 bp, Homo sapiens
ggcattgcttgcttt

SEQ ID NO: 1004900 - DNA, 15 bp, Homo sapiens
tggcattgcttgctt

SEQ ID NO: 1004901 - DNA, 15 bp, Homo sapiens
ttggcattgcttgct

SEQ ID NO: 1004902 - DNA, 15 bp, Homo sapiens
gttggcattgcttgc

SEQ ID NO: 1004903 - DNA, 15 bp, Homo sapiens
agttggcattgcttg

SEQ ID NO: 1004904 - DNA, 15 bp, Homo sapiens
aagttggcattgctt

SEQ ID NO: 1004905 - DNA, 15 bp, Homo sapiens
aaagttggcattgct

SEQ ID NO: 1004906 - DNA, 15 bp, Homo sapiens
aaaagttggcattgc

SEQ ID NO: 1004907 - DNA, 15 bp, Homo sapiens
gaaaagttggcattg

SEQ ID NO: 1004908 - DNA, 15 bp, Homo sapiens
tgaaaagttggcatt

SEQ ID NO: 1004909 - DNA, 15 bp, Homo sapiens
gtgaaaagttggcat

SEQ ID NO: 1004910 - DNA, 15 bp, Homo sapiens
ggtgaaaagttggca

SEQ ID NO: 1004911 - DNA, 15 bp, Homo sapiens
tggtgaaaagttggc

SEQ ID NO: 1004912 - DNA, 15 bp, Homo sapiens
ttggtgaaaagttgg

SEQ ID NO: 1004913 - DNA, 15 bp, Homo sapiens
cttggtgaaaagttg

SEQ ID NO: 1004914 - DNA, 15 bp, Homo sapiens
acttggtgaaaagtt

SEQ ID NO: 1004915 - DNA, 15 bp, Homo sapiens
tacttggtgaaaagt

SEQ ID NO: 1004916 - DNA, 15 bp, Homo sapiens
ttacttggtgaaaag

SEQ ID NO: 1004917 - DNA, 15 bp, Homo sapiens
cttacttggtgaaaa

SEQ ID NO: 1004918 - DNA, 15 bp, Homo sapiens
ccttacttggtgaaa

SEQ ID NO: 1004919 - DNA, 15 bp, Homo sapiens
accttacttggtgaa

SEQ ID NO: 1004920 - DNA, 15 bp, Homo sapiens
caccttacttggtga

SEQ ID NO: 1004921 - DNA, 15 bp, Homo sapiens
tcaccttacttggtg

SEQ ID NO: 1004922 - DNA, 15 bp, Homo sapiens
ctcaccttacttggt

SEQ ID NO: 1004923 - DNA, 15 bp, Homo sapiens
tctcaccttacttgg

SEQ ID NO: 1004924 - DNA, 15 bp, Homo sapiens
atctcaccttacttg

SEQ ID NO: 1004925 - DNA, 15 bp, Homo sapiens
aatctcaccttactt

SEQ ID NO: 1004926 - DNA, 15 bp, Homo sapiens
gaatctcaccttact

SEQ ID NO: 1004927 - DNA, 15 bp, Homo sapiens
agaatctcaccttac

SEQ ID NO: 1004928 - DNA, 15 bp, Homo sapiens
tagaatctcacctta

SEQ ID NO: 1004929 - DNA, 15 bp, Homo sapiens
atagaatctcacctt

SEQ ID NO: 1004930 - DNA, 15 bp, Homo sapiens
tatagaatctcacct

SEQ ID NO: 1004931 - DNA, 15 bp, Homo sapiens
ctatagaatctcacc

SEQ ID NO: 1004932 - DNA, 15 bp, Homo sapiens
actatagaatctcac

SEQ ID NO: 1004933 - DNA, 15 bp, Homo sapiens
aactatagaatctca

SEQ ID NO: 1004934 - DNA, 15 bp, Homo sapiens
caactatagaatctc

SEQ ID NO: 1004935 - DNA, 15 bp, Homo sapiens
acaactatagaatct

SEQ ID NO: 1004936 - DNA, 15 bp, Homo sapiens
tacaactatagaatc

SEQ ID NO: 1004937 - DNA, 15 bp, Homo sapiens
ctacaactatagaat

SEQ ID NO: 1004938 - DNA, 15 bp, Homo sapiens
gctacaactatagaa

SEQ ID NO: 1004939 - DNA, 15 bp, Homo sapiens
ggctacaactataga

SEQ ID NO: 1004940 - DNA, 15 bp, Homo sapiens
tggctacaactatag

SEQ ID NO: 1004941 - DNA, 15 bp, Homo sapiens
ctggctacaactata

SEQ ID NO: 1004942 - DNA, 15 bp, Homo sapiens
actggctacaactat

SEQ ID NO: 1004943 - DNA, 15 bp, Homo sapiens
cactggctacaacta

SEQ ID NO: 1004944 - DNA, 15 bp, Homo sapiens
gcactggctacaact

SEQ ID NO: 1004945 - DNA, 15 bp, Homo sapiens
agcactggctacaac

SEQ ID NO: 1004946 - DNA, 15 bp, Homo sapiens
cagcactggctacaa

SEQ ID NO: 1004947 - DNA, 15 bp, Homo sapiens
tcagcactggctaca

SEQ ID NO: 1004948 - DNA, 15 bp, Homo sapiens
ctcagcactggctac

SEQ ID NO: 1004949 - DNA, 15 bp, Homo sapiens
tctcagcactggcta

SEQ ID NO: 1004950 - DNA, 15 bp, Homo sapiens
gtctcagcactggct

SEQ ID NO: 1004951 - DNA, 15 bp, Homo sapiens
cgtctcagcactggc

SEQ ID NO: 1004952 - DNA, 15 bp, Homo sapiens
acgtctcagcactgg

SEQ ID NO: 1004953 - DNA, 15 bp, Homo sapiens
gacgtctcagcactg

SEQ ID NO: 1004954 - DNA, 15 bp, Homo sapiens
tgacgtctcagcact

SEQ ID NO: 1004955 - DNA, 15 bp, Homo sapiens
ctgacgtctcagcac

SEQ ID NO: 1004956 - DNA, 15 bp, Homo sapiens
gctgacgtctcagca

SEQ ID NO: 1004957 - DNA, 15 bp, Homo sapiens
ggctgacgtctcagc

SEQ ID NO: 1004958 - DNA, 15 bp, Homo sapiens
gggctgacgtctcag

SEQ ID NO: 1004959 - DNA, 15 bp, Homo sapiens
tgggctgacgtctca

SEQ ID NO: 1004960 - DNA, 15 bp, Homo sapiens
ttgggctgacgtctc

SEQ ID NO: 1004961 - DNA, 15 bp, Homo sapiens
tttgggctgacgtct

SEQ ID NO: 1004962 - DNA, 15 bp, Homo sapiens
ctttgggctgacgtc

SEQ ID NO: 1004963 - DNA, 15 bp, Homo sapiens
gctttgggctgacgt

SEQ ID NO: 1004964 - DNA, 15 bp, Homo sapiens
tgctttgggctgacg

SEQ ID NO: 1004965 - DNA, 15 bp, Homo sapiens
ctgctttgggctgac

SEQ ID NO: 1004966 - DNA, 15 bp, Homo sapiens
cctgctttgggctga

SEQ ID NO: 1004967 - DNA, 15 bp, Homo sapiens
ccctgctttgggctg

SEQ ID NO: 1004968 - DNA, 15 bp, Homo sapiens
tccctgctttgggct

SEQ ID NO: 1004969 - DNA, 15 bp, Homo sapiens
gtccctgctttgggc

SEQ ID NO: 1004970 - DNA, 15 bp, Homo sapiens
tgtccctgctttggg

SEQ ID NO: 1004971 - DNA, 15 bp, Homo sapiens
ctgtccctgctttgg

SEQ ID NO: 1004972 - DNA, 15 bp, Homo sapiens
tctgtccctgctttg

SEQ ID NO: 1004973 - DNA, 15 bp, Homo sapiens
ctctgtccctgcttt

SEQ ID NO: 1004974 - DNA, 15 bp, Homo sapiens
actctgtccctgctt

SEQ ID NO: 1004975 - DNA, 15 bp, Homo sapiens
cactctgtccctgct

SEQ ID NO: 1004976 - DNA, 15 bp, Homo sapiens
ccactctgtccctgc

SEQ ID NO: 1004977 - DNA, 15 bp, Homo sapiens
tccactctgtccctg

SEQ ID NO: 1004978 - DNA, 15 bp, Homo sapiens
ctccactctgtccct

SEQ ID NO: 1004979 - DNA, 15 bp, Homo sapiens
tctccactctgtccc

SEQ ID NO: 1004980 - DNA, 15 bp, Homo sapiens
ttctccactctgtcc

SEQ ID NO: 1004981 - DNA, 15 bp, Homo sapiens
cttctccactctgtc

SEQ ID NO: 1004982 - DNA, 15 bp, Homo sapiens
tcttctccactctgt

SEQ ID NO: 1004983 - DNA, 15 bp, Homo sapiens
gtcttctccactctg

SEQ ID NO: 1004984 - DNA, 15 bp, Homo sapiens
ggtcttctccactct

SEQ ID NO: 1004985 - DNA, 15 bp, Homo sapiens
gggtcttctccactc

SEQ ID NO: 1004986 - DNA, 15 bp, Homo sapiens
tgggtcttctccact

SEQ ID NO: 1004987 - DNA, 15 bp, Homo sapiens
gtgggtcttctccac

SEQ ID NO: 1004988 - DNA, 15 bp, Homo sapiens
ggtgggtcttctcca

SEQ ID NO: 1004989 - DNA, 15 bp, Homo sapiens
aggtgggtcttctcc

SEQ ID NO: 1004990 - DNA, 15 bp, Homo sapiens
gaggtgggtcttctc

SEQ ID NO: 1004991 - DNA, 15 bp, Homo sapiens
agaggtgggtcttct

SEQ ID NO: 1004992 - DNA, 15 bp, Homo sapiens
gagaggtgggtcttc

SEQ ID NO: 1004993 - DNA, 15 bp, Homo sapiens
agagaggtgggtctt

SEQ ID NO: 1004994 - DNA, 15 bp, Homo sapiens
cagagaggtgggtct

SEQ ID NO: 1004995 - DNA, 15 bp, Homo sapiens
acagagaggtgggtc

SEQ ID NO: 1004996 - DNA, 15 bp, Homo sapiens
aacagagaggtgggt

SEQ ID NO: 1004997 - DNA, 15 bp, Homo sapiens
gaacagagaggtggg

SEQ ID NO: 1004998 - DNA, 15 bp, Homo sapiens
agaacagagaggtgg

SEQ ID NO: 1004999 - DNA, 15 bp, Homo sapiens
gagaacagagaggtg

SEQ ID NO: 1005000 - DNA, 15 bp, Homo sapiens
ggagaacagagaggt

SEQ ID NO: 1005001 - DNA, 15 bp, Homo sapiens
gggagaacagagagg

SEQ ID NO: 1005002 - DNA, 15 bp, Homo sapiens
tgggagaacagagag

SEQ ID NO: 1005003 - DNA, 15 bp, Homo sapiens
ctgggagaacagaga

SEQ ID NO: 1005004 - DNA, 15 bp, Homo sapiens
gctgggagaacagag

SEQ ID NO: 1005005 - DNA, 15 bp, Homo sapiens
agctgggagaacaga

SEQ ID NO: 1005006 - DNA, 15 bp, Homo sapiens
gagctgggagaacag

SEQ ID NO: 1005007 - DNA, 15 bp, Homo sapiens
agagctgggagaaca

SEQ ID NO: 1005008 - DNA, 15 bp, Homo sapiens
cagagctgggagaac

SEQ ID NO: 1005009 - DNA, 15 bp, Homo sapiens
tcagagctgggagaa

SEQ ID NO: 1005010 - DNA, 15 bp, Homo sapiens
atcagagctgggaga

SEQ ID NO: 1005011 - DNA, 15 bp, Homo sapiens
tatcagagctgggag

SEQ ID NO: 1005012 - DNA, 15 bp, Homo sapiens
atatcagagctggga

SEQ ID NO: 1005013 - DNA, 15 bp, Homo sapiens
gatatcagagctggg

SEQ ID NO: 1005014 - DNA, 15 bp, Homo sapiens
ggatatcagagctgg

SEQ ID NO: 1005015 - DNA, 15 bp, Homo sapiens
tggatatcagagctg

SEQ ID NO: 1005016 - DNA, 15 bp, Homo sapiens
ctggatatcagagct

SEQ ID NO: 1005017 - DNA, 15 bp, Homo sapiens
gctggatatcagagc

SEQ ID NO: 1005018 - DNA, 15 bp, Homo sapiens
agctggatatcagag

SEQ ID NO: 1005019 - DNA, 15 bp, Homo sapiens
cagctggatatcaga

SEQ ID NO: 1005020 - DNA, 15 bp, Homo sapiens
ccagctggatatcag

SEQ ID NO: 1005021 - DNA, 15 bp, Homo sapiens
cccagctggatatca

SEQ ID NO: 1005022 - DNA, 15 bp, Homo sapiens
ccccagctggatatc

SEQ ID NO: 1005023 - DNA, 15 bp, Homo sapiens
accccagctggatat

SEQ ID NO: 1005024 - DNA, 15 bp, Homo sapiens
gaccccagctggata

SEQ ID NO: 1005025 - DNA, 15 bp, Homo sapiens
agaccccagctggat

SEQ ID NO: 1005026 - DNA, 15 bp, Homo sapiens
aagaccccagctgga

SEQ ID NO: 1005027 - DNA, 15 bp, Homo sapiens
gaagaccccagctgg

SEQ ID NO: 1005028 - DNA, 15 bp, Homo sapiens
ggaagaccccagctg

SEQ ID NO: 1005029 - DNA, 15 bp, Homo sapiens
cggaagaccccagct

SEQ ID NO: 1005030 - DNA, 15 bp, Homo sapiens
gcggaagaccccagc

SEQ ID NO: 1005031 - DNA, 15 bp, Homo sapiens
agcggaagaccccag

SEQ ID NO: 1005032 - DNA, 15 bp, Homo sapiens
cagcggaagacccca

SEQ ID NO: 1005033 - DNA, 15 bp, Homo sapiens
ccagcggaagacccc

SEQ ID NO: 1005034 - DNA, 15 bp, Homo sapiens
gccagcggaagaccc

SEQ ID NO: 1005035 - DNA, 15 bp, Homo sapiens
agccagcggaagacc

SEQ ID NO: 1005036 - DNA, 15 bp, Homo sapiens
cagccagcggaagac

SEQ ID NO: 1005037 - DNA, 15 bp, Homo sapiens
ccagccagcggaaga

SEQ ID NO: 1005038 - DNA, 15 bp, Homo sapiens
tccagccagcggaag

SEQ ID NO: 1005039 - DNA, 15 bp, Homo sapiens
atccagccagcggaa

SEQ ID NO: 1005040 - DNA, 15 bp, Homo sapiens
gatccagccagcgga

SEQ ID NO: 1005041 - DNA, 15 bp, Homo sapiens
ggatccagccagcgg

SEQ ID NO: 1005042 - DNA, 15 bp, Homo sapiens
tggatccagccagcg

SEQ ID NO: 1005043 - DNA, 15 bp, Homo sapiens
gtggatccagccagc

SEQ ID NO: 1005044 - DNA, 15 bp, Homo sapiens
ggtggatccagccag

SEQ ID NO: 1005045 - DNA, 15 bp, Homo sapiens
tggtggatccagcca

SEQ ID NO: 1005046 - DNA, 15 bp, Homo sapiens
ctggtggatccagcc

SEQ ID NO: 1005047 - DNA, 15 bp, Homo sapiens
cctggtggatccagc

SEQ ID NO: 1005048 - DNA, 15 bp, Homo sapiens
tcctggtggatccag

SEQ ID NO: 1005049 - DNA, 15 bp, Homo sapiens
ttcctggtggatcca

SEQ ID NO: 1005050 - DNA, 15 bp, Homo sapiens
cttcctggtggatcc

SEQ ID NO: 1005051 - DNA, 15 bp, Homo sapiens
gcttcctggtggatc

SEQ ID NO: 1005052 - DNA, 15 bp, Homo sapiens
ggcttcctggtggat

SEQ ID NO: 1005053 - DNA, 15 bp, Homo sapiens
tggcttcctggtgga

SEQ ID NO: 1005054 - DNA, 15 bp, Homo sapiens
ctggcttcctggtgg

SEQ ID NO: 1005055 - DNA, 15 bp, Homo sapiens
tctggcttcctggtg

SEQ ID NO: 1005056 - DNA, 15 bp, Homo sapiens
ttctggcttcctggt

SEQ ID NO: 1005057 - DNA, 15 bp, Homo sapiens
cttctggcttcctgg

SEQ ID NO: 1005058 - DNA, 15 bp, Homo sapiens
tcttctggcttcctg

SEQ ID NO: 1005059 - DNA, 15 bp, Homo sapiens
gtcttctggcttcct

SEQ ID NO: 1005060 - DNA, 15 bp, Homo sapiens
tgtcttctggcttcc

SEQ ID NO: 1005061 - DNA, 15 bp, Homo sapiens
ctgtcttctggcttc

SEQ ID NO: 1005062 - DNA, 15 bp, Homo sapiens
actgtcttctggctt

SEQ ID NO: 1005063 - DNA, 15 bp, Homo sapiens
cactgtcttctggct

SEQ ID NO: 1005064 - DNA, 15 bp, Homo sapiens
ccactgtcttctggc

SEQ ID NO: 1005065 - DNA, 15 bp, Homo sapiens
tccactgtcttctgg

SEQ ID NO: 1005066 - DNA, 15 bp, Homo sapiens
ctccactgtcttctg

SEQ ID NO: 1005067 - DNA, 15 bp, Homo sapiens
gctccactgtcttct

SEQ ID NO: 1005068 - DNA, 15 bp, Homo sapiens
agctccactgtcttc

SEQ ID NO: 1005069 - DNA, 15 bp, Homo sapiens
tagctccactgtctt

SEQ ID NO: 1005070 - DNA, 15 bp, Homo sapiens
ctagctccactgtct

SEQ ID NO: 1005071 - DNA, 15 bp, Homo sapiens
cctagctccactgtc

SEQ ID NO: 1005072 - DNA, 15 bp, Homo sapiens
acctagctccactgt

SEQ ID NO: 1005073 - DNA, 15 bp, Homo sapiens
gacctagctccactg

SEQ ID NO: 1005074 - DNA, 15 bp, Homo sapiens
agacctagctccact

SEQ ID NO: 1005075 - DNA, 15 bp, Homo sapiens
cagacctagctccac

SEQ ID NO: 1005076 - DNA, 15 bp, Homo sapiens
acagacctagctcca

SEQ ID NO: 1005077 - DNA, 15 bp, Homo sapiens
cacagacctagctcc

SEQ ID NO: 1005078 - DNA, 15 bp, Homo sapiens
acacagacctagctc

SEQ ID NO: 1005079 - DNA, 15 bp, Homo sapiens
tacacagacctagct

SEQ ID NO: 1005080 - DNA, 15 bp, Homo sapiens
ctacacagacctagc

SEQ ID NO: 1005081 - DNA, 15 bp, Homo sapiens
actacacagacctag

SEQ ID NO: 1005082 - DNA, 15 bp, Homo sapiens
gactacacagaccta

SEQ ID NO: 1005083 - DNA, 15 bp, Homo sapiens
agactacacagacct

SEQ ID NO: 1005084 - DNA, 15 bp, Homo sapiens
cagactacacagacc

SEQ ID NO: 1005085 - DNA, 15 bp, Homo sapiens
acagactacacagac

SEQ ID NO: 1005086 - DNA, 15 bp, Homo sapiens
tacagactacacaga

SEQ ID NO: 1005087 - DNA, 15 bp, Homo sapiens
ctacagactacacag

SEQ ID NO: 1005088 - DNA, 15 bp, Homo sapiens
tctacagactacaca

SEQ ID NO: 1005089 - DNA, 15 bp, Homo sapiens
ctctacagactacac

SEQ ID NO: 1005090 - DNA, 15 bp, Homo sapiens
cctctacagactaca

SEQ ID NO: 1005091 - DNA, 15 bp, Homo sapiens
acctctacagactac

SEQ ID NO: 1005092 - DNA, 15 bp, Homo sapiens
gacctctacagacta

SEQ ID NO: 1005093 - DNA, 15 bp, Homo sapiens
tgacctctacagact

SEQ ID NO: 1005094 - DNA, 15 bp, Homo sapiens
ctgacctctacagac

SEQ ID NO: 1005095 - DNA, 15 bp, Homo sapiens
gctgacctctacaga

SEQ ID NO: 1005096 - DNA, 15 bp, Homo sapiens
ggctgacctctacag

SEQ ID NO: 1005097 - DNA, 15 bp, Homo sapiens
aggctgacctctaca

SEQ ID NO: 1005098 - DNA, 15 bp, Homo sapiens
taggctgacctctac

SEQ ID NO: 1005099 - DNA, 15 bp, Homo sapiens
gtaggctgacctcta

SEQ ID NO: 1005100 - DNA, 15 bp, Homo sapiens
agtaggctgacctct

SEQ ID NO: 1005101 - DNA, 15 bp, Homo sapiens
tagtaggctgacctc

SEQ ID NO: 1005102 - DNA, 15 bp, Homo sapiens
ctagtaggctgacct

SEQ ID NO: 1005103 - DNA, 15 bp, Homo sapiens
cctagtaggctgacc

SEQ ID NO: 1005104 - DNA, 15 bp, Homo sapiens
gcctagtaggctgac

SEQ ID NO: 1005105 - DNA, 15 bp, Homo sapiens
tgcctagtaggctga

SEQ ID NO: 1005106 - DNA, 15 bp, Homo sapiens
gtgcctagtaggctg

SEQ ID NO: 1005107 - DNA, 15 bp, Homo sapiens
tgtgcctagtaggct

SEQ ID NO: 1005108 - DNA, 15 bp, Homo sapiens
ttgtgcctagtaggc

SEQ ID NO: 1005109 - DNA, 15 bp, Homo sapiens
attgtgcctagtagg

SEQ ID NO: 1005110 - DNA, 15 bp, Homo sapiens
cattgtgcctagtag

SEQ ID NO: 1005111 - DNA, 15 bp, Homo sapiens
gcattgtgcctagta

SEQ ID NO: 1005112 - DNA, 15 bp, Homo sapiens
ggcattgtgcctagt

SEQ ID NO: 1005113 - DNA, 15 bp, Homo sapiens
aggcattgtgcctag

SEQ ID NO: 1005114 - DNA, 15 bp, Homo sapiens
caggcattgtgccta

SEQ ID NO: 1005115 - DNA, 15 bp, Homo sapiens
ccaggcattgtgcct

SEQ ID NO: 1005116 - DNA, 15 bp, Homo sapiens
tccaggcattgtgcc

SEQ ID NO: 1005117 - DNA, 15 bp, Homo sapiens
ctccaggcattgtgc

SEQ ID NO: 1005118 - DNA, 15 bp, Homo sapiens
cctccaggcattgtg

SEQ ID NO: 1005119 - DNA, 15 bp, Homo sapiens
ccctccaggcattgt

SEQ ID NO: 1005120 - DNA, 15 bp, Homo sapiens
tccctccaggcattg

SEQ ID NO: 1005121 - DNA, 15 bp, Homo sapiens
ctccctccaggcatt

SEQ ID NO: 1005122 - DNA, 15 bp, Homo sapiens
tctccctccaggcat

SEQ ID NO: 1005123 - DNA, 15 bp, Homo sapiens
ttctccctccaggca

SEQ ID NO: 1005124 - DNA, 15 bp, Homo sapiens
tttctccctccaggc

SEQ ID NO: 1005125 - DNA, 15 bp, Homo sapiens
atttctccctccagg

SEQ ID NO: 1005126 - DNA, 15 bp, Homo sapiens
tatttctccctccag

SEQ ID NO: 1005127 - DNA, 15 bp, Homo sapiens
ctatttctccctcca

SEQ ID NO: 1005128 - DNA, 15 bp, Homo sapiens
tctatttctccctcc

SEQ ID NO: 1005129 - DNA, 15 bp, Homo sapiens
ttctatttctccctc

SEQ ID NO: 1005130 - DNA, 15 bp, Homo sapiens
tttctatttctccct

SEQ ID NO: 1005131 - DNA, 15 bp, Homo sapiens
ttttctatttctccc

SEQ ID NO: 1005132 - DNA, 15 bp, Homo sapiens
attttctatttctcc

SEQ ID NO: 1005133 - DNA, 15 bp, Homo sapiens
tattttctatttctc

SEQ ID NO: 1005134 - DNA, 15 bp, Homo sapiens
atattttctatttct

SEQ ID NO: 1005135 - DNA, 15 bp, Homo sapiens
gatattttctatttc

SEQ ID NO: 1005136 - DNA, 15 bp, Homo sapiens
ggatattttctattt

SEQ ID NO: 1005137 - DNA, 15 bp, Homo sapiens
tggatattttctatt

SEQ ID NO: 1005138 - DNA, 15 bp, Homo sapiens
ctggatattttctat

SEQ ID NO: 1005139 - DNA, 15 bp, Homo sapiens
gctggatattttcta

SEQ ID NO: 1005140 - DNA, 15 bp, Homo sapiens
tgctggatattttct

SEQ ID NO: 1005141 - DNA, 15 bp, Homo sapiens
gtgctggatattttc

SEQ ID NO: 1005142 - DNA, 15 bp, Homo sapiens
tgtgctggatatttt

SEQ ID NO: 1005143 - DNA, 15 bp, Homo sapiens
gtgtgctggatattt

SEQ ID NO: 1005144 - DNA, 15 bp, Homo sapiens
ggtgtgctggatatt

SEQ ID NO: 1005145 - DNA, 15 bp, Homo sapiens
tggtgtgctggatat

SEQ ID NO: 1005146 - DNA, 15 bp, Homo sapiens
atggtgtgctggata

SEQ ID NO: 1005147 - DNA, 15 bp, Homo sapiens
aatggtgtgctggat

SEQ ID NO: 1005148 - DNA, 15 bp, Homo sapiens
aaatggtgtgctgga

SEQ ID NO: 1005149 - DNA, 15 bp, Homo sapiens
gaaatggtgtgctgg

SEQ ID NO: 1005150 - DNA, 15 bp, Homo sapiens
agaaatggtgtgctg

SEQ ID NO: 1005151 - DNA, 15 bp, Homo sapiens
aagaaatggtgtgct

SEQ ID NO: 1005152 - DNA, 15 bp, Homo sapiens
aaagaaatggtgtgc

SEQ ID NO: 1005153 - DNA, 15 bp, Homo sapiens
aaaagaaatggtgtg

SEQ ID NO: 1005154 - DNA, 15 bp, Homo sapiens
aaaaagaaatggtgt

SEQ ID NO: 1005155 - DNA, 15 bp, Homo sapiens
aaaaaagaaatggtg

SEQ ID NO: 1005156 - DNA, 15 bp, Homo sapiens
aaaaaaagaaatggt

SEQ ID NO: 1005157 - DNA, 15 bp, Homo sapiens
aaaaaaaagaaatgg

SEQ ID NO: 1005158 - DNA, 15 bp, Homo sapiens
caaaaaaaagaaatg

SEQ ID NO: 1005159 - DNA, 15 bp, Homo sapiens
acaaaaaaaagaaat

SEQ ID NO: 1005160 - DNA, 15 bp, Homo sapiens
caaacaaaaaaaaga

SEQ ID NO: 1005161 - DNA, 15 bp, Homo sapiens
acaaacaaaaaaaag

SEQ ID NO: 1005162 - DNA, 15 bp, Homo sapiens
taaaaacaaacaaaa

SEQ ID NO: 1005163 - DNA, 15 bp, Homo sapiens
gtaaaaacaaacaaa

SEQ ID NO: 1005164 - DNA, 15 bp, Homo sapiens
tgtaaaaacaaacaa

SEQ ID NO: 1005165 - DNA, 15 bp, Homo sapiens
gtgtaaaaacaaaca

SEQ ID NO: 1005166 - DNA, 15 bp, Homo sapiens
agtgtaaaaacaaac

SEQ ID NO: 1005167 - DNA, 15 bp, Homo sapiens
aagtgtaaaaacaaa

SEQ ID NO: 1005168 - DNA, 15 bp, Homo sapiens
aaagtgtaaaaacaa

SEQ ID NO: 1005169 - DNA, 15 bp, Homo sapiens
taaagtgtaaaaaca

SEQ ID NO: 1005170 - DNA, 15 bp, Homo sapiens
ttaaagtgtaaaaac

SEQ ID NO: 1005171 - DNA, 15 bp, Homo sapiens
cttaaagtgtaaaaa

SEQ ID NO: 1005172 - DNA, 15 bp, Homo sapiens
gcttaaagtgtaaaa

SEQ ID NO: 1005173 - DNA, 15 bp, Homo sapiens
agcttaaagtgtaaa

SEQ ID NO: 1005174 - DNA, 15 bp, Homo sapiens
gagcttaaagtgtaa

SEQ ID NO: 1005175 - DNA, 15 bp, Homo sapiens
agagcttaaagtgta

SEQ ID NO: 1005176 - DNA, 15 bp, Homo sapiens
tagagcttaaagtgt

SEQ ID NO: 1005177 - DNA, 15 bp, Homo sapiens
ctagagcttaaagtg

SEQ ID NO: 1005178 - DNA, 15 bp, Homo sapiens
cctagagcttaaagt

SEQ ID NO: 1005179 - DNA, 15 bp, Homo sapiens
ccctagagcttaaag

SEQ ID NO: 1005180 - DNA, 15 bp, Homo sapiens
accctagagcttaaa

SEQ ID NO: 1005181 - DNA, 15 bp, Homo sapiens
taccctagagcttaa

SEQ ID NO: 1005182 - DNA, 15 bp, Homo sapiens
gtaccctagagctta

SEQ ID NO: 1005183 - DNA, 15 bp, Homo sapiens
tgtaccctagagctt

SEQ ID NO: 1005184 - DNA, 15 bp, Homo sapiens
atgtaccctagagct

SEQ ID NO: 1005185 - DNA, 15 bp, Homo sapiens
catgtaccctagagc

SEQ ID NO: 1005186 - DNA, 15 bp, Homo sapiens
acatgtaccctagag

SEQ ID NO: 1005187 - DNA, 15 bp, Homo sapiens
cacatgtaccctaga

SEQ ID NO: 1005188 - DNA, 15 bp, Homo sapiens
gcacatgtaccctag

SEQ ID NO: 1005189 - DNA, 15 bp, Homo sapiens
gttgtgcacatgtac

SEQ ID NO: 1005190 - DNA, 15 bp, Homo sapiens
cgttgtgcacatgta

SEQ ID NO: 1005191 - DNA, 15 bp, Homo sapiens
acgttgtgcacatgt

SEQ ID NO: 1005192 - DNA, 15 bp, Homo sapiens
cacgttgtgcacatg

SEQ ID NO: 1005193 - DNA, 15 bp, Homo sapiens
gcacgttgtgcacat

SEQ ID NO: 1005194 - DNA, 15 bp, Homo sapiens
tgcacgttgtgcaca

SEQ ID NO: 1005195 - DNA, 15 bp, Homo sapiens
ctgcacgttgtgcac

SEQ ID NO: 1005196 - DNA, 15 bp, Homo sapiens
cctgcacgttgtgca

SEQ ID NO: 1005197 - DNA, 15 bp, Homo sapiens
acctgcacgttgtgc

SEQ ID NO: 1005198 - DNA, 15 bp, Homo sapiens
aacctgcacgttgtg

SEQ ID NO: 1005199 - DNA, 15 bp, Homo sapiens
aaacctgcacgttgt

SEQ ID NO: 1005200 - DNA, 15 bp, Homo sapiens
caaacctgcacgttg

SEQ ID NO: 1005201 - DNA, 15 bp, Homo sapiens
ggtaacaaacctgca

SEQ ID NO: 1005202 - DNA, 15 bp, Homo sapiens
aggtaacaaacctgc

SEQ ID NO: 1005203 - DNA, 15 bp, Homo sapiens
taggtaacaaacctg

SEQ ID NO: 1005204 - DNA, 15 bp, Homo sapiens
ataggtaacaaacct

SEQ ID NO: 1005205 - DNA, 15 bp, Homo sapiens
cataggtaacaaacc

SEQ ID NO: 1005206 - DNA, 15 bp, Homo sapiens
acataggtaacaaac

SEQ ID NO: 1005207 - DNA, 15 bp, Homo sapiens
tacataggtaacaaa

SEQ ID NO: 1005208 - DNA, 15 bp, Homo sapiens
atacataggtaacaa

SEQ ID NO: 1005209 - DNA, 15 bp, Homo sapiens
tatacataggtaaca

SEQ ID NO: 1005210 - DNA, 15 bp, Homo sapiens
gtatacataggtaac

SEQ ID NO: 1005211 - DNA, 15 bp, Homo sapiens
tgtatacataggtaa

SEQ ID NO: 1005212 - DNA, 15 bp, Homo sapiens
atgtatacataggta

SEQ ID NO: 1005213 - DNA, 15 bp, Homo sapiens
catgtatacataggt

SEQ ID NO: 1005214 - DNA, 15 bp, Homo sapiens
acatgtatacatagg

SEQ ID NO: 1005215 - DNA, 15 bp, Homo sapiens
cacatgtatacatag

SEQ ID NO: 1005216 - DNA, 15 bp, Homo sapiens
gcacatgtatacata

SEQ ID NO: 1005217 - DNA, 15 bp, Homo sapiens
ggcacatgtatacat

SEQ ID NO: 1005218 - DNA, 15 bp, Homo sapiens
cggcacatgtataca

SEQ ID NO: 1005219 - DNA, 15 bp, Homo sapiens
acggcacatgtatac

SEQ ID NO: 1005220 - DNA, 15 bp, Homo sapiens
cacggcacatgtata

SEQ ID NO: 1005221 - DNA, 15 bp, Homo sapiens
acacggcacatgtat

SEQ ID NO: 1005222 - DNA, 15 bp, Homo sapiens
aacacggcacatgta

SEQ ID NO: 1005223 - DNA, 15 bp, Homo sapiens
caacacggcacatgt

SEQ ID NO: 1005224 - DNA, 15 bp, Homo sapiens
ccaacacggcacatg

SEQ ID NO: 1005225 - DNA, 15 bp, Homo sapiens
accaacacggcacat

SEQ ID NO: 1005226 - DNA, 15 bp, Homo sapiens
caccaacacggcaca

SEQ ID NO: 1005227 - DNA, 15 bp, Homo sapiens
acaccaacacggcac

SEQ ID NO: 1005228 - DNA, 15 bp, Homo sapiens
cacaccaacacggca

SEQ ID NO: 1005229 - DNA, 15 bp, Homo sapiens
acacaccaacacggc

SEQ ID NO: 1005230 - DNA, 15 bp, Homo sapiens
aacacaccaacacgg

SEQ ID NO: 1005231 - DNA, 15 bp, Homo sapiens
caacacaccaacacg

SEQ ID NO: 1005232 - DNA, 15 bp, Homo sapiens
gcaacacaccaacac

SEQ ID NO: 1005233 - DNA, 15 bp, Homo sapiens
tgcaacacaccaaca

SEQ ID NO: 1005234 - DNA, 15 bp, Homo sapiens
gtgcaacacaccaac

SEQ ID NO: 1005235 - DNA, 15 bp, Homo sapiens
ggtgcaacacaccaa

SEQ ID NO: 1005236 - DNA, 15 bp, Homo sapiens
gggtgcaacacacca

SEQ ID NO: 1005237 - DNA, 15 bp, Homo sapiens
tgggtgcaacacacc

SEQ ID NO: 1005238 - DNA, 15 bp, Homo sapiens
atgggtgcaacacac

SEQ ID NO: 1005239 - DNA, 15 bp, Homo sapiens
aatgggtgcaacaca

SEQ ID NO: 1005240 - DNA, 15 bp, Homo sapiens
taatgggtgcaacac

SEQ ID NO: 1005241 - DNA, 15 bp, Homo sapiens
ttaatgggtgcaaca

SEQ ID NO: 1005242 - DNA, 15 bp, Homo sapiens
cttaatgggtgcaac

SEQ ID NO: 1005243 - DNA, 15 bp, Homo sapiens
acttaatgggtgcaa

SEQ ID NO: 1005244 - DNA, 15 bp, Homo sapiens
aacttaatgggtgca

SEQ ID NO: 1005245 - DNA, 15 bp, Homo sapiens
caacttaatgggtgc

SEQ ID NO: 1005246 - DNA, 15 bp, Homo sapiens
acaacttaatgggtg

SEQ ID NO: 1005247 - DNA, 15 bp, Homo sapiens
gacaacttaatgggt

SEQ ID NO: 1005248 - DNA, 15 bp, Homo sapiens
tgacaacttaatggg

SEQ ID NO: 1005249 - DNA, 15 bp, Homo sapiens
atgacaacttaatgg

SEQ ID NO: 1005250 - DNA, 15 bp, Homo sapiens
aatgacaacttaatg

SEQ ID NO: 1005251 - DNA, 15 bp, Homo sapiens
aaatgacaacttaat

SEQ ID NO: 1005252 - DNA, 15 bp, Homo sapiens
taaatgacaacttaa

SEQ ID NO: 1005253 - DNA, 15 bp, Homo sapiens
gtaaatgacaactta

SEQ ID NO: 1005254 - DNA, 15 bp, Homo sapiens
tgtaaatgacaactt

SEQ ID NO: 1005255 - DNA, 15 bp, Homo sapiens
atgtaaatgacaact

SEQ ID NO: 1005256 - DNA, 15 bp, Homo sapiens
aatgtaaatgacaac

SEQ ID NO: 1005257 - DNA, 15 bp, Homo sapiens
taatgtaaatgacaa

SEQ ID NO: 1005258 - DNA, 15 bp, Homo sapiens
ctaatgtaaatgaca

SEQ ID NO: 1005259 - DNA, 15 bp, Homo sapiens
cctaatgtaaatgac

SEQ ID NO: 1005260 - DNA, 15 bp, Homo sapiens
acctaatgtaaatga

SEQ ID NO: 1005261 - DNA, 15 bp, Homo sapiens
cacctaatgtaaatg

SEQ ID NO: 1005262 - DNA, 15 bp, Homo sapiens
acacctaatgtaaat

SEQ ID NO: 1005263 - DNA, 15 bp, Homo sapiens
tacacctaatgtaaa

SEQ ID NO: 1005264 - DNA, 15 bp, Homo sapiens
atacacctaatgtaa

SEQ ID NO: 1005265 - DNA, 15 bp, Homo sapiens
gatacacctaatgta

SEQ ID NO: 1005266 - DNA, 15 bp, Homo sapiens
agatacacctaatgt

SEQ ID NO: 1005267 - DNA, 15 bp, Homo sapiens
gagatacacctaatg

SEQ ID NO: 1005268 - DNA, 15 bp, Homo sapiens
ggagatacacctaat

SEQ ID NO: 1005269 - DNA, 15 bp, Homo sapiens
aggagatacacctaa

SEQ ID NO: 1005270 - DNA, 15 bp, Homo sapiens
taggagatacaccta

SEQ ID NO: 1005271 - DNA, 15 bp, Homo sapiens
ttaggagatacacct

SEQ ID NO: 1005272 - DNA, 15 bp, Homo sapiens
attaggagatacacc

SEQ ID NO: 1005273 - DNA, 15 bp, Homo sapiens
cattaggagatacac

SEQ ID NO: 1005274 - DNA, 15 bp, Homo sapiens
gcattaggagataca

SEQ ID NO: 1005275 - DNA, 15 bp, Homo sapiens
agcattaggagatac

SEQ ID NO: 1005276 - DNA, 15 bp, Homo sapiens
tagcattaggagata

SEQ ID NO: 1005277 - DNA, 15 bp, Homo sapiens
atagcattaggagat

SEQ ID NO: 1005278 - DNA, 15 bp, Homo sapiens
gatagcattaggaga

SEQ ID NO: 1005279 - DNA, 15 bp, Homo sapiens
ggatagcattaggag

SEQ ID NO: 1005280 - DNA, 15 bp, Homo sapiens
gggatagcattagga

SEQ ID NO: 1005281 - DNA, 15 bp, Homo sapiens
agggatagcattagg

SEQ ID NO: 1005282 - DNA, 15 bp, Homo sapiens
gagggatagcattag

SEQ ID NO: 1005283 - DNA, 15 bp, Homo sapiens
gggggagggatagca

SEQ ID NO: 1005284 - DNA, 15 bp, Homo sapiens
cctgttgtggggtgg

SEQ ID NO: 1005285 - DNA, 15 bp, Homo sapiens
gcctgttgtggggtg

SEQ ID NO: 1005286 - DNA, 15 bp, Homo sapiens
ggcctgttgtggggt

SEQ ID NO: 1005287 - DNA, 15 bp, Homo sapiens
gggcctgttgtgggg

SEQ ID NO: 1005288 - DNA, 15 bp, Homo sapiens
ggggcctgttgtggg

SEQ ID NO: 1005289 - DNA, 15 bp, Homo sapiens
cggggcctgttgtgg

SEQ ID NO: 1005290 - DNA, 15 bp, Homo sapiens
ccggggcctgttgtg

SEQ ID NO: 1005291 - DNA, 15 bp, Homo sapiens
accggggcctgttgt

SEQ ID NO: 1005292 - DNA, 15 bp, Homo sapiens
caccggggcctgttg

SEQ ID NO: 1005293 - DNA, 15 bp, Homo sapiens
acaccggggcctgtt

SEQ ID NO: 1005294 - DNA, 15 bp, Homo sapiens
cacaccggggcctgt

SEQ ID NO: 1005295 - DNA, 15 bp, Homo sapiens
acacaccggggcctg

SEQ ID NO: 1005296 - DNA, 15 bp, Homo sapiens
cacacaccggggcct

SEQ ID NO: 1005297 - DNA, 15 bp, Homo sapiens
tcacacaccggggcc

SEQ ID NO: 1005298 - DNA, 15 bp, Homo sapiens
atcacacaccggggc

SEQ ID NO: 1005299 - DNA, 15 bp, Homo sapiens
catcacacaccgggg

SEQ ID NO: 1005300 - DNA, 15 bp, Homo sapiens
acatcacacaccggg

SEQ ID NO: 1005301 - DNA, 15 bp, Homo sapiens
gacatcacacaccgg

SEQ ID NO: 1005302 - DNA, 15 bp, Homo sapiens
ggacatcacacaccg

SEQ ID NO: 1005303 - DNA, 15 bp, Homo sapiens
gggacatcacacacc

SEQ ID NO: 1005304 - DNA, 15 bp, Homo sapiens
ggggacatcacacac

SEQ ID NO: 1005305 - DNA, 15 bp, Homo sapiens
gggggacatcacaca

SEQ ID NO: 1005306 - DNA, 15 bp, Homo sapiens
agggggacatcacac

SEQ ID NO: 1005307 - DNA, 15 bp, Homo sapiens
aagggggacatcaca

SEQ ID NO: 1005308 - DNA, 15 bp, Homo sapiens
gaagggggacatcac

SEQ ID NO: 1005309 - DNA, 15 bp, Homo sapiens
ggaagggggacatca

SEQ ID NO: 1005310 - DNA, 15 bp, Homo sapiens
aggaagggggacatc

SEQ ID NO: 1005311 - DNA, 15 bp, Homo sapiens
caggaagggggacat

SEQ ID NO: 1005312 - DNA, 15 bp, Homo sapiens
acaggaagggggaca

SEQ ID NO: 1005313 - DNA, 15 bp, Homo sapiens
cacaggaagggggac

SEQ ID NO: 1005314 - DNA, 15 bp, Homo sapiens
acacaggaaggggga

SEQ ID NO: 1005315 - DNA, 15 bp, Homo sapiens
gacacaggaaggggg

SEQ ID NO: 1005316 - DNA, 15 bp, Homo sapiens
ttggacacaggaagg

SEQ ID NO: 1005317 - DNA, 15 bp, Homo sapiens
cttggacacaggaag

SEQ ID NO: 1005318 - DNA, 15 bp, Homo sapiens
acttggacacaggaa

SEQ ID NO: 1005319 - DNA, 15 bp, Homo sapiens
cacttggacacagga

SEQ ID NO: 1005320 - DNA, 15 bp, Homo sapiens
acacttggacacagg

SEQ ID NO: 1005321 - DNA, 15 bp, Homo sapiens
aacacttggacacag

SEQ ID NO: 1005322 - DNA, 15 bp, Homo sapiens
gaacacttggacaca

SEQ ID NO: 1005323 - DNA, 15 bp, Homo sapiens
agaacacttggacac

SEQ ID NO: 1005324 - DNA, 15 bp, Homo sapiens
gagaacacttggaca

SEQ ID NO: 1005325 - DNA, 15 bp, Homo sapiens
tgagaacacttggac

SEQ ID NO: 1005326 - DNA, 15 bp, Homo sapiens
atgagaacacttgga

SEQ ID NO: 1005327 - DNA, 15 bp, Homo sapiens
aatgagaacacttgg

SEQ ID NO: 1005328 - DNA, 15 bp, Homo sapiens
caatgagaacacttg

SEQ ID NO: 1005329 - DNA, 15 bp, Homo sapiens
acaatgagaacactt

SEQ ID NO: 1005330 - DNA, 15 bp, Homo sapiens
aacaatgagaacact

SEQ ID NO: 1005331 - DNA, 15 bp, Homo sapiens
aattgaacaatgaga

SEQ ID NO: 1005332 - DNA, 15 bp, Homo sapiens
gaattgaacaatgag

SEQ ID NO: 1005333 - DNA, 15 bp, Homo sapiens
ggaattgaacaatga

SEQ ID NO: 1005334 - DNA, 15 bp, Homo sapiens
gggaattgaacaatg

SEQ ID NO: 1005335 - DNA, 15 bp, Homo sapiens
tgggaattgaacaat

SEQ ID NO: 1005336 - DNA, 15 bp, Homo sapiens
gtgggaattgaacaa

SEQ ID NO: 1005337 - DNA, 15 bp, Homo sapiens
ggtgggaattgaaca

SEQ ID NO: 1005338 - DNA, 15 bp, Homo sapiens
aggtgggaattgaac

SEQ ID NO: 1005339 - DNA, 15 bp, Homo sapiens
taggtgggaattgaa

SEQ ID NO: 1005340 - DNA, 15 bp, Homo sapiens
ataggtgggaattga

SEQ ID NO: 1005341 - DNA, 15 bp, Homo sapiens
cataggtgggaattg

SEQ ID NO: 1005342 - DNA, 15 bp, Homo sapiens
tcataggtgggaatt

SEQ ID NO: 1005343 - DNA, 15 bp, Homo sapiens
ctcataggtgggaat

SEQ ID NO: 1005344 - DNA, 15 bp, Homo sapiens
actcataggtgggaa

SEQ ID NO: 1005345 - DNA, 15 bp, Homo sapiens
cactcataggtggga

SEQ ID NO: 1005346 - DNA, 15 bp, Homo sapiens
tcactcataggtggg

SEQ ID NO: 1005347 - DNA, 15 bp, Homo sapiens
ctcactcataggtgg

SEQ ID NO: 1005348 - DNA, 15 bp, Homo sapiens
tctcactcataggtg

SEQ ID NO: 1005349 - DNA, 15 bp, Homo sapiens
ttctcactcataggt

SEQ ID NO: 1005350 - DNA, 15 bp, Homo sapiens
gttctcactcatagg

SEQ ID NO: 1005351 - DNA, 15 bp, Homo sapiens
tgttctcactcatag

SEQ ID NO: 1005352 - DNA, 15 bp, Homo sapiens
atgttctcactcata

SEQ ID NO: 1005353 - DNA, 15 bp, Homo sapiens
catgttctcactcat

SEQ ID NO: 1005354 - DNA, 15 bp, Homo sapiens
gcatgttctcactca

SEQ ID NO: 1005355 - DNA, 15 bp, Homo sapiens
cgcatgttctcactc

SEQ ID NO: 1005356 - DNA, 15 bp, Homo sapiens
ccgcatgttctcact

SEQ ID NO: 1005357 - DNA, 15 bp, Homo sapiens
accgcatgttctcac

SEQ ID NO: 1005358 - DNA, 15 bp, Homo sapiens
caccgcatgttctca

SEQ ID NO: 1005359 - DNA, 15 bp, Homo sapiens
acaccgcatgttctc

SEQ ID NO: 1005360 - DNA, 15 bp, Homo sapiens
aacaccgcatgttct

SEQ ID NO: 1005361 - DNA, 15 bp, Homo sapiens
aaacaccgcatgttc

SEQ ID NO: 1005362 - DNA, 15 bp, Homo sapiens
caaacaccgcatgtt

SEQ ID NO: 1005363 - DNA, 15 bp, Homo sapiens
ccaaacaccgcatgt

SEQ ID NO: 1005364 - DNA, 15 bp, Homo sapiens
accaaacaccgcatg

SEQ ID NO: 1005365 - DNA, 15 bp, Homo sapiens
aaccaaacaccgcat

SEQ ID NO: 1005366 - DNA, 15 bp, Homo sapiens
aaaccaaacaccgca

SEQ ID NO: 1005367 - DNA, 15 bp, Homo sapiens
aaaaccaaacaccgc

SEQ ID NO: 1005368 - DNA, 15 bp, Homo sapiens
aaaaaccaaacaccg

SEQ ID NO: 1005369 - DNA, 15 bp, Homo sapiens
aaaaaaccaaacacc

SEQ ID NO: 1005370 - DNA, 15 bp, Homo sapiens
caaaaaaccaaacac

SEQ ID NO: 1005371 - DNA, 15 bp, Homo sapiens
acaaaaaaccaaaca

SEQ ID NO: 1005372 - DNA, 15 bp, Homo sapiens
gacaaaaaaccaaac

SEQ ID NO: 1005373 - DNA, 15 bp, Homo sapiens
ggacaaaaaaccaaa

SEQ ID NO: 1005374 - DNA, 15 bp, Homo sapiens
aggacaaaaaaccaa

SEQ ID NO: 1005375 - DNA, 15 bp, Homo sapiens
aaggacaaaaaacca

SEQ ID NO: 1005376 - DNA, 15 bp, Homo sapiens
caaggacaaaaaacc

SEQ ID NO: 1005377 - DNA, 15 bp, Homo sapiens
gcaaggacaaaaaac

SEQ ID NO: 1005378 - DNA, 15 bp, Homo sapiens
cgcaaggacaaaaaa

SEQ ID NO: 1005379 - DNA, 15 bp, Homo sapiens
tcgcaaggacaaaaa

SEQ ID NO: 1005380 - DNA, 15 bp, Homo sapiens
atcgcaaggacaaaa

SEQ ID NO: 1005381 - DNA, 15 bp, Homo sapiens
tatcgcaaggacaaa

SEQ ID NO: 1005382 - DNA, 15 bp, Homo sapiens
ctatcgcaaggacaa

SEQ ID NO: 1005383 - DNA, 15 bp, Homo sapiens
actatcgcaaggaca

SEQ ID NO: 1005384 - DNA, 15 bp, Homo sapiens
aactatcgcaaggac

SEQ ID NO: 1005385 - DNA, 15 bp, Homo sapiens
aaactatcgcaagga

SEQ ID NO: 1005386 - DNA, 15 bp, Homo sapiens
caaactatcgcaagg

SEQ ID NO: 1005387 - DNA, 15 bp, Homo sapiens
gcaaactatcgcaag

SEQ ID NO: 1005388 - DNA, 15 bp, Homo sapiens
agcaaactatcgcaa

SEQ ID NO: 1005389 - DNA, 15 bp, Homo sapiens
cagcaaactatcgca

SEQ ID NO: 1005390 - DNA, 15 bp, Homo sapiens
tcagcaaactatcgc

SEQ ID NO: 1005391 - DNA, 15 bp, Homo sapiens
ctcagcaaactatcg

SEQ ID NO: 1005392 - DNA, 15 bp, Homo sapiens
tctcagcaaactatc

SEQ ID NO: 1005393 - DNA, 15 bp, Homo sapiens
ttctcagcaaactat

SEQ ID NO: 1005394 - DNA, 15 bp, Homo sapiens
attctcagcaaacta

SEQ ID NO: 1005395 - DNA, 15 bp, Homo sapiens
cattctcagcaaact

SEQ ID NO: 1005396 - DNA, 15 bp, Homo sapiens
tcattctcagcaaac

SEQ ID NO: 1005397 - DNA, 15 bp, Homo sapiens
atcattctcagcaaa

SEQ ID NO: 1005398 - DNA, 15 bp, Homo sapiens
catcattctcagcaa

SEQ ID NO: 1005399 - DNA, 15 bp, Homo sapiens
ccatcattctcagca

SEQ ID NO: 1005400 - DNA, 15 bp, Homo sapiens
accatcattctcagc

SEQ ID NO: 1005401 - DNA, 15 bp, Homo sapiens
aaccatcattctcag

SEQ ID NO: 1005402 - DNA, 15 bp, Homo sapiens
aaaccatcattctca

SEQ ID NO: 1005403 - DNA, 15 bp, Homo sapiens
gaaaccatcattctc

SEQ ID NO: 1005404 - DNA, 15 bp, Homo sapiens
ggaaaccatcattct

SEQ ID NO: 1005405 - DNA, 15 bp, Homo sapiens
tggaaaccatcattc

SEQ ID NO: 1005406 - DNA, 15 bp, Homo sapiens
atgaagctggaaacc

SEQ ID NO: 1005407 - DNA, 15 bp, Homo sapiens
gatgaagctggaaac

SEQ ID NO: 1005408 - DNA, 15 bp, Homo sapiens
ggatgaagctggaaa

SEQ ID NO: 1005409 - DNA, 15 bp, Homo sapiens
tggatgaagctggaa

SEQ ID NO: 1005410 - DNA, 15 bp, Homo sapiens
gtggatgaagctgga

SEQ ID NO: 1005411 - DNA, 15 bp, Homo sapiens
cgtggatgaagctgg

SEQ ID NO: 1005412 - DNA, 15 bp, Homo sapiens
acgtggatgaagctg

SEQ ID NO: 1005413 - DNA, 15 bp, Homo sapiens
gacgtggatgaagct

SEQ ID NO: 1005414 - DNA, 15 bp, Homo sapiens
ggacgtggatgaagc

SEQ ID NO: 1005415 - DNA, 15 bp, Homo sapiens
gggacgtggatgaag

SEQ ID NO: 1005416 - DNA, 15 bp, Homo sapiens
agggacgtggatgaa

SEQ ID NO: 1005417 - DNA, 15 bp, Homo sapiens
tagggacgtggatga

SEQ ID NO: 1005418 - DNA, 15 bp, Homo sapiens
gtagggacgtggatg

SEQ ID NO: 1005419 - DNA, 15 bp, Homo sapiens
tgtagggacgtggat

SEQ ID NO: 1005420 - DNA, 15 bp, Homo sapiens
ttgtagggacgtgga

SEQ ID NO: 1005421 - DNA, 15 bp, Homo sapiens
tttgtagggacgtgg

SEQ ID NO: 1005422 - DNA, 15 bp, Homo sapiens
ctttgtagggacgtg

SEQ ID NO: 1005423 - DNA, 15 bp, Homo sapiens
cctttgtagggacgt

SEQ ID NO: 1005424 - DNA, 15 bp, Homo sapiens
tcctttgtagggacg

SEQ ID NO: 1005425 - DNA, 15 bp, Homo sapiens
gtcctttgtagggac

SEQ ID NO: 1005426 - DNA, 15 bp, Homo sapiens
tgtcctttgtaggga

SEQ ID NO: 1005427 - DNA, 15 bp, Homo sapiens
atgtcctttgtaggg

SEQ ID NO: 1005428 - DNA, 15 bp, Homo sapiens
catgtcctttgtagg

SEQ ID NO: 1005429 - DNA, 15 bp, Homo sapiens
tcatgtcctttgtag

SEQ ID NO: 1005430 - DNA, 15 bp, Homo sapiens
ttcatgtcctttgta

SEQ ID NO: 1005431 - DNA, 15 bp, Homo sapiens
gttcatgtcctttgt

SEQ ID NO: 1005432 - DNA, 15 bp, Homo sapiens
agttcatgtcctttg

SEQ ID NO: 1005433 - DNA, 15 bp, Homo sapiens
gagttcatgtccttt

SEQ ID NO: 1005434 - DNA, 15 bp, Homo sapiens
tgagttcatgtcctt

SEQ ID NO: 1005435 - DNA, 15 bp, Homo sapiens
atgagttcatgtcct

SEQ ID NO: 1005436 - DNA, 15 bp, Homo sapiens
gatgagttcatgtcc

SEQ ID NO: 1005437 - DNA, 15 bp, Homo sapiens
tgatgagttcatgtc

SEQ ID NO: 1005438 - DNA, 15 bp, Homo sapiens
atgatgagttcatgt

SEQ ID NO: 1005439 - DNA, 15 bp, Homo sapiens
aatgatgagttcatg

SEQ ID NO: 1005440 - DNA, 15 bp, Homo sapiens
aaatgatgagttcat

SEQ ID NO: 1005441 - DNA, 15 bp, Homo sapiens
aaaatgatgagttca

SEQ ID NO: 1005442 - DNA, 15 bp, Homo sapiens
aaaaatgatgagttc

SEQ ID NO: 1005443 - DNA, 15 bp, Homo sapiens
aaaaaatgatgagtt

SEQ ID NO: 1005444 - DNA, 15 bp, Homo sapiens
taaaaaatgatgagt

SEQ ID NO: 1005445 - DNA, 15 bp, Homo sapiens
ataaaaaatgatgag

SEQ ID NO: 1005446 - DNA, 15 bp, Homo sapiens
cataaaaaatgatga

SEQ ID NO: 1005447 - DNA, 15 bp, Homo sapiens
ccataaaaaatgatg

SEQ ID NO: 1005448 - DNA, 15 bp, Homo sapiens
gccataaaaaatgat

SEQ ID NO: 1005449 - DNA, 15 bp, Homo sapiens
agccataaaaaatga

SEQ ID NO: 1005450 - DNA, 15 bp, Homo sapiens
cagccataaaaaatg

SEQ ID NO: 1005451 - DNA, 15 bp, Homo sapiens
gcagccataaaaaat

SEQ ID NO: 1005452 - DNA, 15 bp, Homo sapiens
tgcagccataaaaaa

SEQ ID NO: 1005453 - DNA, 15 bp, Homo sapiens
atgcagccataaaaa

SEQ ID NO: 1005454 - DNA, 15 bp, Homo sapiens
tatgcagccataaaa

SEQ ID NO: 1005455 - DNA, 15 bp, Homo sapiens
ctatgcagccataaa

SEQ ID NO: 1005456 - DNA, 15 bp, Homo sapiens
actatgcagccataa

SEQ ID NO: 1005457 - DNA, 15 bp, Homo sapiens
tactatgcagccata

SEQ ID NO: 1005458 - DNA, 15 bp, Homo sapiens
ctggaatactatgca

SEQ ID NO: 1005459 - DNA, 15 bp, Homo sapiens
gctggaatactatgc

SEQ ID NO: 1005460 - DNA, 15 bp, Homo sapiens
tgctggaatactatg

SEQ ID NO: 1005461 - DNA, 15 bp, Homo sapiens
gtgctggaatactat

SEQ ID NO: 1005462 - DNA, 15 bp, Homo sapiens
tgtgctggaatacta

SEQ ID NO: 1005463 - DNA, 15 bp, Homo sapiens
gtgtgctggaatact

SEQ ID NO: 1005464 - DNA, 15 bp, Homo sapiens
ggtgtgctggaatac

SEQ ID NO: 1005465 - DNA, 15 bp, Homo sapiens
tggtgtgctggaata

SEQ ID NO: 1005466 - DNA, 15 bp, Homo sapiens
atggtgtgctggaat

SEQ ID NO: 1005467 - DNA, 15 bp, Homo sapiens
aatggtgtgctggaa

SEQ ID NO: 1005468 - DNA, 15 bp, Homo sapiens
tagaaatggtgtgct

SEQ ID NO: 1005469 - DNA, 15 bp, Homo sapiens
gtagaaatggtgtgc

SEQ ID NO: 1005470 - DNA, 15 bp, Homo sapiens
tgtagaaatggtgtg

SEQ ID NO: 1005471 - DNA, 15 bp, Homo sapiens
ttgtagaaatggtgt

SEQ ID NO: 1005472 - DNA, 15 bp, Homo sapiens
gttgtagaaatggtg

SEQ ID NO: 1005473 - DNA, 15 bp, Homo sapiens
ggttgtagaaatggt

SEQ ID NO: 1005474 - DNA, 15 bp, Homo sapiens
aggttgtagaaatgg

SEQ ID NO: 1005475 - DNA, 15 bp, Homo sapiens
aaggttgtagaaatg

SEQ ID NO: 1005476 - DNA, 15 bp, Homo sapiens
caaggttgtagaaat

SEQ ID NO: 1005477 - DNA, 15 bp, Homo sapiens
ccaaggttgtagaaa

SEQ ID NO: 1005478 - DNA, 15 bp, Homo sapiens
cccaaggttgtagaa

SEQ ID NO: 1005479 - DNA, 15 bp, Homo sapiens
acccaaggttgtaga

SEQ ID NO: 1005480 - DNA, 15 bp, Homo sapiens
aacccaaggttgtag

SEQ ID NO: 1005481 - DNA, 15 bp, Homo sapiens
aaacccaaggttgta

SEQ ID NO: 1005482 - DNA, 15 bp, Homo sapiens
taaacccaaggttgt

SEQ ID NO: 1005483 - DNA, 15 bp, Homo sapiens
ataaacccaaggttg

SEQ ID NO: 1005484 - DNA, 15 bp, Homo sapiens
aataaacccaaggtt

SEQ ID NO: 1005485 - DNA, 15 bp, Homo sapiens
caataaacccaaggt

SEQ ID NO: 1005486 - DNA, 15 bp, Homo sapiens
acaataaacccaagg

SEQ ID NO: 1005487 - DNA, 15 bp, Homo sapiens
cacaataaacccaag

SEQ ID NO: 1005488 - DNA, 15 bp, Homo sapiens
acacaataaacccaa

SEQ ID NO: 1005489 - DNA, 15 bp, Homo sapiens
aacacaataaaccca

SEQ ID NO: 1005490 - DNA, 15 bp, Homo sapiens
aaacacaataaaccc

SEQ ID NO: 1005491 - DNA, 15 bp, Homo sapiens
caaacacaataaacc

SEQ ID NO: 1005492 - DNA, 15 bp, Homo sapiens
ccaaacacaataaac

SEQ ID NO: 1005493 - DNA, 15 bp, Homo sapiens
tccaaacacaataaa

SEQ ID NO: 1005494 - DNA, 15 bp, Homo sapiens
ttccaaacacaataa

SEQ ID NO: 1005495 - DNA, 15 bp, Homo sapiens
cttccaaacacaata

SEQ ID NO: 1005496 - DNA, 15 bp, Homo sapiens
gcttccaaacacaat

SEQ ID NO: 1005497 - DNA, 15 bp, Homo sapiens
ggcttccaaacacaa

SEQ ID NO: 1005498 - DNA, 15 bp, Homo sapiens
aggcttccaaacaca

SEQ ID NO: 1005499 - DNA, 15 bp, Homo sapiens
taggcttccaaacac

SEQ ID NO: 1005500 - DNA, 15 bp, Homo sapiens
ctaggcttccaaaca

SEQ ID NO: 1005501 - DNA, 15 bp, Homo sapiens
tctaggcttccaaac

SEQ ID NO: 1005502 - DNA, 15 bp, Homo sapiens
atctaggcttccaaa

SEQ ID NO: 1005503 - DNA, 15 bp, Homo sapiens
gatctaggcttccaa

SEQ ID NO: 1005504 - DNA, 15 bp, Homo sapiens
ggatctaggcttcca

SEQ ID NO: 1005505 - DNA, 15 bp, Homo sapiens
tggatctaggcttcc

SEQ ID NO: 1005506 - DNA, 15 bp, Homo sapiens
ttggatctaggcttc

SEQ ID NO: 1005507 - DNA, 15 bp, Homo sapiens
tttggatctaggctt

SEQ ID NO: 1005508 - DNA, 15 bp, Homo sapiens
ctttggatctaggct

SEQ ID NO: 1005509 - DNA, 15 bp, Homo sapiens
cctttggatctaggc

SEQ ID NO: 1005510 - DNA, 15 bp, Homo sapiens
tcctttggatctagg

SEQ ID NO: 1005511 - DNA, 15 bp, Homo sapiens
ttcctttggatctag

SEQ ID NO: 1005512 - DNA, 15 bp, Homo sapiens
cttcctttggatcta

SEQ ID NO: 1005513 - DNA, 15 bp, Homo sapiens
ccttcctttggatct

SEQ ID NO: 1005514 - DNA, 15 bp, Homo sapiens
tccttcctttggatc

SEQ ID NO: 1005515 - DNA, 15 bp, Homo sapiens
ttccttcctttggat

SEQ ID NO: 1005516 - DNA, 15 bp, Homo sapiens
attccttcctttgga

SEQ ID NO: 1005517 - DNA, 15 bp, Homo sapiens
cattccttcctttgg

SEQ ID NO: 1005518 - DNA, 15 bp, Homo sapiens
gcattccttcctttg

SEQ ID NO: 1005519 - DNA, 15 bp, Homo sapiens
agcattccttccttt

SEQ ID NO: 1005520 - DNA, 15 bp, Homo sapiens
cagcattccttcctt

SEQ ID NO: 1005521 - DNA, 15 bp, Homo sapiens
gcagcattccttcct

SEQ ID NO: 1005522 - DNA, 15 bp, Homo sapiens
ggcagcattccttcc

SEQ ID NO: 1005523 - DNA, 15 bp, Homo sapiens
tggcagcattccttc

SEQ ID NO: 1005524 - DNA, 15 bp, Homo sapiens
gtggcagcattcctt

SEQ ID NO: 1005525 - DNA, 15 bp, Homo sapiens
agtggcagcattcct

SEQ ID NO: 1005526 - DNA, 15 bp, Homo sapiens
tagtggcagcattcc

SEQ ID NO: 1005527 - DNA, 15 bp, Homo sapiens
ctagtggcagcattc

SEQ ID NO: 1005528 - DNA, 15 bp, Homo sapiens
tctagtggcagcatt

SEQ ID NO: 1005529 - DNA, 15 bp, Homo sapiens
ttctagtggcagcat

SEQ ID NO: 1005530 - DNA, 15 bp, Homo sapiens
cttctagtggcagca

SEQ ID NO: 1005531 - DNA, 15 bp, Homo sapiens
tcttctagtggcagc

SEQ ID NO: 1005532 - DNA, 15 bp, Homo sapiens
gtcttctagtggcag

SEQ ID NO: 1005533 - DNA, 15 bp, Homo sapiens
ggtcttctagtggca

SEQ ID NO: 1005534 - DNA, 15 bp, Homo sapiens
gggtcttctagtggc

SEQ ID NO: 1005535 - DNA, 15 bp, Homo sapiens
ggggtcttctagtgg

SEQ ID NO: 1005536 - DNA, 15 bp, Homo sapiens
cggggtcttctagtg

SEQ ID NO: 1005537 - DNA, 15 bp, Homo sapiens
acggggtcttctagt

SEQ ID NO: 1005538 - DNA, 15 bp, Homo sapiens
gacggggtcttctag

SEQ ID NO: 1005539 - DNA, 15 bp, Homo sapiens
tgacggggtcttcta

SEQ ID NO: 1005540 - DNA, 15 bp, Homo sapiens
gtgacggggtcttct

SEQ ID NO: 1005541 - DNA, 15 bp, Homo sapiens
agtgacggggtcttc

SEQ ID NO: 1005542 - DNA, 15 bp, Homo sapiens
cagtgacggggtctt

SEQ ID NO: 1005543 - DNA, 15 bp, Homo sapiens
tcagtgacggggtct

SEQ ID NO: 1005544 - DNA, 15 bp, Homo sapiens
ttcagtgacggggtc

SEQ ID NO: 1005545 - DNA, 15 bp, Homo sapiens
attcagtgacggggt

SEQ ID NO: 1005546 - DNA, 15 bp, Homo sapiens
aattcagtgacgggg

SEQ ID NO: 1005547 - DNA, 15 bp, Homo sapiens
caattcagtgacggg

SEQ ID NO: 1005548 - DNA, 15 bp, Homo sapiens
tcaattcagtgacgg

SEQ ID NO: 1005549 - DNA, 15 bp, Homo sapiens
ttcaattcagtgacg

SEQ ID NO: 1005550 - DNA, 15 bp, Homo sapiens
attcaattcagtgac

SEQ ID NO: 1005551 - DNA, 15 bp, Homo sapiens
aattcaattcagtga

SEQ ID NO: 1005552 - DNA, 15 bp, Homo sapiens
caattcaattcagtg

SEQ ID NO: 1005553 - DNA, 15 bp, Homo sapiens
tcaattcaattcagt

SEQ ID NO: 1005554 - DNA, 15 bp, Homo sapiens
ttcaattcaattcag

SEQ ID NO: 1005555 - DNA, 15 bp, Homo sapiens
attcaattcaattca

SEQ ID NO: 1005556 - DNA, 15 bp, Homo sapiens
aattcaattcaattc

SEQ ID NO: 1005557 - DNA, 15 bp, Homo sapiens
aaattcaattcaatt

SEQ ID NO: 1005558 - DNA, 15 bp, Homo sapiens
gaaattcaattcaat

SEQ ID NO: 1005559 - DNA, 15 bp, Homo sapiens
tgaaattcaattcaa

SEQ ID NO: 1005560 - DNA, 15 bp, Homo sapiens
ttgaaattcaattca

SEQ ID NO: 1005561 - DNA, 15 bp, Homo sapiens
attgaaattcaattc

SEQ ID NO: 1005562 - DNA, 15 bp, Homo sapiens
aattgaaattcaatt

SEQ ID NO: 1005563 - DNA, 15 bp, Homo sapiens
gaattgaaattcaat

SEQ ID NO: 1005564 - DNA, 15 bp, Homo sapiens
tgaattgaaattcaa

SEQ ID NO: 1005565 - DNA, 15 bp, Homo sapiens
atgaattgaaattca

SEQ ID NO: 1005566 - DNA, 15 bp, Homo sapiens
aatgaattgaaattc

SEQ ID NO: 1005567 - DNA, 15 bp, Homo sapiens
caatgaattgaaatt

SEQ ID NO: 1005568 - DNA, 15 bp, Homo sapiens
tcaatgaattgaaat

SEQ ID NO: 1005569 - DNA, 15 bp, Homo sapiens
atcaatgaattgaaa

SEQ ID NO: 1005570 - DNA, 15 bp, Homo sapiens
aatcaatgaattgaa

SEQ ID NO: 1005571 - DNA, 15 bp, Homo sapiens
gaatcaatgaattga

SEQ ID NO: 1005572 - DNA, 15 bp, Homo sapiens
cgaatcaatgaattg

SEQ ID NO: 1005573 - DNA, 15 bp, Homo sapiens
tcgaatcaatgaatt

SEQ ID NO: 1005574 - DNA, 15 bp, Homo sapiens
ttcgaatcaatgaat

SEQ ID NO: 1005575 - DNA, 15 bp, Homo sapiens
tttcgaatcaatgaa

SEQ ID NO: 1005576 - DNA, 15 bp, Homo sapiens
ctttcgaatcaatga

SEQ ID NO: 1005577 - DNA, 15 bp, Homo sapiens
gctttcgaatcaatg

SEQ ID NO: 1005578 - DNA, 15 bp, Homo sapiens
agctttcgaatcaat

SEQ ID NO: 1005579 - DNA, 15 bp, Homo sapiens
cagctttcgaatcaa

SEQ ID NO: 1005580 - DNA, 15 bp, Homo sapiens
tcagctttcgaatca

SEQ ID NO: 1005581 - DNA, 15 bp, Homo sapiens
ttcagctttcgaatc

SEQ ID NO: 1005582 - DNA, 15 bp, Homo sapiens
tttcagctttcgaat

SEQ ID NO: 1005583 - DNA, 15 bp, Homo sapiens
gtttcagctttcgaa

SEQ ID NO: 1005584 - DNA, 15 bp, Homo sapiens
agtttcagctttcga

SEQ ID NO: 1005585 - DNA, 15 bp, Homo sapiens
cagtttcagctttcg

SEQ ID NO: 1005586 - DNA, 15 bp, Homo sapiens
gcagtttcagctttc

SEQ ID NO: 1005587 - DNA, 15 bp, Homo sapiens
ggcagtttcagcttt

SEQ ID NO: 1005588 - DNA, 15 bp, Homo sapiens
gggcagtttcagctt

SEQ ID NO: 1005589 - DNA, 15 bp, Homo sapiens
agggcagtttcagct

SEQ ID NO: 1005590 - DNA, 15 bp, Homo sapiens
gagggcagtttcagc

SEQ ID NO: 1005591 - DNA, 15 bp, Homo sapiens
agagggcagtttcag

SEQ ID NO: 1005592 - DNA, 15 bp, Homo sapiens
cagagggcagtttca

SEQ ID NO: 1005593 - DNA, 15 bp, Homo sapiens
ccagagggcagtttc

SEQ ID NO: 1005594 - DNA, 15 bp, Homo sapiens
accagagggcagttt

SEQ ID NO: 1005595 - DNA, 15 bp, Homo sapiens
gaccagagggcagtt

SEQ ID NO: 1005596 - DNA, 15 bp, Homo sapiens
tgaccagagggcagt

SEQ ID NO: 1005597 - DNA, 15 bp, Homo sapiens
gtgaccagagggcag

SEQ ID NO: 1005598 - DNA, 15 bp, Homo sapiens
agtgaccagagggca

SEQ ID NO: 1005599 - DNA, 15 bp, Homo sapiens
aagtgaccagagggc

SEQ ID NO: 1005600 - DNA, 15 bp, Homo sapiens
aaagtgaccagaggg

SEQ ID NO: 1005601 - DNA, 15 bp, Homo sapiens
caaagtgaccagagg

SEQ ID NO: 1005602 - DNA, 15 bp, Homo sapiens
tcaaagtgaccagag

SEQ ID NO: 1005603 - DNA, 15 bp, Homo sapiens
atcaaagtgaccaga

SEQ ID NO: 1005604 - DNA, 15 bp, Homo sapiens
aatcaaagtgaccag

SEQ ID NO: 1005605 - DNA, 15 bp, Homo sapiens
gaatcaaagtgacca

SEQ ID NO: 1005606 - DNA, 15 bp, Homo sapiens
ggaatcaaagtgacc

SEQ ID NO: 1005607 - DNA, 15 bp, Homo sapiens
aggaatcaaagtgac

SEQ ID NO: 1005608 - DNA, 15 bp, Homo sapiens
gaggaatcaaagtga

SEQ ID NO: 1005609 - DNA, 15 bp, Homo sapiens
tgaggaatcaaagtg

SEQ ID NO: 1005610 - DNA, 15 bp, Homo sapiens
gtgaggaatcaaagt

SEQ ID NO: 1005611 - DNA, 15 bp, Homo sapiens
tgtgaggaatcaaag

SEQ ID NO: 1005612 - DNA, 15 bp, Homo sapiens
ctgtgaggaatcaaa

SEQ ID NO: 1005613 - DNA, 15 bp, Homo sapiens
actgtgaggaatcaa

SEQ ID NO: 1005614 - DNA, 15 bp, Homo sapiens
cactgtgaggaatca

SEQ ID NO: 1005615 - DNA, 15 bp, Homo sapiens
tcactgtgaggaatc

SEQ ID NO: 1005616 - DNA, 15 bp, Homo sapiens
gtcactgtgaggaat

SEQ ID NO: 1005617 - DNA, 15 bp, Homo sapiens
tgtcactgtgaggaa

SEQ ID NO: 1005618 - DNA, 15 bp, Homo sapiens
ctgtcactgtgagga

SEQ ID NO: 1005619 - DNA, 15 bp, Homo sapiens
tctgtcactgtgagg

SEQ ID NO: 1005620 - DNA, 15 bp, Homo sapiens
ttctgtcactgtgag

SEQ ID NO: 1005621 - DNA, 15 bp, Homo sapiens
attctgtcactgtga

SEQ ID NO: 1005622 - DNA, 15 bp, Homo sapiens
cattctgtcactgtg

SEQ ID NO: 1005623 - DNA, 15 bp, Homo sapiens
ccattctgtcactgt

SEQ ID NO: 1005624 - DNA, 15 bp, Homo sapiens
accattctgtcactg

SEQ ID NO: 1005625 - DNA, 15 bp, Homo sapiens
taccattctgtcact

SEQ ID NO: 1005626 - DNA, 15 bp, Homo sapiens
ataccattctgtcac

SEQ ID NO: 1005627 - DNA, 15 bp, Homo sapiens
cataccattctgtca

SEQ ID NO: 1005628 - DNA, 15 bp, Homo sapiens
tcataccattctgtc

SEQ ID NO: 1005629 - DNA, 15 bp, Homo sapiens
atcataccattctgt

SEQ ID NO: 1005630 - DNA, 15 bp, Homo sapiens
aatcataccattctg

SEQ ID NO: 1005631 - DNA, 15 bp, Homo sapiens
gaatcataccattct

SEQ ID NO: 1005632 - DNA, 15 bp, Homo sapiens
tgaatcataccattc

SEQ ID NO: 1005633 - DNA, 15 bp, Homo sapiens
atgaatcataccatt

SEQ ID NO: 1005634 - DNA, 15 bp, Homo sapiens
gatgaatcataccat

SEQ ID NO: 1005635 - DNA, 15 bp, Homo sapiens
ggatgaatcatacca

SEQ ID NO: 1005636 - DNA, 15 bp, Homo sapiens
gggatgaatcatacc

SEQ ID NO: 1005637 - DNA, 15 bp, Homo sapiens
tgggatgaatcatac

SEQ ID NO: 1005638 - DNA, 15 bp, Homo sapiens
ttgggatgaatcata

SEQ ID NO: 1005639 - DNA, 15 bp, Homo sapiens
tttgggatgaatcat

SEQ ID NO: 1005640 - DNA, 15 bp, Homo sapiens
atttgggatgaatca

SEQ ID NO: 1005641 - DNA, 15 bp, Homo sapiens
tatttgggatgaatc

SEQ ID NO: 1005642 - DNA, 15 bp, Homo sapiens
gtatttgggatgaat

SEQ ID NO: 1005643 - DNA, 15 bp, Homo sapiens
ggtatttgggatgaa

SEQ ID NO: 1005644 - DNA, 15 bp, Homo sapiens
tggtatttgggatga

SEQ ID NO: 1005645 - DNA, 15 bp, Homo sapiens
ttggtatttgggatg

SEQ ID NO: 1005646 - DNA, 15 bp, Homo sapiens
tttggtatttgggat

SEQ ID NO: 1005647 - DNA, 15 bp, Homo sapiens
ttttggtatttggga

SEQ ID NO: 1005648 - DNA, 15 bp, Homo sapiens
cttttggtatttggg

SEQ ID NO: 1005649 - DNA, 15 bp, Homo sapiens
agatacacaagggat

SEQ ID NO: 1005650 - DNA, 15 bp, Homo sapiens
cagatacacaaggga

SEQ ID NO: 1005651 - DNA, 15 bp, Homo sapiens
gcagatacacaaggg

SEQ ID NO: 1005652 - DNA, 15 bp, Homo sapiens
tgcagatacacaagg

SEQ ID NO: 1005653 - DNA, 15 bp, Homo sapiens
ctgcagatacacaag

SEQ ID NO: 1005654 - DNA, 15 bp, Homo sapiens
actgcagatacacaa

SEQ ID NO: 1005655 - DNA, 15 bp, Homo sapiens
gactgcagatacaca

SEQ ID NO: 1005656 - DNA, 15 bp, Homo sapiens
agactgcagatacac

SEQ ID NO: 1005657 - DNA, 15 bp, Homo sapiens
gagactgcagataca

SEQ ID NO: 1005658 - DNA, 15 bp, Homo sapiens
ggagactgcagatac

SEQ ID NO: 1005659 - DNA, 15 bp, Homo sapiens
aggagactgcagata

SEQ ID NO: 1005660 - DNA, 15 bp, Homo sapiens
aaggagactgcagat

SEQ ID NO: 1005661 - DNA, 15 bp, Homo sapiens
aaaggagactgcaga

SEQ ID NO: 1005662 - DNA, 15 bp, Homo sapiens
caaaggagactgcag

SEQ ID NO: 1005663 - DNA, 15 bp, Homo sapiens
gcaaaggagactgca

SEQ ID NO: 1005664 - DNA, 15 bp, Homo sapiens
ggcaaaggagactgc

SEQ ID NO: 1005665 - DNA, 15 bp, Homo sapiens
tggcaaaggagactg

SEQ ID NO: 1005666 - DNA, 15 bp, Homo sapiens
atggcaaaggagact

SEQ ID NO: 1005667 - DNA, 15 bp, Homo sapiens
catggcaaaggagac

SEQ ID NO: 1005668 - DNA, 15 bp, Homo sapiens
ccatggcaaaggaga

SEQ ID NO: 1005669 - DNA, 15 bp, Homo sapiens
tccatggcaaaggag

SEQ ID NO: 1005670 - DNA, 15 bp, Homo sapiens
atccatggcaaagga

SEQ ID NO: 1005671 - DNA, 15 bp, Homo sapiens
gatccatggcaaagg

SEQ ID NO: 1005672 - DNA, 15 bp, Homo sapiens
tgatccatggcaaag

SEQ ID NO: 1005673 - DNA, 15 bp, Homo sapiens
ttgatccatggcaaa

SEQ ID NO: 1005674 - DNA, 15 bp, Homo sapiens
gttgatccatggcaa

SEQ ID NO: 1005675 - DNA, 15 bp, Homo sapiens
tgttgatccatggca

SEQ ID NO: 1005676 - DNA, 15 bp, Homo sapiens
gtgttgatccatggc

SEQ ID NO: 1005677 - DNA, 15 bp, Homo sapiens
tgtgttgatccatgg

SEQ ID NO: 1005678 - DNA, 15 bp, Homo sapiens
ttgtgttgatccatg

SEQ ID NO: 1005679 - DNA, 15 bp, Homo sapiens
attgtgttgatccat

SEQ ID NO: 1005680 - DNA, 15 bp, Homo sapiens
tattgtgttgatcca

SEQ ID NO: 1005681 - DNA, 15 bp, Homo sapiens
ctattgtgttgatcc

SEQ ID NO: 1005682 - DNA, 15 bp, Homo sapiens
cctattgtgttgatc

SEQ ID NO: 1005683 - DNA, 15 bp, Homo sapiens
tcctattgtgttgat

SEQ ID NO: 1005684 - DNA, 15 bp, Homo sapiens
ttcctattgtgttga

SEQ ID NO: 1005685 - DNA, 15 bp, Homo sapiens
tttcctattgtgttg

SEQ ID NO: 1005686 - DNA, 15 bp, Homo sapiens
atttcctattgtgtt

SEQ ID NO: 1005687 - DNA, 15 bp, Homo sapiens
gatttcctattgtgt

SEQ ID NO: 1005688 - DNA, 15 bp, Homo sapiens
agatttcctattgtg

SEQ ID NO: 1005689 - DNA, 15 bp, Homo sapiens
aagatttcctattgt

SEQ ID NO: 1005690 - DNA, 15 bp, Homo sapiens
gaagatttcctattg

SEQ ID NO: 1005691 - DNA, 15 bp, Homo sapiens
ggaagatttcctatt

SEQ ID NO: 1005692 - DNA, 15 bp, Homo sapiens
cggaagatttcctat

SEQ ID NO: 1005693 - DNA, 15 bp, Homo sapiens
ccggaagatttccta

SEQ ID NO: 1005694 - DNA, 15 bp, Homo sapiens
gccggaagatttcct

SEQ ID NO: 1005695 - DNA, 15 bp, Homo sapiens
tgccggaagatttcc

SEQ ID NO: 1005696 - DNA, 15 bp, Homo sapiens
gtgccggaagatttc

SEQ ID NO: 1005697 - DNA, 15 bp, Homo sapiens
agtgccggaagattt

SEQ ID NO: 1005698 - DNA, 15 bp, Homo sapiens
cagtgccggaagatt

SEQ ID NO: 1005699 - DNA, 15 bp, Homo sapiens
tcagtgccggaagat

SEQ ID NO: 1005700 - DNA, 15 bp, Homo sapiens
atcagtgccggaaga

SEQ ID NO: 1005701 - DNA, 15 bp, Homo sapiens
catcagtgccggaag

SEQ ID NO: 1005702 - DNA, 15 bp, Homo sapiens
ccatcagtgccggaa

SEQ ID NO: 1005703 - DNA, 15 bp, Homo sapiens
accatcagtgccgga

SEQ ID NO: 1005704 - DNA, 15 bp, Homo sapiens
aaccatcagtgccgg

SEQ ID NO: 1005705 - DNA, 15 bp, Homo sapiens
aaaccatcagtgccg

SEQ ID NO: 1005706 - DNA, 15 bp, Homo sapiens
aaaaccatcagtgcc

SEQ ID NO: 1005707 - DNA, 15 bp, Homo sapiens
aaaaaccatcagtgc

SEQ ID NO: 1005708 - DNA, 15 bp, Homo sapiens
gaaaaaccatcagtg

SEQ ID NO: 1005709 - DNA, 15 bp, Homo sapiens
ggaaaaaccatcagt

SEQ ID NO: 1005710 - DNA, 15 bp, Homo sapiens
tggaaaaaccatcag

SEQ ID NO: 1005711 - DNA, 15 bp, Homo sapiens
ttggaaaaaccatca

SEQ ID NO: 1005712 - DNA, 15 bp, Homo sapiens
cttggaaaaaccatc

SEQ ID NO: 1005713 - DNA, 15 bp, Homo sapiens
ccttggaaaaaccat

SEQ ID NO: 1005714 - DNA, 15 bp, Homo sapiens
cccttggaaaaacca

SEQ ID NO: 1005715 - DNA, 15 bp, Homo sapiens
ccccttggaaaaacc

SEQ ID NO: 1005716 - DNA, 15 bp, Homo sapiens
cccccttggaaaaac

SEQ ID NO: 1005717 - DNA, 15 bp, Homo sapiens
tcccccttggaaaaa

SEQ ID NO: 1005718 - DNA, 15 bp, Homo sapiens
ctcccccttggaaaa

SEQ ID NO: 1005719 - DNA, 15 bp, Homo sapiens
actcccccttggaaa

SEQ ID NO: 1005720 - DNA, 15 bp, Homo sapiens
aactcccccttggaa

SEQ ID NO: 1005721 - DNA, 15 bp, Homo sapiens
gaactcccccttgga

SEQ ID NO: 1005722 - DNA, 15 bp, Homo sapiens
agaactcccccttgg

SEQ ID NO: 1005723 - DNA, 15 bp, Homo sapiens
aagaactcccccttg

SEQ ID NO: 1005724 - DNA, 15 bp, Homo sapiens
gaagaactccccctt

SEQ ID NO: 1005725 - DNA, 15 bp, Homo sapiens
ggaagaactccccct

SEQ ID NO: 1005726 - DNA, 15 bp, Homo sapiens
aggaagaactccccc

SEQ ID NO: 1005727 - DNA, 15 bp, Homo sapiens
caggaagaactcccc

SEQ ID NO: 1005728 - DNA, 15 bp, Homo sapiens
ccaggaagaactccc

SEQ ID NO: 1005729 - DNA, 15 bp, Homo sapiens
tccaggaagaactcc

SEQ ID NO: 1005730 - DNA, 15 bp, Homo sapiens
ctccaggaagaactc

SEQ ID NO: 1005731 - DNA, 15 bp, Homo sapiens
gctccaggaagaact

SEQ ID NO: 1005732 - DNA, 15 bp, Homo sapiens
tgctccaggaagaac

SEQ ID NO: 1005733 - DNA, 15 bp, Homo sapiens
ttgctccaggaagaa

SEQ ID NO: 1005734 - DNA, 15 bp, Homo sapiens
tttgctccaggaaga

SEQ ID NO: 1005735 - DNA, 15 bp, Homo sapiens
ctttgctccaggaag

SEQ ID NO: 1005736 - DNA, 15 bp, Homo sapiens
gctttgctccaggaa

SEQ ID NO: 1005737 - DNA, 15 bp, Homo sapiens
tgctttgctccagga

SEQ ID NO: 1005738 - DNA, 15 bp, Homo sapiens
ttgctttgctccagg

SEQ ID NO: 1005739 - DNA, 15 bp, Homo sapiens
tttgctttgctccag

SEQ ID NO: 1005740 - DNA, 15 bp, Homo sapiens
atttgctttgctcca

SEQ ID NO: 1005741 - DNA, 15 bp, Homo sapiens
catttgctttgctcc

SEQ ID NO: 1005742 - DNA, 15 bp, Homo sapiens
tcatttgctttgctc

SEQ ID NO: 1005743 - DNA, 15 bp, Homo sapiens
gtcatttgctttgct

SEQ ID NO: 1005744 - DNA, 15 bp, Homo sapiens
ggtcatttgctttgc

SEQ ID NO: 1005745 - DNA, 15 bp, Homo sapiens
tggtcatttgctttg

SEQ ID NO: 1005746 - DNA, 15 bp, Homo sapiens
ttggtcatttgcttt

SEQ ID NO: 1005747 - DNA, 15 bp, Homo sapiens
gttggtcatttgctt

SEQ ID NO: 1005748 - DNA, 15 bp, Homo sapiens
ggttggtcatttgct

SEQ ID NO: 1005749 - DNA, 15 bp, Homo sapiens
tggttggtcatttgc

SEQ ID NO: 1005750 - DNA, 15 bp, Homo sapiens
ctggttggtcatttg

SEQ ID NO: 1005751 - DNA, 15 bp, Homo sapiens
cctggttggtcattt

SEQ ID NO: 1005752 - DNA, 15 bp, Homo sapiens
acctggttggtcatt

SEQ ID NO: 1005753 - DNA, 15 bp, Homo sapiens
aacctggttggtcat

SEQ ID NO: 1005754 - DNA, 15 bp, Homo sapiens
aaacctggttggtca

SEQ ID NO: 1005755 - DNA, 15 bp, Homo sapiens
caaacctggttggtc

SEQ ID NO: 1005756 - DNA, 15 bp, Homo sapiens
tcaaacctggttggt

SEQ ID NO: 1005757 - DNA, 15 bp, Homo sapiens
ctcaaacctggttgg

SEQ ID NO: 1005758 - DNA, 15 bp, Homo sapiens
cctcaaacctggttg

SEQ ID NO: 1005759 - DNA, 15 bp, Homo sapiens
tcctcaaacctggtt

SEQ ID NO: 1005760 - DNA, 15 bp, Homo sapiens
gtcctcaaacctggt

SEQ ID NO: 1005761 - DNA, 15 bp, Homo sapiens
ggtcctcaaacctgg

SEQ ID NO: 1005762 - DNA, 15 bp, Homo sapiens
aggtcctcaaacctg

SEQ ID NO: 1005763 - DNA, 15 bp, Homo sapiens
caggtcctcaaacct

SEQ ID NO: 1005764 - DNA, 15 bp, Homo sapiens
tcaggtcctcaaacc

SEQ ID NO: 1005765 - DNA, 15 bp, Homo sapiens
atcaggtcctcaaac

SEQ ID NO: 1005766 - DNA, 15 bp, Homo sapiens
aatcaggtcctcaaa

SEQ ID NO: 1005767 - DNA, 15 bp, Homo sapiens
aaatcaggtcctcaa

SEQ ID NO: 1005768 - DNA, 15 bp, Homo sapiens
caaatcaggtcctca

SEQ ID NO: 1005769 - DNA, 15 bp, Homo sapiens
acaaatcaggtcctc

SEQ ID NO: 1005770 - DNA, 15 bp, Homo sapiens
aacaaatcaggtcct

SEQ ID NO: 1005771 - DNA, 15 bp, Homo sapiens
aaacaaatcaggtcc

SEQ ID NO: 1005772 - DNA, 15 bp, Homo sapiens
caaacaaatcaggtc

SEQ ID NO: 1005773 - DNA, 15 bp, Homo sapiens
tcaaacaaatcaggt

SEQ ID NO: 1005774 - DNA, 15 bp, Homo sapiens
gtcaaacaaatcagg

SEQ ID NO: 1005775 - DNA, 15 bp, Homo sapiens
tgtcaaacaaatcag

SEQ ID NO: 1005776 - DNA, 15 bp, Homo sapiens
ttgtcaaacaaatca

SEQ ID NO: 1005777 - DNA, 15 bp, Homo sapiens
attgtcaaacaaatc

SEQ ID NO: 1005778 - DNA, 15 bp, Homo sapiens
aattgtcaaacaaat

SEQ ID NO: 1005779 - DNA, 15 bp, Homo sapiens
gaattgtcaaacaaa

SEQ ID NO: 1005780 - DNA, 15 bp, Homo sapiens
ggaattgtcaaacaa

SEQ ID NO: 1005781 - DNA, 15 bp, Homo sapiens
tggaattgtcaaaca

SEQ ID NO: 1005782 - DNA, 15 bp, Homo sapiens
atggaattgtcaaac

SEQ ID NO: 1005783 - DNA, 15 bp, Homo sapiens
aatggaattgtcaaa

SEQ ID NO: 1005784 - DNA, 15 bp, Homo sapiens
aaatggaattgtcaa

SEQ ID NO: 1005785 - DNA, 15 bp, Homo sapiens
aaaatggaattgtca

SEQ ID NO: 1005786 - DNA, 15 bp, Homo sapiens
caaaatggaattgtc

SEQ ID NO: 1005787 - DNA, 15 bp, Homo sapiens
acaaaatggaattgt

SEQ ID NO: 1005788 - DNA, 15 bp, Homo sapiens
tacaaaatggaattg

SEQ ID NO: 1005789 - DNA, 15 bp, Homo sapiens
atacaaaatggaatt

SEQ ID NO: 1005790 - DNA, 15 bp, Homo sapiens
aatacaaaatggaat

SEQ ID NO: 1005791 - DNA, 15 bp, Homo sapiens
caatacaaaatggaa

SEQ ID NO: 1005792 - DNA, 15 bp, Homo sapiens
acaatacaaaatgga

SEQ ID NO: 1005793 - DNA, 15 bp, Homo sapiens
tacaatacaaaatgg

SEQ ID NO: 1005794 - DNA, 15 bp, Homo sapiens
ttacaatacaaaatg

SEQ ID NO: 1005795 - DNA, 15 bp, Homo sapiens
tttacaatacaaaat

SEQ ID NO: 1005796 - DNA, 15 bp, Homo sapiens
atttacaatacaaaa

SEQ ID NO: 1005797 - DNA, 15 bp, Homo sapiens
aatttacaatacaaa

SEQ ID NO: 1005798 - DNA, 15 bp, Homo sapiens
taatttacaatacaa

SEQ ID NO: 1005799 - DNA, 15 bp, Homo sapiens
gtaatttacaataca

SEQ ID NO: 1005800 - DNA, 15 bp, Homo sapiens
agtaatttacaatac

SEQ ID NO: 1005801 - DNA, 15 bp, Homo sapiens
aagtaatttacaata

SEQ ID NO: 1005802 - DNA, 15 bp, Homo sapiens
taagtaatttacaat

SEQ ID NO: 1005803 - DNA, 15 bp, Homo sapiens
ttaagtaatttacaa

SEQ ID NO: 1005804 - DNA, 15 bp, Homo sapiens
attaagtaatttaca

SEQ ID NO: 1005805 - DNA, 15 bp, Homo sapiens
aattaagtaatttac

SEQ ID NO: 1005806 - DNA, 15 bp, Homo sapiens
caattaagtaattta

SEQ ID NO: 1005807 - DNA, 15 bp, Homo sapiens
ccaattaagtaattt

SEQ ID NO: 1005808 - DNA, 15 bp, Homo sapiens
gccaattaagtaatt

SEQ ID NO: 1005809 - DNA, 15 bp, Homo sapiens
tgccaattaagtaat

SEQ ID NO: 1005810 - DNA, 15 bp, Homo sapiens
atgccaattaagtaa

SEQ ID NO: 1005811 - DNA, 15 bp, Homo sapiens
aatgccaattaagta

SEQ ID NO: 1005812 - DNA, 15 bp, Homo sapiens
gaatgccaattaagt

SEQ ID NO: 1005813 - DNA, 15 bp, Homo sapiens
agaatgccaattaag

SEQ ID NO: 1005814 - DNA, 15 bp, Homo sapiens
tagaatgccaattaa

SEQ ID NO: 1005815 - DNA, 15 bp, Homo sapiens
gtagaatgccaatta

SEQ ID NO: 1005816 - DNA, 15 bp, Homo sapiens
agtagaatgccaatt

SEQ ID NO: 1005817 - DNA, 15 bp, Homo sapiens
gagtagaatgccaat

SEQ ID NO: 1005818 - DNA, 15 bp, Homo sapiens
ggagtagaatgccaa

SEQ ID NO: 1005819 - DNA, 15 bp, Homo sapiens
gggagtagaatgcca

SEQ ID NO: 1005820 - DNA, 15 bp, Homo sapiens
tgggagtagaatgcc

SEQ ID NO: 1005821 - DNA, 15 bp, Homo sapiens
ttgggagtagaatgc

SEQ ID NO: 1005822 - DNA, 15 bp, Homo sapiens
attgggagtagaatg

SEQ ID NO: 1005823 - DNA, 15 bp, Homo sapiens
gattgggagtagaat

SEQ ID NO: 1005824 - DNA, 15 bp, Homo sapiens
ggattgggagtagaa

SEQ ID NO: 1005825 - DNA, 15 bp, Homo sapiens
tggattgggagtaga

SEQ ID NO: 1005826 - DNA, 15 bp, Homo sapiens
atggattgggagtag

SEQ ID NO: 1005827 - DNA, 15 bp, Homo sapiens
gatggattgggagta

SEQ ID NO: 1005828 - DNA, 15 bp, Homo sapiens
agatggattgggagt

SEQ ID NO: 1005829 - DNA, 15 bp, Homo sapiens
aagatggattgggag

SEQ ID NO: 1005830 - DNA, 15 bp, Homo sapiens
caagatggattggga

SEQ ID NO: 1005831 - DNA, 15 bp, Homo sapiens
acaagatggattggg

SEQ ID NO: 1005832 - DNA, 15 bp, Homo sapiens
gacaagatggattgg

SEQ ID NO: 1005833 - DNA, 15 bp, Homo sapiens
tgacaagatggattg

SEQ ID NO: 1005834 - DNA, 15 bp, Homo sapiens
atgacaagatggatt

SEQ ID NO: 1005835 - DNA, 15 bp, Homo sapiens
aatgacaagatggat

SEQ ID NO: 1005836 - DNA, 15 bp, Homo sapiens
aaatgacaagatgga

SEQ ID NO: 1005837 - DNA, 15 bp, Homo sapiens
caaatgacaagatgg

SEQ ID NO: 1005838 - DNA, 15 bp, Homo sapiens
gcaaatgacaagatg

SEQ ID NO: 1005839 - DNA, 15 bp, Homo sapiens
tgcaaatgacaagat

SEQ ID NO: 1005840 - DNA, 15 bp, Homo sapiens
atgcaaatgacaaga

SEQ ID NO: 1005841 - DNA, 15 bp, Homo sapiens
tatgcaaatgacaag

SEQ ID NO: 1005842 - DNA, 15 bp, Homo sapiens
gtatgcaaatgacaa

SEQ ID NO: 1005843 - DNA, 15 bp, Homo sapiens
tgtatgcaaatgaca

SEQ ID NO: 1005844 - DNA, 15 bp, Homo sapiens
ctgtatgcaaatgac

SEQ ID NO: 1005845 - DNA, 15 bp, Homo sapiens
actgtatgcaaatga

SEQ ID NO: 1005846 - DNA, 15 bp, Homo sapiens
cactgtatgcaaatg

SEQ ID NO: 1005847 - DNA, 15 bp, Homo sapiens
ccactgtatgcaaat

SEQ ID NO: 1005848 - DNA, 15 bp, Homo sapiens
accactgtatgcaaa

SEQ ID NO: 1005849 - DNA, 15 bp, Homo sapiens
aaccactgtatgcaa

SEQ ID NO: 1005850 - DNA, 15 bp, Homo sapiens
aaaccactgtatgca

SEQ ID NO: 1005851 - DNA, 15 bp, Homo sapiens
aaaaccactgtatgc

SEQ ID NO: 1005852 - DNA, 15 bp, Homo sapiens
caaaaccactgtatg

SEQ ID NO: 1005853 - DNA, 15 bp, Homo sapiens
ccaaaaccactgtat

SEQ ID NO: 1005854 - DNA, 15 bp, Homo sapiens
cccaaaaccactgta

SEQ ID NO: 1005855 - DNA, 15 bp, Homo sapiens
tcccaaaaccactgt

SEQ ID NO: 1005856 - DNA, 15 bp, Homo sapiens
atcccaaaaccactg

SEQ ID NO: 1005857 - DNA, 15 bp, Homo sapiens
aatcccaaaaccact

SEQ ID NO: 1005858 - DNA, 15 bp, Homo sapiens
caatcccaaaaccac

SEQ ID NO: 1005859 - DNA, 15 bp, Homo sapiens
tcaatcccaaaacca

SEQ ID NO: 1005860 - DNA, 15 bp, Homo sapiens
ctcaatcccaaaacc

SEQ ID NO: 1005861 - DNA, 15 bp, Homo sapiens
actcaatcccaaaac

SEQ ID NO: 1005862 - DNA, 15 bp, Homo sapiens
aactcaatcccaaaa

SEQ ID NO: 1005863 - DNA, 15 bp, Homo sapiens
gaactcaatcccaaa

SEQ ID NO: 1005864 - DNA, 15 bp, Homo sapiens
tgaactcaatcccaa

SEQ ID NO: 1005865 - DNA, 15 bp, Homo sapiens
ctgaactcaatccca

SEQ ID NO: 1005866 - DNA, 15 bp, Homo sapiens
gctgaactcaatccc

SEQ ID NO: 1005867 - DNA, 15 bp, Homo sapiens
agctgaactcaatcc

SEQ ID NO: 1005868 - DNA, 15 bp, Homo sapiens
tagctgaactcaatc

SEQ ID NO: 1005869 - DNA, 15 bp, Homo sapiens
atagctgaactcaat

SEQ ID NO: 1005870 - DNA, 15 bp, Homo sapiens
tatagctgaactcaa

SEQ ID NO: 1005871 - DNA, 15 bp, Homo sapiens
gtatagctgaactca

SEQ ID NO: 1005872 - DNA, 15 bp, Homo sapiens
ggtatagctgaactc

SEQ ID NO: 1005873 - DNA, 15 bp, Homo sapiens
tggtatagctgaact

SEQ ID NO: 1005874 - DNA, 15 bp, Homo sapiens
ttggtatagctgaac

SEQ ID NO: 1005875 - DNA, 15 bp, Homo sapiens
tttggtatagctgaa

SEQ ID NO: 1005876 - DNA, 15 bp, Homo sapiens
ttttggtatagctga

SEQ ID NO: 1005877 - DNA, 15 bp, Homo sapiens
cttttggtatagctg

SEQ ID NO: 1005878 - DNA, 15 bp, Homo sapiens
acttttggtatagct

SEQ ID NO: 1005879 - DNA, 15 bp, Homo sapiens
gacttttggtatagc

SEQ ID NO: 1005880 - DNA, 15 bp, Homo sapiens
agacttttggtatag

SEQ ID NO: 1005881 - DNA, 15 bp, Homo sapiens
cagacttttggtata

SEQ ID NO: 1005882 - DNA, 15 bp, Homo sapiens
tcagacttttggtat

SEQ ID NO: 1005883 - DNA, 15 bp, Homo sapiens
ttcagacttttggta

SEQ ID NO: 1005884 - DNA, 15 bp, Homo sapiens
gttcagacttttggt

SEQ ID NO: 1005885 - DNA, 15 bp, Homo sapiens
ggttcagacttttgg

SEQ ID NO: 1005886 - DNA, 15 bp, Homo sapiens
aggttcagacttttg

SEQ ID NO: 1005887 - DNA, 15 bp, Homo sapiens
aaggttcagactttt

SEQ ID NO: 1005888 - DNA, 15 bp, Homo sapiens
gaaggttcagacttt

SEQ ID NO: 1005889 - DNA, 15 bp, Homo sapiens
agaaggttcagactt

SEQ ID NO: 1005890 - DNA, 15 bp, Homo sapiens
cagaaggttcagact

SEQ ID NO: 1005891 - DNA, 15 bp, Homo sapiens
gcagaaggttcagac

SEQ ID NO: 1005892 - DNA, 15 bp, Homo sapiens
tgcagaaggttcaga

SEQ ID NO: 1005893 - DNA, 15 bp, Homo sapiens
gtgcagaaggttcag

SEQ ID NO: 1005894 - DNA, 15 bp, Homo sapiens
agtgcagaaggttca

SEQ ID NO: 1005895 - DNA, 15 bp, Homo sapiens
aagtgcagaaggttc

SEQ ID NO: 1005896 - DNA, 15 bp, Homo sapiens
taagtgcagaaggtt

SEQ ID NO: 1005897 - DNA, 15 bp, Homo sapiens
ctaagtgcagaaggt

SEQ ID NO: 1005898 - DNA, 15 bp, Homo sapiens
tctaagtgcagaagg

SEQ ID NO: 1005899 - DNA, 15 bp, Homo sapiens
ttctaagtgcagaag

SEQ ID NO: 1005900 - DNA, 15 bp, Homo sapiens
gttctaagtgcagaa

SEQ ID NO: 1005901 - DNA, 15 bp, Homo sapiens
tgttctaagtgcaga

SEQ ID NO: 1005902 - DNA, 15 bp, Homo sapiens
ttgttctaagtgcag

SEQ ID NO: 1005903 - DNA, 15 bp, Homo sapiens
cttgttctaagtgca

SEQ ID NO: 1005904 - DNA, 15 bp, Homo sapiens
ccttgttctaagtgc

SEQ ID NO: 1005905 - DNA, 15 bp, Homo sapiens
gccttgttctaagtg

SEQ ID NO: 1005906 - DNA, 15 bp, Homo sapiens
tgccttgttctaagt

SEQ ID NO: 1005907 - DNA, 15 bp, Homo sapiens
ttgccttgttctaag

SEQ ID NO: 1005908 - DNA, 15 bp, Homo sapiens
gttgccttgttctaa

SEQ ID NO: 1005909 - DNA, 15 bp, Homo sapiens
ggttgccttgttcta

SEQ ID NO: 1005910 - DNA, 15 bp, Homo sapiens
tggttgccttgttct

SEQ ID NO: 1005911 - DNA, 15 bp, Homo sapiens
gtggttgccttgttc

SEQ ID NO: 1005912 - DNA, 15 bp, Homo sapiens
ggtggttgccttgtt

SEQ ID NO: 1005913 - DNA, 15 bp, Homo sapiens
tggtggttgccttgt

SEQ ID NO: 1005914 - DNA, 15 bp, Homo sapiens
ttggtggttgccttg

SEQ ID NO: 1005915 - DNA, 15 bp, Homo sapiens
cttggtggttgcctt

SEQ ID NO: 1005916 - DNA, 15 bp, Homo sapiens
gcttggtggttgcct

SEQ ID NO: 1005917 - DNA, 15 bp, Homo sapiens
agcttggtggttgcc

SEQ ID NO: 1005918 - DNA, 15 bp, Homo sapiens
aagcttggtggttgc

SEQ ID NO: 1005919 - DNA, 15 bp, Homo sapiens
gaagcttggtggttg

SEQ ID NO: 1005920 - DNA, 15 bp, Homo sapiens
tgaagcttggtggtt

SEQ ID NO: 1005921 - DNA, 15 bp, Homo sapiens
gtgaagcttggtggt

SEQ ID NO: 1005922 - DNA, 15 bp, Homo sapiens
agtgaagcttggtgg

SEQ ID NO: 1005923 - DNA, 15 bp, Homo sapiens
aagtgaagcttggtg

SEQ ID NO: 1005924 - DNA, 15 bp, Homo sapiens
caagtgaagcttggt

SEQ ID NO: 1005925 - DNA, 15 bp, Homo sapiens
gcaagtgaagcttgg

SEQ ID NO: 1005926 - DNA, 15 bp, Homo sapiens
tgcaagtgaagcttg

SEQ ID NO: 1005927 - DNA, 15 bp, Homo sapiens
gtgcaagtgaagctt

SEQ ID NO: 1005928 - DNA, 15 bp, Homo sapiens
agtgcaagtgaagct

SEQ ID NO: 1005929 - DNA, 15 bp, Homo sapiens
cagtgcaagtgaagc

SEQ ID NO: 1005930 - DNA, 15 bp, Homo sapiens
tcagtgcaagtgaag

SEQ ID NO: 1005931 - DNA, 15 bp, Homo sapiens
ctcagtgcaagtgaa

SEQ ID NO: 1005932 - DNA, 15 bp, Homo sapiens
cctcagtgcaagtga

SEQ ID NO: 1005933 - DNA, 15 bp, Homo sapiens
gcctcagtgcaagtg

SEQ ID NO: 1005934 - DNA, 15 bp, Homo sapiens
ggcctcagtgcaagt

SEQ ID NO: 1005935 - DNA, 15 bp, Homo sapiens
cggcctcagtgcaag

SEQ ID NO: 1005936 - DNA, 15 bp, Homo sapiens
acggcctcagtgcaa

SEQ ID NO: 1005937 - DNA, 15 bp, Homo sapiens
cacggcctcagtgca

SEQ ID NO: 1005938 - DNA, 15 bp, Homo sapiens
acacggcctcagtgc

SEQ ID NO: 1005939 - DNA, 15 bp, Homo sapiens
gacacggcctcagtg

SEQ ID NO: 1005940 - DNA, 15 bp, Homo sapiens
agacacggcctcagt

SEQ ID NO: 1005941 - DNA, 15 bp, Homo sapiens
gagacacggcctcag

SEQ ID NO: 1005942 - DNA, 15 bp, Homo sapiens
ggagacacggcctca

SEQ ID NO: 1005943 - DNA, 15 bp, Homo sapiens
tggagacacggcctc

SEQ ID NO: 1005944 - DNA, 15 bp, Homo sapiens
ttggagacacggcct

SEQ ID NO: 1005945 - DNA, 15 bp, Homo sapiens
attggagacacggcc

SEQ ID NO: 1005946 - DNA, 15 bp, Homo sapiens
cattggagacacggc

SEQ ID NO: 1005947 - DNA, 15 bp, Homo sapiens
ccattggagacacgg

SEQ ID NO: 1005948 - DNA, 15 bp, Homo sapiens
tccattggagacacg

SEQ ID NO: 1005949 - DNA, 15 bp, Homo sapiens
ttccattggagacac

SEQ ID NO: 1005950 - DNA, 15 bp, Homo sapiens
tttccattggagaca

SEQ ID NO: 1005951 - DNA, 15 bp, Homo sapiens
atttccattggagac

SEQ ID NO: 1005952 - DNA, 15 bp, Homo sapiens
catttccattggaga

SEQ ID NO: 1005953 - DNA, 15 bp, Homo sapiens
tcatttccattggag

SEQ ID NO: 1005954 - DNA, 15 bp, Homo sapiens
ctcatttccattgga

SEQ ID NO: 1005955 - DNA, 15 bp, Homo sapiens
cctcatttccattgg

SEQ ID NO: 1005956 - DNA, 15 bp, Homo sapiens
gcctcatttccattg

SEQ ID NO: 1005957 - DNA, 15 bp, Homo sapiens
tgcctcatttccatt

SEQ ID NO: 1005958 - DNA, 15 bp, Homo sapiens
ctgcctcatttccat

SEQ ID NO: 1005959 - DNA, 15 bp, Homo sapiens
gctgcctcatttcca

SEQ ID NO: 1005960 - DNA, 15 bp, Homo sapiens
agctgcctcatttcc

SEQ ID NO: 1005961 - DNA, 15 bp, Homo sapiens
cagctgcctcatttc

SEQ ID NO: 1005962 - DNA, 15 bp, Homo sapiens
ccagctgcctcattt

SEQ ID NO: 1005963 - DNA, 15 bp, Homo sapiens
agccagctgcctcat

SEQ ID NO: 1005964 - DNA, 15 bp, Homo sapiens
aagccagctgcctca

SEQ ID NO: 1005965 - DNA, 15 bp, Homo sapiens
caagccagctgcctc

SEQ ID NO: 1005966 - DNA, 15 bp, Homo sapiens
gcaagccagctgcct

SEQ ID NO: 1005967 - DNA, 15 bp, Homo sapiens
tgcaagccagctgcc

SEQ ID NO: 1005968 - DNA, 15 bp, Homo sapiens
ctgcaagccagctgc

SEQ ID NO: 1005969 - DNA, 15 bp, Homo sapiens
cctgcaagccagctg

SEQ ID NO: 1005970 - DNA, 15 bp, Homo sapiens
tcctgcaagccagct

SEQ ID NO: 1005971 - DNA, 15 bp, Homo sapiens
ctcctgcaagccagc

SEQ ID NO: 1005972 - DNA, 15 bp, Homo sapiens
gctcctgcaagccag

SEQ ID NO: 1005973 - DNA, 15 bp, Homo sapiens
agctcctgcaagcca

SEQ ID NO: 1005974 - DNA, 15 bp, Homo sapiens
aagctcctgcaagcc

SEQ ID NO: 1005975 - DNA, 15 bp, Homo sapiens
gaagctcctgcaagc

SEQ ID NO: 1005976 - DNA, 15 bp, Homo sapiens
ggaagctcctgcaag

SEQ ID NO: 1005977 - DNA, 15 bp, Homo sapiens
gggaagctcctgcaa

SEQ ID NO: 1005978 - DNA, 15 bp, Homo sapiens
tgggaagctcctgca

SEQ ID NO: 1005979 - DNA, 15 bp, Homo sapiens
ttgggaagctcctgc

SEQ ID NO: 1005980 - DNA, 15 bp, Homo sapiens
gttgggaagctcctg

SEQ ID NO: 1005981 - DNA, 15 bp, Homo sapiens
agttgggaagctcct

SEQ ID NO: 1005982 - DNA, 15 bp, Homo sapiens
gagttgggaagctcc

SEQ ID NO: 1005983 - DNA, 15 bp, Homo sapiens
tgagttgggaagctc

SEQ ID NO: 1005984 - DNA, 15 bp, Homo sapiens
ctgagttgggaagct

SEQ ID NO: 1005985 - DNA, 15 bp, Homo sapiens
cctgagttgggaagc

SEQ ID NO: 1005986 - DNA, 15 bp, Homo sapiens
ccctgagttgggaag

SEQ ID NO: 1005987 - DNA, 15 bp, Homo sapiens
tccctgagttgggaa

SEQ ID NO: 1005988 - DNA, 15 bp, Homo sapiens
ttccctgagttggga

SEQ ID NO: 1005989 - DNA, 15 bp, Homo sapiens
cttccctgagttggg

SEQ ID NO: 1005990 - DNA, 15 bp, Homo sapiens
acttccctgagttgg

SEQ ID NO: 1005991 - DNA, 15 bp, Homo sapiens
tacttccctgagttg

SEQ ID NO: 1005992 - DNA, 15 bp, Homo sapiens
ctacttccctgagtt

SEQ ID NO: 1005993 - DNA, 15 bp, Homo sapiens
tctacttccctgagt

SEQ ID NO: 1005994 - DNA, 15 bp, Homo sapiens
ttctacttccctgag

SEQ ID NO: 1005995 - DNA, 15 bp, Homo sapiens
gttctacttccctga

SEQ ID NO: 1005996 - DNA, 15 bp, Homo sapiens
agttctacttccctg

SEQ ID NO: 1005997 - DNA, 15 bp, Homo sapiens
gagttctacttccct

SEQ ID NO: 1005998 - DNA, 15 bp, Homo sapiens
ggagttctacttccc

SEQ ID NO: 1005999 - DNA, 15 bp, Homo sapiens
aggagttctacttcc

SEQ ID NO: 1006000 - DNA, 15 bp, Homo sapiens
tcaggagttctactt

SEQ ID NO: 1006001 - DNA, 15 bp, Homo sapiens
ctcaggagttctact

SEQ ID NO: 1006002 - DNA, 15 bp, Homo sapiens
actcaggagttctac

SEQ ID NO: 1006003 - DNA, 15 bp, Homo sapiens
gactcaggagttcta

SEQ ID NO: 1006004 - DNA, 15 bp, Homo sapiens
tgactcaggagttct

SEQ ID NO: 1006005 - DNA, 15 bp, Homo sapiens
gtgactcaggagttc

SEQ ID NO: 1006006 - DNA, 15 bp, Homo sapiens
ggtgactcaggagtt

SEQ ID NO: 1006007 - DNA, 15 bp, Homo sapiens
aggtgactcaggagt

SEQ ID NO: 1006008 - DNA, 15 bp, Homo sapiens
gaggtgactcaggag

SEQ ID NO: 1006009 - DNA, 15 bp, Homo sapiens
ggaggtgactcagga

SEQ ID NO: 1006010 - DNA, 15 bp, Homo sapiens
tggaggtgactcagg

SEQ ID NO: 1006011 - DNA, 15 bp, Homo sapiens
atggaggtgactcag

SEQ ID NO: 1006012 - DNA, 15 bp, Homo sapiens
tatggaggtgactca

SEQ ID NO: 1006013 - DNA, 15 bp, Homo sapiens
atatggaggtgactc

SEQ ID NO: 1006014 - DNA, 15 bp, Homo sapiens
catatggaggtgact

SEQ ID NO: 1006015 - DNA, 15 bp, Homo sapiens
gcatatggaggtgac

SEQ ID NO: 1006016 - DNA, 15 bp, Homo sapiens
tgcatatggaggtga

SEQ ID NO: 1006017 - DNA, 15 bp, Homo sapiens
ttgcatatggaggtg

SEQ ID NO: 1006018 - DNA, 15 bp, Homo sapiens
tttgcatatggaggt

SEQ ID NO: 1006019 - DNA, 15 bp, Homo sapiens
atttgcatatggagg

SEQ ID NO: 1006020 - DNA, 15 bp, Homo sapiens
catttgcatatggag

SEQ ID NO: 1006021 - DNA, 15 bp, Homo sapiens
tcatttgcatatgga

SEQ ID NO: 1006022 - DNA, 15 bp, Homo sapiens
atcatttgcatatgg

SEQ ID NO: 1006023 - DNA, 15 bp, Homo sapiens
aatcatttgcatatg

SEQ ID NO: 1006024 - DNA, 15 bp, Homo sapiens
aaatcatttgcatat

SEQ ID NO: 1006025 - DNA, 15 bp, Homo sapiens
gaaatcatttgcata

SEQ ID NO: 1006026 - DNA, 15 bp, Homo sapiens
tgaaatcatttgcat

SEQ ID NO: 1006027 - DNA, 15 bp, Homo sapiens
gtgaaatcatttgca

SEQ ID NO: 1006028 - DNA, 15 bp, Homo sapiens
tgtgaaatcatttgc

SEQ ID NO: 1006029 - DNA, 15 bp, Homo sapiens
ctgtgaaatcatttg

SEQ ID NO: 1006030 - DNA, 15 bp, Homo sapiens
actgtgaaatcattt

SEQ ID NO: 1006031 - DNA, 15 bp, Homo sapiens
tactgtgaaatcatt

SEQ ID NO: 1006032 - DNA, 15 bp, Homo sapiens
ttactgtgaaatcat

SEQ ID NO: 1006033 - DNA, 15 bp, Homo sapiens
attactgtgaaatca

SEQ ID NO: 1006034 - DNA, 15 bp, Homo sapiens
cattactgtgaaatc

SEQ ID NO: 1006035 - DNA, 15 bp, Homo sapiens
gcattactgtgaaat

SEQ ID NO: 1006036 - DNA, 15 bp, Homo sapiens
agcattactgtgaaa

SEQ ID NO: 1006037 - DNA, 15 bp, Homo sapiens
cagcattactgtgaa

SEQ ID NO: 1006038 - DNA, 15 bp, Homo sapiens
acagcattactgtga

SEQ ID NO: 1006039 - DNA, 15 bp, Homo sapiens
aacagcattactgtg

SEQ ID NO: 1006040 - DNA, 15 bp, Homo sapiens
caacagcattactgt

SEQ ID NO: 1006041 - DNA, 15 bp, Homo sapiens
tcaacagcattactg

SEQ ID NO: 1006042 - DNA, 15 bp, Homo sapiens
ttcaacagcattact

SEQ ID NO: 1006043 - DNA, 15 bp, Homo sapiens
gttcaacagcattac

SEQ ID NO: 1006044 - DNA, 15 bp, Homo sapiens
agttcaacagcatta

SEQ ID NO: 1006045 - DNA, 15 bp, Homo sapiens
aagttcaacagcatt

SEQ ID NO: 1006046 - DNA, 15 bp, Homo sapiens
gaagttcaacagcat

SEQ ID NO: 1006047 - DNA, 15 bp, Homo sapiens
tgaagttcaacagca

SEQ ID NO: 1006048 - DNA, 15 bp, Homo sapiens
gtgaagttcaacagc

SEQ ID NO: 1006049 - DNA, 15 bp, Homo sapiens
agtgaagttcaacag

SEQ ID NO: 1006050 - DNA, 15 bp, Homo sapiens
aagtgaagttcaaca

SEQ ID NO: 1006051 - DNA, 15 bp, Homo sapiens
gaagtgaagttcaac

SEQ ID NO: 1006052 - DNA, 15 bp, Homo sapiens
ggaagtgaagttcaa

SEQ ID NO: 1006053 - DNA, 15 bp, Homo sapiens
gggaagtgaagttca

SEQ ID NO: 1006054 - DNA, 15 bp, Homo sapiens
tgggaagtgaagttc

SEQ ID NO: 1006055 - DNA, 15 bp, Homo sapiens
atgggaagtgaagtt

SEQ ID NO: 1006056 - DNA, 15 bp, Homo sapiens
gatgggaagtgaagt

SEQ ID NO: 1006057 - DNA, 15 bp, Homo sapiens
tgatgggaagtgaag

SEQ ID NO: 1006058 - DNA, 15 bp, Homo sapiens
gtgatgggaagtgaa

SEQ ID NO: 1006059 - DNA, 15 bp, Homo sapiens
tgtgatgggaagtga

SEQ ID NO: 1006060 - DNA, 15 bp, Homo sapiens
ctgtgatgggaagtg

SEQ ID NO: 1006061 - DNA, 15 bp, Homo sapiens
gctgtgatgggaagt

SEQ ID NO: 1006062 - DNA, 15 bp, Homo sapiens
tgctgtgatgggaag

SEQ ID NO: 1006063 - DNA, 15 bp, Homo sapiens
ttgctgtgatgggaa

SEQ ID NO: 1006064 - DNA, 15 bp, Homo sapiens
tttgctgtgatggga

SEQ ID NO: 1006065 - DNA, 15 bp, Homo sapiens
atttgctgtgatggg

SEQ ID NO: 1006066 - DNA, 15 bp, Homo sapiens
catttgctgtgatgg

SEQ ID NO: 1006067 - DNA, 15 bp, Homo sapiens
acatttgctgtgatg

SEQ ID NO: 1006068 - DNA, 15 bp, Homo sapiens
cacatttgctgtgat

SEQ ID NO: 1006069 - DNA, 15 bp, Homo sapiens
acacatttgctgtga

SEQ ID NO: 1006070 - DNA, 15 bp, Homo sapiens
cacacatttgctgtg

SEQ ID NO: 1006071 - DNA, 15 bp, Homo sapiens
ccacacatttgctgt

SEQ ID NO: 1006072 - DNA, 15 bp, Homo sapiens
accacacatttgctg

SEQ ID NO: 1006073 - DNA, 15 bp, Homo sapiens
taccacacatttgct

SEQ ID NO: 1006074 - DNA, 15 bp, Homo sapiens
ttaccacacatttgc

SEQ ID NO: 1006075 - DNA, 15 bp, Homo sapiens
gttaccacacatttg

SEQ ID NO: 1006076 - DNA, 15 bp, Homo sapiens
tgttaccacacattt

SEQ ID NO: 1006077 - DNA, 15 bp, Homo sapiens
atgttaccacacatt

SEQ ID NO: 1006078 - DNA, 15 bp, Homo sapiens
tatgttaccacacat

SEQ ID NO: 1006079 - DNA, 15 bp, Homo sapiens
ctatgttaccacaca

SEQ ID NO: 1006080 - DNA, 15 bp, Homo sapiens
gctatgttaccacac

SEQ ID NO: 1006081 - DNA, 15 bp, Homo sapiens
agctatgttaccaca

SEQ ID NO: 1006082 - DNA, 15 bp, Homo sapiens
aagctatgttaccac

SEQ ID NO: 1006083 - DNA, 15 bp, Homo sapiens
gaagctatgttacca

SEQ ID NO: 1006084 - DNA, 15 bp, Homo sapiens
ggaagctatgttacc

SEQ ID NO: 1006085 - DNA, 15 bp, Homo sapiens
gggaagctatgttac

SEQ ID NO: 1006086 - DNA, 15 bp, Homo sapiens
ggggaagctatgtta

SEQ ID NO: 1006087 - DNA, 15 bp, Homo sapiens
tggggaagctatgtt

SEQ ID NO: 1006088 - DNA, 15 bp, Homo sapiens
gtggggaagctatgt

SEQ ID NO: 1006089 - DNA, 15 bp, Homo sapiens
tgtggggaagctatg

SEQ ID NO: 1006090 - DNA, 15 bp, Homo sapiens
ctgtggggaagctat

SEQ ID NO: 1006091 - DNA, 15 bp, Homo sapiens
cctgtggggaagcta

SEQ ID NO: 1006092 - DNA, 15 bp, Homo sapiens
tcctgtggggaagct

SEQ ID NO: 1006093 - DNA, 15 bp, Homo sapiens
ctcctgtggggaagc

SEQ ID NO: 1006094 - DNA, 15 bp, Homo sapiens
actcctgtggggaag

SEQ ID NO: 1006095 - DNA, 15 bp, Homo sapiens
aactcctgtggggaa

SEQ ID NO: 1006096 - DNA, 15 bp, Homo sapiens
aaactcctgtgggga

SEQ ID NO: 1006097 - DNA, 15 bp, Homo sapiens
taaactcctgtgggg

SEQ ID NO: 1006098 - DNA, 15 bp, Homo sapiens
gtaaactcctgtggg

SEQ ID NO: 1006099 - DNA, 15 bp, Homo sapiens
agtaaactcctgtgg

SEQ ID NO: 1006100 - DNA, 15 bp, Homo sapiens
gagtaaactcctgtg

SEQ ID NO: 1006101 - DNA, 15 bp, Homo sapiens
tgagtaaactcctgt

SEQ ID NO: 1006102 - DNA, 15 bp, Homo sapiens
gtgagtaaactcctg

SEQ ID NO: 1006103 - DNA, 15 bp, Homo sapiens
ggtgagtaaactcct

SEQ ID NO: 1006104 - DNA, 15 bp, Homo sapiens
tggtgagtaaactcc

SEQ ID NO: 1006105 - DNA, 15 bp, Homo sapiens
atggtgagtaaactc

SEQ ID NO: 1006106 - DNA, 15 bp, Homo sapiens
catggtgagtaaact

SEQ ID NO: 1006107 - DNA, 15 bp, Homo sapiens
ccatggtgagtaaac

SEQ ID NO: 1006108 - DNA, 15 bp, Homo sapiens
accatggtgagtaaa

SEQ ID NO: 1006109 - DNA, 15 bp, Homo sapiens
taccatggtgagtaa

SEQ ID NO: 1006110 - DNA, 15 bp, Homo sapiens
ataccatggtgagta

SEQ ID NO: 1006111 - DNA, 15 bp, Homo sapiens
aataccatggtgagt

SEQ ID NO: 1006112 - DNA, 15 bp, Homo sapiens
aaataccatggtgag

SEQ ID NO: 1006113 - DNA, 15 bp, Homo sapiens
aaaataccatggtga

SEQ ID NO: 1006114 - DNA, 15 bp, Homo sapiens
taaaataccatggtg

SEQ ID NO: 1006115 - DNA, 15 bp, Homo sapiens
ttaaaataccatggt

SEQ ID NO: 1006116 - DNA, 15 bp, Homo sapiens
tttaaaataccatgg

SEQ ID NO: 1006117 - DNA, 15 bp, Homo sapiens
ctttaaaataccatg

SEQ ID NO: 1006118 - DNA, 15 bp, Homo sapiens
cctttaaaataccat

SEQ ID NO: 1006119 - DNA, 15 bp, Homo sapiens
acctttaaaatacca

SEQ ID NO: 1006120 - DNA, 15 bp, Homo sapiens
cacctttaaaatacc

SEQ ID NO: 1006121 - DNA, 15 bp, Homo sapiens
tcacctttaaaatac

SEQ ID NO: 1006122 - DNA, 15 bp, Homo sapiens
ttcacctttaaaata

SEQ ID NO: 1006123 - DNA, 15 bp, Homo sapiens
tttcacctttaaaat

SEQ ID NO: 1006124 - DNA, 15 bp, Homo sapiens
gtttcacctttaaaa

SEQ ID NO: 1006125 - DNA, 15 bp, Homo sapiens
tgtttcacctttaaa

SEQ ID NO: 1006126 - DNA, 15 bp, Homo sapiens
atgtttcacctttaa

SEQ ID NO: 1006127 - DNA, 15 bp, Homo sapiens
aatgtttcaccttta

SEQ ID NO: 1006128 - DNA, 15 bp, Homo sapiens
aaatgtttcaccttt

SEQ ID NO: 1006129 - DNA, 15 bp, Homo sapiens
gaaatgtttcacctt

SEQ ID NO: 1006130 - DNA, 15 bp, Homo sapiens
tgaaatgtttcacct

SEQ ID NO: 1006131 - DNA, 15 bp, Homo sapiens
ttgaaatgtttcacc

SEQ ID NO: 1006132 - DNA, 15 bp, Homo sapiens
tttgaaatgtttcac

SEQ ID NO: 1006133 - DNA, 15 bp, Homo sapiens
ttttgaaatgtttca

SEQ ID NO: 1006134 - DNA, 15 bp, Homo sapiens
gttttgaaatgtttc

SEQ ID NO: 1006135 - DNA, 15 bp, Homo sapiens
agttttgaaatgttt

SEQ ID NO: 1006136 - DNA, 15 bp, Homo sapiens
cagttttgaaatgtt

SEQ ID NO: 1006137 - DNA, 15 bp, Homo sapiens
tcagttttgaaatgt

SEQ ID NO: 1006138 - DNA, 15 bp, Homo sapiens
ttcagttttgaaatg

SEQ ID NO: 1006139 - DNA, 15 bp, Homo sapiens
tttcagttttgaaat

SEQ ID NO: 1006140 - DNA, 15 bp, Homo sapiens
atttcagttttgaaa

SEQ ID NO: 1006141 - DNA, 15 bp, Homo sapiens
aatttcagttttgaa

SEQ ID NO: 1006142 - DNA, 15 bp, Homo sapiens
aaatttcagttttga

SEQ ID NO: 1006143 - DNA, 15 bp, Homo sapiens
caaatttcagttttg

SEQ ID NO: 1006144 - DNA, 15 bp, Homo sapiens
tcaaatttcagtttt

SEQ ID NO: 1006145 - DNA, 15 bp, Homo sapiens
ttcaaatttcagttt

SEQ ID NO: 1006146 - DNA, 15 bp, Homo sapiens
tttcaaatttcagtt

SEQ ID NO: 1006147 - DNA, 15 bp, Homo sapiens
ctttcaaatttcagt

SEQ ID NO: 1006148 - DNA, 15 bp, Homo sapiens
tctttcaaatttcag

SEQ ID NO: 1006149 - DNA, 15 bp, Homo sapiens
ttctttcaaatttca

SEQ ID NO: 1006150 - DNA, 15 bp, Homo sapiens
attctttcaaatttc

SEQ ID NO: 1006151 - DNA, 15 bp, Homo sapiens
aattctttcaaattt

SEQ ID NO: 1006152 - DNA, 15 bp, Homo sapiens
aaattctttcaaatt

SEQ ID NO: 1006153 - DNA, 15 bp, Homo sapiens
taaattctttcaaat

SEQ ID NO: 1006154 - DNA, 15 bp, Homo sapiens
ctaaattctttcaaa

SEQ ID NO: 1006155 - DNA, 15 bp, Homo sapiens
actaaattctttcaa

SEQ ID NO: 1006156 - DNA, 15 bp, Homo sapiens
aactaaattctttca

SEQ ID NO: 1006157 - DNA, 15 bp, Homo sapiens
aaactaaattctttc

SEQ ID NO: 1006158 - DNA, 15 bp, Homo sapiens
aaaactaaattcttt

SEQ ID NO: 1006159 - DNA, 15 bp, Homo sapiens
caaaactaaattctt

SEQ ID NO: 1006160 - DNA, 15 bp, Homo sapiens
ccaaaactaaattct

SEQ ID NO: 1006161 - DNA, 15 bp, Homo sapiens
tccaaaactaaattc

SEQ ID NO: 1006162 - DNA, 15 bp, Homo sapiens
atccaaaactaaatt

SEQ ID NO: 1006163 - DNA, 15 bp, Homo sapiens
aatccaaaactaaat

SEQ ID NO: 1006164 - DNA, 15 bp, Homo sapiens
gaatccaaaactaaa

SEQ ID NO: 1006165 - DNA, 15 bp, Homo sapiens
tgaatccaaaactaa

SEQ ID NO: 1006166 - DNA, 15 bp, Homo sapiens
gtgaatccaaaacta

SEQ ID NO: 1006167 - DNA, 15 bp, Homo sapiens
agtgaatccaaaact

SEQ ID NO: 1006168 - DNA, 15 bp, Homo sapiens
gagtgaatccaaaac

SEQ ID NO: 1006169 - DNA, 15 bp, Homo sapiens
tgagtgaatccaaaa

SEQ ID NO: 1006170 - DNA, 15 bp, Homo sapiens
ttgagtgaatccaaa

SEQ ID NO: 1006171 - DNA, 15 bp, Homo sapiens
attgagtgaatccaa

SEQ ID NO: 1006172 - DNA, 15 bp, Homo sapiens
aattgagtgaatcca

SEQ ID NO: 1006173 - DNA, 15 bp, Homo sapiens
taattgagtgaatcc

SEQ ID NO: 1006174 - DNA, 15 bp, Homo sapiens
ataattgagtgaatc

SEQ ID NO: 1006175 - DNA, 15 bp, Homo sapiens
gataattgagtgaat

SEQ ID NO: 1006176 - DNA, 15 bp, Homo sapiens
tgataattgagtgaa

SEQ ID NO: 1006177 - DNA, 15 bp, Homo sapiens
gtgataattgagtga

SEQ ID NO: 1006178 - DNA, 15 bp, Homo sapiens
agtgataattgagtg

SEQ ID NO: 1006179 - DNA, 15 bp, Homo sapiens
tagtgataattgagt

SEQ ID NO: 1006180 - DNA, 15 bp, Homo sapiens
atagtgataattgag

SEQ ID NO: 1006181 - DNA, 15 bp, Homo sapiens
gatagtgataattga

SEQ ID NO: 1006182 - DNA, 15 bp, Homo sapiens
tgatagtgataattg

SEQ ID NO: 1006183 - DNA, 15 bp, Homo sapiens
gtgatagtgataatt

SEQ ID NO: 1006184 - DNA, 15 bp, Homo sapiens
agtgatagtgataat

SEQ ID NO: 1006185 - DNA, 15 bp, Homo sapiens
aagtgatagtgataa

SEQ ID NO: 1006186 - DNA, 15 bp, Homo sapiens
gaagtgatagtgata

SEQ ID NO: 1006187 - DNA, 15 bp, Homo sapiens
cgaagtgatagtgat

SEQ ID NO: 1006188 - DNA, 15 bp, Homo sapiens
ccgaagtgatagtga

SEQ ID NO: 1006189 - DNA, 15 bp, Homo sapiens
cccgaagtgatagtg

SEQ ID NO: 1006190 - DNA, 15 bp, Homo sapiens
acccgaagtgatagt

SEQ ID NO: 1006191 - DNA, 15 bp, Homo sapiens
cacccgaagtgatag

SEQ ID NO: 1006192 - DNA, 15 bp, Homo sapiens
acacccgaagtgata

SEQ ID NO: 1006193 - DNA, 15 bp, Homo sapiens
aacacccgaagtgat

SEQ ID NO: 1006194 - DNA, 15 bp, Homo sapiens
taacacccgaagtga

SEQ ID NO: 1006195 - DNA, 15 bp, Homo sapiens
ataacacccgaagtg

SEQ ID NO: 1006196 - DNA, 15 bp, Homo sapiens
aataacacccgaagt

SEQ ID NO: 1006197 - DNA, 15 bp, Homo sapiens
caataacacccgaag

SEQ ID NO: 1006198 - DNA, 15 bp, Homo sapiens
gcaataacacccgaa

SEQ ID NO: 1006199 - DNA, 15 bp, Homo sapiens
tgcaataacacccga

SEQ ID NO: 1006200 - DNA, 15 bp, Homo sapiens
gtgcaataacacccg

SEQ ID NO: 1006201 - DNA, 15 bp, Homo sapiens
ggtgcaataacaccc

SEQ ID NO: 1006202 - DNA, 15 bp, Homo sapiens
aggtgcaataacacc

SEQ ID NO: 1006203 - DNA, 15 bp, Homo sapiens
aaggtgcaataacac

SEQ ID NO: 1006204 - DNA, 15 bp, Homo sapiens
aaaggtgcaataaca

SEQ ID NO: 1006205 - DNA, 15 bp, Homo sapiens
gaaaggtgcaataac

SEQ ID NO: 1006206 - DNA, 15 bp, Homo sapiens
agaaaggtgcaataa

SEQ ID NO: 1006207 - DNA, 15 bp, Homo sapiens
aagaaaggtgcaata

SEQ ID NO: 1006208 - DNA, 15 bp, Homo sapiens
caagaaaggtgcaat

SEQ ID NO: 1006209 - DNA, 15 bp, Homo sapiens
acaagaaaggtgcaa

SEQ ID NO: 1006210 - DNA, 15 bp, Homo sapiens
aacaagaaaggtgca

SEQ ID NO: 1006211 - DNA, 15 bp, Homo sapiens
aaacaagaaaggtgc

SEQ ID NO: 1006212 - DNA, 15 bp, Homo sapiens
caaacaagaaaggtg

SEQ ID NO: 1006213 - DNA, 15 bp, Homo sapiens
acaaacaagaaaggt

SEQ ID NO: 1006214 - DNA, 15 bp, Homo sapiens
cacaaacaagaaagg

SEQ ID NO: 1006215 - DNA, 15 bp, Homo sapiens
tcacaaacaagaaag

SEQ ID NO: 1006216 - DNA, 15 bp, Homo sapiens
ctcacaaacaagaaa

SEQ ID NO: 1006217 - DNA, 15 bp, Homo sapiens
actcacaaacaagaa

SEQ ID NO: 1006218 - DNA, 15 bp, Homo sapiens
aactcacaaacaaga

SEQ ID NO: 1006219 - DNA, 15 bp, Homo sapiens
aaactcacaaacaag

SEQ ID NO: 1006220 - DNA, 15 bp, Homo sapiens
taaactcacaaacaa

SEQ ID NO: 1006221 - DNA, 15 bp, Homo sapiens
ttaaactcacaaaca

SEQ ID NO: 1006222 - DNA, 15 bp, Homo sapiens
tttaaactcacaaac

SEQ ID NO: 1006223 - DNA, 15 bp, Homo sapiens
atttaaactcacaaa

SEQ ID NO: 1006224 - DNA, 15 bp, Homo sapiens
catttaaactcacaa

SEQ ID NO: 1006225 - DNA, 15 bp, Homo sapiens
gcatttaaactcaca

SEQ ID NO: 1006226 - DNA, 15 bp, Homo sapiens
ggcatttaaactcac

SEQ ID NO: 1006227 - DNA, 15 bp, Homo sapiens
tggcatttaaactca

SEQ ID NO: 1006228 - DNA, 15 bp, Homo sapiens
ctggcatttaaactc

SEQ ID NO: 1006229 - DNA, 15 bp, Homo sapiens
tctggcatttaaact

SEQ ID NO: 1006230 - DNA, 15 bp, Homo sapiens
gtctggcatttaaac

SEQ ID NO: 1006231 - DNA, 15 bp, Homo sapiens
agtctggcatttaaa

SEQ ID NO: 1006232 - DNA, 15 bp, Homo sapiens
gagtctggcatttaa

SEQ ID NO: 1006233 - DNA, 15 bp, Homo sapiens
agagtctggcattta

SEQ ID NO: 1006234 - DNA, 15 bp, Homo sapiens
gagagtctggcattt

SEQ ID NO: 1006235 - DNA, 15 bp, Homo sapiens
tgagagtctggcatt

SEQ ID NO: 1006236 - DNA, 15 bp, Homo sapiens
ctgagagtctggcat

SEQ ID NO: 1006237 - DNA, 15 bp, Homo sapiens
cctgagagtctggca

SEQ ID NO: 1006238 - DNA, 15 bp, Homo sapiens
gcctgagagtctggc

SEQ ID NO: 1006239 - DNA, 15 bp, Homo sapiens
ggcctgagagtctgg

SEQ ID NO: 1006240 - DNA, 15 bp, Homo sapiens
tggcctgagagtctg

SEQ ID NO: 1006241 - DNA, 15 bp, Homo sapiens
gtggcctgagagtct

SEQ ID NO: 1006242 - DNA, 15 bp, Homo sapiens
agtggcctgagagtc

SEQ ID NO: 1006243 - DNA, 15 bp, Homo sapiens
tagtggcctgagagt

SEQ ID NO: 1006244 - DNA, 15 bp, Homo sapiens
ttagtggcctgagag

SEQ ID NO: 1006245 - DNA, 15 bp, Homo sapiens
gttagtggcctgaga

SEQ ID NO: 1006246 - DNA, 15 bp, Homo sapiens
agttagtggcctgag

SEQ ID NO: 1006247 - DNA, 15 bp, Homo sapiens
aagttagtggcctga

SEQ ID NO: 1006248 - DNA, 15 bp, Homo sapiens
aaagttagtggcctg

SEQ ID NO: 1006249 - DNA, 15 bp, Homo sapiens
gaaagttagtggcct

SEQ ID NO: 1006250 - DNA, 15 bp, Homo sapiens
tgaaagttagtggcc

SEQ ID NO: 1006251 - DNA, 15 bp, Homo sapiens
ttgaaagttagtggc

SEQ ID NO: 1006252 - DNA, 15 bp, Homo sapiens
attgaaagttagtgg

SEQ ID NO: 1006253 - DNA, 15 bp, Homo sapiens
aattgaaagttagtg

SEQ ID NO: 1006254 - DNA, 15 bp, Homo sapiens
taattgaaagttagt

SEQ ID NO: 1006255 - DNA, 15 bp, Homo sapiens
ttaattgaaagttag

SEQ ID NO: 1006256 - DNA, 15 bp, Homo sapiens
tttaattgaaagtta

SEQ ID NO: 1006257 - DNA, 15 bp, Homo sapiens
ttttaattgaaagtt

SEQ ID NO: 1006258 - DNA, 15 bp, Homo sapiens
cttttaattgaaagt

SEQ ID NO: 1006259 - DNA, 15 bp, Homo sapiens
acttttaattgaaag

SEQ ID NO: 1006260 - DNA, 15 bp, Homo sapiens
cacttttaattgaaa

SEQ ID NO: 1006261 - DNA, 15 bp, Homo sapiens
acacttttaattgaa

SEQ ID NO: 1006262 - DNA, 15 bp, Homo sapiens
aacacttttaattga

SEQ ID NO: 1006263 - DNA, 15 bp, Homo sapiens
aaacacttttaattg

SEQ ID NO: 1006264 - DNA, 15 bp, Homo sapiens
aaaacacttttaatt

SEQ ID NO: 1006265 - DNA, 15 bp, Homo sapiens
aaaaacacttttaat

SEQ ID NO: 1006266 - DNA, 15 bp, Homo sapiens
gaaaaacacttttaa

SEQ ID NO: 1006267 - DNA, 15 bp, Homo sapiens
agaaaaacactttta

SEQ ID NO: 1006268 - DNA, 15 bp, Homo sapiens
aagaaaaacactttt

SEQ ID NO: 1006269 - DNA, 15 bp, Homo sapiens
aaagaaaaacacttt

SEQ ID NO: 1006270 - DNA, 15 bp, Homo sapiens
taaagaaaaacactt

SEQ ID NO: 1006271 - DNA, 15 bp, Homo sapiens
ttaaagaaaaacact

SEQ ID NO: 1006272 - DNA, 15 bp, Homo sapiens
attaaagaaaaacac

SEQ ID NO: 1006273 - DNA, 15 bp, Homo sapiens
gattaaagaaaaaca

SEQ ID NO: 1006274 - DNA, 15 bp, Homo sapiens
cgattaaagaaaaac

SEQ ID NO: 1006275 - DNA, 15 bp, Homo sapiens
gcgattaaagaaaaa

SEQ ID NO: 1006276 - DNA, 15 bp, Homo sapiens
agcgattaaagaaaa

SEQ ID NO: 1006277 - DNA, 15 bp, Homo sapiens
cagcgattaaagaaa

SEQ ID NO: 1006278 - DNA, 15 bp, Homo sapiens
tcagcgattaaagaa

SEQ ID NO: 1006279 - DNA, 15 bp, Homo sapiens
ttcagcgattaaaga

SEQ ID NO: 1006280 - DNA, 15 bp, Homo sapiens
gttcagcgattaaag

SEQ ID NO: 1006281 - DNA, 15 bp, Homo sapiens
ggttcagcgattaaa

SEQ ID NO: 1006282 - DNA, 15 bp, Homo sapiens
aggttcagcgattaa

SEQ ID NO: 1006283 - DNA, 15 bp, Homo sapiens
taggttcagcgatta

SEQ ID NO: 1006284 - DNA, 15 bp, Homo sapiens
ttaggttcagcgatt

SEQ ID NO: 1006285 - DNA, 15 bp, Homo sapiens
gttaggttcagcgat

SEQ ID NO: 1006286 - DNA, 15 bp, Homo sapiens
tgttaggttcagcga

SEQ ID NO: 1006287 - DNA, 15 bp, Homo sapiens
ctgttaggttcagcg

SEQ ID NO: 1006288 - DNA, 15 bp, Homo sapiens
gctgttaggttcagc

SEQ ID NO: 1006289 - DNA, 15 bp, Homo sapiens
tgctgttaggttcag

SEQ ID NO: 1006290 - DNA, 15 bp, Homo sapiens
ctgctgttaggttca

SEQ ID NO: 1006291 - DNA, 15 bp, Homo sapiens
cctgctgttaggttc

SEQ ID NO: 1006292 - DNA, 15 bp, Homo sapiens
ccctgctgttaggtt

SEQ ID NO: 1006293 - DNA, 15 bp, Homo sapiens
tccctgctgttaggt

SEQ ID NO: 1006294 - DNA, 15 bp, Homo sapiens
ttccctgctgttagg

SEQ ID NO: 1006295 - DNA, 15 bp, Homo sapiens
tttccctgctgttag

SEQ ID NO: 1006296 - DNA, 15 bp, Homo sapiens
ttttccctgctgtta

SEQ ID NO: 1006297 - DNA, 15 bp, Homo sapiens
gttttccctgctgtt

SEQ ID NO: 1006298 - DNA, 15 bp, Homo sapiens
cgttttccctgctgt

SEQ ID NO: 1006299 - DNA, 15 bp, Homo sapiens
tcgttttccctgctg

SEQ ID NO: 1006300 - DNA, 15 bp, Homo sapiens
ttcgttttccctgct

SEQ ID NO: 1006301 - DNA, 15 bp, Homo sapiens
tttcgttttccctgc

SEQ ID NO: 1006302 - DNA, 15 bp, Homo sapiens
atttcgttttccctg

SEQ ID NO: 1006303 - DNA, 15 bp, Homo sapiens
catttcgttttccct

SEQ ID NO: 1006304 - DNA, 15 bp, Homo sapiens
acatttcgttttccc

SEQ ID NO: 1006305 - DNA, 15 bp, Homo sapiens
aacatttcgttttcc

SEQ ID NO: 1006306 - DNA, 15 bp, Homo sapiens
gaacatttcgttttc

SEQ ID NO: 1006307 - DNA, 15 bp, Homo sapiens
tgaacatttcgtttt

SEQ ID NO: 1006308 - DNA, 15 bp, Homo sapiens
atgaacatttcgttt

SEQ ID NO: 1006309 - DNA, 15 bp, Homo sapiens
aatgaacatttcgtt

SEQ ID NO: 1006310 - DNA, 15 bp, Homo sapiens
gaatgaacatttcgt

SEQ ID NO: 1006311 - DNA, 15 bp, Homo sapiens
tgaatgaacatttcg

SEQ ID NO: 1006312 - DNA, 15 bp, Homo sapiens
ctgaatgaacatttc

SEQ ID NO: 1006313 - DNA, 15 bp, Homo sapiens
tctgaatgaacattt

SEQ ID NO: 1006314 - DNA, 15 bp, Homo sapiens
gtctgaatgaacatt

SEQ ID NO: 1006315 - DNA, 15 bp, Homo sapiens
agtctgaatgaacat

SEQ ID NO: 1006316 - DNA, 15 bp, Homo sapiens
aagtctgaatgaaca

SEQ ID NO: 1006317 - DNA, 15 bp, Homo sapiens
aaagtctgaatgaac

SEQ ID NO: 1006318 - DNA, 15 bp, Homo sapiens
gaaagtctgaatgaa

SEQ ID NO: 1006319 - DNA, 15 bp, Homo sapiens
tgaaagtctgaatga

SEQ ID NO: 1006320 - DNA, 15 bp, Homo sapiens
ctgaaagtctgaatg

SEQ ID NO: 1006321 - DNA, 15 bp, Homo sapiens
tctgaaagtctgaat

SEQ ID NO: 1006322 - DNA, 15 bp, Homo sapiens
ttctgaaagtctgaa

SEQ ID NO: 1006323 - DNA, 15 bp, Homo sapiens
gttctgaaagtctga

SEQ ID NO: 1006324 - DNA, 15 bp, Homo sapiens
ggttctgaaagtctg

SEQ ID NO: 1006325 - DNA, 15 bp, Homo sapiens
aggttctgaaagtct

SEQ ID NO: 1006326 - DNA, 15 bp, Homo sapiens
aaggttctgaaagtc

SEQ ID NO: 1006327 - DNA, 15 bp, Homo sapiens
gaaggttctgaaagt

SEQ ID NO: 1006328 - DNA, 15 bp, Homo sapiens
tgaaggttctgaaag

SEQ ID NO: 1006329 - DNA, 15 bp, Homo sapiens
ttgaaggttctgaaa

SEQ ID NO: 1006330 - DNA, 15 bp, Homo sapiens
attgaaggttctgaa

SEQ ID NO: 1006331 - DNA, 15 bp, Homo sapiens
cattgaaggttctga

SEQ ID NO: 1006332 - DNA, 15 bp, Homo sapiens
tcattgaaggttctg

SEQ ID NO: 1006333 - DNA, 15 bp, Homo sapiens
ctcattgaaggttct

SEQ ID NO: 1006334 - DNA, 15 bp, Homo sapiens
tctcattgaaggttc

SEQ ID NO: 1006335 - DNA, 15 bp, Homo sapiens
atctcattgaaggtt

SEQ ID NO: 1006336 - DNA, 15 bp, Homo sapiens
aatctcattgaaggt

SEQ ID NO: 1006337 - DNA, 15 bp, Homo sapiens
taatctcattgaagg

SEQ ID NO: 1006338 - DNA, 15 bp, Homo sapiens
ctaatctcattgaag

SEQ ID NO: 1006339 - DNA, 15 bp, Homo sapiens
cctaatctcattgaa

SEQ ID NO: 1006340 - DNA, 15 bp, Homo sapiens
gcctaatctcattga

SEQ ID NO: 1006341 - DNA, 15 bp, Homo sapiens
tgcctaatctcattg

SEQ ID NO: 1006342 - DNA, 15 bp, Homo sapiens
ctgcctaatctcatt

SEQ ID NO: 1006343 - DNA, 15 bp, Homo sapiens
gctgcctaatctcat

SEQ ID NO: 1006344 - DNA, 15 bp, Homo sapiens
agctgcctaatctca

SEQ ID NO: 1006345 - DNA, 15 bp, Homo sapiens
cagctgcctaatctc

SEQ ID NO: 1006346 - DNA, 15 bp, Homo sapiens
tcagctgcctaatct

SEQ ID NO: 1006347 - DNA, 15 bp, Homo sapiens
ttcagctgcctaatc

SEQ ID NO: 1006348 - DNA, 15 bp, Homo sapiens
tttcagctgcctaat

SEQ ID NO: 1006349 - DNA, 15 bp, Homo sapiens
ctttcagctgcctaa

SEQ ID NO: 1006350 - DNA, 15 bp, Homo sapiens
tctttcagctgccta

SEQ ID NO: 1006351 - DNA, 15 bp, Homo sapiens
atctttcagctgcct

SEQ ID NO: 1006352 - DNA, 15 bp, Homo sapiens
gatctttcagctgcc

SEQ ID NO: 1006353 - DNA, 15 bp, Homo sapiens
tgatctttcagctgc

SEQ ID NO: 1006354 - DNA, 15 bp, Homo sapiens
ttgatctttcagctg

SEQ ID NO: 1006355 - DNA, 15 bp, Homo sapiens
tttgatctttcagct

SEQ ID NO: 1006356 - DNA, 15 bp, Homo sapiens
ctttgatctttcagc

SEQ ID NO: 1006357 - DNA, 15 bp, Homo sapiens
actttgatctttcag

SEQ ID NO: 1006358 - DNA, 15 bp, Homo sapiens
cactttgatctttca

SEQ ID NO: 1006359 - DNA, 15 bp, Homo sapiens
acactttgatctttc

SEQ ID NO: 1006360 - DNA, 15 bp, Homo sapiens
aacactttgatcttt

SEQ ID NO: 1006361 - DNA, 15 bp, Homo sapiens
caacactttgatctt

SEQ ID NO: 1006362 - DNA, 15 bp, Homo sapiens
gcaacactttgatct

SEQ ID NO: 1006363 - DNA, 15 bp, Homo sapiens
tgcaacactttgatc

SEQ ID NO: 1006364 - DNA, 15 bp, Homo sapiens
atgcaacactttgat

SEQ ID NO: 1006365 - DNA, 15 bp, Homo sapiens
tatgcaacactttga

SEQ ID NO: 1006366 - DNA, 15 bp, Homo sapiens
ctatgcaacactttg

SEQ ID NO: 1006367 - DNA, 15 bp, Homo sapiens
actatgcaacacttt

SEQ ID NO: 1006368 - DNA, 15 bp, Homo sapiens
aactatgcaacactt

SEQ ID NO: 1006369 - DNA, 15 bp, Homo sapiens
caactatgcaacact

SEQ ID NO: 1006370 - DNA, 15 bp, Homo sapiens
acaactatgcaacac

SEQ ID NO: 1006371 - DNA, 15 bp, Homo sapiens
gacaactatgcaaca

SEQ ID NO: 1006372 - DNA, 15 bp, Homo sapiens
ggacaactatgcaac

SEQ ID NO: 1006373 - DNA, 15 bp, Homo sapiens
gggacaactatgcaa

SEQ ID NO: 1006374 - DNA, 15 bp, Homo sapiens
cgggacaactatgca

SEQ ID NO: 1006375 - DNA, 15 bp, Homo sapiens
tcgggacaactatgc

SEQ ID NO: 1006376 - DNA, 15 bp, Homo sapiens
atcgggacaactatg

SEQ ID NO: 1006377 - DNA, 15 bp, Homo sapiens
tatcgggacaactat

SEQ ID NO: 1006378 - DNA, 15 bp, Homo sapiens
ttatcgggacaacta

SEQ ID NO: 1006379 - DNA, 15 bp, Homo sapiens
tttatcgggacaact

SEQ ID NO: 1006380 - DNA, 15 bp, Homo sapiens
ctttatcgggacaac

SEQ ID NO: 1006381 - DNA, 15 bp, Homo sapiens
gctttatcgggacaa

SEQ ID NO: 1006382 - DNA, 15 bp, Homo sapiens
agctttatcgggaca

SEQ ID NO: 1006383 - DNA, 15 bp, Homo sapiens
tagctttatcgggac

SEQ ID NO: 1006384 - DNA, 15 bp, Homo sapiens
atagctttatcggga

SEQ ID NO: 1006385 - DNA, 15 bp, Homo sapiens
aatagctttatcggg

SEQ ID NO: 1006386 - DNA, 15 bp, Homo sapiens
aaatagctttatcgg

SEQ ID NO: 1006387 - DNA, 15 bp, Homo sapiens
caaatagctttatcg

SEQ ID NO: 1006388 - DNA, 15 bp, Homo sapiens
ccaaatagctttatc

SEQ ID NO: 1006389 - DNA, 15 bp, Homo sapiens
tccaaatagctttat

SEQ ID NO: 1006390 - DNA, 15 bp, Homo sapiens
atccaaatagcttta

SEQ ID NO: 1006391 - DNA, 15 bp, Homo sapiens
gatccaaatagcttt

SEQ ID NO: 1006392 - DNA, 15 bp, Homo sapiens
tgatccaaatagctt

SEQ ID NO: 1006393 - DNA, 15 bp, Homo sapiens
atgatccaaatagct

SEQ ID NO: 1006394 - DNA, 15 bp, Homo sapiens
tatgatccaaatagc

SEQ ID NO: 1006395 - DNA, 15 bp, Homo sapiens
atatgatccaaatag

SEQ ID NO: 1006396 - DNA, 15 bp, Homo sapiens
catatgatccaaata

SEQ ID NO: 1006397 - DNA, 15 bp, Homo sapiens
ccatatgatccaaat

SEQ ID NO: 1006398 - DNA, 15 bp, Homo sapiens
tccatatgatccaaa

SEQ ID NO: 1006399 - DNA, 15 bp, Homo sapiens
gtccatatgatccaa

SEQ ID NO: 1006400 - DNA, 15 bp, Homo sapiens
ggtccatatgatcca

SEQ ID NO: 1006401 - DNA, 15 bp, Homo sapiens
tggtccatatgatcc

SEQ ID NO: 1006402 - DNA, 15 bp, Homo sapiens
ttggtccatatgatc

SEQ ID NO: 1006403 - DNA, 15 bp, Homo sapiens
tttggtccatatgat

SEQ ID NO: 1006404 - DNA, 15 bp, Homo sapiens
atttggtccatatga

SEQ ID NO: 1006405 - DNA, 15 bp, Homo sapiens
gatttggtccatatg

SEQ ID NO: 1006406 - DNA, 15 bp, Homo sapiens
cgatttggtccatat

SEQ ID NO: 1006407 - DNA, 15 bp, Homo sapiens
tcgatttggtccata

SEQ ID NO: 1006408 - DNA, 15 bp, Homo sapiens
gtcgatttggtccat

SEQ ID NO: 1006409 - DNA, 15 bp, Homo sapiens
agtcgatttggtcca

SEQ ID NO: 1006410 - DNA, 15 bp, Homo sapiens
cagtcgatttggtcc

SEQ ID NO: 1006411 - DNA, 15 bp, Homo sapiens
gcagtcgatttggtc

SEQ ID NO: 1006412 - DNA, 15 bp, Homo sapiens
agcagtcgatttggt

SEQ ID NO: 1006413 - DNA, 15 bp, Homo sapiens
cagcagtcgatttgg

SEQ ID NO: 1006414 - DNA, 15 bp, Homo sapiens
acagcagtcgatttg

SEQ ID NO: 1006415 - DNA, 15 bp, Homo sapiens
gacagcagtcgattt

SEQ ID NO: 1006416 - DNA, 15 bp, Homo sapiens
tgacagcagtcgatt

SEQ ID NO: 1006417 - DNA, 15 bp, Homo sapiens
atgacagcagtcgat

SEQ ID NO: 1006418 - DNA, 15 bp, Homo sapiens
aatgacagcagtcga

SEQ ID NO: 1006419 - DNA, 15 bp, Homo sapiens
gaatgacagcagtcg

SEQ ID NO: 1006420 - DNA, 15 bp, Homo sapiens
ggaatgacagcagtc

SEQ ID NO: 1006421 - DNA, 15 bp, Homo sapiens
gggaatgacagcagt

SEQ ID NO: 1006422 - DNA, 15 bp, Homo sapiens
ggggaatgacagcag

SEQ ID NO: 1006423 - DNA, 15 bp, Homo sapiens
tggggaatgacagca

SEQ ID NO: 1006424 - DNA, 15 bp, Homo sapiens
gtggggaatgacagc

SEQ ID NO: 1006425 - DNA, 15 bp, Homo sapiens
ggtggggaatgacag

SEQ ID NO: 1006426 - DNA, 15 bp, Homo sapiens
tggtggggaatgaca

SEQ ID NO: 1006427 - DNA, 15 bp, Homo sapiens
ttggtggggaatgac

SEQ ID NO: 1006428 - DNA, 15 bp, Homo sapiens
gttggtggggaatga

SEQ ID NO: 1006429 - DNA, 15 bp, Homo sapiens
ggttggtggggaatg

SEQ ID NO: 1006430 - DNA, 15 bp, Homo sapiens
gggttggtggggaat

SEQ ID NO: 1006431 - DNA, 15 bp, Homo sapiens
ggggttggtggggaa

SEQ ID NO: 1006432 - DNA, 15 bp, Homo sapiens
tggggttggtgggga

SEQ ID NO: 1006433 - DNA, 15 bp, Homo sapiens
atggggttggtgggg

SEQ ID NO: 1006434 - DNA, 15 bp, Homo sapiens
gatggggttggtggg

SEQ ID NO: 1006435 - DNA, 15 bp, Homo sapiens
agatggggttggtgg

SEQ ID NO: 1006436 - DNA, 15 bp, Homo sapiens
gagatggggttggtg

SEQ ID NO: 1006437 - DNA, 15 bp, Homo sapiens
agagatggggttggt

SEQ ID NO: 1006438 - DNA, 15 bp, Homo sapiens
gagagatggggttgg

SEQ ID NO: 1006439 - DNA, 15 bp, Homo sapiens
ggagagatggggttg

SEQ ID NO: 1006440 - DNA, 15 bp, Homo sapiens
gggagagatggggtt

SEQ ID NO: 1006441 - DNA, 15 bp, Homo sapiens
ggggagagatggggt

SEQ ID NO: 1006442 - DNA, 15 bp, Homo sapiens
tggggagagatgggg

SEQ ID NO: 1006443 - DNA, 15 bp, Homo sapiens
ttggggagagatggg

SEQ ID NO: 1006444 - DNA, 15 bp, Homo sapiens
tttggggagagatgg

SEQ ID NO: 1006445 - DNA, 15 bp, Homo sapiens
ttttggggagagatg

SEQ ID NO: 1006446 - DNA, 15 bp, Homo sapiens
attttggggagagat

SEQ ID NO: 1006447 - DNA, 15 bp, Homo sapiens
aattttggggagaga

SEQ ID NO: 1006448 - DNA, 15 bp, Homo sapiens
gaattttggggagag

SEQ ID NO: 1006449 - DNA, 15 bp, Homo sapiens
ggaattttggggaga

SEQ ID NO: 1006450 - DNA, 15 bp, Homo sapiens
gggaattttggggag

SEQ ID NO: 1006451 - DNA, 15 bp, Homo sapiens
tgggaattttgggga

SEQ ID NO: 1006452 - DNA, 15 bp, Homo sapiens
ctgggaattttgggg

SEQ ID NO: 1006453 - DNA, 15 bp, Homo sapiens
gctgggaattttggg

SEQ ID NO: 1006454 - DNA, 15 bp, Homo sapiens
ggctgggaattttgg

SEQ ID NO: 1006455 - DNA, 15 bp, Homo sapiens
gggctgggaattttg

SEQ ID NO: 1006456 - DNA, 15 bp, Homo sapiens
agggctgggaatttt

SEQ ID NO: 1006457 - DNA, 15 bp, Homo sapiens
cagggctgggaattt

SEQ ID NO: 1006458 - DNA, 15 bp, Homo sapiens
acagggctgggaatt

SEQ ID NO: 1006459 - DNA, 15 bp, Homo sapiens
aacagggctgggaat

SEQ ID NO: 1006460 - DNA, 15 bp, Homo sapiens
aaacagggctgggaa

SEQ ID NO: 1006461 - DNA, 15 bp, Homo sapiens
taaacagggctggga

SEQ ID NO: 1006462 - DNA, 15 bp, Homo sapiens
ttaaacagggctggg

SEQ ID NO: 1006463 - DNA, 15 bp, Homo sapiens
cttaaacagggctgg

SEQ ID NO: 1006464 - DNA, 15 bp, Homo sapiens
acttaaacagggctg

SEQ ID NO: 1006465 - DNA, 15 bp, Homo sapiens
cacttaaacagggct

SEQ ID NO: 1006466 - DNA, 15 bp, Homo sapiens
acacttaaacagggc

SEQ ID NO: 1006467 - DNA, 15 bp, Homo sapiens
aacacttaaacaggg

SEQ ID NO: 1006468 - DNA, 15 bp, Homo sapiens
gaacacttaaacagg

SEQ ID NO: 1006469 - DNA, 15 bp, Homo sapiens
agaacacttaaacag

SEQ ID NO: 1006470 - DNA, 15 bp, Homo sapiens
gagaacacttaaaca

SEQ ID NO: 1006471 - DNA, 15 bp, Homo sapiens
agagaacacttaaac

SEQ ID NO: 1006472 - DNA, 15 bp, Homo sapiens
cagagaacacttaaa

SEQ ID NO: 1006473 - DNA, 15 bp, Homo sapiens
acagagaacacttaa

SEQ ID NO: 1006474 - DNA, 15 bp, Homo sapiens
tacagagaacactta

SEQ ID NO: 1006475 - DNA, 15 bp, Homo sapiens
ctacagagaacactt

SEQ ID NO: 1006476 - DNA, 15 bp, Homo sapiens
gctacagagaacact

SEQ ID NO: 1006477 - DNA, 15 bp, Homo sapiens
tgctacagagaacac

SEQ ID NO: 1006478 - DNA, 15 bp, Homo sapiens
atgctacagagaaca

SEQ ID NO: 1006479 - DNA, 15 bp, Homo sapiens
aatgctacagagaac

SEQ ID NO: 1006480 - DNA, 15 bp, Homo sapiens
aaatgctacagagaa

SEQ ID NO: 1006481 - DNA, 15 bp, Homo sapiens
taaatgctacagaga

SEQ ID NO: 1006482 - DNA, 15 bp, Homo sapiens
ataaatgctacagag

SEQ ID NO: 1006483 - DNA, 15 bp, Homo sapiens
gataaatgctacaga

SEQ ID NO: 1006484 - DNA, 15 bp, Homo sapiens
agataaatgctacag

SEQ ID NO: 1006485 - DNA, 15 bp, Homo sapiens
gagataaatgctaca

SEQ ID NO: 1006486 - DNA, 15 bp, Homo sapiens
agagataaatgctac

SEQ ID NO: 1006487 - DNA, 15 bp, Homo sapiens
tagagataaatgcta

SEQ ID NO: 1006488 - DNA, 15 bp, Homo sapiens
atagagataaatgct

SEQ ID NO: 1006489 - DNA, 15 bp, Homo sapiens
gatagagataaatgc

SEQ ID NO: 1006490 - DNA, 15 bp, Homo sapiens
agatagagataaatg

SEQ ID NO: 1006491 - DNA, 15 bp, Homo sapiens
tagatagagataaat

SEQ ID NO: 1006492 - DNA, 15 bp, Homo sapiens
ctagatagagataaa

SEQ ID NO: 1006493 - DNA, 15 bp, Homo sapiens
actagatagagataa

SEQ ID NO: 1006494 - DNA, 15 bp, Homo sapiens
tactagatagagata

SEQ ID NO: 1006495 - DNA, 15 bp, Homo sapiens
atactagatagagat

SEQ ID NO: 1006496 - DNA, 15 bp, Homo sapiens
tatactagatagaga

SEQ ID NO: 1006497 - DNA, 15 bp, Homo sapiens
atatactagatagag

SEQ ID NO: 1006498 - DNA, 15 bp, Homo sapiens
aatatactagataga

SEQ ID NO: 1006499 - DNA, 15 bp, Homo sapiens
caatatactagatag

SEQ ID NO: 1006500 - DNA, 15 bp, Homo sapiens
acaatatactagata

SEQ ID NO: 1006501 - DNA, 15 bp, Homo sapiens
cacaatatactagat

SEQ ID NO: 1006502 - DNA, 15 bp, Homo sapiens
acacaatatactaga

SEQ ID NO: 1006503 - DNA, 15 bp, Homo sapiens
tacacaatatactag

SEQ ID NO: 1006504 - DNA, 15 bp, Homo sapiens
ctacacaatatacta

SEQ ID NO: 1006505 - DNA, 15 bp, Homo sapiens
gctacacaatatact

SEQ ID NO: 1006506 - DNA, 15 bp, Homo sapiens
tgctacacaatatac

SEQ ID NO: 1006507 - DNA, 15 bp, Homo sapiens
atgctacacaatata

SEQ ID NO: 1006508 - DNA, 15 bp, Homo sapiens
tatgctacacaatat

SEQ ID NO: 1006509 - DNA, 15 bp, Homo sapiens
atatgctacacaata

SEQ ID NO: 1006510 - DNA, 15 bp, Homo sapiens
gatatgctacacaat

SEQ ID NO: 1006511 - DNA, 15 bp, Homo sapiens
tgatatgctacacaa

SEQ ID NO: 1006512 - DNA, 15 bp, Homo sapiens
atgatatgctacaca

SEQ ID NO: 1006513 - DNA, 15 bp, Homo sapiens
tatgatatgctacac

SEQ ID NO: 1006514 - DNA, 15 bp, Homo sapiens
atatgatatgctaca

SEQ ID NO: 1006515 - DNA, 15 bp, Homo sapiens
gatatgatatgctac

SEQ ID NO: 1006516 - DNA, 15 bp, Homo sapiens
tgatatgatatgcta

SEQ ID NO: 1006517 - DNA, 15 bp, Homo sapiens
atgatatgatatgct

SEQ ID NO: 1006518 - DNA, 15 bp, Homo sapiens
tatgatatgatatgc

SEQ ID NO: 1006519 - DNA, 15 bp, Homo sapiens
gtatgatatgatatg

SEQ ID NO: 1006520 - DNA, 15 bp, Homo sapiens
agtatgatatgatat

SEQ ID NO: 1006521 - DNA, 15 bp, Homo sapiens
aagtatgatatgata

SEQ ID NO: 1006522 - DNA, 15 bp, Homo sapiens
aaagtatgatatgat

SEQ ID NO: 1006523 - DNA, 15 bp, Homo sapiens
aaaagtatgatatga

SEQ ID NO: 1006524 - DNA, 15 bp, Homo sapiens
gaaaagtatgatatg

SEQ ID NO: 1006525 - DNA, 15 bp, Homo sapiens
agaaaagtatgatat

SEQ ID NO: 1006526 - DNA, 15 bp, Homo sapiens
cagaaaagtatgata

SEQ ID NO: 1006527 - DNA, 15 bp, Homo sapiens
acagaaaagtatgat

SEQ ID NO: 1006528 - DNA, 15 bp, Homo sapiens
aacagaaaagtatga

SEQ ID NO: 1006529 - DNA, 15 bp, Homo sapiens
aaacagaaaagtatg

SEQ ID NO: 1006530 - DNA, 15 bp, Homo sapiens
aaaacagaaaagtat

SEQ ID NO: 1006531 - DNA, 15 bp, Homo sapiens
caaaacagaaaagta

SEQ ID NO: 1006532 - DNA, 15 bp, Homo sapiens
acaaaacagaaaagt

SEQ ID NO: 1006533 - DNA, 15 bp, Homo sapiens
aacaaaacagaaaag

SEQ ID NO: 1006534 - DNA, 15 bp, Homo sapiens
aaacaaaacagaaaa

SEQ ID NO: 1006535 - DNA, 15 bp, Homo sapiens
taaacaaaacagaaa

SEQ ID NO: 1006536 - DNA, 15 bp, Homo sapiens
ataaacaaaacagaa

SEQ ID NO: 1006537 - DNA, 15 bp, Homo sapiens
aataaacaaaacaga

SEQ ID NO: 1006538 - DNA, 15 bp, Homo sapiens
caataaacaaaacag

SEQ ID NO: 1006539 - DNA, 15 bp, Homo sapiens
acaataaacaaaaca

SEQ ID NO: 1006540 - DNA, 15 bp, Homo sapiens
gacaataaacaaaac

SEQ ID NO: 1006541 - DNA, 15 bp, Homo sapiens
agacaataaacaaaa

SEQ ID NO: 1006542 - DNA, 15 bp, Homo sapiens
gagacaataaacaaa

SEQ ID NO: 1006543 - DNA, 15 bp, Homo sapiens
agagacaataaacaa

SEQ ID NO: 1006544 - DNA, 15 bp, Homo sapiens
gagagacaataaaca

SEQ ID NO: 1006545 - DNA, 15 bp, Homo sapiens
gagagagacaataaa

SEQ ID NO: 1006546 - DNA, 15 bp, Homo sapiens
ggagagagacaataa

SEQ ID NO: 1006547 - DNA, 15 bp, Homo sapiens
aggagagagacaata

SEQ ID NO: 1006548 - DNA, 15 bp, Homo sapiens
gaggagagagacaat

SEQ ID NO: 1006549 - DNA, 15 bp, Homo sapiens
ggaggagagagacaa

SEQ ID NO: 1006550 - DNA, 15 bp, Homo sapiens
aggaggagagagaca

SEQ ID NO: 1006551 - DNA, 15 bp, Homo sapiens
taggaggagagagac

SEQ ID NO: 1006552 - DNA, 15 bp, Homo sapiens
ctaggaggagagaga

SEQ ID NO: 1006553 - DNA, 15 bp, Homo sapiens
tctaggaggagagag

SEQ ID NO: 1006554 - DNA, 15 bp, Homo sapiens
ttctaggaggagaga

SEQ ID NO: 1006555 - DNA, 15 bp, Homo sapiens
attctaggaggagag

SEQ ID NO: 1006556 - DNA, 15 bp, Homo sapiens
tattctaggaggaga

SEQ ID NO: 1006557 - DNA, 15 bp, Homo sapiens
atattctaggaggag

SEQ ID NO: 1006558 - DNA, 15 bp, Homo sapiens
tatattctaggagga

SEQ ID NO: 1006559 - DNA, 15 bp, Homo sapiens
ttatattctaggagg

SEQ ID NO: 1006560 - DNA, 15 bp, Homo sapiens
tttatattctaggag

SEQ ID NO: 1006561 - DNA, 15 bp, Homo sapiens
gtttatattctagga

SEQ ID NO: 1006562 - DNA, 15 bp, Homo sapiens
agtttatattctagg

SEQ ID NO: 1006563 - DNA, 15 bp, Homo sapiens
gagtttatattctag

SEQ ID NO: 1006564 - DNA, 15 bp, Homo sapiens
ggagtttatattcta

SEQ ID NO: 1006565 - DNA, 15 bp, Homo sapiens
tggagtttatattct

SEQ ID NO: 1006566 - DNA, 15 bp, Homo sapiens
gtggagtttatattc

SEQ ID NO: 1006567 - DNA, 15 bp, Homo sapiens
tgtggagtttatatt

SEQ ID NO: 1006568 - DNA, 15 bp, Homo sapiens
ttgtggagtttatat

SEQ ID NO: 1006569 - DNA, 15 bp, Homo sapiens
cttgtggagtttata

SEQ ID NO: 1006570 - DNA, 15 bp, Homo sapiens
gcttgtggagtttat

SEQ ID NO: 1006571 - DNA, 15 bp, Homo sapiens
tgcttgtggagttta

SEQ ID NO: 1006572 - DNA, 15 bp, Homo sapiens
gtgcttgtggagttt

SEQ ID NO: 1006573 - DNA, 15 bp, Homo sapiens
tgtgcttgtggagtt

SEQ ID NO: 1006574 - DNA, 15 bp, Homo sapiens
ttgtgcttgtggagt

SEQ ID NO: 1006575 - DNA, 15 bp, Homo sapiens
tttgtgcttgtggag

SEQ ID NO: 1006576 - DNA, 15 bp, Homo sapiens
ctttgtgcttgtgga

SEQ ID NO: 1006577 - DNA, 15 bp, Homo sapiens
tctttgtgcttgtgg

SEQ ID NO: 1006578 - DNA, 15 bp, Homo sapiens
atctttgtgcttgtg

SEQ ID NO: 1006579 - DNA, 15 bp, Homo sapiens
aatctttgtgcttgt

SEQ ID NO: 1006580 - DNA, 15 bp, Homo sapiens
aaatctttgtgcttg

SEQ ID NO: 1006581 - DNA, 15 bp, Homo sapiens
caaatctttgtgctt

SEQ ID NO: 1006582 - DNA, 15 bp, Homo sapiens
ccaaatctttgtgct

SEQ ID NO: 1006583 - DNA, 15 bp, Homo sapiens
cccaaatctttgtgc

SEQ ID NO: 1006584 - DNA, 15 bp, Homo sapiens
gcccaaatctttgtg

SEQ ID NO: 1006585 - DNA, 15 bp, Homo sapiens
ggcccaaatctttgt

SEQ ID NO: 1006586 - DNA, 15 bp, Homo sapiens
aggcccaaatctttg

SEQ ID NO: 1006587 - DNA, 15 bp, Homo sapiens
caggcccaaatcttt

SEQ ID NO: 1006588 - DNA, 15 bp, Homo sapiens
acaggcccaaatctt

SEQ ID NO: 1006589 - DNA, 15 bp, Homo sapiens
aacaggcccaaatct

SEQ ID NO: 1006590 - DNA, 15 bp, Homo sapiens
aaacaggcccaaatc

SEQ ID NO: 1006591 - DNA, 15 bp, Homo sapiens
aaaacaggcccaaat

SEQ ID NO: 1006592 - DNA, 15 bp, Homo sapiens
taaaacaggcccaaa

SEQ ID NO: 1006593 - DNA, 15 bp, Homo sapiens
ataaaacaggcccaa

SEQ ID NO: 1006594 - DNA, 15 bp, Homo sapiens
tataaaacaggccca

SEQ ID NO: 1006595 - DNA, 15 bp, Homo sapiens
ttataaaacaggccc

SEQ ID NO: 1006596 - DNA, 15 bp, Homo sapiens
attataaaacaggcc

SEQ ID NO: 1006597 - DNA, 15 bp, Homo sapiens
tattataaaacaggc

SEQ ID NO: 1006598 - DNA, 15 bp, Homo sapiens
atattataaaacagg

SEQ ID NO: 1006599 - DNA, 15 bp, Homo sapiens
aatattataaaacag

SEQ ID NO: 1006600 - DNA, 15 bp, Homo sapiens
caatattataaaaca

SEQ ID NO: 1006601 - DNA, 15 bp, Homo sapiens
acaatattataaaac

SEQ ID NO: 1006602 - DNA, 15 bp, Homo sapiens
aacaatattataaaa

SEQ ID NO: 1006603 - DNA, 15 bp, Homo sapiens
caacaatattataaa

SEQ ID NO: 1006604 - DNA, 15 bp, Homo sapiens
gcaacaatattataa

SEQ ID NO: 1006605 - DNA, 15 bp, Homo sapiens
tgcaacaatattata

SEQ ID NO: 1006606 - DNA, 15 bp, Homo sapiens
atgcaacaatattat

SEQ ID NO: 1006607 - DNA, 15 bp, Homo sapiens
gatgcaacaatatta

SEQ ID NO: 1006608 - DNA, 15 bp, Homo sapiens
ggatgcaacaatatt

SEQ ID NO: 1006609 - DNA, 15 bp, Homo sapiens
gggatgcaacaatat

SEQ ID NO: 1006610 - DNA, 15 bp, Homo sapiens
ggggatgcaacaata

SEQ ID NO: 1006611 - DNA, 15 bp, Homo sapiens
tggggatgcaacaat

SEQ ID NO: 1006612 - DNA, 15 bp, Homo sapiens
ctggggatgcaacaa

SEQ ID NO: 1006613 - DNA, 15 bp, Homo sapiens
cctggggatgcaaca

SEQ ID NO: 1006614 - DNA, 15 bp, Homo sapiens
ccctggggatgcaac

SEQ ID NO: 1006615 - DNA, 15 bp, Homo sapiens
gccctggggatgcaa

SEQ ID NO: 1006616 - DNA, 15 bp, Homo sapiens
ggccctggggatgca

SEQ ID NO: 1006617 - DNA, 15 bp, Homo sapiens
aggccctggggatgc

SEQ ID NO: 1006618 - DNA, 15 bp, Homo sapiens
caggccctggggatg

SEQ ID NO: 1006619 - DNA, 15 bp, Homo sapiens
tcaggccctggggat

SEQ ID NO: 1006620 - DNA, 15 bp, Homo sapiens
atcaggccctgggga

SEQ ID NO: 1006621 - DNA, 15 bp, Homo sapiens
tatcaggccctgggg

SEQ ID NO: 1006622 - DNA, 15 bp, Homo sapiens
atatcaggccctggg

SEQ ID NO: 1006623 - DNA, 15 bp, Homo sapiens
tatatcaggccctgg

SEQ ID NO: 1006624 - DNA, 15 bp, Homo sapiens
gtatatcaggccctg

SEQ ID NO: 1006625 - DNA, 15 bp, Homo sapiens
tgtatatcaggccct

SEQ ID NO: 1006626 - DNA, 15 bp, Homo sapiens
ctgtatatcaggccc

SEQ ID NO: 1006627 - DNA, 15 bp, Homo sapiens
gctgtatatcaggcc

SEQ ID NO: 1006628 - DNA, 15 bp, Homo sapiens
tgctgtatatcaggc

SEQ ID NO: 1006629 - DNA, 15 bp, Homo sapiens
ctgctgtatatcagg

SEQ ID NO: 1006630 - DNA, 15 bp, Homo sapiens
tctgctgtatatcag

SEQ ID NO: 1006631 - DNA, 15 bp, Homo sapiens
ctctgctgtatatca

SEQ ID NO: 1006632 - DNA, 15 bp, Homo sapiens
actctgctgtatatc

SEQ ID NO: 1006633 - DNA, 15 bp, Homo sapiens
cactctgctgtatat

SEQ ID NO: 1006634 - DNA, 15 bp, Homo sapiens
ccactctgctgtata

SEQ ID NO: 1006635 - DNA, 15 bp, Homo sapiens
accactctgctgtat

SEQ ID NO: 1006636 - DNA, 15 bp, Homo sapiens
caccactctgctgta

SEQ ID NO: 1006637 - DNA, 15 bp, Homo sapiens
ccaccactctgctgt

SEQ ID NO: 1006638 - DNA, 15 bp, Homo sapiens
accaccactctgctg

SEQ ID NO: 1006639 - DNA, 15 bp, Homo sapiens
taccaccactctgct

SEQ ID NO: 1006640 - DNA, 15 bp, Homo sapiens
gtaccaccactctgc

SEQ ID NO: 1006641 - DNA, 15 bp, Homo sapiens
cgtaccaccactctg

SEQ ID NO: 1006642 - DNA, 15 bp, Homo sapiens
tcgtaccaccactct

SEQ ID NO: 1006643 - DNA, 15 bp, Homo sapiens
ttcgtaccaccactc

SEQ ID NO: 1006644 - DNA, 15 bp, Homo sapiens
tttcgtaccaccact

SEQ ID NO: 1006645 - DNA, 15 bp, Homo sapiens
ttttcgtaccaccac

SEQ ID NO: 1006646 - DNA, 15 bp, Homo sapiens
cttttcgtaccacca

SEQ ID NO: 1006647 - DNA, 15 bp, Homo sapiens
tcttttcgtaccacc

SEQ ID NO: 1006648 - DNA, 15 bp, Homo sapiens
ctcttttcgtaccac

SEQ ID NO: 1006649 - DNA, 15 bp, Homo sapiens
gctcttttcgtacca

SEQ ID NO: 1006650 - DNA, 15 bp, Homo sapiens
tgctcttttcgtacc

SEQ ID NO: 1006651 - DNA, 15 bp, Homo sapiens
gtgctcttttcgtac

SEQ ID NO: 1006652 - DNA, 15 bp, Homo sapiens
tgtgctcttttcgta

SEQ ID NO: 1006653 - DNA, 15 bp, Homo sapiens
gtgtgctcttttcgt

SEQ ID NO: 1006654 - DNA, 15 bp, Homo sapiens
tgtgtgctcttttcg

SEQ ID NO: 1006655 - DNA, 15 bp, Homo sapiens
ttgtgtgctcttttc

SEQ ID NO: 1006656 - DNA, 15 bp, Homo sapiens
tttgtgtgctctttt

SEQ ID NO: 1006657 - DNA, 15 bp, Homo sapiens
ttttgtgtgctcttt

SEQ ID NO: 1006658 - DNA, 15 bp, Homo sapiens
tttttgtgtgctctt

SEQ ID NO: 1006659 - DNA, 15 bp, Homo sapiens
ttttttgtgtgctct

SEQ ID NO: 1006660 - DNA, 15 bp, Homo sapiens
tttttttgtgtgctc

SEQ ID NO: 1006661 - DNA, 15 bp, Homo sapiens
atttttttgtgtgct

SEQ ID NO: 1006662 - DNA, 15 bp, Homo sapiens
tatttttttgtgtgc

SEQ ID NO: 1006663 - DNA, 15 bp, Homo sapiens
atatttttttgtgtg

SEQ ID NO: 1006664 - DNA, 15 bp, Homo sapiens
aatatttttttgtgt

SEQ ID NO: 1006665 - DNA, 15 bp, Homo sapiens
aaatatttttttgtg

SEQ ID NO: 1006666 - DNA, 15 bp, Homo sapiens
caacaaatatttttt

SEQ ID NO: 1006667 - DNA, 15 bp, Homo sapiens
tcaacaaatattttt

SEQ ID NO: 1006668 - DNA, 15 bp, Homo sapiens
ctcaacaaatatttt

SEQ ID NO: 1006669 - DNA, 15 bp, Homo sapiens
actcaacaaatattt

SEQ ID NO: 1006670 - DNA, 15 bp, Homo sapiens
gactcaacaaatatt

SEQ ID NO: 1006671 - DNA, 15 bp, Homo sapiens
tgactcaacaaatat

SEQ ID NO: 1006672 - DNA, 15 bp, Homo sapiens
ttgactcaacaaata

SEQ ID NO: 1006673 - DNA, 15 bp, Homo sapiens
attgactcaacaaat

SEQ ID NO: 1006674 - DNA, 15 bp, Homo sapiens
cattgactcaacaaa

SEQ ID NO: 1006675 - DNA, 15 bp, Homo sapiens
tcattgactcaacaa

SEQ ID NO: 1006676 - DNA, 15 bp, Homo sapiens
ttcattgactcaaca

SEQ ID NO: 1006677 - DNA, 15 bp, Homo sapiens
attcattgactcaac

SEQ ID NO: 1006678 - DNA, 15 bp, Homo sapiens
cattcattgactcaa

SEQ ID NO: 1006679 - DNA, 15 bp, Homo sapiens
tcattcattgactca

SEQ ID NO: 1006680 - DNA, 15 bp, Homo sapiens
ttcattcattgactc

SEQ ID NO: 1006681 - DNA, 15 bp, Homo sapiens
attcattcattgact

SEQ ID NO: 1006682 - DNA, 15 bp, Homo sapiens
cattcattcattgac

SEQ ID NO: 1006683 - DNA, 15 bp, Homo sapiens
tcattcattcattga

SEQ ID NO: 1006684 - DNA, 15 bp, Homo sapiens
atcattcattcattg

SEQ ID NO: 1006685 - DNA, 15 bp, Homo sapiens
aatcattcattcatt

SEQ ID NO: 1006686 - DNA, 15 bp, Homo sapiens
aaatcattcattcat

SEQ ID NO: 1006687 - DNA, 15 bp, Homo sapiens
gaaatcattcattca

SEQ ID NO: 1006688 - DNA, 15 bp, Homo sapiens
ggaaatcattcattc

SEQ ID NO: 1006689 - DNA, 15 bp, Homo sapiens
aggaaatcattcatt

SEQ ID NO: 1006690 - DNA, 15 bp, Homo sapiens
gaggaaatcattcat

SEQ ID NO: 1006691 - DNA, 15 bp, Homo sapiens
tgaggaaatcattca

SEQ ID NO: 1006692 - DNA, 15 bp, Homo sapiens
ttgaggaaatcattc

SEQ ID NO: 1006693 - DNA, 15 bp, Homo sapiens
tttgaggaaatcatt

SEQ ID NO: 1006694 - DNA, 15 bp, Homo sapiens
atttgaggaaatcat

SEQ ID NO: 1006695 - DNA, 15 bp, Homo sapiens
tatttgaggaaatca

SEQ ID NO: 1006696 - DNA, 15 bp, Homo sapiens
ctatttgaggaaatc

SEQ ID NO: 1006697 - DNA, 15 bp, Homo sapiens
cctatttgaggaaat

SEQ ID NO: 1006698 - DNA, 15 bp, Homo sapiens
tcctatttgaggaaa

SEQ ID NO: 1006699 - DNA, 15 bp, Homo sapiens
atcctatttgaggaa

SEQ ID NO: 1006700 - DNA, 15 bp, Homo sapiens
aatcctatttgagga

SEQ ID NO: 1006701 - DNA, 15 bp, Homo sapiens
taatcctatttgagg

SEQ ID NO: 1006702 - DNA, 15 bp, Homo sapiens
ctaatcctatttgag

SEQ ID NO: 1006703 - DNA, 15 bp, Homo sapiens
gctaatcctatttga

SEQ ID NO: 1006704 - DNA, 15 bp, Homo sapiens
ggctaatcctatttg

SEQ ID NO: 1006705 - DNA, 15 bp, Homo sapiens
aggctaatcctattt

SEQ ID NO: 1006706 - DNA, 15 bp, Homo sapiens
taggctaatcctatt

SEQ ID NO: 1006707 - DNA, 15 bp, Homo sapiens
ttaggctaatcctat

SEQ ID NO: 1006708 - DNA, 15 bp, Homo sapiens
tttaggctaatccta

SEQ ID NO: 1006709 - DNA, 15 bp, Homo sapiens
ttttaggctaatcct

SEQ ID NO: 1006710 - DNA, 15 bp, Homo sapiens
attttaggctaatcc

SEQ ID NO: 1006711 - DNA, 15 bp, Homo sapiens
aattttaggctaatc

SEQ ID NO: 1006712 - DNA, 15 bp, Homo sapiens
aaattttaggctaat

SEQ ID NO: 1006713 - DNA, 15 bp, Homo sapiens
aaaattttaggctaa

SEQ ID NO: 1006714 - DNA, 15 bp, Homo sapiens
caaaattttaggcta

SEQ ID NO: 1006715 - DNA, 15 bp, Homo sapiens
ccaaaattttaggct

SEQ ID NO: 1006716 - DNA, 15 bp, Homo sapiens
tccaaaattttaggc

SEQ ID NO: 1006717 - DNA, 15 bp, Homo sapiens
ttccaaaattttagg

SEQ ID NO: 1006718 - DNA, 15 bp, Homo sapiens
tttccaaaattttag

SEQ ID NO: 1006719 - DNA, 15 bp, Homo sapiens
gtttccaaaatttta

SEQ ID NO: 1006720 - DNA, 15 bp, Homo sapiens
tgtttccaaaatttt

SEQ ID NO: 1006721 - DNA, 15 bp, Homo sapiens
atgtttccaaaattt

SEQ ID NO: 1006722 - DNA, 15 bp, Homo sapiens
catgtttccaaaatt

SEQ ID NO: 1006723 - DNA, 15 bp, Homo sapiens
tcatgtttccaaaat

SEQ ID NO: 1006724 - DNA, 15 bp, Homo sapiens
ttcatgtttccaaaa

SEQ ID NO: 1006725 - DNA, 15 bp, Homo sapiens
gttcatgtttccaaa

SEQ ID NO: 1006726 - DNA, 15 bp, Homo sapiens
tgttcatgtttccaa

SEQ ID NO: 1006727 - DNA, 15 bp, Homo sapiens
ctgttcatgtttcca

SEQ ID NO: 1006728 - DNA, 15 bp, Homo sapiens
tctgttcatgtttcc

SEQ ID NO: 1006729 - DNA, 15 bp, Homo sapiens
atctgttcatgtttc

SEQ ID NO: 1006730 - DNA, 15 bp, Homo sapiens
aatctgttcatgttt

SEQ ID NO: 1006731 - DNA, 15 bp, Homo sapiens
aaatctgttcatgtt

SEQ ID NO: 1006732 - DNA, 15 bp, Homo sapiens
caaatctgttcatgt

SEQ ID NO: 1006733 - DNA, 15 bp, Homo sapiens
ccaaatctgttcatg

SEQ ID NO: 1006734 - DNA, 15 bp, Homo sapiens
tccaaatctgttcat

SEQ ID NO: 1006735 - DNA, 15 bp, Homo sapiens
atccaaatctgttca

SEQ ID NO: 1006736 - DNA, 15 bp, Homo sapiens
tatccaaatctgttc

SEQ ID NO: 1006737 - DNA, 15 bp, Homo sapiens
atatccaaatctgtt

SEQ ID NO: 1006738 - DNA, 15 bp, Homo sapiens
catatccaaatctgt

SEQ ID NO: 1006739 - DNA, 15 bp, Homo sapiens
acatatccaaatctg

SEQ ID NO: 1006740 - DNA, 15 bp, Homo sapiens
cacatatccaaatct

SEQ ID NO: 1006741 - DNA, 15 bp, Homo sapiens
tcacatatccaaatc

SEQ ID NO: 1006742 - DNA, 15 bp, Homo sapiens
ttcacatatccaaat

SEQ ID NO: 1006743 - DNA, 15 bp, Homo sapiens
tttcacatatccaaa

SEQ ID NO: 1006744 - DNA, 15 bp, Homo sapiens
ttttcacatatccaa

SEQ ID NO: 1006745 - DNA, 15 bp, Homo sapiens
attttcacatatcca

SEQ ID NO: 1006746 - DNA, 15 bp, Homo sapiens
aattttcacatatcc

SEQ ID NO: 1006747 - DNA, 15 bp, Homo sapiens
aaattttcacatatc

SEQ ID NO: 1006748 - DNA, 15 bp, Homo sapiens
taaattttcacatat

SEQ ID NO: 1006749 - DNA, 15 bp, Homo sapiens
ataaattttcacata

SEQ ID NO: 1006750 - DNA, 15 bp, Homo sapiens
aataaattttcacat

SEQ ID NO: 1006751 - DNA, 15 bp, Homo sapiens
ggaaataaattttca

SEQ ID NO: 1006752 - DNA, 15 bp, Homo sapiens
tggaaataaattttc

SEQ ID NO: 1006753 - DNA, 15 bp, Homo sapiens
ctggaaataaatttt

SEQ ID NO: 1006754 - DNA, 15 bp, Homo sapiens
tctggaaataaattt

SEQ ID NO: 1006755 - DNA, 15 bp, Homo sapiens
gtctggaaataaatt

SEQ ID NO: 1006756 - DNA, 15 bp, Homo sapiens
agtctggaaataaat

SEQ ID NO: 1006757 - DNA, 15 bp, Homo sapiens
cagtctggaaataaa

SEQ ID NO: 1006758 - DNA, 15 bp, Homo sapiens
acagtctggaaataa

SEQ ID NO: 1006759 - DNA, 15 bp, Homo sapiens
aacagtctggaaata

SEQ ID NO: 1006760 - DNA, 15 bp, Homo sapiens
gaacagtctggaaat

SEQ ID NO: 1006761 - DNA, 15 bp, Homo sapiens
tgaacagtctggaaa

SEQ ID NO: 1006762 - DNA, 15 bp, Homo sapiens
atgaacagtctggaa

SEQ ID NO: 1006763 - DNA, 15 bp, Homo sapiens
gatgaacagtctgga

SEQ ID NO: 1006764 - DNA, 15 bp, Homo sapiens
tgatgaacagtctgg

SEQ ID NO: 1006765 - DNA, 15 bp, Homo sapiens
ctgatgaacagtctg

SEQ ID NO: 1006766 - DNA, 15 bp, Homo sapiens
cctgatgaacagtct

SEQ ID NO: 1006767 - DNA, 15 bp, Homo sapiens
tcctgatgaacagtc

SEQ ID NO: 1006768 - DNA, 15 bp, Homo sapiens
ttcctgatgaacagt

SEQ ID NO: 1006769 - DNA, 15 bp, Homo sapiens
gttcctgatgaacag

SEQ ID NO: 1006770 - DNA, 15 bp, Homo sapiens
agttcctgatgaaca

SEQ ID NO: 1006771 - DNA, 15 bp, Homo sapiens
cagttcctgatgaac

SEQ ID NO: 1006772 - DNA, 15 bp, Homo sapiens
acagttcctgatgaa

SEQ ID NO: 1006773 - DNA, 15 bp, Homo sapiens
aacagttcctgatga

SEQ ID NO: 1006774 - DNA, 15 bp, Homo sapiens
taacagttcctgatg

SEQ ID NO: 1006775 - DNA, 15 bp, Homo sapiens
ctaacagttcctgat

SEQ ID NO: 1006776 - DNA, 15 bp, Homo sapiens
gctaacagttcctga

SEQ ID NO: 1006777 - DNA, 15 bp, Homo sapiens
tgctaacagttcctg

SEQ ID NO: 1006778 - DNA, 15 bp, Homo sapiens
ctgctaacagttcct

SEQ ID NO: 1006779 - DNA, 15 bp, Homo sapiens
gctgctaacagttcc

SEQ ID NO: 1006780 - DNA, 15 bp, Homo sapiens
agctgctaacagttc

SEQ ID NO: 1006781 - DNA, 15 bp, Homo sapiens
aagctgctaacagtt

SEQ ID NO: 1006782 - DNA, 15 bp, Homo sapiens
gaagctgctaacagt

SEQ ID NO: 1006783 - DNA, 15 bp, Homo sapiens
agaagctgctaacag

SEQ ID NO: 1006784 - DNA, 15 bp, Homo sapiens
tagaagctgctaaca

SEQ ID NO: 1006785 - DNA, 15 bp, Homo sapiens
ttagaagctgctaac

SEQ ID NO: 1006786 - DNA, 15 bp, Homo sapiens
tttagaagctgctaa

SEQ ID NO: 1006787 - DNA, 15 bp, Homo sapiens
ctttagaagctgcta

SEQ ID NO: 1006788 - DNA, 15 bp, Homo sapiens
cctttagaagctgct

SEQ ID NO: 1006789 - DNA, 15 bp, Homo sapiens
ccctttagaagctgc

SEQ ID NO: 1006790 - DNA, 15 bp, Homo sapiens
accctttagaagctg

SEQ ID NO: 1006791 - DNA, 15 bp, Homo sapiens
taccctttagaagct

SEQ ID NO: 1006792 - DNA, 15 bp, Homo sapiens
gtaccctttagaagc

SEQ ID NO: 1006793 - DNA, 15 bp, Homo sapiens
tgtaccctttagaag

SEQ ID NO: 1006794 - DNA, 15 bp, Homo sapiens
gtgtaccctttagaa

SEQ ID NO: 1006795 - DNA, 15 bp, Homo sapiens
agtgtaccctttaga

SEQ ID NO: 1006796 - DNA, 15 bp, Homo sapiens
cagtgtaccctttag

SEQ ID NO: 1006797 - DNA, 15 bp, Homo sapiens
ccagtgtacccttta

SEQ ID NO: 1006798 - DNA, 15 bp, Homo sapiens
tccagtgtacccttt

SEQ ID NO: 1006799 - DNA, 15 bp, Homo sapiens
ctccagtgtaccctt

SEQ ID NO: 1006800 - DNA, 15 bp, Homo sapiens
gctccagtgtaccct

SEQ ID NO: 1006801 - DNA, 15 bp, Homo sapiens
tgctccagtgtaccc

SEQ ID NO: 1006802 - DNA, 15 bp, Homo sapiens
ctgctccagtgtacc

SEQ ID NO: 1006803 - DNA, 15 bp, Homo sapiens
gctgctccagtgtac

SEQ ID NO: 1006804 - DNA, 15 bp, Homo sapiens
tgctgctccagtgta

SEQ ID NO: 1006805 - DNA, 15 bp, Homo sapiens
ctgctgctccagtgt

SEQ ID NO: 1006806 - DNA, 15 bp, Homo sapiens
actgctgctccagtg

SEQ ID NO: 1006807 - DNA, 15 bp, Homo sapiens
tactgctgctccagt

SEQ ID NO: 1006808 - DNA, 15 bp, Homo sapiens
ctactgctgctccag

SEQ ID NO: 1006809 - DNA, 15 bp, Homo sapiens
actactgctgctcca

SEQ ID NO: 1006810 - DNA, 15 bp, Homo sapiens
tactactgctgctcc

SEQ ID NO: 1006811 - DNA, 15 bp, Homo sapiens
ttactactgctgctc

SEQ ID NO: 1006812 - DNA, 15 bp, Homo sapiens
tttactactgctgct

SEQ ID NO: 1006813 - DNA, 15 bp, Homo sapiens
ttttactactgctgc

SEQ ID NO: 1006814 - DNA, 15 bp, Homo sapiens
cttttactactgctg

SEQ ID NO: 1006815 - DNA, 15 bp, Homo sapiens
ccttttactactgct

SEQ ID NO: 1006816 - DNA, 15 bp, Homo sapiens
tccttttactactgc

SEQ ID NO: 1006817 - DNA, 15 bp, Homo sapiens
ctccttttactactg

SEQ ID NO: 1006818 - DNA, 15 bp, Homo sapiens
cctccttttactact

SEQ ID NO: 1006819 - DNA, 15 bp, Homo sapiens
tcctccttttactac

SEQ ID NO: 1006820 - DNA, 15 bp, Homo sapiens
ttcctccttttacta

SEQ ID NO: 1006821 - DNA, 15 bp, Homo sapiens
cttcctccttttact

SEQ ID NO: 1006822 - DNA, 15 bp, Homo sapiens
tcttcctccttttac

SEQ ID NO: 1006823 - DNA, 15 bp, Homo sapiens
ctcttcctcctttta

SEQ ID NO: 1006824 - DNA, 15 bp, Homo sapiens
cctcttcctcctttt

SEQ ID NO: 1006825 - DNA, 15 bp, Homo sapiens
tcctcttcctccttt

SEQ ID NO: 1006826 - DNA, 15 bp, Homo sapiens
ctcctcttcctcctt

SEQ ID NO: 1006827 - DNA, 15 bp, Homo sapiens
gctcctcttcctcct

SEQ ID NO: 1006828 - DNA, 15 bp, Homo sapiens
tgctcctcttcctcc

SEQ ID NO: 1006829 - DNA, 15 bp, Homo sapiens
ctgctcctcttcctc

SEQ ID NO: 1006830 - DNA, 15 bp, Homo sapiens
gctgctcctcttcct

SEQ ID NO: 1006831 - DNA, 15 bp, Homo sapiens
agctgctcctcttcc

SEQ ID NO: 1006832 - DNA, 15 bp, Homo sapiens
gagctgctcctcttc

SEQ ID NO: 1006833 - DNA, 15 bp, Homo sapiens
agagctgctcctctt

SEQ ID NO: 1006834 - DNA, 15 bp, Homo sapiens
cagagctgctcctct

SEQ ID NO: 1006835 - DNA, 15 bp, Homo sapiens
gcagagctgctcctc

SEQ ID NO: 1006836 - DNA, 15 bp, Homo sapiens
agcagagctgctcct

SEQ ID NO: 1006837 - DNA, 15 bp, Homo sapiens
tagcagagctgctcc

SEQ ID NO: 1006838 - DNA, 15 bp, Homo sapiens
gtagcagagctgctc

SEQ ID NO: 1006839 - DNA, 15 bp, Homo sapiens
agtagcagagctgct

SEQ ID NO: 1006840 - DNA, 15 bp, Homo sapiens
cagtagcagagctgc

SEQ ID NO: 1006841 - DNA, 15 bp, Homo sapiens
gcagtagcagagctg

SEQ ID NO: 1006842 - DNA, 15 bp, Homo sapiens
agcagtagcagagct

SEQ ID NO: 1006843 - DNA, 15 bp, Homo sapiens
tagcagtagcagagc

SEQ ID NO: 1006844 - DNA, 15 bp, Homo sapiens
gtagcagtagcagag

SEQ ID NO: 1006845 - DNA, 15 bp, Homo sapiens
agtagcagtagcaga

SEQ ID NO: 1006846 - DNA, 15 bp, Homo sapiens
tagtagcagtagcag

SEQ ID NO: 1006847 - DNA, 15 bp, Homo sapiens
atagtagcagtagca

SEQ ID NO: 1006848 - DNA, 15 bp, Homo sapiens
gatagtagcagtagc

SEQ ID NO: 1006849 - DNA, 15 bp, Homo sapiens
cgatagtagcagtag

SEQ ID NO: 1006850 - DNA, 15 bp, Homo sapiens
tcgatagtagcagta

SEQ ID NO: 1006851 - DNA, 15 bp, Homo sapiens
ctcgatagtagcagt

SEQ ID NO: 1006852 - DNA, 15 bp, Homo sapiens
actcgatagtagcag

SEQ ID NO: 1006853 - DNA, 15 bp, Homo sapiens
tactcgatagtagca

SEQ ID NO: 1006854 - DNA, 15 bp, Homo sapiens
gtactcgatagtagc

SEQ ID NO: 1006855 - DNA, 15 bp, Homo sapiens
agtactcgatagtag

SEQ ID NO: 1006856 - DNA, 15 bp, Homo sapiens
tagtactcgatagta

SEQ ID NO: 1006857 - DNA, 15 bp, Homo sapiens
gtagtactcgatagt

SEQ ID NO: 1006858 - DNA, 15 bp, Homo sapiens
agtagtactcgatag

SEQ ID NO: 1006859 - DNA, 15 bp, Homo sapiens
tagtagtactcgata

SEQ ID NO: 1006860 - DNA, 15 bp, Homo sapiens
gtagtagtactcgat

SEQ ID NO: 1006861 - DNA, 15 bp, Homo sapiens
tgtagtagtactcga

SEQ ID NO: 1006862 - DNA, 15 bp, Homo sapiens
ttgtagtagtactcg

SEQ ID NO: 1006863 - DNA, 15 bp, Homo sapiens
attgtagtagtactc

SEQ ID NO: 1006864 - DNA, 15 bp, Homo sapiens
aattgtagtagtact

SEQ ID NO: 1006865 - DNA, 15 bp, Homo sapiens
taattgtagtagtac

SEQ ID NO: 1006866 - DNA, 15 bp, Homo sapiens
ctaattgtagtagta

SEQ ID NO: 1006867 - DNA, 15 bp, Homo sapiens
gctaattgtagtagt

SEQ ID NO: 1006868 - DNA, 15 bp, Homo sapiens
tgctaattgtagtag

SEQ ID NO: 1006869 - DNA, 15 bp, Homo sapiens
gtgctaattgtagta

SEQ ID NO: 1006870 - DNA, 15 bp, Homo sapiens
agtgctaattgtagt

SEQ ID NO: 1006871 - DNA, 15 bp, Homo sapiens
aagtgctaattgtag

SEQ ID NO: 1006872 - DNA, 15 bp, Homo sapiens
caagtgctaattgta

SEQ ID NO: 1006873 - DNA, 15 bp, Homo sapiens
gcaagtgctaattgt

SEQ ID NO: 1006874 - DNA, 15 bp, Homo sapiens
agcaagtgctaattg

SEQ ID NO: 1006875 - DNA, 15 bp, Homo sapiens
aagcaagtgctaatt

SEQ ID NO: 1006876 - DNA, 15 bp, Homo sapiens
taagcaagtgctaat

SEQ ID NO: 1006877 - DNA, 15 bp, Homo sapiens
ataagcaagtgctaa

SEQ ID NO: 1006878 - DNA, 15 bp, Homo sapiens
aataagcaagtgcta

SEQ ID NO: 1006879 - DNA, 15 bp, Homo sapiens
gaataagcaagtgct

SEQ ID NO: 1006880 - DNA, 15 bp, Homo sapiens
agaataagcaagtgc

SEQ ID NO: 1006881 - DNA, 15 bp, Homo sapiens
cagaataagcaagtg

SEQ ID NO: 1006882 - DNA, 15 bp, Homo sapiens
acagaataagcaagt

SEQ ID NO: 1006883 - DNA, 15 bp, Homo sapiens
cacagaataagcaag

SEQ ID NO: 1006884 - DNA, 15 bp, Homo sapiens
acacagaataagcaa

SEQ ID NO: 1006885 - DNA, 15 bp, Homo sapiens
cacacagaataagca

SEQ ID NO: 1006886 - DNA, 15 bp, Homo sapiens
acacacagaataagc

SEQ ID NO: 1006887 - DNA, 15 bp, Homo sapiens
aacacacagaataag

SEQ ID NO: 1006888 - DNA, 15 bp, Homo sapiens
taacacacagaataa

SEQ ID NO: 1006889 - DNA, 15 bp, Homo sapiens
ctaacacacagaata

SEQ ID NO: 1006890 - DNA, 15 bp, Homo sapiens
cctaacacacagaat

SEQ ID NO: 1006891 - DNA, 15 bp, Homo sapiens
gcctaacacacagaa

SEQ ID NO: 1006892 - DNA, 15 bp, Homo sapiens
ggcctaacacacaga

SEQ ID NO: 1006893 - DNA, 15 bp, Homo sapiens
gggcctaacacacag

SEQ ID NO: 1006894 - DNA, 15 bp, Homo sapiens
agggcctaacacaca

SEQ ID NO: 1006895 - DNA, 15 bp, Homo sapiens
cagggcctaacacac

SEQ ID NO: 1006896 - DNA, 15 bp, Homo sapiens
acagggcctaacaca

SEQ ID NO: 1006897 - DNA, 15 bp, Homo sapiens
tacagggcctaacac

SEQ ID NO: 1006898 - DNA, 15 bp, Homo sapiens
gtacagggcctaaca

SEQ ID NO: 1006899 - DNA, 15 bp, Homo sapiens
agtacagggcctaac

SEQ ID NO: 1006900 - DNA, 15 bp, Homo sapiens
cagtacagggcctaa

SEQ ID NO: 1006901 - DNA, 15 bp, Homo sapiens
tcagtacagggccta

SEQ ID NO: 1006902 - DNA, 15 bp, Homo sapiens
ttcagtacagggcct

SEQ ID NO: 1006903 - DNA, 15 bp, Homo sapiens
gttcagtacagggcc

SEQ ID NO: 1006904 - DNA, 15 bp, Homo sapiens
tgttcagtacagggc

SEQ ID NO: 1006905 - DNA, 15 bp, Homo sapiens
gtgttcagtacaggg

SEQ ID NO: 1006906 - DNA, 15 bp, Homo sapiens
agtgttcagtacagg

SEQ ID NO: 1006907 - DNA, 15 bp, Homo sapiens
gagtgttcagtacag

SEQ ID NO: 1006908 - DNA, 15 bp, Homo sapiens
agagtgttcagtaca

SEQ ID NO: 1006909 - DNA, 15 bp, Homo sapiens
cagagtgttcagtac

SEQ ID NO: 1006910 - DNA, 15 bp, Homo sapiens
acagagtgttcagta

SEQ ID NO: 1006911 - DNA, 15 bp, Homo sapiens
gacagagtgttcagt

SEQ ID NO: 1006912 - DNA, 15 bp, Homo sapiens
agacagagtgttcag

SEQ ID NO: 1006913 - DNA, 15 bp, Homo sapiens
tagacagagtgttca

SEQ ID NO: 1006914 - DNA, 15 bp, Homo sapiens
ttagacagagtgttc

SEQ ID NO: 1006915 - DNA, 15 bp, Homo sapiens
tttagacagagtgtt

SEQ ID NO: 1006916 - DNA, 15 bp, Homo sapiens
atttagacagagtgt

SEQ ID NO: 1006917 - DNA, 15 bp, Homo sapiens
aatttagacagagtg

SEQ ID NO: 1006918 - DNA, 15 bp, Homo sapiens
taatttagacagagt

SEQ ID NO: 1006919 - DNA, 15 bp, Homo sapiens
ctaatttagacagag

SEQ ID NO: 1006920 - DNA, 15 bp, Homo sapiens
actaatttagacaga

SEQ ID NO: 1006921 - DNA, 15 bp, Homo sapiens
aactaatttagacag

SEQ ID NO: 1006922 - DNA, 15 bp, Homo sapiens
gaactaatttagaca

SEQ ID NO: 1006923 - DNA, 15 bp, Homo sapiens
tgaactaatttagac

SEQ ID NO: 1006924 - DNA, 15 bp, Homo sapiens
atgaactaatttaga

SEQ ID NO: 1006925 - DNA, 15 bp, Homo sapiens
aatgaactaatttag

SEQ ID NO: 1006926 - DNA, 15 bp, Homo sapiens
aaatgaactaattta

SEQ ID NO: 1006927 - DNA, 15 bp, Homo sapiens
gaaatgaactaattt

SEQ ID NO: 1006928 - DNA, 15 bp, Homo sapiens
ggaaatgaactaatt

SEQ ID NO: 1006929 - DNA, 15 bp, Homo sapiens
aggaaatgaactaat

SEQ ID NO: 1006930 - DNA, 15 bp, Homo sapiens
gaggaaatgaactaa

SEQ ID NO: 1006931 - DNA, 15 bp, Homo sapiens
ggaggaaatgaacta

SEQ ID NO: 1006932 - DNA, 15 bp, Homo sapiens
aggaggaaatgaact

SEQ ID NO: 1006933 - DNA, 15 bp, Homo sapiens
caggaggaaatgaac

SEQ ID NO: 1006934 - DNA, 15 bp, Homo sapiens
ccaggaggaaatgaa

SEQ ID NO: 1006935 - DNA, 15 bp, Homo sapiens
tccaggaggaaatga

SEQ ID NO: 1006936 - DNA, 15 bp, Homo sapiens
ttccaggaggaaatg

SEQ ID NO: 1006937 - DNA, 15 bp, Homo sapiens
tttccaggaggaaat

SEQ ID NO: 1006938 - DNA, 15 bp, Homo sapiens
atttccaggaggaaa

SEQ ID NO: 1006939 - DNA, 15 bp, Homo sapiens
catttccaggaggaa

SEQ ID NO: 1006940 - DNA, 15 bp, Homo sapiens
tcatttccaggagga

SEQ ID NO: 1006941 - DNA, 15 bp, Homo sapiens
gtcatttccaggagg

SEQ ID NO: 1006942 - DNA, 15 bp, Homo sapiens
agtcatttccaggag

SEQ ID NO: 1006943 - DNA, 15 bp, Homo sapiens
gagtcatttccagga

SEQ ID NO: 1006944 - DNA, 15 bp, Homo sapiens
agagtcatttccagg

SEQ ID NO: 1006945 - DNA, 15 bp, Homo sapiens
tagagtcatttccag

SEQ ID NO: 1006946 - DNA, 15 bp, Homo sapiens
ctagagtcatttcca

SEQ ID NO: 1006947 - DNA, 15 bp, Homo sapiens
cctagagtcatttcc

SEQ ID NO: 1006948 - DNA, 15 bp, Homo sapiens
ccctagagtcatttc

SEQ ID NO: 1006949 - DNA, 15 bp, Homo sapiens
cccctagagtcattt

SEQ ID NO: 1006950 - DNA, 15 bp, Homo sapiens
ccccctagagtcatt

SEQ ID NO: 1006951 - DNA, 15 bp, Homo sapiens
accccctagagtcat

SEQ ID NO: 1006952 - DNA, 15 bp, Homo sapiens
taccccctagagtca

SEQ ID NO: 1006953 - DNA, 15 bp, Homo sapiens
ttaccccctagagtc

SEQ ID NO: 1006954 - DNA, 15 bp, Homo sapiens
cttaccccctagagt

SEQ ID NO: 1006955 - DNA, 15 bp, Homo sapiens
acttaccccctagag

SEQ ID NO: 1006956 - DNA, 15 bp, Homo sapiens
cacttaccccctaga

SEQ ID NO: 1006957 - DNA, 15 bp, Homo sapiens
gcacttaccccctag

SEQ ID NO: 1006958 - DNA, 15 bp, Homo sapiens
agcacttacccccta

SEQ ID NO: 1006959 - DNA, 15 bp, Homo sapiens
aagcacttaccccct

SEQ ID NO: 1006960 - DNA, 15 bp, Homo sapiens
gaagcacttaccccc

SEQ ID NO: 1006961 - DNA, 15 bp, Homo sapiens
tgaagcacttacccc

SEQ ID NO: 1006962 - DNA, 15 bp, Homo sapiens
atgaagcacttaccc

SEQ ID NO: 1006963 - DNA, 15 bp, Homo sapiens
gatgaagcacttacc

SEQ ID NO: 1006964 - DNA, 15 bp, Homo sapiens
tgatgaagcacttac

SEQ ID NO: 1006965 - DNA, 15 bp, Homo sapiens
atgatgaagcactta

SEQ ID NO: 1006966 - DNA, 15 bp, Homo sapiens
catgatgaagcactt

SEQ ID NO: 1006967 - DNA, 15 bp, Homo sapiens
acatgatgaagcact

SEQ ID NO: 1006968 - DNA, 15 bp, Homo sapiens
tacatgatgaagcac

SEQ ID NO: 1006969 - DNA, 15 bp, Homo sapiens
ttacatgatgaagca

SEQ ID NO: 1006970 - DNA, 15 bp, Homo sapiens
cttacatgatgaagc

SEQ ID NO: 1006971 - DNA, 15 bp, Homo sapiens
tcttacatgatgaag

SEQ ID NO: 1006972 - DNA, 15 bp, Homo sapiens
atcttacatgatgaa

SEQ ID NO: 1006973 - DNA, 15 bp, Homo sapiens
catcttacatgatga

SEQ ID NO: 1006974 - DNA, 15 bp, Homo sapiens
tcatcttacatgatg

SEQ ID NO: 1006975 - DNA, 15 bp, Homo sapiens
ctcatcttacatgat

SEQ ID NO: 1006976 - DNA, 15 bp, Homo sapiens
actcatcttacatga

SEQ ID NO: 1006977 - DNA, 15 bp, Homo sapiens
tactcatcttacatg

SEQ ID NO: 1006978 - DNA, 15 bp, Homo sapiens
atactcatcttacat

SEQ ID NO: 1006979 - DNA, 15 bp, Homo sapiens
aatactcatcttaca

SEQ ID NO: 1006980 - DNA, 15 bp, Homo sapiens
aaatactcatcttac

SEQ ID NO: 1006981 - DNA, 15 bp, Homo sapiens
aaaatactcatctta

SEQ ID NO: 1006982 - DNA, 15 bp, Homo sapiens
aaaaatactcatctt

SEQ ID NO: 1006983 - DNA, 15 bp, Homo sapiens
gaaaaatactcatct

SEQ ID NO: 1006984 - DNA, 15 bp, Homo sapiens
tgaaaaatactcatc

SEQ ID NO: 1006985 - DNA, 15 bp, Homo sapiens
gtgaaaaatactcat

SEQ ID NO: 1006986 - DNA, 15 bp, Homo sapiens
tgtgaaaaatactca

SEQ ID NO: 1006987 - DNA, 15 bp, Homo sapiens
atgtgaaaaatactc

SEQ ID NO: 1006988 - DNA, 15 bp, Homo sapiens
aatgtgaaaaatact

SEQ ID NO: 1006989 - DNA, 15 bp, Homo sapiens
aaatgtgaaaaatac

SEQ ID NO: 1006990 - DNA, 15 bp, Homo sapiens
aaaatgtgaaaaata

SEQ ID NO: 1006991 - DNA, 15 bp, Homo sapiens
caaaatgtgaaaaat

SEQ ID NO: 1006992 - DNA, 15 bp, Homo sapiens
acaaaatgtgaaaaa

SEQ ID NO: 1006993 - DNA, 15 bp, Homo sapiens
aacaaaatgtgaaaa

SEQ ID NO: 1006994 - DNA, 15 bp, Homo sapiens
caacaaaatgtgaaa

SEQ ID NO: 1006995 - DNA, 15 bp, Homo sapiens
acaacaaaatgtgaa

SEQ ID NO: 1006996 - DNA, 15 bp, Homo sapiens
cacaacaaaatgtga

SEQ ID NO: 1006997 - DNA, 15 bp, Homo sapiens
acacaacaaaatgtg

SEQ ID NO: 1006998 - DNA, 15 bp, Homo sapiens
gacacaacaaaatgt

SEQ ID NO: 1006999 - DNA, 15 bp, Homo sapiens
agacacaacaaaatg

SEQ ID NO: 1007000 - DNA, 15 bp, Homo sapiens
cagacacaacaaaat

SEQ ID NO: 1007001 - DNA, 15 bp, Homo sapiens
tcagacacaacaaaa

SEQ ID NO: 1007002 - DNA, 15 bp, Homo sapiens
ttcagacacaacaaa

SEQ ID NO: 1007003 - DNA, 15 bp, Homo sapiens
tttcagacacaacaa

SEQ ID NO: 1007004 - DNA, 15 bp, Homo sapiens
atttcagacacaaca

SEQ ID NO: 1007005 - DNA, 15 bp, Homo sapiens
gatttcagacacaac

SEQ ID NO: 1007006 - DNA, 15 bp, Homo sapiens
agatttcagacacaa

SEQ ID NO: 1007007 - DNA, 15 bp, Homo sapiens
cagatttcagacaca

SEQ ID NO: 1007008 - DNA, 15 bp, Homo sapiens
tcagatttcagacac

SEQ ID NO: 1007009 - DNA, 15 bp, Homo sapiens
ctcagatttcagaca

SEQ ID NO: 1007010 - DNA, 15 bp, Homo sapiens
actcagatttcagac

SEQ ID NO: 1007011 - DNA, 15 bp, Homo sapiens
cactcagatttcaga

SEQ ID NO: 1007012 - DNA, 15 bp, Homo sapiens
acactcagatttcag

SEQ ID NO: 1007013 - DNA, 15 bp, Homo sapiens
cacactcagatttca

SEQ ID NO: 1007014 - DNA, 15 bp, Homo sapiens
acacactcagatttc

SEQ ID NO: 1007015 - DNA, 15 bp, Homo sapiens
gacacactcagattt

SEQ ID NO: 1007016 - DNA, 15 bp, Homo sapiens
agacacactcagatt

SEQ ID NO: 1007017 - DNA, 15 bp, Homo sapiens
aagacacactcagat

SEQ ID NO: 1007018 - DNA, 15 bp, Homo sapiens
aaagacacactcaga

SEQ ID NO: 1007019 - DNA, 15 bp, Homo sapiens
gaaagacacactcag

SEQ ID NO: 1007020 - DNA, 15 bp, Homo sapiens
tgaaagacacactca

SEQ ID NO: 1007021 - DNA, 15 bp, Homo sapiens
ttgaaagacacactc

SEQ ID NO: 1007022 - DNA, 15 bp, Homo sapiens
attgaaagacacact

SEQ ID NO: 1007023 - DNA, 15 bp, Homo sapiens
cattgaaagacacac

SEQ ID NO: 1007024 - DNA, 15 bp, Homo sapiens
tcattgaaagacaca

SEQ ID NO: 1007025 - DNA, 15 bp, Homo sapiens
atcattgaaagacac

SEQ ID NO: 1007026 - DNA, 15 bp, Homo sapiens
catcattgaaagaca

SEQ ID NO: 1007027 - DNA, 15 bp, Homo sapiens
ccatcattgaaagac

SEQ ID NO: 1007028 - DNA, 15 bp, Homo sapiens
tccatcattgaaaga

SEQ ID NO: 1007029 - DNA, 15 bp, Homo sapiens
ttccatcattgaaag

SEQ ID NO: 1007030 - DNA, 15 bp, Homo sapiens
attccatcattgaaa

SEQ ID NO: 1007031 - DNA, 15 bp, Homo sapiens
gattccatcattgaa

SEQ ID NO: 1007032 - DNA, 15 bp, Homo sapiens
agattccatcattga

SEQ ID NO: 1007033 - DNA, 15 bp, Homo sapiens
aagattccatcattg

SEQ ID NO: 1007034 - DNA, 15 bp, Homo sapiens
aaagattccatcatt

SEQ ID NO: 1007035 - DNA, 15 bp, Homo sapiens
caaagattccatcat

SEQ ID NO: 1007036 - DNA, 15 bp, Homo sapiens
tcaaagattccatca

SEQ ID NO: 1007037 - DNA, 15 bp, Homo sapiens
atcaaagattccatc

SEQ ID NO: 1007038 - DNA, 15 bp, Homo sapiens
aatcaaagattccat

SEQ ID NO: 1007039 - DNA, 15 bp, Homo sapiens
gaatcaaagattcca

SEQ ID NO: 1007040 - DNA, 15 bp, Homo sapiens
ggaatcaaagattcc

SEQ ID NO: 1007041 - DNA, 15 bp, Homo sapiens
tggaatcaaagattc

SEQ ID NO: 1007042 - DNA, 15 bp, Homo sapiens
atggaatcaaagatt

SEQ ID NO: 1007043 - DNA, 15 bp, Homo sapiens
catggaatcaaagat

SEQ ID NO: 1007044 - DNA, 15 bp, Homo sapiens
tcatggaatcaaaga

SEQ ID NO: 1007045 - DNA, 15 bp, Homo sapiens
atcatggaatcaaag

SEQ ID NO: 1007046 - DNA, 15 bp, Homo sapiens
tatcatggaatcaaa

SEQ ID NO: 1007047 - DNA, 15 bp, Homo sapiens
ttatcatggaatcaa

SEQ ID NO: 1007048 - DNA, 15 bp, Homo sapiens
cttatcatggaatca

SEQ ID NO: 1007049 - DNA, 15 bp, Homo sapiens
acttatcatggaatc

SEQ ID NO: 1007050 - DNA, 15 bp, Homo sapiens
cacttatcatggaat

SEQ ID NO: 1007051 - DNA, 15 bp, Homo sapiens
ccacttatcatggaa

SEQ ID NO: 1007052 - DNA, 15 bp, Homo sapiens
accacttatcatgga

SEQ ID NO: 1007053 - DNA, 15 bp, Homo sapiens
taccacttatcatgg

SEQ ID NO: 1007054 - DNA, 15 bp, Homo sapiens
ataccacttatcatg

SEQ ID NO: 1007055 - DNA, 15 bp, Homo sapiens
aataccacttatcat

SEQ ID NO: 1007056 - DNA, 15 bp, Homo sapiens
taataccacttatca

SEQ ID NO: 1007057 - DNA, 15 bp, Homo sapiens
ataataccacttatc

SEQ ID NO: 1007058 - DNA, 15 bp, Homo sapiens
aataataccacttat

SEQ ID NO: 1007059 - DNA, 15 bp, Homo sapiens
gaataataccactta

SEQ ID NO: 1007060 - DNA, 15 bp, Homo sapiens
ggaataataccactt

SEQ ID NO: 1007061 - DNA, 15 bp, Homo sapiens
gggaataataccact

SEQ ID NO: 1007062 - DNA, 15 bp, Homo sapiens
tgggaataataccac

SEQ ID NO: 1007063 - DNA, 15 bp, Homo sapiens
atgggaataatacca

SEQ ID NO: 1007064 - DNA, 15 bp, Homo sapiens
aatgggaataatacc

SEQ ID NO: 1007065 - DNA, 15 bp, Homo sapiens
aaatgggaataatac

SEQ ID NO: 1007066 - DNA, 15 bp, Homo sapiens
aaaatgggaataata

SEQ ID NO: 1007067 - DNA, 15 bp, Homo sapiens
taaaatgggaataat

SEQ ID NO: 1007068 - DNA, 15 bp, Homo sapiens
ttaaaatgggaataa

SEQ ID NO: 1007069 - DNA, 15 bp, Homo sapiens
cttaaaatgggaata

SEQ ID NO: 1007070 - DNA, 15 bp, Homo sapiens
ccttaaaatgggaat

SEQ ID NO: 1007071 - DNA, 15 bp, Homo sapiens
tccttaaaatgggaa

SEQ ID NO: 1007072 - DNA, 15 bp, Homo sapiens
atccttaaaatggga

SEQ ID NO: 1007073 - DNA, 15 bp, Homo sapiens
catccttaaaatggg

SEQ ID NO: 1007074 - DNA, 15 bp, Homo sapiens
tcatccttaaaatgg

SEQ ID NO: 1007075 - DNA, 15 bp, Homo sapiens
ctcatccttaaaatg

SEQ ID NO: 1007076 - DNA, 15 bp, Homo sapiens
cctcatccttaaaat

SEQ ID NO: 1007077 - DNA, 15 bp, Homo sapiens
tcctcatccttaaaa

SEQ ID NO: 1007078 - DNA, 15 bp, Homo sapiens
ttcctcatccttaaa

SEQ ID NO: 1007079 - DNA, 15 bp, Homo sapiens
tttcctcatccttaa

SEQ ID NO: 1007080 - DNA, 15 bp, Homo sapiens
gtttcctcatcctta

SEQ ID NO: 1007081 - DNA, 15 bp, Homo sapiens
agtttcctcatcctt

SEQ ID NO: 1007082 - DNA, 15 bp, Homo sapiens
cagtttcctcatcct

SEQ ID NO: 1007083 - DNA, 15 bp, Homo sapiens
tcagtttcctcatcc

SEQ ID NO: 1007084 - DNA, 15 bp, Homo sapiens
tggacctcagtttcc

SEQ ID NO: 1007085 - DNA, 15 bp, Homo sapiens
ttggacctcagtttc

SEQ ID NO: 1007086 - DNA, 15 bp, Homo sapiens
tttggacctcagttt

SEQ ID NO: 1007087 - DNA, 15 bp, Homo sapiens
ctttggacctcagtt

SEQ ID NO: 1007088 - DNA, 15 bp, Homo sapiens
tctttggacctcagt

SEQ ID NO: 1007089 - DNA, 15 bp, Homo sapiens
ttctttggacctcag

SEQ ID NO: 1007090 - DNA, 15 bp, Homo sapiens
tttctttggacctca

SEQ ID NO: 1007091 - DNA, 15 bp, Homo sapiens
atttctttggacctc

SEQ ID NO: 1007092 - DNA, 15 bp, Homo sapiens
aatttctttggacct

SEQ ID NO: 1007093 - DNA, 15 bp, Homo sapiens
taatttctttggacc

SEQ ID NO: 1007094 - DNA, 15 bp, Homo sapiens
ttaatttctttggac

SEQ ID NO: 1007095 - DNA, 15 bp, Homo sapiens
cttaatttctttgga

SEQ ID NO: 1007096 - DNA, 15 bp, Homo sapiens
acttaatttctttgg

SEQ ID NO: 1007097 - DNA, 15 bp, Homo sapiens
tacttaatttctttg

SEQ ID NO: 1007098 - DNA, 15 bp, Homo sapiens
ttacttaatttcttt

SEQ ID NO: 1007099 - DNA, 15 bp, Homo sapiens
attacttaatttctt

SEQ ID NO: 1007100 - DNA, 15 bp, Homo sapiens
aattacttaatttct

SEQ ID NO: 1007101 - DNA, 15 bp, Homo sapiens
aaattacttaatttc

SEQ ID NO: 1007102 - DNA, 15 bp, Homo sapiens
caaattacttaattt

SEQ ID NO: 1007103 - DNA, 15 bp, Homo sapiens
gcaaattacttaatt

SEQ ID NO: 1007104 - DNA, 15 bp, Homo sapiens
ggcaaattacttaat

SEQ ID NO: 1007105 - DNA, 15 bp, Homo sapiens
gggcaaattacttaa

SEQ ID NO: 1007106 - DNA, 15 bp, Homo sapiens
tgggcaaattactta

SEQ ID NO: 1007107 - DNA, 15 bp, Homo sapiens
ttgggcaaattactt

SEQ ID NO: 1007108 - DNA, 15 bp, Homo sapiens
tttgggcaaattact

SEQ ID NO: 1007109 - DNA, 15 bp, Homo sapiens
atttgggcaaattac

SEQ ID NO: 1007110 - DNA, 15 bp, Homo sapiens
aatttgggcaaatta

SEQ ID NO: 1007111 - DNA, 15 bp, Homo sapiens
gaatttgggcaaatt

SEQ ID NO: 1007112 - DNA, 15 bp, Homo sapiens
tgaatttgggcaaat

SEQ ID NO: 1007113 - DNA, 15 bp, Homo sapiens
gtgaatttgggcaaa

SEQ ID NO: 1007114 - DNA, 15 bp, Homo sapiens
ggtgaatttgggcaa

SEQ ID NO: 1007115 - DNA, 15 bp, Homo sapiens
gggtgaatttgggca

SEQ ID NO: 1007116 - DNA, 15 bp, Homo sapiens
tgggtgaatttgggc

SEQ ID NO: 1007117 - DNA, 15 bp, Homo sapiens
ctgggtgaatttggg

SEQ ID NO: 1007118 - DNA, 15 bp, Homo sapiens
gctgggtgaatttgg

SEQ ID NO: 1007119 - DNA, 15 bp, Homo sapiens
ggctgggtgaatttg

SEQ ID NO: 1007120 - DNA, 15 bp, Homo sapiens
aggctgggtgaattt

SEQ ID NO: 1007121 - DNA, 15 bp, Homo sapiens
taggctgggtgaatt

SEQ ID NO: 1007122 - DNA, 15 bp, Homo sapiens
ctaggctgggtgaat

SEQ ID NO: 1007123 - DNA, 15 bp, Homo sapiens
tctaggctgggtgaa

SEQ ID NO: 1007124 - DNA, 15 bp, Homo sapiens
ttctaggctgggtga

SEQ ID NO: 1007125 - DNA, 15 bp, Homo sapiens
tttctaggctgggtg

SEQ ID NO: 1007126 - DNA, 15 bp, Homo sapiens
ttttctaggctgggt

SEQ ID NO: 1007127 - DNA, 15 bp, Homo sapiens
attttctaggctggg

SEQ ID NO: 1007128 - DNA, 15 bp, Homo sapiens
cattttctaggctgg

SEQ ID NO: 1007129 - DNA, 15 bp, Homo sapiens
tcattttctaggctg

SEQ ID NO: 1007130 - DNA, 15 bp, Homo sapiens
atcattttctaggct

SEQ ID NO: 1007131 - DNA, 15 bp, Homo sapiens
tatcattttctaggc

SEQ ID NO: 1007132 - DNA, 15 bp, Homo sapiens
ttatcattttctagg

SEQ ID NO: 1007133 - DNA, 15 bp, Homo sapiens
tttatcattttctag

SEQ ID NO: 1007134 - DNA, 15 bp, Homo sapiens
ctttatcattttcta

SEQ ID NO: 1007135 - DNA, 15 bp, Homo sapiens
gctttatcattttct

SEQ ID NO: 1007136 - DNA, 15 bp, Homo sapiens
agctttatcattttc

SEQ ID NO: 1007137 - DNA, 15 bp, Homo sapiens
tagctttatcatttt

SEQ ID NO: 1007138 - DNA, 15 bp, Homo sapiens
ctagctttatcattt

SEQ ID NO: 1007139 - DNA, 15 bp, Homo sapiens
actagctttatcatt

SEQ ID NO: 1007140 - DNA, 15 bp, Homo sapiens
aactagctttatcat

SEQ ID NO: 1007141 - DNA, 15 bp, Homo sapiens
gaactagctttatca

SEQ ID NO: 1007142 - DNA, 15 bp, Homo sapiens
agaactagctttatc

SEQ ID NO: 1007143 - DNA, 15 bp, Homo sapiens
tagaactagctttat

SEQ ID NO: 1007144 - DNA, 15 bp, Homo sapiens
ttagaactagcttta

SEQ ID NO: 1007145 - DNA, 15 bp, Homo sapiens
tttagaactagcttt

SEQ ID NO: 1007146 - DNA, 15 bp, Homo sapiens
gtttagaactagctt

SEQ ID NO: 1007147 - DNA, 15 bp, Homo sapiens
ggtttagaactagct

SEQ ID NO: 1007148 - DNA, 15 bp, Homo sapiens
gggtttagaactagc

SEQ ID NO: 1007149 - DNA, 15 bp, Homo sapiens
tgggtttagaactag

SEQ ID NO: 1007150 - DNA, 15 bp, Homo sapiens
ttgggtttagaacta

SEQ ID NO: 1007151 - DNA, 15 bp, Homo sapiens
cttgggtttagaact

SEQ ID NO: 1007152 - DNA, 15 bp, Homo sapiens
gcttgggtttagaac

SEQ ID NO: 1007153 - DNA, 15 bp, Homo sapiens
tgcttgggtttagaa

SEQ ID NO: 1007154 - DNA, 15 bp, Homo sapiens
ctgcttgggtttaga

SEQ ID NO: 1007155 - DNA, 15 bp, Homo sapiens
tctgcttgggtttag

SEQ ID NO: 1007156 - DNA, 15 bp, Homo sapiens
atctgcttgggttta

SEQ ID NO: 1007157 - DNA, 15 bp, Homo sapiens
aatctgcttgggttt

SEQ ID NO: 1007158 - DNA, 15 bp, Homo sapiens
taatctgcttgggtt

SEQ ID NO: 1007159 - DNA, 15 bp, Homo sapiens
ctaatctgcttgggt

SEQ ID NO: 1007160 - DNA, 15 bp, Homo sapiens
gctaatctgcttggg

SEQ ID NO: 1007161 - DNA, 15 bp, Homo sapiens
agctaatctgcttgg

SEQ ID NO: 1007162 - DNA, 15 bp, Homo sapiens
gagctaatctgcttg

SEQ ID NO: 1007163 - DNA, 15 bp, Homo sapiens
agagctaatctgctt

SEQ ID NO: 1007164 - DNA, 15 bp, Homo sapiens
cagagctaatctgct

SEQ ID NO: 1007165 - DNA, 15 bp, Homo sapiens
tcagagctaatctgc

SEQ ID NO: 1007166 - DNA, 15 bp, Homo sapiens
ttcagagctaatctg

SEQ ID NO: 1007167 - DNA, 15 bp, Homo sapiens
cttcagagctaatct

SEQ ID NO: 1007168 - DNA, 15 bp, Homo sapiens
acttcagagctaatc

SEQ ID NO: 1007169 - DNA, 15 bp, Homo sapiens
gacttcagagctaat

SEQ ID NO: 1007170 - DNA, 15 bp, Homo sapiens
agacttcagagctaa

SEQ ID NO: 1007171 - DNA, 15 bp, Homo sapiens
cagacttcagagcta

SEQ ID NO: 1007172 - DNA, 15 bp, Homo sapiens
ccagacttcagagct

SEQ ID NO: 1007173 - DNA, 15 bp, Homo sapiens
cccagacttcagagc

SEQ ID NO: 1007174 - DNA, 15 bp, Homo sapiens
gcccagacttcagag

SEQ ID NO: 1007175 - DNA, 15 bp, Homo sapiens
ggcccagacttcaga

SEQ ID NO: 1007176 - DNA, 15 bp, Homo sapiens
gggcccagacttcag

SEQ ID NO: 1007177 - DNA, 15 bp, Homo sapiens
agggcccagacttca

SEQ ID NO: 1007178 - DNA, 15 bp, Homo sapiens
aagggcccagacttc

SEQ ID NO: 1007179 - DNA, 15 bp, Homo sapiens
taagggcccagactt

SEQ ID NO: 1007180 - DNA, 15 bp, Homo sapiens
ttaagggcccagact

SEQ ID NO: 1007181 - DNA, 15 bp, Homo sapiens
attaagggcccagac

SEQ ID NO: 1007182 - DNA, 15 bp, Homo sapiens
tattaagggcccaga

SEQ ID NO: 1007183 - DNA, 15 bp, Homo sapiens
ttattaagggcccag

SEQ ID NO: 1007184 - DNA, 15 bp, Homo sapiens
gttattaagggccca

SEQ ID NO: 1007185 - DNA, 15 bp, Homo sapiens
ggttattaagggccc

SEQ ID NO: 1007186 - DNA, 15 bp, Homo sapiens
tggttattaagggcc

SEQ ID NO: 1007187 - DNA, 15 bp, Homo sapiens
gtggttattaagggc

SEQ ID NO: 1007188 - DNA, 15 bp, Homo sapiens
agtggttattaaggg

SEQ ID NO: 1007189 - DNA, 15 bp, Homo sapiens
aagtggttattaagg

SEQ ID NO: 1007190 - DNA, 15 bp, Homo sapiens
aaagtggttattaag

SEQ ID NO: 1007191 - DNA, 15 bp, Homo sapiens
aaaagtggttattaa

SEQ ID NO: 1007192 - DNA, 15 bp, Homo sapiens
aaaaagtggttatta

SEQ ID NO: 1007193 - DNA, 15 bp, Homo sapiens
ataaaaagtggttat

SEQ ID NO: 1007194 - DNA, 15 bp, Homo sapiens
aataaaaagtggtta

SEQ ID NO: 1007195 - DNA, 15 bp, Homo sapiens
caataaaaagtggtt

SEQ ID NO: 1007196 - DNA, 15 bp, Homo sapiens
gcaataaaaagtggt

SEQ ID NO: 1007197 - DNA, 15 bp, Homo sapiens
ggcaataaaaagtgg

SEQ ID NO: 1007198 - DNA, 15 bp, Homo sapiens
aggcaataaaaagtg

SEQ ID NO: 1007199 - DNA, 15 bp, Homo sapiens
taggcaataaaaagt

SEQ ID NO: 1007200 - DNA, 15 bp, Homo sapiens
ataggcaataaaaag

SEQ ID NO: 1007201 - DNA, 15 bp, Homo sapiens
tataggcaataaaaa

SEQ ID NO: 1007202 - DNA, 15 bp, Homo sapiens
atataggcaataaaa

SEQ ID NO: 1007203 - DNA, 15 bp, Homo sapiens
aatataggcaataaa

SEQ ID NO: 1007204 - DNA, 15 bp, Homo sapiens
aaatataggcaataa

SEQ ID NO: 1007205 - DNA, 15 bp, Homo sapiens
caaatataggcaata

SEQ ID NO: 1007206 - DNA, 15 bp, Homo sapiens
acaaatataggcaat

SEQ ID NO: 1007207 - DNA, 15 bp, Homo sapiens
tacaaatataggcaa

SEQ ID NO: 1007208 - DNA, 15 bp, Homo sapiens
gtacaaatataggca

SEQ ID NO: 1007209 - DNA, 15 bp, Homo sapiens
ggtacaaatataggc

SEQ ID NO: 1007210 - DNA, 15 bp, Homo sapiens
aggtacaaatatagg

SEQ ID NO: 1007211 - DNA, 15 bp, Homo sapiens
gaggtacaaatatag

SEQ ID NO: 1007212 - DNA, 15 bp, Homo sapiens
agaggtacaaatata

SEQ ID NO: 1007213 - DNA, 15 bp, Homo sapiens
cagaggtacaaatat

SEQ ID NO: 1007214 - DNA, 15 bp, Homo sapiens
ccagaggtacaaata

SEQ ID NO: 1007215 - DNA, 15 bp, Homo sapiens
accagaggtacaaat

SEQ ID NO: 1007216 - DNA, 15 bp, Homo sapiens
caccagaggtacaaa

SEQ ID NO: 1007217 - DNA, 15 bp, Homo sapiens
acaccagaggtacaa

SEQ ID NO: 1007218 - DNA, 15 bp, Homo sapiens
tacaccagaggtaca

SEQ ID NO: 1007219 - DNA, 15 bp, Homo sapiens
gtacaccagaggtac

SEQ ID NO: 1007220 - DNA, 15 bp, Homo sapiens
cgtacaccagaggta

SEQ ID NO: 1007221 - DNA, 15 bp, Homo sapiens
acgtacaccagaggt

SEQ ID NO: 1007222 - DNA, 15 bp, Homo sapiens
tacgtacaccagagg

SEQ ID NO: 1007223 - DNA, 15 bp, Homo sapiens
atacgtacaccagag

SEQ ID NO: 1007224 - DNA, 15 bp, Homo sapiens
gatacgtacaccaga

SEQ ID NO: 1007225 - DNA, 15 bp, Homo sapiens
tgatacgtacaccag

SEQ ID NO: 1007226 - DNA, 15 bp, Homo sapiens
ttgatacgtacacca

SEQ ID NO: 1007227 - DNA, 15 bp, Homo sapiens
cttgatacgtacacc

SEQ ID NO: 1007228 - DNA, 15 bp, Homo sapiens
acttgatacgtacac

SEQ ID NO: 1007229 - DNA, 15 bp, Homo sapiens
aacttgatacgtaca

SEQ ID NO: 1007230 - DNA, 15 bp, Homo sapiens
taacttgatacgtac

SEQ ID NO: 1007231 - DNA, 15 bp, Homo sapiens
ataacttgatacgta

SEQ ID NO: 1007232 - DNA, 15 bp, Homo sapiens
tataacttgatacgt

SEQ ID NO: 1007233 - DNA, 15 bp, Homo sapiens
atataacttgatacg

SEQ ID NO: 1007234 - DNA, 15 bp, Homo sapiens
catataacttgatac

SEQ ID NO: 1007235 - DNA, 15 bp, Homo sapiens
acatataacttgata

SEQ ID NO: 1007236 - DNA, 15 bp, Homo sapiens
aacatataacttgat

SEQ ID NO: 1007237 - DNA, 15 bp, Homo sapiens
caacatataacttga

SEQ ID NO: 1007238 - DNA, 15 bp, Homo sapiens
tcaacatataacttg

SEQ ID NO: 1007239 - DNA, 15 bp, Homo sapiens
gtcaacatataactt

SEQ ID NO: 1007240 - DNA, 15 bp, Homo sapiens
agtcaacatataact

SEQ ID NO: 1007241 - DNA, 15 bp, Homo sapiens
aagtcaacatataac

SEQ ID NO: 1007242 - DNA, 15 bp, Homo sapiens
gaagtcaacatataa

SEQ ID NO: 1007243 - DNA, 15 bp, Homo sapiens
tgaagtcaacatata

SEQ ID NO: 1007244 - DNA, 15 bp, Homo sapiens
ttgaagtcaacatat

SEQ ID NO: 1007245 - DNA, 15 bp, Homo sapiens
tttgaagtcaacata

SEQ ID NO: 1007246 - DNA, 15 bp, Homo sapiens
ttttgaagtcaacat

SEQ ID NO: 1007247 - DNA, 15 bp, Homo sapiens
gttttgaagtcaaca

SEQ ID NO: 1007248 - DNA, 15 bp, Homo sapiens
agttttgaagtcaac

SEQ ID NO: 1007249 - DNA, 15 bp, Homo sapiens
tagttttgaagtcaa

SEQ ID NO: 1007250 - DNA, 15 bp, Homo sapiens
atagttttgaagtca

SEQ ID NO: 1007251 - DNA, 15 bp, Homo sapiens
gatagttttgaagtc

SEQ ID NO: 1007252 - DNA, 15 bp, Homo sapiens
tgatagttttgaagt

SEQ ID NO: 1007253 - DNA, 15 bp, Homo sapiens
atgatagttttgaag

SEQ ID NO: 1007254 - DNA, 15 bp, Homo sapiens
catgatagttttgaa

SEQ ID NO: 1007255 - DNA, 15 bp, Homo sapiens
tcatgatagttttga

SEQ ID NO: 1007256 - DNA, 15 bp, Homo sapiens
gtcatgatagttttg

SEQ ID NO: 1007257 - DNA, 15 bp, Homo sapiens
ggtcatgatagtttt

SEQ ID NO: 1007258 - DNA, 15 bp, Homo sapiens
aggtcatgatagttt

SEQ ID NO: 1007259 - DNA, 15 bp, Homo sapiens
aaggtcatgatagtt

SEQ ID NO: 1007260 - DNA, 15 bp, Homo sapiens
aaaggtcatgatagt

SEQ ID NO: 1007261 - DNA, 15 bp, Homo sapiens
aaaaggtcatgatag

SEQ ID NO: 1007262 - DNA, 15 bp, Homo sapiens
gaaaaggtcatgata

SEQ ID NO: 1007263 - DNA, 15 bp, Homo sapiens
agaaaaggtcatgat

SEQ ID NO: 1007264 - DNA, 15 bp, Homo sapiens
aagaaaaggtcatga

SEQ ID NO: 1007265 - DNA, 15 bp, Homo sapiens
caagaaaaggtcatg

SEQ ID NO: 1007266 - DNA, 15 bp, Homo sapiens
ccaagaaaaggtcat

SEQ ID NO: 1007267 - DNA, 15 bp, Homo sapiens
accaagaaaaggtca

SEQ ID NO: 1007268 - DNA, 15 bp, Homo sapiens
aaccaagaaaaggtc

SEQ ID NO: 1007269 - DNA, 15 bp, Homo sapiens
aaaccaagaaaaggt

SEQ ID NO: 1007270 - DNA, 15 bp, Homo sapiens
aaaaccaagaaaagg

SEQ ID NO: 1007271 - DNA, 15 bp, Homo sapiens
caaaaccaagaaaag

SEQ ID NO: 1007272 - DNA, 15 bp, Homo sapiens
tcaaaaccaagaaaa

SEQ ID NO: 1007273 - DNA, 15 bp, Homo sapiens
atcaaaaccaagaaa

SEQ ID NO: 1007274 - DNA, 15 bp, Homo sapiens
aatcaaaaccaagaa

SEQ ID NO: 1007275 - DNA, 15 bp, Homo sapiens
caatcaaaaccaaga

SEQ ID NO: 1007276 - DNA, 15 bp, Homo sapiens
acaatcaaaaccaag

SEQ ID NO: 1007277 - DNA, 15 bp, Homo sapiens
gacaatcaaaaccaa

SEQ ID NO: 1007278 - DNA, 15 bp, Homo sapiens
ggacaatcaaaacca

SEQ ID NO: 1007279 - DNA, 15 bp, Homo sapiens
tggacaatcaaaacc

SEQ ID NO: 1007280 - DNA, 15 bp, Homo sapiens
ttggacaatcaaaac

SEQ ID NO: 1007281 - DNA, 15 bp, Homo sapiens
gttggacaatcaaaa

SEQ ID NO: 1007282 - DNA, 15 bp, Homo sapiens
tgttggacaatcaaa

SEQ ID NO: 1007283 - DNA, 15 bp, Homo sapiens
atgttggacaatcaa

SEQ ID NO: 1007284 - DNA, 15 bp, Homo sapiens
aatgttggacaatca

SEQ ID NO: 1007285 - DNA, 15 bp, Homo sapiens
taatgttggacaatc

SEQ ID NO: 1007286 - DNA, 15 bp, Homo sapiens
ctaatgttggacaat

SEQ ID NO: 1007287 - DNA, 15 bp, Homo sapiens
actaatgttggacaa

SEQ ID NO: 1007288 - DNA, 15 bp, Homo sapiens
tactaatgttggaca

SEQ ID NO: 1007289 - DNA, 15 bp, Homo sapiens
atactaatgttggac

SEQ ID NO: 1007290 - DNA, 15 bp, Homo sapiens
tatactaatgttgga

SEQ ID NO: 1007291 - DNA, 15 bp, Homo sapiens
ctatactaatgttgg

SEQ ID NO: 1007292 - DNA, 15 bp, Homo sapiens
actatactaatgttg

SEQ ID NO: 1007293 - DNA, 15 bp, Homo sapiens
cactatactaatgtt

SEQ ID NO: 1007294 - DNA, 15 bp, Homo sapiens
acactatactaatgt

SEQ ID NO: 1007295 - DNA, 15 bp, Homo sapiens
aacactatactaatg

SEQ ID NO: 1007296 - DNA, 15 bp, Homo sapiens
gaacactatactaat

SEQ ID NO: 1007297 - DNA, 15 bp, Homo sapiens
agaacactatactaa

SEQ ID NO: 1007298 - DNA, 15 bp, Homo sapiens
cagaacactatacta

SEQ ID NO: 1007299 - DNA, 15 bp, Homo sapiens
ccagaacactatact

SEQ ID NO: 1007300 - DNA, 15 bp, Homo sapiens
cccagaacactatac

SEQ ID NO: 1007301 - DNA, 15 bp, Homo sapiens
acccagaacactata

SEQ ID NO: 1007302 - DNA, 15 bp, Homo sapiens
gacccagaacactat

SEQ ID NO: 1007303 - DNA, 15 bp, Homo sapiens
agacccagaacacta

SEQ ID NO: 1007304 - DNA, 15 bp, Homo sapiens
cagacccagaacact

SEQ ID NO: 1007305 - DNA, 15 bp, Homo sapiens
gcagacccagaacac

SEQ ID NO: 1007306 - DNA, 15 bp, Homo sapiens
tgcagacccagaaca

SEQ ID NO: 1007307 - DNA, 15 bp, Homo sapiens
ttgcagacccagaac

SEQ ID NO: 1007308 - DNA, 15 bp, Homo sapiens
tttgcagacccagaa

SEQ ID NO: 1007309 - DNA, 15 bp, Homo sapiens
ttttgcagacccaga

SEQ ID NO: 1007310 - DNA, 15 bp, Homo sapiens
tttttgcagacccag

SEQ ID NO: 1007311 - DNA, 15 bp, Homo sapiens
atttttgcagaccca

SEQ ID NO: 1007312 - DNA, 15 bp, Homo sapiens
aatttttgcagaccc

SEQ ID NO: 1007313 - DNA, 15 bp, Homo sapiens
aaatttttgcagacc

SEQ ID NO: 1007314 - DNA, 15 bp, Homo sapiens
aaaatttttgcagac

SEQ ID NO: 1007315 - DNA, 15 bp, Homo sapiens
caaaatttttgcaga

SEQ ID NO: 1007316 - DNA, 15 bp, Homo sapiens
tcaaaatttttgcag

SEQ ID NO: 1007317 - DNA, 15 bp, Homo sapiens
atcaaaatttttgca

SEQ ID NO: 1007318 - DNA, 15 bp, Homo sapiens
aatcaaaatttttgc

SEQ ID NO: 1007319 - DNA, 15 bp, Homo sapiens
taatcaaaatttttg

SEQ ID NO: 1007320 - DNA, 15 bp, Homo sapiens
gtaatcaaaattttt

SEQ ID NO: 1007321 - DNA, 15 bp, Homo sapiens
agtaatcaaaatttt

SEQ ID NO: 1007322 - DNA, 15 bp, Homo sapiens
gagtaatcaaaattt

SEQ ID NO: 1007323 - DNA, 15 bp, Homo sapiens
tgagtaatcaaaatt

SEQ ID NO: 1007324 - DNA, 15 bp, Homo sapiens
atgagtaatcaaaat

SEQ ID NO: 1007325 - DNA, 15 bp, Homo sapiens
gatgagtaatcaaaa

SEQ ID NO: 1007326 - DNA, 15 bp, Homo sapiens
agatgagtaatcaaa

SEQ ID NO: 1007327 - DNA, 15 bp, Homo sapiens
gagatgagtaatcaa

SEQ ID NO: 1007328 - DNA, 15 bp, Homo sapiens
tgagatgagtaatca

SEQ ID NO: 1007329 - DNA, 15 bp, Homo sapiens
atgagatgagtaatc

SEQ ID NO: 1007330 - DNA, 15 bp, Homo sapiens
gatgagatgagtaat

SEQ ID NO: 1007331 - DNA, 15 bp, Homo sapiens
agatgagatgagtaa

SEQ ID NO: 1007332 - DNA, 15 bp, Homo sapiens
cagatgagatgagta

SEQ ID NO: 1007333 - DNA, 15 bp, Homo sapiens
acagatgagatgagt

SEQ ID NO: 1007334 - DNA, 15 bp, Homo sapiens
tacagatgagatgag

SEQ ID NO: 1007335 - DNA, 15 bp, Homo sapiens
ttacagatgagatga

SEQ ID NO: 1007336 - DNA, 15 bp, Homo sapiens
tttacagatgagatg

SEQ ID NO: 1007337 - DNA, 15 bp, Homo sapiens
ttttacagatgagat

SEQ ID NO: 1007338 - DNA, 15 bp, Homo sapiens
gttttacagatgaga

SEQ ID NO: 1007339 - DNA, 15 bp, Homo sapiens
tgttttacagatgag

SEQ ID NO: 1007340 - DNA, 15 bp, Homo sapiens
atgttttacagatga

SEQ ID NO: 1007341 - DNA, 15 bp, Homo sapiens
aatgttttacagatg

SEQ ID NO: 1007342 - DNA, 15 bp, Homo sapiens
aaatgttttacagat

SEQ ID NO: 1007343 - DNA, 15 bp, Homo sapiens
aaaatgttttacaga

SEQ ID NO: 1007344 - DNA, 15 bp, Homo sapiens
caaaatgttttacag

SEQ ID NO: 1007345 - DNA, 15 bp, Homo sapiens
tcaaaatgttttaca

SEQ ID NO: 1007346 - DNA, 15 bp, Homo sapiens
ttcaaaatgttttac

SEQ ID NO: 1007347 - DNA, 15 bp, Homo sapiens
gttcaaaatgtttta

SEQ ID NO: 1007348 - DNA, 15 bp, Homo sapiens
agttcaaaatgtttt

SEQ ID NO: 1007349 - DNA, 15 bp, Homo sapiens
gagttcaaaatgttt

SEQ ID NO: 1007350 - DNA, 15 bp, Homo sapiens
cgagttcaaaatgtt

SEQ ID NO: 1007351 - DNA, 15 bp, Homo sapiens
acgagttcaaaatgt

SEQ ID NO: 1007352 - DNA, 15 bp, Homo sapiens
cacgagttcaaaatg

SEQ ID NO: 1007353 - DNA, 15 bp, Homo sapiens
acacgagttcaaaat

SEQ ID NO: 1007354 - DNA, 15 bp, Homo sapiens
cacacgagttcaaaa

SEQ ID NO: 1007355 - DNA, 15 bp, Homo sapiens
acacacgagttcaaa

SEQ ID NO: 1007356 - DNA, 15 bp, Homo sapiens
aacacacgagttcaa

SEQ ID NO: 1007357 - DNA, 15 bp, Homo sapiens
aaacacacgagttca

SEQ ID NO: 1007358 - DNA, 15 bp, Homo sapiens
caaacacacgagttc

SEQ ID NO: 1007359 - DNA, 15 bp, Homo sapiens
acaaacacacgagtt

SEQ ID NO: 1007360 - DNA, 15 bp, Homo sapiens
cacaaacacacgagt

SEQ ID NO: 1007361 - DNA, 15 bp, Homo sapiens
gcacaaacacacgag

SEQ ID NO: 1007362 - DNA, 15 bp, Homo sapiens
tgcacaaacacacga

SEQ ID NO: 1007363 - DNA, 15 bp, Homo sapiens
atgcacaaacacacg

SEQ ID NO: 1007364 - DNA, 15 bp, Homo sapiens
catgcacaaacacac

SEQ ID NO: 1007365 - DNA, 15 bp, Homo sapiens
gcatgcacaaacaca

SEQ ID NO: 1007366 - DNA, 15 bp, Homo sapiens
tgcatgcacaaacac

SEQ ID NO: 1007367 - DNA, 15 bp, Homo sapiens
gtgcatgcacaaaca

SEQ ID NO: 1007368 - DNA, 15 bp, Homo sapiens
tgtgcatgcacaaac

SEQ ID NO: 1007369 - DNA, 15 bp, Homo sapiens
atgtgcatgcacaaa

SEQ ID NO: 1007370 - DNA, 15 bp, Homo sapiens
aatgtgcatgcacaa

SEQ ID NO: 1007371 - DNA, 15 bp, Homo sapiens
aaatgtgcatgcaca

SEQ ID NO: 1007372 - DNA, 15 bp, Homo sapiens
caaatgtgcatgcac

SEQ ID NO: 1007373 - DNA, 15 bp, Homo sapiens
acaaatgtgcatgca

SEQ ID NO: 1007374 - DNA, 15 bp, Homo sapiens
cacaaatgtgcatgc

SEQ ID NO: 1007375 - DNA, 15 bp, Homo sapiens
acacaaatgtgcatg

SEQ ID NO: 1007376 - DNA, 15 bp, Homo sapiens
cacacaaatgtgcat

SEQ ID NO: 1007377 - DNA, 15 bp, Homo sapiens
acacacaaatgtgca

SEQ ID NO: 1007378 - DNA, 15 bp, Homo sapiens
tacacacaaatgtgc

SEQ ID NO: 1007379 - DNA, 15 bp, Homo sapiens
ttacacacaaatgtg

SEQ ID NO: 1007380 - DNA, 15 bp, Homo sapiens
attacacacaaatgt

SEQ ID NO: 1007381 - DNA, 15 bp, Homo sapiens
aattacacacaaatg

SEQ ID NO: 1007382 - DNA, 15 bp, Homo sapiens
taattacacacaaat

SEQ ID NO: 1007383 - DNA, 15 bp, Homo sapiens
ataattacacacaaa

SEQ ID NO: 1007384 - DNA, 15 bp, Homo sapiens
tataattacacacaa

SEQ ID NO: 1007385 - DNA, 15 bp, Homo sapiens
ttataattacacaca

SEQ ID NO: 1007386 - DNA, 15 bp, Homo sapiens
tttataattacacac

SEQ ID NO: 1007387 - DNA, 15 bp, Homo sapiens
ttttataattacaca

SEQ ID NO: 1007388 - DNA, 15 bp, Homo sapiens
tttttataattacac

SEQ ID NO: 1007389 - DNA, 15 bp, Homo sapiens
atttttataattaca

SEQ ID NO: 1007390 - DNA, 15 bp, Homo sapiens
aatttttataattac

SEQ ID NO: 1007391 - DNA, 15 bp, Homo sapiens
aaatttttataatta

SEQ ID NO: 1007392 - DNA, 15 bp, Homo sapiens
aaaatttttataatt

SEQ ID NO: 1007393 - DNA, 15 bp, Homo sapiens
taaaatttttataat

SEQ ID NO: 1007394 - DNA, 15 bp, Homo sapiens
gtaaaatttttataa

SEQ ID NO: 1007395 - DNA, 15 bp, Homo sapiens
agtaaaatttttata

SEQ ID NO: 1007396 - DNA, 15 bp, Homo sapiens
aagtaaaatttttat

SEQ ID NO: 1007397 - DNA, 15 bp, Homo sapiens
aaagtaaaattttta

SEQ ID NO: 1007398 - DNA, 15 bp, Homo sapiens
gaaagtaaaattttt

SEQ ID NO: 1007399 - DNA, 15 bp, Homo sapiens
agaaagtaaaatttt

SEQ ID NO: 1007400 - DNA, 15 bp, Homo sapiens
cagaaagtaaaattt

SEQ ID NO: 1007401 - DNA, 15 bp, Homo sapiens
acagaaagtaaaatt

SEQ ID NO: 1007402 - DNA, 15 bp, Homo sapiens
aacagaaagtaaaat

SEQ ID NO: 1007403 - DNA, 15 bp, Homo sapiens
taacagaaagtaaaa

SEQ ID NO: 1007404 - DNA, 15 bp, Homo sapiens
ttaacagaaagtaaa

SEQ ID NO: 1007405 - DNA, 15 bp, Homo sapiens
attaacagaaagtaa

SEQ ID NO: 1007406 - DNA, 15 bp, Homo sapiens
tattaacagaaagta

SEQ ID NO: 1007407 - DNA, 15 bp, Homo sapiens
atattaacagaaagt

SEQ ID NO: 1007408 - DNA, 15 bp, Homo sapiens
tatattaacagaaag

SEQ ID NO: 1007409 - DNA, 15 bp, Homo sapiens
atatattaacagaaa

SEQ ID NO: 1007410 - DNA, 15 bp, Homo sapiens
tatatattaacagaa

SEQ ID NO: 1007411 - DNA, 15 bp, Homo sapiens
ttatatattaacaga

SEQ ID NO: 1007412 - DNA, 15 bp, Homo sapiens
cttatatattaacag

SEQ ID NO: 1007413 - DNA, 15 bp, Homo sapiens
acttatatattaaca

SEQ ID NO: 1007414 - DNA, 15 bp, Homo sapiens
aacttatatattaac

SEQ ID NO: 1007415 - DNA, 15 bp, Homo sapiens
caacttatatattaa

SEQ ID NO: 1007416 - DNA, 15 bp, Homo sapiens
acaacttatatatta

SEQ ID NO: 1007417 - DNA, 15 bp, Homo sapiens
tacaacttatatatt

SEQ ID NO: 1007418 - DNA, 15 bp, Homo sapiens
atacaacttatatat

SEQ ID NO: 1007419 - DNA, 15 bp, Homo sapiens
gatacaacttatata

SEQ ID NO: 1007420 - DNA, 15 bp, Homo sapiens
tgatacaacttatat

SEQ ID NO: 1007421 - DNA, 15 bp, Homo sapiens
atgatacaacttata

SEQ ID NO: 1007422 - DNA, 15 bp, Homo sapiens
tatgatacaacttat

SEQ ID NO: 1007423 - DNA, 15 bp, Homo sapiens
ttatgatacaactta

SEQ ID NO: 1007424 - DNA, 15 bp, Homo sapiens
cttatgatacaactt

SEQ ID NO: 1007425 - DNA, 15 bp, Homo sapiens
tcttatgatacaact

SEQ ID NO: 1007426 - DNA, 15 bp, Homo sapiens
ttcttatgatacaac

SEQ ID NO: 1007427 - DNA, 15 bp, Homo sapiens
tttcttatgatacaa

SEQ ID NO: 1007428 - DNA, 15 bp, Homo sapiens
gtttcttatgataca

SEQ ID NO: 1007429 - DNA, 15 bp, Homo sapiens
agtttcttatgatac

SEQ ID NO: 1007430 - DNA, 15 bp, Homo sapiens
cagtttcttatgata

SEQ ID NO: 1007431 - DNA, 15 bp, Homo sapiens
gcagtttcttatgat

SEQ ID NO: 1007432 - DNA, 15 bp, Homo sapiens
ggcagtttcttatga

SEQ ID NO: 1007433 - DNA, 15 bp, Homo sapiens
cggcagtttcttatg

SEQ ID NO: 1007434 - DNA, 15 bp, Homo sapiens
acggcagtttcttat

SEQ ID NO: 1007435 - DNA, 15 bp, Homo sapiens
aacggcagtttctta

SEQ ID NO: 1007436 - DNA, 15 bp, Homo sapiens
aaacggcagtttctt

SEQ ID NO: 1007437 - DNA, 15 bp, Homo sapiens
aaaacggcagtttct

SEQ ID NO: 1007438 - DNA, 15 bp, Homo sapiens
aaaaacggcagtttc

SEQ ID NO: 1007439 - DNA, 15 bp, Homo sapiens
caaaaacggcagttt

SEQ ID NO: 1007440 - DNA, 15 bp, Homo sapiens
tcaaaaacggcagtt

SEQ ID NO: 1007441 - DNA, 15 bp, Homo sapiens
ttcaaaaacggcagt

SEQ ID NO: 1007442 - DNA, 15 bp, Homo sapiens
cttcaaaaacggcag

SEQ ID NO: 1007443 - DNA, 15 bp, Homo sapiens
tcttcaaaaacggca

SEQ ID NO: 1007444 - DNA, 15 bp, Homo sapiens
ctcttcaaaaacggc

SEQ ID NO: 1007445 - DNA, 15 bp, Homo sapiens
gctcttcaaaaacgg

SEQ ID NO: 1007446 - DNA, 15 bp, Homo sapiens
tgctcttcaaaaacg

SEQ ID NO: 1007447 - DNA, 15 bp, Homo sapiens
ttgctcttcaaaaac

SEQ ID NO: 1007448 - DNA, 15 bp, Homo sapiens
tttgctcttcaaaaa

SEQ ID NO: 1007449 - DNA, 15 bp, Homo sapiens
ttttgctcttcaaaa

SEQ ID NO: 1007450 - DNA, 15 bp, Homo sapiens
tttttgctcttcaaa

SEQ ID NO: 1007451 - DNA, 15 bp, Homo sapiens
ttttttgctcttcaa

SEQ ID NO: 1007452 - DNA, 15 bp, Homo sapiens
tttttttgctcttca

SEQ ID NO: 1007453 - DNA, 15 bp, Homo sapiens
ctttttttgctcttc

SEQ ID NO: 1007454 - DNA, 15 bp, Homo sapiens
cctttttttgctctt

SEQ ID NO: 1007455 - DNA, 15 bp, Homo sapiens
acctttttttgctct

SEQ ID NO: 1007456 - DNA, 15 bp, Homo sapiens
aacctttttttgctc

SEQ ID NO: 1007457 - DNA, 15 bp, Homo sapiens
caacctttttttgct

SEQ ID NO: 1007458 - DNA, 15 bp, Homo sapiens
tcaacctttttttgc

SEQ ID NO: 1007459 - DNA, 15 bp, Homo sapiens
ttcaacctttttttg

SEQ ID NO: 1007460 - DNA, 15 bp, Homo sapiens
attcaaccttttttt

SEQ ID NO: 1007461 - DNA, 15 bp, Homo sapiens
cattcaacctttttt

SEQ ID NO: 1007462 - DNA, 15 bp, Homo sapiens
acattcaaccttttt

SEQ ID NO: 1007463 - DNA, 15 bp, Homo sapiens
aacattcaacctttt

SEQ ID NO: 1007464 - DNA, 15 bp, Homo sapiens
taacattcaaccttt

SEQ ID NO: 1007465 - DNA, 15 bp, Homo sapiens
gtaacattcaacctt

SEQ ID NO: 1007466 - DNA, 15 bp, Homo sapiens
ggtaacattcaacct

SEQ ID NO: 1007467 - DNA, 15 bp, Homo sapiens
tggtaacattcaacc

SEQ ID NO: 1007468 - DNA, 15 bp, Homo sapiens
ctggtaacattcaac

SEQ ID NO: 1007469 - DNA, 15 bp, Homo sapiens
actggtaacattcaa

SEQ ID NO: 1007470 - DNA, 15 bp, Homo sapiens
aactggtaacattca

SEQ ID NO: 1007471 - DNA, 15 bp, Homo sapiens
taactggtaacattc

SEQ ID NO: 1007472 - DNA, 15 bp, Homo sapiens
gtaactggtaacatt

SEQ ID NO: 1007473 - DNA, 15 bp, Homo sapiens
tgtaactggtaacat

SEQ ID NO: 1007474 - DNA, 15 bp, Homo sapiens
atgtaactggtaaca

SEQ ID NO: 1007475 - DNA, 15 bp, Homo sapiens
gatgtaactggtaac

SEQ ID NO: 1007476 - DNA, 15 bp, Homo sapiens
agatgtaactggtaa

SEQ ID NO: 1007477 - DNA, 15 bp, Homo sapiens
cagatgtaactggta

SEQ ID NO: 1007478 - DNA, 15 bp, Homo sapiens
ccagatgtaactggt

SEQ ID NO: 1007479 - DNA, 15 bp, Homo sapiens
accagatgtaactgg

SEQ ID NO: 1007480 - DNA, 15 bp, Homo sapiens
aaccagatgtaactg

SEQ ID NO: 1007481 - DNA, 15 bp, Homo sapiens
gaaccagatgtaact

SEQ ID NO: 1007482 - DNA, 15 bp, Homo sapiens
tgaaccagatgtaac

SEQ ID NO: 1007483 - DNA, 15 bp, Homo sapiens
ttgaaccagatgtaa

SEQ ID NO: 1007484 - DNA, 15 bp, Homo sapiens
gttgaaccagatgta

SEQ ID NO: 1007485 - DNA, 15 bp, Homo sapiens
ggttgaaccagatgt

SEQ ID NO: 1007486 - DNA, 15 bp, Homo sapiens
aggttgaaccagatg

SEQ ID NO: 1007487 - DNA, 15 bp, Homo sapiens
taggttgaaccagat

SEQ ID NO: 1007488 - DNA, 15 bp, Homo sapiens
ttaggttgaaccaga

SEQ ID NO: 1007489 - DNA, 15 bp, Homo sapiens
attaggttgaaccag

SEQ ID NO: 1007490 - DNA, 15 bp, Homo sapiens
tattaggttgaacca

SEQ ID NO: 1007491 - DNA, 15 bp, Homo sapiens
ctattaggttgaacc

SEQ ID NO: 1007492 - DNA, 15 bp, Homo sapiens
tctattaggttgaac

SEQ ID NO: 1007493 - DNA, 15 bp, Homo sapiens
gtctattaggttgaa

SEQ ID NO: 1007494 - DNA, 15 bp, Homo sapiens
tgtctattaggttga

SEQ ID NO: 1007495 - DNA, 15 bp, Homo sapiens
atgtctattaggttg

SEQ ID NO: 1007496 - DNA, 15 bp, Homo sapiens
aatgtctattaggtt

SEQ ID NO: 1007497 - DNA, 15 bp, Homo sapiens
aaatgtctattaggt

SEQ ID NO: 1007498 - DNA, 15 bp, Homo sapiens
caaatgtctattagg

SEQ ID NO: 1007499 - DNA, 15 bp, Homo sapiens
acaaatgtctattag

SEQ ID NO: 1007500 - DNA, 15 bp, Homo sapiens
tacaaatgtctatta

SEQ ID NO: 1007501 - DNA, 15 bp, Homo sapiens
gtacaaatgtctatt

SEQ ID NO: 1007502 - DNA, 15 bp, Homo sapiens
tgtacaaatgtctat

SEQ ID NO: 1007503 - DNA, 15 bp, Homo sapiens
ttgtacaaatgtcta

SEQ ID NO: 1007504 - DNA, 15 bp, Homo sapiens
tttgtacaaatgtct

SEQ ID NO: 1007505 - DNA, 15 bp, Homo sapiens
ttttgtacaaatgtc

SEQ ID NO: 1007506 - DNA, 15 bp, Homo sapiens
tttttgtacaaatgt

SEQ ID NO: 1007507 - DNA, 15 bp, Homo sapiens
gtttttgtacaaatg

SEQ ID NO: 1007508 - DNA, 15 bp, Homo sapiens
tgtttttgtacaaat

SEQ ID NO: 1007509 - DNA, 15 bp, Homo sapiens
ctgtttttgtacaaa

SEQ ID NO: 1007510 - DNA, 15 bp, Homo sapiens
tctgtttttgtacaa

SEQ ID NO: 1007511 - DNA, 15 bp, Homo sapiens
gtctgtttttgtaca

SEQ ID NO: 1007512 - DNA, 15 bp, Homo sapiens
tgtctgtttttgtac

SEQ ID NO: 1007513 - DNA, 15 bp, Homo sapiens
atgtctgtttttgta

SEQ ID NO: 1007514 - DNA, 15 bp, Homo sapiens
aatgtctgtttttgt

SEQ ID NO: 1007515 - DNA, 15 bp, Homo sapiens
aaatgtctgtttttg

SEQ ID NO: 1007516 - DNA, 15 bp, Homo sapiens
aaaatgtctgttttt

SEQ ID NO: 1007517 - DNA, 15 bp, Homo sapiens
taaaatgtctgtttt

SEQ ID NO: 1007518 - DNA, 15 bp, Homo sapiens
ttaaaatgtctgttt

SEQ ID NO: 1007519 - DNA, 15 bp, Homo sapiens
cttaaaatgtctgtt

SEQ ID NO: 1007520 - DNA, 15 bp, Homo sapiens
tcttaaaatgtctgt

SEQ ID NO: 1007521 - DNA, 15 bp, Homo sapiens
ctcttaaaatgtctg

SEQ ID NO: 1007522 - DNA, 15 bp, Homo sapiens
cctcttaaaatgtct

SEQ ID NO: 1007523 - DNA, 15 bp, Homo sapiens
acctcttaaaatgtc

SEQ ID NO: 1007524 - DNA, 15 bp, Homo sapiens
aacctcttaaaatgt

SEQ ID NO: 1007525 - DNA, 15 bp, Homo sapiens
caacctcttaaaatg

SEQ ID NO: 1007526 - DNA, 15 bp, Homo sapiens
tcaacctcttaaaat

SEQ ID NO: 1007527 - DNA, 15 bp, Homo sapiens
ttcaacctcttaaaa

SEQ ID NO: 1007528 - DNA, 15 bp, Homo sapiens
tttcaacctcttaaa

SEQ ID NO: 1007529 - DNA, 15 bp, Homo sapiens
atttcaacctcttaa

SEQ ID NO: 1007530 - DNA, 15 bp, Homo sapiens
tatttcaacctctta

SEQ ID NO: 1007531 - DNA, 15 bp, Homo sapiens
ttatttcaacctctt

SEQ ID NO: 1007532 - DNA, 15 bp, Homo sapiens
tttatttcaacctct

SEQ ID NO: 1007533 - DNA, 15 bp, Homo sapiens
ttttatttcaacctc

SEQ ID NO: 1007534 - DNA, 15 bp, Homo sapiens
tttttatttcaacct

SEQ ID NO: 1007535 - DNA, 15 bp, Homo sapiens
atttttatttcaacc

SEQ ID NO: 1007536 - DNA, 15 bp, Homo sapiens
aatttttatttcaac

SEQ ID NO: 1007537 - DNA, 15 bp, Homo sapiens
aaatttttatttcaa

SEQ ID NO: 1007538 - DNA, 15 bp, Homo sapiens
taaatttttatttca

SEQ ID NO: 1007539 - DNA, 15 bp, Homo sapiens
ttaaatttttatttc

SEQ ID NO: 1007540 - DNA, 15 bp, Homo sapiens
attaaatttttattt

SEQ ID NO: 1007541 - DNA, 15 bp, Homo sapiens
tattaaatttttatt

SEQ ID NO: 1007542 - DNA, 15 bp, Homo sapiens
ttattaaatttttat

SEQ ID NO: 1007543 - DNA, 15 bp, Homo sapiens
tttattaaattttta

SEQ ID NO: 1007544 - DNA, 15 bp, Homo sapiens
gtttattaaattttt

SEQ ID NO: 1007545 - DNA, 15 bp, Homo sapiens
tgtttattaaatttt

SEQ ID NO: 1007546 - DNA, 15 bp, Homo sapiens
ttgtttattaaattt

SEQ ID NO: 1007547 - DNA, 15 bp, Homo sapiens
attgtttattaaatt

SEQ ID NO: 1007548 - DNA, 15 bp, Homo sapiens
tattgtttattaaat

SEQ ID NO: 1007549 - DNA, 15 bp, Homo sapiens
atattgtttattaaa

SEQ ID NO: 1007550 - DNA, 15 bp, Homo sapiens
aatattgtttattaa

SEQ ID NO: 1007551 - DNA, 15 bp, Homo sapiens
aaatattgtttatta

SEQ ID NO: 1007552 - DNA, 15 bp, Homo sapiens
aaaatattgtttatt

SEQ ID NO: 1007553 - DNA, 15 bp, Homo sapiens
gaaaatattgtttat

SEQ ID NO: 1007554 - DNA, 15 bp, Homo sapiens
tgaaaatattgttta

SEQ ID NO: 1007555 - DNA, 15 bp, Homo sapiens
ctgaaaatattgttt

SEQ ID NO: 1007556 - DNA, 15 bp, Homo sapiens
actgaaaatattgtt

SEQ ID NO: 1007557 - DNA, 15 bp, Homo sapiens
aactgaaaatattgt

SEQ ID NO: 1007558 - DNA, 15 bp, Homo sapiens
aaactgaaaatattg

SEQ ID NO: 1007559 - DNA, 15 bp, Homo sapiens
aaaactgaaaatatt

SEQ ID NO: 1007560 - DNA, 15 bp, Homo sapiens
aaaaactgaaaatat

SEQ ID NO: 1007561 - DNA, 15 bp, Homo sapiens
taaaaactgaaaata

SEQ ID NO: 1007562 - DNA, 15 bp, Homo sapiens
gtaaaaactgaaaat

SEQ ID NO: 1007563 - DNA, 15 bp, Homo sapiens
agtaaaaactgaaaa

SEQ ID NO: 1007564 - DNA, 15 bp, Homo sapiens
tagtaaaaactgaaa

SEQ ID NO: 1007565 - DNA, 15 bp, Homo sapiens
ttagtaaaaactgaa

SEQ ID NO: 1007566 - DNA, 15 bp, Homo sapiens
attagtaaaaactga

SEQ ID NO: 1007567 - DNA, 15 bp, Homo sapiens
aattagtaaaaactg

SEQ ID NO: 1007568 - DNA, 15 bp, Homo sapiens
caattagtaaaaact

SEQ ID NO: 1007569 - DNA, 15 bp, Homo sapiens
acaattagtaaaaac

SEQ ID NO: 1007570 - DNA, 15 bp, Homo sapiens
cacaattagtaaaaa

SEQ ID NO: 1007571 - DNA, 15 bp, Homo sapiens
tcacaattagtaaaa

SEQ ID NO: 1007572 - DNA, 15 bp, Homo sapiens
atcacaattagtaaa

SEQ ID NO: 1007573 - DNA, 15 bp, Homo sapiens
catcacaattagtaa

SEQ ID NO: 1007574 - DNA, 15 bp, Homo sapiens
gcatcacaattagta

SEQ ID NO: 1007575 - DNA, 15 bp, Homo sapiens
agcatcacaattagt

SEQ ID NO: 1007576 - DNA, 15 bp, Homo sapiens
aagcatcacaattag

SEQ ID NO: 1007577 - DNA, 15 bp, Homo sapiens
gaagcatcacaatta

SEQ ID NO: 1007578 - DNA, 15 bp, Homo sapiens
tgaagcatcacaatt

SEQ ID NO: 1007579 - DNA, 15 bp, Homo sapiens
gtgaagcatcacaat

SEQ ID NO: 1007580 - DNA, 15 bp, Homo sapiens
agtgaagcatcacaa

SEQ ID NO: 1007581 - DNA, 15 bp, Homo sapiens
tagtgaagcatcaca

SEQ ID NO: 1007582 - DNA, 15 bp, Homo sapiens
atagtgaagcatcac

SEQ ID NO: 1007583 - DNA, 15 bp, Homo sapiens
gatagtgaagcatca

SEQ ID NO: 1007584 - DNA, 15 bp, Homo sapiens
tgatagtgaagcatc

SEQ ID NO: 1007585 - DNA, 15 bp, Homo sapiens
atgatagtgaagcat

SEQ ID NO: 1007586 - DNA, 15 bp, Homo sapiens
aatgatagtgaagca

SEQ ID NO: 1007587 - DNA, 15 bp, Homo sapiens
taatgatagtgaagc

SEQ ID NO: 1007588 - DNA, 15 bp, Homo sapiens
ctaatgatagtgaag

SEQ ID NO: 1007589 - DNA, 15 bp, Homo sapiens
gctaatgatagtgaa

SEQ ID NO: 1007590 - DNA, 15 bp, Homo sapiens
agctaatgatagtga

SEQ ID NO: 1007591 - DNA, 15 bp, Homo sapiens
tagctaatgatagtg

SEQ ID NO: 1007592 - DNA, 15 bp, Homo sapiens
ttagctaatgatagt

SEQ ID NO: 1007593 - DNA, 15 bp, Homo sapiens
attagctaatgatag

SEQ ID NO: 1007594 - DNA, 15 bp, Homo sapiens
tattagctaatgata

SEQ ID NO: 1007595 - DNA, 15 bp, Homo sapiens
atattagctaatgat

SEQ ID NO: 1007596 - DNA, 15 bp, Homo sapiens
catattagctaatga

SEQ ID NO: 1007597 - DNA, 15 bp, Homo sapiens
acatattagctaatg

SEQ ID NO: 1007598 - DNA, 15 bp, Homo sapiens
gacatattagctaat

SEQ ID NO: 1007599 - DNA, 15 bp, Homo sapiens
tgacatattagctaa

SEQ ID NO: 1007600 - DNA, 15 bp, Homo sapiens
ttgacatattagcta

SEQ ID NO: 1007601 - DNA, 15 bp, Homo sapiens
cttgacatattagct

SEQ ID NO: 1007602 - DNA, 15 bp, Homo sapiens
ccttgacatattagc

SEQ ID NO: 1007603 - DNA, 15 bp, Homo sapiens
gccttgacatattag

SEQ ID NO: 1007604 - DNA, 15 bp, Homo sapiens
tgccttgacatatta

SEQ ID NO: 1007605 - DNA, 15 bp, Homo sapiens
atgccttgacatatt

SEQ ID NO: 1007606 - DNA, 15 bp, Homo sapiens
tatgccttgacatat

SEQ ID NO: 1007607 - DNA, 15 bp, Homo sapiens
ttatgccttgacata

SEQ ID NO: 1007608 - DNA, 15 bp, Homo sapiens
attatgccttgacat

SEQ ID NO: 1007609 - DNA, 15 bp, Homo sapiens
tattatgccttgaca

SEQ ID NO: 1007610 - DNA, 15 bp, Homo sapiens
atattatgccttgac

SEQ ID NO: 1007611 - DNA, 15 bp, Homo sapiens
tatattatgccttga

SEQ ID NO: 1007612 - DNA, 15 bp, Homo sapiens
gtatattatgccttg

SEQ ID NO: 1007613 - DNA, 15 bp, Homo sapiens
ggtatattatgcctt

SEQ ID NO: 1007614 - DNA, 15 bp, Homo sapiens
aggtatattatgcct

SEQ ID NO: 1007615 - DNA, 15 bp, Homo sapiens
aaggtatattatgcc

SEQ ID NO: 1007616 - DNA, 15 bp, Homo sapiens
taaggtatattatgc

SEQ ID NO: 1007617 - DNA, 15 bp, Homo sapiens
ctaaggtatattatg

SEQ ID NO: 1007618 - DNA, 15 bp, Homo sapiens
cctaaggtatattat

SEQ ID NO: 1007619 - DNA, 15 bp, Homo sapiens
ccctaaggtatatta

SEQ ID NO: 1007620 - DNA, 15 bp, Homo sapiens
accctaaggtatatt

SEQ ID NO: 1007621 - DNA, 15 bp, Homo sapiens
caccctaaggtatat

SEQ ID NO: 1007622 - DNA, 15 bp, Homo sapiens
tcaccctaaggtata

SEQ ID NO: 1007623 - DNA, 15 bp, Homo sapiens
ttcaccctaaggtat

SEQ ID NO: 1007624 - DNA, 15 bp, Homo sapiens
gttcaccctaaggta

SEQ ID NO: 1007625 - DNA, 15 bp, Homo sapiens
agttcaccctaaggt

SEQ ID NO: 1007626 - DNA, 15 bp, Homo sapiens
aagttcaccctaagg

SEQ ID NO: 1007627 - DNA, 15 bp, Homo sapiens
aaagttcaccctaag

SEQ ID NO: 1007628 - DNA, 15 bp, Homo sapiens
taaagttcaccctaa

SEQ ID NO: 1007629 - DNA, 15 bp, Homo sapiens
ataaagttcacccta

SEQ ID NO: 1007630 - DNA, 15 bp, Homo sapiens
gataaagttcaccct

SEQ ID NO: 1007631 - DNA, 15 bp, Homo sapiens
tgataaagttcaccc

SEQ ID NO: 1007632 - DNA, 15 bp, Homo sapiens
atgataaagttcacc

SEQ ID NO: 1007633 - DNA, 15 bp, Homo sapiens
aatgataaagttcac

SEQ ID NO: 1007634 - DNA, 15 bp, Homo sapiens
taatgataaagttca

SEQ ID NO: 1007635 - DNA, 15 bp, Homo sapiens
ttaatgataaagttc

SEQ ID NO: 1007636 - DNA, 15 bp, Homo sapiens
gttaatgataaagtt

SEQ ID NO: 1007637 - DNA, 15 bp, Homo sapiens
tgttaatgataaagt

SEQ ID NO: 1007638 - DNA, 15 bp, Homo sapiens
ttgttaatgataaag

SEQ ID NO: 1007639 - DNA, 15 bp, Homo sapiens
tttgttaatgataaa

SEQ ID NO: 1007640 - DNA, 15 bp, Homo sapiens
ctttgttaatgataa

SEQ ID NO: 1007641 - DNA, 15 bp, Homo sapiens
cctttgttaatgata

SEQ ID NO: 1007642 - DNA, 15 bp, Homo sapiens
acctttgttaatgat

SEQ ID NO: 1007643 - DNA, 15 bp, Homo sapiens
cacctttgttaatga

SEQ ID NO: 1007644 - DNA, 15 bp, Homo sapiens
ccacctttgttaatg

SEQ ID NO: 1007645 - DNA, 15 bp, Homo sapiens
tccacctttgttaat

SEQ ID NO: 1007646 - DNA, 15 bp, Homo sapiens
atccacctttgttaa

SEQ ID NO: 1007647 - DNA, 15 bp, Homo sapiens
catccacctttgtta

SEQ ID NO: 1007648 - DNA, 15 bp, Homo sapiens
ccatccacctttgtt

SEQ ID NO: 1007649 - DNA, 15 bp, Homo sapiens
accatccacctttgt

SEQ ID NO: 1007650 - DNA, 15 bp, Homo sapiens
caccatccacctttg

SEQ ID NO: 1007651 - DNA, 15 bp, Homo sapiens
acaccatccaccttt

SEQ ID NO: 1007652 - DNA, 15 bp, Homo sapiens
gacaccatccacctt

SEQ ID NO: 1007653 - DNA, 15 bp, Homo sapiens
tgacaccatccacct

SEQ ID NO: 1007654 - DNA, 15 bp, Homo sapiens
ttgacaccatccacc

SEQ ID NO: 1007655 - DNA, 15 bp, Homo sapiens
attgacaccatccac

SEQ ID NO: 1007656 - DNA, 15 bp, Homo sapiens
tattgacaccatcca

SEQ ID NO: 1007657 - DNA, 15 bp, Homo sapiens
ttattgacaccatcc

SEQ ID NO: 1007658 - DNA, 15 bp, Homo sapiens
attattgacaccatc

SEQ ID NO: 1007659 - DNA, 15 bp, Homo sapiens
gattattgacaccat

SEQ ID NO: 1007660 - DNA, 15 bp, Homo sapiens
agattattgacacca

SEQ ID NO: 1007661 - DNA, 15 bp, Homo sapiens
aagattattgacacc

SEQ ID NO: 1007662 - DNA, 15 bp, Homo sapiens
caagattattgacac

SEQ ID NO: 1007663 - DNA, 15 bp, Homo sapiens
tcaagattattgaca

SEQ ID NO: 1007664 - DNA, 15 bp, Homo sapiens
ctcaagattattgac

SEQ ID NO: 1007665 - DNA, 15 bp, Homo sapiens
cctcaagattattga

SEQ ID NO: 1007666 - DNA, 15 bp, Homo sapiens
acctcaagattattg

SEQ ID NO: 1007667 - DNA, 15 bp, Homo sapiens
aacctcaagattatt

SEQ ID NO: 1007668 - DNA, 15 bp, Homo sapiens
aaacctcaagattat

SEQ ID NO: 1007669 - DNA, 15 bp, Homo sapiens
caaacctcaagatta

SEQ ID NO: 1007670 - DNA, 15 bp, Homo sapiens
acaaacctcaagatt

SEQ ID NO: 1007671 - DNA, 15 bp, Homo sapiens
cacaaacctcaagat

SEQ ID NO: 1007672 - DNA, 15 bp, Homo sapiens
acacaaacctcaaga

SEQ ID NO: 1007673 - DNA, 15 bp, Homo sapiens
aacacaaacctcaag

SEQ ID NO: 1007674 - DNA, 15 bp, Homo sapiens
aaacacaaacctcaa

SEQ ID NO: 1007675 - DNA, 15 bp, Homo sapiens
aaaacacaaacctca

SEQ ID NO: 1007676 - DNA, 15 bp, Homo sapiens
aaaaacacaaacctc

SEQ ID NO: 1007677 - DNA, 15 bp, Homo sapiens
aaaaaacacaaacct

SEQ ID NO: 1007678 - DNA, 15 bp, Homo sapiens
aaaaaaacacaaacc

SEQ ID NO: 1007679 - DNA, 15 bp, Homo sapiens
taaaaaaacacaaac

SEQ ID NO: 1007680 - DNA, 15 bp, Homo sapiens
ataaaaaaacacaaa

SEQ ID NO: 1007681 - DNA, 15 bp, Homo sapiens
tataaaaaaacacaa

SEQ ID NO: 1007682 - DNA, 15 bp, Homo sapiens
atataaaaaaacaca

SEQ ID NO: 1007683 - DNA, 15 bp, Homo sapiens
tatataaaaaaacac

SEQ ID NO: 1007684 - DNA, 15 bp, Homo sapiens
ttatataaaaaaaca

SEQ ID NO: 1007685 - DNA, 15 bp, Homo sapiens
gttatataaaaaaac

SEQ ID NO: 1007686 - DNA, 15 bp, Homo sapiens
tgttatataaaaaaa

SEQ ID NO: 1007687 - DNA, 15 bp, Homo sapiens
gtgttatataaaaaa

SEQ ID NO: 1007688 - DNA, 15 bp, Homo sapiens
agtgttatataaaaa

SEQ ID NO: 1007689 - DNA, 15 bp, Homo sapiens
cagtgttatataaaa

SEQ ID NO: 1007690 - DNA, 15 bp, Homo sapiens
gcagtgttatataaa

SEQ ID NO: 1007691 - DNA, 15 bp, Homo sapiens
cgcagtgttatataa

SEQ ID NO: 1007692 - DNA, 15 bp, Homo sapiens
tcgcagtgttatata

SEQ ID NO: 1007693 - DNA, 15 bp, Homo sapiens
ctcgcagtgttatat

SEQ ID NO: 1007694 - DNA, 15 bp, Homo sapiens
cctcgcagtgttata

SEQ ID NO: 1007695 - DNA, 15 bp, Homo sapiens
acctcgcagtgttat

SEQ ID NO: 1007696 - DNA, 15 bp, Homo sapiens
gacctcgcagtgtta

SEQ ID NO: 1007697 - DNA, 15 bp, Homo sapiens
agacctcgcagtgtt

SEQ ID NO: 1007698 - DNA, 15 bp, Homo sapiens
tagacctcgcagtgt

SEQ ID NO: 1007699 - DNA, 15 bp, Homo sapiens
ttagacctcgcagtg

SEQ ID NO: 1007700 - DNA, 15 bp, Homo sapiens
attagacctcgcagt

SEQ ID NO: 1007701 - DNA, 15 bp, Homo sapiens
aattagacctcgcag

SEQ ID NO: 1007702 - DNA, 15 bp, Homo sapiens
taattagacctcgca

SEQ ID NO: 1007703 - DNA, 15 bp, Homo sapiens
ttaattagacctcgc

SEQ ID NO: 1007704 - DNA, 15 bp, Homo sapiens
cttaattagacctcg

SEQ ID NO: 1007705 - DNA, 15 bp, Homo sapiens
acttaattagacctc

SEQ ID NO: 1007706 - DNA, 15 bp, Homo sapiens
tacttaattagacct

SEQ ID NO: 1007707 - DNA, 15 bp, Homo sapiens
gtacttaattagacc

SEQ ID NO: 1007708 - DNA, 15 bp, Homo sapiens
agtacttaattagac

SEQ ID NO: 1007709 - DNA, 15 bp, Homo sapiens
aagtacttaattaga

SEQ ID NO: 1007710 - DNA, 15 bp, Homo sapiens
taagtacttaattag

SEQ ID NO: 1007711 - DNA, 15 bp, Homo sapiens
gtaagtacttaatta

SEQ ID NO: 1007712 - DNA, 15 bp, Homo sapiens
agtaagtacttaatt

SEQ ID NO: 1007713 - DNA, 15 bp, Homo sapiens
cagtaagtacttaat

SEQ ID NO: 1007714 - DNA, 15 bp, Homo sapiens
acagtaagtacttaa

SEQ ID NO: 1007715 - DNA, 15 bp, Homo sapiens
aacagtaagtactta

SEQ ID NO: 1007716 - DNA, 15 bp, Homo sapiens
aaacagtaagtactt

SEQ ID NO: 1007717 - DNA, 15 bp, Homo sapiens
taaacagtaagtact

SEQ ID NO: 1007718 - DNA, 15 bp, Homo sapiens
gtaaacagtaagtac

SEQ ID NO: 1007719 - DNA, 15 bp, Homo sapiens
ggtaaacagtaagta

SEQ ID NO: 1007720 - DNA, 15 bp, Homo sapiens
tggtaaacagtaagt

SEQ ID NO: 1007721 - DNA, 15 bp, Homo sapiens
gtggtaaacagtaag

SEQ ID NO: 1007722 - DNA, 15 bp, Homo sapiens
ggtggtaaacagtaa

SEQ ID NO: 1007723 - DNA, 15 bp, Homo sapiens
aggtggtaaacagta

SEQ ID NO: 1007724 - DNA, 15 bp, Homo sapiens
gaggtggtaaacagt

SEQ ID NO: 1007725 - DNA, 15 bp, Homo sapiens
tgaggtggtaaacag

SEQ ID NO: 1007726 - DNA, 15 bp, Homo sapiens
atgaggtggtaaaca

SEQ ID NO: 1007727 - DNA, 15 bp, Homo sapiens
tatgaggtggtaaac

SEQ ID NO: 1007728 - DNA, 15 bp, Homo sapiens
gtatgaggtggtaaa

SEQ ID NO: 1007729 - DNA, 15 bp, Homo sapiens
tgtatgaggtggtaa

SEQ ID NO: 1007730 - DNA, 15 bp, Homo sapiens
ctgtatgaggtggta

SEQ ID NO: 1007731 - DNA, 15 bp, Homo sapiens
actgtatgaggtggt

SEQ ID NO: 1007732 - DNA, 15 bp, Homo sapiens
cactgtatgaggtgg

SEQ ID NO: 1007733 - DNA, 15 bp, Homo sapiens
ccactgtatgaggtg

SEQ ID NO: 1007734 - DNA, 15 bp, Homo sapiens
gccactgtatgaggt

SEQ ID NO: 1007735 - DNA, 15 bp, Homo sapiens
ggccactgtatgagg

SEQ ID NO: 1007736 - DNA, 15 bp, Homo sapiens
cggccactgtatgag

SEQ ID NO: 1007737 - DNA, 15 bp, Homo sapiens
tcggccactgtatga

SEQ ID NO: 1007738 - DNA, 15 bp, Homo sapiens
atcggccactgtatg

SEQ ID NO: 1007739 - DNA, 15 bp, Homo sapiens
tatcggccactgtat

SEQ ID NO: 1007740 - DNA, 15 bp, Homo sapiens
ttatcggccactgta

SEQ ID NO: 1007741 - DNA, 15 bp, Homo sapiens
tttatcggccactgt

SEQ ID NO: 1007742 - DNA, 15 bp, Homo sapiens
ttttatcggccactg

SEQ ID NO: 1007743 - DNA, 15 bp, Homo sapiens
tttttatcggccact

SEQ ID NO: 1007744 - DNA, 15 bp, Homo sapiens
ctttttatcggccac

SEQ ID NO: 1007745 - DNA, 15 bp, Homo sapiens
actttttatcggcca

SEQ ID NO: 1007746 - DNA, 15 bp, Homo sapiens
cactttttatcggcc

SEQ ID NO: 1007747 - DNA, 15 bp, Homo sapiens
acactttttatcggc

SEQ ID NO: 1007748 - DNA, 15 bp, Homo sapiens
gacactttttatcgg

SEQ ID NO: 1007749 - DNA, 15 bp, Homo sapiens
tgacactttttatcg

SEQ ID NO: 1007750 - DNA, 15 bp, Homo sapiens
gtgacactttttatc

SEQ ID NO: 1007751 - DNA, 15 bp, Homo sapiens
agtgacactttttat

SEQ ID NO: 1007752 - DNA, 15 bp, Homo sapiens
aagtgacacttttta

SEQ ID NO: 1007753 - DNA, 15 bp, Homo sapiens
gaagtgacacttttt

SEQ ID NO: 1007754 - DNA, 15 bp, Homo sapiens
agaagtgacactttt

SEQ ID NO: 1007755 - DNA, 15 bp, Homo sapiens
cagaagtgacacttt

SEQ ID NO: 1007756 - DNA, 15 bp, Homo sapiens
gcagaagtgacactt

SEQ ID NO: 1007757 - DNA, 15 bp, Homo sapiens
agcagaagtgacact

SEQ ID NO: 1007758 - DNA, 15 bp, Homo sapiens
cagcagaagtgacac

SEQ ID NO: 1007759 - DNA, 15 bp, Homo sapiens
acagcagaagtgaca

SEQ ID NO: 1007760 - DNA, 15 bp, Homo sapiens
aacagcagaagtgac

SEQ ID NO: 1007761 - DNA, 15 bp, Homo sapiens
aaacagcagaagtga

SEQ ID NO: 1007762 - DNA, 15 bp, Homo sapiens
gaaacagcagaagtg

SEQ ID NO: 1007763 - DNA, 15 bp, Homo sapiens
ggaaacagcagaagt

SEQ ID NO: 1007764 - DNA, 15 bp, Homo sapiens
aggaaacagcagaag

SEQ ID NO: 1007765 - DNA, 15 bp, Homo sapiens
gaggaaacagcagaa

SEQ ID NO: 1007766 - DNA, 15 bp, Homo sapiens
agaggaaacagcaga

SEQ ID NO: 1007767 - DNA, 15 bp, Homo sapiens
cagaggaaacagcag

SEQ ID NO: 1007768 - DNA, 15 bp, Homo sapiens
ccagaggaaacagca

SEQ ID NO: 1007769 - DNA, 15 bp, Homo sapiens
cccagaggaaacagc

SEQ ID NO: 1007770 - DNA, 15 bp, Homo sapiens
acccagaggaaacag

SEQ ID NO: 1007771 - DNA, 15 bp, Homo sapiens
aacccagaggaaaca

SEQ ID NO: 1007772 - DNA, 15 bp, Homo sapiens
caacccagaggaaac

SEQ ID NO: 1007773 - DNA, 15 bp, Homo sapiens
acaacccagaggaaa

SEQ ID NO: 1007774 - DNA, 15 bp, Homo sapiens
cacaacccagaggaa

SEQ ID NO: 1007775 - DNA, 15 bp, Homo sapiens
gcacaacccagagga

SEQ ID NO: 1007776 - DNA, 15 bp, Homo sapiens
agcacaacccagagg

SEQ ID NO: 1007777 - DNA, 15 bp, Homo sapiens
aagcacaacccagag

SEQ ID NO: 1007778 - DNA, 15 bp, Homo sapiens
caagcacaacccaga

SEQ ID NO: 1007779 - DNA, 15 bp, Homo sapiens
tcaagcacaacccag

SEQ ID NO: 1007780 - DNA, 15 bp, Homo sapiens
ttcaagcacaaccca

SEQ ID NO: 1007781 - DNA, 15 bp, Homo sapiens
attcaagcacaaccc

SEQ ID NO: 1007782 - DNA, 15 bp, Homo sapiens
aattcaagcacaacc

SEQ ID NO: 1007783 - DNA, 15 bp, Homo sapiens
taattcaagcacaac

SEQ ID NO: 1007784 - DNA, 15 bp, Homo sapiens
ataattcaagcacaa

SEQ ID NO: 1007785 - DNA, 15 bp, Homo sapiens
aataattcaagcaca

SEQ ID NO: 1007786 - DNA, 15 bp, Homo sapiens
taataattcaagcac

SEQ ID NO: 1007787 - DNA, 15 bp, Homo sapiens
ctaataattcaagca

SEQ ID NO: 1007788 - DNA, 15 bp, Homo sapiens
actaataattcaagc

SEQ ID NO: 1007789 - DNA, 15 bp, Homo sapiens
tactaataattcaag

SEQ ID NO: 1007790 - DNA, 15 bp, Homo sapiens
atactaataattcaa

SEQ ID NO: 1007791 - DNA, 15 bp, Homo sapiens
aatactaataattca

SEQ ID NO: 1007792 - DNA, 15 bp, Homo sapiens
taatactaataattc

SEQ ID NO: 1007793 - DNA, 15 bp, Homo sapiens
ataatactaataatt

SEQ ID NO: 1007794 - DNA, 15 bp, Homo sapiens
gataatactaataat

SEQ ID NO: 1007795 - DNA, 15 bp, Homo sapiens
agataatactaataa

SEQ ID NO: 1007796 - DNA, 15 bp, Homo sapiens
aagataatactaata

SEQ ID NO: 1007797 - DNA, 15 bp, Homo sapiens
gaagataatactaat

SEQ ID NO: 1007798 - DNA, 15 bp, Homo sapiens
tgaagataatactaa

SEQ ID NO: 1007799 - DNA, 15 bp, Homo sapiens
ctgaagataatacta

SEQ ID NO: 1007800 - DNA, 15 bp, Homo sapiens
actgaagataatact

SEQ ID NO: 1007801 - DNA, 15 bp, Homo sapiens
gactgaagataatac

SEQ ID NO: 1007802 - DNA, 15 bp, Homo sapiens
ggactgaagataata

SEQ ID NO: 1007803 - DNA, 15 bp, Homo sapiens
aggactgaagataat

SEQ ID NO: 1007804 - DNA, 15 bp, Homo sapiens
gaggactgaagataa

SEQ ID NO: 1007805 - DNA, 15 bp, Homo sapiens
tgaggactgaagata

SEQ ID NO: 1007806 - DNA, 15 bp, Homo sapiens
ctgaggactgaagat

SEQ ID NO: 1007807 - DNA, 15 bp, Homo sapiens
actgaggactgaaga

SEQ ID NO: 1007808 - DNA, 15 bp, Homo sapiens
aactgaggactgaag

SEQ ID NO: 1007809 - DNA, 15 bp, Homo sapiens
aaactgaggactgaa

SEQ ID NO: 1007810 - DNA, 15 bp, Homo sapiens
gaaactgaggactga

SEQ ID NO: 1007811 - DNA, 15 bp, Homo sapiens
agaaactgaggactg

SEQ ID NO: 1007812 - DNA, 15 bp, Homo sapiens
aagaaactgaggact

SEQ ID NO: 1007813 - DNA, 15 bp, Homo sapiens
aaagaaactgaggac

SEQ ID NO: 1007814 - DNA, 15 bp, Homo sapiens
caaagaaactgagga

SEQ ID NO: 1007815 - DNA, 15 bp, Homo sapiens
acaaagaaactgagg

SEQ ID NO: 1007816 - DNA, 15 bp, Homo sapiens
cacaaagaaactgag

SEQ ID NO: 1007817 - DNA, 15 bp, Homo sapiens
ccacaaagaaactga

SEQ ID NO: 1007818 - DNA, 15 bp, Homo sapiens
cccacaaagaaactg

SEQ ID NO: 1007819 - DNA, 15 bp, Homo sapiens
tcccacaaagaaact

SEQ ID NO: 1007820 - DNA, 15 bp, Homo sapiens
ttcccacaaagaaac

SEQ ID NO: 1007821 - DNA, 15 bp, Homo sapiens
tttcccacaaagaaa

SEQ ID NO: 1007822 - DNA, 15 bp, Homo sapiens
gtttcccacaaagaa

SEQ ID NO: 1007823 - DNA, 15 bp, Homo sapiens
agtttcccacaaaga

SEQ ID NO: 1007824 - DNA, 15 bp, Homo sapiens
aagtttcccacaaag

SEQ ID NO: 1007825 - DNA, 15 bp, Homo sapiens
aaagtttcccacaaa

SEQ ID NO: 1007826 - DNA, 15 bp, Homo sapiens
aaaagtttcccacaa

SEQ ID NO: 1007827 - DNA, 15 bp, Homo sapiens
aaaaagtttcccaca

SEQ ID NO: 1007828 - DNA, 15 bp, Homo sapiens
taaaaagtttcccac

SEQ ID NO: 1007829 - DNA, 15 bp, Homo sapiens
ttaaaaagtttccca

SEQ ID NO: 1007830 - DNA, 15 bp, Homo sapiens
attaaaaagtttccc

SEQ ID NO: 1007831 - DNA, 15 bp, Homo sapiens
aattaaaaagtttcc

SEQ ID NO: 1007832 - DNA, 15 bp, Homo sapiens
taattaaaaagtttc

SEQ ID NO: 1007833 - DNA, 15 bp, Homo sapiens
ctaattaaaaagttt

SEQ ID NO: 1007834 - DNA, 15 bp, Homo sapiens
actaattaaaaagtt

SEQ ID NO: 1007835 - DNA, 15 bp, Homo sapiens
aactaattaaaaagt

SEQ ID NO: 1007836 - DNA, 15 bp, Homo sapiens
caactaattaaaaag

SEQ ID NO: 1007837 - DNA, 15 bp, Homo sapiens
acaactaattaaaaa

SEQ ID NO: 1007838 - DNA, 15 bp, Homo sapiens
aacaactaattaaaa

SEQ ID NO: 1007839 - DNA, 15 bp, Homo sapiens
aaacaactaattaaa

SEQ ID NO: 1007840 - DNA, 15 bp, Homo sapiens
taaacaactaattaa

SEQ ID NO: 1007841 - DNA, 15 bp, Homo sapiens
ttaaacaactaatta

SEQ ID NO: 1007842 - DNA, 15 bp, Homo sapiens
attaaacaactaatt

SEQ ID NO: 1007843 - DNA, 15 bp, Homo sapiens
aattaaacaactaat

SEQ ID NO: 1007844 - DNA, 15 bp, Homo sapiens
aaattaaacaactaa

SEQ ID NO: 1007845 - DNA, 15 bp, Homo sapiens
aaaattaaacaacta

SEQ ID NO: 1007846 - DNA, 15 bp, Homo sapiens
caaaattaaacaact

SEQ ID NO: 1007847 - DNA, 15 bp, Homo sapiens
acaaaattaaacaac

SEQ ID NO: 1007848 - DNA, 15 bp, Homo sapiens
tacaaaattaaacaa

SEQ ID NO: 1007849 - DNA, 15 bp, Homo sapiens
ttacaaaattaaaca

SEQ ID NO: 1007850 - DNA, 15 bp, Homo sapiens
cttacaaaattaaac

SEQ ID NO: 1007851 - DNA, 15 bp, Homo sapiens
tcttacaaaattaaa

SEQ ID NO: 1007852 - DNA, 15 bp, Homo sapiens
atcttacaaaattaa

SEQ ID NO: 1007853 - DNA, 15 bp, Homo sapiens
catcttacaaaatta

SEQ ID NO: 1007854 - DNA, 15 bp, Homo sapiens
ccatcttacaaaatt

SEQ ID NO: 1007855 - DNA, 15 bp, Homo sapiens
accatcttacaaaat

SEQ ID NO: 1007856 - DNA, 15 bp, Homo sapiens
aaccatcttacaaaa

SEQ ID NO: 1007857 - DNA, 15 bp, Homo sapiens
taaccatcttacaaa

SEQ ID NO: 1007858 - DNA, 15 bp, Homo sapiens
ctaaccatcttacaa

SEQ ID NO: 1007859 - DNA, 15 bp, Homo sapiens
actaaccatcttaca

SEQ ID NO: 1007860 - DNA, 15 bp, Homo sapiens
aactaaccatcttac

SEQ ID NO: 1007861 - DNA, 15 bp, Homo sapiens
aaactaaccatctta

SEQ ID NO: 1007862 - DNA, 15 bp, Homo sapiens
taaactaaccatctt

SEQ ID NO: 1007863 - DNA, 15 bp, Homo sapiens
ctaaactaaccatct

SEQ ID NO: 1007864 - DNA, 15 bp, Homo sapiens
actaaactaaccatc

SEQ ID NO: 1007865 - DNA, 15 bp, Homo sapiens
gactaaactaaccat

SEQ ID NO: 1007866 - DNA, 15 bp, Homo sapiens
tgactaaactaacca

SEQ ID NO: 1007867 - DNA, 15 bp, Homo sapiens
ttgactaaactaacc

SEQ ID NO: 1007868 - DNA, 15 bp, Homo sapiens
tttgactaaactaac

SEQ ID NO: 1007869 - DNA, 15 bp, Homo sapiens
ttttgactaaactaa

SEQ ID NO: 1007870 - DNA, 15 bp, Homo sapiens
attttgactaaacta

SEQ ID NO: 1007871 - DNA, 15 bp, Homo sapiens
aattttgactaaact

SEQ ID NO: 1007872 - DNA, 15 bp, Homo sapiens
taattttgactaaac

SEQ ID NO: 1007873 - DNA, 15 bp, Homo sapiens
ctaattttgactaaa

SEQ ID NO: 1007874 - DNA, 15 bp, Homo sapiens
tctaattttgactaa

SEQ ID NO: 1007875 - DNA, 15 bp, Homo sapiens
atctaattttgacta

SEQ ID NO: 1007876 - DNA, 15 bp, Homo sapiens
tatctaattttgact

SEQ ID NO: 1007877 - DNA, 15 bp, Homo sapiens
ttatctaattttgac

SEQ ID NO: 1007878 - DNA, 15 bp, Homo sapiens
cttatctaattttga

SEQ ID NO: 1007879 - DNA, 15 bp, Homo sapiens
tcttatctaattttg

SEQ ID NO: 1007880 - DNA, 15 bp, Homo sapiens
ctcttatctaatttt

SEQ ID NO: 1007881 - DNA, 15 bp, Homo sapiens
tctcttatctaattt

SEQ ID NO: 1007882 - DNA, 15 bp, Homo sapiens
ttctcttatctaatt

SEQ ID NO: 1007883 - DNA, 15 bp, Homo sapiens
attctcttatctaat

SEQ ID NO: 1007884 - DNA, 15 bp, Homo sapiens
aattctcttatctaa

SEQ ID NO: 1007885 - DNA, 15 bp, Homo sapiens
aaattctcttatcta

SEQ ID NO: 1007886 - DNA, 15 bp, Homo sapiens
caaattctcttatct

SEQ ID NO: 1007887 - DNA, 15 bp, Homo sapiens
tcaaattctcttatc

SEQ ID NO: 1007888 - DNA, 15 bp, Homo sapiens
ttcaaattctcttat

SEQ ID NO: 1007889 - DNA, 15 bp, Homo sapiens
tttcaaattctctta

SEQ ID NO: 1007890 - DNA, 15 bp, Homo sapiens
ttttcaaattctctt

SEQ ID NO: 1007891 - DNA, 15 bp, Homo sapiens
attttcaaattctct

SEQ ID NO: 1007892 - DNA, 15 bp, Homo sapiens
gattttcaaattctc

SEQ ID NO: 1007893 - DNA, 15 bp, Homo sapiens
ggattttcaaattct

SEQ ID NO: 1007894 - DNA, 15 bp, Homo sapiens
cggattttcaaattc

SEQ ID NO: 1007895 - DNA, 15 bp, Homo sapiens
acggattttcaaatt

SEQ ID NO: 1007896 - DNA, 15 bp, Homo sapiens
tacggattttcaaat

SEQ ID NO: 1007897 - DNA, 15 bp, Homo sapiens
ctacggattttcaaa

SEQ ID NO: 1007898 - DNA, 15 bp, Homo sapiens
gctacggattttcaa

SEQ ID NO: 1007899 - DNA, 15 bp, Homo sapiens
agctacggattttca

SEQ ID NO: 1007900 - DNA, 15 bp, Homo sapiens
tagctacggattttc

SEQ ID NO: 1007901 - DNA, 15 bp, Homo sapiens
gtagctacggatttt

SEQ ID NO: 1007902 - DNA, 15 bp, Homo sapiens
ggtagctacggattt

SEQ ID NO: 1007903 - DNA, 15 bp, Homo sapiens
gggtagctacggatt

SEQ ID NO: 1007904 - DNA, 15 bp, Homo sapiens
ggggtagctacggat

SEQ ID NO: 1007905 - DNA, 15 bp, Homo sapiens
tggggtagctacgga

SEQ ID NO: 1007906 - DNA, 15 bp, Homo sapiens
ttggggtagctacgg

SEQ ID NO: 1007907 - DNA, 15 bp, Homo sapiens
tttggggtagctacg

SEQ ID NO: 1007908 - DNA, 15 bp, Homo sapiens
ctttggggtagctac

SEQ ID NO: 1007909 - DNA, 15 bp, Homo sapiens
gctttggggtagcta

SEQ ID NO: 1007910 - DNA, 15 bp, Homo sapiens
tgctttggggtagct

SEQ ID NO: 1007911 - DNA, 15 bp, Homo sapiens
ttgctttggggtagc

SEQ ID NO: 1007912 - DNA, 15 bp, Homo sapiens
gttgctttggggtag

SEQ ID NO: 1007913 - DNA, 15 bp, Homo sapiens
ggttgctttggggta

SEQ ID NO: 1007914 - DNA, 15 bp, Homo sapiens
aggttgctttggggt

SEQ ID NO: 1007915 - DNA, 15 bp, Homo sapiens
taggttgctttgggg

SEQ ID NO: 1007916 - DNA, 15 bp, Homo sapiens
gtaggttgctttggg

SEQ ID NO: 1007917 - DNA, 15 bp, Homo sapiens
tgtaggttgctttgg

SEQ ID NO: 1007918 - DNA, 15 bp, Homo sapiens
gtgtaggttgctttg

SEQ ID NO: 1007919 - DNA, 15 bp, Homo sapiens
tgtgtaggttgcttt

SEQ ID NO: 1007920 - DNA, 15 bp, Homo sapiens
atgtgtaggttgctt

SEQ ID NO: 1007921 - DNA, 15 bp, Homo sapiens
tatgtgtaggttgct

SEQ ID NO: 1007922 - DNA, 15 bp, Homo sapiens
ttatgtgtaggttgc

SEQ ID NO: 1007923 - DNA, 15 bp, Homo sapiens
cttatgtgtaggttg

SEQ ID NO: 1007924 - DNA, 15 bp, Homo sapiens
tcttatgtgtaggtt

SEQ ID NO: 1007925 - DNA, 15 bp, Homo sapiens
ttcttatgtgtaggt

SEQ ID NO: 1007926 - DNA, 15 bp, Homo sapiens
gttcttatgtgtagg

SEQ ID NO: 1007927 - DNA, 15 bp, Homo sapiens
agttcttatgtgtag

SEQ ID NO: 1007928 - DNA, 15 bp, Homo sapiens
tagttcttatgtgta

SEQ ID NO: 1007929 - DNA, 15 bp, Homo sapiens
atagttcttatgtgt

SEQ ID NO: 1007930 - DNA, 15 bp, Homo sapiens
aatagttcttatgtg

SEQ ID NO: 1007931 - DNA, 15 bp, Homo sapiens
taatagttcttatgt

SEQ ID NO: 1007932 - DNA, 15 bp, Homo sapiens
ataatagttcttatg

SEQ ID NO: 1007933 - DNA, 15 bp, Homo sapiens
aataatagttcttat

SEQ ID NO: 1007934 - DNA, 15 bp, Homo sapiens
aaataatagttctta

SEQ ID NO: 1007935 - DNA, 15 bp, Homo sapiens
aaaataatagttctt

SEQ ID NO: 1007936 - DNA, 15 bp, Homo sapiens
aaaaataatagttct

SEQ ID NO: 1007937 - DNA, 15 bp, Homo sapiens
caaaaataatagttc

SEQ ID NO: 1007938 - DNA, 15 bp, Homo sapiens
acaaaaataatagtt

SEQ ID NO: 1007939 - DNA, 15 bp, Homo sapiens
cacaaaaataatagt

SEQ ID NO: 1007940 - DNA, 15 bp, Homo sapiens
acacaaaaataatag

SEQ ID NO: 1007941 - DNA, 15 bp, Homo sapiens
aacacaaaaataata

SEQ ID NO: 1007942 - DNA, 15 bp, Homo sapiens
aaacacaaaaataat

SEQ ID NO: 1007943 - DNA, 15 bp, Homo sapiens
aaaacacaaaaataa

SEQ ID NO: 1007944 - DNA, 15 bp, Homo sapiens
caaaacacaaaaata

SEQ ID NO: 1007945 - DNA, 15 bp, Homo sapiens
tcaaaacacaaaaat

SEQ ID NO: 1007946 - DNA, 15 bp, Homo sapiens
ttcaaaacacaaaaa

SEQ ID NO: 1007947 - DNA, 15 bp, Homo sapiens
tttcaaaacacaaaa

SEQ ID NO: 1007948 - DNA, 15 bp, Homo sapiens
atttcaaaacacaaa

SEQ ID NO: 1007949 - DNA, 15 bp, Homo sapiens
gatttcaaaacacaa

SEQ ID NO: 1007950 - DNA, 15 bp, Homo sapiens
tgatttcaaaacaca

SEQ ID NO: 1007951 - DNA, 15 bp, Homo sapiens
atgatttcaaaacac

SEQ ID NO: 1007952 - DNA, 15 bp, Homo sapiens
tatgatttcaaaaca

SEQ ID NO: 1007953 - DNA, 15 bp, Homo sapiens
ttatgatttcaaaac

SEQ ID NO: 1007954 - DNA, 15 bp, Homo sapiens
attatgatttcaaaa

SEQ ID NO: 1007955 - DNA, 15 bp, Homo sapiens
aattatgatttcaaa

SEQ ID NO: 1007956 - DNA, 15 bp, Homo sapiens
aaattatgatttcaa

SEQ ID NO: 1007957 - DNA, 15 bp, Homo sapiens
aaaattatgatttca

SEQ ID NO: 1007958 - DNA, 15 bp, Homo sapiens
taaaattatgatttc

SEQ ID NO: 1007959 - DNA, 15 bp, Homo sapiens
aataaaattatgatt

SEQ ID NO: 1007960 - DNA, 15 bp, Homo sapiens
caataaaattatgat

SEQ ID NO: 1007961 - DNA, 15 bp, Homo sapiens
tcaataaaattatga

SEQ ID NO: 1007962 - DNA, 15 bp, Homo sapiens
atcaataaaattatg

SEQ ID NO: 1007963 - DNA, 15 bp, Homo sapiens
aatcaataaaattat

SEQ ID NO: 1007964 - DNA, 15 bp, Homo sapiens
aaatcaataaaatta

SEQ ID NO: 1007965 - DNA, 15 bp, Homo sapiens
gaaatcaataaaatt

SEQ ID NO: 1007966 - DNA, 15 bp, Homo sapiens
ggaaatcaataaaat

SEQ ID NO: 1007967 - DNA, 15 bp, Homo sapiens
tggaaatcaataaaa

SEQ ID NO: 1007968 - DNA, 15 bp, Homo sapiens
ctggaaatcaataaa

SEQ ID NO: 1007969 - DNA, 15 bp, Homo sapiens
actggaaatcaataa

SEQ ID NO: 1007970 - DNA, 15 bp, Homo sapiens
cactggaaatcaata

SEQ ID NO: 1007971 - DNA, 15 bp, Homo sapiens
acactggaaatcaat

SEQ ID NO: 1007972 - DNA, 15 bp, Homo sapiens
aacactggaaatcaa

SEQ ID NO: 1007973 - DNA, 15 bp, Homo sapiens
aaacactggaaatca

SEQ ID NO: 1007974 - DNA, 15 bp, Homo sapiens
gaaacactggaaatc

SEQ ID NO: 1007975 - DNA, 15 bp, Homo sapiens
ggaaacactggaaat

SEQ ID NO: 1007976 - DNA, 15 bp, Homo sapiens
tggaaacactggaaa

SEQ ID NO: 1007977 - DNA, 15 bp, Homo sapiens
gtggaaacactggaa

SEQ ID NO: 1007978 - DNA, 15 bp, Homo sapiens
agtggaaacactgga

SEQ ID NO: 1007979 - DNA, 15 bp, Homo sapiens
cagtggaaacactgg

SEQ ID NO: 1007980 - DNA, 15 bp, Homo sapiens
ccagtggaaacactg

SEQ ID NO: 1007981 - DNA, 15 bp, Homo sapiens
accagtggaaacact

SEQ ID NO: 1007982 - DNA, 15 bp, Homo sapiens
taccagtggaaacac

SEQ ID NO: 1007983 - DNA, 15 bp, Homo sapiens
ctaccagtggaaaca

SEQ ID NO: 1007984 - DNA, 15 bp, Homo sapiens
actaccagtggaaac

SEQ ID NO: 1007985 - DNA, 15 bp, Homo sapiens
cactaccagtggaaa

SEQ ID NO: 1007986 - DNA, 15 bp, Homo sapiens
ccactaccagtggaa

SEQ ID NO: 1007987 - DNA, 15 bp, Homo sapiens
accactaccagtgga

SEQ ID NO: 1007988 - DNA, 15 bp, Homo sapiens
aaccactaccagtgg

SEQ ID NO: 1007989 - DNA, 15 bp, Homo sapiens
aaaccactaccagtg

SEQ ID NO: 1007990 - DNA, 15 bp, Homo sapiens
gaaaccactaccagt

SEQ ID NO: 1007991 - DNA, 15 bp, Homo sapiens
tgaaaccactaccag

SEQ ID NO: 1007992 - DNA, 15 bp, Homo sapiens
atgaaaccactacca

SEQ ID NO: 1007993 - DNA, 15 bp, Homo sapiens
aatgaaaccactacc

SEQ ID NO: 1007994 - DNA, 15 bp, Homo sapiens
caatgaaaccactac

SEQ ID NO: 1007995 - DNA, 15 bp, Homo sapiens
tcaatgaaaccacta

SEQ ID NO: 1007996 - DNA, 15 bp, Homo sapiens
atcaatgaaaccact

SEQ ID NO: 1007997 - DNA, 15 bp, Homo sapiens
tatatcaatgaaacc

SEQ ID NO: 1007998 - DNA, 15 bp, Homo sapiens
ctatatcaatgaaac

SEQ ID NO: 1007999 - DNA, 15 bp, Homo sapiens
cctatatcaatgaaa

SEQ ID NO: 1008000 - DNA, 15 bp, Homo sapiens
tcctatatcaatgaa

SEQ ID NO: 1008001 - DNA, 15 bp, Homo sapiens
ctcctatatcaatga

SEQ ID NO: 1008002 - DNA, 15 bp, Homo sapiens
actcctatatcaatg

SEQ ID NO: 1008003 - DNA, 15 bp, Homo sapiens
tactcctatatcaat

SEQ ID NO: 1008004 - DNA, 15 bp, Homo sapiens
atactcctatatcaa

SEQ ID NO: 1008005 - DNA, 15 bp, Homo sapiens
gatactcctatatca

SEQ ID NO: 1008006 - DNA, 15 bp, Homo sapiens
tgatactcctatatc

SEQ ID NO: 1008007 - DNA, 15 bp, Homo sapiens
ttgatactcctatat

SEQ ID NO: 1008008 - DNA, 15 bp, Homo sapiens
tttgatactcctata

SEQ ID NO: 1008009 - DNA, 15 bp, Homo sapiens
ttttgatactcctat

SEQ ID NO: 1008010 - DNA, 15 bp, Homo sapiens
gttttgatactccta

SEQ ID NO: 1008011 - DNA, 15 bp, Homo sapiens
tgttttgatactcct

SEQ ID NO: 1008012 - DNA, 15 bp, Homo sapiens
atgttttgatactcc

SEQ ID NO: 1008013 - DNA, 15 bp, Homo sapiens
gatgttttgatactc

SEQ ID NO: 1008014 - DNA, 15 bp, Homo sapiens
tgatgttttgatact

SEQ ID NO: 1008015 - DNA, 15 bp, Homo sapiens
gtgatgttttgatac

SEQ ID NO: 1008016 - DNA, 15 bp, Homo sapiens
agtgatgttttgata

SEQ ID NO: 1008017 - DNA, 15 bp, Homo sapiens
gagtgatgttttgat

SEQ ID NO: 1008018 - DNA, 15 bp, Homo sapiens
tgagtgatgttttga

SEQ ID NO: 1008019 - DNA, 15 bp, Homo sapiens
atgagtgatgttttg

SEQ ID NO: 1008020 - DNA, 15 bp, Homo sapiens
aatgagtgatgtttt

SEQ ID NO: 1008021 - DNA, 15 bp, Homo sapiens
taatgagtgatgttt

SEQ ID NO: 1008022 - DNA, 15 bp, Homo sapiens
ataatgagtgatgtt

SEQ ID NO: 1008023 - DNA, 15 bp, Homo sapiens
aataatgagtgatgt

SEQ ID NO: 1008024 - DNA, 15 bp, Homo sapiens
aaataatgagtgatg

SEQ ID NO: 1008025 - DNA, 15 bp, Homo sapiens
taaataatgagtgat

SEQ ID NO: 1008026 - DNA, 15 bp, Homo sapiens
ataaataatgagtga

SEQ ID NO: 1008027 - DNA, 15 bp, Homo sapiens
aataaataatgagtg

SEQ ID NO: 1008028 - DNA, 15 bp, Homo sapiens
aaataaataatgagt

SEQ ID NO: 1008029 - DNA, 15 bp, Homo sapiens
gaaataaataatgag

SEQ ID NO: 1008030 - DNA, 15 bp, Homo sapiens
tgaaataaataatga

SEQ ID NO: 1008031 - DNA, 15 bp, Homo sapiens
ctgaaataaataatg

SEQ ID NO: 1008032 - DNA, 15 bp, Homo sapiens
actgaaataaataat

SEQ ID NO: 1008033 - DNA, 15 bp, Homo sapiens
aactgaaataaataa

SEQ ID NO: 1008034 - DNA, 15 bp, Homo sapiens
aaactgaaataaata

SEQ ID NO: 1008035 - DNA, 15 bp, Homo sapiens
gaaactgaaataaat

SEQ ID NO: 1008036 - DNA, 15 bp, Homo sapiens
tgaaactgaaataaa

SEQ ID NO: 1008037 - DNA, 15 bp, Homo sapiens
atgaaactgaaataa

SEQ ID NO: 1008038 - DNA, 15 bp, Homo sapiens
aatgaaactgaaata

SEQ ID NO: 1008039 - DNA, 15 bp, Homo sapiens
aaatgaaactgaaat

SEQ ID NO: 1008040 - DNA, 15 bp, Homo sapiens
caaatgaaactgaaa

SEQ ID NO: 1008041 - DNA, 15 bp, Homo sapiens
tcaaatgaaactgaa

SEQ ID NO: 1008042 - DNA, 15 bp, Homo sapiens
atcaaatgaaactga

SEQ ID NO: 1008043 - DNA, 15 bp, Homo sapiens
gatcaaatgaaactg

SEQ ID NO: 1008044 - DNA, 15 bp, Homo sapiens
ggatcaaatgaaact

SEQ ID NO: 1008045 - DNA, 15 bp, Homo sapiens
aggatcaaatgaaac

SEQ ID NO: 1008046 - DNA, 15 bp, Homo sapiens
taggatcaaatgaaa

SEQ ID NO: 1008047 - DNA, 15 bp, Homo sapiens
ctaggatcaaatgaa

SEQ ID NO: 1008048 - DNA, 15 bp, Homo sapiens
gctaggatcaaatga

SEQ ID NO: 1008049 - DNA, 15 bp, Homo sapiens
ggctaggatcaaatg

SEQ ID NO: 1008050 - DNA, 15 bp, Homo sapiens
cggctaggatcaaat

SEQ ID NO: 1008051 - DNA, 15 bp, Homo sapiens
acggctaggatcaaa

SEQ ID NO: 1008052 - DNA, 15 bp, Homo sapiens
aacggctaggatcaa

SEQ ID NO: 1008053 - DNA, 15 bp, Homo sapiens
aaacggctaggatca

SEQ ID NO: 1008054 - DNA, 15 bp, Homo sapiens
aaaacggctaggatc

SEQ ID NO: 1008055 - DNA, 15 bp, Homo sapiens
caaaacggctaggat

SEQ ID NO: 1008056 - DNA, 15 bp, Homo sapiens
acaaaacggctagga

SEQ ID NO: 1008057 - DNA, 15 bp, Homo sapiens
tacaaaacggctagg

SEQ ID NO: 1008058 - DNA, 15 bp, Homo sapiens
atacaaaacggctag

SEQ ID NO: 1008059 - DNA, 15 bp, Homo sapiens
aatacaaaacggcta

SEQ ID NO: 1008060 - DNA, 15 bp, Homo sapiens
taatacaaaacggct

SEQ ID NO: 1008061 - DNA, 15 bp, Homo sapiens
ttaatacaaaacggc

SEQ ID NO: 1008062 - DNA, 15 bp, Homo sapiens
gttaatacaaaacgg

SEQ ID NO: 1008063 - DNA, 15 bp, Homo sapiens
agttaatacaaaacg

SEQ ID NO: 1008064 - DNA, 15 bp, Homo sapiens
gagttaatacaaaac

SEQ ID NO: 1008065 - DNA, 15 bp, Homo sapiens
agagttaatacaaaa

SEQ ID NO: 1008066 - DNA, 15 bp, Homo sapiens
gagagttaatacaaa

SEQ ID NO: 1008067 - DNA, 15 bp, Homo sapiens
agagagttaatacaa

SEQ ID NO: 1008068 - DNA, 15 bp, Homo sapiens
cagagagttaataca

SEQ ID NO: 1008069 - DNA, 15 bp, Homo sapiens
acagagagttaatac

SEQ ID NO: 1008070 - DNA, 15 bp, Homo sapiens
cacagagagttaata

SEQ ID NO: 1008071 - DNA, 15 bp, Homo sapiens
tcacagagagttaat

SEQ ID NO: 1008072 - DNA, 15 bp, Homo sapiens
ttcacagagagttaa

SEQ ID NO: 1008073 - DNA, 15 bp, Homo sapiens
cttcacagagagtta

SEQ ID NO: 1008074 - DNA, 15 bp, Homo sapiens
tcttcacagagagtt

SEQ ID NO: 1008075 - DNA, 15 bp, Homo sapiens
ttcttcacagagagt

SEQ ID NO: 1008076 - DNA, 15 bp, Homo sapiens
tttcttcacagagag

SEQ ID NO: 1008077 - DNA, 15 bp, Homo sapiens
atttcttcacagaga

SEQ ID NO: 1008078 - DNA, 15 bp, Homo sapiens
aatttcttcacagag

SEQ ID NO: 1008079 - DNA, 15 bp, Homo sapiens
taatttcttcacaga

SEQ ID NO: 1008080 - DNA, 15 bp, Homo sapiens
gtaatttcttcacag

SEQ ID NO: 1008081 - DNA, 15 bp, Homo sapiens
ggtaatttcttcaca

SEQ ID NO: 1008082 - DNA, 15 bp, Homo sapiens
aggtaatttcttcac

SEQ ID NO: 1008083 - DNA, 15 bp, Homo sapiens
gaggtaatttcttca

SEQ ID NO: 1008084 - DNA, 15 bp, Homo sapiens
tgaggtaatttcttc

SEQ ID NO: 1008085 - DNA, 15 bp, Homo sapiens
gtgaggtaatttctt

SEQ ID NO: 1008086 - DNA, 15 bp, Homo sapiens
tgtgaggtaatttct

SEQ ID NO: 1008087 - DNA, 15 bp, Homo sapiens
ttgtgaggtaatttc

SEQ ID NO: 1008088 - DNA, 15 bp, Homo sapiens
tttgtgaggtaattt

SEQ ID NO: 1008089 - DNA, 15 bp, Homo sapiens
atttgtgaggtaatt

SEQ ID NO: 1008090 - DNA, 15 bp, Homo sapiens
gatttgtgaggtaat

SEQ ID NO: 1008091 - DNA, 15 bp, Homo sapiens
agatttgtgaggtaa

SEQ ID NO: 1008092 - DNA, 15 bp, Homo sapiens
tagatttgtgaggta

SEQ ID NO: 1008093 - DNA, 15 bp, Homo sapiens
atagatttgtgaggt

SEQ ID NO: 1008094 - DNA, 15 bp, Homo sapiens
aatagatttgtgagg

SEQ ID NO: 1008095 - DNA, 15 bp, Homo sapiens
caatagatttgtgag

SEQ ID NO: 1008096 - DNA, 15 bp, Homo sapiens
gcaatagatttgtga

SEQ ID NO: 1008097 - DNA, 15 bp, Homo sapiens
agcaatagatttgtg

SEQ ID NO: 1008098 - DNA, 15 bp, Homo sapiens
cagcaatagatttgt

SEQ ID NO: 1008099 - DNA, 15 bp, Homo sapiens
acagcaatagatttg

SEQ ID NO: 1008100 - DNA, 15 bp, Homo sapiens
gacagcaatagattt

SEQ ID NO: 1008101 - DNA, 15 bp, Homo sapiens
ggacagcaatagatt

SEQ ID NO: 1008102 - DNA, 15 bp, Homo sapiens
aggacagcaatagat

SEQ ID NO: 1008103 - DNA, 15 bp, Homo sapiens
aaggacagcaataga

SEQ ID NO: 1008104 - DNA, 15 bp, Homo sapiens
caaggacagcaatag

SEQ ID NO: 1008105 - DNA, 15 bp, Homo sapiens
ccaaggacagcaata

SEQ ID NO: 1008106 - DNA, 15 bp, Homo sapiens
accaaggacagcaat

SEQ ID NO: 1008107 - DNA, 15 bp, Homo sapiens
taccaaggacagcaa

SEQ ID NO: 1008108 - DNA, 15 bp, Homo sapiens
ttaccaaggacagca

SEQ ID NO: 1008109 - DNA, 15 bp, Homo sapiens
tttaccaaggacagc

SEQ ID NO: 1008110 - DNA, 15 bp, Homo sapiens
ctttaccaaggacag

SEQ ID NO: 1008111 - DNA, 15 bp, Homo sapiens
cctttaccaaggaca

SEQ ID NO: 1008112 - DNA, 15 bp, Homo sapiens
tcctttaccaaggac

SEQ ID NO: 1008113 - DNA, 15 bp, Homo sapiens
ttcctttaccaagga

SEQ ID NO: 1008114 - DNA, 15 bp, Homo sapiens
attcctttaccaagg

SEQ ID NO: 1008115 - DNA, 15 bp, Homo sapiens
cattcctttaccaag

SEQ ID NO: 1008116 - DNA, 15 bp, Homo sapiens
ccattcctttaccaa

SEQ ID NO: 1008117 - DNA, 15 bp, Homo sapiens
tccattcctttacca

SEQ ID NO: 1008118 - DNA, 15 bp, Homo sapiens
ctccattcctttacc

SEQ ID NO: 1008119 - DNA, 15 bp, Homo sapiens
tctccattcctttac

SEQ ID NO: 1008120 - DNA, 15 bp, Homo sapiens
ttctccattccttta

SEQ ID NO: 1008121 - DNA, 15 bp, Homo sapiens
attctccattccttt

SEQ ID NO: 1008122 - DNA, 15 bp, Homo sapiens
aattctccattcctt

SEQ ID NO: 1008123 - DNA, 15 bp, Homo sapiens
taattctccattcct

SEQ ID NO: 1008124 - DNA, 15 bp, Homo sapiens
ttaattctccattcc

SEQ ID NO: 1008125 - DNA, 15 bp, Homo sapiens
cttaattctccattc

SEQ ID NO: 1008126 - DNA, 15 bp, Homo sapiens
ccttaattctccatt

SEQ ID NO: 1008127 - DNA, 15 bp, Homo sapiens
gccttaattctccat

SEQ ID NO: 1008128 - DNA, 15 bp, Homo sapiens
agccttaattctcca

SEQ ID NO: 1008129 - DNA, 15 bp, Homo sapiens
gagccttaattctcc

SEQ ID NO: 1008130 - DNA, 15 bp, Homo sapiens
agagccttaattctc

SEQ ID NO: 1008131 - DNA, 15 bp, Homo sapiens
tagagccttaattct

SEQ ID NO: 1008132 - DNA, 15 bp, Homo sapiens
ctagagccttaattc

SEQ ID NO: 1008133 - DNA, 15 bp, Homo sapiens
tctagagccttaatt

SEQ ID NO: 1008134 - DNA, 15 bp, Homo sapiens
atctagagccttaat

SEQ ID NO: 1008135 - DNA, 15 bp, Homo sapiens
gatctagagccttaa

SEQ ID NO: 1008136 - DNA, 15 bp, Homo sapiens
tgatctagagcctta

SEQ ID NO: 1008137 - DNA, 15 bp, Homo sapiens
atgatctagagcctt

SEQ ID NO: 1008138 - DNA, 15 bp, Homo sapiens
aatgatctagagcct

SEQ ID NO: 1008139 - DNA, 15 bp, Homo sapiens
taatgatctagagcc

SEQ ID NO: 1008140 - DNA, 15 bp, Homo sapiens
ctaatgatctagagc

SEQ ID NO: 1008141 - DNA, 15 bp, Homo sapiens
actaatgatctagag

SEQ ID NO: 1008142 - DNA, 15 bp, Homo sapiens
cactaatgatctaga

SEQ ID NO: 1008143 - DNA, 15 bp, Homo sapiens
ccactaatgatctag

SEQ ID NO: 1008144 - DNA, 15 bp, Homo sapiens
accactaatgatcta

SEQ ID NO: 1008145 - DNA, 15 bp, Homo sapiens
aaccactaatgatct

SEQ ID NO: 1008146 - DNA, 15 bp, Homo sapiens
taaccactaatgatc

SEQ ID NO: 1008147 - DNA, 15 bp, Homo sapiens
gtaaccactaatgat

SEQ ID NO: 1008148 - DNA, 15 bp, Homo sapiens
tgtaaccactaatga

SEQ ID NO: 1008149 - DNA, 15 bp, Homo sapiens
gtgtaaccactaatg

SEQ ID NO: 1008150 - DNA, 15 bp, Homo sapiens
agtgtaaccactaat

SEQ ID NO: 1008151 - DNA, 15 bp, Homo sapiens
tagtgtaaccactaa

SEQ ID NO: 1008152 - DNA, 15 bp, Homo sapiens
atagtgtaaccacta

SEQ ID NO: 1008153 - DNA, 15 bp, Homo sapiens
tatagtgtaaccact

SEQ ID NO: 1008154 - DNA, 15 bp, Homo sapiens
ctatagtgtaaccac

SEQ ID NO: 1008155 - DNA, 15 bp, Homo sapiens
actatagtgtaacca

SEQ ID NO: 1008156 - DNA, 15 bp, Homo sapiens
tactatagtgtaacc

SEQ ID NO: 1008157 - DNA, 15 bp, Homo sapiens
atactatagtgtaac

SEQ ID NO: 1008158 - DNA, 15 bp, Homo sapiens
aatactatagtgtaa

SEQ ID NO: 1008159 - DNA, 15 bp, Homo sapiens
taatactatagtgta

SEQ ID NO: 1008160 - DNA, 15 bp, Homo sapiens
ctaatactatagtgt

SEQ ID NO: 1008161 - DNA, 15 bp, Homo sapiens
tctaatactatagtg

SEQ ID NO: 1008162 - DNA, 15 bp, Homo sapiens
ttctaatactatagt

SEQ ID NO: 1008163 - DNA, 15 bp, Homo sapiens
cttctaatactatag

SEQ ID NO: 1008164 - DNA, 15 bp, Homo sapiens
acttctaatactata

SEQ ID NO: 1008165 - DNA, 15 bp, Homo sapiens
tacttctaatactat

SEQ ID NO: 1008166 - DNA, 15 bp, Homo sapiens
ttacttctaatacta

SEQ ID NO: 1008167 - DNA, 15 bp, Homo sapiens
tttacttctaatact

SEQ ID NO: 1008168 - DNA, 15 bp, Homo sapiens
ttttacttctaatac

SEQ ID NO: 1008169 - DNA, 15 bp, Homo sapiens
tttttacttctaata

SEQ ID NO: 1008170 - DNA, 15 bp, Homo sapiens
ttttttacttctaat

SEQ ID NO: 1008171 - DNA, 15 bp, Homo sapiens
tttttttacttctaa

SEQ ID NO: 1008172 - DNA, 15 bp, Homo sapiens
ttttttttacttcta

SEQ ID NO: 1008173 - DNA, 15 bp, Homo sapiens
cttttttttacttct

SEQ ID NO: 1008174 - DNA, 15 bp, Homo sapiens
tcttttttttacttc

SEQ ID NO: 1008175 - DNA, 15 bp, Homo sapiens
atcttttttttactt

SEQ ID NO: 1008176 - DNA, 15 bp, Homo sapiens
aatcttttttttact

SEQ ID NO: 1008177 - DNA, 15 bp, Homo sapiens
taatcttttttttac

SEQ ID NO: 1008178 - DNA, 15 bp, Homo sapiens
ataatctttttttta

SEQ ID NO: 1008179 - DNA, 15 bp, Homo sapiens
gtataatcttttttt

SEQ ID NO: 1008180 - DNA, 15 bp, Homo sapiens
ggtataatctttttt

SEQ ID NO: 1008181 - DNA, 15 bp, Homo sapiens
tggtataatcttttt

SEQ ID NO: 1008182 - DNA, 15 bp, Homo sapiens
ttggtataatctttt

SEQ ID NO: 1008183 - DNA, 15 bp, Homo sapiens
gttggtataatcttt

SEQ ID NO: 1008184 - DNA, 15 bp, Homo sapiens
tgttggtataatctt

SEQ ID NO: 1008185 - DNA, 15 bp, Homo sapiens
ttgttggtataatct

SEQ ID NO: 1008186 - DNA, 15 bp, Homo sapiens
tttgttggtataatc

SEQ ID NO: 1008187 - DNA, 15 bp, Homo sapiens
ttttgttggtataat

SEQ ID NO: 1008188 - DNA, 15 bp, Homo sapiens
attttgttggtataa

SEQ ID NO: 1008189 - DNA, 15 bp, Homo sapiens
tattttgttggtata

SEQ ID NO: 1008190 - DNA, 15 bp, Homo sapiens
ttattttgttggtat

SEQ ID NO: 1008191 - DNA, 15 bp, Homo sapiens
cttattttgttggta

SEQ ID NO: 1008192 - DNA, 15 bp, Homo sapiens
tcttattttgttggt

SEQ ID NO: 1008193 - DNA, 15 bp, Homo sapiens
ttcttattttgttgg

SEQ ID NO: 1008194 - DNA, 15 bp, Homo sapiens
gttcttattttgttg

SEQ ID NO: 1008195 - DNA, 15 bp, Homo sapiens
tgttcttattttgtt

SEQ ID NO: 1008196 - DNA, 15 bp, Homo sapiens
atgttcttattttgt

SEQ ID NO: 1008197 - DNA, 15 bp, Homo sapiens
catgttcttattttg

SEQ ID NO: 1008198 - DNA, 15 bp, Homo sapiens
acatgttcttatttt

SEQ ID NO: 1008199 - DNA, 15 bp, Homo sapiens
aacatgttcttattt

SEQ ID NO: 1008200 - DNA, 15 bp, Homo sapiens
taacatgttcttatt

SEQ ID NO: 1008201 - DNA, 15 bp, Homo sapiens
ttaacatgttcttat

SEQ ID NO: 1008202 - DNA, 15 bp, Homo sapiens
attaacatgttctta

SEQ ID NO: 1008203 - DNA, 15 bp, Homo sapiens
cattaacatgttctt

SEQ ID NO: 1008204 - DNA, 15 bp, Homo sapiens
acattaacatgttct

SEQ ID NO: 1008205 - DNA, 15 bp, Homo sapiens
tacattaacatgttc

SEQ ID NO: 1008206 - DNA, 15 bp, Homo sapiens
gtacattaacatgtt

SEQ ID NO: 1008207 - DNA, 15 bp, Homo sapiens
agtacattaacatgt

SEQ ID NO: 1008208 - DNA, 15 bp, Homo sapiens
aagtacattaacatg

SEQ ID NO: 1008209 - DNA, 15 bp, Homo sapiens
caagtacattaacat

SEQ ID NO: 1008210 - DNA, 15 bp, Homo sapiens
acaagtacattaaca

SEQ ID NO: 1008211 - DNA, 15 bp, Homo sapiens
tacaagtacattaac

SEQ ID NO: 1008212 - DNA, 15 bp, Homo sapiens
ttacaagtacattaa

SEQ ID NO: 1008213 - DNA, 15 bp, Homo sapiens
attacaagtacatta

SEQ ID NO: 1008214 - DNA, 15 bp, Homo sapiens
cattacaagtacatt

SEQ ID NO: 1008215 - DNA, 15 bp, Homo sapiens
tcattacaagtacat

SEQ ID NO: 1008216 - DNA, 15 bp, Homo sapiens
ttcattacaagtaca

SEQ ID NO: 1008217 - DNA, 15 bp, Homo sapiens
attcattacaagtac

SEQ ID NO: 1008218 - DNA, 15 bp, Homo sapiens
tattcattacaagta

SEQ ID NO: 1008219 - DNA, 15 bp, Homo sapiens
ttattcattacaagt

SEQ ID NO: 1008220 - DNA, 15 bp, Homo sapiens
tttattcattacaag

SEQ ID NO: 1008221 - DNA, 15 bp, Homo sapiens
gtttattcattacaa

SEQ ID NO: 1008222 - DNA, 15 bp, Homo sapiens
tgtttattcattaca

SEQ ID NO: 1008223 - DNA, 15 bp, Homo sapiens
atgtttattcattac

SEQ ID NO: 1008224 - DNA, 15 bp, Homo sapiens
catgtttattcatta

SEQ ID NO: 1008225 - DNA, 15 bp, Homo sapiens
tcatgtttattcatt

SEQ ID NO: 1008226 - DNA, 15 bp, Homo sapiens
ttcatgtttattcat

SEQ ID NO: 1008227 - DNA, 15 bp, Homo sapiens
attcatgtttattca

SEQ ID NO: 1008228 - DNA, 15 bp, Homo sapiens
tattcatgtttattc

SEQ ID NO: 1008229 - DNA, 15 bp, Homo sapiens
ttattcatgtttatt

SEQ ID NO: 1008230 - DNA, 15 bp, Homo sapiens
tttattcatgtttat

SEQ ID NO: 1008231 - DNA, 15 bp, Homo sapiens
ctttattcatgttta

SEQ ID NO: 1008232 - DNA, 15 bp, Homo sapiens
gctttattcatgttt

SEQ ID NO: 1008233 - DNA, 15 bp, Homo sapiens
agctttattcatgtt

SEQ ID NO: 1008234 - DNA, 15 bp, Homo sapiens
gagctttattcatgt

SEQ ID NO: 1008235 - DNA, 15 bp, Homo sapiens
agagctttattcatg

SEQ ID NO: 1008236 - DNA, 15 bp, Homo sapiens
aagagctttattcat

SEQ ID NO: 1008237 - DNA, 15 bp, Homo sapiens
taagagctttattca

SEQ ID NO: 1008238 - DNA, 15 bp, Homo sapiens
ataagagctttattc

SEQ ID NO: 1008239 - DNA, 15 bp, Homo sapiens
cataagagctttatt

SEQ ID NO: 1008240 - DNA, 15 bp, Homo sapiens
gcataagagctttat

SEQ ID NO: 1008241 - DNA, 15 bp, Homo sapiens
agcataagagcttta

SEQ ID NO: 1008242 - DNA, 15 bp, Homo sapiens
tagcataagagcttt

SEQ ID NO: 1008243 - DNA, 15 bp, Homo sapiens
atagcataagagctt

SEQ ID NO: 1008244 - DNA, 15 bp, Homo sapiens
tatagcataagagct

SEQ ID NO: 1008245 - DNA, 15 bp, Homo sapiens
atatagcataagagc

SEQ ID NO: 1008246 - DNA, 15 bp, Homo sapiens
tatatagcataagag

SEQ ID NO: 1008247 - DNA, 15 bp, Homo sapiens
ctatatagcataaga

SEQ ID NO: 1008248 - DNA, 15 bp, Homo sapiens
cctatatagcataag

SEQ ID NO: 1008249 - DNA, 15 bp, Homo sapiens
acctatatagcataa

SEQ ID NO: 1008250 - DNA, 15 bp, Homo sapiens
cacctatatagcata

SEQ ID NO: 1008251 - DNA, 15 bp, Homo sapiens
gcacctatatagcat

SEQ ID NO: 1008252 - DNA, 15 bp, Homo sapiens
tgcacctatatagca

SEQ ID NO: 1008253 - DNA, 15 bp, Homo sapiens
gtgcacctatatagc

SEQ ID NO: 1008254 - DNA, 15 bp, Homo sapiens
agtgcacctatatag

SEQ ID NO: 1008255 - DNA, 15 bp, Homo sapiens
tagtgcacctatata

SEQ ID NO: 1008256 - DNA, 15 bp, Homo sapiens
ttagtgcacctatat

SEQ ID NO: 1008257 - DNA, 15 bp, Homo sapiens
tttagtgcacctata

SEQ ID NO: 1008258 - DNA, 15 bp, Homo sapiens
gtttagtgcacctat

SEQ ID NO: 1008259 - DNA, 15 bp, Homo sapiens
tgtttagtgcaccta

SEQ ID NO: 1008260 - DNA, 15 bp, Homo sapiens
ttgtttagtgcacct

SEQ ID NO: 1008261 - DNA, 15 bp, Homo sapiens
attgtttagtgcacc

SEQ ID NO: 1008262 - DNA, 15 bp, Homo sapiens
gattgtttagtgcac

SEQ ID NO: 1008263 - DNA, 15 bp, Homo sapiens
agattgtttagtgca

SEQ ID NO: 1008264 - DNA, 15 bp, Homo sapiens
tagattgtttagtgc

SEQ ID NO: 1008265 - DNA, 15 bp, Homo sapiens
gtagattgtttagtg

SEQ ID NO: 1008266 - DNA, 15 bp, Homo sapiens
agtagattgtttagt

SEQ ID NO: 1008267 - DNA, 15 bp, Homo sapiens
tagtagattgtttag

SEQ ID NO: 1008268 - DNA, 15 bp, Homo sapiens
ctagtagattgttta

SEQ ID NO: 1008269 - DNA, 15 bp, Homo sapiens
tctagtagattgttt

SEQ ID NO: 1008270 - DNA, 15 bp, Homo sapiens
ttctagtagattgtt

SEQ ID NO: 1008271 - DNA, 15 bp, Homo sapiens
attctagtagattgt

SEQ ID NO: 1008272 - DNA, 15 bp, Homo sapiens
aattctagtagattg

SEQ ID NO: 1008273 - DNA, 15 bp, Homo sapiens
caattctagtagatt

SEQ ID NO: 1008274 - DNA, 15 bp, Homo sapiens
acaattctagtagat

SEQ ID NO: 1008275 - DNA, 15 bp, Homo sapiens
gacaattctagtaga

SEQ ID NO: 1008276 - DNA, 15 bp, Homo sapiens
tgacaattctagtag

SEQ ID NO: 1008277 - DNA, 15 bp, Homo sapiens
ctgacaattctagta

SEQ ID NO: 1008278 - DNA, 15 bp, Homo sapiens
gctgacaattctagt

SEQ ID NO: 1008279 - DNA, 15 bp, Homo sapiens
tgctgacaattctag

SEQ ID NO: 1008280 - DNA, 15 bp, Homo sapiens
ttgctgacaattcta

SEQ ID NO: 1008281 - DNA, 15 bp, Homo sapiens
tttgctgacaattct

SEQ ID NO: 1008282 - DNA, 15 bp, Homo sapiens
gtttgctgacaattc

SEQ ID NO: 1008283 - DNA, 15 bp, Homo sapiens
agtttgctgacaatt

SEQ ID NO: 1008284 - DNA, 15 bp, Homo sapiens
tagtttgctgacaat

SEQ ID NO: 1008285 - DNA, 15 bp, Homo sapiens
gtagtttgctgacaa

SEQ ID NO: 1008286 - DNA, 15 bp, Homo sapiens
cgtagtttgctgaca

SEQ ID NO: 1008287 - DNA, 15 bp, Homo sapiens
acgtagtttgctgac

SEQ ID NO: 1008288 - DNA, 15 bp, Homo sapiens
tacgtagtttgctga

SEQ ID NO: 1008289 - DNA, 15 bp, Homo sapiens
atacgtagtttgctg

SEQ ID NO: 1008290 - DNA, 15 bp, Homo sapiens
gatacgtagtttgct

SEQ ID NO: 1008291 - DNA, 15 bp, Homo sapiens
agatacgtagtttgc

SEQ ID NO: 1008292 - DNA, 15 bp, Homo sapiens
aagatacgtagtttg

SEQ ID NO: 1008293 - DNA, 15 bp, Homo sapiens
taagatacgtagttt

SEQ ID NO: 1008294 - DNA, 15 bp, Homo sapiens
ttaagatacgtagtt

SEQ ID NO: 1008295 - DNA, 15 bp, Homo sapiens
attaagatacgtagt

SEQ ID NO: 1008296 - DNA, 15 bp, Homo sapiens
gattaagatacgtag

SEQ ID NO: 1008297 - DNA, 15 bp, Homo sapiens
ggattaagatacgta

SEQ ID NO: 1008298 - DNA, 15 bp, Homo sapiens
aggattaagatacgt

SEQ ID NO: 1008299 - DNA, 15 bp, Homo sapiens
caggattaagatacg

SEQ ID NO: 1008300 - DNA, 15 bp, Homo sapiens
tcaggattaagatac

SEQ ID NO: 1008301 - DNA, 15 bp, Homo sapiens
ttcaggattaagata

SEQ ID NO: 1008302 - DNA, 15 bp, Homo sapiens
tttcaggattaagat

SEQ ID NO: 1008303 - DNA, 15 bp, Homo sapiens
ctttcaggattaaga

SEQ ID NO: 1008304 - DNA, 15 bp, Homo sapiens
cctttcaggattaag

SEQ ID NO: 1008305 - DNA, 15 bp, Homo sapiens
ccctttcaggattaa

SEQ ID NO: 1008306 - DNA, 15 bp, Homo sapiens
accctttcaggatta

SEQ ID NO: 1008307 - DNA, 15 bp, Homo sapiens
gaccctttcaggatt

SEQ ID NO: 1008308 - DNA, 15 bp, Homo sapiens
ggaccctttcaggat

SEQ ID NO: 1008309 - DNA, 15 bp, Homo sapiens
gggaccctttcagga

SEQ ID NO: 1008310 - DNA, 15 bp, Homo sapiens
tgggaccctttcagg

SEQ ID NO: 1008311 - DNA, 15 bp, Homo sapiens
ttgggaccctttcag

SEQ ID NO: 1008312 - DNA, 15 bp, Homo sapiens
tttgggaccctttca

SEQ ID NO: 1008313 - DNA, 15 bp, Homo sapiens
gtttgggaccctttc

SEQ ID NO: 1008314 - DNA, 15 bp, Homo sapiens
ggtttgggacccttt

SEQ ID NO: 1008315 - DNA, 15 bp, Homo sapiens
tggtttgggaccctt

SEQ ID NO: 1008316 - DNA, 15 bp, Homo sapiens
ttggtttgggaccct

SEQ ID NO: 1008317 - DNA, 15 bp, Homo sapiens
attggtttgggaccc

SEQ ID NO: 1008318 - DNA, 15 bp, Homo sapiens
cattggtttgggacc

SEQ ID NO: 1008319 - DNA, 15 bp, Homo sapiens
tcattggtttgggac

SEQ ID NO: 1008320 - DNA, 15 bp, Homo sapiens
atcattggtttggga

SEQ ID NO: 1008321 - DNA, 15 bp, Homo sapiens
gatcattggtttggg

SEQ ID NO: 1008322 - DNA, 15 bp, Homo sapiens
agatcattggtttgg

SEQ ID NO: 1008323 - DNA, 15 bp, Homo sapiens
tagatcattggtttg

SEQ ID NO: 1008324 - DNA, 15 bp, Homo sapiens
ttagatcattggttt

SEQ ID NO: 1008325 - DNA, 15 bp, Homo sapiens
tttagatcattggtt

SEQ ID NO: 1008326 - DNA, 15 bp, Homo sapiens
ttttagatcattggt

SEQ ID NO: 1008327 - DNA, 15 bp, Homo sapiens
attttagatcattgg

SEQ ID NO: 1008328 - DNA, 15 bp, Homo sapiens
aattttagatcattg

SEQ ID NO: 1008329 - DNA, 15 bp, Homo sapiens
caattttagatcatt

SEQ ID NO: 1008330 - DNA, 15 bp, Homo sapiens
tcaattttagatcat

SEQ ID NO: 1008331 - DNA, 15 bp, Homo sapiens
ttcaattttagatca

SEQ ID NO: 1008332 - DNA, 15 bp, Homo sapiens
attcaattttagatc

SEQ ID NO: 1008333 - DNA, 15 bp, Homo sapiens
gattcaattttagat

SEQ ID NO: 1008334 - DNA, 15 bp, Homo sapiens
tgattcaattttaga

SEQ ID NO: 1008335 - DNA, 15 bp, Homo sapiens
ttgattcaattttag

SEQ ID NO: 1008336 - DNA, 15 bp, Homo sapiens
tttgattcaatttta

SEQ ID NO: 1008337 - DNA, 15 bp, Homo sapiens
gtttgattcaatttt

SEQ ID NO: 1008338 - DNA, 15 bp, Homo sapiens
agtttgattcaattt

SEQ ID NO: 1008339 - DNA, 15 bp, Homo sapiens
aagtttgattcaatt

SEQ ID NO: 1008340 - DNA, 15 bp, Homo sapiens
aaagtttgattcaat

SEQ ID NO: 1008341 - DNA, 15 bp, Homo sapiens
gaaagtttgattcaa

SEQ ID NO: 1008342 - DNA, 15 bp, Homo sapiens
agaaagtttgattca

SEQ ID NO: 1008343 - DNA, 15 bp, Homo sapiens
aagaaagtttgattc

SEQ ID NO: 1008344 - DNA, 15 bp, Homo sapiens
gaagaaagtttgatt

SEQ ID NO: 1008345 - DNA, 15 bp, Homo sapiens
ggaagaaagtttgat

SEQ ID NO: 1008346 - DNA, 15 bp, Homo sapiens
aggaagaaagtttga

SEQ ID NO: 1008347 - DNA, 15 bp, Homo sapiens
aaggaagaaagtttg

SEQ ID NO: 1008348 - DNA, 15 bp, Homo sapiens
caaggaagaaagttt

SEQ ID NO: 1008349 - DNA, 15 bp, Homo sapiens
tcaaggaagaaagtt

SEQ ID NO: 1008350 - DNA, 15 bp, Homo sapiens
ctcaaggaagaaagt

SEQ ID NO: 1008351 - DNA, 15 bp, Homo sapiens
gctcaaggaagaaag

SEQ ID NO: 1008352 - DNA, 15 bp, Homo sapiens
tgctcaaggaagaaa

SEQ ID NO: 1008353 - DNA, 15 bp, Homo sapiens
atgctcaaggaagaa

SEQ ID NO: 1008354 - DNA, 15 bp, Homo sapiens
tatgctcaaggaaga

SEQ ID NO: 1008355 - DNA, 15 bp, Homo sapiens
ttatgctcaaggaag

SEQ ID NO: 1008356 - DNA, 15 bp, Homo sapiens
attatgctcaaggaa

SEQ ID NO: 1008357 - DNA, 15 bp, Homo sapiens
aattatgctcaagga

SEQ ID NO: 1008358 - DNA, 15 bp, Homo sapiens
taattatgctcaagg

SEQ ID NO: 1008359 - DNA, 15 bp, Homo sapiens
gtaattatgctcaag

SEQ ID NO: 1008360 - DNA, 15 bp, Homo sapiens
agtaattatgctcaa

SEQ ID NO: 1008361 - DNA, 15 bp, Homo sapiens
aagtaattatgctca

SEQ ID NO: 1008362 - DNA, 15 bp, Homo sapiens
taagtaattatgctc

SEQ ID NO: 1008363 - DNA, 15 bp, Homo sapiens
ttaagtaattatgct

SEQ ID NO: 1008364 - DNA, 15 bp, Homo sapiens
tttaagtaattatgc

SEQ ID NO: 1008365 - DNA, 15 bp, Homo sapiens
atttaagtaattatg

SEQ ID NO: 1008366 - DNA, 15 bp, Homo sapiens
catttaagtaattat

SEQ ID NO: 1008367 - DNA, 15 bp, Homo sapiens
tcatttaagtaatta

SEQ ID NO: 1008368 - DNA, 15 bp, Homo sapiens
atcatttaagtaatt

SEQ ID NO: 1008369 - DNA, 15 bp, Homo sapiens
aatcatttaagtaat

SEQ ID NO: 1008370 - DNA, 15 bp, Homo sapiens
aaatcatttaagtaa

SEQ ID NO: 1008371 - DNA, 15 bp, Homo sapiens
taaatcatttaagta

SEQ ID NO: 1008372 - DNA, 15 bp, Homo sapiens
ataaatcatttaagt

SEQ ID NO: 1008373 - DNA, 15 bp, Homo sapiens
aataaatcatttaag

SEQ ID NO: 1008374 - DNA, 15 bp, Homo sapiens
taataaatcatttaa

SEQ ID NO: 1008375 - DNA, 15 bp, Homo sapiens
ttaataaatcattta

SEQ ID NO: 1008376 - DNA, 15 bp, Homo sapiens
tttaataaatcattt

SEQ ID NO: 1008377 - DNA, 15 bp, Homo sapiens
ttttaataaatcatt

SEQ ID NO: 1008378 - DNA, 15 bp, Homo sapiens
attttaataaatcat

SEQ ID NO: 1008379 - DNA, 15 bp, Homo sapiens
tattttaataaatca

SEQ ID NO: 1008380 - DNA, 15 bp, Homo sapiens
ctattttaataaatc

SEQ ID NO: 1008381 - DNA, 15 bp, Homo sapiens
gctattttaataaat

SEQ ID NO: 1008382 - DNA, 15 bp, Homo sapiens
ggctattttaataaa

SEQ ID NO: 1008383 - DNA, 15 bp, Homo sapiens
tggctattttaataa

SEQ ID NO: 1008384 - DNA, 15 bp, Homo sapiens
ctggctattttaata

SEQ ID NO: 1008385 - DNA, 15 bp, Homo sapiens
gctggctattttaat

SEQ ID NO: 1008386 - DNA, 15 bp, Homo sapiens
tgctggctattttaa

SEQ ID NO: 1008387 - DNA, 15 bp, Homo sapiens
atgctggctatttta

SEQ ID NO: 1008388 - DNA, 15 bp, Homo sapiens
aatgctggctatttt

SEQ ID NO: 1008389 - DNA, 15 bp, Homo sapiens
aaatgctggctattt

SEQ ID NO: 1008390 - DNA, 15 bp, Homo sapiens
taaatgctggctatt

SEQ ID NO: 1008391 - DNA, 15 bp, Homo sapiens
ttaaatgctggctat

SEQ ID NO: 1008392 - DNA, 15 bp, Homo sapiens
tttaaatgctggcta

SEQ ID NO: 1008393 - DNA, 15 bp, Homo sapiens
ttttaaatgctggct

SEQ ID NO: 1008394 - DNA, 15 bp, Homo sapiens
cttttaaatgctggc

SEQ ID NO: 1008395 - DNA, 15 bp, Homo sapiens
gcttttaaatgctgg

SEQ ID NO: 1008396 - DNA, 15 bp, Homo sapiens
agcttttaaatgctg

SEQ ID NO: 1008397 - DNA, 15 bp, Homo sapiens
aagcttttaaatgct

SEQ ID NO: 1008398 - DNA, 15 bp, Homo sapiens
taagcttttaaatgc

SEQ ID NO: 1008399 - DNA, 15 bp, Homo sapiens
ttaagcttttaaatg

SEQ ID NO: 1008400 - DNA, 15 bp, Homo sapiens
tttaagcttttaaat

SEQ ID NO: 1008401 - DNA, 15 bp, Homo sapiens
ttttaagcttttaaa

SEQ ID NO: 1008402 - DNA, 15 bp, Homo sapiens
attttaagcttttaa

SEQ ID NO: 1008403 - DNA, 15 bp, Homo sapiens
cattttaagctttta

SEQ ID NO: 1008404 - DNA, 15 bp, Homo sapiens
acattttaagctttt

SEQ ID NO: 1008405 - DNA, 15 bp, Homo sapiens
tacattttaagcttt

SEQ ID NO: 1008406 - DNA, 15 bp, Homo sapiens
ttacattttaagctt

SEQ ID NO: 1008407 - DNA, 15 bp, Homo sapiens
tttacattttaagct

SEQ ID NO: 1008408 - DNA, 15 bp, Homo sapiens
atttacattttaagc

SEQ ID NO: 1008409 - DNA, 15 bp, Homo sapiens
tatttacattttaag

SEQ ID NO: 1008410 - DNA, 15 bp, Homo sapiens
atatttacattttaa

SEQ ID NO: 1008411 - DNA, 15 bp, Homo sapiens
gatatttacatttta

SEQ ID NO: 1008412 - DNA, 15 bp, Homo sapiens
tgatatttacatttt

SEQ ID NO: 1008413 - DNA, 15 bp, Homo sapiens
atgatatttacattt

SEQ ID NO: 1008414 - DNA, 15 bp, Homo sapiens
tatgatatttacatt

SEQ ID NO: 1008415 - DNA, 15 bp, Homo sapiens
ttatgatatttacat

SEQ ID NO: 1008416 - DNA, 15 bp, Homo sapiens
attatgatatttaca

SEQ ID NO: 1008417 - DNA, 15 bp, Homo sapiens
cattatgatatttac

SEQ ID NO: 1008418 - DNA, 15 bp, Homo sapiens
acattatgatattta

SEQ ID NO: 1008419 - DNA, 15 bp, Homo sapiens
cacattatgatattt

SEQ ID NO: 1008420 - DNA, 15 bp, Homo sapiens
ccacattatgatatt

SEQ ID NO: 1008421 - DNA, 15 bp, Homo sapiens
accacattatgatat

SEQ ID NO: 1008422 - DNA, 15 bp, Homo sapiens
taccacattatgata

SEQ ID NO: 1008423 - DNA, 15 bp, Homo sapiens
ataccacattatgat

SEQ ID NO: 1008424 - DNA, 15 bp, Homo sapiens
gataccacattatga

SEQ ID NO: 1008425 - DNA, 15 bp, Homo sapiens
ggataccacattatg

SEQ ID NO: 1008426 - DNA, 15 bp, Homo sapiens
aggataccacattat

SEQ ID NO: 1008427 - DNA, 15 bp, Homo sapiens
taggataccacatta

SEQ ID NO: 1008428 - DNA, 15 bp, Homo sapiens
ctaggataccacatt

SEQ ID NO: 1008429 - DNA, 15 bp, Homo sapiens
tctaggataccacat

SEQ ID NO: 1008430 - DNA, 15 bp, Homo sapiens
atctaggataccaca

SEQ ID NO: 1008431 - DNA, 15 bp, Homo sapiens
tatctaggataccac

SEQ ID NO: 1008432 - DNA, 15 bp, Homo sapiens
ctatctaggatacca

SEQ ID NO: 1008433 - DNA, 15 bp, Homo sapiens
gctatctaggatacc

SEQ ID NO: 1008434 - DNA, 15 bp, Homo sapiens
tgctatctaggatac

SEQ ID NO: 1008435 - DNA, 15 bp, Homo sapiens
atgctatctaggata

SEQ ID NO: 1008436 - DNA, 15 bp, Homo sapiens
gatgctatctaggat

SEQ ID NO: 1008437 - DNA, 15 bp, Homo sapiens
ggatgctatctagga

SEQ ID NO: 1008438 - DNA, 15 bp, Homo sapiens
gggatgctatctagg

SEQ ID NO: 1008439 - DNA, 15 bp, Homo sapiens
tgggatgctatctag

SEQ ID NO: 1008440 - DNA, 15 bp, Homo sapiens
ctgggatgctatcta

SEQ ID NO: 1008441 - DNA, 15 bp, Homo sapiens
tctgggatgctatct

SEQ ID NO: 1008442 - DNA, 15 bp, Homo sapiens
ttctgggatgctatc

SEQ ID NO: 1008443 - DNA, 15 bp, Homo sapiens
gttctgggatgctat

SEQ ID NO: 1008444 - DNA, 15 bp, Homo sapiens
tgttctgggatgcta

SEQ ID NO: 1008445 - DNA, 15 bp, Homo sapiens
ctgttctgggatgct

SEQ ID NO: 1008446 - DNA, 15 bp, Homo sapiens
tctgttctgggatgc

SEQ ID NO: 1008447 - DNA, 15 bp, Homo sapiens
ttctgttctgggatg

SEQ ID NO: 1008448 - DNA, 15 bp, Homo sapiens
tttctgttctgggat

SEQ ID NO: 1008449 - DNA, 15 bp, Homo sapiens
ttttctgttctggga

SEQ ID NO: 1008450 - DNA, 15 bp, Homo sapiens
tttttctgttctggg

SEQ ID NO: 1008451 - DNA, 15 bp, Homo sapiens
ctttttctgttctgg

SEQ ID NO: 1008452 - DNA, 15 bp, Homo sapiens
cctttttctgttctg

SEQ ID NO: 1008453 - DNA, 15 bp, Homo sapiens
tcctttttctgttct

SEQ ID NO: 1008454 - DNA, 15 bp, Homo sapiens
atcctttttctgttc

SEQ ID NO: 1008455 - DNA, 15 bp, Homo sapiens
tatcctttttctgtt

SEQ ID NO: 1008456 - DNA, 15 bp, Homo sapiens
atatcctttttctgt

SEQ ID NO: 1008457 - DNA, 15 bp, Homo sapiens
aatatcctttttctg

SEQ ID NO: 1008458 - DNA, 15 bp, Homo sapiens
taatatcctttttct

SEQ ID NO: 1008459 - DNA, 15 bp, Homo sapiens
ctaatatcctttttc

SEQ ID NO: 1008460 - DNA, 15 bp, Homo sapiens
cctaatatccttttt

SEQ ID NO: 1008461 - DNA, 15 bp, Homo sapiens
ccctaatatcctttt

SEQ ID NO: 1008462 - DNA, 15 bp, Homo sapiens
tccctaatatccttt

SEQ ID NO: 1008463 - DNA, 15 bp, Homo sapiens
ttccctaatatcctt

SEQ ID NO: 1008464 - DNA, 15 bp, Homo sapiens
tttccctaatatcct

SEQ ID NO: 1008465 - DNA, 15 bp, Homo sapiens
ttttccctaatatcc

SEQ ID NO: 1008466 - DNA, 15 bp, Homo sapiens
tttttccctaatatc

SEQ ID NO: 1008467 - DNA, 15 bp, Homo sapiens
gtttttccctaatat

SEQ ID NO: 1008468 - DNA, 15 bp, Homo sapiens
agtttttccctaata

SEQ ID NO: 1008469 - DNA, 15 bp, Homo sapiens
cagtttttccctaat

SEQ ID NO: 1008470 - DNA, 15 bp, Homo sapiens
ccagtttttccctaa

SEQ ID NO: 1008471 - DNA, 15 bp, Homo sapiens
tccagtttttcccta

SEQ ID NO: 1008472 - DNA, 15 bp, Homo sapiens
ctccagtttttccct

SEQ ID NO: 1008473 - DNA, 15 bp, Homo sapiens
cctccagtttttccc

SEQ ID NO: 1008474 - DNA, 15 bp, Homo sapiens
tcctccagtttttcc

SEQ ID NO: 1008475 - DNA, 15 bp, Homo sapiens
ttcctccagtttttc

SEQ ID NO: 1008476 - DNA, 15 bp, Homo sapiens
attcctccagttttt

SEQ ID NO: 1008477 - DNA, 15 bp, Homo sapiens
cattcctccagtttt

SEQ ID NO: 1008478 - DNA, 15 bp, Homo sapiens
ccattcctccagttt

SEQ ID NO: 1008479 - DNA, 15 bp, Homo sapiens
tccattcctccagtt

SEQ ID NO: 1008480 - DNA, 15 bp, Homo sapiens
ttccattcctccagt

SEQ ID NO: 1008481 - DNA, 15 bp, Homo sapiens
attccattcctccag

SEQ ID NO: 1008482 - DNA, 15 bp, Homo sapiens
tattccattcctcca

SEQ ID NO: 1008483 - DNA, 15 bp, Homo sapiens
ttattccattcctcc

SEQ ID NO: 1008484 - DNA, 15 bp, Homo sapiens
tttattccattcctc

SEQ ID NO: 1008485 - DNA, 15 bp, Homo sapiens
atttattccattcct

SEQ ID NO: 1008486 - DNA, 15 bp, Homo sapiens
aatttattccattcc

SEQ ID NO: 1008487 - DNA, 15 bp, Homo sapiens
taatttattccattc

SEQ ID NO: 1008488 - DNA, 15 bp, Homo sapiens
ataatttattccatt

SEQ ID NO: 1008489 - DNA, 15 bp, Homo sapiens
cataatttattccat

SEQ ID NO: 1008490 - DNA, 15 bp, Homo sapiens
gcataatttattcca

SEQ ID NO: 1008491 - DNA, 15 bp, Homo sapiens
tgcataatttattcc

SEQ ID NO: 1008492 - DNA, 15 bp, Homo sapiens
ctgcataatttattc

SEQ ID NO: 1008493 - DNA, 15 bp, Homo sapiens
actgcataatttatt

SEQ ID NO: 1008494 - DNA, 15 bp, Homo sapiens
aactgcataatttat

SEQ ID NO: 1008495 - DNA, 15 bp, Homo sapiens
aaactgcataattta

SEQ ID NO: 1008496 - DNA, 15 bp, Homo sapiens
taaactgcataattt

SEQ ID NO: 1008497 - DNA, 15 bp, Homo sapiens
ctaaactgcataatt

SEQ ID NO: 1008498 - DNA, 15 bp, Homo sapiens
actaaactgcataat

SEQ ID NO: 1008499 - DNA, 15 bp, Homo sapiens
aactaaactgcataa

SEQ ID NO: 1008500 - DNA, 15 bp, Homo sapiens
taactaaactgcata

SEQ ID NO: 1008501 - DNA, 15 bp, Homo sapiens
ataactaaactgcat

SEQ ID NO: 1008502 - DNA, 15 bp, Homo sapiens
aataactaaactgca

SEQ ID NO: 1008503 - DNA, 15 bp, Homo sapiens
taataactaaactgc

SEQ ID NO: 1008504 - DNA, 15 bp, Homo sapiens
ttaataactaaactg

SEQ ID NO: 1008505 - DNA, 15 bp, Homo sapiens
attaataactaaact

SEQ ID NO: 1008506 - DNA, 15 bp, Homo sapiens
tattaataactaaac

SEQ ID NO: 1008507 - DNA, 15 bp, Homo sapiens
ttattaataactaaa

SEQ ID NO: 1008508 - DNA, 15 bp, Homo sapiens
attattaataactaa

SEQ ID NO: 1008509 - DNA, 15 bp, Homo sapiens
cattattaataacta

SEQ ID NO: 1008510 - DNA, 15 bp, Homo sapiens
acattattaataact

SEQ ID NO: 1008511 - DNA, 15 bp, Homo sapiens
tacattattaataac

SEQ ID NO: 1008512 - DNA, 15 bp, Homo sapiens
gtacattattaataa

SEQ ID NO: 1008513 - DNA, 15 bp, Homo sapiens
agtacattattaata

SEQ ID NO: 1008514 - DNA, 15 bp, Homo sapiens
tagtacattattaat

SEQ ID NO: 1008515 - DNA, 15 bp, Homo sapiens
ttagtacattattaa

SEQ ID NO: 1008516 - DNA, 15 bp, Homo sapiens
gttagtacattatta

SEQ ID NO: 1008517 - DNA, 15 bp, Homo sapiens
cgttagtacattatt

SEQ ID NO: 1008518 - DNA, 15 bp, Homo sapiens
acgttagtacattat

SEQ ID NO: 1008519 - DNA, 15 bp, Homo sapiens
gacgttagtacatta

SEQ ID NO: 1008520 - DNA, 15 bp, Homo sapiens
ggacgttagtacatt

SEQ ID NO: 1008521 - DNA, 15 bp, Homo sapiens
aggacgttagtacat

SEQ ID NO: 1008522 - DNA, 15 bp, Homo sapiens
aaggacgttagtaca

SEQ ID NO: 1008523 - DNA, 15 bp, Homo sapiens
taaggacgttagtac

SEQ ID NO: 1008524 - DNA, 15 bp, Homo sapiens
ctaaggacgttagta

SEQ ID NO: 1008525 - DNA, 15 bp, Homo sapiens
actaaggacgttagt

SEQ ID NO: 1008526 - DNA, 15 bp, Homo sapiens
aactaaggacgttag

SEQ ID NO: 1008527 - DNA, 15 bp, Homo sapiens
taactaaggacgtta

SEQ ID NO: 1008528 - DNA, 15 bp, Homo sapiens
ataactaaggacgtt

SEQ ID NO: 1008529 - DNA, 15 bp, Homo sapiens
cataactaaggacgt

SEQ ID NO: 1008530 - DNA, 15 bp, Homo sapiens
tcataactaaggacg

SEQ ID NO: 1008531 - DNA, 15 bp, Homo sapiens
gtcataactaaggac

SEQ ID NO: 1008532 - DNA, 15 bp, Homo sapiens
cgtcataactaagga

SEQ ID NO: 1008533 - DNA, 15 bp, Homo sapiens
tcgtcataactaagg

SEQ ID NO: 1008534 - DNA, 15 bp, Homo sapiens
atcgtcataactaag

SEQ ID NO: 1008535 - DNA, 15 bp, Homo sapiens
aatcgtcataactaa

SEQ ID NO: 1008536 - DNA, 15 bp, Homo sapiens
caatcgtcataacta

SEQ ID NO: 1008537 - DNA, 15 bp, Homo sapiens
acaatcgtcataact

SEQ ID NO: 1008538 - DNA, 15 bp, Homo sapiens
tacaatcgtcataac

SEQ ID NO: 1008539 - DNA, 15 bp, Homo sapiens
gtacaatcgtcataa

SEQ ID NO: 1008540 - DNA, 15 bp, Homo sapiens
ggtacaatcgtcata

SEQ ID NO: 1008541 - DNA, 15 bp, Homo sapiens
tggtacaatcgtcat

SEQ ID NO: 1008542 - DNA, 15 bp, Homo sapiens
atggtacaatcgtca

SEQ ID NO: 1008543 - DNA, 15 bp, Homo sapiens
catggtacaatcgtc

SEQ ID NO: 1008544 - DNA, 15 bp, Homo sapiens
ccatggtacaatcgt

SEQ ID NO: 1008545 - DNA, 15 bp, Homo sapiens
accatggtacaatcg

SEQ ID NO: 1008546 - DNA, 15 bp, Homo sapiens
taccatggtacaatc

SEQ ID NO: 1008547 - DNA, 15 bp, Homo sapiens
ttaccatggtacaat

SEQ ID NO: 1008548 - DNA, 15 bp, Homo sapiens
attaccatggtacaa

SEQ ID NO: 1008549 - DNA, 15 bp, Homo sapiens
cattaccatggtaca

SEQ ID NO: 1008550 - DNA, 15 bp, Homo sapiens
acattaccatggtac

SEQ ID NO: 1008551 - DNA, 15 bp, Homo sapiens
tacattaccatggta

SEQ ID NO: 1008552 - DNA, 15 bp, Homo sapiens
ttacattaccatggt

SEQ ID NO: 1008553 - DNA, 15 bp, Homo sapiens
cttacattaccatgg

SEQ ID NO: 1008554 - DNA, 15 bp, Homo sapiens
tcttacattaccatg

SEQ ID NO: 1008555 - DNA, 15 bp, Homo sapiens
atcttacattaccat

SEQ ID NO: 1008556 - DNA, 15 bp, Homo sapiens
tatcttacattacca

SEQ ID NO: 1008557 - DNA, 15 bp, Homo sapiens
gtatcttacattacc

SEQ ID NO: 1008558 - DNA, 15 bp, Homo sapiens
agtatcttacattac

SEQ ID NO: 1008559 - DNA, 15 bp, Homo sapiens
tagtatcttacatta

SEQ ID NO: 1008560 - DNA, 15 bp, Homo sapiens
ttagtatcttacatt

SEQ ID NO: 1008561 - DNA, 15 bp, Homo sapiens
gttagtatcttacat

SEQ ID NO: 1008562 - DNA, 15 bp, Homo sapiens
tgttagtatcttaca

SEQ ID NO: 1008563 - DNA, 15 bp, Homo sapiens
ttgttagtatcttac

SEQ ID NO: 1008564 - DNA, 15 bp, Homo sapiens
attgttagtatctta

SEQ ID NO: 1008565 - DNA, 15 bp, Homo sapiens
tattgttagtatctt

SEQ ID NO: 1008566 - DNA, 15 bp, Homo sapiens
ctattgttagtatct

SEQ ID NO: 1008567 - DNA, 15 bp, Homo sapiens
tctattgttagtatc

SEQ ID NO: 1008568 - DNA, 15 bp, Homo sapiens
ctctattgttagtat

SEQ ID NO: 1008569 - DNA, 15 bp, Homo sapiens
cctctattgttagta

SEQ ID NO: 1008570 - DNA, 15 bp, Homo sapiens
tcctctattgttagt

SEQ ID NO: 1008571 - DNA, 15 bp, Homo sapiens
ttcctctattgttag

SEQ ID NO: 1008572 - DNA, 15 bp, Homo sapiens
tttcctctattgtta

SEQ ID NO: 1008573 - DNA, 15 bp, Homo sapiens
gtttcctctattgtt

SEQ ID NO: 1008574 - DNA, 15 bp, Homo sapiens
ggtttcctctattgt

SEQ ID NO: 1008575 - DNA, 15 bp, Homo sapiens
cggtttcctctattg

SEQ ID NO: 1008576 - DNA, 15 bp, Homo sapiens
ccggtttcctctatt

SEQ ID NO: 1008577 - DNA, 15 bp, Homo sapiens
cccggtttcctctat

SEQ ID NO: 1008578 - DNA, 15 bp, Homo sapiens
acccggtttcctcta

SEQ ID NO: 1008579 - DNA, 15 bp, Homo sapiens
tacccggtttcctct

SEQ ID NO: 1008580 - DNA, 15 bp, Homo sapiens
ttacccggtttcctc

SEQ ID NO: 1008581 - DNA, 15 bp, Homo sapiens
cttacccggtttcct

SEQ ID NO: 1008582 - DNA, 15 bp, Homo sapiens
ccttacccggtttcc

SEQ ID NO: 1008583 - DNA, 15 bp, Homo sapiens
tccttacccggtttc

SEQ ID NO: 1008584 - DNA, 15 bp, Homo sapiens
ctccttacccggttt

SEQ ID NO: 1008585 - DNA, 15 bp, Homo sapiens
actccttacccggtt

SEQ ID NO: 1008586 - DNA, 15 bp, Homo sapiens
tactccttacccggt

SEQ ID NO: 1008587 - DNA, 15 bp, Homo sapiens
atactccttacccgg

SEQ ID NO: 1008588 - DNA, 15 bp, Homo sapiens
tatactccttacccg

SEQ ID NO: 1008589 - DNA, 15 bp, Homo sapiens
gtatactccttaccc

SEQ ID NO: 1008590 - DNA, 15 bp, Homo sapiens
tgtatactccttacc

SEQ ID NO: 1008591 - DNA, 15 bp, Homo sapiens
ctgtatactccttac

SEQ ID NO: 1008592 - DNA, 15 bp, Homo sapiens
actgtatactcctta

SEQ ID NO: 1008593 - DNA, 15 bp, Homo sapiens
tactgtatactcctt

SEQ ID NO: 1008594 - DNA, 15 bp, Homo sapiens
ttactgtatactcct

SEQ ID NO: 1008595 - DNA, 15 bp, Homo sapiens
gttactgtatactcc

SEQ ID NO: 1008596 - DNA, 15 bp, Homo sapiens
agttactgtatactc

SEQ ID NO: 1008597 - DNA, 15 bp, Homo sapiens
gagttactgtatact

SEQ ID NO: 1008598 - DNA, 15 bp, Homo sapiens
agagttactgtatac

SEQ ID NO: 1008599 - DNA, 15 bp, Homo sapiens
tagagttactgtata

SEQ ID NO: 1008600 - DNA, 15 bp, Homo sapiens
atagagttactgtat

SEQ ID NO: 1008601 - DNA, 15 bp, Homo sapiens
tatagagttactgta

SEQ ID NO: 1008602 - DNA, 15 bp, Homo sapiens
gtatagagttactgt

SEQ ID NO: 1008603 - DNA, 15 bp, Homo sapiens
agtatagagttactg

SEQ ID NO: 1008604 - DNA, 15 bp, Homo sapiens
tagtatagagttact

SEQ ID NO: 1008605 - DNA, 15 bp, Homo sapiens
atagtatagagttac

SEQ ID NO: 1008606 - DNA, 15 bp, Homo sapiens
gatagtatagagtta

SEQ ID NO: 1008607 - DNA, 15 bp, Homo sapiens
agatagtatagagtt

SEQ ID NO: 1008608 - DNA, 15 bp, Homo sapiens
aagatagtatagagt

SEQ ID NO: 1008609 - DNA, 15 bp, Homo sapiens
aaagatagtatagag

SEQ ID NO: 1008610 - DNA, 15 bp, Homo sapiens
caaagatagtataga

SEQ ID NO: 1008611 - DNA, 15 bp, Homo sapiens
gcaaagatagtatag

SEQ ID NO: 1008612 - DNA, 15 bp, Homo sapiens
tgcaaagatagtata

SEQ ID NO: 1008613 - DNA, 15 bp, Homo sapiens
ttgcaaagatagtat

SEQ ID NO: 1008614 - DNA, 15 bp, Homo sapiens
gttgcaaagatagta

SEQ ID NO: 1008615 - DNA, 15 bp, Homo sapiens
agttgcaaagatagt

SEQ ID NO: 1008616 - DNA, 15 bp, Homo sapiens
aagttgcaaagatag

SEQ ID NO: 1008617 - DNA, 15 bp, Homo sapiens
aaagttgcaaagata

SEQ ID NO: 1008618 - DNA, 15 bp, Homo sapiens
aaaagttgcaaagat

SEQ ID NO: 1008619 - DNA, 15 bp, Homo sapiens
aaaaagttgcaaaga

SEQ ID NO: 1008620 - DNA, 15 bp, Homo sapiens
aaaaaagttgcaaag

SEQ ID NO: 1008621 - DNA, 15 bp, Homo sapiens
caaaaaagttgcaaa

SEQ ID NO: 1008622 - DNA, 15 bp, Homo sapiens
acaaaaaagttgcaa

SEQ ID NO: 1008623 - DNA, 15 bp, Homo sapiens
tacaaaaaagttgca

SEQ ID NO: 1008624 - DNA, 15 bp, Homo sapiens
ttacaaaaaagttgc

SEQ ID NO: 1008625 - DNA, 15 bp, Homo sapiens
tttacaaaaaagttg

SEQ ID NO: 1008626 - DNA, 15 bp, Homo sapiens
atttacaaaaaagtt

SEQ ID NO: 1008627 - DNA, 15 bp, Homo sapiens
aatttacaaaaaagt

SEQ ID NO: 1008628 - DNA, 15 bp, Homo sapiens
aaatttacaaaaaag

SEQ ID NO: 1008629 - DNA, 15 bp, Homo sapiens
taaatttacaaaaaa

SEQ ID NO: 1008630 - DNA, 15 bp, Homo sapiens
ttaaatttacaaaaa

SEQ ID NO: 1008631 - DNA, 15 bp, Homo sapiens
tttaaatttacaaaa

SEQ ID NO: 1008632 - DNA, 15 bp, Homo sapiens
ttttaaatttacaaa

SEQ ID NO: 1008633 - DNA, 15 bp, Homo sapiens
gttttaaatttacaa

SEQ ID NO: 1008634 - DNA, 15 bp, Homo sapiens
agttttaaatttaca

SEQ ID NO: 1008635 - DNA, 15 bp, Homo sapiens
aagttttaaatttac

SEQ ID NO: 1008636 - DNA, 15 bp, Homo sapiens
gaagttttaaattta

SEQ ID NO: 1008637 - DNA, 15 bp, Homo sapiens
agaagttttaaattt

SEQ ID NO: 1008638 - DNA, 15 bp, Homo sapiens
tagaagttttaaatt

SEQ ID NO: 1008639 - DNA, 15 bp, Homo sapiens
ttagaagttttaaat

SEQ ID NO: 1008640 - DNA, 15 bp, Homo sapiens
tttagaagttttaaa

SEQ ID NO: 1008641 - DNA, 15 bp, Homo sapiens
ttttagaagttttaa

SEQ ID NO: 1008642 - DNA, 15 bp, Homo sapiens
attttagaagtttta

SEQ ID NO: 1008643 - DNA, 15 bp, Homo sapiens
tattttagaagtttt

SEQ ID NO: 1008644 - DNA, 15 bp, Homo sapiens
ttattttagaagttt

SEQ ID NO: 1008645 - DNA, 15 bp, Homo sapiens
tttattttagaagtt

SEQ ID NO: 1008646 - DNA, 15 bp, Homo sapiens
ctttattttagaagt

SEQ ID NO: 1008647 - DNA, 15 bp, Homo sapiens
tctttattttagaag

SEQ ID NO: 1008648 - DNA, 15 bp, Homo sapiens
ttctttattttagaa

SEQ ID NO: 1008649 - DNA, 15 bp, Homo sapiens
gttctttattttaga

SEQ ID NO: 1008650 - DNA, 15 bp, Homo sapiens
tgttctttattttag

SEQ ID NO: 1008651 - DNA, 15 bp, Homo sapiens
ttgttctttatttta

SEQ ID NO: 1008652 - DNA, 15 bp, Homo sapiens
tttgttctttatttt

SEQ ID NO: 1008653 - DNA, 15 bp, Homo sapiens
atttgttctttattt

SEQ ID NO: 1008654 - DNA, 15 bp, Homo sapiens
aatttgttctttatt

SEQ ID NO: 1008655 - DNA, 15 bp, Homo sapiens
aaatttgttctttat

SEQ ID NO: 1008656 - DNA, 15 bp, Homo sapiens
taaatttgttcttta

SEQ ID NO: 1008657 - DNA, 15 bp, Homo sapiens
ttaaatttgttcttt

SEQ ID NO: 1008658 - DNA, 15 bp, Homo sapiens
tttaaatttgttctt

SEQ ID NO: 1008659 - DNA, 15 bp, Homo sapiens
gtttaaatttgttct

SEQ ID NO: 1008660 - DNA, 15 bp, Homo sapiens
tgtttaaatttgttc

SEQ ID NO: 1008661 - DNA, 15 bp, Homo sapiens
atgtttaaatttgtt

SEQ ID NO: 1008662 - DNA, 15 bp, Homo sapiens
aatgtttaaatttgt

SEQ ID NO: 1008663 - DNA, 15 bp, Homo sapiens
taatgtttaaatttg

SEQ ID NO: 1008664 - DNA, 15 bp, Homo sapiens
ttaatgtttaaattt

SEQ ID NO: 1008665 - DNA, 15 bp, Homo sapiens
tttaatgtttaaatt

SEQ ID NO: 1008666 - DNA, 15 bp, Homo sapiens
ttttaatgtttaaat

SEQ ID NO: 1008667 - DNA, 15 bp, Homo sapiens
tttttaatgtttaaa

SEQ ID NO: 1008668 - DNA, 15 bp, Homo sapiens
ctttttaatgtttaa

SEQ ID NO: 1008669 - DNA, 15 bp, Homo sapiens
actttttaatgttta

SEQ ID NO: 1008670 - DNA, 15 bp, Homo sapiens
tactttttaatgttt

SEQ ID NO: 1008671 - DNA, 15 bp, Homo sapiens
atactttttaatgtt

SEQ ID NO: 1008672 - DNA, 15 bp, Homo sapiens
gatactttttaatgt

SEQ ID NO: 1008673 - DNA, 15 bp, Homo sapiens
tgatactttttaatg

SEQ ID NO: 1008674 - DNA, 15 bp, Homo sapiens
gtgatactttttaat

SEQ ID NO: 1008675 - DNA, 15 bp, Homo sapiens
ggtgatactttttaa

SEQ ID NO: 1008676 - DNA, 15 bp, Homo sapiens
tggtgatacttttta

SEQ ID NO: 1008677 - DNA, 15 bp, Homo sapiens
ctggtgatacttttt

SEQ ID NO: 1008678 - DNA, 15 bp, Homo sapiens
cctggtgatactttt

SEQ ID NO: 1008679 - DNA, 15 bp, Homo sapiens
tcctggtgatacttt

SEQ ID NO: 1008680 - DNA, 15 bp, Homo sapiens
ttcctggtgatactt

SEQ ID NO: 1008681 - DNA, 15 bp, Homo sapiens
gttcctggtgatact

SEQ ID NO: 1008682 - DNA, 15 bp, Homo sapiens
tgttcctggtgatac

SEQ ID NO: 1008683 - DNA, 15 bp, Homo sapiens
atgttcctggtgata

SEQ ID NO: 1008684 - DNA, 15 bp, Homo sapiens
tatgttcctggtgat

SEQ ID NO: 1008685 - DNA, 15 bp, Homo sapiens
atatgttcctggtga

SEQ ID NO: 1008686 - DNA, 15 bp, Homo sapiens
tatatgttcctggtg

SEQ ID NO: 1008687 - DNA, 15 bp, Homo sapiens
atatatgttcctggt

SEQ ID NO: 1008688 - DNA, 15 bp, Homo sapiens
gatatatgttcctgg

SEQ ID NO: 1008689 - DNA, 15 bp, Homo sapiens
tgatatatgttcctg

SEQ ID NO: 1008690 - DNA, 15 bp, Homo sapiens
gtgatatatgttcct

SEQ ID NO: 1008691 - DNA, 15 bp, Homo sapiens
agtgatatatgttcc

SEQ ID NO: 1008692 - DNA, 15 bp, Homo sapiens
cagtgatatatgttc

SEQ ID NO: 1008693 - DNA, 15 bp, Homo sapiens
acagtgatatatgtt

SEQ ID NO: 1008694 - DNA, 15 bp, Homo sapiens
aacagtgatatatgt

SEQ ID NO: 1008695 - DNA, 15 bp, Homo sapiens
aaacagtgatatatg

SEQ ID NO: 1008696 - DNA, 15 bp, Homo sapiens
taaacagtgatatat

SEQ ID NO: 1008697 - DNA, 15 bp, Homo sapiens
gtaaacagtgatata

SEQ ID NO: 1008698 - DNA, 15 bp, Homo sapiens
tgtaaacagtgatat

SEQ ID NO: 1008699 - DNA, 15 bp, Homo sapiens
ctgtaaacagtgata

SEQ ID NO: 1008700 - DNA, 15 bp, Homo sapiens
tctgtaaacagtgat

SEQ ID NO: 1008701 - DNA, 15 bp, Homo sapiens
atctgtaaacagtga

SEQ ID NO: 1008702 - DNA, 15 bp, Homo sapiens
catctgtaaacagtg

SEQ ID NO: 1008703 - DNA, 15 bp, Homo sapiens
tcatctgtaaacagt

SEQ ID NO: 1008704 - DNA, 15 bp, Homo sapiens
ttcatctgtaaacag

SEQ ID NO: 1008705 - DNA, 15 bp, Homo sapiens
tttcatctgtaaaca

SEQ ID NO: 1008706 - DNA, 15 bp, Homo sapiens
atttcatctgtaaac

SEQ ID NO: 1008707 - DNA, 15 bp, Homo sapiens
tatttcatctgtaaa

SEQ ID NO: 1008708 - DNA, 15 bp, Homo sapiens
gtatttcatctgtaa

SEQ ID NO: 1008709 - DNA, 15 bp, Homo sapiens
agtatttcatctgta

SEQ ID NO: 1008710 - DNA, 15 bp, Homo sapiens
tagtatttcatctgt

SEQ ID NO: 1008711 - DNA, 15 bp, Homo sapiens
atagtatttcatctg

SEQ ID NO: 1008712 - DNA, 15 bp, Homo sapiens
catagtatttcatct

SEQ ID NO: 1008713 - DNA, 15 bp, Homo sapiens
acatagtatttcatc

SEQ ID NO: 1008714 - DNA, 15 bp, Homo sapiens
tacatagtatttcat

SEQ ID NO: 1008715 - DNA, 15 bp, Homo sapiens
atacatagtatttca

SEQ ID NO: 1008716 - DNA, 15 bp, Homo sapiens
aatacatagtatttc

SEQ ID NO: 1008717 - DNA, 15 bp, Homo sapiens
aaatacatagtattt

SEQ ID NO: 1008718 - DNA, 15 bp, Homo sapiens
aaaatacatagtatt

SEQ ID NO: 1008719 - DNA, 15 bp, Homo sapiens
gaaaatacatagtat

SEQ ID NO: 1008720 - DNA, 15 bp, Homo sapiens
tgaaaatacatagta

SEQ ID NO: 1008721 - DNA, 15 bp, Homo sapiens
atgaaaatacatagt

SEQ ID NO: 1008722 - DNA, 15 bp, Homo sapiens
tatgaaaatacatag

SEQ ID NO: 1008723 - DNA, 15 bp, Homo sapiens
atatgaaaatacata

SEQ ID NO: 1008724 - DNA, 15 bp, Homo sapiens
gatatgaaaatacat

SEQ ID NO: 1008725 - DNA, 15 bp, Homo sapiens
agatatgaaaataca

SEQ ID NO: 1008726 - DNA, 15 bp, Homo sapiens
tagatatgaaaatac

SEQ ID NO: 1008727 - DNA, 15 bp, Homo sapiens
ttagatatgaaaata

SEQ ID NO: 1008728 - DNA, 15 bp, Homo sapiens
attagatatgaaaat

SEQ ID NO: 1008729 - DNA, 15 bp, Homo sapiens
aattagatatgaaaa

SEQ ID NO: 1008730 - DNA, 15 bp, Homo sapiens
aaattagatatgaaa

SEQ ID NO: 1008731 - DNA, 15 bp, Homo sapiens
gaaattagatatgaa

SEQ ID NO: 1008732 - DNA, 15 bp, Homo sapiens
agaaattagatatga

SEQ ID NO: 1008733 - DNA, 15 bp, Homo sapiens
cagaaattagatatg

SEQ ID NO: 1008734 - DNA, 15 bp, Homo sapiens
tcagaaattagatat

SEQ ID NO: 1008735 - DNA, 15 bp, Homo sapiens
atcagaaattagata

SEQ ID NO: 1008736 - DNA, 15 bp, Homo sapiens
gatcagaaattagat

SEQ ID NO: 1008737 - DNA, 15 bp, Homo sapiens
tgatcagaaattaga

SEQ ID NO: 1008738 - DNA, 15 bp, Homo sapiens
atgatcagaaattag

SEQ ID NO: 1008739 - DNA, 15 bp, Homo sapiens
aatgatcagaaatta

SEQ ID NO: 1008740 - DNA, 15 bp, Homo sapiens
caatgatcagaaatt

SEQ ID NO: 1008741 - DNA, 15 bp, Homo sapiens
tcaatgatcagaaat

SEQ ID NO: 1008742 - DNA, 15 bp, Homo sapiens
gtcaatgatcagaaa

SEQ ID NO: 1008743 - DNA, 15 bp, Homo sapiens
agtcaatgatcagaa

SEQ ID NO: 1008744 - DNA, 15 bp, Homo sapiens
aagtcaatgatcaga

SEQ ID NO: 1008745 - DNA, 15 bp, Homo sapiens
gaagtcaatgatcag

SEQ ID NO: 1008746 - DNA, 15 bp, Homo sapiens
tgaagtcaatgatca

SEQ ID NO: 1008747 - DNA, 15 bp, Homo sapiens
ttgaagtcaatgatc

SEQ ID NO: 1008748 - DNA, 15 bp, Homo sapiens
tttgaagtcaatgat

SEQ ID NO: 1008749 - DNA, 15 bp, Homo sapiens
atttgaagtcaatga

SEQ ID NO: 1008750 - DNA, 15 bp, Homo sapiens
gatttgaagtcaatg

SEQ ID NO: 1008751 - DNA, 15 bp, Homo sapiens
tgatttgaagtcaat

SEQ ID NO: 1008752 - DNA, 15 bp, Homo sapiens
ctgatttgaagtcaa

SEQ ID NO: 1008753 - DNA, 15 bp, Homo sapiens
tctgatttgaagtca

SEQ ID NO: 1008754 - DNA, 15 bp, Homo sapiens
ttctgatttgaagtc

SEQ ID NO: 1008755 - DNA, 15 bp, Homo sapiens
tttctgatttgaagt

SEQ ID NO: 1008756 - DNA, 15 bp, Homo sapiens
ttttctgatttgaag

SEQ ID NO: 1008757 - DNA, 15 bp, Homo sapiens
cttttctgatttgaa

SEQ ID NO: 1008758 - DNA, 15 bp, Homo sapiens
acttttctgatttga

SEQ ID NO: 1008759 - DNA, 15 bp, Homo sapiens
cacttttctgatttg

SEQ ID NO: 1008760 - DNA, 15 bp, Homo sapiens
tcacttttctgattt

SEQ ID NO: 1008761 - DNA, 15 bp, Homo sapiens
ttcacttttctgatt

SEQ ID NO: 1008762 - DNA, 15 bp, Homo sapiens
attcacttttctgat

SEQ ID NO: 1008763 - DNA, 15 bp, Homo sapiens
cattcacttttctga

SEQ ID NO: 1008764 - DNA, 15 bp, Homo sapiens
tcattcacttttctg

SEQ ID NO: 1008765 - DNA, 15 bp, Homo sapiens
gtcattcacttttct

SEQ ID NO: 1008766 - DNA, 15 bp, Homo sapiens
tgtcattcacttttc

SEQ ID NO: 1008767 - DNA, 15 bp, Homo sapiens
gtgtcattcactttt

SEQ ID NO: 1008768 - DNA, 15 bp, Homo sapiens
ggtgtcattcacttt

SEQ ID NO: 1008769 - DNA, 15 bp, Homo sapiens
aggtgtcattcactt

SEQ ID NO: 1008770 - DNA, 15 bp, Homo sapiens
gaggtgtcattcact

SEQ ID NO: 1008771 - DNA, 15 bp, Homo sapiens
tgaggtgtcattcac

SEQ ID NO: 1008772 - DNA, 15 bp, Homo sapiens
ttgaggtgtcattca

SEQ ID NO: 1008773 - DNA, 15 bp, Homo sapiens
tttgaggtgtcattc

SEQ ID NO: 1008774 - DNA, 15 bp, Homo sapiens
ttttgaggtgtcatt

SEQ ID NO: 1008775 - DNA, 15 bp, Homo sapiens
attttgaggtgtcat

SEQ ID NO: 1008776 - DNA, 15 bp, Homo sapiens
gattttgaggtgtca

SEQ ID NO: 1008777 - DNA, 15 bp, Homo sapiens
tgattttgaggtgtc

SEQ ID NO: 1008778 - DNA, 15 bp, Homo sapiens
ctgattttgaggtgt

SEQ ID NO: 1008779 - DNA, 15 bp, Homo sapiens
cctgattttgaggtg

SEQ ID NO: 1008780 - DNA, 15 bp, Homo sapiens
acctgattttgaggt

SEQ ID NO: 1008781 - DNA, 15 bp, Homo sapiens
aacctgattttgagg

SEQ ID NO: 1008782 - DNA, 15 bp, Homo sapiens
aaacctgattttgag

SEQ ID NO: 1008783 - DNA, 15 bp, Homo sapiens
aaaacctgattttga

SEQ ID NO: 1008784 - DNA, 15 bp, Homo sapiens
gaaaacctgattttg

SEQ ID NO: 1008785 - DNA, 15 bp, Homo sapiens
agaaaacctgatttt

SEQ ID NO: 1008786 - DNA, 15 bp, Homo sapiens
cagaaaacctgattt

SEQ ID NO: 1008787 - DNA, 15 bp, Homo sapiens
acagaaaacctgatt

SEQ ID NO: 1008788 - DNA, 15 bp, Homo sapiens
aacagaaaacctgat

SEQ ID NO: 1008789 - DNA, 15 bp, Homo sapiens
aaacagaaaacctga

SEQ ID NO: 1008790 - DNA, 15 bp, Homo sapiens
taaacagaaaacctg

SEQ ID NO: 1008791 - DNA, 15 bp, Homo sapiens
gtaaacagaaaacct

SEQ ID NO: 1008792 - DNA, 15 bp, Homo sapiens
agtaaacagaaaacc

SEQ ID NO: 1008793 - DNA, 15 bp, Homo sapiens
cagtaaacagaaaac

SEQ ID NO: 1008794 - DNA, 15 bp, Homo sapiens
tcagtaaacagaaaa

SEQ ID NO: 1008795 - DNA, 15 bp, Homo sapiens
ttcagtaaacagaaa

SEQ ID NO: 1008796 - DNA, 15 bp, Homo sapiens
cttcagtaaacagaa

SEQ ID NO: 1008797 - DNA, 15 bp, Homo sapiens
acttcagtaaacaga

SEQ ID NO: 1008798 - DNA, 15 bp, Homo sapiens
gacttcagtaaacag

SEQ ID NO: 1008799 - DNA, 15 bp, Homo sapiens
agacttcagtaaaca

SEQ ID NO: 1008800 - DNA, 15 bp, Homo sapiens
tagacttcagtaaac

SEQ ID NO: 1008801 - DNA, 15 bp, Homo sapiens
ttagacttcagtaaa

SEQ ID NO: 1008802 - DNA, 15 bp, Homo sapiens
cttagacttcagtaa

SEQ ID NO: 1008803 - DNA, 15 bp, Homo sapiens
tcttagacttcagta

SEQ ID NO: 1008804 - DNA, 15 bp, Homo sapiens
ttcttagacttcagt

SEQ ID NO: 1008805 - DNA, 15 bp, Homo sapiens
tttcttagacttcag

SEQ ID NO: 1008806 - DNA, 15 bp, Homo sapiens
ttttcttagacttca

SEQ ID NO: 1008807 - DNA, 15 bp, Homo sapiens
cttttcttagacttc

SEQ ID NO: 1008808 - DNA, 15 bp, Homo sapiens
tcttttcttagactt

SEQ ID NO: 1008809 - DNA, 15 bp, Homo sapiens
ttcttttcttagact

SEQ ID NO: 1008810 - DNA, 15 bp, Homo sapiens
tttcttttcttagac

SEQ ID NO: 1008811 - DNA, 15 bp, Homo sapiens
ctttcttttcttaga

SEQ ID NO: 1008812 - DNA, 15 bp, Homo sapiens
gctttcttttcttag

SEQ ID NO: 1008813 - DNA, 15 bp, Homo sapiens
tgctttcttttctta

SEQ ID NO: 1008814 - DNA, 15 bp, Homo sapiens
atgctttcttttctt

SEQ ID NO: 1008815 - DNA, 15 bp, Homo sapiens
tatgctttcttttct

SEQ ID NO: 1008816 - DNA, 15 bp, Homo sapiens
gtatgctttcttttc

SEQ ID NO: 1008817 - DNA, 15 bp, Homo sapiens
ggtatgctttctttt

SEQ ID NO: 1008818 - DNA, 15 bp, Homo sapiens
tggtatgctttcttt

SEQ ID NO: 1008819 - DNA, 15 bp, Homo sapiens
ctggtatgctttctt

SEQ ID NO: 1008820 - DNA, 15 bp, Homo sapiens
gctggtatgctttct

SEQ ID NO: 1008821 - DNA, 15 bp, Homo sapiens
agctggtatgctttc

SEQ ID NO: 1008822 - DNA, 15 bp, Homo sapiens
cagctggtatgcttt

SEQ ID NO: 1008823 - DNA, 15 bp, Homo sapiens
ccagctggtatgctt

SEQ ID NO: 1008824 - DNA, 15 bp, Homo sapiens
tccagctggtatgct

SEQ ID NO: 1008825 - DNA, 15 bp, Homo sapiens
ctccagctggtatgc

SEQ ID NO: 1008826 - DNA, 15 bp, Homo sapiens
tctccagctggtatg

SEQ ID NO: 1008827 - DNA, 15 bp, Homo sapiens
ctctccagctggtat

SEQ ID NO: 1008828 - DNA, 15 bp, Homo sapiens
tctctccagctggta

SEQ ID NO: 1008829 - DNA, 15 bp, Homo sapiens
atctctccagctggt

SEQ ID NO: 1008830 - DNA, 15 bp, Homo sapiens
aatctctccagctgg

SEQ ID NO: 1008831 - DNA, 15 bp, Homo sapiens
gaatctctccagctg

SEQ ID NO: 1008832 - DNA, 15 bp, Homo sapiens
tgaatctctccagct

SEQ ID NO: 1008833 - DNA, 15 bp, Homo sapiens
atgaatctctccagc

SEQ ID NO: 1008834 - DNA, 15 bp, Homo sapiens
catgaatctctccag

SEQ ID NO: 1008835 - DNA, 15 bp, Homo sapiens
acatgaatctctcca

SEQ ID NO: 1008836 - DNA, 15 bp, Homo sapiens
aacatgaatctctcc

SEQ ID NO: 1008837 - DNA, 15 bp, Homo sapiens
aaacatgaatctctc

SEQ ID NO: 1008838 - DNA, 15 bp, Homo sapiens
taaacatgaatctct

SEQ ID NO: 1008839 - DNA, 15 bp, Homo sapiens
ataaacatgaatctc

SEQ ID NO: 1008840 - DNA, 15 bp, Homo sapiens
tataaacatgaatct

SEQ ID NO: 1008841 - DNA, 15 bp, Homo sapiens
ttataaacatgaatc

SEQ ID NO: 1008842 - DNA, 15 bp, Homo sapiens
tttataaacatgaat

SEQ ID NO: 1008843 - DNA, 15 bp, Homo sapiens
ctttataaacatgaa

SEQ ID NO: 1008844 - DNA, 15 bp, Homo sapiens
tctttataaacatga

SEQ ID NO: 1008845 - DNA, 15 bp, Homo sapiens
gtctttataaacatg

SEQ ID NO: 1008846 - DNA, 15 bp, Homo sapiens
tgtctttataaacat

SEQ ID NO: 1008847 - DNA, 15 bp, Homo sapiens
ctgtctttataaaca

SEQ ID NO: 1008848 - DNA, 15 bp, Homo sapiens
tctgtctttataaac

SEQ ID NO: 1008849 - DNA, 15 bp, Homo sapiens
atctgtctttataaa

SEQ ID NO: 1008850 - DNA, 15 bp, Homo sapiens
aatctgtctttataa

SEQ ID NO: 1008851 - DNA, 15 bp, Homo sapiens
aaatctgtctttata

SEQ ID NO: 1008852 - DNA, 15 bp, Homo sapiens
taaatctgtctttat

SEQ ID NO: 1008853 - DNA, 15 bp, Homo sapiens
ataaatctgtcttta

SEQ ID NO: 1008854 - DNA, 15 bp, Homo sapiens
tataaatctgtcttt

SEQ ID NO: 1008855 - DNA, 15 bp, Homo sapiens
ttataaatctgtctt

SEQ ID NO: 1008856 - DNA, 15 bp, Homo sapiens
gttataaatctgtct

SEQ ID NO: 1008857 - DNA, 15 bp, Homo sapiens
tgttataaatctgtc

SEQ ID NO: 1008858 - DNA, 15 bp, Homo sapiens
ttgttataaatctgt

SEQ ID NO: 1008859 - DNA, 15 bp, Homo sapiens
gttgttataaatctg

SEQ ID NO: 1008860 - DNA, 15 bp, Homo sapiens
tgttgttataaatct

SEQ ID NO: 1008861 - DNA, 15 bp, Homo sapiens
ttgttgttataaatc

SEQ ID NO: 1008862 - DNA, 15 bp, Homo sapiens
tttgttgttataaat

SEQ ID NO: 1008863 - DNA, 15 bp, Homo sapiens
ttttgttgttataaa

SEQ ID NO: 1008864 - DNA, 15 bp, Homo sapiens
tttttgttgttataa

SEQ ID NO: 1008865 - DNA, 15 bp, Homo sapiens
atttttgttgttata

SEQ ID NO: 1008866 - DNA, 15 bp, Homo sapiens
tatttttgttgttat

SEQ ID NO: 1008867 - DNA, 15 bp, Homo sapiens
ttatttttgttgtta

SEQ ID NO: 1008868 - DNA, 15 bp, Homo sapiens
tttatttttgttgtt

SEQ ID NO: 1008869 - DNA, 15 bp, Homo sapiens
ttttatttttgttgt

SEQ ID NO: 1008870 - DNA, 15 bp, Homo sapiens
attttatttttgttg

SEQ ID NO: 1008871 - DNA, 15 bp, Homo sapiens
tattttatttttgtt

SEQ ID NO: 1008872 - DNA, 15 bp, Homo sapiens
atattttatttttgt

SEQ ID NO: 1008873 - DNA, 15 bp, Homo sapiens
gatattttatttttg

SEQ ID NO: 1008874 - DNA, 15 bp, Homo sapiens
ggatattttattttt

SEQ ID NO: 1008875 - DNA, 15 bp, Homo sapiens
tggatattttatttt

SEQ ID NO: 1008876 - DNA, 15 bp, Homo sapiens
ttggatattttattt

SEQ ID NO: 1008877 - DNA, 15 bp, Homo sapiens
cttggatattttatt

SEQ ID NO: 1008878 - DNA, 15 bp, Homo sapiens
tcttggatattttat

SEQ ID NO: 1008879 - DNA, 15 bp, Homo sapiens
ttcttggatatttta

SEQ ID NO: 1008880 - DNA, 15 bp, Homo sapiens
attcttggatatttt

SEQ ID NO: 1008881 - DNA, 15 bp, Homo sapiens
tattcttggatattt

SEQ ID NO: 1008882 - DNA, 15 bp, Homo sapiens
ttattcttggatatt

SEQ ID NO: 1008883 - DNA, 15 bp, Homo sapiens
tttattcttggatat

SEQ ID NO: 1008884 - DNA, 15 bp, Homo sapiens
atttattcttggata

SEQ ID NO: 1008885 - DNA, 15 bp, Homo sapiens
aatttattcttggat

SEQ ID NO: 1008886 - DNA, 15 bp, Homo sapiens
aaatttattcttgga

SEQ ID NO: 1008887 - DNA, 15 bp, Homo sapiens
taaatttattcttgg

SEQ ID NO: 1008888 - DNA, 15 bp, Homo sapiens
ttaaatttattcttg

SEQ ID NO: 1008889 - DNA, 15 bp, Homo sapiens
cttaaatttattctt

SEQ ID NO: 1008890 - DNA, 15 bp, Homo sapiens
tcttaaatttattct

SEQ ID NO: 1008891 - DNA, 15 bp, Homo sapiens
ttcttaaatttattc

SEQ ID NO: 1008892 - DNA, 15 bp, Homo sapiens
cttcttaaatttatt

SEQ ID NO: 1008893 - DNA, 15 bp, Homo sapiens
tcttcttaaatttat

SEQ ID NO: 1008894 - DNA, 15 bp, Homo sapiens
ttcttcttaaattta

SEQ ID NO: 1008895 - DNA, 15 bp, Homo sapiens
cttcttcttaaattt

SEQ ID NO: 1008896 - DNA, 15 bp, Homo sapiens
gcttcttcttaaatt

SEQ ID NO: 1008897 - DNA, 15 bp, Homo sapiens
tgcttcttcttaaat

SEQ ID NO: 1008898 - DNA, 15 bp, Homo sapiens
gtgcttcttcttaaa

SEQ ID NO: 1008899 - DNA, 15 bp, Homo sapiens
agtgcttcttcttaa

SEQ ID NO: 1008900 - DNA, 15 bp, Homo sapiens
aagtgcttcttctta

SEQ ID NO: 1008901 - DNA, 15 bp, Homo sapiens
aaagtgcttcttctt

SEQ ID NO: 1008902 - DNA, 15 bp, Homo sapiens
taaagtgcttcttct

SEQ ID NO: 1008903 - DNA, 15 bp, Homo sapiens
gtaaagtgcttcttc

SEQ ID NO: 1008904 - DNA, 15 bp, Homo sapiens
agtaaagtgcttctt

SEQ ID NO: 1008905 - DNA, 15 bp, Homo sapiens
cagtaaagtgcttct

SEQ ID NO: 1008906 - DNA, 15 bp, Homo sapiens
tcagtaaagtgcttc

SEQ ID NO: 1008907 - DNA, 15 bp, Homo sapiens
ctcagtaaagtgctt

SEQ ID NO: 1008908 - DNA, 15 bp, Homo sapiens
tctcagtaaagtgct

SEQ ID NO: 1008909 - DNA, 15 bp, Homo sapiens
ttctcagtaaagtgc

SEQ ID NO: 1008910 - DNA, 15 bp, Homo sapiens
tttctcagtaaagtg

SEQ ID NO: 1008911 - DNA, 15 bp, Homo sapiens
gtttctcagtaaagt

SEQ ID NO: 1008912 - DNA, 15 bp, Homo sapiens
tgtttctcagtaaag

SEQ ID NO: 1008913 - DNA, 15 bp, Homo sapiens
atgtttctcagtaaa

SEQ ID NO: 1008914 - DNA, 15 bp, Homo sapiens
tatgtttctcagtaa

SEQ ID NO: 1008915 - DNA, 15 bp, Homo sapiens
atatgtttctcagta

SEQ ID NO: 1008916 - DNA, 15 bp, Homo sapiens
catatgtttctcagt

SEQ ID NO: 1008917 - DNA, 15 bp, Homo sapiens
tcatatgtttctcag

SEQ ID NO: 1008918 - DNA, 15 bp, Homo sapiens
ttcatatgtttctca

SEQ ID NO: 1008919 - DNA, 15 bp, Homo sapiens
tttcatatgtttctc

SEQ ID NO: 1008920 - DNA, 15 bp, Homo sapiens
ttttcatatgtttct

SEQ ID NO: 1008921 - DNA, 15 bp, Homo sapiens
gttttcatatgtttc

SEQ ID NO: 1008922 - DNA, 15 bp, Homo sapiens
ggttttcatatgttt

SEQ ID NO: 1008923 - DNA, 15 bp, Homo sapiens
aggttttcatatgtt

SEQ ID NO: 1008924 - DNA, 15 bp, Homo sapiens
caggttttcatatgt

SEQ ID NO: 1008925 - DNA, 15 bp, Homo sapiens
tcaggttttcatatg

SEQ ID NO: 1008926 - DNA, 15 bp, Homo sapiens
ttcaggttttcatat

SEQ ID NO: 1008927 - DNA, 15 bp, Homo sapiens
gttcaggttttcata

SEQ ID NO: 1008928 - DNA, 15 bp, Homo sapiens
tgttcaggttttcat

SEQ ID NO: 1008929 - DNA, 15 bp, Homo sapiens
ttgttcaggttttca

SEQ ID NO: 1008930 - DNA, 15 bp, Homo sapiens
tttgttcaggttttc

SEQ ID NO: 1008931 - DNA, 15 bp, Homo sapiens
atttgttcaggtttt

SEQ ID NO: 1008932 - DNA, 15 bp, Homo sapiens
catttgttcaggttt

SEQ ID NO: 1008933 - DNA, 15 bp, Homo sapiens
ccatttgttcaggtt

SEQ ID NO: 1008934 - DNA, 15 bp, Homo sapiens
tccatttgttcaggt

SEQ ID NO: 1008935 - DNA, 15 bp, Homo sapiens
ctccatttgttcagg

SEQ ID NO: 1008936 - DNA, 15 bp, Homo sapiens
tctccatttgttcag

SEQ ID NO: 1008937 - DNA, 15 bp, Homo sapiens
ctctccatttgttca

SEQ ID NO: 1008938 - DNA, 15 bp, Homo sapiens
cctctccatttgttc

SEQ ID NO: 1008939 - DNA, 15 bp, Homo sapiens
ccctctccatttgtt

SEQ ID NO: 1008940 - DNA, 15 bp, Homo sapiens
tccctctccatttgt

SEQ ID NO: 1008941 - DNA, 15 bp, Homo sapiens
atccctctccatttg

SEQ ID NO: 1008942 - DNA, 15 bp, Homo sapiens
tatccctctccattt

SEQ ID NO: 1008943 - DNA, 15 bp, Homo sapiens
atatccctctccatt

SEQ ID NO: 1008944 - DNA, 15 bp, Homo sapiens
aatatccctctccat

SEQ ID NO: 1008945 - DNA, 15 bp, Homo sapiens
aaatatccctctcca

SEQ ID NO: 1008946 - DNA, 15 bp, Homo sapiens
aaaatatccctctcc

SEQ ID NO: 1008947 - DNA, 15 bp, Homo sapiens
caaaatatccctctc

SEQ ID NO: 1008948 - DNA, 15 bp, Homo sapiens
acaaaatatccctct

SEQ ID NO: 1008949 - DNA, 15 bp, Homo sapiens
tacaaaatatccctc

SEQ ID NO: 1008950 - DNA, 15 bp, Homo sapiens
atacaaaatatccct

SEQ ID NO: 1008951 - DNA, 15 bp, Homo sapiens
aatacaaaatatccc

SEQ ID NO: 1008952 - DNA, 15 bp, Homo sapiens
aaatacaaaatatcc

SEQ ID NO: 1008953 - DNA, 15 bp, Homo sapiens
caaatacaaaatatc

SEQ ID NO: 1008954 - DNA, 15 bp, Homo sapiens
attcaaatacaaaat

SEQ ID NO: 1008955 - DNA, 15 bp, Homo sapiens
tattcaaatacaaaa

SEQ ID NO: 1008956 - DNA, 15 bp, Homo sapiens
ctattcaaatacaaa

SEQ ID NO: 1008957 - DNA, 15 bp, Homo sapiens
tctattcaaatacaa

SEQ ID NO: 1008958 - DNA, 15 bp, Homo sapiens
ttctattcaaataca

SEQ ID NO: 1008959 - DNA, 15 bp, Homo sapiens
tttctattcaaatac

SEQ ID NO: 1008960 - DNA, 15 bp, Homo sapiens
ctttctattcaaata

SEQ ID NO: 1008961 - DNA, 15 bp, Homo sapiens
tctttctattcaaat

SEQ ID NO: 1008962 - DNA, 15 bp, Homo sapiens
gtctttctattcaaa

SEQ ID NO: 1008963 - DNA, 15 bp, Homo sapiens
agtctttctattcaa

SEQ ID NO: 1008964 - DNA, 15 bp, Homo sapiens
aagtctttctattca

SEQ ID NO: 1008965 - DNA, 15 bp, Homo sapiens
gaagtctttctattc

SEQ ID NO: 1008966 - DNA, 15 bp, Homo sapiens
agaagtctttctatt

SEQ ID NO: 1008967 - DNA, 15 bp, Homo sapiens
cagaagtctttctat

SEQ ID NO: 1008968 - DNA, 15 bp, Homo sapiens
ccagaagtctttcta

SEQ ID NO: 1008969 - DNA, 15 bp, Homo sapiens
accagaagtctttct

SEQ ID NO: 1008970 - DNA, 15 bp, Homo sapiens
aaccagaagtctttc

SEQ ID NO: 1008971 - DNA, 15 bp, Homo sapiens
aaaccagaagtcttt

SEQ ID NO: 1008972 - DNA, 15 bp, Homo sapiens
taaaccagaagtctt

SEQ ID NO: 1008973 - DNA, 15 bp, Homo sapiens
ttaaaccagaagtct

SEQ ID NO: 1008974 - DNA, 15 bp, Homo sapiens
tttaaaccagaagtc

SEQ ID NO: 1008975 - DNA, 15 bp, Homo sapiens
ctttaaaccagaagt

SEQ ID NO: 1008976 - DNA, 15 bp, Homo sapiens
tctttaaaccagaag

SEQ ID NO: 1008977 - DNA, 15 bp, Homo sapiens
atctttaaaccagaa

SEQ ID NO: 1008978 - DNA, 15 bp, Homo sapiens
tatctttaaaccaga

SEQ ID NO: 1008979 - DNA, 15 bp, Homo sapiens
ttatctttaaaccag

SEQ ID NO: 1008980 - DNA, 15 bp, Homo sapiens
attatctttaaacca

SEQ ID NO: 1008981 - DNA, 15 bp, Homo sapiens
aattatctttaaacc

SEQ ID NO: 1008982 - DNA, 15 bp, Homo sapiens
gaattatctttaaac

SEQ ID NO: 1008983 - DNA, 15 bp, Homo sapiens
agaattatctttaaa

SEQ ID NO: 1008984 - DNA, 15 bp, Homo sapiens
gagaattatctttaa

SEQ ID NO: 1008985 - DNA, 15 bp, Homo sapiens
agagaattatcttta

SEQ ID NO: 1008986 - DNA, 15 bp, Homo sapiens
aagagaattatcttt

SEQ ID NO: 1008987 - DNA, 15 bp, Homo sapiens
aaagagaattatctt

SEQ ID NO: 1008988 - DNA, 15 bp, Homo sapiens
taaagagaattatct

SEQ ID NO: 1008989 - DNA, 15 bp, Homo sapiens
ttaaagagaattatc

SEQ ID NO: 1008990 - DNA, 15 bp, Homo sapiens
tttaaagagaattat

SEQ ID NO: 1008991 - DNA, 15 bp, Homo sapiens
atttaaagagaatta

SEQ ID NO: 1008992 - DNA, 15 bp, Homo sapiens
aatttaaagagaatt

SEQ ID NO: 1008993 - DNA, 15 bp, Homo sapiens
taatttaaagagaat

SEQ ID NO: 1008994 - DNA, 15 bp, Homo sapiens
ataatttaaagagaa

SEQ ID NO: 1008995 - DNA, 15 bp, Homo sapiens
aataatttaaagaga

SEQ ID NO: 1008996 - DNA, 15 bp, Homo sapiens
aaataatttaaagag

SEQ ID NO: 1008997 - DNA, 15 bp, Homo sapiens
aaaataatttaaaga

SEQ ID NO: 1008998 - DNA, 15 bp, Homo sapiens
aaaaataatttaaag

SEQ ID NO: 1008999 - DNA, 15 bp, Homo sapiens
aaaaaataatttaaa

SEQ ID NO: 1009000 - DNA, 15 bp, Homo sapiens
caaaaaataatttaa

SEQ ID NO: 1009001 - DNA, 15 bp, Homo sapiens
acaaaaaataattta

SEQ ID NO: 1009002 - DNA, 15 bp, Homo sapiens
tacaaaaaataattt

SEQ ID NO: 1009003 - DNA, 15 bp, Homo sapiens
ctacaaaaaataatt

SEQ ID NO: 1009004 - DNA, 15 bp, Homo sapiens
tctacaaaaaataat

SEQ ID NO: 1009005 - DNA, 15 bp, Homo sapiens
ttctacaaaaaataa

SEQ ID NO: 1009006 - DNA, 15 bp, Homo sapiens
tttctacaaaaaata

SEQ ID NO: 1009007 - DNA, 15 bp, Homo sapiens
atttctacaaaaaat

SEQ ID NO: 1009008 - DNA, 15 bp, Homo sapiens
aatttctacaaaaaa

SEQ ID NO: 1009009 - DNA, 15 bp, Homo sapiens
aaatttctacaaaaa

SEQ ID NO: 1009010 - DNA, 15 bp, Homo sapiens
taaatttctacaaaa

SEQ ID NO: 1009011 - DNA, 15 bp, Homo sapiens
ttaaatttctacaaa

SEQ ID NO: 1009012 - DNA, 15 bp, Homo sapiens
cttaaatttctacaa

SEQ ID NO: 1009013 - DNA, 15 bp, Homo sapiens
ccttaaatttctaca

SEQ ID NO: 1009014 - DNA, 15 bp, Homo sapiens
cccttaaatttctac

SEQ ID NO: 1009015 - DNA, 15 bp, Homo sapiens
ccccttaaatttcta

SEQ ID NO: 1009016 - DNA, 15 bp, Homo sapiens
accccttaaatttct

SEQ ID NO: 1009017 - DNA, 15 bp, Homo sapiens
taccccttaaatttc

SEQ ID NO: 1009018 - DNA, 15 bp, Homo sapiens
gtaccccttaaattt

SEQ ID NO: 1009019 - DNA, 15 bp, Homo sapiens
tgtaccccttaaatt

SEQ ID NO: 1009020 - DNA, 15 bp, Homo sapiens
ttgtaccccttaaat

SEQ ID NO: 1009021 - DNA, 15 bp, Homo sapiens
cttgtaccccttaaa

SEQ ID NO: 1009022 - DNA, 15 bp, Homo sapiens
tcttgtaccccttaa

SEQ ID NO: 1009023 - DNA, 15 bp, Homo sapiens
ctcttgtacccctta

SEQ ID NO: 1009024 - DNA, 15 bp, Homo sapiens
gctcttgtacccctt

SEQ ID NO: 1009025 - DNA, 15 bp, Homo sapiens
tgctcttgtacccct

SEQ ID NO: 1009026 - DNA, 15 bp, Homo sapiens
ctgctcttgtacccc

SEQ ID NO: 1009027 - DNA, 15 bp, Homo sapiens
actgctcttgtaccc

SEQ ID NO: 1009028 - DNA, 15 bp, Homo sapiens
cactgctcttgtacc

SEQ ID NO: 1009029 - DNA, 15 bp, Homo sapiens
acactgctcttgtac

SEQ ID NO: 1009030 - DNA, 15 bp, Homo sapiens
aacactgctcttgta

SEQ ID NO: 1009031 - DNA, 15 bp, Homo sapiens
caacactgctcttgt

SEQ ID NO: 1009032 - DNA, 15 bp, Homo sapiens
acaacactgctcttg

SEQ ID NO: 1009033 - DNA, 15 bp, Homo sapiens
gacaacactgctctt

SEQ ID NO: 1009034 - DNA, 15 bp, Homo sapiens
tgacaacactgctct

SEQ ID NO: 1009035 - DNA, 15 bp, Homo sapiens
gtgacaacactgctc

SEQ ID NO: 1009036 - DNA, 15 bp, Homo sapiens
tgtgacaacactgct

SEQ ID NO: 1009037 - DNA, 15 bp, Homo sapiens
atgtgacaacactgc

SEQ ID NO: 1009038 - DNA, 15 bp, Homo sapiens
catgtgacaacactg

SEQ ID NO: 1009039 - DNA, 15 bp, Homo sapiens
ccatgtgacaacact

SEQ ID NO: 1009040 - DNA, 15 bp, Homo sapiens
tccatgtgacaacac

SEQ ID NO: 1009041 - DNA, 15 bp, Homo sapiens
atccatgtgacaaca

SEQ ID NO: 1009042 - DNA, 15 bp, Homo sapiens
tatccatgtgacaac

SEQ ID NO: 1009043 - DNA, 15 bp, Homo sapiens
atatccatgtgacaa

SEQ ID NO: 1009044 - DNA, 15 bp, Homo sapiens
tatatccatgtgaca

SEQ ID NO: 1009045 - DNA, 15 bp, Homo sapiens
atatatccatgtgac

SEQ ID NO: 1009046 - DNA, 15 bp, Homo sapiens
aatatatccatgtga

SEQ ID NO: 1009047 - DNA, 15 bp, Homo sapiens
taatatatccatgtg

SEQ ID NO: 1009048 - DNA, 15 bp, Homo sapiens
gtaatatatccatgt

SEQ ID NO: 1009049 - DNA, 15 bp, Homo sapiens
tgtaatatatccatg

SEQ ID NO: 1009050 - DNA, 15 bp, Homo sapiens
atgtaatatatccat

SEQ ID NO: 1009051 - DNA, 15 bp, Homo sapiens
tatgtaatatatcca

SEQ ID NO: 1009052 - DNA, 15 bp, Homo sapiens
ctatgtaatatatcc

SEQ ID NO: 1009053 - DNA, 15 bp, Homo sapiens
actatgtaatatatc

SEQ ID NO: 1009054 - DNA, 15 bp, Homo sapiens
cactatgtaatatat

SEQ ID NO: 1009055 - DNA, 15 bp, Homo sapiens
ccactatgtaatata

SEQ ID NO: 1009056 - DNA, 15 bp, Homo sapiens
accactatgtaatat

SEQ ID NO: 1009057 - DNA, 15 bp, Homo sapiens
caccactatgtaata

SEQ ID NO: 1009058 - DNA, 15 bp, Homo sapiens
tcaccactatgtaat

SEQ ID NO: 1009059 - DNA, 15 bp, Homo sapiens
ttcaccactatgtaa

SEQ ID NO: 1009060 - DNA, 15 bp, Homo sapiens
cttcaccactatgta

SEQ ID NO: 1009061 - DNA, 15 bp, Homo sapiens
acttcaccactatgt

SEQ ID NO: 1009062 - DNA, 15 bp, Homo sapiens
gacttcaccactatg

SEQ ID NO: 1009063 - DNA, 15 bp, Homo sapiens
agacttcaccactat

SEQ ID NO: 1009064 - DNA, 15 bp, Homo sapiens
cagacttcaccacta

SEQ ID NO: 1009065 - DNA, 15 bp, Homo sapiens
ccagacttcaccact

SEQ ID NO: 1009066 - DNA, 15 bp, Homo sapiens
cccagacttcaccac

SEQ ID NO: 1009067 - DNA, 15 bp, Homo sapiens
ccccagacttcacca

SEQ ID NO: 1009068 - DNA, 15 bp, Homo sapiens
accccagacttcacc

SEQ ID NO: 1009069 - DNA, 15 bp, Homo sapiens
aaccccagacttcac

SEQ ID NO: 1009070 - DNA, 15 bp, Homo sapiens
aaaccccagacttca

SEQ ID NO: 1009071 - DNA, 15 bp, Homo sapiens
aaaaccccagacttc

SEQ ID NO: 1009072 - DNA, 15 bp, Homo sapiens
taaaaccccagactt

SEQ ID NO: 1009073 - DNA, 15 bp, Homo sapiens
ctaaaaccccagact

SEQ ID NO: 1009074 - DNA, 15 bp, Homo sapiens
actaaaaccccagac

SEQ ID NO: 1009075 - DNA, 15 bp, Homo sapiens
cactaaaaccccaga

SEQ ID NO: 1009076 - DNA, 15 bp, Homo sapiens
acactaaaaccccag

SEQ ID NO: 1009077 - DNA, 15 bp, Homo sapiens
tacactaaaacccca

SEQ ID NO: 1009078 - DNA, 15 bp, Homo sapiens
ttacactaaaacccc

SEQ ID NO: 1009079 - DNA, 15 bp, Homo sapiens
tttacactaaaaccc

SEQ ID NO: 1009080 - DNA, 15 bp, Homo sapiens
atttacactaaaacc

SEQ ID NO: 1009081 - DNA, 15 bp, Homo sapiens
aatttacactaaaac

SEQ ID NO: 1009082 - DNA, 15 bp, Homo sapiens
taatttacactaaaa

SEQ ID NO: 1009083 - DNA, 15 bp, Homo sapiens
ttaatttacactaaa

SEQ ID NO: 1009084 - DNA, 15 bp, Homo sapiens
attaatttacactaa

SEQ ID NO: 1009085 - DNA, 15 bp, Homo sapiens
gattaatttacacta

SEQ ID NO: 1009086 - DNA, 15 bp, Homo sapiens
agattaatttacact

SEQ ID NO: 1009087 - DNA, 15 bp, Homo sapiens
aagattaatttacac

SEQ ID NO: 1009088 - DNA, 15 bp, Homo sapiens
aaagattaatttaca

SEQ ID NO: 1009089 - DNA, 15 bp, Homo sapiens
taaagattaatttac

SEQ ID NO: 1009090 - DNA, 15 bp, Homo sapiens
gtaaagattaattta

SEQ ID NO: 1009091 - DNA, 15 bp, Homo sapiens
tgtaaagattaattt

SEQ ID NO: 1009092 - DNA, 15 bp, Homo sapiens
atgtaaagattaatt

SEQ ID NO: 1009093 - DNA, 15 bp, Homo sapiens
aatgtaaagattaat

SEQ ID NO: 1009094 - DNA, 15 bp, Homo sapiens
aaatgtaaagattaa

SEQ ID NO: 1009095 - DNA, 15 bp, Homo sapiens
aaaatgtaaagatta

SEQ ID NO: 1009096 - DNA, 15 bp, Homo sapiens
caaaatgtaaagatt

SEQ ID NO: 1009097 - DNA, 15 bp, Homo sapiens
acaaaatgtaaagat

SEQ ID NO: 1009098 - DNA, 15 bp, Homo sapiens
aacaaaatgtaaaga

SEQ ID NO: 1009099 - DNA, 15 bp, Homo sapiens
aaacaaaatgtaaag

SEQ ID NO: 1009100 - DNA, 15 bp, Homo sapiens
caaacaaaatgtaaa

SEQ ID NO: 1009101 - DNA, 15 bp, Homo sapiens
tcaaacaaaatgtaa

SEQ ID NO: 1009102 - DNA, 15 bp, Homo sapiens
ctcaaacaaaatgta

SEQ ID NO: 1009103 - DNA, 15 bp, Homo sapiens
gctcaaacaaaatgt

SEQ ID NO: 1009104 - DNA, 15 bp, Homo sapiens
ggctcaaacaaaatg

SEQ ID NO: 1009105 - DNA, 15 bp, Homo sapiens
gggctcaaacaaaat

SEQ ID NO: 1009106 - DNA, 15 bp, Homo sapiens
tgggctcaaacaaaa

SEQ ID NO: 1009107 - DNA, 15 bp, Homo sapiens
ttgggctcaaacaaa

SEQ ID NO: 1009108 - DNA, 15 bp, Homo sapiens
attgggctcaaacaa

SEQ ID NO: 1009109 - DNA, 15 bp, Homo sapiens
tattgggctcaaaca

SEQ ID NO: 1009110 - DNA, 15 bp, Homo sapiens
ttattgggctcaaac

SEQ ID NO: 1009111 - DNA, 15 bp, Homo sapiens
tttattgggctcaaa

SEQ ID NO: 1009112 - DNA, 15 bp, Homo sapiens
atttattgggctcaa

SEQ ID NO: 1009113 - DNA, 15 bp, Homo sapiens
catttattgggctca

SEQ ID NO: 1009114 - DNA, 15 bp, Homo sapiens
acatttattgggctc

SEQ ID NO: 1009115 - DNA, 15 bp, Homo sapiens
tacatttattgggct

SEQ ID NO: 1009116 - DNA, 15 bp, Homo sapiens
gtacatttattgggc

SEQ ID NO: 1009117 - DNA, 15 bp, Homo sapiens
ggtacatttattggg

SEQ ID NO: 1009118 - DNA, 15 bp, Homo sapiens
tggtacatttattgg

SEQ ID NO: 1009119 - DNA, 15 bp, Homo sapiens
ttggtacatttattg

SEQ ID NO: 1009120 - DNA, 15 bp, Homo sapiens
gttggtacatttatt

SEQ ID NO: 1009121 - DNA, 15 bp, Homo sapiens
tgttggtacatttat

SEQ ID NO: 1009122 - DNA, 15 bp, Homo sapiens
atgttggtacattta

SEQ ID NO: 1009123 - DNA, 15 bp, Homo sapiens
catgttggtacattt

SEQ ID NO: 1009124 - DNA, 15 bp, Homo sapiens
tcatgttggtacatt

SEQ ID NO: 1009125 - DNA, 15 bp, Homo sapiens
atcatgttggtacat

SEQ ID NO: 1009126 - DNA, 15 bp, Homo sapiens
aatcatgttggtaca

SEQ ID NO: 1009127 - DNA, 15 bp, Homo sapiens
aaatcatgttggtac

SEQ ID NO: 1009128 - DNA, 15 bp, Homo sapiens
aaaatcatgttggta

SEQ ID NO: 1009129 - DNA, 15 bp, Homo sapiens
aaaaatcatgttggt

SEQ ID NO: 1009130 - DNA, 15 bp, Homo sapiens
taaaaatcatgttgg

SEQ ID NO: 1009131 - DNA, 15 bp, Homo sapiens
ataaaaatcatgttg

SEQ ID NO: 1009132 - DNA, 15 bp, Homo sapiens
tataaaaatcatgtt

SEQ ID NO: 1009133 - DNA, 15 bp, Homo sapiens
ctataaaaatcatgt

SEQ ID NO: 1009134 - DNA, 15 bp, Homo sapiens
tctataaaaatcatg

SEQ ID NO: 1009135 - DNA, 15 bp, Homo sapiens
ttctataaaaatcat

SEQ ID NO: 1009136 - DNA, 15 bp, Homo sapiens
tttctataaaaatca

SEQ ID NO: 1009137 - DNA, 15 bp, Homo sapiens
ctttctataaaaatc

SEQ ID NO: 1009138 - DNA, 15 bp, Homo sapiens
tctttctataaaaat

SEQ ID NO: 1009139 - DNA, 15 bp, Homo sapiens
atctttctataaaaa

SEQ ID NO: 1009140 - DNA, 15 bp, Homo sapiens
tatctttctataaaa

SEQ ID NO: 1009141 - DNA, 15 bp, Homo sapiens
ctatctttctataaa

SEQ ID NO: 1009142 - DNA, 15 bp, Homo sapiens
actatctttctataa

SEQ ID NO: 1009143 - DNA, 15 bp, Homo sapiens
gactatctttctata

SEQ ID NO: 1009144 - DNA, 15 bp, Homo sapiens
tgactatctttctat

SEQ ID NO: 1009145 - DNA, 15 bp, Homo sapiens
atgactatctttcta

SEQ ID NO: 1009146 - DNA, 15 bp, Homo sapiens
aatgactatctttct

SEQ ID NO: 1009147 - DNA, 15 bp, Homo sapiens
gaatgactatctttc

SEQ ID NO: 1009148 - DNA, 15 bp, Homo sapiens
ggaatgactatcttt

SEQ ID NO: 1009149 - DNA, 15 bp, Homo sapiens
aggaatgactatctt

SEQ ID NO: 1009150 - DNA, 15 bp, Homo sapiens
taggaatgactatct

SEQ ID NO: 1009151 - DNA, 15 bp, Homo sapiens
ataggaatgactatc

SEQ ID NO: 1009152 - DNA, 15 bp, Homo sapiens
aataggaatgactat

SEQ ID NO: 1009153 - DNA, 15 bp, Homo sapiens
taataggaatgacta

SEQ ID NO: 1009154 - DNA, 15 bp, Homo sapiens
ttaataggaatgact

SEQ ID NO: 1009155 - DNA, 15 bp, Homo sapiens
attaataggaatgac

SEQ ID NO: 1009156 - DNA, 15 bp, Homo sapiens
gattaataggaatga

SEQ ID NO: 1009157 - DNA, 15 bp, Homo sapiens
ggattaataggaatg

SEQ ID NO: 1009158 - DNA, 15 bp, Homo sapiens
tggattaataggaat

SEQ ID NO: 1009159 - DNA, 15 bp, Homo sapiens
ttggattaataggaa

SEQ ID NO: 1009160 - DNA, 15 bp, Homo sapiens
tttggattaatagga

SEQ ID NO: 1009161 - DNA, 15 bp, Homo sapiens
gtttggattaatagg

SEQ ID NO: 1009162 - DNA, 15 bp, Homo sapiens
agtttggattaatag

SEQ ID NO: 1009163 - DNA, 15 bp, Homo sapiens
aagtttggattaata

SEQ ID NO: 1009164 - DNA, 15 bp, Homo sapiens
caagtttggattaat

SEQ ID NO: 1009165 - DNA, 15 bp, Homo sapiens
acaagtttggattaa

SEQ ID NO: 1009166 - DNA, 15 bp, Homo sapiens
gacaagtttggatta

SEQ ID NO: 1009167 - DNA, 15 bp, Homo sapiens
ggacaagtttggatt

SEQ ID NO: 1009168 - DNA, 15 bp, Homo sapiens
gggacaagtttggat

SEQ ID NO: 1009169 - DNA, 15 bp, Homo sapiens
tgggacaagtttgga

SEQ ID NO: 1009170 - DNA, 15 bp, Homo sapiens
ttgggacaagtttgg

SEQ ID NO: 1009171 - DNA, 15 bp, Homo sapiens
gttgggacaagtttg

SEQ ID NO: 1009172 - DNA, 15 bp, Homo sapiens
agttgggacaagttt

SEQ ID NO: 1009173 - DNA, 15 bp, Homo sapiens
aagttgggacaagtt

SEQ ID NO: 1009174 - DNA, 15 bp, Homo sapiens
aaagttgggacaagt

SEQ ID NO: 1009175 - DNA, 15 bp, Homo sapiens
caaagttgggacaag

SEQ ID NO: 1009176 - DNA, 15 bp, Homo sapiens
tcaaagttgggacaa

SEQ ID NO: 1009177 - DNA, 15 bp, Homo sapiens
ttcaaagttgggaca

SEQ ID NO: 1009178 - DNA, 15 bp, Homo sapiens
attcaaagttgggac

SEQ ID NO: 1009179 - DNA, 15 bp, Homo sapiens
aattcaaagttggga

SEQ ID NO: 1009180 - DNA, 15 bp, Homo sapiens
caattcaaagttggg

SEQ ID NO: 1009181 - DNA, 15 bp, Homo sapiens
tcaattcaaagttgg

SEQ ID NO: 1009182 - DNA, 15 bp, Homo sapiens
ttcaattcaaagttg

SEQ ID NO: 1009183 - DNA, 15 bp, Homo sapiens
attcaattcaaagtt

SEQ ID NO: 1009184 - DNA, 15 bp, Homo sapiens
aattcaattcaaagt

SEQ ID NO: 1009185 - DNA, 15 bp, Homo sapiens
caattcaattcaaag

SEQ ID NO: 1009186 - DNA, 15 bp, Homo sapiens
tcaattcaattcaaa

SEQ ID NO: 1009187 - DNA, 15 bp, Homo sapiens
ctcaattcaattcaa

SEQ ID NO: 1009188 - DNA, 15 bp, Homo sapiens
cctcaattcaattca

SEQ ID NO: 1009189 - DNA, 15 bp, Homo sapiens
gcctcaattcaattc

SEQ ID NO: 1009190 - DNA, 15 bp, Homo sapiens
tgcctcaattcaatt

SEQ ID NO: 1009191 - DNA, 15 bp, Homo sapiens
ctgcctcaattcaat

SEQ ID NO: 1009192 - DNA, 15 bp, Homo sapiens
tctgcctcaattcaa

SEQ ID NO: 1009193 - DNA, 15 bp, Homo sapiens
ctctgcctcaattca

SEQ ID NO: 1009194 - DNA, 15 bp, Homo sapiens
gctctgcctcaattc

SEQ ID NO: 1009195 - DNA, 15 bp, Homo sapiens
agctctgcctcaatt

SEQ ID NO: 1009196 - DNA, 15 bp, Homo sapiens
tagctctgcctcaat

SEQ ID NO: 1009197 - DNA, 15 bp, Homo sapiens
ctagctctgcctcaa

SEQ ID NO: 1009198 - DNA, 15 bp, Homo sapiens
gctagctctgcctca

SEQ ID NO: 1009199 - DNA, 15 bp, Homo sapiens
tgctagctctgcctc

SEQ ID NO: 1009200 - DNA, 15 bp, Homo sapiens
ctgctagctctgcct

SEQ ID NO: 1009201 - DNA, 15 bp, Homo sapiens
cctgctagctctgcc

SEQ ID NO: 1009202 - DNA, 15 bp, Homo sapiens
acctgctagctctgc

SEQ ID NO: 1009203 - DNA, 15 bp, Homo sapiens
cacctgctagctctg

SEQ ID NO: 1009204 - DNA, 15 bp, Homo sapiens
acacctgctagctct

SEQ ID NO: 1009205 - DNA, 15 bp, Homo sapiens
aacacctgctagctc

SEQ ID NO: 1009206 - DNA, 15 bp, Homo sapiens
gaacacctgctagct

SEQ ID NO: 1009207 - DNA, 15 bp, Homo sapiens
ggaacacctgctagc

SEQ ID NO: 1009208 - DNA, 15 bp, Homo sapiens
gggaacacctgctag

SEQ ID NO: 1009209 - DNA, 15 bp, Homo sapiens
ggggaacacctgcta

SEQ ID NO: 1009210 - DNA, 15 bp, Homo sapiens
tggggaacacctgct

SEQ ID NO: 1009211 - DNA, 15 bp, Homo sapiens
gtggggaacacctgc

SEQ ID NO: 1009212 - DNA, 15 bp, Homo sapiens
cgtggggaacacctg

SEQ ID NO: 1009213 - DNA, 15 bp, Homo sapiens
ccgtggggaacacct

SEQ ID NO: 1009214 - DNA, 15 bp, Homo sapiens
gccgtggggaacacc

SEQ ID NO: 1009215 - DNA, 15 bp, Homo sapiens
agccgtggggaacac

SEQ ID NO: 1009216 - DNA, 15 bp, Homo sapiens
cagccgtggggaaca

SEQ ID NO: 1009217 - DNA, 15 bp, Homo sapiens
tcagccgtggggaac

SEQ ID NO: 1009218 - DNA, 15 bp, Homo sapiens
ctcagccgtggggaa

SEQ ID NO: 1009219 - DNA, 15 bp, Homo sapiens
cctcagccgtgggga

SEQ ID NO: 1009220 - DNA, 15 bp, Homo sapiens
gcctcagccgtgggg

SEQ ID NO: 1009221 - DNA, 15 bp, Homo sapiens
tgcctcagccgtggg

SEQ ID NO: 1009222 - DNA, 15 bp, Homo sapiens
atgcctcagccgtgg

SEQ ID NO: 1009223 - DNA, 15 bp, Homo sapiens
gatgcctcagccgtg

SEQ ID NO: 1009224 - DNA, 15 bp, Homo sapiens
agatgcctcagccgt

SEQ ID NO: 1009225 - DNA, 15 bp, Homo sapiens
cagatgcctcagccg

SEQ ID NO: 1009226 - DNA, 15 bp, Homo sapiens
tcagatgcctcagcc

SEQ ID NO: 1009227 - DNA, 15 bp, Homo sapiens
ttcagatgcctcagc

SEQ ID NO: 1009228 - DNA, 15 bp, Homo sapiens
gttcagatgcctcag

SEQ ID NO: 1009229 - DNA, 15 bp, Homo sapiens
tgttcagatgcctca

SEQ ID NO: 1009230 - DNA, 15 bp, Homo sapiens
atgttcagatgcctc

SEQ ID NO: 1009231 - DNA, 15 bp, Homo sapiens
aatgttcagatgcct

SEQ ID NO: 1009232 - DNA, 15 bp, Homo sapiens
taatgttcagatgcc

SEQ ID NO: 1009233 - DNA, 15 bp, Homo sapiens
ttaatgttcagatgc

SEQ ID NO: 1009234 - DNA, 15 bp, Homo sapiens
cttaatgttcagatg

SEQ ID NO: 1009235 - DNA, 15 bp, Homo sapiens
gcttaatgttcagat

SEQ ID NO: 1009236 - DNA, 15 bp, Homo sapiens
tgcttaatgttcaga

SEQ ID NO: 1009237 - DNA, 15 bp, Homo sapiens
atgcttaatgttcag

SEQ ID NO: 1009238 - DNA, 15 bp, Homo sapiens
tatgcttaatgttca

SEQ ID NO: 1009239 - DNA, 15 bp, Homo sapiens
atatgcttaatgttc

SEQ ID NO: 1009240 - DNA, 15 bp, Homo sapiens
gatatgcttaatgtt

SEQ ID NO: 1009241 - DNA, 15 bp, Homo sapiens
ggatatgcttaatgt

SEQ ID NO: 1009242 - DNA, 15 bp, Homo sapiens
gggatatgcttaatg

SEQ ID NO: 1009243 - DNA, 15 bp, Homo sapiens
agggatatgcttaat

SEQ ID NO: 1009244 - DNA, 15 bp, Homo sapiens
gagggatatgcttaa

SEQ ID NO: 1009245 - DNA, 15 bp, Homo sapiens
agagggatatgctta

SEQ ID NO: 1009246 - DNA, 15 bp, Homo sapiens
cagagggatatgctt

SEQ ID NO: 1009247 - DNA, 15 bp, Homo sapiens
tcagagggatatgct

SEQ ID NO: 1009248 - DNA, 15 bp, Homo sapiens
ctcagagggatatgc

SEQ ID NO: 1009249 - DNA, 15 bp, Homo sapiens
tctcagagggatatg

SEQ ID NO: 1009250 - DNA, 15 bp, Homo sapiens
ttctcagagggatat

SEQ ID NO: 1009251 - DNA, 15 bp, Homo sapiens
gttctcagagggata

SEQ ID NO: 1009252 - DNA, 15 bp, Homo sapiens
ggttctcagagggat

SEQ ID NO: 1009253 - DNA, 15 bp, Homo sapiens
tggttctcagaggga

SEQ ID NO: 1009254 - DNA, 15 bp, Homo sapiens
ctggttctcagaggg

SEQ ID NO: 1009255 - DNA, 15 bp, Homo sapiens
gctggttctcagagg

SEQ ID NO: 1009256 - DNA, 15 bp, Homo sapiens
ggctggttctcagag

SEQ ID NO: 1009257 - DNA, 15 bp, Homo sapiens
aggctggttctcaga

SEQ ID NO: 1009258 - DNA, 15 bp, Homo sapiens
caggctggttctcag

SEQ ID NO: 1009259 - DNA, 15 bp, Homo sapiens
gcaggctggttctca

SEQ ID NO: 1009260 - DNA, 15 bp, Homo sapiens
tgcaggctggttctc

SEQ ID NO: 1009261 - DNA, 15 bp, Homo sapiens
atgcaggctggttct

SEQ ID NO: 1009262 - DNA, 15 bp, Homo sapiens
aatgcaggctggttc

SEQ ID NO: 1009263 - DNA, 15 bp, Homo sapiens
caatgcaggctggtt

SEQ ID NO: 1009264 - DNA, 15 bp, Homo sapiens
tcaatgcaggctggt

SEQ ID NO: 1009265 - DNA, 15 bp, Homo sapiens
gtatcaatgcaggct

SEQ ID NO: 1009266 - DNA, 15 bp, Homo sapiens
agtatcaatgcaggc

SEQ ID NO: 1009267 - DNA, 15 bp, Homo sapiens
gagtatcaatgcagg

SEQ ID NO: 1009268 - DNA, 15 bp, Homo sapiens
agagtatcaatgcag

SEQ ID NO: 1009269 - DNA, 15 bp, Homo sapiens
aagagtatcaatgca

SEQ ID NO: 1009270 - DNA, 15 bp, Homo sapiens
aaagagtatcaatgc

SEQ ID NO: 1009271 - DNA, 15 bp, Homo sapiens
gaaagagtatcaatg

SEQ ID NO: 1009272 - DNA, 15 bp, Homo sapiens
agaaagagtatcaat

SEQ ID NO: 1009273 - DNA, 15 bp, Homo sapiens
tagaaagagtatcaa

SEQ ID NO: 1009274 - DNA, 15 bp, Homo sapiens
ttagaaagagtatca

SEQ ID NO: 1009275 - DNA, 15 bp, Homo sapiens
attagaaagagtatc

SEQ ID NO: 1009276 - DNA, 15 bp, Homo sapiens
cattagaaagagtat

SEQ ID NO: 1009277 - DNA, 15 bp, Homo sapiens
acattagaaagagta

SEQ ID NO: 1009278 - DNA, 15 bp, Homo sapiens
cacattagaaagagt

SEQ ID NO: 1009279 - DNA, 15 bp, Homo sapiens
ccacattagaaagag

SEQ ID NO: 1009280 - DNA, 15 bp, Homo sapiens
tccacattagaaaga

SEQ ID NO: 1009281 - DNA, 15 bp, Homo sapiens
gtccacattagaaag

SEQ ID NO: 1009282 - DNA, 15 bp, Homo sapiens
tgtccacattagaaa

SEQ ID NO: 1009283 - DNA, 15 bp, Homo sapiens
ctgtccacattagaa

SEQ ID NO: 1009284 - DNA, 15 bp, Homo sapiens
gctgtccacattaga

SEQ ID NO: 1009285 - DNA, 15 bp, Homo sapiens
tgctgtccacattag

SEQ ID NO: 1009286 - DNA, 15 bp, Homo sapiens
atgctgtccacatta

SEQ ID NO: 1009287 - DNA, 15 bp, Homo sapiens
gatgctgtccacatt

SEQ ID NO: 1009288 - DNA, 15 bp, Homo sapiens
tgatgctgtccacat

SEQ ID NO: 1009289 - DNA, 15 bp, Homo sapiens
ttgatgctgtccaca

SEQ ID NO: 1009290 - DNA, 15 bp, Homo sapiens
cttgatgctgtccac

SEQ ID NO: 1009291 - DNA, 15 bp, Homo sapiens
gcttgatgctgtcca

SEQ ID NO: 1009292 - DNA, 15 bp, Homo sapiens
agcttgatgctgtcc

SEQ ID NO: 1009293 - DNA, 15 bp, Homo sapiens
tagcttgatgctgtc

SEQ ID NO: 1009294 - DNA, 15 bp, Homo sapiens
atagcttgatgctgt

SEQ ID NO: 1009295 - DNA, 15 bp, Homo sapiens
catagcttgatgctg

SEQ ID NO: 1009296 - DNA, 15 bp, Homo sapiens
acatagcttgatgct

SEQ ID NO: 1009297 - DNA, 15 bp, Homo sapiens
tacatagcttgatgc

SEQ ID NO: 1009298 - DNA, 15 bp, Homo sapiens
gtacatagcttgatg

SEQ ID NO: 1009299 - DNA, 15 bp, Homo sapiens
cgtacatagcttgat

SEQ ID NO: 1009300 - DNA, 15 bp, Homo sapiens
acgtacatagcttga

SEQ ID NO: 1009301 - DNA, 15 bp, Homo sapiens
tacgtacatagcttg

SEQ ID NO: 1009302 - DNA, 15 bp, Homo sapiens
ctacgtacatagctt

SEQ ID NO: 1009303 - DNA, 15 bp, Homo sapiens
actacgtacatagct

SEQ ID NO: 1009304 - DNA, 15 bp, Homo sapiens
aactacgtacatagc

SEQ ID NO: 1009305 - DNA, 15 bp, Homo sapiens
gaactacgtacatag

SEQ ID NO: 1009306 - DNA, 15 bp, Homo sapiens
agaactacgtacata

SEQ ID NO: 1009307 - DNA, 15 bp, Homo sapiens
cagaactacgtacat

SEQ ID NO: 1009308 - DNA, 15 bp, Homo sapiens
acagaactacgtaca

SEQ ID NO: 1009309 - DNA, 15 bp, Homo sapiens
cacagaactacgtac

SEQ ID NO: 1009310 - DNA, 15 bp, Homo sapiens
gcacagaactacgta

SEQ ID NO: 1009311 - DNA, 15 bp, Homo sapiens
agcacagaactacgt

SEQ ID NO: 1009312 - DNA, 15 bp, Homo sapiens
gagcacagaactacg

SEQ ID NO: 1009313 - DNA, 15 bp, Homo sapiens
tgagcacagaactac

SEQ ID NO: 1009314 - DNA, 15 bp, Homo sapiens
ctgagcacagaacta

SEQ ID NO: 1009315 - DNA, 15 bp, Homo sapiens
gctgagcacagaact

SEQ ID NO: 1009316 - DNA, 15 bp, Homo sapiens
tgctgagcacagaac

SEQ ID NO: 1009317 - DNA, 15 bp, Homo sapiens
ttgctgagcacagaa

SEQ ID NO: 1009318 - DNA, 15 bp, Homo sapiens
tttgctgagcacaga

SEQ ID NO: 1009319 - DNA, 15 bp, Homo sapiens
ttttgctgagcacag

SEQ ID NO: 1009320 - DNA, 15 bp, Homo sapiens
cttttgctgagcaca

SEQ ID NO: 1009321 - DNA, 15 bp, Homo sapiens
gcttttgctgagcac

SEQ ID NO: 1009322 - DNA, 15 bp, Homo sapiens
ggcttttgctgagca

SEQ ID NO: 1009323 - DNA, 15 bp, Homo sapiens
gggcttttgctgagc

SEQ ID NO: 1009324 - DNA, 15 bp, Homo sapiens
agggcttttgctgag

SEQ ID NO: 1009325 - DNA, 15 bp, Homo sapiens
cagggcttttgctga

SEQ ID NO: 1009326 - DNA, 15 bp, Homo sapiens
tcagggcttttgctg

SEQ ID NO: 1009327 - DNA, 15 bp, Homo sapiens
gtcagggcttttgct

SEQ ID NO: 1009328 - DNA, 15 bp, Homo sapiens
agtcagggcttttgc

SEQ ID NO: 1009329 - DNA, 15 bp, Homo sapiens
aagtcagggcttttg

SEQ ID NO: 1009330 - DNA, 15 bp, Homo sapiens
gaagtcagggctttt

SEQ ID NO: 1009331 - DNA, 15 bp, Homo sapiens
agaagtcagggcttt

SEQ ID NO: 1009332 - DNA, 15 bp, Homo sapiens
aagaagtcagggctt

SEQ ID NO: 1009333 - DNA, 15 bp, Homo sapiens
aaagaagtcagggct

SEQ ID NO: 1009334 - DNA, 15 bp, Homo sapiens
aaaagaagtcagggc

SEQ ID NO: 1009335 - DNA, 15 bp, Homo sapiens
aaaaagaagtcaggg

SEQ ID NO: 1009336 - DNA, 15 bp, Homo sapiens
caaaaagaagtcagg

SEQ ID NO: 1009337 - DNA, 15 bp, Homo sapiens
acaaaaagaagtcag

SEQ ID NO: 1009338 - DNA, 15 bp, Homo sapiens
aacaaaaagaagtca

SEQ ID NO: 1009339 - DNA, 15 bp, Homo sapiens
aaacaaaaagaagtc

SEQ ID NO: 1009340 - DNA, 15 bp, Homo sapiens
taaacaaaaagaagt

SEQ ID NO: 1009341 - DNA, 15 bp, Homo sapiens
ataaacaaaaagaag

SEQ ID NO: 1009342 - DNA, 15 bp, Homo sapiens
cataaacaaaaagaa

SEQ ID NO: 1009343 - DNA, 15 bp, Homo sapiens
acataaacaaaaaga

SEQ ID NO: 1009344 - DNA, 15 bp, Homo sapiens
gacataaacaaaaag

SEQ ID NO: 1009345 - DNA, 15 bp, Homo sapiens
ggacataaacaaaaa

SEQ ID NO: 1009346 - DNA, 15 bp, Homo sapiens
aggacataaacaaaa

SEQ ID NO: 1009347 - DNA, 15 bp, Homo sapiens
taggacataaacaaa

SEQ ID NO: 1009348 - DNA, 15 bp, Homo sapiens
ctaggacataaacaa

SEQ ID NO: 1009349 - DNA, 15 bp, Homo sapiens
gctaggacataaaca

SEQ ID NO: 1009350 - DNA, 15 bp, Homo sapiens
ggctaggacataaac

SEQ ID NO: 1009351 - DNA, 15 bp, Homo sapiens
gggctaggacataaa

SEQ ID NO: 1009352 - DNA, 15 bp, Homo sapiens
ggggctaggacataa

SEQ ID NO: 1009353 - DNA, 15 bp, Homo sapiens
tggggctaggacata

SEQ ID NO: 1009354 - DNA, 15 bp, Homo sapiens
atggggctaggacat

SEQ ID NO: 1009355 - DNA, 15 bp, Homo sapiens
tatggggctaggaca

SEQ ID NO: 1009356 - DNA, 15 bp, Homo sapiens
gtatggggctaggac

SEQ ID NO: 1009357 - DNA, 15 bp, Homo sapiens
tgtatggggctagga

SEQ ID NO: 1009358 - DNA, 15 bp, Homo sapiens
ttgtatggggctagg

SEQ ID NO: 1009359 - DNA, 15 bp, Homo sapiens
gttgtatggggctag

SEQ ID NO: 1009360 - DNA, 15 bp, Homo sapiens
tgttgtatggggcta

SEQ ID NO: 1009361 - DNA, 15 bp, Homo sapiens
ttgttgtatggggct

SEQ ID NO: 1009362 - DNA, 15 bp, Homo sapiens
tttgttgtatggggc

SEQ ID NO: 1009363 - DNA, 15 bp, Homo sapiens
ttttgttgtatgggg

SEQ ID NO: 1009364 - DNA, 15 bp, Homo sapiens
attttgttgtatggg

SEQ ID NO: 1009365 - DNA, 15 bp, Homo sapiens
gattttgttgtatgg

SEQ ID NO: 1009366 - DNA, 15 bp, Homo sapiens
tgattttgttgtatg

SEQ ID NO: 1009367 - DNA, 15 bp, Homo sapiens
ttgattttgttgtat

SEQ ID NO: 1009368 - DNA, 15 bp, Homo sapiens
gttgattttgttgta

SEQ ID NO: 1009369 - DNA, 15 bp, Homo sapiens
ggttgattttgttgt

SEQ ID NO: 1009370 - DNA, 15 bp, Homo sapiens
tggttgattttgttg

SEQ ID NO: 1009371 - DNA, 15 bp, Homo sapiens
ttggttgattttgtt

SEQ ID NO: 1009372 - DNA, 15 bp, Homo sapiens
tttggttgattttgt

SEQ ID NO: 1009373 - DNA, 15 bp, Homo sapiens
ctttggttgattttg

SEQ ID NO: 1009374 - DNA, 15 bp, Homo sapiens
tctttggttgatttt

SEQ ID NO: 1009375 - DNA, 15 bp, Homo sapiens
ttctttggttgattt

SEQ ID NO: 1009376 - DNA, 15 bp, Homo sapiens
attctttggttgatt

SEQ ID NO: 1009377 - DNA, 15 bp, Homo sapiens
aattctttggttgat

SEQ ID NO: 1009378 - DNA, 15 bp, Homo sapiens
aaattctttggttga

SEQ ID NO: 1009379 - DNA, 15 bp, Homo sapiens
aaaattctttggttg

SEQ ID NO: 1009380 - DNA, 15 bp, Homo sapiens
caaaattctttggtt

SEQ ID NO: 1009381 - DNA, 15 bp, Homo sapiens
ccaaaattctttggt

SEQ ID NO: 1009382 - DNA, 15 bp, Homo sapiens
accaaaattctttgg

SEQ ID NO: 1009383 - DNA, 15 bp, Homo sapiens
aaccaaaattctttg

SEQ ID NO: 1009384 - DNA, 15 bp, Homo sapiens
caaccaaaattcttt

SEQ ID NO: 1009385 - DNA, 15 bp, Homo sapiens
acaaccaaaattctt

SEQ ID NO: 1009386 - DNA, 15 bp, Homo sapiens
cacaaccaaaattct

SEQ ID NO: 1009387 - DNA, 15 bp, Homo sapiens
ccacaaccaaaattc

SEQ ID NO: 1009388 - DNA, 15 bp, Homo sapiens
tccacaaccaaaatt

SEQ ID NO: 1009389 - DNA, 15 bp, Homo sapiens
atccacaaccaaaat

SEQ ID NO: 1009390 - DNA, 15 bp, Homo sapiens
gatccacaaccaaaa

SEQ ID NO: 1009391 - DNA, 15 bp, Homo sapiens
ggatccacaaccaaa

SEQ ID NO: 1009392 - DNA, 15 bp, Homo sapiens
tggatccacaaccaa

SEQ ID NO: 1009393 - DNA, 15 bp, Homo sapiens
ctggatccacaacca

SEQ ID NO: 1009394 - DNA, 15 bp, Homo sapiens
actggatccacaacc

SEQ ID NO: 1009395 - DNA, 15 bp, Homo sapiens
gactggatccacaac

SEQ ID NO: 1009396 - DNA, 15 bp, Homo sapiens
tgactggatccacaa

SEQ ID NO: 1009397 - DNA, 15 bp, Homo sapiens
gtgactggatccaca

SEQ ID NO: 1009398 - DNA, 15 bp, Homo sapiens
ggtgactggatccac

SEQ ID NO: 1009399 - DNA, 15 bp, Homo sapiens
aggtgactggatcca

SEQ ID NO: 1009400 - DNA, 15 bp, Homo sapiens
gaggtgactggatcc

SEQ ID NO: 1009401 - DNA, 15 bp, Homo sapiens
agaggtgactggatc

SEQ ID NO: 1009402 - DNA, 15 bp, Homo sapiens
cagaggtgactggat

SEQ ID NO: 1009403 - DNA, 15 bp, Homo sapiens
tcagaggtgactgga

SEQ ID NO: 1009404 - DNA, 15 bp, Homo sapiens
ttcagaggtgactgg

SEQ ID NO: 1009405 - DNA, 15 bp, Homo sapiens
gttcagaggtgactg

SEQ ID NO: 1009406 - DNA, 15 bp, Homo sapiens
tgttcagaggtgact

SEQ ID NO: 1009407 - DNA, 15 bp, Homo sapiens
atgttcagaggtgac

SEQ ID NO: 1009408 - DNA, 15 bp, Homo sapiens
catgttcagaggtga

SEQ ID NO: 1009409 - DNA, 15 bp, Homo sapiens
tcatgttcagaggtg

SEQ ID NO: 1009410 - DNA, 15 bp, Homo sapiens
ttcatgttcagaggt

SEQ ID NO: 1009411 - DNA, 15 bp, Homo sapiens
gttcatgttcagagg

SEQ ID NO: 1009412 - DNA, 15 bp, Homo sapiens
agttcatgttcagag

SEQ ID NO: 1009413 - DNA, 15 bp, Homo sapiens
cagttcatgttcaga

SEQ ID NO: 1009414 - DNA, 15 bp, Homo sapiens
tcagttcatgttcag

SEQ ID NO: 1009415 - DNA, 15 bp, Homo sapiens
gtcagttcatgttca

SEQ ID NO: 1009416 - DNA, 15 bp, Homo sapiens
tgtcagttcatgttc

SEQ ID NO: 1009417 - DNA, 15 bp, Homo sapiens
atgtcagttcatgtt

SEQ ID NO: 1009418 - DNA, 15 bp, Homo sapiens
catgtcagttcatgt

SEQ ID NO: 1009419 - DNA, 15 bp, Homo sapiens
acatgtcagttcatg

SEQ ID NO: 1009420 - DNA, 15 bp, Homo sapiens
gacatgtcagttcat

SEQ ID NO: 1009421 - DNA, 15 bp, Homo sapiens
tgacatgtcagttca

SEQ ID NO: 1009422 - DNA, 15 bp, Homo sapiens
ctgacatgtcagttc

SEQ ID NO: 1009423 - DNA, 15 bp, Homo sapiens
cctgacatgtcagtt

SEQ ID NO: 1009424 - DNA, 15 bp, Homo sapiens
gcctgacatgtcagt

SEQ ID NO: 1009425 - DNA, 15 bp, Homo sapiens
agcctgacatgtcag

SEQ ID NO: 1009426 - DNA, 15 bp, Homo sapiens
cagcctgacatgtca

SEQ ID NO: 1009427 - DNA, 15 bp, Homo sapiens
tcagcctgacatgtc

SEQ ID NO: 1009428 - DNA, 15 bp, Homo sapiens
ctcagcctgacatgt

SEQ ID NO: 1009429 - DNA, 15 bp, Homo sapiens
cctcagcctgacatg

SEQ ID NO: 1009430 - DNA, 15 bp, Homo sapiens
ccctcagcctgacat

SEQ ID NO: 1009431 - DNA, 15 bp, Homo sapiens
gccctcagcctgaca

SEQ ID NO: 1009432 - DNA, 15 bp, Homo sapiens
agccctcagcctgac

SEQ ID NO: 1009433 - DNA, 15 bp, Homo sapiens
tagccctcagcctga

SEQ ID NO: 1009434 - DNA, 15 bp, Homo sapiens
gtagccctcagcctg

SEQ ID NO: 1009435 - DNA, 15 bp, Homo sapiens
ggtagccctcagcct

SEQ ID NO: 1009436 - DNA, 15 bp, Homo sapiens
gggtagccctcagcc

SEQ ID NO: 1009437 - DNA, 15 bp, Homo sapiens
ggggtagccctcagc

SEQ ID NO: 1009438 - DNA, 15 bp, Homo sapiens
tggggtagccctcag

SEQ ID NO: 1009439 - DNA, 15 bp, Homo sapiens
ttggggtagccctca

SEQ ID NO: 1009440 - DNA, 15 bp, Homo sapiens
cttggggtagccctc

SEQ ID NO: 1009441 - DNA, 15 bp, Homo sapiens
ccttggggtagccct

SEQ ID NO: 1009442 - DNA, 15 bp, Homo sapiens
gccttggggtagccc

SEQ ID NO: 1009443 - DNA, 15 bp, Homo sapiens
ggccttggggtagcc

SEQ ID NO: 1009444 - DNA, 15 bp, Homo sapiens
cggccttggggtagc

SEQ ID NO: 1009445 - DNA, 15 bp, Homo sapiens
tcggccttggggtag

SEQ ID NO: 1009446 - DNA, 15 bp, Homo sapiens
ttcggccttggggta

SEQ ID NO: 1009447 - DNA, 15 bp, Homo sapiens
cttcggccttggggt

SEQ ID NO: 1009448 - DNA, 15 bp, Homo sapiens
acttcggccttgggg

SEQ ID NO: 1009449 - DNA, 15 bp, Homo sapiens
gacttcggccttggg

SEQ ID NO: 1009450 - DNA, 15 bp, Homo sapiens
tgacttcggccttgg

SEQ ID NO: 1009451 - DNA, 15 bp, Homo sapiens
atgacttcggccttg

SEQ ID NO: 1009452 - DNA, 15 bp, Homo sapiens
gatgacttcggcctt

SEQ ID NO: 1009453 - DNA, 15 bp, Homo sapiens
agatgacttcggcct

SEQ ID NO: 1009454 - DNA, 15 bp, Homo sapiens
cagatgacttcggcc

SEQ ID NO: 1009455 - DNA, 15 bp, Homo sapiens
ccagatgacttcggc

SEQ ID NO: 1009456 - DNA, 15 bp, Homo sapiens
tccagatgacttcgg

SEQ ID NO: 1009457 - DNA, 15 bp, Homo sapiens
gtccagatgacttcg

SEQ ID NO: 1009458 - DNA, 15 bp, Homo sapiens
tgtccagatgacttc

SEQ ID NO: 1009459 - DNA, 15 bp, Homo sapiens
ttgtccagatgactt

SEQ ID NO: 1009460 - DNA, 15 bp, Homo sapiens
cttgtccagatgact

SEQ ID NO: 1009461 - DNA, 15 bp, Homo sapiens
gcttgtccagatgac

SEQ ID NO: 1009462 - DNA, 15 bp, Homo sapiens
tgcttgtccagatga

SEQ ID NO: 1009463 - DNA, 15 bp, Homo sapiens
ctgcttgtccagatg

SEQ ID NO: 1009464 - DNA, 15 bp, Homo sapiens
actgcttgtccagat

SEQ ID NO: 1009465 - DNA, 15 bp, Homo sapiens
cactgcttgtccaga

SEQ ID NO: 1009466 - DNA, 15 bp, Homo sapiens
tcactgcttgtccag

SEQ ID NO: 1009467 - DNA, 15 bp, Homo sapiens
gtcactgcttgtcca

SEQ ID NO: 1009468 - DNA, 15 bp, Homo sapiens
ggtcactgcttgtcc

SEQ ID NO: 1009469 - DNA, 15 bp, Homo sapiens
tggtcactgcttgtc

SEQ ID NO: 1009470 - DNA, 15 bp, Homo sapiens
atggtcactgcttgt

SEQ ID NO: 1009471 - DNA, 15 bp, Homo sapiens
gatggtcactgcttg

SEQ ID NO: 1009472 - DNA, 15 bp, Homo sapiens
tgatggtcactgctt

SEQ ID NO: 1009473 - DNA, 15 bp, Homo sapiens
ttgatggtcactgct

SEQ ID NO: 1009474 - DNA, 15 bp, Homo sapiens
cttgatggtcactgc

SEQ ID NO: 1009475 - DNA, 15 bp, Homo sapiens
acttgatggtcactg

SEQ ID NO: 1009476 - DNA, 15 bp, Homo sapiens
gacttgatggtcact

SEQ ID NO: 1009477 - DNA, 15 bp, Homo sapiens
ggacttgatggtcac

SEQ ID NO: 1009478 - DNA, 15 bp, Homo sapiens
aggacttgatggtca

SEQ ID NO: 1009479 - DNA, 15 bp, Homo sapiens
caggacttgatggtc

SEQ ID NO: 1009480 - DNA, 15 bp, Homo sapiens
tcaggacttgatggt

SEQ ID NO: 1009481 - DNA, 15 bp, Homo sapiens
ctcaggacttgatgg

SEQ ID NO: 1009482 - DNA, 15 bp, Homo sapiens
actcaggacttgatg

SEQ ID NO: 1009483 - DNA, 15 bp, Homo sapiens
cactcaggacttgat

SEQ ID NO: 1009484 - DNA, 15 bp, Homo sapiens
ccactcaggacttga

SEQ ID NO: 1009485 - DNA, 15 bp, Homo sapiens
accactcaggacttg

SEQ ID NO: 1009486 - DNA, 15 bp, Homo sapiens
taccactcaggactt

SEQ ID NO: 1009487 - DNA, 15 bp, Homo sapiens
ttaccactcaggact

SEQ ID NO: 1009488 - DNA, 15 bp, Homo sapiens
cttaccactcaggac

SEQ ID NO: 1009489 - DNA, 15 bp, Homo sapiens
tcttaccactcagga

SEQ ID NO: 1009490 - DNA, 15 bp, Homo sapiens
gtcttaccactcagg

SEQ ID NO: 1009491 - DNA, 15 bp, Homo sapiens
ggtcttaccactcag

SEQ ID NO: 1009492 - DNA, 15 bp, Homo sapiens
tggtcttaccactca

SEQ ID NO: 1009493 - DNA, 15 bp, Homo sapiens
gtggtcttaccactc

SEQ ID NO: 1009494 - DNA, 15 bp, Homo sapiens
ggtggtcttaccact

SEQ ID NO: 1009495 - DNA, 15 bp, Homo sapiens
tggtggtcttaccac

SEQ ID NO: 1009496 - DNA, 15 bp, Homo sapiens
gtggtggtcttacca

SEQ ID NO: 1009497 - DNA, 15 bp, Homo sapiens
ggtggtggtcttacc

SEQ ID NO: 1009498 - DNA, 15 bp, Homo sapiens
tggtggtggtcttac

SEQ ID NO: 1009499 - DNA, 15 bp, Homo sapiens
gtggtggtggtctta

SEQ ID NO: 1009500 - DNA, 15 bp, Homo sapiens
ggtggtggtggtctt

SEQ ID NO: 1009501 - DNA, 15 bp, Homo sapiens
tggtggtggtggtct

SEQ ID NO: 1009502 - DNA, 15 bp, Homo sapiens
attggtggtggtggt

SEQ ID NO: 1009503 - DNA, 15 bp, Homo sapiens
aattggtggtggtgg

SEQ ID NO: 1009504 - DNA, 15 bp, Homo sapiens
gaattggtggtggtg

SEQ ID NO: 1009505 - DNA, 15 bp, Homo sapiens
ggaattggtggtggt

SEQ ID NO: 1009506 - DNA, 15 bp, Homo sapiens
tggaattggtggtgg

SEQ ID NO: 1009507 - DNA, 15 bp, Homo sapiens
ttggaattggtggtg

SEQ ID NO: 1009508 - DNA, 15 bp, Homo sapiens
cttggaattggtggt

SEQ ID NO: 1009509 - DNA, 15 bp, Homo sapiens
tcttggaattggtgg

SEQ ID NO: 1009510 - DNA, 15 bp, Homo sapiens
ctcttggaattggtg

SEQ ID NO: 1009511 - DNA, 15 bp, Homo sapiens
ctctcttggaattgg

SEQ ID NO: 1009512 - DNA, 15 bp, Homo sapiens
tctctcttggaattg

SEQ ID NO: 1009513 - DNA, 15 bp, Homo sapiens
ctctctcttggaatt

SEQ ID NO: 1009514 - DNA, 15 bp, Homo sapiens
cctctctcttggaat

SEQ ID NO: 1009515 - DNA, 15 bp, Homo sapiens
tcctctctcttggaa

SEQ ID NO: 1009516 - DNA, 15 bp, Homo sapiens
ctcctctctcttgga

SEQ ID NO: 1009517 - DNA, 15 bp, Homo sapiens
tctcctctctcttgg

SEQ ID NO: 1009518 - DNA, 15 bp, Homo sapiens
ttctcctctctcttg

SEQ ID NO: 1009519 - DNA, 15 bp, Homo sapiens
cttctcctctctctt

SEQ ID NO: 1009520 - DNA, 15 bp, Homo sapiens
gcttctcctctctct

SEQ ID NO: 1009521 - DNA, 15 bp, Homo sapiens
agcttctcctctctc

SEQ ID NO: 1009522 - DNA, 15 bp, Homo sapiens
aagcttctcctctct

SEQ ID NO: 1009523 - DNA, 15 bp, Homo sapiens
aaagcttctcctctc

SEQ ID NO: 1009524 - DNA, 15 bp, Homo sapiens
aaaagcttctcctct

SEQ ID NO: 1009525 - DNA, 15 bp, Homo sapiens
gaaaagcttctcctc

SEQ ID NO: 1009526 - DNA, 15 bp, Homo sapiens
tgaaaagcttctcct

SEQ ID NO: 1009527 - DNA, 15 bp, Homo sapiens
ttgaaaagcttctcc

SEQ ID NO: 1009528 - DNA, 15 bp, Homo sapiens
attgaaaagcttctc

SEQ ID NO: 1009529 - DNA, 15 bp, Homo sapiens
cattgaaaagcttct

SEQ ID NO: 1009530 - DNA, 15 bp, Homo sapiens
acattgaaaagcttc

SEQ ID NO: 1009531 - DNA, 15 bp, Homo sapiens
cacattgaaaagctt

SEQ ID NO: 1009532 - DNA, 15 bp, Homo sapiens
tcacattgaaaagct

SEQ ID NO: 1009533 - DNA, 15 bp, Homo sapiens
gtcacattgaaaagc

SEQ ID NO: 1009534 - DNA, 15 bp, Homo sapiens
ggtcacattgaaaag

SEQ ID NO: 1009535 - DNA, 15 bp, Homo sapiens
tggtcacattgaaaa

SEQ ID NO: 1009536 - DNA, 15 bp, Homo sapiens
ctggtcacattgaaa

SEQ ID NO: 1009537 - DNA, 15 bp, Homo sapiens
gctggtcacattgaa

SEQ ID NO: 1009538 - DNA, 15 bp, Homo sapiens
tgctggtcacattga

SEQ ID NO: 1009539 - DNA, 15 bp, Homo sapiens
gtgctggtcacattg

SEQ ID NO: 1009540 - DNA, 15 bp, Homo sapiens
tgtgctggtcacatt

SEQ ID NO: 1009541 - DNA, 15 bp, Homo sapiens
gtgtgctggtcacat

SEQ ID NO: 1009542 - DNA, 15 bp, Homo sapiens
agtgtgctggtcaca

SEQ ID NO: 1009543 - DNA, 15 bp, Homo sapiens
cagtgtgctggtcac

SEQ ID NO: 1009544 - DNA, 15 bp, Homo sapiens
tcagtgtgctggtca

SEQ ID NO: 1009545 - DNA, 15 bp, Homo sapiens
ctcagtgtgctggtc

SEQ ID NO: 1009546 - DNA, 15 bp, Homo sapiens
tctcagtgtgctggt

SEQ ID NO: 1009547 - DNA, 15 bp, Homo sapiens
ttctcagtgtgctgg

SEQ ID NO: 1009548 - DNA, 15 bp, Homo sapiens
attctcagtgtgctg

SEQ ID NO: 1009549 - DNA, 15 bp, Homo sapiens
gattctcagtgtgct

SEQ ID NO: 1009550 - DNA, 15 bp, Homo sapiens
tgattctcagtgtgc

SEQ ID NO: 1009551 - DNA, 15 bp, Homo sapiens
ttgattctcagtgtg

SEQ ID NO: 1009552 - DNA, 15 bp, Homo sapiens
gttgattctcagtgt

SEQ ID NO: 1009553 - DNA, 15 bp, Homo sapiens
tgttgattctcagtg

SEQ ID NO: 1009554 - DNA, 15 bp, Homo sapiens
gtgttgattctcagt

SEQ ID NO: 1009555 - DNA, 15 bp, Homo sapiens
tgtgttgattctcag

SEQ ID NO: 1009556 - DNA, 15 bp, Homo sapiens
ttgtgttgattctca

SEQ ID NO: 1009557 - DNA, 15 bp, Homo sapiens
gttgtgttgattctc

SEQ ID NO: 1009558 - DNA, 15 bp, Homo sapiens
tgttgtgttgattct

SEQ ID NO: 1009559 - DNA, 15 bp, Homo sapiens
ttgttgtgttgattc

SEQ ID NO: 1009560 - DNA, 15 bp, Homo sapiens
gttgttgtgttgatt

SEQ ID NO: 1009561 - DNA, 15 bp, Homo sapiens
agttgttgtgttgat

SEQ ID NO: 1009562 - DNA, 15 bp, Homo sapiens
tagttgttgtgttga

SEQ ID NO: 1009563 - DNA, 15 bp, Homo sapiens
ttagttgttgtgttg

SEQ ID NO: 1009564 - DNA, 15 bp, Homo sapiens
attagttgttgtgtt

SEQ ID NO: 1009565 - DNA, 15 bp, Homo sapiens
cattagttgttgtgt

SEQ ID NO: 1009566 - DNA, 15 bp, Homo sapiens
tcattagttgttgtg

SEQ ID NO: 1009567 - DNA, 15 bp, Homo sapiens
ctcattagttgttgt

SEQ ID NO: 1009568 - DNA, 15 bp, Homo sapiens
tctcattagttgttg

SEQ ID NO: 1009569 - DNA, 15 bp, Homo sapiens
atctcattagttgtt

SEQ ID NO: 1009570 - DNA, 15 bp, Homo sapiens
aatctcattagttgt

SEQ ID NO: 1009571 - DNA, 15 bp, Homo sapiens
aaatctcattagttg

SEQ ID NO: 1009572 - DNA, 15 bp, Homo sapiens
aaaatctcattagtt

SEQ ID NO: 1009573 - DNA, 15 bp, Homo sapiens
gaaaatctcattagt

SEQ ID NO: 1009574 - DNA, 15 bp, Homo sapiens
agaaaatctcattag

SEQ ID NO: 1009575 - DNA, 15 bp, Homo sapiens
tagaaaatctcatta

SEQ ID NO: 1009576 - DNA, 15 bp, Homo sapiens
gtagaaaatctcatt

SEQ ID NO: 1009577 - DNA, 15 bp, Homo sapiens
agtagaaaatctcat

SEQ ID NO: 1009578 - DNA, 15 bp, Homo sapiens
cagtagaaaatctca

SEQ ID NO: 1009579 - DNA, 15 bp, Homo sapiens
gcagtagaaaatctc

SEQ ID NO: 1009580 - DNA, 15 bp, Homo sapiens
tgcagtagaaaatct

SEQ ID NO: 1009581 - DNA, 15 bp, Homo sapiens
gtgcagtagaaaatc

SEQ ID NO: 1009582 - DNA, 15 bp, Homo sapiens
agtgcagtagaaaat

SEQ ID NO: 1009583 - DNA, 15 bp, Homo sapiens
aagtgcagtagaaaa

SEQ ID NO: 1009584 - DNA, 15 bp, Homo sapiens
aaagtgcagtagaaa

SEQ ID NO: 1009585 - DNA, 15 bp, Homo sapiens
aaaagtgcagtagaa

SEQ ID NO: 1009586 - DNA, 15 bp, Homo sapiens
taaaagtgcagtaga

SEQ ID NO: 1009587 - DNA, 15 bp, Homo sapiens
ctaaaagtgcagtag

SEQ ID NO: 1009588 - DNA, 15 bp, Homo sapiens
cctaaaagtgcagta

SEQ ID NO: 1009589 - DNA, 15 bp, Homo sapiens
tcctaaaagtgcagt

SEQ ID NO: 1009590 - DNA, 15 bp, Homo sapiens
ctcctaaaagtgcag

SEQ ID NO: 1009591 - DNA, 15 bp, Homo sapiens
tctcctaaaagtgca

SEQ ID NO: 1009592 - DNA, 15 bp, Homo sapiens
atctcctaaaagtgc

SEQ ID NO: 1009593 - DNA, 15 bp, Homo sapiens
aatctcctaaaagtg

SEQ ID NO: 1009594 - DNA, 15 bp, Homo sapiens
taatctcctaaaagt

SEQ ID NO: 1009595 - DNA, 15 bp, Homo sapiens
ctaatctcctaaaag

SEQ ID NO: 1009596 - DNA, 15 bp, Homo sapiens
tctaatctcctaaaa

SEQ ID NO: 1009597 - DNA, 15 bp, Homo sapiens
atctaatctcctaaa

SEQ ID NO: 1009598 - DNA, 15 bp, Homo sapiens
gatctaatctcctaa

SEQ ID NO: 1009599 - DNA, 15 bp, Homo sapiens
ggatctaatctccta

SEQ ID NO: 1009600 - DNA, 15 bp, Homo sapiens
aggatctaatctcct

SEQ ID NO: 1009601 - DNA, 15 bp, Homo sapiens
caggatctaatctcc

SEQ ID NO: 1009602 - DNA, 15 bp, Homo sapiens
tcaggatctaatctc

SEQ ID NO: 1009603 - DNA, 15 bp, Homo sapiens
ctcaggatctaatct

SEQ ID NO: 1009604 - DNA, 15 bp, Homo sapiens
cctcaggatctaatc

SEQ ID NO: 1009605 - DNA, 15 bp, Homo sapiens
tcctcaggatctaat

SEQ ID NO: 1009606 - DNA, 15 bp, Homo sapiens
ttcctcaggatctaa

SEQ ID NO: 1009607 - DNA, 15 bp, Homo sapiens
tttcctcaggatcta

SEQ ID NO: 1009608 - DNA, 15 bp, Homo sapiens
ttttcctcaggatct

SEQ ID NO: 1009609 - DNA, 15 bp, Homo sapiens
gttttcctcaggatc

SEQ ID NO: 1009610 - DNA, 15 bp, Homo sapiens
ggttttcctcaggat

SEQ ID NO: 1009611 - DNA, 15 bp, Homo sapiens
tggttttcctcagga

SEQ ID NO: 1009612 - DNA, 15 bp, Homo sapiens
atggttttcctcagg

SEQ ID NO: 1009613 - DNA, 15 bp, Homo sapiens
tatggttttcctcag

SEQ ID NO: 1009614 - DNA, 15 bp, Homo sapiens
gtatggttttcctca

SEQ ID NO: 1009615 - DNA, 15 bp, Homo sapiens
tgtatggttttcctc

SEQ ID NO: 1009616 - DNA, 15 bp, Homo sapiens
ctgtatggttttcct

SEQ ID NO: 1009617 - DNA, 15 bp, Homo sapiens
gctgtatggttttcc

SEQ ID NO: 1009618 - DNA, 15 bp, Homo sapiens
agctgtatggttttc

SEQ ID NO: 1009619 - DNA, 15 bp, Homo sapiens
cagctgtatggtttt

SEQ ID NO: 1009620 - DNA, 15 bp, Homo sapiens
tcagctgtatggttt

SEQ ID NO: 1009621 - DNA, 15 bp, Homo sapiens
ttcagctgtatggtt

SEQ ID NO: 1009622 - DNA, 15 bp, Homo sapiens
attcagctgtatggt

SEQ ID NO: 1009623 - DNA, 15 bp, Homo sapiens
aattcagctgtatgg

SEQ ID NO: 1009624 - DNA, 15 bp, Homo sapiens
caattcagctgtatg

SEQ ID NO: 1009625 - DNA, 15 bp, Homo sapiens
ccaattcagctgtat

SEQ ID NO: 1009626 - DNA, 15 bp, Homo sapiens
accaattcagctgta

SEQ ID NO: 1009627 - DNA, 15 bp, Homo sapiens
gaccaattcagctgt

SEQ ID NO: 1009628 - DNA, 15 bp, Homo sapiens
tgaccaattcagctg

SEQ ID NO: 1009629 - DNA, 15 bp, Homo sapiens
atgaccaattcagct

SEQ ID NO: 1009630 - DNA, 15 bp, Homo sapiens
gatgaccaattcagc

SEQ ID NO: 1009631 - DNA, 15 bp, Homo sapiens
ggatgaccaattcag

SEQ ID NO: 1009632 - DNA, 15 bp, Homo sapiens
gggatgaccaattca

SEQ ID NO: 1009633 - DNA, 15 bp, Homo sapiens
tgggatgaccaattc

SEQ ID NO: 1009634 - DNA, 15 bp, Homo sapiens
ctgggatgaccaatt

SEQ ID NO: 1009635 - DNA, 15 bp, Homo sapiens
cctgggatgaccaat

SEQ ID NO: 1009636 - DNA, 15 bp, Homo sapiens
acctgggatgaccaa

SEQ ID NO: 1009637 - DNA, 15 bp, Homo sapiens
tacctgggatgacca

SEQ ID NO: 1009638 - DNA, 15 bp, Homo sapiens
ttacctgggatgacc

SEQ ID NO: 1009639 - DNA, 15 bp, Homo sapiens
attacctgggatgac

SEQ ID NO: 1009640 - DNA, 15 bp, Homo sapiens
tattacctgggatga

SEQ ID NO: 1009641 - DNA, 15 bp, Homo sapiens
atattacctgggatg

SEQ ID NO: 1009642 - DNA, 15 bp, Homo sapiens
aatattacctgggat

SEQ ID NO: 1009643 - DNA, 15 bp, Homo sapiens
gaatattacctggga

SEQ ID NO: 1009644 - DNA, 15 bp, Homo sapiens
agaatattacctggg

SEQ ID NO: 1009645 - DNA, 15 bp, Homo sapiens
cagaatattacctgg

SEQ ID NO: 1009646 - DNA, 15 bp, Homo sapiens
tcagaatattacctg

SEQ ID NO: 1009647 - DNA, 15 bp, Homo sapiens
ttcagaatattacct

SEQ ID NO: 1009648 - DNA, 15 bp, Homo sapiens
attcagaatattacc

SEQ ID NO: 1009649 - DNA, 15 bp, Homo sapiens
cattcagaatattac

SEQ ID NO: 1009650 - DNA, 15 bp, Homo sapiens
acattcagaatatta

SEQ ID NO: 1009651 - DNA, 15 bp, Homo sapiens
cacattcagaatatt

SEQ ID NO: 1009652 - DNA, 15 bp, Homo sapiens
acacattcagaatat

SEQ ID NO: 1009653 - DNA, 15 bp, Homo sapiens
gacacattcagaata

SEQ ID NO: 1009654 - DNA, 15 bp, Homo sapiens
ggacacattcagaat

SEQ ID NO: 1009655 - DNA, 15 bp, Homo sapiens
tggacacattcagaa

SEQ ID NO: 1009656 - DNA, 15 bp, Homo sapiens
atggacacattcaga

SEQ ID NO: 1009657 - DNA, 15 bp, Homo sapiens
aatggacacattcag

SEQ ID NO: 1009658 - DNA, 15 bp, Homo sapiens
taatggacacattca

SEQ ID NO: 1009659 - DNA, 15 bp, Homo sapiens
ttaatggacacattc

SEQ ID NO: 1009660 - DNA, 15 bp, Homo sapiens
tttaatggacacatt

SEQ ID NO: 1009661 - DNA, 15 bp, Homo sapiens
ttttaatggacacat

SEQ ID NO: 1009662 - DNA, 15 bp, Homo sapiens
attttaatggacaca

SEQ ID NO: 1009663 - DNA, 15 bp, Homo sapiens
tattttaatggacac

SEQ ID NO: 1009664 - DNA, 15 bp, Homo sapiens
atattttaatggaca

SEQ ID NO: 1009665 - DNA, 15 bp, Homo sapiens
catattttaatggac

SEQ ID NO: 1009666 - DNA, 15 bp, Homo sapiens
acatattttaatgga

SEQ ID NO: 1009667 - DNA, 15 bp, Homo sapiens
gacatattttaatgg

SEQ ID NO: 1009668 - DNA, 15 bp, Homo sapiens
agacatattttaatg

SEQ ID NO: 1009669 - DNA, 15 bp, Homo sapiens
tagacatattttaat

SEQ ID NO: 1009670 - DNA, 15 bp, Homo sapiens
ttagacatattttaa

SEQ ID NO: 1009671 - DNA, 15 bp, Homo sapiens
gttagacatatttta

SEQ ID NO: 1009672 - DNA, 15 bp, Homo sapiens
tgttagacatatttt

SEQ ID NO: 1009673 - DNA, 15 bp, Homo sapiens
gtgttagacatattt

SEQ ID NO: 1009674 - DNA, 15 bp, Homo sapiens
agtgttagacatatt

SEQ ID NO: 1009675 - DNA, 15 bp, Homo sapiens
cagtgttagacatat

SEQ ID NO: 1009676 - DNA, 15 bp, Homo sapiens
acagtgttagacata

SEQ ID NO: 1009677 - DNA, 15 bp, Homo sapiens
gacagtgttagacat

SEQ ID NO: 1009678 - DNA, 15 bp, Homo sapiens
ggacagtgttagaca

SEQ ID NO: 1009679 - DNA, 15 bp, Homo sapiens
gggacagtgttagac

SEQ ID NO: 1009680 - DNA, 15 bp, Homo sapiens
ggggacagtgttaga

SEQ ID NO: 1009681 - DNA, 15 bp, Homo sapiens
aggggacagtgttag

SEQ ID NO: 1009682 - DNA, 15 bp, Homo sapiens
taggggacagtgtta

SEQ ID NO: 1009683 - DNA, 15 bp, Homo sapiens
ctaggggacagtgtt

SEQ ID NO: 1009684 - DNA, 15 bp, Homo sapiens
gctaggggacagtgt

SEQ ID NO: 1009685 - DNA, 15 bp, Homo sapiens
tgctaggggacagtg

SEQ ID NO: 1009686 - DNA, 15 bp, Homo sapiens
gtgctaggggacagt

SEQ ID NO: 1009687 - DNA, 15 bp, Homo sapiens
ggtgctaggggacag

SEQ ID NO: 1009688 - DNA, 15 bp, Homo sapiens
aggtgctaggggaca

SEQ ID NO: 1009689 - DNA, 15 bp, Homo sapiens
taggtgctaggggac

SEQ ID NO: 1009690 - DNA, 15 bp, Homo sapiens
ctaggtgctagggga

SEQ ID NO: 1009691 - DNA, 15 bp, Homo sapiens
gctaggtgctagggg

SEQ ID NO: 1009692 - DNA, 15 bp, Homo sapiens
tgctaggtgctaggg

SEQ ID NO: 1009693 - DNA, 15 bp, Homo sapiens
atgctaggtgctagg

SEQ ID NO: 1009694 - DNA, 15 bp, Homo sapiens
catgctaggtgctag

SEQ ID NO: 1009695 - DNA, 15 bp, Homo sapiens
tcatgctaggtgcta

SEQ ID NO: 1009696 - DNA, 15 bp, Homo sapiens
atcatgctaggtgct

SEQ ID NO: 1009697 - DNA, 15 bp, Homo sapiens
catcatgctaggtgc

SEQ ID NO: 1009698 - DNA, 15 bp, Homo sapiens
acatcatgctaggtg

SEQ ID NO: 1009699 - DNA, 15 bp, Homo sapiens
gacatcatgctaggt

SEQ ID NO: 1009700 - DNA, 15 bp, Homo sapiens
agacatcatgctagg

SEQ ID NO: 1009701 - DNA, 15 bp, Homo sapiens
cagacatcatgctag

SEQ ID NO: 1009702 - DNA, 15 bp, Homo sapiens
gcagacatcatgcta

SEQ ID NO: 1009703 - DNA, 15 bp, Homo sapiens
ggcagacatcatgct

SEQ ID NO: 1009704 - DNA, 15 bp, Homo sapiens
aggcagacatcatgc

SEQ ID NO: 1009705 - DNA, 15 bp, Homo sapiens
taggcagacatcatg

SEQ ID NO: 1009706 - DNA, 15 bp, Homo sapiens
ataggcagacatcat

SEQ ID NO: 1009707 - DNA, 15 bp, Homo sapiens
gataggcagacatca

SEQ ID NO: 1009708 - DNA, 15 bp, Homo sapiens
tgataggcagacatc

SEQ ID NO: 1009709 - DNA, 15 bp, Homo sapiens
atgataggcagacat

SEQ ID NO: 1009710 - DNA, 15 bp, Homo sapiens
tatgataggcagaca

SEQ ID NO: 1009711 - DNA, 15 bp, Homo sapiens
ctatgataggcagac

SEQ ID NO: 1009712 - DNA, 15 bp, Homo sapiens
actatgataggcaga

SEQ ID NO: 1009713 - DNA, 15 bp, Homo sapiens
gactatgataggcag

SEQ ID NO: 1009714 - DNA, 15 bp, Homo sapiens
tgactatgataggca

SEQ ID NO: 1009715 - DNA, 15 bp, Homo sapiens
atgactatgataggc

SEQ ID NO: 1009716 - DNA, 15 bp, Homo sapiens
aatgactatgatagg

SEQ ID NO: 1009717 - DNA, 15 bp, Homo sapiens
gaatgactatgatag

SEQ ID NO: 1009718 - DNA, 15 bp, Homo sapiens
tgaatgactatgata

SEQ ID NO: 1009719 - DNA, 15 bp, Homo sapiens
ctgaatgactatgat

SEQ ID NO: 1009720 - DNA, 15 bp, Homo sapiens
actgaatgactatga

SEQ ID NO: 1009721 - DNA, 15 bp, Homo sapiens
cactgaatgactatg

SEQ ID NO: 1009722 - DNA, 15 bp, Homo sapiens
tcactgaatgactat

SEQ ID NO: 1009723 - DNA, 15 bp, Homo sapiens
atcactgaatgacta

SEQ ID NO: 1009724 - DNA, 15 bp, Homo sapiens
aatcactgaatgact

SEQ ID NO: 1009725 - DNA, 15 bp, Homo sapiens
caatcactgaatgac

SEQ ID NO: 1009726 - DNA, 15 bp, Homo sapiens
acaatcactgaatga

SEQ ID NO: 1009727 - DNA, 15 bp, Homo sapiens
aacaatcactgaatg

SEQ ID NO: 1009728 - DNA, 15 bp, Homo sapiens
caacaatcactgaat

SEQ ID NO: 1009729 - DNA, 15 bp, Homo sapiens
tcaacaatcactgaa

SEQ ID NO: 1009730 - DNA, 15 bp, Homo sapiens
ttcaacaatcactga

SEQ ID NO: 1009731 - DNA, 15 bp, Homo sapiens
attcaacaatcactg

SEQ ID NO: 1009732 - DNA, 15 bp, Homo sapiens
tattcaacaatcact

SEQ ID NO: 1009733 - DNA, 15 bp, Homo sapiens
ttattcaacaatcac

SEQ ID NO: 1009734 - DNA, 15 bp, Homo sapiens
tttattcaacaatca

SEQ ID NO: 1009735 - DNA, 15 bp, Homo sapiens
atttattcaacaatc

SEQ ID NO: 1009736 - DNA, 15 bp, Homo sapiens
catttattcaacaat

SEQ ID NO: 1009737 - DNA, 15 bp, Homo sapiens
tcatttattcaacaa

SEQ ID NO: 1009738 - DNA, 15 bp, Homo sapiens
ttcatttattcaaca

SEQ ID NO: 1009739 - DNA, 15 bp, Homo sapiens
attcatttattcaac

SEQ ID NO: 1009740 - DNA, 15 bp, Homo sapiens
cattcatttattcaa

SEQ ID NO: 1009741 - DNA, 15 bp, Homo sapiens
tcattcatttattca

SEQ ID NO: 1009742 - DNA, 15 bp, Homo sapiens
ttcattcatttattc

SEQ ID NO: 1009743 - DNA, 15 bp, Homo sapiens
attcattcatttatt

SEQ ID NO: 1009744 - DNA, 15 bp, Homo sapiens
cattcattcatttat

SEQ ID NO: 1009745 - DNA, 15 bp, Homo sapiens
tcattcattcattta

SEQ ID NO: 1009746 - DNA, 15 bp, Homo sapiens
ttcattcattcattt

SEQ ID NO: 1009747 - DNA, 15 bp, Homo sapiens
attcattcattcatt

SEQ ID NO: 1009748 - DNA, 15 bp, Homo sapiens
gttattcattcattc

SEQ ID NO: 1009749 - DNA, 15 bp, Homo sapiens
tgttattcattcatt

SEQ ID NO: 1009750 - DNA, 15 bp, Homo sapiens
gtgttattcattcat

SEQ ID NO: 1009751 - DNA, 15 bp, Homo sapiens
agtgttattcattca

SEQ ID NO: 1009752 - DNA, 15 bp, Homo sapiens
tagtgttattcattc

SEQ ID NO: 1009753 - DNA, 15 bp, Homo sapiens
atagtgttattcatt

SEQ ID NO: 1009754 - DNA, 15 bp, Homo sapiens
catagtgttattcat

SEQ ID NO: 1009755 - DNA, 15 bp, Homo sapiens
acatagtgttattca

SEQ ID NO: 1009756 - DNA, 15 bp, Homo sapiens
aacatagtgttattc

SEQ ID NO: 1009757 - DNA, 15 bp, Homo sapiens
aaacatagtgttatt

SEQ ID NO: 1009758 - DNA, 15 bp, Homo sapiens
taaacatagtgttat

SEQ ID NO: 1009759 - DNA, 15 bp, Homo sapiens
gtaaacatagtgtta

SEQ ID NO: 1009760 - DNA, 15 bp, Homo sapiens
tgtaaacatagtgtt

SEQ ID NO: 1009761 - DNA, 15 bp, Homo sapiens
ttgtaaacatagtgt

SEQ ID NO: 1009762 - DNA, 15 bp, Homo sapiens
tttgtaaacatagtg

SEQ ID NO: 1009763 - DNA, 15 bp, Homo sapiens
ttttgtaaacatagt

SEQ ID NO: 1009764 - DNA, 15 bp, Homo sapiens
attttgtaaacatag

SEQ ID NO: 1009765 - DNA, 15 bp, Homo sapiens
tattttgtaaacata

SEQ ID NO: 1009766 - DNA, 15 bp, Homo sapiens
atattttgtaaacat

SEQ ID NO: 1009767 - DNA, 15 bp, Homo sapiens
tatattttgtaaaca

SEQ ID NO: 1009768 - DNA, 15 bp, Homo sapiens
atatattttgtaaac

SEQ ID NO: 1009769 - DNA, 15 bp, Homo sapiens
gatatattttgtaaa

SEQ ID NO: 1009770 - DNA, 15 bp, Homo sapiens
ggatatattttgtaa

SEQ ID NO: 1009771 - DNA, 15 bp, Homo sapiens
aggatatattttgta

SEQ ID NO: 1009772 - DNA, 15 bp, Homo sapiens
taggatatattttgt

SEQ ID NO: 1009773 - DNA, 15 bp, Homo sapiens
ttaggatatattttg

SEQ ID NO: 1009774 - DNA, 15 bp, Homo sapiens
attaggatatatttt

SEQ ID NO: 1009775 - DNA, 15 bp, Homo sapiens
aattaggatatattt

SEQ ID NO: 1009776 - DNA, 15 bp, Homo sapiens
gaattaggatatatt

SEQ ID NO: 1009777 - DNA, 15 bp, Homo sapiens
ggaattaggatatat

SEQ ID NO: 1009778 - DNA, 15 bp, Homo sapiens
aggaattaggatata

SEQ ID NO: 1009779 - DNA, 15 bp, Homo sapiens
gaggaattaggatat

SEQ ID NO: 1009780 - DNA, 15 bp, Homo sapiens
tgaggaattaggata

SEQ ID NO: 1009781 - DNA, 15 bp, Homo sapiens
gtgaggaattaggat

SEQ ID NO: 1009782 - DNA, 15 bp, Homo sapiens
ggtgaggaattagga

SEQ ID NO: 1009783 - DNA, 15 bp, Homo sapiens
aggtgaggaattagg

SEQ ID NO: 1009784 - DNA, 15 bp, Homo sapiens
gaggtgaggaattag

SEQ ID NO: 1009785 - DNA, 15 bp, Homo sapiens
ggaggtgaggaatta

SEQ ID NO: 1009786 - DNA, 15 bp, Homo sapiens
tggaggtgaggaatt

SEQ ID NO: 1009787 - DNA, 15 bp, Homo sapiens
atggaggtgaggaat

SEQ ID NO: 1009788 - DNA, 15 bp, Homo sapiens
aatggaggtgaggaa

SEQ ID NO: 1009789 - DNA, 15 bp, Homo sapiens
gaatggaggtgagga

SEQ ID NO: 1009790 - DNA, 15 bp, Homo sapiens
tgaatggaggtgagg

SEQ ID NO: 1009791 - DNA, 15 bp, Homo sapiens
atgaatggaggtgag

SEQ ID NO: 1009792 - DNA, 15 bp, Homo sapiens
gatgaatggaggtga

SEQ ID NO: 1009793 - DNA, 15 bp, Homo sapiens
ggatgaatggaggtg

SEQ ID NO: 1009794 - DNA, 15 bp, Homo sapiens
tggatgaatggaggt

SEQ ID NO: 1009795 - DNA, 15 bp, Homo sapiens
ttggatgaatggagg

SEQ ID NO: 1009796 - DNA, 15 bp, Homo sapiens
tttggatgaatggag

SEQ ID NO: 1009797 - DNA, 15 bp, Homo sapiens
gtttggatgaatgga

SEQ ID NO: 1009798 - DNA, 15 bp, Homo sapiens
ggtttggatgaatgg

SEQ ID NO: 1009799 - DNA, 15 bp, Homo sapiens
tggtttggatgaatg

SEQ ID NO: 1009800 - DNA, 15 bp, Homo sapiens
atggtttggatgaat

SEQ ID NO: 1009801 - DNA, 15 bp, Homo sapiens
tatggtttggatgaa

SEQ ID NO: 1009802 - DNA, 15 bp, Homo sapiens
atatggtttggatga

SEQ ID NO: 1009803 - DNA, 15 bp, Homo sapiens
aatatggtttggatg

SEQ ID NO: 1009804 - DNA, 15 bp, Homo sapiens
caatatggtttggat

SEQ ID NO: 1009805 - DNA, 15 bp, Homo sapiens
acaatatggtttgga

SEQ ID NO: 1009806 - DNA, 15 bp, Homo sapiens
aacaatatggtttgg

SEQ ID NO: 1009807 - DNA, 15 bp, Homo sapiens
taacaatatggtttg

SEQ ID NO: 1009808 - DNA, 15 bp, Homo sapiens
gtaacaatatggttt

SEQ ID NO: 1009809 - DNA, 15 bp, Homo sapiens
agtaacaatatggtt

SEQ ID NO: 1009810 - DNA, 15 bp, Homo sapiens
aagtaacaatatggt

SEQ ID NO: 1009811 - DNA, 15 bp, Homo sapiens
taagtaacaatatgg

SEQ ID NO: 1009812 - DNA, 15 bp, Homo sapiens
ttaagtaacaatatg

SEQ ID NO: 1009813 - DNA, 15 bp, Homo sapiens
attaagtaacaatat

SEQ ID NO: 1009814 - DNA, 15 bp, Homo sapiens
tattaagtaacaata

SEQ ID NO: 1009815 - DNA, 15 bp, Homo sapiens
ttattaagtaacaat

SEQ ID NO: 1009816 - DNA, 15 bp, Homo sapiens
tttattaagtaacaa

SEQ ID NO: 1009817 - DNA, 15 bp, Homo sapiens
gtttattaagtaaca

SEQ ID NO: 1009818 - DNA, 15 bp, Homo sapiens
tgtttattaagtaac

SEQ ID NO: 1009819 - DNA, 15 bp, Homo sapiens
atgtttattaagtaa

SEQ ID NO: 1009820 - DNA, 15 bp, Homo sapiens
aatgtttattaagta

SEQ ID NO: 1009821 - DNA, 15 bp, Homo sapiens
gaatgtttattaagt

SEQ ID NO: 1009822 - DNA, 15 bp, Homo sapiens
tgaatgtttattaag

SEQ ID NO: 1009823 - DNA, 15 bp, Homo sapiens
ctgaatgtttattaa

SEQ ID NO: 1009824 - DNA, 15 bp, Homo sapiens
gctgaatgtttatta

SEQ ID NO: 1009825 - DNA, 15 bp, Homo sapiens
tgctgaatgtttatt

SEQ ID NO: 1009826 - DNA, 15 bp, Homo sapiens
ctgctgaatgtttat

SEQ ID NO: 1009827 - DNA, 15 bp, Homo sapiens
atctgctgaatgttt

SEQ ID NO: 1009828 - DNA, 15 bp, Homo sapiens
tatctgctgaatgtt

SEQ ID NO: 1009829 - DNA, 15 bp, Homo sapiens
atatctgctgaatgt

SEQ ID NO: 1009830 - DNA, 15 bp, Homo sapiens
aatatctgctgaatg

SEQ ID NO: 1009831 - DNA, 15 bp, Homo sapiens
aaatatctgctgaat

SEQ ID NO: 1009832 - DNA, 15 bp, Homo sapiens
taaatatctgctgaa

SEQ ID NO: 1009833 - DNA, 15 bp, Homo sapiens
ataaatatctgctga

SEQ ID NO: 1009834 - DNA, 15 bp, Homo sapiens
cataaatatctgctg

SEQ ID NO: 1009835 - DNA, 15 bp, Homo sapiens
ccataaatatctgct

SEQ ID NO: 1009836 - DNA, 15 bp, Homo sapiens
tccataaatatctgc

SEQ ID NO: 1009837 - DNA, 15 bp, Homo sapiens
ttccataaatatctg

SEQ ID NO: 1009838 - DNA, 15 bp, Homo sapiens
attccataaatatct

SEQ ID NO: 1009839 - DNA, 15 bp, Homo sapiens
tattccataaatatc

SEQ ID NO: 1009840 - DNA, 15 bp, Homo sapiens
atattccataaatat

SEQ ID NO: 1009841 - DNA, 15 bp, Homo sapiens
tatattccataaata

SEQ ID NO: 1009842 - DNA, 15 bp, Homo sapiens
gtatattccataaat

SEQ ID NO: 1009843 - DNA, 15 bp, Homo sapiens
ggtatattccataaa

SEQ ID NO: 1009844 - DNA, 15 bp, Homo sapiens
aggtatattccataa

SEQ ID NO: 1009845 - DNA, 15 bp, Homo sapiens
aaggtatattccata

SEQ ID NO: 1009846 - DNA, 15 bp, Homo sapiens
aaaggtatattccat

SEQ ID NO: 1009847 - DNA, 15 bp, Homo sapiens
aaaaggtatattcca

SEQ ID NO: 1009848 - DNA, 15 bp, Homo sapiens
caaaaggtatattcc

SEQ ID NO: 1009849 - DNA, 15 bp, Homo sapiens
acaaaaggtatattc

SEQ ID NO: 1009850 - DNA, 15 bp, Homo sapiens
aacaaaaggtatatt

SEQ ID NO: 1009851 - DNA, 15 bp, Homo sapiens
gaacaaaaggtatat

SEQ ID NO: 1009852 - DNA, 15 bp, Homo sapiens
ggaacaaaaggtata

SEQ ID NO: 1009853 - DNA, 15 bp, Homo sapiens
tggaacaaaaggtat

SEQ ID NO: 1009854 - DNA, 15 bp, Homo sapiens
atggaacaaaaggta

SEQ ID NO: 1009855 - DNA, 15 bp, Homo sapiens
catggaacaaaaggt

SEQ ID NO: 1009856 - DNA, 15 bp, Homo sapiens
gcatggaacaaaagg

SEQ ID NO: 1009857 - DNA, 15 bp, Homo sapiens
tgcatggaacaaaag

SEQ ID NO: 1009858 - DNA, 15 bp, Homo sapiens
atgcatggaacaaaa

SEQ ID NO: 1009859 - DNA, 15 bp, Homo sapiens
aatgcatggaacaaa

SEQ ID NO: 1009860 - DNA, 15 bp, Homo sapiens
caatgcatggaacaa

SEQ ID NO: 1009861 - DNA, 15 bp, Homo sapiens
acaatgcatggaaca

SEQ ID NO: 1009862 - DNA, 15 bp, Homo sapiens
tacaatgcatggaac

SEQ ID NO: 1009863 - DNA, 15 bp, Homo sapiens
ctacaatgcatggaa

SEQ ID NO: 1009864 - DNA, 15 bp, Homo sapiens
actacaatgcatgga

SEQ ID NO: 1009865 - DNA, 15 bp, Homo sapiens
tactacaatgcatgg

SEQ ID NO: 1009866 - DNA, 15 bp, Homo sapiens
gtactacaatgcatg

SEQ ID NO: 1009867 - DNA, 15 bp, Homo sapiens
agtactacaatgcat

SEQ ID NO: 1009868 - DNA, 15 bp, Homo sapiens
gagtactacaatgca

SEQ ID NO: 1009869 - DNA, 15 bp, Homo sapiens
tgagtactacaatgc

SEQ ID NO: 1009870 - DNA, 15 bp, Homo sapiens
atgagtactacaatg

SEQ ID NO: 1009871 - DNA, 15 bp, Homo sapiens
aatgagtactacaat

SEQ ID NO: 1009872 - DNA, 15 bp, Homo sapiens
caatgagtactacaa

SEQ ID NO: 1009873 - DNA, 15 bp, Homo sapiens
ccaatgagtactaca

SEQ ID NO: 1009874 - DNA, 15 bp, Homo sapiens
tccaatgagtactac

SEQ ID NO: 1009875 - DNA, 15 bp, Homo sapiens
atccaatgagtacta

SEQ ID NO: 1009876 - DNA, 15 bp, Homo sapiens
tatccaatgagtact

SEQ ID NO: 1009877 - DNA, 15 bp, Homo sapiens
gtatccaatgagtac

SEQ ID NO: 1009878 - DNA, 15 bp, Homo sapiens
tgtatccaatgagta

SEQ ID NO: 1009879 - DNA, 15 bp, Homo sapiens
gtgtatccaatgagt

SEQ ID NO: 1009880 - DNA, 15 bp, Homo sapiens
tgtgtatccaatgag

SEQ ID NO: 1009881 - DNA, 15 bp, Homo sapiens
atgtgtatccaatga

SEQ ID NO: 1009882 - DNA, 15 bp, Homo sapiens
tatgtgtatccaatg

SEQ ID NO: 1009883 - DNA, 15 bp, Homo sapiens
ctatgtgtatccaat

SEQ ID NO: 1009884 - DNA, 15 bp, Homo sapiens
tctatgtgtatccaa

SEQ ID NO: 1009885 - DNA, 15 bp, Homo sapiens
ttctatgtgtatcca

SEQ ID NO: 1009886 - DNA, 15 bp, Homo sapiens
attctatgtgtatcc

SEQ ID NO: 1009887 - DNA, 15 bp, Homo sapiens
tattctatgtgtatc

SEQ ID NO: 1009888 - DNA, 15 bp, Homo sapiens
ttattctatgtgtat

SEQ ID NO: 1009889 - DNA, 15 bp, Homo sapiens
attattctatgtgta

SEQ ID NO: 1009890 - DNA, 15 bp, Homo sapiens
tattattctatgtgt

SEQ ID NO: 1009891 - DNA, 15 bp, Homo sapiens
ttattattctatgtg

SEQ ID NO: 1009892 - DNA, 15 bp, Homo sapiens
cttattattctatgt

SEQ ID NO: 1009893 - DNA, 15 bp, Homo sapiens
tcttattattctatg

SEQ ID NO: 1009894 - DNA, 15 bp, Homo sapiens
gtcttattattctat

SEQ ID NO: 1009895 - DNA, 15 bp, Homo sapiens
agtcttattattcta

SEQ ID NO: 1009896 - DNA, 15 bp, Homo sapiens
gagtcttattattct

SEQ ID NO: 1009897 - DNA, 15 bp, Homo sapiens
tgagtcttattattc

SEQ ID NO: 1009898 - DNA, 15 bp, Homo sapiens
ctgagtcttattatt

SEQ ID NO: 1009899 - DNA, 15 bp, Homo sapiens
actgagtcttattat

SEQ ID NO: 1009900 - DNA, 15 bp, Homo sapiens
aactgagtcttatta

SEQ ID NO: 1009901 - DNA, 15 bp, Homo sapiens
gaactgagtcttatt

SEQ ID NO: 1009902 - DNA, 15 bp, Homo sapiens
tgaactgagtcttat

SEQ ID NO: 1009903 - DNA, 15 bp, Homo sapiens
gtgaactgagtctta

SEQ ID NO: 1009904 - DNA, 15 bp, Homo sapiens
tgtgaactgagtctt

SEQ ID NO: 1009905 - DNA, 15 bp, Homo sapiens
gtgtgaactgagtct

SEQ ID NO: 1009906 - DNA, 15 bp, Homo sapiens
agtgtgaactgagtc

SEQ ID NO: 1009907 - DNA, 15 bp, Homo sapiens
gagtgtgaactgagt

SEQ ID NO: 1009908 - DNA, 15 bp, Homo sapiens
agagtgtgaactgag

SEQ ID NO: 1009909 - DNA, 15 bp, Homo sapiens
aagagtgtgaactga

SEQ ID NO: 1009910 - DNA, 15 bp, Homo sapiens
gaagagtgtgaactg

SEQ ID NO: 1009911 - DNA, 15 bp, Homo sapiens
tgaagagtgtgaact

SEQ ID NO: 1009912 - DNA, 15 bp, Homo sapiens
ctgaagagtgtgaac

SEQ ID NO: 1009913 - DNA, 15 bp, Homo sapiens
cctgaagagtgtgaa

SEQ ID NO: 1009914 - DNA, 15 bp, Homo sapiens
tcctgaagagtgtga

SEQ ID NO: 1009915 - DNA, 15 bp, Homo sapiens
ttcctgaagagtgtg

SEQ ID NO: 1009916 - DNA, 15 bp, Homo sapiens
tttcctgaagagtgt

SEQ ID NO: 1009917 - DNA, 15 bp, Homo sapiens
gtttcctgaagagtg

SEQ ID NO: 1009918 - DNA, 15 bp, Homo sapiens
tgtttcctgaagagt

SEQ ID NO: 1009919 - DNA, 15 bp, Homo sapiens
ctgtttcctgaagag

SEQ ID NO: 1009920 - DNA, 15 bp, Homo sapiens
tctgtttcctgaaga

SEQ ID NO: 1009921 - DNA, 15 bp, Homo sapiens
atctgtttcctgaag

SEQ ID NO: 1009922 - DNA, 15 bp, Homo sapiens
tatctgtttcctgaa

SEQ ID NO: 1009923 - DNA, 15 bp, Homo sapiens
ttatctgtttcctga

SEQ ID NO: 1009924 - DNA, 15 bp, Homo sapiens
tttatctgtttcctg

SEQ ID NO: 1009925 - DNA, 15 bp, Homo sapiens
ttttatctgtttcct

SEQ ID NO: 1009926 - DNA, 15 bp, Homo sapiens
tttttatctgtttcc

SEQ ID NO: 1009927 - DNA, 15 bp, Homo sapiens
ttttttatctgtttc

SEQ ID NO: 1009928 - DNA, 15 bp, Homo sapiens
gttttttatctgttt

SEQ ID NO: 1009929 - DNA, 15 bp, Homo sapiens
agttttttatctgtt

SEQ ID NO: 1009930 - DNA, 15 bp, Homo sapiens
tagttttttatctgt

SEQ ID NO: 1009931 - DNA, 15 bp, Homo sapiens
ttagttttttatctg

SEQ ID NO: 1009932 - DNA, 15 bp, Homo sapiens
cttagttttttatct

SEQ ID NO: 1009933 - DNA, 15 bp, Homo sapiens
tcttagttttttatc

SEQ ID NO: 1009934 - DNA, 15 bp, Homo sapiens
ttcttagttttttat

SEQ ID NO: 1009935 - DNA, 15 bp, Homo sapiens
tttcttagtttttta

SEQ ID NO: 1009936 - DNA, 15 bp, Homo sapiens
gtttcttagtttttt

SEQ ID NO: 1009937 - DNA, 15 bp, Homo sapiens
tgtttcttagttttt

SEQ ID NO: 1009938 - DNA, 15 bp, Homo sapiens
ttgtttcttagtttt

SEQ ID NO: 1009939 - DNA, 15 bp, Homo sapiens
tttgtttcttagttt

SEQ ID NO: 1009940 - DNA, 15 bp, Homo sapiens
gtttgtttcttagtt

SEQ ID NO: 1009941 - DNA, 15 bp, Homo sapiens
tgtttgtttcttagt

SEQ ID NO: 1009942 - DNA, 15 bp, Homo sapiens
ttgtttgtttcttag

SEQ ID NO: 1009943 - DNA, 15 bp, Homo sapiens
tttgtttgtttctta

SEQ ID NO: 1009944 - DNA, 15 bp, Homo sapiens
ttttgtttgtttctt

SEQ ID NO: 1009945 - DNA, 15 bp, Homo sapiens
tttttgtttgtttct

SEQ ID NO: 1009946 - DNA, 15 bp, Homo sapiens
ttttttgtttgtttc

SEQ ID NO: 1009947 - DNA, 15 bp, Homo sapiens
gcctgttttttgttt

SEQ ID NO: 1009948 - DNA, 15 bp, Homo sapiens
tgcctgttttttgtt

SEQ ID NO: 1009949 - DNA, 15 bp, Homo sapiens
ttgcctgttttttgt

SEQ ID NO: 1009950 - DNA, 15 bp, Homo sapiens
attgcctgttttttg

SEQ ID NO: 1009951 - DNA, 15 bp, Homo sapiens
gattgcctgtttttt

SEQ ID NO: 1009952 - DNA, 15 bp, Homo sapiens
ggattgcctgttttt

SEQ ID NO: 1009953 - DNA, 15 bp, Homo sapiens
tggattgcctgtttt

SEQ ID NO: 1009954 - DNA, 15 bp, Homo sapiens
ttggattgcctgttt

SEQ ID NO: 1009955 - DNA, 15 bp, Homo sapiens
gttggattgcctgtt

SEQ ID NO: 1009956 - DNA, 15 bp, Homo sapiens
tgttggattgcctgt

SEQ ID NO: 1009957 - DNA, 15 bp, Homo sapiens
gtgttggattgcctg

SEQ ID NO: 1009958 - DNA, 15 bp, Homo sapiens
ggtgttggattgcct

SEQ ID NO: 1009959 - DNA, 15 bp, Homo sapiens
tggtgttggattgcc

SEQ ID NO: 1009960 - DNA, 15 bp, Homo sapiens
atggtgttggattgc

SEQ ID NO: 1009961 - DNA, 15 bp, Homo sapiens
catggtgttggattg

SEQ ID NO: 1009962 - DNA, 15 bp, Homo sapiens
acatggtgttggatt

SEQ ID NO: 1009963 - DNA, 15 bp, Homo sapiens
cacatggtgttggat

SEQ ID NO: 1009964 - DNA, 15 bp, Homo sapiens
ccacatggtgttgga

SEQ ID NO: 1009965 - DNA, 15 bp, Homo sapiens
cccacatggtgttgg

SEQ ID NO: 1009966 - DNA, 15 bp, Homo sapiens
tcccacatggtgttg

SEQ ID NO: 1009967 - DNA, 15 bp, Homo sapiens
ttcccacatggtgtt

SEQ ID NO: 1009968 - DNA, 15 bp, Homo sapiens
tttcccacatggtgt

SEQ ID NO: 1009969 - DNA, 15 bp, Homo sapiens
atttcccacatggtg

SEQ ID NO: 1009970 - DNA, 15 bp, Homo sapiens
catttcccacatggt

SEQ ID NO: 1009971 - DNA, 15 bp, Homo sapiens
gcatttcccacatgg

SEQ ID NO: 1009972 - DNA, 15 bp, Homo sapiens
agcatttcccacatg

SEQ ID NO: 1009973 - DNA, 15 bp, Homo sapiens
aagcatttcccacat

SEQ ID NO: 1009974 - DNA, 15 bp, Homo sapiens
aaagcatttcccaca

SEQ ID NO: 1009975 - DNA, 15 bp, Homo sapiens
gaaagcatttcccac

SEQ ID NO: 1009976 - DNA, 15 bp, Homo sapiens
tgaaagcatttccca

SEQ ID NO: 1009977 - DNA, 15 bp, Homo sapiens
atgaaagcatttccc

SEQ ID NO: 1009978 - DNA, 15 bp, Homo sapiens
tatgaaagcatttcc

SEQ ID NO: 1009979 - DNA, 15 bp, Homo sapiens
ctatgaaagcatttc

SEQ ID NO: 1009980 - DNA, 15 bp, Homo sapiens
gctatgaaagcattt

SEQ ID NO: 1009981 - DNA, 15 bp, Homo sapiens
ggctatgaaagcatt

SEQ ID NO: 1009982 - DNA, 15 bp, Homo sapiens
cggctatgaaagcat

SEQ ID NO: 1009983 - DNA, 15 bp, Homo sapiens
ccggctatgaaagca

SEQ ID NO: 1009984 - DNA, 15 bp, Homo sapiens
cccggctatgaaagc

SEQ ID NO: 1009985 - DNA, 15 bp, Homo sapiens
tcccggctatgaaag

SEQ ID NO: 1009986 - DNA, 15 bp, Homo sapiens
ttcccggctatgaaa

SEQ ID NO: 1009987 - DNA, 15 bp, Homo sapiens
tttcccggctatgaa

SEQ ID NO: 1009988 - DNA, 15 bp, Homo sapiens
gtttcccggctatga

SEQ ID NO: 1009989 - DNA, 15 bp, Homo sapiens
ggtttcccggctatg

SEQ ID NO: 1009990 - DNA, 15 bp, Homo sapiens
aggtttcccggctat

SEQ ID NO: 1009991 - DNA, 15 bp, Homo sapiens
caggtttcccggcta

SEQ ID NO: 1009992 - DNA, 15 bp, Homo sapiens
ccaggtttcccggct

SEQ ID NO: 1009993 - DNA, 15 bp, Homo sapiens
cccaggtttcccggc

SEQ ID NO: 1009994 - DNA, 15 bp, Homo sapiens
ccccaggtttcccgg

SEQ ID NO: 1009995 - DNA, 15 bp, Homo sapiens
tccccaggtttcccg

SEQ ID NO: 1009996 - DNA, 15 bp, Homo sapiens
attccccaggtttcc

SEQ ID NO: 1009997 - DNA, 15 bp, Homo sapiens
tattccccaggtttc

SEQ ID NO: 1009998 - DNA, 15 bp, Homo sapiens
gtattccccaggttt

SEQ ID NO: 1009999 - DNA, 15 bp, Homo sapiens
ggtattccccaggtt

SEQ ID NO: 1010000 - DNA, 15 bp, Homo sapiens
aggtattccccaggt

SEQ ID NO: 1010001 - DNA, 15 bp, Homo sapiens
caggtattccccagg

SEQ ID NO: 1010002 - DNA, 15 bp, Homo sapiens
tcaggtattccccag

SEQ ID NO: 1010003 - DNA, 15 bp, Homo sapiens
ctcaggtattcccca

SEQ ID NO: 1010004 - DNA, 15 bp, Homo sapiens
tctcaggtattcccc

SEQ ID NO: 1010005 - DNA, 15 bp, Homo sapiens
ctctcaggtattccc

SEQ ID NO: 1010006 - DNA, 15 bp, Homo sapiens
cctctcaggtattcc

SEQ ID NO: 1010007 - DNA, 15 bp, Homo sapiens
tcctctcaggtattc

SEQ ID NO: 1010008 - DNA, 15 bp, Homo sapiens
ttcctctcaggtatt

SEQ ID NO: 1010009 - DNA, 15 bp, Homo sapiens
attcctctcaggtat

SEQ ID NO: 1010010 - DNA, 15 bp, Homo sapiens
tattcctctcaggta

SEQ ID NO: 1010011 - DNA, 15 bp, Homo sapiens
gtattcctctcaggt

SEQ ID NO: 1010012 - DNA, 15 bp, Homo sapiens
agtattcctctcagg

SEQ ID NO: 1010013 - DNA, 15 bp, Homo sapiens
gagtattcctctcag

SEQ ID NO: 1010014 - DNA, 15 bp, Homo sapiens
tgagtattcctctca

SEQ ID NO: 1010015 - DNA, 15 bp, Homo sapiens
ttgagtattcctctc

SEQ ID NO: 1010016 - DNA, 15 bp, Homo sapiens
attgagtattcctct

SEQ ID NO: 1010017 - DNA, 15 bp, Homo sapiens
aattgagtattcctc

SEQ ID NO: 1010018 - DNA, 15 bp, Homo sapiens
gaattgagtattcct

SEQ ID NO: 1010019 - DNA, 15 bp, Homo sapiens
tgaattgagtattcc

SEQ ID NO: 1010020 - DNA, 15 bp, Homo sapiens
ctgaattgagtattc

SEQ ID NO: 1010021 - DNA, 15 bp, Homo sapiens
cctgaattgagtatt

SEQ ID NO: 1010022 - DNA, 15 bp, Homo sapiens
gcctgaattgagtat

SEQ ID NO: 1010023 - DNA, 15 bp, Homo sapiens
ggcctgaattgagta

SEQ ID NO: 1010024 - DNA, 15 bp, Homo sapiens
aggcctgaattgagt

SEQ ID NO: 1010025 - DNA, 15 bp, Homo sapiens
aaggcctgaattgag

SEQ ID NO: 1010026 - DNA, 15 bp, Homo sapiens
caaggcctgaattga

SEQ ID NO: 1010027 - DNA, 15 bp, Homo sapiens
acaaggcctgaattg

SEQ ID NO: 1010028 - DNA, 15 bp, Homo sapiens
aacaaggcctgaatt

SEQ ID NO: 1010029 - DNA, 15 bp, Homo sapiens
aaacaaggcctgaat

SEQ ID NO: 1010030 - DNA, 15 bp, Homo sapiens
gaaacaaggcctgaa

SEQ ID NO: 1010031 - DNA, 15 bp, Homo sapiens
tgaaacaaggcctga

SEQ ID NO: 1010032 - DNA, 15 bp, Homo sapiens
ctgaaacaaggcctg

SEQ ID NO: 1010033 - DNA, 15 bp, Homo sapiens
cctgaaacaaggcct

SEQ ID NO: 1010034 - DNA, 15 bp, Homo sapiens
tcctgaaacaaggcc

SEQ ID NO: 1010035 - DNA, 15 bp, Homo sapiens
ttcctgaaacaaggc

SEQ ID NO: 1010036 - DNA, 15 bp, Homo sapiens
attcctgaaacaagg

SEQ ID NO: 1010037 - DNA, 15 bp, Homo sapiens
gattcctgaaacaag

SEQ ID NO: 1010038 - DNA, 15 bp, Homo sapiens
ggattcctgaaacaa

SEQ ID NO: 1010039 - DNA, 15 bp, Homo sapiens
tggattcctgaaaca

SEQ ID NO: 1010040 - DNA, 15 bp, Homo sapiens
ttggattcctgaaac

SEQ ID NO: 1010041 - DNA, 15 bp, Homo sapiens
tttggattcctgaaa

SEQ ID NO: 1010042 - DNA, 15 bp, Homo sapiens
atttggattcctgaa

SEQ ID NO: 1010043 - DNA, 15 bp, Homo sapiens
gatttggattcctga

SEQ ID NO: 1010044 - DNA, 15 bp, Homo sapiens
ggatttggattcctg

SEQ ID NO: 1010045 - DNA, 15 bp, Homo sapiens
aggatttggattcct

SEQ ID NO: 1010046 - DNA, 15 bp, Homo sapiens
caggatttggattcc

SEQ ID NO: 1010047 - DNA, 15 bp, Homo sapiens
ccaggatttggattc

SEQ ID NO: 1010048 - DNA, 15 bp, Homo sapiens
gccaggatttggatt

SEQ ID NO: 1010049 - DNA, 15 bp, Homo sapiens
tgccaggatttggat

SEQ ID NO: 1010050 - DNA, 15 bp, Homo sapiens
gtgccaggatttgga

SEQ ID NO: 1010051 - DNA, 15 bp, Homo sapiens
tgtgccaggatttgg

SEQ ID NO: 1010052 - DNA, 15 bp, Homo sapiens
atgtgccaggatttg

SEQ ID NO: 1010053 - DNA, 15 bp, Homo sapiens
gatgtgccaggattt

SEQ ID NO: 1010054 - DNA, 15 bp, Homo sapiens
tgatgtgccaggatt

SEQ ID NO: 1010055 - DNA, 15 bp, Homo sapiens
ctgatgtgccaggat

SEQ ID NO: 1010056 - DNA, 15 bp, Homo sapiens
tctgatgtgccagga

SEQ ID NO: 1010057 - DNA, 15 bp, Homo sapiens
ctctgatgtgccagg

SEQ ID NO: 1010058 - DNA, 15 bp, Homo sapiens
gctctgatgtgccag

SEQ ID NO: 1010059 - DNA, 15 bp, Homo sapiens
agctctgatgtgcca

SEQ ID NO: 1010060 - DNA, 15 bp, Homo sapiens
cagctctgatgtgcc

SEQ ID NO: 1010061 - DNA, 15 bp, Homo sapiens
gcagctctgatgtgc

SEQ ID NO: 1010062 - DNA, 15 bp, Homo sapiens
agcagctctgatgtg

SEQ ID NO: 1010063 - DNA, 15 bp, Homo sapiens
aagcagctctgatgt

SEQ ID NO: 1010064 - DNA, 15 bp, Homo sapiens
gaagcagctctgatg

SEQ ID NO: 1010065 - DNA, 15 bp, Homo sapiens
ggaagcagctctgat

SEQ ID NO: 1010066 - DNA, 15 bp, Homo sapiens
gggaagcagctctga

SEQ ID NO: 1010067 - DNA, 15 bp, Homo sapiens
agggaagcagctctg

SEQ ID NO: 1010068 - DNA, 15 bp, Homo sapiens
gagggaagcagctct

SEQ ID NO: 1010069 - DNA, 15 bp, Homo sapiens
agagggaagcagctc

SEQ ID NO: 1010070 - DNA, 15 bp, Homo sapiens
aagagggaagcagct

SEQ ID NO: 1010071 - DNA, 15 bp, Homo sapiens
aaagagggaagcagc

SEQ ID NO: 1010072 - DNA, 15 bp, Homo sapiens
gaaagagggaagcag

SEQ ID NO: 1010073 - DNA, 15 bp, Homo sapiens
ggaaagagggaagca

SEQ ID NO: 1010074 - DNA, 15 bp, Homo sapiens
tggaaagagggaagc

SEQ ID NO: 1010075 - DNA, 15 bp, Homo sapiens
ctggaaagagggaag

SEQ ID NO: 1010076 - DNA, 15 bp, Homo sapiens
cctggaaagagggaa

SEQ ID NO: 1010077 - DNA, 15 bp, Homo sapiens
ccctggaaagaggga

SEQ ID NO: 1010078 - DNA, 15 bp, Homo sapiens
accctggaaagaggg

SEQ ID NO: 1010079 - DNA, 15 bp, Homo sapiens
caccctggaaagagg

SEQ ID NO: 1010080 - DNA, 15 bp, Homo sapiens
ccaccctggaaagag

SEQ ID NO: 1010081 - DNA, 15 bp, Homo sapiens
gccaccctggaaaga

SEQ ID NO: 1010082 - DNA, 15 bp, Homo sapiens
tgccaccctggaaag

SEQ ID NO: 1010083 - DNA, 15 bp, Homo sapiens
ctgccaccctggaaa

SEQ ID NO: 1010084 - DNA, 15 bp, Homo sapiens
cctgccaccctggaa

SEQ ID NO: 1010085 - DNA, 15 bp, Homo sapiens
tcctgccaccctgga

SEQ ID NO: 1010086 - DNA, 15 bp, Homo sapiens
ttcctgccaccctgg

SEQ ID NO: 1010087 - DNA, 15 bp, Homo sapiens
tttcctgccaccctg

SEQ ID NO: 1010088 - DNA, 15 bp, Homo sapiens
atttcctgccaccct

SEQ ID NO: 1010089 - DNA, 15 bp, Homo sapiens
tatttcctgccaccc

SEQ ID NO: 1010090 - DNA, 15 bp, Homo sapiens
ttatttcctgccacc

SEQ ID NO: 1010091 - DNA, 15 bp, Homo sapiens
tttatttcctgccac

SEQ ID NO: 1010092 - DNA, 15 bp, Homo sapiens
atttatttcctgcca

SEQ ID NO: 1010093 - DNA, 15 bp, Homo sapiens
catttatttcctgcc

SEQ ID NO: 1010094 - DNA, 15 bp, Homo sapiens
ccatttatttcctgc

SEQ ID NO: 1010095 - DNA, 15 bp, Homo sapiens
tccatttatttcctg

SEQ ID NO: 1010096 - DNA, 15 bp, Homo sapiens
ttccatttatttcct

SEQ ID NO: 1010097 - DNA, 15 bp, Homo sapiens
gttccatttatttcc

SEQ ID NO: 1010098 - DNA, 15 bp, Homo sapiens
tgttccatttatttc

SEQ ID NO: 1010099 - DNA, 15 bp, Homo sapiens
atgttccatttattt

SEQ ID NO: 1010100 - DNA, 15 bp, Homo sapiens
tatgttccatttatt

SEQ ID NO: 1010101 - DNA, 15 bp, Homo sapiens
atatgttccatttat

SEQ ID NO: 1010102 - DNA, 15 bp, Homo sapiens
aatatgttccattta

SEQ ID NO: 1010103 - DNA, 15 bp, Homo sapiens
aaatatgttccattt

SEQ ID NO: 1010104 - DNA, 15 bp, Homo sapiens
aaaatatgttccatt

SEQ ID NO: 1010105 - DNA, 15 bp, Homo sapiens
aaaaatatgttccat

SEQ ID NO: 1010106 - DNA, 15 bp, Homo sapiens
gaaaaatatgttcca

SEQ ID NO: 1010107 - DNA, 15 bp, Homo sapiens
agaaaaatatgttcc

SEQ ID NO: 1010108 - DNA, 15 bp, Homo sapiens
tagaaaaatatgttc

SEQ ID NO: 1010109 - DNA, 15 bp, Homo sapiens
atagaaaaatatgtt

SEQ ID NO: 1010110 - DNA, 15 bp, Homo sapiens
gatagaaaaatatgt

SEQ ID NO: 1010111 - DNA, 15 bp, Homo sapiens
agatagaaaaatatg

SEQ ID NO: 1010112 - DNA, 15 bp, Homo sapiens
aagatagaaaaatat

SEQ ID NO: 1010113 - DNA, 15 bp, Homo sapiens
taagatagaaaaata

SEQ ID NO: 1010114 - DNA, 15 bp, Homo sapiens
ataagatagaaaaat

SEQ ID NO: 1010115 - DNA, 15 bp, Homo sapiens
cataagatagaaaaa

SEQ ID NO: 1010116 - DNA, 15 bp, Homo sapiens
gcataagatagaaaa

SEQ ID NO: 1010117 - DNA, 15 bp, Homo sapiens
ggcataagatagaaa

SEQ ID NO: 1010118 - DNA, 15 bp, Homo sapiens
tggcataagatagaa

SEQ ID NO: 1010119 - DNA, 15 bp, Homo sapiens
ttggcataagataga

SEQ ID NO: 1010120 - DNA, 15 bp, Homo sapiens
tttggcataagatag

SEQ ID NO: 1010121 - DNA, 15 bp, Homo sapiens
gtttggcataagata

SEQ ID NO: 1010122 - DNA, 15 bp, Homo sapiens
tgtttggcataagat

SEQ ID NO: 1010123 - DNA, 15 bp, Homo sapiens
atgtttggcataaga

SEQ ID NO: 1010124 - DNA, 15 bp, Homo sapiens
catgtttggcataag

SEQ ID NO: 1010125 - DNA, 15 bp, Homo sapiens
tcatgtttggcataa

SEQ ID NO: 1010126 - DNA, 15 bp, Homo sapiens
ctcatgtttggcata

SEQ ID NO: 1010127 - DNA, 15 bp, Homo sapiens
cctcatgtttggcat

SEQ ID NO: 1010128 - DNA, 15 bp, Homo sapiens
ccctcatgtttggca

SEQ ID NO: 1010129 - DNA, 15 bp, Homo sapiens
tccctcatgtttggc

SEQ ID NO: 1010130 - DNA, 15 bp, Homo sapiens
gtccctcatgtttgg

SEQ ID NO: 1010131 - DNA, 15 bp, Homo sapiens
ggtccctcatgtttg

SEQ ID NO: 1010132 - DNA, 15 bp, Homo sapiens
gggtccctcatgttt

SEQ ID NO: 1010133 - DNA, 15 bp, Homo sapiens
agggtccctcatgtt

SEQ ID NO: 1010134 - DNA, 15 bp, Homo sapiens
aagggtccctcatgt

SEQ ID NO: 1010135 - DNA, 15 bp, Homo sapiens
aaagggtccctcatg

SEQ ID NO: 1010136 - DNA, 15 bp, Homo sapiens
gaaagggtccctcat

SEQ ID NO: 1010137 - DNA, 15 bp, Homo sapiens
agaaagggtccctca

SEQ ID NO: 1010138 - DNA, 15 bp, Homo sapiens
gagaaagggtccctc

SEQ ID NO: 1010139 - DNA, 15 bp, Homo sapiens
ggagaaagggtccct

SEQ ID NO: 1010140 - DNA, 15 bp, Homo sapiens
gggagaaagggtccc

SEQ ID NO: 1010141 - DNA, 15 bp, Homo sapiens
ggggagaaagggtcc

SEQ ID NO: 1010142 - DNA, 15 bp, Homo sapiens
cggggagaaagggtc

SEQ ID NO: 1010143 - DNA, 15 bp, Homo sapiens
ccggggagaaagggt

SEQ ID NO: 1010144 - DNA, 15 bp, Homo sapiens
accggggagaaaggg

SEQ ID NO: 1010145 - DNA, 15 bp, Homo sapiens
caccggggagaaagg

SEQ ID NO: 1010146 - DNA, 15 bp, Homo sapiens
gcaccggggagaaag

SEQ ID NO: 1010147 - DNA, 15 bp, Homo sapiens
ggcaccggggagaaa

SEQ ID NO: 1010148 - DNA, 15 bp, Homo sapiens
aggcaccggggagaa

SEQ ID NO: 1010149 - DNA, 15 bp, Homo sapiens
gaggcaccggggaga

SEQ ID NO: 1010150 - DNA, 15 bp, Homo sapiens
agaggcaccggggag

SEQ ID NO: 1010151 - DNA, 15 bp, Homo sapiens
gagaggcaccgggga

SEQ ID NO: 1010152 - DNA, 15 bp, Homo sapiens
ggagaggcaccgggg

SEQ ID NO: 1010153 - DNA, 15 bp, Homo sapiens
gggagaggcaccggg

SEQ ID NO: 1010154 - DNA, 15 bp, Homo sapiens
tgggagaggcaccgg

SEQ ID NO: 1010155 - DNA, 15 bp, Homo sapiens
ttgggagaggcaccg

SEQ ID NO: 1010156 - DNA, 15 bp, Homo sapiens
cttgggagaggcacc

SEQ ID NO: 1010157 - DNA, 15 bp, Homo sapiens
ccttgggagaggcac

SEQ ID NO: 1010158 - DNA, 15 bp, Homo sapiens
accttgggagaggca

SEQ ID NO: 1010159 - DNA, 15 bp, Homo sapiens
taccttgggagaggc

SEQ ID NO: 1010160 - DNA, 15 bp, Homo sapiens
ctaccttgggagagg

SEQ ID NO: 1010161 - DNA, 15 bp, Homo sapiens
actaccttgggagag

SEQ ID NO: 1010162 - DNA, 15 bp, Homo sapiens
gactaccttgggaga

SEQ ID NO: 1010163 - DNA, 15 bp, Homo sapiens
agactaccttgggag

SEQ ID NO: 1010164 - DNA, 15 bp, Homo sapiens
tagactaccttggga

SEQ ID NO: 1010165 - DNA, 15 bp, Homo sapiens
gtagactaccttggg

SEQ ID NO: 1010166 - DNA, 15 bp, Homo sapiens
tgtagactaccttgg

SEQ ID NO: 1010167 - DNA, 15 bp, Homo sapiens
ttgtagactaccttg

SEQ ID NO: 1010168 - DNA, 15 bp, Homo sapiens
attgtagactacctt

SEQ ID NO: 1010169 - DNA, 15 bp, Homo sapiens
tattgtagactacct

SEQ ID NO: 1010170 - DNA, 15 bp, Homo sapiens
atattgtagactacc

SEQ ID NO: 1010171 - DNA, 15 bp, Homo sapiens
aatattgtagactac

SEQ ID NO: 1010172 - DNA, 15 bp, Homo sapiens
aaatattgtagacta

SEQ ID NO: 1010173 - DNA, 15 bp, Homo sapiens
gaaatattgtagact

SEQ ID NO: 1010174 - DNA, 15 bp, Homo sapiens
tgaaatattgtagac

SEQ ID NO: 1010175 - DNA, 15 bp, Homo sapiens
ttgaaatattgtaga

SEQ ID NO: 1010176 - DNA, 15 bp, Homo sapiens
gttgaaatattgtag

SEQ ID NO: 1010177 - DNA, 15 bp, Homo sapiens
agttgaaatattgta

SEQ ID NO: 1010178 - DNA, 15 bp, Homo sapiens
gagttgaaatattgt

SEQ ID NO: 1010179 - DNA, 15 bp, Homo sapiens
agagttgaaatattg

SEQ ID NO: 1010180 - DNA, 15 bp, Homo sapiens
tagagttgaaatatt

SEQ ID NO: 1010181 - DNA, 15 bp, Homo sapiens
ctagagttgaaatat

SEQ ID NO: 1010182 - DNA, 15 bp, Homo sapiens
gctagagttgaaata

SEQ ID NO: 1010183 - DNA, 15 bp, Homo sapiens
tgctagagttgaaat

SEQ ID NO: 1010184 - DNA, 15 bp, Homo sapiens
ctgctagagttgaaa

SEQ ID NO: 1010185 - DNA, 15 bp, Homo sapiens
actgctagagttgaa

SEQ ID NO: 1010186 - DNA, 15 bp, Homo sapiens
gactgctagagttga

SEQ ID NO: 1010187 - DNA, 15 bp, Homo sapiens
agactgctagagttg

SEQ ID NO: 1010188 - DNA, 15 bp, Homo sapiens
cagactgctagagtt

SEQ ID NO: 1010189 - DNA, 15 bp, Homo sapiens
gcagactgctagagt

SEQ ID NO: 1010190 - DNA, 15 bp, Homo sapiens
agcagactgctagag

SEQ ID NO: 1010191 - DNA, 15 bp, Homo sapiens
aagcagactgctaga

SEQ ID NO: 1010192 - DNA, 15 bp, Homo sapiens
taagcagactgctag

SEQ ID NO: 1010193 - DNA, 15 bp, Homo sapiens
ctaagcagactgcta

SEQ ID NO: 1010194 - DNA, 15 bp, Homo sapiens
actaagcagactgct

SEQ ID NO: 1010195 - DNA, 15 bp, Homo sapiens
cactaagcagactgc

SEQ ID NO: 1010196 - DNA, 15 bp, Homo sapiens
gcactaagcagactg

SEQ ID NO: 1010197 - DNA, 15 bp, Homo sapiens
tgcactaagcagact

SEQ ID NO: 1010198 - DNA, 15 bp, Homo sapiens
atgcactaagcagac

SEQ ID NO: 1010199 - DNA, 15 bp, Homo sapiens
tatgcactaagcaga

SEQ ID NO: 1010200 - DNA, 15 bp, Homo sapiens
ctatgcactaagcag

SEQ ID NO: 1010201 - DNA, 15 bp, Homo sapiens
tctatgcactaagca

SEQ ID NO: 1010202 - DNA, 15 bp, Homo sapiens
ttctatgcactaagc

SEQ ID NO: 1010203 - DNA, 15 bp, Homo sapiens
gttctatgcactaag

SEQ ID NO: 1010204 - DNA, 15 bp, Homo sapiens
tgttctatgcactaa

SEQ ID NO: 1010205 - DNA, 15 bp, Homo sapiens
atgttctatgcacta

SEQ ID NO: 1010206 - DNA, 15 bp, Homo sapiens
catgttctatgcact

SEQ ID NO: 1010207 - DNA, 15 bp, Homo sapiens
tcatgttctatgcac

SEQ ID NO: 1010208 - DNA, 15 bp, Homo sapiens
ctcatgttctatgca

SEQ ID NO: 1010209 - DNA, 15 bp, Homo sapiens
cctcatgttctatgc

SEQ ID NO: 1010210 - DNA, 15 bp, Homo sapiens
gcctcatgttctatg

SEQ ID NO: 1010211 - DNA, 15 bp, Homo sapiens
agcctcatgttctat

SEQ ID NO: 1010212 - DNA, 15 bp, Homo sapiens
cagcctcatgttcta

SEQ ID NO: 1010213 - DNA, 15 bp, Homo sapiens
acagcctcatgttct

SEQ ID NO: 1010214 - DNA, 15 bp, Homo sapiens
cacagcctcatgttc

SEQ ID NO: 1010215 - DNA, 15 bp, Homo sapiens
acacagcctcatgtt

SEQ ID NO: 1010216 - DNA, 15 bp, Homo sapiens
cacacagcctcatgt

SEQ ID NO: 1010217 - DNA, 15 bp, Homo sapiens
acacacagcctcatg

SEQ ID NO: 1010218 - DNA, 15 bp, Homo sapiens
gacacacagcctcat

SEQ ID NO: 1010219 - DNA, 15 bp, Homo sapiens
ggacacacagcctca

SEQ ID NO: 1010220 - DNA, 15 bp, Homo sapiens
gggacacacagcctc

SEQ ID NO: 1010221 - DNA, 15 bp, Homo sapiens
agggacacacagcct

SEQ ID NO: 1010222 - DNA, 15 bp, Homo sapiens
cagggacacacagcc

SEQ ID NO: 1010223 - DNA, 15 bp, Homo sapiens
ccagggacacacagc

SEQ ID NO: 1010224 - DNA, 15 bp, Homo sapiens
cccagggacacacag

SEQ ID NO: 1010225 - DNA, 15 bp, Homo sapiens
gcccagggacacaca

SEQ ID NO: 1010226 - DNA, 15 bp, Homo sapiens
tgcccagggacacac

SEQ ID NO: 1010227 - DNA, 15 bp, Homo sapiens
ttgcccagggacaca

SEQ ID NO: 1010228 - DNA, 15 bp, Homo sapiens
tttgcccagggacac

SEQ ID NO: 1010229 - DNA, 15 bp, Homo sapiens
atttgcccagggaca

SEQ ID NO: 1010230 - DNA, 15 bp, Homo sapiens
aatttgcccagggac

SEQ ID NO: 1010231 - DNA, 15 bp, Homo sapiens
taatttgcccaggga

SEQ ID NO: 1010232 - DNA, 15 bp, Homo sapiens
gtaatttgcccaggg

SEQ ID NO: 1010233 - DNA, 15 bp, Homo sapiens
agtaatttgcccagg

SEQ ID NO: 1010234 - DNA, 15 bp, Homo sapiens
tagtaatttgcccag

SEQ ID NO: 1010235 - DNA, 15 bp, Homo sapiens
ctagtaatttgccca

SEQ ID NO: 1010236 - DNA, 15 bp, Homo sapiens
tctagtaatttgccc

SEQ ID NO: 1010237 - DNA, 15 bp, Homo sapiens
gtctagtaatttgcc

SEQ ID NO: 1010238 - DNA, 15 bp, Homo sapiens
agtctagtaatttgc

SEQ ID NO: 1010239 - DNA, 15 bp, Homo sapiens
aagtctagtaatttg

SEQ ID NO: 1010240 - DNA, 15 bp, Homo sapiens
gaagtctagtaattt

SEQ ID NO: 1010241 - DNA, 15 bp, Homo sapiens
agaagtctagtaatt

SEQ ID NO: 1010242 - DNA, 15 bp, Homo sapiens
cagaagtctagtaat

SEQ ID NO: 1010243 - DNA, 15 bp, Homo sapiens
acagaagtctagtaa

SEQ ID NO: 1010244 - DNA, 15 bp, Homo sapiens
cacagaagtctagta

SEQ ID NO: 1010245 - DNA, 15 bp, Homo sapiens
acacagaagtctagt

SEQ ID NO: 1010246 - DNA, 15 bp, Homo sapiens
cacacagaagtctag

SEQ ID NO: 1010247 - DNA, 15 bp, Homo sapiens
gcacacagaagtcta

SEQ ID NO: 1010248 - DNA, 15 bp, Homo sapiens
agcacacagaagtct

SEQ ID NO: 1010249 - DNA, 15 bp, Homo sapiens
aagcacacagaagtc

SEQ ID NO: 1010250 - DNA, 15 bp, Homo sapiens
gaagcacacagaagt

SEQ ID NO: 1010251 - DNA, 15 bp, Homo sapiens
tgaagcacacagaag

SEQ ID NO: 1010252 - DNA, 15 bp, Homo sapiens
gtgaagcacacagaa

SEQ ID NO: 1010253 - DNA, 15 bp, Homo sapiens
agtgaagcacacaga

SEQ ID NO: 1010254 - DNA, 15 bp, Homo sapiens
aagtgaagcacacag

SEQ ID NO: 1010255 - DNA, 15 bp, Homo sapiens
aaagtgaagcacaca

SEQ ID NO: 1010256 - DNA, 15 bp, Homo sapiens
gaaagtgaagcacac

SEQ ID NO: 1010257 - DNA, 15 bp, Homo sapiens
ggaaagtgaagcaca

SEQ ID NO: 1010258 - DNA, 15 bp, Homo sapiens
gggaaagtgaagcac

SEQ ID NO: 1010259 - DNA, 15 bp, Homo sapiens
agggaaagtgaagca

SEQ ID NO: 1010260 - DNA, 15 bp, Homo sapiens
cagggaaagtgaagc

SEQ ID NO: 1010261 - DNA, 15 bp, Homo sapiens
acagggaaagtgaag

SEQ ID NO: 1010262 - DNA, 15 bp, Homo sapiens
tacagggaaagtgaa

SEQ ID NO: 1010263 - DNA, 15 bp, Homo sapiens
ctacagggaaagtga

SEQ ID NO: 1010264 - DNA, 15 bp, Homo sapiens
cctacagggaaagtg

SEQ ID NO: 1010265 - DNA, 15 bp, Homo sapiens
tcctacagggaaagt

SEQ ID NO: 1010266 - DNA, 15 bp, Homo sapiens
atcctacagggaaag

SEQ ID NO: 1010267 - DNA, 15 bp, Homo sapiens
aatcctacagggaaa

SEQ ID NO: 1010268 - DNA, 15 bp, Homo sapiens
taatcctacagggaa

SEQ ID NO: 1010269 - DNA, 15 bp, Homo sapiens
ataatcctacaggga

SEQ ID NO: 1010270 - DNA, 15 bp, Homo sapiens
tataatcctacaggg

SEQ ID NO: 1010271 - DNA, 15 bp, Homo sapiens
ttataatcctacagg

SEQ ID NO: 1010272 - DNA, 15 bp, Homo sapiens
attataatcctacag

SEQ ID NO: 1010273 - DNA, 15 bp, Homo sapiens
gattataatcctaca

SEQ ID NO: 1010274 - DNA, 15 bp, Homo sapiens
agattataatcctac

SEQ ID NO: 1010275 - DNA, 15 bp, Homo sapiens
tagattataatccta

SEQ ID NO: 1010276 - DNA, 15 bp, Homo sapiens
gtagattataatcct

SEQ ID NO: 1010277 - DNA, 15 bp, Homo sapiens
agtagattataatcc

SEQ ID NO: 1010278 - DNA, 15 bp, Homo sapiens
cagtagattataatc

SEQ ID NO: 1010279 - DNA, 15 bp, Homo sapiens
tcagtagattataat

SEQ ID NO: 1010280 - DNA, 15 bp, Homo sapiens
ctcagtagattataa

SEQ ID NO: 1010281 - DNA, 15 bp, Homo sapiens
gctcagtagattata

SEQ ID NO: 1010282 - DNA, 15 bp, Homo sapiens
tgctcagtagattat

SEQ ID NO: 1010283 - DNA, 15 bp, Homo sapiens
ttgctcagtagatta

SEQ ID NO: 1010284 - DNA, 15 bp, Homo sapiens
cttgctcagtagatt

SEQ ID NO: 1010285 - DNA, 15 bp, Homo sapiens
gcttgctcagtagat

SEQ ID NO: 1010286 - DNA, 15 bp, Homo sapiens
agcttgctcagtaga

SEQ ID NO: 1010287 - DNA, 15 bp, Homo sapiens
aagcttgctcagtag

SEQ ID NO: 1010288 - DNA, 15 bp, Homo sapiens
taagcttgctcagta

SEQ ID NO: 1010289 - DNA, 15 bp, Homo sapiens
ataagcttgctcagt

SEQ ID NO: 1010290 - DNA, 15 bp, Homo sapiens
aataagcttgctcag

SEQ ID NO: 1010291 - DNA, 15 bp, Homo sapiens
caataagcttgctca

SEQ ID NO: 1010292 - DNA, 15 bp, Homo sapiens
acaataagcttgctc

SEQ ID NO: 1010293 - DNA, 15 bp, Homo sapiens
tacaataagcttgct

SEQ ID NO: 1010294 - DNA, 15 bp, Homo sapiens
ttacaataagcttgc

SEQ ID NO: 1010295 - DNA, 15 bp, Homo sapiens
cttacaataagcttg

SEQ ID NO: 1010296 - DNA, 15 bp, Homo sapiens
ccttacaataagctt

SEQ ID NO: 1010297 - DNA, 15 bp, Homo sapiens
cccttacaataagct

SEQ ID NO: 1010298 - DNA, 15 bp, Homo sapiens
acccttacaataagc

SEQ ID NO: 1010299 - DNA, 15 bp, Homo sapiens
gacccttacaataag

SEQ ID NO: 1010300 - DNA, 15 bp, Homo sapiens
tgacccttacaataa

SEQ ID NO: 1010301 - DNA, 15 bp, Homo sapiens
ctgacccttacaata

SEQ ID NO: 1010302 - DNA, 15 bp, Homo sapiens
tctgacccttacaat

SEQ ID NO: 1010303 - DNA, 15 bp, Homo sapiens
atctgacccttacaa

SEQ ID NO: 1010304 - DNA, 15 bp, Homo sapiens
aatctgacccttaca

SEQ ID NO: 1010305 - DNA, 15 bp, Homo sapiens
taatctgacccttac

SEQ ID NO: 1010306 - DNA, 15 bp, Homo sapiens
ctaatctgaccctta

SEQ ID NO: 1010307 - DNA, 15 bp, Homo sapiens
gctaatctgaccctt

SEQ ID NO: 1010308 - DNA, 15 bp, Homo sapiens
tgctaatctgaccct

SEQ ID NO: 1010309 - DNA, 15 bp, Homo sapiens
ttgctaatctgaccc

SEQ ID NO: 1010310 - DNA, 15 bp, Homo sapiens
gttgctaatctgacc

SEQ ID NO: 1010311 - DNA, 15 bp, Homo sapiens
tgttgctaatctgac

SEQ ID NO: 1010312 - DNA, 15 bp, Homo sapiens
ctgttgctaatctga

SEQ ID NO: 1010313 - DNA, 15 bp, Homo sapiens
actgttgctaatctg

SEQ ID NO: 1010314 - DNA, 15 bp, Homo sapiens
cactgttgctaatct

SEQ ID NO: 1010315 - DNA, 15 bp, Homo sapiens
acactgttgctaatc

SEQ ID NO: 1010316 - DNA, 15 bp, Homo sapiens
tacactgttgctaat

SEQ ID NO: 1010317 - DNA, 15 bp, Homo sapiens
atacactgttgctaa

SEQ ID NO: 1010318 - DNA, 15 bp, Homo sapiens
catacactgttgcta

SEQ ID NO: 1010319 - DNA, 15 bp, Homo sapiens
tcatacactgttgct

SEQ ID NO: 1010320 - DNA, 15 bp, Homo sapiens
ttcatacactgttgc

SEQ ID NO: 1010321 - DNA, 15 bp, Homo sapiens
tttcatacactgttg

SEQ ID NO: 1010322 - DNA, 15 bp, Homo sapiens
ttttcatacactgtt

SEQ ID NO: 1010323 - DNA, 15 bp, Homo sapiens
attttcatacactgt

SEQ ID NO: 1010324 - DNA, 15 bp, Homo sapiens
cattttcatacactg

SEQ ID NO: 1010325 - DNA, 15 bp, Homo sapiens
tcattttcatacact

SEQ ID NO: 1010326 - DNA, 15 bp, Homo sapiens
atcattttcatacac

SEQ ID NO: 1010327 - DNA, 15 bp, Homo sapiens
aatcattttcataca

SEQ ID NO: 1010328 - DNA, 15 bp, Homo sapiens
aaatcattttcatac

SEQ ID NO: 1010329 - DNA, 15 bp, Homo sapiens
caaatcattttcata

SEQ ID NO: 1010330 - DNA, 15 bp, Homo sapiens
tcaaatcattttcat

SEQ ID NO: 1010331 - DNA, 15 bp, Homo sapiens
ctcaaatcattttca

SEQ ID NO: 1010332 - DNA, 15 bp, Homo sapiens
tctcaaatcattttc

SEQ ID NO: 1010333 - DNA, 15 bp, Homo sapiens
gtctcaaatcatttt

SEQ ID NO: 1010334 - DNA, 15 bp, Homo sapiens
ggtctcaaatcattt

SEQ ID NO: 1010335 - DNA, 15 bp, Homo sapiens
tggtctcaaatcatt

SEQ ID NO: 1010336 - DNA, 15 bp, Homo sapiens
atggtctcaaatcat

SEQ ID NO: 1010337 - DNA, 15 bp, Homo sapiens
aatggtctcaaatca

SEQ ID NO: 1010338 - DNA, 15 bp, Homo sapiens
caatggtctcaaatc

SEQ ID NO: 1010339 - DNA, 15 bp, Homo sapiens
gcaatggtctcaaat

SEQ ID NO: 1010340 - DNA, 15 bp, Homo sapiens
ggcaatggtctcaaa

SEQ ID NO: 1010341 - DNA, 15 bp, Homo sapiens
aggcaatggtctcaa

SEQ ID NO: 1010342 - DNA, 15 bp, Homo sapiens
caggcaatggtctca

SEQ ID NO: 1010343 - DNA, 15 bp, Homo sapiens
gcaggcaatggtctc

SEQ ID NO: 1010344 - DNA, 15 bp, Homo sapiens
tgcaggcaatggtct

SEQ ID NO: 1010345 - DNA, 15 bp, Homo sapiens
gtgcaggcaatggtc

SEQ ID NO: 1010346 - DNA, 15 bp, Homo sapiens
tgtgcaggcaatggt

SEQ ID NO: 1010347 - DNA, 15 bp, Homo sapiens
ttgtgcaggcaatgg

SEQ ID NO: 1010348 - DNA, 15 bp, Homo sapiens
tttgtgcaggcaatg

SEQ ID NO: 1010349 - DNA, 15 bp, Homo sapiens
atttgtgcaggcaat

SEQ ID NO: 1010350 - DNA, 15 bp, Homo sapiens
aatttgtgcaggcaa

SEQ ID NO: 1010351 - DNA, 15 bp, Homo sapiens
gaatttgtgcaggca

SEQ ID NO: 1010352 - DNA, 15 bp, Homo sapiens
tgaatttgtgcaggc

SEQ ID NO: 1010353 - DNA, 15 bp, Homo sapiens
ttgaatttgtgcagg

SEQ ID NO: 1010354 - DNA, 15 bp, Homo sapiens
gttgaatttgtgcag

SEQ ID NO: 1010355 - DNA, 15 bp, Homo sapiens
agttgaatttgtgca

SEQ ID NO: 1010356 - DNA, 15 bp, Homo sapiens
tagttgaatttgtgc

SEQ ID NO: 1010357 - DNA, 15 bp, Homo sapiens
atagttgaatttgtg

SEQ ID NO: 1010358 - DNA, 15 bp, Homo sapiens
aatagttgaatttgt

SEQ ID NO: 1010359 - DNA, 15 bp, Homo sapiens
aaatagttgaatttg

SEQ ID NO: 1010360 - DNA, 15 bp, Homo sapiens
aaaatagttgaattt

SEQ ID NO: 1010361 - DNA, 15 bp, Homo sapiens
aaaaatagttgaatt

SEQ ID NO: 1010362 - DNA, 15 bp, Homo sapiens
aaaaaatagttgaat

SEQ ID NO: 1010363 - DNA, 15 bp, Homo sapiens
aaaaaaatagttgaa

SEQ ID NO: 1010364 - DNA, 15 bp, Homo sapiens
aaaaaaaatagttga

SEQ ID NO: 1010365 - DNA, 15 bp, Homo sapiens
aaaaaaaaatagttg

SEQ ID NO: 1010366 - DNA, 15 bp, Homo sapiens
taaaaaaaaatagtt

SEQ ID NO: 1010367 - DNA, 15 bp, Homo sapiens
ataaaaaaaaatagt

SEQ ID NO: 1010368 - DNA, 15 bp, Homo sapiens
gataaaaaaaaatag

SEQ ID NO: 1010369 - DNA, 15 bp, Homo sapiens
agataaaaaaaaata

SEQ ID NO: 1010370 - DNA, 15 bp, Homo sapiens
gagataaaaaaaaat

SEQ ID NO: 1010371 - DNA, 15 bp, Homo sapiens
tgagataaaaaaaaa

SEQ ID NO: 1010372 - DNA, 15 bp, Homo sapiens
gtgagataaaaaaaa

SEQ ID NO: 1010373 - DNA, 15 bp, Homo sapiens
agtgagataaaaaaa

SEQ ID NO: 1010374 - DNA, 15 bp, Homo sapiens
tagtgagataaaaaa

SEQ ID NO: 1010375 - DNA, 15 bp, Homo sapiens
gtagtgagataaaaa

SEQ ID NO: 1010376 - DNA, 15 bp, Homo sapiens
agtagtgagataaaa

SEQ ID NO: 1010377 - DNA, 15 bp, Homo sapiens
gagtagtgagataaa

SEQ ID NO: 1010378 - DNA, 15 bp, Homo sapiens
agagtagtgagataa

SEQ ID NO: 1010379 - DNA, 15 bp, Homo sapiens
tagagtagtgagata

SEQ ID NO: 1010380 - DNA, 15 bp, Homo sapiens
gtagagtagtgagat

SEQ ID NO: 1010381 - DNA, 15 bp, Homo sapiens
tgtagagtagtgaga

SEQ ID NO: 1010382 - DNA, 15 bp, Homo sapiens
ctgtagagtagtgag

SEQ ID NO: 1010383 - DNA, 15 bp, Homo sapiens
tctgtagagtagtga

SEQ ID NO: 1010384 - DNA, 15 bp, Homo sapiens
ttctgtagagtagtg

SEQ ID NO: 1010385 - DNA, 15 bp, Homo sapiens
cttctgtagagtagt

SEQ ID NO: 1010386 - DNA, 15 bp, Homo sapiens
acttctgtagagtag

SEQ ID NO: 1010387 - DNA, 15 bp, Homo sapiens
tacttctgtagagta

SEQ ID NO: 1010388 - DNA, 15 bp, Homo sapiens
ctacttctgtagagt

SEQ ID NO: 1010389 - DNA, 15 bp, Homo sapiens
cctacttctgtagag

SEQ ID NO: 1010390 - DNA, 15 bp, Homo sapiens
acctacttctgtaga

SEQ ID NO: 1010391 - DNA, 15 bp, Homo sapiens
tacctacttctgtag

SEQ ID NO: 1010392 - DNA, 15 bp, Homo sapiens
ctacctacttctgta

SEQ ID NO: 1010393 - DNA, 15 bp, Homo sapiens
cctacctacttctgt

SEQ ID NO: 1010394 - DNA, 15 bp, Homo sapiens
ccctacctacttctg

SEQ ID NO: 1010395 - DNA, 15 bp, Homo sapiens
accctacctacttct

SEQ ID NO: 1010396 - DNA, 15 bp, Homo sapiens
caccctacctacttc

SEQ ID NO: 1010397 - DNA, 15 bp, Homo sapiens
ccaccctacctactt

SEQ ID NO: 1010398 - DNA, 15 bp, Homo sapiens
cccaccctacctact

SEQ ID NO: 1010399 - DNA, 15 bp, Homo sapiens
tcccaccctacctac

SEQ ID NO: 1010400 - DNA, 15 bp, Homo sapiens
ctcccaccctaccta

SEQ ID NO: 1010401 - DNA, 15 bp, Homo sapiens
tctcccaccctacct

SEQ ID NO: 1010402 - DNA, 15 bp, Homo sapiens
gtctcccaccctacc

SEQ ID NO: 1010403 - DNA, 15 bp, Homo sapiens
tgtctcccaccctac

SEQ ID NO: 1010404 - DNA, 15 bp, Homo sapiens
ctgtctcccacccta

SEQ ID NO: 1010405 - DNA, 15 bp, Homo sapiens
tctgtctcccaccct

SEQ ID NO: 1010406 - DNA, 15 bp, Homo sapiens
ctctgtctcccaccc

SEQ ID NO: 1010407 - DNA, 15 bp, Homo sapiens
actctgtctcccacc

SEQ ID NO: 1010408 - DNA, 15 bp, Homo sapiens
gactctgtctcccac

SEQ ID NO: 1010409 - DNA, 15 bp, Homo sapiens
agactctgtctccca

SEQ ID NO: 1010410 - DNA, 15 bp, Homo sapiens
cagactctgtctccc

SEQ ID NO: 1010411 - DNA, 15 bp, Homo sapiens
tcagactctgtctcc

SEQ ID NO: 1010412 - DNA, 15 bp, Homo sapiens
atcagactctgtctc

SEQ ID NO: 1010413 - DNA, 15 bp, Homo sapiens
catcagactctgtct

SEQ ID NO: 1010414 - DNA, 15 bp, Homo sapiens
tcatcagactctgtc

SEQ ID NO: 1010415 - DNA, 15 bp, Homo sapiens
ctcatcagactctgt

SEQ ID NO: 1010416 - DNA, 15 bp, Homo sapiens
tctcatcagactctg

SEQ ID NO: 1010417 - DNA, 15 bp, Homo sapiens
ctctcatcagactct

SEQ ID NO: 1010418 - DNA, 15 bp, Homo sapiens
cctctcatcagactc

SEQ ID NO: 1010419 - DNA, 15 bp, Homo sapiens
gcctctcatcagact

SEQ ID NO: 1010420 - DNA, 15 bp, Homo sapiens
agcctctcatcagac

SEQ ID NO: 1010421 - DNA, 15 bp, Homo sapiens
gagcctctcatcaga

SEQ ID NO: 1010422 - DNA, 15 bp, Homo sapiens
tgagcctctcatcag

SEQ ID NO: 1010423 - DNA, 15 bp, Homo sapiens
ctgagcctctcatca

SEQ ID NO: 1010424 - DNA, 15 bp, Homo sapiens
tctgagcctctcatc

SEQ ID NO: 1010425 - DNA, 15 bp, Homo sapiens
ttctgagcctctcat

SEQ ID NO: 1010426 - DNA, 15 bp, Homo sapiens
attctgagcctctca

SEQ ID NO: 1010427 - DNA, 15 bp, Homo sapiens
cattctgagcctctc

SEQ ID NO: 1010428 - DNA, 15 bp, Homo sapiens
acattctgagcctct

SEQ ID NO: 1010429 - DNA, 15 bp, Homo sapiens
cacattctgagcctc

SEQ ID NO: 1010430 - DNA, 15 bp, Homo sapiens
tcacattctgagcct

SEQ ID NO: 1010431 - DNA, 15 bp, Homo sapiens
ttcacattctgagcc

SEQ ID NO: 1010432 - DNA, 15 bp, Homo sapiens
tttcacattctgagc

SEQ ID NO: 1010433 - DNA, 15 bp, Homo sapiens
ctttcacattctgag

SEQ ID NO: 1010434 - DNA, 15 bp, Homo sapiens
tctttcacattctga

SEQ ID NO: 1010435 - DNA, 15 bp, Homo sapiens
ttctttcacattctg

SEQ ID NO: 1010436 - DNA, 15 bp, Homo sapiens
tttctttcacattct

SEQ ID NO: 1010437 - DNA, 15 bp, Homo sapiens
ctttctttcacattc

SEQ ID NO: 1010438 - DNA, 15 bp, Homo sapiens
actttctttcacatt

SEQ ID NO: 1010439 - DNA, 15 bp, Homo sapiens
cactttctttcacat

SEQ ID NO: 1010440 - DNA, 15 bp, Homo sapiens
tcactttctttcaca

SEQ ID NO: 1010441 - DNA, 15 bp, Homo sapiens
ctcactttctttcac

SEQ ID NO: 1010442 - DNA, 15 bp, Homo sapiens
cctcactttctttca

SEQ ID NO: 1010443 - DNA, 15 bp, Homo sapiens
gcctcactttctttc

SEQ ID NO: 1010444 - DNA, 15 bp, Homo sapiens
cgcctcactttcttt

SEQ ID NO: 1010445 - DNA, 15 bp, Homo sapiens
tcgcctcactttctt

SEQ ID NO: 1010446 - DNA, 15 bp, Homo sapiens
ctcgcctcactttct

SEQ ID NO: 1010447 - DNA, 15 bp, Homo sapiens
actcgcctcactttc

SEQ ID NO: 1010448 - DNA, 15 bp, Homo sapiens
cactcgcctcacttt

SEQ ID NO: 1010449 - DNA, 15 bp, Homo sapiens
tcactcgcctcactt

SEQ ID NO: 1010450 - DNA, 15 bp, Homo sapiens
ctcactcgcctcact

SEQ ID NO: 1010451 - DNA, 15 bp, Homo sapiens
gctcactcgcctcac

SEQ ID NO: 1010452 - DNA, 15 bp, Homo sapiens
tgctcactcgcctca

SEQ ID NO: 1010453 - DNA, 15 bp, Homo sapiens
atgctcactcgcctc

SEQ ID NO: 1010454 - DNA, 15 bp, Homo sapiens
catgctcactcgcct

SEQ ID NO: 1010455 - DNA, 15 bp, Homo sapiens
tcatgctcactcgcc

SEQ ID NO: 1010456 - DNA, 15 bp, Homo sapiens
atcatgctcactcgc

SEQ ID NO: 1010457 - DNA, 15 bp, Homo sapiens
tatcatgctcactcg

SEQ ID NO: 1010458 - DNA, 15 bp, Homo sapiens
atatcatgctcactc

SEQ ID NO: 1010459 - DNA, 15 bp, Homo sapiens
aatatcatgctcact

SEQ ID NO: 1010460 - DNA, 15 bp, Homo sapiens
aaatatcatgctcac

SEQ ID NO: 1010461 - DNA, 15 bp, Homo sapiens
taaatatcatgctca

SEQ ID NO: 1010462 - DNA, 15 bp, Homo sapiens
ttaaatatcatgctc

SEQ ID NO: 1010463 - DNA, 15 bp, Homo sapiens
attaaatatcatgct

SEQ ID NO: 1010464 - DNA, 15 bp, Homo sapiens
tattaaatatcatgc

SEQ ID NO: 1010465 - DNA, 15 bp, Homo sapiens
atattaaatatcatg

SEQ ID NO: 1010466 - DNA, 15 bp, Homo sapiens
tatattaaatatcat

SEQ ID NO: 1010467 - DNA, 15 bp, Homo sapiens
ttatattaaatatca

SEQ ID NO: 1010468 - DNA, 15 bp, Homo sapiens
tttatattaaatatc

SEQ ID NO: 1010469 - DNA, 15 bp, Homo sapiens
gtttatattaaatat

SEQ ID NO: 1010470 - DNA, 15 bp, Homo sapiens
tgtttatattaaata

SEQ ID NO: 1010471 - DNA, 15 bp, Homo sapiens
gtgtttatattaaat

SEQ ID NO: 1010472 - DNA, 15 bp, Homo sapiens
tgtgtttatattaaa

SEQ ID NO: 1010473 - DNA, 15 bp, Homo sapiens
ttgtgtttatattaa

SEQ ID NO: 1010474 - DNA, 15 bp, Homo sapiens
tttgtgtttatatta

SEQ ID NO: 1010475 - DNA, 15 bp, Homo sapiens
ctttgtgtttatatt

SEQ ID NO: 1010476 - DNA, 15 bp, Homo sapiens
tctttgtgtttatat

SEQ ID NO: 1010477 - DNA, 15 bp, Homo sapiens
atctttgtgtttata

SEQ ID NO: 1010478 - DNA, 15 bp, Homo sapiens
tatctttgtgtttat

SEQ ID NO: 1010479 - DNA, 15 bp, Homo sapiens
atatctttgtgttta

SEQ ID NO: 1010480 - DNA, 15 bp, Homo sapiens
aatatctttgtgttt

SEQ ID NO: 1010481 - DNA, 15 bp, Homo sapiens
gaatatctttgtgtt

SEQ ID NO: 1010482 - DNA, 15 bp, Homo sapiens
agaatatctttgtgt

SEQ ID NO: 1010483 - DNA, 15 bp, Homo sapiens
cagaatatctttgtg

SEQ ID NO: 1010484 - DNA, 15 bp, Homo sapiens
tcagaatatctttgt

SEQ ID NO: 1010485 - DNA, 15 bp, Homo sapiens
ctcagaatatctttg

SEQ ID NO: 1010486 - DNA, 15 bp, Homo sapiens
tctcagaatatcttt

SEQ ID NO: 1010487 - DNA, 15 bp, Homo sapiens
ttctcagaatatctt

SEQ ID NO: 1010488 - DNA, 15 bp, Homo sapiens
tcttctcagaatatc

SEQ ID NO: 1010489 - DNA, 15 bp, Homo sapiens
ctcttctcagaatat

SEQ ID NO: 1010490 - DNA, 15 bp, Homo sapiens
gctcttctcagaata

SEQ ID NO: 1010491 - DNA, 15 bp, Homo sapiens
agctcttctcagaat

SEQ ID NO: 1010492 - DNA, 15 bp, Homo sapiens
cagctcttctcagaa

SEQ ID NO: 1010493 - DNA, 15 bp, Homo sapiens
gcagctcttctcaga

SEQ ID NO: 1010494 - DNA, 15 bp, Homo sapiens
agcagctcttctcag

SEQ ID NO: 1010495 - DNA, 15 bp, Homo sapiens
gagcagctcttctca

SEQ ID NO: 1010496 - DNA, 15 bp, Homo sapiens
tgagcagctcttctc

SEQ ID NO: 1010497 - DNA, 15 bp, Homo sapiens
gtgagcagctcttct

SEQ ID NO: 1010498 - DNA, 15 bp, Homo sapiens
agtgagcagctcttc

SEQ ID NO: 1010499 - DNA, 15 bp, Homo sapiens
cagtgagcagctctt

SEQ ID NO: 1010500 - DNA, 15 bp, Homo sapiens
gcagtgagcagctct

SEQ ID NO: 1010501 - DNA, 15 bp, Homo sapiens
ggcagtgagcagctc

SEQ ID NO: 1010502 - DNA, 15 bp, Homo sapiens
gggcagtgagcagct

SEQ ID NO: 1010503 - DNA, 15 bp, Homo sapiens
ggggcagtgagcagc

SEQ ID NO: 1010504 - DNA, 15 bp, Homo sapiens
gggggcagtgagcag

SEQ ID NO: 1010505 - DNA, 15 bp, Homo sapiens
agggggcagtgagca

SEQ ID NO: 1010506 - DNA, 15 bp, Homo sapiens
gagggggcagtgagc

SEQ ID NO: 1010507 - DNA, 15 bp, Homo sapiens
ggagggggcagtgag

SEQ ID NO: 1010508 - DNA, 15 bp, Homo sapiens
gggagggggcagtga

SEQ ID NO: 1010509 - DNA, 15 bp, Homo sapiens
ggggagggggcagtg

SEQ ID NO: 1010510 - DNA, 15 bp, Homo sapiens
gggggagggggcagt

SEQ ID NO: 1010511 - DNA, 15 bp, Homo sapiens
tgggggagggggcag

SEQ ID NO: 1010512 - DNA, 15 bp, Homo sapiens
ttgggggagggggca

SEQ ID NO: 1010513 - DNA, 15 bp, Homo sapiens
attgggggagggggc

SEQ ID NO: 1010514 - DNA, 15 bp, Homo sapiens
tattgggggaggggg

SEQ ID NO: 1010515 - DNA, 15 bp, Homo sapiens
gtattgggggagggg

SEQ ID NO: 1010516 - DNA, 15 bp, Homo sapiens
tgtattgggggaggg

SEQ ID NO: 1010517 - DNA, 15 bp, Homo sapiens
atgtattgggggagg

SEQ ID NO: 1010518 - DNA, 15 bp, Homo sapiens
catgtattgggggag

SEQ ID NO: 1010519 - DNA, 15 bp, Homo sapiens
acatgtattggggga

SEQ ID NO: 1010520 - DNA, 15 bp, Homo sapiens
aacatgtattggggg

SEQ ID NO: 1010521 - DNA, 15 bp, Homo sapiens
caacatgtattgggg

SEQ ID NO: 1010522 - DNA, 15 bp, Homo sapiens
tcaacatgtattggg

SEQ ID NO: 1010523 - DNA, 15 bp, Homo sapiens
atcaacatgtattgg

SEQ ID NO: 1010524 - DNA, 15 bp, Homo sapiens
tatcaacatgtattg

SEQ ID NO: 1010525 - DNA, 15 bp, Homo sapiens
ctatcaacatgtatt

SEQ ID NO: 1010526 - DNA, 15 bp, Homo sapiens
cctatcaacatgtat

SEQ ID NO: 1010527 - DNA, 15 bp, Homo sapiens
tcctatcaacatgta

SEQ ID NO: 1010528 - DNA, 15 bp, Homo sapiens
ttcctatcaacatgt

SEQ ID NO: 1010529 - DNA, 15 bp, Homo sapiens
tttcctatcaacatg

SEQ ID NO: 1010530 - DNA, 15 bp, Homo sapiens
ttttcctatcaacat

SEQ ID NO: 1010531 - DNA, 15 bp, Homo sapiens
attttcctatcaaca

SEQ ID NO: 1010532 - DNA, 15 bp, Homo sapiens
cattttcctatcaac

SEQ ID NO: 1010533 - DNA, 15 bp, Homo sapiens
gcattttcctatcaa

SEQ ID NO: 1010534 - DNA, 15 bp, Homo sapiens
ggcattttcctatca

SEQ ID NO: 1010535 - DNA, 15 bp, Homo sapiens
tggcattttcctatc

SEQ ID NO: 1010536 - DNA, 15 bp, Homo sapiens
gtggcattttcctat

SEQ ID NO: 1010537 - DNA, 15 bp, Homo sapiens
cgtggcattttccta

SEQ ID NO: 1010538 - DNA, 15 bp, Homo sapiens
acgtggcattttcct

SEQ ID NO: 1010539 - DNA, 15 bp, Homo sapiens
tacgtggcattttcc

SEQ ID NO: 1010540 - DNA, 15 bp, Homo sapiens
gtacgtggcattttc

SEQ ID NO: 1010541 - DNA, 15 bp, Homo sapiens
agtacgtggcatttt

SEQ ID NO: 1010542 - DNA, 15 bp, Homo sapiens
aagtacgtggcattt

SEQ ID NO: 1010543 - DNA, 15 bp, Homo sapiens
gaagtacgtggcatt

SEQ ID NO: 1010544 - DNA, 15 bp, Homo sapiens
tgaagtacgtggcat

SEQ ID NO: 1010545 - DNA, 15 bp, Homo sapiens
ctgaagtacgtggca

SEQ ID NO: 1010546 - DNA, 15 bp, Homo sapiens
gctgaagtacgtggc

SEQ ID NO: 1010547 - DNA, 15 bp, Homo sapiens
tgctgaagtacgtgg

SEQ ID NO: 1010548 - DNA, 15 bp, Homo sapiens
ttgctgaagtacgtg

SEQ ID NO: 1010549 - DNA, 15 bp, Homo sapiens
tttgctgaagtacgt

SEQ ID NO: 1010550 - DNA, 15 bp, Homo sapiens
ttttgctgaagtacg

SEQ ID NO: 1010551 - DNA, 15 bp, Homo sapiens
tttttgctgaagtac

SEQ ID NO: 1010552 - DNA, 15 bp, Homo sapiens
gtttttgctgaagta

SEQ ID NO: 1010553 - DNA, 15 bp, Homo sapiens
tgtttttgctgaagt

SEQ ID NO: 1010554 - DNA, 15 bp, Homo sapiens
ttgtttttgctgaag

SEQ ID NO: 1010555 - DNA, 15 bp, Homo sapiens
gttgtttttgctgaa

SEQ ID NO: 1010556 - DNA, 15 bp, Homo sapiens
agttgtttttgctga

SEQ ID NO: 1010557 - DNA, 15 bp, Homo sapiens
cagttgtttttgctg

SEQ ID NO: 1010558 - DNA, 15 bp, Homo sapiens
tcagttgtttttgct

SEQ ID NO: 1010559 - DNA, 15 bp, Homo sapiens
ttcagttgtttttgc

SEQ ID NO: 1010560 - DNA, 15 bp, Homo sapiens
tttcagttgtttttg

SEQ ID NO: 1010561 - DNA, 15 bp, Homo sapiens
ttttcagttgttttt

SEQ ID NO: 1010562 - DNA, 15 bp, Homo sapiens
tttttcagttgtttt

SEQ ID NO: 1010563 - DNA, 15 bp, Homo sapiens
atttttcagttgttt

SEQ ID NO: 1010564 - DNA, 15 bp, Homo sapiens
ctaatttttcagttg

SEQ ID NO: 1010565 - DNA, 15 bp, Homo sapiens
tctaatttttcagtt

SEQ ID NO: 1010566 - DNA, 15 bp, Homo sapiens
atctaatttttcagt

SEQ ID NO: 1010567 - DNA, 15 bp, Homo sapiens
tatctaatttttcag

SEQ ID NO: 1010568 - DNA, 15 bp, Homo sapiens
ctatctaatttttca

SEQ ID NO: 1010569 - DNA, 15 bp, Homo sapiens
tctatctaatttttc

SEQ ID NO: 1010570 - DNA, 15 bp, Homo sapiens
ttctatctaattttt

SEQ ID NO: 1010571 - DNA, 15 bp, Homo sapiens
tttctatctaatttt

SEQ ID NO: 1010572 - DNA, 15 bp, Homo sapiens
ttttctatctaattt

SEQ ID NO: 1010573 - DNA, 15 bp, Homo sapiens
cttttctatctaatt

SEQ ID NO: 1010574 - DNA, 15 bp, Homo sapiens
acttttctatctaat

SEQ ID NO: 1010575 - DNA, 15 bp, Homo sapiens
gacttttctatctaa

SEQ ID NO: 1010576 - DNA, 15 bp, Homo sapiens
tgacttttctatcta

SEQ ID NO: 1010577 - DNA, 15 bp, Homo sapiens
ttgacttttctatct

SEQ ID NO: 1010578 - DNA, 15 bp, Homo sapiens
attgacttttctatc

SEQ ID NO: 1010579 - DNA, 15 bp, Homo sapiens
gattgacttttctat

SEQ ID NO: 1010580 - DNA, 15 bp, Homo sapiens
tgattgacttttcta

SEQ ID NO: 1010581 - DNA, 15 bp, Homo sapiens
ttgattgacttttct

SEQ ID NO: 1010582 - DNA, 15 bp, Homo sapiens
attgattgacttttc

SEQ ID NO: 1010583 - DNA, 15 bp, Homo sapiens
tattgattgactttt

SEQ ID NO: 1010584 - DNA, 15 bp, Homo sapiens
ctattgattgacttt

SEQ ID NO: 1010585 - DNA, 15 bp, Homo sapiens
cctattgattgactt

SEQ ID NO: 1010586 - DNA, 15 bp, Homo sapiens
tcctattgattgact

SEQ ID NO: 1010587 - DNA, 15 bp, Homo sapiens
ttcctattgattgac

SEQ ID NO: 1010588 - DNA, 15 bp, Homo sapiens
tttcctattgattga

SEQ ID NO: 1010589 - DNA, 15 bp, Homo sapiens
ttttcctattgattg

SEQ ID NO: 1010590 - DNA, 15 bp, Homo sapiens
cttttcctattgatt

SEQ ID NO: 1010591 - DNA, 15 bp, Homo sapiens
tcttttcctattgat

SEQ ID NO: 1010592 - DNA, 15 bp, Homo sapiens
atcttttcctattga

SEQ ID NO: 1010593 - DNA, 15 bp, Homo sapiens
tatcttttcctattg

SEQ ID NO: 1010594 - DNA, 15 bp, Homo sapiens
ttatcttttcctatt

SEQ ID NO: 1010595 - DNA, 15 bp, Homo sapiens
attatcttttcctat

SEQ ID NO: 1010596 - DNA, 15 bp, Homo sapiens
ctacctaactttcct

SEQ ID NO: 1010597 - DNA, 15 bp, Homo sapiens
tctacctaactttcc

SEQ ID NO: 1010598 - DNA, 15 bp, Homo sapiens
ctctacctaactttc

SEQ ID NO: 1010599 - DNA, 15 bp, Homo sapiens
tctctacctaacttt

SEQ ID NO: 1010600 - DNA, 15 bp, Homo sapiens
atctctacctaactt

SEQ ID NO: 1010601 - DNA, 15 bp, Homo sapiens
catctctacctaact

SEQ ID NO: 1010602 - DNA, 15 bp, Homo sapiens
acatctctacctaac

SEQ ID NO: 1010603 - DNA, 15 bp, Homo sapiens
tacatctctacctaa

SEQ ID NO: 1010604 - DNA, 15 bp, Homo sapiens
atacatctctaccta

SEQ ID NO: 1010605 - DNA, 15 bp, Homo sapiens
gatacatctctacct

SEQ ID NO: 1010606 - DNA, 15 bp, Homo sapiens
tgatacatctctacc

SEQ ID NO: 1010607 - DNA, 15 bp, Homo sapiens
atgatacatctctac

SEQ ID NO: 1010608 - DNA, 15 bp, Homo sapiens
tatgatacatctcta

SEQ ID NO: 1010609 - DNA, 15 bp, Homo sapiens
gtatgatacatctct

SEQ ID NO: 1010610 - DNA, 15 bp, Homo sapiens
agtatgatacatctc

SEQ ID NO: 1010611 - DNA, 15 bp, Homo sapiens
gagtatgatacatct

SEQ ID NO: 1010612 - DNA, 15 bp, Homo sapiens
ggagtatgatacatc

SEQ ID NO: 1010613 - DNA, 15 bp, Homo sapiens
tggagtatgatacat

SEQ ID NO: 1010614 - DNA, 15 bp, Homo sapiens
ctggagtatgataca

SEQ ID NO: 1010615 - DNA, 15 bp, Homo sapiens
gctggagtatgatac

SEQ ID NO: 1010616 - DNA, 15 bp, Homo sapiens
tgctggagtatgata

SEQ ID NO: 1010617 - DNA, 15 bp, Homo sapiens
atgctggagtatgat

SEQ ID NO: 1010618 - DNA, 15 bp, Homo sapiens
catgctggagtatga

SEQ ID NO: 1010619 - DNA, 15 bp, Homo sapiens
tcatgctggagtatg

SEQ ID NO: 1010620 - DNA, 15 bp, Homo sapiens
atcatgctggagtat

SEQ ID NO: 1010621 - DNA, 15 bp, Homo sapiens
aatcatgctggagta

SEQ ID NO: 1010622 - DNA, 15 bp, Homo sapiens
caatcatgctggagt

SEQ ID NO: 1010623 - DNA, 15 bp, Homo sapiens
acaatcatgctggag

SEQ ID NO: 1010624 - DNA, 15 bp, Homo sapiens
cacaatcatgctgga

SEQ ID NO: 1010625 - DNA, 15 bp, Homo sapiens
tcacaatcatgctgg

SEQ ID NO: 1010626 - DNA, 15 bp, Homo sapiens
ctcacaatcatgctg

SEQ ID NO: 1010627 - DNA, 15 bp, Homo sapiens
gctcacaatcatgct

SEQ ID NO: 1010628 - DNA, 15 bp, Homo sapiens
tgctcacaatcatgc

SEQ ID NO: 1010629 - DNA, 15 bp, Homo sapiens
ctgctcacaatcatg

SEQ ID NO: 1010630 - DNA, 15 bp, Homo sapiens
tctgctcacaatcat

SEQ ID NO: 1010631 - DNA, 15 bp, Homo sapiens
gtctgctcacaatca

SEQ ID NO: 1010632 - DNA, 15 bp, Homo sapiens
cgtctgctcacaatc

SEQ ID NO: 1010633 - DNA, 15 bp, Homo sapiens
tcgtctgctcacaat

SEQ ID NO: 1010634 - DNA, 15 bp, Homo sapiens
ctcgtctgctcacaa

SEQ ID NO: 1010635 - DNA, 15 bp, Homo sapiens
gctcgtctgctcaca

SEQ ID NO: 1010636 - DNA, 15 bp, Homo sapiens
tgctcgtctgctcac

SEQ ID NO: 1010637 - DNA, 15 bp, Homo sapiens
ctgctcgtctgctca

SEQ ID NO: 1010638 - DNA, 15 bp, Homo sapiens
cctgctcgtctgctc

SEQ ID NO: 1010639 - DNA, 15 bp, Homo sapiens
tcctgctcgtctgct

SEQ ID NO: 1010640 - DNA, 15 bp, Homo sapiens
atcctgctcgtctgc

SEQ ID NO: 1010641 - DNA, 15 bp, Homo sapiens
catcctgctcgtctg

SEQ ID NO: 1010642 - DNA, 15 bp, Homo sapiens
tcatcctgctcgtct

SEQ ID NO: 1010643 - DNA, 15 bp, Homo sapiens
ctcatcctgctcgtc

SEQ ID NO: 1010644 - DNA, 15 bp, Homo sapiens
gctcatcctgctcgt

SEQ ID NO: 1010645 - DNA, 15 bp, Homo sapiens
tgctcatcctgctcg

SEQ ID NO: 1010646 - DNA, 15 bp, Homo sapiens
ttgctcatcctgctc

SEQ ID NO: 1010647 - DNA, 15 bp, Homo sapiens
tttgctcatcctgct

SEQ ID NO: 1010648 - DNA, 15 bp, Homo sapiens
ttttgctcatcctgc

SEQ ID NO: 1010649 - DNA, 15 bp, Homo sapiens
gttttgctcatcctg

SEQ ID NO: 1010650 - DNA, 15 bp, Homo sapiens
agttttgctcatcct

SEQ ID NO: 1010651 - DNA, 15 bp, Homo sapiens
aagttttgctcatcc

SEQ ID NO: 1010652 - DNA, 15 bp, Homo sapiens
caagttttgctcatc

SEQ ID NO: 1010653 - DNA, 15 bp, Homo sapiens
gcaagttttgctcat

SEQ ID NO: 1010654 - DNA, 15 bp, Homo sapiens
tgcaagttttgctca

SEQ ID NO: 1010655 - DNA, 15 bp, Homo sapiens
gtgcaagttttgctc

SEQ ID NO: 1010656 - DNA, 15 bp, Homo sapiens
cgtgcaagttttgct

SEQ ID NO: 1010657 - DNA, 15 bp, Homo sapiens
tcgtgcaagttttgc

SEQ ID NO: 1010658 - DNA, 15 bp, Homo sapiens
ctcgtgcaagttttg

SEQ ID NO: 1010659 - DNA, 15 bp, Homo sapiens
actcgtgcaagtttt

SEQ ID NO: 1010660 - DNA, 15 bp, Homo sapiens
tactcgtgcaagttt

SEQ ID NO: 1010661 - DNA, 15 bp, Homo sapiens
ttactcgtgcaagtt

SEQ ID NO: 1010662 - DNA, 15 bp, Homo sapiens
cttactcgtgcaagt

SEQ ID NO: 1010663 - DNA, 15 bp, Homo sapiens
tcttactcgtgcaag

SEQ ID NO: 1010664 - DNA, 15 bp, Homo sapiens
ctcttactcgtgcaa

SEQ ID NO: 1010665 - DNA, 15 bp, Homo sapiens
actcttactcgtgca

SEQ ID NO: 1010666 - DNA, 15 bp, Homo sapiens
cactcttactcgtgc

SEQ ID NO: 1010667 - DNA, 15 bp, Homo sapiens
ccactcttactcgtg

SEQ ID NO: 1010668 - DNA, 15 bp, Homo sapiens
accactcttactcgt

SEQ ID NO: 1010669 - DNA, 15 bp, Homo sapiens
taccactcttactcg

SEQ ID NO: 1010670 - DNA, 15 bp, Homo sapiens
ttaccactcttactc

SEQ ID NO: 1010671 - DNA, 15 bp, Homo sapiens
tttaccactcttact

SEQ ID NO: 1010672 - DNA, 15 bp, Homo sapiens
gtttaccactcttac

SEQ ID NO: 1010673 - DNA, 15 bp, Homo sapiens
tgtttaccactctta

SEQ ID NO: 1010674 - DNA, 15 bp, Homo sapiens
gtgtttaccactctt

SEQ ID NO: 1010675 - DNA, 15 bp, Homo sapiens
ggtgtttaccactct

SEQ ID NO: 1010676 - DNA, 15 bp, Homo sapiens
tggtgtttaccactc

SEQ ID NO: 1010677 - DNA, 15 bp, Homo sapiens
ctggtgtttaccact

SEQ ID NO: 1010678 - DNA, 15 bp, Homo sapiens
tctggtgtttaccac

SEQ ID NO: 1010679 - DNA, 15 bp, Homo sapiens
ctctggtgtttacca

SEQ ID NO: 1010680 - DNA, 15 bp, Homo sapiens
tctctggtgtttacc

SEQ ID NO: 1010681 - DNA, 15 bp, Homo sapiens
ttctctggtgtttac

SEQ ID NO: 1010682 - DNA, 15 bp, Homo sapiens
cttctctggtgttta

SEQ ID NO: 1010683 - DNA, 15 bp, Homo sapiens
ccttctctggtgttt

SEQ ID NO: 1010684 - DNA, 15 bp, Homo sapiens
gccttctctggtgtt

SEQ ID NO: 1010685 - DNA, 15 bp, Homo sapiens
cgccttctctggtgt

SEQ ID NO: 1010686 - DNA, 15 bp, Homo sapiens
gcgccttctctggtg

SEQ ID NO: 1010687 - DNA, 15 bp, Homo sapiens
agcgccttctctggt

SEQ ID NO: 1010688 - DNA, 15 bp, Homo sapiens
aagcgccttctctgg

SEQ ID NO: 1010689 - DNA, 15 bp, Homo sapiens
aaagcgccttctctg

SEQ ID NO: 1010690 - DNA, 15 bp, Homo sapiens
gaaagcgccttctct

SEQ ID NO: 1010691 - DNA, 15 bp, Homo sapiens
tgaaagcgccttctc

SEQ ID NO: 1010692 - DNA, 15 bp, Homo sapiens
atgaaagcgccttct

SEQ ID NO: 1010693 - DNA, 15 bp, Homo sapiens
catgaaagcgccttc

SEQ ID NO: 1010694 - DNA, 15 bp, Homo sapiens
ccatgaaagcgcctt

SEQ ID NO: 1010695 - DNA, 15 bp, Homo sapiens
tccatgaaagcgcct

SEQ ID NO: 1010696 - DNA, 15 bp, Homo sapiens
ttccatgaaagcgcc

SEQ ID NO: 1010697 - DNA, 15 bp, Homo sapiens
cttccatgaaagcgc

SEQ ID NO: 1010698 - DNA, 15 bp, Homo sapiens
ccttccatgaaagcg

SEQ ID NO: 1010699 - DNA, 15 bp, Homo sapiens
cccttccatgaaagc

SEQ ID NO: 1010700 - DNA, 15 bp, Homo sapiens
gcccttccatgaaag

SEQ ID NO: 1010701 - DNA, 15 bp, Homo sapiens
tgcccttccatgaaa

SEQ ID NO: 1010702 - DNA, 15 bp, Homo sapiens
gtgcccttccatgaa

SEQ ID NO: 1010703 - DNA, 15 bp, Homo sapiens
ggtgcccttccatga

SEQ ID NO: 1010704 - DNA, 15 bp, Homo sapiens
gggtgcccttccatg

SEQ ID NO: 1010705 - DNA, 15 bp, Homo sapiens
agggtgcccttccat

SEQ ID NO: 1010706 - DNA, 15 bp, Homo sapiens
tagggtgcccttcca

SEQ ID NO: 1010707 - DNA, 15 bp, Homo sapiens
ctagggtgcccttcc

SEQ ID NO: 1010708 - DNA, 15 bp, Homo sapiens
cctagggtgcccttc

SEQ ID NO: 1010709 - DNA, 15 bp, Homo sapiens
acctagggtgccctt

SEQ ID NO: 1010710 - DNA, 15 bp, Homo sapiens
tacctagggtgccct

SEQ ID NO: 1010711 - DNA, 15 bp, Homo sapiens
ttacctagggtgccc

SEQ ID NO: 1010712 - DNA, 15 bp, Homo sapiens
gttacctagggtgcc

SEQ ID NO: 1010713 - DNA, 15 bp, Homo sapiens
ggttacctagggtgc

SEQ ID NO: 1010714 - DNA, 15 bp, Homo sapiens
tggttacctagggtg

SEQ ID NO: 1010715 - DNA, 15 bp, Homo sapiens
ttggttacctagggt

SEQ ID NO: 1010716 - DNA, 15 bp, Homo sapiens
cttggttacctaggg

SEQ ID NO: 1010717 - DNA, 15 bp, Homo sapiens
gcttggttacctagg

SEQ ID NO: 1010718 - DNA, 15 bp, Homo sapiens
tgcttggttacctag

SEQ ID NO: 1010719 - DNA, 15 bp, Homo sapiens
ttgcttggttaccta

SEQ ID NO: 1010720 - DNA, 15 bp, Homo sapiens
cttgcttggttacct

SEQ ID NO: 1010721 - DNA, 15 bp, Homo sapiens
acttgcttggttacc

SEQ ID NO: 1010722 - DNA, 15 bp, Homo sapiens
cacttgcttggttac

SEQ ID NO: 1010723 - DNA, 15 bp, Homo sapiens
ccacttgcttggtta

SEQ ID NO: 1010724 - DNA, 15 bp, Homo sapiens
gccacttgcttggtt

SEQ ID NO: 1010725 - DNA, 15 bp, Homo sapiens
tgccacttgcttggt

SEQ ID NO: 1010726 - DNA, 15 bp, Homo sapiens
ttgccacttgcttgg

SEQ ID NO: 1010727 - DNA, 15 bp, Homo sapiens
gttgccacttgcttg

SEQ ID NO: 1010728 - DNA, 15 bp, Homo sapiens
tgttgccacttgctt

SEQ ID NO: 1010729 - DNA, 15 bp, Homo sapiens
ttgttgccacttgct

SEQ ID NO: 1010730 - DNA, 15 bp, Homo sapiens
attgttgccacttgc

SEQ ID NO: 1010731 - DNA, 15 bp, Homo sapiens
tattgttgccacttg

SEQ ID NO: 1010732 - DNA, 15 bp, Homo sapiens
ctattgttgccactt

SEQ ID NO: 1010733 - DNA, 15 bp, Homo sapiens
actattgttgccact

SEQ ID NO: 1010734 - DNA, 15 bp, Homo sapiens
tactattgttgccac

SEQ ID NO: 1010735 - DNA, 15 bp, Homo sapiens
gtactattgttgcca

SEQ ID NO: 1010736 - DNA, 15 bp, Homo sapiens
tgtactattgttgcc

SEQ ID NO: 1010737 - DNA, 15 bp, Homo sapiens
ctgtactattgttgc

SEQ ID NO: 1010738 - DNA, 15 bp, Homo sapiens
cctgtactattgttg

SEQ ID NO: 1010739 - DNA, 15 bp, Homo sapiens
acctgtactattgtt

SEQ ID NO: 1010740 - DNA, 15 bp, Homo sapiens
cacctgtactattgt

SEQ ID NO: 1010741 - DNA, 15 bp, Homo sapiens
tcacctgtactattg

SEQ ID NO: 1010742 - DNA, 15 bp, Homo sapiens
ctcacctgtactatt

SEQ ID NO: 1010743 - DNA, 15 bp, Homo sapiens
actcacctgtactat

SEQ ID NO: 1010744 - DNA, 15 bp, Homo sapiens
gactcacctgtacta

SEQ ID NO: 1010745 - DNA, 15 bp, Homo sapiens
ggactcacctgtact

SEQ ID NO: 1010746 - DNA, 15 bp, Homo sapiens
aggactcacctgtac

SEQ ID NO: 1010747 - DNA, 15 bp, Homo sapiens
aaggactcacctgta

SEQ ID NO: 1010748 - DNA, 15 bp, Homo sapiens
caaggactcacctgt

SEQ ID NO: 1010749 - DNA, 15 bp, Homo sapiens
ccaaggactcacctg

SEQ ID NO: 1010750 - DNA, 15 bp, Homo sapiens
tccaaggactcacct

SEQ ID NO: 1010751 - DNA, 15 bp, Homo sapiens
atccaaggactcacc

SEQ ID NO: 1010752 - DNA, 15 bp, Homo sapiens
gatccaaggactcac

SEQ ID NO: 1010753 - DNA, 15 bp, Homo sapiens
ggatccaaggactca

SEQ ID NO: 1010754 - DNA, 15 bp, Homo sapiens
gggatccaaggactc

SEQ ID NO: 1010755 - DNA, 15 bp, Homo sapiens
agggatccaaggact

SEQ ID NO: 1010756 - DNA, 15 bp, Homo sapiens
aagggatccaaggac

SEQ ID NO: 1010757 - DNA, 15 bp, Homo sapiens
gaagggatccaagga

SEQ ID NO: 1010758 - DNA, 15 bp, Homo sapiens
agaagggatccaagg

SEQ ID NO: 1010759 - DNA, 15 bp, Homo sapiens
gagaagggatccaag

SEQ ID NO: 1010760 - DNA, 15 bp, Homo sapiens
agagaagggatccaa

SEQ ID NO: 1010761 - DNA, 15 bp, Homo sapiens
gagagaagggatcca

SEQ ID NO: 1010762 - DNA, 15 bp, Homo sapiens
agagagaagggatcc

SEQ ID NO: 1010763 - DNA, 15 bp, Homo sapiens
gagagagaagggatc

SEQ ID NO: 1010764 - DNA, 15 bp, Homo sapiens
ggagagagaagggat

SEQ ID NO: 1010765 - DNA, 15 bp, Homo sapiens
tggagagagaaggga

SEQ ID NO: 1010766 - DNA, 15 bp, Homo sapiens
gtggagagagaaggg

SEQ ID NO: 1010767 - DNA, 15 bp, Homo sapiens
ggtggagagagaagg

SEQ ID NO: 1010768 - DNA, 15 bp, Homo sapiens
gggtggagagagaag

SEQ ID NO: 1010769 - DNA, 15 bp, Homo sapiens
ggggtggagagagaa

SEQ ID NO: 1010770 - DNA, 15 bp, Homo sapiens
gggggtggagagaga

SEQ ID NO: 1010771 - DNA, 15 bp, Homo sapiens
cgggggtggagagag

SEQ ID NO: 1010772 - DNA, 15 bp, Homo sapiens
ccgggggtggagaga

SEQ ID NO: 1010773 - DNA, 15 bp, Homo sapiens
gccgggggtggagag

SEQ ID NO: 1010774 - DNA, 15 bp, Homo sapiens
tgccgggggtggaga

SEQ ID NO: 1010775 - DNA, 15 bp, Homo sapiens
ctgccgggggtggag

SEQ ID NO: 1010776 - DNA, 15 bp, Homo sapiens
actgccgggggtgga

SEQ ID NO: 1010777 - DNA, 15 bp, Homo sapiens
cactgccgggggtgg

SEQ ID NO: 1010778 - DNA, 15 bp, Homo sapiens
ccactgccgggggtg

SEQ ID NO: 1010779 - DNA, 15 bp, Homo sapiens
accactgccgggggt

SEQ ID NO: 1010780 - DNA, 15 bp, Homo sapiens
gaccactgccggggg

SEQ ID NO: 1010781 - DNA, 15 bp, Homo sapiens
ggaccactgccgggg

SEQ ID NO: 1010782 - DNA, 15 bp, Homo sapiens
cggaccactgccggg

SEQ ID NO: 1010783 - DNA, 15 bp, Homo sapiens
ccggaccactgccgg

SEQ ID NO: 1010784 - DNA, 15 bp, Homo sapiens
tccggaccactgccg

SEQ ID NO: 1010785 - DNA, 15 bp, Homo sapiens
gtccggaccactgcc

SEQ ID NO: 1010786 - DNA, 15 bp, Homo sapiens
tgtccggaccactgc

SEQ ID NO: 1010787 - DNA, 15 bp, Homo sapiens
ttgtccggaccactg

SEQ ID NO: 1010788 - DNA, 15 bp, Homo sapiens
cttgtccggaccact

SEQ ID NO: 1010789 - DNA, 15 bp, Homo sapiens
acttgtccggaccac

SEQ ID NO: 1010790 - DNA, 15 bp, Homo sapiens
tacttgtccggacca

SEQ ID NO: 1010791 - DNA, 15 bp, Homo sapiens
gtacttgtccggacc

SEQ ID NO: 1010792 - DNA, 15 bp, Homo sapiens
agtacttgtccggac

SEQ ID NO: 1010793 - DNA, 15 bp, Homo sapiens
tagtacttgtccgga

SEQ ID NO: 1010794 - DNA, 15 bp, Homo sapiens
ttagtacttgtccgg

SEQ ID NO: 1010795 - DNA, 15 bp, Homo sapiens
gttagtacttgtccg

SEQ ID NO: 1010796 - DNA, 15 bp, Homo sapiens
ggttagtacttgtcc

SEQ ID NO: 1010797 - DNA, 15 bp, Homo sapiens
aggttagtacttgtc

SEQ ID NO: 1010798 - DNA, 15 bp, Homo sapiens
gaggttagtacttgt

SEQ ID NO: 1010799 - DNA, 15 bp, Homo sapiens
agaggttagtacttg

SEQ ID NO: 1010800 - DNA, 15 bp, Homo sapiens
gagaggttagtactt

SEQ ID NO: 1010801 - DNA, 15 bp, Homo sapiens
ggagaggttagtact

SEQ ID NO: 1010802 - DNA, 15 bp, Homo sapiens
aggagaggttagtac

SEQ ID NO: 1010803 - DNA, 15 bp, Homo sapiens
gaggagaggttagta

SEQ ID NO: 1010804 - DNA, 15 bp, Homo sapiens
agaggagaggttagt

SEQ ID NO: 1010805 - DNA, 15 bp, Homo sapiens
gagaggagaggttag

SEQ ID NO: 1010806 - DNA, 15 bp, Homo sapiens
agagaggagaggtta

SEQ ID NO: 1010807 - DNA, 15 bp, Homo sapiens
tagagaggagaggtt

SEQ ID NO: 1010808 - DNA, 15 bp, Homo sapiens
ctagagaggagaggt

SEQ ID NO: 1010809 - DNA, 15 bp, Homo sapiens
tctagagaggagagg

SEQ ID NO: 1010810 - DNA, 15 bp, Homo sapiens
ctctagagaggagag

SEQ ID NO: 1010811 - DNA, 15 bp, Homo sapiens
gctctagagaggaga

SEQ ID NO: 1010812 - DNA, 15 bp, Homo sapiens
ggctctagagaggag

SEQ ID NO: 1010813 - DNA, 15 bp, Homo sapiens
aggctctagagagga

SEQ ID NO: 1010814 - DNA, 15 bp, Homo sapiens
aaggctctagagagg

SEQ ID NO: 1010815 - DNA, 15 bp, Homo sapiens
caaggctctagagag

SEQ ID NO: 1010816 - DNA, 15 bp, Homo sapiens
tcaaggctctagaga

SEQ ID NO: 1010817 - DNA, 15 bp, Homo sapiens
gtcaaggctctagag

SEQ ID NO: 1010818 - DNA, 15 bp, Homo sapiens
agtcaaggctctaga

SEQ ID NO: 1010819 - DNA, 15 bp, Homo sapiens
aagtcaaggctctag

SEQ ID NO: 1010820 - DNA, 15 bp, Homo sapiens
aaagtcaaggctcta

SEQ ID NO: 1010821 - DNA, 15 bp, Homo sapiens
taaagtcaaggctct

SEQ ID NO: 1010822 - DNA, 15 bp, Homo sapiens
ataaagtcaaggctc

SEQ ID NO: 1010823 - DNA, 15 bp, Homo sapiens
tataaagtcaaggct

SEQ ID NO: 1010824 - DNA, 15 bp, Homo sapiens
gtataaagtcaaggc

SEQ ID NO: 1010825 - DNA, 15 bp, Homo sapiens
agtataaagtcaagg

SEQ ID NO: 1010826 - DNA, 15 bp, Homo sapiens
tagtataaagtcaag

SEQ ID NO: 1010827 - DNA, 15 bp, Homo sapiens
ctagtataaagtcaa

SEQ ID NO: 1010828 - DNA, 15 bp, Homo sapiens
gctagtataaagtca

SEQ ID NO: 1010829 - DNA, 15 bp, Homo sapiens
agctagtataaagtc

SEQ ID NO: 1010830 - DNA, 15 bp, Homo sapiens
gagctagtataaagt

SEQ ID NO: 1010831 - DNA, 15 bp, Homo sapiens
ggagctagtataaag

SEQ ID NO: 1010832 - DNA, 15 bp, Homo sapiens
tggagctagtataaa

SEQ ID NO: 1010833 - DNA, 15 bp, Homo sapiens
gtggagctagtataa

SEQ ID NO: 1010834 - DNA, 15 bp, Homo sapiens
tgtggagctagtata

SEQ ID NO: 1010835 - DNA, 15 bp, Homo sapiens
ttgtggagctagtat

SEQ ID NO: 1010836 - DNA, 15 bp, Homo sapiens
gttgtggagctagta

SEQ ID NO: 1010837 - DNA, 15 bp, Homo sapiens
ggttgtggagctagt

SEQ ID NO: 1010838 - DNA, 15 bp, Homo sapiens
tggttgtggagctag

SEQ ID NO: 1010839 - DNA, 15 bp, Homo sapiens
atggttgtggagcta

SEQ ID NO: 1010840 - DNA, 15 bp, Homo sapiens
gatggttgtggagct

SEQ ID NO: 1010841 - DNA, 15 bp, Homo sapiens
tgatggttgtggagc

SEQ ID NO: 1010842 - DNA, 15 bp, Homo sapiens
ttgatggttgtggag

SEQ ID NO: 1010843 - DNA, 15 bp, Homo sapiens
cttgatggttgtgga

SEQ ID NO: 1010844 - DNA, 15 bp, Homo sapiens
gcttgatggttgtgg

SEQ ID NO: 1010845 - DNA, 15 bp, Homo sapiens
ggcttgatggttgtg

SEQ ID NO: 1010846 - DNA, 15 bp, Homo sapiens
gggcttgatggttgt

SEQ ID NO: 1010847 - DNA, 15 bp, Homo sapiens
ggggcttgatggttg

SEQ ID NO: 1010848 - DNA, 15 bp, Homo sapiens
tggggcttgatggtt

SEQ ID NO: 1010849 - DNA, 15 bp, Homo sapiens
gtggggcttgatggt

SEQ ID NO: 1010850 - DNA, 15 bp, Homo sapiens
cgtggggcttgatgg

SEQ ID NO: 1010851 - DNA, 15 bp, Homo sapiens
tcgtggggcttgatg

SEQ ID NO: 1010852 - DNA, 15 bp, Homo sapiens
atcgtggggcttgat

SEQ ID NO: 1010853 - DNA, 15 bp, Homo sapiens
gatcgtggggcttga

SEQ ID NO: 1010854 - DNA, 15 bp, Homo sapiens
ggatcgtggggcttg

SEQ ID NO: 1010855 - DNA, 15 bp, Homo sapiens
cggatcgtggggctt

SEQ ID NO: 1010856 - DNA, 15 bp, Homo sapiens
gcggatcgtggggct

SEQ ID NO: 1010857 - DNA, 15 bp, Homo sapiens
cgcggatcgtggggc

SEQ ID NO: 1010858 - DNA, 15 bp, Homo sapiens
tcgcggatcgtgggg

SEQ ID NO: 1010859 - DNA, 15 bp, Homo sapiens
ttcgcggatcgtggg

SEQ ID NO: 1010860 - DNA, 15 bp, Homo sapiens
tttcgcggatcgtgg

SEQ ID NO: 1010861 - DNA, 15 bp, Homo sapiens
ctttcgcggatcgtg

SEQ ID NO: 1010862 - DNA, 15 bp, Homo sapiens
cctttcgcggatcgt

SEQ ID NO: 1010863 - DNA, 15 bp, Homo sapiens
tcctttcgcggatcg

SEQ ID NO: 1010864 - DNA, 15 bp, Homo sapiens
ttcctttcgcggatc

SEQ ID NO: 1010865 - DNA, 15 bp, Homo sapiens
attcctttcgcggat

SEQ ID NO: 1010866 - DNA, 15 bp, Homo sapiens
cattcctttcgcgga

SEQ ID NO: 1010867 - DNA, 15 bp, Homo sapiens
ccattcctttcgcgg

SEQ ID NO: 1010868 - DNA, 15 bp, Homo sapiens
accattcctttcgcg

SEQ ID NO: 1010869 - DNA, 15 bp, Homo sapiens
caccattcctttcgc

SEQ ID NO: 1010870 - DNA, 15 bp, Homo sapiens
gcaccattcctttcg

SEQ ID NO: 1010871 - DNA, 15 bp, Homo sapiens
agcaccattcctttc

SEQ ID NO: 1010872 - DNA, 15 bp, Homo sapiens
tagcaccattccttt

SEQ ID NO: 1010873 - DNA, 15 bp, Homo sapiens
gtagcaccattcctt

SEQ ID NO: 1010874 - DNA, 15 bp, Homo sapiens
tgtagcaccattcct

SEQ ID NO: 1010875 - DNA, 15 bp, Homo sapiens
ctgtagcaccattcc

SEQ ID NO: 1010876 - DNA, 15 bp, Homo sapiens
cctgtagcaccattc

SEQ ID NO: 1010877 - DNA, 15 bp, Homo sapiens
acctgtagcaccatt

SEQ ID NO: 1010878 - DNA, 15 bp, Homo sapiens
tacctgtagcaccat

SEQ ID NO: 1010879 - DNA, 15 bp, Homo sapiens
ttacctgtagcacca

SEQ ID NO: 1010880 - DNA, 15 bp, Homo sapiens
cttacctgtagcacc

SEQ ID NO: 1010881 - DNA, 15 bp, Homo sapiens
ccttacctgtagcac

SEQ ID NO: 1010882 - DNA, 15 bp, Homo sapiens
gccttacctgtagca

SEQ ID NO: 1010883 - DNA, 15 bp, Homo sapiens
cgccttacctgtagc

SEQ ID NO: 1010884 - DNA, 15 bp, Homo sapiens
ccgccttacctgtag

SEQ ID NO: 1010885 - DNA, 15 bp, Homo sapiens
cccgccttacctgta

SEQ ID NO: 1010886 - DNA, 15 bp, Homo sapiens
gcccgccttacctgt

SEQ ID NO: 1010887 - DNA, 15 bp, Homo sapiens
cgcccgccttacctg

SEQ ID NO: 1010888 - DNA, 15 bp, Homo sapiens
ccgcccgccttacct

SEQ ID NO: 1010889 - DNA, 15 bp, Homo sapiens
cccgcccgccttacc

SEQ ID NO: 1010890 - DNA, 15 bp, Homo sapiens
ccccgcccgccttac

SEQ ID NO: 1010891 - DNA, 15 bp, Homo sapiens
accccgcccgcctta

SEQ ID NO: 1010892 - DNA, 15 bp, Homo sapiens
gaccccgcccgcctt

SEQ ID NO: 1010893 - DNA, 15 bp, Homo sapiens
cgaccccgcccgcct

SEQ ID NO: 1010894 - DNA, 15 bp, Homo sapiens
ccgaccccgcccgcc

SEQ ID NO: 1010895 - DNA, 15 bp, Homo sapiens
cccgaccccgcccgc

SEQ ID NO: 1010896 - DNA, 15 bp, Homo sapiens
tcccgaccccgcccg

SEQ ID NO: 1010897 - DNA, 15 bp, Homo sapiens
atcccgaccccgccc

SEQ ID NO: 1010898 - DNA, 15 bp, Homo sapiens
catcccgaccccgcc

SEQ ID NO: 1010899 - DNA, 15 bp, Homo sapiens
gcatcccgaccccgc

SEQ ID NO: 1010900 - DNA, 15 bp, Homo sapiens
ggcatcccgaccccg

SEQ ID NO: 1010901 - DNA, 15 bp, Homo sapiens
cggcatcccgacccc

SEQ ID NO: 1010902 - DNA, 15 bp, Homo sapiens
tcggcatcccgaccc

SEQ ID NO: 1010903 - DNA, 15 bp, Homo sapiens
ctcggcatcccgacc

SEQ ID NO: 1010904 - DNA, 15 bp, Homo sapiens
tctcggcatcccgac

SEQ ID NO: 1010905 - DNA, 15 bp, Homo sapiens
gtctcggcatcccga

SEQ ID NO: 1010906 - DNA, 15 bp, Homo sapiens
ggtctcggcatcccg

SEQ ID NO: 1010907 - DNA, 15 bp, Homo sapiens
aggtctcggcatccc

SEQ ID NO: 1010908 - DNA, 15 bp, Homo sapiens
gaggtctcggcatcc

SEQ ID NO: 1010909 - DNA, 15 bp, Homo sapiens
agaggtctcggcatc

SEQ ID NO: 1010910 - DNA, 15 bp, Homo sapiens
aagaggtctcggcat

SEQ ID NO: 1010911 - DNA, 15 bp, Homo sapiens
caagaggtctcggca

SEQ ID NO: 1010912 - DNA, 15 bp, Homo sapiens
acaagaggtctcggc

SEQ ID NO: 1010913 - DNA, 15 bp, Homo sapiens
gacaagaggtctcgg

SEQ ID NO: 1010914 - DNA, 15 bp, Homo sapiens
tgacaagaggtctcg

SEQ ID NO: 1010915 - DNA, 15 bp, Homo sapiens
ttgacaagaggtctc

SEQ ID NO: 1010916 - DNA, 15 bp, Homo sapiens
attgacaagaggtct

SEQ ID NO: 1010917 - DNA, 15 bp, Homo sapiens
aattgacaagaggtc

SEQ ID NO: 1010918 - DNA, 15 bp, Homo sapiens
gaattgacaagaggt

SEQ ID NO: 1010919 - DNA, 15 bp, Homo sapiens
agaattgacaagagg

SEQ ID NO: 1010920 - DNA, 15 bp, Homo sapiens
aagaattgacaagag

SEQ ID NO: 1010921 - DNA, 15 bp, Homo sapiens
gaagaattgacaaga

SEQ ID NO: 1010922 - DNA, 15 bp, Homo sapiens
cgaagaattgacaag

SEQ ID NO: 1010923 - DNA, 15 bp, Homo sapiens
gcgaagaattgacaa

SEQ ID NO: 1010924 - DNA, 15 bp, Homo sapiens
agcgaagaattgaca

SEQ ID NO: 1010925 - DNA, 15 bp, Homo sapiens
gagcgaagaattgac

SEQ ID NO: 1010926 - DNA, 15 bp, Homo sapiens
cgagcgaagaattga

SEQ ID NO: 1010927 - DNA, 15 bp, Homo sapiens
gcgagcgaagaattg

SEQ ID NO: 1010928 - DNA, 15 bp, Homo sapiens
ggcgagcgaagaatt

SEQ ID NO: 1010929 - DNA, 15 bp, Homo sapiens
gggcgagcgaagaat

SEQ ID NO: 1010930 - DNA, 15 bp, Homo sapiens
ggggcgagcgaagaa

SEQ ID NO: 1010931 - DNA, 15 bp, Homo sapiens
gggggcgagcgaaga

SEQ ID NO: 1010932 - DNA, 15 bp, Homo sapiens
tgggggcgagcgaag

SEQ ID NO: 1010933 - DNA, 15 bp, Homo sapiens
ttgggggcgagcgaa

SEQ ID NO: 1010934 - DNA, 15 bp, Homo sapiens
tttgggggcgagcga

SEQ ID NO: 1010935 - DNA, 15 bp, Homo sapiens
gtttgggggcgagcg

SEQ ID NO: 1010936 - DNA, 15 bp, Homo sapiens
cgtttgggggcgagc

SEQ ID NO: 1010937 - DNA, 15 bp, Homo sapiens
tcgtttgggggcgag

SEQ ID NO: 1010938 - DNA, 15 bp, Homo sapiens
ctcgtttgggggcga

SEQ ID NO: 1010939 - DNA, 15 bp, Homo sapiens
cctcgtttgggggcg

SEQ ID NO: 1010940 - DNA, 15 bp, Homo sapiens
tcctcgtttgggggc

SEQ ID NO: 1010941 - DNA, 15 bp, Homo sapiens
atcctcgtttggggg

SEQ ID NO: 1010942 - DNA, 15 bp, Homo sapiens
gatcctcgtttgggg

SEQ ID NO: 1010943 - DNA, 15 bp, Homo sapiens
tgatcctcgtttggg

SEQ ID NO: 1010944 - DNA, 15 bp, Homo sapiens
gtgatcctcgtttgg

SEQ ID NO: 1010945 - DNA, 15 bp, Homo sapiens
cgtgatcctcgtttg

SEQ ID NO: 1010946 - DNA, 15 bp, Homo sapiens
ccgtgatcctcgttt

SEQ ID NO: 1010947 - DNA, 15 bp, Homo sapiens
gccgtgatcctcgtt

SEQ ID NO: 1010948 - DNA, 15 bp, Homo sapiens
agccgtgatcctcgt

SEQ ID NO: 1010949 - DNA, 15 bp, Homo sapiens
cagccgtgatcctcg

SEQ ID NO: 1010950 - DNA, 15 bp, Homo sapiens
gcagccgtgatcctc

SEQ ID NO: 1010951 - DNA, 15 bp, Homo sapiens
cgcagccgtgatcct

SEQ ID NO: 1010952 - DNA, 15 bp, Homo sapiens
gcgcagccgtgatcc

SEQ ID NO: 1010953 - DNA, 15 bp, Homo sapiens
cgcgcagccgtgatc

SEQ ID NO: 1010954 - DNA, 15 bp, Homo sapiens
ccgcgcagccgtgat

SEQ ID NO: 1010955 - DNA, 15 bp, Homo sapiens
gccgcgcagccgtga

SEQ ID NO: 1010956 - DNA, 15 bp, Homo sapiens
agccgcgcagccgtg

SEQ ID NO: 1010957 - DNA, 15 bp, Homo sapiens
gagccgcgcagccgt

SEQ ID NO: 1010958 - DNA, 15 bp, Homo sapiens
agagccgcgcagccg

SEQ ID NO: 1010959 - DNA, 15 bp, Homo sapiens
gagagccgcgcagcc

SEQ ID NO: 1010960 - DNA, 15 bp, Homo sapiens
tgagagccgcgcagc

SEQ ID NO: 1010961 - DNA, 15 bp, Homo sapiens
gtgagagccgcgcag

SEQ ID NO: 1010962 - DNA, 15 bp, Homo sapiens
agtgagagccgcgca

SEQ ID NO: 1010963 - DNA, 15 bp, Homo sapiens
gagtgagagccgcgc

SEQ ID NO: 1010964 - DNA, 15 bp, Homo sapiens
agagtgagagccgcg

SEQ ID NO: 1010965 - DNA, 15 bp, Homo sapiens
tagagtgagagccgc

SEQ ID NO: 1010966 - DNA, 15 bp, Homo sapiens
ttagagtgagagccg

SEQ ID NO: 1010967 - DNA, 15 bp, Homo sapiens
gttagagtgagagcc

SEQ ID NO: 1010968 - DNA, 15 bp, Homo sapiens
agttagagtgagagc

SEQ ID NO: 1010969 - DNA, 15 bp, Homo sapiens
tagttagagtgagag

SEQ ID NO: 1010970 - DNA, 15 bp, Homo sapiens
atagttagagtgaga

SEQ ID NO: 1010971 - DNA, 15 bp, Homo sapiens
gatagttagagtgag

SEQ ID NO: 1010972 - DNA, 15 bp, Homo sapiens
tgatagttagagtga

SEQ ID NO: 1010973 - DNA, 15 bp, Homo sapiens
ttgatagttagagtg

SEQ ID NO: 1010974 - DNA, 15 bp, Homo sapiens
cttgatagttagagt

SEQ ID NO: 1010975 - DNA, 15 bp, Homo sapiens
tcttgatagttagag

SEQ ID NO: 1010976 - DNA, 15 bp, Homo sapiens
gtcttgatagttaga

SEQ ID NO: 1010977 - DNA, 15 bp, Homo sapiens
tgtcttgatagttag

SEQ ID NO: 1010978 - DNA, 15 bp, Homo sapiens
ctgtcttgatagtta

SEQ ID NO: 1010979 - DNA, 15 bp, Homo sapiens
tctgtcttgatagtt

SEQ ID NO: 1010980 - DNA, 15 bp, Homo sapiens
atctgtcttgatagt

SEQ ID NO: 1010981 - DNA, 15 bp, Homo sapiens
aatctgtcttgatag

SEQ ID NO: 1010982 - DNA, 15 bp, Homo sapiens
gaatctgtcttgata

SEQ ID NO: 1010983 - DNA, 15 bp, Homo sapiens
agaatctgtcttgat

SEQ ID NO: 1010984 - DNA, 15 bp, Homo sapiens
cagaatctgtcttga

SEQ ID NO: 1010985 - DNA, 15 bp, Homo sapiens
tcagaatctgtcttg

SEQ ID NO: 1010986 - DNA, 15 bp, Homo sapiens
atcagaatctgtctt

SEQ ID NO: 1010987 - DNA, 15 bp, Homo sapiens
tatcagaatctgtct

SEQ ID NO: 1010988 - DNA, 15 bp, Homo sapiens
gtatcagaatctgtc

SEQ ID NO: 1010989 - DNA, 15 bp, Homo sapiens
agtatcagaatctgt

SEQ ID NO: 1010990 - DNA, 15 bp, Homo sapiens
tagtatcagaatctg

SEQ ID NO: 1010991 - DNA, 15 bp, Homo sapiens
ttagtatcagaatct

SEQ ID NO: 1010992 - DNA, 15 bp, Homo sapiens
tttagtatcagaatc

SEQ ID NO: 1010993 - DNA, 15 bp, Homo sapiens
gtttagtatcagaat

SEQ ID NO: 1010994 - DNA, 15 bp, Homo sapiens
tgtttagtatcagaa

SEQ ID NO: 1010995 - DNA, 15 bp, Homo sapiens
ttgtttagtatcaga

SEQ ID NO: 1010996 - DNA, 15 bp, Homo sapiens
cttgtttagtatcag

SEQ ID NO: 1010997 - DNA, 15 bp, Homo sapiens
ccttgtttagtatca

SEQ ID NO: 1010998 - DNA, 15 bp, Homo sapiens
gccttgtttagtatc

SEQ ID NO: 1010999 - DNA, 15 bp, Homo sapiens
agccttgtttagtat

SEQ ID NO: 1011000 - DNA, 15 bp, Homo sapiens
tagccttgtttagta

SEQ ID NO: 1011001 - DNA, 15 bp, Homo sapiens
ttagccttgtttagt

SEQ ID NO: 1011002 - DNA, 15 bp, Homo sapiens
tttagccttgtttag

SEQ ID NO: 1011003 - DNA, 15 bp, Homo sapiens
ttttagccttgttta

SEQ ID NO: 1011004 - DNA, 15 bp, Homo sapiens
gttttagccttgttt

SEQ ID NO: 1011005 - DNA, 15 bp, Homo sapiens
agttttagccttgtt

SEQ ID NO: 1011006 - DNA, 15 bp, Homo sapiens
aagttttagccttgt

SEQ ID NO: 1011007 - DNA, 15 bp, Homo sapiens
aaagttttagccttg

SEQ ID NO: 1011008 - DNA, 15 bp, Homo sapiens
aaaagttttagcctt

SEQ ID NO: 1011009 - DNA, 15 bp, Homo sapiens
aaaaagttttagcct

SEQ ID NO: 1011010 - DNA, 15 bp, Homo sapiens
caaaaagttttagcc

SEQ ID NO: 1011011 - DNA, 15 bp, Homo sapiens
acaaaaagttttagc

SEQ ID NO: 1011012 - DNA, 15 bp, Homo sapiens
aacaaaaagttttag

SEQ ID NO: 1011013 - DNA, 15 bp, Homo sapiens
aaacaaaaagtttta

SEQ ID NO: 1011014 - DNA, 15 bp, Homo sapiens
aaaacaaaaagtttt

SEQ ID NO: 1011015 - DNA, 15 bp, Homo sapiens
aaaaacaaaaagttt

SEQ ID NO: 1011016 - DNA, 15 bp, Homo sapiens
aaaaaacaaaaagtt

SEQ ID NO: 1011017 - DNA, 15 bp, Homo sapiens
gaaaaaacaaaaagt

SEQ ID NO: 1011018 - DNA, 15 bp, Homo sapiens
ggaaaaaacaaaaag

SEQ ID NO: 1011019 - DNA, 15 bp, Homo sapiens
aggaaaaaacaaaaa

SEQ ID NO: 1011020 - DNA, 15 bp, Homo sapiens
aaggaaaaaacaaaa

SEQ ID NO: 1011021 - DNA, 15 bp, Homo sapiens
gaaggaaaaaacaaa

SEQ ID NO: 1011022 - DNA, 15 bp, Homo sapiens
agaaggaaaaaacaa

SEQ ID NO: 1011023 - DNA, 15 bp, Homo sapiens
aagaaggaaaaaaca

SEQ ID NO: 1011024 - DNA, 15 bp, Homo sapiens
taagaaggaaaaaac

SEQ ID NO: 1011025 - DNA, 15 bp, Homo sapiens
gtaagaaggaaaaaa

SEQ ID NO: 1011026 - DNA, 15 bp, Homo sapiens
tgtaagaaggaaaaa

SEQ ID NO: 1011027 - DNA, 15 bp, Homo sapiens
ctgtaagaaggaaaa

SEQ ID NO: 1011028 - DNA, 15 bp, Homo sapiens
tctgtaagaaggaaa

SEQ ID NO: 1011029 - DNA, 15 bp, Homo sapiens
ttctgtaagaaggaa

SEQ ID NO: 1011030 - DNA, 15 bp, Homo sapiens
cttctgtaagaagga

SEQ ID NO: 1011031 - DNA, 15 bp, Homo sapiens
ccttctgtaagaagg

SEQ ID NO: 1011032 - DNA, 15 bp, Homo sapiens
gccttctgtaagaag

SEQ ID NO: 1011033 - DNA, 15 bp, Homo sapiens
tgccttctgtaagaa

SEQ ID NO: 1011034 - DNA, 15 bp, Homo sapiens
gtgccttctgtaaga

SEQ ID NO: 1011035 - DNA, 15 bp, Homo sapiens
agtgccttctgtaag

SEQ ID NO: 1011036 - DNA, 15 bp, Homo sapiens
tagtgccttctgtaa

SEQ ID NO: 1011037 - DNA, 15 bp, Homo sapiens
gtagtgccttctgta

SEQ ID NO: 1011038 - DNA, 15 bp, Homo sapiens
ggtagtgccttctgt

SEQ ID NO: 1011039 - DNA, 15 bp, Homo sapiens
gggtagtgccttctg

SEQ ID NO: 1011040 - DNA, 15 bp, Homo sapiens
agggtagtgccttct

SEQ ID NO: 1011041 - DNA, 15 bp, Homo sapiens
cagggtagtgccttc

SEQ ID NO: 1011042 - DNA, 15 bp, Homo sapiens
ccagggtagtgcctt

SEQ ID NO: 1011043 - DNA, 15 bp, Homo sapiens
tccagggtagtgcct

SEQ ID NO: 1011044 - DNA, 15 bp, Homo sapiens
gtccagggtagtgcc

SEQ ID NO: 1011045 - DNA, 15 bp, Homo sapiens
cgtccagggtagtgc

SEQ ID NO: 1011046 - DNA, 15 bp, Homo sapiens
gcgtccagggtagtg

SEQ ID NO: 1011047 - DNA, 15 bp, Homo sapiens
ggcgtccagggtagt

SEQ ID NO: 1011048 - DNA, 15 bp, Homo sapiens
cggcgtccagggtag

SEQ ID NO: 1011049 - DNA, 15 bp, Homo sapiens
gcggcgtccagggta

SEQ ID NO: 1011050 - DNA, 15 bp, Homo sapiens
agcggcgtccagggt

SEQ ID NO: 1011051 - DNA, 15 bp, Homo sapiens
aagcggcgtccaggg

SEQ ID NO: 1011052 - DNA, 15 bp, Homo sapiens
caagcggcgtccagg

SEQ ID NO: 1011053 - DNA, 15 bp, Homo sapiens
gcaagcggcgtccag

SEQ ID NO: 1011054 - DNA, 15 bp, Homo sapiens
tgcaagcggcgtcca

SEQ ID NO: 1011055 - DNA, 15 bp, Homo sapiens
ttgcaagcggcgtcc

SEQ ID NO: 1011056 - DNA, 15 bp, Homo sapiens
tttgcaagcggcgtc

SEQ ID NO: 1011057 - DNA, 15 bp, Homo sapiens
gtttgcaagcggcgt

SEQ ID NO: 1011058 - DNA, 15 bp, Homo sapiens
cgtttgcaagcggcg

SEQ ID NO: 1011059 - DNA, 15 bp, Homo sapiens
gcgtttgcaagcggc

SEQ ID NO: 1011060 - DNA, 15 bp, Homo sapiens
ggcgtttgcaagcgg

SEQ ID NO: 1011061 - DNA, 15 bp, Homo sapiens
aggcgtttgcaagcg

SEQ ID NO: 1011062 - DNA, 15 bp, Homo sapiens
caggcgtttgcaagc

SEQ ID NO: 1011063 - DNA, 15 bp, Homo sapiens
tcaggcgtttgcaag

SEQ ID NO: 1011064 - DNA, 15 bp, Homo sapiens
ttcaggcgtttgcaa

SEQ ID NO: 1011065 - DNA, 15 bp, Homo sapiens
cttcaggcgtttgca

SEQ ID NO: 1011066 - DNA, 15 bp, Homo sapiens
tcttcaggcgtttgc

SEQ ID NO: 1011067 - DNA, 15 bp, Homo sapiens
ctcttcaggcgtttg

SEQ ID NO: 1011068 - DNA, 15 bp, Homo sapiens
tctcttcaggcgttt

SEQ ID NO: 1011069 - DNA, 15 bp, Homo sapiens
ttctcttcaggcgtt

SEQ ID NO: 1011070 - DNA, 15 bp, Homo sapiens
cttctcttcaggcgt

SEQ ID NO: 1011071 - DNA, 15 bp, Homo sapiens
ccttctcttcaggcg

SEQ ID NO: 1011072 - DNA, 15 bp, Homo sapiens
gccttctcttcaggc

SEQ ID NO: 1011073 - DNA, 15 bp, Homo sapiens
tgccttctcttcagg

SEQ ID NO: 1011074 - DNA, 15 bp, Homo sapiens
ctgccttctcttcag

SEQ ID NO: 1011075 - DNA, 15 bp, Homo sapiens
cctgccttctcttca

SEQ ID NO: 1011076 - DNA, 15 bp, Homo sapiens
ccctgccttctcttc

SEQ ID NO: 1011077 - DNA, 15 bp, Homo sapiens
accctgccttctctt

SEQ ID NO: 1011078 - DNA, 15 bp, Homo sapiens
caccctgccttctct

SEQ ID NO: 1011079 - DNA, 15 bp, Homo sapiens
acaccctgccttctc

SEQ ID NO: 1011080 - DNA, 15 bp, Homo sapiens
aacaccctgccttct

SEQ ID NO: 1011081 - DNA, 15 bp, Homo sapiens
gaacaccctgccttc

SEQ ID NO: 1011082 - DNA, 15 bp, Homo sapiens
ggaacaccctgcctt

SEQ ID NO: 1011083 - DNA, 15 bp, Homo sapiens
gggaacaccctgcct

SEQ ID NO: 1011084 - DNA, 15 bp, Homo sapiens
tgggaacaccctgcc

SEQ ID NO: 1011085 - DNA, 15 bp, Homo sapiens
gtgggaacaccctgc

SEQ ID NO: 1011086 - DNA, 15 bp, Homo sapiens
agtgggaacaccctg

SEQ ID NO: 1011087 - DNA, 15 bp, Homo sapiens
aagtgggaacaccct

SEQ ID NO: 1011088 - DNA, 15 bp, Homo sapiens
aaagtgggaacaccc

SEQ ID NO: 1011089 - DNA, 15 bp, Homo sapiens
aaaagtgggaacacc

SEQ ID NO: 1011090 - DNA, 15 bp, Homo sapiens
aaaaagtgggaacac

SEQ ID NO: 1011091 - DNA, 15 bp, Homo sapiens
gaaaaagtgggaaca

SEQ ID NO: 1011092 - DNA, 15 bp, Homo sapiens
tgaaaaagtgggaac

SEQ ID NO: 1011093 - DNA, 15 bp, Homo sapiens
ctgaaaaagtgggaa

SEQ ID NO: 1011094 - DNA, 15 bp, Homo sapiens
tctgaaaaagtggga

SEQ ID NO: 1011095 - DNA, 15 bp, Homo sapiens
ttctgaaaaagtggg

SEQ ID NO: 1011096 - DNA, 15 bp, Homo sapiens
attctgaaaaagtgg

SEQ ID NO: 1011097 - DNA, 15 bp, Homo sapiens
cattctgaaaaagtg

SEQ ID NO: 1011098 - DNA, 15 bp, Homo sapiens
ccattctgaaaaagt

SEQ ID NO: 1011099 - DNA, 15 bp, Homo sapiens
cccattctgaaaaag

SEQ ID NO: 1011100 - DNA, 15 bp, Homo sapiens
tcccattctgaaaaa

SEQ ID NO: 1011101 - DNA, 15 bp, Homo sapiens
gtcccattctgaaaa

SEQ ID NO: 1011102 - DNA, 15 bp, Homo sapiens
ggtcccattctgaaa

SEQ ID NO: 1011103 - DNA, 15 bp, Homo sapiens
tggtcccattctgaa

SEQ ID NO: 1011104 - DNA, 15 bp, Homo sapiens
ctggtcccattctga

SEQ ID NO: 1011105 - DNA, 15 bp, Homo sapiens
cctggtcccattctg

SEQ ID NO: 1011106 - DNA, 15 bp, Homo sapiens
gcctggtcccattct

SEQ ID NO: 1011107 - DNA, 15 bp, Homo sapiens
ggcctggtcccattc

SEQ ID NO: 1011108 - DNA, 15 bp, Homo sapiens
gggcctggtcccatt

SEQ ID NO: 1011109 - DNA, 15 bp, Homo sapiens
agggcctggtcccat

SEQ ID NO: 1011110 - DNA, 15 bp, Homo sapiens
tagggcctggtccca

SEQ ID NO: 1011111 - DNA, 15 bp, Homo sapiens
gtagggcctggtccc

SEQ ID NO: 1011112 - DNA, 15 bp, Homo sapiens
cgtagggcctggtcc

SEQ ID NO: 1011113 - DNA, 15 bp, Homo sapiens
ccgtagggcctggtc

SEQ ID NO: 1011114 - DNA, 15 bp, Homo sapiens
gccgtagggcctggt

SEQ ID NO: 1011115 - DNA, 15 bp, Homo sapiens
ggccgtagggcctgg

SEQ ID NO: 1011116 - DNA, 15 bp, Homo sapiens
gggccgtagggcctg

SEQ ID NO: 1011117 - DNA, 15 bp, Homo sapiens
ggggccgtagggcct

SEQ ID NO: 1011118 - DNA, 15 bp, Homo sapiens
tggggccgtagggcc

SEQ ID NO: 1011119 - DNA, 15 bp, Homo sapiens
ttggggccgtagggc

SEQ ID NO: 1011120 - DNA, 15 bp, Homo sapiens
attggggccgtaggg

SEQ ID NO: 1011121 - DNA, 15 bp, Homo sapiens
tattggggccgtagg

SEQ ID NO: 1011122 - DNA, 15 bp, Homo sapiens
ctattggggccgtag

SEQ ID NO: 1011123 - DNA, 15 bp, Homo sapiens
gctattggggccgta

SEQ ID NO: 1011124 - DNA, 15 bp, Homo sapiens
tgctattggggccgt

SEQ ID NO: 1011125 - DNA, 15 bp, Homo sapiens
ctgctattggggccg

SEQ ID NO: 1011126 - DNA, 15 bp, Homo sapiens
tctgctattggggcc

SEQ ID NO: 1011127 - DNA, 15 bp, Homo sapiens
ttctgctattggggc

SEQ ID NO: 1011128 - DNA, 15 bp, Homo sapiens
cttctgctattgggg

SEQ ID NO: 1011129 - DNA, 15 bp, Homo sapiens
gcttctgctattggg

SEQ ID NO: 1011130 - DNA, 15 bp, Homo sapiens
agcttctgctattgg

SEQ ID NO: 1011131 - DNA, 15 bp, Homo sapiens
aagcttctgctattg

SEQ ID NO: 1011132 - DNA, 15 bp, Homo sapiens
gaagcttctgctatt

SEQ ID NO: 1011133 - DNA, 15 bp, Homo sapiens
agaagcttctgctat

SEQ ID NO: 1011134 - DNA, 15 bp, Homo sapiens
gagaagcttctgcta

SEQ ID NO: 1011135 - DNA, 15 bp, Homo sapiens
agagaagcttctgct

SEQ ID NO: 1011136 - DNA, 15 bp, Homo sapiens
tagagaagcttctgc

SEQ ID NO: 1011137 - DNA, 15 bp, Homo sapiens
ttagagaagcttctg

SEQ ID NO: 1011138 - DNA, 15 bp, Homo sapiens
gttagagaagcttct

SEQ ID NO: 1011139 - DNA, 15 bp, Homo sapiens
ggttagagaagcttc

SEQ ID NO: 1011140 - DNA, 15 bp, Homo sapiens
gggttagagaagctt

SEQ ID NO: 1011141 - DNA, 15 bp, Homo sapiens
tgggttagagaagct

SEQ ID NO: 1011142 - DNA, 15 bp, Homo sapiens
ctgggttagagaagc

SEQ ID NO: 1011143 - DNA, 15 bp, Homo sapiens
cctgggttagagaag

SEQ ID NO: 1011144 - DNA, 15 bp, Homo sapiens
tcctgggttagagaa

SEQ ID NO: 1011145 - DNA, 15 bp, Homo sapiens
gtcctgggttagaga

SEQ ID NO: 1011146 - DNA, 15 bp, Homo sapiens
agtcctgggttagag

SEQ ID NO: 1011147 - DNA, 15 bp, Homo sapiens
cagtcctgggttaga

SEQ ID NO: 1011148 - DNA, 15 bp, Homo sapiens
gcagtcctgggttag

SEQ ID NO: 1011149 - DNA, 15 bp, Homo sapiens
agcagtcctgggtta

SEQ ID NO: 1011150 - DNA, 15 bp, Homo sapiens
gagcagtcctgggtt

SEQ ID NO: 1011151 - DNA, 15 bp, Homo sapiens
ggagcagtcctgggt

SEQ ID NO: 1011152 - DNA, 15 bp, Homo sapiens
gggagcagtcctggg

SEQ ID NO: 1011153 - DNA, 15 bp, Homo sapiens
ggggagcagtcctgg

SEQ ID NO: 1011154 - DNA, 15 bp, Homo sapiens
aggggagcagtcctg

SEQ ID NO: 1011155 - DNA, 15 bp, Homo sapiens
gaggggagcagtcct

SEQ ID NO: 1011156 - DNA, 15 bp, Homo sapiens
tgaggggagcagtcc

SEQ ID NO: 1011157 - DNA, 15 bp, Homo sapiens
ttgaggggagcagtc

SEQ ID NO: 1011158 - DNA, 15 bp, Homo sapiens
attgaggggagcagt

SEQ ID NO: 1011159 - DNA, 15 bp, Homo sapiens
aattgaggggagcag

SEQ ID NO: 1011160 - DNA, 15 bp, Homo sapiens
gaattgaggggagca

SEQ ID NO: 1011161 - DNA, 15 bp, Homo sapiens
ggaattgaggggagc

SEQ ID NO: 1011162 - DNA, 15 bp, Homo sapiens
aggaattgaggggag

SEQ ID NO: 1011163 - DNA, 15 bp, Homo sapiens
gaggaattgagggga

SEQ ID NO: 1011164 - DNA, 15 bp, Homo sapiens
ggaggaattgagggg

SEQ ID NO: 1011165 - DNA, 15 bp, Homo sapiens
gggaggaattgaggg

SEQ ID NO: 1011166 - DNA, 15 bp, Homo sapiens
tgggaggaattgagg

SEQ ID NO: 1011167 - DNA, 15 bp, Homo sapiens
ttgggaggaattgag

SEQ ID NO: 1011168 - DNA, 15 bp, Homo sapiens
attgggaggaattga

SEQ ID NO: 1011169 - DNA, 15 bp, Homo sapiens
tattgggaggaattg

SEQ ID NO: 1011170 - DNA, 15 bp, Homo sapiens
atattgggaggaatt

SEQ ID NO: 1011171 - DNA, 15 bp, Homo sapiens
catattgggaggaat

SEQ ID NO: 1011172 - DNA, 15 bp, Homo sapiens
gcatattgggaggaa

SEQ ID NO: 1011173 - DNA, 15 bp, Homo sapiens
agcatattgggagga

SEQ ID NO: 1011174 - DNA, 15 bp, Homo sapiens
tcagcatattgggag

SEQ ID NO: 1011175 - DNA, 15 bp, Homo sapiens
gtcagcatattggga

SEQ ID NO: 1011176 - DNA, 15 bp, Homo sapiens
ggtcagcatattggg

SEQ ID NO: 1011177 - DNA, 15 bp, Homo sapiens
cggtcagcatattgg

SEQ ID NO: 1011178 - DNA, 15 bp, Homo sapiens
tcggtcagcatattg

SEQ ID NO: 1011179 - DNA, 15 bp, Homo sapiens
gtcggtcagcatatt

SEQ ID NO: 1011180 - DNA, 15 bp, Homo sapiens
tgtcggtcagcatat

SEQ ID NO: 1011181 - DNA, 15 bp, Homo sapiens
ctgtcggtcagcata

SEQ ID NO: 1011182 - DNA, 15 bp, Homo sapiens
gctgtcggtcagcat

SEQ ID NO: 1011183 - DNA, 15 bp, Homo sapiens
agctgtcggtcagca

SEQ ID NO: 1011184 - DNA, 15 bp, Homo sapiens
gagctgtcggtcagc

SEQ ID NO: 1011185 - DNA, 15 bp, Homo sapiens
cgagctgtcggtcag

SEQ ID NO: 1011186 - DNA, 15 bp, Homo sapiens
tcgagctgtcggtca

SEQ ID NO: 1011187 - DNA, 15 bp, Homo sapiens
gtcgagctgtcggtc

SEQ ID NO: 1011188 - DNA, 15 bp, Homo sapiens
ggtcgagctgtcggt

SEQ ID NO: 1011189 - DNA, 15 bp, Homo sapiens
aggtcgagctgtcgg

SEQ ID NO: 1011190 - DNA, 15 bp, Homo sapiens
gaggtcgagctgtcg

SEQ ID NO: 1011191 - DNA, 15 bp, Homo sapiens
tgaggtcgagctgtc

SEQ ID NO: 1011192 - DNA, 15 bp, Homo sapiens
gtgaggtcgagctgt

SEQ ID NO: 1011193 - DNA, 15 bp, Homo sapiens
ggtgaggtcgagctg

SEQ ID NO: 1011194 - DNA, 15 bp, Homo sapiens
aggtgaggtcgagct

SEQ ID NO: 1011195 - DNA, 15 bp, Homo sapiens
caggtgaggtcgagc

SEQ ID NO: 1011196 - DNA, 15 bp, Homo sapiens
ccaggtgaggtcgag

SEQ ID NO: 1011197 - DNA, 15 bp, Homo sapiens
cccaggtgaggtcga

SEQ ID NO: 1011198 - DNA, 15 bp, Homo sapiens
ccccaggtgaggtcg

SEQ ID NO: 1011199 - DNA, 15 bp, Homo sapiens
cccccaggtgaggtc

SEQ ID NO: 1011200 - DNA, 15 bp, Homo sapiens
gcccccaggtgaggt

SEQ ID NO: 1011201 - DNA, 15 bp, Homo sapiens
cgcccccaggtgagg

SEQ ID NO: 1011202 - DNA, 15 bp, Homo sapiens
accgcccccaggtga

SEQ ID NO: 1011203 - DNA, 15 bp, Homo sapiens
aaccgcccccaggtg

SEQ ID NO: 1011204 - DNA, 15 bp, Homo sapiens
gaaccgcccccaggt

SEQ ID NO: 1011205 - DNA, 15 bp, Homo sapiens
ggaaccgcccccagg

SEQ ID NO: 1011206 - DNA, 15 bp, Homo sapiens
cggaaccgcccccag

SEQ ID NO: 1011207 - DNA, 15 bp, Homo sapiens
gcggaaccgccccca

SEQ ID NO: 1011208 - DNA, 15 bp, Homo sapiens
ggcggaaccgccccc

SEQ ID NO: 1011209 - DNA, 15 bp, Homo sapiens
tggcggaaccgcccc

SEQ ID NO: 1011210 - DNA, 15 bp, Homo sapiens
ctggcggaaccgccc

SEQ ID NO: 1011211 - DNA, 15 bp, Homo sapiens
cctggcggaaccgcc

SEQ ID NO: 1011212 - DNA, 15 bp, Homo sapiens
ccctggcggaaccgc

SEQ ID NO: 1011213 - DNA, 15 bp, Homo sapiens
cccctggcggaaccg

SEQ ID NO: 1011214 - DNA, 15 bp, Homo sapiens
tcccctggcggaacc

SEQ ID NO: 1011215 - DNA, 15 bp, Homo sapiens
atcccctggcggaac

SEQ ID NO: 1011216 - DNA, 15 bp, Homo sapiens
catcccctggcggaa

SEQ ID NO: 1011217 - DNA, 15 bp, Homo sapiens
ccatcccctggcgga

SEQ ID NO: 1011218 - DNA, 15 bp, Homo sapiens
gccatcccctggcgg

SEQ ID NO: 1011219 - DNA, 15 bp, Homo sapiens
agccatcccctggcg

SEQ ID NO: 1011220 - DNA, 15 bp, Homo sapiens
aagccatcccctggc

SEQ ID NO: 1011221 - DNA, 15 bp, Homo sapiens
taagccatcccctgg

SEQ ID NO: 1011222 - DNA, 15 bp, Homo sapiens
ctaagccatcccctg

SEQ ID NO: 1011223 - DNA, 15 bp, Homo sapiens
cctaagccatcccct

SEQ ID NO: 1011224 - DNA, 15 bp, Homo sapiens
tcctaagccatcccc

SEQ ID NO: 1011225 - DNA, 15 bp, Homo sapiens
ttcctaagccatccc

SEQ ID NO: 1011226 - DNA, 15 bp, Homo sapiens
tttcctaagccatcc

SEQ ID NO: 1011227 - DNA, 15 bp, Homo sapiens
ttttcctaagccatc

SEQ ID NO: 1011228 - DNA, 15 bp, Homo sapiens
gttttcctaagccat

SEQ ID NO: 1011229 - DNA, 15 bp, Homo sapiens
ggttttcctaagcca

SEQ ID NO: 1011230 - DNA, 15 bp, Homo sapiens
aggttttcctaagcc

SEQ ID NO: 1011231 - DNA, 15 bp, Homo sapiens
gaggttttcctaagc

SEQ ID NO: 1011232 - DNA, 15 bp, Homo sapiens
tgaggttttcctaag

SEQ ID NO: 1011233 - DNA, 15 bp, Homo sapiens
ctgaggttttcctaa

SEQ ID NO: 1011234 - DNA, 15 bp, Homo sapiens
cctgaggttttccta

SEQ ID NO: 1011235 - DNA, 15 bp, Homo sapiens
tcctgaggttttcct

SEQ ID NO: 1011236 - DNA, 15 bp, Homo sapiens
ttcctgaggttttcc

SEQ ID NO: 1011237 - DNA, 15 bp, Homo sapiens
cttcctgaggttttc

SEQ ID NO: 1011238 - DNA, 15 bp, Homo sapiens
tcttcctgaggtttt

SEQ ID NO: 1011239 - DNA, 15 bp, Homo sapiens
ctcttcctgaggttt

SEQ ID NO: 1011240 - DNA, 15 bp, Homo sapiens
gctcttcctgaggtt

SEQ ID NO: 1011241 - DNA, 15 bp, Homo sapiens
tgctcttcctgaggt

SEQ ID NO: 1011242 - DNA, 15 bp, Homo sapiens
ctgctcttcctgagg

SEQ ID NO: 1011243 - DNA, 15 bp, Homo sapiens
gctgctcttcctgag

SEQ ID NO: 1011244 - DNA, 15 bp, Homo sapiens
ggctgctcttcctga

SEQ ID NO: 1011245 - DNA, 15 bp, Homo sapiens
gggctgctcttcctg

SEQ ID NO: 1011246 - DNA, 15 bp, Homo sapiens
tgggctgctcttcct

SEQ ID NO: 1011247 - DNA, 15 bp, Homo sapiens
ctgggctgctcttcc

SEQ ID NO: 1011248 - DNA, 15 bp, Homo sapiens
gctgggctgctcttc

SEQ ID NO: 1011249 - DNA, 15 bp, Homo sapiens
cgctgggctgctctt

SEQ ID NO: 1011250 - DNA, 15 bp, Homo sapiens
tcgctgggctgctct

SEQ ID NO: 1011251 - DNA, 15 bp, Homo sapiens
ctcgctgggctgctc

SEQ ID NO: 1011252 - DNA, 15 bp, Homo sapiens
actcgctgggctgct

SEQ ID NO: 1011253 - DNA, 15 bp, Homo sapiens
cactcgctgggctgc

SEQ ID NO: 1011254 - DNA, 15 bp, Homo sapiens
tcactcgctgggctg

SEQ ID NO: 1011255 - DNA, 15 bp, Homo sapiens
gtcactcgctgggct

SEQ ID NO: 1011256 - DNA, 15 bp, Homo sapiens
cgtcactcgctgggc

SEQ ID NO: 1011257 - DNA, 15 bp, Homo sapiens
gcgtcactcgctggg

SEQ ID NO: 1011258 - DNA, 15 bp, Homo sapiens
ggcgtcactcgctgg

SEQ ID NO: 1011259 - DNA, 15 bp, Homo sapiens
tggcgtcactcgctg

SEQ ID NO: 1011260 - DNA, 15 bp, Homo sapiens
gtggcgtcactcgct

SEQ ID NO: 1011261 - DNA, 15 bp, Homo sapiens
agtggcgtcactcgc

SEQ ID NO: 1011262 - DNA, 15 bp, Homo sapiens
cagtggcgtcactcg

SEQ ID NO: 1011263 - DNA, 15 bp, Homo sapiens
tcagtggcgtcactc

SEQ ID NO: 1011264 - DNA, 15 bp, Homo sapiens
ttcagtggcgtcact

SEQ ID NO: 1011265 - DNA, 15 bp, Homo sapiens
tttcagtggcgtcac

SEQ ID NO: 1011266 - DNA, 15 bp, Homo sapiens
gtttcagtggcgtca

SEQ ID NO: 1011267 - DNA, 15 bp, Homo sapiens
ggtttcagtggcgtc

SEQ ID NO: 1011268 - DNA, 15 bp, Homo sapiens
tggtttcagtggcgt

SEQ ID NO: 1011269 - DNA, 15 bp, Homo sapiens
gtggtttcagtggcg

SEQ ID NO: 1011270 - DNA, 15 bp, Homo sapiens
tgtggtttcagtggc

SEQ ID NO: 1011271 - DNA, 15 bp, Homo sapiens
ctgtggtttcagtgg

SEQ ID NO: 1011272 - DNA, 15 bp, Homo sapiens
actgtggtttcagtg

SEQ ID NO: 1011273 - DNA, 15 bp, Homo sapiens
gactgtggtttcagt

SEQ ID NO: 1011274 - DNA, 15 bp, Homo sapiens
tgactgtggtttcag

SEQ ID NO: 1011275 - DNA, 15 bp, Homo sapiens
atgactgtggtttca

SEQ ID NO: 1011276 - DNA, 15 bp, Homo sapiens
catgactgtggtttc

SEQ ID NO: 1011277 - DNA, 15 bp, Homo sapiens
ccatgactgtggttt

SEQ ID NO: 1011278 - DNA, 15 bp, Homo sapiens
accatgactgtggtt

SEQ ID NO: 1011279 - DNA, 15 bp, Homo sapiens
gaccatgactgtggt

SEQ ID NO: 1011280 - DNA, 15 bp, Homo sapiens
agaccatgactgtgg

SEQ ID NO: 1011281 - DNA, 15 bp, Homo sapiens
tagaccatgactgtg

SEQ ID NO: 1011282 - DNA, 15 bp, Homo sapiens
gtagaccatgactgt

SEQ ID NO: 1011283 - DNA, 15 bp, Homo sapiens
ggtagaccatgactg

SEQ ID NO: 1011284 - DNA, 15 bp, Homo sapiens
aggtagaccatgact

SEQ ID NO: 1011285 - DNA, 15 bp, Homo sapiens
gaggtagaccatgac

SEQ ID NO: 1011286 - DNA, 15 bp, Homo sapiens
cgaggtagaccatga

SEQ ID NO: 1011287 - DNA, 15 bp, Homo sapiens
acgaggtagaccatg

SEQ ID NO: 1011288 - DNA, 15 bp, Homo sapiens
aacgaggtagaccat

SEQ ID NO: 1011289 - DNA, 15 bp, Homo sapiens
gaacgaggtagacca

SEQ ID NO: 1011290 - DNA, 15 bp, Homo sapiens
tgaacgaggtagacc

SEQ ID NO: 1011291 - DNA, 15 bp, Homo sapiens
ctgaacgaggtagac

SEQ ID NO: 1011292 - DNA, 15 bp, Homo sapiens
cctgaacgaggtaga

SEQ ID NO: 1011293 - DNA, 15 bp, Homo sapiens
gcctgaacgaggtag

SEQ ID NO: 1011294 - DNA, 15 bp, Homo sapiens
ggcctgaacgaggta

SEQ ID NO: 1011295 - DNA, 15 bp, Homo sapiens
tggcctgaacgaggt

SEQ ID NO: 1011296 - DNA, 15 bp, Homo sapiens
gtggcctgaacgagg

SEQ ID NO: 1011297 - DNA, 15 bp, Homo sapiens
ggtggcctgaacgag

SEQ ID NO: 1011298 - DNA, 15 bp, Homo sapiens
tggtggcctgaacga

SEQ ID NO: 1011299 - DNA, 15 bp, Homo sapiens
ctggtggcctgaacg

SEQ ID NO: 1011300 - DNA, 15 bp, Homo sapiens
actggtggcctgaac

SEQ ID NO: 1011301 - DNA, 15 bp, Homo sapiens
aactggtggcctgaa

SEQ ID NO: 1011302 - DNA, 15 bp, Homo sapiens
aaactggtggcctga

SEQ ID NO: 1011303 - DNA, 15 bp, Homo sapiens
caaactggtggcctg

SEQ ID NO: 1011304 - DNA, 15 bp, Homo sapiens
gcaaactggtggcct

SEQ ID NO: 1011305 - DNA, 15 bp, Homo sapiens
tgcaaactggtggcc

SEQ ID NO: 1011306 - DNA, 15 bp, Homo sapiens
ctgcaaactggtggc

SEQ ID NO: 1011307 - DNA, 15 bp, Homo sapiens
cctgcaaactggtgg

SEQ ID NO: 1011308 - DNA, 15 bp, Homo sapiens
gcctgcaaactggtg

SEQ ID NO: 1011309 - DNA, 15 bp, Homo sapiens
cgcctgcaaactggt

SEQ ID NO: 1011310 - DNA, 15 bp, Homo sapiens
gcgcctgcaaactgg

SEQ ID NO: 1011311 - DNA, 15 bp, Homo sapiens
ggcgcctgcaaactg

SEQ ID NO: 1011312 - DNA, 15 bp, Homo sapiens
aggcgcctgcaaact

SEQ ID NO: 1011313 - DNA, 15 bp, Homo sapiens
caggcgcctgcaaac

SEQ ID NO: 1011314 - DNA, 15 bp, Homo sapiens
tcaggcgcctgcaaa

SEQ ID NO: 1011315 - DNA, 15 bp, Homo sapiens
ctcaggcgcctgcaa

SEQ ID NO: 1011316 - DNA, 15 bp, Homo sapiens
gctcaggcgcctgca

SEQ ID NO: 1011317 - DNA, 15 bp, Homo sapiens
ggctcaggcgcctgc

SEQ ID NO: 1011318 - DNA, 15 bp, Homo sapiens
cggctcaggcgcctg

SEQ ID NO: 1011319 - DNA, 15 bp, Homo sapiens
gcggctcaggcgcct

SEQ ID NO: 1011320 - DNA, 15 bp, Homo sapiens
agcggctcaggcgcc

SEQ ID NO: 1011321 - DNA, 15 bp, Homo sapiens
cagcggctcaggcgc

SEQ ID NO: 1011322 - DNA, 15 bp, Homo sapiens
gcagcggctcaggcg

SEQ ID NO: 1011323 - DNA, 15 bp, Homo sapiens
agcagcggctcaggc

SEQ ID NO: 1011324 - DNA, 15 bp, Homo sapiens
gagcagcggctcagg

SEQ ID NO: 1011325 - DNA, 15 bp, Homo sapiens
ggagcagcggctcag

SEQ ID NO: 1011326 - DNA, 15 bp, Homo sapiens
aggagcagcggctca

SEQ ID NO: 1011327 - DNA, 15 bp, Homo sapiens
gaggagcagcggctc

SEQ ID NO: 1011328 - DNA, 15 bp, Homo sapiens
ggaggagcagcggct

SEQ ID NO: 1011329 - DNA, 15 bp, Homo sapiens
gggaggagcagcggc

SEQ ID NO: 1011330 - DNA, 15 bp, Homo sapiens
cgggaggagcagcgg

SEQ ID NO: 1011331 - DNA, 15 bp, Homo sapiens
gcgggaggagcagcg

SEQ ID NO: 1011332 - DNA, 15 bp, Homo sapiens
ggcgggaggagcagc

SEQ ID NO: 1011333 - DNA, 15 bp, Homo sapiens
aggcgggaggagcag

SEQ ID NO: 1011334 - DNA, 15 bp, Homo sapiens
gaggcgggaggagca

SEQ ID NO: 1011335 - DNA, 15 bp, Homo sapiens
agaggcgggaggagc

SEQ ID NO: 1011336 - DNA, 15 bp, Homo sapiens
gagaggcgggaggag

SEQ ID NO: 1011337 - DNA, 15 bp, Homo sapiens
cgagaggcgggagga

SEQ ID NO: 1011338 - DNA, 15 bp, Homo sapiens
ccgagaggcgggagg

SEQ ID NO: 1011339 - DNA, 15 bp, Homo sapiens
accgagaggcgggag

SEQ ID NO: 1011340 - DNA, 15 bp, Homo sapiens
gaccgagaggcggga

SEQ ID NO: 1011341 - DNA, 15 bp, Homo sapiens
ggaccgagaggcggg

SEQ ID NO: 1011342 - DNA, 15 bp, Homo sapiens
aggaccgagaggcgg

SEQ ID NO: 1011343 - DNA, 15 bp, Homo sapiens
aaggaccgagaggcg

SEQ ID NO: 1011344 - DNA, 15 bp, Homo sapiens
gaaggaccgagaggc

SEQ ID NO: 1011345 - DNA, 15 bp, Homo sapiens
ggaaggaccgagagg

SEQ ID NO: 1011346 - DNA, 15 bp, Homo sapiens
gggaaggaccgagag

SEQ ID NO: 1011347 - DNA, 15 bp, Homo sapiens
ggggaaggaccgaga

SEQ ID NO: 1011348 - DNA, 15 bp, Homo sapiens
cggggaaggaccgag

SEQ ID NO: 1011349 - DNA, 15 bp, Homo sapiens
gcggggaaggaccga

SEQ ID NO: 1011350 - DNA, 15 bp, Homo sapiens
ggcggggaaggaccg

SEQ ID NO: 1011351 - DNA, 15 bp, Homo sapiens
cggcggggaaggacc

SEQ ID NO: 1011352 - DNA, 15 bp, Homo sapiens
gcggcggggaaggac

SEQ ID NO: 1011353 - DNA, 15 bp, Homo sapiens
ggcggcggggaagga

SEQ ID NO: 1011354 - DNA, 15 bp, Homo sapiens
gggcggcggggaagg

SEQ ID NO: 1011355 - DNA, 15 bp, Homo sapiens
ggggcggcggggaag

SEQ ID NO: 1011356 - DNA, 15 bp, Homo sapiens
cggggcggcggggaa

SEQ ID NO: 1011357 - DNA, 15 bp, Homo sapiens
ccggggcggcgggga

SEQ ID NO: 1011358 - DNA, 15 bp, Homo sapiens
accggggcggcgggg

SEQ ID NO: 1011359 - DNA, 15 bp, Homo sapiens
taccggggcggcggg

SEQ ID NO: 1011360 - DNA, 15 bp, Homo sapiens
gtaccggggcggcgg

SEQ ID NO: 1011361 - DNA, 15 bp, Homo sapiens
ggtaccggggcggcg

SEQ ID NO: 1011362 - DNA, 15 bp, Homo sapiens
cggtaccggggcggc

SEQ ID NO: 1011363 - DNA, 15 bp, Homo sapiens
acggtaccggggcgg

SEQ ID NO: 1011364 - DNA, 15 bp, Homo sapiens
gacggtaccggggcg

SEQ ID NO: 1011365 - DNA, 15 bp, Homo sapiens
cgacggtaccggggc

SEQ ID NO: 1011366 - DNA, 15 bp, Homo sapiens
gcgacggtaccgggg

SEQ ID NO: 1011367 - DNA, 15 bp, Homo sapiens
tgcgacggtaccggg

SEQ ID NO: 1011368 - DNA, 15 bp, Homo sapiens
ctgcgacggtaccgg

SEQ ID NO: 1011369 - DNA, 15 bp, Homo sapiens
actgcgacggtaccg

SEQ ID NO: 1011370 - DNA, 15 bp, Homo sapiens
gactgcgacggtacc

SEQ ID NO: 1011371 - DNA, 15 bp, Homo sapiens
agactgcgacggtac

SEQ ID NO: 1011372 - DNA, 15 bp, Homo sapiens
aagactgcgacggta

SEQ ID NO: 1011373 - DNA, 15 bp, Homo sapiens
taagactgcgacggt

SEQ ID NO: 1011374 - DNA, 15 bp, Homo sapiens
gtaagactgcgacgg

SEQ ID NO: 1011375 - DNA, 15 bp, Homo sapiens
cgtaagactgcgacg

SEQ ID NO: 1011376 - DNA, 15 bp, Homo sapiens
gcgtaagactgcgac

SEQ ID NO: 1011377 - DNA, 15 bp, Homo sapiens
cgcgtaagactgcga

SEQ ID NO: 1011378 - DNA, 15 bp, Homo sapiens
acgcgtaagactgcg

SEQ ID NO: 1011379 - DNA, 15 bp, Homo sapiens
aacgcgtaagactgc

SEQ ID NO: 1011380 - DNA, 15 bp, Homo sapiens
caacgcgtaagactg

SEQ ID NO: 1011381 - DNA, 15 bp, Homo sapiens
gcaacgcgtaagact

SEQ ID NO: 1011382 - DNA, 15 bp, Homo sapiens
tgcaacgcgtaagac

SEQ ID NO: 1011383 - DNA, 15 bp, Homo sapiens
atgcaacgcgtaaga

SEQ ID NO: 1011384 - DNA, 15 bp, Homo sapiens
catgcaacgcgtaag

SEQ ID NO: 1011385 - DNA, 15 bp, Homo sapiens
gcatgcaacgcgtaa

SEQ ID NO: 1011386 - DNA, 15 bp, Homo sapiens
ggcatgcaacgcgta

SEQ ID NO: 1011387 - DNA, 15 bp, Homo sapiens
cggcatgcaacgcgt

SEQ ID NO: 1011388 - DNA, 15 bp, Homo sapiens
ccggcatgcaacgcg

SEQ ID NO: 1011389 - DNA, 15 bp, Homo sapiens
cccggcatgcaacgc

SEQ ID NO: 1011390 - DNA, 15 bp, Homo sapiens
tcccggcatgcaacg

SEQ ID NO: 1011391 - DNA, 15 bp, Homo sapiens
ctcccggcatgcaac

SEQ ID NO: 1011392 - DNA, 15 bp, Homo sapiens
gctcccggcatgcaa

SEQ ID NO: 1011393 - DNA, 15 bp, Homo sapiens
cgctcccggcatgca

SEQ ID NO: 1011394 - DNA, 15 bp, Homo sapiens
gcgctcccggcatgc

SEQ ID NO: 1011395 - DNA, 15 bp, Homo sapiens
ggcgctcccggcatg

SEQ ID NO: 1011396 - DNA, 15 bp, Homo sapiens
aggcgctcccggcat

SEQ ID NO: 1011397 - DNA, 15 bp, Homo sapiens
aaggcgctcccggca

SEQ ID NO: 1011398 - DNA, 15 bp, Homo sapiens
taaggcgctcccggc

SEQ ID NO: 1011399 - DNA, 15 bp, Homo sapiens
gtaaggcgctcccgg

SEQ ID NO: 1011400 - DNA, 15 bp, Homo sapiens
ggtaaggcgctcccg

SEQ ID NO: 1011401 - DNA, 15 bp, Homo sapiens
aggtaaggcgctccc

SEQ ID NO: 1011402 - DNA, 15 bp, Homo sapiens
gaggtaaggcgctcc

SEQ ID NO: 1011403 - DNA, 15 bp, Homo sapiens
ggaggtaaggcgctc

SEQ ID NO: 1011404 - DNA, 15 bp, Homo sapiens
aggaggtaaggcgct

SEQ ID NO: 1011405 - DNA, 15 bp, Homo sapiens
gaggaggtaaggcgc

SEQ ID NO: 1011406 - DNA, 15 bp, Homo sapiens
agaggaggtaaggcg

SEQ ID NO: 1011407 - DNA, 15 bp, Homo sapiens
aagaggaggtaaggc

SEQ ID NO: 1011408 - DNA, 15 bp, Homo sapiens
gaagaggaggtaagg

SEQ ID NO: 1011409 - DNA, 15 bp, Homo sapiens
agaagaggaggtaag

SEQ ID NO: 1011410 - DNA, 15 bp, Homo sapiens
gagaagaggaggtaa

SEQ ID NO: 1011411 - DNA, 15 bp, Homo sapiens
tgagaagaggaggta

SEQ ID NO: 1011412 - DNA, 15 bp, Homo sapiens
ctgagaagaggaggt

SEQ ID NO: 1011413 - DNA, 15 bp, Homo sapiens
cctgagaagaggagg

SEQ ID NO: 1011414 - DNA, 15 bp, Homo sapiens
ccctgagaagaggag

SEQ ID NO: 1011415 - DNA, 15 bp, Homo sapiens
tccctgagaagagga

SEQ ID NO: 1011416 - DNA, 15 bp, Homo sapiens
gtccctgagaagagg

SEQ ID NO: 1011417 - DNA, 15 bp, Homo sapiens
agtccctgagaagag

SEQ ID NO: 1011418 - DNA, 15 bp, Homo sapiens
aagtccctgagaaga

SEQ ID NO: 1011419 - DNA, 15 bp, Homo sapiens
gaagtccctgagaag

SEQ ID NO: 1011420 - DNA, 15 bp, Homo sapiens
tgaagtccctgagaa

SEQ ID NO: 1011421 - DNA, 15 bp, Homo sapiens
ctgaagtccctgaga

SEQ ID NO: 1011422 - DNA, 15 bp, Homo sapiens
actgaagtccctgag

SEQ ID NO: 1011423 - DNA, 15 bp, Homo sapiens
aactgaagtccctga

SEQ ID NO: 1011424 - DNA, 15 bp, Homo sapiens
gaactgaagtccctg

SEQ ID NO: 1011425 - DNA, 15 bp, Homo sapiens
ggaactgaagtccct

SEQ ID NO: 1011426 - DNA, 15 bp, Homo sapiens
gggaactgaagtccc

SEQ ID NO: 1011427 - DNA, 15 bp, Homo sapiens
tgggaactgaagtcc

SEQ ID NO: 1011428 - DNA, 15 bp, Homo sapiens
ctgggaactgaagtc

SEQ ID NO: 1011429 - DNA, 15 bp, Homo sapiens
gctgggaactgaagt

SEQ ID NO: 1011430 - DNA, 15 bp, Homo sapiens
tgctgggaactgaag

SEQ ID NO: 1011431 - DNA, 15 bp, Homo sapiens
atgctgggaactgaa

SEQ ID NO: 1011432 - DNA, 15 bp, Homo sapiens
catgctgggaactga

SEQ ID NO: 1011433 - DNA, 15 bp, Homo sapiens
gcatgctgggaactg

SEQ ID NO: 1011434 - DNA, 15 bp, Homo sapiens
tgcatgctgggaact

SEQ ID NO: 1011435 - DNA, 15 bp, Homo sapiens
ctgcatgctgggaac

SEQ ID NO: 1011436 - DNA, 15 bp, Homo sapiens
tctgcatgctgggaa

SEQ ID NO: 1011437 - DNA, 15 bp, Homo sapiens
ttctgcatgctggga

SEQ ID NO: 1011438 - DNA, 15 bp, Homo sapiens
cttctgcatgctggg

SEQ ID NO: 1011439 - DNA, 15 bp, Homo sapiens
gcttctgcatgctgg

SEQ ID NO: 1011440 - DNA, 15 bp, Homo sapiens
ggcttctgcatgctg

SEQ ID NO: 1011441 - DNA, 15 bp, Homo sapiens
aggcttctgcatgct

SEQ ID NO: 1011442 - DNA, 15 bp, Homo sapiens
gaggcttctgcatgc

SEQ ID NO: 1011443 - DNA, 15 bp, Homo sapiens
tgaggcttctgcatg

SEQ ID NO: 1011444 - DNA, 15 bp, Homo sapiens
ctgaggcttctgcat

SEQ ID NO: 1011445 - DNA, 15 bp, Homo sapiens
cctgaggcttctgca

SEQ ID NO: 1011446 - DNA, 15 bp, Homo sapiens
gcctgaggcttctgc

SEQ ID NO: 1011447 - DNA, 15 bp, Homo sapiens
tgcctgaggcttctg

SEQ ID NO: 1011448 - DNA, 15 bp, Homo sapiens
ctgcctgaggcttct

SEQ ID NO: 1011449 - DNA, 15 bp, Homo sapiens
tctgcctgaggcttc

SEQ ID NO: 1011450 - DNA, 15 bp, Homo sapiens
ttctgcctgaggctt

SEQ ID NO: 1011451 - DNA, 15 bp, Homo sapiens
gttctgcctgaggct

SEQ ID NO: 1011452 - DNA, 15 bp, Homo sapiens
agttctgcctgaggc

SEQ ID NO: 1011453 - DNA, 15 bp, Homo sapiens
cagttctgcctgagg

SEQ ID NO: 1011454 - DNA, 15 bp, Homo sapiens
gcagttctgcctgag

SEQ ID NO: 1011455 - DNA, 15 bp, Homo sapiens
tgcagttctgcctga

SEQ ID NO: 1011456 - DNA, 15 bp, Homo sapiens
gtgcagttctgcctg

SEQ ID NO: 1011457 - DNA, 15 bp, Homo sapiens
agtgcagttctgcct

SEQ ID NO: 1011458 - DNA, 15 bp, Homo sapiens
gagtgcagttctgcc

SEQ ID NO: 1011459 - DNA, 15 bp, Homo sapiens
agagtgcagttctgc

SEQ ID NO: 1011460 - DNA, 15 bp, Homo sapiens
cagagtgcagttctg

SEQ ID NO: 1011461 - DNA, 15 bp, Homo sapiens
ccagagtgcagttct

SEQ ID NO: 1011462 - DNA, 15 bp, Homo sapiens
cccagagtgcagttc

SEQ ID NO: 1011463 - DNA, 15 bp, Homo sapiens
tcccagagtgcagtt

SEQ ID NO: 1011464 - DNA, 15 bp, Homo sapiens
atcccagagtgcagt

SEQ ID NO: 1011465 - DNA, 15 bp, Homo sapiens
aatcccagagtgcag

SEQ ID NO: 1011466 - DNA, 15 bp, Homo sapiens
aaatcccagagtgca

SEQ ID NO: 1011467 - DNA, 15 bp, Homo sapiens
caaatcccagagtgc

SEQ ID NO: 1011468 - DNA, 15 bp, Homo sapiens
tcaaatcccagagtg

SEQ ID NO: 1011469 - DNA, 15 bp, Homo sapiens
ttcaaatcccagagt

SEQ ID NO: 1011470 - DNA, 15 bp, Homo sapiens
cttcaaatcccagag

SEQ ID NO: 1011471 - DNA, 15 bp, Homo sapiens
acttcaaatcccaga

SEQ ID NO: 1011472 - DNA, 15 bp, Homo sapiens
gacttcaaatcccag

SEQ ID NO: 1011473 - DNA, 15 bp, Homo sapiens
ggacttcaaatccca

SEQ ID NO: 1011474 - DNA, 15 bp, Homo sapiens
aggacttcaaatccc

SEQ ID NO: 1011475 - DNA, 15 bp, Homo sapiens
gaggacttcaaatcc

SEQ ID NO: 1011476 - DNA, 15 bp, Homo sapiens
cgaggacttcaaatc

SEQ ID NO: 1011477 - DNA, 15 bp, Homo sapiens
acgaggacttcaaat

SEQ ID NO: 1011478 - DNA, 15 bp, Homo sapiens
aacgaggacttcaaa

SEQ ID NO: 1011479 - DNA, 15 bp, Homo sapiens
gaacgaggacttcaa

SEQ ID NO: 1011480 - DNA, 15 bp, Homo sapiens
ggaacgaggacttca

SEQ ID NO: 1011481 - DNA, 15 bp, Homo sapiens
tggaacgaggacttc

SEQ ID NO: 1011482 - DNA, 15 bp, Homo sapiens
gtggaacgaggactt

SEQ ID NO: 1011483 - DNA, 15 bp, Homo sapiens
cgtggaacgaggact

SEQ ID NO: 1011484 - DNA, 15 bp, Homo sapiens
gcgtggaacgaggac

SEQ ID NO: 1011485 - DNA, 15 bp, Homo sapiens
ggcgtggaacgagga

SEQ ID NO: 1011486 - DNA, 15 bp, Homo sapiens
aggcgtggaacgagg

SEQ ID NO: 1011487 - DNA, 15 bp, Homo sapiens
aaggcgtggaacgag

SEQ ID NO: 1011488 - DNA, 15 bp, Homo sapiens
gaaggcgtggaacga

SEQ ID NO: 1011489 - DNA, 15 bp, Homo sapiens
agaaggcgtggaacg

SEQ ID NO: 1011490 - DNA, 15 bp, Homo sapiens
gagaaggcgtggaac

SEQ ID NO: 1011491 - DNA, 15 bp, Homo sapiens
tgagaaggcgtggaa

SEQ ID NO: 1011492 - DNA, 15 bp, Homo sapiens
atgagaaggcgtgga

SEQ ID NO: 1011493 - DNA, 15 bp, Homo sapiens
gatgagaaggcgtgg

SEQ ID NO: 1011494 - DNA, 15 bp, Homo sapiens
tgatgagaaggcgtg

SEQ ID NO: 1011495 - DNA, 15 bp, Homo sapiens
atgatgagaaggcgt

SEQ ID NO: 1011496 - DNA, 15 bp, Homo sapiens
gatgatgagaaggcg

SEQ ID NO: 1011497 - DNA, 15 bp, Homo sapiens
ggatgatgagaaggc

SEQ ID NO: 1011498 - DNA, 15 bp, Homo sapiens
aggatgatgagaagg

SEQ ID NO: 1011499 - DNA, 15 bp, Homo sapiens
caggatgatgagaag

SEQ ID NO: 1011500 - DNA, 15 bp, Homo sapiens
tcaggatgatgagaa

SEQ ID NO: 1011501 - DNA, 15 bp, Homo sapiens
ttcaggatgatgaga

SEQ ID NO: 1011502 - DNA, 15 bp, Homo sapiens
gttcaggatgatgag

SEQ ID NO: 1011503 - DNA, 15 bp, Homo sapiens
tgttcaggatgatga

SEQ ID NO: 1011504 - DNA, 15 bp, Homo sapiens
ctaatcctggcaagc

SEQ ID NO: 1011505 - DNA, 15 bp, Homo sapiens
cctaatcctggcaag

SEQ ID NO: 1011506 - DNA, 15 bp, Homo sapiens
ccctaatcctggcaa

SEQ ID NO: 1011507 - DNA, 15 bp, Homo sapiens
accctaatcctggca

SEQ ID NO: 1011508 - DNA, 15 bp, Homo sapiens
caccctaatcctggc

SEQ ID NO: 1011509 - DNA, 15 bp, Homo sapiens
acaccctaatcctgg

SEQ ID NO: 1011510 - DNA, 15 bp, Homo sapiens
aacaccctaatcctg

SEQ ID NO: 1011511 - DNA, 15 bp, Homo sapiens
gaacaccctaatcct

SEQ ID NO: 1011512 - DNA, 15 bp, Homo sapiens
cgaacaccctaatcc

SEQ ID NO: 1011513 - DNA, 15 bp, Homo sapiens
gcgaacaccctaatc

SEQ ID NO: 1011514 - DNA, 15 bp, Homo sapiens
cgcgaacaccctaat

SEQ ID NO: 1011515 - DNA, 15 bp, Homo sapiens
gcgcgaacaccctaa

SEQ ID NO: 1011516 - DNA, 15 bp, Homo sapiens
cgcgcgaacacccta

SEQ ID NO: 1011517 - DNA, 15 bp, Homo sapiens
gcgcgcgaacaccct

SEQ ID NO: 1011518 - DNA, 15 bp, Homo sapiens
tgcgcgcgaacaccc

SEQ ID NO: 1011519 - DNA, 15 bp, Homo sapiens
atgcgcgcgaacacc

SEQ ID NO: 1011520 - DNA, 15 bp, Homo sapiens
aatgcgcgcgaacac

SEQ ID NO: 1011521 - DNA, 15 bp, Homo sapiens
caatgcgcgcgaaca

SEQ ID NO: 1011522 - DNA, 15 bp, Homo sapiens
acaatgcgcgcgaac

SEQ ID NO: 1011523 - DNA, 15 bp, Homo sapiens
cacaatgcgcgcgaa

SEQ ID NO: 1011524 - DNA, 15 bp, Homo sapiens
ccacaatgcgcgcga

SEQ ID NO: 1011525 - DNA, 15 bp, Homo sapiens
cccacaatgcgcgcg

SEQ ID NO: 1011526 - DNA, 15 bp, Homo sapiens
acccacaatgcgcgc

SEQ ID NO: 1011527 - DNA, 15 bp, Homo sapiens
tacccacaatgcgcg

SEQ ID NO: 1011528 - DNA, 15 bp, Homo sapiens
ctacccacaatgcgc

SEQ ID NO: 1011529 - DNA, 15 bp, Homo sapiens
cctacccacaatgcg

SEQ ID NO: 1011530 - DNA, 15 bp, Homo sapiens
ccctacccacaatgc

SEQ ID NO: 1011531 - DNA, 15 bp, Homo sapiens
cccctacccacaatg

SEQ ID NO: 1011532 - DNA, 15 bp, Homo sapiens
acccctacccacaat

SEQ ID NO: 1011533 - DNA, 15 bp, Homo sapiens
cacccctacccacaa

SEQ ID NO: 1011534 - DNA, 15 bp, Homo sapiens
acacccctacccaca

SEQ ID NO: 1011535 - DNA, 15 bp, Homo sapiens
cacacccctacccac

SEQ ID NO: 1011536 - DNA, 15 bp, Homo sapiens
ccacacccctaccca

SEQ ID NO: 1011537 - DNA, 15 bp, Homo sapiens
tccacacccctaccc

SEQ ID NO: 1011538 - DNA, 15 bp, Homo sapiens
ctccacacccctacc

SEQ ID NO: 1011539 - DNA, 15 bp, Homo sapiens
cctccacacccctac

SEQ ID NO: 1011540 - DNA, 15 bp, Homo sapiens
tcctccacaccccta

SEQ ID NO: 1011541 - DNA, 15 bp, Homo sapiens
ttcctccacacccct

SEQ ID NO: 1011542 - DNA, 15 bp, Homo sapiens
cttcctccacacccc

SEQ ID NO: 1011543 - DNA, 15 bp, Homo sapiens
ccttcctccacaccc

SEQ ID NO: 1011544 - DNA, 15 bp, Homo sapiens
tcccttcctccacac

SEQ ID NO: 1011545 - DNA, 15 bp, Homo sapiens
atcccttcctccaca

SEQ ID NO: 1011546 - DNA, 15 bp, Homo sapiens
gatcccttcctccac

SEQ ID NO: 1011547 - DNA, 15 bp, Homo sapiens
ggatcccttcctcca

SEQ ID NO: 1011548 - DNA, 15 bp, Homo sapiens
tggatcccttcctcc

SEQ ID NO: 1011549 - DNA, 15 bp, Homo sapiens
ctggatcccttcctc

SEQ ID NO: 1011550 - DNA, 15 bp, Homo sapiens
tctggatcccttcct

SEQ ID NO: 1011551 - DNA, 15 bp, Homo sapiens
ttctggatcccttcc

SEQ ID NO: 1011552 - DNA, 15 bp, Homo sapiens
tttctggatcccttc

SEQ ID NO: 1011553 - DNA, 15 bp, Homo sapiens
atttctggatccctt

SEQ ID NO: 1011554 - DNA, 15 bp, Homo sapiens
gatttctggatccct

SEQ ID NO: 1011555 - DNA, 15 bp, Homo sapiens
agatttctggatccc

SEQ ID NO: 1011556 - DNA, 15 bp, Homo sapiens
aagatttctggatcc

SEQ ID NO: 1011557 - DNA, 15 bp, Homo sapiens
taagatttctggatc

SEQ ID NO: 1011558 - DNA, 15 bp, Homo sapiens
ttaagatttctggat

SEQ ID NO: 1011559 - DNA, 15 bp, Homo sapiens
cttaagatttctgga

SEQ ID NO: 1011560 - DNA, 15 bp, Homo sapiens
acttaagatttctgg

SEQ ID NO: 1011561 - DNA, 15 bp, Homo sapiens
tacttaagatttctg

SEQ ID NO: 1011562 - DNA, 15 bp, Homo sapiens
atacttaagatttct

SEQ ID NO: 1011563 - DNA, 15 bp, Homo sapiens
aatacttaagatttc

SEQ ID NO: 1011564 - DNA, 15 bp, Homo sapiens
taatacttaagattt

SEQ ID NO: 1011565 - DNA, 15 bp, Homo sapiens
ttaatacttaagatt

SEQ ID NO: 1011566 - DNA, 15 bp, Homo sapiens
gttaatacttaagat

SEQ ID NO: 1011567 - DNA, 15 bp, Homo sapiens
agttaatacttaaga

SEQ ID NO: 1011568 - DNA, 15 bp, Homo sapiens
aagttaatacttaag

SEQ ID NO: 1011569 - DNA, 15 bp, Homo sapiens
taagttaatacttaa

SEQ ID NO: 1011570 - DNA, 15 bp, Homo sapiens
ctaagttaatactta

SEQ ID NO: 1011571 - DNA, 15 bp, Homo sapiens
tctaagttaatactt

SEQ ID NO: 1011572 - DNA, 15 bp, Homo sapiens
atctaagttaatact

SEQ ID NO: 1011573 - DNA, 15 bp, Homo sapiens
aatctaagttaatac

SEQ ID NO: 1011574 - DNA, 15 bp, Homo sapiens
taatctaagttaata

SEQ ID NO: 1011575 - DNA, 15 bp, Homo sapiens
ctaatctaagttaat

SEQ ID NO: 1011576 - DNA, 15 bp, Homo sapiens
actaatctaagttaa

SEQ ID NO: 1011577 - DNA, 15 bp, Homo sapiens
cactaatctaagtta

SEQ ID NO: 1011578 - DNA, 15 bp, Homo sapiens
acactaatctaagtt

SEQ ID NO: 1011579 - DNA, 15 bp, Homo sapiens
aacactaatctaagt

SEQ ID NO: 1011580 - DNA, 15 bp, Homo sapiens
taacactaatctaag

SEQ ID NO: 1011581 - DNA, 15 bp, Homo sapiens
ctaacactaatctaa

SEQ ID NO: 1011582 - DNA, 15 bp, Homo sapiens
gctaacactaatcta

SEQ ID NO: 1011583 - DNA, 15 bp, Homo sapiens
tgctaacactaatct

SEQ ID NO: 1011584 - DNA, 15 bp, Homo sapiens
ttgctaacactaatc

SEQ ID NO: 1011585 - DNA, 15 bp, Homo sapiens
cttgctaacactaat

SEQ ID NO: 1011586 - DNA, 15 bp, Homo sapiens
ccttgctaacactaa

SEQ ID NO: 1011587 - DNA, 15 bp, Homo sapiens
tccttgctaacacta

SEQ ID NO: 1011588 - DNA, 15 bp, Homo sapiens
ttccttgctaacact

SEQ ID NO: 1011589 - DNA, 15 bp, Homo sapiens
cttccttgctaacac

SEQ ID NO: 1011590 - DNA, 15 bp, Homo sapiens
gcttccttgctaaca

SEQ ID NO: 1011591 - DNA, 15 bp, Homo sapiens
ggcttccttgctaac

SEQ ID NO: 1011592 - DNA, 15 bp, Homo sapiens
cggcttccttgctaa

SEQ ID NO: 1011593 - DNA, 15 bp, Homo sapiens
acggcttccttgcta

SEQ ID NO: 1011594 - DNA, 15 bp, Homo sapiens
gacggcttccttgct

SEQ ID NO: 1011595 - DNA, 15 bp, Homo sapiens
tgacggcttccttgc

SEQ ID NO: 1011596 - DNA, 15 bp, Homo sapiens
gtgacggcttccttg

SEQ ID NO: 1011597 - DNA, 15 bp, Homo sapiens
tgtgacggcttcctt

SEQ ID NO: 1011598 - DNA, 15 bp, Homo sapiens
atgtgacggcttcct

SEQ ID NO: 1011599 - DNA, 15 bp, Homo sapiens
aatgtgacggcttcc

SEQ ID NO: 1011600 - DNA, 15 bp, Homo sapiens
aaatgtgacggcttc

SEQ ID NO: 1011601 - DNA, 15 bp, Homo sapiens
aaaatgtgacggctt

SEQ ID NO: 1011602 - DNA, 15 bp, Homo sapiens
taaaatgtgacggct

SEQ ID NO: 1011603 - DNA, 15 bp, Homo sapiens
ataaaatgtgacggc

SEQ ID NO: 1011604 - DNA, 15 bp, Homo sapiens
aataaaatgtgacgg

SEQ ID NO: 1011605 - DNA, 15 bp, Homo sapiens
aaataaaatgtgacg

SEQ ID NO: 1011606 - DNA, 15 bp, Homo sapiens
taaataaaatgtgac

SEQ ID NO: 1011607 - DNA, 15 bp, Homo sapiens
ctaaataaaatgtga

SEQ ID NO: 1011608 - DNA, 15 bp, Homo sapiens
gctaaataaaatgtg

SEQ ID NO: 1011609 - DNA, 15 bp, Homo sapiens
ggctaaataaaatgt

SEQ ID NO: 1011610 - DNA, 15 bp, Homo sapiens
cggctaaataaaatg

SEQ ID NO: 1011611 - DNA, 15 bp, Homo sapiens
ccggctaaataaaat

SEQ ID NO: 1011612 - DNA, 15 bp, Homo sapiens
cccggctaaataaaa

SEQ ID NO: 1011613 - DNA, 15 bp, Homo sapiens
tcccggctaaataaa

SEQ ID NO: 1011614 - DNA, 15 bp, Homo sapiens
gtcccggctaaataa

SEQ ID NO: 1011615 - DNA, 15 bp, Homo sapiens
tgtcccggctaaata

SEQ ID NO: 1011616 - DNA, 15 bp, Homo sapiens
gtgtcccggctaaat

SEQ ID NO: 1011617 - DNA, 15 bp, Homo sapiens
agtgtcccggctaaa

SEQ ID NO: 1011618 - DNA, 15 bp, Homo sapiens
gagtgtcccggctaa

SEQ ID NO: 1011619 - DNA, 15 bp, Homo sapiens
agagtgtcccggcta

SEQ ID NO: 1011620 - DNA, 15 bp, Homo sapiens
cagagtgtcccggct

SEQ ID NO: 1011621 - DNA, 15 bp, Homo sapiens
tcagagtgtcccggc

SEQ ID NO: 1011622 - DNA, 15 bp, Homo sapiens
gtcagagtgtcccgg

SEQ ID NO: 1011623 - DNA, 15 bp, Homo sapiens
tgtcagagtgtcccg

SEQ ID NO: 1011624 - DNA, 15 bp, Homo sapiens
ctgtcagagtgtccc

SEQ ID NO: 1011625 - DNA, 15 bp, Homo sapiens
actgtcagagtgtcc

SEQ ID NO: 1011626 - DNA, 15 bp, Homo sapiens
aactgtcagagtgtc

SEQ ID NO: 1011627 - DNA, 15 bp, Homo sapiens
aaactgtcagagtgt

SEQ ID NO: 1011628 - DNA, 15 bp, Homo sapiens
caaactgtcagagtg

SEQ ID NO: 1011629 - DNA, 15 bp, Homo sapiens
acaaactgtcagagt

SEQ ID NO: 1011630 - DNA, 15 bp, Homo sapiens
cacaaactgtcagag

SEQ ID NO: 1011631 - DNA, 15 bp, Homo sapiens
gcacaaactgtcaga

SEQ ID NO: 1011632 - DNA, 15 bp, Homo sapiens
ggcacaaactgtcag

SEQ ID NO: 1011633 - DNA, 15 bp, Homo sapiens
cggcacaaactgtca

SEQ ID NO: 1011634 - DNA, 15 bp, Homo sapiens
tcggcacaaactgtc

SEQ ID NO: 1011635 - DNA, 15 bp, Homo sapiens
gtcggcacaaactgt

SEQ ID NO: 1011636 - DNA, 15 bp, Homo sapiens
agtcggcacaaactg

SEQ ID NO: 1011637 - DNA, 15 bp, Homo sapiens
cagtcggcacaaact

SEQ ID NO: 1011638 - DNA, 15 bp, Homo sapiens
gcagtcggcacaaac

SEQ ID NO: 1011639 - DNA, 15 bp, Homo sapiens
agcagtcggcacaaa

SEQ ID NO: 1011640 - DNA, 15 bp, Homo sapiens
tagcagtcggcacaa

SEQ ID NO: 1011641 - DNA, 15 bp, Homo sapiens
atagcagtcggcaca

SEQ ID NO: 1011642 - DNA, 15 bp, Homo sapiens
aatagcagtcggcac

SEQ ID NO: 1011643 - DNA, 15 bp, Homo sapiens
aaatagcagtcggca

SEQ ID NO: 1011644 - DNA, 15 bp, Homo sapiens
aaaatagcagtcggc

SEQ ID NO: 1011645 - DNA, 15 bp, Homo sapiens
aaaaatagcagtcgg

SEQ ID NO: 1011646 - DNA, 15 bp, Homo sapiens
caaaaatagcagtcg

SEQ ID NO: 1011647 - DNA, 15 bp, Homo sapiens
tcaaaaatagcagtc

SEQ ID NO: 1011648 - DNA, 15 bp, Homo sapiens
atcaaaaatagcagt

SEQ ID NO: 1011649 - DNA, 15 bp, Homo sapiens
gatcaaaaatagcag

SEQ ID NO: 1011650 - DNA, 15 bp, Homo sapiens
tgatcaaaaatagca

SEQ ID NO: 1011651 - DNA, 15 bp, Homo sapiens
ttgatcaaaaatagc

SEQ ID NO: 1011652 - DNA, 15 bp, Homo sapiens
cttgatcaaaaatag

SEQ ID NO: 1011653 - DNA, 15 bp, Homo sapiens
ccttgatcaaaaata

SEQ ID NO: 1011654 - DNA, 15 bp, Homo sapiens
gccttgatcaaaaat

SEQ ID NO: 1011655 - DNA, 15 bp, Homo sapiens
agccttgatcaaaaa

SEQ ID NO: 1011656 - DNA, 15 bp, Homo sapiens
tagccttgatcaaaa

SEQ ID NO: 1011657 - DNA, 15 bp, Homo sapiens
atagccttgatcaaa

SEQ ID NO: 1011658 - DNA, 15 bp, Homo sapiens
aatagccttgatcaa

SEQ ID NO: 1011659 - DNA, 15 bp, Homo sapiens
aaatagccttgatca

SEQ ID NO: 1011660 - DNA, 15 bp, Homo sapiens
aaaatagccttgatc

SEQ ID NO: 1011661 - DNA, 15 bp, Homo sapiens
caaaatagccttgat

SEQ ID NO: 1011662 - DNA, 15 bp, Homo sapiens
gcaaaatagccttga

SEQ ID NO: 1011663 - DNA, 15 bp, Homo sapiens
ggcaaaatagccttg

SEQ ID NO: 1011664 - DNA, 15 bp, Homo sapiens
gggcaaaatagcctt

SEQ ID NO: 1011665 - DNA, 15 bp, Homo sapiens
tgggcaaaatagcct

SEQ ID NO: 1011666 - DNA, 15 bp, Homo sapiens
gtgggcaaaatagcc

SEQ ID NO: 1011667 - DNA, 15 bp, Homo sapiens
agtgggcaaaatagc

SEQ ID NO: 1011668 - DNA, 15 bp, Homo sapiens
aagtgggcaaaatag

SEQ ID NO: 1011669 - DNA, 15 bp, Homo sapiens
caagtgggcaaaata

SEQ ID NO: 1011670 - DNA, 15 bp, Homo sapiens
acaagtgggcaaaat

SEQ ID NO: 1011671 - DNA, 15 bp, Homo sapiens
gacaagtgggcaaaa

SEQ ID NO: 1011672 - DNA, 15 bp, Homo sapiens
agacaagtgggcaaa

SEQ ID NO: 1011673 - DNA, 15 bp, Homo sapiens
tagacaagtgggcaa

SEQ ID NO: 1011674 - DNA, 15 bp, Homo sapiens
atagacaagtgggca

SEQ ID NO: 1011675 - DNA, 15 bp, Homo sapiens
aatagacaagtgggc

SEQ ID NO: 1011676 - DNA, 15 bp, Homo sapiens
aaatagacaagtggg

SEQ ID NO: 1011677 - DNA, 15 bp, Homo sapiens
aaaatagacaagtgg

SEQ ID NO: 1011678 - DNA, 15 bp, Homo sapiens
caaaatagacaagtg

SEQ ID NO: 1011679 - DNA, 15 bp, Homo sapiens
acaaaatagacaagt

SEQ ID NO: 1011680 - DNA, 15 bp, Homo sapiens
cacaaaatagacaag

SEQ ID NO: 1011681 - DNA, 15 bp, Homo sapiens
ccacaaaatagacaa

SEQ ID NO: 1011682 - DNA, 15 bp, Homo sapiens
gccacaaaatagaca

SEQ ID NO: 1011683 - DNA, 15 bp, Homo sapiens
ggccacaaaatagac

SEQ ID NO: 1011684 - DNA, 15 bp, Homo sapiens
gggccacaaaataga

SEQ ID NO: 1011685 - DNA, 15 bp, Homo sapiens
tgggccacaaaatag

SEQ ID NO: 1011686 - DNA, 15 bp, Homo sapiens
ttgggccacaaaata

SEQ ID NO: 1011687 - DNA, 15 bp, Homo sapiens
attgggccacaaaat

SEQ ID NO: 1011688 - DNA, 15 bp, Homo sapiens
aattgggccacaaaa

SEQ ID NO: 1011689 - DNA, 15 bp, Homo sapiens
caattgggccacaaa

SEQ ID NO: 1011690 - DNA, 15 bp, Homo sapiens
acaattgggccacaa

SEQ ID NO: 1011691 - DNA, 15 bp, Homo sapiens
gacaattgggccaca

SEQ ID NO: 1011692 - DNA, 15 bp, Homo sapiens
agacaattgggccac

SEQ ID NO: 1011693 - DNA, 15 bp, Homo sapiens
cagacaattgggcca

SEQ ID NO: 1011694 - DNA, 15 bp, Homo sapiens
acagacaattgggcc

SEQ ID NO: 1011695 - DNA, 15 bp, Homo sapiens
aacagacaattgggc

SEQ ID NO: 1011696 - DNA, 15 bp, Homo sapiens
aaacagacaattggg

SEQ ID NO: 1011697 - DNA, 15 bp, Homo sapiens
aaaacagacaattgg

SEQ ID NO: 1011698 - DNA, 15 bp, Homo sapiens
caaaacagacaattg

SEQ ID NO: 1011699 - DNA, 15 bp, Homo sapiens
gcaaaacagacaatt

SEQ ID NO: 1011700 - DNA, 15 bp, Homo sapiens
agcaaaacagacaat

SEQ ID NO: 1011701 - DNA, 15 bp, Homo sapiens
tagcaaaacagacaa

SEQ ID NO: 1011702 - DNA, 15 bp, Homo sapiens
ttagcaaaacagaca

SEQ ID NO: 1011703 - DNA, 15 bp, Homo sapiens
gttagcaaaacagac

SEQ ID NO: 1011704 - DNA, 15 bp, Homo sapiens
tgttagcaaaacaga

SEQ ID NO: 1011705 - DNA, 15 bp, Homo sapiens
atgttagcaaaacag

SEQ ID NO: 1011706 - DNA, 15 bp, Homo sapiens
gatgttagcaaaaca

SEQ ID NO: 1011707 - DNA, 15 bp, Homo sapiens
tgatgttagcaaaac

SEQ ID NO: 1011708 - DNA, 15 bp, Homo sapiens
ctgatgttagcaaaa

SEQ ID NO: 1011709 - DNA, 15 bp, Homo sapiens
tctgatgttagcaaa

SEQ ID NO: 1011710 - DNA, 15 bp, Homo sapiens
ttctgatgttagcaa

SEQ ID NO: 1011711 - DNA, 15 bp, Homo sapiens
tttctgatgttagca

SEQ ID NO: 1011712 - DNA, 15 bp, Homo sapiens
ctttctgatgttagc

SEQ ID NO: 1011713 - DNA, 15 bp, Homo sapiens
actttctgatgttag

SEQ ID NO: 1011714 - DNA, 15 bp, Homo sapiens
aactttctgatgtta

SEQ ID NO: 1011715 - DNA, 15 bp, Homo sapiens
taactttctgatgtt

SEQ ID NO: 1011716 - DNA, 15 bp, Homo sapiens
ataactttctgatgt

SEQ ID NO: 1011717 - DNA, 15 bp, Homo sapiens
tataactttctgatg

SEQ ID NO: 1011718 - DNA, 15 bp, Homo sapiens
ttataactttctgat

SEQ ID NO: 1011719 - DNA, 15 bp, Homo sapiens
attataactttctga

SEQ ID NO: 1011720 - DNA, 15 bp, Homo sapiens
cattataactttctg

SEQ ID NO: 1011721 - DNA, 15 bp, Homo sapiens
tcattataactttct

SEQ ID NO: 1011722 - DNA, 15 bp, Homo sapiens
ttcattataactttc

SEQ ID NO: 1011723 - DNA, 15 bp, Homo sapiens
tttcattataacttt

SEQ ID NO: 1011724 - DNA, 15 bp, Homo sapiens
atttcattataactt

SEQ ID NO: 1011725 - DNA, 15 bp, Homo sapiens
tatttcattataact

SEQ ID NO: 1011726 - DNA, 15 bp, Homo sapiens
ttatttcattataac

SEQ ID NO: 1011727 - DNA, 15 bp, Homo sapiens
attatttcattataa

SEQ ID NO: 1011728 - DNA, 15 bp, Homo sapiens
gattatttcattata

SEQ ID NO: 1011729 - DNA, 15 bp, Homo sapiens
agattatttcattat

SEQ ID NO: 1011730 - DNA, 15 bp, Homo sapiens
cagattatttcatta

SEQ ID NO: 1011731 - DNA, 15 bp, Homo sapiens
gcagattatttcatt

SEQ ID NO: 1011732 - DNA, 15 bp, Homo sapiens
tgcagattatttcat

SEQ ID NO: 1011733 - DNA, 15 bp, Homo sapiens
ttgcagattatttca

SEQ ID NO: 1011734 - DNA, 15 bp, Homo sapiens
tttgcagattatttc

SEQ ID NO: 1011735 - DNA, 15 bp, Homo sapiens
ttttgcagattattt

SEQ ID NO: 1011736 - DNA, 15 bp, Homo sapiens
tttttgcagattatt

SEQ ID NO: 1011737 - DNA, 15 bp, Homo sapiens
ttttttgcagattat

SEQ ID NO: 1011738 - DNA, 15 bp, Homo sapiens
attttttgcagatta

SEQ ID NO: 1011739 - DNA, 15 bp, Homo sapiens
cattttttgcagatt

SEQ ID NO: 1011740 - DNA, 15 bp, Homo sapiens
acattttttgcagat

SEQ ID NO: 1011741 - DNA, 15 bp, Homo sapiens
tacattttttgcaga

SEQ ID NO: 1011742 - DNA, 15 bp, Homo sapiens
ttacattttttgcag

SEQ ID NO: 1011743 - DNA, 15 bp, Homo sapiens
cttacattttttgca

SEQ ID NO: 1011744 - DNA, 15 bp, Homo sapiens
ccttacattttttgc

SEQ ID NO: 1011745 - DNA, 15 bp, Homo sapiens
accttacattttttg

SEQ ID NO: 1011746 - DNA, 15 bp, Homo sapiens
caccttacatttttt

SEQ ID NO: 1011747 - DNA, 15 bp, Homo sapiens
gcaccttacattttt

SEQ ID NO: 1011748 - DNA, 15 bp, Homo sapiens
agcaccttacatttt

SEQ ID NO: 1011749 - DNA, 15 bp, Homo sapiens
tagcaccttacattt

SEQ ID NO: 1011750 - DNA, 15 bp, Homo sapiens
ctagcaccttacatt

SEQ ID NO: 1011751 - DNA, 15 bp, Homo sapiens
tctagcaccttacat

SEQ ID NO: 1011752 - DNA, 15 bp, Homo sapiens
ttctagcaccttaca

SEQ ID NO: 1011753 - DNA, 15 bp, Homo sapiens
tttctagcaccttac

SEQ ID NO: 1011754 - DNA, 15 bp, Homo sapiens
ttttctagcacctta

SEQ ID NO: 1011755 - DNA, 15 bp, Homo sapiens
gttttctagcacctt

SEQ ID NO: 1011756 - DNA, 15 bp, Homo sapiens
ggttttctagcacct

SEQ ID NO: 1011757 - DNA, 15 bp, Homo sapiens
tggttttctagcacc

SEQ ID NO: 1011758 - DNA, 15 bp, Homo sapiens
ttggttttctagcac

SEQ ID NO: 1011759 - DNA, 15 bp, Homo sapiens
attggttttctagca

SEQ ID NO: 1011760 - DNA, 15 bp, Homo sapiens
tattggttttctagc

SEQ ID NO: 1011761 - DNA, 15 bp, Homo sapiens
ttattggttttctag

SEQ ID NO: 1011762 - DNA, 15 bp, Homo sapiens
attattggttttcta

SEQ ID NO: 1011763 - DNA, 15 bp, Homo sapiens
tattattggttttct

SEQ ID NO: 1011764 - DNA, 15 bp, Homo sapiens
gtattattggttttc

SEQ ID NO: 1011765 - DNA, 15 bp, Homo sapiens
agtattattggtttt

SEQ ID NO: 1011766 - DNA, 15 bp, Homo sapiens
cagtattattggttt

SEQ ID NO: 1011767 - DNA, 15 bp, Homo sapiens
acagtattattggtt

SEQ ID NO: 1011768 - DNA, 15 bp, Homo sapiens
cacagtattattggt

SEQ ID NO: 1011769 - DNA, 15 bp, Homo sapiens
acacagtattattgg

SEQ ID NO: 1011770 - DNA, 15 bp, Homo sapiens
tacacagtattattg

SEQ ID NO: 1011771 - DNA, 15 bp, Homo sapiens
gtacacagtattatt

SEQ ID NO: 1011772 - DNA, 15 bp, Homo sapiens
ggtacacagtattat

SEQ ID NO: 1011773 - DNA, 15 bp, Homo sapiens
aggtacacagtatta

SEQ ID NO: 1011774 - DNA, 15 bp, Homo sapiens
aaggtacacagtatt

SEQ ID NO: 1011775 - DNA, 15 bp, Homo sapiens
caaggtacacagtat

SEQ ID NO: 1011776 - DNA, 15 bp, Homo sapiens
tcaaggtacacagta

SEQ ID NO: 1011777 - DNA, 15 bp, Homo sapiens
ttcaaggtacacagt

SEQ ID NO: 1011778 - DNA, 15 bp, Homo sapiens
tttcaaggtacacag

SEQ ID NO: 1011779 - DNA, 15 bp, Homo sapiens
ttttcaaggtacaca

SEQ ID NO: 1011780 - DNA, 15 bp, Homo sapiens
attttcaaggtacac

SEQ ID NO: 1011781 - DNA, 15 bp, Homo sapiens
cattttcaaggtaca

SEQ ID NO: 1011782 - DNA, 15 bp, Homo sapiens
gcattttcaaggtac

SEQ ID NO: 1011783 - DNA, 15 bp, Homo sapiens
agcattttcaaggta

SEQ ID NO: 1011784 - DNA, 15 bp, Homo sapiens
tagcattttcaaggt

SEQ ID NO: 1011785 - DNA, 15 bp, Homo sapiens
ttagcattttcaagg

SEQ ID NO: 1011786 - DNA, 15 bp, Homo sapiens
attagcattttcaag

SEQ ID NO: 1011787 - DNA, 15 bp, Homo sapiens
tattagcattttcaa

SEQ ID NO: 1011788 - DNA, 15 bp, Homo sapiens
atattagcattttca

SEQ ID NO: 1011789 - DNA, 15 bp, Homo sapiens
tatattagcattttc

SEQ ID NO: 1011790 - DNA, 15 bp, Homo sapiens
gtatattagcatttt

SEQ ID NO: 1011791 - DNA, 15 bp, Homo sapiens
tgtatattagcattt

SEQ ID NO: 1011792 - DNA, 15 bp, Homo sapiens
gtgtatattagcatt

SEQ ID NO: 1011793 - DNA, 15 bp, Homo sapiens
ggtgtatattagcat

SEQ ID NO: 1011794 - DNA, 15 bp, Homo sapiens
aggtgtatattagca

SEQ ID NO: 1011795 - DNA, 15 bp, Homo sapiens
caggtgtatattagc

SEQ ID NO: 1011796 - DNA, 15 bp, Homo sapiens
acaggtgtatattag

SEQ ID NO: 1011797 - DNA, 15 bp, Homo sapiens
aacaggtgtatatta

SEQ ID NO: 1011798 - DNA, 15 bp, Homo sapiens
aaacaggtgtatatt

SEQ ID NO: 1011799 - DNA, 15 bp, Homo sapiens
aaaacaggtgtatat

SEQ ID NO: 1011800 - DNA, 15 bp, Homo sapiens
caaaacaggtgtata

SEQ ID NO: 1011801 - DNA, 15 bp, Homo sapiens
acaaaacaggtgtat

SEQ ID NO: 1011802 - DNA, 15 bp, Homo sapiens
aacaaaacaggtgta

SEQ ID NO: 1011803 - DNA, 15 bp, Homo sapiens
taacaaaacaggtgt

SEQ ID NO: 1011804 - DNA, 15 bp, Homo sapiens
gtaacaaaacaggtg

SEQ ID NO: 1011805 - DNA, 15 bp, Homo sapiens
tgtaacaaaacaggt

SEQ ID NO: 1011806 - DNA, 15 bp, Homo sapiens
ctgtaacaaaacagg

SEQ ID NO: 1011807 - DNA, 15 bp, Homo sapiens
tctgtaacaaaacag

SEQ ID NO: 1011808 - DNA, 15 bp, Homo sapiens
ctctgtaacaaaaca

SEQ ID NO: 1011809 - DNA, 15 bp, Homo sapiens
cctctgtaacaaaac

SEQ ID NO: 1011810 - DNA, 15 bp, Homo sapiens
acctctgtaacaaaa

SEQ ID NO: 1011811 - DNA, 15 bp, Homo sapiens
cacctctgtaacaaa

SEQ ID NO: 1011812 - DNA, 15 bp, Homo sapiens
ccacctctgtaacaa

SEQ ID NO: 1011813 - DNA, 15 bp, Homo sapiens
tccacctctgtaaca

SEQ ID NO: 1011814 - DNA, 15 bp, Homo sapiens
ctccacctctgtaac

SEQ ID NO: 1011815 - DNA, 15 bp, Homo sapiens
gctccacctctgtaa

SEQ ID NO: 1011816 - DNA, 15 bp, Homo sapiens
tgctccacctctgta

SEQ ID NO: 1011817 - DNA, 15 bp, Homo sapiens
gtgctccacctctgt

SEQ ID NO: 1011818 - DNA, 15 bp, Homo sapiens
tgtgctccacctctg

SEQ ID NO: 1011819 - DNA, 15 bp, Homo sapiens
ctgtgctccacctct

SEQ ID NO: 1011820 - DNA, 15 bp, Homo sapiens
actgtgctccacctc

SEQ ID NO: 1011821 - DNA, 15 bp, Homo sapiens
cactgtgctccacct

SEQ ID NO: 1011822 - DNA, 15 bp, Homo sapiens
tcactgtgctccacc

SEQ ID NO: 1011823 - DNA, 15 bp, Homo sapiens
ttcactgtgctccac

SEQ ID NO: 1011824 - DNA, 15 bp, Homo sapiens
tttcactgtgctcca

SEQ ID NO: 1011825 - DNA, 15 bp, Homo sapiens
ctttcactgtgctcc

SEQ ID NO: 1011826 - DNA, 15 bp, Homo sapiens
tctttcactgtgctc

SEQ ID NO: 1011827 - DNA, 15 bp, Homo sapiens
ttctttcactgtgct

SEQ ID NO: 1011828 - DNA, 15 bp, Homo sapiens
attctttcactgtgc

SEQ ID NO: 1011829 - DNA, 15 bp, Homo sapiens
aattctttcactgtg

SEQ ID NO: 1011830 - DNA, 15 bp, Homo sapiens
gaattctttcactgt

SEQ ID NO: 1011831 - DNA, 15 bp, Homo sapiens
tgaattctttcactg

SEQ ID NO: 1011832 - DNA, 15 bp, Homo sapiens
ttgaattctttcact

SEQ ID NO: 1011833 - DNA, 15 bp, Homo sapiens
cttgaattctttcac

SEQ ID NO: 1011834 - DNA, 15 bp, Homo sapiens
tcttgaattctttca

SEQ ID NO: 1011835 - DNA, 15 bp, Homo sapiens
atcttgaattctttc

SEQ ID NO: 1011836 - DNA, 15 bp, Homo sapiens
catcttgaattcttt

SEQ ID NO: 1011837 - DNA, 15 bp, Homo sapiens
gcatcttgaattctt

SEQ ID NO: 1011838 - DNA, 15 bp, Homo sapiens
ggcatcttgaattct

SEQ ID NO: 1011839 - DNA, 15 bp, Homo sapiens
tggcatcttgaattc

SEQ ID NO: 1011840 - DNA, 15 bp, Homo sapiens
gtggcatcttgaatt

SEQ ID NO: 1011841 - DNA, 15 bp, Homo sapiens
ggtggcatcttgaat

SEQ ID NO: 1011842 - DNA, 15 bp, Homo sapiens
aggtggcatcttgaa

SEQ ID NO: 1011843 - DNA, 15 bp, Homo sapiens
taggtggcatcttga

SEQ ID NO: 1011844 - DNA, 15 bp, Homo sapiens
ttaggtggcatcttg

SEQ ID NO: 1011845 - DNA, 15 bp, Homo sapiens
attaggtggcatctt

SEQ ID NO: 1011846 - DNA, 15 bp, Homo sapiens
tattaggtggcatct

SEQ ID NO: 1011847 - DNA, 15 bp, Homo sapiens
atattaggtggcatc

SEQ ID NO: 1011848 - DNA, 15 bp, Homo sapiens
tatattaggtggcat

SEQ ID NO: 1011849 - DNA, 15 bp, Homo sapiens
ttatattaggtggca

SEQ ID NO: 1011850 - DNA, 15 bp, Homo sapiens
tttatattaggtggc

SEQ ID NO: 1011851 - DNA, 15 bp, Homo sapiens
gtttatattaggtgg

SEQ ID NO: 1011852 - DNA, 15 bp, Homo sapiens
agtttatattaggtg

SEQ ID NO: 1011853 - DNA, 15 bp, Homo sapiens
cagtttatattaggt

SEQ ID NO: 1011854 - DNA, 15 bp, Homo sapiens
ccagtttatattagg

SEQ ID NO: 1011855 - DNA, 15 bp, Homo sapiens
gggtacattaaatat

SEQ ID NO: 1011856 - DNA, 15 bp, Homo sapiens
agggtacattaaata

SEQ ID NO: 1011857 - DNA, 15 bp, Homo sapiens
aagggtacattaaat

SEQ ID NO: 1011858 - DNA, 15 bp, Homo sapiens
aaagggtacattaaa

SEQ ID NO: 1011859 - DNA, 15 bp, Homo sapiens
aaaagggtacattaa

SEQ ID NO: 1011860 - DNA, 15 bp, Homo sapiens
caaaagggtacatta

SEQ ID NO: 1011861 - DNA, 15 bp, Homo sapiens
tcaaaagggtacatt

SEQ ID NO: 1011862 - DNA, 15 bp, Homo sapiens
ttcaaaagggtacat

SEQ ID NO: 1011863 - DNA, 15 bp, Homo sapiens
tttcaaaagggtaca

SEQ ID NO: 1011864 - DNA, 15 bp, Homo sapiens
ttttcaaaagggtac

SEQ ID NO: 1011865 - DNA, 15 bp, Homo sapiens
tttttcaaaagggta

SEQ ID NO: 1011866 - DNA, 15 bp, Homo sapiens
ctttttcaaaagggt

SEQ ID NO: 1011867 - DNA, 15 bp, Homo sapiens
cctttttcaaaaggg

SEQ ID NO: 1011868 - DNA, 15 bp, Homo sapiens
gcctttttcaaaagg

SEQ ID NO: 1011869 - DNA, 15 bp, Homo sapiens
agcctttttcaaaag

SEQ ID NO: 1011870 - DNA, 15 bp, Homo sapiens
aagcctttttcaaaa

SEQ ID NO: 1011871 - DNA, 15 bp, Homo sapiens
aaagcctttttcaaa

SEQ ID NO: 1011872 - DNA, 15 bp, Homo sapiens
aaaagcctttttcaa

SEQ ID NO: 1011873 - DNA, 15 bp, Homo sapiens
aaaaagcctttttca

SEQ ID NO: 1011874 - DNA, 15 bp, Homo sapiens
aaaaaagcctttttc

SEQ ID NO: 1011875 - DNA, 15 bp, Homo sapiens
gaaaaaagccttttt

SEQ ID NO: 1011876 - DNA, 15 bp, Homo sapiens
agaaaaaagcctttt

SEQ ID NO: 1011877 - DNA, 15 bp, Homo sapiens
aagaaaaaagccttt

SEQ ID NO: 1011878 - DNA, 15 bp, Homo sapiens
aaagaaaaaagcctt

SEQ ID NO: 1011879 - DNA, 15 bp, Homo sapiens
taaagaaaaaagcct

SEQ ID NO: 1011880 - DNA, 15 bp, Homo sapiens
ttaaagaaaaaagcc

SEQ ID NO: 1011881 - DNA, 15 bp, Homo sapiens
gttaaagaaaaaagc

SEQ ID NO: 1011882 - DNA, 15 bp, Homo sapiens
agttaaagaaaaaag

SEQ ID NO: 1011883 - DNA, 15 bp, Homo sapiens
tagttaaagaaaaaa

SEQ ID NO: 1011884 - DNA, 15 bp, Homo sapiens
ttagttaaagaaaaa

SEQ ID NO: 1011885 - DNA, 15 bp, Homo sapiens
gttagttaaagaaaa

SEQ ID NO: 1011886 - DNA, 15 bp, Homo sapiens
ggttagttaaagaaa

SEQ ID NO: 1011887 - DNA, 15 bp, Homo sapiens
tggttagttaaagaa

SEQ ID NO: 1011888 - DNA, 15 bp, Homo sapiens
atggttagttaaaga

SEQ ID NO: 1011889 - DNA, 15 bp, Homo sapiens
tatggttagttaaag

SEQ ID NO: 1011890 - DNA, 15 bp, Homo sapiens
ctatggttagttaaa

SEQ ID NO: 1011891 - DNA, 15 bp, Homo sapiens
actatggttagttaa

SEQ ID NO: 1011892 - DNA, 15 bp, Homo sapiens
tactatggttagtta

SEQ ID NO: 1011893 - DNA, 15 bp, Homo sapiens
ttactatggttagtt

SEQ ID NO: 1011894 - DNA, 15 bp, Homo sapiens
gttactatggttagt

SEQ ID NO: 1011895 - DNA, 15 bp, Homo sapiens
agttactatggttag

SEQ ID NO: 1011896 - DNA, 15 bp, Homo sapiens
aagttactatggtta

SEQ ID NO: 1011897 - DNA, 15 bp, Homo sapiens
aaagttactatggtt

SEQ ID NO: 1011898 - DNA, 15 bp, Homo sapiens
taaagttactatggt

SEQ ID NO: 1011899 - DNA, 15 bp, Homo sapiens
ataaagttactatgg

SEQ ID NO: 1011900 - DNA, 15 bp, Homo sapiens
aataaagttactatg

SEQ ID NO: 1011901 - DNA, 15 bp, Homo sapiens
taataaagttactat

SEQ ID NO: 1011902 - DNA, 15 bp, Homo sapiens
ataataaagttacta

SEQ ID NO: 1011903 - DNA, 15 bp, Homo sapiens
tataataaagttact

SEQ ID NO: 1011904 - DNA, 15 bp, Homo sapiens
gtataataaagttac

SEQ ID NO: 1011905 - DNA, 15 bp, Homo sapiens
ggtataataaagtta

SEQ ID NO: 1011906 - DNA, 15 bp, Homo sapiens
aggtataataaagtt

SEQ ID NO: 1011907 - DNA, 15 bp, Homo sapiens
taggtataataaagt

SEQ ID NO: 1011908 - DNA, 15 bp, Homo sapiens
ttaggtataataaag

SEQ ID NO: 1011909 - DNA, 15 bp, Homo sapiens
gttaggtataataaa

SEQ ID NO: 1011910 - DNA, 15 bp, Homo sapiens
tgttaggtataataa

SEQ ID NO: 1011911 - DNA, 15 bp, Homo sapiens
ttgttaggtataata

SEQ ID NO: 1011912 - DNA, 15 bp, Homo sapiens
tttgttaggtataat

SEQ ID NO: 1011913 - DNA, 15 bp, Homo sapiens
ttttgttaggtataa

SEQ ID NO: 1011914 - DNA, 15 bp, Homo sapiens
attttgttaggtata

SEQ ID NO: 1011915 - DNA, 15 bp, Homo sapiens
cattttgttaggtat

SEQ ID NO: 1011916 - DNA, 15 bp, Homo sapiens
tcattttgttaggta

SEQ ID NO: 1011917 - DNA, 15 bp, Homo sapiens
gtcattttgttaggt

SEQ ID NO: 1011918 - DNA, 15 bp, Homo sapiens
tgtcattttgttagg

SEQ ID NO: 1011919 - DNA, 15 bp, Homo sapiens
ctgtcattttgttag

SEQ ID NO: 1011920 - DNA, 15 bp, Homo sapiens
actgtcattttgtta

SEQ ID NO: 1011921 - DNA, 15 bp, Homo sapiens
tactgtcattttgtt

SEQ ID NO: 1011922 - DNA, 15 bp, Homo sapiens
ttactgtcattttgt

SEQ ID NO: 1011923 - DNA, 15 bp, Homo sapiens
attactgtcattttg

SEQ ID NO: 1011924 - DNA, 15 bp, Homo sapiens
aattactgtcatttt

SEQ ID NO: 1011925 - DNA, 15 bp, Homo sapiens
aaattactgtcattt

SEQ ID NO: 1011926 - DNA, 15 bp, Homo sapiens
aaaattactgtcatt

SEQ ID NO: 1011927 - DNA, 15 bp, Homo sapiens
gaaaattactgtcat

SEQ ID NO: 1011928 - DNA, 15 bp, Homo sapiens
agaaaattactgtca

SEQ ID NO: 1011929 - DNA, 15 bp, Homo sapiens
tagaaaattactgtc

SEQ ID NO: 1011930 - DNA, 15 bp, Homo sapiens
ttagaaaattactgt

SEQ ID NO: 1011931 - DNA, 15 bp, Homo sapiens
attagaaaattactg

SEQ ID NO: 1011932 - DNA, 15 bp, Homo sapiens
gatattagaaaatta

SEQ ID NO: 1011933 - DNA, 15 bp, Homo sapiens
cgatattagaaaatt

SEQ ID NO: 1011934 - DNA, 15 bp, Homo sapiens
gcgatattagaaaat

SEQ ID NO: 1011935 - DNA, 15 bp, Homo sapiens
ggcgatattagaaaa

SEQ ID NO: 1011936 - DNA, 15 bp, Homo sapiens
aggcgatattagaaa

SEQ ID NO: 1011937 - DNA, 15 bp, Homo sapiens
taggcgatattagaa

SEQ ID NO: 1011938 - DNA, 15 bp, Homo sapiens
ttaggcgatattaga

SEQ ID NO: 1011939 - DNA, 15 bp, Homo sapiens
attaggcgatattag

SEQ ID NO: 1011940 - DNA, 15 bp, Homo sapiens
tattaggcgatatta

SEQ ID NO: 1011941 - DNA, 15 bp, Homo sapiens
gtattaggcgatatt

SEQ ID NO: 1011942 - DNA, 15 bp, Homo sapiens
ggtattaggcgatat

SEQ ID NO: 1011943 - DNA, 15 bp, Homo sapiens
gggtattaggcgata

SEQ ID NO: 1011944 - DNA, 15 bp, Homo sapiens
agggtattaggcgat

SEQ ID NO: 1011945 - DNA, 15 bp, Homo sapiens
cagggtattaggcga

SEQ ID NO: 1011946 - DNA, 15 bp, Homo sapiens
tcagggtattaggcg

SEQ ID NO: 1011947 - DNA, 15 bp, Homo sapiens
atcagggtattaggc

SEQ ID NO: 1011948 - DNA, 15 bp, Homo sapiens
aatcagggtattagg

SEQ ID NO: 1011949 - DNA, 15 bp, Homo sapiens
taatcagggtattag

SEQ ID NO: 1011950 - DNA, 15 bp, Homo sapiens
ataatcagggtatta

SEQ ID NO: 1011951 - DNA, 15 bp, Homo sapiens
tataatcagggtatt

SEQ ID NO: 1011952 - DNA, 15 bp, Homo sapiens
ctataatcagggtat

SEQ ID NO: 1011953 - DNA, 15 bp, Homo sapiens
actataatcagggta

SEQ ID NO: 1011954 - DNA, 15 bp, Homo sapiens
gactataatcagggt

SEQ ID NO: 1011955 - DNA, 15 bp, Homo sapiens
tgactataatcaggg

SEQ ID NO: 1011956 - DNA, 15 bp, Homo sapiens
gtgactataatcagg

SEQ ID NO: 1011957 - DNA, 15 bp, Homo sapiens
tgtgactataatcag

SEQ ID NO: 1011958 - DNA, 15 bp, Homo sapiens
atgtgactataatca

SEQ ID NO: 1011959 - DNA, 15 bp, Homo sapiens
aatgtgactataatc

SEQ ID NO: 1011960 - DNA, 15 bp, Homo sapiens
aaatgtgactataat

SEQ ID NO: 1011961 - DNA, 15 bp, Homo sapiens
aaaatgtgactataa

SEQ ID NO: 1011962 - DNA, 15 bp, Homo sapiens
aaaaatgtgactata

SEQ ID NO: 1011963 - DNA, 15 bp, Homo sapiens
aaaaaatgtgactat

SEQ ID NO: 1011964 - DNA, 15 bp, Homo sapiens
taaaaaatgtgacta

SEQ ID NO: 1011965 - DNA, 15 bp, Homo sapiens
gtaaaaaatgtgact

SEQ ID NO: 1011966 - DNA, 15 bp, Homo sapiens
tgtaaaaaatgtgac

SEQ ID NO: 1011967 - DNA, 15 bp, Homo sapiens
atgtaaaaaatgtga

SEQ ID NO: 1011968 - DNA, 15 bp, Homo sapiens
aatgtaaaaaatgtg

SEQ ID NO: 1011969 - DNA, 15 bp, Homo sapiens
aaatgtaaaaaatgt

SEQ ID NO: 1011970 - DNA, 15 bp, Homo sapiens
aaaatgtaaaaaatg

SEQ ID NO: 1011971 - DNA, 15 bp, Homo sapiens
aaaaatgtaaaaaat

SEQ ID NO: 1011972 - DNA, 15 bp, Homo sapiens
aaaaaatgtaaaaaa

SEQ ID NO: 1011973 - DNA, 15 bp, Homo sapiens
caaaaaatgtaaaaa

SEQ ID NO: 1011974 - DNA, 15 bp, Homo sapiens
tcaaaaaatgtaaaa

SEQ ID NO: 1011975 - DNA, 15 bp, Homo sapiens
atcaaaaaatgtaaa

SEQ ID NO: 1011976 - DNA, 15 bp, Homo sapiens
gatcaaaaaatgtaa

SEQ ID NO: 1011977 - DNA, 15 bp, Homo sapiens
tgatcaaaaaatgta

SEQ ID NO: 1011978 - DNA, 15 bp, Homo sapiens
ttgatcaaaaaatgt

SEQ ID NO: 1011979 - DNA, 15 bp, Homo sapiens
tttgatcaaaaaatg

SEQ ID NO: 1011980 - DNA, 15 bp, Homo sapiens
ctttgatcaaaaaat

SEQ ID NO: 1011981 - DNA, 15 bp, Homo sapiens
tctttgatcaaaaaa

SEQ ID NO: 1011982 - DNA, 15 bp, Homo sapiens
ttctttgatcaaaaa

SEQ ID NO: 1011983 - DNA, 15 bp, Homo sapiens
attctttgatcaaaa

SEQ ID NO: 1011984 - DNA, 15 bp, Homo sapiens
tattctttgatcaaa

SEQ ID NO: 1011985 - DNA, 15 bp, Homo sapiens
ttattctttgatcaa

SEQ ID NO: 1011986 - DNA, 15 bp, Homo sapiens
cttattctttgatca

SEQ ID NO: 1011987 - DNA, 15 bp, Homo sapiens
gcttattctttgatc

SEQ ID NO: 1011988 - DNA, 15 bp, Homo sapiens
tgcttattctttgat

SEQ ID NO: 1011989 - DNA, 15 bp, Homo sapiens
atgcttattctttga

SEQ ID NO: 1011990 - DNA, 15 bp, Homo sapiens
aatgcttattctttg

SEQ ID NO: 1011991 - DNA, 15 bp, Homo sapiens
aaatgcttattcttt

SEQ ID NO: 1011992 - DNA, 15 bp, Homo sapiens
caaatgcttattctt

SEQ ID NO: 1011993 - DNA, 15 bp, Homo sapiens
ccaaatgcttattct

SEQ ID NO: 1011994 - DNA, 15 bp, Homo sapiens
tccaaatgcttattc

SEQ ID NO: 1011995 - DNA, 15 bp, Homo sapiens
atccaaatgcttatt

SEQ ID NO: 1011996 - DNA, 15 bp, Homo sapiens
catccaaatgcttat

SEQ ID NO: 1011997 - DNA, 15 bp, Homo sapiens
acatccaaatgctta

SEQ ID NO: 1011998 - DNA, 15 bp, Homo sapiens
aacatccaaatgctt

SEQ ID NO: 1011999 - DNA, 15 bp, Homo sapiens
taacatccaaatgct

SEQ ID NO: 1012000 - DNA, 15 bp, Homo sapiens
gtaacatccaaatgc

SEQ ID NO: 1012001 - DNA, 15 bp, Homo sapiens
tgtaacatccaaatg

SEQ ID NO: 1012002 - DNA, 15 bp, Homo sapiens
atgtaacatccaaat

SEQ ID NO: 1012003 - DNA, 15 bp, Homo sapiens
gatgtaacatccaaa

SEQ ID NO: 1012004 - DNA, 15 bp, Homo sapiens
agatgtaacatccaa

SEQ ID NO: 1012005 - DNA, 15 bp, Homo sapiens
gagatgtaacatcca

SEQ ID NO: 1012006 - DNA, 15 bp, Homo sapiens
tgagatgtaacatcc

SEQ ID NO: 1012007 - DNA, 15 bp, Homo sapiens
atgagatgtaacatc

SEQ ID NO: 1012008 - DNA, 15 bp, Homo sapiens
tatgagatgtaacat

SEQ ID NO: 1012009 - DNA, 15 bp, Homo sapiens
ttatgagatgtaaca

SEQ ID NO: 1012010 - DNA, 15 bp, Homo sapiens
tttatgagatgtaac

SEQ ID NO: 1012011 - DNA, 15 bp, Homo sapiens
atttatgagatgtaa

SEQ ID NO: 1012012 - DNA, 15 bp, Homo sapiens
gatttatgagatgta

SEQ ID NO: 1012013 - DNA, 15 bp, Homo sapiens
agatttatgagatgt

SEQ ID NO: 1012014 - DNA, 15 bp, Homo sapiens
aagatttatgagatg

SEQ ID NO: 1012015 - DNA, 15 bp, Homo sapiens
aaagatttatgagat

SEQ ID NO: 1012016 - DNA, 15 bp, Homo sapiens
aaaagatttatgaga

SEQ ID NO: 1012017 - DNA, 15 bp, Homo sapiens
aaaaagatttatgag

SEQ ID NO: 1012018 - DNA, 15 bp, Homo sapiens
taaaaagatttatga

SEQ ID NO: 1012019 - DNA, 15 bp, Homo sapiens
ttaaaaagatttatg

SEQ ID NO: 1012020 - DNA, 15 bp, Homo sapiens
attaaaaagatttat

SEQ ID NO: 1012021 - DNA, 15 bp, Homo sapiens
tattaaaaagattta

SEQ ID NO: 1012022 - DNA, 15 bp, Homo sapiens
atattaaaaagattt

SEQ ID NO: 1012023 - DNA, 15 bp, Homo sapiens
tatattaaaaagatt

SEQ ID NO: 1012024 - DNA, 15 bp, Homo sapiens
ctatattaaaaagat

SEQ ID NO: 1012025 - DNA, 15 bp, Homo sapiens
tctatattaaaaaga

SEQ ID NO: 1012026 - DNA, 15 bp, Homo sapiens
ttctatattaaaaag

SEQ ID NO: 1012027 - DNA, 15 bp, Homo sapiens
attctatattaaaaa

SEQ ID NO: 1012028 - DNA, 15 bp, Homo sapiens
gattctatattaaaa

SEQ ID NO: 1012029 - DNA, 15 bp, Homo sapiens
ggattctatattaaa

SEQ ID NO: 1012030 - DNA, 15 bp, Homo sapiens
gggattctatattaa

SEQ ID NO: 1012031 - DNA, 15 bp, Homo sapiens
ggggattctatatta

SEQ ID NO: 1012032 - DNA, 15 bp, Homo sapiens
aggggattctatatt

SEQ ID NO: 1012033 - DNA, 15 bp, Homo sapiens
aaggggattctatat

SEQ ID NO: 1012034 - DNA, 15 bp, Homo sapiens
caaggggattctata

SEQ ID NO: 1012035 - DNA, 15 bp, Homo sapiens
ccaaggggattctat

SEQ ID NO: 1012036 - DNA, 15 bp, Homo sapiens
accaaggggattcta

SEQ ID NO: 1012037 - DNA, 15 bp, Homo sapiens
aaccaaggggattct

SEQ ID NO: 1012038 - DNA, 15 bp, Homo sapiens
aaaccaaggggattc

SEQ ID NO: 1012039 - DNA, 15 bp, Homo sapiens
aaaaccaaggggatt

SEQ ID NO: 1012040 - DNA, 15 bp, Homo sapiens
gaaaaccaaggggat

SEQ ID NO: 1012041 - DNA, 15 bp, Homo sapiens
agaaaaccaagggga

SEQ ID NO: 1012042 - DNA, 15 bp, Homo sapiens
aagaaaaccaagggg

SEQ ID NO: 1012043 - DNA, 15 bp, Homo sapiens
aaagaaaaccaaggg

SEQ ID NO: 1012044 - DNA, 15 bp, Homo sapiens
aaaagaaaaccaagg

SEQ ID NO: 1012045 - DNA, 15 bp, Homo sapiens
gaaaaagaaaaccaa

SEQ ID NO: 1012046 - DNA, 15 bp, Homo sapiens
agaaaaagaaaacca

SEQ ID NO: 1012047 - DNA, 15 bp, Homo sapiens
gagaaaaagaaaacc

SEQ ID NO: 1012048 - DNA, 15 bp, Homo sapiens
ggagaaaaagaaaac

SEQ ID NO: 1012049 - DNA, 15 bp, Homo sapiens
tggagaaaaagaaaa

SEQ ID NO: 1012050 - DNA, 15 bp, Homo sapiens
ttggagaaaaagaaa

SEQ ID NO: 1012051 - DNA, 15 bp, Homo sapiens
tttggagaaaaagaa

SEQ ID NO: 1012052 - DNA, 15 bp, Homo sapiens
ttttggagaaaaaga

SEQ ID NO: 1012053 - DNA, 15 bp, Homo sapiens
tttttggagaaaaag

SEQ ID NO: 1012054 - DNA, 15 bp, Homo sapiens
ttttttggagaaaaa

SEQ ID NO: 1012055 - DNA, 15 bp, Homo sapiens
attttttggagaaaa

SEQ ID NO: 1012056 - DNA, 15 bp, Homo sapiens
cattttttggagaaa

SEQ ID NO: 1012057 - DNA, 15 bp, Homo sapiens
acattttttggagaa

SEQ ID NO: 1012058 - DNA, 15 bp, Homo sapiens
aacattttttggaga

SEQ ID NO: 1012059 - DNA, 15 bp, Homo sapiens
aaacattttttggag

SEQ ID NO: 1012060 - DNA, 15 bp, Homo sapiens
caaacattttttgga

SEQ ID NO: 1012061 - DNA, 15 bp, Homo sapiens
tcaaacattttttgg

SEQ ID NO: 1012062 - DNA, 15 bp, Homo sapiens
ttcaaacattttttg

SEQ ID NO: 1012063 - DNA, 15 bp, Homo sapiens
cttcaaacatttttt

SEQ ID NO: 1012064 - DNA, 15 bp, Homo sapiens
tcttcaaacattttt

SEQ ID NO: 1012065 - DNA, 15 bp, Homo sapiens
atcttcaaacatttt

SEQ ID NO: 1012066 - DNA, 15 bp, Homo sapiens
catcttcaaacattt

SEQ ID NO: 1012067 - DNA, 15 bp, Homo sapiens
acatcttcaaacatt

SEQ ID NO: 1012068 - DNA, 15 bp, Homo sapiens
tacatcttcaaacat

SEQ ID NO: 1012069 - DNA, 15 bp, Homo sapiens
atacatcttcaaaca

SEQ ID NO: 1012070 - DNA, 15 bp, Homo sapiens
gatacatcttcaaac

SEQ ID NO: 1012071 - DNA, 15 bp, Homo sapiens
agatacatcttcaaa

SEQ ID NO: 1012072 - DNA, 15 bp, Homo sapiens
tagatacatcttcaa

SEQ ID NO: 1012073 - DNA, 15 bp, Homo sapiens
ttagatacatcttca

SEQ ID NO: 1012074 - DNA, 15 bp, Homo sapiens
gttagatacatcttc

SEQ ID NO: 1012075 - DNA, 15 bp, Homo sapiens
agttagatacatctt

SEQ ID NO: 1012076 - DNA, 15 bp, Homo sapiens
aagttagatacatct

SEQ ID NO: 1012077 - DNA, 15 bp, Homo sapiens
aaagttagatacatc

SEQ ID NO: 1012078 - DNA, 15 bp, Homo sapiens
aaaagttagatacat

SEQ ID NO: 1012079 - DNA, 15 bp, Homo sapiens
caaaagttagataca

SEQ ID NO: 1012080 - DNA, 15 bp, Homo sapiens
acaaaagttagatac

SEQ ID NO: 1012081 - DNA, 15 bp, Homo sapiens
cacaaaagttagata

SEQ ID NO: 1012082 - DNA, 15 bp, Homo sapiens
acacaaaagttagat

SEQ ID NO: 1012083 - DNA, 15 bp, Homo sapiens
cacacaaaagttaga

SEQ ID NO: 1012084 - DNA, 15 bp, Homo sapiens
acacacaaaagttag

SEQ ID NO: 1012085 - DNA, 15 bp, Homo sapiens
cacacacaaaagtta

SEQ ID NO: 1012086 - DNA, 15 bp, Homo sapiens
acacacacaaaagtt

SEQ ID NO: 1012087 - DNA, 15 bp, Homo sapiens
cacacacacaaaagt

SEQ ID NO: 1012088 - DNA, 15 bp, Homo sapiens
acacacacacaaaag

SEQ ID NO: 1012089 - DNA, 15 bp, Homo sapiens
gacacacacacaaaa

SEQ ID NO: 1012090 - DNA, 15 bp, Homo sapiens
tgacacacacacaaa

SEQ ID NO: 1012091 - DNA, 15 bp, Homo sapiens
atgacacacacacaa

SEQ ID NO: 1012092 - DNA, 15 bp, Homo sapiens
aatgacacacacaca

SEQ ID NO: 1012093 - DNA, 15 bp, Homo sapiens
aaatgacacacacac

SEQ ID NO: 1012094 - DNA, 15 bp, Homo sapiens
aaaatgacacacaca

SEQ ID NO: 1012095 - DNA, 15 bp, Homo sapiens
taaaatgacacacac

SEQ ID NO: 1012096 - DNA, 15 bp, Homo sapiens
gtaaaatgacacaca

SEQ ID NO: 1012097 - DNA, 15 bp, Homo sapiens
agtaaaatgacacac

SEQ ID NO: 1012098 - DNA, 15 bp, Homo sapiens
aagtaaaatgacaca

SEQ ID NO: 1012099 - DNA, 15 bp, Homo sapiens
caagtaaaatgacac

SEQ ID NO: 1012100 - DNA, 15 bp, Homo sapiens
acaagtaaaatgaca

SEQ ID NO: 1012101 - DNA, 15 bp, Homo sapiens
aacaagtaaaatgac

SEQ ID NO: 1012102 - DNA, 15 bp, Homo sapiens
gaacaagtaaaatga

SEQ ID NO: 1012103 - DNA, 15 bp, Homo sapiens
ggaacaagtaaaatg

SEQ ID NO: 1012104 - DNA, 15 bp, Homo sapiens
aggaacaagtaaaat

SEQ ID NO: 1012105 - DNA, 15 bp, Homo sapiens
caggaacaagtaaaa

SEQ ID NO: 1012106 - DNA, 15 bp, Homo sapiens
acaggaacaagtaaa

SEQ ID NO: 1012107 - DNA, 15 bp, Homo sapiens
cacaggaacaagtaa

SEQ ID NO: 1012108 - DNA, 15 bp, Homo sapiens
acacaggaacaagta

SEQ ID NO: 1012109 - DNA, 15 bp, Homo sapiens
gacacaggaacaagt

SEQ ID NO: 1012110 - DNA, 15 bp, Homo sapiens
ggacacaggaacaag

SEQ ID NO: 1012111 - DNA, 15 bp, Homo sapiens
gggacacaggaacaa

SEQ ID NO: 1012112 - DNA, 15 bp, Homo sapiens
agggacacaggaaca

SEQ ID NO: 1012113 - DNA, 15 bp, Homo sapiens
aagggacacaggaac

SEQ ID NO: 1012114 - DNA, 15 bp, Homo sapiens
caagggacacaggaa

SEQ ID NO: 1012115 - DNA, 15 bp, Homo sapiens
acaagggacacagga

SEQ ID NO: 1012116 - DNA, 15 bp, Homo sapiens
tacaagggacacagg

SEQ ID NO: 1012117 - DNA, 15 bp, Homo sapiens
atacaagggacacag

SEQ ID NO: 1012118 - DNA, 15 bp, Homo sapiens
aatacaagggacaca

SEQ ID NO: 1012119 - DNA, 15 bp, Homo sapiens
taatacaagggacac

SEQ ID NO: 1012120 - DNA, 15 bp, Homo sapiens
gtaatacaagggaca

SEQ ID NO: 1012121 - DNA, 15 bp, Homo sapiens
agtaatacaagggac

SEQ ID NO: 1012122 - DNA, 15 bp, Homo sapiens
tagtaatacaaggga

SEQ ID NO: 1012123 - DNA, 15 bp, Homo sapiens
ttagtaatacaaggg

SEQ ID NO: 1012124 - DNA, 15 bp, Homo sapiens
tttagtaatacaagg

SEQ ID NO: 1012125 - DNA, 15 bp, Homo sapiens
ttttagtaatacaag

SEQ ID NO: 1012126 - DNA, 15 bp, Homo sapiens
cttttagtaatacaa

SEQ ID NO: 1012127 - DNA, 15 bp, Homo sapiens
acttttagtaataca

SEQ ID NO: 1012128 - DNA, 15 bp, Homo sapiens
aacttttagtaatac

SEQ ID NO: 1012129 - DNA, 15 bp, Homo sapiens
taacttttagtaata

SEQ ID NO: 1012130 - DNA, 15 bp, Homo sapiens
ctaacttttagtaat

SEQ ID NO: 1012131 - DNA, 15 bp, Homo sapiens
cctaacttttagtaa

SEQ ID NO: 1012132 - DNA, 15 bp, Homo sapiens
acctaacttttagta

SEQ ID NO: 1012133 - DNA, 15 bp, Homo sapiens
gacctaacttttagt

SEQ ID NO: 1012134 - DNA, 15 bp, Homo sapiens
tgacctaacttttag

SEQ ID NO: 1012135 - DNA, 15 bp, Homo sapiens
ctgacctaactttta

SEQ ID NO: 1012136 - DNA, 15 bp, Homo sapiens
tctgacctaactttt

SEQ ID NO: 1012137 - DNA, 15 bp, Homo sapiens
ttctgacctaacttt

SEQ ID NO: 1012138 - DNA, 15 bp, Homo sapiens
gttctgacctaactt

SEQ ID NO: 1012139 - DNA, 15 bp, Homo sapiens
ggttctgacctaact

SEQ ID NO: 1012140 - DNA, 15 bp, Homo sapiens
gggttctgacctaac

SEQ ID NO: 1012141 - DNA, 15 bp, Homo sapiens
agggttctgacctaa

SEQ ID NO: 1012142 - DNA, 15 bp, Homo sapiens
tagggttctgaccta

SEQ ID NO: 1012143 - DNA, 15 bp, Homo sapiens
ttagggttctgacct

SEQ ID NO: 1012144 - DNA, 15 bp, Homo sapiens
cttagggttctgacc

SEQ ID NO: 1012145 - DNA, 15 bp, Homo sapiens
acttagggttctgac

SEQ ID NO: 1012146 - DNA, 15 bp, Homo sapiens
aacttagggttctga

SEQ ID NO: 1012147 - DNA, 15 bp, Homo sapiens
taacttagggttctg

SEQ ID NO: 1012148 - DNA, 15 bp, Homo sapiens
gtaacttagggttct

SEQ ID NO: 1012149 - DNA, 15 bp, Homo sapiens
tgtaacttagggttc

SEQ ID NO: 1012150 - DNA, 15 bp, Homo sapiens
atgtaacttagggtt

SEQ ID NO: 1012151 - DNA, 15 bp, Homo sapiens
aatgtaacttagggt

SEQ ID NO: 1012152 - DNA, 15 bp, Homo sapiens
gaatgtaacttaggg

SEQ ID NO: 1012153 - DNA, 15 bp, Homo sapiens
tgaatgtaacttagg

SEQ ID NO: 1012154 - DNA, 15 bp, Homo sapiens
ctgaatgtaacttag

SEQ ID NO: 1012155 - DNA, 15 bp, Homo sapiens
cctgaatgtaactta

SEQ ID NO: 1012156 - DNA, 15 bp, Homo sapiens
acctgaatgtaactt

SEQ ID NO: 1012157 - DNA, 15 bp, Homo sapiens
aacctgaatgtaact

SEQ ID NO: 1012158 - DNA, 15 bp, Homo sapiens
aaacctgaatgtaac

SEQ ID NO: 1012159 - DNA, 15 bp, Homo sapiens
taaacctgaatgtaa

SEQ ID NO: 1012160 - DNA, 15 bp, Homo sapiens
ttaaacctgaatgta

SEQ ID NO: 1012161 - DNA, 15 bp, Homo sapiens
tttaaacctgaatgt

SEQ ID NO: 1012162 - DNA, 15 bp, Homo sapiens
gtttaaacctgaatg

SEQ ID NO: 1012163 - DNA, 15 bp, Homo sapiens
tgtttaaacctgaat

SEQ ID NO: 1012164 - DNA, 15 bp, Homo sapiens
atgtttaaacctgaa

SEQ ID NO: 1012165 - DNA, 15 bp, Homo sapiens
aatgtttaaacctga

SEQ ID NO: 1012166 - DNA, 15 bp, Homo sapiens
aaatgtttaaacctg

SEQ ID NO: 1012167 - DNA, 15 bp, Homo sapiens
aaaatgtttaaacct

SEQ ID NO: 1012168 - DNA, 15 bp, Homo sapiens
aaaaatgtttaaacc

SEQ ID NO: 1012169 - DNA, 15 bp, Homo sapiens
caaaaatgtttaaac

SEQ ID NO: 1012170 - DNA, 15 bp, Homo sapiens
ccaaaaatgtttaaa

SEQ ID NO: 1012171 - DNA, 15 bp, Homo sapiens
gccaaaaatgtttaa

SEQ ID NO: 1012172 - DNA, 15 bp, Homo sapiens
tgccaaaaatgttta

SEQ ID NO: 1012173 - DNA, 15 bp, Homo sapiens
ttgccaaaaatgttt

SEQ ID NO: 1012174 - DNA, 15 bp, Homo sapiens
cttgccaaaaatgtt

SEQ ID NO: 1012175 - DNA, 15 bp, Homo sapiens
tcttgccaaaaatgt

SEQ ID NO: 1012176 - DNA, 15 bp, Homo sapiens
ttcttgccaaaaatg

SEQ ID NO: 1012177 - DNA, 15 bp, Homo sapiens
attcttgccaaaaat

SEQ ID NO: 1012178 - DNA, 15 bp, Homo sapiens
tattcttgccaaaaa

SEQ ID NO: 1012179 - DNA, 15 bp, Homo sapiens
gtattcttgccaaaa

SEQ ID NO: 1012180 - DNA, 15 bp, Homo sapiens
agtattcttgccaaa

SEQ ID NO: 1012181 - DNA, 15 bp, Homo sapiens
aagtattcttgccaa

SEQ ID NO: 1012182 - DNA, 15 bp, Homo sapiens
gaagtattcttgcca

SEQ ID NO: 1012183 - DNA, 15 bp, Homo sapiens
gaaagtaaagaaccc

SEQ ID NO: 1012184 - DNA, 15 bp, Homo sapiens
ggaaagtaaagaacc

SEQ ID NO: 1012185 - DNA, 15 bp, Homo sapiens
tggaaagtaaagaac

SEQ ID NO: 1012186 - DNA, 15 bp, Homo sapiens
gtggaaagtaaagaa

SEQ ID NO: 1012187 - DNA, 15 bp, Homo sapiens
agtggaaagtaaaga

SEQ ID NO: 1012188 - DNA, 15 bp, Homo sapiens
aagtggaaagtaaag

SEQ ID NO: 1012189 - DNA, 15 bp, Homo sapiens
aaagtggaaagtaaa

SEQ ID NO: 1012190 - DNA, 15 bp, Homo sapiens
taaagtggaaagtaa

SEQ ID NO: 1012191 - DNA, 15 bp, Homo sapiens
ttaaagtggaaagta

SEQ ID NO: 1012192 - DNA, 15 bp, Homo sapiens
tttaaagtggaaagt

SEQ ID NO: 1012193 - DNA, 15 bp, Homo sapiens
ctttaaagtggaaag

SEQ ID NO: 1012194 - DNA, 15 bp, Homo sapiens
cctttaaagtggaaa

SEQ ID NO: 1012195 - DNA, 15 bp, Homo sapiens
acctttaaagtggaa

SEQ ID NO: 1012196 - DNA, 15 bp, Homo sapiens
aacctttaaagtgga

SEQ ID NO: 1012197 - DNA, 15 bp, Homo sapiens
caacctttaaagtgg

SEQ ID NO: 1012198 - DNA, 15 bp, Homo sapiens
acaacctttaaagtg

SEQ ID NO: 1012199 - DNA, 15 bp, Homo sapiens
tacaacctttaaagt

SEQ ID NO: 1012200 - DNA, 15 bp, Homo sapiens
ttacaacctttaaag

SEQ ID NO: 1012201 - DNA, 15 bp, Homo sapiens
attacaacctttaaa

SEQ ID NO: 1012202 - DNA, 15 bp, Homo sapiens
cattacaacctttaa

SEQ ID NO: 1012203 - DNA, 15 bp, Homo sapiens
ccattacaaccttta

SEQ ID NO: 1012204 - DNA, 15 bp, Homo sapiens
cccattacaaccttt

SEQ ID NO: 1012205 - DNA, 15 bp, Homo sapiens
acccattacaacctt

SEQ ID NO: 1012206 - DNA, 15 bp, Homo sapiens
cacccattacaacct

SEQ ID NO: 1012207 - DNA, 15 bp, Homo sapiens
tcacccattacaacc

SEQ ID NO: 1012208 - DNA, 15 bp, Homo sapiens
atcacccattacaac

SEQ ID NO: 1012209 - DNA, 15 bp, Homo sapiens
catcacccattacaa

SEQ ID NO: 1012210 - DNA, 15 bp, Homo sapiens
acatcacccattaca

SEQ ID NO: 1012211 - DNA, 15 bp, Homo sapiens
gacatcacccattac

SEQ ID NO: 1012212 - DNA, 15 bp, Homo sapiens
tgacatcacccatta

SEQ ID NO: 1012213 - DNA, 15 bp, Homo sapiens
ctgacatcacccatt

SEQ ID NO: 1012214 - DNA, 15 bp, Homo sapiens
cctgacatcacccat

SEQ ID NO: 1012215 - DNA, 15 bp, Homo sapiens
gcctgacatcaccca

SEQ ID NO: 1012216 - DNA, 15 bp, Homo sapiens
agcctgacatcaccc

SEQ ID NO: 1012217 - DNA, 15 bp, Homo sapiens
tagcctgacatcacc

SEQ ID NO: 1012218 - DNA, 15 bp, Homo sapiens
ttagcctgacatcac

SEQ ID NO: 1012219 - DNA, 15 bp, Homo sapiens
attagcctgacatca

SEQ ID NO: 1012220 - DNA, 15 bp, Homo sapiens
tattagcctgacatc

SEQ ID NO: 1012221 - DNA, 15 bp, Homo sapiens
ttattagcctgacat

SEQ ID NO: 1012222 - DNA, 15 bp, Homo sapiens
tttattagcctgaca

SEQ ID NO: 1012223 - DNA, 15 bp, Homo sapiens
gtttattagcctgac

SEQ ID NO: 1012224 - DNA, 15 bp, Homo sapiens
ggtttattagcctga

SEQ ID NO: 1012225 - DNA, 15 bp, Homo sapiens
aggtttattagcctg

SEQ ID NO: 1012226 - DNA, 15 bp, Homo sapiens
taggtttattagcct

SEQ ID NO: 1012227 - DNA, 15 bp, Homo sapiens
ataggtttattagcc

SEQ ID NO: 1012228 - DNA, 15 bp, Homo sapiens
aataggtttattagc

SEQ ID NO: 1012229 - DNA, 15 bp, Homo sapiens
aaataggtttattag

SEQ ID NO: 1012230 - DNA, 15 bp, Homo sapiens
aaaataggtttatta

SEQ ID NO: 1012231 - DNA, 15 bp, Homo sapiens
gaaaataggtttatt

SEQ ID NO: 1012232 - DNA, 15 bp, Homo sapiens
tgaaaataggtttat

SEQ ID NO: 1012233 - DNA, 15 bp, Homo sapiens
ctgaaaataggttta

SEQ ID NO: 1012234 - DNA, 15 bp, Homo sapiens
gctgaaaataggttt

SEQ ID NO: 1012235 - DNA, 15 bp, Homo sapiens
agctgaaaataggtt

SEQ ID NO: 1012236 - DNA, 15 bp, Homo sapiens
aagctgaaaataggt

SEQ ID NO: 1012237 - DNA, 15 bp, Homo sapiens
caagctgaaaatagg

SEQ ID NO: 1012238 - DNA, 15 bp, Homo sapiens
tcaagctgaaaatag

SEQ ID NO: 1012239 - DNA, 15 bp, Homo sapiens
atcaagctgaaaata

SEQ ID NO: 1012240 - DNA, 15 bp, Homo sapiens
gatcaagctgaaaat

SEQ ID NO: 1012241 - DNA, 15 bp, Homo sapiens
agatcaagctgaaaa

SEQ ID NO: 1012242 - DNA, 15 bp, Homo sapiens
tagatcaagctgaaa

SEQ ID NO: 1012243 - DNA, 15 bp, Homo sapiens
ttagatcaagctgaa

SEQ ID NO: 1012244 - DNA, 15 bp, Homo sapiens
tttagatcaagctga

SEQ ID NO: 1012245 - DNA, 15 bp, Homo sapiens
ctttagatcaagctg

SEQ ID NO: 1012246 - DNA, 15 bp, Homo sapiens
gctttagatcaagct

SEQ ID NO: 1012247 - DNA, 15 bp, Homo sapiens
agctttagatcaagc

SEQ ID NO: 1012248 - DNA, 15 bp, Homo sapiens
aagctttagatcaag

SEQ ID NO: 1012249 - DNA, 15 bp, Homo sapiens
taagctttagatcaa

SEQ ID NO: 1012250 - DNA, 15 bp, Homo sapiens
ttaagctttagatca

SEQ ID NO: 1012251 - DNA, 15 bp, Homo sapiens
attaagctttagatc

SEQ ID NO: 1012252 - DNA, 15 bp, Homo sapiens
tattaagctttagat

SEQ ID NO: 1012253 - DNA, 15 bp, Homo sapiens
gtattaagctttaga

SEQ ID NO: 1012254 - DNA, 15 bp, Homo sapiens
agtattaagctttag

SEQ ID NO: 1012255 - DNA, 15 bp, Homo sapiens
cagtattaagcttta

SEQ ID NO: 1012256 - DNA, 15 bp, Homo sapiens
tcagtattaagcttt

SEQ ID NO: 1012257 - DNA, 15 bp, Homo sapiens
ctcagtattaagctt

SEQ ID NO: 1012258 - DNA, 15 bp, Homo sapiens
gctcagtattaagct

SEQ ID NO: 1012259 - DNA, 15 bp, Homo sapiens
tgctcagtattaagc

SEQ ID NO: 1012260 - DNA, 15 bp, Homo sapiens
atgctcagtattaag

SEQ ID NO: 1012261 - DNA, 15 bp, Homo sapiens
gatgctcagtattaa

SEQ ID NO: 1012262 - DNA, 15 bp, Homo sapiens
tgatgctcagtatta

SEQ ID NO: 1012263 - DNA, 15 bp, Homo sapiens
ttgatgctcagtatt

SEQ ID NO: 1012264 - DNA, 15 bp, Homo sapiens
cttgatgctcagtat

SEQ ID NO: 1012265 - DNA, 15 bp, Homo sapiens
tcttgatgctcagta

SEQ ID NO: 1012266 - DNA, 15 bp, Homo sapiens
ttcttgatgctcagt

SEQ ID NO: 1012267 - DNA, 15 bp, Homo sapiens
tttcttgatgctcag

SEQ ID NO: 1012268 - DNA, 15 bp, Homo sapiens
atttcttgatgctca

SEQ ID NO: 1012269 - DNA, 15 bp, Homo sapiens
aatttcttgatgctc

SEQ ID NO: 1012270 - DNA, 15 bp, Homo sapiens
gaatttcttgatgct

SEQ ID NO: 1012271 - DNA, 15 bp, Homo sapiens
agaatttcttgatgc

SEQ ID NO: 1012272 - DNA, 15 bp, Homo sapiens
aagaatttcttgatg

SEQ ID NO: 1012273 - DNA, 15 bp, Homo sapiens
aaagaatttcttgat

SEQ ID NO: 1012274 - DNA, 15 bp, Homo sapiens
taaagaatttcttga

SEQ ID NO: 1012275 - DNA, 15 bp, Homo sapiens
ttaaagaatttcttg

SEQ ID NO: 1012276 - DNA, 15 bp, Homo sapiens
attaaagaatttctt

SEQ ID NO: 1012277 - DNA, 15 bp, Homo sapiens
tattaaagaatttct

SEQ ID NO: 1012278 - DNA, 15 bp, Homo sapiens
ttattaaagaatttc

SEQ ID NO: 1012279 - DNA, 15 bp, Homo sapiens
tttattaaagaattt

SEQ ID NO: 1012280 - DNA, 15 bp, Homo sapiens
atttattaaagaatt

SEQ ID NO: 1012281 - DNA, 15 bp, Homo sapiens
tatttattaaagaat

SEQ ID NO: 1012282 - DNA, 15 bp, Homo sapiens
ttatatttattaaag

SEQ ID NO: 1012283 - DNA, 15 bp, Homo sapiens
cttatatttattaaa

SEQ ID NO: 1012284 - DNA, 15 bp, Homo sapiens
acttatatttattaa

SEQ ID NO: 1012285 - DNA, 15 bp, Homo sapiens
cacttatatttatta

SEQ ID NO: 1012286 - DNA, 15 bp, Homo sapiens
tcacttatatttatt

SEQ ID NO: 1012287 - DNA, 15 bp, Homo sapiens
atcacttatatttat

SEQ ID NO: 1012288 - DNA, 15 bp, Homo sapiens
tatcacttatattta

SEQ ID NO: 1012289 - DNA, 15 bp, Homo sapiens
atatcacttatattt

SEQ ID NO: 1012290 - DNA, 15 bp, Homo sapiens
aatatcacttatatt

SEQ ID NO: 1012291 - DNA, 15 bp, Homo sapiens
aaatatcacttatat

SEQ ID NO: 1012292 - DNA, 15 bp, Homo sapiens
taaatatcacttata

SEQ ID NO: 1012293 - DNA, 15 bp, Homo sapiens
ataaatatcacttat

SEQ ID NO: 1012294 - DNA, 15 bp, Homo sapiens
aataaatatcactta

SEQ ID NO: 1012295 - DNA, 15 bp, Homo sapiens
gaataaatatcactt

SEQ ID NO: 1012296 - DNA, 15 bp, Homo sapiens
tgaataaatatcact

SEQ ID NO: 1012297 - DNA, 15 bp, Homo sapiens
ctgaataaatatcac

SEQ ID NO: 1012298 - DNA, 15 bp, Homo sapiens
tctgaataaatatca

SEQ ID NO: 1012299 - DNA, 15 bp, Homo sapiens
gtctgaataaatatc

SEQ ID NO: 1012300 - DNA, 15 bp, Homo sapiens
tgtctgaataaatat

SEQ ID NO: 1012301 - DNA, 15 bp, Homo sapiens
atgtctgaataaata

SEQ ID NO: 1012302 - DNA, 15 bp, Homo sapiens
catgtctgaataaat

SEQ ID NO: 1012303 - DNA, 15 bp, Homo sapiens
acatgtctgaataaa

SEQ ID NO: 1012304 - DNA, 15 bp, Homo sapiens
tacatgtctgaataa

SEQ ID NO: 1012305 - DNA, 15 bp, Homo sapiens
ttacatgtctgaata

SEQ ID NO: 1012306 - DNA, 15 bp, Homo sapiens
attacatgtctgaat

SEQ ID NO: 1012307 - DNA, 15 bp, Homo sapiens
tattacatgtctgaa

SEQ ID NO: 1012308 - DNA, 15 bp, Homo sapiens
ttattacatgtctga

SEQ ID NO: 1012309 - DNA, 15 bp, Homo sapiens
cttattacatgtctg

SEQ ID NO: 1012310 - DNA, 15 bp, Homo sapiens
ccttattacatgtct

SEQ ID NO: 1012311 - DNA, 15 bp, Homo sapiens
tccttattacatgtc

SEQ ID NO: 1012312 - DNA, 15 bp, Homo sapiens
ttccttattacatgt

SEQ ID NO: 1012313 - DNA, 15 bp, Homo sapiens
tttccttattacatg

SEQ ID NO: 1012314 - DNA, 15 bp, Homo sapiens
atttccttattacat

SEQ ID NO: 1012315 - DNA, 15 bp, Homo sapiens
catttccttattaca

SEQ ID NO: 1012316 - DNA, 15 bp, Homo sapiens
acatttccttattac

SEQ ID NO: 1012317 - DNA, 15 bp, Homo sapiens
aacatttccttatta

SEQ ID NO: 1012318 - DNA, 15 bp, Homo sapiens
gaacatttccttatt

SEQ ID NO: 1012319 - DNA, 15 bp, Homo sapiens
tgaacatttccttat

SEQ ID NO: 1012320 - DNA, 15 bp, Homo sapiens
atgaacatttcctta

SEQ ID NO: 1012321 - DNA, 15 bp, Homo sapiens
catgaacatttcctt

SEQ ID NO: 1012322 - DNA, 15 bp, Homo sapiens
acatgaacatttcct

SEQ ID NO: 1012323 - DNA, 15 bp, Homo sapiens
gacatgaacatttcc

SEQ ID NO: 1012324 - DNA, 15 bp, Homo sapiens
agacatgaacatttc

SEQ ID NO: 1012325 - DNA, 15 bp, Homo sapiens
aagacatgaacattt

SEQ ID NO: 1012326 - DNA, 15 bp, Homo sapiens
taagacatgaacatt

SEQ ID NO: 1012327 - DNA, 15 bp, Homo sapiens
ataagacatgaacat

SEQ ID NO: 1012328 - DNA, 15 bp, Homo sapiens
aataagacatgaaca

SEQ ID NO: 1012329 - DNA, 15 bp, Homo sapiens
aaataagacatgaac

SEQ ID NO: 1012330 - DNA, 15 bp, Homo sapiens
aaaataagacatgaa

SEQ ID NO: 1012331 - DNA, 15 bp, Homo sapiens
aaaaataagacatga

SEQ ID NO: 1012332 - DNA, 15 bp, Homo sapiens
caaaaataagacatg

SEQ ID NO: 1012333 - DNA, 15 bp, Homo sapiens
acaaaaataagacat

SEQ ID NO: 1012334 - DNA, 15 bp, Homo sapiens
cacaaaaataagaca

SEQ ID NO: 1012335 - DNA, 15 bp, Homo sapiens
acacaaaaataagac

SEQ ID NO: 1012336 - DNA, 15 bp, Homo sapiens
aacacaaaaataaga

SEQ ID NO: 1012337 - DNA, 15 bp, Homo sapiens
taacacaaaaataag

SEQ ID NO: 1012338 - DNA, 15 bp, Homo sapiens
ctaacacaaaaataa

SEQ ID NO: 1012339 - DNA, 15 bp, Homo sapiens
tctaacacaaaaata

SEQ ID NO: 1012340 - DNA, 15 bp, Homo sapiens
atctaacacaaaaat

SEQ ID NO: 1012341 - DNA, 15 bp, Homo sapiens
aatctaacacaaaaa

SEQ ID NO: 1012342 - DNA, 15 bp, Homo sapiens
aaatctaacacaaaa

SEQ ID NO: 1012343 - DNA, 15 bp, Homo sapiens
aaaatctaacacaaa

SEQ ID NO: 1012344 - DNA, 15 bp, Homo sapiens
agcacacacacacaa

SEQ ID NO: 1012345 - DNA, 15 bp, Homo sapiens
aagcacacacacaca

SEQ ID NO: 1012346 - DNA, 15 bp, Homo sapiens
aaagcacacacacac

SEQ ID NO: 1012347 - DNA, 15 bp, Homo sapiens
taaagcacacacaca

SEQ ID NO: 1012348 - DNA, 15 bp, Homo sapiens
gtaaagcacacacac

SEQ ID NO: 1012349 - DNA, 15 bp, Homo sapiens
tgtaaagcacacaca

SEQ ID NO: 1012350 - DNA, 15 bp, Homo sapiens
ttgtaaagcacacac

SEQ ID NO: 1012351 - DNA, 15 bp, Homo sapiens
attgtaaagcacaca

SEQ ID NO: 1012352 - DNA, 15 bp, Homo sapiens
gattgtaaagcacac

SEQ ID NO: 1012353 - DNA, 15 bp, Homo sapiens
agattgtaaagcaca

SEQ ID NO: 1012354 - DNA, 15 bp, Homo sapiens
gagattgtaaagcac

SEQ ID NO: 1012355 - DNA, 15 bp, Homo sapiens
agagattgtaaagca

SEQ ID NO: 1012356 - DNA, 15 bp, Homo sapiens
aagagattgtaaagc

SEQ ID NO: 1012357 - DNA, 15 bp, Homo sapiens
aaagagattgtaaag

SEQ ID NO: 1012358 - DNA, 15 bp, Homo sapiens
gaaagagattgtaaa

SEQ ID NO: 1012359 - DNA, 15 bp, Homo sapiens
ggaaagagattgtaa

SEQ ID NO: 1012360 - DNA, 15 bp, Homo sapiens
tggaaagagattgta

SEQ ID NO: 1012361 - DNA, 15 bp, Homo sapiens
ttggaaagagattgt

SEQ ID NO: 1012362 - DNA, 15 bp, Homo sapiens
cttggaaagagattg

SEQ ID NO: 1012363 - DNA, 15 bp, Homo sapiens
acttggaaagagatt

SEQ ID NO: 1012364 - DNA, 15 bp, Homo sapiens
aacttggaaagagat

SEQ ID NO: 1012365 - DNA, 15 bp, Homo sapiens
taacttggaaagaga

SEQ ID NO: 1012366 - DNA, 15 bp, Homo sapiens
ataacttggaaagag

SEQ ID NO: 1012367 - DNA, 15 bp, Homo sapiens
tataacttggaaaga

SEQ ID NO: 1012368 - DNA, 15 bp, Homo sapiens
atataacttggaaag

SEQ ID NO: 1012369 - DNA, 15 bp, Homo sapiens
gatataacttggaaa

SEQ ID NO: 1012370 - DNA, 15 bp, Homo sapiens
agatataacttggaa

SEQ ID NO: 1012371 - DNA, 15 bp, Homo sapiens
aagatataacttgga

SEQ ID NO: 1012372 - DNA, 15 bp, Homo sapiens
gaagatataacttgg

SEQ ID NO: 1012373 - DNA, 15 bp, Homo sapiens
agaagatataacttg

SEQ ID NO: 1012374 - DNA, 15 bp, Homo sapiens
cagaagatataactt

SEQ ID NO: 1012375 - DNA, 15 bp, Homo sapiens
tcagaagatataact

SEQ ID NO: 1012376 - DNA, 15 bp, Homo sapiens
atcagaagatataac

SEQ ID NO: 1012377 - DNA, 15 bp, Homo sapiens
tatcagaagatataa

SEQ ID NO: 1012378 - DNA, 15 bp, Homo sapiens
gtatcagaagatata

SEQ ID NO: 1012379 - DNA, 15 bp, Homo sapiens
tgtatcagaagatat

SEQ ID NO: 1012380 - DNA, 15 bp, Homo sapiens
ctgtatcagaagata

SEQ ID NO: 1012381 - DNA, 15 bp, Homo sapiens
actgtatcagaagat

SEQ ID NO: 1012382 - DNA, 15 bp, Homo sapiens
gactgtatcagaaga

SEQ ID NO: 1012383 - DNA, 15 bp, Homo sapiens
tgactgtatcagaag

SEQ ID NO: 1012384 - DNA, 15 bp, Homo sapiens
atgactgtatcagaa

SEQ ID NO: 1012385 - DNA, 15 bp, Homo sapiens
catgactgtatcaga

SEQ ID NO: 1012386 - DNA, 15 bp, Homo sapiens
ccatgactgtatcag

SEQ ID NO: 1012387 - DNA, 15 bp, Homo sapiens
accatgactgtatca

SEQ ID NO: 1012388 - DNA, 15 bp, Homo sapiens
gaccatgactgtatc

SEQ ID NO: 1012389 - DNA, 15 bp, Homo sapiens
cgaccatgactgtat

SEQ ID NO: 1012390 - DNA, 15 bp, Homo sapiens
acgaccatgactgta

SEQ ID NO: 1012391 - DNA, 15 bp, Homo sapiens
cacgaccatgactgt

SEQ ID NO: 1012392 - DNA, 15 bp, Homo sapiens
tcacgaccatgactg

SEQ ID NO: 1012393 - DNA, 15 bp, Homo sapiens
ttcacgaccatgact

SEQ ID NO: 1012394 - DNA, 15 bp, Homo sapiens
tttcacgaccatgac

SEQ ID NO: 1012395 - DNA, 15 bp, Homo sapiens
ttttcacgaccatga

SEQ ID NO: 1012396 - DNA, 15 bp, Homo sapiens
cttttcacgaccatg

SEQ ID NO: 1012397 - DNA, 15 bp, Homo sapiens
gcttttcacgaccat

SEQ ID NO: 1012398 - DNA, 15 bp, Homo sapiens
tgcttttcacgacca

SEQ ID NO: 1012399 - DNA, 15 bp, Homo sapiens
ttgcttttcacgacc

SEQ ID NO: 1012400 - DNA, 15 bp, Homo sapiens
tttgcttttcacgac

SEQ ID NO: 1012401 - DNA, 15 bp, Homo sapiens
ttttgcttttcacga

SEQ ID NO: 1012402 - DNA, 15 bp, Homo sapiens
attttgcttttcacg

SEQ ID NO: 1012403 - DNA, 15 bp, Homo sapiens
tattttgcttttcac

SEQ ID NO: 1012404 - DNA, 15 bp, Homo sapiens
ttattttgcttttca

SEQ ID NO: 1012405 - DNA, 15 bp, Homo sapiens
tttattttgcttttc

SEQ ID NO: 1012406 - DNA, 15 bp, Homo sapiens
ttttattttgctttt

SEQ ID NO: 1012407 - DNA, 15 bp, Homo sapiens
attttattttgcttt

SEQ ID NO: 1012408 - DNA, 15 bp, Homo sapiens
gattttattttgctt

SEQ ID NO: 1012409 - DNA, 15 bp, Homo sapiens
tgattttattttgct

SEQ ID NO: 1012410 - DNA, 15 bp, Homo sapiens
atgattttattttgc

SEQ ID NO: 1012411 - DNA, 15 bp, Homo sapiens
catgattttattttg

SEQ ID NO: 1012412 - DNA, 15 bp, Homo sapiens
acatgattttatttt

SEQ ID NO: 1012413 - DNA, 15 bp, Homo sapiens
cacatgattttattt

SEQ ID NO: 1012414 - DNA, 15 bp, Homo sapiens
acacatgattttatt

SEQ ID NO: 1012415 - DNA, 15 bp, Homo sapiens
aacacatgattttat

SEQ ID NO: 1012416 - DNA, 15 bp, Homo sapiens
taacacatgatttta

SEQ ID NO: 1012417 - DNA, 15 bp, Homo sapiens
ttaacacatgatttt

SEQ ID NO: 1012418 - DNA, 15 bp, Homo sapiens
gttaacacatgattt

SEQ ID NO: 1012419 - DNA, 15 bp, Homo sapiens
tgttaacacatgatt

SEQ ID NO: 1012420 - DNA, 15 bp, Homo sapiens
atgttaacacatgat

SEQ ID NO: 1012421 - DNA, 15 bp, Homo sapiens
aatgttaacacatga

SEQ ID NO: 1012422 - DNA, 15 bp, Homo sapiens
aaatgttaacacatg

SEQ ID NO: 1012423 - DNA, 15 bp, Homo sapiens
taaatgttaacacat

SEQ ID NO: 1012424 - DNA, 15 bp, Homo sapiens
ttaaatgttaacaca

SEQ ID NO: 1012425 - DNA, 15 bp, Homo sapiens
tttaaatgttaacac

SEQ ID NO: 1012426 - DNA, 15 bp, Homo sapiens
ttttaaatgttaaca

SEQ ID NO: 1012427 - DNA, 15 bp, Homo sapiens
gttttaaatgttaac

SEQ ID NO: 1012428 - DNA, 15 bp, Homo sapiens
agttttaaatgttaa

SEQ ID NO: 1012429 - DNA, 15 bp, Homo sapiens
aagttttaaatgtta

SEQ ID NO: 1012430 - DNA, 15 bp, Homo sapiens
aaagttttaaatgtt

SEQ ID NO: 1012431 - DNA, 15 bp, Homo sapiens
aaaagttttaaatgt

SEQ ID NO: 1012432 - DNA, 15 bp, Homo sapiens
aaaaagttttaaatg

SEQ ID NO: 1012433 - DNA, 15 bp, Homo sapiens
taaaaagttttaaat

SEQ ID NO: 1012434 - DNA, 15 bp, Homo sapiens
ttaaaaagttttaaa

SEQ ID NO: 1012435 - DNA, 15 bp, Homo sapiens
attaaaaagttttaa

SEQ ID NO: 1012436 - DNA, 15 bp, Homo sapiens
aattaaaaagtttta

SEQ ID NO: 1012437 - DNA, 15 bp, Homo sapiens
aaattaaaaagtttt

SEQ ID NO: 1012438 - DNA, 15 bp, Homo sapiens
aaaattaaaaagttt

SEQ ID NO: 1012439 - DNA, 15 bp, Homo sapiens
taaaattaaaaagtt

SEQ ID NO: 1012440 - DNA, 15 bp, Homo sapiens
ataaaattaaaaagt

SEQ ID NO: 1012441 - DNA, 15 bp, Homo sapiens
aataaaattaaaaag

SEQ ID NO: 1012442 - DNA, 15 bp, Homo sapiens
gaataaaattaaaaa

SEQ ID NO: 1012443 - DNA, 15 bp, Homo sapiens
agaataaaattaaaa

SEQ ID NO: 1012444 - DNA, 15 bp, Homo sapiens
cagaataaaattaaa

SEQ ID NO: 1012445 - DNA, 15 bp, Homo sapiens
tcagaataaaattaa

SEQ ID NO: 1012446 - DNA, 15 bp, Homo sapiens
gtcagaataaaatta

SEQ ID NO: 1012447 - DNA, 15 bp, Homo sapiens
tgtcagaataaaatt

SEQ ID NO: 1012448 - DNA, 15 bp, Homo sapiens
ttgtcagaataaaat

SEQ ID NO: 1012449 - DNA, 15 bp, Homo sapiens
gttgtcagaataaaa

SEQ ID NO: 1012450 - DNA, 15 bp, Homo sapiens
tgttgtcagaataaa

SEQ ID NO: 1012451 - DNA, 15 bp, Homo sapiens
ctgttgtcagaataa

SEQ ID NO: 1012452 - DNA, 15 bp, Homo sapiens
gctgttgtcagaata

SEQ ID NO: 1012453 - DNA, 15 bp, Homo sapiens
agctgttgtcagaat

SEQ ID NO: 1012454 - DNA, 15 bp, Homo sapiens
tagctgttgtcagaa

SEQ ID NO: 1012455 - DNA, 15 bp, Homo sapiens
ttagctgttgtcaga

SEQ ID NO: 1012456 - DNA, 15 bp, Homo sapiens
tttagctgttgtcag

SEQ ID NO: 1012457 - DNA, 15 bp, Homo sapiens
ttttagctgttgtca

SEQ ID NO: 1012458 - DNA, 15 bp, Homo sapiens
gttttagctgttgtc

SEQ ID NO: 1012459 - DNA, 15 bp, Homo sapiens
agttttagctgttgt

SEQ ID NO: 1012460 - DNA, 15 bp, Homo sapiens
tagttttagctgttg

SEQ ID NO: 1012461 - DNA, 15 bp, Homo sapiens
atagttttagctgtt

SEQ ID NO: 1012462 - DNA, 15 bp, Homo sapiens
aatagttttagctgt

SEQ ID NO: 1012463 - DNA, 15 bp, Homo sapiens
aaatagttttagctg

SEQ ID NO: 1012464 - DNA, 15 bp, Homo sapiens
taaatagttttagct

SEQ ID NO: 1012465 - DNA, 15 bp, Homo sapiens
ttaaatagttttagc

SEQ ID NO: 1012466 - DNA, 15 bp, Homo sapiens
attaaatagttttag

SEQ ID NO: 1012467 - DNA, 15 bp, Homo sapiens
gattaaatagtttta

SEQ ID NO: 1012468 - DNA, 15 bp, Homo sapiens
agattaaatagtttt

SEQ ID NO: 1012469 - DNA, 15 bp, Homo sapiens
aagattaaatagttt

SEQ ID NO: 1012470 - DNA, 15 bp, Homo sapiens
gaagattaaatagtt

SEQ ID NO: 1012471 - DNA, 15 bp, Homo sapiens
agaagattaaatagt

SEQ ID NO: 1012472 - DNA, 15 bp, Homo sapiens
cagaagattaaatag

SEQ ID NO: 1012473 - DNA, 15 bp, Homo sapiens
acagaagattaaata

SEQ ID NO: 1012474 - DNA, 15 bp, Homo sapiens
aacagaagattaaat

SEQ ID NO: 1012475 - DNA, 15 bp, Homo sapiens
aaacagaagattaaa

SEQ ID NO: 1012476 - DNA, 15 bp, Homo sapiens
gaaacagaagattaa

SEQ ID NO: 1012477 - DNA, 15 bp, Homo sapiens
cgaaacagaagatta

SEQ ID NO: 1012478 - DNA, 15 bp, Homo sapiens
gcgaaacagaagatt

SEQ ID NO: 1012479 - DNA, 15 bp, Homo sapiens
agcgaaacagaagat

SEQ ID NO: 1012480 - DNA, 15 bp, Homo sapiens
gagcgaaacagaaga

SEQ ID NO: 1012481 - DNA, 15 bp, Homo sapiens
tgagcgaaacagaag

SEQ ID NO: 1012482 - DNA, 15 bp, Homo sapiens
atgagcgaaacagaa

SEQ ID NO: 1012483 - DNA, 15 bp, Homo sapiens
aatgagcgaaacaga

SEQ ID NO: 1012484 - DNA, 15 bp, Homo sapiens
aaatgagcgaaacag

SEQ ID NO: 1012485 - DNA, 15 bp, Homo sapiens
gaaatgagcgaaaca

SEQ ID NO: 1012486 - DNA, 15 bp, Homo sapiens
agaaatgagcgaaac

SEQ ID NO: 1012487 - DNA, 15 bp, Homo sapiens
aagaaatgagcgaaa

SEQ ID NO: 1012488 - DNA, 15 bp, Homo sapiens
gaagaaatgagcgaa

SEQ ID NO: 1012489 - DNA, 15 bp, Homo sapiens
ggaagaaatgagcga

SEQ ID NO: 1012490 - DNA, 15 bp, Homo sapiens
tggaagaaatgagcg

SEQ ID NO: 1012491 - DNA, 15 bp, Homo sapiens
ttggaagaaatgagc

SEQ ID NO: 1012492 - DNA, 15 bp, Homo sapiens
cttggaagaaatgag

SEQ ID NO: 1012493 - DNA, 15 bp, Homo sapiens
ccttggaagaaatga

SEQ ID NO: 1012494 - DNA, 15 bp, Homo sapiens
accttggaagaaatg

SEQ ID NO: 1012495 - DNA, 15 bp, Homo sapiens
taccttggaagaaat

SEQ ID NO: 1012496 - DNA, 15 bp, Homo sapiens
ttaccttggaagaaa

SEQ ID NO: 1012497 - DNA, 15 bp, Homo sapiens
tttaccttggaagaa

SEQ ID NO: 1012498 - DNA, 15 bp, Homo sapiens
gtttaccttggaaga

SEQ ID NO: 1012499 - DNA, 15 bp, Homo sapiens
agtttaccttggaag

SEQ ID NO: 1012500 - DNA, 15 bp, Homo sapiens
aagtttaccttggaa

SEQ ID NO: 1012501 - DNA, 15 bp, Homo sapiens
gaagtttaccttgga

SEQ ID NO: 1012502 - DNA, 15 bp, Homo sapiens
tgaagtttaccttgg

SEQ ID NO: 1012503 - DNA, 15 bp, Homo sapiens
ctgaagtttaccttg

SEQ ID NO: 1012504 - DNA, 15 bp, Homo sapiens
actgaagtttacctt

SEQ ID NO: 1012505 - DNA, 15 bp, Homo sapiens
aactgaagtttacct

SEQ ID NO: 1012506 - DNA, 15 bp, Homo sapiens
caactgaagtttacc

SEQ ID NO: 1012507 - DNA, 15 bp, Homo sapiens
ccaactgaagtttac

SEQ ID NO: 1012508 - DNA, 15 bp, Homo sapiens
accaactgaagttta

SEQ ID NO: 1012509 - DNA, 15 bp, Homo sapiens
aaccaactgaagttt

SEQ ID NO: 1012510 - DNA, 15 bp, Homo sapiens
aaaccaactgaagtt

SEQ ID NO: 1012511 - DNA, 15 bp, Homo sapiens
aaaaccaactgaagt

SEQ ID NO: 1012512 - DNA, 15 bp, Homo sapiens
taaaaccaactgaag

SEQ ID NO: 1012513 - DNA, 15 bp, Homo sapiens
gtaaaaccaactgaa

SEQ ID NO: 1012514 - DNA, 15 bp, Homo sapiens
cgtaaaaccaactga

SEQ ID NO: 1012515 - DNA, 15 bp, Homo sapiens
acgtaaaaccaactg

SEQ ID NO: 1012516 - DNA, 15 bp, Homo sapiens
cacgtaaaaccaact

SEQ ID NO: 1012517 - DNA, 15 bp, Homo sapiens
tcacgtaaaaccaac

SEQ ID NO: 1012518 - DNA, 15 bp, Homo sapiens
atcacgtaaaaccaa

SEQ ID NO: 1012519 - DNA, 15 bp, Homo sapiens
aatcacgtaaaacca

SEQ ID NO: 1012520 - DNA, 15 bp, Homo sapiens
aaatcacgtaaaacc

SEQ ID NO: 1012521 - DNA, 15 bp, Homo sapiens
caaatcacgtaaaac

SEQ ID NO: 1012522 - DNA, 15 bp, Homo sapiens
gcaaatcacgtaaaa

SEQ ID NO: 1012523 - DNA, 15 bp, Homo sapiens
agcaaatcacgtaaa

SEQ ID NO: 1012524 - DNA, 15 bp, Homo sapiens
tagcaaatcacgtaa

SEQ ID NO: 1012525 - DNA, 15 bp, Homo sapiens
atagcaaatcacgta

SEQ ID NO: 1012526 - DNA, 15 bp, Homo sapiens
aatagcaaatcacgt

SEQ ID NO: 1012527 - DNA, 15 bp, Homo sapiens
aaatagcaaatcacg

SEQ ID NO: 1012528 - DNA, 15 bp, Homo sapiens
gaaatagcaaatcac

SEQ ID NO: 1012529 - DNA, 15 bp, Homo sapiens
agaaatagcaaatca

SEQ ID NO: 1012530 - DNA, 15 bp, Homo sapiens
aagaaatagcaaatc

SEQ ID NO: 1012531 - DNA, 15 bp, Homo sapiens
gaagaaatagcaaat

SEQ ID NO: 1012532 - DNA, 15 bp, Homo sapiens
agaagaaatagcaaa

SEQ ID NO: 1012533 - DNA, 15 bp, Homo sapiens
aagaagaaatagcaa

SEQ ID NO: 1012534 - DNA, 15 bp, Homo sapiens
gaagaagaaatagca

SEQ ID NO: 1012535 - DNA, 15 bp, Homo sapiens
agaagaagaaatagc

SEQ ID NO: 1012536 - DNA, 15 bp, Homo sapiens
aagaagaagaaatag

SEQ ID NO: 1012537 - DNA, 15 bp, Homo sapiens
aaagaagaagaaata

SEQ ID NO: 1012538 - DNA, 15 bp, Homo sapiens
caaagaagaagaaat

SEQ ID NO: 1012539 - DNA, 15 bp, Homo sapiens
gcaaagaagaagaaa

SEQ ID NO: 1012540 - DNA, 15 bp, Homo sapiens
tgcaaagaagaagaa

SEQ ID NO: 1012541 - DNA, 15 bp, Homo sapiens
atgcaaagaagaaga

SEQ ID NO: 1012542 - DNA, 15 bp, Homo sapiens
aatgcaaagaagaag

SEQ ID NO: 1012543 - DNA, 15 bp, Homo sapiens
aaatgcaaagaagaa

SEQ ID NO: 1012544 - DNA, 15 bp, Homo sapiens
taaatgcaaagaaga

SEQ ID NO: 1012545 - DNA, 15 bp, Homo sapiens
gtaaatgcaaagaag

SEQ ID NO: 1012546 - DNA, 15 bp, Homo sapiens
tgtaaatgcaaagaa

SEQ ID NO: 1012547 - DNA, 15 bp, Homo sapiens
ttgtaaatgcaaaga

SEQ ID NO: 1012548 - DNA, 15 bp, Homo sapiens
tttgtaaatgcaaag

SEQ ID NO: 1012549 - DNA, 15 bp, Homo sapiens
atttgtaaatgcaaa

SEQ ID NO: 1012550 - DNA, 15 bp, Homo sapiens
catttgtaaatgcaa

SEQ ID NO: 1012551 - DNA, 15 bp, Homo sapiens
tcatttgtaaatgca

SEQ ID NO: 1012552 - DNA, 15 bp, Homo sapiens
atcatttgtaaatgc

SEQ ID NO: 1012553 - DNA, 15 bp, Homo sapiens
gatcatttgtaaatg

SEQ ID NO: 1012554 - DNA, 15 bp, Homo sapiens
agatcatttgtaaat

SEQ ID NO: 1012555 - DNA, 15 bp, Homo sapiens
cagatcatttgtaaa

SEQ ID NO: 1012556 - DNA, 15 bp, Homo sapiens
acagatcatttgtaa

SEQ ID NO: 1012557 - DNA, 15 bp, Homo sapiens
cacagatcatttgta

SEQ ID NO: 1012558 - DNA, 15 bp, Homo sapiens
tcacagatcatttgt

SEQ ID NO: 1012559 - DNA, 15 bp, Homo sapiens
atcacagatcatttg

SEQ ID NO: 1012560 - DNA, 15 bp, Homo sapiens
gatcacagatcattt

SEQ ID NO: 1012561 - DNA, 15 bp, Homo sapiens
tgatcacagatcatt

SEQ ID NO: 1012562 - DNA, 15 bp, Homo sapiens
atgatcacagatcat

SEQ ID NO: 1012563 - DNA, 15 bp, Homo sapiens
tatgatcacagatca

SEQ ID NO: 1012564 - DNA, 15 bp, Homo sapiens
atatgatcacagatc

SEQ ID NO: 1012565 - DNA, 15 bp, Homo sapiens
aatatgatcacagat

SEQ ID NO: 1012566 - DNA, 15 bp, Homo sapiens
taatatgatcacaga

SEQ ID NO: 1012567 - DNA, 15 bp, Homo sapiens
gtaatatgatcacag

SEQ ID NO: 1012568 - DNA, 15 bp, Homo sapiens
agtaatatgatcaca

SEQ ID NO: 1012569 - DNA, 15 bp, Homo sapiens
cagtaatatgatcac

SEQ ID NO: 1012570 - DNA, 15 bp, Homo sapiens
tcagtaatatgatca

SEQ ID NO: 1012571 - DNA, 15 bp, Homo sapiens
atcagtaatatgatc

SEQ ID NO: 1012572 - DNA, 15 bp, Homo sapiens
gatcagtaatatgat

SEQ ID NO: 1012573 - DNA, 15 bp, Homo sapiens
agatcagtaatatga

SEQ ID NO: 1012574 - DNA, 15 bp, Homo sapiens
aagatcagtaatatg

SEQ ID NO: 1012575 - DNA, 15 bp, Homo sapiens
aaagatcagtaatat

SEQ ID NO: 1012576 - DNA, 15 bp, Homo sapiens
caaagatcagtaata

SEQ ID NO: 1012577 - DNA, 15 bp, Homo sapiens
acaaagatcagtaat

SEQ ID NO: 1012578 - DNA, 15 bp, Homo sapiens
tacaaagatcagtaa

SEQ ID NO: 1012579 - DNA, 15 bp, Homo sapiens
ttacaaagatcagta

SEQ ID NO: 1012580 - DNA, 15 bp, Homo sapiens
tttacaaagatcagt

SEQ ID NO: 1012581 - DNA, 15 bp, Homo sapiens
ctttacaaagatcag

SEQ ID NO: 1012582 - DNA, 15 bp, Homo sapiens
cctttacaaagatca

SEQ ID NO: 1012583 - DNA, 15 bp, Homo sapiens
ccctttacaaagatc

SEQ ID NO: 1012584 - DNA, 15 bp, Homo sapiens
gccctttacaaagat

SEQ ID NO: 1012585 - DNA, 15 bp, Homo sapiens
agccctttacaaaga

SEQ ID NO: 1012586 - DNA, 15 bp, Homo sapiens
tagccctttacaaag

SEQ ID NO: 1012587 - DNA, 15 bp, Homo sapiens
ttagccctttacaaa

SEQ ID NO: 1012588 - DNA, 15 bp, Homo sapiens
attagccctttacaa

SEQ ID NO: 1012589 - DNA, 15 bp, Homo sapiens
tattagccctttaca

SEQ ID NO: 1012590 - DNA, 15 bp, Homo sapiens
atattagccctttac

SEQ ID NO: 1012591 - DNA, 15 bp, Homo sapiens
gatattagcccttta

SEQ ID NO: 1012592 - DNA, 15 bp, Homo sapiens
agatattagcccttt

SEQ ID NO: 1012593 - DNA, 15 bp, Homo sapiens
tagatattagccctt

SEQ ID NO: 1012594 - DNA, 15 bp, Homo sapiens
gtagatattagccct

SEQ ID NO: 1012595 - DNA, 15 bp, Homo sapiens
ggtagatattagccc

SEQ ID NO: 1012596 - DNA, 15 bp, Homo sapiens
aggtagatattagcc

SEQ ID NO: 1012597 - DNA, 15 bp, Homo sapiens
caggtagatattagc

SEQ ID NO: 1012598 - DNA, 15 bp, Homo sapiens
gcaggtagatattag

SEQ ID NO: 1012599 - DNA, 15 bp, Homo sapiens
tgcaggtagatatta

SEQ ID NO: 1012600 - DNA, 15 bp, Homo sapiens
ttgcaggtagatatt

SEQ ID NO: 1012601 - DNA, 15 bp, Homo sapiens
gttgcaggtagatat

SEQ ID NO: 1012602 - DNA, 15 bp, Homo sapiens
tgttgcaggtagata

SEQ ID NO: 1012603 - DNA, 15 bp, Homo sapiens
atgttgcaggtagat

SEQ ID NO: 1012604 - DNA, 15 bp, Homo sapiens
aatgttgcaggtaga

SEQ ID NO: 1012605 - DNA, 15 bp, Homo sapiens
aaatgttgcaggtag

SEQ ID NO: 1012606 - DNA, 15 bp, Homo sapiens
caaatgttgcaggta

SEQ ID NO: 1012607 - DNA, 15 bp, Homo sapiens
ccaaatgttgcaggt

SEQ ID NO: 1012608 - DNA, 15 bp, Homo sapiens
tccaaatgttgcagg

SEQ ID NO: 1012609 - DNA, 15 bp, Homo sapiens
tgttaggaccaatgg

SEQ ID NO: 1012610 - DNA, 15 bp, Homo sapiens
gtgttaggaccaatg

SEQ ID NO: 1012611 - DNA, 15 bp, Homo sapiens
tgtgttaggaccaat

SEQ ID NO: 1012612 - DNA, 15 bp, Homo sapiens
ttgtgttaggaccaa

SEQ ID NO: 1012613 - DNA, 15 bp, Homo sapiens
gttgtgttaggacca

SEQ ID NO: 1012614 - DNA, 15 bp, Homo sapiens
agttgtgttaggacc

SEQ ID NO: 1012615 - DNA, 15 bp, Homo sapiens
aagttgtgttaggac

SEQ ID NO: 1012616 - DNA, 15 bp, Homo sapiens
aaagttgtgttagga

SEQ ID NO: 1012617 - DNA, 15 bp, Homo sapiens
gaaagttgtgttagg

SEQ ID NO: 1012618 - DNA, 15 bp, Homo sapiens
tgaaagttgtgttag

SEQ ID NO: 1012619 - DNA, 15 bp, Homo sapiens
atgaaagttgtgtta

SEQ ID NO: 1012620 - DNA, 15 bp, Homo sapiens
tatgaaagttgtgtt

SEQ ID NO: 1012621 - DNA, 15 bp, Homo sapiens
atatgaaagttgtgt

SEQ ID NO: 1012622 - DNA, 15 bp, Homo sapiens
aatatgaaagttgtg

SEQ ID NO: 1012623 - DNA, 15 bp, Homo sapiens
gaatatgaaagttgt

SEQ ID NO: 1012624 - DNA, 15 bp, Homo sapiens
agaatatgaaagttg

SEQ ID NO: 1012625 - DNA, 15 bp, Homo sapiens
tagaatatgaaagtt

SEQ ID NO: 1012626 - DNA, 15 bp, Homo sapiens
gtagaatatgaaagt

SEQ ID NO: 1012627 - DNA, 15 bp, Homo sapiens
ggtagaatatgaaag

SEQ ID NO: 1012628 - DNA, 15 bp, Homo sapiens
gggtagaatatgaaa

SEQ ID NO: 1012629 - DNA, 15 bp, Homo sapiens
ggggtagaatatgaa

SEQ ID NO: 1012630 - DNA, 15 bp, Homo sapiens
tggggtagaatatga

SEQ ID NO: 1012631 - DNA, 15 bp, Homo sapiens
ttggggtagaatatg

SEQ ID NO: 1012632 - DNA, 15 bp, Homo sapiens
attggggtagaatat

SEQ ID NO: 1012633 - DNA, 15 bp, Homo sapiens
tattggggtagaata

SEQ ID NO: 1012634 - DNA, 15 bp, Homo sapiens
atattggggtagaat

SEQ ID NO: 1012635 - DNA, 15 bp, Homo sapiens
gatattggggtagaa

SEQ ID NO: 1012636 - DNA, 15 bp, Homo sapiens
tgatattggggtaga

SEQ ID NO: 1012637 - DNA, 15 bp, Homo sapiens
ttgatattggggtag

SEQ ID NO: 1012638 - DNA, 15 bp, Homo sapiens
tttgatattggggta

SEQ ID NO: 1012639 - DNA, 15 bp, Homo sapiens
ctttgatattggggt

SEQ ID NO: 1012640 - DNA, 15 bp, Homo sapiens
tctttgatattgggg

SEQ ID NO: 1012641 - DNA, 15 bp, Homo sapiens
ctctttgatattggg

SEQ ID NO: 1012642 - DNA, 15 bp, Homo sapiens
cctctttgatattgg

SEQ ID NO: 1012643 - DNA, 15 bp, Homo sapiens
gcctctttgatattg

SEQ ID NO: 1012644 - DNA, 15 bp, Homo sapiens
agcctctttgatatt

SEQ ID NO: 1012645 - DNA, 15 bp, Homo sapiens
aagcctctttgatat

SEQ ID NO: 1012646 - DNA, 15 bp, Homo sapiens
taagcctctttgata

SEQ ID NO: 1012647 - DNA, 15 bp, Homo sapiens
ttaagcctctttgat

SEQ ID NO: 1012648 - DNA, 15 bp, Homo sapiens
tttaagcctctttga

SEQ ID NO: 1012649 - DNA, 15 bp, Homo sapiens
ttttaagcctctttg

SEQ ID NO: 1012650 - DNA, 15 bp, Homo sapiens
attttaagcctcttt

SEQ ID NO: 1012651 - DNA, 15 bp, Homo sapiens
gattttaagcctctt

SEQ ID NO: 1012652 - DNA, 15 bp, Homo sapiens
agattttaagcctct

SEQ ID NO: 1012653 - DNA, 15 bp, Homo sapiens
gagattttaagcctc

SEQ ID NO: 1012654 - DNA, 15 bp, Homo sapiens
ggagattttaagcct

SEQ ID NO: 1012655 - DNA, 15 bp, Homo sapiens
aggagattttaagcc

SEQ ID NO: 1012656 - DNA, 15 bp, Homo sapiens
caggagattttaagc

SEQ ID NO: 1012657 - DNA, 15 bp, Homo sapiens
ccaggagattttaag

SEQ ID NO: 1012658 - DNA, 15 bp, Homo sapiens
accaggagattttaa

SEQ ID NO: 1012659 - DNA, 15 bp, Homo sapiens
gaccaggagatttta

SEQ ID NO: 1012660 - DNA, 15 bp, Homo sapiens
cgaccaggagatttt

SEQ ID NO: 1012661 - DNA, 15 bp, Homo sapiens
acgaccaggagattt

SEQ ID NO: 1012662 - DNA, 15 bp, Homo sapiens
cacgaccaggagatt

SEQ ID NO: 1012663 - DNA, 15 bp, Homo sapiens
acacgaccaggagat

SEQ ID NO: 1012664 - DNA, 15 bp, Homo sapiens
cacacgaccaggaga

SEQ ID NO: 1012665 - DNA, 15 bp, Homo sapiens
tcacacgaccaggag

SEQ ID NO: 1012666 - DNA, 15 bp, Homo sapiens
atcacacgaccagga

SEQ ID NO: 1012667 - DNA, 15 bp, Homo sapiens
catcacacgaccagg

SEQ ID NO: 1012668 - DNA, 15 bp, Homo sapiens
ccatcacacgaccag

SEQ ID NO: 1012669 - DNA, 15 bp, Homo sapiens
cccatcacacgacca

SEQ ID NO: 1012670 - DNA, 15 bp, Homo sapiens
gcccatcacacgacc

SEQ ID NO: 1012671 - DNA, 15 bp, Homo sapiens
tgcccatcacacgac

SEQ ID NO: 1012672 - DNA, 15 bp, Homo sapiens
gtgcccatcacacga

SEQ ID NO: 1012673 - DNA, 15 bp, Homo sapiens
tgtgcccatcacacg

SEQ ID NO: 1012674 - DNA, 15 bp, Homo sapiens
gtgtgcccatcacac

SEQ ID NO: 1012675 - DNA, 15 bp, Homo sapiens
tgtgtgcccatcaca

SEQ ID NO: 1012676 - DNA, 15 bp, Homo sapiens
ctgtgtgcccatcac

SEQ ID NO: 1012677 - DNA, 15 bp, Homo sapiens
actgtgtgcccatca

SEQ ID NO: 1012678 - DNA, 15 bp, Homo sapiens
aactgtgtgcccatc

SEQ ID NO: 1012679 - DNA, 15 bp, Homo sapiens
taactgtgtgcccat

SEQ ID NO: 1012680 - DNA, 15 bp, Homo sapiens
ttaactgtgtgccca

SEQ ID NO: 1012681 - DNA, 15 bp, Homo sapiens
attaactgtgtgccc

SEQ ID NO: 1012682 - DNA, 15 bp, Homo sapiens
aaattaactgtgtgc

SEQ ID NO: 1012683 - DNA, 15 bp, Homo sapiens
aaaattaactgtgtg

SEQ ID NO: 1012684 - DNA, 15 bp, Homo sapiens
aaaaattaactgtgt

SEQ ID NO: 1012685 - DNA, 15 bp, Homo sapiens
aaaaaattaactgtg

SEQ ID NO: 1012686 - DNA, 15 bp, Homo sapiens
caaaaaattaactgt

SEQ ID NO: 1012687 - DNA, 15 bp, Homo sapiens
acaaaaaattaactg

SEQ ID NO: 1012688 - DNA, 15 bp, Homo sapiens
cacaaaaaattaact

SEQ ID NO: 1012689 - DNA, 15 bp, Homo sapiens
tcacaaaaaattaac

SEQ ID NO: 1012690 - DNA, 15 bp, Homo sapiens
ttcacaaaaaattaa

SEQ ID NO: 1012691 - DNA, 15 bp, Homo sapiens
gttcacaaaaaatta

SEQ ID NO: 1012692 - DNA, 15 bp, Homo sapiens
tgttcacaaaaaatt

SEQ ID NO: 1012693 - DNA, 15 bp, Homo sapiens
ttgttcacaaaaaat

SEQ ID NO: 1012694 - DNA, 15 bp, Homo sapiens
tttgttcacaaaaaa

SEQ ID NO: 1012695 - DNA, 15 bp, Homo sapiens
gtttgttcacaaaaa

SEQ ID NO: 1012696 - DNA, 15 bp, Homo sapiens
tgtttgttcacaaaa

SEQ ID NO: 1012697 - DNA, 15 bp, Homo sapiens
gtgtttgttcacaaa

SEQ ID NO: 1012698 - DNA, 15 bp, Homo sapiens
tgtgtttgttcacaa

SEQ ID NO: 1012699 - DNA, 15 bp, Homo sapiens
ctgtgtttgttcaca

SEQ ID NO: 1012700 - DNA, 15 bp, Homo sapiens
actgtgtttgttcac

SEQ ID NO: 1012701 - DNA, 15 bp, Homo sapiens
cactgtgtttgttca

SEQ ID NO: 1012702 - DNA, 15 bp, Homo sapiens
acactgtgtttgttc

SEQ ID NO: 1012703 - DNA, 15 bp, Homo sapiens
aacactgtgtttgtt

SEQ ID NO: 1012704 - DNA, 15 bp, Homo sapiens
taacactgtgtttgt

SEQ ID NO: 1012705 - DNA, 15 bp, Homo sapiens
ataacactgtgtttg

SEQ ID NO: 1012706 - DNA, 15 bp, Homo sapiens
cataacactgtgttt

SEQ ID NO: 1012707 - DNA, 15 bp, Homo sapiens
ccataacactgtgtt

SEQ ID NO: 1012708 - DNA, 15 bp, Homo sapiens
cccataacactgtgt

SEQ ID NO: 1012709 - DNA, 15 bp, Homo sapiens
gcccataacactgtg

SEQ ID NO: 1012710 - DNA, 15 bp, Homo sapiens
ggcccataacactgt

SEQ ID NO: 1012711 - DNA, 15 bp, Homo sapiens
tggcccataacactg

SEQ ID NO: 1012712 - DNA, 15 bp, Homo sapiens
atggcccataacact

SEQ ID NO: 1012713 - DNA, 15 bp, Homo sapiens
aatggcccataacac

SEQ ID NO: 1012714 - DNA, 15 bp, Homo sapiens
aaatggcccataaca

SEQ ID NO: 1012715 - DNA, 15 bp, Homo sapiens
gaaatggcccataac

SEQ ID NO: 1012716 - DNA, 15 bp, Homo sapiens
agaaatggcccataa

SEQ ID NO: 1012717 - DNA, 15 bp, Homo sapiens
cagaaatggcccata

SEQ ID NO: 1012718 - DNA, 15 bp, Homo sapiens
tcagaaatggcccat

SEQ ID NO: 1012719 - DNA, 15 bp, Homo sapiens
ttcagaaatggccca

SEQ ID NO: 1012720 - DNA, 15 bp, Homo sapiens
attcagaaatggccc

SEQ ID NO: 1012721 - DNA, 15 bp, Homo sapiens
aattcagaaatggcc

SEQ ID NO: 1012722 - DNA, 15 bp, Homo sapiens
aaattcagaaatggc

SEQ ID NO: 1012723 - DNA, 15 bp, Homo sapiens
taaattcagaaatgg

SEQ ID NO: 1012724 - DNA, 15 bp, Homo sapiens
ataaattcagaaatg

SEQ ID NO: 1012725 - DNA, 15 bp, Homo sapiens
gataaattcagaaat

SEQ ID NO: 1012726 - DNA, 15 bp, Homo sapiens
agataaattcagaaa

SEQ ID NO: 1012727 - DNA, 15 bp, Homo sapiens
gagataaattcagaa

SEQ ID NO: 1012728 - DNA, 15 bp, Homo sapiens
agagataaattcaga

SEQ ID NO: 1012729 - DNA, 15 bp, Homo sapiens
cagagataaattcag

SEQ ID NO: 1012730 - DNA, 15 bp, Homo sapiens
tcagagataaattca

SEQ ID NO: 1012731 - DNA, 15 bp, Homo sapiens
ttcagagataaattc

SEQ ID NO: 1012732 - DNA, 15 bp, Homo sapiens
tttcagagataaatt

SEQ ID NO: 1012733 - DNA, 15 bp, Homo sapiens
atttcagagataaat

SEQ ID NO: 1012734 - DNA, 15 bp, Homo sapiens
gatttcagagataaa

SEQ ID NO: 1012735 - DNA, 15 bp, Homo sapiens
tgatttcagagataa

SEQ ID NO: 1012736 - DNA, 15 bp, Homo sapiens
atgatttcagagata

SEQ ID NO: 1012737 - DNA, 15 bp, Homo sapiens
tatgatttcagagat

SEQ ID NO: 1012738 - DNA, 15 bp, Homo sapiens
ttatgatttcagaga

SEQ ID NO: 1012739 - DNA, 15 bp, Homo sapiens
cttatgatttcagag

SEQ ID NO: 1012740 - DNA, 15 bp, Homo sapiens
tcttatgatttcaga

SEQ ID NO: 1012741 - DNA, 15 bp, Homo sapiens
atcttatgatttcag

SEQ ID NO: 1012742 - DNA, 15 bp, Homo sapiens
aatcttatgatttca

SEQ ID NO: 1012743 - DNA, 15 bp, Homo sapiens
gaatcttatgatttc

SEQ ID NO: 1012744 - DNA, 15 bp, Homo sapiens
agaatcttatgattt

SEQ ID NO: 1012745 - DNA, 15 bp, Homo sapiens
aagaatcttatgatt

SEQ ID NO: 1012746 - DNA, 15 bp, Homo sapiens
aaagaatcttatgat

SEQ ID NO: 1012747 - DNA, 15 bp, Homo sapiens
gaaagaatcttatga

SEQ ID NO: 1012748 - DNA, 15 bp, Homo sapiens
agaaagaatcttatg

SEQ ID NO: 1012749 - DNA, 15 bp, Homo sapiens
cagaaagaatcttat

SEQ ID NO: 1012750 - DNA, 15 bp, Homo sapiens
tcagaaagaatctta

SEQ ID NO: 1012751 - DNA, 15 bp, Homo sapiens
ctcagaaagaatctt

SEQ ID NO: 1012752 - DNA, 15 bp, Homo sapiens
gctcagaaagaatct

SEQ ID NO: 1012753 - DNA, 15 bp, Homo sapiens
ggctcagaaagaatc

SEQ ID NO: 1012754 - DNA, 15 bp, Homo sapiens
tggctcagaaagaat

SEQ ID NO: 1012755 - DNA, 15 bp, Homo sapiens
atggctcagaaagaa

SEQ ID NO: 1012756 - DNA, 15 bp, Homo sapiens
aatggctcagaaaga

SEQ ID NO: 1012757 - DNA, 15 bp, Homo sapiens
taatggctcagaaag

SEQ ID NO: 1012758 - DNA, 15 bp, Homo sapiens
ataatggctcagaaa

SEQ ID NO: 1012759 - DNA, 15 bp, Homo sapiens
gataatggctcagaa

SEQ ID NO: 1012760 - DNA, 15 bp, Homo sapiens
agataatggctcaga

SEQ ID NO: 1012761 - DNA, 15 bp, Homo sapiens
gagataatggctcag

SEQ ID NO: 1012762 - DNA, 15 bp, Homo sapiens
tgagataatggctca

SEQ ID NO: 1012763 - DNA, 15 bp, Homo sapiens
atgagataatggctc

SEQ ID NO: 1012764 - DNA, 15 bp, Homo sapiens
aatgagataatggct

SEQ ID NO: 1012765 - DNA, 15 bp, Homo sapiens
gaatgagataatggc

SEQ ID NO: 1012766 - DNA, 15 bp, Homo sapiens
agaatgagataatgg

SEQ ID NO: 1012767 - DNA, 15 bp, Homo sapiens
tagaatgagataatg

SEQ ID NO: 1012768 - DNA, 15 bp, Homo sapiens
atagaatgagataat

SEQ ID NO: 1012769 - DNA, 15 bp, Homo sapiens
tatagaatgagataa

SEQ ID NO: 1012770 - DNA, 15 bp, Homo sapiens
atatagaatgagata

SEQ ID NO: 1012771 - DNA, 15 bp, Homo sapiens
aatatagaatgagat

SEQ ID NO: 1012772 - DNA, 15 bp, Homo sapiens
taatatagaatgaga

SEQ ID NO: 1012773 - DNA, 15 bp, Homo sapiens
gtaatatagaatgag

SEQ ID NO: 1012774 - DNA, 15 bp, Homo sapiens
tgtaatatagaatga

SEQ ID NO: 1012775 - DNA, 15 bp, Homo sapiens
ctgtaatatagaatg

SEQ ID NO: 1012776 - DNA, 15 bp, Homo sapiens
actgtaatatagaat

SEQ ID NO: 1012777 - DNA, 15 bp, Homo sapiens
gactgtaatatagaa

SEQ ID NO: 1012778 - DNA, 15 bp, Homo sapiens
tgactgtaatataga

SEQ ID NO: 1012779 - DNA, 15 bp, Homo sapiens
ctgactgtaatatag

SEQ ID NO: 1012780 - DNA, 15 bp, Homo sapiens
cctgactgtaatata

SEQ ID NO: 1012781 - DNA, 15 bp, Homo sapiens
acctgactgtaatat

SEQ ID NO: 1012782 - DNA, 15 bp, Homo sapiens
cacctgactgtaata

SEQ ID NO: 1012783 - DNA, 15 bp, Homo sapiens
ccacctgactgtaat

SEQ ID NO: 1012784 - DNA, 15 bp, Homo sapiens
tccacctgactgtaa

SEQ ID NO: 1012785 - DNA, 15 bp, Homo sapiens
ctccacctgactgta

SEQ ID NO: 1012786 - DNA, 15 bp, Homo sapiens
gctccacctgactgt

SEQ ID NO: 1012787 - DNA, 15 bp, Homo sapiens
ggctccacctgactg

SEQ ID NO: 1012788 - DNA, 15 bp, Homo sapiens
gggctccacctgact

SEQ ID NO: 1012789 - DNA, 15 bp, Homo sapiens
tgggctccacctgac

SEQ ID NO: 1012790 - DNA, 15 bp, Homo sapiens
atgggctccacctga

SEQ ID NO: 1012791 - DNA, 15 bp, Homo sapiens
gatgggctccacctg

SEQ ID NO: 1012792 - DNA, 15 bp, Homo sapiens
agatgggctccacct

SEQ ID NO: 1012793 - DNA, 15 bp, Homo sapiens
aagatgggctccacc

SEQ ID NO: 1012794 - DNA, 15 bp, Homo sapiens
taagatgggctccac

SEQ ID NO: 1012795 - DNA, 15 bp, Homo sapiens
gtaagatgggctcca

SEQ ID NO: 1012796 - DNA, 15 bp, Homo sapiens
ggtaagatgggctcc

SEQ ID NO: 1012797 - DNA, 15 bp, Homo sapiens
aggtaagatgggctc

SEQ ID NO: 1012798 - DNA, 15 bp, Homo sapiens
gaggtaagatgggct

SEQ ID NO: 1012799 - DNA, 15 bp, Homo sapiens
ggaggtaagatgggc

SEQ ID NO: 1012800 - DNA, 15 bp, Homo sapiens
aggaggtaagatggg

SEQ ID NO: 1012801 - DNA, 15 bp, Homo sapiens
gaggaggtaagatgg

SEQ ID NO: 1012802 - DNA, 15 bp, Homo sapiens
tgaggaggtaagatg

SEQ ID NO: 1012803 - DNA, 15 bp, Homo sapiens
atgaggaggtaagat

SEQ ID NO: 1012804 - DNA, 15 bp, Homo sapiens
tatgaggaggtaaga

SEQ ID NO: 1012805 - DNA, 15 bp, Homo sapiens
gtatgaggaggtaag

SEQ ID NO: 1012806 - DNA, 15 bp, Homo sapiens
agtatgaggaggtaa

SEQ ID NO: 1012807 - DNA, 15 bp, Homo sapiens
tagtatgaggaggta

SEQ ID NO: 1012808 - DNA, 15 bp, Homo sapiens
ttagtatgaggaggt

SEQ ID NO: 1012809 - DNA, 15 bp, Homo sapiens
tttagtatgaggagg

SEQ ID NO: 1012810 - DNA, 15 bp, Homo sapiens
atttagtatgaggag

SEQ ID NO: 1012811 - DNA, 15 bp, Homo sapiens
aatttagtatgagga

SEQ ID NO: 1012812 - DNA, 15 bp, Homo sapiens
gaatttagtatgagg

SEQ ID NO: 1012813 - DNA, 15 bp, Homo sapiens
agaatttagtatgag

SEQ ID NO: 1012814 - DNA, 15 bp, Homo sapiens
tagaatttagtatga

SEQ ID NO: 1012815 - DNA, 15 bp, Homo sapiens
ctagaatttagtatg

SEQ ID NO: 1012816 - DNA, 15 bp, Homo sapiens
tctagaatttagtat

SEQ ID NO: 1012817 - DNA, 15 bp, Homo sapiens
gtctagaatttagta

SEQ ID NO: 1012818 - DNA, 15 bp, Homo sapiens
agtctagaatttagt

SEQ ID NO: 1012819 - DNA, 15 bp, Homo sapiens
aagtctagaatttag

SEQ ID NO: 1012820 - DNA, 15 bp, Homo sapiens
gaagtctagaattta

SEQ ID NO: 1012821 - DNA, 15 bp, Homo sapiens
agaagtctagaattt

SEQ ID NO: 1012822 - DNA, 15 bp, Homo sapiens
gagaagtctagaatt

SEQ ID NO: 1012823 - DNA, 15 bp, Homo sapiens
tgagaagtctagaat

SEQ ID NO: 1012824 - DNA, 15 bp, Homo sapiens
ttgagaagtctagaa

SEQ ID NO: 1012825 - DNA, 15 bp, Homo sapiens
cttgagaagtctaga

SEQ ID NO: 1012826 - DNA, 15 bp, Homo sapiens
ccttgagaagtctag

SEQ ID NO: 1012827 - DNA, 15 bp, Homo sapiens
cccttgagaagtcta

SEQ ID NO: 1012828 - DNA, 15 bp, Homo sapiens
gcccttgagaagtct

SEQ ID NO: 1012829 - DNA, 15 bp, Homo sapiens
tgcccttgagaagtc

SEQ ID NO: 1012830 - DNA, 15 bp, Homo sapiens
ctgcccttgagaagt

SEQ ID NO: 1012831 - DNA, 15 bp, Homo sapiens
cctgcccttgagaag

SEQ ID NO: 1012832 - DNA, 15 bp, Homo sapiens
tcctgcccttgagaa

SEQ ID NO: 1012833 - DNA, 15 bp, Homo sapiens
ctcctgcccttgaga

SEQ ID NO: 1012834 - DNA, 15 bp, Homo sapiens
tctcctgcccttgag

SEQ ID NO: 1012835 - DNA, 15 bp, Homo sapiens
gtctcctgcccttga

SEQ ID NO: 1012836 - DNA, 15 bp, Homo sapiens
tgtctcctgcccttg

SEQ ID NO: 1012837 - DNA, 15 bp, Homo sapiens
ttgtctcctgccctt

SEQ ID NO: 1012838 - DNA, 15 bp, Homo sapiens
attgtctcctgccct

SEQ ID NO: 1012839 - DNA, 15 bp, Homo sapiens
gattgtctcctgccc

SEQ ID NO: 1012840 - DNA, 15 bp, Homo sapiens
tgattgtctcctgcc

SEQ ID NO: 1012841 - DNA, 15 bp, Homo sapiens
atgattgtctcctgc

SEQ ID NO: 1012842 - DNA, 15 bp, Homo sapiens
gatgattgtctcctg

SEQ ID NO: 1012843 - DNA, 15 bp, Homo sapiens
agatgattgtctcct

SEQ ID NO: 1012844 - DNA, 15 bp, Homo sapiens
cagatgattgtctcc

SEQ ID NO: 1012845 - DNA, 15 bp, Homo sapiens
acagatgattgtctc

SEQ ID NO: 1012846 - DNA, 15 bp, Homo sapiens
tacagatgattgtct

SEQ ID NO: 1012847 - DNA, 15 bp, Homo sapiens
atacagatgattgtc

SEQ ID NO: 1012848 - DNA, 15 bp, Homo sapiens
tatacagatgattgt

SEQ ID NO: 1012849 - DNA, 15 bp, Homo sapiens
atatacagatgattg

SEQ ID NO: 1012850 - DNA, 15 bp, Homo sapiens
gatatacagatgatt

SEQ ID NO: 1012851 - DNA, 15 bp, Homo sapiens
agatatacagatgat

SEQ ID NO: 1012852 - DNA, 15 bp, Homo sapiens
gagatatacagatga

SEQ ID NO: 1012853 - DNA, 15 bp, Homo sapiens
agagatatacagatg

SEQ ID NO: 1012854 - DNA, 15 bp, Homo sapiens
aagagatatacagat

SEQ ID NO: 1012855 - DNA, 15 bp, Homo sapiens
aaagagatatacaga

SEQ ID NO: 1012856 - DNA, 15 bp, Homo sapiens
caaagagatatacag

SEQ ID NO: 1012857 - DNA, 15 bp, Homo sapiens
ccaaagagatataca

SEQ ID NO: 1012858 - DNA, 15 bp, Homo sapiens
gccaaagagatatac

SEQ ID NO: 1012859 - DNA, 15 bp, Homo sapiens
ggccaaagagatata

SEQ ID NO: 1012860 - DNA, 15 bp, Homo sapiens
aggccaaagagatat

SEQ ID NO: 1012861 - DNA, 15 bp, Homo sapiens
aaggccaaagagata

SEQ ID NO: 1012862 - DNA, 15 bp, Homo sapiens
gaaggccaaagagat

SEQ ID NO: 1012863 - DNA, 15 bp, Homo sapiens
tgaaggccaaagaga

SEQ ID NO: 1012864 - DNA, 15 bp, Homo sapiens
atgaaggccaaagag

SEQ ID NO: 1012865 - DNA, 15 bp, Homo sapiens
tatgaaggccaaaga

SEQ ID NO: 1012866 - DNA, 15 bp, Homo sapiens
gtatgaaggccaaag

SEQ ID NO: 1012867 - DNA, 15 bp, Homo sapiens
tgtatgaaggccaaa

SEQ ID NO: 1012868 - DNA, 15 bp, Homo sapiens
gtgtatgaaggccaa

SEQ ID NO: 1012869 - DNA, 15 bp, Homo sapiens
agtgtatgaaggcca

SEQ ID NO: 1012870 - DNA, 15 bp, Homo sapiens
gagtgtatgaaggcc

SEQ ID NO: 1012871 - DNA, 15 bp, Homo sapiens
tgagtgtatgaaggc

SEQ ID NO: 1012872 - DNA, 15 bp, Homo sapiens
ctgagtgtatgaagg

SEQ ID NO: 1012873 - DNA, 15 bp, Homo sapiens
cctgagtgtatgaag

SEQ ID NO: 1012874 - DNA, 15 bp, Homo sapiens
tcctgagtgtatgaa

SEQ ID NO: 1012875 - DNA, 15 bp, Homo sapiens
ctcctgagtgtatga

SEQ ID NO: 1012876 - DNA, 15 bp, Homo sapiens
actcctgagtgtatg

SEQ ID NO: 1012877 - DNA, 15 bp, Homo sapiens
tactcctgagtgtat

SEQ ID NO: 1012878 - DNA, 15 bp, Homo sapiens
gtactcctgagtgta

SEQ ID NO: 1012879 - DNA, 15 bp, Homo sapiens
agtactcctgagtgt

SEQ ID NO: 1012880 - DNA, 15 bp, Homo sapiens
aagtactcctgagtg

SEQ ID NO: 1012881 - DNA, 15 bp, Homo sapiens
caagtactcctgagt

SEQ ID NO: 1012882 - DNA, 15 bp, Homo sapiens
gcaagtactcctgag

SEQ ID NO: 1012883 - DNA, 15 bp, Homo sapiens
ggcaagtactcctga

SEQ ID NO: 1012884 - DNA, 15 bp, Homo sapiens
tggcaagtactcctg

SEQ ID NO: 1012885 - DNA, 15 bp, Homo sapiens
ttggcaagtactcct

SEQ ID NO: 1012886 - DNA, 15 bp, Homo sapiens
tttggcaagtactcc

SEQ ID NO: 1012887 - DNA, 15 bp, Homo sapiens
ttttggcaagtactc

SEQ ID NO: 1012888 - DNA, 15 bp, Homo sapiens
tttttggcaagtact

SEQ ID NO: 1012889 - DNA, 15 bp, Homo sapiens
atttttggcaagtac

SEQ ID NO: 1012890 - DNA, 15 bp, Homo sapiens
tatttttggcaagta

SEQ ID NO: 1012891 - DNA, 15 bp, Homo sapiens
ttatttttggcaagt

SEQ ID NO: 1012892 - DNA, 15 bp, Homo sapiens
tttatttttggcaag

SEQ ID NO: 1012893 - DNA, 15 bp, Homo sapiens
gtttatttttggcaa

SEQ ID NO: 1012894 - DNA, 15 bp, Homo sapiens
tgtttatttttggca

SEQ ID NO: 1012895 - DNA, 15 bp, Homo sapiens
atgtttatttttggc

SEQ ID NO: 1012896 - DNA, 15 bp, Homo sapiens
aatgtttatttttgg

SEQ ID NO: 1012897 - DNA, 15 bp, Homo sapiens
aaatgtttatttttg

SEQ ID NO: 1012898 - DNA, 15 bp, Homo sapiens
ttaaatgtttatttt

SEQ ID NO: 1012899 - DNA, 15 bp, Homo sapiens
attaaatgtttattt

SEQ ID NO: 1012900 - DNA, 15 bp, Homo sapiens
cattaaatgtttatt

SEQ ID NO: 1012901 - DNA, 15 bp, Homo sapiens
gtgcattaaatgttt

SEQ ID NO: 1012902 - DNA, 15 bp, Homo sapiens
tgtgcattaaatgtt

SEQ ID NO: 1012903 - DNA, 15 bp, Homo sapiens
atgtgcattaaatgt

SEQ ID NO: 1012904 - DNA, 15 bp, Homo sapiens
aatgtgcattaaatg

SEQ ID NO: 1012905 - DNA, 15 bp, Homo sapiens
aaatgtgcattaaat

SEQ ID NO: 1012906 - DNA, 15 bp, Homo sapiens
taaatgtgcattaaa

SEQ ID NO: 1012907 - DNA, 15 bp, Homo sapiens
ataaatgtgcattaa

SEQ ID NO: 1012908 - DNA, 15 bp, Homo sapiens
aataaatgtgcatta

SEQ ID NO: 1012909 - DNA, 15 bp, Homo sapiens
aaataaatgtgcatt

SEQ ID NO: 1012910 - DNA, 15 bp, Homo sapiens
caaataaatgtgcat

SEQ ID NO: 1012911 - DNA, 15 bp, Homo sapiens
tcaaataaatgtgca

SEQ ID NO: 1012912 - DNA, 15 bp, Homo sapiens
ttcaaataaatgtgc

SEQ ID NO: 1012913 - DNA, 15 bp, Homo sapiens
attcaaataaatgtg

SEQ ID NO: 1012914 - DNA, 15 bp, Homo sapiens
tattcaaataaatgt

SEQ ID NO: 1012915 - DNA, 15 bp, Homo sapiens
ttattcaaataaatg

SEQ ID NO: 1012916 - DNA, 15 bp, Homo sapiens
attattcaaataaat

SEQ ID NO: 1012917 - DNA, 15 bp, Homo sapiens
aattattcaaataaa

SEQ ID NO: 1012918 - DNA, 15 bp, Homo sapiens
caattattcaaataa

SEQ ID NO: 1012919 - DNA, 15 bp, Homo sapiens
tcaattattcaaata

SEQ ID NO: 1012920 - DNA, 15 bp, Homo sapiens
atcaattattcaaat

SEQ ID NO: 1012921 - DNA, 15 bp, Homo sapiens
tatcaattattcaaa

SEQ ID NO: 1012922 - DNA, 15 bp, Homo sapiens
ttatcaattattcaa

SEQ ID NO: 1012923 - DNA, 15 bp, Homo sapiens
cttatcaattattca

SEQ ID NO: 1012924 - DNA, 15 bp, Homo sapiens
tcttatcaattattc

SEQ ID NO: 1012925 - DNA, 15 bp, Homo sapiens
atcttatcaattatt

SEQ ID NO: 1012926 - DNA, 15 bp, Homo sapiens
gatcttatcaattat

SEQ ID NO: 1012927 - DNA, 15 bp, Homo sapiens
ggatcttatcaatta

SEQ ID NO: 1012928 - DNA, 15 bp, Homo sapiens
tggatcttatcaatt

SEQ ID NO: 1012929 - DNA, 15 bp, Homo sapiens
ttggatcttatcaat

SEQ ID NO: 1012930 - DNA, 15 bp, Homo sapiens
attggatcttatcaa

SEQ ID NO: 1012931 - DNA, 15 bp, Homo sapiens
tattggatcttatca

SEQ ID NO: 1012932 - DNA, 15 bp, Homo sapiens
gtattggatcttatc

SEQ ID NO: 1012933 - DNA, 15 bp, Homo sapiens
agtattggatcttat

SEQ ID NO: 1012934 - DNA, 15 bp, Homo sapiens
aagtattggatctta

SEQ ID NO: 1012935 - DNA, 15 bp, Homo sapiens
gaagtattggatctt

SEQ ID NO: 1012936 - DNA, 15 bp, Homo sapiens
tgaagtattggatct

SEQ ID NO: 1012937 - DNA, 15 bp, Homo sapiens
ttgaagtattggatc

SEQ ID NO: 1012938 - DNA, 15 bp, Homo sapiens
attgaagtattggat

SEQ ID NO: 1012939 - DNA, 15 bp, Homo sapiens
tattgaagtattgga

SEQ ID NO: 1012940 - DNA, 15 bp, Homo sapiens
ttattgaagtattgg

SEQ ID NO: 1012941 - DNA, 15 bp, Homo sapiens
gttattgaagtattg

SEQ ID NO: 1012942 - DNA, 15 bp, Homo sapiens
agttattgaagtatt

SEQ ID NO: 1012943 - DNA, 15 bp, Homo sapiens
aagttattgaagtat

SEQ ID NO: 1012944 - DNA, 15 bp, Homo sapiens
aaagttattgaagta

SEQ ID NO: 1012945 - DNA, 15 bp, Homo sapiens
caaagttattgaagt

SEQ ID NO: 1012946 - DNA, 15 bp, Homo sapiens
acaaagttattgaag

SEQ ID NO: 1012947 - DNA, 15 bp, Homo sapiens
gacaaagttattgaa

SEQ ID NO: 1012948 - DNA, 15 bp, Homo sapiens
tgacaaagttattga

SEQ ID NO: 1012949 - DNA, 15 bp, Homo sapiens
atgacaaagttattg

SEQ ID NO: 1012950 - DNA, 15 bp, Homo sapiens
tatgacaaagttatt

SEQ ID NO: 1012951 - DNA, 15 bp, Homo sapiens
atatgacaaagttat

SEQ ID NO: 1012952 - DNA, 15 bp, Homo sapiens
aatatgacaaagtta

SEQ ID NO: 1012953 - DNA, 15 bp, Homo sapiens
aaatatgacaaagtt

SEQ ID NO: 1012954 - DNA, 15 bp, Homo sapiens
aaaatatgacaaagt

SEQ ID NO: 1012955 - DNA, 15 bp, Homo sapiens
aaaaatatgacaaag

SEQ ID NO: 1012956 - DNA, 15 bp, Homo sapiens
taaaaatatgacaaa

SEQ ID NO: 1012957 - DNA, 15 bp, Homo sapiens
ataaaaatatgacaa

SEQ ID NO: 1012958 - DNA, 15 bp, Homo sapiens
tataaaaatatgaca

SEQ ID NO: 1012959 - DNA, 15 bp, Homo sapiens
ctataaaaatatgac

SEQ ID NO: 1012960 - DNA, 15 bp, Homo sapiens
tctataaaaatatga

SEQ ID NO: 1012961 - DNA, 15 bp, Homo sapiens
ttctataaaaatatg

SEQ ID NO: 1012962 - DNA, 15 bp, Homo sapiens
attctataaaaatat

SEQ ID NO: 1012963 - DNA, 15 bp, Homo sapiens
cattctataaaaata

SEQ ID NO: 1012964 - DNA, 15 bp, Homo sapiens
ccattctataaaaat

SEQ ID NO: 1012965 - DNA, 15 bp, Homo sapiens
cccattctataaaaa

SEQ ID NO: 1012966 - DNA, 15 bp, Homo sapiens
acccattctataaaa

SEQ ID NO: 1012967 - DNA, 15 bp, Homo sapiens
aacccattctataaa

SEQ ID NO: 1012968 - DNA, 15 bp, Homo sapiens
aaacccattctataa

SEQ ID NO: 1012969 - DNA, 15 bp, Homo sapiens
gaaacccattctata

SEQ ID NO: 1012970 - DNA, 15 bp, Homo sapiens
agaaacccattctat

SEQ ID NO: 1012971 - DNA, 15 bp, Homo sapiens
tagaaacccattcta

SEQ ID NO: 1012972 - DNA, 15 bp, Homo sapiens
atagaaacccattct

SEQ ID NO: 1012973 - DNA, 15 bp, Homo sapiens
tatagaaacccattc

SEQ ID NO: 1012974 - DNA, 15 bp, Homo sapiens
atatagaaacccatt

SEQ ID NO: 1012975 - DNA, 15 bp, Homo sapiens
gatatagaaacccat

SEQ ID NO: 1012976 - DNA, 15 bp, Homo sapiens
agatatagaaaccca

SEQ ID NO: 1012977 - DNA, 15 bp, Homo sapiens
gagatatagaaaccc

SEQ ID NO: 1012978 - DNA, 15 bp, Homo sapiens
tgagatatagaaacc

SEQ ID NO: 1012979 - DNA, 15 bp, Homo sapiens
atgagatatagaaac

SEQ ID NO: 1012980 - DNA, 15 bp, Homo sapiens
aatgagatatagaaa

SEQ ID NO: 1012981 - DNA, 15 bp, Homo sapiens
aaatgagatatagaa

SEQ ID NO: 1012982 - DNA, 15 bp, Homo sapiens
caaatgagatataga

SEQ ID NO: 1012983 - DNA, 15 bp, Homo sapiens
gcaaatgagatatag

SEQ ID NO: 1012984 - DNA, 15 bp, Homo sapiens
tgcaaatgagatata

SEQ ID NO: 1012985 - DNA, 15 bp, Homo sapiens
atgcaaatgagatat

SEQ ID NO: 1012986 - DNA, 15 bp, Homo sapiens
aatgcaaatgagata

SEQ ID NO: 1012987 - DNA, 15 bp, Homo sapiens
aaatgcaaatgagat

SEQ ID NO: 1012988 - DNA, 15 bp, Homo sapiens
aaaatgcaaatgaga

SEQ ID NO: 1012989 - DNA, 15 bp, Homo sapiens
gaaaatgcaaatgag

SEQ ID NO: 1012990 - DNA, 15 bp, Homo sapiens
tgaaaatgcaaatga

SEQ ID NO: 1012991 - DNA, 15 bp, Homo sapiens
ttgaaaatgcaaatg

SEQ ID NO: 1012992 - DNA, 15 bp, Homo sapiens
tttgaaaatgcaaat

SEQ ID NO: 1012993 - DNA, 15 bp, Homo sapiens
gtttgaaaatgcaaa

SEQ ID NO: 1012994 - DNA, 15 bp, Homo sapiens
agtttgaaaatgcaa

SEQ ID NO: 1012995 - DNA, 15 bp, Homo sapiens
aagtttgaaaatgca

SEQ ID NO: 1012996 - DNA, 15 bp, Homo sapiens
aaagtttgaaaatgc

SEQ ID NO: 1012997 - DNA, 15 bp, Homo sapiens
taaagtttgaaaatg

SEQ ID NO: 1012998 - DNA, 15 bp, Homo sapiens
gtaaagtttgaaaat

SEQ ID NO: 1012999 - DNA, 15 bp, Homo sapiens
agtaaagtttgaaaa

SEQ ID NO: 1013000 - DNA, 15 bp, Homo sapiens
aagtaaagtttgaaa

SEQ ID NO: 1013001 - DNA, 15 bp, Homo sapiens
aaagtaaagtttgaa

SEQ ID NO: 1013002 - DNA, 15 bp, Homo sapiens
aaaagtaaagtttga

SEQ ID NO: 1013003 - DNA, 15 bp, Homo sapiens
taaaagtaaagtttg

SEQ ID NO: 1013004 - DNA, 15 bp, Homo sapiens
gtaaaagtaaagttt

SEQ ID NO: 1013005 - DNA, 15 bp, Homo sapiens
agtaaaagtaaagtt

SEQ ID NO: 1013006 - DNA, 15 bp, Homo sapiens
cagtaaaagtaaagt

SEQ ID NO: 1013007 - DNA, 15 bp, Homo sapiens
acagtaaaagtaaag

SEQ ID NO: 1013008 - DNA, 15 bp, Homo sapiens
gacagtaaaagtaaa

SEQ ID NO: 1013009 - DNA, 15 bp, Homo sapiens
agacagtaaaagtaa

SEQ ID NO: 1013010 - DNA, 15 bp, Homo sapiens
tagacagtaaaagta

SEQ ID NO: 1013011 - DNA, 15 bp, Homo sapiens
ctagacagtaaaagt

SEQ ID NO: 1013012 - DNA, 15 bp, Homo sapiens
gctagacagtaaaag

SEQ ID NO: 1013013 - DNA, 15 bp, Homo sapiens
agctagacagtaaaa

SEQ ID NO: 1013014 - DNA, 15 bp, Homo sapiens
aagctagacagtaaa

SEQ ID NO: 1013015 - DNA, 15 bp, Homo sapiens
aaagctagacagtaa

SEQ ID NO: 1013016 - DNA, 15 bp, Homo sapiens
taaagctagacagta

SEQ ID NO: 1013017 - DNA, 15 bp, Homo sapiens
ttaaagctagacagt

SEQ ID NO: 1013018 - DNA, 15 bp, Homo sapiens
tttaaagctagacag

SEQ ID NO: 1013019 - DNA, 15 bp, Homo sapiens
ttttaaagctagaca

SEQ ID NO: 1013020 - DNA, 15 bp, Homo sapiens
tttttaaagctagac

SEQ ID NO: 1013021 - DNA, 15 bp, Homo sapiens
ttttttaaagctaga

SEQ ID NO: 1013022 - DNA, 15 bp, Homo sapiens
tttttttaaagctag

SEQ ID NO: 1013023 - DNA, 15 bp, Homo sapiens
ttttttttaaagcta

SEQ ID NO: 1013024 - DNA, 15 bp, Homo sapiens
tttttttttaaagct

SEQ ID NO: 1013025 - DNA, 15 bp, Homo sapiens
ctttttttttaaagc

SEQ ID NO: 1013026 - DNA, 15 bp, Homo sapiens
gctttttttttaaag

SEQ ID NO: 1013027 - DNA, 15 bp, Homo sapiens
ggctttttttttaaa

SEQ ID NO: 1013028 - DNA, 15 bp, Homo sapiens
aggctttttttttaa

SEQ ID NO: 1013029 - DNA, 15 bp, Homo sapiens
aaggcttttttttta

SEQ ID NO: 1013030 - DNA, 15 bp, Homo sapiens
aaaggcttttttttt

SEQ ID NO: 1013031 - DNA, 15 bp, Homo sapiens
caaaggctttttttt

SEQ ID NO: 1013032 - DNA, 15 bp, Homo sapiens
tcaaaggcttttttt

SEQ ID NO: 1013033 - DNA, 15 bp, Homo sapiens
gtcaaaggctttttt

SEQ ID NO: 1013034 - DNA, 15 bp, Homo sapiens
agtcaaaggcttttt

SEQ ID NO: 1013035 - DNA, 15 bp, Homo sapiens
gagtcaaaggctttt

SEQ ID NO: 1013036 - DNA, 15 bp, Homo sapiens
agagtcaaaggcttt

SEQ ID NO: 1013037 - DNA, 15 bp, Homo sapiens
tagagtcaaaggctt

SEQ ID NO: 1013038 - DNA, 15 bp, Homo sapiens
ttagagtcaaaggct

SEQ ID NO: 1013039 - DNA, 15 bp, Homo sapiens
attagagtcaaaggc

SEQ ID NO: 1013040 - DNA, 15 bp, Homo sapiens
tattagagtcaaagg

SEQ ID NO: 1013041 - DNA, 15 bp, Homo sapiens
gtattagagtcaaag

SEQ ID NO: 1013042 - DNA, 15 bp, Homo sapiens
tgtattagagtcaaa

SEQ ID NO: 1013043 - DNA, 15 bp, Homo sapiens
ctgtattagagtcaa

SEQ ID NO: 1013044 - DNA, 15 bp, Homo sapiens
gctgtattagagtca

SEQ ID NO: 1013045 - DNA, 15 bp, Homo sapiens
ggctgtattagagtc

SEQ ID NO: 1013046 - DNA, 15 bp, Homo sapiens
gggctgtattagagt

SEQ ID NO: 1013047 - DNA, 15 bp, Homo sapiens
agggctgtattagag

SEQ ID NO: 1013048 - DNA, 15 bp, Homo sapiens
gagggctgtattaga

SEQ ID NO: 1013049 - DNA, 15 bp, Homo sapiens
tgagggctgtattag

SEQ ID NO: 1013050 - DNA, 15 bp, Homo sapiens
atgagggctgtatta

SEQ ID NO: 1013051 - DNA, 15 bp, Homo sapiens
tatgagggctgtatt

SEQ ID NO: 1013052 - DNA, 15 bp, Homo sapiens
atatgagggctgtat

SEQ ID NO: 1013053 - DNA, 15 bp, Homo sapiens
aatatgagggctgta

SEQ ID NO: 1013054 - DNA, 15 bp, Homo sapiens
gaatatgagggctgt

SEQ ID NO: 1013055 - DNA, 15 bp, Homo sapiens
agaatatgagggctg

SEQ ID NO: 1013056 - DNA, 15 bp, Homo sapiens
tagaatatgagggct

SEQ ID NO: 1013057 - DNA, 15 bp, Homo sapiens
gtagaatatgagggc

SEQ ID NO: 1013058 - DNA, 15 bp, Homo sapiens
ggtagaatatgaggg

SEQ ID NO: 1013059 - DNA, 15 bp, Homo sapiens
gggtagaatatgagg

SEQ ID NO: 1013060 - DNA, 15 bp, Homo sapiens
ggggtagaatatgag

SEQ ID NO: 1013061 - DNA, 15 bp, Homo sapiens
agatattggggtaga

SEQ ID NO: 1013062 - DNA, 15 bp, Homo sapiens
tagatattggggtag

SEQ ID NO: 1013063 - DNA, 15 bp, Homo sapiens
ttagatattggggta

SEQ ID NO: 1013064 - DNA, 15 bp, Homo sapiens
cttagatattggggt

SEQ ID NO: 1013065 - DNA, 15 bp, Homo sapiens
tcttagatattgggg

SEQ ID NO: 1013066 - DNA, 15 bp, Homo sapiens
ctcttagatattggg

SEQ ID NO: 1013067 - DNA, 15 bp, Homo sapiens
cctcttagatattgg

SEQ ID NO: 1013068 - DNA, 15 bp, Homo sapiens
gcctcttagatattg

SEQ ID NO: 1013069 - DNA, 15 bp, Homo sapiens
agcctcttagatatt

SEQ ID NO: 1013070 - DNA, 15 bp, Homo sapiens
aagcctcttagatat

SEQ ID NO: 1013071 - DNA, 15 bp, Homo sapiens
aaagcctcttagata

SEQ ID NO: 1013072 - DNA, 15 bp, Homo sapiens
taaagcctcttagat

SEQ ID NO: 1013073 - DNA, 15 bp, Homo sapiens
ataaagcctcttaga

SEQ ID NO: 1013074 - DNA, 15 bp, Homo sapiens
tataaagcctcttag

SEQ ID NO: 1013075 - DNA, 15 bp, Homo sapiens
atataaagcctctta

SEQ ID NO: 1013076 - DNA, 15 bp, Homo sapiens
gatataaagcctctt

SEQ ID NO: 1013077 - DNA, 15 bp, Homo sapiens
agatataaagcctct

SEQ ID NO: 1013078 - DNA, 15 bp, Homo sapiens
gagatataaagcctc

SEQ ID NO: 1013079 - DNA, 15 bp, Homo sapiens
ggagatataaagcct

SEQ ID NO: 1013080 - DNA, 15 bp, Homo sapiens
aggagatataaagcc

SEQ ID NO: 1013081 - DNA, 15 bp, Homo sapiens
taggagatataaagc

SEQ ID NO: 1013082 - DNA, 15 bp, Homo sapiens
ctaggagatataaag

SEQ ID NO: 1013083 - DNA, 15 bp, Homo sapiens
actaggagatataaa

SEQ ID NO: 1013084 - DNA, 15 bp, Homo sapiens
cactaggagatataa

SEQ ID NO: 1013085 - DNA, 15 bp, Homo sapiens
acactaggagatata

SEQ ID NO: 1013086 - DNA, 15 bp, Homo sapiens
aacactaggagatat

SEQ ID NO: 1013087 - DNA, 15 bp, Homo sapiens
caacactaggagata

SEQ ID NO: 1013088 - DNA, 15 bp, Homo sapiens
acaacactaggagat

SEQ ID NO: 1013089 - DNA, 15 bp, Homo sapiens
tacaacactaggaga

SEQ ID NO: 1013090 - DNA, 15 bp, Homo sapiens
gtacaacactaggag

SEQ ID NO: 1013091 - DNA, 15 bp, Homo sapiens
ggtacaacactagga

SEQ ID NO: 1013092 - DNA, 15 bp, Homo sapiens
tggtacaacactagg

SEQ ID NO: 1013093 - DNA, 15 bp, Homo sapiens
gtggtacaacactag

SEQ ID NO: 1013094 - DNA, 15 bp, Homo sapiens
agtggtacaacacta

SEQ ID NO: 1013095 - DNA, 15 bp, Homo sapiens
tagtggtacaacact

SEQ ID NO: 1013096 - DNA, 15 bp, Homo sapiens
atagtggtacaacac

SEQ ID NO: 1013097 - DNA, 15 bp, Homo sapiens
aatagtggtacaaca

SEQ ID NO: 1013098 - DNA, 15 bp, Homo sapiens
aaatagtggtacaac

SEQ ID NO: 1013099 - DNA, 15 bp, Homo sapiens
aaaatagtggtacaa

SEQ ID NO: 1013100 - DNA, 15 bp, Homo sapiens
taaaatagtggtaca

SEQ ID NO: 1013101 - DNA, 15 bp, Homo sapiens
ttaaaatagtggtac

SEQ ID NO: 1013102 - DNA, 15 bp, Homo sapiens
gttaaaatagtggta

SEQ ID NO: 1013103 - DNA, 15 bp, Homo sapiens
agttaaaatagtggt

SEQ ID NO: 1013104 - DNA, 15 bp, Homo sapiens
gagttaaaatagtgg

SEQ ID NO: 1013105 - DNA, 15 bp, Homo sapiens
ggagttaaaatagtg

SEQ ID NO: 1013106 - DNA, 15 bp, Homo sapiens
tggagttaaaatagt

SEQ ID NO: 1013107 - DNA, 15 bp, Homo sapiens
ctggagttaaaatag

SEQ ID NO: 1013108 - DNA, 15 bp, Homo sapiens
actggagttaaaata

SEQ ID NO: 1013109 - DNA, 15 bp, Homo sapiens
tactggagttaaaat

SEQ ID NO: 1013110 - DNA, 15 bp, Homo sapiens
atactggagttaaaa

SEQ ID NO: 1013111 - DNA, 15 bp, Homo sapiens
aatactggagttaaa

SEQ ID NO: 1013112 - DNA, 15 bp, Homo sapiens
aaatactggagttaa

SEQ ID NO: 1013113 - DNA, 15 bp, Homo sapiens
aaaatactggagtta

SEQ ID NO: 1013114 - DNA, 15 bp, Homo sapiens
aaaaatactggagtt

SEQ ID NO: 1013115 - DNA, 15 bp, Homo sapiens
aaaaaatactggagt

SEQ ID NO: 1013116 - DNA, 15 bp, Homo sapiens
taaaaaatactggag

SEQ ID NO: 1013117 - DNA, 15 bp, Homo sapiens
gtaaaaaatactgga

SEQ ID NO: 1013118 - DNA, 15 bp, Homo sapiens
agtaaaaaatactgg

SEQ ID NO: 1013119 - DNA, 15 bp, Homo sapiens
aagtaaaaaatactg

SEQ ID NO: 1013120 - DNA, 15 bp, Homo sapiens
gaagtaaaaaatact

SEQ ID NO: 1013121 - DNA, 15 bp, Homo sapiens
tgaagtaaaaaatac

SEQ ID NO: 1013122 - DNA, 15 bp, Homo sapiens
atgaagtaaaaaata

SEQ ID NO: 1013123 - DNA, 15 bp, Homo sapiens
tatgaagtaaaaaat

SEQ ID NO: 1013124 - DNA, 15 bp, Homo sapiens
ctatgaagtaaaaaa

SEQ ID NO: 1013125 - DNA, 15 bp, Homo sapiens
actatgaagtaaaaa

SEQ ID NO: 1013126 - DNA, 15 bp, Homo sapiens
aactatgaagtaaaa

SEQ ID NO: 1013127 - DNA, 15 bp, Homo sapiens
aaactatgaagtaaa

SEQ ID NO: 1013128 - DNA, 15 bp, Homo sapiens
aaaactatgaagtaa

SEQ ID NO: 1013129 - DNA, 15 bp, Homo sapiens
taaaactatgaagta

SEQ ID NO: 1013130 - DNA, 15 bp, Homo sapiens
gtaaaactatgaagt

SEQ ID NO: 1013131 - DNA, 15 bp, Homo sapiens
ggtaaaactatgaag

SEQ ID NO: 1013132 - DNA, 15 bp, Homo sapiens
aggtaaaactatgaa

SEQ ID NO: 1013133 - DNA, 15 bp, Homo sapiens
taggtaaaactatga

SEQ ID NO: 1013134 - DNA, 15 bp, Homo sapiens
ataggtaaaactatg

SEQ ID NO: 1013135 - DNA, 15 bp, Homo sapiens
aataggtaaaactat

SEQ ID NO: 1013136 - DNA, 15 bp, Homo sapiens
aaataggtaaaacta

SEQ ID NO: 1013137 - DNA, 15 bp, Homo sapiens
caaataggtaaaact

SEQ ID NO: 1013138 - DNA, 15 bp, Homo sapiens
acaaataggtaaaac

SEQ ID NO: 1013139 - DNA, 15 bp, Homo sapiens
aacaaataggtaaaa

SEQ ID NO: 1013140 - DNA, 15 bp, Homo sapiens
taacaaataggtaaa

SEQ ID NO: 1013141 - DNA, 15 bp, Homo sapiens
gtaacaaataggtaa

SEQ ID NO: 1013142 - DNA, 15 bp, Homo sapiens
tgtaacaaataggta

SEQ ID NO: 1013143 - DNA, 15 bp, Homo sapiens
ctgtaacaaataggt

SEQ ID NO: 1013144 - DNA, 15 bp, Homo sapiens
actgtaacaaatagg

SEQ ID NO: 1013145 - DNA, 15 bp, Homo sapiens
aactgtaacaaatag

SEQ ID NO: 1013146 - DNA, 15 bp, Homo sapiens
taactgtaacaaata

SEQ ID NO: 1013147 - DNA, 15 bp, Homo sapiens
ctaactgtaacaaat

SEQ ID NO: 1013148 - DNA, 15 bp, Homo sapiens
actaactgtaacaaa

SEQ ID NO: 1013149 - DNA, 15 bp, Homo sapiens
aactaactgtaacaa

SEQ ID NO: 1013150 - DNA, 15 bp, Homo sapiens
aaactaactgtaaca

SEQ ID NO: 1013151 - DNA, 15 bp, Homo sapiens
aaaactaactgtaac

SEQ ID NO: 1013152 - DNA, 15 bp, Homo sapiens
aaaaactaactgtaa

SEQ ID NO: 1013153 - DNA, 15 bp, Homo sapiens
taaaaactaactgta

SEQ ID NO: 1013154 - DNA, 15 bp, Homo sapiens
ataaaaactaactgt

SEQ ID NO: 1013155 - DNA, 15 bp, Homo sapiens
cataaaaactaactg

SEQ ID NO: 1013156 - DNA, 15 bp, Homo sapiens
tcataaaaactaact

SEQ ID NO: 1013157 - DNA, 15 bp, Homo sapiens
ttcataaaaactaac

SEQ ID NO: 1013158 - DNA, 15 bp, Homo sapiens
attcataaaaactaa

SEQ ID NO: 1013159 - DNA, 15 bp, Homo sapiens
aattcataaaaacta

SEQ ID NO: 1013160 - DNA, 15 bp, Homo sapiens
gaattcataaaaact

SEQ ID NO: 1013161 - DNA, 15 bp, Homo sapiens
tgaattcataaaaac

SEQ ID NO: 1013162 - DNA, 15 bp, Homo sapiens
ttgaattcataaaaa

SEQ ID NO: 1013163 - DNA, 15 bp, Homo sapiens
cttgaattcataaaa

SEQ ID NO: 1013164 - DNA, 15 bp, Homo sapiens
tcttgaattcataaa

SEQ ID NO: 1013165 - DNA, 15 bp, Homo sapiens
ctcttgaattcataa

SEQ ID NO: 1013166 - DNA, 15 bp, Homo sapiens
tctcttgaattcata

SEQ ID NO: 1013167 - DNA, 15 bp, Homo sapiens
atctcttgaattcat

SEQ ID NO: 1013168 - DNA, 15 bp, Homo sapiens
catctcttgaattca

SEQ ID NO: 1013169 - DNA, 15 bp, Homo sapiens
tcatctcttgaattc

SEQ ID NO: 1013170 - DNA, 15 bp, Homo sapiens
ttcatctcttgaatt

SEQ ID NO: 1013171 - DNA, 15 bp, Homo sapiens
attcatctcttgaat

SEQ ID NO: 1013172 - DNA, 15 bp, Homo sapiens
tattcatctcttgaa

SEQ ID NO: 1013173 - DNA, 15 bp, Homo sapiens
ctattcatctcttga

SEQ ID NO: 1013174 - DNA, 15 bp, Homo sapiens
gctattcatctcttg

SEQ ID NO: 1013175 - DNA, 15 bp, Homo sapiens
tgctattcatctctt

SEQ ID NO: 1013176 - DNA, 15 bp, Homo sapiens
ttgctattcatctct

SEQ ID NO: 1013177 - DNA, 15 bp, Homo sapiens
attgctattcatctc

SEQ ID NO: 1013178 - DNA, 15 bp, Homo sapiens
aattgctattcatct

SEQ ID NO: 1013179 - DNA, 15 bp, Homo sapiens
aaattgctattcatc

SEQ ID NO: 1013180 - DNA, 15 bp, Homo sapiens
aaaattgctattcat

SEQ ID NO: 1013181 - DNA, 15 bp, Homo sapiens
gaaaattgctattca

SEQ ID NO: 1013182 - DNA, 15 bp, Homo sapiens
ggaaaattgctattc

SEQ ID NO: 1013183 - DNA, 15 bp, Homo sapiens
tggaaaattgctatt

SEQ ID NO: 1013184 - DNA, 15 bp, Homo sapiens
atggaaaattgctat

SEQ ID NO: 1013185 - DNA, 15 bp, Homo sapiens
tatggaaaattgcta

SEQ ID NO: 1013186 - DNA, 15 bp, Homo sapiens
atatggaaaattgct

SEQ ID NO: 1013187 - DNA, 15 bp, Homo sapiens
catatggaaaattgc

SEQ ID NO: 1013188 - DNA, 15 bp, Homo sapiens
acatatggaaaattg

SEQ ID NO: 1013189 - DNA, 15 bp, Homo sapiens
tacatatggaaaatt

SEQ ID NO: 1013190 - DNA, 15 bp, Homo sapiens
ttacatatggaaaat

SEQ ID NO: 1013191 - DNA, 15 bp, Homo sapiens
attacatatggaaaa

SEQ ID NO: 1013192 - DNA, 15 bp, Homo sapiens
aattacatatggaaa

SEQ ID NO: 1013193 - DNA, 15 bp, Homo sapiens
aaattacatatggaa

SEQ ID NO: 1013194 - DNA, 15 bp, Homo sapiens
taaattacatatgga

SEQ ID NO: 1013195 - DNA, 15 bp, Homo sapiens
ttaaattacatatgg

SEQ ID NO: 1013196 - DNA, 15 bp, Homo sapiens
tttaaattacatatg

SEQ ID NO: 1013197 - DNA, 15 bp, Homo sapiens
ttttaaattacatat

SEQ ID NO: 1013198 - DNA, 15 bp, Homo sapiens
tttttaaattacata

SEQ ID NO: 1013199 - DNA, 15 bp, Homo sapiens
ttttttaaattacat

SEQ ID NO: 1013200 - DNA, 15 bp, Homo sapiens
gttttttaaattaca

SEQ ID NO: 1013201 - DNA, 15 bp, Homo sapiens
ggttttttaaattac

SEQ ID NO: 1013202 - DNA, 15 bp, Homo sapiens
gggttttttaaatta

SEQ ID NO: 1013203 - DNA, 15 bp, Homo sapiens
ggggttttttaaatt

SEQ ID NO: 1013204 - DNA, 15 bp, Homo sapiens
tggggttttttaaat

SEQ ID NO: 1013205 - DNA, 15 bp, Homo sapiens
gtggggttttttaaa

SEQ ID NO: 1013206 - DNA, 15 bp, Homo sapiens
tgtggggttttttaa

SEQ ID NO: 1013207 - DNA, 15 bp, Homo sapiens
ctgtggggtttttta

SEQ ID NO: 1013208 - DNA, 15 bp, Homo sapiens
actgtggggtttttt

SEQ ID NO: 1013209 - DNA, 15 bp, Homo sapiens
aactgtggggttttt

SEQ ID NO: 1013210 - DNA, 15 bp, Homo sapiens
caactgtggggtttt

SEQ ID NO: 1013211 - DNA, 15 bp, Homo sapiens
tcaactgtggggttt

SEQ ID NO: 1013212 - DNA, 15 bp, Homo sapiens
gtcaactgtggggtt

SEQ ID NO: 1013213 - DNA, 15 bp, Homo sapiens
agtcaactgtggggt

SEQ ID NO: 1013214 - DNA, 15 bp, Homo sapiens
tagtcaactgtgggg

SEQ ID NO: 1013215 - DNA, 15 bp, Homo sapiens
atagtcaactgtggg

SEQ ID NO: 1013216 - DNA, 15 bp, Homo sapiens
aatagtcaactgtgg

SEQ ID NO: 1013217 - DNA, 15 bp, Homo sapiens
aaatagtcaactgtg

SEQ ID NO: 1013218 - DNA, 15 bp, Homo sapiens
aaaatagtcaactgt

SEQ ID NO: 1013219 - DNA, 15 bp, Homo sapiens
taaaatagtcaactg

SEQ ID NO: 1013220 - DNA, 15 bp, Homo sapiens
ataaaatagtcaact

SEQ ID NO: 1013221 - DNA, 15 bp, Homo sapiens
cataaaatagtcaac

SEQ ID NO: 1013222 - DNA, 15 bp, Homo sapiens
gcataaaatagtcaa

SEQ ID NO: 1013223 - DNA, 15 bp, Homo sapiens
agcataaaatagtca

SEQ ID NO: 1013224 - DNA, 15 bp, Homo sapiens
tagcataaaatagtc

SEQ ID NO: 1013225 - DNA, 15 bp, Homo sapiens
atagcataaaatagt

SEQ ID NO: 1013226 - DNA, 15 bp, Homo sapiens
gatagcataaaatag

SEQ ID NO: 1013227 - DNA, 15 bp, Homo sapiens
agatagcataaaata

SEQ ID NO: 1013228 - DNA, 15 bp, Homo sapiens
aagatagcataaaat

SEQ ID NO: 1013229 - DNA, 15 bp, Homo sapiens
aaagatagcataaaa

SEQ ID NO: 1013230 - DNA, 15 bp, Homo sapiens
aaaagatagcataaa

SEQ ID NO: 1013231 - DNA, 15 bp, Homo sapiens
caaaagatagcataa

SEQ ID NO: 1013232 - DNA, 15 bp, Homo sapiens
acaaaagatagcata

SEQ ID NO: 1013233 - DNA, 15 bp, Homo sapiens
gacaaaagatagcat

SEQ ID NO: 1013234 - DNA, 15 bp, Homo sapiens
ggacaaaagatagca

SEQ ID NO: 1013235 - DNA, 15 bp, Homo sapiens
aggacaaaagatagc

SEQ ID NO: 1013236 - DNA, 15 bp, Homo sapiens
gaggacaaaagatag

SEQ ID NO: 1013237 - DNA, 15 bp, Homo sapiens
tgaggacaaaagata

SEQ ID NO: 1013238 - DNA, 15 bp, Homo sapiens
ctgaggacaaaagat

SEQ ID NO: 1013239 - DNA, 15 bp, Homo sapiens
actgaggacaaaaga

SEQ ID NO: 1013240 - DNA, 15 bp, Homo sapiens
gactgaggacaaaag

SEQ ID NO: 1013241 - DNA, 15 bp, Homo sapiens
tgactgaggacaaaa

SEQ ID NO: 1013242 - DNA, 15 bp, Homo sapiens
atgactgaggacaaa

SEQ ID NO: 1013243 - DNA, 15 bp, Homo sapiens
catgactgaggacaa

SEQ ID NO: 1013244 - DNA, 15 bp, Homo sapiens
tcatgactgaggaca

SEQ ID NO: 1013245 - DNA, 15 bp, Homo sapiens
gtcatgactgaggac

SEQ ID NO: 1013246 - DNA, 15 bp, Homo sapiens
tgtcatgactgagga

SEQ ID NO: 1013247 - DNA, 15 bp, Homo sapiens
ctgtcatgactgagg

SEQ ID NO: 1013248 - DNA, 15 bp, Homo sapiens
tctgtcatgactgag

SEQ ID NO: 1013249 - DNA, 15 bp, Homo sapiens
ctctgtcatgactga

SEQ ID NO: 1013250 - DNA, 15 bp, Homo sapiens
actctgtcatgactg

SEQ ID NO: 1013251 - DNA, 15 bp, Homo sapiens
tactctgtcatgact

SEQ ID NO: 1013252 - DNA, 15 bp, Homo sapiens
ctactctgtcatgac

SEQ ID NO: 1013253 - DNA, 15 bp, Homo sapiens
tctactctgtcatga

SEQ ID NO: 1013254 - DNA, 15 bp, Homo sapiens
ttctactctgtcatg

SEQ ID NO: 1013255 - DNA, 15 bp, Homo sapiens
cttctactctgtcat

SEQ ID NO: 1013256 - DNA, 15 bp, Homo sapiens
tcttctactctgtca

SEQ ID NO: 1013257 - DNA, 15 bp, Homo sapiens
atcttctactctgtc

SEQ ID NO: 1013258 - DNA, 15 bp, Homo sapiens
catcttctactctgt

SEQ ID NO: 1013259 - DNA, 15 bp, Homo sapiens
ccatcttctactctg

SEQ ID NO: 1013260 - DNA, 15 bp, Homo sapiens
cccatcttctactct

SEQ ID NO: 1013261 - DNA, 15 bp, Homo sapiens
tcccatcttctactc

SEQ ID NO: 1013262 - DNA, 15 bp, Homo sapiens
ctcccatcttctact

SEQ ID NO: 1013263 - DNA, 15 bp, Homo sapiens
cctcccatcttctac

SEQ ID NO: 1013264 - DNA, 15 bp, Homo sapiens
acctcccatcttcta

SEQ ID NO: 1013265 - DNA, 15 bp, Homo sapiens
tacctcccatcttct

SEQ ID NO: 1013266 - DNA, 15 bp, Homo sapiens
ctacctcccatcttc

SEQ ID NO: 1013267 - DNA, 15 bp, Homo sapiens
gctacctcccatctt

SEQ ID NO: 1013268 - DNA, 15 bp, Homo sapiens
tgctacctcccatct

SEQ ID NO: 1013269 - DNA, 15 bp, Homo sapiens
gtgctacctcccatc

SEQ ID NO: 1013270 - DNA, 15 bp, Homo sapiens
ggtgctacctcccat

SEQ ID NO: 1013271 - DNA, 15 bp, Homo sapiens
tggtgctacctccca

SEQ ID NO: 1013272 - DNA, 15 bp, Homo sapiens
ttggtgctacctccc

SEQ ID NO: 1013273 - DNA, 15 bp, Homo sapiens
cttggtgctacctcc

SEQ ID NO: 1013274 - DNA, 15 bp, Homo sapiens
ccttggtgctacctc

SEQ ID NO: 1013275 - DNA, 15 bp, Homo sapiens
tccttggtgctacct

SEQ ID NO: 1013276 - DNA, 15 bp, Homo sapiens
atccttggtgctacc

SEQ ID NO: 1013277 - DNA, 15 bp, Homo sapiens
catccttggtgctac

SEQ ID NO: 1013278 - DNA, 15 bp, Homo sapiens
tcatccttggtgcta

SEQ ID NO: 1013279 - DNA, 15 bp, Homo sapiens
atcatccttggtgct

SEQ ID NO: 1013280 - DNA, 15 bp, Homo sapiens
catcatccttggtgc

SEQ ID NO: 1013281 - DNA, 15 bp, Homo sapiens
acatcatccttggtg

SEQ ID NO: 1013282 - DNA, 15 bp, Homo sapiens
gacatcatccttggt

SEQ ID NO: 1013283 - DNA, 15 bp, Homo sapiens
tgacatcatccttgg

SEQ ID NO: 1013284 - DNA, 15 bp, Homo sapiens
atgacatcatccttg

SEQ ID NO: 1013285 - DNA, 15 bp, Homo sapiens
tatgacatcatcctt

SEQ ID NO: 1013286 - DNA, 15 bp, Homo sapiens
gtatgacatcatcct

SEQ ID NO: 1013287 - DNA, 15 bp, Homo sapiens
ggtatgacatcatcc

SEQ ID NO: 1013288 - DNA, 15 bp, Homo sapiens
aggtatgacatcatc

SEQ ID NO: 1013289 - DNA, 15 bp, Homo sapiens
gaggtatgacatcat

SEQ ID NO: 1013290 - DNA, 15 bp, Homo sapiens
ggaggtatgacatca

SEQ ID NO: 1013291 - DNA, 15 bp, Homo sapiens
tggaggtatgacatc

SEQ ID NO: 1013292 - DNA, 15 bp, Homo sapiens
atggaggtatgacat

SEQ ID NO: 1013293 - DNA, 15 bp, Homo sapiens
gatggaggtatgaca

SEQ ID NO: 1013294 - DNA, 15 bp, Homo sapiens
ggatggaggtatgac

SEQ ID NO: 1013295 - DNA, 15 bp, Homo sapiens
aggatggaggtatga

SEQ ID NO: 1013296 - DNA, 15 bp, Homo sapiens
aaggatggaggtatg

SEQ ID NO: 1013297 - DNA, 15 bp, Homo sapiens
aaaggatggaggtat

SEQ ID NO: 1013298 - DNA, 15 bp, Homo sapiens
taaaggatggaggta

SEQ ID NO: 1013299 - DNA, 15 bp, Homo sapiens
ataaaggatggaggt

SEQ ID NO: 1013300 - DNA, 15 bp, Homo sapiens
cataaaggatggagg

SEQ ID NO: 1013301 - DNA, 15 bp, Homo sapiens
gcataaaggatggag

SEQ ID NO: 1013302 - DNA, 15 bp, Homo sapiens
agcataaaggatgga

SEQ ID NO: 1013303 - DNA, 15 bp, Homo sapiens
tagcataaaggatgg

SEQ ID NO: 1013304 - DNA, 15 bp, Homo sapiens
gtagcataaaggatg

SEQ ID NO: 1013305 - DNA, 15 bp, Homo sapiens
tgtagcataaaggat

SEQ ID NO: 1013306 - DNA, 15 bp, Homo sapiens
atgtagcataaagga

SEQ ID NO: 1013307 - DNA, 15 bp, Homo sapiens
aatgtagcataaagg

SEQ ID NO: 1013308 - DNA, 15 bp, Homo sapiens
gaatgtagcataaag

SEQ ID NO: 1013309 - DNA, 15 bp, Homo sapiens
agaatgtagcataaa

SEQ ID NO: 1013310 - DNA, 15 bp, Homo sapiens
tagaatgtagcataa

SEQ ID NO: 1013311 - DNA, 15 bp, Homo sapiens
atagaatgtagcata

SEQ ID NO: 1013312 - DNA, 15 bp, Homo sapiens
gatagaatgtagcat

SEQ ID NO: 1013313 - DNA, 15 bp, Homo sapiens
agatagaatgtagca

SEQ ID NO: 1013314 - DNA, 15 bp, Homo sapiens
aagatagaatgtagc

SEQ ID NO: 1013315 - DNA, 15 bp, Homo sapiens
gaagatagaatgtag

SEQ ID NO: 1013316 - DNA, 15 bp, Homo sapiens
agaagatagaatgta

SEQ ID NO: 1013317 - DNA, 15 bp, Homo sapiens
cagaagatagaatgt

SEQ ID NO: 1013318 - DNA, 15 bp, Homo sapiens
acagaagatagaatg

SEQ ID NO: 1013319 - DNA, 15 bp, Homo sapiens
gacagaagatagaat

SEQ ID NO: 1013320 - DNA, 15 bp, Homo sapiens
agacagaagatagaa

SEQ ID NO: 1013321 - DNA, 15 bp, Homo sapiens
tagacagaagataga

SEQ ID NO: 1013322 - DNA, 15 bp, Homo sapiens
gtagacagaagatag

SEQ ID NO: 1013323 - DNA, 15 bp, Homo sapiens
tgtagacagaagata

SEQ ID NO: 1013324 - DNA, 15 bp, Homo sapiens
atgtagacagaagat

SEQ ID NO: 1013325 - DNA, 15 bp, Homo sapiens
tatgtagacagaaga

SEQ ID NO: 1013326 - DNA, 15 bp, Homo sapiens
ttatgtagacagaag

SEQ ID NO: 1013327 - DNA, 15 bp, Homo sapiens
cttatgtagacagaa

SEQ ID NO: 1013328 - DNA, 15 bp, Homo sapiens
tcttatgtagacaga

SEQ ID NO: 1013329 - DNA, 15 bp, Homo sapiens
atcttatgtagacag

SEQ ID NO: 1013330 - DNA, 15 bp, Homo sapiens
catcttatgtagaca

SEQ ID NO: 1013331 - DNA, 15 bp, Homo sapiens
acatcttatgtagac

SEQ ID NO: 1013332 - DNA, 15 bp, Homo sapiens
gacatcttatgtaga

SEQ ID NO: 1013333 - DNA, 15 bp, Homo sapiens
tgacatcttatgtag

SEQ ID NO: 1013334 - DNA, 15 bp, Homo sapiens
atgacatcttatgta

SEQ ID NO: 1013335 - DNA, 15 bp, Homo sapiens
tatgacatcttatgt

SEQ ID NO: 1013336 - DNA, 15 bp, Homo sapiens
gtatgacatcttatg

SEQ ID NO: 1013337 - DNA, 15 bp, Homo sapiens
agtatgacatcttat

SEQ ID NO: 1013338 - DNA, 15 bp, Homo sapiens
tagtatgacatctta

SEQ ID NO: 1013339 - DNA, 15 bp, Homo sapiens
ctagtatgacatctt

SEQ ID NO: 1013340 - DNA, 15 bp, Homo sapiens
tctagtatgacatct

SEQ ID NO: 1013341 - DNA, 15 bp, Homo sapiens
ctctagtatgacatc

SEQ ID NO: 1013342 - DNA, 15 bp, Homo sapiens
cctctagtatgacat

SEQ ID NO: 1013343 - DNA, 15 bp, Homo sapiens
ccctctagtatgaca

SEQ ID NO: 1013344 - DNA, 15 bp, Homo sapiens
gccctctagtatgac

SEQ ID NO: 1013345 - DNA, 15 bp, Homo sapiens
tgccctctagtatga

SEQ ID NO: 1013346 - DNA, 15 bp, Homo sapiens
atgccctctagtatg

SEQ ID NO: 1013347 - DNA, 15 bp, Homo sapiens
tatgccctctagtat

SEQ ID NO: 1013348 - DNA, 15 bp, Homo sapiens
atatgccctctagta

SEQ ID NO: 1013349 - DNA, 15 bp, Homo sapiens
gatatgccctctagt

SEQ ID NO: 1013350 - DNA, 15 bp, Homo sapiens
agatatgccctctag

SEQ ID NO: 1013351 - DNA, 15 bp, Homo sapiens
cagatatgccctcta

SEQ ID NO: 1013352 - DNA, 15 bp, Homo sapiens
gcagatatgccctct

SEQ ID NO: 1013353 - DNA, 15 bp, Homo sapiens
tgcagatatgccctc

SEQ ID NO: 1013354 - DNA, 15 bp, Homo sapiens
ttgcagatatgccct

SEQ ID NO: 1013355 - DNA, 15 bp, Homo sapiens
attgcagatatgccc

SEQ ID NO: 1013356 - DNA, 15 bp, Homo sapiens
cattgcagatatgcc

SEQ ID NO: 1013357 - DNA, 15 bp, Homo sapiens
acattgcagatatgc

SEQ ID NO: 1013358 - DNA, 15 bp, Homo sapiens
tacattgcagatatg

SEQ ID NO: 1013359 - DNA, 15 bp, Homo sapiens
atacattgcagatat

SEQ ID NO: 1013360 - DNA, 15 bp, Homo sapiens
tatacattgcagata

SEQ ID NO: 1013361 - DNA, 15 bp, Homo sapiens
gtatacattgcagat

SEQ ID NO: 1013362 - DNA, 15 bp, Homo sapiens
tgtatacattgcaga

SEQ ID NO: 1013363 - DNA, 15 bp, Homo sapiens
atgtatacattgcag

SEQ ID NO: 1013364 - DNA, 15 bp, Homo sapiens
tatgtatacattgca

SEQ ID NO: 1013365 - DNA, 15 bp, Homo sapiens
atatgtatacattgc

SEQ ID NO: 1013366 - DNA, 15 bp, Homo sapiens
aatatgtatacattg

SEQ ID NO: 1013367 - DNA, 15 bp, Homo sapiens
taatatgtatacatt

SEQ ID NO: 1013368 - DNA, 15 bp, Homo sapiens
ataatatgtatacat

SEQ ID NO: 1013369 - DNA, 15 bp, Homo sapiens
gataatatgtataca

SEQ ID NO: 1013370 - DNA, 15 bp, Homo sapiens
agataatatgtatac

SEQ ID NO: 1013371 - DNA, 15 bp, Homo sapiens
aagataatatgtata

SEQ ID NO: 1013372 - DNA, 15 bp, Homo sapiens
aaagataatatgtat

SEQ ID NO: 1013373 - DNA, 15 bp, Homo sapiens
aaaagataatatgta

SEQ ID NO: 1013374 - DNA, 15 bp, Homo sapiens
gaaaagataatatgt

SEQ ID NO: 1013375 - DNA, 15 bp, Homo sapiens
ggaaaagataatatg

SEQ ID NO: 1013376 - DNA, 15 bp, Homo sapiens
tggaaaagataatat

SEQ ID NO: 1013377 - DNA, 15 bp, Homo sapiens
ctggaaaagataata

SEQ ID NO: 1013378 - DNA, 15 bp, Homo sapiens
gctggaaaagataat

SEQ ID NO: 1013379 - DNA, 15 bp, Homo sapiens
tgctggaaaagataa

SEQ ID NO: 1013380 - DNA, 15 bp, Homo sapiens
atgctggaaaagata

SEQ ID NO: 1013381 - DNA, 15 bp, Homo sapiens
catgctggaaaagat

SEQ ID NO: 1013382 - DNA, 15 bp, Homo sapiens
gcatgctggaaaaga

SEQ ID NO: 1013383 - DNA, 15 bp, Homo sapiens
tgcatgctggaaaag

SEQ ID NO: 1013384 - DNA, 15 bp, Homo sapiens
atgcatgctggaaaa

SEQ ID NO: 1013385 - DNA, 15 bp, Homo sapiens
aatgcatgctggaaa

SEQ ID NO: 1013386 - DNA, 15 bp, Homo sapiens
gaatgcatgctggaa

SEQ ID NO: 1013387 - DNA, 15 bp, Homo sapiens
tgaatgcatgctgga

SEQ ID NO: 1013388 - DNA, 15 bp, Homo sapiens
ctgaatgcatgctgg

SEQ ID NO: 1013389 - DNA, 15 bp, Homo sapiens
actgaatgcatgctg

SEQ ID NO: 1013390 - DNA, 15 bp, Homo sapiens
aactgaatgcatgct

SEQ ID NO: 1013391 - DNA, 15 bp, Homo sapiens
caactgaatgcatgc

SEQ ID NO: 1013392 - DNA, 15 bp, Homo sapiens
acaactgaatgcatg

SEQ ID NO: 1013393 - DNA, 15 bp, Homo sapiens
cacaactgaatgcat

SEQ ID NO: 1013394 - DNA, 15 bp, Homo sapiens
acacaactgaatgca

SEQ ID NO: 1013395 - DNA, 15 bp, Homo sapiens
aacacaactgaatgc

SEQ ID NO: 1013396 - DNA, 15 bp, Homo sapiens
caacacaactgaatg

SEQ ID NO: 1013397 - DNA, 15 bp, Homo sapiens
ccaacacaactgaat

SEQ ID NO: 1013398 - DNA, 15 bp, Homo sapiens
tccaacacaactgaa

SEQ ID NO: 1013399 - DNA, 15 bp, Homo sapiens
ttccaacacaactga

SEQ ID NO: 1013400 - DNA, 15 bp, Homo sapiens
attccaacacaactg

SEQ ID NO: 1013401 - DNA, 15 bp, Homo sapiens
tattccaacacaact

SEQ ID NO: 1013402 - DNA, 15 bp, Homo sapiens
ttattccaacacaac

SEQ ID NO: 1013403 - DNA, 15 bp, Homo sapiens
attattccaacacaa

SEQ ID NO: 1013404 - DNA, 15 bp, Homo sapiens
aattattccaacaca

SEQ ID NO: 1013405 - DNA, 15 bp, Homo sapiens
aaattattccaacac

SEQ ID NO: 1013406 - DNA, 15 bp, Homo sapiens
taaattattccaaca

SEQ ID NO: 1013407 - DNA, 15 bp, Homo sapiens
ataaattattccaac

SEQ ID NO: 1013408 - DNA, 15 bp, Homo sapiens
cataaattattccaa

SEQ ID NO: 1013409 - DNA, 15 bp, Homo sapiens
acataaattattcca

SEQ ID NO: 1013410 - DNA, 15 bp, Homo sapiens
tacataaattattcc

SEQ ID NO: 1013411 - DNA, 15 bp, Homo sapiens
gtacataaattattc

SEQ ID NO: 1013412 - DNA, 15 bp, Homo sapiens
tgtacataaattatt

SEQ ID NO: 1013413 - DNA, 15 bp, Homo sapiens
gtgtacataaattat

SEQ ID NO: 1013414 - DNA, 15 bp, Homo sapiens
ggtgtacataaatta

SEQ ID NO: 1013415 - DNA, 15 bp, Homo sapiens
aggtgtacataaatt

SEQ ID NO: 1013416 - DNA, 15 bp, Homo sapiens
aaggtgtacataaat

SEQ ID NO: 1013417 - DNA, 15 bp, Homo sapiens
aaaggtgtacataaa

SEQ ID NO: 1013418 - DNA, 15 bp, Homo sapiens
taaaggtgtacataa

SEQ ID NO: 1013419 - DNA, 15 bp, Homo sapiens
ataaaggtgtacata

SEQ ID NO: 1013420 - DNA, 15 bp, Homo sapiens
tataaaggtgtacat

SEQ ID NO: 1013421 - DNA, 15 bp, Homo sapiens
ttataaaggtgtaca

SEQ ID NO: 1013422 - DNA, 15 bp, Homo sapiens
tttataaaggtgtac

SEQ ID NO: 1013423 - DNA, 15 bp, Homo sapiens
gtttataaaggtgta

SEQ ID NO: 1013424 - DNA, 15 bp, Homo sapiens
cgtttataaaggtgt

SEQ ID NO: 1013425 - DNA, 15 bp, Homo sapiens
gcgtttataaaggtg

SEQ ID NO: 1013426 - DNA, 15 bp, Homo sapiens
agcgtttataaaggt

SEQ ID NO: 1013427 - DNA, 15 bp, Homo sapiens
cagcgtttataaagg

SEQ ID NO: 1013428 - DNA, 15 bp, Homo sapiens
tcagcgtttataaag

SEQ ID NO: 1013429 - DNA, 15 bp, Homo sapiens
ctcagcgtttataaa

SEQ ID NO: 1013430 - DNA, 15 bp, Homo sapiens
gctcagcgtttataa

SEQ ID NO: 1013431 - DNA, 15 bp, Homo sapiens
ggctcagcgtttata

SEQ ID NO: 1013432 - DNA, 15 bp, Homo sapiens
aggctcagcgtttat

SEQ ID NO: 1013433 - DNA, 15 bp, Homo sapiens
gaggctcagcgttta

SEQ ID NO: 1013434 - DNA, 15 bp, Homo sapiens
tgaggctcagcgttt

SEQ ID NO: 1013435 - DNA, 15 bp, Homo sapiens
gtgaggctcagcgtt

SEQ ID NO: 1013436 - DNA, 15 bp, Homo sapiens
tgtgaggctcagcgt

SEQ ID NO: 1013437 - DNA, 15 bp, Homo sapiens
ttgtgaggctcagcg

SEQ ID NO: 1013438 - DNA, 15 bp, Homo sapiens
cttgtgaggctcagc

SEQ ID NO: 1013439 - DNA, 15 bp, Homo sapiens
tcttgtgaggctcag

SEQ ID NO: 1013440 - DNA, 15 bp, Homo sapiens
ctcttgtgaggctca

SEQ ID NO: 1013441 - DNA, 15 bp, Homo sapiens
gctcttgtgaggctc

SEQ ID NO: 1013442 - DNA, 15 bp, Homo sapiens
ggctcttgtgaggct

SEQ ID NO: 1013443 - DNA, 15 bp, Homo sapiens
tggctcttgtgaggc

SEQ ID NO: 1013444 - DNA, 15 bp, Homo sapiens
atggctcttgtgagg

SEQ ID NO: 1013445 - DNA, 15 bp, Homo sapiens
catggctcttgtgag

SEQ ID NO: 1013446 - DNA, 15 bp, Homo sapiens
acatggctcttgtga

SEQ ID NO: 1013447 - DNA, 15 bp, Homo sapiens
cacatggctcttgtg

SEQ ID NO: 1013448 - DNA, 15 bp, Homo sapiens
gcacatggctcttgt

SEQ ID NO: 1013449 - DNA, 15 bp, Homo sapiens
ggcacatggctcttg

SEQ ID NO: 1013450 - DNA, 15 bp, Homo sapiens
tggcacatggctctt

SEQ ID NO: 1013451 - DNA, 15 bp, Homo sapiens
gtggcacatggctct

SEQ ID NO: 1013452 - DNA, 15 bp, Homo sapiens
cgtggcacatggctc

SEQ ID NO: 1013453 - DNA, 15 bp, Homo sapiens
acgtggcacatggct

SEQ ID NO: 1013454 - DNA, 15 bp, Homo sapiens
tacgtggcacatggc

SEQ ID NO: 1013455 - DNA, 15 bp, Homo sapiens
atacgtggcacatgg

SEQ ID NO: 1013456 - DNA, 15 bp, Homo sapiens
aatacgtggcacatg

SEQ ID NO: 1013457 - DNA, 15 bp, Homo sapiens
caatacgtggcacat

SEQ ID NO: 1013458 - DNA, 15 bp, Homo sapiens
acaatacgtggcaca

SEQ ID NO: 1013459 - DNA, 15 bp, Homo sapiens
aacaatacgtggcac

SEQ ID NO: 1013460 - DNA, 15 bp, Homo sapiens
aaacaatacgtggca

SEQ ID NO: 1013461 - DNA, 15 bp, Homo sapiens
aaaacaatacgtggc

SEQ ID NO: 1013462 - DNA, 15 bp, Homo sapiens
gaaaacaatacgtgg

SEQ ID NO: 1013463 - DNA, 15 bp, Homo sapiens
agaaaacaatacgtg

SEQ ID NO: 1013464 - DNA, 15 bp, Homo sapiens
aagaaaacaatacgt

SEQ ID NO: 1013465 - DNA, 15 bp, Homo sapiens
taagaaaacaatacg

SEQ ID NO: 1013466 - DNA, 15 bp, Homo sapiens
gtaagaaaacaatac

SEQ ID NO: 1013467 - DNA, 15 bp, Homo sapiens
agtaagaaaacaata

SEQ ID NO: 1013468 - DNA, 15 bp, Homo sapiens
tagtaagaaaacaat

SEQ ID NO: 1013469 - DNA, 15 bp, Homo sapiens
gtagtaagaaaacaa

SEQ ID NO: 1013470 - DNA, 15 bp, Homo sapiens
agtagtaagaaaaca

SEQ ID NO: 1013471 - DNA, 15 bp, Homo sapiens
aagtagtaagaaaac

SEQ ID NO: 1013472 - DNA, 15 bp, Homo sapiens
aaagtagtaagaaaa

SEQ ID NO: 1013473 - DNA, 15 bp, Homo sapiens
aaaagtagtaagaaa

SEQ ID NO: 1013474 - DNA, 15 bp, Homo sapiens
aaaaagtagtaagaa

SEQ ID NO: 1013475 - DNA, 15 bp, Homo sapiens
caaaaagtagtaaga

SEQ ID NO: 1013476 - DNA, 15 bp, Homo sapiens
ccaaaaagtagtaag

SEQ ID NO: 1013477 - DNA, 15 bp, Homo sapiens
cccaaaaagtagtaa

SEQ ID NO: 1013478 - DNA, 15 bp, Homo sapiens
tcccaaaaagtagta

SEQ ID NO: 1013479 - DNA, 15 bp, Homo sapiens
atcccaaaaagtagt

SEQ ID NO: 1013480 - DNA, 15 bp, Homo sapiens
tatcccaaaaagtag

SEQ ID NO: 1013481 - DNA, 15 bp, Homo sapiens
gtatcccaaaaagta

SEQ ID NO: 1013482 - DNA, 15 bp, Homo sapiens
ggtatcccaaaaagt

SEQ ID NO: 1013483 - DNA, 15 bp, Homo sapiens
aggtatcccaaaaag

SEQ ID NO: 1013484 - DNA, 15 bp, Homo sapiens
caggtatcccaaaaa

SEQ ID NO: 1013485 - DNA, 15 bp, Homo sapiens
ccaggtatcccaaaa

SEQ ID NO: 1013486 - DNA, 15 bp, Homo sapiens
gccaggtatcccaaa

SEQ ID NO: 1013487 - DNA, 15 bp, Homo sapiens
tgccaggtatcccaa

SEQ ID NO: 1013488 - DNA, 15 bp, Homo sapiens
gtgccaggtatccca

SEQ ID NO: 1013489 - DNA, 15 bp, Homo sapiens
cgtgccaggtatccc

SEQ ID NO: 1013490 - DNA, 15 bp, Homo sapiens
acgtgccaggtatcc

SEQ ID NO: 1013491 - DNA, 15 bp, Homo sapiens
tacgtgccaggtatc

SEQ ID NO: 1013492 - DNA, 15 bp, Homo sapiens
ttacgtgccaggtat

SEQ ID NO: 1013493 - DNA, 15 bp, Homo sapiens
attacgtgccaggta

SEQ ID NO: 1013494 - DNA, 15 bp, Homo sapiens
tattacgtgccaggt

SEQ ID NO: 1013495 - DNA, 15 bp, Homo sapiens
ctattacgtgccagg

SEQ ID NO: 1013496 - DNA, 15 bp, Homo sapiens
tctattacgtgccag

SEQ ID NO: 1013497 - DNA, 15 bp, Homo sapiens
gtctattacgtgcca

SEQ ID NO: 1013498 - DNA, 15 bp, Homo sapiens
tgtctattacgtgcc

SEQ ID NO: 1013499 - DNA, 15 bp, Homo sapiens
gtgtctattacgtgc

SEQ ID NO: 1013500 - DNA, 15 bp, Homo sapiens
agtgtctattacgtg

SEQ ID NO: 1013501 - DNA, 15 bp, Homo sapiens
gagtgtctattacgt

SEQ ID NO: 1013502 - DNA, 15 bp, Homo sapiens
tgagtgtctattacg

SEQ ID NO: 1013503 - DNA, 15 bp, Homo sapiens
atgagtgtctattac

SEQ ID NO: 1013504 - DNA, 15 bp, Homo sapiens
aatgagtgtctatta

SEQ ID NO: 1013505 - DNA, 15 bp, Homo sapiens
caatgagtgtctatt

SEQ ID NO: 1013506 - DNA, 15 bp, Homo sapiens
tcaatgagtgtctat

SEQ ID NO: 1013507 - DNA, 15 bp, Homo sapiens
ttcaatgagtgtcta

SEQ ID NO: 1013508 - DNA, 15 bp, Homo sapiens
tttcaatgagtgtct

SEQ ID NO: 1013509 - DNA, 15 bp, Homo sapiens
ctttcaatgagtgtc

SEQ ID NO: 1013510 - DNA, 15 bp, Homo sapiens
actttcaatgagtgt

SEQ ID NO: 1013511 - DNA, 15 bp, Homo sapiens
aactttcaatgagtg

SEQ ID NO: 1013512 - DNA, 15 bp, Homo sapiens
aaactttcaatgagt

SEQ ID NO: 1013513 - DNA, 15 bp, Homo sapiens
gaaactttcaatgag

SEQ ID NO: 1013514 - DNA, 15 bp, Homo sapiens
ggaaactttcaatga

SEQ ID NO: 1013515 - DNA, 15 bp, Homo sapiens
aggaaactttcaatg

SEQ ID NO: 1013516 - DNA, 15 bp, Homo sapiens
taggaaactttcaat

SEQ ID NO: 1013517 - DNA, 15 bp, Homo sapiens
ttaggaaactttcaa

SEQ ID NO: 1013518 - DNA, 15 bp, Homo sapiens
attaggaaactttca

SEQ ID NO: 1013519 - DNA, 15 bp, Homo sapiens
cattaggaaactttc

SEQ ID NO: 1013520 - DNA, 15 bp, Homo sapiens
tcattaggaaacttt

SEQ ID NO: 1013521 - DNA, 15 bp, Homo sapiens
ttcattaggaaactt

SEQ ID NO: 1013522 - DNA, 15 bp, Homo sapiens
attcattaggaaact

SEQ ID NO: 1013523 - DNA, 15 bp, Homo sapiens
cattcattaggaaac

SEQ ID NO: 1013524 - DNA, 15 bp, Homo sapiens
tcattcattaggaaa

SEQ ID NO: 1013525 - DNA, 15 bp, Homo sapiens
ttcattcattaggaa

SEQ ID NO: 1013526 - DNA, 15 bp, Homo sapiens
cttcattcattagga

SEQ ID NO: 1013527 - DNA, 15 bp, Homo sapiens
acttcattcattagg

SEQ ID NO: 1013528 - DNA, 15 bp, Homo sapiens
tacttcattcattag

SEQ ID NO: 1013529 - DNA, 15 bp, Homo sapiens
gtacttcattcatta

SEQ ID NO: 1013530 - DNA, 15 bp, Homo sapiens
tgtacttcattcatt

SEQ ID NO: 1013531 - DNA, 15 bp, Homo sapiens
ttgtacttcattcat

SEQ ID NO: 1013532 - DNA, 15 bp, Homo sapiens
tttgtacttcattca

SEQ ID NO: 1013533 - DNA, 15 bp, Homo sapiens
ctttgtacttcattc

SEQ ID NO: 1013534 - DNA, 15 bp, Homo sapiens
tctttgtacttcatt

SEQ ID NO: 1013535 - DNA, 15 bp, Homo sapiens
atctttgtacttcat

SEQ ID NO: 1013536 - DNA, 15 bp, Homo sapiens
tatctttgtacttca

SEQ ID NO: 1013537 - DNA, 15 bp, Homo sapiens
ttatctttgtacttc

SEQ ID NO: 1013538 - DNA, 15 bp, Homo sapiens
tttatctttgtactt

SEQ ID NO: 1013539 - DNA, 15 bp, Homo sapiens
ttttatctttgtact

SEQ ID NO: 1013540 - DNA, 15 bp, Homo sapiens
gttttatctttgtac

SEQ ID NO: 1013541 - DNA, 15 bp, Homo sapiens
tgttttatctttgta

SEQ ID NO: 1013542 - DNA, 15 bp, Homo sapiens
ttgttttatctttgt

SEQ ID NO: 1013543 - DNA, 15 bp, Homo sapiens
cttgttttatctttg

SEQ ID NO: 1013544 - DNA, 15 bp, Homo sapiens
acttgttttatcttt

SEQ ID NO: 1013545 - DNA, 15 bp, Homo sapiens
aacttgttttatctt

SEQ ID NO: 1013546 - DNA, 15 bp, Homo sapiens
taacttgttttatct

SEQ ID NO: 1013547 - DNA, 15 bp, Homo sapiens
ataacttgttttatc

SEQ ID NO: 1013548 - DNA, 15 bp, Homo sapiens
tataacttgttttat

SEQ ID NO: 1013549 - DNA, 15 bp, Homo sapiens
ctataacttgtttta

SEQ ID NO: 1013550 - DNA, 15 bp, Homo sapiens
tctataacttgtttt

SEQ ID NO: 1013551 - DNA, 15 bp, Homo sapiens
gtctataacttgttt

SEQ ID NO: 1013552 - DNA, 15 bp, Homo sapiens
agtctataacttgtt

SEQ ID NO: 1013553 - DNA, 15 bp, Homo sapiens
cagtctataacttgt

SEQ ID NO: 1013554 - DNA, 15 bp, Homo sapiens
tcagtctataacttg

SEQ ID NO: 1013555 - DNA, 15 bp, Homo sapiens
atcagtctataactt

SEQ ID NO: 1013556 - DNA, 15 bp, Homo sapiens
aatcagtctataact

SEQ ID NO: 1013557 - DNA, 15 bp, Homo sapiens
gaatcagtctataac

SEQ ID NO: 1013558 - DNA, 15 bp, Homo sapiens
agaatcagtctataa

SEQ ID NO: 1013559 - DNA, 15 bp, Homo sapiens
aagaatcagtctata

SEQ ID NO: 1013560 - DNA, 15 bp, Homo sapiens
aaagaatcagtctat

SEQ ID NO: 1013561 - DNA, 15 bp, Homo sapiens
aaaagaatcagtcta

SEQ ID NO: 1013562 - DNA, 15 bp, Homo sapiens
caaaagaatcagtct

SEQ ID NO: 1013563 - DNA, 15 bp, Homo sapiens
tcaaaagaatcagtc

SEQ ID NO: 1013564 - DNA, 15 bp, Homo sapiens
ctcaaaagaatcagt

SEQ ID NO: 1013565 - DNA, 15 bp, Homo sapiens
gctcaaaagaatcag

SEQ ID NO: 1013566 - DNA, 15 bp, Homo sapiens
agctcaaaagaatca

SEQ ID NO: 1013567 - DNA, 15 bp, Homo sapiens
cagctcaaaagaatc

SEQ ID NO: 1013568 - DNA, 15 bp, Homo sapiens
acagctcaaaagaat

SEQ ID NO: 1013569 - DNA, 15 bp, Homo sapiens
gacagctcaaaagaa

SEQ ID NO: 1013570 - DNA, 15 bp, Homo sapiens
tgacagctcaaaaga

SEQ ID NO: 1013571 - DNA, 15 bp, Homo sapiens
ttgacagctcaaaag

SEQ ID NO: 1013572 - DNA, 15 bp, Homo sapiens
cttgacagctcaaaa

SEQ ID NO: 1013573 - DNA, 15 bp, Homo sapiens
ccttgacagctcaaa

SEQ ID NO: 1013574 - DNA, 15 bp, Homo sapiens
accttgacagctcaa

SEQ ID NO: 1013575 - DNA, 15 bp, Homo sapiens
aaccttgacagctca

SEQ ID NO: 1013576 - DNA, 15 bp, Homo sapiens
caaccttgacagctc

SEQ ID NO: 1013577 - DNA, 15 bp, Homo sapiens
acaaccttgacagct

SEQ ID NO: 1013578 - DNA, 15 bp, Homo sapiens
tacaaccttgacagc

SEQ ID NO: 1013579 - DNA, 15 bp, Homo sapiens
ttacaaccttgacag

SEQ ID NO: 1013580 - DNA, 15 bp, Homo sapiens
tttacaaccttgaca

SEQ ID NO: 1013581 - DNA, 15 bp, Homo sapiens
atttacaaccttgac

SEQ ID NO: 1013582 - DNA, 15 bp, Homo sapiens
tatttacaaccttga

SEQ ID NO: 1013583 - DNA, 15 bp, Homo sapiens
ctatttacaaccttg

SEQ ID NO: 1013584 - DNA, 15 bp, Homo sapiens
tctatttacaacctt

SEQ ID NO: 1013585 - DNA, 15 bp, Homo sapiens
gtctatttacaacct

SEQ ID NO: 1013586 - DNA, 15 bp, Homo sapiens
agtctatttacaacc

SEQ ID NO: 1013587 - DNA, 15 bp, Homo sapiens
aagtctatttacaac

SEQ ID NO: 1013588 - DNA, 15 bp, Homo sapiens
aaagtctatttacaa

SEQ ID NO: 1013589 - DNA, 15 bp, Homo sapiens
aaaagtctatttaca

SEQ ID NO: 1013590 - DNA, 15 bp, Homo sapiens
caaaagtctatttac

SEQ ID NO: 1013591 - DNA, 15 bp, Homo sapiens
gcaaaagtctattta

SEQ ID NO: 1013592 - DNA, 15 bp, Homo sapiens
agcaaaagtctattt

SEQ ID NO: 1013593 - DNA, 15 bp, Homo sapiens
gagcaaaagtctatt

SEQ ID NO: 1013594 - DNA, 15 bp, Homo sapiens
tgagcaaaagtctat

SEQ ID NO: 1013595 - DNA, 15 bp, Homo sapiens
ttgagcaaaagtcta

SEQ ID NO: 1013596 - DNA, 15 bp, Homo sapiens
attgagcaaaagtct

SEQ ID NO: 1013597 - DNA, 15 bp, Homo sapiens
gattgagcaaaagtc

SEQ ID NO: 1013598 - DNA, 15 bp, Homo sapiens
tgattgagcaaaagt

SEQ ID NO: 1013599 - DNA, 15 bp, Homo sapiens
ttgattgagcaaaag

SEQ ID NO: 1013600 - DNA, 15 bp, Homo sapiens
attgattgagcaaaa

SEQ ID NO: 1013601 - DNA, 15 bp, Homo sapiens
aattgattgagcaaa

SEQ ID NO: 1013602 - DNA, 15 bp, Homo sapiens
gaattgattgagcaa

SEQ ID NO: 1013603 - DNA, 15 bp, Homo sapiens
tgaattgattgagca

SEQ ID NO: 1013604 - DNA, 15 bp, Homo sapiens
ttgaattgattgagc

SEQ ID NO: 1013605 - DNA, 15 bp, Homo sapiens
tttgaattgattgag

SEQ ID NO: 1013606 - DNA, 15 bp, Homo sapiens
atttgaattgattga

SEQ ID NO: 1013607 - DNA, 15 bp, Homo sapiens
catttgaattgattg

SEQ ID NO: 1013608 - DNA, 15 bp, Homo sapiens
ccatttgaattgatt

SEQ ID NO: 1013609 - DNA, 15 bp, Homo sapiens
accatttgaattgat

SEQ ID NO: 1013610 - DNA, 15 bp, Homo sapiens
caccatttgaattga

SEQ ID NO: 1013611 - DNA, 15 bp, Homo sapiens
ccaccatttgaattg

SEQ ID NO: 1013612 - DNA, 15 bp, Homo sapiens
gccaccatttgaatt

SEQ ID NO: 1013613 - DNA, 15 bp, Homo sapiens
tgccaccatttgaat

SEQ ID NO: 1013614 - DNA, 15 bp, Homo sapiens
ctgccaccatttgaa

SEQ ID NO: 1013615 - DNA, 15 bp, Homo sapiens
cctgccaccatttga

SEQ ID NO: 1013616 - DNA, 15 bp, Homo sapiens
acctgccaccatttg

SEQ ID NO: 1013617 - DNA, 15 bp, Homo sapiens
tacctgccaccattt

SEQ ID NO: 1013618 - DNA, 15 bp, Homo sapiens
ctacctgccaccatt

SEQ ID NO: 1013619 - DNA, 15 bp, Homo sapiens
actacctgccaccat

SEQ ID NO: 1013620 - DNA, 15 bp, Homo sapiens
cactacctgccacca

SEQ ID NO: 1013621 - DNA, 15 bp, Homo sapiens
ccactacctgccacc

SEQ ID NO: 1013622 - DNA, 15 bp, Homo sapiens
cccactacctgccac

SEQ ID NO: 1013623 - DNA, 15 bp, Homo sapiens
ccccactacctgcca

SEQ ID NO: 1013624 - DNA, 15 bp, Homo sapiens
cccccactacctgcc

SEQ ID NO: 1013625 - DNA, 15 bp, Homo sapiens
acccccactacctgc

SEQ ID NO: 1013626 - DNA, 15 bp, Homo sapiens
tacccccactacctg

SEQ ID NO: 1013627 - DNA, 15 bp, Homo sapiens
ctacccccactacct

SEQ ID NO: 1013628 - DNA, 15 bp, Homo sapiens
tctacccccactacc

SEQ ID NO: 1013629 - DNA, 15 bp, Homo sapiens
ctctacccccactac

SEQ ID NO: 1013630 - DNA, 15 bp, Homo sapiens
cctctacccccacta

SEQ ID NO: 1013631 - DNA, 15 bp, Homo sapiens
ccctctacccccact

SEQ ID NO: 1013632 - DNA, 15 bp, Homo sapiens
tccctctacccccac

SEQ ID NO: 1013633 - DNA, 15 bp, Homo sapiens
atccctctaccccca

SEQ ID NO: 1013634 - DNA, 15 bp, Homo sapiens
aatccctctaccccc

SEQ ID NO: 1013635 - DNA, 15 bp, Homo sapiens
caatccctctacccc

SEQ ID NO: 1013636 - DNA, 15 bp, Homo sapiens
ccaatccctctaccc

SEQ ID NO: 1013637 - DNA, 15 bp, Homo sapiens
accaatccctctacc

SEQ ID NO: 1013638 - DNA, 15 bp, Homo sapiens
taccaatccctctac

SEQ ID NO: 1013639 - DNA, 15 bp, Homo sapiens
ataccaatccctcta

SEQ ID NO: 1013640 - DNA, 15 bp, Homo sapiens
tttcataccaatccc

SEQ ID NO: 1013641 - DNA, 15 bp, Homo sapiens
ttttcataccaatcc

SEQ ID NO: 1013642 - DNA, 15 bp, Homo sapiens
tttttcataccaatc

SEQ ID NO: 1013643 - DNA, 15 bp, Homo sapiens
gtttttcataccaat

SEQ ID NO: 1013644 - DNA, 15 bp, Homo sapiens
tgtttttcataccaa

SEQ ID NO: 1013645 - DNA, 15 bp, Homo sapiens
atgtttttcatacca

SEQ ID NO: 1013646 - DNA, 15 bp, Homo sapiens
tatgtttttcatacc

SEQ ID NO: 1013647 - DNA, 15 bp, Homo sapiens
ttatgtttttcatac

SEQ ID NO: 1013648 - DNA, 15 bp, Homo sapiens
cttatgtttttcata

SEQ ID NO: 1013649 - DNA, 15 bp, Homo sapiens
gcttatgtttttcat

SEQ ID NO: 1013650 - DNA, 15 bp, Homo sapiens
agcttatgtttttca

SEQ ID NO: 1013651 - DNA, 15 bp, Homo sapiens
aagcttatgtttttc

SEQ ID NO: 1013652 - DNA, 15 bp, Homo sapiens
aaagcttatgttttt

SEQ ID NO: 1013653 - DNA, 15 bp, Homo sapiens
gaaagcttatgtttt

SEQ ID NO: 1013654 - DNA, 15 bp, Homo sapiens
tgaaagcttatgttt

SEQ ID NO: 1013655 - DNA, 15 bp, Homo sapiens
ctgaaagcttatgtt

SEQ ID NO: 1013656 - DNA, 15 bp, Homo sapiens
tctgaaagcttatgt

SEQ ID NO: 1013657 - DNA, 15 bp, Homo sapiens
ttctgaaagcttatg

SEQ ID NO: 1013658 - DNA, 15 bp, Homo sapiens
gttctgaaagcttat

SEQ ID NO: 1013659 - DNA, 15 bp, Homo sapiens
agttctgaaagctta

SEQ ID NO: 1013660 - DNA, 15 bp, Homo sapiens
gagttctgaaagctt

SEQ ID NO: 1013661 - DNA, 15 bp, Homo sapiens
ggagttctgaaagct

SEQ ID NO: 1013662 - DNA, 15 bp, Homo sapiens
aggagttctgaaagc

SEQ ID NO: 1013663 - DNA, 15 bp, Homo sapiens
caggagttctgaaag

SEQ ID NO: 1013664 - DNA, 15 bp, Homo sapiens
acaggagttctgaaa

SEQ ID NO: 1013665 - DNA, 15 bp, Homo sapiens
cacaggagttctgaa

SEQ ID NO: 1013666 - DNA, 15 bp, Homo sapiens
acacaggagttctga

SEQ ID NO: 1013667 - DNA, 15 bp, Homo sapiens
aacacaggagttctg

SEQ ID NO: 1013668 - DNA, 15 bp, Homo sapiens
aaacacaggagttct

SEQ ID NO: 1013669 - DNA, 15 bp, Homo sapiens
taaacacaggagttc

SEQ ID NO: 1013670 - DNA, 15 bp, Homo sapiens
ataaacacaggagtt

SEQ ID NO: 1013671 - DNA, 15 bp, Homo sapiens
aataaacacaggagt

SEQ ID NO: 1013672 - DNA, 15 bp, Homo sapiens
aaataaacacaggag

SEQ ID NO: 1013673 - DNA, 15 bp, Homo sapiens
aaaataaacacagga

SEQ ID NO: 1013674 - DNA, 15 bp, Homo sapiens
aaaaataaacacagg

SEQ ID NO: 1013675 - DNA, 15 bp, Homo sapiens
taaaaataaacacag

SEQ ID NO: 1013676 - DNA, 15 bp, Homo sapiens
ctaaaaataaacaca

SEQ ID NO: 1013677 - DNA, 15 bp, Homo sapiens
tctaaaaataaacac

SEQ ID NO: 1013678 - DNA, 15 bp, Homo sapiens
ttctaaaaataaaca

SEQ ID NO: 1013679 - DNA, 15 bp, Homo sapiens
attctaaaaataaac

SEQ ID NO: 1013680 - DNA, 15 bp, Homo sapiens
cattctaaaaataaa

SEQ ID NO: 1013681 - DNA, 15 bp, Homo sapiens
acattctaaaaataa

SEQ ID NO: 1013682 - DNA, 15 bp, Homo sapiens
gacattctaaaaata

SEQ ID NO: 1013683 - DNA, 15 bp, Homo sapiens
tgacattctaaaaat

SEQ ID NO: 1013684 - DNA, 15 bp, Homo sapiens
ttgacattctaaaaa

SEQ ID NO: 1013685 - DNA, 15 bp, Homo sapiens
gttgacattctaaaa

SEQ ID NO: 1013686 - DNA, 15 bp, Homo sapiens
agttgacattctaaa

SEQ ID NO: 1013687 - DNA, 15 bp, Homo sapiens
cagttgacattctaa

SEQ ID NO: 1013688 - DNA, 15 bp, Homo sapiens
gcagttgacattcta

SEQ ID NO: 1013689 - DNA, 15 bp, Homo sapiens
agcagttgacattct

SEQ ID NO: 1013690 - DNA, 15 bp, Homo sapiens
aagcagttgacattc

SEQ ID NO: 1013691 - DNA, 15 bp, Homo sapiens
caagcagttgacatt

SEQ ID NO: 1013692 - DNA, 15 bp, Homo sapiens
tcaagcagttgacat

SEQ ID NO: 1013693 - DNA, 15 bp, Homo sapiens
ctcaagcagttgaca

SEQ ID NO: 1013694 - DNA, 15 bp, Homo sapiens
actcaagcagttgac

SEQ ID NO: 1013695 - DNA, 15 bp, Homo sapiens
cactcaagcagttga

SEQ ID NO: 1013696 - DNA, 15 bp, Homo sapiens
acactcaagcagttg

SEQ ID NO: 1013697 - DNA, 15 bp, Homo sapiens
aacactcaagcagtt

SEQ ID NO: 1013698 - DNA, 15 bp, Homo sapiens
aaacactcaagcagt

SEQ ID NO: 1013699 - DNA, 15 bp, Homo sapiens
aaaacactcaagcag

SEQ ID NO: 1013700 - DNA, 15 bp, Homo sapiens
aaaaacactcaagca

SEQ ID NO: 1013701 - DNA, 15 bp, Homo sapiens
taaaaacactcaagc

SEQ ID NO: 1013702 - DNA, 15 bp, Homo sapiens
ttaaaaacactcaag

SEQ ID NO: 1013703 - DNA, 15 bp, Homo sapiens
gttaaaaacactcaa

SEQ ID NO: 1013704 - DNA, 15 bp, Homo sapiens
agttaaaaacactca

SEQ ID NO: 1013705 - DNA, 15 bp, Homo sapiens
gagttaaaaacactc

SEQ ID NO: 1013706 - DNA, 15 bp, Homo sapiens
agagttaaaaacact

SEQ ID NO: 1013707 - DNA, 15 bp, Homo sapiens
cagagttaaaaacac

SEQ ID NO: 1013708 - DNA, 15 bp, Homo sapiens
acagagttaaaaaca

SEQ ID NO: 1013709 - DNA, 15 bp, Homo sapiens
cacagagttaaaaac

SEQ ID NO: 1013710 - DNA, 15 bp, Homo sapiens
ccacagagttaaaaa

SEQ ID NO: 1013711 - DNA, 15 bp, Homo sapiens
accacagagttaaaa

SEQ ID NO: 1013712 - DNA, 15 bp, Homo sapiens
taccacagagttaaa

SEQ ID NO: 1013713 - DNA, 15 bp, Homo sapiens
ataccacagagttaa

SEQ ID NO: 1013714 - DNA, 15 bp, Homo sapiens
gataccacagagtta

SEQ ID NO: 1013715 - DNA, 15 bp, Homo sapiens
agataccacagagtt

SEQ ID NO: 1013716 - DNA, 15 bp, Homo sapiens
cagataccacagagt

SEQ ID NO: 1013717 - DNA, 15 bp, Homo sapiens
tcagataccacagag

SEQ ID NO: 1013718 - DNA, 15 bp, Homo sapiens
ttcagataccacaga

SEQ ID NO: 1013719 - DNA, 15 bp, Homo sapiens
gttcagataccacag

SEQ ID NO: 1013720 - DNA, 15 bp, Homo sapiens
agttcagataccaca

SEQ ID NO: 1013721 - DNA, 15 bp, Homo sapiens
tagttcagataccac

SEQ ID NO: 1013722 - DNA, 15 bp, Homo sapiens
atagttcagatacca

SEQ ID NO: 1013723 - DNA, 15 bp, Homo sapiens
gatagttcagatacc

SEQ ID NO: 1013724 - DNA, 15 bp, Homo sapiens
agatagttcagatac

SEQ ID NO: 1013725 - DNA, 15 bp, Homo sapiens
aagatagttcagata

SEQ ID NO: 1013726 - DNA, 15 bp, Homo sapiens
gaagatagttcagat

SEQ ID NO: 1013727 - DNA, 15 bp, Homo sapiens
agaagatagttcaga

SEQ ID NO: 1013728 - DNA, 15 bp, Homo sapiens
gagaagatagttcag

SEQ ID NO: 1013729 - DNA, 15 bp, Homo sapiens
agagaagatagttca

SEQ ID NO: 1013730 - DNA, 15 bp, Homo sapiens
tagagaagatagttc

SEQ ID NO: 1013731 - DNA, 15 bp, Homo sapiens
ttagagaagatagtt

SEQ ID NO: 1013732 - DNA, 15 bp, Homo sapiens
gttagagaagatagt

SEQ ID NO: 1013733 - DNA, 15 bp, Homo sapiens
agttagagaagatag

SEQ ID NO: 1013734 - DNA, 15 bp, Homo sapiens
cagttagagaagata

SEQ ID NO: 1013735 - DNA, 15 bp, Homo sapiens
gcagttagagaagat

SEQ ID NO: 1013736 - DNA, 15 bp, Homo sapiens
tgcagttagagaaga

SEQ ID NO: 1013737 - DNA, 15 bp, Homo sapiens
ctgcagttagagaag

SEQ ID NO: 1013738 - DNA, 15 bp, Homo sapiens
cctgcagttagagaa

SEQ ID NO: 1013739 - DNA, 15 bp, Homo sapiens
acctgcagttagaga

SEQ ID NO: 1013740 - DNA, 15 bp, Homo sapiens
aacctgcagttagag

SEQ ID NO: 1013741 - DNA, 15 bp, Homo sapiens
caacctgcagttaga

SEQ ID NO: 1013742 - DNA, 15 bp, Homo sapiens
ccaacctgcagttag

SEQ ID NO: 1013743 - DNA, 15 bp, Homo sapiens
cccaacctgcagtta

SEQ ID NO: 1013744 - DNA, 15 bp, Homo sapiens
gcccaacctgcagtt

SEQ ID NO: 1013745 - DNA, 15 bp, Homo sapiens
agcccaacctgcagt

SEQ ID NO: 1013746 - DNA, 15 bp, Homo sapiens
gagcccaacctgcag

SEQ ID NO: 1013747 - DNA, 15 bp, Homo sapiens
tgagcccaacctgca

SEQ ID NO: 1013748 - DNA, 15 bp, Homo sapiens
ctgagcccaacctgc

SEQ ID NO: 1013749 - DNA, 15 bp, Homo sapiens
tctgagcccaacctg

SEQ ID NO: 1013750 - DNA, 15 bp, Homo sapiens
atctgagcccaacct

SEQ ID NO: 1013751 - DNA, 15 bp, Homo sapiens
gatctgagcccaacc

SEQ ID NO: 1013752 - DNA, 15 bp, Homo sapiens
agatctgagcccaac

SEQ ID NO: 1013753 - DNA, 15 bp, Homo sapiens
acagatctgagccca

SEQ ID NO: 1013754 - DNA, 15 bp, Homo sapiens
cacagatctgagccc

SEQ ID NO: 1013755 - DNA, 15 bp, Homo sapiens
tcacagatctgagcc

SEQ ID NO: 1013756 - DNA, 15 bp, Homo sapiens
atcacagatctgagc

SEQ ID NO: 1013757 - DNA, 15 bp, Homo sapiens
tatcacagatctgag

SEQ ID NO: 1013758 - DNA, 15 bp, Homo sapiens
ctatcacagatctga

SEQ ID NO: 1013759 - DNA, 15 bp, Homo sapiens
tctatcacagatctg

SEQ ID NO: 1013760 - DNA, 15 bp, Homo sapiens
ttctatcacagatct

SEQ ID NO: 1013761 - DNA, 15 bp, Homo sapiens
gttctatcacagatc

SEQ ID NO: 1013762 - DNA, 15 bp, Homo sapiens
tgttctatcacagat

SEQ ID NO: 1013763 - DNA, 15 bp, Homo sapiens
ctgttctatcacaga

SEQ ID NO: 1013764 - DNA, 15 bp, Homo sapiens
actgttctatcacag

SEQ ID NO: 1013765 - DNA, 15 bp, Homo sapiens
aactgttctatcaca

SEQ ID NO: 1013766 - DNA, 15 bp, Homo sapiens
aaactgttctatcac

SEQ ID NO: 1013767 - DNA, 15 bp, Homo sapiens
gaaactgttctatca

SEQ ID NO: 1013768 - DNA, 15 bp, Homo sapiens
ggaaactgttctatc

SEQ ID NO: 1013769 - DNA, 15 bp, Homo sapiens
aggaaactgttctat

SEQ ID NO: 1013770 - DNA, 15 bp, Homo sapiens
caggaaactgttcta

SEQ ID NO: 1013771 - DNA, 15 bp, Homo sapiens
ccaggaaactgttct

SEQ ID NO: 1013772 - DNA, 15 bp, Homo sapiens
cccaggaaactgttc

SEQ ID NO: 1013773 - DNA, 15 bp, Homo sapiens
tcccaggaaactgtt

SEQ ID NO: 1013774 - DNA, 15 bp, Homo sapiens
ttcccaggaaactgt

SEQ ID NO: 1013775 - DNA, 15 bp, Homo sapiens
cttcccaggaaactg

SEQ ID NO: 1013776 - DNA, 15 bp, Homo sapiens
gcttcccaggaaact

SEQ ID NO: 1013777 - DNA, 15 bp, Homo sapiens
agcttcccaggaaac

SEQ ID NO: 1013778 - DNA, 15 bp, Homo sapiens
aagcttcccaggaaa

SEQ ID NO: 1013779 - DNA, 15 bp, Homo sapiens
caagcttcccaggaa

SEQ ID NO: 1013780 - DNA, 15 bp, Homo sapiens
tcaagcttcccagga

SEQ ID NO: 1013781 - DNA, 15 bp, Homo sapiens
gtcaagcttcccagg

SEQ ID NO: 1013782 - DNA, 15 bp, Homo sapiens
agtcaagcttcccag

SEQ ID NO: 1013783 - DNA, 15 bp, Homo sapiens
aagtcaagcttccca

SEQ ID NO: 1013784 - DNA, 15 bp, Homo sapiens
aaagtcaagcttccc

SEQ ID NO: 1013785 - DNA, 15 bp, Homo sapiens
caaagtcaagcttcc

SEQ ID NO: 1013786 - DNA, 15 bp, Homo sapiens
acaaagtcaagcttc

SEQ ID NO: 1013787 - DNA, 15 bp, Homo sapiens
gacaaagtcaagctt

SEQ ID NO: 1013788 - DNA, 15 bp, Homo sapiens
ggacaaagtcaagct

SEQ ID NO: 1013789 - DNA, 15 bp, Homo sapiens
aggacaaagtcaagc

SEQ ID NO: 1013790 - DNA, 15 bp, Homo sapiens
aaggacaaagtcaag

SEQ ID NO: 1013791 - DNA, 15 bp, Homo sapiens
caaggacaaagtcaa

SEQ ID NO: 1013792 - DNA, 15 bp, Homo sapiens
acaaggacaaagtca

SEQ ID NO: 1013793 - DNA, 15 bp, Homo sapiens
cacaaggacaaagtc

SEQ ID NO: 1013794 - DNA, 15 bp, Homo sapiens
ccacaaggacaaagt

SEQ ID NO: 1013795 - DNA, 15 bp, Homo sapiens
tccacaaggacaaag

SEQ ID NO: 1013796 - DNA, 15 bp, Homo sapiens
atccacaaggacaaa

SEQ ID NO: 1013797 - DNA, 15 bp, Homo sapiens
catccacaaggacaa

SEQ ID NO: 1013798 - DNA, 15 bp, Homo sapiens
ccatccacaaggaca

SEQ ID NO: 1013799 - DNA, 15 bp, Homo sapiens
cccatccacaaggac

SEQ ID NO: 1013800 - DNA, 15 bp, Homo sapiens
ccccatccacaagga

SEQ ID NO: 1013801 - DNA, 15 bp, Homo sapiens
cccccatccacaagg

SEQ ID NO: 1013802 - DNA, 15 bp, Homo sapiens
gcccccatccacaag

SEQ ID NO: 1013803 - DNA, 15 bp, Homo sapiens
agcccccatccacaa

SEQ ID NO: 1013804 - DNA, 15 bp, Homo sapiens
cagcccccatccaca

SEQ ID NO: 1013805 - DNA, 15 bp, Homo sapiens
acagcccccatccac

SEQ ID NO: 1013806 - DNA, 15 bp, Homo sapiens
cacagcccccatcca

SEQ ID NO: 1013807 - DNA, 15 bp, Homo sapiens
acacagcccccatcc

SEQ ID NO: 1013808 - DNA, 15 bp, Homo sapiens
gacacagcccccatc

SEQ ID NO: 1013809 - DNA, 15 bp, Homo sapiens
ggacacagcccccat

SEQ ID NO: 1013810 - DNA, 15 bp, Homo sapiens
aggacacagccccca

SEQ ID NO: 1013811 - DNA, 15 bp, Homo sapiens
taggacacagccccc

SEQ ID NO: 1013812 - DNA, 15 bp, Homo sapiens
ttaggacacagcccc

SEQ ID NO: 1013813 - DNA, 15 bp, Homo sapiens
cttaggacacagccc

SEQ ID NO: 1013814 - DNA, 15 bp, Homo sapiens
gcttaggacacagcc

SEQ ID NO: 1013815 - DNA, 15 bp, Homo sapiens
ggcttaggacacagc

SEQ ID NO: 1013816 - DNA, 15 bp, Homo sapiens
tggcttaggacacag

SEQ ID NO: 1013817 - DNA, 15 bp, Homo sapiens
atggcttaggacaca

SEQ ID NO: 1013818 - DNA, 15 bp, Homo sapiens
catggcttaggacac

SEQ ID NO: 1013819 - DNA, 15 bp, Homo sapiens
ccatggcttaggaca

SEQ ID NO: 1013820 - DNA, 15 bp, Homo sapiens
gccatggcttaggac

SEQ ID NO: 1013821 - DNA, 15 bp, Homo sapiens
ggccatggcttagga

SEQ ID NO: 1013822 - DNA, 15 bp, Homo sapiens
tggccatggcttagg

SEQ ID NO: 1013823 - DNA, 15 bp, Homo sapiens
gtggccatggcttag

SEQ ID NO: 1013824 - DNA, 15 bp, Homo sapiens
tgtggccatggctta

SEQ ID NO: 1013825 - DNA, 15 bp, Homo sapiens
ttgtggccatggctt

SEQ ID NO: 1013826 - DNA, 15 bp, Homo sapiens
cttgtggccatggct

SEQ ID NO: 1013827 - DNA, 15 bp, Homo sapiens
gcttgtggccatggc

SEQ ID NO: 1013828 - DNA, 15 bp, Homo sapiens
tgcttgtggccatgg

SEQ ID NO: 1013829 - DNA, 15 bp, Homo sapiens
ctgcttgtggccatg

SEQ ID NO: 1013830 - DNA, 15 bp, Homo sapiens
actgcttgtggccat

SEQ ID NO: 1013831 - DNA, 15 bp, Homo sapiens
aactgcttgtggcca

SEQ ID NO: 1013832 - DNA, 15 bp, Homo sapiens
caactgcttgtggcc

SEQ ID NO: 1013833 - DNA, 15 bp, Homo sapiens
tcaactgcttgtggc

SEQ ID NO: 1013834 - DNA, 15 bp, Homo sapiens
atcaactgcttgtgg

SEQ ID NO: 1013835 - DNA, 15 bp, Homo sapiens
catcaactgcttgtg

SEQ ID NO: 1013836 - DNA, 15 bp, Homo sapiens
acatcaactgcttgt

SEQ ID NO: 1013837 - DNA, 15 bp, Homo sapiens
cacatcaactgcttg

SEQ ID NO: 1013838 - DNA, 15 bp, Homo sapiens
gcacatcaactgctt

SEQ ID NO: 1013839 - DNA, 15 bp, Homo sapiens
agcacatcaactgct

SEQ ID NO: 1013840 - DNA, 15 bp, Homo sapiens
aagcacatcaactgc

SEQ ID NO: 1013841 - DNA, 15 bp, Homo sapiens
caagcacatcaactg

SEQ ID NO: 1013842 - DNA, 15 bp, Homo sapiens
ccaagcacatcaact

SEQ ID NO: 1013843 - DNA, 15 bp, Homo sapiens
gccaagcacatcaac

SEQ ID NO: 1013844 - DNA, 15 bp, Homo sapiens
agccaagcacatcaa

SEQ ID NO: 1013845 - DNA, 15 bp, Homo sapiens
tagccaagcacatca

SEQ ID NO: 1013846 - DNA, 15 bp, Homo sapiens
ctagccaagcacatc

SEQ ID NO: 1013847 - DNA, 15 bp, Homo sapiens
tctagccaagcacat

SEQ ID NO: 1013848 - DNA, 15 bp, Homo sapiens
atctagccaagcaca

SEQ ID NO: 1013849 - DNA, 15 bp, Homo sapiens
gatctagccaagcac

SEQ ID NO: 1013850 - DNA, 15 bp, Homo sapiens
agatctagccaagca

SEQ ID NO: 1013851 - DNA, 15 bp, Homo sapiens
cagatctagccaagc

SEQ ID NO: 1013852 - DNA, 15 bp, Homo sapiens
acagatctagccaag

SEQ ID NO: 1013853 - DNA, 15 bp, Homo sapiens
aacagatctagccaa

SEQ ID NO: 1013854 - DNA, 15 bp, Homo sapiens
gaacagatctagcca

SEQ ID NO: 1013855 - DNA, 15 bp, Homo sapiens
agaacagatctagcc

SEQ ID NO: 1013856 - DNA, 15 bp, Homo sapiens
gagaacagatctagc

SEQ ID NO: 1013857 - DNA, 15 bp, Homo sapiens
tgagaacagatctag

SEQ ID NO: 1013858 - DNA, 15 bp, Homo sapiens
ctgagaacagatcta

SEQ ID NO: 1013859 - DNA, 15 bp, Homo sapiens
actgagaacagatct

SEQ ID NO: 1013860 - DNA, 15 bp, Homo sapiens
tactgagaacagatc

SEQ ID NO: 1013861 - DNA, 15 bp, Homo sapiens
ttactgagaacagat

SEQ ID NO: 1013862 - DNA, 15 bp, Homo sapiens
cttactgagaacaga

SEQ ID NO: 1013863 - DNA, 15 bp, Homo sapiens
ccttactgagaacag

SEQ ID NO: 1013864 - DNA, 15 bp, Homo sapiens
gccttactgagaaca

SEQ ID NO: 1013865 - DNA, 15 bp, Homo sapiens
cgccttactgagaac

SEQ ID NO: 1013866 - DNA, 15 bp, Homo sapiens
tcgccttactgagaa

SEQ ID NO: 1013867 - DNA, 15 bp, Homo sapiens
ttcgccttactgaga

SEQ ID NO: 1013868 - DNA, 15 bp, Homo sapiens
cttcgccttactgag

SEQ ID NO: 1013869 - DNA, 15 bp, Homo sapiens
tcttcgccttactga

SEQ ID NO: 1013870 - DNA, 15 bp, Homo sapiens
atcttcgccttactg

SEQ ID NO: 1013871 - DNA, 15 bp, Homo sapiens
gatcttcgccttact

SEQ ID NO: 1013872 - DNA, 15 bp, Homo sapiens
agatcttcgccttac

SEQ ID NO: 1013873 - DNA, 15 bp, Homo sapiens
aagatcttcgcctta

SEQ ID NO: 1013874 - DNA, 15 bp, Homo sapiens
caagatcttcgcctt

SEQ ID NO: 1013875 - DNA, 15 bp, Homo sapiens
gcaagatcttcgcct

SEQ ID NO: 1013876 - DNA, 15 bp, Homo sapiens
agcaagatcttcgcc

SEQ ID NO: 1013877 - DNA, 15 bp, Homo sapiens
cagcaagatcttcgc

SEQ ID NO: 1013878 - DNA, 15 bp, Homo sapiens
gcagcaagatcttcg

SEQ ID NO: 1013879 - DNA, 15 bp, Homo sapiens
agcagcaagatcttc

SEQ ID NO: 1013880 - DNA, 15 bp, Homo sapiens
aagcagcaagatctt

SEQ ID NO: 1013881 - DNA, 15 bp, Homo sapiens
caagcagcaagatct

SEQ ID NO: 1013882 - DNA, 15 bp, Homo sapiens
tcaagcagcaagatc

SEQ ID NO: 1013883 - DNA, 15 bp, Homo sapiens
ctgggtttttttgta

SEQ ID NO: 1013884 - DNA, 15 bp, Homo sapiens
gctgggtttttttgt

SEQ ID NO: 1013885 - DNA, 15 bp, Homo sapiens
tgctgggtttttttg

SEQ ID NO: 1013886 - DNA, 15 bp, Homo sapiens
ctgctgggttttttt

SEQ ID NO: 1013887 - DNA, 15 bp, Homo sapiens
actgctgggtttttt

SEQ ID NO: 1013888 - DNA, 15 bp, Homo sapiens
cactgctgggttttt

SEQ ID NO: 1013889 - DNA, 15 bp, Homo sapiens
acactgctgggtttt

SEQ ID NO: 1013890 - DNA, 15 bp, Homo sapiens
aacactgctgggttt

SEQ ID NO: 1013891 - DNA, 15 bp, Homo sapiens
gaacactgctgggtt

SEQ ID NO: 1013892 - DNA, 15 bp, Homo sapiens
ggaacactgctgggt

SEQ ID NO: 1013893 - DNA, 15 bp, Homo sapiens
tggaacactgctggg

SEQ ID NO: 1013894 - DNA, 15 bp, Homo sapiens
ctggaacactgctgg

SEQ ID NO: 1013895 - DNA, 15 bp, Homo sapiens
actggaacactgctg

SEQ ID NO: 1013896 - DNA, 15 bp, Homo sapiens
aactggaacactgct

SEQ ID NO: 1013897 - DNA, 15 bp, Homo sapiens
taactggaacactgc

SEQ ID NO: 1013898 - DNA, 15 bp, Homo sapiens
gtaactggaacactg

SEQ ID NO: 1013899 - DNA, 15 bp, Homo sapiens
agtaactggaacact

SEQ ID NO: 1013900 - DNA, 15 bp, Homo sapiens
aagtaactggaacac

SEQ ID NO: 1013901 - DNA, 15 bp, Homo sapiens
gaagtaactggaaca

SEQ ID NO: 1013902 - DNA, 15 bp, Homo sapiens
cgaagtaactggaac

SEQ ID NO: 1013903 - DNA, 15 bp, Homo sapiens
ccgaagtaactggaa

SEQ ID NO: 1013904 - DNA, 15 bp, Homo sapiens
gccgaagtaactgga

SEQ ID NO: 1013905 - DNA, 15 bp, Homo sapiens
agccgaagtaactgg

SEQ ID NO: 1013906 - DNA, 15 bp, Homo sapiens
cagccgaagtaactg

SEQ ID NO: 1013907 - DNA, 15 bp, Homo sapiens
acagccgaagtaact

SEQ ID NO: 1013908 - DNA, 15 bp, Homo sapiens
tacagccgaagtaac

SEQ ID NO: 1013909 - DNA, 15 bp, Homo sapiens
gtacagccgaagtaa

SEQ ID NO: 1013910 - DNA, 15 bp, Homo sapiens
agtacagccgaagta

SEQ ID NO: 1013911 - DNA, 15 bp, Homo sapiens
tagtacagccgaagt

SEQ ID NO: 1013912 - DNA, 15 bp, Homo sapiens
gtagtacagccgaag

SEQ ID NO: 1013913 - DNA, 15 bp, Homo sapiens
tgtagtacagccgaa

SEQ ID NO: 1013914 - DNA, 15 bp, Homo sapiens
ttgtagtacagccga

SEQ ID NO: 1013915 - DNA, 15 bp, Homo sapiens
tttgtagtacagccg

SEQ ID NO: 1013916 - DNA, 15 bp, Homo sapiens
atttgtagtacagcc

SEQ ID NO: 1013917 - DNA, 15 bp, Homo sapiens
aatttgtagtacagc

SEQ ID NO: 1013918 - DNA, 15 bp, Homo sapiens
taatttgtagtacag

SEQ ID NO: 1013919 - DNA, 15 bp, Homo sapiens
gtaatttgtagtaca

SEQ ID NO: 1013920 - DNA, 15 bp, Homo sapiens
agtaatttgtagtac

SEQ ID NO: 1013921 - DNA, 15 bp, Homo sapiens
gagtaatttgtagta

SEQ ID NO: 1013922 - DNA, 15 bp, Homo sapiens
ggagtaatttgtagt

SEQ ID NO: 1013923 - DNA, 15 bp, Homo sapiens
tggagtaatttgtag

SEQ ID NO: 1013924 - DNA, 15 bp, Homo sapiens
ttggagtaatttgta

SEQ ID NO: 1013925 - DNA, 15 bp, Homo sapiens
tttggagtaatttgt

SEQ ID NO: 1013926 - DNA, 15 bp, Homo sapiens
ttttggagtaatttg

SEQ ID NO: 1013927 - DNA, 15 bp, Homo sapiens
gttttggagtaattt

SEQ ID NO: 1013928 - DNA, 15 bp, Homo sapiens
agttttggagtaatt

SEQ ID NO: 1013929 - DNA, 15 bp, Homo sapiens
aagttttggagtaat

SEQ ID NO: 1013930 - DNA, 15 bp, Homo sapiens
gaagttttggagtaa

SEQ ID NO: 1013931 - DNA, 15 bp, Homo sapiens
tgaagttttggagta

SEQ ID NO: 1013932 - DNA, 15 bp, Homo sapiens
atgaagttttggagt

SEQ ID NO: 1013933 - DNA, 15 bp, Homo sapiens
catgaagttttggag

SEQ ID NO: 1013934 - DNA, 15 bp, Homo sapiens
tcatgaagttttgga

SEQ ID NO: 1013935 - DNA, 15 bp, Homo sapiens
ttcatgaagttttgg

SEQ ID NO: 1013936 - DNA, 15 bp, Homo sapiens
cttcatgaagttttg

SEQ ID NO: 1013937 - DNA, 15 bp, Homo sapiens
gcttcatgaagtttt

SEQ ID NO: 1013938 - DNA, 15 bp, Homo sapiens
tgcttcatgaagttt

SEQ ID NO: 1013939 - DNA, 15 bp, Homo sapiens
ttgcttcatgaagtt

SEQ ID NO: 1013940 - DNA, 15 bp, Homo sapiens
tttgcttcatgaagt

SEQ ID NO: 1013941 - DNA, 15 bp, Homo sapiens
ttttgcttcatgaag

SEQ ID NO: 1013942 - DNA, 15 bp, Homo sapiens
gttttgcttcatgaa

SEQ ID NO: 1013943 - DNA, 15 bp, Homo sapiens
tgttttgcttcatga

SEQ ID NO: 1013944 - DNA, 15 bp, Homo sapiens
ttgttttgcttcatg

SEQ ID NO: 1013945 - DNA, 15 bp, Homo sapiens
attgttttgcttcat

SEQ ID NO: 1013946 - DNA, 15 bp, Homo sapiens
gattgttttgcttca

SEQ ID NO: 1013947 - DNA, 15 bp, Homo sapiens
tgattgttttgcttc

SEQ ID NO: 1013948 - DNA, 15 bp, Homo sapiens
atgattgttttgctt

SEQ ID NO: 1013949 - DNA, 15 bp, Homo sapiens
tatgattgttttgct

SEQ ID NO: 1013950 - DNA, 15 bp, Homo sapiens
atatgattgttttgc

SEQ ID NO: 1013951 - DNA, 15 bp, Homo sapiens
tatatgattgttttg

SEQ ID NO: 1013952 - DNA, 15 bp, Homo sapiens
atatatgattgtttt

SEQ ID NO: 1013953 - DNA, 15 bp, Homo sapiens
aatatatgattgttt

SEQ ID NO: 1013954 - DNA, 15 bp, Homo sapiens
taatatatgattgtt

SEQ ID NO: 1013955 - DNA, 15 bp, Homo sapiens
ataatatatgattgt

SEQ ID NO: 1013956 - DNA, 15 bp, Homo sapiens
cataatatatgattg

SEQ ID NO: 1013957 - DNA, 15 bp, Homo sapiens
gcataatatatgatt

SEQ ID NO: 1013958 - DNA, 15 bp, Homo sapiens
agcataatatatgat

SEQ ID NO: 1013959 - DNA, 15 bp, Homo sapiens
gagcataatatatga

SEQ ID NO: 1013960 - DNA, 15 bp, Homo sapiens
agagcataatatatg

SEQ ID NO: 1013961 - DNA, 15 bp, Homo sapiens
gagagcataatatat

SEQ ID NO: 1013962 - DNA, 15 bp, Homo sapiens
tgagagcataatata

SEQ ID NO: 1013963 - DNA, 15 bp, Homo sapiens
ctgagagcataatat

SEQ ID NO: 1013964 - DNA, 15 bp, Homo sapiens
tctgagagcataata

SEQ ID NO: 1013965 - DNA, 15 bp, Homo sapiens
atctgagagcataat

SEQ ID NO: 1013966 - DNA, 15 bp, Homo sapiens
aatctgagagcataa

SEQ ID NO: 1013967 - DNA, 15 bp, Homo sapiens
aaatctgagagcata

SEQ ID NO: 1013968 - DNA, 15 bp, Homo sapiens
aaaatctgagagcat

SEQ ID NO: 1013969 - DNA, 15 bp, Homo sapiens
caaaatctgagagca

SEQ ID NO: 1013970 - DNA, 15 bp, Homo sapiens
acaaaatctgagagc

SEQ ID NO: 1013971 - DNA, 15 bp, Homo sapiens
cacaaaatctgagag

SEQ ID NO: 1013972 - DNA, 15 bp, Homo sapiens
ccacaaaatctgaga

SEQ ID NO: 1013973 - DNA, 15 bp, Homo sapiens
tccacaaaatctgag

SEQ ID NO: 1013974 - DNA, 15 bp, Homo sapiens
atccacaaaatctga

SEQ ID NO: 1013975 - DNA, 15 bp, Homo sapiens
gatccacaaaatctg

SEQ ID NO: 1013976 - DNA, 15 bp, Homo sapiens
tgatccacaaaatct

SEQ ID NO: 1013977 - DNA, 15 bp, Homo sapiens
ctgatccacaaaatc

SEQ ID NO: 1013978 - DNA, 15 bp, Homo sapiens
cctgatccacaaaat

SEQ ID NO: 1013979 - DNA, 15 bp, Homo sapiens
tcctgatccacaaaa

SEQ ID NO: 1013980 - DNA, 15 bp, Homo sapiens
ttcctgatccacaaa

SEQ ID NO: 1013981 - DNA, 15 bp, Homo sapiens
attcctgatccacaa

SEQ ID NO: 1013982 - DNA, 15 bp, Homo sapiens
aattcctgatccaca

SEQ ID NO: 1013983 - DNA, 15 bp, Homo sapiens
gaattcctgatccac

SEQ ID NO: 1013984 - DNA, 15 bp, Homo sapiens
tgaattcctgatcca

SEQ ID NO: 1013985 - DNA, 15 bp, Homo sapiens
ctgaattcctgatcc

SEQ ID NO: 1013986 - DNA, 15 bp, Homo sapiens
gctgaattcctgatc

SEQ ID NO: 1013987 - DNA, 15 bp, Homo sapiens
ggctgaattcctgat

SEQ ID NO: 1013988 - DNA, 15 bp, Homo sapiens
tggctgaattcctga

SEQ ID NO: 1013989 - DNA, 15 bp, Homo sapiens
gtggctgaattcctg

SEQ ID NO: 1013990 - DNA, 15 bp, Homo sapiens
tgtggctgaattcct

SEQ ID NO: 1013991 - DNA, 15 bp, Homo sapiens
ctgtggctgaattcc

SEQ ID NO: 1013992 - DNA, 15 bp, Homo sapiens
gctgtggctgaattc

SEQ ID NO: 1013993 - DNA, 15 bp, Homo sapiens
tgctgtggctgaatt

SEQ ID NO: 1013994 - DNA, 15 bp, Homo sapiens
gtgctgtggctgaat

SEQ ID NO: 1013995 - DNA, 15 bp, Homo sapiens
agtgctgtggctgaa

SEQ ID NO: 1013996 - DNA, 15 bp, Homo sapiens
cagtgctgtggctga

SEQ ID NO: 1013997 - DNA, 15 bp, Homo sapiens
acagtgctgtggctg

SEQ ID NO: 1013998 - DNA, 15 bp, Homo sapiens
cacagtgctgtggct

SEQ ID NO: 1013999 - DNA, 15 bp, Homo sapiens
ccacagtgctgtggc

SEQ ID NO: 1014000 - DNA, 15 bp, Homo sapiens
accacagtgctgtgg

SEQ ID NO: 1014001 - DNA, 15 bp, Homo sapiens
aaccacagtgctgtg

SEQ ID NO: 1014002 - DNA, 15 bp, Homo sapiens
aaaccacagtgctgt

SEQ ID NO: 1014003 - DNA, 15 bp, Homo sapiens
caaaccacagtgctg

SEQ ID NO: 1014004 - DNA, 15 bp, Homo sapiens
acaaaccacagtgct

SEQ ID NO: 1014005 - DNA, 15 bp, Homo sapiens
gacaaaccacagtgc

SEQ ID NO: 1014006 - DNA, 15 bp, Homo sapiens
agacaaaccacagtg

SEQ ID NO: 1014007 - DNA, 15 bp, Homo sapiens
aagacaaaccacagt

SEQ ID NO: 1014008 - DNA, 15 bp, Homo sapiens
aaagacaaaccacag

SEQ ID NO: 1014009 - DNA, 15 bp, Homo sapiens
caaagacaaaccaca

SEQ ID NO: 1014010 - DNA, 15 bp, Homo sapiens
acaaagacaaaccac

SEQ ID NO: 1014011 - DNA, 15 bp, Homo sapiens
aacaaagacaaacca

SEQ ID NO: 1014012 - DNA, 15 bp, Homo sapiens
aaacaaagacaaacc

SEQ ID NO: 1014013 - DNA, 15 bp, Homo sapiens
gaaacaaagacaaac

SEQ ID NO: 1014014 - DNA, 15 bp, Homo sapiens
tgaaacaaagacaaa

SEQ ID NO: 1014015 - DNA, 15 bp, Homo sapiens
atgaaacaaagacaa

SEQ ID NO: 1014016 - DNA, 15 bp, Homo sapiens
catgaaacaaagaca

SEQ ID NO: 1014017 - DNA, 15 bp, Homo sapiens
acatgaaacaaagac

SEQ ID NO: 1014018 - DNA, 15 bp, Homo sapiens
gacatgaaacaaaga

SEQ ID NO: 1014019 - DNA, 15 bp, Homo sapiens
agacatgaaacaaag

SEQ ID NO: 1014020 - DNA, 15 bp, Homo sapiens
cagacatgaaacaaa

SEQ ID NO: 1014021 - DNA, 15 bp, Homo sapiens
tcagacatgaaacaa

SEQ ID NO: 1014022 - DNA, 15 bp, Homo sapiens
ctcagacatgaaaca

SEQ ID NO: 1014023 - DNA, 15 bp, Homo sapiens
cctcagacatgaaac

SEQ ID NO: 1014024 - DNA, 15 bp, Homo sapiens
gcctcagacatgaaa

SEQ ID NO: 1014025 - DNA, 15 bp, Homo sapiens
agcctcagacatgaa

SEQ ID NO: 1014026 - DNA, 15 bp, Homo sapiens
aagcctcagacatga

SEQ ID NO: 1014027 - DNA, 15 bp, Homo sapiens
aaagcctcagacatg

SEQ ID NO: 1014028 - DNA, 15 bp, Homo sapiens
taaagcctcagacat

SEQ ID NO: 1014029 - DNA, 15 bp, Homo sapiens
ctaaagcctcagaca

SEQ ID NO: 1014030 - DNA, 15 bp, Homo sapiens
gctaaagcctcagac

SEQ ID NO: 1014031 - DNA, 15 bp, Homo sapiens
ggctaaagcctcaga

SEQ ID NO: 1014032 - DNA, 15 bp, Homo sapiens
tggctaaagcctcag

SEQ ID NO: 1014033 - DNA, 15 bp, Homo sapiens
ctggctaaagcctca

SEQ ID NO: 1014034 - DNA, 15 bp, Homo sapiens
tctggctaaagcctc

SEQ ID NO: 1014035 - DNA, 15 bp, Homo sapiens
ttctggctaaagcct

SEQ ID NO: 1014036 - DNA, 15 bp, Homo sapiens
cttctggctaaagcc

SEQ ID NO: 1014037 - DNA, 15 bp, Homo sapiens
tcttctggctaaagc

SEQ ID NO: 1014038 - DNA, 15 bp, Homo sapiens
gtcttctggctaaag

SEQ ID NO: 1014039 - DNA, 15 bp, Homo sapiens
agtcttctggctaaa

SEQ ID NO: 1014040 - DNA, 15 bp, Homo sapiens
aagtcttctggctaa

SEQ ID NO: 1014041 - DNA, 15 bp, Homo sapiens
taagtcttctggcta

SEQ ID NO: 1014042 - DNA, 15 bp, Homo sapiens
gtaagtcttctggct

SEQ ID NO: 1014043 - DNA, 15 bp, Homo sapiens
tgtaagtcttctggc

SEQ ID NO: 1014044 - DNA, 15 bp, Homo sapiens
ctgtaagtcttctgg

SEQ ID NO: 1014045 - DNA, 15 bp, Homo sapiens
cctgtaagtcttctg

SEQ ID NO: 1014046 - DNA, 15 bp, Homo sapiens
gcctgtaagtcttct

SEQ ID NO: 1014047 - DNA, 15 bp, Homo sapiens
agcctgtaagtcttc

SEQ ID NO: 1014048 - DNA, 15 bp, Homo sapiens
cagcctgtaagtctt

SEQ ID NO: 1014049 - DNA, 15 bp, Homo sapiens
ccagcctgtaagtct

SEQ ID NO: 1014050 - DNA, 15 bp, Homo sapiens
cccagcctgtaagtc

SEQ ID NO: 1014051 - DNA, 15 bp, Homo sapiens
acccagcctgtaagt

SEQ ID NO: 1014052 - DNA, 15 bp, Homo sapiens
gacccagcctgtaag

SEQ ID NO: 1014053 - DNA, 15 bp, Homo sapiens
agacccagcctgtaa

SEQ ID NO: 1014054 - DNA, 15 bp, Homo sapiens
cagacccagcctgta

SEQ ID NO: 1014055 - DNA, 15 bp, Homo sapiens
tcagacccagcctgt

SEQ ID NO: 1014056 - DNA, 15 bp, Homo sapiens
ttcagacccagcctg

SEQ ID NO: 1014057 - DNA, 15 bp, Homo sapiens
cttcagacccagcct

SEQ ID NO: 1014058 - DNA, 15 bp, Homo sapiens
tcttcagacccagcc

SEQ ID NO: 1014059 - DNA, 15 bp, Homo sapiens
gtcttcagacccagc

SEQ ID NO: 1014060 - DNA, 15 bp, Homo sapiens
agtcttcagacccag

SEQ ID NO: 1014061 - DNA, 15 bp, Homo sapiens
gagtcttcagaccca

SEQ ID NO: 1014062 - DNA, 15 bp, Homo sapiens
agagtcttcagaccc

SEQ ID NO: 1014063 - DNA, 15 bp, Homo sapiens
tagagtcttcagacc

SEQ ID NO: 1014064 - DNA, 15 bp, Homo sapiens
gtagagtcttcagac

SEQ ID NO: 1014065 - DNA, 15 bp, Homo sapiens
tgtagagtcttcaga

SEQ ID NO: 1014066 - DNA, 15 bp, Homo sapiens
gtgtagagtcttcag

SEQ ID NO: 1014067 - DNA, 15 bp, Homo sapiens
agtgtagagtcttca

SEQ ID NO: 1014068 - DNA, 15 bp, Homo sapiens
gagtgtagagtcttc

SEQ ID NO: 1014069 - DNA, 15 bp, Homo sapiens
tgagtgtagagtctt

SEQ ID NO: 1014070 - DNA, 15 bp, Homo sapiens
gtgagtgtagagtct

SEQ ID NO: 1014071 - DNA, 15 bp, Homo sapiens
tgtgagtgtagagtc

SEQ ID NO: 1014072 - DNA, 15 bp, Homo sapiens
gtgtgagtgtagagt

SEQ ID NO: 1014073 - DNA, 15 bp, Homo sapiens
tgtgtgagtgtagag

SEQ ID NO: 1014074 - DNA, 15 bp, Homo sapiens
ctgtgtgagtgtaga

SEQ ID NO: 1014075 - DNA, 15 bp, Homo sapiens
tctgtgtgagtgtag

SEQ ID NO: 1014076 - DNA, 15 bp, Homo sapiens
atctgtgtgagtgta

SEQ ID NO: 1014077 - DNA, 15 bp, Homo sapiens
tatctgtgtgagtgt

SEQ ID NO: 1014078 - DNA, 15 bp, Homo sapiens
ctatctgtgtgagtg

SEQ ID NO: 1014079 - DNA, 15 bp, Homo sapiens
tctatctgtgtgagt

SEQ ID NO: 1014080 - DNA, 15 bp, Homo sapiens
atctatctgtgtgag

SEQ ID NO: 1014081 - DNA, 15 bp, Homo sapiens
tatctatctgtgtga

SEQ ID NO: 1014082 - DNA, 15 bp, Homo sapiens
ctatctatctgtgtg

SEQ ID NO: 1014083 - DNA, 15 bp, Homo sapiens
cctatctatctgtgt

SEQ ID NO: 1014084 - DNA, 15 bp, Homo sapiens
gcctatctatctgtg

SEQ ID NO: 1014085 - DNA, 15 bp, Homo sapiens
agcctatctatctgt

SEQ ID NO: 1014086 - DNA, 15 bp, Homo sapiens
cagcctatctatctg

SEQ ID NO: 1014087 - DNA, 15 bp, Homo sapiens
gcagcctatctatct

SEQ ID NO: 1014088 - DNA, 15 bp, Homo sapiens
agcagcctatctatc

SEQ ID NO: 1014089 - DNA, 15 bp, Homo sapiens
tagcagcctatctat

SEQ ID NO: 1014090 - DNA, 15 bp, Homo sapiens
gtagcagcctatcta

SEQ ID NO: 1014091 - DNA, 15 bp, Homo sapiens
agtagcagcctatct

SEQ ID NO: 1014092 - DNA, 15 bp, Homo sapiens
gagtagcagcctatc

SEQ ID NO: 1014093 - DNA, 15 bp, Homo sapiens
agagtagcagcctat

SEQ ID NO: 1014094 - DNA, 15 bp, Homo sapiens
tagagtagcagccta

SEQ ID NO: 1014095 - DNA, 15 bp, Homo sapiens
atagagtagcagcct

SEQ ID NO: 1014096 - DNA, 15 bp, Homo sapiens
catagagtagcagcc

SEQ ID NO: 1014097 - DNA, 15 bp, Homo sapiens
acatagagtagcagc

SEQ ID NO: 1014098 - DNA, 15 bp, Homo sapiens
cacatagagtagcag

SEQ ID NO: 1014099 - DNA, 15 bp, Homo sapiens
tcacatagagtagca

SEQ ID NO: 1014100 - DNA, 15 bp, Homo sapiens
ctcacatagagtagc

SEQ ID NO: 1014101 - DNA, 15 bp, Homo sapiens
actcacatagagtag

SEQ ID NO: 1014102 - DNA, 15 bp, Homo sapiens
gactcacatagagta

SEQ ID NO: 1014103 - DNA, 15 bp, Homo sapiens
tgactcacatagagt

SEQ ID NO: 1014104 - DNA, 15 bp, Homo sapiens
ctgactcacatagag

SEQ ID NO: 1014105 - DNA, 15 bp, Homo sapiens
actgactcacataga

SEQ ID NO: 1014106 - DNA, 15 bp, Homo sapiens
gactgactcacatag

SEQ ID NO: 1014107 - DNA, 15 bp, Homo sapiens
agactgactcacata

SEQ ID NO: 1014108 - DNA, 15 bp, Homo sapiens
tagactgactcacat

SEQ ID NO: 1014109 - DNA, 15 bp, Homo sapiens
ctagactgactcaca

SEQ ID NO: 1014110 - DNA, 15 bp, Homo sapiens
cctagactgactcac

SEQ ID NO: 1014111 - DNA, 15 bp, Homo sapiens
gcctagactgactca

SEQ ID NO: 1014112 - DNA, 15 bp, Homo sapiens
agcctagactgactc

SEQ ID NO: 1014113 - DNA, 15 bp, Homo sapiens
aagcctagactgact

SEQ ID NO: 1014114 - DNA, 15 bp, Homo sapiens
gaagcctagactgac

SEQ ID NO: 1014115 - DNA, 15 bp, Homo sapiens
ggaagcctagactga

SEQ ID NO: 1014116 - DNA, 15 bp, Homo sapiens
aggaagcctagactg

SEQ ID NO: 1014117 - DNA, 15 bp, Homo sapiens
aaggaagcctagact

SEQ ID NO: 1014118 - DNA, 15 bp, Homo sapiens
taaggaagcctagac

SEQ ID NO: 1014119 - DNA, 15 bp, Homo sapiens
gtaaggaagcctaga

SEQ ID NO: 1014120 - DNA, 15 bp, Homo sapiens
tgtaaggaagcctag

SEQ ID NO: 1014121 - DNA, 15 bp, Homo sapiens
ctgtaaggaagccta

SEQ ID NO: 1014122 - DNA, 15 bp, Homo sapiens
gctgtaaggaagcct

SEQ ID NO: 1014123 - DNA, 15 bp, Homo sapiens
tgctgtaaggaagcc

SEQ ID NO: 1014124 - DNA, 15 bp, Homo sapiens
atgctgtaaggaagc

SEQ ID NO: 1014125 - DNA, 15 bp, Homo sapiens
tatgctgtaaggaag

SEQ ID NO: 1014126 - DNA, 15 bp, Homo sapiens
ctatgctgtaaggaa

SEQ ID NO: 1014127 - DNA, 15 bp, Homo sapiens
cctatgctgtaagga

SEQ ID NO: 1014128 - DNA, 15 bp, Homo sapiens
tcctatgctgtaagg

SEQ ID NO: 1014129 - DNA, 15 bp, Homo sapiens
ctcctatgctgtaag

SEQ ID NO: 1014130 - DNA, 15 bp, Homo sapiens
gctcctatgctgtaa

SEQ ID NO: 1014131 - DNA, 15 bp, Homo sapiens
agctcctatgctgta

SEQ ID NO: 1014132 - DNA, 15 bp, Homo sapiens
cagctcctatgctgt

SEQ ID NO: 1014133 - DNA, 15 bp, Homo sapiens
tcagctcctatgctg

SEQ ID NO: 1014134 - DNA, 15 bp, Homo sapiens
ctcagctcctatgct

SEQ ID NO: 1014135 - DNA, 15 bp, Homo sapiens
actcagctcctatgc

SEQ ID NO: 1014136 - DNA, 15 bp, Homo sapiens
aactcagctcctatg

SEQ ID NO: 1014137 - DNA, 15 bp, Homo sapiens
gaactcagctcctat

SEQ ID NO: 1014138 - DNA, 15 bp, Homo sapiens
tgaactcagctccta

SEQ ID NO: 1014139 - DNA, 15 bp, Homo sapiens
ctgaactcagctcct

SEQ ID NO: 1014140 - DNA, 15 bp, Homo sapiens
cctgaactcagctcc

SEQ ID NO: 1014141 - DNA, 15 bp, Homo sapiens
tcctgaactcagctc

SEQ ID NO: 1014142 - DNA, 15 bp, Homo sapiens
ctcctgaactcagct

SEQ ID NO: 1014143 - DNA, 15 bp, Homo sapiens
cctcctgaactcagc

SEQ ID NO: 1014144 - DNA, 15 bp, Homo sapiens
acctcctgaactcag

SEQ ID NO: 1014145 - DNA, 15 bp, Homo sapiens
cacctcctgaactca

SEQ ID NO: 1014146 - DNA, 15 bp, Homo sapiens
tcacctcctgaactc

SEQ ID NO: 1014147 - DNA, 15 bp, Homo sapiens
ttcacctcctgaact

SEQ ID NO: 1014148 - DNA, 15 bp, Homo sapiens
tttcacctcctgaac

SEQ ID NO: 1014149 - DNA, 15 bp, Homo sapiens
ctttcacctcctgaa

SEQ ID NO: 1014150 - DNA, 15 bp, Homo sapiens
actttcacctcctga

SEQ ID NO: 1014151 - DNA, 15 bp, Homo sapiens
gactttcacctcctg

SEQ ID NO: 1014152 - DNA, 15 bp, Homo sapiens
ggactttcacctcct

SEQ ID NO: 1014153 - DNA, 15 bp, Homo sapiens
gggactttcacctcc

SEQ ID NO: 1014154 - DNA, 15 bp, Homo sapiens
tgggactttcacctc

SEQ ID NO: 1014155 - DNA, 15 bp, Homo sapiens
ttgggactttcacct

SEQ ID NO: 1014156 - DNA, 15 bp, Homo sapiens
cttgggactttcacc

SEQ ID NO: 1014157 - DNA, 15 bp, Homo sapiens
tcttgggactttcac

SEQ ID NO: 1014158 - DNA, 15 bp, Homo sapiens
ttcttgggactttca

SEQ ID NO: 1014159 - DNA, 15 bp, Homo sapiens
tttcttgggactttc

SEQ ID NO: 1014160 - DNA, 15 bp, Homo sapiens
ctttcttgggacttt

SEQ ID NO: 1014161 - DNA, 15 bp, Homo sapiens
cctttcttgggactt

SEQ ID NO: 1014162 - DNA, 15 bp, Homo sapiens
ccctttcttgggact

SEQ ID NO: 1014163 - DNA, 15 bp, Homo sapiens
tccctttcttgggac

SEQ ID NO: 1014164 - DNA, 15 bp, Homo sapiens
ctccctttcttggga

SEQ ID NO: 1014165 - DNA, 15 bp, Homo sapiens
tctccctttcttggg

SEQ ID NO: 1014166 - DNA, 15 bp, Homo sapiens
ctctccctttcttgg

SEQ ID NO: 1014167 - DNA, 15 bp, Homo sapiens
tctctccctttcttg

SEQ ID NO: 1014168 - DNA, 15 bp, Homo sapiens
ctctctccctttctt

SEQ ID NO: 1014169 - DNA, 15 bp, Homo sapiens
gctctctccctttct

SEQ ID NO: 1014170 - DNA, 15 bp, Homo sapiens
tgctctctccctttc

SEQ ID NO: 1014171 - DNA, 15 bp, Homo sapiens
ttgctctctcccttt

SEQ ID NO: 1014172 - DNA, 15 bp, Homo sapiens
tttgctctctccctt

SEQ ID NO: 1014173 - DNA, 15 bp, Homo sapiens
atttgctctctccct

SEQ ID NO: 1014174 - DNA, 15 bp, Homo sapiens
catttgctctctccc

SEQ ID NO: 1014175 - DNA, 15 bp, Homo sapiens
gcatttgctctctcc

SEQ ID NO: 1014176 - DNA, 15 bp, Homo sapiens
tgcatttgctctctc

SEQ ID NO: 1014177 - DNA, 15 bp, Homo sapiens
ctgcatttgctctct

SEQ ID NO: 1014178 - DNA, 15 bp, Homo sapiens
actgcatttgctctc

SEQ ID NO: 1014179 - DNA, 15 bp, Homo sapiens
cactgcatttgctct

SEQ ID NO: 1014180 - DNA, 15 bp, Homo sapiens
acactgcatttgctc

SEQ ID NO: 1014181 - DNA, 15 bp, Homo sapiens
aacactgcatttgct

SEQ ID NO: 1014182 - DNA, 15 bp, Homo sapiens
taacactgcatttgc

SEQ ID NO: 1014183 - DNA, 15 bp, Homo sapiens
ttaacactgcatttg

SEQ ID NO: 1014184 - DNA, 15 bp, Homo sapiens
gttaacactgcattt

SEQ ID NO: 1014185 - DNA, 15 bp, Homo sapiens
agttaacactgcatt

SEQ ID NO: 1014186 - DNA, 15 bp, Homo sapiens
aagttaacactgcat

SEQ ID NO: 1014187 - DNA, 15 bp, Homo sapiens
gaagttaacactgca

SEQ ID NO: 1014188 - DNA, 15 bp, Homo sapiens
ggaagttaacactgc

SEQ ID NO: 1014189 - DNA, 15 bp, Homo sapiens
tggaagttaacactg

SEQ ID NO: 1014190 - DNA, 15 bp, Homo sapiens
gtggaagttaacact

SEQ ID NO: 1014191 - DNA, 15 bp, Homo sapiens
agtggaagttaacac

SEQ ID NO: 1014192 - DNA, 15 bp, Homo sapiens
cagtggaagttaaca

SEQ ID NO: 1014193 - DNA, 15 bp, Homo sapiens
gcagtggaagttaac

SEQ ID NO: 1014194 - DNA, 15 bp, Homo sapiens
tgcagtggaagttaa

SEQ ID NO: 1014195 - DNA, 15 bp, Homo sapiens
atgcagtggaagtta

SEQ ID NO: 1014196 - DNA, 15 bp, Homo sapiens
aatgcagtggaagtt

SEQ ID NO: 1014197 - DNA, 15 bp, Homo sapiens
gaatgcagtggaagt

SEQ ID NO: 1014198 - DNA, 15 bp, Homo sapiens
agaatgcagtggaag

SEQ ID NO: 1014199 - DNA, 15 bp, Homo sapiens
cagaatgcagtggaa

SEQ ID NO: 1014200 - DNA, 15 bp, Homo sapiens
acagaatgcagtgga

SEQ ID NO: 1014201 - DNA, 15 bp, Homo sapiens
tacagaatgcagtgg

SEQ ID NO: 1014202 - DNA, 15 bp, Homo sapiens
ctacagaatgcagtg

SEQ ID NO: 1014203 - DNA, 15 bp, Homo sapiens
cctacagaatgcagt

SEQ ID NO: 1014204 - DNA, 15 bp, Homo sapiens
tcctacagaatgcag

SEQ ID NO: 1014205 - DNA, 15 bp, Homo sapiens
ttcctacagaatgca

SEQ ID NO: 1014206 - DNA, 15 bp, Homo sapiens
gttcctacagaatgc

SEQ ID NO: 1014207 - DNA, 15 bp, Homo sapiens
tgttcctacagaatg

SEQ ID NO: 1014208 - DNA, 15 bp, Homo sapiens
ctgttcctacagaat

SEQ ID NO: 1014209 - DNA, 15 bp, Homo sapiens
cctgttcctacagaa

SEQ ID NO: 1014210 - DNA, 15 bp, Homo sapiens
gcctgttcctacaga

SEQ ID NO: 1014211 - DNA, 15 bp, Homo sapiens
tgcctgttcctacag

SEQ ID NO: 1014212 - DNA, 15 bp, Homo sapiens
ctgcctgttcctaca

SEQ ID NO: 1014213 - DNA, 15 bp, Homo sapiens
actgcctgttcctac

SEQ ID NO: 1014214 - DNA, 15 bp, Homo sapiens
gactgcctgttccta

SEQ ID NO: 1014215 - DNA, 15 bp, Homo sapiens
tgactgcctgttcct

SEQ ID NO: 1014216 - DNA, 15 bp, Homo sapiens
ctgactgcctgttcc

SEQ ID NO: 1014217 - DNA, 15 bp, Homo sapiens
actgactgcctgttc

SEQ ID NO: 1014218 - DNA, 15 bp, Homo sapiens
gactgactgcctgtt

SEQ ID NO: 1014219 - DNA, 15 bp, Homo sapiens
tgactgactgcctgt

SEQ ID NO: 1014220 - DNA, 15 bp, Homo sapiens
gtgactgactgcctg

SEQ ID NO: 1014221 - DNA, 15 bp, Homo sapiens
tgtgactgactgcct

SEQ ID NO: 1014222 - DNA, 15 bp, Homo sapiens
ttgtgactgactgcc

SEQ ID NO: 1014223 - DNA, 15 bp, Homo sapiens
tttgtgactgactgc

SEQ ID NO: 1014224 - DNA, 15 bp, Homo sapiens
gtttgtgactgactg

SEQ ID NO: 1014225 - DNA, 15 bp, Homo sapiens
agtttgtgactgact

SEQ ID NO: 1014226 - DNA, 15 bp, Homo sapiens
gagtttgtgactgac

SEQ ID NO: 1014227 - DNA, 15 bp, Homo sapiens
ggagtttgtgactga

SEQ ID NO: 1014228 - DNA, 15 bp, Homo sapiens
gggagtttgtgactg

SEQ ID NO: 1014229 - DNA, 15 bp, Homo sapiens
tgggagtttgtgact

SEQ ID NO: 1014230 - DNA, 15 bp, Homo sapiens
atgggagtttgtgac

SEQ ID NO: 1014231 - DNA, 15 bp, Homo sapiens
gatgggagtttgtga

SEQ ID NO: 1014232 - DNA, 15 bp, Homo sapiens
ggatgggagtttgtg

SEQ ID NO: 1014233 - DNA, 15 bp, Homo sapiens
tggatgggagtttgt

SEQ ID NO: 1014234 - DNA, 15 bp, Homo sapiens
ctggatgggagtttg

SEQ ID NO: 1014235 - DNA, 15 bp, Homo sapiens
tctggatgggagttt

SEQ ID NO: 1014236 - DNA, 15 bp, Homo sapiens
atctggatgggagtt

SEQ ID NO: 1014237 - DNA, 15 bp, Homo sapiens
aatctggatgggagt

SEQ ID NO: 1014238 - DNA, 15 bp, Homo sapiens
gaatctggatgggag

SEQ ID NO: 1014239 - DNA, 15 bp, Homo sapiens
tgaatctggatggga

SEQ ID NO: 1014240 - DNA, 15 bp, Homo sapiens
atgaatctggatggg

SEQ ID NO: 1014241 - DNA, 15 bp, Homo sapiens
catgaatctggatgg

SEQ ID NO: 1014242 - DNA, 15 bp, Homo sapiens
tcatgaatctggatg

SEQ ID NO: 1014243 - DNA, 15 bp, Homo sapiens
ttcatgaatctggat

SEQ ID NO: 1014244 - DNA, 15 bp, Homo sapiens
cttcatgaatctgga

SEQ ID NO: 1014245 - DNA, 15 bp, Homo sapiens
tcttcatgaatctgg

SEQ ID NO: 1014246 - DNA, 15 bp, Homo sapiens
ctcttcatgaatctg

SEQ ID NO: 1014247 - DNA, 15 bp, Homo sapiens
cctcttcatgaatct

SEQ ID NO: 1014248 - DNA, 15 bp, Homo sapiens
ccctcttcatgaatc

SEQ ID NO: 1014249 - DNA, 15 bp, Homo sapiens
tccctcttcatgaat

SEQ ID NO: 1014250 - DNA, 15 bp, Homo sapiens
ttccctcttcatgaa

SEQ ID NO: 1014251 - DNA, 15 bp, Homo sapiens
attccctcttcatga

SEQ ID NO: 1014252 - DNA, 15 bp, Homo sapiens
tattccctcttcatg

SEQ ID NO: 1014253 - DNA, 15 bp, Homo sapiens
atattccctcttcat

SEQ ID NO: 1014254 - DNA, 15 bp, Homo sapiens
tatattccctcttca

SEQ ID NO: 1014255 - DNA, 15 bp, Homo sapiens
ctatattccctcttc

SEQ ID NO: 1014256 - DNA, 15 bp, Homo sapiens
tctatattccctctt

SEQ ID NO: 1014257 - DNA, 15 bp, Homo sapiens
atctatattccctct

SEQ ID NO: 1014258 - DNA, 15 bp, Homo sapiens
gatctatattccctc

SEQ ID NO: 1014259 - DNA, 15 bp, Homo sapiens
ggatctatattccct

SEQ ID NO: 1014260 - DNA, 15 bp, Homo sapiens
gggatctatattccc

SEQ ID NO: 1014261 - DNA, 15 bp, Homo sapiens
tgggatctatattcc

SEQ ID NO: 1014262 - DNA, 15 bp, Homo sapiens
gtgggatctatattc

SEQ ID NO: 1014263 - DNA, 15 bp, Homo sapiens
ggtgggatctatatt

SEQ ID NO: 1014264 - DNA, 15 bp, Homo sapiens
gggtgggatctatat

SEQ ID NO: 1014265 - DNA, 15 bp, Homo sapiens
ggggtgggatctata

SEQ ID NO: 1014266 - DNA, 15 bp, Homo sapiens
aggggtgggatctat

SEQ ID NO: 1014267 - DNA, 15 bp, Homo sapiens
caggggtgggatcta

SEQ ID NO: 1014268 - DNA, 15 bp, Homo sapiens
ccaggggtgggatct

SEQ ID NO: 1014269 - DNA, 15 bp, Homo sapiens
cccaggggtgggatc

SEQ ID NO: 1014270 - DNA, 15 bp, Homo sapiens
acccaggggtgggat

SEQ ID NO: 1014271 - DNA, 15 bp, Homo sapiens
cacccaggggtggga

SEQ ID NO: 1014272 - DNA, 15 bp, Homo sapiens
ccacccaggggtggg

SEQ ID NO: 1014273 - DNA, 15 bp, Homo sapiens
cccacccaggggtgg

SEQ ID NO: 1014274 - DNA, 15 bp, Homo sapiens
tcccacccaggggtg

SEQ ID NO: 1014275 - DNA, 15 bp, Homo sapiens
ctcccacccaggggt

SEQ ID NO: 1014276 - DNA, 15 bp, Homo sapiens
cctcccacccagggg

SEQ ID NO: 1014277 - DNA, 15 bp, Homo sapiens
tcctcccacccaggg

SEQ ID NO: 1014278 - DNA, 15 bp, Homo sapiens
ctcctcccacccagg

SEQ ID NO: 1014279 - DNA, 15 bp, Homo sapiens
actcctcccacccag

SEQ ID NO: 1014280 - DNA, 15 bp, Homo sapiens
cactcctcccaccca

SEQ ID NO: 1014281 - DNA, 15 bp, Homo sapiens
acactcctcccaccc

SEQ ID NO: 1014282 - DNA, 15 bp, Homo sapiens
gacactcctcccacc

SEQ ID NO: 1014283 - DNA, 15 bp, Homo sapiens
tgacactcctcccac

SEQ ID NO: 1014284 - DNA, 15 bp, Homo sapiens
ttgacactcctccca

SEQ ID NO: 1014285 - DNA, 15 bp, Homo sapiens
tttgacactcctccc

SEQ ID NO: 1014286 - DNA, 15 bp, Homo sapiens
ctttgacactcctcc

SEQ ID NO: 1014287 - DNA, 15 bp, Homo sapiens
actttgacactcctc

SEQ ID NO: 1014288 - DNA, 15 bp, Homo sapiens
gactttgacactcct

SEQ ID NO: 1014289 - DNA, 15 bp, Homo sapiens
tgactttgacactcc

SEQ ID NO: 1014290 - DNA, 15 bp, Homo sapiens
gtgactttgacactc

SEQ ID NO: 1014291 - DNA, 15 bp, Homo sapiens
agtgactttgacact

SEQ ID NO: 1014292 - DNA, 15 bp, Homo sapiens
tagtgactttgacac

SEQ ID NO: 1014293 - DNA, 15 bp, Homo sapiens
ctagtgactttgaca

SEQ ID NO: 1014294 - DNA, 15 bp, Homo sapiens
cctagtgactttgac

SEQ ID NO: 1014295 - DNA, 15 bp, Homo sapiens
tcctagtgactttga

SEQ ID NO: 1014296 - DNA, 15 bp, Homo sapiens
ttcctagtgactttg

SEQ ID NO: 1014297 - DNA, 15 bp, Homo sapiens
tttcctagtgacttt

SEQ ID NO: 1014298 - DNA, 15 bp, Homo sapiens
ttttcctagtgactt

SEQ ID NO: 1014299 - DNA, 15 bp, Homo sapiens
tttttcctagtgact

SEQ ID NO: 1014300 - DNA, 15 bp, Homo sapiens
ctttttcctagtgac

SEQ ID NO: 1014301 - DNA, 15 bp, Homo sapiens
tctttttcctagtga

SEQ ID NO: 1014302 - DNA, 15 bp, Homo sapiens
gtctttttcctagtg

SEQ ID NO: 1014303 - DNA, 15 bp, Homo sapiens
ggtctttttcctagt

SEQ ID NO: 1014304 - DNA, 15 bp, Homo sapiens
tggtctttttcctag

SEQ ID NO: 1014305 - DNA, 15 bp, Homo sapiens
atggtctttttccta

SEQ ID NO: 1014306 - DNA, 15 bp, Homo sapiens
tatggtctttttcct

SEQ ID NO: 1014307 - DNA, 15 bp, Homo sapiens
ttatggtctttttcc

SEQ ID NO: 1014308 - DNA, 15 bp, Homo sapiens
cttatggtctttttc

SEQ ID NO: 1014309 - DNA, 15 bp, Homo sapiens
ccttatggtcttttt

SEQ ID NO: 1014310 - DNA, 15 bp, Homo sapiens
tccttatggtctttt

SEQ ID NO: 1014311 - DNA, 15 bp, Homo sapiens
ttccttatggtcttt

SEQ ID NO: 1014312 - DNA, 15 bp, Homo sapiens
attccttatggtctt

SEQ ID NO: 1014313 - DNA, 15 bp, Homo sapiens
cattccttatggtct

SEQ ID NO: 1014314 - DNA, 15 bp, Homo sapiens
ccattccttatggtc

SEQ ID NO: 1014315 - DNA, 15 bp, Homo sapiens
tccattccttatggt

SEQ ID NO: 1014316 - DNA, 15 bp, Homo sapiens
ttccattccttatgg

SEQ ID NO: 1014317 - DNA, 15 bp, Homo sapiens
tttccattccttatg

SEQ ID NO: 1014318 - DNA, 15 bp, Homo sapiens
ttttccattccttat

SEQ ID NO: 1014319 - DNA, 15 bp, Homo sapiens
attttccattcctta

SEQ ID NO: 1014320 - DNA, 15 bp, Homo sapiens
tattttccattcctt

SEQ ID NO: 1014321 - DNA, 15 bp, Homo sapiens
atattttccattcct

SEQ ID NO: 1014322 - DNA, 15 bp, Homo sapiens
aatattttccattcc

SEQ ID NO: 1014323 - DNA, 15 bp, Homo sapiens
caatattttccattc

SEQ ID NO: 1014324 - DNA, 15 bp, Homo sapiens
gcaatattttccatt

SEQ ID NO: 1014325 - DNA, 15 bp, Homo sapiens
agcaatattttccat

SEQ ID NO: 1014326 - DNA, 15 bp, Homo sapiens
cagcaatattttcca

SEQ ID NO: 1014327 - DNA, 15 bp, Homo sapiens
gcagcaatattttcc

SEQ ID NO: 1014328 - DNA, 15 bp, Homo sapiens
tgcagcaatattttc

SEQ ID NO: 1014329 - DNA, 15 bp, Homo sapiens
ttgcagcaatatttt

SEQ ID NO: 1014330 - DNA, 15 bp, Homo sapiens
attgcagcaatattt

SEQ ID NO: 1014331 - DNA, 15 bp, Homo sapiens
gattgcagcaatatt

SEQ ID NO: 1014332 - DNA, 15 bp, Homo sapiens
tgattgcagcaatat

SEQ ID NO: 1014333 - DNA, 15 bp, Homo sapiens
ctgattgcagcaata

SEQ ID NO: 1014334 - DNA, 15 bp, Homo sapiens
cctgattgcagcaat

SEQ ID NO: 1014335 - DNA, 15 bp, Homo sapiens
tcctgattgcagcaa

SEQ ID NO: 1014336 - DNA, 15 bp, Homo sapiens
ttcctgattgcagca

SEQ ID NO: 1014337 - DNA, 15 bp, Homo sapiens
tttcctgattgcagc

SEQ ID NO: 1014338 - DNA, 15 bp, Homo sapiens
ttttcctgattgcag

SEQ ID NO: 1014339 - DNA, 15 bp, Homo sapiens
attttcctgattgca

SEQ ID NO: 1014340 - DNA, 15 bp, Homo sapiens
tattttcctgattgc

SEQ ID NO: 1014341 - DNA, 15 bp, Homo sapiens
gtattttcctgattg

SEQ ID NO: 1014342 - DNA, 15 bp, Homo sapiens
tgtattttcctgatt

SEQ ID NO: 1014343 - DNA, 15 bp, Homo sapiens
ttgtattttcctgat

SEQ ID NO: 1014344 - DNA, 15 bp, Homo sapiens
tttgtattttcctga

SEQ ID NO: 1014345 - DNA, 15 bp, Homo sapiens
gtttgtattttcctg

SEQ ID NO: 1014346 - DNA, 15 bp, Homo sapiens
agtttgtattttcct

SEQ ID NO: 1014347 - DNA, 15 bp, Homo sapiens
cagtttgtattttcc

SEQ ID NO: 1014348 - DNA, 15 bp, Homo sapiens
gcagtttgtattttc

SEQ ID NO: 1014349 - DNA, 15 bp, Homo sapiens
ggcagtttgtatttt

SEQ ID NO: 1014350 - DNA, 15 bp, Homo sapiens
tggcagtttgtattt

SEQ ID NO: 1014351 - DNA, 15 bp, Homo sapiens
gtggcagtttgtatt

SEQ ID NO: 1014352 - DNA, 15 bp, Homo sapiens
tgtggcagtttgtat

SEQ ID NO: 1014353 - DNA, 15 bp, Homo sapiens
ttgtggcagtttgta

SEQ ID NO: 1014354 - DNA, 15 bp, Homo sapiens
attgtggcagtttgt

SEQ ID NO: 1014355 - DNA, 15 bp, Homo sapiens
tattgtggcagtttg

SEQ ID NO: 1014356 - DNA, 15 bp, Homo sapiens
ttattgtggcagttt

SEQ ID NO: 1014357 - DNA, 15 bp, Homo sapiens
attattgtggcagtt

SEQ ID NO: 1014358 - DNA, 15 bp, Homo sapiens
gattattgtggcagt

SEQ ID NO: 1014359 - DNA, 15 bp, Homo sapiens
ggattattgtggcag

SEQ ID NO: 1014360 - DNA, 15 bp, Homo sapiens
aggattattgtggca

SEQ ID NO: 1014361 - DNA, 15 bp, Homo sapiens
caggattattgtggc

SEQ ID NO: 1014362 - DNA, 15 bp, Homo sapiens
ccaggattattgtgg

SEQ ID NO: 1014363 - DNA, 15 bp, Homo sapiens
cccaggattattgtg

SEQ ID NO: 1014364 - DNA, 15 bp, Homo sapiens
ccccaggattattgt

SEQ ID NO: 1014365 - DNA, 15 bp, Homo sapiens
cccccaggattattg

SEQ ID NO: 1014366 - DNA, 15 bp, Homo sapiens
gcccccaggattatt

SEQ ID NO: 1014367 - DNA, 15 bp, Homo sapiens
cgcccccaggattat

SEQ ID NO: 1014368 - DNA, 15 bp, Homo sapiens
ccgcccccaggatta

SEQ ID NO: 1014369 - DNA, 15 bp, Homo sapiens
tccgcccccaggatt

SEQ ID NO: 1014370 - DNA, 15 bp, Homo sapiens
ctccgcccccaggat

SEQ ID NO: 1014371 - DNA, 15 bp, Homo sapiens
cctccgcccccagga

SEQ ID NO: 1014372 - DNA, 15 bp, Homo sapiens
gcctccgcccccagg

SEQ ID NO: 1014373 - DNA, 15 bp, Homo sapiens
cgcctccgcccccag

SEQ ID NO: 1014374 - DNA, 15 bp, Homo sapiens
ccgcctccgccccca

SEQ ID NO: 1014375 - DNA, 15 bp, Homo sapiens
cccgcctccgccccc

SEQ ID NO: 1014376 - DNA, 15 bp, Homo sapiens
gcccgcctccgcccc

SEQ ID NO: 1014377 - DNA, 15 bp, Homo sapiens
tgcccgcctccgccc

SEQ ID NO: 1014378 - DNA, 15 bp, Homo sapiens
ttgcccgcctccgcc

SEQ ID NO: 1014379 - DNA, 15 bp, Homo sapiens
cttgcccgcctccgc

SEQ ID NO: 1014380 - DNA, 15 bp, Homo sapiens
ccttgcccgcctccg

SEQ ID NO: 1014381 - DNA, 15 bp, Homo sapiens
cccttgcccgcctcc

SEQ ID NO: 1014382 - DNA, 15 bp, Homo sapiens
tcccttgcccgcctc

SEQ ID NO: 1014383 - DNA, 15 bp, Homo sapiens
ttcccttgcccgcct

SEQ ID NO: 1014384 - DNA, 15 bp, Homo sapiens
tttcccttgcccgcc

SEQ ID NO: 1014385 - DNA, 15 bp, Homo sapiens
ctttcccttgcccgc

SEQ ID NO: 1014386 - DNA, 15 bp, Homo sapiens
tctttcccttgcccg

SEQ ID NO: 1014387 - DNA, 15 bp, Homo sapiens
ctctttcccttgccc

SEQ ID NO: 1014388 - DNA, 15 bp, Homo sapiens
cctctttcccttgcc

SEQ ID NO: 1014389 - DNA, 15 bp, Homo sapiens
tcctctttcccttgc

SEQ ID NO: 1014390 - DNA, 15 bp, Homo sapiens
ctcctctttcccttg

SEQ ID NO: 1014391 - DNA, 15 bp, Homo sapiens
cctcctctttccctt

SEQ ID NO: 1014392 - DNA, 15 bp, Homo sapiens
ccctcctctttccct

SEQ ID NO: 1014393 - DNA, 15 bp, Homo sapiens
accctcctctttccc

SEQ ID NO: 1014394 - DNA, 15 bp, Homo sapiens
aaccctcctctttcc

SEQ ID NO: 1014395 - DNA, 15 bp, Homo sapiens
gaaccctcctctttc

SEQ ID NO: 1014396 - DNA, 15 bp, Homo sapiens
tgaaccctcctcttt

SEQ ID NO: 1014397 - DNA, 15 bp, Homo sapiens
ttgaaccctcctctt

SEQ ID NO: 1014398 - DNA, 15 bp, Homo sapiens
cttgaaccctcctct

SEQ ID NO: 1014399 - DNA, 15 bp, Homo sapiens
ccttgaaccctcctc

SEQ ID NO: 1014400 - DNA, 15 bp, Homo sapiens
tccttgaaccctcct

SEQ ID NO: 1014401 - DNA, 15 bp, Homo sapiens
ttccttgaaccctcc

SEQ ID NO: 1014402 - DNA, 15 bp, Homo sapiens
attccttgaaccctc

SEQ ID NO: 1014403 - DNA, 15 bp, Homo sapiens
aattccttgaaccct

SEQ ID NO: 1014404 - DNA, 15 bp, Homo sapiens
aaattccttgaaccc

SEQ ID NO: 1014405 - DNA, 15 bp, Homo sapiens
gaaattccttgaacc

SEQ ID NO: 1014406 - DNA, 15 bp, Homo sapiens
tgaaattccttgaac

SEQ ID NO: 1014407 - DNA, 15 bp, Homo sapiens
ttgaaattccttgaa

SEQ ID NO: 1014408 - DNA, 15 bp, Homo sapiens
cttgaaattccttga

SEQ ID NO: 1014409 - DNA, 15 bp, Homo sapiens
ccttgaaattccttg

SEQ ID NO: 1014410 - DNA, 15 bp, Homo sapiens
gccttgaaattcctt

SEQ ID NO: 1014411 - DNA, 15 bp, Homo sapiens
agccttgaaattcct

SEQ ID NO: 1014412 - DNA, 15 bp, Homo sapiens
gagccttgaaattcc

SEQ ID NO: 1014413 - DNA, 15 bp, Homo sapiens
tgagccttgaaattc

SEQ ID NO: 1014414 - DNA, 15 bp, Homo sapiens
atgagccttgaaatt

SEQ ID NO: 1014415 - DNA, 15 bp, Homo sapiens
aatgagccttgaaat

SEQ ID NO: 1014416 - DNA, 15 bp, Homo sapiens
taatgagccttgaaa

SEQ ID NO: 1014417 - DNA, 15 bp, Homo sapiens
ataatgagccttgaa

SEQ ID NO: 1014418 - DNA, 15 bp, Homo sapiens
tataatgagccttga

SEQ ID NO: 1014419 - DNA, 15 bp, Homo sapiens
ttataatgagccttg

SEQ ID NO: 1014420 - DNA, 15 bp, Homo sapiens
tttataatgagcctt

SEQ ID NO: 1014421 - DNA, 15 bp, Homo sapiens
ctttataatgagcct

SEQ ID NO: 1014422 - DNA, 15 bp, Homo sapiens
gctttataatgagcc

SEQ ID NO: 1014423 - DNA, 15 bp, Homo sapiens
agctttataatgagc

SEQ ID NO: 1014424 - DNA, 15 bp, Homo sapiens
tagctttataatgag

SEQ ID NO: 1014425 - DNA, 15 bp, Homo sapiens
gtagctttataatga

SEQ ID NO: 1014426 - DNA, 15 bp, Homo sapiens
tgtagctttataatg

SEQ ID NO: 1014427 - DNA, 15 bp, Homo sapiens
ctgtagctttataat

SEQ ID NO: 1014428 - DNA, 15 bp, Homo sapiens
actgtagctttataa

SEQ ID NO: 1014429 - DNA, 15 bp, Homo sapiens
tactgtagctttata

SEQ ID NO: 1014430 - DNA, 15 bp, Homo sapiens
atactgtagctttat

SEQ ID NO: 1014431 - DNA, 15 bp, Homo sapiens
tatactgtagcttta

SEQ ID NO: 1014432 - DNA, 15 bp, Homo sapiens
ttatactgtagcttt

SEQ ID NO: 1014433 - DNA, 15 bp, Homo sapiens
attatactgtagctt

SEQ ID NO: 1014434 - DNA, 15 bp, Homo sapiens
tattatactgtagct

SEQ ID NO: 1014435 - DNA, 15 bp, Homo sapiens
atattatactgtagc

SEQ ID NO: 1014436 - DNA, 15 bp, Homo sapiens
tatattatactgtag

SEQ ID NO: 1014437 - DNA, 15 bp, Homo sapiens
gtatattatactgta

SEQ ID NO: 1014438 - DNA, 15 bp, Homo sapiens
tgtatattatactgt

SEQ ID NO: 1014439 - DNA, 15 bp, Homo sapiens
ttgtatattatactg

SEQ ID NO: 1014440 - DNA, 15 bp, Homo sapiens
gttgtatattatact

SEQ ID NO: 1014441 - DNA, 15 bp, Homo sapiens
agttgtatattatac

SEQ ID NO: 1014442 - DNA, 15 bp, Homo sapiens
tagttgtatattata

SEQ ID NO: 1014443 - DNA, 15 bp, Homo sapiens
atagttgtatattat

SEQ ID NO: 1014444 - DNA, 15 bp, Homo sapiens
gatagttgtatatta

SEQ ID NO: 1014445 - DNA, 15 bp, Homo sapiens
agatagttgtatatt

SEQ ID NO: 1014446 - DNA, 15 bp, Homo sapiens
aagatagttgtatat

SEQ ID NO: 1014447 - DNA, 15 bp, Homo sapiens
taagatagttgtata

SEQ ID NO: 1014448 - DNA, 15 bp, Homo sapiens
ttaagatagttgtat

SEQ ID NO: 1014449 - DNA, 15 bp, Homo sapiens
attaagatagttgta

SEQ ID NO: 1014450 - DNA, 15 bp, Homo sapiens
aattaagatagttgt

SEQ ID NO: 1014451 - DNA, 15 bp, Homo sapiens
aaattaagatagttg

SEQ ID NO: 1014452 - DNA, 15 bp, Homo sapiens
gaaattaagatagtt

SEQ ID NO: 1014453 - DNA, 15 bp, Homo sapiens
tgaaattaagatagt

SEQ ID NO: 1014454 - DNA, 15 bp, Homo sapiens
ttgaaattaagatag

SEQ ID NO: 1014455 - DNA, 15 bp, Homo sapiens
cttgaaattaagata

SEQ ID NO: 1014456 - DNA, 15 bp, Homo sapiens
ccttgaaattaagat

SEQ ID NO: 1014457 - DNA, 15 bp, Homo sapiens
gccttgaaattaaga

SEQ ID NO: 1014458 - DNA, 15 bp, Homo sapiens
agccttgaaattaag

SEQ ID NO: 1014459 - DNA, 15 bp, Homo sapiens
aagccttgaaattaa

SEQ ID NO: 1014460 - DNA, 15 bp, Homo sapiens
taagccttgaaatta

SEQ ID NO: 1014461 - DNA, 15 bp, Homo sapiens
ataagccttgaaatt

SEQ ID NO: 1014462 - DNA, 15 bp, Homo sapiens
tataagccttgaaat

SEQ ID NO: 1014463 - DNA, 15 bp, Homo sapiens
ttataagccttgaaa

SEQ ID NO: 1014464 - DNA, 15 bp, Homo sapiens
tttataagccttgaa

SEQ ID NO: 1014465 - DNA, 15 bp, Homo sapiens
ctttataagccttga

SEQ ID NO: 1014466 - DNA, 15 bp, Homo sapiens
gctttataagccttg

SEQ ID NO: 1014467 - DNA, 15 bp, Homo sapiens
tgctttataagcctt

SEQ ID NO: 1014468 - DNA, 15 bp, Homo sapiens
ttgctttataagcct

SEQ ID NO: 1014469 - DNA, 15 bp, Homo sapiens
attgctttataagcc

SEQ ID NO: 1014470 - DNA, 15 bp, Homo sapiens
cattgctttataagc

SEQ ID NO: 1014471 - DNA, 15 bp, Homo sapiens
tcattgctttataag

SEQ ID NO: 1014472 - DNA, 15 bp, Homo sapiens
gtcattgctttataa

SEQ ID NO: 1014473 - DNA, 15 bp, Homo sapiens
tgtcattgctttata

SEQ ID NO: 1014474 - DNA, 15 bp, Homo sapiens
atgtcattgctttat

SEQ ID NO: 1014475 - DNA, 15 bp, Homo sapiens
aatgtcattgcttta

SEQ ID NO: 1014476 - DNA, 15 bp, Homo sapiens
gaatgtcattgcttt

SEQ ID NO: 1014477 - DNA, 15 bp, Homo sapiens
tgaatgtcattgctt

SEQ ID NO: 1014478 - DNA, 15 bp, Homo sapiens
ttgaatgtcattgct

SEQ ID NO: 1014479 - DNA, 15 bp, Homo sapiens
gttgaatgtcattgc

SEQ ID NO: 1014480 - DNA, 15 bp, Homo sapiens
tgttgaatgtcattg

SEQ ID NO: 1014481 - DNA, 15 bp, Homo sapiens
gtgttgaatgtcatt

SEQ ID NO: 1014482 - DNA, 15 bp, Homo sapiens
agtgttgaatgtcat

SEQ ID NO: 1014483 - DNA, 15 bp, Homo sapiens
cagtgttgaatgtca

SEQ ID NO: 1014484 - DNA, 15 bp, Homo sapiens
acagtgttgaatgtc

SEQ ID NO: 1014485 - DNA, 15 bp, Homo sapiens
gacagtgttgaatgt

SEQ ID NO: 1014486 - DNA, 15 bp, Homo sapiens
tgacagtgttgaatg

SEQ ID NO: 1014487 - DNA, 15 bp, Homo sapiens
ttgacagtgttgaat

SEQ ID NO: 1014488 - DNA, 15 bp, Homo sapiens
tttgacagtgttgaa

SEQ ID NO: 1014489 - DNA, 15 bp, Homo sapiens
gtttgacagtgttga

SEQ ID NO: 1014490 - DNA, 15 bp, Homo sapiens
agtttgacagtgttg

SEQ ID NO: 1014491 - DNA, 15 bp, Homo sapiens
cagtttgacagtgtt

SEQ ID NO: 1014492 - DNA, 15 bp, Homo sapiens
tcagtttgacagtgt

SEQ ID NO: 1014493 - DNA, 15 bp, Homo sapiens
gtcagtttgacagtg

SEQ ID NO: 1014494 - DNA, 15 bp, Homo sapiens
ggtcagtttgacagt

SEQ ID NO: 1014495 - DNA, 15 bp, Homo sapiens
gggtcagtttgacag

SEQ ID NO: 1014496 - DNA, 15 bp, Homo sapiens
tgggtcagtttgaca

SEQ ID NO: 1014497 - DNA, 15 bp, Homo sapiens
ttgggtcagtttgac

SEQ ID NO: 1014498 - DNA, 15 bp, Homo sapiens
cttgggtcagtttga

SEQ ID NO: 1014499 - DNA, 15 bp, Homo sapiens
ccttgggtcagtttg

SEQ ID NO: 1014500 - DNA, 15 bp, Homo sapiens
tccttgggtcagttt

SEQ ID NO: 1014501 - DNA, 15 bp, Homo sapiens
atccttgggtcagtt

SEQ ID NO: 1014502 - DNA, 15 bp, Homo sapiens
tatccttgggtcagt

SEQ ID NO: 1014503 - DNA, 15 bp, Homo sapiens
gtatccttgggtcag

SEQ ID NO: 1014504 - DNA, 15 bp, Homo sapiens
ggtatccttgggtca

SEQ ID NO: 1014505 - DNA, 15 bp, Homo sapiens
gggtatccttgggtc

SEQ ID NO: 1014506 - DNA, 15 bp, Homo sapiens
tgggtatccttgggt

SEQ ID NO: 1014507 - DNA, 15 bp, Homo sapiens
ttgggtatccttggg

SEQ ID NO: 1014508 - DNA, 15 bp, Homo sapiens
tatttgggtatcctt

SEQ ID NO: 1014509 - DNA, 15 bp, Homo sapiens
atatttgggtatcct

SEQ ID NO: 1014510 - DNA, 15 bp, Homo sapiens
tatatttgggtatcc

SEQ ID NO: 1014511 - DNA, 15 bp, Homo sapiens
ctatatttgggtatc

SEQ ID NO: 1014512 - DNA, 15 bp, Homo sapiens
gctatatttgggtat

SEQ ID NO: 1014513 - DNA, 15 bp, Homo sapiens
tgctatatttgggta

SEQ ID NO: 1014514 - DNA, 15 bp, Homo sapiens
ttgctatatttgggt

SEQ ID NO: 1014515 - DNA, 15 bp, Homo sapiens
attgctatatttggg

SEQ ID NO: 1014516 - DNA, 15 bp, Homo sapiens
cattgctatatttgg

SEQ ID NO: 1014517 - DNA, 15 bp, Homo sapiens
ccattgctatatttg

SEQ ID NO: 1014518 - DNA, 15 bp, Homo sapiens
tccattgctatattt

SEQ ID NO: 1014519 - DNA, 15 bp, Homo sapiens
ttccattgctatatt

SEQ ID NO: 1014520 - DNA, 15 bp, Homo sapiens
cttccattgctatat

SEQ ID NO: 1014521 - DNA, 15 bp, Homo sapiens
tcttccattgctata

SEQ ID NO: 1014522 - DNA, 15 bp, Homo sapiens
ctcttccattgctat

SEQ ID NO: 1014523 - DNA, 15 bp, Homo sapiens
tctcttccattgcta

SEQ ID NO: 1014524 - DNA, 15 bp, Homo sapiens
ttctcttccattgct

SEQ ID NO: 1014525 - DNA, 15 bp, Homo sapiens
attctcttccattgc

SEQ ID NO: 1014526 - DNA, 15 bp, Homo sapiens
gattctcttccattg

SEQ ID NO: 1014527 - DNA, 15 bp, Homo sapiens
ggattctcttccatt

SEQ ID NO: 1014528 - DNA, 15 bp, Homo sapiens
tggattctcttccat

SEQ ID NO: 1014529 - DNA, 15 bp, Homo sapiens
ctggattctcttcca

SEQ ID NO: 1014530 - DNA, 15 bp, Homo sapiens
tctggattctcttcc

SEQ ID NO: 1014531 - DNA, 15 bp, Homo sapiens
ttctggattctcttc

SEQ ID NO: 1014532 - DNA, 15 bp, Homo sapiens
attctggattctctt

SEQ ID NO: 1014533 - DNA, 15 bp, Homo sapiens
gattctggattctct

SEQ ID NO: 1014534 - DNA, 15 bp, Homo sapiens
ggattctggattctc

SEQ ID NO: 1014535 - DNA, 15 bp, Homo sapiens
tggattctggattct

SEQ ID NO: 1014536 - DNA, 15 bp, Homo sapiens
ctggattctggattc

SEQ ID NO: 1014537 - DNA, 15 bp, Homo sapiens
tctggattctggatt

SEQ ID NO: 1014538 - DNA, 15 bp, Homo sapiens
ttctggattctggat

SEQ ID NO: 1014539 - DNA, 15 bp, Homo sapiens
tttctggattctgga

SEQ ID NO: 1014540 - DNA, 15 bp, Homo sapiens
atttctggattctgg

SEQ ID NO: 1014541 - DNA, 15 bp, Homo sapiens
tatttctggattctg

SEQ ID NO: 1014542 - DNA, 15 bp, Homo sapiens
ctatttctggattct

SEQ ID NO: 1014543 - DNA, 15 bp, Homo sapiens
tctatttctggattc

SEQ ID NO: 1014544 - DNA, 15 bp, Homo sapiens
atctatttctggatt

SEQ ID NO: 1014545 - DNA, 15 bp, Homo sapiens
gatctatttctggat

SEQ ID NO: 1014546 - DNA, 15 bp, Homo sapiens
ggatctatttctgga

SEQ ID NO: 1014547 - DNA, 15 bp, Homo sapiens
tggatctatttctgg

SEQ ID NO: 1014548 - DNA, 15 bp, Homo sapiens
gtggatctatttctg

SEQ ID NO: 1014549 - DNA, 15 bp, Homo sapiens
tgtggatctatttct

SEQ ID NO: 1014550 - DNA, 15 bp, Homo sapiens
gtgtggatctatttc

SEQ ID NO: 1014551 - DNA, 15 bp, Homo sapiens
tgtgtggatctattt

SEQ ID NO: 1014552 - DNA, 15 bp, Homo sapiens
atgtgtggatctatt

SEQ ID NO: 1014553 - DNA, 15 bp, Homo sapiens
tatgtgtggatctat

SEQ ID NO: 1014554 - DNA, 15 bp, Homo sapiens
atatgtgtggatcta

SEQ ID NO: 1014555 - DNA, 15 bp, Homo sapiens
tatatgtgtggatct

SEQ ID NO: 1014556 - DNA, 15 bp, Homo sapiens
ctatatgtgtggatc

SEQ ID NO: 1014557 - DNA, 15 bp, Homo sapiens
actatatgtgtggat

SEQ ID NO: 1014558 - DNA, 15 bp, Homo sapiens
gactatatgtgtgga

SEQ ID NO: 1014559 - DNA, 15 bp, Homo sapiens
tgactatatgtgtgg

SEQ ID NO: 1014560 - DNA, 15 bp, Homo sapiens
atgactatatgtgtg

SEQ ID NO: 1014561 - DNA, 15 bp, Homo sapiens
aatgactatatgtgt

SEQ ID NO: 1014562 - DNA, 15 bp, Homo sapiens
aaatgactatatgtg

SEQ ID NO: 1014563 - DNA, 15 bp, Homo sapiens
caaatgactatatgt

SEQ ID NO: 1014564 - DNA, 15 bp, Homo sapiens
tcaaatgactatatg

SEQ ID NO: 1014565 - DNA, 15 bp, Homo sapiens
atcaaatgactatat

SEQ ID NO: 1014566 - DNA, 15 bp, Homo sapiens
aatcaaatgactata

SEQ ID NO: 1014567 - DNA, 15 bp, Homo sapiens
aaatcaaatgactat

SEQ ID NO: 1014568 - DNA, 15 bp, Homo sapiens
aaaatcaaatgacta

SEQ ID NO: 1014569 - DNA, 15 bp, Homo sapiens
aaaaatcaaatgact

SEQ ID NO: 1014570 - DNA, 15 bp, Homo sapiens
taaaaatcaaatgac

SEQ ID NO: 1014571 - DNA, 15 bp, Homo sapiens
ttaaaaatcaaatga

SEQ ID NO: 1014572 - DNA, 15 bp, Homo sapiens
attaaaaatcaaatg

SEQ ID NO: 1014573 - DNA, 15 bp, Homo sapiens
tattaaaaatcaaat

SEQ ID NO: 1014574 - DNA, 15 bp, Homo sapiens
ttattaaaaatcaaa

SEQ ID NO: 1014575 - DNA, 15 bp, Homo sapiens
gttattaaaaatcaa

SEQ ID NO: 1014576 - DNA, 15 bp, Homo sapiens
agttattaaaaatca

SEQ ID NO: 1014577 - DNA, 15 bp, Homo sapiens
aagttattaaaaatc

SEQ ID NO: 1014578 - DNA, 15 bp, Homo sapiens
taagttattaaaaat

SEQ ID NO: 1014579 - DNA, 15 bp, Homo sapiens
ctaagttattaaaaa

SEQ ID NO: 1014580 - DNA, 15 bp, Homo sapiens
gctaagttattaaaa

SEQ ID NO: 1014581 - DNA, 15 bp, Homo sapiens
tgctaagttattaaa

SEQ ID NO: 1014582 - DNA, 15 bp, Homo sapiens
gtgctaagttattaa

SEQ ID NO: 1014583 - DNA, 15 bp, Homo sapiens
ggtgctaagttatta

SEQ ID NO: 1014584 - DNA, 15 bp, Homo sapiens
tggtgctaagttatt

SEQ ID NO: 1014585 - DNA, 15 bp, Homo sapiens
ttggtgctaagttat

SEQ ID NO: 1014586 - DNA, 15 bp, Homo sapiens
cttggtgctaagtta

SEQ ID NO: 1014587 - DNA, 15 bp, Homo sapiens
ccttggtgctaagtt

SEQ ID NO: 1014588 - DNA, 15 bp, Homo sapiens
accttggtgctaagt

SEQ ID NO: 1014589 - DNA, 15 bp, Homo sapiens
taccttggtgctaag

SEQ ID NO: 1014590 - DNA, 15 bp, Homo sapiens
ttaccttggtgctaa

SEQ ID NO: 1014591 - DNA, 15 bp, Homo sapiens
gttaccttggtgcta

SEQ ID NO: 1014592 - DNA, 15 bp, Homo sapiens
agttaccttggtgct

SEQ ID NO: 1014593 - DNA, 15 bp, Homo sapiens
gagttaccttggtgc

SEQ ID NO: 1014594 - DNA, 15 bp, Homo sapiens
tgagttaccttggtg

SEQ ID NO: 1014595 - DNA, 15 bp, Homo sapiens
ttgagttaccttggt

SEQ ID NO: 1014596 - DNA, 15 bp, Homo sapiens
attgagttaccttgg

SEQ ID NO: 1014597 - DNA, 15 bp, Homo sapiens
cattgagttaccttg

SEQ ID NO: 1014598 - DNA, 15 bp, Homo sapiens
tcattgagttacctt

SEQ ID NO: 1014599 - DNA, 15 bp, Homo sapiens
ttcattgagttacct

SEQ ID NO: 1014600 - DNA, 15 bp, Homo sapiens
cttcattgagttacc

SEQ ID NO: 1014601 - DNA, 15 bp, Homo sapiens
ccttcattgagttac

SEQ ID NO: 1014602 - DNA, 15 bp, Homo sapiens
tccttcattgagtta

SEQ ID NO: 1014603 - DNA, 15 bp, Homo sapiens
ttccttcattgagtt

SEQ ID NO: 1014604 - DNA, 15 bp, Homo sapiens
tttccttcattgagt

SEQ ID NO: 1014605 - DNA, 15 bp, Homo sapiens
gtttccttcattgag

SEQ ID NO: 1014606 - DNA, 15 bp, Homo sapiens
tgtttccttcattga

SEQ ID NO: 1014607 - DNA, 15 bp, Homo sapiens
ttgtttccttcattg

SEQ ID NO: 1014608 - DNA, 15 bp, Homo sapiens
gttgtttccttcatt

SEQ ID NO: 1014609 - DNA, 15 bp, Homo sapiens
tgttgtttccttcat

SEQ ID NO: 1014610 - DNA, 15 bp, Homo sapiens
ttgttgtttccttca

SEQ ID NO: 1014611 - DNA, 15 bp, Homo sapiens
tttgttgtttccttc

SEQ ID NO: 1014612 - DNA, 15 bp, Homo sapiens
atttgttgtttcctt

SEQ ID NO: 1014613 - DNA, 15 bp, Homo sapiens
catttgttgtttcct

SEQ ID NO: 1014614 - DNA, 15 bp, Homo sapiens
tcatttgttgtttcc

SEQ ID NO: 1014615 - DNA, 15 bp, Homo sapiens
atcatttgttgtttc

SEQ ID NO: 1014616 - DNA, 15 bp, Homo sapiens
catcatttgttgttt

SEQ ID NO: 1014617 - DNA, 15 bp, Homo sapiens
acatcatttgttgtt

SEQ ID NO: 1014618 - DNA, 15 bp, Homo sapiens
aacatcatttgttgt

SEQ ID NO: 1014619 - DNA, 15 bp, Homo sapiens
taacatcatttgttg

SEQ ID NO: 1014620 - DNA, 15 bp, Homo sapiens
ctaacatcatttgtt

SEQ ID NO: 1014621 - DNA, 15 bp, Homo sapiens
tctaacatcatttgt

SEQ ID NO: 1014622 - DNA, 15 bp, Homo sapiens
ttctaacatcatttg

SEQ ID NO: 1014623 - DNA, 15 bp, Homo sapiens
gttctaacatcattt

SEQ ID NO: 1014624 - DNA, 15 bp, Homo sapiens
agttctaacatcatt

SEQ ID NO: 1014625 - DNA, 15 bp, Homo sapiens
tagttctaacatcat

SEQ ID NO: 1014626 - DNA, 15 bp, Homo sapiens
gtagttctaacatca

SEQ ID NO: 1014627 - DNA, 15 bp, Homo sapiens
agtagttctaacatc

SEQ ID NO: 1014628 - DNA, 15 bp, Homo sapiens
tagtagttctaacat

SEQ ID NO: 1014629 - DNA, 15 bp, Homo sapiens
atagtagttctaaca

SEQ ID NO: 1014630 - DNA, 15 bp, Homo sapiens
tatagtagttctaac

SEQ ID NO: 1014631 - DNA, 15 bp, Homo sapiens
atatagtagttctaa

SEQ ID NO: 1014632 - DNA, 15 bp, Homo sapiens
tatatagtagttcta

SEQ ID NO: 1014633 - DNA, 15 bp, Homo sapiens
atatatagtagttct

SEQ ID NO: 1014634 - DNA, 15 bp, Homo sapiens
aatatatagtagttc

SEQ ID NO: 1014635 - DNA, 15 bp, Homo sapiens
aaatatatagtagtt

SEQ ID NO: 1014636 - DNA, 15 bp, Homo sapiens
caaatatatagtagt

SEQ ID NO: 1014637 - DNA, 15 bp, Homo sapiens
acaaatatatagtag

SEQ ID NO: 1014638 - DNA, 15 bp, Homo sapiens
cacaaatatatagta

SEQ ID NO: 1014639 - DNA, 15 bp, Homo sapiens
acacaaatatatagt

SEQ ID NO: 1014640 - DNA, 15 bp, Homo sapiens
aacacaaatatatag

SEQ ID NO: 1014641 - DNA, 15 bp, Homo sapiens
aaacacaaatatata

SEQ ID NO: 1014642 - DNA, 15 bp, Homo sapiens
gaaacacaaatatat

SEQ ID NO: 1014643 - DNA, 15 bp, Homo sapiens
tgaaacacaaatata

SEQ ID NO: 1014644 - DNA, 15 bp, Homo sapiens
ttgaaacacaaatat

SEQ ID NO: 1014645 - DNA, 15 bp, Homo sapiens
tttgaaacacaaata

SEQ ID NO: 1014646 - DNA, 15 bp, Homo sapiens
ttttgaaacacaaat

SEQ ID NO: 1014647 - DNA, 15 bp, Homo sapiens
tttttgaaacacaaa

SEQ ID NO: 1014648 - DNA, 15 bp, Homo sapiens
ttttttgaaacacaa

SEQ ID NO: 1014649 - DNA, 15 bp, Homo sapiens
tttttttgaaacaca

SEQ ID NO: 1014650 - DNA, 15 bp, Homo sapiens
ttttttttgaaacac

SEQ ID NO: 1014651 - DNA, 15 bp, Homo sapiens
gttttttttgaaaca

SEQ ID NO: 1014652 - DNA, 15 bp, Homo sapiens
agttttttttgaaac

SEQ ID NO: 1014653 - DNA, 15 bp, Homo sapiens
tagttttttttgaaa

SEQ ID NO: 1014654 - DNA, 15 bp, Homo sapiens
gtagttttttttgaa

SEQ ID NO: 1014655 - DNA, 15 bp, Homo sapiens
agtagttttttttga

SEQ ID NO: 1014656 - DNA, 15 bp, Homo sapiens
gagtagttttttttg

SEQ ID NO: 1014657 - DNA, 15 bp, Homo sapiens
agagtagtttttttt

SEQ ID NO: 1014658 - DNA, 15 bp, Homo sapiens
gagagtagttttttt

SEQ ID NO: 1014659 - DNA, 15 bp, Homo sapiens
tgagagtagtttttt

SEQ ID NO: 1014660 - DNA, 15 bp, Homo sapiens
ttgagagtagttttt

SEQ ID NO: 1014661 - DNA, 15 bp, Homo sapiens
gttgagagtagtttt

SEQ ID NO: 1014662 - DNA, 15 bp, Homo sapiens
ggttgagagtagttt

SEQ ID NO: 1014663 - DNA, 15 bp, Homo sapiens
aggttgagagtagtt

SEQ ID NO: 1014664 - DNA, 15 bp, Homo sapiens
gaggttgagagtagt

SEQ ID NO: 1014665 - DNA, 15 bp, Homo sapiens
agaggttgagagtag

SEQ ID NO: 1014666 - DNA, 15 bp, Homo sapiens
tagaggttgagagta

SEQ ID NO: 1014667 - DNA, 15 bp, Homo sapiens
gtagaggttgagagt

SEQ ID NO: 1014668 - DNA, 15 bp, Homo sapiens
ggtagaggttgagag

SEQ ID NO: 1014669 - DNA, 15 bp, Homo sapiens
aggtagaggttgaga

SEQ ID NO: 1014670 - DNA, 15 bp, Homo sapiens
aaggtagaggttgag

SEQ ID NO: 1014671 - DNA, 15 bp, Homo sapiens
taaggtagaggttga

SEQ ID NO: 1014672 - DNA, 15 bp, Homo sapiens
ttaaggtagaggttg

SEQ ID NO: 1014673 - DNA, 15 bp, Homo sapiens
tttaaggtagaggtt

SEQ ID NO: 1014674 - DNA, 15 bp, Homo sapiens
gtttaaggtagaggt

SEQ ID NO: 1014675 - DNA, 15 bp, Homo sapiens
ggtttaaggtagagg

SEQ ID NO: 1014676 - DNA, 15 bp, Homo sapiens
tggtttaaggtagag

SEQ ID NO: 1014677 - DNA, 15 bp, Homo sapiens
atggtttaaggtaga

SEQ ID NO: 1014678 - DNA, 15 bp, Homo sapiens
tatggtttaaggtag

SEQ ID NO: 1014679 - DNA, 15 bp, Homo sapiens
gtatggtttaaggta

SEQ ID NO: 1014680 - DNA, 15 bp, Homo sapiens
tgtatggtttaaggt

SEQ ID NO: 1014681 - DNA, 15 bp, Homo sapiens
gtgtatggtttaagg

SEQ ID NO: 1014682 - DNA, 15 bp, Homo sapiens
tgtgtatggtttaag

SEQ ID NO: 1014683 - DNA, 15 bp, Homo sapiens
ttgtgtatggtttaa

SEQ ID NO: 1014684 - DNA, 15 bp, Homo sapiens
tttgtgtatggttta

SEQ ID NO: 1014685 - DNA, 15 bp, Homo sapiens
ttttgtgtatggttt

SEQ ID NO: 1014686 - DNA, 15 bp, Homo sapiens
attttgtgtatggtt

SEQ ID NO: 1014687 - DNA, 15 bp, Homo sapiens
tattttgtgtatggt

SEQ ID NO: 1014688 - DNA, 15 bp, Homo sapiens
atattttgtgtatgg

SEQ ID NO: 1014689 - DNA, 15 bp, Homo sapiens
tatattttgtgtatg

SEQ ID NO: 1014690 - DNA, 15 bp, Homo sapiens
ttatattttgtgtat

SEQ ID NO: 1014691 - DNA, 15 bp, Homo sapiens
attatattttgtgta

SEQ ID NO: 1014692 - DNA, 15 bp, Homo sapiens
aattatattttgtgt

SEQ ID NO: 1014693 - DNA, 15 bp, Homo sapiens
gaattatattttgtg

SEQ ID NO: 1014694 - DNA, 15 bp, Homo sapiens
tgaattatattttgt

SEQ ID NO: 1014695 - DNA, 15 bp, Homo sapiens
ttgaattatattttg

SEQ ID NO: 1014696 - DNA, 15 bp, Homo sapiens
cttgaattatatttt

SEQ ID NO: 1014697 - DNA, 15 bp, Homo sapiens
tcttgaattatattt

SEQ ID NO: 1014698 - DNA, 15 bp, Homo sapiens
ttcttgaattatatt

SEQ ID NO: 1014699 - DNA, 15 bp, Homo sapiens
attcttgaattatat

SEQ ID NO: 1014700 - DNA, 15 bp, Homo sapiens
aattcttgaattata

SEQ ID NO: 1014701 - DNA, 15 bp, Homo sapiens
gaattcttgaattat

SEQ ID NO: 1014702 - DNA, 15 bp, Homo sapiens
tgaattcttgaatta

SEQ ID NO: 1014703 - DNA, 15 bp, Homo sapiens
atgaattcttgaatt

SEQ ID NO: 1014704 - DNA, 15 bp, Homo sapiens
aatgaattcttgaat

SEQ ID NO: 1014705 - DNA, 15 bp, Homo sapiens
gaatgaattcttgaa

SEQ ID NO: 1014706 - DNA, 15 bp, Homo sapiens
tgaatgaattcttga

SEQ ID NO: 1014707 - DNA, 15 bp, Homo sapiens
ctgaatgaattcttg

SEQ ID NO: 1014708 - DNA, 15 bp, Homo sapiens
cctgaatgaattctt

SEQ ID NO: 1014709 - DNA, 15 bp, Homo sapiens
tcctgaatgaattct

SEQ ID NO: 1014710 - DNA, 15 bp, Homo sapiens
atcctgaatgaattc

SEQ ID NO: 1014711 - DNA, 15 bp, Homo sapiens
tatcctgaatgaatt

SEQ ID NO: 1014712 - DNA, 15 bp, Homo sapiens
gtatcctgaatgaat

SEQ ID NO: 1014713 - DNA, 15 bp, Homo sapiens
tgtatcctgaatgaa

SEQ ID NO: 1014714 - DNA, 15 bp, Homo sapiens
atgtatcctgaatga

SEQ ID NO: 1014715 - DNA, 15 bp, Homo sapiens
gatgtatcctgaatg

SEQ ID NO: 1014716 - DNA, 15 bp, Homo sapiens
tgatgtatcctgaat

SEQ ID NO: 1014717 - DNA, 15 bp, Homo sapiens
gtgatgtatcctgaa

SEQ ID NO: 1014718 - DNA, 15 bp, Homo sapiens
tgtgatgtatcctga

SEQ ID NO: 1014719 - DNA, 15 bp, Homo sapiens
ctgtgatgtatcctg

SEQ ID NO: 1014720 - DNA, 15 bp, Homo sapiens
tctgtgatgtatcct

SEQ ID NO: 1014721 - DNA, 15 bp, Homo sapiens
gtctgtgatgtatcc

SEQ ID NO: 1014722 - DNA, 15 bp, Homo sapiens
cgtctgtgatgtatc

SEQ ID NO: 1014723 - DNA, 15 bp, Homo sapiens
gcgtctgtgatgtat

SEQ ID NO: 1014724 - DNA, 15 bp, Homo sapiens
ggcgtctgtgatgta

SEQ ID NO: 1014725 - DNA, 15 bp, Homo sapiens
gggcgtctgtgatgt

SEQ ID NO: 1014726 - DNA, 15 bp, Homo sapiens
tgggcgtctgtgatg

SEQ ID NO: 1014727 - DNA, 15 bp, Homo sapiens
atgggcgtctgtgat

SEQ ID NO: 1014728 - DNA, 15 bp, Homo sapiens
aatgggcgtctgtga

SEQ ID NO: 1014729 - DNA, 15 bp, Homo sapiens
aaatgggcgtctgtg

SEQ ID NO: 1014730 - DNA, 15 bp, Homo sapiens
taaatgggcgtctgt

SEQ ID NO: 1014731 - DNA, 15 bp, Homo sapiens
ctaaatgggcgtctg

SEQ ID NO: 1014732 - DNA, 15 bp, Homo sapiens
gctaaatgggcgtct

SEQ ID NO: 1014733 - DNA, 15 bp, Homo sapiens
tgctaaatgggcgtc

SEQ ID NO: 1014734 - DNA, 15 bp, Homo sapiens
ctgctaaatgggcgt

SEQ ID NO: 1014735 - DNA, 15 bp, Homo sapiens
tctgctaaatgggcg

SEQ ID NO: 1014736 - DNA, 15 bp, Homo sapiens
ttctgctaaatgggc

SEQ ID NO: 1014737 - DNA, 15 bp, Homo sapiens
gttctgctaaatggg

SEQ ID NO: 1014738 - DNA, 15 bp, Homo sapiens
tgttctgctaaatgg

SEQ ID NO: 1014739 - DNA, 15 bp, Homo sapiens
ttgttctgctaaatg

SEQ ID NO: 1014740 - DNA, 15 bp, Homo sapiens
tttgttctgctaaat

SEQ ID NO: 1014741 - DNA, 15 bp, Homo sapiens
ttttgttctgctaaa

SEQ ID NO: 1014742 - DNA, 15 bp, Homo sapiens
catattttgttctgc

SEQ ID NO: 1014743 - DNA, 15 bp, Homo sapiens
ccatattttgttctg

SEQ ID NO: 1014744 - DNA, 15 bp, Homo sapiens
tccatattttgttct

SEQ ID NO: 1014745 - DNA, 15 bp, Homo sapiens
atccatattttgttc

SEQ ID NO: 1014746 - DNA, 15 bp, Homo sapiens
catccatattttgtt

SEQ ID NO: 1014747 - DNA, 15 bp, Homo sapiens
acatccatattttgt

SEQ ID NO: 1014748 - DNA, 15 bp, Homo sapiens
gacatccatattttg

SEQ ID NO: 1014749 - DNA, 15 bp, Homo sapiens
agacatccatatttt

SEQ ID NO: 1014750 - DNA, 15 bp, Homo sapiens
cagacatccatattt

SEQ ID NO: 1014751 - DNA, 15 bp, Homo sapiens
tcagacatccatatt

SEQ ID NO: 1014752 - DNA, 15 bp, Homo sapiens
ctcagacatccatat

SEQ ID NO: 1014753 - DNA, 15 bp, Homo sapiens
actcagacatccata

SEQ ID NO: 1014754 - DNA, 15 bp, Homo sapiens
tactcagacatccat

SEQ ID NO: 1014755 - DNA, 15 bp, Homo sapiens
gtactcagacatcca

SEQ ID NO: 1014756 - DNA, 15 bp, Homo sapiens
ggtactcagacatcc

SEQ ID NO: 1014757 - DNA, 15 bp, Homo sapiens
aggtactcagacatc

SEQ ID NO: 1014758 - DNA, 15 bp, Homo sapiens
caggtactcagacat

SEQ ID NO: 1014759 - DNA, 15 bp, Homo sapiens
ccaggtactcagaca

SEQ ID NO: 1014760 - DNA, 15 bp, Homo sapiens
cccaggtactcagac

SEQ ID NO: 1014761 - DNA, 15 bp, Homo sapiens
acccaggtactcaga

SEQ ID NO: 1014762 - DNA, 15 bp, Homo sapiens
tacccaggtactcag

SEQ ID NO: 1014763 - DNA, 15 bp, Homo sapiens
gtacccaggtactca

SEQ ID NO: 1014764 - DNA, 15 bp, Homo sapiens
agtacccaggtactc

SEQ ID NO: 1014765 - DNA, 15 bp, Homo sapiens
gagtacccaggtact

SEQ ID NO: 1014766 - DNA, 15 bp, Homo sapiens
ggagtacccaggtac

SEQ ID NO: 1014767 - DNA, 15 bp, Homo sapiens
tggagtacccaggta

SEQ ID NO: 1014768 - DNA, 15 bp, Homo sapiens
atggagtacccaggt

SEQ ID NO: 1014769 - DNA, 15 bp, Homo sapiens
catggagtacccagg

SEQ ID NO: 1014770 - DNA, 15 bp, Homo sapiens
ccatggagtacccag

SEQ ID NO: 1014771 - DNA, 15 bp, Homo sapiens
gccatggagtaccca

SEQ ID NO: 1014772 - DNA, 15 bp, Homo sapiens
ggccatggagtaccc

SEQ ID NO: 1014773 - DNA, 15 bp, Homo sapiens
aggccatggagtacc

SEQ ID NO: 1014774 - DNA, 15 bp, Homo sapiens
gaggccatggagtac

SEQ ID NO: 1014775 - DNA, 15 bp, Homo sapiens
agaggccatggagta

SEQ ID NO: 1014776 - DNA, 15 bp, Homo sapiens
gagaggccatggagt

SEQ ID NO: 1014777 - DNA, 15 bp, Homo sapiens
tgagaggccatggag

SEQ ID NO: 1014778 - DNA, 15 bp, Homo sapiens
ttgagaggccatgga

SEQ ID NO: 1014779 - DNA, 15 bp, Homo sapiens
cttgagaggccatgg

SEQ ID NO: 1014780 - DNA, 15 bp, Homo sapiens
acttgagaggccatg

SEQ ID NO: 1014781 - DNA, 15 bp, Homo sapiens
tacttgagaggccat

SEQ ID NO: 1014782 - DNA, 15 bp, Homo sapiens
ctacttgagaggcca

SEQ ID NO: 1014783 - DNA, 15 bp, Homo sapiens
actacttgagaggcc

SEQ ID NO: 1014784 - DNA, 15 bp, Homo sapiens
aactacttgagaggc

SEQ ID NO: 1014785 - DNA, 15 bp, Homo sapiens
taactacttgagagg

SEQ ID NO: 1014786 - DNA, 15 bp, Homo sapiens
ttaactacttgagag

SEQ ID NO: 1014787 - DNA, 15 bp, Homo sapiens
tttaactacttgaga

SEQ ID NO: 1014788 - DNA, 15 bp, Homo sapiens
atttaactacttgag

SEQ ID NO: 1014789 - DNA, 15 bp, Homo sapiens
tatttaactacttga

SEQ ID NO: 1014790 - DNA, 15 bp, Homo sapiens
ttatttaactacttg

SEQ ID NO: 1014791 - DNA, 15 bp, Homo sapiens
attatttaactactt

SEQ ID NO: 1014792 - DNA, 15 bp, Homo sapiens
aattatttaactact

SEQ ID NO: 1014793 - DNA, 15 bp, Homo sapiens
aaattatttaactac

SEQ ID NO: 1014794 - DNA, 15 bp, Homo sapiens
taaattatttaacta

SEQ ID NO: 1014795 - DNA, 15 bp, Homo sapiens
ataaattatttaact

SEQ ID NO: 1014796 - DNA, 15 bp, Homo sapiens
aataaattatttaac

SEQ ID NO: 1014797 - DNA, 15 bp, Homo sapiens
aaataaattatttaa

SEQ ID NO: 1014798 - DNA, 15 bp, Homo sapiens
aaaataaattattta

SEQ ID NO: 1014799 - DNA, 15 bp, Homo sapiens
aaaaataaattattt

SEQ ID NO: 1014800 - DNA, 15 bp, Homo sapiens
gaaaaataaattatt

SEQ ID NO: 1014801 - DNA, 15 bp, Homo sapiens
agaaaaataaattat

SEQ ID NO: 1014802 - DNA, 15 bp, Homo sapiens
tagaaaaataaatta

SEQ ID NO: 1014803 - DNA, 15 bp, Homo sapiens
ttagaaaaataaatt

SEQ ID NO: 1014804 - DNA, 15 bp, Homo sapiens
attagaaaaataaat

SEQ ID NO: 1014805 - DNA, 15 bp, Homo sapiens
cattagaaaaataaa

SEQ ID NO: 1014806 - DNA, 15 bp, Homo sapiens
acattagaaaaataa

SEQ ID NO: 1014807 - DNA, 15 bp, Homo sapiens
tacattagaaaaata

SEQ ID NO: 1014808 - DNA, 15 bp, Homo sapiens
ttacattagaaaaat

SEQ ID NO: 1014809 - DNA, 15 bp, Homo sapiens
gttacattagaaaaa

SEQ ID NO: 1014810 - DNA, 15 bp, Homo sapiens
tgttacattagaaaa

SEQ ID NO: 1014811 - DNA, 15 bp, Homo sapiens
ttgttacattagaaa

SEQ ID NO: 1014812 - DNA, 15 bp, Homo sapiens
gttgttacattagaa

SEQ ID NO: 1014813 - DNA, 15 bp, Homo sapiens
tgttgttacattaga

SEQ ID NO: 1014814 - DNA, 15 bp, Homo sapiens
ttgttgttacattag

SEQ ID NO: 1014815 - DNA, 15 bp, Homo sapiens
tttgttgttacatta

SEQ ID NO: 1014816 - DNA, 15 bp, Homo sapiens
ttttgttgttacatt

SEQ ID NO: 1014817 - DNA, 15 bp, Homo sapiens
gttttgttgttacat

SEQ ID NO: 1014818 - DNA, 15 bp, Homo sapiens
tgttttgttgttaca

SEQ ID NO: 1014819 - DNA, 15 bp, Homo sapiens
atgttttgttgttac

SEQ ID NO: 1014820 - DNA, 15 bp, Homo sapiens
aatgttttgttgtta

SEQ ID NO: 1014821 - DNA, 15 bp, Homo sapiens
taatgttttgttgtt

SEQ ID NO: 1014822 - DNA, 15 bp, Homo sapiens
gtaatgttttgttgt

SEQ ID NO: 1014823 - DNA, 15 bp, Homo sapiens
tgtaatgttttgttg

SEQ ID NO: 1014824 - DNA, 15 bp, Homo sapiens
ctgtaatgttttgtt

SEQ ID NO: 1014825 - DNA, 15 bp, Homo sapiens
actgtaatgttttgt

SEQ ID NO: 1014826 - DNA, 15 bp, Homo sapiens
aactgtaatgttttg

SEQ ID NO: 1014827 - DNA, 15 bp, Homo sapiens
aaactgtaatgtttt

SEQ ID NO: 1014828 - DNA, 15 bp, Homo sapiens
aaaactgtaatgttt

SEQ ID NO: 1014829 - DNA, 15 bp, Homo sapiens
taaaactgtaatgtt

SEQ ID NO: 1014830 - DNA, 15 bp, Homo sapiens
ttaaaactgtaatgt

SEQ ID NO: 1014831 - DNA, 15 bp, Homo sapiens
gttaaaactgtaatg

SEQ ID NO: 1014832 - DNA, 15 bp, Homo sapiens
cgttaaaactgtaat

SEQ ID NO: 1014833 - DNA, 15 bp, Homo sapiens
acgttaaaactgtaa

SEQ ID NO: 1014834 - DNA, 15 bp, Homo sapiens
tacgttaaaactgta

SEQ ID NO: 1014835 - DNA, 15 bp, Homo sapiens
ttacgttaaaactgt

SEQ ID NO: 1014836 - DNA, 15 bp, Homo sapiens
attacgttaaaactg

SEQ ID NO: 1014837 - DNA, 15 bp, Homo sapiens
aattacgttaaaact

SEQ ID NO: 1014838 - DNA, 15 bp, Homo sapiens
aaattacgttaaaac

SEQ ID NO: 1014839 - DNA, 15 bp, Homo sapiens
caaattacgttaaaa

SEQ ID NO: 1014840 - DNA, 15 bp, Homo sapiens
tcaaattacgttaaa

SEQ ID NO: 1014841 - DNA, 15 bp, Homo sapiens
gtcaaattacgttaa

SEQ ID NO: 1014842 - DNA, 15 bp, Homo sapiens
ggtcaaattacgtta

SEQ ID NO: 1014843 - DNA, 15 bp, Homo sapiens
tggtcaaattacgtt

SEQ ID NO: 1014844 - DNA, 15 bp, Homo sapiens
ttggtcaaattacgt

SEQ ID NO: 1014845 - DNA, 15 bp, Homo sapiens
cttggtcaaattacg

SEQ ID NO: 1014846 - DNA, 15 bp, Homo sapiens
gcttggtcaaattac

SEQ ID NO: 1014847 - DNA, 15 bp, Homo sapiens
ggcttggtcaaatta

SEQ ID NO: 1014848 - DNA, 15 bp, Homo sapiens
gggcttggtcaaatt

SEQ ID NO: 1014849 - DNA, 15 bp, Homo sapiens
ggggcttggtcaaat

SEQ ID NO: 1014850 - DNA, 15 bp, Homo sapiens
aggggcttggtcaaa

SEQ ID NO: 1014851 - DNA, 15 bp, Homo sapiens
aaggggcttggtcaa

SEQ ID NO: 1014852 - DNA, 15 bp, Homo sapiens
taaggggcttggtca

SEQ ID NO: 1014853 - DNA, 15 bp, Homo sapiens
ctaaggggcttggtc

SEQ ID NO: 1014854 - DNA, 15 bp, Homo sapiens
tctaaggggcttggt

SEQ ID NO: 1014855 - DNA, 15 bp, Homo sapiens
atctaaggggcttgg

SEQ ID NO: 1014856 - DNA, 15 bp, Homo sapiens
gatctaaggggcttg

SEQ ID NO: 1014857 - DNA, 15 bp, Homo sapiens
tgatctaaggggctt

SEQ ID NO: 1014858 - DNA, 15 bp, Homo sapiens
ttgatctaaggggct

SEQ ID NO: 1014859 - DNA, 15 bp, Homo sapiens
gttgatctaaggggc

SEQ ID NO: 1014860 - DNA, 15 bp, Homo sapiens
tgttgatctaagggg

SEQ ID NO: 1014861 - DNA, 15 bp, Homo sapiens
ctgttgatctaaggg

SEQ ID NO: 1014862 - DNA, 15 bp, Homo sapiens
cctgttgatctaagg

SEQ ID NO: 1014863 - DNA, 15 bp, Homo sapiens
acctgttgatctaag

SEQ ID NO: 1014864 - DNA, 15 bp, Homo sapiens
cacctgttgatctaa

SEQ ID NO: 1014865 - DNA, 15 bp, Homo sapiens
ccacctgttgatcta

SEQ ID NO: 1014866 - DNA, 15 bp, Homo sapiens
gccacctgttgatct

SEQ ID NO: 1014867 - DNA, 15 bp, Homo sapiens
agccacctgttgatc

SEQ ID NO: 1014868 - DNA, 15 bp, Homo sapiens
gagccacctgttgat

SEQ ID NO: 1014869 - DNA, 15 bp, Homo sapiens
ggagccacctgttga

SEQ ID NO: 1014870 - DNA, 15 bp, Homo sapiens
tggagccacctgttg

SEQ ID NO: 1014871 - DNA, 15 bp, Homo sapiens
gtggagccacctgtt

SEQ ID NO: 1014872 - DNA, 15 bp, Homo sapiens
agtggagccacctgt

SEQ ID NO: 1014873 - DNA, 15 bp, Homo sapiens
cagtggagccacctg

SEQ ID NO: 1014874 - DNA, 15 bp, Homo sapiens
ccagtggagccacct

SEQ ID NO: 1014875 - DNA, 15 bp, Homo sapiens
cccagtggagccacc

SEQ ID NO: 1014876 - DNA, 15 bp, Homo sapiens
ccccagtggagccac

SEQ ID NO: 1014877 - DNA, 15 bp, Homo sapiens
gccccagtggagcca

SEQ ID NO: 1014878 - DNA, 15 bp, Homo sapiens
agccccagtggagcc

SEQ ID NO: 1014879 - DNA, 15 bp, Homo sapiens
cagccccagtggagc

SEQ ID NO: 1014880 - DNA, 15 bp, Homo sapiens
gcagccccagtggag

SEQ ID NO: 1014881 - DNA, 15 bp, Homo sapiens
tgcagccccagtgga

SEQ ID NO: 1014882 - DNA, 15 bp, Homo sapiens
ctgcagccccagtgg

SEQ ID NO: 1014883 - DNA, 15 bp, Homo sapiens
actgcagccccagtg

SEQ ID NO: 1014884 - DNA, 15 bp, Homo sapiens
cactgcagccccagt

SEQ ID NO: 1014885 - DNA, 15 bp, Homo sapiens
tcactgcagccccag

SEQ ID NO: 1014886 - DNA, 15 bp, Homo sapiens
ctcactgcagcccca

SEQ ID NO: 1014887 - DNA, 15 bp, Homo sapiens
acagtggcacaatca

SEQ ID NO: 1014888 - DNA, 15 bp, Homo sapiens
cacagtggcacaatc

SEQ ID NO: 1014889 - DNA, 15 bp, Homo sapiens
gcacagtggcacaat

SEQ ID NO: 1014890 - DNA, 15 bp, Homo sapiens
agcacagtggcacaa

SEQ ID NO: 1014891 - DNA, 15 bp, Homo sapiens
cagcacagtggcaca

SEQ ID NO: 1014892 - DNA, 15 bp, Homo sapiens
acagcacagtggcac

SEQ ID NO: 1014893 - DNA, 15 bp, Homo sapiens
tacagcacagtggca

SEQ ID NO: 1014894 - DNA, 15 bp, Homo sapiens
ctacagcacagtggc

SEQ ID NO: 1014895 - DNA, 15 bp, Homo sapiens
gctacagcacagtgg

SEQ ID NO: 1014896 - DNA, 15 bp, Homo sapiens
ggctacagcacagtg

SEQ ID NO: 1014897 - DNA, 15 bp, Homo sapiens
aggctacagcacagt

SEQ ID NO: 1014898 - DNA, 15 bp, Homo sapiens
caggctacagcacag

SEQ ID NO: 1014899 - DNA, 15 bp, Homo sapiens
tcaggctacagcaca

SEQ ID NO: 1014900 - DNA, 15 bp, Homo sapiens
ttcaggctacagcac

SEQ ID NO: 1014901 - DNA, 15 bp, Homo sapiens
attcaggctacagca

SEQ ID NO: 1014902 - DNA, 15 bp, Homo sapiens
cattcaggctacagc

SEQ ID NO: 1014903 - DNA, 15 bp, Homo sapiens
tcattcaggctacag

SEQ ID NO: 1014904 - DNA, 15 bp, Homo sapiens
gtcattcaggctaca

SEQ ID NO: 1014905 - DNA, 15 bp, Homo sapiens
tgtcattcaggctac

SEQ ID NO: 1014906 - DNA, 15 bp, Homo sapiens
ctgtcattcaggcta

SEQ ID NO: 1014907 - DNA, 15 bp, Homo sapiens
tctgtcattcaggct

SEQ ID NO: 1014908 - DNA, 15 bp, Homo sapiens
atctgtcattcaggc

SEQ ID NO: 1014909 - DNA, 15 bp, Homo sapiens
gatctgtcattcagg

SEQ ID NO: 1014910 - DNA, 15 bp, Homo sapiens
agatctgtcattcag

SEQ ID NO: 1014911 - DNA, 15 bp, Homo sapiens
tagatctgtcattca

SEQ ID NO: 1014912 - DNA, 15 bp, Homo sapiens
ctagatctgtcattc

SEQ ID NO: 1014913 - DNA, 15 bp, Homo sapiens
actagatctgtcatt

SEQ ID NO: 1014914 - DNA, 15 bp, Homo sapiens
gactagatctgtcat

SEQ ID NO: 1014915 - DNA, 15 bp, Homo sapiens
ggactagatctgtca

SEQ ID NO: 1014916 - DNA, 15 bp, Homo sapiens
gggactagatctgtc

SEQ ID NO: 1014917 - DNA, 15 bp, Homo sapiens
agggactagatctgt

SEQ ID NO: 1014918 - DNA, 15 bp, Homo sapiens
tagggactagatctg

SEQ ID NO: 1014919 - DNA, 15 bp, Homo sapiens
ttagggactagatct

SEQ ID NO: 1014920 - DNA, 15 bp, Homo sapiens
tttagggactagatc

SEQ ID NO: 1014921 - DNA, 15 bp, Homo sapiens
ttttagggactagat

SEQ ID NO: 1014922 - DNA, 15 bp, Homo sapiens
tttttagggactaga

SEQ ID NO: 1014923 - DNA, 15 bp, Homo sapiens
ttttttagggactag

SEQ ID NO: 1014924 - DNA, 15 bp, Homo sapiens
cttttttagggacta

SEQ ID NO: 1014925 - DNA, 15 bp, Homo sapiens
ccttttttagggact

SEQ ID NO: 1014926 - DNA, 15 bp, Homo sapiens
cccttttttagggac

SEQ ID NO: 1014927 - DNA, 15 bp, Homo sapiens
tcccttttttaggga

SEQ ID NO: 1014928 - DNA, 15 bp, Homo sapiens
ctcccttttttaggg

SEQ ID NO: 1014929 - DNA, 15 bp, Homo sapiens
actcccttttttagg

SEQ ID NO: 1014930 - DNA, 15 bp, Homo sapiens
tactcccttttttag

SEQ ID NO: 1014931 - DNA, 15 bp, Homo sapiens
ctactccctttttta

SEQ ID NO: 1014932 - DNA, 15 bp, Homo sapiens
cctactccctttttt

SEQ ID NO: 1014933 - DNA, 15 bp, Homo sapiens
ccctactcccttttt

SEQ ID NO: 1014934 - DNA, 15 bp, Homo sapiens
cccctactccctttt

SEQ ID NO: 1014935 - DNA, 15 bp, Homo sapiens
ccccctactcccttt

SEQ ID NO: 1014936 - DNA, 15 bp, Homo sapiens
cccccctactccctt

SEQ ID NO: 1014937 - DNA, 15 bp, Homo sapiens
tcccccctactccct

SEQ ID NO: 1014938 - DNA, 15 bp, Homo sapiens
ttcccccctactccc

SEQ ID NO: 1014939 - DNA, 15 bp, Homo sapiens
cttcccccctactcc

SEQ ID NO: 1014940 - DNA, 15 bp, Homo sapiens
ccttcccccctactc

SEQ ID NO: 1014941 - DNA, 15 bp, Homo sapiens
accttcccccctact

SEQ ID NO: 1014942 - DNA, 15 bp, Homo sapiens
taccttcccccctac

SEQ ID NO: 1014943 - DNA, 15 bp, Homo sapiens
ctaccttccccccta

SEQ ID NO: 1014944 - DNA, 15 bp, Homo sapiens
tctaccttcccccct

SEQ ID NO: 1014945 - DNA, 15 bp, Homo sapiens
atctaccttcccccc

SEQ ID NO: 1014946 - DNA, 15 bp, Homo sapiens
aatctaccttccccc

SEQ ID NO: 1014947 - DNA, 15 bp, Homo sapiens
taatctaccttcccc

SEQ ID NO: 1014948 - DNA, 15 bp, Homo sapiens
ttaatctaccttccc

SEQ ID NO: 1014949 - DNA, 15 bp, Homo sapiens
tttaatctaccttcc

SEQ ID NO: 1014950 - DNA, 15 bp, Homo sapiens
atttaatctaccttc

SEQ ID NO: 1014951 - DNA, 15 bp, Homo sapiens
catttaatctacctt

SEQ ID NO: 1014952 - DNA, 15 bp, Homo sapiens
gcatttaatctacct

SEQ ID NO: 1014953 - DNA, 15 bp, Homo sapiens
cgcatttaatctacc

SEQ ID NO: 1014954 - DNA, 15 bp, Homo sapiens
tcgcatttaatctac

SEQ ID NO: 1014955 - DNA, 15 bp, Homo sapiens
ctcgcatttaatcta

SEQ ID NO: 1014956 - DNA, 15 bp, Homo sapiens
tctcgcatttaatct

SEQ ID NO: 1014957 - DNA, 15 bp, Homo sapiens
atctcgcatttaatc

SEQ ID NO: 1014958 - DNA, 15 bp, Homo sapiens
tatctcgcatttaat

SEQ ID NO: 1014959 - DNA, 15 bp, Homo sapiens
atatctcgcatttaa

SEQ ID NO: 1014960 - DNA, 15 bp, Homo sapiens
aatatctcgcattta

SEQ ID NO: 1014961 - DNA, 15 bp, Homo sapiens
aaatatctcgcattt

SEQ ID NO: 1014962 - DNA, 15 bp, Homo sapiens
caaatatctcgcatt

SEQ ID NO: 1014963 - DNA, 15 bp, Homo sapiens
ccaaatatctcgcat

SEQ ID NO: 1014964 - DNA, 15 bp, Homo sapiens
accaaatatctcgca

SEQ ID NO: 1014965 - DNA, 15 bp, Homo sapiens
gaccaaatatctcgc

SEQ ID NO: 1014966 - DNA, 15 bp, Homo sapiens
tgaccaaatatctcg

SEQ ID NO: 1014967 - DNA, 15 bp, Homo sapiens
ctgaccaaatatctc

SEQ ID NO: 1014968 - DNA, 15 bp, Homo sapiens
actgaccaaatatct

SEQ ID NO: 1014969 - DNA, 15 bp, Homo sapiens
gactgaccaaatatc

SEQ ID NO: 1014970 - DNA, 15 bp, Homo sapiens
tgactgaccaaatat

SEQ ID NO: 1014971 - DNA, 15 bp, Homo sapiens
atgactgaccaaata

SEQ ID NO: 1014972 - DNA, 15 bp, Homo sapiens
aatgactgaccaaat

SEQ ID NO: 1014973 - DNA, 15 bp, Homo sapiens
caatgactgaccaaa

SEQ ID NO: 1014974 - DNA, 15 bp, Homo sapiens
ccaatgactgaccaa

SEQ ID NO: 1014975 - DNA, 15 bp, Homo sapiens
accaatgactgacca

SEQ ID NO: 1014976 - DNA, 15 bp, Homo sapiens
gaccaatgactgacc

SEQ ID NO: 1014977 - DNA, 15 bp, Homo sapiens
tgaccaatgactgac

SEQ ID NO: 1014978 - DNA, 15 bp, Homo sapiens
ttgaccaatgactga

SEQ ID NO: 1014979 - DNA, 15 bp, Homo sapiens
tttgaccaatgactg

SEQ ID NO: 1014980 - DNA, 15 bp, Homo sapiens
gtttgaccaatgact

SEQ ID NO: 1014981 - DNA, 15 bp, Homo sapiens
tgtttgaccaatgac

SEQ ID NO: 1014982 - DNA, 15 bp, Homo sapiens
gtgtttgaccaatga

SEQ ID NO: 1014983 - DNA, 15 bp, Homo sapiens
agtgtttgaccaatg

SEQ ID NO: 1014984 - DNA, 15 bp, Homo sapiens
cagtgtttgaccaat

SEQ ID NO: 1014985 - DNA, 15 bp, Homo sapiens
gcagtgtttgaccaa

SEQ ID NO: 1014986 - DNA, 15 bp, Homo sapiens
agcagtgtttgacca

SEQ ID NO: 1014987 - DNA, 15 bp, Homo sapiens
tagcagtgtttgacc

SEQ ID NO: 1014988 - DNA, 15 bp, Homo sapiens
ttagcagtgtttgac

SEQ ID NO: 1014989 - DNA, 15 bp, Homo sapiens
cttagcagtgtttga

SEQ ID NO: 1014990 - DNA, 15 bp, Homo sapiens
gcttagcagtgtttg

SEQ ID NO: 1014991 - DNA, 15 bp, Homo sapiens
tgcttagcagtgttt

SEQ ID NO: 1014992 - DNA, 15 bp, Homo sapiens
gtgcttagcagtgtt

SEQ ID NO: 1014993 - DNA, 15 bp, Homo sapiens
agtgcttagcagtgt

SEQ ID NO: 1014994 - DNA, 15 bp, Homo sapiens
tagtgcttagcagtg

SEQ ID NO: 1014995 - DNA, 15 bp, Homo sapiens
atagtgcttagcagt

SEQ ID NO: 1014996 - DNA, 15 bp, Homo sapiens
catagtgcttagcag

SEQ ID NO: 1014997 - DNA, 15 bp, Homo sapiens
tcatagtgcttagca

SEQ ID NO: 1014998 - DNA, 15 bp, Homo sapiens
gtcatagtgcttagc

SEQ ID NO: 1014999 - DNA, 15 bp, Homo sapiens
tgtcatagtgcttag

SEQ ID NO: 1015000 - DNA, 15 bp, Homo sapiens
ctgtcatagtgctta

SEQ ID NO: 1015001 - DNA, 15 bp, Homo sapiens
tctgtcatagtgctt

SEQ ID NO: 1015002 - DNA, 15 bp, Homo sapiens
gtctgtcatagtgct

SEQ ID NO: 1015003 - DNA, 15 bp, Homo sapiens
tgtctgtcatagtgc

SEQ ID NO: 1015004 - DNA, 15 bp, Homo sapiens
ttgtctgtcatagtg

SEQ ID NO: 1015005 - DNA, 15 bp, Homo sapiens
tttgtctgtcatagt

SEQ ID NO: 1015006 - DNA, 15 bp, Homo sapiens
ttttgtctgtcatag

SEQ ID NO: 1015007 - DNA, 15 bp, Homo sapiens
cttttgtctgtcata

SEQ ID NO: 1015008 - DNA, 15 bp, Homo sapiens
acttttgtctgtcat

SEQ ID NO: 1015009 - DNA, 15 bp, Homo sapiens
gacttttgtctgtca

SEQ ID NO: 1015010 - DNA, 15 bp, Homo sapiens
tgacttttgtctgtc

SEQ ID NO: 1015011 - DNA, 15 bp, Homo sapiens
ctgacttttgtctgt

SEQ ID NO: 1015012 - DNA, 15 bp, Homo sapiens
gctgacttttgtctg

SEQ ID NO: 1015013 - DNA, 15 bp, Homo sapiens
ggctgacttttgtct

SEQ ID NO: 1015014 - DNA, 15 bp, Homo sapiens
tggctgacttttgtc

SEQ ID NO: 1015015 - DNA, 15 bp, Homo sapiens
ttggctgacttttgt

SEQ ID NO: 1015016 - DNA, 15 bp, Homo sapiens
attggctgacttttg

SEQ ID NO: 1015017 - DNA, 15 bp, Homo sapiens
tattggctgactttt

SEQ ID NO: 1015018 - DNA, 15 bp, Homo sapiens
ctattggctgacttt

SEQ ID NO: 1015019 - DNA, 15 bp, Homo sapiens
gctattggctgactt

SEQ ID NO: 1015020 - DNA, 15 bp, Homo sapiens
agctattggctgact

SEQ ID NO: 1015021 - DNA, 15 bp, Homo sapiens
aagctattggctgac

SEQ ID NO: 1015022 - DNA, 15 bp, Homo sapiens
gaagctattggctga

SEQ ID NO: 1015023 - DNA, 15 bp, Homo sapiens
cgaagctattggctg

SEQ ID NO: 1015024 - DNA, 15 bp, Homo sapiens
acgaagctattggct

SEQ ID NO: 1015025 - DNA, 15 bp, Homo sapiens
aacgaagctattggc

SEQ ID NO: 1015026 - DNA, 15 bp, Homo sapiens
aaacgaagctattgg

SEQ ID NO: 1015027 - DNA, 15 bp, Homo sapiens
taaacgaagctattg

SEQ ID NO: 1015028 - DNA, 15 bp, Homo sapiens
ataaacgaagctatt

SEQ ID NO: 1015029 - DNA, 15 bp, Homo sapiens
cataaacgaagctat

SEQ ID NO: 1015030 - DNA, 15 bp, Homo sapiens
tcataaacgaagcta

SEQ ID NO: 1015031 - DNA, 15 bp, Homo sapiens
ctcataaacgaagct

SEQ ID NO: 1015032 - DNA, 15 bp, Homo sapiens
gctcataaacgaagc

SEQ ID NO: 1015033 - DNA, 15 bp, Homo sapiens
ggctcataaacgaag

SEQ ID NO: 1015034 - DNA, 15 bp, Homo sapiens
gggctcataaacgaa

SEQ ID NO: 1015035 - DNA, 15 bp, Homo sapiens
tgggctcataaacga

SEQ ID NO: 1015036 - DNA, 15 bp, Homo sapiens
gtgggctcataaacg

SEQ ID NO: 1015037 - DNA, 15 bp, Homo sapiens
tgtgggctcataaac

SEQ ID NO: 1015038 - DNA, 15 bp, Homo sapiens
ttgtgggctcataaa

SEQ ID NO: 1015039 - DNA, 15 bp, Homo sapiens
tttgtgggctcataa

SEQ ID NO: 1015040 - DNA, 15 bp, Homo sapiens
ttttgtgggctcata

SEQ ID NO: 1015041 - DNA, 15 bp, Homo sapiens
attttgtgggctcat

SEQ ID NO: 1015042 - DNA, 15 bp, Homo sapiens
gattttgtgggctca

SEQ ID NO: 1015043 - DNA, 15 bp, Homo sapiens
tgattttgtgggctc

SEQ ID NO: 1015044 - DNA, 15 bp, Homo sapiens
ttgattttgtgggct

SEQ ID NO: 1015045 - DNA, 15 bp, Homo sapiens
attgattttgtgggc

SEQ ID NO: 1015046 - DNA, 15 bp, Homo sapiens
cattgattttgtggg

SEQ ID NO: 1015047 - DNA, 15 bp, Homo sapiens
tcattgattttgtgg

SEQ ID NO: 1015048 - DNA, 15 bp, Homo sapiens
atcattgattttgtg

SEQ ID NO: 1015049 - DNA, 15 bp, Homo sapiens
gatcattgattttgt

SEQ ID NO: 1015050 - DNA, 15 bp, Homo sapiens
tgatcattgattttg

SEQ ID NO: 1015051 - DNA, 15 bp, Homo sapiens
gtgatcattgatttt

SEQ ID NO: 1015052 - DNA, 15 bp, Homo sapiens
tgtgatcattgattt

SEQ ID NO: 1015053 - DNA, 15 bp, Homo sapiens
ctgtgatcattgatt

SEQ ID NO: 1015054 - DNA, 15 bp, Homo sapiens
actgtgatcattgat

SEQ ID NO: 1015055 - DNA, 15 bp, Homo sapiens
aactgtgatcattga

SEQ ID NO: 1015056 - DNA, 15 bp, Homo sapiens
taactgtgatcattg

SEQ ID NO: 1015057 - DNA, 15 bp, Homo sapiens
ataactgtgatcatt

SEQ ID NO: 1015058 - DNA, 15 bp, Homo sapiens
aataactgtgatcat

SEQ ID NO: 1015059 - DNA, 15 bp, Homo sapiens
taataactgtgatca

SEQ ID NO: 1015060 - DNA, 15 bp, Homo sapiens
ataataactgtgatc

SEQ ID NO: 1015061 - DNA, 15 bp, Homo sapiens
cataataactgtgat

SEQ ID NO: 1015062 - DNA, 15 bp, Homo sapiens
acataataactgtga

SEQ ID NO: 1015063 - DNA, 15 bp, Homo sapiens
cacataataactgtg

SEQ ID NO: 1015064 - DNA, 15 bp, Homo sapiens
tcacataataactgt

SEQ ID NO: 1015065 - DNA, 15 bp, Homo sapiens
atcacataataactg

SEQ ID NO: 1015066 - DNA, 15 bp, Homo sapiens
gatcacataataact

SEQ ID NO: 1015067 - DNA, 15 bp, Homo sapiens
tgatcacataataac

SEQ ID NO: 1015068 - DNA, 15 bp, Homo sapiens
atgatcacataataa

SEQ ID NO: 1015069 - DNA, 15 bp, Homo sapiens
gatgatcacataata

SEQ ID NO: 1015070 - DNA, 15 bp, Homo sapiens
tgatgatcacataat

SEQ ID NO: 1015071 - DNA, 15 bp, Homo sapiens
gtgatgatcacataa

SEQ ID NO: 1015072 - DNA, 15 bp, Homo sapiens
agtgatgatcacata

SEQ ID NO: 1015073 - DNA, 15 bp, Homo sapiens
cagtgatgatcacat

SEQ ID NO: 1015074 - DNA, 15 bp, Homo sapiens
acagtgatgatcaca

SEQ ID NO: 1015075 - DNA, 15 bp, Homo sapiens
cacagtgatgatcac

SEQ ID NO: 1015076 - DNA, 15 bp, Homo sapiens
tcacagtgatgatca

SEQ ID NO: 1015077 - DNA, 15 bp, Homo sapiens
atcacagtgatgatc

SEQ ID NO: 1015078 - DNA, 15 bp, Homo sapiens
tatcacagtgatgat

SEQ ID NO: 1015079 - DNA, 15 bp, Homo sapiens
ttatcacagtgatga

SEQ ID NO: 1015080 - DNA, 15 bp, Homo sapiens
gttatcacagtgatg

SEQ ID NO: 1015081 - DNA, 15 bp, Homo sapiens
tgttatcacagtgat

SEQ ID NO: 1015082 - DNA, 15 bp, Homo sapiens
ttgttatcacagtga

SEQ ID NO: 1015083 - DNA, 15 bp, Homo sapiens
attgttatcacagtg

SEQ ID NO: 1015084 - DNA, 15 bp, Homo sapiens
aattgttatcacagt

SEQ ID NO: 1015085 - DNA, 15 bp, Homo sapiens
caattgttatcacag

SEQ ID NO: 1015086 - DNA, 15 bp, Homo sapiens
tcaattgttatcaca

SEQ ID NO: 1015087 - DNA, 15 bp, Homo sapiens
ttcaattgttatcac

SEQ ID NO: 1015088 - DNA, 15 bp, Homo sapiens
tttcaattgttatca

SEQ ID NO: 1015089 - DNA, 15 bp, Homo sapiens
gtttcaattgttatc

SEQ ID NO: 1015090 - DNA, 15 bp, Homo sapiens
agtttcaattgttat

SEQ ID NO: 1015091 - DNA, 15 bp, Homo sapiens
gagtttcaattgtta

SEQ ID NO: 1015092 - DNA, 15 bp, Homo sapiens
tgagtttcaattgtt

SEQ ID NO: 1015093 - DNA, 15 bp, Homo sapiens
atgagtttcaattgt

SEQ ID NO: 1015094 - DNA, 15 bp, Homo sapiens
gatgagtttcaattg

SEQ ID NO: 1015095 - DNA, 15 bp, Homo sapiens
agatgagtttcaatt

SEQ ID NO: 1015096 - DNA, 15 bp, Homo sapiens
aagatgagtttcaat

SEQ ID NO: 1015097 - DNA, 15 bp, Homo sapiens
taagatgagtttcaa

SEQ ID NO: 1015098 - DNA, 15 bp, Homo sapiens
ttaagatgagtttca

SEQ ID NO: 1015099 - DNA, 15 bp, Homo sapiens
gttaagatgagtttc

SEQ ID NO: 1015100 - DNA, 15 bp, Homo sapiens
ggttaagatgagttt

SEQ ID NO: 1015101 - DNA, 15 bp, Homo sapiens
aggttaagatgagtt

SEQ ID NO: 1015102 - DNA, 15 bp, Homo sapiens
gaggttaagatgagt

SEQ ID NO: 1015103 - DNA, 15 bp, Homo sapiens
tgaggttaagatgag

SEQ ID NO: 1015104 - DNA, 15 bp, Homo sapiens
ttgaggttaagatga

SEQ ID NO: 1015105 - DNA, 15 bp, Homo sapiens
tttgaggttaagatg

SEQ ID NO: 1015106 - DNA, 15 bp, Homo sapiens
ttttgaggttaagat

SEQ ID NO: 1015107 - DNA, 15 bp, Homo sapiens
attttgaggttaaga

SEQ ID NO: 1015108 - DNA, 15 bp, Homo sapiens
aattttgaggttaag

SEQ ID NO: 1015109 - DNA, 15 bp, Homo sapiens
aaattttgaggttaa

SEQ ID NO: 1015110 - DNA, 15 bp, Homo sapiens
gaaattttgaggtta

SEQ ID NO: 1015111 - DNA, 15 bp, Homo sapiens
agaaattttgaggtt

SEQ ID NO: 1015112 - DNA, 15 bp, Homo sapiens
gagaaattttgaggt

SEQ ID NO: 1015113 - DNA, 15 bp, Homo sapiens
tgagaaattttgagg

SEQ ID NO: 1015114 - DNA, 15 bp, Homo sapiens
gtgagaaattttgag

SEQ ID NO: 1015115 - DNA, 15 bp, Homo sapiens
tgtgagaaattttga

SEQ ID NO: 1015116 - DNA, 15 bp, Homo sapiens
ttgtgagaaattttg

SEQ ID NO: 1015117 - DNA, 15 bp, Homo sapiens
gttgtgagaaatttt

SEQ ID NO: 1015118 - DNA, 15 bp, Homo sapiens
tgttgtgagaaattt

SEQ ID NO: 1015119 - DNA, 15 bp, Homo sapiens
ttgttgtgagaaatt

SEQ ID NO: 1015120 - DNA, 15 bp, Homo sapiens
attgttgtgagaaat

SEQ ID NO: 1015121 - DNA, 15 bp, Homo sapiens
aattgttgtgagaaa

SEQ ID NO: 1015122 - DNA, 15 bp, Homo sapiens
aaattgttgtgagaa

SEQ ID NO: 1015123 - DNA, 15 bp, Homo sapiens
gaaattgttgtgaga

SEQ ID NO: 1015124 - DNA, 15 bp, Homo sapiens
ggaaattgttgtgag

SEQ ID NO: 1015125 - DNA, 15 bp, Homo sapiens
aggaaattgttgtga

SEQ ID NO: 1015126 - DNA, 15 bp, Homo sapiens
taggaaattgttgtg

SEQ ID NO: 1015127 - DNA, 15 bp, Homo sapiens
ctaggaaattgttgt

SEQ ID NO: 1015128 - DNA, 15 bp, Homo sapiens
cctaggaaattgttg

SEQ ID NO: 1015129 - DNA, 15 bp, Homo sapiens
acctaggaaattgtt

SEQ ID NO: 1015130 - DNA, 15 bp, Homo sapiens
cacctaggaaattgt

SEQ ID NO: 1015131 - DNA, 15 bp, Homo sapiens
gcacctaggaaattg

SEQ ID NO: 1015132 - DNA, 15 bp, Homo sapiens
tgcacctaggaaatt

SEQ ID NO: 1015133 - DNA, 15 bp, Homo sapiens
ttgcacctaggaaat

SEQ ID NO: 1015134 - DNA, 15 bp, Homo sapiens
tttgcacctaggaaa

SEQ ID NO: 1015135 - DNA, 15 bp, Homo sapiens
atttgcacctaggaa

SEQ ID NO: 1015136 - DNA, 15 bp, Homo sapiens
tatttgcacctagga

SEQ ID NO: 1015137 - DNA, 15 bp, Homo sapiens
gtatttgcacctagg

SEQ ID NO: 1015138 - DNA, 15 bp, Homo sapiens
ggtatttgcacctag

SEQ ID NO: 1015139 - DNA, 15 bp, Homo sapiens
aggtatttgcaccta

SEQ ID NO: 1015140 - DNA, 15 bp, Homo sapiens
caggtatttgcacct

SEQ ID NO: 1015141 - DNA, 15 bp, Homo sapiens
tcaggtatttgcacc

SEQ ID NO: 1015142 - DNA, 15 bp, Homo sapiens
atcaggtatttgcac

SEQ ID NO: 1015143 - DNA, 15 bp, Homo sapiens
gatcaggtatttgca

SEQ ID NO: 1015144 - DNA, 15 bp, Homo sapiens
tgatcaggtatttgc

SEQ ID NO: 1015145 - DNA, 15 bp, Homo sapiens
ttgatcaggtatttg

SEQ ID NO: 1015146 - DNA, 15 bp, Homo sapiens
gttgatcaggtattt

SEQ ID NO: 1015147 - DNA, 15 bp, Homo sapiens
ggttgatcaggtatt

SEQ ID NO: 1015148 - DNA, 15 bp, Homo sapiens
aggttgatcaggtat

SEQ ID NO: 1015149 - DNA, 15 bp, Homo sapiens
taggttgatcaggta

SEQ ID NO: 1015150 - DNA, 15 bp, Homo sapiens
ataggttgatcaggt

SEQ ID NO: 1015151 - DNA, 15 bp, Homo sapiens
tataggttgatcagg

SEQ ID NO: 1015152 - DNA, 15 bp, Homo sapiens
ttataggttgatcag

SEQ ID NO: 1015153 - DNA, 15 bp, Homo sapiens
cttataggttgatca

SEQ ID NO: 1015154 - DNA, 15 bp, Homo sapiens
tcttataggttgatc

SEQ ID NO: 1015155 - DNA, 15 bp, Homo sapiens
ctcttataggttgat

SEQ ID NO: 1015156 - DNA, 15 bp, Homo sapiens
gctcttataggttga

SEQ ID NO: 1015157 - DNA, 15 bp, Homo sapiens
tgctcttataggttg

SEQ ID NO: 1015158 - DNA, 15 bp, Homo sapiens
ctgctcttataggtt

SEQ ID NO: 1015159 - DNA, 15 bp, Homo sapiens
actgctcttataggt

SEQ ID NO: 1015160 - DNA, 15 bp, Homo sapiens
gactgctcttatagg

SEQ ID NO: 1015161 - DNA, 15 bp, Homo sapiens
agactgctcttatag

SEQ ID NO: 1015162 - DNA, 15 bp, Homo sapiens
cagactgctcttata

SEQ ID NO: 1015163 - DNA, 15 bp, Homo sapiens
gcagactgctcttat

SEQ ID NO: 1015164 - DNA, 15 bp, Homo sapiens
agcagactgctctta

SEQ ID NO: 1015165 - DNA, 15 bp, Homo sapiens
gagcagactgctctt

SEQ ID NO: 1015166 - DNA, 15 bp, Homo sapiens
agagcagactgctct

SEQ ID NO: 1015167 - DNA, 15 bp, Homo sapiens
aagagcagactgctc

SEQ ID NO: 1015168 - DNA, 15 bp, Homo sapiens
taagagcagactgct

SEQ ID NO: 1015169 - DNA, 15 bp, Homo sapiens
ataagagcagactgc

SEQ ID NO: 1015170 - DNA, 15 bp, Homo sapiens
tataagagcagactg

SEQ ID NO: 1015171 - DNA, 15 bp, Homo sapiens
ttataagagcagact

SEQ ID NO: 1015172 - DNA, 15 bp, Homo sapiens
tttataagagcagac

SEQ ID NO: 1015173 - DNA, 15 bp, Homo sapiens
ttttataagagcaga

SEQ ID NO: 1015174 - DNA, 15 bp, Homo sapiens
cttttataagagcag

SEQ ID NO: 1015175 - DNA, 15 bp, Homo sapiens
acttttataagagca

SEQ ID NO: 1015176 - DNA, 15 bp, Homo sapiens
gacttttataagagc

SEQ ID NO: 1015177 - DNA, 15 bp, Homo sapiens
agacttttataagag

SEQ ID NO: 1015178 - DNA, 15 bp, Homo sapiens
tagacttttataaga

SEQ ID NO: 1015179 - DNA, 15 bp, Homo sapiens
atagacttttataag

SEQ ID NO: 1015180 - DNA, 15 bp, Homo sapiens
tatagacttttataa

SEQ ID NO: 1015181 - DNA, 15 bp, Homo sapiens
ttatagacttttata

SEQ ID NO: 1015182 - DNA, 15 bp, Homo sapiens
cttatagacttttat

SEQ ID NO: 1015183 - DNA, 15 bp, Homo sapiens
tcttatagactttta

SEQ ID NO: 1015184 - DNA, 15 bp, Homo sapiens
ctcttatagactttt

SEQ ID NO: 1015185 - DNA, 15 bp, Homo sapiens
gctcttatagacttt

SEQ ID NO: 1015186 - DNA, 15 bp, Homo sapiens
tgctcttatagactt

SEQ ID NO: 1015187 - DNA, 15 bp, Homo sapiens
ctgctcttatagact

SEQ ID NO: 1015188 - DNA, 15 bp, Homo sapiens
actgctcttatagac

SEQ ID NO: 1015189 - DNA, 15 bp, Homo sapiens
gactgctcttataga

SEQ ID NO: 1015190 - DNA, 15 bp, Homo sapiens
cagagcagactgctc

SEQ ID NO: 1015191 - DNA, 15 bp, Homo sapiens
gcagagcagactgct

SEQ ID NO: 1015192 - DNA, 15 bp, Homo sapiens
tgcagagcagactgc

SEQ ID NO: 1015193 - DNA, 15 bp, Homo sapiens
ctgcagagcagactg

SEQ ID NO: 1015194 - DNA, 15 bp, Homo sapiens
cctgcagagcagact

SEQ ID NO: 1015195 - DNA, 15 bp, Homo sapiens
tcctgcagagcagac

SEQ ID NO: 1015196 - DNA, 15 bp, Homo sapiens
ttcctgcagagcaga

SEQ ID NO: 1015197 - DNA, 15 bp, Homo sapiens
tttcctgcagagcag

SEQ ID NO: 1015198 - DNA, 15 bp, Homo sapiens
ttttcctgcagagca

SEQ ID NO: 1015199 - DNA, 15 bp, Homo sapiens
attttcctgcagagc

SEQ ID NO: 1015200 - DNA, 15 bp, Homo sapiens
tattttcctgcagag

SEQ ID NO: 1015201 - DNA, 15 bp, Homo sapiens
gtattttcctgcaga

SEQ ID NO: 1015202 - DNA, 15 bp, Homo sapiens
tgtattttcctgcag

SEQ ID NO: 1015203 - DNA, 15 bp, Homo sapiens
atgtattttcctgca

SEQ ID NO: 1015204 - DNA, 15 bp, Homo sapiens
tatgtattttcctgc

SEQ ID NO: 1015205 - DNA, 15 bp, Homo sapiens
ttatgtattttcctg

SEQ ID NO: 1015206 - DNA, 15 bp, Homo sapiens
attatgtattttcct

SEQ ID NO: 1015207 - DNA, 15 bp, Homo sapiens
aattatgtattttcc

SEQ ID NO: 1015208 - DNA, 15 bp, Homo sapiens
taattatgtattttc

SEQ ID NO: 1015209 - DNA, 15 bp, Homo sapiens
ataattatgtatttt

SEQ ID NO: 1015210 - DNA, 15 bp, Homo sapiens
gataattatgtattt

SEQ ID NO: 1015211 - DNA, 15 bp, Homo sapiens
tgataattatgtatt

SEQ ID NO: 1015212 - DNA, 15 bp, Homo sapiens
gtgataattatgtat

SEQ ID NO: 1015213 - DNA, 15 bp, Homo sapiens
tgtgataattatgta

SEQ ID NO: 1015214 - DNA, 15 bp, Homo sapiens
atgtgataattatgt

SEQ ID NO: 1015215 - DNA, 15 bp, Homo sapiens
aatgtgataattatg

SEQ ID NO: 1015216 - DNA, 15 bp, Homo sapiens
caatgtgataattat

SEQ ID NO: 1015217 - DNA, 15 bp, Homo sapiens
gcaatgtgataatta

SEQ ID NO: 1015218 - DNA, 15 bp, Homo sapiens
tgcaatgtgataatt

SEQ ID NO: 1015219 - DNA, 15 bp, Homo sapiens
gtgcaatgtgataat

SEQ ID NO: 1015220 - DNA, 15 bp, Homo sapiens
tgtgcaatgtgataa

SEQ ID NO: 1015221 - DNA, 15 bp, Homo sapiens
atgtgcaatgtgata

SEQ ID NO: 1015222 - DNA, 15 bp, Homo sapiens
aatgtgcaatgtgat

SEQ ID NO: 1015223 - DNA, 15 bp, Homo sapiens
gaatgtgcaatgtga

SEQ ID NO: 1015224 - DNA, 15 bp, Homo sapiens
ggaatgtgcaatgtg

SEQ ID NO: 1015225 - DNA, 15 bp, Homo sapiens
tggaatgtgcaatgt

SEQ ID NO: 1015226 - DNA, 15 bp, Homo sapiens
gtggaatgtgcaatg

SEQ ID NO: 1015227 - DNA, 15 bp, Homo sapiens
ggtggaatgtgcaat

SEQ ID NO: 1015228 - DNA, 15 bp, Homo sapiens
aggtggaatgtgcaa

SEQ ID NO: 1015229 - DNA, 15 bp, Homo sapiens
aaggtggaatgtgca

SEQ ID NO: 1015230 - DNA, 15 bp, Homo sapiens
gaaggtggaatgtgc

SEQ ID NO: 1015231 - DNA, 15 bp, Homo sapiens
ggaaggtggaatgtg

SEQ ID NO: 1015232 - DNA, 15 bp, Homo sapiens
gggaaggtggaatgt

SEQ ID NO: 1015233 - DNA, 15 bp, Homo sapiens
tgggaaggtggaatg

SEQ ID NO: 1015234 - DNA, 15 bp, Homo sapiens
ctgggaaggtggaat

SEQ ID NO: 1015235 - DNA, 15 bp, Homo sapiens
tctgggaaggtggaa

SEQ ID NO: 1015236 - DNA, 15 bp, Homo sapiens
ctctgggaaggtgga

SEQ ID NO: 1015237 - DNA, 15 bp, Homo sapiens
actctgggaaggtgg

SEQ ID NO: 1015238 - DNA, 15 bp, Homo sapiens
gactctgggaaggtg

SEQ ID NO: 1015239 - DNA, 15 bp, Homo sapiens
tgactctgggaaggt

SEQ ID NO: 1015240 - DNA, 15 bp, Homo sapiens
atgactctgggaagg

SEQ ID NO: 1015241 - DNA, 15 bp, Homo sapiens
gatgactctgggaag

SEQ ID NO: 1015242 - DNA, 15 bp, Homo sapiens
agatgactctgggaa

SEQ ID NO: 1015243 - DNA, 15 bp, Homo sapiens
tagatgactctggga

SEQ ID NO: 1015244 - DNA, 15 bp, Homo sapiens
ttagatgactctggg

SEQ ID NO: 1015245 - DNA, 15 bp, Homo sapiens
tttagatgactctgg

SEQ ID NO: 1015246 - DNA, 15 bp, Homo sapiens
ttttagatgactctg

SEQ ID NO: 1015247 - DNA, 15 bp, Homo sapiens
attttagatgactct

SEQ ID NO: 1015248 - DNA, 15 bp, Homo sapiens
aattttagatgactc

SEQ ID NO: 1015249 - DNA, 15 bp, Homo sapiens
aaattttagatgact

SEQ ID NO: 1015250 - DNA, 15 bp, Homo sapiens
taaattttagatgac

SEQ ID NO: 1015251 - DNA, 15 bp, Homo sapiens
ctaaattttagatga

SEQ ID NO: 1015252 - DNA, 15 bp, Homo sapiens
gctaaattttagatg

SEQ ID NO: 1015253 - DNA, 15 bp, Homo sapiens
cgctaaattttagat

SEQ ID NO: 1015254 - DNA, 15 bp, Homo sapiens
ccgctaaattttaga

SEQ ID NO: 1015255 - DNA, 15 bp, Homo sapiens
gccgctaaattttag

SEQ ID NO: 1015256 - DNA, 15 bp, Homo sapiens
cgccgctaaatttta

SEQ ID NO: 1015257 - DNA, 15 bp, Homo sapiens
acgccgctaaatttt

SEQ ID NO: 1015258 - DNA, 15 bp, Homo sapiens
cacgccgctaaattt

SEQ ID NO: 1015259 - DNA, 15 bp, Homo sapiens
gcacgccgctaaatt

SEQ ID NO: 1015260 - DNA, 15 bp, Homo sapiens
agcacgccgctaaat

SEQ ID NO: 1015261 - DNA, 15 bp, Homo sapiens
cagcacgccgctaaa

SEQ ID NO: 1015262 - DNA, 15 bp, Homo sapiens
ccagcacgccgctaa

SEQ ID NO: 1015263 - DNA, 15 bp, Homo sapiens
accagcacgccgcta

SEQ ID NO: 1015264 - DNA, 15 bp, Homo sapiens
caccagcacgccgct

SEQ ID NO: 1015265 - DNA, 15 bp, Homo sapiens
tcaccagcacgccgc

SEQ ID NO: 1015266 - DNA, 15 bp, Homo sapiens
ttcaccagcacgccg

SEQ ID NO: 1015267 - DNA, 15 bp, Homo sapiens
tttcaccagcacgcc

SEQ ID NO: 1015268 - DNA, 15 bp, Homo sapiens
atttcaccagcacgc

SEQ ID NO: 1015269 - DNA, 15 bp, Homo sapiens
catttcaccagcacg

SEQ ID NO: 1015270 - DNA, 15 bp, Homo sapiens
gcatttcaccagcac

SEQ ID NO: 1015271 - DNA, 15 bp, Homo sapiens
agcatttcaccagca

SEQ ID NO: 1015272 - DNA, 15 bp, Homo sapiens
aagcatttcaccagc

SEQ ID NO: 1015273 - DNA, 15 bp, Homo sapiens
taagcatttcaccag

SEQ ID NO: 1015274 - DNA, 15 bp, Homo sapiens
ttaagcatttcacca

SEQ ID NO: 1015275 - DNA, 15 bp, Homo sapiens
gttaagcatttcacc

SEQ ID NO: 1015276 - DNA, 15 bp, Homo sapiens
tgttaagcatttcac

SEQ ID NO: 1015277 - DNA, 15 bp, Homo sapiens
ctgttaagcatttca

SEQ ID NO: 1015278 - DNA, 15 bp, Homo sapiens
actgttaagcatttc

SEQ ID NO: 1015279 - DNA, 15 bp, Homo sapiens
gactgttaagcattt

SEQ ID NO: 1015280 - DNA, 15 bp, Homo sapiens
cgactgttaagcatt

SEQ ID NO: 1015281 - DNA, 15 bp, Homo sapiens
ccgactgttaagcat

SEQ ID NO: 1015282 - DNA, 15 bp, Homo sapiens
gccgactgttaagca

SEQ ID NO: 1015283 - DNA, 15 bp, Homo sapiens
agccgactgttaagc

SEQ ID NO: 1015284 - DNA, 15 bp, Homo sapiens
aagccgactgttaag

SEQ ID NO: 1015285 - DNA, 15 bp, Homo sapiens
aaagccgactgttaa

SEQ ID NO: 1015286 - DNA, 15 bp, Homo sapiens
taaagccgactgtta

SEQ ID NO: 1015287 - DNA, 15 bp, Homo sapiens
ctaaagccgactgtt

SEQ ID NO: 1015288 - DNA, 15 bp, Homo sapiens
cctaaagccgactgt

SEQ ID NO: 1015289 - DNA, 15 bp, Homo sapiens
gcctaaagccgactg

SEQ ID NO: 1015290 - DNA, 15 bp, Homo sapiens
tgcctaaagccgact

SEQ ID NO: 1015291 - DNA, 15 bp, Homo sapiens
ttgcctaaagccgac

SEQ ID NO: 1015292 - DNA, 15 bp, Homo sapiens
cttgcctaaagccga

SEQ ID NO: 1015293 - DNA, 15 bp, Homo sapiens
ccttgcctaaagccg

SEQ ID NO: 1015294 - DNA, 15 bp, Homo sapiens
cccttgcctaaagcc

SEQ ID NO: 1015295 - DNA, 15 bp, Homo sapiens
gcccttgcctaaagc

SEQ ID NO: 1015296 - DNA, 15 bp, Homo sapiens
agcccttgcctaaag

SEQ ID NO: 1015297 - DNA, 15 bp, Homo sapiens
cagcccttgcctaaa

SEQ ID NO: 1015298 - DNA, 15 bp, Homo sapiens
tcagcccttgcctaa

SEQ ID NO: 1015299 - DNA, 15 bp, Homo sapiens
atcagcccttgccta

SEQ ID NO: 1015300 - DNA, 15 bp, Homo sapiens
aatcagcccttgcct

SEQ ID NO: 1015301 - DNA, 15 bp, Homo sapiens
aaatcagcccttgcc

SEQ ID NO: 1015302 - DNA, 15 bp, Homo sapiens
caaatcagcccttgc

SEQ ID NO: 1015303 - DNA, 15 bp, Homo sapiens
acaaatcagcccttg

SEQ ID NO: 1015304 - DNA, 15 bp, Homo sapiens
tacaaatcagccctt

SEQ ID NO: 1015305 - DNA, 15 bp, Homo sapiens
ctacaaatcagccct

SEQ ID NO: 1015306 - DNA, 15 bp, Homo sapiens
actacaaatcagccc

SEQ ID NO: 1015307 - DNA, 15 bp, Homo sapiens
cactacaaatcagcc

SEQ ID NO: 1015308 - DNA, 15 bp, Homo sapiens
acactacaaatcagc

SEQ ID NO: 1015309 - DNA, 15 bp, Homo sapiens
tacactacaaatcag

SEQ ID NO: 1015310 - DNA, 15 bp, Homo sapiens
ctacactacaaatca

SEQ ID NO: 1015311 - DNA, 15 bp, Homo sapiens
gctacactacaaatc

SEQ ID NO: 1015312 - DNA, 15 bp, Homo sapiens
ggctacactacaaat

SEQ ID NO: 1015313 - DNA, 15 bp, Homo sapiens
tggctacactacaaa

SEQ ID NO: 1015314 - DNA, 15 bp, Homo sapiens
ttggctacactacaa

SEQ ID NO: 1015315 - DNA, 15 bp, Homo sapiens
attggctacactaca

SEQ ID NO: 1015316 - DNA, 15 bp, Homo sapiens
aattggctacactac

SEQ ID NO: 1015317 - DNA, 15 bp, Homo sapiens
aaattggctacacta

SEQ ID NO: 1015318 - DNA, 15 bp, Homo sapiens
gaaattggctacact

SEQ ID NO: 1015319 - DNA, 15 bp, Homo sapiens
ggaaattggctacac

SEQ ID NO: 1015320 - DNA, 15 bp, Homo sapiens
tggaaattggctaca

SEQ ID NO: 1015321 - DNA, 15 bp, Homo sapiens
atggaaattggctac

SEQ ID NO: 1015322 - DNA, 15 bp, Homo sapiens
aatggaaattggcta

SEQ ID NO: 1015323 - DNA, 15 bp, Homo sapiens
caatggaaattggct

SEQ ID NO: 1015324 - DNA, 15 bp, Homo sapiens
gcaatggaaattggc

SEQ ID NO: 1015325 - DNA, 15 bp, Homo sapiens
cgcaatggaaattgg

SEQ ID NO: 1015326 - DNA, 15 bp, Homo sapiens
acgcaatggaaattg

SEQ ID NO: 1015327 - DNA, 15 bp, Homo sapiens
tacgcaatggaaatt

SEQ ID NO: 1015328 - DNA, 15 bp, Homo sapiens
atacgcaatggaaat

SEQ ID NO: 1015329 - DNA, 15 bp, Homo sapiens
aatacgcaatggaaa

SEQ ID NO: 1015330 - DNA, 15 bp, Homo sapiens
gaatacgcaatggaa

SEQ ID NO: 1015331 - DNA, 15 bp, Homo sapiens
tgaatacgcaatgga

SEQ ID NO: 1015332 - DNA, 15 bp, Homo sapiens
atgaatacgcaatgg

SEQ ID NO: 1015333 - DNA, 15 bp, Homo sapiens
aatgaatacgcaatg

SEQ ID NO: 1015334 - DNA, 15 bp, Homo sapiens
gaatgaatacgcaat

SEQ ID NO: 1015335 - DNA, 15 bp, Homo sapiens
tgaatgaatacgcaa

SEQ ID NO: 1015336 - DNA, 15 bp, Homo sapiens
atgaatgaatacgca

SEQ ID NO: 1015337 - DNA, 15 bp, Homo sapiens
gatgaatgaatacgc

SEQ ID NO: 1015338 - DNA, 15 bp, Homo sapiens
cgatgaatgaatacg

SEQ ID NO: 1015339 - DNA, 15 bp, Homo sapiens
acgatgaatgaatac

SEQ ID NO: 1015340 - DNA, 15 bp, Homo sapiens
cacgatgaatgaata

SEQ ID NO: 1015341 - DNA, 15 bp, Homo sapiens
tcacgatgaatgaat

SEQ ID NO: 1015342 - DNA, 15 bp, Homo sapiens
ctcacgatgaatgaa

SEQ ID NO: 1015343 - DNA, 15 bp, Homo sapiens
gctcacgatgaatga

SEQ ID NO: 1015344 - DNA, 15 bp, Homo sapiens
tgctcacgatgaatg

SEQ ID NO: 1015345 - DNA, 15 bp, Homo sapiens
atgctcacgatgaat

SEQ ID NO: 1015346 - DNA, 15 bp, Homo sapiens
catgctcacgatgaa

SEQ ID NO: 1015347 - DNA, 15 bp, Homo sapiens
tcatgctcacgatga

SEQ ID NO: 1015348 - DNA, 15 bp, Homo sapiens
gtcatgctcacgatg

SEQ ID NO: 1015349 - DNA, 15 bp, Homo sapiens
tgtcatgctcacgat

SEQ ID NO: 1015350 - DNA, 15 bp, Homo sapiens
atgtcatgctcacga

SEQ ID NO: 1015351 - DNA, 15 bp, Homo sapiens
aatgtcatgctcacg

SEQ ID NO: 1015352 - DNA, 15 bp, Homo sapiens
taatgtcatgctcac

SEQ ID NO: 1015353 - DNA, 15 bp, Homo sapiens
gtaatgtcatgctca

SEQ ID NO: 1015354 - DNA, 15 bp, Homo sapiens
agtaatgtcatgctc

SEQ ID NO: 1015355 - DNA, 15 bp, Homo sapiens
cagtaatgtcatgct

SEQ ID NO: 1015356 - DNA, 15 bp, Homo sapiens
tcagtaatgtcatgc

SEQ ID NO: 1015357 - DNA, 15 bp, Homo sapiens
ttcagtaatgtcatg

SEQ ID NO: 1015358 - DNA, 15 bp, Homo sapiens
attcagtaatgtcat

SEQ ID NO: 1015359 - DNA, 15 bp, Homo sapiens
aattcagtaatgtca

SEQ ID NO: 1015360 - DNA, 15 bp, Homo sapiens
caattcagtaatgtc

SEQ ID NO: 1015361 - DNA, 15 bp, Homo sapiens
acaattcagtaatgt

SEQ ID NO: 1015362 - DNA, 15 bp, Homo sapiens
cacaattcagtaatg

SEQ ID NO: 1015363 - DNA, 15 bp, Homo sapiens
tcacaattcagtaat

SEQ ID NO: 1015364 - DNA, 15 bp, Homo sapiens
ttcacaattcagtaa

SEQ ID NO: 1015365 - DNA, 15 bp, Homo sapiens
tttcacaattcagta

SEQ ID NO: 1015366 - DNA, 15 bp, Homo sapiens
gtttcacaattcagt

SEQ ID NO: 1015367 - DNA, 15 bp, Homo sapiens
agtttcacaattcag

SEQ ID NO: 1015368 - DNA, 15 bp, Homo sapiens
tagtttcacaattca

SEQ ID NO: 1015369 - DNA, 15 bp, Homo sapiens
gtagtttcacaattc

SEQ ID NO: 1015370 - DNA, 15 bp, Homo sapiens
agtagtttcacaatt

SEQ ID NO: 1015371 - DNA, 15 bp, Homo sapiens
cagtagtttcacaat

SEQ ID NO: 1015372 - DNA, 15 bp, Homo sapiens
tcagtagtttcacaa

SEQ ID NO: 1015373 - DNA, 15 bp, Homo sapiens
ttcagtagtttcaca

SEQ ID NO: 1015374 - DNA, 15 bp, Homo sapiens
gttcagtagtttcac

SEQ ID NO: 1015375 - DNA, 15 bp, Homo sapiens
ggttcagtagtttca

SEQ ID NO: 1015376 - DNA, 15 bp, Homo sapiens
gggttcagtagtttc

SEQ ID NO: 1015377 - DNA, 15 bp, Homo sapiens
tgggttcagtagttt

SEQ ID NO: 1015378 - DNA, 15 bp, Homo sapiens
ctgggttcagtagtt

SEQ ID NO: 1015379 - DNA, 15 bp, Homo sapiens
tctgggttcagtagt

SEQ ID NO: 1015380 - DNA, 15 bp, Homo sapiens
ctctgggttcagtag

SEQ ID NO: 1015381 - DNA, 15 bp, Homo sapiens
tctctgggttcagta

SEQ ID NO: 1015382 - DNA, 15 bp, Homo sapiens
atctctgggttcagt

SEQ ID NO: 1015383 - DNA, 15 bp, Homo sapiens
catctctgggttcag

SEQ ID NO: 1015384 - DNA, 15 bp, Homo sapiens
ccatctctgggttca

SEQ ID NO: 1015385 - DNA, 15 bp, Homo sapiens
cccatctctgggttc

SEQ ID NO: 1015386 - DNA, 15 bp, Homo sapiens
tcccatctctgggtt

SEQ ID NO: 1015387 - DNA, 15 bp, Homo sapiens
ttcccatctctgggt

SEQ ID NO: 1015388 - DNA, 15 bp, Homo sapiens
cttcccatctctggg

SEQ ID NO: 1015389 - DNA, 15 bp, Homo sapiens
tcttcccatctctgg

SEQ ID NO: 1015390 - DNA, 15 bp, Homo sapiens
ctcttcccatctctg

SEQ ID NO: 1015391 - DNA, 15 bp, Homo sapiens
tctcttcccatctct

SEQ ID NO: 1015392 - DNA, 15 bp, Homo sapiens
gtctcttcccatctc

SEQ ID NO: 1015393 - DNA, 15 bp, Homo sapiens
cgtctcttcccatct

SEQ ID NO: 1015394 - DNA, 15 bp, Homo sapiens
gcgtctcttcccatc

SEQ ID NO: 1015395 - DNA, 15 bp, Homo sapiens
tgcgtctcttcccat

SEQ ID NO: 1015396 - DNA, 15 bp, Homo sapiens
gtgcgtctcttccca

SEQ ID NO: 1015397 - DNA, 15 bp, Homo sapiens
tgtgcgtctcttccc

SEQ ID NO: 1015398 - DNA, 15 bp, Homo sapiens
ctgtgcgtctcttcc

SEQ ID NO: 1015399 - DNA, 15 bp, Homo sapiens
actgtgcgtctcttc

SEQ ID NO: 1015400 - DNA, 15 bp, Homo sapiens
tactgtgcgtctctt

SEQ ID NO: 1015401 - DNA, 15 bp, Homo sapiens
ctactgtgcgtctct

SEQ ID NO: 1015402 - DNA, 15 bp, Homo sapiens
tctactgtgcgtctc

SEQ ID NO: 1015403 - DNA, 15 bp, Homo sapiens
ctctactgtgcgtct

SEQ ID NO: 1015404 - DNA, 15 bp, Homo sapiens
gctctactgtgcgtc

SEQ ID NO: 1015405 - DNA, 15 bp, Homo sapiens
tgctctactgtgcgt

SEQ ID NO: 1015406 - DNA, 15 bp, Homo sapiens
gtgctctactgtgcg

SEQ ID NO: 1015407 - DNA, 15 bp, Homo sapiens
ggtgctctactgtgc

SEQ ID NO: 1015408 - DNA, 15 bp, Homo sapiens
tggtgctctactgtg

SEQ ID NO: 1015409 - DNA, 15 bp, Homo sapiens
atggtgctctactgt

SEQ ID NO: 1015410 - DNA, 15 bp, Homo sapiens
tatggtgctctactg

SEQ ID NO: 1015411 - DNA, 15 bp, Homo sapiens
ctatggtgctctact

SEQ ID NO: 1015412 - DNA, 15 bp, Homo sapiens
actatggtgctctac

SEQ ID NO: 1015413 - DNA, 15 bp, Homo sapiens
tactatggtgctcta

SEQ ID NO: 1015414 - DNA, 15 bp, Homo sapiens
atactatggtgctct

SEQ ID NO: 1015415 - DNA, 15 bp, Homo sapiens
tatactatggtgctc

SEQ ID NO: 1015416 - DNA, 15 bp, Homo sapiens
ctatactatggtgct

SEQ ID NO: 1015417 - DNA, 15 bp, Homo sapiens
actatactatggtgc

SEQ ID NO: 1015418 - DNA, 15 bp, Homo sapiens
tactatactatggtg

SEQ ID NO: 1015419 - DNA, 15 bp, Homo sapiens
atactatactatggt

SEQ ID NO: 1015420 - DNA, 15 bp, Homo sapiens
gatactatactatgg

SEQ ID NO: 1015421 - DNA, 15 bp, Homo sapiens
agatactatactatg

SEQ ID NO: 1015422 - DNA, 15 bp, Homo sapiens
gagatactatactat

SEQ ID NO: 1015423 - DNA, 15 bp, Homo sapiens
ggagatactatacta

SEQ ID NO: 1015424 - DNA, 15 bp, Homo sapiens
aggagatactatact

SEQ ID NO: 1015425 - DNA, 15 bp, Homo sapiens
gaggagatactatac

SEQ ID NO: 1015426 - DNA, 15 bp, Homo sapiens
ggaggagatactata

SEQ ID NO: 1015427 - DNA, 15 bp, Homo sapiens
tggaggagatactat

SEQ ID NO: 1015428 - DNA, 15 bp, Homo sapiens
gtggaggagatacta

SEQ ID NO: 1015429 - DNA, 15 bp, Homo sapiens
tgtggaggagatact

SEQ ID NO: 1015430 - DNA, 15 bp, Homo sapiens
ttgtggaggagatac

SEQ ID NO: 1015431 - DNA, 15 bp, Homo sapiens
tttgtggaggagata

SEQ ID NO: 1015432 - DNA, 15 bp, Homo sapiens
ctttgtggaggagat

SEQ ID NO: 1015433 - DNA, 15 bp, Homo sapiens
tctttgtggaggaga

SEQ ID NO: 1015434 - DNA, 15 bp, Homo sapiens
atctttgtggaggag

SEQ ID NO: 1015435 - DNA, 15 bp, Homo sapiens
tatctttgtggagga

SEQ ID NO: 1015436 - DNA, 15 bp, Homo sapiens
gtatctttgtggagg

SEQ ID NO: 1015437 - DNA, 15 bp, Homo sapiens
tgtatctttgtggag

SEQ ID NO: 1015438 - DNA, 15 bp, Homo sapiens
ttgtatctttgtgga

SEQ ID NO: 1015439 - DNA, 15 bp, Homo sapiens
attgtatctttgtgg

SEQ ID NO: 1015440 - DNA, 15 bp, Homo sapiens
tattgtatctttgtg

SEQ ID NO: 1015441 - DNA, 15 bp, Homo sapiens
ctattgtatctttgt

SEQ ID NO: 1015442 - DNA, 15 bp, Homo sapiens
tctattgtatctttg

SEQ ID NO: 1015443 - DNA, 15 bp, Homo sapiens
atctattgtatcttt

SEQ ID NO: 1015444 - DNA, 15 bp, Homo sapiens
catctattgtatctt

SEQ ID NO: 1015445 - DNA, 15 bp, Homo sapiens
acatctattgtatct

SEQ ID NO: 1015446 - DNA, 15 bp, Homo sapiens
tacatctattgtatc

SEQ ID NO: 1015447 - DNA, 15 bp, Homo sapiens
atacatctattgtat

SEQ ID NO: 1015448 - DNA, 15 bp, Homo sapiens
tatacatctattgta

SEQ ID NO: 1015449 - DNA, 15 bp, Homo sapiens
ttatacatctattgt

SEQ ID NO: 1015450 - DNA, 15 bp, Homo sapiens
tttatacatctattg

SEQ ID NO: 1015451 - DNA, 15 bp, Homo sapiens
atttatacatctatt

SEQ ID NO: 1015452 - DNA, 15 bp, Homo sapiens
tatttatacatctat

SEQ ID NO: 1015453 - DNA, 15 bp, Homo sapiens
ttatttatacatcta

SEQ ID NO: 1015454 - DNA, 15 bp, Homo sapiens
gttatttatacatct

SEQ ID NO: 1015455 - DNA, 15 bp, Homo sapiens
ggttatttatacatc

SEQ ID NO: 1015456 - DNA, 15 bp, Homo sapiens
aggttatttatacat

SEQ ID NO: 1015457 - DNA, 15 bp, Homo sapiens
gaggttatttataca

SEQ ID NO: 1015458 - DNA, 15 bp, Homo sapiens
tgaggttatttatac

SEQ ID NO: 1015459 - DNA, 15 bp, Homo sapiens
ttgaggttatttata

SEQ ID NO: 1015460 - DNA, 15 bp, Homo sapiens
tttgaggttatttat

SEQ ID NO: 1015461 - DNA, 15 bp, Homo sapiens
ttttgaggttattta

SEQ ID NO: 1015462 - DNA, 15 bp, Homo sapiens
cttttgaggttattt

SEQ ID NO: 1015463 - DNA, 15 bp, Homo sapiens
acttttgaggttatt

SEQ ID NO: 1015464 - DNA, 15 bp, Homo sapiens
tacttttgaggttat

SEQ ID NO: 1015465 - DNA, 15 bp, Homo sapiens
ttacttttgaggtta

SEQ ID NO: 1015466 - DNA, 15 bp, Homo sapiens
tttacttttgaggtt

SEQ ID NO: 1015467 - DNA, 15 bp, Homo sapiens
ctttacttttgaggt

SEQ ID NO: 1015468 - DNA, 15 bp, Homo sapiens
actttacttttgagg

SEQ ID NO: 1015469 - DNA, 15 bp, Homo sapiens
tactttacttttgag

SEQ ID NO: 1015470 - DNA, 15 bp, Homo sapiens
ttactttacttttga

SEQ ID NO: 1015471 - DNA, 15 bp, Homo sapiens
gttactttacttttg

SEQ ID NO: 1015472 - DNA, 15 bp, Homo sapiens
tgttactttactttt

SEQ ID NO: 1015473 - DNA, 15 bp, Homo sapiens
ttgttactttacttt

SEQ ID NO: 1015474 - DNA, 15 bp, Homo sapiens
attgttactttactt

SEQ ID NO: 1015475 - DNA, 15 bp, Homo sapiens
tattgttactttact

SEQ ID NO: 1015476 - DNA, 15 bp, Homo sapiens
ttattgttactttac

SEQ ID NO: 1015477 - DNA, 15 bp, Homo sapiens
tttattgttacttta

SEQ ID NO: 1015478 - DNA, 15 bp, Homo sapiens
ttttattgttacttt

SEQ ID NO: 1015479 - DNA, 15 bp, Homo sapiens
gttttattgttactt

SEQ ID NO: 1015480 - DNA, 15 bp, Homo sapiens
tgttttattgttact

SEQ ID NO: 1015481 - DNA, 15 bp, Homo sapiens
atgttttattgttac

SEQ ID NO: 1015482 - DNA, 15 bp, Homo sapiens
catgttttattgtta

SEQ ID NO: 1015483 - DNA, 15 bp, Homo sapiens
ccatgttttattgtt

SEQ ID NO: 1015484 - DNA, 15 bp, Homo sapiens
accatgttttattgt

SEQ ID NO: 1015485 - DNA, 15 bp, Homo sapiens
taccatgttttattg

SEQ ID NO: 1015486 - DNA, 15 bp, Homo sapiens
ttaccatgttttatt

SEQ ID NO: 1015487 - DNA, 15 bp, Homo sapiens
tttaccatgttttat

SEQ ID NO: 1015488 - DNA, 15 bp, Homo sapiens
atttaccatgtttta

SEQ ID NO: 1015489 - DNA, 15 bp, Homo sapiens
tatttaccatgtttt

SEQ ID NO: 1015490 - DNA, 15 bp, Homo sapiens
ttatttaccatgttt

SEQ ID NO: 1015491 - DNA, 15 bp, Homo sapiens
attatttaccatgtt

SEQ ID NO: 1015492 - DNA, 15 bp, Homo sapiens
tattatttaccatgt

SEQ ID NO: 1015493 - DNA, 15 bp, Homo sapiens
ttattatttaccatg

SEQ ID NO: 1015494 - DNA, 15 bp, Homo sapiens
tttattatttaccat

SEQ ID NO: 1015495 - DNA, 15 bp, Homo sapiens
ttttattatttacca

SEQ ID NO: 1015496 - DNA, 15 bp, Homo sapiens
cttttattatttacc

SEQ ID NO: 1015497 - DNA, 15 bp, Homo sapiens
acttttattatttac

SEQ ID NO: 1015498 - DNA, 15 bp, Homo sapiens
cacttttattattta

SEQ ID NO: 1015499 - DNA, 15 bp, Homo sapiens
tcacttttattattt

SEQ ID NO: 1015500 - DNA, 15 bp, Homo sapiens
atcacttttattatt

SEQ ID NO: 1015501 - DNA, 15 bp, Homo sapiens
catcacttttattat

SEQ ID NO: 1015502 - DNA, 15 bp, Homo sapiens
tcatcacttttatta

SEQ ID NO: 1015503 - DNA, 15 bp, Homo sapiens
ctcatcacttttatt

SEQ ID NO: 1015504 - DNA, 15 bp, Homo sapiens
actcatcacttttat

SEQ ID NO: 1015505 - DNA, 15 bp, Homo sapiens
aactcatcactttta

SEQ ID NO: 1015506 - DNA, 15 bp, Homo sapiens
aaactcatcactttt

SEQ ID NO: 1015507 - DNA, 15 bp, Homo sapiens
aaaactcatcacttt

SEQ ID NO: 1015508 - DNA, 15 bp, Homo sapiens
aaaaactcatcactt

SEQ ID NO: 1015509 - DNA, 15 bp, Homo sapiens
taaaaactcatcact

SEQ ID NO: 1015510 - DNA, 15 bp, Homo sapiens
ctaaaaactcatcac

SEQ ID NO: 1015511 - DNA, 15 bp, Homo sapiens
actaaaaactcatca

SEQ ID NO: 1015512 - DNA, 15 bp, Homo sapiens
tactaaaaactcatc

SEQ ID NO: 1015513 - DNA, 15 bp, Homo sapiens
atactaaaaactcat

SEQ ID NO: 1015514 - DNA, 15 bp, Homo sapiens
aatactaaaaactca

SEQ ID NO: 1015515 - DNA, 15 bp, Homo sapiens
aaatactaaaaactc

SEQ ID NO: 1015516 - DNA, 15 bp, Homo sapiens
aaaatactaaaaact

SEQ ID NO: 1015517 - DNA, 15 bp, Homo sapiens
gaaaatactaaaaac

SEQ ID NO: 1015518 - DNA, 15 bp, Homo sapiens
tgaaaatactaaaaa

SEQ ID NO: 1015519 - DNA, 15 bp, Homo sapiens
gtgaaaatactaaaa

SEQ ID NO: 1015520 - DNA, 15 bp, Homo sapiens
agtgaaaatactaaa

SEQ ID NO: 1015521 - DNA, 15 bp, Homo sapiens
cagtgaaaatactaa

SEQ ID NO: 1015522 - DNA, 15 bp, Homo sapiens
gcagtgaaaatacta

SEQ ID NO: 1015523 - DNA, 15 bp, Homo sapiens
ggcagtgaaaatact

SEQ ID NO: 1015524 - DNA, 15 bp, Homo sapiens
aggcagtgaaaatac

SEQ ID NO: 1015525 - DNA, 15 bp, Homo sapiens
aaggcagtgaaaata

SEQ ID NO: 1015526 - DNA, 15 bp, Homo sapiens
aaaggcagtgaaaat

SEQ ID NO: 1015527 - DNA, 15 bp, Homo sapiens
caaaggcagtgaaaa

SEQ ID NO: 1015528 - DNA, 15 bp, Homo sapiens
acaaaggcagtgaaa

SEQ ID NO: 1015529 - DNA, 15 bp, Homo sapiens
aacaaaggcagtgaa

SEQ ID NO: 1015530 - DNA, 15 bp, Homo sapiens
aaacaaaggcagtga

SEQ ID NO: 1015531 - DNA, 15 bp, Homo sapiens
aaaacaaaggcagtg

SEQ ID NO: 1015532 - DNA, 15 bp, Homo sapiens
aaaaacaaaggcagt

SEQ ID NO: 1015533 - DNA, 15 bp, Homo sapiens
taaaaacaaaggcag

SEQ ID NO: 1015534 - DNA, 15 bp, Homo sapiens
ttaaaaacaaaggca

SEQ ID NO: 1015535 - DNA, 15 bp, Homo sapiens
gttaaaaacaaaggc

SEQ ID NO: 1015536 - DNA, 15 bp, Homo sapiens
tgttaaaaacaaagg

SEQ ID NO: 1015537 - DNA, 15 bp, Homo sapiens
atgttaaaaacaaag

SEQ ID NO: 1015538 - DNA, 15 bp, Homo sapiens
tatgttaaaaacaaa

SEQ ID NO: 1015539 - DNA, 15 bp, Homo sapiens
ttatgttaaaaacaa

SEQ ID NO: 1015540 - DNA, 15 bp, Homo sapiens
attatgttaaaaaca

SEQ ID NO: 1015541 - DNA, 15 bp, Homo sapiens
aattatgttaaaaac

SEQ ID NO: 1015542 - DNA, 15 bp, Homo sapiens
aaattatgttaaaaa

SEQ ID NO: 1015543 - DNA, 15 bp, Homo sapiens
taaattatgttaaaa

SEQ ID NO: 1015544 - DNA, 15 bp, Homo sapiens
gtaaattatgttaaa

SEQ ID NO: 1015545 - DNA, 15 bp, Homo sapiens
cgtaaattatgttaa

SEQ ID NO: 1015546 - DNA, 15 bp, Homo sapiens
acgtaaattatgtta

SEQ ID NO: 1015547 - DNA, 15 bp, Homo sapiens
tacgtaaattatgtt

SEQ ID NO: 1015548 - DNA, 15 bp, Homo sapiens
ttacgtaaattatgt

SEQ ID NO: 1015549 - DNA, 15 bp, Homo sapiens
attacgtaaattatg

SEQ ID NO: 1015550 - DNA, 15 bp, Homo sapiens
aattacgtaaattat

SEQ ID NO: 1015551 - DNA, 15 bp, Homo sapiens
aaattacgtaaatta

SEQ ID NO: 1015552 - DNA, 15 bp, Homo sapiens
aaaattacgtaaatt

SEQ ID NO: 1015553 - DNA, 15 bp, Homo sapiens
taaaattacgtaaat

SEQ ID NO: 1015554 - DNA, 15 bp, Homo sapiens
gtaaaattacgtaaa

SEQ ID NO: 1015555 - DNA, 15 bp, Homo sapiens
cgtaaaattacgtaa

SEQ ID NO: 1015556 - DNA, 15 bp, Homo sapiens
acgtaaaattacgta

SEQ ID NO: 1015557 - DNA, 15 bp, Homo sapiens
aacgtaaaattacgt

SEQ ID NO: 1015558 - DNA, 15 bp, Homo sapiens
aaacgtaaaattacg

SEQ ID NO: 1015559 - DNA, 15 bp, Homo sapiens
taaacgtaaaattac

SEQ ID NO: 1015560 - DNA, 15 bp, Homo sapiens
ataaacgtaaaatta

SEQ ID NO: 1015561 - DNA, 15 bp, Homo sapiens
tataaacgtaaaatt

SEQ ID NO: 1015562 - DNA, 15 bp, Homo sapiens
atataaacgtaaaat

SEQ ID NO: 1015563 - DNA, 15 bp, Homo sapiens
catataaacgtaaaa

SEQ ID NO: 1015564 - DNA, 15 bp, Homo sapiens
tcatataaacgtaaa

SEQ ID NO: 1015565 - DNA, 15 bp, Homo sapiens
atcatataaacgtaa

SEQ ID NO: 1015566 - DNA, 15 bp, Homo sapiens
aatcatataaacgta

SEQ ID NO: 1015567 - DNA, 15 bp, Homo sapiens
caatcatataaacgt

SEQ ID NO: 1015568 - DNA, 15 bp, Homo sapiens
tcaatcatataaacg

SEQ ID NO: 1015569 - DNA, 15 bp, Homo sapiens
ctcaatcatataaac

SEQ ID NO: 1015570 - DNA, 15 bp, Homo sapiens
actcaatcatataaa

SEQ ID NO: 1015571 - DNA, 15 bp, Homo sapiens
aactcaatcatataa

SEQ ID NO: 1015572 - DNA, 15 bp, Homo sapiens
aaactcaatcatata

SEQ ID NO: 1015573 - DNA, 15 bp, Homo sapiens
aaaactcaatcatat

SEQ ID NO: 1015574 - DNA, 15 bp, Homo sapiens
gaaaactcaatcata

SEQ ID NO: 1015575 - DNA, 15 bp, Homo sapiens
tgaaaactcaatcat

SEQ ID NO: 1015576 - DNA, 15 bp, Homo sapiens
ttgaaaactcaatca

SEQ ID NO: 1015577 - DNA, 15 bp, Homo sapiens
attgaaaactcaatc

SEQ ID NO: 1015578 - DNA, 15 bp, Homo sapiens
cattgaaaactcaat

SEQ ID NO: 1015579 - DNA, 15 bp, Homo sapiens
tcattgaaaactcaa

SEQ ID NO: 1015580 - DNA, 15 bp, Homo sapiens
atcattgaaaactca

SEQ ID NO: 1015581 - DNA, 15 bp, Homo sapiens
catcattgaaaactc

SEQ ID NO: 1015582 - DNA, 15 bp, Homo sapiens
ccatcattgaaaact

SEQ ID NO: 1015583 - DNA, 15 bp, Homo sapiens
gccatcattgaaaac

SEQ ID NO: 1015584 - DNA, 15 bp, Homo sapiens
agccatcattgaaaa

SEQ ID NO: 1015585 - DNA, 15 bp, Homo sapiens
gagccatcattgaaa

SEQ ID NO: 1015586 - DNA, 15 bp, Homo sapiens
agagccatcattgaa

SEQ ID NO: 1015587 - DNA, 15 bp, Homo sapiens
cagagccatcattga

SEQ ID NO: 1015588 - DNA, 15 bp, Homo sapiens
acagagccatcattg

SEQ ID NO: 1015589 - DNA, 15 bp, Homo sapiens
aacagagccatcatt

SEQ ID NO: 1015590 - DNA, 15 bp, Homo sapiens
aaacagagccatcat

SEQ ID NO: 1015591 - DNA, 15 bp, Homo sapiens
taaacagagccatca

SEQ ID NO: 1015592 - DNA, 15 bp, Homo sapiens
ctaaacagagccatc

SEQ ID NO: 1015593 - DNA, 15 bp, Homo sapiens
gctaaacagagccat

SEQ ID NO: 1015594 - DNA, 15 bp, Homo sapiens
tgctaaacagagcca

SEQ ID NO: 1015595 - DNA, 15 bp, Homo sapiens
ttgctaaacagagcc

SEQ ID NO: 1015596 - DNA, 15 bp, Homo sapiens
attgctaaacagagc

SEQ ID NO: 1015597 - DNA, 15 bp, Homo sapiens
cattgctaaacagag

SEQ ID NO: 1015598 - DNA, 15 bp, Homo sapiens
ccattgctaaacaga

SEQ ID NO: 1015599 - DNA, 15 bp, Homo sapiens
cccattgctaaacag

SEQ ID NO: 1015600 - DNA, 15 bp, Homo sapiens
tcccattgctaaaca

SEQ ID NO: 1015601 - DNA, 15 bp, Homo sapiens
atcccattgctaaac

SEQ ID NO: 1015602 - DNA, 15 bp, Homo sapiens
gatcccattgctaaa

SEQ ID NO: 1015603 - DNA, 15 bp, Homo sapiens
ggatcccattgctaa

SEQ ID NO: 1015604 - DNA, 15 bp, Homo sapiens
gggatcccattgcta

SEQ ID NO: 1015605 - DNA, 15 bp, Homo sapiens
cgggatcccattgct

SEQ ID NO: 1015606 - DNA, 15 bp, Homo sapiens
acgggatcccattgc

SEQ ID NO: 1015607 - DNA, 15 bp, Homo sapiens
cacgggatcccattg

SEQ ID NO: 1015608 - DNA, 15 bp, Homo sapiens
tcacgggatcccatt

SEQ ID NO: 1015609 - DNA, 15 bp, Homo sapiens
ctcacgggatcccat

SEQ ID NO: 1015610 - DNA, 15 bp, Homo sapiens
actcacgggatccca

SEQ ID NO: 1015611 - DNA, 15 bp, Homo sapiens
gactcacgggatccc

SEQ ID NO: 1015612 - DNA, 15 bp, Homo sapiens
tgactcacgggatcc

SEQ ID NO: 1015613 - DNA, 15 bp, Homo sapiens
ctgactcacgggatc

SEQ ID NO: 1015614 - DNA, 15 bp, Homo sapiens
actgactcacgggat

SEQ ID NO: 1015615 - DNA, 15 bp, Homo sapiens
tactgactcacggga

SEQ ID NO: 1015616 - DNA, 15 bp, Homo sapiens
gtactgactcacggg

SEQ ID NO: 1015617 - DNA, 15 bp, Homo sapiens
agtactgactcacgg

SEQ ID NO: 1015618 - DNA, 15 bp, Homo sapiens
tagtactgactcacg

SEQ ID NO: 1015619 - DNA, 15 bp, Homo sapiens
ttagtactgactcac

SEQ ID NO: 1015620 - DNA, 15 bp, Homo sapiens
tttagtactgactca

SEQ ID NO: 1015621 - DNA, 15 bp, Homo sapiens
atttagtactgactc

SEQ ID NO: 1015622 - DNA, 15 bp, Homo sapiens
aatttagtactgact

SEQ ID NO: 1015623 - DNA, 15 bp, Homo sapiens
taatttagtactgac

SEQ ID NO: 1015624 - DNA, 15 bp, Homo sapiens
ttaatttagtactga

SEQ ID NO: 1015625 - DNA, 15 bp, Homo sapiens
tttaatttagtactg

SEQ ID NO: 1015626 - DNA, 15 bp, Homo sapiens
atttaatttagtact

SEQ ID NO: 1015627 - DNA, 15 bp, Homo sapiens
tatttaatttagtac

SEQ ID NO: 1015628 - DNA, 15 bp, Homo sapiens
gtatttaatttagta

SEQ ID NO: 1015629 - DNA, 15 bp, Homo sapiens
tgtatttaatttagt

SEQ ID NO: 1015630 - DNA, 15 bp, Homo sapiens
ttgtatttaatttag

SEQ ID NO: 1015631 - DNA, 15 bp, Homo sapiens
gttgtatttaattta

SEQ ID NO: 1015632 - DNA, 15 bp, Homo sapiens
ggttgtatttaattt

SEQ ID NO: 1015633 - DNA, 15 bp, Homo sapiens
aggttgtatttaatt

SEQ ID NO: 1015634 - DNA, 15 bp, Homo sapiens
taggttgtatttaat

SEQ ID NO: 1015635 - DNA, 15 bp, Homo sapiens
ttaggttgtatttaa

SEQ ID NO: 1015636 - DNA, 15 bp, Homo sapiens
tttaggttgtattta

SEQ ID NO: 1015637 - DNA, 15 bp, Homo sapiens
gtttaggttgtattt

SEQ ID NO: 1015638 - DNA, 15 bp, Homo sapiens
tgtttaggttgtatt

SEQ ID NO: 1015639 - DNA, 15 bp, Homo sapiens
atgtttaggttgtat

SEQ ID NO: 1015640 - DNA, 15 bp, Homo sapiens
aatgtttaggttgta

SEQ ID NO: 1015641 - DNA, 15 bp, Homo sapiens
gaatgtttaggttgt

SEQ ID NO: 1015642 - DNA, 15 bp, Homo sapiens
tgaatgtttaggttg

SEQ ID NO: 1015643 - DNA, 15 bp, Homo sapiens
ttgaatgtttaggtt

SEQ ID NO: 1015644 - DNA, 15 bp, Homo sapiens
tttgaatgtttaggt

SEQ ID NO: 1015645 - DNA, 15 bp, Homo sapiens
ttttgaatgtttagg

SEQ ID NO: 1015646 - DNA, 15 bp, Homo sapiens
attttgaatgtttag

SEQ ID NO: 1015647 - DNA, 15 bp, Homo sapiens
tattttgaatgttta

SEQ ID NO: 1015648 - DNA, 15 bp, Homo sapiens
ctattttgaatgttt

SEQ ID NO: 1015649 - DNA, 15 bp, Homo sapiens
cctattttgaatgtt

SEQ ID NO: 1015650 - DNA, 15 bp, Homo sapiens
ccctattttgaatgt

SEQ ID NO: 1015651 - DNA, 15 bp, Homo sapiens
accctattttgaatg

SEQ ID NO: 1015652 - DNA, 15 bp, Homo sapiens
taccctattttgaat

SEQ ID NO: 1015653 - DNA, 15 bp, Homo sapiens
ttaccctattttgaa

SEQ ID NO: 1015654 - DNA, 15 bp, Homo sapiens
cttaccctattttga

SEQ ID NO: 1015655 - DNA, 15 bp, Homo sapiens
tcttaccctattttg

SEQ ID NO: 1015656 - DNA, 15 bp, Homo sapiens
gtcttaccctatttt

SEQ ID NO: 1015657 - DNA, 15 bp, Homo sapiens
cgtcttaccctattt

SEQ ID NO: 1015658 - DNA, 15 bp, Homo sapiens
gcgtcttaccctatt

SEQ ID NO: 1015659 - DNA, 15 bp, Homo sapiens
tgcgtcttaccctat

SEQ ID NO: 1015660 - DNA, 15 bp, Homo sapiens
atgcgtcttacccta

SEQ ID NO: 1015661 - DNA, 15 bp, Homo sapiens
tatgcgtcttaccct

SEQ ID NO: 1015662 - DNA, 15 bp, Homo sapiens
ttatgcgtcttaccc

SEQ ID NO: 1015663 - DNA, 15 bp, Homo sapiens
gttatgcgtcttacc

SEQ ID NO: 1015664 - DNA, 15 bp, Homo sapiens
agttatgcgtcttac

SEQ ID NO: 1015665 - DNA, 15 bp, Homo sapiens
aagttatgcgtctta

SEQ ID NO: 1015666 - DNA, 15 bp, Homo sapiens
taagttatgcgtctt

SEQ ID NO: 1015667 - DNA, 15 bp, Homo sapiens
ttaagttatgcgtct

SEQ ID NO: 1015668 - DNA, 15 bp, Homo sapiens
tttaagttatgcgtc

SEQ ID NO: 1015669 - DNA, 15 bp, Homo sapiens
ctttaagttatgcgt

SEQ ID NO: 1015670 - DNA, 15 bp, Homo sapiens
tctttaagttatgcg

SEQ ID NO: 1015671 - DNA, 15 bp, Homo sapiens
gtctttaagttatgc

SEQ ID NO: 1015672 - DNA, 15 bp, Homo sapiens
cgtctttaagttatg

SEQ ID NO: 1015673 - DNA, 15 bp, Homo sapiens
acgtctttaagttat

SEQ ID NO: 1015674 - DNA, 15 bp, Homo sapiens
cacgtctttaagtta

SEQ ID NO: 1015675 - DNA, 15 bp, Homo sapiens
gcacgtctttaagtt

SEQ ID NO: 1015676 - DNA, 15 bp, Homo sapiens
agcacgtctttaagt

SEQ ID NO: 1015677 - DNA, 15 bp, Homo sapiens
gagcacgtctttaag

SEQ ID NO: 1015678 - DNA, 15 bp, Homo sapiens
ggagcacgtctttaa

SEQ ID NO: 1015679 - DNA, 15 bp, Homo sapiens
tggagcacgtcttta

SEQ ID NO: 1015680 - DNA, 15 bp, Homo sapiens
gtggagcacgtcttt

SEQ ID NO: 1015681 - DNA, 15 bp, Homo sapiens
agtggagcacgtctt

SEQ ID NO: 1015682 - DNA, 15 bp, Homo sapiens
cagtggagcacgtct

SEQ ID NO: 1015683 - DNA, 15 bp, Homo sapiens
gcagtggagcacgtc

SEQ ID NO: 1015684 - DNA, 15 bp, Homo sapiens
cgcagtggagcacgt

SEQ ID NO: 1015685 - DNA, 15 bp, Homo sapiens
tcgcagtggagcacg

SEQ ID NO: 1015686 - DNA, 15 bp, Homo sapiens
ttcgcagtggagcac

SEQ ID NO: 1015687 - DNA, 15 bp, Homo sapiens
attcgcagtggagca

SEQ ID NO: 1015688 - DNA, 15 bp, Homo sapiens
aattcgcagtggagc

SEQ ID NO: 1015689 - DNA, 15 bp, Homo sapiens
taattcgcagtggag

SEQ ID NO: 1015690 - DNA, 15 bp, Homo sapiens
gtaattcgcagtgga

SEQ ID NO: 1015691 - DNA, 15 bp, Homo sapiens
tgtaattcgcagtgg

SEQ ID NO: 1015692 - DNA, 15 bp, Homo sapiens
gtgtaattcgcagtg

SEQ ID NO: 1015693 - DNA, 15 bp, Homo sapiens
cgtgtaattcgcagt

SEQ ID NO: 1015694 - DNA, 15 bp, Homo sapiens
ccgtgtaattcgcag

SEQ ID NO: 1015695 - DNA, 15 bp, Homo sapiens
tccgtgtaattcgca

SEQ ID NO: 1015696 - DNA, 15 bp, Homo sapiens
ttccgtgtaattcgc

SEQ ID NO: 1015697 - DNA, 15 bp, Homo sapiens
attccgtgtaattcg

SEQ ID NO: 1015698 - DNA, 15 bp, Homo sapiens
gattccgtgtaattc

SEQ ID NO: 1015699 - DNA, 15 bp, Homo sapiens
agattccgtgtaatt

SEQ ID NO: 1015700 - DNA, 15 bp, Homo sapiens
aagattccgtgtaat

SEQ ID NO: 1015701 - DNA, 15 bp, Homo sapiens
aaagattccgtgtaa

SEQ ID NO: 1015702 - DNA, 15 bp, Homo sapiens
caaagattccgtgta

SEQ ID NO: 1015703 - DNA, 15 bp, Homo sapiens
tcaaagattccgtgt

SEQ ID NO: 1015704 - DNA, 15 bp, Homo sapiens
gtcaaagattccgtg

SEQ ID NO: 1015705 - DNA, 15 bp, Homo sapiens
agtcaaagattccgt

SEQ ID NO: 1015706 - DNA, 15 bp, Homo sapiens
tagtcaaagattccg

SEQ ID NO: 1015707 - DNA, 15 bp, Homo sapiens
atagtcaaagattcc

SEQ ID NO: 1015708 - DNA, 15 bp, Homo sapiens
catagtcaaagattc

SEQ ID NO: 1015709 - DNA, 15 bp, Homo sapiens
gcatagtcaaagatt

SEQ ID NO: 1015710 - DNA, 15 bp, Homo sapiens
ggcatagtcaaagat

SEQ ID NO: 1015711 - DNA, 15 bp, Homo sapiens
cggcatagtcaaaga

SEQ ID NO: 1015712 - DNA, 15 bp, Homo sapiens
tcggcatagtcaaag

SEQ ID NO: 1015713 - DNA, 15 bp, Homo sapiens
gtcggcatagtcaaa

SEQ ID NO: 1015714 - DNA, 15 bp, Homo sapiens
agtcggcatagtcaa

SEQ ID NO: 1015715 - DNA, 15 bp, Homo sapiens
tagtcggcatagtca

SEQ ID NO: 1015716 - DNA, 15 bp, Homo sapiens
ttagtcggcatagtc

SEQ ID NO: 1015717 - DNA, 15 bp, Homo sapiens
tttagtcggcatagt

SEQ ID NO: 1015718 - DNA, 15 bp, Homo sapiens
gtttagtcggcatag

SEQ ID NO: 1015719 - DNA, 15 bp, Homo sapiens
tgtttagtcggcata

SEQ ID NO: 1015720 - DNA, 15 bp, Homo sapiens
ctgtttagtcggcat

SEQ ID NO: 1015721 - DNA, 15 bp, Homo sapiens
tctgtttagtcggca

SEQ ID NO: 1015722 - DNA, 15 bp, Homo sapiens
ttctgtttagtcggc

SEQ ID NO: 1015723 - DNA, 15 bp, Homo sapiens
cttctgtttagtcgg

SEQ ID NO: 1015724 - DNA, 15 bp, Homo sapiens
ccttctgtttagtcg

SEQ ID NO: 1015725 - DNA, 15 bp, Homo sapiens
gccttctgtttagtc

SEQ ID NO: 1015726 - DNA, 15 bp, Homo sapiens
agccttctgtttagt

SEQ ID NO: 1015727 - DNA, 15 bp, Homo sapiens
tagccttctgtttag

SEQ ID NO: 1015728 - DNA, 15 bp, Homo sapiens
atagccttctgttta

SEQ ID NO: 1015729 - DNA, 15 bp, Homo sapiens
aatagccttctgttt

SEQ ID NO: 1015730 - DNA, 15 bp, Homo sapiens
gaatagccttctgtt

SEQ ID NO: 1015731 - DNA, 15 bp, Homo sapiens
ggaatagccttctgt

SEQ ID NO: 1015732 - DNA, 15 bp, Homo sapiens
aggaatagccttctg

SEQ ID NO: 1015733 - DNA, 15 bp, Homo sapiens
taggaatagccttct

SEQ ID NO: 1015734 - DNA, 15 bp, Homo sapiens
ttaggaatagccttc

SEQ ID NO: 1015735 - DNA, 15 bp, Homo sapiens
cttaggaatagcctt

SEQ ID NO: 1015736 - DNA, 15 bp, Homo sapiens
acttaggaatagcct

SEQ ID NO: 1015737 - DNA, 15 bp, Homo sapiens
tacttaggaatagcc

SEQ ID NO: 1015738 - DNA, 15 bp, Homo sapiens
gtacttaggaatagc

SEQ ID NO: 1015739 - DNA, 15 bp, Homo sapiens
ggtacttaggaatag

SEQ ID NO: 1015740 - DNA, 15 bp, Homo sapiens
tggtacttaggaata

SEQ ID NO: 1015741 - DNA, 15 bp, Homo sapiens
atggtacttaggaat

SEQ ID NO: 1015742 - DNA, 15 bp, Homo sapiens
gatggtacttaggaa

SEQ ID NO: 1015743 - DNA, 15 bp, Homo sapiens
ggatggtacttagga

SEQ ID NO: 1015744 - DNA, 15 bp, Homo sapiens
gggatggtacttagg

SEQ ID NO: 1015745 - DNA, 15 bp, Homo sapiens
tgggatggtacttag

SEQ ID NO: 1015746 - DNA, 15 bp, Homo sapiens
atgggatggtactta

SEQ ID NO: 1015747 - DNA, 15 bp, Homo sapiens
tatgggatggtactt

SEQ ID NO: 1015748 - DNA, 15 bp, Homo sapiens
atatgggatggtact

SEQ ID NO: 1015749 - DNA, 15 bp, Homo sapiens
catatgggatggtac

SEQ ID NO: 1015750 - DNA, 15 bp, Homo sapiens
acatatgggatggta

SEQ ID NO: 1015751 - DNA, 15 bp, Homo sapiens
cacatatgggatggt

SEQ ID NO: 1015752 - DNA, 15 bp, Homo sapiens
gcacatatgggatgg

SEQ ID NO: 1015753 - DNA, 15 bp, Homo sapiens
agcacatatgggatg

SEQ ID NO: 1015754 - DNA, 15 bp, Homo sapiens
tagcacatatgggat

SEQ ID NO: 1015755 - DNA, 15 bp, Homo sapiens
ctagcacatatggga

SEQ ID NO: 1015756 - DNA, 15 bp, Homo sapiens
actagcacatatggg

SEQ ID NO: 1015757 - DNA, 15 bp, Homo sapiens
aactagcacatatgg

SEQ ID NO: 1015758 - DNA, 15 bp, Homo sapiens
aaactagcacatatg

SEQ ID NO: 1015759 - DNA, 15 bp, Homo sapiens
aaaactagcacatat

SEQ ID NO: 1015760 - DNA, 15 bp, Homo sapiens
aaaaactagcacata

SEQ ID NO: 1015761 - DNA, 15 bp, Homo sapiens
gaaaaactagcacat

SEQ ID NO: 1015762 - DNA, 15 bp, Homo sapiens
tgaaaaactagcaca

SEQ ID NO: 1015763 - DNA, 15 bp, Homo sapiens
ttgaaaaactagcac

SEQ ID NO: 1015764 - DNA, 15 bp, Homo sapiens
tttgaaaaactagca

SEQ ID NO: 1015765 - DNA, 15 bp, Homo sapiens
ttttgaaaaactagc

SEQ ID NO: 1015766 - DNA, 15 bp, Homo sapiens
gttttgaaaaactag

SEQ ID NO: 1015767 - DNA, 15 bp, Homo sapiens
ggttttgaaaaacta

SEQ ID NO: 1015768 - DNA, 15 bp, Homo sapiens
tggttttgaaaaact

SEQ ID NO: 1015769 - DNA, 15 bp, Homo sapiens
ttggttttgaaaaac

SEQ ID NO: 1015770 - DNA, 15 bp, Homo sapiens
gttggttttgaaaaa

SEQ ID NO: 1015771 - DNA, 15 bp, Homo sapiens
tgttggttttgaaaa

SEQ ID NO: 1015772 - DNA, 15 bp, Homo sapiens
ttgttggttttgaaa

SEQ ID NO: 1015773 - DNA, 15 bp, Homo sapiens
attgttggttttgaa

SEQ ID NO: 1015774 - DNA, 15 bp, Homo sapiens
tattgttggttttga

SEQ ID NO: 1015775 - DNA, 15 bp, Homo sapiens
ttattgttggttttg

SEQ ID NO: 1015776 - DNA, 15 bp, Homo sapiens
tttattgttggtttt

SEQ ID NO: 1015777 - DNA, 15 bp, Homo sapiens
ctttattgttggttt

SEQ ID NO: 1015778 - DNA, 15 bp, Homo sapiens
gctttattgttggtt

SEQ ID NO: 1015779 - DNA, 15 bp, Homo sapiens
tgctttattgttggt

SEQ ID NO: 1015780 - DNA, 15 bp, Homo sapiens
ctgctttattgttgg

SEQ ID NO: 1015781 - DNA, 15 bp, Homo sapiens
actgctttattgttg

SEQ ID NO: 1015782 - DNA, 15 bp, Homo sapiens
aactgctttattgtt

SEQ ID NO: 1015783 - DNA, 15 bp, Homo sapiens
caactgctttattgt

SEQ ID NO: 1015784 - DNA, 15 bp, Homo sapiens
ccaactgctttattg

SEQ ID NO: 1015785 - DNA, 15 bp, Homo sapiens
cccaactgctttatt

SEQ ID NO: 1015786 - DNA, 15 bp, Homo sapiens
ccccaactgctttat

SEQ ID NO: 1015787 - DNA, 15 bp, Homo sapiens
tccccaactgcttta

SEQ ID NO: 1015788 - DNA, 15 bp, Homo sapiens
ctccccaactgcttt

SEQ ID NO: 1015789 - DNA, 15 bp, Homo sapiens
cctccccaactgctt

SEQ ID NO: 1015790 - DNA, 15 bp, Homo sapiens
acctccccaactgct

SEQ ID NO: 1015791 - DNA, 15 bp, Homo sapiens
cacctccccaactgc

SEQ ID NO: 1015792 - DNA, 15 bp, Homo sapiens
gcacctccccaactg

SEQ ID NO: 1015793 - DNA, 15 bp, Homo sapiens
ggcacctccccaact

SEQ ID NO: 1015794 - DNA, 15 bp, Homo sapiens
aggcacctccccaac

SEQ ID NO: 1015795 - DNA, 15 bp, Homo sapiens
aaggcacctccccaa

SEQ ID NO: 1015796 - DNA, 15 bp, Homo sapiens
caaggcacctcccca

SEQ ID NO: 1015797 - DNA, 15 bp, Homo sapiens
acaaggcacctcccc

SEQ ID NO: 1015798 - DNA, 15 bp, Homo sapiens
tacaaggcacctccc

SEQ ID NO: 1015799 - DNA, 15 bp, Homo sapiens
gtacaaggcacctcc

SEQ ID NO: 1015800 - DNA, 15 bp, Homo sapiens
tgtacaaggcacctc

SEQ ID NO: 1015801 - DNA, 15 bp, Homo sapiens
gtgtacaaggcacct

SEQ ID NO: 1015802 - DNA, 15 bp, Homo sapiens
tgtgtacaaggcacc

SEQ ID NO: 1015803 - DNA, 15 bp, Homo sapiens
ctgtgtacaaggcac

SEQ ID NO: 1015804 - DNA, 15 bp, Homo sapiens
tctgtgtacaaggca

SEQ ID NO: 1015805 - DNA, 15 bp, Homo sapiens
ttctgtgtacaaggc

SEQ ID NO: 1015806 - DNA, 15 bp, Homo sapiens
attctgtgtacaagg

SEQ ID NO: 1015807 - DNA, 15 bp, Homo sapiens
cattctgtgtacaag

SEQ ID NO: 1015808 - DNA, 15 bp, Homo sapiens
tcattctgtgtacaa

SEQ ID NO: 1015809 - DNA, 15 bp, Homo sapiens
gtcattctgtgtaca

SEQ ID NO: 1015810 - DNA, 15 bp, Homo sapiens
cgtcattctgtgtac

SEQ ID NO: 1015811 - DNA, 15 bp, Homo sapiens
gcgtcattctgtgta

SEQ ID NO: 1015812 - DNA, 15 bp, Homo sapiens
ggcgtcattctgtgt

SEQ ID NO: 1015813 - DNA, 15 bp, Homo sapiens
tggcgtcattctgtg

SEQ ID NO: 1015814 - DNA, 15 bp, Homo sapiens
gtggcgtcattctgt

SEQ ID NO: 1015815 - DNA, 15 bp, Homo sapiens
cgtggcgtcattctg

SEQ ID NO: 1015816 - DNA, 15 bp, Homo sapiens
tcgtggcgtcattct

SEQ ID NO: 1015817 - DNA, 15 bp, Homo sapiens
ctcgtggcgtcattc

SEQ ID NO: 1015818 - DNA, 15 bp, Homo sapiens
cctcgtggcgtcatt

SEQ ID NO: 1015819 - DNA, 15 bp, Homo sapiens
gcctcgtggcgtcat

SEQ ID NO: 1015820 - DNA, 15 bp, Homo sapiens
tgcctcgtggcgtca

SEQ ID NO: 1015821 - DNA, 15 bp, Homo sapiens
atgcctcgtggcgtc

SEQ ID NO: 1015822 - DNA, 15 bp, Homo sapiens
aatgcctcgtggcgt

SEQ ID NO: 1015823 - DNA, 15 bp, Homo sapiens
aaatgcctcgtggcg

SEQ ID NO: 1015824 - DNA, 15 bp, Homo sapiens
caaatgcctcgtggc

SEQ ID NO: 1015825 - DNA, 15 bp, Homo sapiens
tcaaatgcctcgtgg

SEQ ID NO: 1015826 - DNA, 15 bp, Homo sapiens
ctcaaatgcctcgtg

SEQ ID NO: 1015827 - DNA, 15 bp, Homo sapiens
tctcaaatgcctcgt

SEQ ID NO: 1015828 - DNA, 15 bp, Homo sapiens
atctcaaatgcctcg

SEQ ID NO: 1015829 - DNA, 15 bp, Homo sapiens
catctcaaatgcctc

SEQ ID NO: 1015830 - DNA, 15 bp, Homo sapiens
tcatctcaaatgcct

SEQ ID NO: 1015831 - DNA, 15 bp, Homo sapiens
ttcatctcaaatgcc

SEQ ID NO: 1015832 - DNA, 15 bp, Homo sapiens
gttcatctcaaatgc

SEQ ID NO: 1015833 - DNA, 15 bp, Homo sapiens
cgttcatctcaaatg

SEQ ID NO: 1015834 - DNA, 15 bp, Homo sapiens
acgttcatctcaaat

SEQ ID NO: 1015835 - DNA, 15 bp, Homo sapiens
gacgttcatctcaaa

SEQ ID NO: 1015836 - DNA, 15 bp, Homo sapiens
ggacgttcatctcaa

SEQ ID NO: 1015837 - DNA, 15 bp, Homo sapiens
tggacgttcatctca

SEQ ID NO: 1015838 - DNA, 15 bp, Homo sapiens
ttggacgttcatctc

SEQ ID NO: 1015839 - DNA, 15 bp, Homo sapiens
tttggacgttcatct

SEQ ID NO: 1015840 - DNA, 15 bp, Homo sapiens
ctttggacgttcatc

SEQ ID NO: 1015841 - DNA, 15 bp, Homo sapiens
cctttggacgttcat

SEQ ID NO: 1015842 - DNA, 15 bp, Homo sapiens
ccctttggacgttca

SEQ ID NO: 1015843 - DNA, 15 bp, Homo sapiens
tccctttggacgttc

SEQ ID NO: 1015844 - DNA, 15 bp, Homo sapiens
gtccctttggacgtt

SEQ ID NO: 1015845 - DNA, 15 bp, Homo sapiens
tgtccctttggacgt

SEQ ID NO: 1015846 - DNA, 15 bp, Homo sapiens
ttgtccctttggacg

SEQ ID NO: 1015847 - DNA, 15 bp, Homo sapiens
tttgtccctttggac

SEQ ID NO: 1015848 - DNA, 15 bp, Homo sapiens
ctttgtccctttgga

SEQ ID NO: 1015849 - DNA, 15 bp, Homo sapiens
tctttgtccctttgg

SEQ ID NO: 1015850 - DNA, 15 bp, Homo sapiens
ttctttgtccctttg

SEQ ID NO: 1015851 - DNA, 15 bp, Homo sapiens
cttctttgtcccttt

SEQ ID NO: 1015852 - DNA, 15 bp, Homo sapiens
gcttctttgtccctt

SEQ ID NO: 1015853 - DNA, 15 bp, Homo sapiens
ggcttctttgtccct

SEQ ID NO: 1015854 - DNA, 15 bp, Homo sapiens
tggcttctttgtccc

SEQ ID NO: 1015855 - DNA, 15 bp, Homo sapiens
ctggcttctttgtcc

SEQ ID NO: 1015856 - DNA, 15 bp, Homo sapiens
tctggcttctttgtc

SEQ ID NO: 1015857 - DNA, 15 bp, Homo sapiens
gtctggcttctttgt

SEQ ID NO: 1015858 - DNA, 15 bp, Homo sapiens
ggtctggcttctttg

SEQ ID NO: 1015859 - DNA, 15 bp, Homo sapiens
cggtctggcttcttt

SEQ ID NO: 1015860 - DNA, 15 bp, Homo sapiens
gcggtctggcttctt

SEQ ID NO: 1015861 - DNA, 15 bp, Homo sapiens
agcggtctggcttct

SEQ ID NO: 1015862 - DNA, 15 bp, Homo sapiens
aagcggtctggcttc

SEQ ID NO: 1015863 - DNA, 15 bp, Homo sapiens
gaagcggtctggctt

SEQ ID NO: 1015864 - DNA, 15 bp, Homo sapiens
ggaagcggtctggct

SEQ ID NO: 1015865 - DNA, 15 bp, Homo sapiens
cggaagcggtctggc

SEQ ID NO: 1015866 - DNA, 15 bp, Homo sapiens
tcggaagcggtctgg

SEQ ID NO: 1015867 - DNA, 15 bp, Homo sapiens
ctcggaagcggtctg

SEQ ID NO: 1015868 - DNA, 15 bp, Homo sapiens
tctcggaagcggtct

SEQ ID NO: 1015869 - DNA, 15 bp, Homo sapiens
ttctcggaagcggtc

SEQ ID NO: 1015870 - DNA, 15 bp, Homo sapiens
gttctcggaagcggt

SEQ ID NO: 1015871 - DNA, 15 bp, Homo sapiens
cgttctcggaagcgg

SEQ ID NO: 1015872 - DNA, 15 bp, Homo sapiens
ccgttctcggaagcg

SEQ ID NO: 1015873 - DNA, 15 bp, Homo sapiens
cccgttctcggaagc

SEQ ID NO: 1015874 - DNA, 15 bp, Homo sapiens
ccccgttctcggaag

SEQ ID NO: 1015875 - DNA, 15 bp, Homo sapiens
tccccgttctcggaa

SEQ ID NO: 1015876 - DNA, 15 bp, Homo sapiens
gtccccgttctcgga

SEQ ID NO: 1015877 - DNA, 15 bp, Homo sapiens
tgtccccgttctcgg

SEQ ID NO: 1015878 - DNA, 15 bp, Homo sapiens
ctgtccccgttctcg

SEQ ID NO: 1015879 - DNA, 15 bp, Homo sapiens
tctgtccccgttctc

SEQ ID NO: 1015880 - DNA, 15 bp, Homo sapiens
ttctgtccccgttct

SEQ ID NO: 1015881 - DNA, 15 bp, Homo sapiens
attctgtccccgttc

SEQ ID NO: 1015882 - DNA, 15 bp, Homo sapiens
cattctgtccccgtt

SEQ ID NO: 1015883 - DNA, 15 bp, Homo sapiens
acattctgtccccgt

SEQ ID NO: 1015884 - DNA, 15 bp, Homo sapiens
gacattctgtccccg

SEQ ID NO: 1015885 - DNA, 15 bp, Homo sapiens
agacattctgtcccc

SEQ ID NO: 1015886 - DNA, 15 bp, Homo sapiens
aagacattctgtccc

SEQ ID NO: 1015887 - DNA, 15 bp, Homo sapiens
gaagacattctgtcc

SEQ ID NO: 1015888 - DNA, 15 bp, Homo sapiens
cgaagacattctgtc

SEQ ID NO: 1015889 - DNA, 15 bp, Homo sapiens
ccgaagacattctgt

SEQ ID NO: 1015890 - DNA, 15 bp, Homo sapiens
cccgaagacattctg

SEQ ID NO: 1015891 - DNA, 15 bp, Homo sapiens
gcccgaagacattct

SEQ ID NO: 1015892 - DNA, 15 bp, Homo sapiens
agcccgaagacattc

SEQ ID NO: 1015893 - DNA, 15 bp, Homo sapiens
aagcccgaagacatt

SEQ ID NO: 1015894 - DNA, 15 bp, Homo sapiens
gaagcccgaagacat

SEQ ID NO: 1015895 - DNA, 15 bp, Homo sapiens
agaagcccgaagaca

SEQ ID NO: 1015896 - DNA, 15 bp, Homo sapiens
cagaagcccgaagac

SEQ ID NO: 1015897 - DNA, 15 bp, Homo sapiens
gcagaagcccgaaga

SEQ ID NO: 1015898 - DNA, 15 bp, Homo sapiens
cgcagaagcccgaag

SEQ ID NO: 1015899 - DNA, 15 bp, Homo sapiens
gcgcagaagcccgaa

SEQ ID NO: 1015900 - DNA, 15 bp, Homo sapiens
ggcgcagaagcccga

SEQ ID NO: 1015901 - DNA, 15 bp, Homo sapiens
cggcgcagaagcccg

SEQ ID NO: 1015902 - DNA, 15 bp, Homo sapiens
ccggcgcagaagccc

SEQ ID NO: 1015903 - DNA, 15 bp, Homo sapiens
cccggcgcagaagcc

SEQ ID NO: 1015904 - DNA, 15 bp, Homo sapiens
ccccggcgcagaagc

SEQ ID NO: 1015905 - DNA, 15 bp, Homo sapiens
cccccggcgcagaag

SEQ ID NO: 1015906 - DNA, 15 bp, Homo sapiens
gcccccggcgcagaa

SEQ ID NO: 1015907 - DNA, 15 bp, Homo sapiens
cgcccccggcgcaga

SEQ ID NO: 1015908 - DNA, 15 bp, Homo sapiens
ccgcccccggcgcag

SEQ ID NO: 1015909 - DNA, 15 bp, Homo sapiens
gccgcccccggcgca

SEQ ID NO: 1015910 - DNA, 15 bp, Homo sapiens
cgccgcccccggcgc

SEQ ID NO: 1015911 - DNA, 15 bp, Homo sapiens
gcgccgcccccggcg

SEQ ID NO: 1015912 - DNA, 15 bp, Homo sapiens
ggcgccgcccccggc

SEQ ID NO: 1015913 - DNA, 15 bp, Homo sapiens
cggcgccgcccccgg

SEQ ID NO: 1015914 - DNA, 15 bp, Homo sapiens
ccggcgccgcccccg

SEQ ID NO: 1015915 - DNA, 15 bp, Homo sapiens
tccggcgccgccccc

SEQ ID NO: 1015916 - DNA, 15 bp, Homo sapiens
ttccggcgccgcccc

SEQ ID NO: 1015917 - DNA, 15 bp, Homo sapiens
cttccggcgccgccc

SEQ ID NO: 1015918 - DNA, 15 bp, Homo sapiens
ccttccggcgccgcc

SEQ ID NO: 1015919 - DNA, 15 bp, Homo sapiens
gccttccggcgccgc

SEQ ID NO: 1015920 - DNA, 15 bp, Homo sapiens
agccttccggcgccg

SEQ ID NO: 1015921 - DNA, 15 bp, Homo sapiens
cagccttccggcgcc

SEQ ID NO: 1015922 - DNA, 15 bp, Homo sapiens
ccagccttccggcgc

SEQ ID NO: 1015923 - DNA, 15 bp, Homo sapiens
cccagccttccggcg

SEQ ID NO: 1015924 - DNA, 15 bp, Homo sapiens
acccagccttccggc

SEQ ID NO: 1015925 - DNA, 15 bp, Homo sapiens
cacccagccttccgg

SEQ ID NO: 1015926 - DNA, 15 bp, Homo sapiens
tcacccagccttccg

SEQ ID NO: 1015927 - DNA, 15 bp, Homo sapiens
ctcacccagccttcc

SEQ ID NO: 1015928 - DNA, 15 bp, Homo sapiens
gctcacccagccttc

SEQ ID NO: 1015929 - DNA, 15 bp, Homo sapiens
agctcacccagcctt

SEQ ID NO: 1015930 - DNA, 15 bp, Homo sapiens
gagctcacccagcct

SEQ ID NO: 1015931 - DNA, 15 bp, Homo sapiens
ggagctcacccagcc

SEQ ID NO: 1015932 - DNA, 15 bp, Homo sapiens
tggagctcacccagc

SEQ ID NO: 1015933 - DNA, 15 bp, Homo sapiens
gtggagctcacccag

SEQ ID NO: 1015934 - DNA, 15 bp, Homo sapiens
agtggagctcaccca

SEQ ID NO: 1015935 - DNA, 15 bp, Homo sapiens
cagtggagctcaccc

SEQ ID NO: 1015936 - DNA, 15 bp, Homo sapiens
ccagtggagctcacc

SEQ ID NO: 1015937 - DNA, 15 bp, Homo sapiens
tccagtggagctcac

SEQ ID NO: 1015938 - DNA, 15 bp, Homo sapiens
ctccagtggagctca

SEQ ID NO: 1015939 - DNA, 15 bp, Homo sapiens
tctccagtggagctc

SEQ ID NO: 1015940 - DNA, 15 bp, Homo sapiens
gtctccagtggagct

SEQ ID NO: 1015941 - DNA, 15 bp, Homo sapiens
cgtctccagtggagc

SEQ ID NO: 1015942 - DNA, 15 bp, Homo sapiens
tcgtctccagtggag

SEQ ID NO: 1015943 - DNA, 15 bp, Homo sapiens
gtcgtctccagtgga

SEQ ID NO: 1015944 - DNA, 15 bp, Homo sapiens
tgtcgtctccagtgg

SEQ ID NO: 1015945 - DNA, 15 bp, Homo sapiens
gtgtcgtctccagtg

SEQ ID NO: 1015946 - DNA, 15 bp, Homo sapiens
ggtgtcgtctccagt

SEQ ID NO: 1015947 - DNA, 15 bp, Homo sapiens
gggtgtcgtctccag

SEQ ID NO: 1015948 - DNA, 15 bp, Homo sapiens
ggggtgtcgtctcca

SEQ ID NO: 1015949 - DNA, 15 bp, Homo sapiens
tggggtgtcgtctcc

SEQ ID NO: 1015950 - DNA, 15 bp, Homo sapiens
ctggggtgtcgtctc

SEQ ID NO: 1015951 - DNA, 15 bp, Homo sapiens
cctggggtgtcgtct

SEQ ID NO: 1015952 - DNA, 15 bp, Homo sapiens
ccctggggtgtcgtc

SEQ ID NO: 1015953 - DNA, 15 bp, Homo sapiens
accctggggtgtcgt

SEQ ID NO: 1015954 - DNA, 15 bp, Homo sapiens
caccctggggtgtcg

SEQ ID NO: 1015955 - DNA, 15 bp, Homo sapiens
ccaccctggggtgtc

SEQ ID NO: 1015956 - DNA, 15 bp, Homo sapiens
accaccctggggtgt

SEQ ID NO: 1015957 - DNA, 15 bp, Homo sapiens
aaccaccctggggtg

SEQ ID NO: 1015958 - DNA, 15 bp, Homo sapiens
taaccaccctggggt

SEQ ID NO: 1015959 - DNA, 15 bp, Homo sapiens
ctaaccaccctgggg

SEQ ID NO: 1015960 - DNA, 15 bp, Homo sapiens
cctaaccaccctggg

SEQ ID NO: 1015961 - DNA, 15 bp, Homo sapiens
gcctaaccaccctgg

SEQ ID NO: 1015962 - DNA, 15 bp, Homo sapiens
ggcctaaccaccctg

SEQ ID NO: 1015963 - DNA, 15 bp, Homo sapiens
gggcctaaccaccct

SEQ ID NO: 1015964 - DNA, 15 bp, Homo sapiens
ggggcctaaccaccc

SEQ ID NO: 1015965 - DNA, 15 bp, Homo sapiens
tggggcctaaccacc

SEQ ID NO: 1015966 - DNA, 15 bp, Homo sapiens
ctggggcctaaccac

SEQ ID NO: 1015967 - DNA, 15 bp, Homo sapiens
tctggggcctaacca

SEQ ID NO: 1015968 - DNA, 15 bp, Homo sapiens
gtctggggcctaacc

SEQ ID NO: 1015969 - DNA, 15 bp, Homo sapiens
tgtctggggcctaac

SEQ ID NO: 1015970 - DNA, 15 bp, Homo sapiens
gtgtctggggcctaa

SEQ ID NO: 1015971 - DNA, 15 bp, Homo sapiens
cgtgtctggggccta

SEQ ID NO: 1015972 - DNA, 15 bp, Homo sapiens
gcgtgtctggggcct

SEQ ID NO: 1015973 - DNA, 15 bp, Homo sapiens
cgcgtgtctggggcc

SEQ ID NO: 1015974 - DNA, 15 bp, Homo sapiens
gcgcgtgtctggggc

SEQ ID NO: 1015975 - DNA, 15 bp, Homo sapiens
cgcgcgtgtctgggg

SEQ ID NO: 1015976 - DNA, 15 bp, Homo sapiens
acgcgcgtgtctggg

SEQ ID NO: 1015977 - DNA, 15 bp, Homo sapiens
cacgcgcgtgtctgg

SEQ ID NO: 1015978 - DNA, 15 bp, Homo sapiens
tcacgcgcgtgtctg

SEQ ID NO: 1015979 - DNA, 15 bp, Homo sapiens
gtcacgcgcgtgtct

SEQ ID NO: 1015980 - DNA, 15 bp, Homo sapiens
ggtcacgcgcgtgtc

SEQ ID NO: 1015981 - DNA, 15 bp, Homo sapiens
aggtcacgcgcgtgt

SEQ ID NO: 1015982 - DNA, 15 bp, Homo sapiens
aaggtcacgcgcgtg

SEQ ID NO: 1015983 - DNA, 15 bp, Homo sapiens
caaggtcacgcgcgt

SEQ ID NO: 1015984 - DNA, 15 bp, Homo sapiens
ccaaggtcacgcgcg

SEQ ID NO: 1015985 - DNA, 15 bp, Homo sapiens
gccaaggtcacgcgc

SEQ ID NO: 1015986 - DNA, 15 bp, Homo sapiens
ggccaaggtcacgcg

SEQ ID NO: 1015987 - DNA, 15 bp, Homo sapiens
cggccaaggtcacgc

SEQ ID NO: 1015988 - DNA, 15 bp, Homo sapiens
ccggccaaggtcacg

SEQ ID NO: 1015989 - DNA, 15 bp, Homo sapiens
tccggccaaggtcac

SEQ ID NO: 1015990 - DNA, 15 bp, Homo sapiens
gtccggccaaggtca

SEQ ID NO: 1015991 - DNA, 15 bp, Homo sapiens
ggtccggccaaggtc

SEQ ID NO: 1015992 - DNA, 15 bp, Homo sapiens
gggtccggccaaggt

SEQ ID NO: 1015993 - DNA, 15 bp, Homo sapiens
agggtccggccaagg

SEQ ID NO: 1015994 - DNA, 15 bp, Homo sapiens
cagggtccggccaag

SEQ ID NO: 1015995 - DNA, 15 bp, Homo sapiens
ccagggtccggccaa

SEQ ID NO: 1015996 - DNA, 15 bp, Homo sapiens
cccagggtccggcca

SEQ ID NO: 1015997 - DNA, 15 bp, Homo sapiens
tcccagggtccggcc

SEQ ID NO: 1015998 - DNA, 15 bp, Homo sapiens
ctcccagggtccggc

SEQ ID NO: 1015999 - DNA, 15 bp, Homo sapiens
gctcccagggtccgg

SEQ ID NO: 1016000 - DNA, 15 bp, Homo sapiens
cgctcccagggtccg

SEQ ID NO: 1016001 - DNA, 15 bp, Homo sapiens
ccgctcccagggtcc

SEQ ID NO: 1016002 - DNA, 15 bp, Homo sapiens
gccgctcccagggtc

SEQ ID NO: 1016003 - DNA, 15 bp, Homo sapiens
agccgctcccagggt

SEQ ID NO: 1016004 - DNA, 15 bp, Homo sapiens
cagccgctcccaggg

SEQ ID NO: 1016005 - DNA, 15 bp, Homo sapiens
tcagccgctcccagg

SEQ ID NO: 1016006 - DNA, 15 bp, Homo sapiens
ctcagccgctcccag

SEQ ID NO: 1016007 - DNA, 15 bp, Homo sapiens
gctcagccgctccca

SEQ ID NO: 1016008 - DNA, 15 bp, Homo sapiens
ggctcagccgctccc

SEQ ID NO: 1016009 - DNA, 15 bp, Homo sapiens
tggctcagccgctcc

SEQ ID NO: 1016010 - DNA, 15 bp, Homo sapiens
ctggctcagccgctc

SEQ ID NO: 1016011 - DNA, 15 bp, Homo sapiens
cctggctcagccgct

SEQ ID NO: 1016012 - DNA, 15 bp, Homo sapiens
ccctggctcagccgc

SEQ ID NO: 1016013 - DNA, 15 bp, Homo sapiens
cccctggctcagccg

SEQ ID NO: 1016014 - DNA, 15 bp, Homo sapiens
gcccctggctcagcc

SEQ ID NO: 1016015 - DNA, 15 bp, Homo sapiens
cgcccctggctcagc

SEQ ID NO: 1016016 - DNA, 15 bp, Homo sapiens
tcgcccctggctcag

SEQ ID NO: 1016017 - DNA, 15 bp, Homo sapiens
atcgcccctggctca

SEQ ID NO: 1016018 - DNA, 15 bp, Homo sapiens
gatcgcccctggctc

SEQ ID NO: 1016019 - DNA, 15 bp, Homo sapiens
ggatcgcccctggct

SEQ ID NO: 1016020 - DNA, 15 bp, Homo sapiens
gggatcgcccctggc

SEQ ID NO: 1016021 - DNA, 15 bp, Homo sapiens
ggggatcgcccctgg

SEQ ID NO: 1016022 - DNA, 15 bp, Homo sapiens
cggggatcgcccctg

SEQ ID NO: 1016023 - DNA, 15 bp, Homo sapiens
tcggggatcgcccct

SEQ ID NO: 1016024 - DNA, 15 bp, Homo sapiens
ctcggggatcgcccc

SEQ ID NO: 1016025 - DNA, 15 bp, Homo sapiens
gctcggggatcgccc

SEQ ID NO: 1016026 - DNA, 15 bp, Homo sapiens
cgctcggggatcgcc

SEQ ID NO: 1016027 - DNA, 15 bp, Homo sapiens
gcgctcggggatcgc

SEQ ID NO: 1016028 - DNA, 15 bp, Homo sapiens
ggcgctcggggatcg

SEQ ID NO: 1016029 - DNA, 15 bp, Homo sapiens
gggcgctcggggatc

SEQ ID NO: 1016030 - DNA, 15 bp, Homo sapiens
agggcgctcggggat

SEQ ID NO: 1016031 - DNA, 15 bp, Homo sapiens
gagggcgctcgggga

SEQ ID NO: 1016032 - DNA, 15 bp, Homo sapiens
ggagggcgctcgggg

SEQ ID NO: 1016033 - DNA, 15 bp, Homo sapiens
gggagggcgctcggg

SEQ ID NO: 1016034 - DNA, 15 bp, Homo sapiens
ggggagggcgctcgg

SEQ ID NO: 1016035 - DNA, 15 bp, Homo sapiens
cggggagggcgctcg

SEQ ID NO: 1016036 - DNA, 15 bp, Homo sapiens
acggggagggcgctc

SEQ ID NO: 1016037 - DNA, 15 bp, Homo sapiens
gacggggagggcgct

SEQ ID NO: 1016038 - DNA, 15 bp, Homo sapiens
ggacggggagggcgc

SEQ ID NO: 1016039 - DNA, 15 bp, Homo sapiens
gggacggggagggcg

SEQ ID NO: 1016040 - DNA, 15 bp, Homo sapiens
ggggacggggagggc

SEQ ID NO: 1016041 - DNA, 15 bp, Homo sapiens
cggggacggggaggg

SEQ ID NO: 1016042 - DNA, 15 bp, Homo sapiens
gcggggacggggagg

SEQ ID NO: 1016043 - DNA, 15 bp, Homo sapiens
cgcggggacggggag

SEQ ID NO: 1016044 - DNA, 15 bp, Homo sapiens
gcgcggggacgggga

SEQ ID NO: 1016045 - DNA, 15 bp, Homo sapiens
ggcgcggggacgggg

SEQ ID NO: 1016046 - DNA, 15 bp, Homo sapiens
cggcgcggggacggg

SEQ ID NO: 1016047 - DNA, 15 bp, Homo sapiens
gcggcgcggggacgg

SEQ ID NO: 1016048 - DNA, 15 bp, Homo sapiens
agcggcgcggggacg

SEQ ID NO: 1016049 - DNA, 15 bp, Homo sapiens
aagcggcgcggggac

SEQ ID NO: 1016050 - DNA, 15 bp, Homo sapiens
caagcggcgcgggga

SEQ ID NO: 1016051 - DNA, 15 bp, Homo sapiens
ccaagcggcgcgggg

SEQ ID NO: 1016052 - DNA, 15 bp, Homo sapiens
tccaagcggcgcggg

SEQ ID NO: 1016053 - DNA, 15 bp, Homo sapiens
gtccaagcggcgcgg

SEQ ID NO: 1016054 - DNA, 15 bp, Homo sapiens
agtccaagcggcgcg

SEQ ID NO: 1016055 - DNA, 15 bp, Homo sapiens
gagtccaagcggcgc

SEQ ID NO: 1016056 - DNA, 15 bp, Homo sapiens
ggagtccaagcggcg

SEQ ID NO: 1016057 - DNA, 15 bp, Homo sapiens
gggagtccaagcggc

SEQ ID NO: 1016058 - DNA, 15 bp, Homo sapiens
ggggagtccaagcgg

SEQ ID NO: 1016059 - DNA, 15 bp, Homo sapiens
cggggagtccaagcg

SEQ ID NO: 1016060 - DNA, 15 bp, Homo sapiens
ccggggagtccaagc

SEQ ID NO: 1016061 - DNA, 15 bp, Homo sapiens
cccggggagtccaag

SEQ ID NO: 1016062 - DNA, 15 bp, Homo sapiens
ccccggggagtccaa

SEQ ID NO: 1016063 - DNA, 15 bp, Homo sapiens
tccccggggagtcca

SEQ ID NO: 1016064 - DNA, 15 bp, Homo sapiens
ctccccggggagtcc

SEQ ID NO: 1016065 - DNA, 15 bp, Homo sapiens
gctccccggggagtc

SEQ ID NO: 1016066 - DNA, 15 bp, Homo sapiens
agctccccggggagt

SEQ ID NO: 1016067 - DNA, 15 bp, Homo sapiens
gagctccccggggag

SEQ ID NO: 1016068 - DNA, 15 bp, Homo sapiens
cgagctccccgggga

SEQ ID NO: 1016069 - DNA, 15 bp, Homo sapiens
ccgagctccccgggg

SEQ ID NO: 1016070 - DNA, 15 bp, Homo sapiens
accgagctccccggg

SEQ ID NO: 1016071 - DNA, 15 bp, Homo sapiens
gaccgagctccccgg

SEQ ID NO: 1016072 - DNA, 15 bp, Homo sapiens
cgaccgagctccccg

SEQ ID NO: 1016073 - DNA, 15 bp, Homo sapiens
gcgaccgagctcccc

SEQ ID NO: 1016074 - DNA, 15 bp, Homo sapiens
cgcgaccgagctccc

SEQ ID NO: 1016075 - DNA, 15 bp, Homo sapiens
tcgcgaccgagctcc

SEQ ID NO: 1016076 - DNA, 15 bp, Homo sapiens
gtcgcgaccgagctc

SEQ ID NO: 1016077 - DNA, 15 bp, Homo sapiens
agtcgcgaccgagct

SEQ ID NO: 1016078 - DNA, 15 bp, Homo sapiens
cagtcgcgaccgagc

SEQ ID NO: 1016079 - DNA, 15 bp, Homo sapiens
ccagtcgcgaccgag

SEQ ID NO: 1016080 - DNA, 15 bp, Homo sapiens
gccagtcgcgaccga

SEQ ID NO: 1016081 - DNA, 15 bp, Homo sapiens
cgccagtcgcgaccg

SEQ ID NO: 1016082 - DNA, 15 bp, Homo sapiens
ccgccagtcgcgacc

SEQ ID NO: 1016083 - DNA, 15 bp, Homo sapiens
cccgccagtcgcgac

SEQ ID NO: 1016084 - DNA, 15 bp, Homo sapiens
gcccgccagtcgcga

SEQ ID NO: 1016085 - DNA, 15 bp, Homo sapiens
cgcccgccagtcgcg

SEQ ID NO: 1016086 - DNA, 15 bp, Homo sapiens
gcgcccgccagtcgc

SEQ ID NO: 1016087 - DNA, 15 bp, Homo sapiens
cgcgcccgccagtcg

SEQ ID NO: 1016088 - DNA, 15 bp, Homo sapiens
ccgcgcccgccagtc

SEQ ID NO: 1016089 - DNA, 15 bp, Homo sapiens
tccgcgcccgccagt

SEQ ID NO: 1016090 - DNA, 15 bp, Homo sapiens
ctccgcgcccgccag

SEQ ID NO: 1016091 - DNA, 15 bp, Homo sapiens
gctccgcgcccgcca

SEQ ID NO: 1016092 - DNA, 15 bp, Homo sapiens
ggctccgcgcccgcc

SEQ ID NO: 1016093 - DNA, 15 bp, Homo sapiens
gggctccgcgcccgc

SEQ ID NO: 1016094 - DNA, 15 bp, Homo sapiens
agggctccgcgcccg

SEQ ID NO: 1016095 - DNA, 15 bp, Homo sapiens
aagggctccgcgccc

SEQ ID NO: 1016096 - DNA, 15 bp, Homo sapiens
gaagggctccgcgcc

SEQ ID NO: 1016097 - DNA, 15 bp, Homo sapiens
ggaagggctccgcgc

SEQ ID NO: 1016098 - DNA, 15 bp, Homo sapiens
gggaagggctccgcg

SEQ ID NO: 1016099 - DNA, 15 bp, Homo sapiens
ggggaagggctccgc

SEQ ID NO: 1016100 - DNA, 15 bp, Homo sapiens
aggggaagggctccg

SEQ ID NO: 1016101 - DNA, 15 bp, Homo sapiens
aaggggaagggctcc

SEQ ID NO: 1016102 - DNA, 15 bp, Homo sapiens
gaaggggaagggctc

SEQ ID NO: 1016103 - DNA, 15 bp, Homo sapiens
ggaaggggaagggct

SEQ ID NO: 1016104 - DNA, 15 bp, Homo sapiens
cggaaggggaagggc

SEQ ID NO: 1016105 - DNA, 15 bp, Homo sapiens
ccggaaggggaaggg

SEQ ID NO: 1016106 - DNA, 15 bp, Homo sapiens
tccggaaggggaagg

SEQ ID NO: 1016107 - DNA, 15 bp, Homo sapiens
ctccggaaggggaag

SEQ ID NO: 1016108 - DNA, 15 bp, Homo sapiens
gctccggaaggggaa

SEQ ID NO: 1016109 - DNA, 15 bp, Homo sapiens
ggctccggaagggga

SEQ ID NO: 1016110 - DNA, 15 bp, Homo sapiens
gggctccggaagggg

SEQ ID NO: 1016111 - DNA, 15 bp, Homo sapiens
tgggctccggaaggg

SEQ ID NO: 1016112 - DNA, 15 bp, Homo sapiens
ctgggctccggaagg

SEQ ID NO: 1016113 - DNA, 15 bp, Homo sapiens
cctgggctccggaag

SEQ ID NO: 1016114 - DNA, 15 bp, Homo sapiens
tcctgggctccggaa

SEQ ID NO: 1016115 - DNA, 15 bp, Homo sapiens
ttcctgggctccgga

SEQ ID NO: 1016116 - DNA, 15 bp, Homo sapiens
cttcctgggctccgg

SEQ ID NO: 1016117 - DNA, 15 bp, Homo sapiens
ccttcctgggctccg

SEQ ID NO: 1016118 - DNA, 15 bp, Homo sapiens
gccttcctgggctcc

SEQ ID NO: 1016119 - DNA, 15 bp, Homo sapiens
cgccttcctgggctc

SEQ ID NO: 1016120 - DNA, 15 bp, Homo sapiens
ccgccttcctgggct

SEQ ID NO: 1016121 - DNA, 15 bp, Homo sapiens
gccgccttcctgggc

SEQ ID NO: 1016122 - DNA, 15 bp, Homo sapiens
agccgccttcctggg

SEQ ID NO: 1016123 - DNA, 15 bp, Homo sapiens
gagccgccttcctgg

SEQ ID NO: 1016124 - DNA, 15 bp, Homo sapiens
ggagccgccttcctg

SEQ ID NO: 1016125 - DNA, 15 bp, Homo sapiens
gggagccgccttcct

SEQ ID NO: 1016126 - DNA, 15 bp, Homo sapiens
ggggagccgccttcc

SEQ ID NO: 1016127 - DNA, 15 bp, Homo sapiens
cggggagccgccttc

SEQ ID NO: 1016128 - DNA, 15 bp, Homo sapiens
gcggggagccgcctt

SEQ ID NO: 1016129 - DNA, 15 bp, Homo sapiens
cgcggggagccgcct

SEQ ID NO: 1016130 - DNA, 15 bp, Homo sapiens
ccgcggggagccgcc

SEQ ID NO: 1016131 - DNA, 15 bp, Homo sapiens
gccgcggggagccgc

SEQ ID NO: 1016132 - DNA, 15 bp, Homo sapiens
cgccgcggggagccg

SEQ ID NO: 1016133 - DNA, 15 bp, Homo sapiens
gcgccgcggggagcc

SEQ ID NO: 1016134 - DNA, 15 bp, Homo sapiens
ggcgccgcggggagc

SEQ ID NO: 1016135 - DNA, 15 bp, Homo sapiens
cggcgccgcggggag

SEQ ID NO: 1016136 - DNA, 15 bp, Homo sapiens
ccggcgccgcgggga

SEQ ID NO: 1016137 - DNA, 15 bp, Homo sapiens
gccggcgccgcgggg

SEQ ID NO: 1016138 - DNA, 15 bp, Homo sapiens
ggccggcgccgcggg

SEQ ID NO: 1016139 - DNA, 15 bp, Homo sapiens
cggccggcgccgcgg

SEQ ID NO: 1016140 - DNA, 15 bp, Homo sapiens
gcggccggcgccgcg

SEQ ID NO: 1016141 - DNA, 15 bp, Homo sapiens
cgcggccggcgccgc

SEQ ID NO: 1016142 - DNA, 15 bp, Homo sapiens
gcgcggccggcgccg

SEQ ID NO: 1016143 - DNA, 15 bp, Homo sapiens
cgcgcggccggcgcc

SEQ ID NO: 1016144 - DNA, 15 bp, Homo sapiens
gcgcgcggccggcgc

SEQ ID NO: 1016145 - DNA, 15 bp, Homo sapiens
cgcgcgcggccggcg

SEQ ID NO: 1016146 - DNA, 15 bp, Homo sapiens
gcgcgcgcggccggc

SEQ ID NO: 1016147 - DNA, 15 bp, Homo sapiens
cgcgcgcgcggccgg

SEQ ID NO: 1016148 - DNA, 15 bp, Homo sapiens
gcgcgcgcgcggccg

SEQ ID NO: 1016149 - DNA, 15 bp, Homo sapiens
ggcgcgcgcgcggcc

SEQ ID NO: 1016150 - DNA, 15 bp, Homo sapiens
gggcgcgcgcgcggc

SEQ ID NO: 1016151 - DNA, 15 bp, Homo sapiens
cgggcgcgcgcgcgg

SEQ ID NO: 1016152 - DNA, 15 bp, Homo sapiens
gcgggcgcgcgcgcg

SEQ ID NO: 1016153 - DNA, 15 bp, Homo sapiens
ggcgggcgcgcgcgc

SEQ ID NO: 1016154 - DNA, 15 bp, Homo sapiens
gggcgggcgcgcgcg

SEQ ID NO: 1016155 - DNA, 15 bp, Homo sapiens
agggcgggcgcgcgc

SEQ ID NO: 1016156 - DNA, 15 bp, Homo sapiens
aagggcgggcgcgcg

SEQ ID NO: 1016157 - DNA, 15 bp, Homo sapiens
taagggcgggcgcgc

SEQ ID NO: 1016158 - DNA, 15 bp, Homo sapiens
gtaagggcgggcgcg

SEQ ID NO: 1016159 - DNA, 15 bp, Homo sapiens
ggtaagggcgggcgc

SEQ ID NO: 1016160 - DNA, 15 bp, Homo sapiens
aggtaagggcgggcg

SEQ ID NO: 1016161 - DNA, 15 bp, Homo sapiens
aaggtaagggcgggc

SEQ ID NO: 1016162 - DNA, 15 bp, Homo sapiens
caaggtaagggcggg

SEQ ID NO: 1016163 - DNA, 15 bp, Homo sapiens
tcaaggtaagggcgg

SEQ ID NO: 1016164 - DNA, 15 bp, Homo sapiens
gtcaaggtaagggcg

SEQ ID NO: 1016165 - DNA, 15 bp, Homo sapiens
agtcaaggtaagggc

SEQ ID NO: 1016166 - DNA, 15 bp, Homo sapiens
cagtcaaggtaaggg

SEQ ID NO: 1016167 - DNA, 15 bp, Homo sapiens
ccagtcaaggtaagg

SEQ ID NO: 1016168 - DNA, 15 bp, Homo sapiens
tccagtcaaggtaag

SEQ ID NO: 1016169 - DNA, 15 bp, Homo sapiens
gtccagtcaaggtaa

SEQ ID NO: 1016170 - DNA, 15 bp, Homo sapiens
cgtccagtcaaggta

SEQ ID NO: 1016171 - DNA, 15 bp, Homo sapiens
gcgtccagtcaaggt

SEQ ID NO: 1016172 - DNA, 15 bp, Homo sapiens
cgcgtccagtcaagg

SEQ ID NO: 1016173 - DNA, 15 bp, Homo sapiens
ccgcgtccagtcaag

SEQ ID NO: 1016174 - DNA, 15 bp, Homo sapiens
gccgcgtccagtcaa

SEQ ID NO: 1016175 - DNA, 15 bp, Homo sapiens
ggccgcgtccagtca

SEQ ID NO: 1016176 - DNA, 15 bp, Homo sapiens
tggccgcgtccagtc

SEQ ID NO: 1016177 - DNA, 15 bp, Homo sapiens
atggccgcgtccagt

SEQ ID NO: 1016178 - DNA, 15 bp, Homo sapiens
aatggccgcgtccag

SEQ ID NO: 1016179 - DNA, 15 bp, Homo sapiens
aaatggccgcgtcca

SEQ ID NO: 1016180 - DNA, 15 bp, Homo sapiens
gaaatggccgcgtcc

SEQ ID NO: 1016181 - DNA, 15 bp, Homo sapiens
cgaaatggccgcgtc

SEQ ID NO: 1016182 - DNA, 15 bp, Homo sapiens
ccgaaatggccgcgt

SEQ ID NO: 1016183 - DNA, 15 bp, Homo sapiens
accgaaatggccgcg

SEQ ID NO: 1016184 - DNA, 15 bp, Homo sapiens
caccgaaatggccgc

SEQ ID NO: 1016185 - DNA, 15 bp, Homo sapiens
tcaccgaaatggccg

SEQ ID NO: 1016186 - DNA, 15 bp, Homo sapiens
ctcaccgaaatggcc

SEQ ID NO: 1016187 - DNA, 15 bp, Homo sapiens
gctcaccgaaatggc

SEQ ID NO: 1016188 - DNA, 15 bp, Homo sapiens
agctcaccgaaatgg

SEQ ID NO: 1016189 - DNA, 15 bp, Homo sapiens
aagctcaccgaaatg

SEQ ID NO: 1016190 - DNA, 15 bp, Homo sapiens
caagctcaccgaaat

SEQ ID NO: 1016191 - DNA, 15 bp, Homo sapiens
acaagctcaccgaaa

SEQ ID NO: 1016192 - DNA, 15 bp, Homo sapiens
gacaagctcaccgaa

SEQ ID NO: 1016193 - DNA, 15 bp, Homo sapiens
agacaagctcaccga

SEQ ID NO: 1016194 - DNA, 15 bp, Homo sapiens
gagacaagctcaccg

SEQ ID NO: 1016195 - DNA, 15 bp, Homo sapiens
cgagacaagctcacc

SEQ ID NO: 1016196 - DNA, 15 bp, Homo sapiens
gcgagacaagctcac

SEQ ID NO: 1016197 - DNA, 15 bp, Homo sapiens
cgcgagacaagctca

SEQ ID NO: 1016198 - DNA, 15 bp, Homo sapiens
tcgcgagacaagctc

SEQ ID NO: 1016199 - DNA, 15 bp, Homo sapiens
ctcgcgagacaagct

SEQ ID NO: 1016200 - DNA, 15 bp, Homo sapiens
cctcgcgagacaagc

SEQ ID NO: 1016201 - DNA, 15 bp, Homo sapiens
tcctcgcgagacaag

SEQ ID NO: 1016202 - DNA, 15 bp, Homo sapiens
gtcctcgcgagacaa

SEQ ID NO: 1016203 - DNA, 15 bp, Homo sapiens
tgtcctcgcgagaca

SEQ ID NO: 1016204 - DNA, 15 bp, Homo sapiens
gtgtcctcgcgagac

SEQ ID NO: 1016205 - DNA, 15 bp, Homo sapiens
tgtgtcctcgcgaga

SEQ ID NO: 1016206 - DNA, 15 bp, Homo sapiens
gtgtgtcctcgcgag

SEQ ID NO: 1016207 - DNA, 15 bp, Homo sapiens
cgtgtgtcctcgcga

SEQ ID NO: 1016208 - DNA, 15 bp, Homo sapiens
acgtgtgtcctcgcg

SEQ ID NO: 1016209 - DNA, 15 bp, Homo sapiens
tacgtgtgtcctcgc

SEQ ID NO: 1016210 - DNA, 15 bp, Homo sapiens
ctacgtgtgtcctcg

SEQ ID NO: 1016211 - DNA, 15 bp, Homo sapiens
tctacgtgtgtcctc

SEQ ID NO: 1016212 - DNA, 15 bp, Homo sapiens
ctctacgtgtgtcct

SEQ ID NO: 1016213 - DNA, 15 bp, Homo sapiens
cctctacgtgtgtcc

SEQ ID NO: 1016214 - DNA, 15 bp, Homo sapiens
tcctctacgtgtgtc

SEQ ID NO: 1016215 - DNA, 15 bp, Homo sapiens
atcctctacgtgtgt

SEQ ID NO: 1016216 - DNA, 15 bp, Homo sapiens
gatcctctacgtgtg

SEQ ID NO: 1016217 - DNA, 15 bp, Homo sapiens
agatcctctacgtgt

SEQ ID NO: 1016218 - DNA, 15 bp, Homo sapiens
cagatcctctacgtg

SEQ ID NO: 1016219 - DNA, 15 bp, Homo sapiens
gcagatcctctacgt

SEQ ID NO: 1016220 - DNA, 15 bp, Homo sapiens
cgcagatcctctacg

SEQ ID NO: 1016221 - DNA, 15 bp, Homo sapiens
gcgcagatcctctac

SEQ ID NO: 1016222 - DNA, 15 bp, Homo sapiens
cgcgcagatcctcta

SEQ ID NO: 1016223 - DNA, 15 bp, Homo sapiens
ccgcgcagatcctct

SEQ ID NO: 1016224 - DNA, 15 bp, Homo sapiens
accgcgcagatcctc

SEQ ID NO: 1016225 - DNA, 15 bp, Homo sapiens
taccgcgcagatcct

SEQ ID NO: 1016226 - DNA, 15 bp, Homo sapiens
ctaccgcgcagatcc

SEQ ID NO: 1016227 - DNA, 15 bp, Homo sapiens
cctaccgcgcagatc

SEQ ID NO: 1016228 - DNA, 15 bp, Homo sapiens
gcctaccgcgcagat

SEQ ID NO: 1016229 - DNA, 15 bp, Homo sapiens
ggcctaccgcgcaga

SEQ ID NO: 1016230 - DNA, 15 bp, Homo sapiens
cggcctaccgcgcag

SEQ ID NO: 1016231 - DNA, 15 bp, Homo sapiens
gcggcctaccgcgca

SEQ ID NO: 1016232 - DNA, 15 bp, Homo sapiens
cgcggcctaccgcgc

SEQ ID NO: 1016233 - DNA, 15 bp, Homo sapiens
ccgcggcctaccgcg

SEQ ID NO: 1016234 - DNA, 15 bp, Homo sapiens
tccgcggcctaccgc

SEQ ID NO: 1016235 - DNA, 15 bp, Homo sapiens
ctccgcggcctaccg

SEQ ID NO: 1016236 - DNA, 15 bp, Homo sapiens
actccgcggcctacc

SEQ ID NO: 1016237 - DNA, 15 bp, Homo sapiens
cactccgcggcctac

SEQ ID NO: 1016238 - DNA, 15 bp, Homo sapiens
ccactccgcggccta

SEQ ID NO: 1016239 - DNA, 15 bp, Homo sapiens
gccactccgcggcct

SEQ ID NO: 1016240 - DNA, 15 bp, Homo sapiens
cgccactccgcggcc

SEQ ID NO: 1016241 - DNA, 15 bp, Homo sapiens
gcgccactccgcggc

SEQ ID NO: 1016242 - DNA, 15 bp, Homo sapiens
cgcgccactccgcgg

SEQ ID NO: 1016243 - DNA, 15 bp, Homo sapiens
gcgcgccactccgcg

SEQ ID NO: 1016244 - DNA, 15 bp, Homo sapiens
tgcgcgccactccgc

SEQ ID NO: 1016245 - DNA, 15 bp, Homo sapiens
ctgcgcgccactccg

SEQ ID NO: 1016246 - DNA, 15 bp, Homo sapiens
actgcgcgccactcc

SEQ ID NO: 1016247 - DNA, 15 bp, Homo sapiens
aactgcgcgccactc

SEQ ID NO: 1016248 - DNA, 15 bp, Homo sapiens
caactgcgcgccact

SEQ ID NO: 1016249 - DNA, 15 bp, Homo sapiens
acaactgcgcgccac

SEQ ID NO: 1016250 - DNA, 15 bp, Homo sapiens
gacaactgcgcgcca

SEQ ID NO: 1016251 - DNA, 15 bp, Homo sapiens
cgacaactgcgcgcc

SEQ ID NO: 1016252 - DNA, 15 bp, Homo sapiens
gcgacaactgcgcgc

SEQ ID NO: 1016253 - DNA, 15 bp, Homo sapiens
ggcgacaactgcgcg

SEQ ID NO: 1016254 - DNA, 15 bp, Homo sapiens
tggcgacaactgcgc

SEQ ID NO: 1016255 - DNA, 15 bp, Homo sapiens
gtggcgacaactgcg

SEQ ID NO: 1016256 - DNA, 15 bp, Homo sapiens
ggtggcgacaactgc

SEQ ID NO: 1016257 - DNA, 15 bp, Homo sapiens
tggtggcgacaactg

SEQ ID NO: 1016258 - DNA, 15 bp, Homo sapiens
gtggtggcgacaact

SEQ ID NO: 1016259 - DNA, 15 bp, Homo sapiens
agtggtggcgacaac

SEQ ID NO: 1016260 - DNA, 15 bp, Homo sapiens
aagtggtggcgacaa

SEQ ID NO: 1016261 - DNA, 15 bp, Homo sapiens
caagtggtggcgaca

SEQ ID NO: 1016262 - DNA, 15 bp, Homo sapiens
ccaagtggtggcgac

SEQ ID NO: 1016263 - DNA, 15 bp, Homo sapiens
gccaagtggtggcga

SEQ ID NO: 1016264 - DNA, 15 bp, Homo sapiens
agccaagtggtggcg

SEQ ID NO: 1016265 - DNA, 15 bp, Homo sapiens
aagccaagtggtggc

SEQ ID NO: 1016266 - DNA, 15 bp, Homo sapiens
gaagccaagtggtgg

SEQ ID NO: 1016267 - DNA, 15 bp, Homo sapiens
ggaagccaagtggtg

SEQ ID NO: 1016268 - DNA, 15 bp, Homo sapiens
cggaagccaagtggt

SEQ ID NO: 1016269 - DNA, 15 bp, Homo sapiens
ccggaagccaagtgg

SEQ ID NO: 1016270 - DNA, 15 bp, Homo sapiens
gccggaagccaagtg

SEQ ID NO: 1016271 - DNA, 15 bp, Homo sapiens
tgccggaagccaagt

SEQ ID NO: 1016272 - DNA, 15 bp, Homo sapiens
gtgccggaagccaag

SEQ ID NO: 1016273 - DNA, 15 bp, Homo sapiens
cgtgccggaagccaa

SEQ ID NO: 1016274 - DNA, 15 bp, Homo sapiens
acgtgccggaagcca

SEQ ID NO: 1016275 - DNA, 15 bp, Homo sapiens
cacgtgccggaagcc

SEQ ID NO: 1016276 - DNA, 15 bp, Homo sapiens
ccacgtgccggaagc

SEQ ID NO: 1016277 - DNA, 15 bp, Homo sapiens
cccacgtgccggaag

SEQ ID NO: 1016278 - DNA, 15 bp, Homo sapiens
ccccacgtgccggaa

SEQ ID NO: 1016279 - DNA, 15 bp, Homo sapiens
gccccacgtgccgga

SEQ ID NO: 1016280 - DNA, 15 bp, Homo sapiens
tgccccacgtgccgg

SEQ ID NO: 1016281 - DNA, 15 bp, Homo sapiens
ctgccccacgtgccg

SEQ ID NO: 1016282 - DNA, 15 bp, Homo sapiens
tctgccccacgtgcc

SEQ ID NO: 1016283 - DNA, 15 bp, Homo sapiens
atctgccccacgtgc

SEQ ID NO: 1016284 - DNA, 15 bp, Homo sapiens
catctgccccacgtg

SEQ ID NO: 1016285 - DNA, 15 bp, Homo sapiens
acatctgccccacgt

SEQ ID NO: 1016286 - DNA, 15 bp, Homo sapiens
aacatctgccccacg

SEQ ID NO: 1016287 - DNA, 15 bp, Homo sapiens
aaacatctgccccac

SEQ ID NO: 1016288 - DNA, 15 bp, Homo sapiens
gaaacatctgcccca

SEQ ID NO: 1016289 - DNA, 15 bp, Homo sapiens
ggaaacatctgcccc

SEQ ID NO: 1016290 - DNA, 15 bp, Homo sapiens
tggaaacatctgccc

SEQ ID NO: 1016291 - DNA, 15 bp, Homo sapiens
atggaaacatctgcc

SEQ ID NO: 1016292 - DNA, 15 bp, Homo sapiens
aatggaaacatctgc

SEQ ID NO: 1016293 - DNA, 15 bp, Homo sapiens
gaatggaaacatctg

SEQ ID NO: 1016294 - DNA, 15 bp, Homo sapiens
ggaatggaaacatct

SEQ ID NO: 1016295 - DNA, 15 bp, Homo sapiens
gggaatggaaacatc

SEQ ID NO: 1016296 - DNA, 15 bp, Homo sapiens
tgggaatggaaacat

SEQ ID NO: 1016297 - DNA, 15 bp, Homo sapiens
gtgggaatggaaaca

SEQ ID NO: 1016298 - DNA, 15 bp, Homo sapiens
cgtgggaatggaaac

SEQ ID NO: 1016299 - DNA, 15 bp, Homo sapiens
ccgtgggaatggaaa

SEQ ID NO: 1016300 - DNA, 15 bp, Homo sapiens
gccgtgggaatggaa

SEQ ID NO: 1016301 - DNA, 15 bp, Homo sapiens
cgccgtgggaatgga

SEQ ID NO: 1016302 - DNA, 15 bp, Homo sapiens
ccgccgtgggaatgg

SEQ ID NO: 1016303 - DNA, 15 bp, Homo sapiens
gccgccgtgggaatg

SEQ ID NO: 1016304 - DNA, 15 bp, Homo sapiens
tgccgccgtgggaat

SEQ ID NO: 1016305 - DNA, 15 bp, Homo sapiens
ctgccgccgtgggaa

SEQ ID NO: 1016306 - DNA, 15 bp, Homo sapiens
gctgccgccgtggga

SEQ ID NO: 1016307 - DNA, 15 bp, Homo sapiens
cgctgccgccgtggg

SEQ ID NO: 1016308 - DNA, 15 bp, Homo sapiens
ccgctgccgccgtgg

SEQ ID NO: 1016309 - DNA, 15 bp, Homo sapiens
tccgctgccgccgtg

SEQ ID NO: 1016310 - DNA, 15 bp, Homo sapiens
ttccgctgccgccgt

SEQ ID NO: 1016311 - DNA, 15 bp, Homo sapiens
cttccgctgccgccg

SEQ ID NO: 1016312 - DNA, 15 bp, Homo sapiens
tcttccgctgccgcc

SEQ ID NO: 1016313 - DNA, 15 bp, Homo sapiens
ctcttccgctgccgc

SEQ ID NO: 1016314 - DNA, 15 bp, Homo sapiens
cctcttccgctgccg

SEQ ID NO: 1016315 - DNA, 15 bp, Homo sapiens
ccctcttccgctgcc

SEQ ID NO: 1016316 - DNA, 15 bp, Homo sapiens
tccctcttccgctgc

SEQ ID NO: 1016317 - DNA, 15 bp, Homo sapiens
ctccctcttccgctg

SEQ ID NO: 1016318 - DNA, 15 bp, Homo sapiens
cctccctcttccgct

SEQ ID NO: 1016319 - DNA, 15 bp, Homo sapiens
ccctccctcttccgc

SEQ ID NO: 1016320 - DNA, 15 bp, Homo sapiens
gccctccctcttccg

SEQ ID NO: 1016321 - DNA, 15 bp, Homo sapiens
ggccctccctcttcc

SEQ ID NO: 1016322 - DNA, 15 bp, Homo sapiens
cggccctccctcttc

SEQ ID NO: 1016323 - DNA, 15 bp, Homo sapiens
ccggccctccctctt

SEQ ID NO: 1016324 - DNA, 15 bp, Homo sapiens
cccggccctccctct

SEQ ID NO: 1016325 - DNA, 15 bp, Homo sapiens
gcccggccctccctc

SEQ ID NO: 1016326 - DNA, 15 bp, Homo sapiens
cgcccggccctccct

SEQ ID NO: 1016327 - DNA, 15 bp, Homo sapiens
gcgcccggccctccc

SEQ ID NO: 1016328 - DNA, 15 bp, Homo sapiens
cgcgcccggccctcc

SEQ ID NO: 1016329 - DNA, 15 bp, Homo sapiens
gcgcgcccggccctc

SEQ ID NO: 1016330 - DNA, 15 bp, Homo sapiens
ggcgcgcccggccct

SEQ ID NO: 1016331 - DNA, 15 bp, Homo sapiens
cggcgcgcccggccc

SEQ ID NO: 1016332 - DNA, 15 bp, Homo sapiens
gcggcgcgcccggcc

SEQ ID NO: 1016333 - DNA, 15 bp, Homo sapiens
cgcggcgcgcccggc

SEQ ID NO: 1016334 - DNA, 15 bp, Homo sapiens
ccgcggcgcgcccgg

SEQ ID NO: 1016335 - DNA, 15 bp, Homo sapiens
gccgcggcgcgcccg

SEQ ID NO: 1016336 - DNA, 15 bp, Homo sapiens
agccgcggcgcgccc

SEQ ID NO: 1016337 - DNA, 15 bp, Homo sapiens
cagccgcggcgcgcc

SEQ ID NO: 1016338 - DNA, 15 bp, Homo sapiens
gcagccgcggcgcgc

SEQ ID NO: 1016339 - DNA, 15 bp, Homo sapiens
agcagccgcggcgcg

SEQ ID NO: 1016340 - DNA, 15 bp, Homo sapiens
aagcagccgcggcgc

SEQ ID NO: 1016341 - DNA, 15 bp, Homo sapiens
caagcagccgcggcg

SEQ ID NO: 1016342 - DNA, 15 bp, Homo sapiens
gcaagcagccgcggc

SEQ ID NO: 1016343 - DNA, 15 bp, Homo sapiens
tgcaagcagccgcgg

SEQ ID NO: 1016344 - DNA, 15 bp, Homo sapiens
ctgcaagcagccgcg

SEQ ID NO: 1016345 - DNA, 15 bp, Homo sapiens
actgcaagcagccgc

SEQ ID NO: 1016346 - DNA, 15 bp, Homo sapiens
gactgcaagcagccg

SEQ ID NO: 1016347 - DNA, 15 bp, Homo sapiens
agactgcaagcagcc

SEQ ID NO: 1016348 - DNA, 15 bp, Homo sapiens
gagactgcaagcagc

SEQ ID NO: 1016349 - DNA, 15 bp, Homo sapiens
ggagactgcaagcag

SEQ ID NO: 1016350 - DNA, 15 bp, Homo sapiens
cggagactgcaagca

SEQ ID NO: 1016351 - DNA, 15 bp, Homo sapiens
gcggagactgcaagc

SEQ ID NO: 1016352 - DNA, 15 bp, Homo sapiens
tgcggagactgcaag

SEQ ID NO: 1016353 - DNA, 15 bp, Homo sapiens
ttgcggagactgcaa

SEQ ID NO: 1016354 - DNA, 15 bp, Homo sapiens
cttgcggagactgca

SEQ ID NO: 1016355 - DNA, 15 bp, Homo sapiens
gcttgcggagactgc

SEQ ID NO: 1016356 - DNA, 15 bp, Homo sapiens
cgcttgcggagactg

SEQ ID NO: 1016357 - DNA, 15 bp, Homo sapiens
ccgcttgcggagact

SEQ ID NO: 1016358 - DNA, 15 bp, Homo sapiens
gccgcttgcggagac

SEQ ID NO: 1016359 - DNA, 15 bp, Homo sapiens
agccgcttgcggaga

SEQ ID NO: 1016360 - DNA, 15 bp, Homo sapiens
tagccgcttgcggag

SEQ ID NO: 1016361 - DNA, 15 bp, Homo sapiens
gtagccgcttgcgga

SEQ ID NO: 1016362 - DNA, 15 bp, Homo sapiens
tgtagccgcttgcgg

SEQ ID NO: 1016363 - DNA, 15 bp, Homo sapiens
atgtagccgcttgcg

SEQ ID NO: 1016364 - DNA, 15 bp, Homo sapiens
gatgtagccgcttgc

SEQ ID NO: 1016365 - DNA, 15 bp, Homo sapiens
tgatgtagccgcttg

SEQ ID NO: 1016366 - DNA, 15 bp, Homo sapiens
gtgatgtagccgctt

SEQ ID NO: 1016367 - DNA, 15 bp, Homo sapiens
tgtgatgtagccgct

SEQ ID NO: 1016368 - DNA, 15 bp, Homo sapiens
ctgtgatgtagccgc

SEQ ID NO: 1016369 - DNA, 15 bp, Homo sapiens
tctgtgatgtagccg

SEQ ID NO: 1016370 - DNA, 15 bp, Homo sapiens
ctctgtgatgtagcc

SEQ ID NO: 1016371 - DNA, 15 bp, Homo sapiens
gctctgtgatgtagc

SEQ ID NO: 1016372 - DNA, 15 bp, Homo sapiens
agctctgtgatgtag

SEQ ID NO: 1016373 - DNA, 15 bp, Homo sapiens
gagctctgtgatgta

SEQ ID NO: 1016374 - DNA, 15 bp, Homo sapiens
tgagctctgtgatgt

SEQ ID NO: 1016375 - DNA, 15 bp, Homo sapiens
ctgagctctgtgatg

SEQ ID NO: 1016376 - DNA, 15 bp, Homo sapiens
gctgagctctgtgat

SEQ ID NO: 1016377 - DNA, 15 bp, Homo sapiens
cgctgagctctgtga

SEQ ID NO: 1016378 - DNA, 15 bp, Homo sapiens
acgctgagctctgtg

SEQ ID NO: 1016379 - DNA, 15 bp, Homo sapiens
cacgctgagctctgt

SEQ ID NO: 1016380 - DNA, 15 bp, Homo sapiens
gcacgctgagctctg

SEQ ID NO: 1016381 - DNA, 15 bp, Homo sapiens
cgcacgctgagctct

SEQ ID NO: 1016382 - DNA, 15 bp, Homo sapiens
ccgcacgctgagctc

SEQ ID NO: 1016383 - DNA, 15 bp, Homo sapiens
accgcacgctgagct

SEQ ID NO: 1016384 - DNA, 15 bp, Homo sapiens
caccgcacgctgagc

SEQ ID NO: 1016385 - DNA, 15 bp, Homo sapiens
acaccgcacgctgag

SEQ ID NO: 1016386 - DNA, 15 bp, Homo sapiens
gacaccgcacgctga

SEQ ID NO: 1016387 - DNA, 15 bp, Homo sapiens
tgacaccgcacgctg

SEQ ID NO: 1016388 - DNA, 15 bp, Homo sapiens
gtgacaccgcacgct

SEQ ID NO: 1016389 - DNA, 15 bp, Homo sapiens
tgtgacaccgcacgc

SEQ ID NO: 1016390 - DNA, 15 bp, Homo sapiens
ctgtgacaccgcacg

SEQ ID NO: 1016391 - DNA, 15 bp, Homo sapiens
cctgtgacaccgcac

SEQ ID NO: 1016392 - DNA, 15 bp, Homo sapiens
gcctgtgacaccgca

SEQ ID NO: 1016393 - DNA, 15 bp, Homo sapiens
ggcctgtgacaccgc

SEQ ID NO: 1016394 - DNA, 15 bp, Homo sapiens
gggcctgtgacaccg

SEQ ID NO: 1016395 - DNA, 15 bp, Homo sapiens
ggggcctgtgacacc

SEQ ID NO: 1016396 - DNA, 15 bp, Homo sapiens
cggggcctgtgacac

SEQ ID NO: 1016397 - DNA, 15 bp, Homo sapiens
gcggggcctgtgaca

SEQ ID NO: 1016398 - DNA, 15 bp, Homo sapiens
cgcggggcctgtgac

SEQ ID NO: 1016399 - DNA, 15 bp, Homo sapiens
ccgcggggcctgtga

SEQ ID NO: 1016400 - DNA, 15 bp, Homo sapiens
accgcggggcctgtg

SEQ ID NO: 1016401 - DNA, 15 bp, Homo sapiens
gaccgcggggcctgt

SEQ ID NO: 1016402 - DNA, 15 bp, Homo sapiens
ggaccgcggggcctg

SEQ ID NO: 1016403 - DNA, 15 bp, Homo sapiens
gggaccgcggggcct

SEQ ID NO: 1016404 - DNA, 15 bp, Homo sapiens
cgggaccgcggggcc

SEQ ID NO: 1016405 - DNA, 15 bp, Homo sapiens
gcgggaccgcggggc

SEQ ID NO: 1016406 - DNA, 15 bp, Homo sapiens
ggcgggaccgcgggg

SEQ ID NO: 1016407 - DNA, 15 bp, Homo sapiens
gggcgggaccgcggg

SEQ ID NO: 1016408 - DNA, 15 bp, Homo sapiens
tgggcgggaccgcgg

SEQ ID NO: 1016409 - DNA, 15 bp, Homo sapiens
ttgggcgggaccgcg

SEQ ID NO: 1016410 - DNA, 15 bp, Homo sapiens
gttgggcgggaccgc

SEQ ID NO: 1016411 - DNA, 15 bp, Homo sapiens
tgttgggcgggaccg

SEQ ID NO: 1016412 - DNA, 15 bp, Homo sapiens
ctgttgggcgggacc

SEQ ID NO: 1016413 - DNA, 15 bp, Homo sapiens
tctgttgggcgggac

SEQ ID NO: 1016414 - DNA, 15 bp, Homo sapiens
atctgttgggcggga

SEQ ID NO: 1016415 - DNA, 15 bp, Homo sapiens
catctgttgggcggg

SEQ ID NO: 1016416 - DNA, 15 bp, Homo sapiens
gcatctgttgggcgg

SEQ ID NO: 1016417 - DNA, 15 bp, Homo sapiens
tgcatctgttgggcg

SEQ ID NO: 1016418 - DNA, 15 bp, Homo sapiens
gtgcatctgttgggc

SEQ ID NO: 1016419 - DNA, 15 bp, Homo sapiens
ggtgcatctgttggg

SEQ ID NO: 1016420 - DNA, 15 bp, Homo sapiens
cggtgcatctgttgg

SEQ ID NO: 1016421 - DNA, 15 bp, Homo sapiens
tcggtgcatctgttg

SEQ ID NO: 1016422 - DNA, 15 bp, Homo sapiens
ctcggtgcatctgtt

SEQ ID NO: 1016423 - DNA, 15 bp, Homo sapiens
tctcggtgcatctgt

SEQ ID NO: 1016424 - DNA, 15 bp, Homo sapiens
atctcggtgcatctg

SEQ ID NO: 1016425 - DNA, 15 bp, Homo sapiens
catctcggtgcatct

SEQ ID NO: 1016426 - DNA, 15 bp, Homo sapiens
gcatctcggtgcatc

SEQ ID NO: 1016427 - DNA, 15 bp, Homo sapiens
cgcatctcggtgcat

SEQ ID NO: 1016428 - DNA, 15 bp, Homo sapiens
gcgcatctcggtgca

SEQ ID NO: 1016429 - DNA, 15 bp, Homo sapiens
cgcgcatctcggtgc

SEQ ID NO: 1016430 - DNA, 15 bp, Homo sapiens
acgcgcatctcggtg

SEQ ID NO: 1016431 - DNA, 15 bp, Homo sapiens
cacgcgcatctcggt

SEQ ID NO: 1016432 - DNA, 15 bp, Homo sapiens
gcacgcgcatctcgg

SEQ ID NO: 1016433 - DNA, 15 bp, Homo sapiens
cgcacgcgcatctcg

SEQ ID NO: 1016434 - DNA, 15 bp, Homo sapiens
gcgcacgcgcatctc

SEQ ID NO: 1016435 - DNA, 15 bp, Homo sapiens
tgcgcacgcgcatct

SEQ ID NO: 1016436 - DNA, 15 bp, Homo sapiens
ctgcgcacgcgcatc

SEQ ID NO: 1016437 - DNA, 15 bp, Homo sapiens
tctgcgcacgcgcat

SEQ ID NO: 1016438 - DNA, 15 bp, Homo sapiens
ttctgcgcacgcgca

SEQ ID NO: 1016439 - DNA, 15 bp, Homo sapiens
tttctgcgcacgcgc

SEQ ID NO: 1016440 - DNA, 15 bp, Homo sapiens
ctttctgcgcacgcg

SEQ ID NO: 1016441 - DNA, 15 bp, Homo sapiens
gctttctgcgcacgc

SEQ ID NO: 1016442 - DNA, 15 bp, Homo sapiens
cgctttctgcgcacg

SEQ ID NO: 1016443 - DNA, 15 bp, Homo sapiens
acgctttctgcgcac

SEQ ID NO: 1016444 - DNA, 15 bp, Homo sapiens
gacgctttctgcgca

SEQ ID NO: 1016445 - DNA, 15 bp, Homo sapiens
ggacgctttctgcgc

SEQ ID NO: 1016446 - DNA, 15 bp, Homo sapiens
gggacgctttctgcg

SEQ ID NO: 1016447 - DNA, 15 bp, Homo sapiens
cgggacgctttctgc

SEQ ID NO: 1016448 - DNA, 15 bp, Homo sapiens
ccgggacgctttctg

SEQ ID NO: 1016449 - DNA, 15 bp, Homo sapiens
cccgggacgctttct

SEQ ID NO: 1016450 - DNA, 15 bp, Homo sapiens
ccccgggacgctttc

SEQ ID NO: 1016451 - DNA, 15 bp, Homo sapiens
cccccgggacgcttt

SEQ ID NO: 1016452 - DNA, 15 bp, Homo sapiens
acccccgggacgctt

SEQ ID NO: 1016453 - DNA, 15 bp, Homo sapiens
cacccccgggacgct

SEQ ID NO: 1016454 - DNA, 15 bp, Homo sapiens
tcacccccgggacgc

SEQ ID NO: 1016455 - DNA, 15 bp, Homo sapiens
ctcacccccgggacg

SEQ ID NO: 1016456 - DNA, 15 bp, Homo sapiens
cctcacccccgggac

SEQ ID NO: 1016457 - DNA, 15 bp, Homo sapiens
gcctcacccccggga

SEQ ID NO: 1016458 - DNA, 15 bp, Homo sapiens
agcctcacccccggg

SEQ ID NO: 1016459 - DNA, 15 bp, Homo sapiens
gagcctcacccccgg

SEQ ID NO: 1016460 - DNA, 15 bp, Homo sapiens
ggagcctcacccccg

SEQ ID NO: 1016461 - DNA, 15 bp, Homo sapiens
gggagcctcaccccc

SEQ ID NO: 1016462 - DNA, 15 bp, Homo sapiens
agggagcctcacccc

SEQ ID NO: 1016463 - DNA, 15 bp, Homo sapiens
gagggagcctcaccc

SEQ ID NO: 1016464 - DNA, 15 bp, Homo sapiens
ggagggagcctcacc

SEQ ID NO: 1016465 - DNA, 15 bp, Homo sapiens
gggagggagcctcac

SEQ ID NO: 1016466 - DNA, 15 bp, Homo sapiens
agggagggagcctca

SEQ ID NO: 1016467 - DNA, 15 bp, Homo sapiens
gagggagggagcctc

SEQ ID NO: 1016468 - DNA, 15 bp, Homo sapiens
cgagggagggagcct

SEQ ID NO: 1016469 - DNA, 15 bp, Homo sapiens
gcgagggagggagcc

SEQ ID NO: 1016470 - DNA, 15 bp, Homo sapiens
agcgagggagggagc

SEQ ID NO: 1016471 - DNA, 15 bp, Homo sapiens
gagcgagggagggag

SEQ ID NO: 1016472 - DNA, 15 bp, Homo sapiens
agagcgagggaggga

SEQ ID NO: 1016473 - DNA, 15 bp, Homo sapiens
gagagcgagggaggg

SEQ ID NO: 1016474 - DNA, 15 bp, Homo sapiens
ggagagcgagggagg

SEQ ID NO: 1016475 - DNA, 15 bp, Homo sapiens
gggagagcgagggag

SEQ ID NO: 1016476 - DNA, 15 bp, Homo sapiens
agggagagcgaggga

SEQ ID NO: 1016477 - DNA, 15 bp, Homo sapiens
gagggagagcgaggg

SEQ ID NO: 1016478 - DNA, 15 bp, Homo sapiens
agagggagagcgagg

SEQ ID NO: 1016479 - DNA, 15 bp, Homo sapiens
tagagggagagcgag

SEQ ID NO: 1016480 - DNA, 15 bp, Homo sapiens
gtagagggagagcga

SEQ ID NO: 1016481 - DNA, 15 bp, Homo sapiens
agtagagggagagcg

SEQ ID NO: 1016482 - DNA, 15 bp, Homo sapiens
gagtagagggagagc

SEQ ID NO: 1016483 - DNA, 15 bp, Homo sapiens
ggagtagagggagag

SEQ ID NO: 1016484 - DNA, 15 bp, Homo sapiens
gggagtagagggaga

SEQ ID NO: 1016485 - DNA, 15 bp, Homo sapiens
cgggagtagagggag

SEQ ID NO: 1016486 - DNA, 15 bp, Homo sapiens
gcgggagtagaggga

SEQ ID NO: 1016487 - DNA, 15 bp, Homo sapiens
ggcgggagtagaggg

SEQ ID NO: 1016488 - DNA, 15 bp, Homo sapiens
gggcgggagtagagg

SEQ ID NO: 1016489 - DNA, 15 bp, Homo sapiens
ggggcgggagtagag

SEQ ID NO: 1016490 - DNA, 15 bp, Homo sapiens
tggggcgggagtaga

SEQ ID NO: 1016491 - DNA, 15 bp, Homo sapiens
gtggggcgggagtag

SEQ ID NO: 1016492 - DNA, 15 bp, Homo sapiens
agtggggcgggagta

SEQ ID NO: 1016493 - DNA, 15 bp, Homo sapiens
gagtggggcgggagt

SEQ ID NO: 1016494 - DNA, 15 bp, Homo sapiens
agagtggggcgggag

SEQ ID NO: 1016495 - DNA, 15 bp, Homo sapiens
gagagtggggcggga

SEQ ID NO: 1016496 - DNA, 15 bp, Homo sapiens
ggagagtggggcggg

SEQ ID NO: 1016497 - DNA, 15 bp, Homo sapiens
gggagagtggggcgg

SEQ ID NO: 1016498 - DNA, 15 bp, Homo sapiens
ggggagagtggggcg

SEQ ID NO: 1016499 - DNA, 15 bp, Homo sapiens
gggggagagtggggc

SEQ ID NO: 1016500 - DNA, 15 bp, Homo sapiens
tgggggagagtgggg

SEQ ID NO: 1016501 - DNA, 15 bp, Homo sapiens
gtgggggagagtggg

SEQ ID NO: 1016502 - DNA, 15 bp, Homo sapiens
agtgggggagagtgg

SEQ ID NO: 1016503 - DNA, 15 bp, Homo sapiens
aagtgggggagagtg

SEQ ID NO: 1016504 - DNA, 15 bp, Homo sapiens
aaagtgggggagagt

SEQ ID NO: 1016505 - DNA, 15 bp, Homo sapiens
gaaagtgggggagag

SEQ ID NO: 1016506 - DNA, 15 bp, Homo sapiens
ggaaagtgggggaga

SEQ ID NO: 1016507 - DNA, 15 bp, Homo sapiens
gggaaagtgggggag

SEQ ID NO: 1016508 - DNA, 15 bp, Homo sapiens
ggggaaagtggggga

SEQ ID NO: 1016509 - DNA, 15 bp, Homo sapiens
gggggaaagtggggg

SEQ ID NO: 1016510 - DNA, 15 bp, Homo sapiens
ggggggaaagtgggg

SEQ ID NO: 1016511 - DNA, 15 bp, Homo sapiens
aggggggaaagtggg

SEQ ID NO: 1016512 - DNA, 15 bp, Homo sapiens
gaggggggaaagtgg

SEQ ID NO: 1016513 - DNA, 15 bp, Homo sapiens
ggaggggggaaagtg

SEQ ID NO: 1016514 - DNA, 15 bp, Homo sapiens
tggaggggggaaagt

SEQ ID NO: 1016515 - DNA, 15 bp, Homo sapiens
gtggaggggggaaag

SEQ ID NO: 1016516 - DNA, 15 bp, Homo sapiens
ggtggaggggggaaa

SEQ ID NO: 1016517 - DNA, 15 bp, Homo sapiens
gggtggaggggggaa

SEQ ID NO: 1016518 - DNA, 15 bp, Homo sapiens
tgggtggagggggga

SEQ ID NO: 1016519 - DNA, 15 bp, Homo sapiens
gtgggtggagggggg

SEQ ID NO: 1016520 - DNA, 15 bp, Homo sapiens
ggtgggtggaggggg

SEQ ID NO: 1016521 - DNA, 15 bp, Homo sapiens
cggtgggtggagggg

SEQ ID NO: 1016522 - DNA, 15 bp, Homo sapiens
gcggtgggtggaggg

SEQ ID NO: 1016523 - DNA, 15 bp, Homo sapiens
cgcggtgggtggagg

SEQ ID NO: 1016524 - DNA, 15 bp, Homo sapiens
ccgcggtgggtggag

SEQ ID NO: 1016525 - DNA, 15 bp, Homo sapiens
gccgcggtgggtgga

SEQ ID NO: 1016526 - DNA, 15 bp, Homo sapiens
ggccgcggtgggtgg

SEQ ID NO: 1016527 - DNA, 15 bp, Homo sapiens
cggccgcggtgggtg

SEQ ID NO: 1016528 - DNA, 15 bp, Homo sapiens
acggccgcggtgggt

SEQ ID NO: 1016529 - DNA, 15 bp, Homo sapiens
gacggccgcggtggg

SEQ ID NO: 1016530 - DNA, 15 bp, Homo sapiens
cgacggccgcggtgg

SEQ ID NO: 1016531 - DNA, 15 bp, Homo sapiens
ccgacggccgcggtg

SEQ ID NO: 1016532 - DNA, 15 bp, Homo sapiens
cccgacggccgcggt

SEQ ID NO: 1016533 - DNA, 15 bp, Homo sapiens
ccccgacggccgcgg

SEQ ID NO: 1016534 - DNA, 15 bp, Homo sapiens
gccccgacggccgcg

SEQ ID NO: 1016535 - DNA, 15 bp, Homo sapiens
agccccgacggccgc

SEQ ID NO: 1016536 - DNA, 15 bp, Homo sapiens
gagccccgacggccg

SEQ ID NO: 1016537 - DNA, 15 bp, Homo sapiens
cgagccccgacggcc

SEQ ID NO: 1016538 - DNA, 15 bp, Homo sapiens
gcgagccccgacggc

SEQ ID NO: 1016539 - DNA, 15 bp, Homo sapiens
agcgagccccgacgg

SEQ ID NO: 1016540 - DNA, 15 bp, Homo sapiens
gagcgagccccgacg

SEQ ID NO: 1016541 - DNA, 15 bp, Homo sapiens
cgagcgagccccgac

SEQ ID NO: 1016542 - DNA, 15 bp, Homo sapiens
gcgagcgagccccga

SEQ ID NO: 1016543 - DNA, 15 bp, Homo sapiens
agcgagcgagccccg

SEQ ID NO: 1016544 - DNA, 15 bp, Homo sapiens
gagcgagcgagcccc

SEQ ID NO: 1016545 - DNA, 15 bp, Homo sapiens
tgagcgagcgagccc

SEQ ID NO: 1016546 - DNA, 15 bp, Homo sapiens
ctgagcgagcgagcc

SEQ ID NO: 1016547 - DNA, 15 bp, Homo sapiens
actgagcgagcgagc

SEQ ID NO: 1016548 - DNA, 15 bp, Homo sapiens
tactgagcgagcgag

SEQ ID NO: 1016549 - DNA, 15 bp, Homo sapiens
gtactgagcgagcga

SEQ ID NO: 1016550 - DNA, 15 bp, Homo sapiens
ggtactgagcgagcg

SEQ ID NO: 1016551 - DNA, 15 bp, Homo sapiens
aggtactgagcgagc

SEQ ID NO: 1016552 - DNA, 15 bp, Homo sapiens
caggtactgagcgag

SEQ ID NO: 1016553 - DNA, 15 bp, Homo sapiens
ccaggtactgagcga

SEQ ID NO: 1016554 - DNA, 15 bp, Homo sapiens
tccaggtactgagcg

SEQ ID NO: 1016555 - DNA, 15 bp, Homo sapiens
ctccaggtactgagc

SEQ ID NO: 1016556 - DNA, 15 bp, Homo sapiens
cctccaggtactgag

SEQ ID NO: 1016557 - DNA, 15 bp, Homo sapiens
gcctccaggtactga

SEQ ID NO: 1016558 - DNA, 15 bp, Homo sapiens
cgcctccaggtactg

SEQ ID NO: 1016559 - DNA, 15 bp, Homo sapiens
tcgcctccaggtact

SEQ ID NO: 1016560 - DNA, 15 bp, Homo sapiens
ctcgcctccaggtac

SEQ ID NO: 1016561 - DNA, 15 bp, Homo sapiens
actcgcctccaggta

SEQ ID NO: 1016562 - DNA, 15 bp, Homo sapiens
aactcgcctccaggt

SEQ ID NO: 1016563 - DNA, 15 bp, Homo sapiens
gaactcgcctccagg

SEQ ID NO: 1016564 - DNA, 15 bp, Homo sapiens
ggaactcgcctccag

SEQ ID NO: 1016565 - DNA, 15 bp, Homo sapiens
aggaactcgcctcca

SEQ ID NO: 1016566 - DNA, 15 bp, Homo sapiens
caggaactcgcctcc

SEQ ID NO: 1016567 - DNA, 15 bp, Homo sapiens
tcaggaactcgcctc

SEQ ID NO: 1016568 - DNA, 15 bp, Homo sapiens
gtcaggaactcgcct

SEQ ID NO: 1016569 - DNA, 15 bp, Homo sapiens
cgtcaggaactcgcc

SEQ ID NO: 1016570 - DNA, 15 bp, Homo sapiens
gcgtcaggaactcgc

SEQ ID NO: 1016571 - DNA, 15 bp, Homo sapiens
cgcgtcaggaactcg

SEQ ID NO: 1016572 - DNA, 15 bp, Homo sapiens
tcgcgtcaggaactc

SEQ ID NO: 1016573 - DNA, 15 bp, Homo sapiens
gtcgcgtcaggaact

SEQ ID NO: 1016574 - DNA, 15 bp, Homo sapiens
agtcgcgtcaggaac

SEQ ID NO: 1016575 - DNA, 15 bp, Homo sapiens
cagtcgcgtcaggaa

SEQ ID NO: 1016576 - DNA, 15 bp, Homo sapiens
gcagtcgcgtcagga

SEQ ID NO: 1016577 - DNA, 15 bp, Homo sapiens
cgcagtcgcgtcagg

SEQ ID NO: 1016578 - DNA, 15 bp, Homo sapiens
tcgcagtcgcgtcag

SEQ ID NO: 1016579 - DNA, 15 bp, Homo sapiens
gtcgcagtcgcgtca

SEQ ID NO: 1016580 - DNA, 15 bp, Homo sapiens
agtcgcagtcgcgtc

SEQ ID NO: 1016581 - DNA, 15 bp, Homo sapiens
gagtcgcagtcgcgt

SEQ ID NO: 1016582 - DNA, 15 bp, Homo sapiens
tgagtcgcagtcgcg

SEQ ID NO: 1016583 - DNA, 15 bp, Homo sapiens
ttgagtcgcagtcgc

SEQ ID NO: 1016584 - DNA, 15 bp, Homo sapiens
attgagtcgcagtcg

SEQ ID NO: 1016585 - DNA, 15 bp, Homo sapiens
gattgagtcgcagtc

SEQ ID NO: 1016586 - DNA, 15 bp, Homo sapiens
ggattgagtcgcagt

SEQ ID NO: 1016587 - DNA, 15 bp, Homo sapiens
aggattgagtcgcag

SEQ ID NO: 1016588 - DNA, 15 bp, Homo sapiens
gaggattgagtcgca

SEQ ID NO: 1016589 - DNA, 15 bp, Homo sapiens
cgaggattgagtcgc

SEQ ID NO: 1016590 - DNA, 15 bp, Homo sapiens
gcgaggattgagtcg

SEQ ID NO: 1016591 - DNA, 15 bp, Homo sapiens
ggcgaggattgagtc

SEQ ID NO: 1016592 - DNA, 15 bp, Homo sapiens
aggcgaggattgagt

SEQ ID NO: 1016593 - DNA, 15 bp, Homo sapiens
caggcgaggattgag

SEQ ID NO: 1016594 - DNA, 15 bp, Homo sapiens
ccaggcgaggattga

SEQ ID NO: 1016595 - DNA, 15 bp, Homo sapiens
accaggcgaggattg

SEQ ID NO: 1016596 - DNA, 15 bp, Homo sapiens
caccaggcgaggatt

SEQ ID NO: 1016597 - DNA, 15 bp, Homo sapiens
tcaccaggcgaggat

SEQ ID NO: 1016598 - DNA, 15 bp, Homo sapiens
ttcaccaggcgagga

SEQ ID NO: 1016599 - DNA, 15 bp, Homo sapiens
cttcaccaggcgagg

SEQ ID NO: 1016600 - DNA, 15 bp, Homo sapiens
tcttcaccaggcgag

SEQ ID NO: 1016601 - DNA, 15 bp, Homo sapiens
ttcttcaccaggcga

SEQ ID NO: 1016602 - DNA, 15 bp, Homo sapiens
attcttcaccaggcg

SEQ ID NO: 1016603 - DNA, 15 bp, Homo sapiens
tattcttcaccaggc

SEQ ID NO: 1016604 - DNA, 15 bp, Homo sapiens
atattcttcaccagg

SEQ ID NO: 1016605 - DNA, 15 bp, Homo sapiens
aatattcttcaccag

SEQ ID NO: 1016606 - DNA, 15 bp, Homo sapiens
aaatattcttcacca

SEQ ID NO: 1016607 - DNA, 15 bp, Homo sapiens
aaaatattcttcacc

SEQ ID NO: 1016608 - DNA, 15 bp, Homo sapiens
taaaatattcttcac

SEQ ID NO: 1016609 - DNA, 15 bp, Homo sapiens
gtaaaatattcttca

SEQ ID NO: 1016610 - DNA, 15 bp, Homo sapiens
ggtaaaatattcttc

SEQ ID NO: 1016611 - DNA, 15 bp, Homo sapiens
aggtaaaatattctt

SEQ ID NO: 1016612 - DNA, 15 bp, Homo sapiens
taggtaaaatattct

SEQ ID NO: 1016613 - DNA, 15 bp, Homo sapiens
ataggtaaaatattc

SEQ ID NO: 1016614 - DNA, 15 bp, Homo sapiens
cataggtaaaatatt

SEQ ID NO: 1016615 - DNA, 15 bp, Homo sapiens
tcataggtaaaatat

SEQ ID NO: 1016616 - DNA, 15 bp, Homo sapiens
gtcataggtaaaata

SEQ ID NO: 1016617 - DNA, 15 bp, Homo sapiens
agtcataggtaaaat

SEQ ID NO: 1016618 - DNA, 15 bp, Homo sapiens
gagtcataggtaaaa

SEQ ID NO: 1016619 - DNA, 15 bp, Homo sapiens
tgagtcataggtaaa

SEQ ID NO: 1016620 - DNA, 15 bp, Homo sapiens
gtgagtcataggtaa

SEQ ID NO: 1016621 - DNA, 15 bp, Homo sapiens
agtgagtcataggta

SEQ ID NO: 1016622 - DNA, 15 bp, Homo sapiens
cagtgagtcataggt

SEQ ID NO: 1016623 - DNA, 15 bp, Homo sapiens
tcagtgagtcatagg

SEQ ID NO: 1016624 - DNA, 15 bp, Homo sapiens
ttcagtgagtcatag

SEQ ID NO: 1016625 - DNA, 15 bp, Homo sapiens
tttcagtgagtcata

SEQ ID NO: 1016626 - DNA, 15 bp, Homo sapiens
ttttcagtgagtcat

SEQ ID NO: 1016627 - DNA, 15 bp, Homo sapiens
attttcagtgagtca

SEQ ID NO: 1016628 - DNA, 15 bp, Homo sapiens
tattttcagtgagtc

SEQ ID NO: 1016629 - DNA, 15 bp, Homo sapiens
ttattttcagtgagt

SEQ ID NO: 1016630 - DNA, 15 bp, Homo sapiens
tttattttcagtgag

SEQ ID NO: 1016631 - DNA, 15 bp, Homo sapiens
ctttattttcagtga

SEQ ID NO: 1016632 - DNA, 15 bp, Homo sapiens
tctttattttcagtg

SEQ ID NO: 1016633 - DNA, 15 bp, Homo sapiens
gtctttattttcagt

SEQ ID NO: 1016634 - DNA, 15 bp, Homo sapiens
cgtctttattttcag

SEQ ID NO: 1016635 - DNA, 15 bp, Homo sapiens
ccgtctttattttca

SEQ ID NO: 1016636 - DNA, 15 bp, Homo sapiens
gccgtctttattttc

SEQ ID NO: 1016637 - DNA, 15 bp, Homo sapiens
agccgtctttatttt

SEQ ID NO: 1016638 - DNA, 15 bp, Homo sapiens
cagccgtctttattt

SEQ ID NO: 1016639 - DNA, 15 bp, Homo sapiens
tcagccgtctttatt

SEQ ID NO: 1016640 - DNA, 15 bp, Homo sapiens
ctcagccgtctttat

SEQ ID NO: 1016641 - DNA, 15 bp, Homo sapiens
actcagccgtcttta

SEQ ID NO: 1016642 - DNA, 15 bp, Homo sapiens
cactcagccgtcttt

SEQ ID NO: 1016643 - DNA, 15 bp, Homo sapiens
tcactcagccgtctt

SEQ ID NO: 1016644 - DNA, 15 bp, Homo sapiens
gtcactcagccgtct

SEQ ID NO: 1016645 - DNA, 15 bp, Homo sapiens
ggtcactcagccgtc

SEQ ID NO: 1016646 - DNA, 15 bp, Homo sapiens
cggtcactcagccgt

SEQ ID NO: 1016647 - DNA, 15 bp, Homo sapiens
acggtcactcagccg

SEQ ID NO: 1016648 - DNA, 15 bp, Homo sapiens
cacggtcactcagcc

SEQ ID NO: 1016649 - DNA, 15 bp, Homo sapiens
acacggtcactcagc

SEQ ID NO: 1016650 - DNA, 15 bp, Homo sapiens
aacacggtcactcag

SEQ ID NO: 1016651 - DNA, 15 bp, Homo sapiens
aaacacggtcactca

SEQ ID NO: 1016652 - DNA, 15 bp, Homo sapiens
caaacacggtcactc

SEQ ID NO: 1016653 - DNA, 15 bp, Homo sapiens
acaaacacggtcact

SEQ ID NO: 1016654 - DNA, 15 bp, Homo sapiens
aacaaacacggtcac

SEQ ID NO: 1016655 - DNA, 15 bp, Homo sapiens
gaacaaacacggtca

SEQ ID NO: 1016656 - DNA, 15 bp, Homo sapiens
tgaacaaacacggtc

SEQ ID NO: 1016657 - DNA, 15 bp, Homo sapiens
atgaacaaacacggt

SEQ ID NO: 1016658 - DNA, 15 bp, Homo sapiens
catgaacaaacacgg

SEQ ID NO: 1016659 - DNA, 15 bp, Homo sapiens
acatgaacaaacacg

SEQ ID NO: 1016660 - DNA, 15 bp, Homo sapiens
tacatgaacaaacac

SEQ ID NO: 1016661 - DNA, 15 bp, Homo sapiens
ttacatgaacaaaca

SEQ ID NO: 1016662 - DNA, 15 bp, Homo sapiens
tttacatgaacaaac

SEQ ID NO: 1016663 - DNA, 15 bp, Homo sapiens
gtttacatgaacaaa

SEQ ID NO: 1016664 - DNA, 15 bp, Homo sapiens
tgtttacatgaacaa

SEQ ID NO: 1016665 - DNA, 15 bp, Homo sapiens
atgtttacatgaaca

SEQ ID NO: 1016666 - DNA, 15 bp, Homo sapiens
aatgtttacatgaac

SEQ ID NO: 1016667 - DNA, 15 bp, Homo sapiens
caatgtttacatgaa

SEQ ID NO: 1016668 - DNA, 15 bp, Homo sapiens
tcaatgtttacatga

SEQ ID NO: 1016669 - DNA, 15 bp, Homo sapiens
ttcaatgtttacatg

SEQ ID NO: 1016670 - DNA, 15 bp, Homo sapiens
gttcaatgtttacat

SEQ ID NO: 1016671 - DNA, 15 bp, Homo sapiens
tgttcaatgtttaca

SEQ ID NO: 1016672 - DNA, 15 bp, Homo sapiens
ttgttcaatgtttac

SEQ ID NO: 1016673 - DNA, 15 bp, Homo sapiens
tttgttcaatgttta

SEQ ID NO: 1016674 - DNA, 15 bp, Homo sapiens
atttgttcaatgttt

SEQ ID NO: 1016675 - DNA, 15 bp, Homo sapiens
tatttgttcaatgtt

SEQ ID NO: 1016676 - DNA, 15 bp, Homo sapiens
atatttgttcaatgt

SEQ ID NO: 1016677 - DNA, 15 bp, Homo sapiens
aatatttgttcaatg

SEQ ID NO: 1016678 - DNA, 15 bp, Homo sapiens
aaatatttgttcaat

SEQ ID NO: 1016679 - DNA, 15 bp, Homo sapiens
taaatatttgttcaa

SEQ ID NO: 1016680 - DNA, 15 bp, Homo sapiens
ataaatatttgttca

SEQ ID NO: 1016681 - DNA, 15 bp, Homo sapiens
gataaatatttgttc

SEQ ID NO: 1016682 - DNA, 15 bp, Homo sapiens
cgataaatatttgtt

SEQ ID NO: 1016683 - DNA, 15 bp, Homo sapiens
ccgataaatatttgt

SEQ ID NO: 1016684 - DNA, 15 bp, Homo sapiens
gccgataaatatttg

SEQ ID NO: 1016685 - DNA, 15 bp, Homo sapiens
agccgataaatattt

SEQ ID NO: 1016686 - DNA, 15 bp, Homo sapiens
aagccgataaatatt

SEQ ID NO: 1016687 - DNA, 15 bp, Homo sapiens
gaagccgataaatat

SEQ ID NO: 1016688 - DNA, 15 bp, Homo sapiens
agaagccgataaata

SEQ ID NO: 1016689 - DNA, 15 bp, Homo sapiens
cagaagccgataaat

SEQ ID NO: 1016690 - DNA, 15 bp, Homo sapiens
gcagaagccgataaa

SEQ ID NO: 1016691 - DNA, 15 bp, Homo sapiens
cgcagaagccgataa

SEQ ID NO: 1016692 - DNA, 15 bp, Homo sapiens
tcgcagaagccgata

SEQ ID NO: 1016693 - DNA, 15 bp, Homo sapiens
atcgcagaagccgat

SEQ ID NO: 1016694 - DNA, 15 bp, Homo sapiens
catcgcagaagccga

SEQ ID NO: 1016695 - DNA, 15 bp, Homo sapiens
acatcgcagaagccg

SEQ ID NO: 1016696 - DNA, 15 bp, Homo sapiens
cacatcgcagaagcc

SEQ ID NO: 1016697 - DNA, 15 bp, Homo sapiens
acacatcgcagaagc

SEQ ID NO: 1016698 - DNA, 15 bp, Homo sapiens
gacacatcgcagaag

SEQ ID NO: 1016699 - DNA, 15 bp, Homo sapiens
ggacacatcgcagaa

SEQ ID NO: 1016700 - DNA, 15 bp, Homo sapiens
aggacacatcgcaga

SEQ ID NO: 1016701 - DNA, 15 bp, Homo sapiens
taggacacatcgcag

SEQ ID NO: 1016702 - DNA, 15 bp, Homo sapiens
gtaggacacatcgca

SEQ ID NO: 1016703 - DNA, 15 bp, Homo sapiens
agtaggacacatcgc

SEQ ID NO: 1016704 - DNA, 15 bp, Homo sapiens
gagtaggacacatcg

SEQ ID NO: 1016705 - DNA, 15 bp, Homo sapiens
agagtaggacacatc

SEQ ID NO: 1016706 - DNA, 15 bp, Homo sapiens
aagagtaggacacat

SEQ ID NO: 1016707 - DNA, 15 bp, Homo sapiens
aaagagtaggacaca

SEQ ID NO: 1016708 - DNA, 15 bp, Homo sapiens
aaaagagtaggacac

SEQ ID NO: 1016709 - DNA, 15 bp, Homo sapiens
taaaagagtaggaca

SEQ ID NO: 1016710 - DNA, 15 bp, Homo sapiens
ctaaaagagtaggac

SEQ ID NO: 1016711 - DNA, 15 bp, Homo sapiens
actaaaagagtagga

SEQ ID NO: 1016712 - DNA, 15 bp, Homo sapiens
cactaaaagagtagg

SEQ ID NO: 1016713 - DNA, 15 bp, Homo sapiens
ccactaaaagagtag

SEQ ID NO: 1016714 - DNA, 15 bp, Homo sapiens
tccactaaaagagta

SEQ ID NO: 1016715 - DNA, 15 bp, Homo sapiens
ctccactaaaagagt

SEQ ID NO: 1016716 - DNA, 15 bp, Homo sapiens
cctccactaaaagag

SEQ ID NO: 1016717 - DNA, 15 bp, Homo sapiens
tcctccactaaaaga

SEQ ID NO: 1016718 - DNA, 15 bp, Homo sapiens
ttcctccactaaaag

SEQ ID NO: 1016719 - DNA, 15 bp, Homo sapiens
cttcctccactaaaa

SEQ ID NO: 1016720 - DNA, 15 bp, Homo sapiens
tcttcctccactaaa

SEQ ID NO: 1016721 - DNA, 15 bp, Homo sapiens
gtcttcctccactaa

SEQ ID NO: 1016722 - DNA, 15 bp, Homo sapiens
tgtcttcctccacta

SEQ ID NO: 1016723 - DNA, 15 bp, Homo sapiens
gtgtcttcctccact

SEQ ID NO: 1016724 - DNA, 15 bp, Homo sapiens
tgtgtcttcctccac

SEQ ID NO: 1016725 - DNA, 15 bp, Homo sapiens
atgtgtcttcctcca

SEQ ID NO: 1016726 - DNA, 15 bp, Homo sapiens
aatgtgtcttcctcc

SEQ ID NO: 1016727 - DNA, 15 bp, Homo sapiens
aaatgtgtcttcctc

SEQ ID NO: 1016728 - DNA, 15 bp, Homo sapiens
aaaatgtgtcttcct

SEQ ID NO: 1016729 - DNA, 15 bp, Homo sapiens
taaaatgtgtcttcc

SEQ ID NO: 1016730 - DNA, 15 bp, Homo sapiens
ataaaatgtgtcttc

SEQ ID NO: 1016731 - DNA, 15 bp, Homo sapiens
aataaaatgtgtctt

SEQ ID NO: 1016732 - DNA, 15 bp, Homo sapiens
aaataaaatgtgtct

SEQ ID NO: 1016733 - DNA, 15 bp, Homo sapiens
taaataaaatgtgtc

SEQ ID NO: 1016734 - DNA, 15 bp, Homo sapiens
ataaataaaatgtgt

SEQ ID NO: 1016735 - DNA, 15 bp, Homo sapiens
cataaataaaatgtg

SEQ ID NO: 1016736 - DNA, 15 bp, Homo sapiens
acataaataaaatgt

SEQ ID NO: 1016737 - DNA, 15 bp, Homo sapiens
tacataaataaaatg

SEQ ID NO: 1016738 - DNA, 15 bp, Homo sapiens
atacataaataaaat

SEQ ID NO: 1016739 - DNA, 15 bp, Homo sapiens
aatacataaataaaa

SEQ ID NO: 1016740 - DNA, 15 bp, Homo sapiens
aaatacataaataaa

SEQ ID NO: 1016741 - DNA, 15 bp, Homo sapiens
taaatacataaataa

SEQ ID NO: 1016742 - DNA, 15 bp, Homo sapiens
ttaaatacataaata

SEQ ID NO: 1016743 - DNA, 15 bp, Homo sapiens
attaaatacataaat

SEQ ID NO: 1016744 - DNA, 15 bp, Homo sapiens
aattaaatacataaa

SEQ ID NO: 1016745 - DNA, 15 bp, Homo sapiens
aaattaaatacataa

SEQ ID NO: 1016746 - DNA, 15 bp, Homo sapiens
aaaattaaatacata

SEQ ID NO: 1016747 - DNA, 15 bp, Homo sapiens
aaaaattaaatacat

SEQ ID NO: 1016748 - DNA, 15 bp, Homo sapiens
gaaaaattaaataca

SEQ ID NO: 1016749 - DNA, 15 bp, Homo sapiens
agaaaaattaaatac

SEQ ID NO: 1016750 - DNA, 15 bp, Homo sapiens
aagaaaaattaaata

SEQ ID NO: 1016751 - DNA, 15 bp, Homo sapiens
aaagaaaaattaaat

SEQ ID NO: 1016752 - DNA, 15 bp, Homo sapiens
aaaagaaaaattaaa

SEQ ID NO: 1016753 - DNA, 15 bp, Homo sapiens
caaaagaaaaattaa

SEQ ID NO: 1016754 - DNA, 15 bp, Homo sapiens
tcaaaagaaaaatta

SEQ ID NO: 1016755 - DNA, 15 bp, Homo sapiens
ttcaaaagaaaaatt

SEQ ID NO: 1016756 - DNA, 15 bp, Homo sapiens
attcaaaagaaaaat

SEQ ID NO: 1016757 - DNA, 15 bp, Homo sapiens
aattcaaaagaaaaa

SEQ ID NO: 1016758 - DNA, 15 bp, Homo sapiens
aaattcaaaagaaaa

SEQ ID NO: 1016759 - DNA, 15 bp, Homo sapiens
aaaattcaaaagaaa

SEQ ID NO: 1016760 - DNA, 15 bp, Homo sapiens
taaaattcaaaagaa

SEQ ID NO: 1016761 - DNA, 15 bp, Homo sapiens
gtaaaattcaaaaga

SEQ ID NO: 1016762 - DNA, 15 bp, Homo sapiens
tgtaaaattcaaaag

SEQ ID NO: 1016763 - DNA, 15 bp, Homo sapiens
atgtaaaattcaaaa

SEQ ID NO: 1016764 - DNA, 15 bp, Homo sapiens
catgtaaaattcaaa

SEQ ID NO: 1016765 - DNA, 15 bp, Homo sapiens
gcatgtaaaattcaa

SEQ ID NO: 1016766 - DNA, 15 bp, Homo sapiens
cgcatgtaaaattca

SEQ ID NO: 1016767 - DNA, 15 bp, Homo sapiens
tcgcatgtaaaattc

SEQ ID NO: 1016768 - DNA, 15 bp, Homo sapiens
ctcgcatgtaaaatt

SEQ ID NO: 1016769 - DNA, 15 bp, Homo sapiens
actcgcatgtaaaat

SEQ ID NO: 1016770 - DNA, 15 bp, Homo sapiens
aactcgcatgtaaaa

SEQ ID NO: 1016771 - DNA, 15 bp, Homo sapiens
taactcgcatgtaaa

SEQ ID NO: 1016772 - DNA, 15 bp, Homo sapiens
ataactcgcatgtaa

SEQ ID NO: 1016773 - DNA, 15 bp, Homo sapiens
tataactcgcatgta

SEQ ID NO: 1016774 - DNA, 15 bp, Homo sapiens
gtataactcgcatgt

SEQ ID NO: 1016775 - DNA, 15 bp, Homo sapiens
agtataactcgcatg

SEQ ID NO: 1016776 - DNA, 15 bp, Homo sapiens
aagtataactcgcat

SEQ ID NO: 1016777 - DNA, 15 bp, Homo sapiens
taagtataactcgca

SEQ ID NO: 1016778 - DNA, 15 bp, Homo sapiens
ttaagtataactcgc

SEQ ID NO: 1016779 - DNA, 15 bp, Homo sapiens
attaagtataactcg

SEQ ID NO: 1016780 - DNA, 15 bp, Homo sapiens
tattaagtataactc

SEQ ID NO: 1016781 - DNA, 15 bp, Homo sapiens
ttattaagtataact

SEQ ID NO: 1016782 - DNA, 15 bp, Homo sapiens
tttattaagtataac

SEQ ID NO: 1016783 - DNA, 15 bp, Homo sapiens
ttttattaagtataa

SEQ ID NO: 1016784 - DNA, 15 bp, Homo sapiens
gttttattaagtata

SEQ ID NO: 1016785 - DNA, 15 bp, Homo sapiens
agttttattaagtat

SEQ ID NO: 1016786 - DNA, 15 bp, Homo sapiens
gagttttattaagta

SEQ ID NO: 1016787 - DNA, 15 bp, Homo sapiens
tgagttttattaagt

SEQ ID NO: 1016788 - DNA, 15 bp, Homo sapiens
gtgagttttattaag

SEQ ID NO: 1016789 - DNA, 15 bp, Homo sapiens
agtgagttttattaa

SEQ ID NO: 1016790 - DNA, 15 bp, Homo sapiens
aagtgagttttatta

SEQ ID NO: 1016791 - DNA, 15 bp, Homo sapiens
gaagtgagttttatt

SEQ ID NO: 1016792 - DNA, 15 bp, Homo sapiens
tgaagtgagttttat

SEQ ID NO: 1016793 - DNA, 15 bp, Homo sapiens
ttgaagtgagtttta

SEQ ID NO: 1016794 - DNA, 15 bp, Homo sapiens
tttgaagtgagtttt

SEQ ID NO: 1016795 - DNA, 15 bp, Homo sapiens
ttttgaagtgagttt

SEQ ID NO: 1016796 - DNA, 15 bp, Homo sapiens
attttgaagtgagtt

SEQ ID NO: 1016797 - DNA, 15 bp, Homo sapiens
tattttgaagtgagt

SEQ ID NO: 1016798 - DNA, 15 bp, Homo sapiens
atattttgaagtgag

SEQ ID NO: 1016799 - DNA, 15 bp, Homo sapiens
tatattttgaagtga

SEQ ID NO: 1016800 - DNA, 15 bp, Homo sapiens
gtatattttgaagtg

SEQ ID NO: 1016801 - DNA, 15 bp, Homo sapiens
ggtatattttgaagt

SEQ ID NO: 1016802 - DNA, 15 bp, Homo sapiens
aggtatattttgaag

SEQ ID NO: 1016803 - DNA, 15 bp, Homo sapiens
aaggtatattttgaa

SEQ ID NO: 1016804 - DNA, 15 bp, Homo sapiens
gaaggtatattttga

SEQ ID NO: 1016805 - DNA, 15 bp, Homo sapiens
tgaaggtatattttg

SEQ ID NO: 1016806 - DNA, 15 bp, Homo sapiens
ttgaaggtatatttt

SEQ ID NO: 1016807 - DNA, 15 bp, Homo sapiens
gttgaaggtatattt

SEQ ID NO: 1016808 - DNA, 15 bp, Homo sapiens
tgttgaaggtatatt

SEQ ID NO: 1016809 - DNA, 15 bp, Homo sapiens
ctgttgaaggtatat

SEQ ID NO: 1016810 - DNA, 15 bp, Homo sapiens
tctgttgaaggtata

SEQ ID NO: 1016811 - DNA, 15 bp, Homo sapiens
ttctgttgaaggtat

SEQ ID NO: 1016812 - DNA, 15 bp, Homo sapiens
tttctgttgaaggta

SEQ ID NO: 1016813 - DNA, 15 bp, Homo sapiens
ttttctgttgaaggt

SEQ ID NO: 1016814 - DNA, 15 bp, Homo sapiens
attttctgttgaagg

SEQ ID NO: 1016815 - DNA, 15 bp, Homo sapiens
gattttctgttgaag

SEQ ID NO: 1016816 - DNA, 15 bp, Homo sapiens
ggattttctgttgaa

SEQ ID NO: 1016817 - DNA, 15 bp, Homo sapiens
tggattttctgttga

SEQ ID NO: 1016818 - DNA, 15 bp, Homo sapiens
ctggattttctgttg

SEQ ID NO: 1016819 - DNA, 15 bp, Homo sapiens
gctggattttctgtt

SEQ ID NO: 1016820 - DNA, 15 bp, Homo sapiens
tgctggattttctgt

SEQ ID NO: 1016821 - DNA, 15 bp, Homo sapiens
ttgctggattttctg

SEQ ID NO: 1016822 - DNA, 15 bp, Homo sapiens
gttgctggattttct

SEQ ID NO: 1016823 - DNA, 15 bp, Homo sapiens
tgttgctggattttc

SEQ ID NO: 1016824 - DNA, 15 bp, Homo sapiens
ctgttgctggatttt

SEQ ID NO: 1016825 - DNA, 15 bp, Homo sapiens
actgttgctggattt

SEQ ID NO: 1016826 - DNA, 15 bp, Homo sapiens
aactgttgctggatt

SEQ ID NO: 1016827 - DNA, 15 bp, Homo sapiens
aaactgttgctggat

SEQ ID NO: 1016828 - DNA, 15 bp, Homo sapiens
gaaactgttgctgga

SEQ ID NO: 1016829 - DNA, 15 bp, Homo sapiens
agaaactgttgctgg

SEQ ID NO: 1016830 - DNA, 15 bp, Homo sapiens
tagaaactgttgctg

SEQ ID NO: 1016831 - DNA, 15 bp, Homo sapiens
atagaaactgttgct

SEQ ID NO: 1016832 - DNA, 15 bp, Homo sapiens
aatagaaactgttgc

SEQ ID NO: 1016833 - DNA, 15 bp, Homo sapiens
taatagaaactgttg

SEQ ID NO: 1016834 - DNA, 15 bp, Homo sapiens
ataatagaaactgtt

SEQ ID NO: 1016835 - DNA, 15 bp, Homo sapiens
cataatagaaactgt

SEQ ID NO: 1016836 - DNA, 15 bp, Homo sapiens
acataatagaaactg

SEQ ID NO: 1016837 - DNA, 15 bp, Homo sapiens
aacataatagaaact

SEQ ID NO: 1016838 - DNA, 15 bp, Homo sapiens
taacataatagaaac

SEQ ID NO: 1016839 - DNA, 15 bp, Homo sapiens
ctaacataatagaaa

SEQ ID NO: 1016840 - DNA, 15 bp, Homo sapiens
actaacataatagaa

SEQ ID NO: 1016841 - DNA, 15 bp, Homo sapiens
aactaacataataga

SEQ ID NO: 1016842 - DNA, 15 bp, Homo sapiens
taactaacataatag

SEQ ID NO: 1016843 - DNA, 15 bp, Homo sapiens
ttaactaacataata

SEQ ID NO: 1016844 - DNA, 15 bp, Homo sapiens
tttaactaacataat

SEQ ID NO: 1016845 - DNA, 15 bp, Homo sapiens
ttttaactaacataa

SEQ ID NO: 1016846 - DNA, 15 bp, Homo sapiens
gttttaactaacata

SEQ ID NO: 1016847 - DNA, 15 bp, Homo sapiens
tgttttaactaacat

SEQ ID NO: 1016848 - DNA, 15 bp, Homo sapiens
ctgttttaactaaca

SEQ ID NO: 1016849 - DNA, 15 bp, Homo sapiens
gctgttttaactaac

SEQ ID NO: 1016850 - DNA, 15 bp, Homo sapiens
ggctgttttaactaa

SEQ ID NO: 1016851 - DNA, 15 bp, Homo sapiens
tggctgttttaacta

SEQ ID NO: 1016852 - DNA, 15 bp, Homo sapiens
ctggctgttttaact

SEQ ID NO: 1016853 - DNA, 15 bp, Homo sapiens
actggctgttttaac

SEQ ID NO: 1016854 - DNA, 15 bp, Homo sapiens
gactggctgttttaa

SEQ ID NO: 1016855 - DNA, 15 bp, Homo sapiens
agactggctgtttta

SEQ ID NO: 1016856 - DNA, 15 bp, Homo sapiens
aagactggctgtttt

SEQ ID NO: 1016857 - DNA, 15 bp, Homo sapiens
aaagactggctgttt

SEQ ID NO: 1016858 - DNA, 15 bp, Homo sapiens
aaaagactggctgtt

SEQ ID NO: 1016859 - DNA, 15 bp, Homo sapiens
gaaaagactggctgt

SEQ ID NO: 1016860 - DNA, 15 bp, Homo sapiens
ggaaaagactggctg

SEQ ID NO: 1016861 - DNA, 15 bp, Homo sapiens
aggaaaagactggct

SEQ ID NO: 1016862 - DNA, 15 bp, Homo sapiens
aaggaaaagactggc

SEQ ID NO: 1016863 - DNA, 15 bp, Homo sapiens
aaaggaaaagactgg

SEQ ID NO: 1016864 - DNA, 15 bp, Homo sapiens
taaaggaaaagactg

SEQ ID NO: 1016865 - DNA, 15 bp, Homo sapiens
gtaaaggaaaagact

SEQ ID NO: 1016866 - DNA, 15 bp, Homo sapiens
agtaaaggaaaagac

SEQ ID NO: 1016867 - DNA, 15 bp, Homo sapiens
aagtaaaggaaaaga

SEQ ID NO: 1016868 - DNA, 15 bp, Homo sapiens
aaagtaaaggaaaag

SEQ ID NO: 1016869 - DNA, 15 bp, Homo sapiens
aaaagtaaaggaaaa

SEQ ID NO: 1016870 - DNA, 15 bp, Homo sapiens
taaaagtaaaggaaa

SEQ ID NO: 1016871 - DNA, 15 bp, Homo sapiens
ttaaaagtaaaggaa

SEQ ID NO: 1016872 - DNA, 15 bp, Homo sapiens
tttaaaagtaaagga

SEQ ID NO: 1016873 - DNA, 15 bp, Homo sapiens
ttttaaaagtaaagg

SEQ ID NO: 1016874 - DNA, 15 bp, Homo sapiens
tttttaaaagtaaag

SEQ ID NO: 1016875 - DNA, 15 bp, Homo sapiens
atttttaaaagtaaa

SEQ ID NO: 1016876 - DNA, 15 bp, Homo sapiens
aatttttaaaagtaa

SEQ ID NO: 1016877 - DNA, 15 bp, Homo sapiens
taatttttaaaagta

SEQ ID NO: 1016878 - DNA, 15 bp, Homo sapiens
ataatttttaaaagt

SEQ ID NO: 1016879 - DNA, 15 bp, Homo sapiens
aataatttttaaaag

SEQ ID NO: 1016880 - DNA, 15 bp, Homo sapiens
gaataatttttaaaa

SEQ ID NO: 1016881 - DNA, 15 bp, Homo sapiens
tgaataatttttaaa

SEQ ID NO: 1016882 - DNA, 15 bp, Homo sapiens
atgaataatttttaa

SEQ ID NO: 1016883 - DNA, 15 bp, Homo sapiens
tatgaataattttta

SEQ ID NO: 1016884 - DNA, 15 bp, Homo sapiens
ttatgaataattttt

SEQ ID NO: 1016885 - DNA, 15 bp, Homo sapiens
tttatgaataatttt

SEQ ID NO: 1016886 - DNA, 15 bp, Homo sapiens
atttatgaataattt

SEQ ID NO: 1016887 - DNA, 15 bp, Homo sapiens
catttatgaataatt

SEQ ID NO: 1016888 - DNA, 15 bp, Homo sapiens
acatttatgaataat

SEQ ID NO: 1016889 - DNA, 15 bp, Homo sapiens
tacatttatgaataa

SEQ ID NO: 1016890 - DNA, 15 bp, Homo sapiens
ttacatttatgaata

SEQ ID NO: 1016891 - DNA, 15 bp, Homo sapiens
attacatttatgaat

SEQ ID NO: 1016892 - DNA, 15 bp, Homo sapiens
aattacatttatgaa

SEQ ID NO: 1016893 - DNA, 15 bp, Homo sapiens
taattacatttatga

SEQ ID NO: 1016894 - DNA, 15 bp, Homo sapiens
ctaattacatttatg

SEQ ID NO: 1016895 - DNA, 15 bp, Homo sapiens
actaattacatttat

SEQ ID NO: 1016896 - DNA, 15 bp, Homo sapiens
cactaattacattta

SEQ ID NO: 1016897 - DNA, 15 bp, Homo sapiens
tcactaattacattt

SEQ ID NO: 1016898 - DNA, 15 bp, Homo sapiens
ttcactaattacatt

SEQ ID NO: 1016899 - DNA, 15 bp, Homo sapiens
attcactaattacat

SEQ ID NO: 1016900 - DNA, 15 bp, Homo sapiens
cattcactaattaca

SEQ ID NO: 1016901 - DNA, 15 bp, Homo sapiens
tcattcactaattac

SEQ ID NO: 1016902 - DNA, 15 bp, Homo sapiens
atcattcactaatta

SEQ ID NO: 1016903 - DNA, 15 bp, Homo sapiens
tatcattcactaatt

SEQ ID NO: 1016904 - DNA, 15 bp, Homo sapiens
ttatcattcactaat

SEQ ID NO: 1016905 - DNA, 15 bp, Homo sapiens
attatcattcactaa

SEQ ID NO: 1016906 - DNA, 15 bp, Homo sapiens
tattatcattcacta

SEQ ID NO: 1016907 - DNA, 15 bp, Homo sapiens
ttattatcattcact

SEQ ID NO: 1016908 - DNA, 15 bp, Homo sapiens
tttattatcattcac

SEQ ID NO: 1016909 - DNA, 15 bp, Homo sapiens
gtttattatcattca

SEQ ID NO: 1016910 - DNA, 15 bp, Homo sapiens
tgtttattatcattc

SEQ ID NO: 1016911 - DNA, 15 bp, Homo sapiens
atgtttattatcatt

SEQ ID NO: 1016912 - DNA, 15 bp, Homo sapiens
aatgtttattatcat

SEQ ID NO: 1016913 - DNA, 15 bp, Homo sapiens
caatgtttattatca

SEQ ID NO: 1016914 - DNA, 15 bp, Homo sapiens
tcaatgtttattatc

SEQ ID NO: 1016915 - DNA, 15 bp, Homo sapiens
gtcaatgtttattat

SEQ ID NO: 1016916 - DNA, 15 bp, Homo sapiens
tgtcaatgtttatta

SEQ ID NO: 1016917 - DNA, 15 bp, Homo sapiens
atgtcaatgtttatt

SEQ ID NO: 1016918 - DNA, 15 bp, Homo sapiens
gatgtcaatgtttat

SEQ ID NO: 1016919 - DNA, 15 bp, Homo sapiens
agatgtcaatgttta

SEQ ID NO: 1016920 - DNA, 15 bp, Homo sapiens
cagatgtcaatgttt

SEQ ID NO: 1016921 - DNA, 15 bp, Homo sapiens
tcagatgtcaatgtt

SEQ ID NO: 1016922 - DNA, 15 bp, Homo sapiens
atcagatgtcaatgt

SEQ ID NO: 1016923 - DNA, 15 bp, Homo sapiens
gatcagatgtcaatg

SEQ ID NO: 1016924 - DNA, 15 bp, Homo sapiens
ggatcagatgtcaat

SEQ ID NO: 1016925 - DNA, 15 bp, Homo sapiens
tggatcagatgtcaa

SEQ ID NO: 1016926 - DNA, 15 bp, Homo sapiens
gtggatcagatgtca

SEQ ID NO: 1016927 - DNA, 15 bp, Homo sapiens
agtggatcagatgtc

SEQ ID NO: 1016928 - DNA, 15 bp, Homo sapiens
cagtggatcagatgt

SEQ ID NO: 1016929 - DNA, 15 bp, Homo sapiens
gcagtggatcagatg

SEQ ID NO: 1016930 - DNA, 15 bp, Homo sapiens
agcagtggatcagat

SEQ ID NO: 1016931 - DNA, 15 bp, Homo sapiens
aagcagtggatcaga

SEQ ID NO: 1016932 - DNA, 15 bp, Homo sapiens
aaagcagtggatcag

SEQ ID NO: 1016933 - DNA, 15 bp, Homo sapiens
taaagcagtggatca

SEQ ID NO: 1016934 - DNA, 15 bp, Homo sapiens
ctaaagcagtggatc

SEQ ID NO: 1016935 - DNA, 15 bp, Homo sapiens
cctaaagcagtggat

SEQ ID NO: 1016936 - DNA, 15 bp, Homo sapiens
tcctaaagcagtgga

SEQ ID NO: 1016937 - DNA, 15 bp, Homo sapiens
ctcctaaagcagtgg

SEQ ID NO: 1016938 - DNA, 15 bp, Homo sapiens
actcctaaagcagtg

SEQ ID NO: 1016939 - DNA, 15 bp, Homo sapiens
cactcctaaagcagt

SEQ ID NO: 1016940 - DNA, 15 bp, Homo sapiens
tcactcctaaagcag

SEQ ID NO: 1016941 - DNA, 15 bp, Homo sapiens
gtcactcctaaagca

SEQ ID NO: 1016942 - DNA, 15 bp, Homo sapiens
tgtcactcctaaagc

SEQ ID NO: 1016943 - DNA, 15 bp, Homo sapiens
gtgtcactcctaaag

SEQ ID NO: 1016944 - DNA, 15 bp, Homo sapiens
tgtgtcactcctaaa

SEQ ID NO: 1016945 - DNA, 15 bp, Homo sapiens
ttgtgtcactcctaa

SEQ ID NO: 1016946 - DNA, 15 bp, Homo sapiens
tttgtgtcactccta

SEQ ID NO: 1016947 - DNA, 15 bp, Homo sapiens
atttgtgtcactcct

SEQ ID NO: 1016948 - DNA, 15 bp, Homo sapiens
catttgtgtcactcc

SEQ ID NO: 1016949 - DNA, 15 bp, Homo sapiens
tcatttgtgtcactc

SEQ ID NO: 1016950 - DNA, 15 bp, Homo sapiens
ttcatttgtgtcact

SEQ ID NO: 1016951 - DNA, 15 bp, Homo sapiens
cttcatttgtgtcac

SEQ ID NO: 1016952 - DNA, 15 bp, Homo sapiens
acttcatttgtgtca

SEQ ID NO: 1016953 - DNA, 15 bp, Homo sapiens
aacttcatttgtgtc

SEQ ID NO: 1016954 - DNA, 15 bp, Homo sapiens
taacttcatttgtgt

SEQ ID NO: 1016955 - DNA, 15 bp, Homo sapiens
ttaacttcatttgtg

SEQ ID NO: 1016956 - DNA, 15 bp, Homo sapiens
gttaacttcatttgt

SEQ ID NO: 1016957 - DNA, 15 bp, Homo sapiens
agttaacttcatttg

SEQ ID NO: 1016958 - DNA, 15 bp, Homo sapiens
gagttaacttcattt

SEQ ID NO: 1016959 - DNA, 15 bp, Homo sapiens
tgagttaacttcatt

SEQ ID NO: 1016960 - DNA, 15 bp, Homo sapiens
ctgagttaacttcat

SEQ ID NO: 1016961 - DNA, 15 bp, Homo sapiens
cctgagttaacttca

SEQ ID NO: 1016962 - DNA, 15 bp, Homo sapiens
gcctgagttaacttc

SEQ ID NO: 1016963 - DNA, 15 bp, Homo sapiens
agcctgagttaactt

SEQ ID NO: 1016964 - DNA, 15 bp, Homo sapiens
tagcctgagttaact

SEQ ID NO: 1016965 - DNA, 15 bp, Homo sapiens
atagcctgagttaac

SEQ ID NO: 1016966 - DNA, 15 bp, Homo sapiens
aatagcctgagttaa

SEQ ID NO: 1016967 - DNA, 15 bp, Homo sapiens
aaatagcctgagtta

SEQ ID NO: 1016968 - DNA, 15 bp, Homo sapiens
aaaatagcctgagtt

SEQ ID NO: 1016969 - DNA, 15 bp, Homo sapiens
gaaaatagcctgagt

SEQ ID NO: 1016970 - DNA, 15 bp, Homo sapiens
agaaaatagcctgag

SEQ ID NO: 1016971 - DNA, 15 bp, Homo sapiens
aagaaaatagcctga

SEQ ID NO: 1016972 - DNA, 15 bp, Homo sapiens
aaagaaaatagcctg

SEQ ID NO: 1016973 - DNA, 15 bp, Homo sapiens
taaagaaaatagcct

SEQ ID NO: 1016974 - DNA, 15 bp, Homo sapiens
ataaagaaaatagcc

SEQ ID NO: 1016975 - DNA, 15 bp, Homo sapiens
tataaagaaaatagc

SEQ ID NO: 1016976 - DNA, 15 bp, Homo sapiens
ttataaagaaaatag

SEQ ID NO: 1016977 - DNA, 15 bp, Homo sapiens
attataaagaaaata

SEQ ID NO: 1016978 - DNA, 15 bp, Homo sapiens
gattataaagaaaat

SEQ ID NO: 1016979 - DNA, 15 bp, Homo sapiens
tgattataaagaaaa

SEQ ID NO: 1016980 - DNA, 15 bp, Homo sapiens
atgattataaagaaa

SEQ ID NO: 1016981 - DNA, 15 bp, Homo sapiens
aatgattataaagaa

SEQ ID NO: 1016982 - DNA, 15 bp, Homo sapiens
caatgattataaaga

SEQ ID NO: 1016983 - DNA, 15 bp, Homo sapiens
acaatgattataaag

SEQ ID NO: 1016984 - DNA, 15 bp, Homo sapiens
cacaatgattataaa

SEQ ID NO: 1016985 - DNA, 15 bp, Homo sapiens
gcacaatgattataa

SEQ ID NO: 1016986 - DNA, 15 bp, Homo sapiens
agcacaatgattata

SEQ ID NO: 1016987 - DNA, 15 bp, Homo sapiens
tagcacaatgattat

SEQ ID NO: 1016988 - DNA, 15 bp, Homo sapiens
atagcacaatgatta

SEQ ID NO: 1016989 - DNA, 15 bp, Homo sapiens
aatagcacaatgatt

SEQ ID NO: 1016990 - DNA, 15 bp, Homo sapiens
caatagcacaatgat

SEQ ID NO: 1016991 - DNA, 15 bp, Homo sapiens
acaatagcacaatga

SEQ ID NO: 1016992 - DNA, 15 bp, Homo sapiens
aacaatagcacaatg

SEQ ID NO: 1016993 - DNA, 15 bp, Homo sapiens
aaacaatagcacaat

SEQ ID NO: 1016994 - DNA, 15 bp, Homo sapiens
aaaacaatagcacaa

SEQ ID NO: 1016995 - DNA, 15 bp, Homo sapiens
gaaaacaatagcaca

SEQ ID NO: 1016996 - DNA, 15 bp, Homo sapiens
agaaaacaatagcac

SEQ ID NO: 1016997 - DNA, 15 bp, Homo sapiens
aagaaaacaatagca

SEQ ID NO: 1016998 - DNA, 15 bp, Homo sapiens
aaagaaaacaatagc

SEQ ID NO: 1016999 - DNA, 15 bp, Homo sapiens
aaaagaaaacaatag

SEQ ID NO: 1017000 - DNA, 15 bp, Homo sapiens
aaaaagaaaacaata

SEQ ID NO: 1017001 - DNA, 15 bp, Homo sapiens
aagaaaaagaaaaca

SEQ ID NO: 1017002 - DNA, 15 bp, Homo sapiens
aaagaaaaagaaaac

SEQ ID NO: 1017003 - DNA, 15 bp, Homo sapiens
tgaaaagaaaaagaa

SEQ ID NO: 1017004 - DNA, 15 bp, Homo sapiens
ttgaaaagaaaaaga

SEQ ID NO: 1017005 - DNA, 15 bp, Homo sapiens
attgaaaagaaaaag

SEQ ID NO: 1017006 - DNA, 15 bp, Homo sapiens
aattgaaaagaaaaa

SEQ ID NO: 1017007 - DNA, 15 bp, Homo sapiens
taattgaaaagaaaa

SEQ ID NO: 1017008 - DNA, 15 bp, Homo sapiens
ataattgaaaagaaa

SEQ ID NO: 1017009 - DNA, 15 bp, Homo sapiens
tataattgaaaagaa

SEQ ID NO: 1017010 - DNA, 15 bp, Homo sapiens
gtataattgaaaaga

SEQ ID NO: 1017011 - DNA, 15 bp, Homo sapiens
agtataattgaaaag

SEQ ID NO: 1017012 - DNA, 15 bp, Homo sapiens
cagtataattgaaaa

SEQ ID NO: 1017013 - DNA, 15 bp, Homo sapiens
gcagtataattgaaa

SEQ ID NO: 1017014 - DNA, 15 bp, Homo sapiens
agcagtataattgaa

SEQ ID NO: 1017015 - DNA, 15 bp, Homo sapiens
aagcagtataattga

SEQ ID NO: 1017016 - DNA, 15 bp, Homo sapiens
taagcagtataattg

SEQ ID NO: 1017017 - DNA, 15 bp, Homo sapiens
ttaagcagtataatt

SEQ ID NO: 1017018 - DNA, 15 bp, Homo sapiens
attaagcagtataat

SEQ ID NO: 1017019 - DNA, 15 bp, Homo sapiens
tattaagcagtataa

SEQ ID NO: 1017020 - DNA, 15 bp, Homo sapiens
atattaagcagtata

SEQ ID NO: 1017021 - DNA, 15 bp, Homo sapiens
tatattaagcagtat

SEQ ID NO: 1017022 - DNA, 15 bp, Homo sapiens
ctatattaagcagta

SEQ ID NO: 1017023 - DNA, 15 bp, Homo sapiens
cctatattaagcagt

SEQ ID NO: 1017024 - DNA, 15 bp, Homo sapiens
tcctatattaagcag

SEQ ID NO: 1017025 - DNA, 15 bp, Homo sapiens
atcctatattaagca

SEQ ID NO: 1017026 - DNA, 15 bp, Homo sapiens
aatcctatattaagc

SEQ ID NO: 1017027 - DNA, 15 bp, Homo sapiens
aaatcctatattaag

SEQ ID NO: 1017028 - DNA, 15 bp, Homo sapiens
aaaatcctatattaa

SEQ ID NO: 1017029 - DNA, 15 bp, Homo sapiens
caaaatcctatatta

SEQ ID NO: 1017030 - DNA, 15 bp, Homo sapiens
acaaaatcctatatt

SEQ ID NO: 1017031 - DNA, 15 bp, Homo sapiens
cacaaaatcctatat

SEQ ID NO: 1017032 - DNA, 15 bp, Homo sapiens
ccacaaaatcctata

SEQ ID NO: 1017033 - DNA, 15 bp, Homo sapiens
gccacaaaatcctat

SEQ ID NO: 1017034 - DNA, 15 bp, Homo sapiens
tgccacaaaatccta

SEQ ID NO: 1017035 - DNA, 15 bp, Homo sapiens
gtgccacaaaatcct

SEQ ID NO: 1017036 - DNA, 15 bp, Homo sapiens
ggtgccacaaaatcc

SEQ ID NO: 1017037 - DNA, 15 bp, Homo sapiens
tggtgccacaaaatc

SEQ ID NO: 1017038 - DNA, 15 bp, Homo sapiens
atggtgccacaaaat

SEQ ID NO: 1017039 - DNA, 15 bp, Homo sapiens
tatggtgccacaaaa

SEQ ID NO: 1017040 - DNA, 15 bp, Homo sapiens
ctatggtgccacaaa

SEQ ID NO: 1017041 - DNA, 15 bp, Homo sapiens
cctatggtgccacaa

SEQ ID NO: 1017042 - DNA, 15 bp, Homo sapiens
tcctatggtgccaca

SEQ ID NO: 1017043 - DNA, 15 bp, Homo sapiens
ctcctatggtgccac

SEQ ID NO: 1017044 - DNA, 15 bp, Homo sapiens
actcctatggtgcca

SEQ ID NO: 1017045 - DNA, 15 bp, Homo sapiens
aactcctatggtgcc

SEQ ID NO: 1017046 - DNA, 15 bp, Homo sapiens
caactcctatggtgc

SEQ ID NO: 1017047 - DNA, 15 bp, Homo sapiens
tcaactcctatggtg

SEQ ID NO: 1017048 - DNA, 15 bp, Homo sapiens
ctcaactcctatggt

SEQ ID NO: 1017049 - DNA, 15 bp, Homo sapiens
actcaactcctatgg

SEQ ID NO: 1017050 - DNA, 15 bp, Homo sapiens
tactcaactcctatg

SEQ ID NO: 1017051 - DNA, 15 bp, Homo sapiens
ttactcaactcctat

SEQ ID NO: 1017052 - DNA, 15 bp, Homo sapiens
tttactcaactccta

SEQ ID NO: 1017053 - DNA, 15 bp, Homo sapiens
ttttactcaactcct

SEQ ID NO: 1017054 - DNA, 15 bp, Homo sapiens
tttttactcaactcc

SEQ ID NO: 1017055 - DNA, 15 bp, Homo sapiens
atttttactcaactc

SEQ ID NO: 1017056 - DNA, 15 bp, Homo sapiens
tatttttactcaact

SEQ ID NO: 1017057 - DNA, 15 bp, Homo sapiens
ttatttttactcaac

SEQ ID NO: 1017058 - DNA, 15 bp, Homo sapiens
tttatttttactcaa

SEQ ID NO: 1017059 - DNA, 15 bp, Homo sapiens
ttttatttttactca

SEQ ID NO: 1017060 - DNA, 15 bp, Homo sapiens
cttttatttttactc

SEQ ID NO: 1017061 - DNA, 15 bp, Homo sapiens
ccttttatttttact

SEQ ID NO: 1017062 - DNA, 15 bp, Homo sapiens
tccttttatttttac

SEQ ID NO: 1017063 - DNA, 15 bp, Homo sapiens
ttccttttattttta

SEQ ID NO: 1017064 - DNA, 15 bp, Homo sapiens
attccttttattttt

SEQ ID NO: 1017065 - DNA, 15 bp, Homo sapiens
tattccttttatttt

SEQ ID NO: 1017066 - DNA, 15 bp, Homo sapiens
ttattccttttattt

SEQ ID NO: 1017067 - DNA, 15 bp, Homo sapiens
tttattccttttatt

SEQ ID NO: 1017068 - DNA, 15 bp, Homo sapiens
ttttattccttttat

SEQ ID NO: 1017069 - DNA, 15 bp, Homo sapiens
tttttattcctttta

SEQ ID NO: 1017070 - DNA, 15 bp, Homo sapiens
atttttattcctttt

SEQ ID NO: 1017071 - DNA, 15 bp, Homo sapiens
tatttttattccttt

SEQ ID NO: 1017072 - DNA, 15 bp, Homo sapiens
atatttttattcctt

SEQ ID NO: 1017073 - DNA, 15 bp, Homo sapiens
tatatttttattcct

SEQ ID NO: 1017074 - DNA, 15 bp, Homo sapiens
gtatatttttattcc

SEQ ID NO: 1017075 - DNA, 15 bp, Homo sapiens
ggtatatttttattc

SEQ ID NO: 1017076 - DNA, 15 bp, Homo sapiens
aaggtatatttttat

SEQ ID NO: 1017077 - DNA, 15 bp, Homo sapiens
taaggtatattttta

SEQ ID NO: 1017078 - DNA, 15 bp, Homo sapiens
ataaggtatattttt

SEQ ID NO: 1017079 - DNA, 15 bp, Homo sapiens
gataaggtatatttt

SEQ ID NO: 1017080 - DNA, 15 bp, Homo sapiens
agataaggtatattt

SEQ ID NO: 1017081 - DNA, 15 bp, Homo sapiens
cagataaggtatatt

SEQ ID NO: 1017082 - DNA, 15 bp, Homo sapiens
ccagataaggtatat

SEQ ID NO: 1017083 - DNA, 15 bp, Homo sapiens
gccagataaggtata

SEQ ID NO: 1017084 - DNA, 15 bp, Homo sapiens
ggccagataaggtat

SEQ ID NO: 1017085 - DNA, 15 bp, Homo sapiens
cggccagataaggta

SEQ ID NO: 1017086 - DNA, 15 bp, Homo sapiens
ccggccagataaggt

SEQ ID NO: 1017087 - DNA, 15 bp, Homo sapiens
cccggccagataagg

SEQ ID NO: 1017088 - DNA, 15 bp, Homo sapiens
gcccggccagataag

SEQ ID NO: 1017089 - DNA, 15 bp, Homo sapiens
cgcccggccagataa

SEQ ID NO: 1017090 - DNA, 15 bp, Homo sapiens
gcgcccggccagata

SEQ ID NO: 1017091 - DNA, 15 bp, Homo sapiens
cgcgcccggccagat

SEQ ID NO: 1017092 - DNA, 15 bp, Homo sapiens
ccgcgcccggccaga

SEQ ID NO: 1017093 - DNA, 15 bp, Homo sapiens
accgcgcccggccag

SEQ ID NO: 1017094 - DNA, 15 bp, Homo sapiens
aaattacaggcgtga

SEQ ID NO: 1017095 - DNA, 15 bp, Homo sapiens
gaaattacaggcgtg

SEQ ID NO: 1017096 - DNA, 15 bp, Homo sapiens
tgaaattacaggcgt

SEQ ID NO: 1017097 - DNA, 15 bp, Homo sapiens
ctgaaattacaggcg

SEQ ID NO: 1017098 - DNA, 15 bp, Homo sapiens
gctgaaattacaggc

SEQ ID NO: 1017099 - DNA, 15 bp, Homo sapiens
tgctgaaattacagg

SEQ ID NO: 1017100 - DNA, 15 bp, Homo sapiens
ctgctgaaattacag

SEQ ID NO: 1017101 - DNA, 15 bp, Homo sapiens
actgctgaaattaca

SEQ ID NO: 1017102 - DNA, 15 bp, Homo sapiens
aactgctgaaattac

SEQ ID NO: 1017103 - DNA, 15 bp, Homo sapiens
aaactgctgaaatta

SEQ ID NO: 1017104 - DNA, 15 bp, Homo sapiens
gaaactgctgaaatt

SEQ ID NO: 1017105 - DNA, 15 bp, Homo sapiens
cgaaactgctgaaat

SEQ ID NO: 1017106 - DNA, 15 bp, Homo sapiens
ccgaaactgctgaaa

SEQ ID NO: 1017107 - DNA, 15 bp, Homo sapiens
tccgaaactgctgaa

SEQ ID NO: 1017108 - DNA, 15 bp, Homo sapiens
ctccgaaactgctga

SEQ ID NO: 1017109 - DNA, 15 bp, Homo sapiens
cctccgaaactgctg

SEQ ID NO: 1017110 - DNA, 15 bp, Homo sapiens
gcctccgaaactgct

SEQ ID NO: 1017111 - DNA, 15 bp, Homo sapiens
ggcctccgaaactgc

SEQ ID NO: 1017112 - DNA, 15 bp, Homo sapiens
cggcctccgaaactg

SEQ ID NO: 1017113 - DNA, 15 bp, Homo sapiens
tcggcctccgaaact

SEQ ID NO: 1017114 - DNA, 15 bp, Homo sapiens
ctcggcctccgaaac

SEQ ID NO: 1017115 - DNA, 15 bp, Homo sapiens
cctcggcctccgaaa

SEQ ID NO: 1017116 - DNA, 15 bp, Homo sapiens
gcctcggcctccgaa

SEQ ID NO: 1017117 - DNA, 15 bp, Homo sapiens
cgcctcggcctccga

SEQ ID NO: 1017118 - DNA, 15 bp, Homo sapiens
ccgcctcggcctccg

SEQ ID NO: 1017119 - DNA, 15 bp, Homo sapiens
gcgtgatccgcccgc

SEQ ID NO: 1017120 - DNA, 15 bp, Homo sapiens
cgcgtgatccgcccg

SEQ ID NO: 1017121 - DNA, 15 bp, Homo sapiens
ccgcgtgatccgccc

SEQ ID NO: 1017122 - DNA, 15 bp, Homo sapiens
accgcgtgatccgcc

SEQ ID NO: 1017123 - DNA, 15 bp, Homo sapiens
gaccgcgtgatccgc

SEQ ID NO: 1017124 - DNA, 15 bp, Homo sapiens
tgaccgcgtgatccg

SEQ ID NO: 1017125 - DNA, 15 bp, Homo sapiens
ctgaccgcgtgatcc

SEQ ID NO: 1017126 - DNA, 15 bp, Homo sapiens
cctgaccgcgtgatc

SEQ ID NO: 1017127 - DNA, 15 bp, Homo sapiens
tcctgaccgcgtgat

SEQ ID NO: 1017128 - DNA, 15 bp, Homo sapiens
ctcctgaccgcgtga

SEQ ID NO: 1017129 - DNA, 15 bp, Homo sapiens
tctcctgaccgcgtg

SEQ ID NO: 1017130 - DNA, 15 bp, Homo sapiens
atctcctgaccgcgt

SEQ ID NO: 1017131 - DNA, 15 bp, Homo sapiens
gatctcctgaccgcg

SEQ ID NO: 1017132 - DNA, 15 bp, Homo sapiens
cgatctcctgaccgc

SEQ ID NO: 1017133 - DNA, 15 bp, Homo sapiens
tcgatctcctgaccg

SEQ ID NO: 1017134 - DNA, 15 bp, Homo sapiens
cctcgatctcctgac

SEQ ID NO: 1017135 - DNA, 15 bp, Homo sapiens
gcctcgatctcctga

SEQ ID NO: 1017136 - DNA, 15 bp, Homo sapiens
ggcctcgatctcctg

SEQ ID NO: 1017137 - DNA, 15 bp, Homo sapiens
tggcctcgatctcct

SEQ ID NO: 1017138 - DNA, 15 bp, Homo sapiens
atggcctcgatctcc

SEQ ID NO: 1017139 - DNA, 15 bp, Homo sapiens
gatggcctcgatctc

SEQ ID NO: 1017140 - DNA, 15 bp, Homo sapiens
ggatggcctcgatct

SEQ ID NO: 1017141 - DNA, 15 bp, Homo sapiens
aggatggcctcgatc

SEQ ID NO: 1017142 - DNA, 15 bp, Homo sapiens
caggatggcctcgat

SEQ ID NO: 1017143 - DNA, 15 bp, Homo sapiens
ccaggatggcctcga

SEQ ID NO: 1017144 - DNA, 15 bp, Homo sapiens
gccaggatggcctcg

SEQ ID NO: 1017145 - DNA, 15 bp, Homo sapiens
agccaggatggcctc

SEQ ID NO: 1017146 - DNA, 15 bp, Homo sapiens
tagccaggatggcct

SEQ ID NO: 1017147 - DNA, 15 bp, Homo sapiens
ttagccaggatggcc

SEQ ID NO: 1017148 - DNA, 15 bp, Homo sapiens
gttagccaggatggc

SEQ ID NO: 1017149 - DNA, 15 bp, Homo sapiens
gccgccaccatgccc

SEQ ID NO: 1017150 - DNA, 15 bp, Homo sapiens
ggccgccaccatgcc

SEQ ID NO: 1017151 - DNA, 15 bp, Homo sapiens
cggccgccaccatgc

SEQ ID NO: 1017152 - DNA, 15 bp, Homo sapiens
gcggccgccaccatg

SEQ ID NO: 1017153 - DNA, 15 bp, Homo sapiens
ggcggccgccaccat

SEQ ID NO: 1017154 - DNA, 15 bp, Homo sapiens
aggcggccgccacca

SEQ ID NO: 1017155 - DNA, 15 bp, Homo sapiens
caggcggccgccacc

SEQ ID NO: 1017156 - DNA, 15 bp, Homo sapiens
acaggcggccgccac

SEQ ID NO: 1017157 - DNA, 15 bp, Homo sapiens
tacaggcggccgcca

SEQ ID NO: 1017158 - DNA, 15 bp, Homo sapiens
ctacaggcggccgcc

SEQ ID NO: 1017159 - DNA, 15 bp, Homo sapiens
actacaggcggccgc

SEQ ID NO: 1017160 - DNA, 15 bp, Homo sapiens
gactacaggcggccg

SEQ ID NO: 1017161 - DNA, 15 bp, Homo sapiens
ggactacaggcggcc

SEQ ID NO: 1017162 - DNA, 15 bp, Homo sapiens
gggactacaggcggc

SEQ ID NO: 1017163 - DNA, 15 bp, Homo sapiens
tgggactacaggcgg

SEQ ID NO: 1017164 - DNA, 15 bp, Homo sapiens
tcgcgatctcggctc

SEQ ID NO: 1017165 - DNA, 15 bp, Homo sapiens
gtcgcgatctcggct

SEQ ID NO: 1017166 - DNA, 15 bp, Homo sapiens
tgtcgcgatctcggc

SEQ ID NO: 1017167 - DNA, 15 bp, Homo sapiens
gtgtcgcgatctcgg

SEQ ID NO: 1017168 - DNA, 15 bp, Homo sapiens
agtgtcgcgatctcg

SEQ ID NO: 1017169 - DNA, 15 bp, Homo sapiens
cagtgtcgcgatctc

SEQ ID NO: 1017170 - DNA, 15 bp, Homo sapiens
gcagtgtcgcgatct

SEQ ID NO: 1017171 - DNA, 15 bp, Homo sapiens
tgcagtgtcgcgatc

SEQ ID NO: 1017172 - DNA, 15 bp, Homo sapiens
gtgcagtgtcgcgat

SEQ ID NO: 1017173 - DNA, 15 bp, Homo sapiens
agtgcagtgtcgcga

SEQ ID NO: 1017174 - DNA, 15 bp, Homo sapiens
gagtgcagtgtcgcg

SEQ ID NO: 1017175 - DNA, 15 bp, Homo sapiens
ggagtgcagtgtcgc

SEQ ID NO: 1017176 - DNA, 15 bp, Homo sapiens
tggagtgcagtgtcg

SEQ ID NO: 1017177 - DNA, 15 bp, Homo sapiens
ctggagtgcagtgtc

SEQ ID NO: 1017178 - DNA, 15 bp, Homo sapiens
gcagtctcactctgt

SEQ ID NO: 1017179 - DNA, 15 bp, Homo sapiens
cgcagtctcactctg

SEQ ID NO: 1017180 - DNA, 15 bp, Homo sapiens
acgcagtctcactct

SEQ ID NO: 1017181 - DNA, 15 bp, Homo sapiens
gacgcagtctcactc

SEQ ID NO: 1017182 - DNA, 15 bp, Homo sapiens
agacgcagtctcact

SEQ ID NO: 1017183 - DNA, 15 bp, Homo sapiens
gagacgcagtctcac

SEQ ID NO: 1017184 - DNA, 15 bp, Homo sapiens
ggagacgcagtctca

SEQ ID NO: 1017185 - DNA, 15 bp, Homo sapiens
tggagacgcagtctc

SEQ ID NO: 1017186 - DNA, 15 bp, Homo sapiens
ttggagacgcagtct

SEQ ID NO: 1017187 - DNA, 15 bp, Homo sapiens
tttggagacgcagtc

SEQ ID NO: 1017188 - DNA, 15 bp, Homo sapiens
ttttggagacgcagt

SEQ ID NO: 1017189 - DNA, 15 bp, Homo sapiens
tttttggagacgcag

SEQ ID NO: 1017190 - DNA, 15 bp, Homo sapiens
ttttttggagacgca

SEQ ID NO: 1017191 - DNA, 15 bp, Homo sapiens
tttttttggagacgc

SEQ ID NO: 1017192 - DNA, 15 bp, Homo sapiens
cttttttttttggag

SEQ ID NO: 1017193 - DNA, 15 bp, Homo sapiens
tattttttctttttt

SEQ ID NO: 1017194 - DNA, 15 bp, Homo sapiens
gtattttttcttttt

SEQ ID NO: 1017195 - DNA, 15 bp, Homo sapiens
cgtattttttctttt

SEQ ID NO: 1017196 - DNA, 15 bp, Homo sapiens
acgtattttttcttt

SEQ ID NO: 1017197 - DNA, 15 bp, Homo sapiens
aacgtattttttctt

SEQ ID NO: 1017198 - DNA, 15 bp, Homo sapiens
taacgtattttttct

SEQ ID NO: 1017199 - DNA, 15 bp, Homo sapiens
ataacgtattttttc

SEQ ID NO: 1017200 - DNA, 15 bp, Homo sapiens
gataacgtatttttt

SEQ ID NO: 1017201 - DNA, 15 bp, Homo sapiens
agataacgtattttt

SEQ ID NO: 1017202 - DNA, 15 bp, Homo sapiens
tagataacgtatttt

SEQ ID NO: 1017203 - DNA, 15 bp, Homo sapiens
atagataacgtattt

SEQ ID NO: 1017204 - DNA, 15 bp, Homo sapiens
catagataacgtatt

SEQ ID NO: 1017205 - DNA, 15 bp, Homo sapiens
tcatagataacgtat

SEQ ID NO: 1017206 - DNA, 15 bp, Homo sapiens
ttcatagataacgta

SEQ ID NO: 1017207 - DNA, 15 bp, Homo sapiens
cttcatagataacgt

SEQ ID NO: 1017208 - DNA, 15 bp, Homo sapiens
tcttcatagataacg

SEQ ID NO: 1017209 - DNA, 15 bp, Homo sapiens
atcttcatagataac

SEQ ID NO: 1017210 - DNA, 15 bp, Homo sapiens
aatcttcatagataa

SEQ ID NO: 1017211 - DNA, 15 bp, Homo sapiens
aaatcttcatagata

SEQ ID NO: 1017212 - DNA, 15 bp, Homo sapiens
gaaatcttcatagat

SEQ ID NO: 1017213 - DNA, 15 bp, Homo sapiens
ggaaatcttcataga

SEQ ID NO: 1017214 - DNA, 15 bp, Homo sapiens
tggaaatcttcatag

SEQ ID NO: 1017215 - DNA, 15 bp, Homo sapiens
ttggaaatcttcata

SEQ ID NO: 1017216 - DNA, 15 bp, Homo sapiens
attggaaatcttcat

SEQ ID NO: 1017217 - DNA, 15 bp, Homo sapiens
aattggaaatcttca

SEQ ID NO: 1017218 - DNA, 15 bp, Homo sapiens
aaattggaaatcttc

SEQ ID NO: 1017219 - DNA, 15 bp, Homo sapiens
caaattggaaatctt

SEQ ID NO: 1017220 - DNA, 15 bp, Homo sapiens
tcaaattggaaatct

SEQ ID NO: 1017221 - DNA, 15 bp, Homo sapiens
atcaaattggaaatc

SEQ ID NO: 1017222 - DNA, 15 bp, Homo sapiens
aatcaaattggaaat

SEQ ID NO: 1017223 - DNA, 15 bp, Homo sapiens
aaatcaaattggaaa

SEQ ID NO: 1017224 - DNA, 15 bp, Homo sapiens
gaaatcaaattggaa

SEQ ID NO: 1017225 - DNA, 15 bp, Homo sapiens
agaaatcaaattgga

SEQ ID NO: 1017226 - DNA, 15 bp, Homo sapiens
tagaaatcaaattgg

SEQ ID NO: 1017227 - DNA, 15 bp, Homo sapiens
atagaaatcaaattg

SEQ ID NO: 1017228 - DNA, 15 bp, Homo sapiens
aatagaaatcaaatt

SEQ ID NO: 1017229 - DNA, 15 bp, Homo sapiens
aaatagaaatcaaat

SEQ ID NO: 1017230 - DNA, 15 bp, Homo sapiens
taaatagaaatcaaa

SEQ ID NO: 1017231 - DNA, 15 bp, Homo sapiens
ataaatagaaatcaa

SEQ ID NO: 1017232 - DNA, 15 bp, Homo sapiens
gataaatagaaatca

SEQ ID NO: 1017233 - DNA, 15 bp, Homo sapiens
tgataaatagaaatc

SEQ ID NO: 1017234 - DNA, 15 bp, Homo sapiens
gtgataaatagaaat

SEQ ID NO: 1017235 - DNA, 15 bp, Homo sapiens
tgtgataaatagaaa

SEQ ID NO: 1017236 - DNA, 15 bp, Homo sapiens
ttgtgataaatagaa

SEQ ID NO: 1017237 - DNA, 15 bp, Homo sapiens
tttgtgataaataga

SEQ ID NO: 1017238 - DNA, 15 bp, Homo sapiens
atttgtgataaatag

SEQ ID NO: 1017239 - DNA, 15 bp, Homo sapiens
catttgtgataaata

SEQ ID NO: 1017240 - DNA, 15 bp, Homo sapiens
ccatttgtgataaat

SEQ ID NO: 1017241 - DNA, 15 bp, Homo sapiens
gccatttgtgataaa

SEQ ID NO: 1017242 - DNA, 15 bp, Homo sapiens
ggccatttgtgataa

SEQ ID NO: 1017243 - DNA, 15 bp, Homo sapiens
tggccatttgtgata

SEQ ID NO: 1017244 - DNA, 15 bp, Homo sapiens
gtggccatttgtgat

SEQ ID NO: 1017245 - DNA, 15 bp, Homo sapiens
tgtggccatttgtga

SEQ ID NO: 1017246 - DNA, 15 bp, Homo sapiens
ctgtggccatttgtg

SEQ ID NO: 1017247 - DNA, 15 bp, Homo sapiens
actgtggccatttgt

SEQ ID NO: 1017248 - DNA, 15 bp, Homo sapiens
tactgtggccatttg

SEQ ID NO: 1017249 - DNA, 15 bp, Homo sapiens
gtactgtggccattt

SEQ ID NO: 1017250 - DNA, 15 bp, Homo sapiens
agtactgtggccatt

SEQ ID NO: 1017251 - DNA, 15 bp, Homo sapiens
gagtactgtggccat

SEQ ID NO: 1017252 - DNA, 15 bp, Homo sapiens
ggagtactgtggcca

SEQ ID NO: 1017253 - DNA, 15 bp, Homo sapiens
aggagtactgtggcc

SEQ ID NO: 1017254 - DNA, 15 bp, Homo sapiens
aaggagtactgtggc

SEQ ID NO: 1017255 - DNA, 15 bp, Homo sapiens
aaaggagtactgtgg

SEQ ID NO: 1017256 - DNA, 15 bp, Homo sapiens
caaaggagtactgtg

SEQ ID NO: 1017257 - DNA, 15 bp, Homo sapiens
acaaaggagtactgt

SEQ ID NO: 1017258 - DNA, 15 bp, Homo sapiens
tacaaaggagtactg

SEQ ID NO: 1017259 - DNA, 15 bp, Homo sapiens
gtacaaaggagtact

SEQ ID NO: 1017260 - DNA, 15 bp, Homo sapiens
agtacaaaggagtac

SEQ ID NO: 1017261 - DNA, 15 bp, Homo sapiens
aagtacaaaggagta

SEQ ID NO: 1017262 - DNA, 15 bp, Homo sapiens
aaagtacaaaggagt

SEQ ID NO: 1017263 - DNA, 15 bp, Homo sapiens
taaagtacaaaggag

SEQ ID NO: 1017264 - DNA, 15 bp, Homo sapiens
gtaaagtacaaagga

SEQ ID NO: 1017265 - DNA, 15 bp, Homo sapiens
ggtaaagtacaaagg

SEQ ID NO: 1017266 - DNA, 15 bp, Homo sapiens
tggtaaagtacaaag

SEQ ID NO: 1017267 - DNA, 15 bp, Homo sapiens
gtggtaaagtacaaa

SEQ ID NO: 1017268 - DNA, 15 bp, Homo sapiens
tgtggtaaagtacaa

SEQ ID NO: 1017269 - DNA, 15 bp, Homo sapiens
atgtggtaaagtaca

SEQ ID NO: 1017270 - DNA, 15 bp, Homo sapiens
tatgtggtaaagtac

SEQ ID NO: 1017271 - DNA, 15 bp, Homo sapiens
gtatgtggtaaagta

SEQ ID NO: 1017272 - DNA, 15 bp, Homo sapiens
ggtatgtggtaaagt

SEQ ID NO: 1017273 - DNA, 15 bp, Homo sapiens
tggtatgtggtaaag

SEQ ID NO: 1017274 - DNA, 15 bp, Homo sapiens
atggtatgtggtaaa

SEQ ID NO: 1017275 - DNA, 15 bp, Homo sapiens
tatggtatgtggtaa

SEQ ID NO: 1017276 - DNA, 15 bp, Homo sapiens
atatggtatgtggta

SEQ ID NO: 1017277 - DNA, 15 bp, Homo sapiens
aatatggtatgtggt

SEQ ID NO: 1017278 - DNA, 15 bp, Homo sapiens
caatatggtatgtgg

SEQ ID NO: 1017279 - DNA, 15 bp, Homo sapiens
acaatatggtatgtg

SEQ ID NO: 1017280 - DNA, 15 bp, Homo sapiens
tacaatatggtatgt

SEQ ID NO: 1017281 - DNA, 15 bp, Homo sapiens
atacaatatggtatg

SEQ ID NO: 1017282 - DNA, 15 bp, Homo sapiens
aatacaatatggtat

SEQ ID NO: 1017283 - DNA, 15 bp, Homo sapiens
gaatacaatatggta

SEQ ID NO: 1017284 - DNA, 15 bp, Homo sapiens
tgaatacaatatggt

SEQ ID NO: 1017285 - DNA, 15 bp, Homo sapiens
ctgaatacaatatgg

SEQ ID NO: 1017286 - DNA, 15 bp, Homo sapiens
actgaatacaatatg

SEQ ID NO: 1017287 - DNA, 15 bp, Homo sapiens
tactgaatacaatat

SEQ ID NO: 1017288 - DNA, 15 bp, Homo sapiens
ttactgaatacaata

SEQ ID NO: 1017289 - DNA, 15 bp, Homo sapiens
attactgaatacaat

SEQ ID NO: 1017290 - DNA, 15 bp, Homo sapiens
aattactgaatacaa

SEQ ID NO: 1017291 - DNA, 15 bp, Homo sapiens
taattactgaataca

SEQ ID NO: 1017292 - DNA, 15 bp, Homo sapiens
ataattactgaatac

SEQ ID NO: 1017293 - DNA, 15 bp, Homo sapiens
aataattactgaata

SEQ ID NO: 1017294 - DNA, 15 bp, Homo sapiens
aaataattactgaat

SEQ ID NO: 1017295 - DNA, 15 bp, Homo sapiens
caaataattactgaa

SEQ ID NO: 1017296 - DNA, 15 bp, Homo sapiens
acaaataattactga

SEQ ID NO: 1017297 - DNA, 15 bp, Homo sapiens
cacaaataattactg

SEQ ID NO: 1017298 - DNA, 15 bp, Homo sapiens
tcacaaataattact

SEQ ID NO: 1017299 - DNA, 15 bp, Homo sapiens
ttcacaaataattac

SEQ ID NO: 1017300 - DNA, 15 bp, Homo sapiens
attcacaaataatta

SEQ ID NO: 1017301 - DNA, 15 bp, Homo sapiens
tattcacaaataatt

SEQ ID NO: 1017302 - DNA, 15 bp, Homo sapiens
atattcacaaataat

SEQ ID NO: 1017303 - DNA, 15 bp, Homo sapiens
catattcacaaataa

SEQ ID NO: 1017304 - DNA, 15 bp, Homo sapiens
acatattcacaaata

SEQ ID NO: 1017305 - DNA, 15 bp, Homo sapiens
tacatattcacaaat

SEQ ID NO: 1017306 - DNA, 15 bp, Homo sapiens
ttacatattcacaaa

SEQ ID NO: 1017307 - DNA, 15 bp, Homo sapiens
attacatattcacaa

SEQ ID NO: 1017308 - DNA, 15 bp, Homo sapiens
aattacatattcaca

SEQ ID NO: 1017309 - DNA, 15 bp, Homo sapiens
caattacatattcac

SEQ ID NO: 1017310 - DNA, 15 bp, Homo sapiens
tcaattacatattca

SEQ ID NO: 1017311 - DNA, 15 bp, Homo sapiens
atcaattacatattc

SEQ ID NO: 1017312 - DNA, 15 bp, Homo sapiens
tatcaattacatatt

SEQ ID NO: 1017313 - DNA, 15 bp, Homo sapiens
ttatcaattacatat

SEQ ID NO: 1017314 - DNA, 15 bp, Homo sapiens
attatcaattacata

SEQ ID NO: 1017315 - DNA, 15 bp, Homo sapiens
tattatcaattacat

SEQ ID NO: 1017316 - DNA, 15 bp, Homo sapiens
atattatcaattaca

SEQ ID NO: 1017317 - DNA, 15 bp, Homo sapiens
aatattatcaattac

SEQ ID NO: 1017318 - DNA, 15 bp, Homo sapiens
caatattatcaatta

SEQ ID NO: 1017319 - DNA, 15 bp, Homo sapiens
acaatattatcaatt

SEQ ID NO: 1017320 - DNA, 15 bp, Homo sapiens
tacaatattatcaat

SEQ ID NO: 1017321 - DNA, 15 bp, Homo sapiens
ctacaatattatcaa

SEQ ID NO: 1017322 - DNA, 15 bp, Homo sapiens
cctacaatattatca

SEQ ID NO: 1017323 - DNA, 15 bp, Homo sapiens
acctacaatattatc

SEQ ID NO: 1017324 - DNA, 15 bp, Homo sapiens
aacctacaatattat

SEQ ID NO: 1017325 - DNA, 15 bp, Homo sapiens
aaacctacaatatta

SEQ ID NO: 1017326 - DNA, 15 bp, Homo sapiens
aaaacctacaatatt

SEQ ID NO: 1017327 - DNA, 15 bp, Homo sapiens
taaaacctacaatat

SEQ ID NO: 1017328 - DNA, 15 bp, Homo sapiens
ctaaaacctacaata

SEQ ID NO: 1017329 - DNA, 15 bp, Homo sapiens
tctaaaacctacaat

SEQ ID NO: 1017330 - DNA, 15 bp, Homo sapiens
ctctaaaacctacaa

SEQ ID NO: 1017331 - DNA, 15 bp, Homo sapiens
tctctaaaacctaca

SEQ ID NO: 1017332 - DNA, 15 bp, Homo sapiens
ttctctaaaacctac

SEQ ID NO: 1017333 - DNA, 15 bp, Homo sapiens
attctctaaaaccta

SEQ ID NO: 1017334 - DNA, 15 bp, Homo sapiens
gattctctaaaacct

SEQ ID NO: 1017335 - DNA, 15 bp, Homo sapiens
ggattctctaaaacc

SEQ ID NO: 1017336 - DNA, 15 bp, Homo sapiens
aggattctctaaaac

SEQ ID NO: 1017337 - DNA, 15 bp, Homo sapiens
aaggattctctaaaa

SEQ ID NO: 1017338 - DNA, 15 bp, Homo sapiens
caaggattctctaaa

SEQ ID NO: 1017339 - DNA, 15 bp, Homo sapiens
tcaaggattctctaa

SEQ ID NO: 1017340 - DNA, 15 bp, Homo sapiens
ttcaaggattctcta

SEQ ID NO: 1017341 - DNA, 15 bp, Homo sapiens
tttcaaggattctct

SEQ ID NO: 1017342 - DNA, 15 bp, Homo sapiens
ttttcaaggattctc

SEQ ID NO: 1017343 - DNA, 15 bp, Homo sapiens
gttttcaaggattct

SEQ ID NO: 1017344 - DNA, 15 bp, Homo sapiens
tgttttcaaggattc

SEQ ID NO: 1017345 - DNA, 15 bp, Homo sapiens
atgttttcaaggatt

SEQ ID NO: 1017346 - DNA, 15 bp, Homo sapiens
catgttttcaaggat

SEQ ID NO: 1017347 - DNA, 15 bp, Homo sapiens
tcatgttttcaagga

SEQ ID NO: 1017348 - DNA, 15 bp, Homo sapiens
ttcatgttttcaagg

SEQ ID NO: 1017349 - DNA, 15 bp, Homo sapiens
tttcatgttttcaag

SEQ ID NO: 1017350 - DNA, 15 bp, Homo sapiens
ttttcatgttttcaa

SEQ ID NO: 1017351 - DNA, 15 bp, Homo sapiens
attttcatgttttca

SEQ ID NO: 1017352 - DNA, 15 bp, Homo sapiens
aattttcatgttttc

SEQ ID NO: 1017353 - DNA, 15 bp, Homo sapiens
aaattttcatgtttt

SEQ ID NO: 1017354 - DNA, 15 bp, Homo sapiens
caaattttcatgttt

SEQ ID NO: 1017355 - DNA, 15 bp, Homo sapiens
ccaaattttcatgtt

SEQ ID NO: 1017356 - DNA, 15 bp, Homo sapiens
accaaattttcatgt

SEQ ID NO: 1017357 - DNA, 15 bp, Homo sapiens
taccaaattttcatg

SEQ ID NO: 1017358 - DNA, 15 bp, Homo sapiens
ttaccaaattttcat

SEQ ID NO: 1017359 - DNA, 15 bp, Homo sapiens
attaccaaattttca

SEQ ID NO: 1017360 - DNA, 15 bp, Homo sapiens
cattaccaaattttc

SEQ ID NO: 1017361 - DNA, 15 bp, Homo sapiens
ccattaccaaatttt

SEQ ID NO: 1017362 - DNA, 15 bp, Homo sapiens
cccattaccaaattt

SEQ ID NO: 1017363 - DNA, 15 bp, Homo sapiens
ccccattaccaaatt

SEQ ID NO: 1017364 - DNA, 15 bp, Homo sapiens
accccattaccaaat

SEQ ID NO: 1017365 - DNA, 15 bp, Homo sapiens
gaccccattaccaaa

SEQ ID NO: 1017366 - DNA, 15 bp, Homo sapiens
agaccccattaccaa

SEQ ID NO: 1017367 - DNA, 15 bp, Homo sapiens
tagaccccattacca

SEQ ID NO: 1017368 - DNA, 15 bp, Homo sapiens
atagaccccattacc

SEQ ID NO: 1017369 - DNA, 15 bp, Homo sapiens
aatagaccccattac

SEQ ID NO: 1017370 - DNA, 15 bp, Homo sapiens
aaatagaccccatta

SEQ ID NO: 1017371 - DNA, 15 bp, Homo sapiens
aaaatagaccccatt

SEQ ID NO: 1017372 - DNA, 15 bp, Homo sapiens
caaaatagaccccat

SEQ ID NO: 1017373 - DNA, 15 bp, Homo sapiens
tcaaaatagacccca

SEQ ID NO: 1017374 - DNA, 15 bp, Homo sapiens
atcaaaatagacccc

SEQ ID NO: 1017375 - DNA, 15 bp, Homo sapiens
aatcaaaatagaccc

SEQ ID NO: 1017376 - DNA, 15 bp, Homo sapiens
taatcaaaatagacc

SEQ ID NO: 1017377 - DNA, 15 bp, Homo sapiens
ataatcaaaatagac

SEQ ID NO: 1017378 - DNA, 15 bp, Homo sapiens
aataatcaaaataga

SEQ ID NO: 1017379 - DNA, 15 bp, Homo sapiens
aaataatcaaaatag

SEQ ID NO: 1017380 - DNA, 15 bp, Homo sapiens
taaataatcaaaata

SEQ ID NO: 1017381 - DNA, 15 bp, Homo sapiens
ataaataatcaaaat

SEQ ID NO: 1017382 - DNA, 15 bp, Homo sapiens
aataaataatcaaaa

SEQ ID NO: 1017383 - DNA, 15 bp, Homo sapiens
aaataaataatcaaa

SEQ ID NO: 1017384 - DNA, 15 bp, Homo sapiens
taaataaataatcaa

SEQ ID NO: 1017385 - DNA, 15 bp, Homo sapiens
ataaataaataatca

SEQ ID NO: 1017386 - DNA, 15 bp, Homo sapiens
aataaataaataatc

SEQ ID NO: 1017387 - DNA, 15 bp, Homo sapiens
ataaaataaataaat

SEQ ID NO: 1017388 - DNA, 15 bp, Homo sapiens
aaaataaaataaata

SEQ ID NO: 1017389 - DNA, 15 bp, Homo sapiens
caaaaataaaataaa

SEQ ID NO: 1017390 - DNA, 15 bp, Homo sapiens
tcaaaaataaaataa

SEQ ID NO: 1017391 - DNA, 15 bp, Homo sapiens
ctcaaaaataaaata

SEQ ID NO: 1017392 - DNA, 15 bp, Homo sapiens
tctcaaaaataaaat

SEQ ID NO: 1017393 - DNA, 15 bp, Homo sapiens
caagagcgagactct

SEQ ID NO: 1017394 - DNA, 15 bp, Homo sapiens
aacaagagcgagact

SEQ ID NO: 1017395 - DNA, 15 bp, Homo sapiens
caacaagagcgagac

SEQ ID NO: 1017396 - DNA, 15 bp, Homo sapiens
gcaacaagagcgaga

SEQ ID NO: 1017397 - DNA, 15 bp, Homo sapiens
ggcaacaagagcgag

SEQ ID NO: 1017398 - DNA, 15 bp, Homo sapiens
ctgggcaacaagagc

SEQ ID NO: 1017399 - DNA, 15 bp, Homo sapiens
cgtgcctgtagtccc

SEQ ID NO: 1017400 - DNA, 15 bp, Homo sapiens
acgtgcctgtagtcc

SEQ ID NO: 1017401 - DNA, 15 bp, Homo sapiens
cacgtgcctgtagtc

SEQ ID NO: 1017402 - DNA, 15 bp, Homo sapiens
gcacgtgcctgtagt

SEQ ID NO: 1017403 - DNA, 15 bp, Homo sapiens
ggcacgtgcctgtag

SEQ ID NO: 1017404 - DNA, 15 bp, Homo sapiens
tggcacgtgcctgta

SEQ ID NO: 1017405 - DNA, 15 bp, Homo sapiens
tggtggcacgtgcct

SEQ ID NO: 1017406 - DNA, 15 bp, Homo sapiens
atggtggcacgtgcc

SEQ ID NO: 1017407 - DNA, 15 bp, Homo sapiens
catggtggcacgtgc

SEQ ID NO: 1017408 - DNA, 15 bp, Homo sapiens
gcatggtggcacgtg

SEQ ID NO: 1017409 - DNA, 15 bp, Homo sapiens
ggcatggtggcacgt

SEQ ID NO: 1017410 - DNA, 15 bp, Homo sapiens
gggcatggtggcacg

SEQ ID NO: 1017411 - DNA, 15 bp, Homo sapiens
tcctctactaaaaat

SEQ ID NO: 1017412 - DNA, 15 bp, Homo sapiens
ctcctctactaaaaa

SEQ ID NO: 1017413 - DNA, 15 bp, Homo sapiens
cctcctctactaaaa

SEQ ID NO: 1017414 - DNA, 15 bp, Homo sapiens
tcctcctctactaaa

SEQ ID NO: 1017415 - DNA, 15 bp, Homo sapiens
ctcctcctctactaa

SEQ ID NO: 1017416 - DNA, 15 bp, Homo sapiens
actcctcctctacta

SEQ ID NO: 1017417 - DNA, 15 bp, Homo sapiens
aactcctcctctact

SEQ ID NO: 1017418 - DNA, 15 bp, Homo sapiens
aaactcctcctctac

SEQ ID NO: 1017419 - DNA, 15 bp, Homo sapiens
gaaactcctcctcta

SEQ ID NO: 1017420 - DNA, 15 bp, Homo sapiens
tgaaactcctcctct

SEQ ID NO: 1017421 - DNA, 15 bp, Homo sapiens
atgaaactcctcctc

SEQ ID NO: 1017422 - DNA, 15 bp, Homo sapiens
gatgaaactcctcct

SEQ ID NO: 1017423 - DNA, 15 bp, Homo sapiens
agatgaaactcctcc

SEQ ID NO: 1017424 - DNA, 15 bp, Homo sapiens
aagatgaaactcctc

SEQ ID NO: 1017425 - DNA, 15 bp, Homo sapiens
caagatgaaactcct

SEQ ID NO: 1017426 - DNA, 15 bp, Homo sapiens
acaagatgaaactcc

SEQ ID NO: 1017427 - DNA, 15 bp, Homo sapiens
aacaagatgaaactc

SEQ ID NO: 1017428 - DNA, 15 bp, Homo sapiens
taacaagatgaaact

SEQ ID NO: 1017429 - DNA, 15 bp, Homo sapiens
ctaacaagatgaaac

SEQ ID NO: 1017430 - DNA, 15 bp, Homo sapiens
gctaacaagatgaaa

SEQ ID NO: 1017431 - DNA, 15 bp, Homo sapiens
agctaacaagatgaa

SEQ ID NO: 1017432 - DNA, 15 bp, Homo sapiens
tagctaacaagatga

SEQ ID NO: 1017433 - DNA, 15 bp, Homo sapiens
ctagctaacaagatg

SEQ ID NO: 1017434 - DNA, 15 bp, Homo sapiens
cctagctaacaagat

SEQ ID NO: 1017435 - DNA, 15 bp, Homo sapiens
tcctagctaacaaga

SEQ ID NO: 1017436 - DNA, 15 bp, Homo sapiens
atcctagctaacaag

SEQ ID NO: 1017437 - DNA, 15 bp, Homo sapiens
catcctagctaacaa

SEQ ID NO: 1017438 - DNA, 15 bp, Homo sapiens
ccatcctagctaaca

SEQ ID NO: 1017439 - DNA, 15 bp, Homo sapiens
accatcctagctaac

SEQ ID NO: 1017440 - DNA, 15 bp, Homo sapiens
gaccatcctagctaa

SEQ ID NO: 1017441 - DNA, 15 bp, Homo sapiens
agaccatcctagcta

SEQ ID NO: 1017442 - DNA, 15 bp, Homo sapiens
tagaccatcctagct

SEQ ID NO: 1017443 - DNA, 15 bp, Homo sapiens
ctagaccatcctagc

SEQ ID NO: 1017444 - DNA, 15 bp, Homo sapiens
tctagaccatcctag

SEQ ID NO: 1017445 - DNA, 15 bp, Homo sapiens
atctagaccatccta

SEQ ID NO: 1017446 - DNA, 15 bp, Homo sapiens
gatctagaccatcct

SEQ ID NO: 1017447 - DNA, 15 bp, Homo sapiens
agatctagaccatcc

SEQ ID NO: 1017448 - DNA, 15 bp, Homo sapiens
gagatctagaccatc

SEQ ID NO: 1017449 - DNA, 15 bp, Homo sapiens
ggagatctagaccat

SEQ ID NO: 1017450 - DNA, 15 bp, Homo sapiens
aggagatctagacca

SEQ ID NO: 1017451 - DNA, 15 bp, Homo sapiens
caggagatctagacc

SEQ ID NO: 1017452 - DNA, 15 bp, Homo sapiens
tcaggagatctagac

SEQ ID NO: 1017453 - DNA, 15 bp, Homo sapiens
gtcaggagatctaga

SEQ ID NO: 1017454 - DNA, 15 bp, Homo sapiens
ggtcaggagatctag

SEQ ID NO: 1017455 - DNA, 15 bp, Homo sapiens
aggtcaggagatcta

SEQ ID NO: 1017456 - DNA, 15 bp, Homo sapiens
gaggtcaggagatct

SEQ ID NO: 1017457 - DNA, 15 bp, Homo sapiens
tggccgggcacggtg

SEQ ID NO: 1017458 - DNA, 15 bp, Homo sapiens
tatggccgggcacgg

SEQ ID NO: 1017459 - DNA, 15 bp, Homo sapiens
atatggccgggcacg

SEQ ID NO: 1017460 - DNA, 15 bp, Homo sapiens
aatatggccgggcac

SEQ ID NO: 1017461 - DNA, 15 bp, Homo sapiens
aaatatggccgggca

SEQ ID NO: 1017462 - DNA, 15 bp, Homo sapiens
aaaatatggccgggc

SEQ ID NO: 1017463 - DNA, 15 bp, Homo sapiens
caaaatatggccggg

SEQ ID NO: 1017464 - DNA, 15 bp, Homo sapiens
tcaaaatatggccgg

SEQ ID NO: 1017465 - DNA, 15 bp, Homo sapiens
atcaaaatatggccg

SEQ ID NO: 1017466 - DNA, 15 bp, Homo sapiens
aatcaaaatatggcc

SEQ ID NO: 1017467 - DNA, 15 bp, Homo sapiens
aaatcaaaatatggc

SEQ ID NO: 1017468 - DNA, 15 bp, Homo sapiens
taaatcaaaatatgg

SEQ ID NO: 1017469 - DNA, 15 bp, Homo sapiens
ttaaatcaaaatatg

SEQ ID NO: 1017470 - DNA, 15 bp, Homo sapiens
tttaaatcaaaatat

SEQ ID NO: 1017471 - DNA, 15 bp, Homo sapiens
ttttaaatcaaaata

SEQ ID NO: 1017472 - DNA, 15 bp, Homo sapiens
attttaaatcaaaat

SEQ ID NO: 1017473 - DNA, 15 bp, Homo sapiens
aattttaaatcaaaa

SEQ ID NO: 1017474 - DNA, 15 bp, Homo sapiens
aaattttaaatcaaa

SEQ ID NO: 1017475 - DNA, 15 bp, Homo sapiens
taaattttaaatcaa

SEQ ID NO: 1017476 - DNA, 15 bp, Homo sapiens
ctaaattttaaatca

SEQ ID NO: 1017477 - DNA, 15 bp, Homo sapiens
gctaaattttaaatc

SEQ ID NO: 1017478 - DNA, 15 bp, Homo sapiens
tgctaaattttaaat

SEQ ID NO: 1017479 - DNA, 15 bp, Homo sapiens
ttgctaaattttaaa

SEQ ID NO: 1017480 - DNA, 15 bp, Homo sapiens
attgctaaattttaa

SEQ ID NO: 1017481 - DNA, 15 bp, Homo sapiens
tattgctaaatttta

SEQ ID NO: 1017482 - DNA, 15 bp, Homo sapiens
ttattgctaaatttt

SEQ ID NO: 1017483 - DNA, 15 bp, Homo sapiens
attattgctaaattt

SEQ ID NO: 1017484 - DNA, 15 bp, Homo sapiens
tattattgctaaatt

SEQ ID NO: 1017485 - DNA, 15 bp, Homo sapiens
ctattattgctaaat

SEQ ID NO: 1017486 - DNA, 15 bp, Homo sapiens
tctattattgctaaa

SEQ ID NO: 1017487 - DNA, 15 bp, Homo sapiens
atctattattgctaa

SEQ ID NO: 1017488 - DNA, 15 bp, Homo sapiens
tatctattattgcta

SEQ ID NO: 1017489 - DNA, 15 bp, Homo sapiens
ttatctattattgct

SEQ ID NO: 1017490 - DNA, 15 bp, Homo sapiens
tttatctattattgc

SEQ ID NO: 1017491 - DNA, 15 bp, Homo sapiens
ttttatctattattg

SEQ ID NO: 1017492 - DNA, 15 bp, Homo sapiens
attttatctattatt

SEQ ID NO: 1017493 - DNA, 15 bp, Homo sapiens
aattttatctattat

SEQ ID NO: 1017494 - DNA, 15 bp, Homo sapiens
aaattttatctatta

SEQ ID NO: 1017495 - DNA, 15 bp, Homo sapiens
aaaattttatctatt

SEQ ID NO: 1017496 - DNA, 15 bp, Homo sapiens
gaaaattttatctat

SEQ ID NO: 1017497 - DNA, 15 bp, Homo sapiens
tgaaaattttatcta

SEQ ID NO: 1017498 - DNA, 15 bp, Homo sapiens
ttgaaaattttatct

SEQ ID NO: 1017499 - DNA, 15 bp, Homo sapiens
attgaaaattttatc

SEQ ID NO: 1017500 - DNA, 15 bp, Homo sapiens
gattgaaaattttat

SEQ ID NO: 1017501 - DNA, 15 bp, Homo sapiens
tgattgaaaatttta

SEQ ID NO: 1017502 - DNA, 15 bp, Homo sapiens
ttgattgaaaatttt

SEQ ID NO: 1017503 - DNA, 15 bp, Homo sapiens
gttgattgaaaattt

SEQ ID NO: 1017504 - DNA, 15 bp, Homo sapiens
agttgattgaaaatt

SEQ ID NO: 1017505 - DNA, 15 bp, Homo sapiens
tagttgattgaaaat

SEQ ID NO: 1017506 - DNA, 15 bp, Homo sapiens
ttagttgattgaaaa

SEQ ID NO: 1017507 - DNA, 15 bp, Homo sapiens
cttagttgattgaaa

SEQ ID NO: 1017508 - DNA, 15 bp, Homo sapiens
gcttagttgattgaa

SEQ ID NO: 1017509 - DNA, 15 bp, Homo sapiens
ggcttagttgattga

SEQ ID NO: 1017510 - DNA, 15 bp, Homo sapiens
gggcttagttgattg

SEQ ID NO: 1017511 - DNA, 15 bp, Homo sapiens
agggcttagttgatt

SEQ ID NO: 1017512 - DNA, 15 bp, Homo sapiens
aagggcttagttgat

SEQ ID NO: 1017513 - DNA, 15 bp, Homo sapiens
caagggcttagttga

SEQ ID NO: 1017514 - DNA, 15 bp, Homo sapiens
ccaagggcttagttg

SEQ ID NO: 1017515 - DNA, 15 bp, Homo sapiens
cccaagggcttagtt

SEQ ID NO: 1017516 - DNA, 15 bp, Homo sapiens
gcccaagggcttagt

SEQ ID NO: 1017517 - DNA, 15 bp, Homo sapiens
ggcccaagggcttag

SEQ ID NO: 1017518 - DNA, 15 bp, Homo sapiens
tggcccaagggctta

SEQ ID NO: 1017519 - DNA, 15 bp, Homo sapiens
ctggcccaagggctt

SEQ ID NO: 1017520 - DNA, 15 bp, Homo sapiens
cctggcccaagggct

SEQ ID NO: 1017521 - DNA, 15 bp, Homo sapiens
ccctggcccaagggc

SEQ ID NO: 1017522 - DNA, 15 bp, Homo sapiens
tccctggcccaaggg

SEQ ID NO: 1017523 - DNA, 15 bp, Homo sapiens
ttccctggcccaagg

SEQ ID NO: 1017524 - DNA, 15 bp, Homo sapiens
attccctggcccaag

SEQ ID NO: 1017525 - DNA, 15 bp, Homo sapiens
cattccctggcccaa

SEQ ID NO: 1017526 - DNA, 15 bp, Homo sapiens
gcattccctggccca

SEQ ID NO: 1017527 - DNA, 15 bp, Homo sapiens
agcattccctggccc

SEQ ID NO: 1017528 - DNA, 15 bp, Homo sapiens
tagcattccctggcc

SEQ ID NO: 1017529 - DNA, 15 bp, Homo sapiens
atagcattccctggc

SEQ ID NO: 1017530 - DNA, 15 bp, Homo sapiens
aatagcattccctgg

SEQ ID NO: 1017531 - DNA, 15 bp, Homo sapiens
gaatagcattccctg

SEQ ID NO: 1017532 - DNA, 15 bp, Homo sapiens
ggaatagcattccct

SEQ ID NO: 1017533 - DNA, 15 bp, Homo sapiens
aggaatagcattccc

SEQ ID NO: 1017534 - DNA, 15 bp, Homo sapiens
aaggaatagcattcc

SEQ ID NO: 1017535 - DNA, 15 bp, Homo sapiens
taaggaatagcattc

SEQ ID NO: 1017536 - DNA, 15 bp, Homo sapiens
ttaaggaatagcatt

SEQ ID NO: 1017537 - DNA, 15 bp, Homo sapiens
tttaaggaatagcat

SEQ ID NO: 1017538 - DNA, 15 bp, Homo sapiens
ttttaaggaatagca

SEQ ID NO: 1017539 - DNA, 15 bp, Homo sapiens
tttttaaggaatagc

SEQ ID NO: 1017540 - DNA, 15 bp, Homo sapiens
ctttttaaggaatag

SEQ ID NO: 1017541 - DNA, 15 bp, Homo sapiens
actttttaaggaata

SEQ ID NO: 1017542 - DNA, 15 bp, Homo sapiens
cactttttaaggaat

SEQ ID NO: 1017543 - DNA, 15 bp, Homo sapiens
gcactttttaaggaa

SEQ ID NO: 1017544 - DNA, 15 bp, Homo sapiens
agcactttttaagga

SEQ ID NO: 1017545 - DNA, 15 bp, Homo sapiens
aagcactttttaagg

SEQ ID NO: 1017546 - DNA, 15 bp, Homo sapiens
gaagcactttttaag

SEQ ID NO: 1017547 - DNA, 15 bp, Homo sapiens
agaagcactttttaa

SEQ ID NO: 1017548 - DNA, 15 bp, Homo sapiens
tagaagcacttttta

SEQ ID NO: 1017549 - DNA, 15 bp, Homo sapiens
atagaagcacttttt

SEQ ID NO: 1017550 - DNA, 15 bp, Homo sapiens
gatagaagcactttt

SEQ ID NO: 1017551 - DNA, 15 bp, Homo sapiens
tgatagaagcacttt

SEQ ID NO: 1017552 - DNA, 15 bp, Homo sapiens
ttgatagaagcactt

SEQ ID NO: 1017553 - DNA, 15 bp, Homo sapiens
attgatagaagcact

SEQ ID NO: 1017554 - DNA, 15 bp, Homo sapiens
tattgatagaagcac

SEQ ID NO: 1017555 - DNA, 15 bp, Homo sapiens
atattgatagaagca

SEQ ID NO: 1017556 - DNA, 15 bp, Homo sapiens
tatattgatagaagc

SEQ ID NO: 1017557 - DNA, 15 bp, Homo sapiens
ctatattgatagaag

SEQ ID NO: 1017558 - DNA, 15 bp, Homo sapiens
gctatattgatagaa

SEQ ID NO: 1017559 - DNA, 15 bp, Homo sapiens
ggctatattgataga

SEQ ID NO: 1017560 - DNA, 15 bp, Homo sapiens
aggctatattgatag

SEQ ID NO: 1017561 - DNA, 15 bp, Homo sapiens
gaggctatattgata

SEQ ID NO: 1017562 - DNA, 15 bp, Homo sapiens
agaggctatattgat

SEQ ID NO: 1017563 - DNA, 15 bp, Homo sapiens
cagaggctatattga

SEQ ID NO: 1017564 - DNA, 15 bp, Homo sapiens
tcagaggctatattg

SEQ ID NO: 1017565 - DNA, 15 bp, Homo sapiens
gtcagaggctatatt

SEQ ID NO: 1017566 - DNA, 15 bp, Homo sapiens
agtcagaggctatat

SEQ ID NO: 1017567 - DNA, 15 bp, Homo sapiens
gagtcagaggctata

SEQ ID NO: 1017568 - DNA, 15 bp, Homo sapiens
tgagtcagaggctat

SEQ ID NO: 1017569 - DNA, 15 bp, Homo sapiens
atgagtcagaggcta

SEQ ID NO: 1017570 - DNA, 15 bp, Homo sapiens
aatgagtcagaggct

SEQ ID NO: 1017571 - DNA, 15 bp, Homo sapiens
taatgagtcagaggc

SEQ ID NO: 1017572 - DNA, 15 bp, Homo sapiens
gtaatgagtcagagg

SEQ ID NO: 1017573 - DNA, 15 bp, Homo sapiens
agtaatgagtcagag

SEQ ID NO: 1017574 - DNA, 15 bp, Homo sapiens
aagtaatgagtcaga

SEQ ID NO: 1017575 - DNA, 15 bp, Homo sapiens
aaagtaatgagtcag

SEQ ID NO: 1017576 - DNA, 15 bp, Homo sapiens
caaagtaatgagtca

SEQ ID NO: 1017577 - DNA, 15 bp, Homo sapiens
acaaagtaatgagtc

SEQ ID NO: 1017578 - DNA, 15 bp, Homo sapiens
aacaaagtaatgagt

SEQ ID NO: 1017579 - DNA, 15 bp, Homo sapiens
taacaaagtaatgag

SEQ ID NO: 1017580 - DNA, 15 bp, Homo sapiens
tctatatatgaaaat

SEQ ID NO: 1017581 - DNA, 15 bp, Homo sapiens
ctctatatatgaaaa

SEQ ID NO: 1017582 - DNA, 15 bp, Homo sapiens
cctctatatatgaaa

SEQ ID NO: 1017583 - DNA, 15 bp, Homo sapiens
ccctctatatatgaa

SEQ ID NO: 1017584 - DNA, 15 bp, Homo sapiens
gccctctatatatga

SEQ ID NO: 1017585 - DNA, 15 bp, Homo sapiens
ggccctctatatatg

SEQ ID NO: 1017586 - DNA, 15 bp, Homo sapiens
aggccctctatatat

SEQ ID NO: 1017587 - DNA, 15 bp, Homo sapiens
aaggccctctatata

SEQ ID NO: 1017588 - DNA, 15 bp, Homo sapiens
taaggccctctatat

SEQ ID NO: 1017589 - DNA, 15 bp, Homo sapiens
ttaaggccctctata

SEQ ID NO: 1017590 - DNA, 15 bp, Homo sapiens
attaaggccctctat

SEQ ID NO: 1017591 - DNA, 15 bp, Homo sapiens
tattaaggccctcta

SEQ ID NO: 1017592 - DNA, 15 bp, Homo sapiens
ctattaaggccctct

SEQ ID NO: 1017593 - DNA, 15 bp, Homo sapiens
actattaaggccctc

SEQ ID NO: 1017594 - DNA, 15 bp, Homo sapiens
gactattaaggccct

SEQ ID NO: 1017595 - DNA, 15 bp, Homo sapiens
tgactattaaggccc

SEQ ID NO: 1017596 - DNA, 15 bp, Homo sapiens
gtgactattaaggcc

SEQ ID NO: 1017597 - DNA, 15 bp, Homo sapiens
agtgactattaaggc

SEQ ID NO: 1017598 - DNA, 15 bp, Homo sapiens
cagtgactattaagg

SEQ ID NO: 1017599 - DNA, 15 bp, Homo sapiens
tcagtgactattaag

SEQ ID NO: 1017600 - DNA, 15 bp, Homo sapiens
ttcagtgactattaa

SEQ ID NO: 1017601 - DNA, 15 bp, Homo sapiens
attcagtgactatta

SEQ ID NO: 1017602 - DNA, 15 bp, Homo sapiens
cattcagtgactatt

SEQ ID NO: 1017603 - DNA, 15 bp, Homo sapiens
acattcagtgactat

SEQ ID NO: 1017604 - DNA, 15 bp, Homo sapiens
cacattcagtgacta

SEQ ID NO: 1017605 - DNA, 15 bp, Homo sapiens
acacattcagtgact

SEQ ID NO: 1017606 - DNA, 15 bp, Homo sapiens
tacacattcagtgac

SEQ ID NO: 1017607 - DNA, 15 bp, Homo sapiens
gtacacattcagtga

SEQ ID NO: 1017608 - DNA, 15 bp, Homo sapiens
agtacacattcagtg

SEQ ID NO: 1017609 - DNA, 15 bp, Homo sapiens
tagtacacattcagt

SEQ ID NO: 1017610 - DNA, 15 bp, Homo sapiens
atagtacacattcag

SEQ ID NO: 1017611 - DNA, 15 bp, Homo sapiens
tatagtacacattca

SEQ ID NO: 1017612 - DNA, 15 bp, Homo sapiens
ctatagtacacattc

SEQ ID NO: 1017613 - DNA, 15 bp, Homo sapiens
actatagtacacatt

SEQ ID NO: 1017614 - DNA, 15 bp, Homo sapiens
tactatagtacacat

SEQ ID NO: 1017615 - DNA, 15 bp, Homo sapiens
ttactatagtacaca

SEQ ID NO: 1017616 - DNA, 15 bp, Homo sapiens
tttactatagtacac

SEQ ID NO: 1017617 - DNA, 15 bp, Homo sapiens
ttttactatagtaca

SEQ ID NO: 1017618 - DNA, 15 bp, Homo sapiens
gttttactatagtac

SEQ ID NO: 1017619 - DNA, 15 bp, Homo sapiens
ggttttactatagta

SEQ ID NO: 1017620 - DNA, 15 bp, Homo sapiens
tggttttactatagt

SEQ ID NO: 1017621 - DNA, 15 bp, Homo sapiens
ctggttttactatag

SEQ ID NO: 1017622 - DNA, 15 bp, Homo sapiens
tctggttttactata

SEQ ID NO: 1017623 - DNA, 15 bp, Homo sapiens
ttctggttttactat

SEQ ID NO: 1017624 - DNA, 15 bp, Homo sapiens
tttctggttttacta

SEQ ID NO: 1017625 - DNA, 15 bp, Homo sapiens
gtttctggttttact

SEQ ID NO: 1017626 - DNA, 15 bp, Homo sapiens
agtttctggttttac

SEQ ID NO: 1017627 - DNA, 15 bp, Homo sapiens
tagtttctggtttta

SEQ ID NO: 1017628 - DNA, 15 bp, Homo sapiens
gtagtttctggtttt

SEQ ID NO: 1017629 - DNA, 15 bp, Homo sapiens
tgtagtttctggttt

SEQ ID NO: 1017630 - DNA, 15 bp, Homo sapiens
atgtagtttctggtt

SEQ ID NO: 1017631 - DNA, 15 bp, Homo sapiens
tatgtagtttctggt

SEQ ID NO: 1017632 - DNA, 15 bp, Homo sapiens
ttatgtagtttctgg

SEQ ID NO: 1017633 - DNA, 15 bp, Homo sapiens
tttatgtagtttctg

SEQ ID NO: 1017634 - DNA, 15 bp, Homo sapiens
ttttatgtagtttct

SEQ ID NO: 1017635 - DNA, 15 bp, Homo sapiens
cttttatgtagtttc

SEQ ID NO: 1017636 - DNA, 15 bp, Homo sapiens
tcttttatgtagttt

SEQ ID NO: 1017637 - DNA, 15 bp, Homo sapiens
ctcttttatgtagtt

SEQ ID NO: 1017638 - DNA, 15 bp, Homo sapiens
cctcttttatgtagt

SEQ ID NO: 1017639 - DNA, 15 bp, Homo sapiens
tcctcttttatgtag

SEQ ID NO: 1017640 - DNA, 15 bp, Homo sapiens
ttcctcttttatgta

SEQ ID NO: 1017641 - DNA, 15 bp, Homo sapiens
attcctcttttatgt

SEQ ID NO: 1017642 - DNA, 15 bp, Homo sapiens
aattcctcttttatg

SEQ ID NO: 1017643 - DNA, 15 bp, Homo sapiens
aaattcctcttttat

SEQ ID NO: 1017644 - DNA, 15 bp, Homo sapiens
caaattcctctttta

SEQ ID NO: 1017645 - DNA, 15 bp, Homo sapiens
ccaaattcctctttt

SEQ ID NO: 1017646 - DNA, 15 bp, Homo sapiens
cccaaattcctcttt

SEQ ID NO: 1017647 - DNA, 15 bp, Homo sapiens
tcccaaattcctctt

SEQ ID NO: 1017648 - DNA, 15 bp, Homo sapiens
ctcccaaattcctct

SEQ ID NO: 1017649 - DNA, 15 bp, Homo sapiens
tctcccaaattcctc

SEQ ID NO: 1017650 - DNA, 15 bp, Homo sapiens
atctcccaaattcct

SEQ ID NO: 1017651 - DNA, 15 bp, Homo sapiens
aatctcccaaattcc

SEQ ID NO: 1017652 - DNA, 15 bp, Homo sapiens
gaatctcccaaattc

SEQ ID NO: 1017653 - DNA, 15 bp, Homo sapiens
tgaatctcccaaatt

SEQ ID NO: 1017654 - DNA, 15 bp, Homo sapiens
ctgaatctcccaaat

SEQ ID NO: 1017655 - DNA, 15 bp, Homo sapiens
gctgaatctcccaaa

SEQ ID NO: 1017656 - DNA, 15 bp, Homo sapiens
tgctgaatctcccaa

SEQ ID NO: 1017657 - DNA, 15 bp, Homo sapiens
ttgctgaatctccca

SEQ ID NO: 1017658 - DNA, 15 bp, Homo sapiens
gttgctgaatctccc

SEQ ID NO: 1017659 - DNA, 15 bp, Homo sapiens
ggttgctgaatctcc

SEQ ID NO: 1017660 - DNA, 15 bp, Homo sapiens
gggttgctgaatctc

SEQ ID NO: 1017661 - DNA, 15 bp, Homo sapiens
tgggttgctgaatct

SEQ ID NO: 1017662 - DNA, 15 bp, Homo sapiens
ttgggttgctgaatc

SEQ ID NO: 1017663 - DNA, 15 bp, Homo sapiens
cttgggttgctgaat

SEQ ID NO: 1017664 - DNA, 15 bp, Homo sapiens
tcttgggttgctgaa

SEQ ID NO: 1017665 - DNA, 15 bp, Homo sapiens
ctcttgggttgctga

SEQ ID NO: 1017666 - DNA, 15 bp, Homo sapiens
tctcttgggttgctg

SEQ ID NO: 1017667 - DNA, 15 bp, Homo sapiens
ttctcttgggttgct

SEQ ID NO: 1017668 - DNA, 15 bp, Homo sapiens
attctcttgggttgc

SEQ ID NO: 1017669 - DNA, 15 bp, Homo sapiens
tattctcttgggttg

SEQ ID NO: 1017670 - DNA, 15 bp, Homo sapiens
ttattctcttgggtt

SEQ ID NO: 1017671 - DNA, 15 bp, Homo sapiens
attattctcttgggt

SEQ ID NO: 1017672 - DNA, 15 bp, Homo sapiens
cattattctcttggg

SEQ ID NO: 1017673 - DNA, 15 bp, Homo sapiens
tcattattctcttgg

SEQ ID NO: 1017674 - DNA, 15 bp, Homo sapiens
ttcattattctcttg

SEQ ID NO: 1017675 - DNA, 15 bp, Homo sapiens
cttcattattctctt

SEQ ID NO: 1017676 - DNA, 15 bp, Homo sapiens
acttcattattctct

SEQ ID NO: 1017677 - DNA, 15 bp, Homo sapiens
tacttcattattctc

SEQ ID NO: 1017678 - DNA, 15 bp, Homo sapiens
atacttcattattct

SEQ ID NO: 1017679 - DNA, 15 bp, Homo sapiens
catacttcattattc

SEQ ID NO: 1017680 - DNA, 15 bp, Homo sapiens
tcatacttcattatt

SEQ ID NO: 1017681 - DNA, 15 bp, Homo sapiens
ctcatacttcattat

SEQ ID NO: 1017682 - DNA, 15 bp, Homo sapiens
cctcatacttcatta

SEQ ID NO: 1017683 - DNA, 15 bp, Homo sapiens
ccctcatacttcatt

SEQ ID NO: 1017684 - DNA, 15 bp, Homo sapiens
cccctcatacttcat

SEQ ID NO: 1017685 - DNA, 15 bp, Homo sapiens
ccccctcatacttca

SEQ ID NO: 1017686 - DNA, 15 bp, Homo sapiens
tccccctcatacttc

SEQ ID NO: 1017687 - DNA, 15 bp, Homo sapiens
atccccctcatactt

SEQ ID NO: 1017688 - DNA, 15 bp, Homo sapiens
catccccctcatact

SEQ ID NO: 1017689 - DNA, 15 bp, Homo sapiens
acatccccctcatac

SEQ ID NO: 1017690 - DNA, 15 bp, Homo sapiens
aacatccccctcata

SEQ ID NO: 1017691 - DNA, 15 bp, Homo sapiens
aaacatccccctcat

SEQ ID NO: 1017692 - DNA, 15 bp, Homo sapiens
aaaacatccccctca

SEQ ID NO: 1017693 - DNA, 15 bp, Homo sapiens
gaaaacatccccctc

SEQ ID NO: 1017694 - DNA, 15 bp, Homo sapiens
agaaaacatccccct

SEQ ID NO: 1017695 - DNA, 15 bp, Homo sapiens
gagaaaacatccccc

SEQ ID NO: 1017696 - DNA, 15 bp, Homo sapiens
ggagaaaacatcccc

SEQ ID NO: 1017697 - DNA, 15 bp, Homo sapiens
aggagaaaacatccc

SEQ ID NO: 1017698 - DNA, 15 bp, Homo sapiens
aaggagaaaacatcc

SEQ ID NO: 1017699 - DNA, 15 bp, Homo sapiens
taaggagaaaacatc

SEQ ID NO: 1017700 - DNA, 15 bp, Homo sapiens
ctaaggagaaaacat

SEQ ID NO: 1017701 - DNA, 15 bp, Homo sapiens
actaaggagaaaaca

SEQ ID NO: 1017702 - DNA, 15 bp, Homo sapiens
aactaaggagaaaac

SEQ ID NO: 1017703 - DNA, 15 bp, Homo sapiens
gaactaaggagaaaa

SEQ ID NO: 1017704 - DNA, 15 bp, Homo sapiens
agaactaaggagaaa

SEQ ID NO: 1017705 - DNA, 15 bp, Homo sapiens
aagaactaaggagaa

SEQ ID NO: 1017706 - DNA, 15 bp, Homo sapiens
aaagaactaaggaga

SEQ ID NO: 1017707 - DNA, 15 bp, Homo sapiens
aaaagaactaaggag

SEQ ID NO: 1017708 - DNA, 15 bp, Homo sapiens
gaaaagaactaagga

SEQ ID NO: 1017709 - DNA, 15 bp, Homo sapiens
ggaaaagaactaagg

SEQ ID NO: 1017710 - DNA, 15 bp, Homo sapiens
cggaaaagaactaag

SEQ ID NO: 1017711 - DNA, 15 bp, Homo sapiens
acggaaaagaactaa

SEQ ID NO: 1017712 - DNA, 15 bp, Homo sapiens
tacggaaaagaacta

SEQ ID NO: 1017713 - DNA, 15 bp, Homo sapiens
atacggaaaagaact

SEQ ID NO: 1017714 - DNA, 15 bp, Homo sapiens
aatacggaaaagaac

SEQ ID NO: 1017715 - DNA, 15 bp, Homo sapiens
aaatacggaaaagaa

SEQ ID NO: 1017716 - DNA, 15 bp, Homo sapiens
aaaatacggaaaaga

SEQ ID NO: 1017717 - DNA, 15 bp, Homo sapiens
aaaaatacggaaaag

SEQ ID NO: 1017718 - DNA, 15 bp, Homo sapiens
gaaaaatacggaaaa

SEQ ID NO: 1017719 - DNA, 15 bp, Homo sapiens
tgaaaaatacggaaa

SEQ ID NO: 1017720 - DNA, 15 bp, Homo sapiens
ttgaaaaatacggaa

SEQ ID NO: 1017721 - DNA, 15 bp, Homo sapiens
attgaaaaatacgga

SEQ ID NO: 1017722 - DNA, 15 bp, Homo sapiens
tattgaaaaatacgg

SEQ ID NO: 1017723 - DNA, 15 bp, Homo sapiens
ttattgaaaaatacg

SEQ ID NO: 1017724 - DNA, 15 bp, Homo sapiens
attattgaaaaatac

SEQ ID NO: 1017725 - DNA, 15 bp, Homo sapiens
aattattgaaaaata

SEQ ID NO: 1017726 - DNA, 15 bp, Homo sapiens
aaattattgaaaaat

SEQ ID NO: 1017727 - DNA, 15 bp, Homo sapiens
caaattattgaaaaa

SEQ ID NO: 1017728 - DNA, 15 bp, Homo sapiens
tcaaattattgaaaa

SEQ ID NO: 1017729 - DNA, 15 bp, Homo sapiens
atcaaattattgaaa

SEQ ID NO: 1017730 - DNA, 15 bp, Homo sapiens
tatcaaattattgaa

SEQ ID NO: 1017731 - DNA, 15 bp, Homo sapiens
ttatcaaattattga

SEQ ID NO: 1017732 - DNA, 15 bp, Homo sapiens
attatcaaattattg

SEQ ID NO: 1017733 - DNA, 15 bp, Homo sapiens
tattatcaaattatt

SEQ ID NO: 1017734 - DNA, 15 bp, Homo sapiens
ttattatcaaattat

SEQ ID NO: 1017735 - DNA, 15 bp, Homo sapiens
tttattatcaaatta

SEQ ID NO: 1017736 - DNA, 15 bp, Homo sapiens
gtttattatcaaatt

SEQ ID NO: 1017737 - DNA, 15 bp, Homo sapiens
tgtttattatcaaat

SEQ ID NO: 1017738 - DNA, 15 bp, Homo sapiens
atgtttattatcaaa

SEQ ID NO: 1017739 - DNA, 15 bp, Homo sapiens
catgtttattatcaa

SEQ ID NO: 1017740 - DNA, 15 bp, Homo sapiens
gcatgtttattatca

SEQ ID NO: 1017741 - DNA, 15 bp, Homo sapiens
tgcatgtttattatc

SEQ ID NO: 1017742 - DNA, 15 bp, Homo sapiens
atgcatgtttattat

SEQ ID NO: 1017743 - DNA, 15 bp, Homo sapiens
tatgcatgtttatta

SEQ ID NO: 1017744 - DNA, 15 bp, Homo sapiens
ttatgcatgtttatt

SEQ ID NO: 1017745 - DNA, 15 bp, Homo sapiens
attatgcatgtttat

SEQ ID NO: 1017746 - DNA, 15 bp, Homo sapiens
aattatgcatgttta

SEQ ID NO: 1017747 - DNA, 15 bp, Homo sapiens
aaattatgcatgttt

SEQ ID NO: 1017748 - DNA, 15 bp, Homo sapiens
aaaattatgcatgtt

SEQ ID NO: 1017749 - DNA, 15 bp, Homo sapiens
taaaattatgcatgt

SEQ ID NO: 1017750 - DNA, 15 bp, Homo sapiens
ataaaattatgcatg

SEQ ID NO: 1017751 - DNA, 15 bp, Homo sapiens
tataaaattatgcat

SEQ ID NO: 1017752 - DNA, 15 bp, Homo sapiens
ttataaaattatgca

SEQ ID NO: 1017753 - DNA, 15 bp, Homo sapiens
attataaaattatgc

SEQ ID NO: 1017754 - DNA, 15 bp, Homo sapiens
aattataaaattatg

SEQ ID NO: 1017755 - DNA, 15 bp, Homo sapiens
taattataaaattat

SEQ ID NO: 1017756 - DNA, 15 bp, Homo sapiens
ttaattataaaatta

SEQ ID NO: 1017757 - DNA, 15 bp, Homo sapiens
tttaattataaaatt

SEQ ID NO: 1017758 - DNA, 15 bp, Homo sapiens
ttttaattataaaat

SEQ ID NO: 1017759 - DNA, 15 bp, Homo sapiens
tttttaattataaaa

SEQ ID NO: 1017760 - DNA, 15 bp, Homo sapiens
ctttttaattataaa

SEQ ID NO: 1017761 - DNA, 15 bp, Homo sapiens
cctttttaattataa

SEQ ID NO: 1017762 - DNA, 15 bp, Homo sapiens
tcctttttaattata

SEQ ID NO: 1017763 - DNA, 15 bp, Homo sapiens
ttcctttttaattat

SEQ ID NO: 1017764 - DNA, 15 bp, Homo sapiens
tttcctttttaatta

SEQ ID NO: 1017765 - DNA, 15 bp, Homo sapiens
atttcctttttaatt

SEQ ID NO: 1017766 - DNA, 15 bp, Homo sapiens
aatttcctttttaat

SEQ ID NO: 1017767 - DNA, 15 bp, Homo sapiens
taatttcctttttaa

SEQ ID NO: 1017768 - DNA, 15 bp, Homo sapiens
ttaatttccttttta

SEQ ID NO: 1017769 - DNA, 15 bp, Homo sapiens
attaatttccttttt

SEQ ID NO: 1017770 - DNA, 15 bp, Homo sapiens
aattaatttcctttt

SEQ ID NO: 1017771 - DNA, 15 bp, Homo sapiens
aaattaatttccttt

SEQ ID NO: 1017772 - DNA, 15 bp, Homo sapiens
aaaattaatttcctt

SEQ ID NO: 1017773 - DNA, 15 bp, Homo sapiens
caaaattaatttcct

SEQ ID NO: 1017774 - DNA, 15 bp, Homo sapiens
tcaaaattaatttcc

SEQ ID NO: 1017775 - DNA, 15 bp, Homo sapiens
gtcaaaattaatttc

SEQ ID NO: 1017776 - DNA, 15 bp, Homo sapiens
tgtcaaaattaattt

SEQ ID NO: 1017777 - DNA, 15 bp, Homo sapiens
ttgtcaaaattaatt

SEQ ID NO: 1017778 - DNA, 15 bp, Homo sapiens
gttgtcaaaattaat

SEQ ID NO: 1017779 - DNA, 15 bp, Homo sapiens
tgttgtcaaaattaa

SEQ ID NO: 1017780 - DNA, 15 bp, Homo sapiens
atgttgtcaaaatta

SEQ ID NO: 1017781 - DNA, 15 bp, Homo sapiens
catgttgtcaaaatt

SEQ ID NO: 1017782 - DNA, 15 bp, Homo sapiens
gcatgttgtcaaaat

SEQ ID NO: 1017783 - DNA, 15 bp, Homo sapiens
tgcatgttgtcaaaa

SEQ ID NO: 1017784 - DNA, 15 bp, Homo sapiens
ttgcatgttgtcaaa

SEQ ID NO: 1017785 - DNA, 15 bp, Homo sapiens
cttgcatgttgtcaa

SEQ ID NO: 1017786 - DNA, 15 bp, Homo sapiens
acttgcatgttgtca

SEQ ID NO: 1017787 - DNA, 15 bp, Homo sapiens
aacttgcatgttgtc

SEQ ID NO: 1017788 - DNA, 15 bp, Homo sapiens
gaacttgcatgttgt

SEQ ID NO: 1017789 - DNA, 15 bp, Homo sapiens
ggaacttgcatgttg

SEQ ID NO: 1017790 - DNA, 15 bp, Homo sapiens
aggaacttgcatgtt

SEQ ID NO: 1017791 - DNA, 15 bp, Homo sapiens
caggaacttgcatgt

SEQ ID NO: 1017792 - DNA, 15 bp, Homo sapiens
acaggaacttgcatg

SEQ ID NO: 1017793 - DNA, 15 bp, Homo sapiens
aacaggaacttgcat

SEQ ID NO: 1017794 - DNA, 15 bp, Homo sapiens
gaacaggaacttgca

SEQ ID NO: 1017795 - DNA, 15 bp, Homo sapiens
agaacaggaacttgc

SEQ ID NO: 1017796 - DNA, 15 bp, Homo sapiens
gagaacaggaacttg

SEQ ID NO: 1017797 - DNA, 15 bp, Homo sapiens
tgagaacaggaactt

SEQ ID NO: 1017798 - DNA, 15 bp, Homo sapiens
gtgagaacaggaact

SEQ ID NO: 1017799 - DNA, 15 bp, Homo sapiens
tgtgagaacaggaac

SEQ ID NO: 1017800 - DNA, 15 bp, Homo sapiens
atgtgagaacaggaa

SEQ ID NO: 1017801 - DNA, 15 bp, Homo sapiens
tatgtgagaacagga

SEQ ID NO: 1017802 - DNA, 15 bp, Homo sapiens
gtatgtgagaacagg

SEQ ID NO: 1017803 - DNA, 15 bp, Homo sapiens
ggtatgtgagaacag

SEQ ID NO: 1017804 - DNA, 15 bp, Homo sapiens
aggtatgtgagaaca

SEQ ID NO: 1017805 - DNA, 15 bp, Homo sapiens
aaggtatgtgagaac

SEQ ID NO: 1017806 - DNA, 15 bp, Homo sapiens
taaggtatgtgagaa

SEQ ID NO: 1017807 - DNA, 15 bp, Homo sapiens
ataaggtatgtgaga

SEQ ID NO: 1017808 - DNA, 15 bp, Homo sapiens
tataaggtatgtgag

SEQ ID NO: 1017809 - DNA, 15 bp, Homo sapiens
ctataaggtatgtga

SEQ ID NO: 1017810 - DNA, 15 bp, Homo sapiens
actataaggtatgtg

SEQ ID NO: 1017811 - DNA, 15 bp, Homo sapiens
cactataaggtatgt

SEQ ID NO: 1017812 - DNA, 15 bp, Homo sapiens
ccactataaggtatg

SEQ ID NO: 1017813 - DNA, 15 bp, Homo sapiens
tccactataaggtat

SEQ ID NO: 1017814 - DNA, 15 bp, Homo sapiens
ctccactataaggta

SEQ ID NO: 1017815 - DNA, 15 bp, Homo sapiens
cctccactataaggt

SEQ ID NO: 1017816 - DNA, 15 bp, Homo sapiens
ccctccactataagg

SEQ ID NO: 1017817 - DNA, 15 bp, Homo sapiens
tccctccactataag

SEQ ID NO: 1017818 - DNA, 15 bp, Homo sapiens
gtccctccactataa

SEQ ID NO: 1017819 - DNA, 15 bp, Homo sapiens
tgtccctccactata

SEQ ID NO: 1017820 - DNA, 15 bp, Homo sapiens
ctgtccctccactat

SEQ ID NO: 1017821 - DNA, 15 bp, Homo sapiens
tctgtccctccacta

SEQ ID NO: 1017822 - DNA, 15 bp, Homo sapiens
atctgtccctccact

SEQ ID NO: 1017823 - DNA, 15 bp, Homo sapiens
aatctgtccctccac

SEQ ID NO: 1017824 - DNA, 15 bp, Homo sapiens
caatctgtccctcca

SEQ ID NO: 1017825 - DNA, 15 bp, Homo sapiens
acaatctgtccctcc

SEQ ID NO: 1017826 - DNA, 15 bp, Homo sapiens
tacaatctgtccctc

SEQ ID NO: 1017827 - DNA, 15 bp, Homo sapiens
ctacaatctgtccct

SEQ ID NO: 1017828 - DNA, 15 bp, Homo sapiens
actacaatctgtccc

SEQ ID NO: 1017829 - DNA, 15 bp, Homo sapiens
gactacaatctgtcc

SEQ ID NO: 1017830 - DNA, 15 bp, Homo sapiens
tgactacaatctgtc

SEQ ID NO: 1017831 - DNA, 15 bp, Homo sapiens
ttgactacaatctgt

SEQ ID NO: 1017832 - DNA, 15 bp, Homo sapiens
tttgactacaatctg

SEQ ID NO: 1017833 - DNA, 15 bp, Homo sapiens
atttgactacaatct

SEQ ID NO: 1017834 - DNA, 15 bp, Homo sapiens
tatttgactacaatc

SEQ ID NO: 1017835 - DNA, 15 bp, Homo sapiens
ttatttgactacaat

SEQ ID NO: 1017836 - DNA, 15 bp, Homo sapiens
cttatttgactacaa

SEQ ID NO: 1017837 - DNA, 15 bp, Homo sapiens
gcttatttgactaca

SEQ ID NO: 1017838 - DNA, 15 bp, Homo sapiens
tgcttatttgactac

SEQ ID NO: 1017839 - DNA, 15 bp, Homo sapiens
atgcttatttgacta

SEQ ID NO: 1017840 - DNA, 15 bp, Homo sapiens
tatgcttatttgact

SEQ ID NO: 1017841 - DNA, 15 bp, Homo sapiens
ttatgcttatttgac

SEQ ID NO: 1017842 - DNA, 15 bp, Homo sapiens
attatgcttatttga

SEQ ID NO: 1017843 - DNA, 15 bp, Homo sapiens
tattatgcttatttg

SEQ ID NO: 1017844 - DNA, 15 bp, Homo sapiens
ttattatgcttattt

SEQ ID NO: 1017845 - DNA, 15 bp, Homo sapiens
attattatgcttatt

SEQ ID NO: 1017846 - DNA, 15 bp, Homo sapiens
tattattatgcttat

SEQ ID NO: 1017847 - DNA, 15 bp, Homo sapiens
gtattattatgctta

SEQ ID NO: 1017848 - DNA, 15 bp, Homo sapiens
tgtattattatgctt

SEQ ID NO: 1017849 - DNA, 15 bp, Homo sapiens
atgtattattatgct

SEQ ID NO: 1017850 - DNA, 15 bp, Homo sapiens
catgtattattatgc

SEQ ID NO: 1017851 - DNA, 15 bp, Homo sapiens
gcatgtattattatg

SEQ ID NO: 1017852 - DNA, 15 bp, Homo sapiens
tgcatgtattattat

SEQ ID NO: 1017853 - DNA, 15 bp, Homo sapiens
ttgcatgtattatta

SEQ ID NO: 1017854 - DNA, 15 bp, Homo sapiens
tttgcatgtattatt

SEQ ID NO: 1017855 - DNA, 15 bp, Homo sapiens
ttttgcatgtattat

SEQ ID NO: 1017856 - DNA, 15 bp, Homo sapiens
attttgcatgtatta

SEQ ID NO: 1017857 - DNA, 15 bp, Homo sapiens
aattttgcatgtatt

SEQ ID NO: 1017858 - DNA, 15 bp, Homo sapiens
taattttgcatgtat

SEQ ID NO: 1017859 - DNA, 15 bp, Homo sapiens
gtaattttgcatgta

SEQ ID NO: 1017860 - DNA, 15 bp, Homo sapiens
tgtaattttgcatgt

SEQ ID NO: 1017861 - DNA, 15 bp, Homo sapiens
ttgtaattttgcatg

SEQ ID NO: 1017862 - DNA, 15 bp, Homo sapiens
tttgtaattttgcat

SEQ ID NO: 1017863 - DNA, 15 bp, Homo sapiens
gtttgtaattttgca

SEQ ID NO: 1017864 - DNA, 15 bp, Homo sapiens
agtttgtaattttgc

SEQ ID NO: 1017865 - DNA, 15 bp, Homo sapiens
cagtttgtaattttg

SEQ ID NO: 1017866 - DNA, 15 bp, Homo sapiens
tcagtttgtaatttt

SEQ ID NO: 1017867 - DNA, 15 bp, Homo sapiens
ctcagtttgtaattt

SEQ ID NO: 1017868 - DNA, 15 bp, Homo sapiens
gctcagtttgtaatt

SEQ ID NO: 1017869 - DNA, 15 bp, Homo sapiens
tgctcagtttgtaat

SEQ ID NO: 1017870 - DNA, 15 bp, Homo sapiens
atgctcagtttgtaa

SEQ ID NO: 1017871 - DNA, 15 bp, Homo sapiens
aatgctcagtttgta

SEQ ID NO: 1017872 - DNA, 15 bp, Homo sapiens
taatgctcagtttgt

SEQ ID NO: 1017873 - DNA, 15 bp, Homo sapiens
gtaatgctcagtttg

SEQ ID NO: 1017874 - DNA, 15 bp, Homo sapiens
agtaatgctcagttt

SEQ ID NO: 1017875 - DNA, 15 bp, Homo sapiens
gagtaatgctcagtt

SEQ ID NO: 1017876 - DNA, 15 bp, Homo sapiens
agagtaatgctcagt

SEQ ID NO: 1017877 - DNA, 15 bp, Homo sapiens
cagagtaatgctcag

SEQ ID NO: 1017878 - DNA, 15 bp, Homo sapiens
tcagagtaatgctca

SEQ ID NO: 1017879 - DNA, 15 bp, Homo sapiens
ttcagagtaatgctc

SEQ ID NO: 1017880 - DNA, 15 bp, Homo sapiens
cttcagagtaatgct

SEQ ID NO: 1017881 - DNA, 15 bp, Homo sapiens
ccttcagagtaatgc

SEQ ID NO: 1017882 - DNA, 15 bp, Homo sapiens
tccttcagagtaatg

SEQ ID NO: 1017883 - DNA, 15 bp, Homo sapiens
ttccttcagagtaat

SEQ ID NO: 1017884 - DNA, 15 bp, Homo sapiens
tttccttcagagtaa

SEQ ID NO: 1017885 - DNA, 15 bp, Homo sapiens
ttttccttcagagta

SEQ ID NO: 1017886 - DNA, 15 bp, Homo sapiens
attttccttcagagt

SEQ ID NO: 1017887 - DNA, 15 bp, Homo sapiens
aattttccttcagag

SEQ ID NO: 1017888 - DNA, 15 bp, Homo sapiens
taattttccttcaga

SEQ ID NO: 1017889 - DNA, 15 bp, Homo sapiens
gtaattttccttcag

SEQ ID NO: 1017890 - DNA, 15 bp, Homo sapiens
tgtaattttccttca

SEQ ID NO: 1017891 - DNA, 15 bp, Homo sapiens
atgtaattttccttc

SEQ ID NO: 1017892 - DNA, 15 bp, Homo sapiens
tatgtaattttcctt

SEQ ID NO: 1017893 - DNA, 15 bp, Homo sapiens
ttatgtaattttcct

SEQ ID NO: 1017894 - DNA, 15 bp, Homo sapiens
attatgtaattttcc

SEQ ID NO: 1017895 - DNA, 15 bp, Homo sapiens
aattatgtaattttc

SEQ ID NO: 1017896 - DNA, 15 bp, Homo sapiens
gaattatgtaatttt

SEQ ID NO: 1017897 - DNA, 15 bp, Homo sapiens
tagaattatgtaatt

SEQ ID NO: 1017898 - DNA, 15 bp, Homo sapiens
atagaattatgtaat

SEQ ID NO: 1017899 - DNA, 15 bp, Homo sapiens
catagaattatgtaa

SEQ ID NO: 1017900 - DNA, 15 bp, Homo sapiens
acatagaattatgta

SEQ ID NO: 1017901 - DNA, 15 bp, Homo sapiens
tacatagaattatgt

SEQ ID NO: 1017902 - DNA, 15 bp, Homo sapiens
ttacatagaattatg

SEQ ID NO: 1017903 - DNA, 15 bp, Homo sapiens
cttacatagaattat

SEQ ID NO: 1017904 - DNA, 15 bp, Homo sapiens
gcttacatagaatta

SEQ ID NO: 1017905 - DNA, 15 bp, Homo sapiens
ggcttacatagaatt

SEQ ID NO: 1017906 - DNA, 15 bp, Homo sapiens
aggcttacatagaat

SEQ ID NO: 1017907 - DNA, 15 bp, Homo sapiens
taggcttacatagaa

SEQ ID NO: 1017908 - DNA, 15 bp, Homo sapiens
ataggcttacataga

SEQ ID NO: 1017909 - DNA, 15 bp, Homo sapiens
tataggcttacatag

SEQ ID NO: 1017910 - DNA, 15 bp, Homo sapiens
ttataggcttacata

SEQ ID NO: 1017911 - DNA, 15 bp, Homo sapiens
attataggcttacat

SEQ ID NO: 1017912 - DNA, 15 bp, Homo sapiens
tattataggcttaca

SEQ ID NO: 1017913 - DNA, 15 bp, Homo sapiens
gtattataggcttac

SEQ ID NO: 1017914 - DNA, 15 bp, Homo sapiens
tgtattataggctta

SEQ ID NO: 1017915 - DNA, 15 bp, Homo sapiens
ctgtattataggctt

SEQ ID NO: 1017916 - DNA, 15 bp, Homo sapiens
cctgtattataggct

SEQ ID NO: 1017917 - DNA, 15 bp, Homo sapiens
tcctgtattataggc

SEQ ID NO: 1017918 - DNA, 15 bp, Homo sapiens
ttcctgtattatagg

SEQ ID NO: 1017919 - DNA, 15 bp, Homo sapiens
attcctgtattatag

SEQ ID NO: 1017920 - DNA, 15 bp, Homo sapiens
gattcctgtattata

SEQ ID NO: 1017921 - DNA, 15 bp, Homo sapiens
agattcctgtattat

SEQ ID NO: 1017922 - DNA, 15 bp, Homo sapiens
cagattcctgtatta

SEQ ID NO: 1017923 - DNA, 15 bp, Homo sapiens
tcagattcctgtatt

SEQ ID NO: 1017924 - DNA, 15 bp, Homo sapiens
gtcagattcctgtat

SEQ ID NO: 1017925 - DNA, 15 bp, Homo sapiens
ggtcagattcctgta

SEQ ID NO: 1017926 - DNA, 15 bp, Homo sapiens
aggtcagattcctgt

SEQ ID NO: 1017927 - DNA, 15 bp, Homo sapiens
taggtcagattcctg

SEQ ID NO: 1017928 - DNA, 15 bp, Homo sapiens
ctaggtcagattcct

SEQ ID NO: 1017929 - DNA, 15 bp, Homo sapiens
tctaggtcagattcc

SEQ ID NO: 1017930 - DNA, 15 bp, Homo sapiens
gtctaggtcagattc

SEQ ID NO: 1017931 - DNA, 15 bp, Homo sapiens
agtctaggtcagatt

SEQ ID NO: 1017932 - DNA, 15 bp, Homo sapiens
cagtctaggtcagat

SEQ ID NO: 1017933 - DNA, 15 bp, Homo sapiens
ccagtctaggtcaga

SEQ ID NO: 1017934 - DNA, 15 bp, Homo sapiens
cccagtctaggtcag

SEQ ID NO: 1017935 - DNA, 15 bp, Homo sapiens
ccccagtctaggtca

SEQ ID NO: 1017936 - DNA, 15 bp, Homo sapiens
tccccagtctaggtc

SEQ ID NO: 1017937 - DNA, 15 bp, Homo sapiens
ttccccagtctaggt

SEQ ID NO: 1017938 - DNA, 15 bp, Homo sapiens
attccccagtctagg

SEQ ID NO: 1017939 - DNA, 15 bp, Homo sapiens
gattccccagtctag

SEQ ID NO: 1017940 - DNA, 15 bp, Homo sapiens
tgattccccagtcta

SEQ ID NO: 1017941 - DNA, 15 bp, Homo sapiens
ctgattccccagtct

SEQ ID NO: 1017942 - DNA, 15 bp, Homo sapiens
tctgattccccagtc

SEQ ID NO: 1017943 - DNA, 15 bp, Homo sapiens
ctctgattccccagt

SEQ ID NO: 1017944 - DNA, 15 bp, Homo sapiens
tctctgattccccag

SEQ ID NO: 1017945 - DNA, 15 bp, Homo sapiens
ttctctgattcccca

SEQ ID NO: 1017946 - DNA, 15 bp, Homo sapiens
cttctctgattcccc

SEQ ID NO: 1017947 - DNA, 15 bp, Homo sapiens
ccttctctgattccc

SEQ ID NO: 1017948 - DNA, 15 bp, Homo sapiens
gccttctctgattcc

SEQ ID NO: 1017949 - DNA, 15 bp, Homo sapiens
agccttctctgattc

SEQ ID NO: 1017950 - DNA, 15 bp, Homo sapiens
aagccttctctgatt

SEQ ID NO: 1017951 - DNA, 15 bp, Homo sapiens
gaagccttctctgat

SEQ ID NO: 1017952 - DNA, 15 bp, Homo sapiens
ggaagccttctctga

SEQ ID NO: 1017953 - DNA, 15 bp, Homo sapiens
gggaagccttctctg

SEQ ID NO: 1017954 - DNA, 15 bp, Homo sapiens
agggaagccttctct

SEQ ID NO: 1017955 - DNA, 15 bp, Homo sapiens
tagggaagccttctc

SEQ ID NO: 1017956 - DNA, 15 bp, Homo sapiens
ttagggaagccttct

SEQ ID NO: 1017957 - DNA, 15 bp, Homo sapiens
cttagggaagccttc

SEQ ID NO: 1017958 - DNA, 15 bp, Homo sapiens
gcttagggaagcctt

SEQ ID NO: 1017959 - DNA, 15 bp, Homo sapiens
tgcttagggaagcct

SEQ ID NO: 1017960 - DNA, 15 bp, Homo sapiens
ttgcttagggaagcc

SEQ ID NO: 1017961 - DNA, 15 bp, Homo sapiens
cttgcttagggaagc

SEQ ID NO: 1017962 - DNA, 15 bp, Homo sapiens
acttgcttagggaag

SEQ ID NO: 1017963 - DNA, 15 bp, Homo sapiens
tacttgcttagggaa

SEQ ID NO: 1017964 - DNA, 15 bp, Homo sapiens
gtacttgcttaggga

SEQ ID NO: 1017965 - DNA, 15 bp, Homo sapiens
ggtacttgcttaggg

SEQ ID NO: 1017966 - DNA, 15 bp, Homo sapiens
gggtacttgcttagg

SEQ ID NO: 1017967 - DNA, 15 bp, Homo sapiens
ggggtacttgcttag

SEQ ID NO: 1017968 - DNA, 15 bp, Homo sapiens
aggggtacttgctta

SEQ ID NO: 1017969 - DNA, 15 bp, Homo sapiens
aaggggtacttgctt

SEQ ID NO: 1017970 - DNA, 15 bp, Homo sapiens
caaggggtacttgct

SEQ ID NO: 1017971 - DNA, 15 bp, Homo sapiens
tcaaggggtacttgc

SEQ ID NO: 1017972 - DNA, 15 bp, Homo sapiens
ttcaaggggtacttg

SEQ ID NO: 1017973 - DNA, 15 bp, Homo sapiens
gttcaaggggtactt

SEQ ID NO: 1017974 - DNA, 15 bp, Homo sapiens
agttcaaggggtact

SEQ ID NO: 1017975 - DNA, 15 bp, Homo sapiens
aagttcaaggggtac

SEQ ID NO: 1017976 - DNA, 15 bp, Homo sapiens
taagttcaaggggta

SEQ ID NO: 1017977 - DNA, 15 bp, Homo sapiens
ctaagttcaaggggt

SEQ ID NO: 1017978 - DNA, 15 bp, Homo sapiens
gctaagttcaagggg

SEQ ID NO: 1017979 - DNA, 15 bp, Homo sapiens
agctaagttcaaggg

SEQ ID NO: 1017980 - DNA, 15 bp, Homo sapiens
aagctaagttcaagg

SEQ ID NO: 1017981 - DNA, 15 bp, Homo sapiens
aaagctaagttcaag

SEQ ID NO: 1017982 - DNA, 15 bp, Homo sapiens
caaagctaagttcaa

SEQ ID NO: 1017983 - DNA, 15 bp, Homo sapiens
tcaaagctaagttca

SEQ ID NO: 1017984 - DNA, 15 bp, Homo sapiens
ttcaaagctaagttc

SEQ ID NO: 1017985 - DNA, 15 bp, Homo sapiens
tttcaaagctaagtt

SEQ ID NO: 1017986 - DNA, 15 bp, Homo sapiens
gtttcaaagctaagt

SEQ ID NO: 1017987 - DNA, 15 bp, Homo sapiens
agtttcaaagctaag

SEQ ID NO: 1017988 - DNA, 15 bp, Homo sapiens
cagtttcaaagctaa

SEQ ID NO: 1017989 - DNA, 15 bp, Homo sapiens
ccagtttcaaagcta

SEQ ID NO: 1017990 - DNA, 15 bp, Homo sapiens
cccagtttcaaagct

SEQ ID NO: 1017991 - DNA, 15 bp, Homo sapiens
tcccagtttcaaagc

SEQ ID NO: 1017992 - DNA, 15 bp, Homo sapiens
ttcccagtttcaaag

SEQ ID NO: 1017993 - DNA, 15 bp, Homo sapiens
tttcccagtttcaaa

SEQ ID NO: 1017994 - DNA, 15 bp, Homo sapiens
ttttcccagtttcaa

SEQ ID NO: 1017995 - DNA, 15 bp, Homo sapiens
cattttcccagtttc

SEQ ID NO: 1017996 - DNA, 15 bp, Homo sapiens
tcattttcccagttt

SEQ ID NO: 1017997 - DNA, 15 bp, Homo sapiens
ctcattttcccagtt

SEQ ID NO: 1017998 - DNA, 15 bp, Homo sapiens
cctcattttcccagt

SEQ ID NO: 1017999 - DNA, 15 bp, Homo sapiens
gcctcattttcccag

SEQ ID NO: 1018000 - DNA, 15 bp, Homo sapiens
tgcctcattttccca

SEQ ID NO: 1018001 - DNA, 15 bp, Homo sapiens
ttgcctcattttccc

SEQ ID NO: 1018002 - DNA, 15 bp, Homo sapiens
attgcctcattttcc

SEQ ID NO: 1018003 - DNA, 15 bp, Homo sapiens
cattgcctcattttc

SEQ ID NO: 1018004 - DNA, 15 bp, Homo sapiens
acattgcctcatttt

SEQ ID NO: 1018005 - DNA, 15 bp, Homo sapiens
cacattgcctcattt

SEQ ID NO: 1018006 - DNA, 15 bp, Homo sapiens
tcacattgcctcatt

SEQ ID NO: 1018007 - DNA, 15 bp, Homo sapiens
ctcacattgcctcat

SEQ ID NO: 1018008 - DNA, 15 bp, Homo sapiens
tctcacattgcctca

SEQ ID NO: 1018009 - DNA, 15 bp, Homo sapiens
atctcacattgcctc

SEQ ID NO: 1018010 - DNA, 15 bp, Homo sapiens
catctcacattgcct

SEQ ID NO: 1018011 - DNA, 15 bp, Homo sapiens
tcatctcacattgcc

SEQ ID NO: 1018012 - DNA, 15 bp, Homo sapiens
ttcatctcacattgc

SEQ ID NO: 1018013 - DNA, 15 bp, Homo sapiens
cttcatctcacattg

SEQ ID NO: 1018014 - DNA, 15 bp, Homo sapiens
gcttcatctcacatt

SEQ ID NO: 1018015 - DNA, 15 bp, Homo sapiens
agcttcatctcacat

SEQ ID NO: 1018016 - DNA, 15 bp, Homo sapiens
cagcttcatctcaca

SEQ ID NO: 1018017 - DNA, 15 bp, Homo sapiens
acagcttcatctcac

SEQ ID NO: 1018018 - DNA, 15 bp, Homo sapiens
aacagcttcatctca

SEQ ID NO: 1018019 - DNA, 15 bp, Homo sapiens
taacagcttcatctc

SEQ ID NO: 1018020 - DNA, 15 bp, Homo sapiens
ctaacagcttcatct

SEQ ID NO: 1018021 - DNA, 15 bp, Homo sapiens
tctaacagcttcatc

SEQ ID NO: 1018022 - DNA, 15 bp, Homo sapiens
ctctaacagcttcat

SEQ ID NO: 1018023 - DNA, 15 bp, Homo sapiens
cctctaacagcttca

SEQ ID NO: 1018024 - DNA, 15 bp, Homo sapiens
acctctaacagcttc

SEQ ID NO: 1018025 - DNA, 15 bp, Homo sapiens
tacctctaacagctt

SEQ ID NO: 1018026 - DNA, 15 bp, Homo sapiens
atacctctaacagct

SEQ ID NO: 1018027 - DNA, 15 bp, Homo sapiens
aatacctctaacagc

SEQ ID NO: 1018028 - DNA, 15 bp, Homo sapiens
taatacctctaacag

SEQ ID NO: 1018029 - DNA, 15 bp, Homo sapiens
ctaatacctctaaca

SEQ ID NO: 1018030 - DNA, 15 bp, Homo sapiens
cctaatacctctaac

SEQ ID NO: 1018031 - DNA, 15 bp, Homo sapiens
tcctaatacctctaa

SEQ ID NO: 1018032 - DNA, 15 bp, Homo sapiens
ttcctaatacctcta

SEQ ID NO: 1018033 - DNA, 15 bp, Homo sapiens
attcctaatacctct

SEQ ID NO: 1018034 - DNA, 15 bp, Homo sapiens
gattcctaatacctc

SEQ ID NO: 1018035 - DNA, 15 bp, Homo sapiens
tgattcctaatacct

SEQ ID NO: 1018036 - DNA, 15 bp, Homo sapiens
ttgattcctaatacc

SEQ ID NO: 1018037 - DNA, 15 bp, Homo sapiens
tttgattcctaatac

SEQ ID NO: 1018038 - DNA, 15 bp, Homo sapiens
gtttgattcctaata

SEQ ID NO: 1018039 - DNA, 15 bp, Homo sapiens
ggtttgattcctaat

SEQ ID NO: 1018040 - DNA, 15 bp, Homo sapiens
aggtttgattcctaa

SEQ ID NO: 1018041 - DNA, 15 bp, Homo sapiens
taggtttgattccta

SEQ ID NO: 1018042 - DNA, 15 bp, Homo sapiens
ataggtttgattcct

SEQ ID NO: 1018043 - DNA, 15 bp, Homo sapiens
aataggtttgattcc

SEQ ID NO: 1018044 - DNA, 15 bp, Homo sapiens
caataggtttgattc

SEQ ID NO: 1018045 - DNA, 15 bp, Homo sapiens
ccaataggtttgatt

SEQ ID NO: 1018046 - DNA, 15 bp, Homo sapiens
cccaataggtttgat

SEQ ID NO: 1018047 - DNA, 15 bp, Homo sapiens
ccccaataggtttga

SEQ ID NO: 1018048 - DNA, 15 bp, Homo sapiens
gccccaataggtttg

SEQ ID NO: 1018049 - DNA, 15 bp, Homo sapiens
ggccccaataggttt

SEQ ID NO: 1018050 - DNA, 15 bp, Homo sapiens
aggccccaataggtt

SEQ ID NO: 1018051 - DNA, 15 bp, Homo sapiens
aaggccccaataggt

SEQ ID NO: 1018052 - DNA, 15 bp, Homo sapiens
gaaggccccaatagg

SEQ ID NO: 1018053 - DNA, 15 bp, Homo sapiens
agaaggccccaatag

SEQ ID NO: 1018054 - DNA, 15 bp, Homo sapiens
tagaaggccccaata

SEQ ID NO: 1018055 - DNA, 15 bp, Homo sapiens
ctagaaggccccaat

SEQ ID NO: 1018056 - DNA, 15 bp, Homo sapiens
actagaaggccccaa

SEQ ID NO: 1018057 - DNA, 15 bp, Homo sapiens
gactagaaggcccca

SEQ ID NO: 1018058 - DNA, 15 bp, Homo sapiens
ggactagaaggcccc

SEQ ID NO: 1018059 - DNA, 15 bp, Homo sapiens
aggactagaaggccc

SEQ ID NO: 1018060 - DNA, 15 bp, Homo sapiens
aaggactagaaggcc

SEQ ID NO: 1018061 - DNA, 15 bp, Homo sapiens
taaggactagaaggc

SEQ ID NO: 1018062 - DNA, 15 bp, Homo sapiens
ctaaggactagaagg

SEQ ID NO: 1018063 - DNA, 15 bp, Homo sapiens
actaaggactagaag

SEQ ID NO: 1018064 - DNA, 15 bp, Homo sapiens
tactaaggactagaa

SEQ ID NO: 1018065 - DNA, 15 bp, Homo sapiens
ctactaaggactaga

SEQ ID NO: 1018066 - DNA, 15 bp, Homo sapiens
tctactaaggactag

SEQ ID NO: 1018067 - DNA, 15 bp, Homo sapiens
ctctactaaggacta

SEQ ID NO: 1018068 - DNA, 15 bp, Homo sapiens
tctctactaaggact

SEQ ID NO: 1018069 - DNA, 15 bp, Homo sapiens
ctctctactaaggac

SEQ ID NO: 1018070 - DNA, 15 bp, Homo sapiens
actctctactaagga

SEQ ID NO: 1018071 - DNA, 15 bp, Homo sapiens
gactctctactaagg

SEQ ID NO: 1018072 - DNA, 15 bp, Homo sapiens
agactctctactaag

SEQ ID NO: 1018073 - DNA, 15 bp, Homo sapiens
cagactctctactaa

SEQ ID NO: 1018074 - DNA, 15 bp, Homo sapiens
ccagactctctacta

SEQ ID NO: 1018075 - DNA, 15 bp, Homo sapiens
tccagactctctact

SEQ ID NO: 1018076 - DNA, 15 bp, Homo sapiens
gtccagactctctac

SEQ ID NO: 1018077 - DNA, 15 bp, Homo sapiens
agtccagactctcta

SEQ ID NO: 1018078 - DNA, 15 bp, Homo sapiens
aagtccagactctct

SEQ ID NO: 1018079 - DNA, 15 bp, Homo sapiens
aaagtccagactctc

SEQ ID NO: 1018080 - DNA, 15 bp, Homo sapiens
taaagtccagactct

SEQ ID NO: 1018081 - DNA, 15 bp, Homo sapiens
ataaagtccagactc

SEQ ID NO: 1018082 - DNA, 15 bp, Homo sapiens
aataaagtccagact

SEQ ID NO: 1018083 - DNA, 15 bp, Homo sapiens
gaataaagtccagac

SEQ ID NO: 1018084 - DNA, 15 bp, Homo sapiens
agaataaagtccaga

SEQ ID NO: 1018085 - DNA, 15 bp, Homo sapiens
tagaataaagtccag

SEQ ID NO: 1018086 - DNA, 15 bp, Homo sapiens
atagaataaagtcca

SEQ ID NO: 1018087 - DNA, 15 bp, Homo sapiens
catagaataaagtcc

SEQ ID NO: 1018088 - DNA, 15 bp, Homo sapiens
acatagaataaagtc

SEQ ID NO: 1018089 - DNA, 15 bp, Homo sapiens
cacatagaataaagt

SEQ ID NO: 1018090 - DNA, 15 bp, Homo sapiens
ccacatagaataaag

SEQ ID NO: 1018091 - DNA, 15 bp, Homo sapiens
tccacatagaataaa

SEQ ID NO: 1018092 - DNA, 15 bp, Homo sapiens
ttccacatagaataa

SEQ ID NO: 1018093 - DNA, 15 bp, Homo sapiens
attccacatagaata

SEQ ID NO: 1018094 - DNA, 15 bp, Homo sapiens
cattccacatagaat

SEQ ID NO: 1018095 - DNA, 15 bp, Homo sapiens
tcattccacatagaa

SEQ ID NO: 1018096 - DNA, 15 bp, Homo sapiens
gtcattccacataga

SEQ ID NO: 1018097 - DNA, 15 bp, Homo sapiens
tgtcattccacatag

SEQ ID NO: 1018098 - DNA, 15 bp, Homo sapiens
ctgtcattccacata

SEQ ID NO: 1018099 - DNA, 15 bp, Homo sapiens
gctgtcattccacat

SEQ ID NO: 1018100 - DNA, 15 bp, Homo sapiens
ggctgtcattccaca

SEQ ID NO: 1018101 - DNA, 15 bp, Homo sapiens
aggctgtcattccac

SEQ ID NO: 1018102 - DNA, 15 bp, Homo sapiens
gaggctgtcattcca

SEQ ID NO: 1018103 - DNA, 15 bp, Homo sapiens
ggaggctgtcattcc

SEQ ID NO: 1018104 - DNA, 15 bp, Homo sapiens
tggaggctgtcattc

SEQ ID NO: 1018105 - DNA, 15 bp, Homo sapiens
ctggaggctgtcatt

SEQ ID NO: 1018106 - DNA, 15 bp, Homo sapiens
actggaggctgtcat

SEQ ID NO: 1018107 - DNA, 15 bp, Homo sapiens
cactggaggctgtca

SEQ ID NO: 1018108 - DNA, 15 bp, Homo sapiens
ccactggaggctgtc

SEQ ID NO: 1018109 - DNA, 15 bp, Homo sapiens
cccactggaggctgt

SEQ ID NO: 1018110 - DNA, 15 bp, Homo sapiens
acccactggaggctg

SEQ ID NO: 1018111 - DNA, 15 bp, Homo sapiens
aacccactggaggct

SEQ ID NO: 1018112 - DNA, 15 bp, Homo sapiens
aaacccactggaggc

SEQ ID NO: 1018113 - DNA, 15 bp, Homo sapiens
aaaacccactggagg

SEQ ID NO: 1018114 - DNA, 15 bp, Homo sapiens
taaaacccactggag

SEQ ID NO: 1018115 - DNA, 15 bp, Homo sapiens
ctaaaacccactgga

SEQ ID NO: 1018116 - DNA, 15 bp, Homo sapiens
cctaaaacccactgg

SEQ ID NO: 1018117 - DNA, 15 bp, Homo sapiens
gcctaaaacccactg

SEQ ID NO: 1018118 - DNA, 15 bp, Homo sapiens
agcctaaaacccact

SEQ ID NO: 1018119 - DNA, 15 bp, Homo sapiens
cagcctaaaacccac

SEQ ID NO: 1018120 - DNA, 15 bp, Homo sapiens
ccagcctaaaaccca

SEQ ID NO: 1018121 - DNA, 15 bp, Homo sapiens
gccagcctaaaaccc

SEQ ID NO: 1018122 - DNA, 15 bp, Homo sapiens
cgccagcctaaaacc

SEQ ID NO: 1018123 - DNA, 15 bp, Homo sapiens
ccgccagcctaaaac

SEQ ID NO: 1018124 - DNA, 15 bp, Homo sapiens
tccgccagcctaaaa

SEQ ID NO: 1018125 - DNA, 15 bp, Homo sapiens
atccgccagcctaaa

SEQ ID NO: 1018126 - DNA, 15 bp, Homo sapiens
tatccgccagcctaa

SEQ ID NO: 1018127 - DNA, 15 bp, Homo sapiens
gtatccgccagccta

SEQ ID NO: 1018128 - DNA, 15 bp, Homo sapiens
agtatccgccagcct

SEQ ID NO: 1018129 - DNA, 15 bp, Homo sapiens
tagtatccgccagcc

SEQ ID NO: 1018130 - DNA, 15 bp, Homo sapiens
gtagtatccgccagc

SEQ ID NO: 1018131 - DNA, 15 bp, Homo sapiens
tgtagtatccgccag

SEQ ID NO: 1018132 - DNA, 15 bp, Homo sapiens
ttgtagtatccgcca

SEQ ID NO: 1018133 - DNA, 15 bp, Homo sapiens
attgtagtatccgcc

SEQ ID NO: 1018134 - DNA, 15 bp, Homo sapiens
gattgtagtatccgc

SEQ ID NO: 1018135 - DNA, 15 bp, Homo sapiens
tgattgtagtatccg

SEQ ID NO: 1018136 - DNA, 15 bp, Homo sapiens
ctgattgtagtatcc

SEQ ID NO: 1018137 - DNA, 15 bp, Homo sapiens
tctgattgtagtatc

SEQ ID NO: 1018138 - DNA, 15 bp, Homo sapiens
atctgattgtagtat

SEQ ID NO: 1018139 - DNA, 15 bp, Homo sapiens
gatctgattgtagta

SEQ ID NO: 1018140 - DNA, 15 bp, Homo sapiens
agatctgattgtagt

SEQ ID NO: 1018141 - DNA, 15 bp, Homo sapiens
cagatctgattgtag

SEQ ID NO: 1018142 - DNA, 15 bp, Homo sapiens
ccagatctgattgta

SEQ ID NO: 1018143 - DNA, 15 bp, Homo sapiens
tccagatctgattgt

SEQ ID NO: 1018144 - DNA, 15 bp, Homo sapiens
ttccagatctgattg

SEQ ID NO: 1018145 - DNA, 15 bp, Homo sapiens
attccagatctgatt

SEQ ID NO: 1018146 - DNA, 15 bp, Homo sapiens
cattccagatctgat

SEQ ID NO: 1018147 - DNA, 15 bp, Homo sapiens
gcattccagatctga

SEQ ID NO: 1018148 - DNA, 15 bp, Homo sapiens
tgcattccagatctg

SEQ ID NO: 1018149 - DNA, 15 bp, Homo sapiens
ctgcattccagatct

SEQ ID NO: 1018150 - DNA, 15 bp, Homo sapiens
tctgcattccagatc

SEQ ID NO: 1018151 - DNA, 15 bp, Homo sapiens
ttctgcattccagat

SEQ ID NO: 1018152 - DNA, 15 bp, Homo sapiens
tttctgcattccaga

SEQ ID NO: 1018153 - DNA, 15 bp, Homo sapiens
atttctgcattccag

SEQ ID NO: 1018154 - DNA, 15 bp, Homo sapiens
tatttctgcattcca

SEQ ID NO: 1018155 - DNA, 15 bp, Homo sapiens
ctatttctgcattcc

SEQ ID NO: 1018156 - DNA, 15 bp, Homo sapiens
actatttctgcattc

SEQ ID NO: 1018157 - DNA, 15 bp, Homo sapiens
tactatttctgcatt

SEQ ID NO: 1018158 - DNA, 15 bp, Homo sapiens
gtactatttctgcat

SEQ ID NO: 1018159 - DNA, 15 bp, Homo sapiens
tgtactatttctgca

SEQ ID NO: 1018160 - DNA, 15 bp, Homo sapiens
gtgtactatttctgc

SEQ ID NO: 1018161 - DNA, 15 bp, Homo sapiens
ggtgtactatttctg

SEQ ID NO: 1018162 - DNA, 15 bp, Homo sapiens
tggtgtactatttct

SEQ ID NO: 1018163 - DNA, 15 bp, Homo sapiens
ctggtgtactatttc

SEQ ID NO: 1018164 - DNA, 15 bp, Homo sapiens
actggtgtactattt

SEQ ID NO: 1018165 - DNA, 15 bp, Homo sapiens
aactggtgtactatt

SEQ ID NO: 1018166 - DNA, 15 bp, Homo sapiens
aaactggtgtactat

SEQ ID NO: 1018167 - DNA, 15 bp, Homo sapiens
gaaactggtgtacta

SEQ ID NO: 1018168 - DNA, 15 bp, Homo sapiens
agaaactggtgtact

SEQ ID NO: 1018169 - DNA, 15 bp, Homo sapiens
aagaaactggtgtac

SEQ ID NO: 1018170 - DNA, 15 bp, Homo sapiens
aaagaaactggtgta

SEQ ID NO: 1018171 - DNA, 15 bp, Homo sapiens
caaagaaactggtgt

SEQ ID NO: 1018172 - DNA, 15 bp, Homo sapiens
acaaagaaactggtg

SEQ ID NO: 1018173 - DNA, 15 bp, Homo sapiens
cacaaagaaactggt

SEQ ID NO: 1018174 - DNA, 15 bp, Homo sapiens
ccacaaagaaactgg

SEQ ID NO: 1018175 - DNA, 15 bp, Homo sapiens
cccacaaagaaactg

SEQ ID NO: 1018176 - DNA, 15 bp, Homo sapiens
acccacaaagaaact

SEQ ID NO: 1018177 - DNA, 15 bp, Homo sapiens
tacccacaaagaaac

SEQ ID NO: 1018178 - DNA, 15 bp, Homo sapiens
ttacccacaaagaaa

SEQ ID NO: 1018179 - DNA, 15 bp, Homo sapiens
tttacccacaaagaa

SEQ ID NO: 1018180 - DNA, 15 bp, Homo sapiens
ttttacccacaaaga

SEQ ID NO: 1018181 - DNA, 15 bp, Homo sapiens
cttttacccacaaag

SEQ ID NO: 1018182 - DNA, 15 bp, Homo sapiens
acttttacccacaaa

SEQ ID NO: 1018183 - DNA, 15 bp, Homo sapiens
gacttttacccacaa

SEQ ID NO: 1018184 - DNA, 15 bp, Homo sapiens
agacttttacccaca

SEQ ID NO: 1018185 - DNA, 15 bp, Homo sapiens
aagacttttacccac

SEQ ID NO: 1018186 - DNA, 15 bp, Homo sapiens
taagacttttaccca

SEQ ID NO: 1018187 - DNA, 15 bp, Homo sapiens
ctaagacttttaccc

SEQ ID NO: 1018188 - DNA, 15 bp, Homo sapiens
tctaagacttttacc

SEQ ID NO: 1018189 - DNA, 15 bp, Homo sapiens
ctctaagacttttac

SEQ ID NO: 1018190 - DNA, 15 bp, Homo sapiens
cctctaagactttta

SEQ ID NO: 1018191 - DNA, 15 bp, Homo sapiens
ccctctaagactttt

SEQ ID NO: 1018192 - DNA, 15 bp, Homo sapiens
cccctctaagacttt

SEQ ID NO: 1018193 - DNA, 15 bp, Homo sapiens
tcccctctaagactt

SEQ ID NO: 1018194 - DNA, 15 bp, Homo sapiens
ctcccctctaagact

SEQ ID NO: 1018195 - DNA, 15 bp, Homo sapiens
tctcccctctaagac

SEQ ID NO: 1018196 - DNA, 15 bp, Homo sapiens
ttctcccctctaaga

SEQ ID NO: 1018197 - DNA, 15 bp, Homo sapiens
attctcccctctaag

SEQ ID NO: 1018198 - DNA, 15 bp, Homo sapiens
tattctcccctctaa

SEQ ID NO: 1018199 - DNA, 15 bp, Homo sapiens
atattctcccctcta

SEQ ID NO: 1018200 - DNA, 15 bp, Homo sapiens
catattctcccctct

SEQ ID NO: 1018201 - DNA, 15 bp, Homo sapiens
tcatattctcccctc

SEQ ID NO: 1018202 - DNA, 15 bp, Homo sapiens
gtcatattctcccct

SEQ ID NO: 1018203 - DNA, 15 bp, Homo sapiens
ggtcatattctcccc

SEQ ID NO: 1018204 - DNA, 15 bp, Homo sapiens
tggtcatattctccc

SEQ ID NO: 1018205 - DNA, 15 bp, Homo sapiens
ttggtcatattctcc

SEQ ID NO: 1018206 - DNA, 15 bp, Homo sapiens
gttggtcatattctc

SEQ ID NO: 1018207 - DNA, 15 bp, Homo sapiens
agttggtcatattct

SEQ ID NO: 1018208 - DNA, 15 bp, Homo sapiens
cagttggtcatattc

SEQ ID NO: 1018209 - DNA, 15 bp, Homo sapiens
acagttggtcatatt

SEQ ID NO: 1018210 - DNA, 15 bp, Homo sapiens
tacagttggtcatat

SEQ ID NO: 1018211 - DNA, 15 bp, Homo sapiens
ctacagttggtcata

SEQ ID NO: 1018212 - DNA, 15 bp, Homo sapiens
cctacagttggtcat

SEQ ID NO: 1018213 - DNA, 15 bp, Homo sapiens
ccctacagttggtca

SEQ ID NO: 1018214 - DNA, 15 bp, Homo sapiens
tccctacagttggtc

SEQ ID NO: 1018215 - DNA, 15 bp, Homo sapiens
ctccctacagttggt

SEQ ID NO: 1018216 - DNA, 15 bp, Homo sapiens
tctccctacagttgg

SEQ ID NO: 1018217 - DNA, 15 bp, Homo sapiens
gtctccctacagttg

SEQ ID NO: 1018218 - DNA, 15 bp, Homo sapiens
ggtctccctacagtt

SEQ ID NO: 1018219 - DNA, 15 bp, Homo sapiens
aggtctccctacagt

SEQ ID NO: 1018220 - DNA, 15 bp, Homo sapiens
caggtctccctacag

SEQ ID NO: 1018221 - DNA, 15 bp, Homo sapiens
acaggtctccctaca

SEQ ID NO: 1018222 - DNA, 15 bp, Homo sapiens
tacaggtctccctac

SEQ ID NO: 1018223 - DNA, 15 bp, Homo sapiens
ttacaggtctcccta

SEQ ID NO: 1018224 - DNA, 15 bp, Homo sapiens
tttacaggtctccct

SEQ ID NO: 1018225 - DNA, 15 bp, Homo sapiens
ttttacaggtctccc

SEQ ID NO: 1018226 - DNA, 15 bp, Homo sapiens
tttttacaggtctcc

SEQ ID NO: 1018227 - DNA, 15 bp, Homo sapiens
ttttttacaggtctc

SEQ ID NO: 1018228 - DNA, 15 bp, Homo sapiens
tttttttacaggtct

SEQ ID NO: 1018229 - DNA, 15 bp, Homo sapiens
ctttttttacaggtc

SEQ ID NO: 1018230 - DNA, 15 bp, Homo sapiens
actttttttacaggt

SEQ ID NO: 1018231 - DNA, 15 bp, Homo sapiens
aactttttttacagg

SEQ ID NO: 1018232 - DNA, 15 bp, Homo sapiens
aaactttttttacag

SEQ ID NO: 1018233 - DNA, 15 bp, Homo sapiens
taaactttttttaca

SEQ ID NO: 1018234 - DNA, 15 bp, Homo sapiens
ataaactttttttac

SEQ ID NO: 1018235 - DNA, 15 bp, Homo sapiens
gataaacttttttta

SEQ ID NO: 1018236 - DNA, 15 bp, Homo sapiens
tgataaacttttttt

SEQ ID NO: 1018237 - DNA, 15 bp, Homo sapiens
ctgataaactttttt

SEQ ID NO: 1018238 - DNA, 15 bp, Homo sapiens
actgataaacttttt

SEQ ID NO: 1018239 - DNA, 15 bp, Homo sapiens
tactgataaactttt

SEQ ID NO: 1018240 - DNA, 15 bp, Homo sapiens
ctactgataaacttt

SEQ ID NO: 1018241 - DNA, 15 bp, Homo sapiens
gctactgataaactt

SEQ ID NO: 1018242 - DNA, 15 bp, Homo sapiens
agctactgataaact

SEQ ID NO: 1018243 - DNA, 15 bp, Homo sapiens
gagctactgataaac

SEQ ID NO: 1018244 - DNA, 15 bp, Homo sapiens
tgagctactgataaa

SEQ ID NO: 1018245 - DNA, 15 bp, Homo sapiens
ctgagctactgataa

SEQ ID NO: 1018246 - DNA, 15 bp, Homo sapiens
tctgagctactgata

SEQ ID NO: 1018247 - DNA, 15 bp, Homo sapiens
gtctgagctactgat

SEQ ID NO: 1018248 - DNA, 15 bp, Homo sapiens
cgtctgagctactga

SEQ ID NO: 1018249 - DNA, 15 bp, Homo sapiens
tcgtctgagctactg

SEQ ID NO: 1018250 - DNA, 15 bp, Homo sapiens
ctcgtctgagctact

SEQ ID NO: 1018251 - DNA, 15 bp, Homo sapiens
tctcgtctgagctac

SEQ ID NO: 1018252 - DNA, 15 bp, Homo sapiens
atctcgtctgagcta

SEQ ID NO: 1018253 - DNA, 15 bp, Homo sapiens
tatctcgtctgagct

SEQ ID NO: 1018254 - DNA, 15 bp, Homo sapiens
ttatctcgtctgagc

SEQ ID NO: 1018255 - DNA, 15 bp, Homo sapiens
attatctcgtctgag

SEQ ID NO: 1018256 - DNA, 15 bp, Homo sapiens
cattatctcgtctga

SEQ ID NO: 1018257 - DNA, 15 bp, Homo sapiens
ccattatctcgtctg

SEQ ID NO: 1018258 - DNA, 15 bp, Homo sapiens
accattatctcgtct

SEQ ID NO: 1018259 - DNA, 15 bp, Homo sapiens
taccattatctcgtc

SEQ ID NO: 1018260 - DNA, 15 bp, Homo sapiens
ttaccattatctcgt

SEQ ID NO: 1018261 - DNA, 15 bp, Homo sapiens
gttaccattatctcg

SEQ ID NO: 1018262 - DNA, 15 bp, Homo sapiens
agttaccattatctc

SEQ ID NO: 1018263 - DNA, 15 bp, Homo sapiens
aagttaccattatct

SEQ ID NO: 1018264 - DNA, 15 bp, Homo sapiens
caagttaccattatc

SEQ ID NO: 1018265 - DNA, 15 bp, Homo sapiens
ccaagttaccattat

SEQ ID NO: 1018266 - DNA, 15 bp, Homo sapiens
tccaagttaccatta

SEQ ID NO: 1018267 - DNA, 15 bp, Homo sapiens
atccaagttaccatt

SEQ ID NO: 1018268 - DNA, 15 bp, Homo sapiens
aatccaagttaccat

SEQ ID NO: 1018269 - DNA, 15 bp, Homo sapiens
taatccaagttacca

SEQ ID NO: 1018270 - DNA, 15 bp, Homo sapiens
ttaatccaagttacc

SEQ ID NO: 1018271 - DNA, 15 bp, Homo sapiens
cttaatccaagttac

SEQ ID NO: 1018272 - DNA, 15 bp, Homo sapiens
tcttaatccaagtta

SEQ ID NO: 1018273 - DNA, 15 bp, Homo sapiens
atcttaatccaagtt

SEQ ID NO: 1018274 - DNA, 15 bp, Homo sapiens
tatcttaatccaagt

SEQ ID NO: 1018275 - DNA, 15 bp, Homo sapiens
ctatcttaatccaag

SEQ ID NO: 1018276 - DNA, 15 bp, Homo sapiens
actatcttaatccaa

SEQ ID NO: 1018277 - DNA, 15 bp, Homo sapiens
cactatcttaatcca

SEQ ID NO: 1018278 - DNA, 15 bp, Homo sapiens
ccactatcttaatcc

SEQ ID NO: 1018279 - DNA, 15 bp, Homo sapiens
accactatcttaatc

SEQ ID NO: 1018280 - DNA, 15 bp, Homo sapiens
taccactatcttaat

SEQ ID NO: 1018281 - DNA, 15 bp, Homo sapiens
ctaccactatcttaa

SEQ ID NO: 1018282 - DNA, 15 bp, Homo sapiens
actaccactatctta

SEQ ID NO: 1018283 - DNA, 15 bp, Homo sapiens
tactaccactatctt

SEQ ID NO: 1018284 - DNA, 15 bp, Homo sapiens
ctactaccactatct

SEQ ID NO: 1018285 - DNA, 15 bp, Homo sapiens
actactaccactatc

SEQ ID NO: 1018286 - DNA, 15 bp, Homo sapiens
tactactaccactat

SEQ ID NO: 1018287 - DNA, 15 bp, Homo sapiens
ttactactaccacta

SEQ ID NO: 1018288 - DNA, 15 bp, Homo sapiens
gttactactaccact

SEQ ID NO: 1018289 - DNA, 15 bp, Homo sapiens
tgttactactaccac

SEQ ID NO: 1018290 - DNA, 15 bp, Homo sapiens
ctgttactactacca

SEQ ID NO: 1018291 - DNA, 15 bp, Homo sapiens
actgttactactacc

SEQ ID NO: 1018292 - DNA, 15 bp, Homo sapiens
cactgttactactac

SEQ ID NO: 1018293 - DNA, 15 bp, Homo sapiens
tcactgttactacta

SEQ ID NO: 1018294 - DNA, 15 bp, Homo sapiens
ttcactgttactact

SEQ ID NO: 1018295 - DNA, 15 bp, Homo sapiens
tttcactgttactac

SEQ ID NO: 1018296 - DNA, 15 bp, Homo sapiens
ttttcactgttacta

SEQ ID NO: 1018297 - DNA, 15 bp, Homo sapiens
tttttcactgttact

SEQ ID NO: 1018298 - DNA, 15 bp, Homo sapiens
gtttttcactgttac

SEQ ID NO: 1018299 - DNA, 15 bp, Homo sapiens
agtttttcactgtta

SEQ ID NO: 1018300 - DNA, 15 bp, Homo sapiens
tagtttttcactgtt

SEQ ID NO: 1018301 - DNA, 15 bp, Homo sapiens
ctagtttttcactgt

SEQ ID NO: 1018302 - DNA, 15 bp, Homo sapiens
tctagtttttcactg

SEQ ID NO: 1018303 - DNA, 15 bp, Homo sapiens
atctagtttttcact

SEQ ID NO: 1018304 - DNA, 15 bp, Homo sapiens
tatctagtttttcac

SEQ ID NO: 1018305 - DNA, 15 bp, Homo sapiens
gtatctagtttttca

SEQ ID NO: 1018306 - DNA, 15 bp, Homo sapiens
tgtatctagtttttc

SEQ ID NO: 1018307 - DNA, 15 bp, Homo sapiens
atgtatctagttttt

SEQ ID NO: 1018308 - DNA, 15 bp, Homo sapiens
aatgtatctagtttt

SEQ ID NO: 1018309 - DNA, 15 bp, Homo sapiens
aaatgtatctagttt

SEQ ID NO: 1018310 - DNA, 15 bp, Homo sapiens
caaatgtatctagtt

SEQ ID NO: 1018311 - DNA, 15 bp, Homo sapiens
tcaaatgtatctagt

SEQ ID NO: 1018312 - DNA, 15 bp, Homo sapiens
ttcaaatgtatctag

SEQ ID NO: 1018313 - DNA, 15 bp, Homo sapiens
tttcaaatgtatcta

SEQ ID NO: 1018314 - DNA, 15 bp, Homo sapiens
ctttcaaatgtatct

SEQ ID NO: 1018315 - DNA, 15 bp, Homo sapiens
gctttcaaatgtatc

SEQ ID NO: 1018316 - DNA, 15 bp, Homo sapiens
agctttcaaatgtat

SEQ ID NO: 1018317 - DNA, 15 bp, Homo sapiens
aagctttcaaatgta

SEQ ID NO: 1018318 - DNA, 15 bp, Homo sapiens
aaagctttcaaatgt

SEQ ID NO: 1018319 - DNA, 15 bp, Homo sapiens
aaaagctttcaaatg

SEQ ID NO: 1018320 - DNA, 15 bp, Homo sapiens
taaaagctttcaaat

SEQ ID NO: 1018321 - DNA, 15 bp, Homo sapiens
ctaaaagctttcaaa

SEQ ID NO: 1018322 - DNA, 15 bp, Homo sapiens
tctaaaagctttcaa

SEQ ID NO: 1018323 - DNA, 15 bp, Homo sapiens
ctctaaaagctttca

SEQ ID NO: 1018324 - DNA, 15 bp, Homo sapiens
gctctaaaagctttc

SEQ ID NO: 1018325 - DNA, 15 bp, Homo sapiens
ggctctaaaagcttt

SEQ ID NO: 1018326 - DNA, 15 bp, Homo sapiens
tggctctaaaagctt

SEQ ID NO: 1018327 - DNA, 15 bp, Homo sapiens
ttggctctaaaagct

SEQ ID NO: 1018328 - DNA, 15 bp, Homo sapiens
tttggctctaaaagc

SEQ ID NO: 1018329 - DNA, 15 bp, Homo sapiens
ttttggctctaaaag

SEQ ID NO: 1018330 - DNA, 15 bp, Homo sapiens
attttggctctaaaa

SEQ ID NO: 1018331 - DNA, 15 bp, Homo sapiens
tattttggctctaaa

SEQ ID NO: 1018332 - DNA, 15 bp, Homo sapiens
ctattttggctctaa

SEQ ID NO: 1018333 - DNA, 15 bp, Homo sapiens
cctattttggctcta

SEQ ID NO: 1018334 - DNA, 15 bp, Homo sapiens
tcctattttggctct

SEQ ID NO: 1018335 - DNA, 15 bp, Homo sapiens
ctcctattttggctc

SEQ ID NO: 1018336 - DNA, 15 bp, Homo sapiens
cctcctattttggct

SEQ ID NO: 1018337 - DNA, 15 bp, Homo sapiens
gcctcctattttggc

SEQ ID NO: 1018338 - DNA, 15 bp, Homo sapiens
gctgcctcctatttt

SEQ ID NO: 1018339 - DNA, 15 bp, Homo sapiens
agctgcctcctattt

SEQ ID NO: 1018340 - DNA, 15 bp, Homo sapiens
cagctgcctcctatt

SEQ ID NO: 1018341 - DNA, 15 bp, Homo sapiens
acagctgcctcctat

SEQ ID NO: 1018342 - DNA, 15 bp, Homo sapiens
cacagctgcctccta

SEQ ID NO: 1018343 - DNA, 15 bp, Homo sapiens
gcacagctgcctcct

SEQ ID NO: 1018344 - DNA, 15 bp, Homo sapiens
ggcacagctgcctcc

SEQ ID NO: 1018345 - DNA, 15 bp, Homo sapiens
gggcacagctgcctc

SEQ ID NO: 1018346 - DNA, 15 bp, Homo sapiens
agggcacagctgcct

SEQ ID NO: 1018347 - DNA, 15 bp, Homo sapiens
aagggcacagctgcc

SEQ ID NO: 1018348 - DNA, 15 bp, Homo sapiens
caagggcacagctgc

SEQ ID NO: 1018349 - DNA, 15 bp, Homo sapiens
acaagggcacagctg

SEQ ID NO: 1018350 - DNA, 15 bp, Homo sapiens
aacaagggcacagct

SEQ ID NO: 1018351 - DNA, 15 bp, Homo sapiens
caacaagggcacagc

SEQ ID NO: 1018352 - DNA, 15 bp, Homo sapiens
acaacaagggcacag

SEQ ID NO: 1018353 - DNA, 15 bp, Homo sapiens
aacaacaagggcaca

SEQ ID NO: 1018354 - DNA, 15 bp, Homo sapiens
taacaacaagggcac

SEQ ID NO: 1018355 - DNA, 15 bp, Homo sapiens
gtaacaacaagggca

SEQ ID NO: 1018356 - DNA, 15 bp, Homo sapiens
ggtaacaacaagggc

SEQ ID NO: 1018357 - DNA, 15 bp, Homo sapiens
tggtaacaacaaggg

SEQ ID NO: 1018358 - DNA, 15 bp, Homo sapiens
ctggtaacaacaagg

SEQ ID NO: 1018359 - DNA, 15 bp, Homo sapiens
actggtaacaacaag

SEQ ID NO: 1018360 - DNA, 15 bp, Homo sapiens
cactggtaacaacaa

SEQ ID NO: 1018361 - DNA, 15 bp, Homo sapiens
acactggtaacaaca

SEQ ID NO: 1018362 - DNA, 15 bp, Homo sapiens
cacactggtaacaac

SEQ ID NO: 1018363 - DNA, 15 bp, Homo sapiens
ccacactggtaacaa

SEQ ID NO: 1018364 - DNA, 15 bp, Homo sapiens
cccacactggtaaca

SEQ ID NO: 1018365 - DNA, 15 bp, Homo sapiens
tcccacactggtaac

SEQ ID NO: 1018366 - DNA, 15 bp, Homo sapiens
atcccacactggtaa

SEQ ID NO: 1018367 - DNA, 15 bp, Homo sapiens
gatcccacactggta

SEQ ID NO: 1018368 - DNA, 15 bp, Homo sapiens
agatcccacactggt

SEQ ID NO: 1018369 - DNA, 15 bp, Homo sapiens
cagatcccacactgg

SEQ ID NO: 1018370 - DNA, 15 bp, Homo sapiens
tcagatcccacactg

SEQ ID NO: 1018371 - DNA, 15 bp, Homo sapiens
ttcagatcccacact

SEQ ID NO: 1018372 - DNA, 15 bp, Homo sapiens
gttcagatcccacac

SEQ ID NO: 1018373 - DNA, 15 bp, Homo sapiens
tgttcagatcccaca

SEQ ID NO: 1018374 - DNA, 15 bp, Homo sapiens
gtgttcagatcccac

SEQ ID NO: 1018375 - DNA, 15 bp, Homo sapiens
tgtgttcagatccca

SEQ ID NO: 1018376 - DNA, 15 bp, Homo sapiens
atgtgttcagatccc

SEQ ID NO: 1018377 - DNA, 15 bp, Homo sapiens
catgtgttcagatcc

SEQ ID NO: 1018378 - DNA, 15 bp, Homo sapiens
tcatgtgttcagatc

SEQ ID NO: 1018379 - DNA, 15 bp, Homo sapiens
gtcatgtgttcagat

SEQ ID NO: 1018380 - DNA, 15 bp, Homo sapiens
agtcatgtgttcaga

SEQ ID NO: 1018381 - DNA, 15 bp, Homo sapiens
tagtcatgtgttcag

SEQ ID NO: 1018382 - DNA, 15 bp, Homo sapiens
gtagtcatgtgttca

SEQ ID NO: 1018383 - DNA, 15 bp, Homo sapiens
agtagtcatgtgttc

SEQ ID NO: 1018384 - DNA, 15 bp, Homo sapiens
aagtagtcatgtgtt

SEQ ID NO: 1018385 - DNA, 15 bp, Homo sapiens
caagtagtcatgtgt

SEQ ID NO: 1018386 - DNA, 15 bp, Homo sapiens
ccaagtagtcatgtg

SEQ ID NO: 1018387 - DNA, 15 bp, Homo sapiens
cccaagtagtcatgt

SEQ ID NO: 1018388 - DNA, 15 bp, Homo sapiens
acccaagtagtcatg

SEQ ID NO: 1018389 - DNA, 15 bp, Homo sapiens
aacccaagtagtcat

SEQ ID NO: 1018390 - DNA, 15 bp, Homo sapiens
gaacccaagtagtca

SEQ ID NO: 1018391 - DNA, 15 bp, Homo sapiens
tgaacccaagtagtc

SEQ ID NO: 1018392 - DNA, 15 bp, Homo sapiens
ttgaacccaagtagt

SEQ ID NO: 1018393 - DNA, 15 bp, Homo sapiens
tttgaacccaagtag

SEQ ID NO: 1018394 - DNA, 15 bp, Homo sapiens
atttgaacccaagta

SEQ ID NO: 1018395 - DNA, 15 bp, Homo sapiens
tatttgaacccaagt

SEQ ID NO: 1018396 - DNA, 15 bp, Homo sapiens
gtatttgaacccaag

SEQ ID NO: 1018397 - DNA, 15 bp, Homo sapiens
agtatttgaacccaa

SEQ ID NO: 1018398 - DNA, 15 bp, Homo sapiens
cagtatttgaaccca

SEQ ID NO: 1018399 - DNA, 15 bp, Homo sapiens
tcagtatttgaaccc

SEQ ID NO: 1018400 - DNA, 15 bp, Homo sapiens
ctcagtatttgaacc

SEQ ID NO: 1018401 - DNA, 15 bp, Homo sapiens
gctcagtatttgaac

SEQ ID NO: 1018402 - DNA, 15 bp, Homo sapiens
tgctcagtatttgaa

SEQ ID NO: 1018403 - DNA, 15 bp, Homo sapiens
ttgctcagtatttga

SEQ ID NO: 1018404 - DNA, 15 bp, Homo sapiens
tttgctcagtatttg

SEQ ID NO: 1018405 - DNA, 15 bp, Homo sapiens
atttgctcagtattt

SEQ ID NO: 1018406 - DNA, 15 bp, Homo sapiens
aatttgctcagtatt

SEQ ID NO: 1018407 - DNA, 15 bp, Homo sapiens
taatttgctcagtat

SEQ ID NO: 1018408 - DNA, 15 bp, Homo sapiens
ttaatttgctcagta

SEQ ID NO: 1018409 - DNA, 15 bp, Homo sapiens
attaatttgctcagt

SEQ ID NO: 1018410 - DNA, 15 bp, Homo sapiens
aattaatttgctcag

SEQ ID NO: 1018411 - DNA, 15 bp, Homo sapiens
taattaatttgctca

SEQ ID NO: 1018412 - DNA, 15 bp, Homo sapiens
ttaattaatttgctc

SEQ ID NO: 1018413 - DNA, 15 bp, Homo sapiens
gttaattaatttgct

SEQ ID NO: 1018414 - DNA, 15 bp, Homo sapiens
ggttaattaatttgc

SEQ ID NO: 1018415 - DNA, 15 bp, Homo sapiens
aggttaattaatttg

SEQ ID NO: 1018416 - DNA, 15 bp, Homo sapiens
gagaggttaattaat

SEQ ID NO: 1018417 - DNA, 15 bp, Homo sapiens
agagaggttaattaa

SEQ ID NO: 1018418 - DNA, 15 bp, Homo sapiens
cagagaggttaatta

SEQ ID NO: 1018419 - DNA, 15 bp, Homo sapiens
ccagagaggttaatt

SEQ ID NO: 1018420 - DNA, 15 bp, Homo sapiens
cccagagaggttaat

SEQ ID NO: 1018421 - DNA, 15 bp, Homo sapiens
gcccagagaggttaa

SEQ ID NO: 1018422 - DNA, 15 bp, Homo sapiens
tgcccagagaggtta

SEQ ID NO: 1018423 - DNA, 15 bp, Homo sapiens
atgcccagagaggtt

SEQ ID NO: 1018424 - DNA, 15 bp, Homo sapiens
gatgcccagagaggt

SEQ ID NO: 1018425 - DNA, 15 bp, Homo sapiens
ggatgcccagagagg

SEQ ID NO: 1018426 - DNA, 15 bp, Homo sapiens
cggatgcccagagag

SEQ ID NO: 1018427 - DNA, 15 bp, Homo sapiens
acggatgcccagaga

SEQ ID NO: 1018428 - DNA, 15 bp, Homo sapiens
aacggatgcccagag

SEQ ID NO: 1018429 - DNA, 15 bp, Homo sapiens
aaacggatgcccaga

SEQ ID NO: 1018430 - DNA, 15 bp, Homo sapiens
gaaacggatgcccag

SEQ ID NO: 1018431 - DNA, 15 bp, Homo sapiens
ggaaacggatgccca

SEQ ID NO: 1018432 - DNA, 15 bp, Homo sapiens
aggaaacggatgccc

SEQ ID NO: 1018433 - DNA, 15 bp, Homo sapiens
gaggaaacggatgcc

SEQ ID NO: 1018434 - DNA, 15 bp, Homo sapiens
agaggaaacggatgc

SEQ ID NO: 1018435 - DNA, 15 bp, Homo sapiens
gagaggaaacggatg

SEQ ID NO: 1018436 - DNA, 15 bp, Homo sapiens
ggagaggaaacggat

SEQ ID NO: 1018437 - DNA, 15 bp, Homo sapiens
aggagaggaaacgga

SEQ ID NO: 1018438 - DNA, 15 bp, Homo sapiens
caggagaggaaacgg

SEQ ID NO: 1018439 - DNA, 15 bp, Homo sapiens
gcaggagaggaaacg

SEQ ID NO: 1018440 - DNA, 15 bp, Homo sapiens
tgcaggagaggaaac

SEQ ID NO: 1018441 - DNA, 15 bp, Homo sapiens
ttgcaggagaggaaa

SEQ ID NO: 1018442 - DNA, 15 bp, Homo sapiens
cttgcaggagaggaa

SEQ ID NO: 1018443 - DNA, 15 bp, Homo sapiens
tcttgcaggagagga

SEQ ID NO: 1018444 - DNA, 15 bp, Homo sapiens
gtcttgcaggagagg

SEQ ID NO: 1018445 - DNA, 15 bp, Homo sapiens
tgtcttgcaggagag

SEQ ID NO: 1018446 - DNA, 15 bp, Homo sapiens
atgtcttgcaggaga

SEQ ID NO: 1018447 - DNA, 15 bp, Homo sapiens
catgtcttgcaggag

SEQ ID NO: 1018448 - DNA, 15 bp, Homo sapiens
ccatgtcttgcagga

SEQ ID NO: 1018449 - DNA, 15 bp, Homo sapiens
tccatgtcttgcagg

SEQ ID NO: 1018450 - DNA, 15 bp, Homo sapiens
atccatgtcttgcag

SEQ ID NO: 1018451 - DNA, 15 bp, Homo sapiens
catccatgtcttgca

SEQ ID NO: 1018452 - DNA, 15 bp, Homo sapiens
tcatccatgtcttgc

SEQ ID NO: 1018453 - DNA, 15 bp, Homo sapiens
atcatccatgtcttg

SEQ ID NO: 1018454 - DNA, 15 bp, Homo sapiens
tatcatccatgtctt

SEQ ID NO: 1018455 - DNA, 15 bp, Homo sapiens
ttatcatccatgtct

SEQ ID NO: 1018456 - DNA, 15 bp, Homo sapiens
attatcatccatgtc

SEQ ID NO: 1018457 - DNA, 15 bp, Homo sapiens
cattatcatccatgt

SEQ ID NO: 1018458 - DNA, 15 bp, Homo sapiens
ccattatcatccatg

SEQ ID NO: 1018459 - DNA, 15 bp, Homo sapiens
accattatcatccat

SEQ ID NO: 1018460 - DNA, 15 bp, Homo sapiens
aaccattatcatcca

SEQ ID NO: 1018461 - DNA, 15 bp, Homo sapiens
aaaccattatcatcc

SEQ ID NO: 1018462 - DNA, 15 bp, Homo sapiens
gaaaccattatcatc

SEQ ID NO: 1018463 - DNA, 15 bp, Homo sapiens
agaaaccattatcat

SEQ ID NO: 1018464 - DNA, 15 bp, Homo sapiens
tagaaaccattatca

SEQ ID NO: 1018465 - DNA, 15 bp, Homo sapiens
gtagaaaccattatc

SEQ ID NO: 1018466 - DNA, 15 bp, Homo sapiens
tgtagaaaccattat

SEQ ID NO: 1018467 - DNA, 15 bp, Homo sapiens
atgtagaaaccatta

SEQ ID NO: 1018468 - DNA, 15 bp, Homo sapiens
aatgtagaaaccatt

SEQ ID NO: 1018469 - DNA, 15 bp, Homo sapiens
gaatgtagaaaccat

SEQ ID NO: 1018470 - DNA, 15 bp, Homo sapiens
tgaatgtagaaacca

SEQ ID NO: 1018471 - DNA, 15 bp, Homo sapiens
atgaatgtagaaacc

SEQ ID NO: 1018472 - DNA, 15 bp, Homo sapiens
tatgaatgtagaaac

SEQ ID NO: 1018473 - DNA, 15 bp, Homo sapiens
ctatgaatgtagaaa

SEQ ID NO: 1018474 - DNA, 15 bp, Homo sapiens
cctatgaatgtagaa

SEQ ID NO: 1018475 - DNA, 15 bp, Homo sapiens
ccctatgaatgtaga

SEQ ID NO: 1018476 - DNA, 15 bp, Homo sapiens
accctatgaatgtag

SEQ ID NO: 1018477 - DNA, 15 bp, Homo sapiens
aaccctatgaatgta

SEQ ID NO: 1018478 - DNA, 15 bp, Homo sapiens
caaccctatgaatgt

SEQ ID NO: 1018479 - DNA, 15 bp, Homo sapiens
acaaccctatgaatg

SEQ ID NO: 1018480 - DNA, 15 bp, Homo sapiens
aacaaccctatgaat

SEQ ID NO: 1018481 - DNA, 15 bp, Homo sapiens
taacaaccctatgaa

SEQ ID NO: 1018482 - DNA, 15 bp, Homo sapiens
ataacaaccctatga

SEQ ID NO: 1018483 - DNA, 15 bp, Homo sapiens
cataacaaccctatg

SEQ ID NO: 1018484 - DNA, 15 bp, Homo sapiens
tcataacaaccctat

SEQ ID NO: 1018485 - DNA, 15 bp, Homo sapiens
ctcataacaacccta

SEQ ID NO: 1018486 - DNA, 15 bp, Homo sapiens
cctcataacaaccct

SEQ ID NO: 1018487 - DNA, 15 bp, Homo sapiens
tcctcataacaaccc

SEQ ID NO: 1018488 - DNA, 15 bp, Homo sapiens
ttcctcataacaacc

SEQ ID NO: 1018489 - DNA, 15 bp, Homo sapiens
attcctcataacaac

SEQ ID NO: 1018490 - DNA, 15 bp, Homo sapiens
cattcctcataacaa

SEQ ID NO: 1018491 - DNA, 15 bp, Homo sapiens
tcattcctcataaca

SEQ ID NO: 1018492 - DNA, 15 bp, Homo sapiens
ttcattcctcataac

SEQ ID NO: 1018493 - DNA, 15 bp, Homo sapiens
attcattcctcataa

SEQ ID NO: 1018494 - DNA, 15 bp, Homo sapiens
cattcattcctcata

SEQ ID NO: 1018495 - DNA, 15 bp, Homo sapiens
tcattcattcctcat

SEQ ID NO: 1018496 - DNA, 15 bp, Homo sapiens
ttcattcattcctca

SEQ ID NO: 1018497 - DNA, 15 bp, Homo sapiens
attcattcattcctc

SEQ ID NO: 1018498 - DNA, 15 bp, Homo sapiens
aattcattcattcct

SEQ ID NO: 1018499 - DNA, 15 bp, Homo sapiens
taattcattcattcc

SEQ ID NO: 1018500 - DNA, 15 bp, Homo sapiens
ttaattcattcattc

SEQ ID NO: 1018501 - DNA, 15 bp, Homo sapiens
tttaattcattcatt

SEQ ID NO: 1018502 - DNA, 15 bp, Homo sapiens
ttttaattcattcat

SEQ ID NO: 1018503 - DNA, 15 bp, Homo sapiens
gttttaattcattca

SEQ ID NO: 1018504 - DNA, 15 bp, Homo sapiens
agttttaattcattc

SEQ ID NO: 1018505 - DNA, 15 bp, Homo sapiens
aagttttaattcatt

SEQ ID NO: 1018506 - DNA, 15 bp, Homo sapiens
caagttttaattcat

SEQ ID NO: 1018507 - DNA, 15 bp, Homo sapiens
acaagttttaattca

SEQ ID NO: 1018508 - DNA, 15 bp, Homo sapiens
tacaagttttaattc

SEQ ID NO: 1018509 - DNA, 15 bp, Homo sapiens
ttacaagttttaatt

SEQ ID NO: 1018510 - DNA, 15 bp, Homo sapiens
tttacaagttttaat

SEQ ID NO: 1018511 - DNA, 15 bp, Homo sapiens
ttttacaagttttaa

SEQ ID NO: 1018512 - DNA, 15 bp, Homo sapiens
attttacaagtttta

SEQ ID NO: 1018513 - DNA, 15 bp, Homo sapiens
tattttacaagtttt

SEQ ID NO: 1018514 - DNA, 15 bp, Homo sapiens
gtattttacaagttt

SEQ ID NO: 1018515 - DNA, 15 bp, Homo sapiens
agtattttacaagtt

SEQ ID NO: 1018516 - DNA, 15 bp, Homo sapiens
aagtattttacaagt

SEQ ID NO: 1018517 - DNA, 15 bp, Homo sapiens
aaagtattttacaag

SEQ ID NO: 1018518 - DNA, 15 bp, Homo sapiens
caaagtattttacaa

SEQ ID NO: 1018519 - DNA, 15 bp, Homo sapiens
ccaaagtattttaca

SEQ ID NO: 1018520 - DNA, 15 bp, Homo sapiens
tccaaagtattttac

SEQ ID NO: 1018521 - DNA, 15 bp, Homo sapiens
gtccaaagtatttta

SEQ ID NO: 1018522 - DNA, 15 bp, Homo sapiens
tgtccaaagtatttt

SEQ ID NO: 1018523 - DNA, 15 bp, Homo sapiens
ctgtccaaagtattt

SEQ ID NO: 1018524 - DNA, 15 bp, Homo sapiens
actgtccaaagtatt

SEQ ID NO: 1018525 - DNA, 15 bp, Homo sapiens
cactgtccaaagtat

SEQ ID NO: 1018526 - DNA, 15 bp, Homo sapiens
gcactgtccaaagta

SEQ ID NO: 1018527 - DNA, 15 bp, Homo sapiens
agcactgtccaaagt

SEQ ID NO: 1018528 - DNA, 15 bp, Homo sapiens
aagcactgtccaaag

SEQ ID NO: 1018529 - DNA, 15 bp, Homo sapiens
caagcactgtccaaa

SEQ ID NO: 1018530 - DNA, 15 bp, Homo sapiens
tcaagcactgtccaa

SEQ ID NO: 1018531 - DNA, 15 bp, Homo sapiens
gtcaagcactgtcca

SEQ ID NO: 1018532 - DNA, 15 bp, Homo sapiens
tgtcaagcactgtcc

SEQ ID NO: 1018533 - DNA, 15 bp, Homo sapiens
atgtcaagcactgtc

SEQ ID NO: 1018534 - DNA, 15 bp, Homo sapiens
tatgtcaagcactgt

SEQ ID NO: 1018535 - DNA, 15 bp, Homo sapiens
ttatgtcaagcactg

SEQ ID NO: 1018536 - DNA, 15 bp, Homo sapiens
tttatgtcaagcact

SEQ ID NO: 1018537 - DNA, 15 bp, Homo sapiens
ttttatgtcaagcac

SEQ ID NO: 1018538 - DNA, 15 bp, Homo sapiens
gttttatgtcaagca

SEQ ID NO: 1018539 - DNA, 15 bp, Homo sapiens
tgttttatgtcaagc

SEQ ID NO: 1018540 - DNA, 15 bp, Homo sapiens
ttgttttatgtcaag

SEQ ID NO: 1018541 - DNA, 15 bp, Homo sapiens
cttgttttatgtcaa

SEQ ID NO: 1018542 - DNA, 15 bp, Homo sapiens
acttgttttatgtca

SEQ ID NO: 1018543 - DNA, 15 bp, Homo sapiens
cacttgttttatgtc

SEQ ID NO: 1018544 - DNA, 15 bp, Homo sapiens
gcacttgttttatgt

SEQ ID NO: 1018545 - DNA, 15 bp, Homo sapiens
agcacttgttttatg

SEQ ID NO: 1018546 - DNA, 15 bp, Homo sapiens
gagcacttgttttat

SEQ ID NO: 1018547 - DNA, 15 bp, Homo sapiens
tgagcacttgtttta

SEQ ID NO: 1018548 - DNA, 15 bp, Homo sapiens
ttgagcacttgtttt

SEQ ID NO: 1018549 - DNA, 15 bp, Homo sapiens
attgagcacttgttt

SEQ ID NO: 1018550 - DNA, 15 bp, Homo sapiens
tattgagcacttgtt

SEQ ID NO: 1018551 - DNA, 15 bp, Homo sapiens
gtattgagcacttgt

SEQ ID NO: 1018552 - DNA, 15 bp, Homo sapiens
tgtattgagcacttg

SEQ ID NO: 1018553 - DNA, 15 bp, Homo sapiens
atgtattgagcactt

SEQ ID NO: 1018554 - DNA, 15 bp, Homo sapiens
tatgtattgagcact

SEQ ID NO: 1018555 - DNA, 15 bp, Homo sapiens
atatgtattgagcac

SEQ ID NO: 1018556 - DNA, 15 bp, Homo sapiens
aatatgtattgagca

SEQ ID NO: 1018557 - DNA, 15 bp, Homo sapiens
taatatgtattgagc

SEQ ID NO: 1018558 - DNA, 15 bp, Homo sapiens
ctaatatgtattgag

SEQ ID NO: 1018559 - DNA, 15 bp, Homo sapiens
gctaatatgtattga

SEQ ID NO: 1018560 - DNA, 15 bp, Homo sapiens
agctaatatgtattg

SEQ ID NO: 1018561 - DNA, 15 bp, Homo sapiens
tagctaatatgtatt

SEQ ID NO: 1018562 - DNA, 15 bp, Homo sapiens
atagctaatatgtat

SEQ ID NO: 1018563 - DNA, 15 bp, Homo sapiens
aatagctaatatgta

SEQ ID NO: 1018564 - DNA, 15 bp, Homo sapiens
taatagctaatatgt

SEQ ID NO: 1018565 - DNA, 15 bp, Homo sapiens
ataatagctaatatg

SEQ ID NO: 1018566 - DNA, 15 bp, Homo sapiens
aataatagctaatat

SEQ ID NO: 1018567 - DNA, 15 bp, Homo sapiens
caataatagctaata

SEQ ID NO: 1018568 - DNA, 15 bp, Homo sapiens
tcaataatagctaat

SEQ ID NO: 1018569 - DNA, 15 bp, Homo sapiens
atcaataatagctaa

SEQ ID NO: 1018570 - DNA, 15 bp, Homo sapiens
aatcaataatagcta

SEQ ID NO: 1018571 - DNA, 15 bp, Homo sapiens
taatcaataatagct

SEQ ID NO: 1018572 - DNA, 15 bp, Homo sapiens
ataatcaataatagc

SEQ ID NO: 1018573 - DNA, 15 bp, Homo sapiens
tataatcaataatag

SEQ ID NO: 1018574 - DNA, 15 bp, Homo sapiens
atataatcaataata

SEQ ID NO: 1018575 - DNA, 15 bp, Homo sapiens
aatataatcaataat

SEQ ID NO: 1018576 - DNA, 15 bp, Homo sapiens
caatataatcaataa

SEQ ID NO: 1018577 - DNA, 15 bp, Homo sapiens
gcaatataatcaata

SEQ ID NO: 1018578 - DNA, 15 bp, Homo sapiens
ggcaatataatcaat

SEQ ID NO: 1018579 - DNA, 15 bp, Homo sapiens
gggcaatataatcaa

SEQ ID NO: 1018580 - DNA, 15 bp, Homo sapiens
agggcaatataatca

SEQ ID NO: 1018581 - DNA, 15 bp, Homo sapiens
cagggcaatataatc

SEQ ID NO: 1018582 - DNA, 15 bp, Homo sapiens
ccagggcaatataat

SEQ ID NO: 1018583 - DNA, 15 bp, Homo sapiens
accagggcaatataa

SEQ ID NO: 1018584 - DNA, 15 bp, Homo sapiens
gaccagggcaatata

SEQ ID NO: 1018585 - DNA, 15 bp, Homo sapiens
tgaccagggcaatat

SEQ ID NO: 1018586 - DNA, 15 bp, Homo sapiens
ctgaccagggcaata

SEQ ID NO: 1018587 - DNA, 15 bp, Homo sapiens
actgaccagggcaat

SEQ ID NO: 1018588 - DNA, 15 bp, Homo sapiens
cactgaccagggcaa

SEQ ID NO: 1018589 - DNA, 15 bp, Homo sapiens
acactgaccagggca

SEQ ID NO: 1018590 - DNA, 15 bp, Homo sapiens
gacactgaccagggc

SEQ ID NO: 1018591 - DNA, 15 bp, Homo sapiens
tgacactgaccaggg

SEQ ID NO: 1018592 - DNA, 15 bp, Homo sapiens
ttgacactgaccagg

SEQ ID NO: 1018593 - DNA, 15 bp, Homo sapiens
tttgacactgaccag

SEQ ID NO: 1018594 - DNA, 15 bp, Homo sapiens
gtttgacactgacca

SEQ ID NO: 1018595 - DNA, 15 bp, Homo sapiens
agtttgacactgacc

SEQ ID NO: 1018596 - DNA, 15 bp, Homo sapiens
cagtttgacactgac

SEQ ID NO: 1018597 - DNA, 15 bp, Homo sapiens
gcagtttgacactga

SEQ ID NO: 1018598 - DNA, 15 bp, Homo sapiens
tgcagtttgacactg

SEQ ID NO: 1018599 - DNA, 15 bp, Homo sapiens
atgcagtttgacact

SEQ ID NO: 1018600 - DNA, 15 bp, Homo sapiens
tatgcagtttgacac

SEQ ID NO: 1018601 - DNA, 15 bp, Homo sapiens
atatgcagtttgaca

SEQ ID NO: 1018602 - DNA, 15 bp, Homo sapiens
catatgcagtttgac

SEQ ID NO: 1018603 - DNA, 15 bp, Homo sapiens
ccatatgcagtttga

SEQ ID NO: 1018604 - DNA, 15 bp, Homo sapiens
cccatatgcagtttg

SEQ ID NO: 1018605 - DNA, 15 bp, Homo sapiens
tcccatatgcagttt

SEQ ID NO: 1018606 - DNA, 15 bp, Homo sapiens
ctcccatatgcagtt

SEQ ID NO: 1018607 - DNA, 15 bp, Homo sapiens
tctcccatatgcagt

SEQ ID NO: 1018608 - DNA, 15 bp, Homo sapiens
atctcccatatgcag

SEQ ID NO: 1018609 - DNA, 15 bp, Homo sapiens
catctcccatatgca

SEQ ID NO: 1018610 - DNA, 15 bp, Homo sapiens
tcatctcccatatgc

SEQ ID NO: 1018611 - DNA, 15 bp, Homo sapiens
ctcatctcccatatg

SEQ ID NO: 1018612 - DNA, 15 bp, Homo sapiens
tctcatctcccatat

SEQ ID NO: 1018613 - DNA, 15 bp, Homo sapiens
ttctcatctcccata

SEQ ID NO: 1018614 - DNA, 15 bp, Homo sapiens
attctcatctcccat

SEQ ID NO: 1018615 - DNA, 15 bp, Homo sapiens
cattctcatctccca

SEQ ID NO: 1018616 - DNA, 15 bp, Homo sapiens
ccattctcatctccc

SEQ ID NO: 1018617 - DNA, 15 bp, Homo sapiens
accattctcatctcc

SEQ ID NO: 1018618 - DNA, 15 bp, Homo sapiens
taccattctcatctc

SEQ ID NO: 1018619 - DNA, 15 bp, Homo sapiens
ttaccattctcatct

SEQ ID NO: 1018620 - DNA, 15 bp, Homo sapiens
gttaccattctcatc

SEQ ID NO: 1018621 - DNA, 15 bp, Homo sapiens
tgttaccattctcat

SEQ ID NO: 1018622 - DNA, 15 bp, Homo sapiens
ttgttaccattctca

SEQ ID NO: 1018623 - DNA, 15 bp, Homo sapiens
cttgttaccattctc

SEQ ID NO: 1018624 - DNA, 15 bp, Homo sapiens
ccttgttaccattct

SEQ ID NO: 1018625 - DNA, 15 bp, Homo sapiens
tccttgttaccattc

SEQ ID NO: 1018626 - DNA, 15 bp, Homo sapiens
ttatccttgttacca

SEQ ID NO: 1018627 - DNA, 15 bp, Homo sapiens
gttatccttgttacc

SEQ ID NO: 1018628 - DNA, 15 bp, Homo sapiens
agttatccttgttac

SEQ ID NO: 1018629 - DNA, 15 bp, Homo sapiens
gagttatccttgtta

SEQ ID NO: 1018630 - DNA, 15 bp, Homo sapiens
agagttatccttgtt

SEQ ID NO: 1018631 - DNA, 15 bp, Homo sapiens
gagagttatccttgt

SEQ ID NO: 1018632 - DNA, 15 bp, Homo sapiens
tgagagttatccttg

SEQ ID NO: 1018633 - DNA, 15 bp, Homo sapiens
gtgagagttatcctt

SEQ ID NO: 1018634 - DNA, 15 bp, Homo sapiens
agtgagagttatcct

SEQ ID NO: 1018635 - DNA, 15 bp, Homo sapiens
aagtgagagttatcc

SEQ ID NO: 1018636 - DNA, 15 bp, Homo sapiens
caagtgagagttatc

SEQ ID NO: 1018637 - DNA, 15 bp, Homo sapiens
gcaagtgagagttat

SEQ ID NO: 1018638 - DNA, 15 bp, Homo sapiens
tgcaagtgagagtta

SEQ ID NO: 1018639 - DNA, 15 bp, Homo sapiens
atgcaagtgagagtt

SEQ ID NO: 1018640 - DNA, 15 bp, Homo sapiens
tatgcaagtgagagt

SEQ ID NO: 1018641 - DNA, 15 bp, Homo sapiens
atatgcaagtgagag

SEQ ID NO: 1018642 - DNA, 15 bp, Homo sapiens
aatatgcaagtgaga

SEQ ID NO: 1018643 - DNA, 15 bp, Homo sapiens
gaatatgcaagtgag

SEQ ID NO: 1018644 - DNA, 15 bp, Homo sapiens
tgaatatgcaagtga

SEQ ID NO: 1018645 - DNA, 15 bp, Homo sapiens
ttgaatatgcaagtg

SEQ ID NO: 1018646 - DNA, 15 bp, Homo sapiens
tttgaatatgcaagt

SEQ ID NO: 1018647 - DNA, 15 bp, Homo sapiens
atttgaatatgcaag

SEQ ID NO: 1018648 - DNA, 15 bp, Homo sapiens
catttgaatatgcaa

SEQ ID NO: 1018649 - DNA, 15 bp, Homo sapiens
gcatttgaatatgca

SEQ ID NO: 1018650 - DNA, 15 bp, Homo sapiens
tgcatttgaatatgc

SEQ ID NO: 1018651 - DNA, 15 bp, Homo sapiens
ctgcatttgaatatg

SEQ ID NO: 1018652 - DNA, 15 bp, Homo sapiens
cctgcatttgaatat

SEQ ID NO: 1018653 - DNA, 15 bp, Homo sapiens
tcctgcatttgaata

SEQ ID NO: 1018654 - DNA, 15 bp, Homo sapiens
atcctgcatttgaat

SEQ ID NO: 1018655 - DNA, 15 bp, Homo sapiens
catcctgcatttgaa

SEQ ID NO: 1018656 - DNA, 15 bp, Homo sapiens
gcatcctgcatttga

SEQ ID NO: 1018657 - DNA, 15 bp, Homo sapiens
agcatcctgcatttg

SEQ ID NO: 1018658 - DNA, 15 bp, Homo sapiens
cagcatcctgcattt

SEQ ID NO: 1018659 - DNA, 15 bp, Homo sapiens
gcagcatcctgcatt

SEQ ID NO: 1018660 - DNA, 15 bp, Homo sapiens
ggcagcatcctgcat

SEQ ID NO: 1018661 - DNA, 15 bp, Homo sapiens
tggcagcatcctgca

SEQ ID NO: 1018662 - DNA, 15 bp, Homo sapiens
atggcagcatcctgc

SEQ ID NO: 1018663 - DNA, 15 bp, Homo sapiens
aatggcagcatcctg

SEQ ID NO: 1018664 - DNA, 15 bp, Homo sapiens
gaatggcagcatcct

SEQ ID NO: 1018665 - DNA, 15 bp, Homo sapiens
tgaatggcagcatcc

SEQ ID NO: 1018666 - DNA, 15 bp, Homo sapiens
gtgaatggcagcatc

SEQ ID NO: 1018667 - DNA, 15 bp, Homo sapiens
agtgaatggcagcat

SEQ ID NO: 1018668 - DNA, 15 bp, Homo sapiens
cagtgaatggcagca

SEQ ID NO: 1018669 - DNA, 15 bp, Homo sapiens
acagtgaatggcagc

SEQ ID NO: 1018670 - DNA, 15 bp, Homo sapiens
aacagtgaatggcag

SEQ ID NO: 1018671 - DNA, 15 bp, Homo sapiens
taacagtgaatggca

SEQ ID NO: 1018672 - DNA, 15 bp, Homo sapiens
ataacagtgaatggc

SEQ ID NO: 1018673 - DNA, 15 bp, Homo sapiens
tataacagtgaatgg

SEQ ID NO: 1018674 - DNA, 15 bp, Homo sapiens
ttataacagtgaatg

SEQ ID NO: 1018675 - DNA, 15 bp, Homo sapiens
tttataacagtgaat

SEQ ID NO: 1018676 - DNA, 15 bp, Homo sapiens
ttttataacagtgaa

SEQ ID NO: 1018677 - DNA, 15 bp, Homo sapiens
tttttataacagtga

SEQ ID NO: 1018678 - DNA, 15 bp, Homo sapiens
ttttttataacagtg

SEQ ID NO: 1018679 - DNA, 15 bp, Homo sapiens
gttttttataacagt

SEQ ID NO: 1018680 - DNA, 15 bp, Homo sapiens
agttttttataacag

SEQ ID NO: 1018681 - DNA, 15 bp, Homo sapiens
gagttttttataaca

SEQ ID NO: 1018682 - DNA, 15 bp, Homo sapiens
agagttttttataac

SEQ ID NO: 1018683 - DNA, 15 bp, Homo sapiens
cagagttttttataa

SEQ ID NO: 1018684 - DNA, 15 bp, Homo sapiens
ccagagttttttata

SEQ ID NO: 1018685 - DNA, 15 bp, Homo sapiens
tccagagttttttat

SEQ ID NO: 1018686 - DNA, 15 bp, Homo sapiens
ttccagagtttttta

SEQ ID NO: 1018687 - DNA, 15 bp, Homo sapiens
cttccagagtttttt

SEQ ID NO: 1018688 - DNA, 15 bp, Homo sapiens
tcttccagagttttt

SEQ ID NO: 1018689 - DNA, 15 bp, Homo sapiens
ctcttccagagtttt

SEQ ID NO: 1018690 - DNA, 15 bp, Homo sapiens
tctcttccagagttt

SEQ ID NO: 1018691 - DNA, 15 bp, Homo sapiens
ttctcttccagagtt

SEQ ID NO: 1018692 - DNA, 15 bp, Homo sapiens
attctcttccagagt

SEQ ID NO: 1018693 - DNA, 15 bp, Homo sapiens
cattctcttccagag

SEQ ID NO: 1018694 - DNA, 15 bp, Homo sapiens
tcattctcttccaga

SEQ ID NO: 1018695 - DNA, 15 bp, Homo sapiens
ttcattctcttccag

SEQ ID NO: 1018696 - DNA, 15 bp, Homo sapiens
cttcattctcttcca

SEQ ID NO: 1018697 - DNA, 15 bp, Homo sapiens
acttcattctcttcc

SEQ ID NO: 1018698 - DNA, 15 bp, Homo sapiens
cacttcattctcttc

SEQ ID NO: 1018699 - DNA, 15 bp, Homo sapiens
tcacttcattctctt

SEQ ID NO: 1018700 - DNA, 15 bp, Homo sapiens
atcacttcattctct

SEQ ID NO: 1018701 - DNA, 15 bp, Homo sapiens
catcacttcattctc

SEQ ID NO: 1018702 - DNA, 15 bp, Homo sapiens
tcatcacttcattct

SEQ ID NO: 1018703 - DNA, 15 bp, Homo sapiens
ttcatcacttcattc

SEQ ID NO: 1018704 - DNA, 15 bp, Homo sapiens
tttcatcacttcatt

SEQ ID NO: 1018705 - DNA, 15 bp, Homo sapiens
ttttcatcacttcat

SEQ ID NO: 1018706 - DNA, 15 bp, Homo sapiens
attttcatcacttca

SEQ ID NO: 1018707 - DNA, 15 bp, Homo sapiens
aattttcatcacttc

SEQ ID NO: 1018708 - DNA, 15 bp, Homo sapiens
caattttcatcactt

SEQ ID NO: 1018709 - DNA, 15 bp, Homo sapiens
acaattttcatcact

SEQ ID NO: 1018710 - DNA, 15 bp, Homo sapiens
tacaattttcatcac

SEQ ID NO: 1018711 - DNA, 15 bp, Homo sapiens
ttacaattttcatca

SEQ ID NO: 1018712 - DNA, 15 bp, Homo sapiens
tttacaattttcatc

SEQ ID NO: 1018713 - DNA, 15 bp, Homo sapiens
atttacaattttcat

SEQ ID NO: 1018714 - DNA, 15 bp, Homo sapiens
aatttacaattttca

SEQ ID NO: 1018715 - DNA, 15 bp, Homo sapiens
aaatttacaattttc

SEQ ID NO: 1018716 - DNA, 15 bp, Homo sapiens
caaatttacaatttt

SEQ ID NO: 1018717 - DNA, 15 bp, Homo sapiens
ccaaatttacaattt

SEQ ID NO: 1018718 - DNA, 15 bp, Homo sapiens
accaaatttacaatt

SEQ ID NO: 1018719 - DNA, 15 bp, Homo sapiens
aaccaaatttacaat

SEQ ID NO: 1018720 - DNA, 15 bp, Homo sapiens
aaaccaaatttacaa

SEQ ID NO: 1018721 - DNA, 15 bp, Homo sapiens
aaaaccaaatttaca

SEQ ID NO: 1018722 - DNA, 15 bp, Homo sapiens
caaaaccaaatttac

SEQ ID NO: 1018723 - DNA, 15 bp, Homo sapiens
tcaaaaccaaattta

SEQ ID NO: 1018724 - DNA, 15 bp, Homo sapiens
ttcaaaaccaaattt

SEQ ID NO: 1018725 - DNA, 15 bp, Homo sapiens
gttcaaaaccaaatt

SEQ ID NO: 1018726 - DNA, 15 bp, Homo sapiens
tgttcaaaaccaaat

SEQ ID NO: 1018727 - DNA, 15 bp, Homo sapiens
atgttcaaaaccaaa

SEQ ID NO: 1018728 - DNA, 15 bp, Homo sapiens
catgttcaaaaccaa

SEQ ID NO: 1018729 - DNA, 15 bp, Homo sapiens
acatgttcaaaacca

SEQ ID NO: 1018730 - DNA, 15 bp, Homo sapiens
cacatgttcaaaacc

SEQ ID NO: 1018731 - DNA, 15 bp, Homo sapiens
ccacatgttcaaaac

SEQ ID NO: 1018732 - DNA, 15 bp, Homo sapiens
cccacatgttcaaaa

SEQ ID NO: 1018733 - DNA, 15 bp, Homo sapiens
acccacatgttcaaa

SEQ ID NO: 1018734 - DNA, 15 bp, Homo sapiens
aacccacatgttcaa

SEQ ID NO: 1018735 - DNA, 15 bp, Homo sapiens
aaacccacatgttca

SEQ ID NO: 1018736 - DNA, 15 bp, Homo sapiens
aaaacccacatgttc

SEQ ID NO: 1018737 - DNA, 15 bp, Homo sapiens
aaaaacccacatgtt

SEQ ID NO: 1018738 - DNA, 15 bp, Homo sapiens
aaaaaacccacatgt

SEQ ID NO: 1018739 - DNA, 15 bp, Homo sapiens
caaaaaacccacatg

SEQ ID NO: 1018740 - DNA, 15 bp, Homo sapiens
tcaaaaaacccacat

SEQ ID NO: 1018741 - DNA, 15 bp, Homo sapiens
ctcaaaaaacccaca

SEQ ID NO: 1018742 - DNA, 15 bp, Homo sapiens
tctcaaaaaacccac

SEQ ID NO: 1018743 - DNA, 15 bp, Homo sapiens
atctcaaaaaaccca

SEQ ID NO: 1018744 - DNA, 15 bp, Homo sapiens
tatctcaaaaaaccc

SEQ ID NO: 1018745 - DNA, 15 bp, Homo sapiens
atatctcaaaaaacc

SEQ ID NO: 1018746 - DNA, 15 bp, Homo sapiens
gatatctcaaaaaac

SEQ ID NO: 1018747 - DNA, 15 bp, Homo sapiens
agatatctcaaaaaa

SEQ ID NO: 1018748 - DNA, 15 bp, Homo sapiens
tagatatctcaaaaa

SEQ ID NO: 1018749 - DNA, 15 bp, Homo sapiens
ctagatatctcaaaa

SEQ ID NO: 1018750 - DNA, 15 bp, Homo sapiens
cctagatatctcaaa

SEQ ID NO: 1018751 - DNA, 15 bp, Homo sapiens
acctagatatctcaa

SEQ ID NO: 1018752 - DNA, 15 bp, Homo sapiens
cacctagatatctca

SEQ ID NO: 1018753 - DNA, 15 bp, Homo sapiens
ccacctagatatctc

SEQ ID NO: 1018754 - DNA, 15 bp, Homo sapiens
tccacctagatatct

SEQ ID NO: 1018755 - DNA, 15 bp, Homo sapiens
ctccacctagatatc

SEQ ID NO: 1018756 - DNA, 15 bp, Homo sapiens
tctccacctagatat

SEQ ID NO: 1018757 - DNA, 15 bp, Homo sapiens
atctccacctagata

SEQ ID NO: 1018758 - DNA, 15 bp, Homo sapiens
catctccacctagat

SEQ ID NO: 1018759 - DNA, 15 bp, Homo sapiens
acatctccacctaga

SEQ ID NO: 1018760 - DNA, 15 bp, Homo sapiens
aacatctccacctag

SEQ ID NO: 1018761 - DNA, 15 bp, Homo sapiens
caacatctccaccta

SEQ ID NO: 1018762 - DNA, 15 bp, Homo sapiens
tcaacatctccacct

SEQ ID NO: 1018763 - DNA, 15 bp, Homo sapiens
ctcaacatctccacc

SEQ ID NO: 1018764 - DNA, 15 bp, Homo sapiens
tctcaacatctccac

SEQ ID NO: 1018765 - DNA, 15 bp, Homo sapiens
ttctcaacatctcca

SEQ ID NO: 1018766 - DNA, 15 bp, Homo sapiens
tttctcaacatctcc

SEQ ID NO: 1018767 - DNA, 15 bp, Homo sapiens
ctttctcaacatctc

SEQ ID NO: 1018768 - DNA, 15 bp, Homo sapiens
actttctcaacatct

SEQ ID NO: 1018769 - DNA, 15 bp, Homo sapiens
cactttctcaacatc

SEQ ID NO: 1018770 - DNA, 15 bp, Homo sapiens
tcactttctcaacat

SEQ ID NO: 1018771 - DNA, 15 bp, Homo sapiens
atcactttctcaaca

SEQ ID NO: 1018772 - DNA, 15 bp, Homo sapiens
aatcactttctcaac

SEQ ID NO: 1018773 - DNA, 15 bp, Homo sapiens
caatcactttctcaa

SEQ ID NO: 1018774 - DNA, 15 bp, Homo sapiens
ccaatcactttctca

SEQ ID NO: 1018775 - DNA, 15 bp, Homo sapiens
gccaatcactttctc

SEQ ID NO: 1018776 - DNA, 15 bp, Homo sapiens
agccaatcactttct

SEQ ID NO: 1018777 - DNA, 15 bp, Homo sapiens
cagccaatcactttc

SEQ ID NO: 1018778 - DNA, 15 bp, Homo sapiens
acagccaatcacttt

SEQ ID NO: 1018779 - DNA, 15 bp, Homo sapiens
tacagccaatcactt

SEQ ID NO: 1018780 - DNA, 15 bp, Homo sapiens
atacagccaatcact

SEQ ID NO: 1018781 - DNA, 15 bp, Homo sapiens
catacagccaatcac

SEQ ID NO: 1018782 - DNA, 15 bp, Homo sapiens
tcatacagccaatca

SEQ ID NO: 1018783 - DNA, 15 bp, Homo sapiens
ctcatacagccaatc

SEQ ID NO: 1018784 - DNA, 15 bp, Homo sapiens
gctcatacagccaat

SEQ ID NO: 1018785 - DNA, 15 bp, Homo sapiens
ggctcatacagccaa

SEQ ID NO: 1018786 - DNA, 15 bp, Homo sapiens
aggctcatacagcca

SEQ ID NO: 1018787 - DNA, 15 bp, Homo sapiens
caggctcatacagcc

SEQ ID NO: 1018788 - DNA, 15 bp, Homo sapiens
ccaggctcatacagc

SEQ ID NO: 1018789 - DNA, 15 bp, Homo sapiens
tccaggctcatacag

SEQ ID NO: 1018790 - DNA, 15 bp, Homo sapiens
ctccaggctcataca

SEQ ID NO: 1018791 - DNA, 15 bp, Homo sapiens
actccaggctcatac

SEQ ID NO: 1018792 - DNA, 15 bp, Homo sapiens
aactccaggctcata

SEQ ID NO: 1018793 - DNA, 15 bp, Homo sapiens
gaactccaggctcat

SEQ ID NO: 1018794 - DNA, 15 bp, Homo sapiens
ggaactccaggctca

SEQ ID NO: 1018795 - DNA, 15 bp, Homo sapiens
tggaactccaggctc

SEQ ID NO: 1018796 - DNA, 15 bp, Homo sapiens
ctggaactccaggct

SEQ ID NO: 1018797 - DNA, 15 bp, Homo sapiens
tctggaactccaggc

SEQ ID NO: 1018798 - DNA, 15 bp, Homo sapiens
ttctggaactccagg

SEQ ID NO: 1018799 - DNA, 15 bp, Homo sapiens
cttctggaactccag

SEQ ID NO: 1018800 - DNA, 15 bp, Homo sapiens
ctcttctggaactcc

SEQ ID NO: 1018801 - DNA, 15 bp, Homo sapiens
cctcttctggaactc

SEQ ID NO: 1018802 - DNA, 15 bp, Homo sapiens
acctcttctggaact

SEQ ID NO: 1018803 - DNA, 15 bp, Homo sapiens
gacctcttctggaac

SEQ ID NO: 1018804 - DNA, 15 bp, Homo sapiens
tgacctcttctggaa

SEQ ID NO: 1018805 - DNA, 15 bp, Homo sapiens
ctgacctcttctgga

SEQ ID NO: 1018806 - DNA, 15 bp, Homo sapiens
gctgacctcttctgg

SEQ ID NO: 1018807 - DNA, 15 bp, Homo sapiens
tgctgacctcttctg

SEQ ID NO: 1018808 - DNA, 15 bp, Homo sapiens
ctgctgacctcttct

SEQ ID NO: 1018809 - DNA, 15 bp, Homo sapiens
cctgctgacctcttc

SEQ ID NO: 1018810 - DNA, 15 bp, Homo sapiens
ccctgctgacctctt

SEQ ID NO: 1018811 - DNA, 15 bp, Homo sapiens
cccctgctgacctct

SEQ ID NO: 1018812 - DNA, 15 bp, Homo sapiens
tcccctgctgacctc

SEQ ID NO: 1018813 - DNA, 15 bp, Homo sapiens
ctcccctgctgacct

SEQ ID NO: 1018814 - DNA, 15 bp, Homo sapiens
tctcccctgctgacc

SEQ ID NO: 1018815 - DNA, 15 bp, Homo sapiens
gtctcccctgctgac

SEQ ID NO: 1018816 - DNA, 15 bp, Homo sapiens
tgtctcccctgctga

SEQ ID NO: 1018817 - DNA, 15 bp, Homo sapiens
ctgtctcccctgctg

SEQ ID NO: 1018818 - DNA, 15 bp, Homo sapiens
tctgtctcccctgct

SEQ ID NO: 1018819 - DNA, 15 bp, Homo sapiens
ttctgtctcccctgc

SEQ ID NO: 1018820 - DNA, 15 bp, Homo sapiens
cttctgtctcccctg

SEQ ID NO: 1018821 - DNA, 15 bp, Homo sapiens
tcttctgtctcccct

SEQ ID NO: 1018822 - DNA, 15 bp, Homo sapiens
ttcttctgtctcccc

SEQ ID NO: 1018823 - DNA, 15 bp, Homo sapiens
cttcttctgtctccc

SEQ ID NO: 1018824 - DNA, 15 bp, Homo sapiens
ccttcttctgtctcc

SEQ ID NO: 1018825 - DNA, 15 bp, Homo sapiens
tccttcttctgtctc

SEQ ID NO: 1018826 - DNA, 15 bp, Homo sapiens
ctccttcttctgtct

SEQ ID NO: 1018827 - DNA, 15 bp, Homo sapiens
gctccttcttctgtc

SEQ ID NO: 1018828 - DNA, 15 bp, Homo sapiens
tgctccttcttctgt

SEQ ID NO: 1018829 - DNA, 15 bp, Homo sapiens
ctgctccttcttctg

SEQ ID NO: 1018830 - DNA, 15 bp, Homo sapiens
actgctccttcttct

SEQ ID NO: 1018831 - DNA, 15 bp, Homo sapiens
gactgctccttcttc

SEQ ID NO: 1018832 - DNA, 15 bp, Homo sapiens
agactgctccttctt

SEQ ID NO: 1018833 - DNA, 15 bp, Homo sapiens
cagactgctccttct

SEQ ID NO: 1018834 - DNA, 15 bp, Homo sapiens
tcagactgctccttc

SEQ ID NO: 1018835 - DNA, 15 bp, Homo sapiens
ctcagactgctcctt

SEQ ID NO: 1018836 - DNA, 15 bp, Homo sapiens
tctcagactgctcct

SEQ ID NO: 1018837 - DNA, 15 bp, Homo sapiens
ttctcagactgctcc

SEQ ID NO: 1018838 - DNA, 15 bp, Homo sapiens
cttctcagactgctc

SEQ ID NO: 1018839 - DNA, 15 bp, Homo sapiens
acttctcagactgct

SEQ ID NO: 1018840 - DNA, 15 bp, Homo sapiens
tacttctcagactgc

SEQ ID NO: 1018841 - DNA, 15 bp, Homo sapiens
ctacttctcagactg

SEQ ID NO: 1018842 - DNA, 15 bp, Homo sapiens
cctacttctcagact

SEQ ID NO: 1018843 - DNA, 15 bp, Homo sapiens
tcctacttctcagac

SEQ ID NO: 1018844 - DNA, 15 bp, Homo sapiens
ctcctacttctcaga

SEQ ID NO: 1018845 - DNA, 15 bp, Homo sapiens
tctcctacttctcag

SEQ ID NO: 1018846 - DNA, 15 bp, Homo sapiens
ttctcctacttctca

SEQ ID NO: 1018847 - DNA, 15 bp, Homo sapiens
tttctcctacttctc

SEQ ID NO: 1018848 - DNA, 15 bp, Homo sapiens
ttttctcctacttct

SEQ ID NO: 1018849 - DNA, 15 bp, Homo sapiens
tttttctcctacttc

SEQ ID NO: 1018850 - DNA, 15 bp, Homo sapiens
ttttttctcctactt

SEQ ID NO: 1018851 - DNA, 15 bp, Homo sapiens
tttttttctcctact

SEQ ID NO: 1018852 - DNA, 15 bp, Homo sapiens
gtttttttctcctac

SEQ ID NO: 1018853 - DNA, 15 bp, Homo sapiens
ggtttttttctccta

SEQ ID NO: 1018854 - DNA, 15 bp, Homo sapiens
gggtttttttctcct

SEQ ID NO: 1018855 - DNA, 15 bp, Homo sapiens
tgggtttttttctcc

SEQ ID NO: 1018856 - DNA, 15 bp, Homo sapiens
gtgggtttttttctc

SEQ ID NO: 1018857 - DNA, 15 bp, Homo sapiens
tgtgggtttttttct

SEQ ID NO: 1018858 - DNA, 15 bp, Homo sapiens
ctgtgggtttttttc

SEQ ID NO: 1018859 - DNA, 15 bp, Homo sapiens
tctgtgggttttttt

SEQ ID NO: 1018860 - DNA, 15 bp, Homo sapiens
ctctgtgggtttttt

SEQ ID NO: 1018861 - DNA, 15 bp, Homo sapiens
tctctgtgggttttt

SEQ ID NO: 1018862 - DNA, 15 bp, Homo sapiens
atctctgtgggtttt

SEQ ID NO: 1018863 - DNA, 15 bp, Homo sapiens
catctctgtgggttt

SEQ ID NO: 1018864 - DNA, 15 bp, Homo sapiens
acatctctgtgggtt

SEQ ID NO: 1018865 - DNA, 15 bp, Homo sapiens
aacatctctgtgggt

SEQ ID NO: 1018866 - DNA, 15 bp, Homo sapiens
caacatctctgtggg

SEQ ID NO: 1018867 - DNA, 15 bp, Homo sapiens
ccaacatctctgtgg

SEQ ID NO: 1018868 - DNA, 15 bp, Homo sapiens
gccaacatctctgtg

SEQ ID NO: 1018869 - DNA, 15 bp, Homo sapiens
tgccaacatctctgt

SEQ ID NO: 1018870 - DNA, 15 bp, Homo sapiens
gtgccaacatctctg

SEQ ID NO: 1018871 - DNA, 15 bp, Homo sapiens
tgtgccaacatctct

SEQ ID NO: 1018872 - DNA, 15 bp, Homo sapiens
ctgtgccaacatctc

SEQ ID NO: 1018873 - DNA, 15 bp, Homo sapiens
tctgtgccaacatct

SEQ ID NO: 1018874 - DNA, 15 bp, Homo sapiens
ctctgtgccaacatc

SEQ ID NO: 1018875 - DNA, 15 bp, Homo sapiens
cctctgtgccaacat

SEQ ID NO: 1018876 - DNA, 15 bp, Homo sapiens
gcctctgtgccaaca

SEQ ID NO: 1018877 - DNA, 15 bp, Homo sapiens
ggcctctgtgccaac

SEQ ID NO: 1018878 - DNA, 15 bp, Homo sapiens
tggcctctgtgccaa

SEQ ID NO: 1018879 - DNA, 15 bp, Homo sapiens
ttggcctctgtgcca

SEQ ID NO: 1018880 - DNA, 15 bp, Homo sapiens
cttggcctctgtgcc

SEQ ID NO: 1018881 - DNA, 15 bp, Homo sapiens
ccttggcctctgtgc

SEQ ID NO: 1018882 - DNA, 15 bp, Homo sapiens
cccttggcctctgtg

SEQ ID NO: 1018883 - DNA, 15 bp, Homo sapiens
tcccttggcctctgt

SEQ ID NO: 1018884 - DNA, 15 bp, Homo sapiens
ttcccttggcctctg

SEQ ID NO: 1018885 - DNA, 15 bp, Homo sapiens
cttcccttggcctct

SEQ ID NO: 1018886 - DNA, 15 bp, Homo sapiens
tcttcccttggcctc

SEQ ID NO: 1018887 - DNA, 15 bp, Homo sapiens
ctcttcccttggcct

SEQ ID NO: 1018888 - DNA, 15 bp, Homo sapiens
tctcttcccttggcc

SEQ ID NO: 1018889 - DNA, 15 bp, Homo sapiens
ctctcttcccttggc

SEQ ID NO: 1018890 - DNA, 15 bp, Homo sapiens
tctctcttcccttgg

SEQ ID NO: 1018891 - DNA, 15 bp, Homo sapiens
ctctctcttcccttg

SEQ ID NO: 1018892 - DNA, 15 bp, Homo sapiens
actctctcttccctt

SEQ ID NO: 1018893 - DNA, 15 bp, Homo sapiens
aactctctcttccct

SEQ ID NO: 1018894 - DNA, 15 bp, Homo sapiens
aaactctctcttccc

SEQ ID NO: 1018895 - DNA, 15 bp, Homo sapiens
aaaactctctcttcc

SEQ ID NO: 1018896 - DNA, 15 bp, Homo sapiens
taaaactctctcttc

SEQ ID NO: 1018897 - DNA, 15 bp, Homo sapiens
ttaaaactctctctt

SEQ ID NO: 1018898 - DNA, 15 bp, Homo sapiens
tttaaaactctctct

SEQ ID NO: 1018899 - DNA, 15 bp, Homo sapiens
ttttaaaactctctc

SEQ ID NO: 1018900 - DNA, 15 bp, Homo sapiens
tttttaaaactctct

SEQ ID NO: 1018901 - DNA, 15 bp, Homo sapiens
gtttttaaaactctc

SEQ ID NO: 1018902 - DNA, 15 bp, Homo sapiens
cgtttttaaaactct

SEQ ID NO: 1018903 - DNA, 15 bp, Homo sapiens
tcgtttttaaaactc

SEQ ID NO: 1018904 - DNA, 15 bp, Homo sapiens
ttcgtttttaaaact

SEQ ID NO: 1018905 - DNA, 15 bp, Homo sapiens
attcgtttttaaaac

SEQ ID NO: 1018906 - DNA, 15 bp, Homo sapiens
cattcgtttttaaaa

SEQ ID NO: 1018907 - DNA, 15 bp, Homo sapiens
tcattcgtttttaaa

SEQ ID NO: 1018908 - DNA, 15 bp, Homo sapiens
ttcattcgtttttaa

SEQ ID NO: 1018909 - DNA, 15 bp, Homo sapiens
attcattcgttttta

SEQ ID NO: 1018910 - DNA, 15 bp, Homo sapiens
cattcattcgttttt

SEQ ID NO: 1018911 - DNA, 15 bp, Homo sapiens
ccattcattcgtttt

SEQ ID NO: 1018912 - DNA, 15 bp, Homo sapiens
accattcattcgttt

SEQ ID NO: 1018913 - DNA, 15 bp, Homo sapiens
gaccattcattcgtt

SEQ ID NO: 1018914 - DNA, 15 bp, Homo sapiens
tgaccattcattcgt

SEQ ID NO: 1018915 - DNA, 15 bp, Homo sapiens
ttgaccattcattcg

SEQ ID NO: 1018916 - DNA, 15 bp, Homo sapiens
gttgaccattcattc

SEQ ID NO: 1018917 - DNA, 15 bp, Homo sapiens
tgttgaccattcatt

SEQ ID NO: 1018918 - DNA, 15 bp, Homo sapiens
ctgttgaccattcat

SEQ ID NO: 1018919 - DNA, 15 bp, Homo sapiens
cctgttgaccattca

SEQ ID NO: 1018920 - DNA, 15 bp, Homo sapiens
acctgttgaccattc

SEQ ID NO: 1018921 - DNA, 15 bp, Homo sapiens
cacctgttgaccatt

SEQ ID NO: 1018922 - DNA, 15 bp, Homo sapiens
gcacctgttgaccat

SEQ ID NO: 1018923 - DNA, 15 bp, Homo sapiens
tgcacctgttgacca

SEQ ID NO: 1018924 - DNA, 15 bp, Homo sapiens
ttgcacctgttgacc

SEQ ID NO: 1018925 - DNA, 15 bp, Homo sapiens
tttgcacctgttgac

SEQ ID NO: 1018926 - DNA, 15 bp, Homo sapiens
atttgcacctgttga

SEQ ID NO: 1018927 - DNA, 15 bp, Homo sapiens
tatttgcacctgttg

SEQ ID NO: 1018928 - DNA, 15 bp, Homo sapiens
ttatttgcacctgtt

SEQ ID NO: 1018929 - DNA, 15 bp, Homo sapiens
tttatttgcacctgt

SEQ ID NO: 1018930 - DNA, 15 bp, Homo sapiens
ctttatttgcacctg

SEQ ID NO: 1018931 - DNA, 15 bp, Homo sapiens
tctttatttgcacct

SEQ ID NO: 1018932 - DNA, 15 bp, Homo sapiens
gtctttatttgcacc

SEQ ID NO: 1018933 - DNA, 15 bp, Homo sapiens
agtctttatttgcac

SEQ ID NO: 1018934 - DNA, 15 bp, Homo sapiens
cagtctttatttgca

SEQ ID NO: 1018935 - DNA, 15 bp, Homo sapiens
tcagtctttatttgc

SEQ ID NO: 1018936 - DNA, 15 bp, Homo sapiens
ttcagtctttatttg

SEQ ID NO: 1018937 - DNA, 15 bp, Homo sapiens
tttcagtctttattt

SEQ ID NO: 1018938 - DNA, 15 bp, Homo sapiens
ttttcagtctttatt

SEQ ID NO: 1018939 - DNA, 15 bp, Homo sapiens
tttttcagtctttat

SEQ ID NO: 1018940 - DNA, 15 bp, Homo sapiens
atttttcagtcttta

SEQ ID NO: 1018941 - DNA, 15 bp, Homo sapiens
catttttcagtcttt

SEQ ID NO: 1018942 - DNA, 15 bp, Homo sapiens
acatttttcagtctt

SEQ ID NO: 1018943 - DNA, 15 bp, Homo sapiens
gacatttttcagtct

SEQ ID NO: 1018944 - DNA, 15 bp, Homo sapiens
ggacatttttcagtc

SEQ ID NO: 1018945 - DNA, 15 bp, Homo sapiens
tggacatttttcagt

SEQ ID NO: 1018946 - DNA, 15 bp, Homo sapiens
atggacatttttcag

SEQ ID NO: 1018947 - DNA, 15 bp, Homo sapiens
aatggacatttttca

SEQ ID NO: 1018948 - DNA, 15 bp, Homo sapiens
caatggacatttttc

SEQ ID NO: 1018949 - DNA, 15 bp, Homo sapiens
ccaatggacattttt

SEQ ID NO: 1018950 - DNA, 15 bp, Homo sapiens
tccaatggacatttt

SEQ ID NO: 1018951 - DNA, 15 bp, Homo sapiens
atccaatggacattt

SEQ ID NO: 1018952 - DNA, 15 bp, Homo sapiens
aatccaatggacatt

SEQ ID NO: 1018953 - DNA, 15 bp, Homo sapiens
aaatccaatggacat

SEQ ID NO: 1018954 - DNA, 15 bp, Homo sapiens
taaatccaatggaca

SEQ ID NO: 1018955 - DNA, 15 bp, Homo sapiens
ctaaatccaatggac

SEQ ID NO: 1018956 - DNA, 15 bp, Homo sapiens
gctaaatccaatgga

SEQ ID NO: 1018957 - DNA, 15 bp, Homo sapiens
tgctaaatccaatgg

SEQ ID NO: 1018958 - DNA, 15 bp, Homo sapiens
ctgctaaatccaatg

SEQ ID NO: 1018959 - DNA, 15 bp, Homo sapiens
gctgctaaatccaat

SEQ ID NO: 1018960 - DNA, 15 bp, Homo sapiens
tgctgctaaatccaa

SEQ ID NO: 1018961 - DNA, 15 bp, Homo sapiens
atgctgctaaatcca

SEQ ID NO: 1018962 - DNA, 15 bp, Homo sapiens
catgctgctaaatcc

SEQ ID NO: 1018963 - DNA, 15 bp, Homo sapiens
tcatgctgctaaatc

SEQ ID NO: 1018964 - DNA, 15 bp, Homo sapiens
atcatgctgctaaat

SEQ ID NO: 1018965 - DNA, 15 bp, Homo sapiens
catcatgctgctaaa

SEQ ID NO: 1018966 - DNA, 15 bp, Homo sapiens
ccatcatgctgctaa

SEQ ID NO: 1018967 - DNA, 15 bp, Homo sapiens
accatcatgctgcta

SEQ ID NO: 1018968 - DNA, 15 bp, Homo sapiens
caccatcatgctgct

SEQ ID NO: 1018969 - DNA, 15 bp, Homo sapiens
tcaccatcatgctgc

SEQ ID NO: 1018970 - DNA, 15 bp, Homo sapiens
atcaccatcatgctg

SEQ ID NO: 1018971 - DNA, 15 bp, Homo sapiens
aatcaccatcatgct

SEQ ID NO: 1018972 - DNA, 15 bp, Homo sapiens
caatcaccatcatgc

SEQ ID NO: 1018973 - DNA, 15 bp, Homo sapiens
ccaatcaccatcatg

SEQ ID NO: 1018974 - DNA, 15 bp, Homo sapiens
accaatcaccatcat

SEQ ID NO: 1018975 - DNA, 15 bp, Homo sapiens
caccaatcaccatca

SEQ ID NO: 1018976 - DNA, 15 bp, Homo sapiens
tcaccaatcaccatc

SEQ ID NO: 1018977 - DNA, 15 bp, Homo sapiens
gtcaccaatcaccat

SEQ ID NO: 1018978 - DNA, 15 bp, Homo sapiens
ggtcaccaatcacca

SEQ ID NO: 1018979 - DNA, 15 bp, Homo sapiens
aggtcaccaatcacc

SEQ ID NO: 1018980 - DNA, 15 bp, Homo sapiens
aaggtcaccaatcac

SEQ ID NO: 1018981 - DNA, 15 bp, Homo sapiens
caaggtcaccaatca

SEQ ID NO: 1018982 - DNA, 15 bp, Homo sapiens
ccaaggtcaccaatc

SEQ ID NO: 1018983 - DNA, 15 bp, Homo sapiens
gccaaggtcaccaat

SEQ ID NO: 1018984 - DNA, 15 bp, Homo sapiens
tgccaaggtcaccaa

SEQ ID NO: 1018985 - DNA, 15 bp, Homo sapiens
ttgccaaggtcacca

SEQ ID NO: 1018986 - DNA, 15 bp, Homo sapiens
cttgccaaggtcacc

SEQ ID NO: 1018987 - DNA, 15 bp, Homo sapiens
tcttgccaaggtcac

SEQ ID NO: 1018988 - DNA, 15 bp, Homo sapiens
ctcttgccaaggtca

SEQ ID NO: 1018989 - DNA, 15 bp, Homo sapiens
gctcttgccaaggtc

SEQ ID NO: 1018990 - DNA, 15 bp, Homo sapiens
agctcttgccaaggt

SEQ ID NO: 1018991 - DNA, 15 bp, Homo sapiens
cagctcttgccaagg

SEQ ID NO: 1018992 - DNA, 15 bp, Homo sapiens
acagctcttgccaag

SEQ ID NO: 1018993 - DNA, 15 bp, Homo sapiens
aacagctcttgccaa

SEQ ID NO: 1018994 - DNA, 15 bp, Homo sapiens
caacagctcttgcca

SEQ ID NO: 1018995 - DNA, 15 bp, Homo sapiens
ccaacagctcttgcc

SEQ ID NO: 1018996 - DNA, 15 bp, Homo sapiens
accaacagctcttgc

SEQ ID NO: 1018997 - DNA, 15 bp, Homo sapiens
aaccaacagctcttg

SEQ ID NO: 1018998 - DNA, 15 bp, Homo sapiens
aaaccaacagctctt

SEQ ID NO: 1018999 - DNA, 15 bp, Homo sapiens
caaaccaacagctct

SEQ ID NO: 1019000 - DNA, 15 bp, Homo sapiens
tcaaaccaacagctc

SEQ ID NO: 1019001 - DNA, 15 bp, Homo sapiens
atcaaaccaacagct

SEQ ID NO: 1019002 - DNA, 15 bp, Homo sapiens
tatcaaaccaacagc

SEQ ID NO: 1019003 - DNA, 15 bp, Homo sapiens
ctatcaaaccaacag

SEQ ID NO: 1019004 - DNA, 15 bp, Homo sapiens
actatcaaaccaaca

SEQ ID NO: 1019005 - DNA, 15 bp, Homo sapiens
tactatcaaaccaac

SEQ ID NO: 1019006 - DNA, 15 bp, Homo sapiens
ctactatcaaaccaa

SEQ ID NO: 1019007 - DNA, 15 bp, Homo sapiens
gctactatcaaacca

SEQ ID NO: 1019008 - DNA, 15 bp, Homo sapiens
ggctactatcaaacc

SEQ ID NO: 1019009 - DNA, 15 bp, Homo sapiens
gggctactatcaaac

SEQ ID NO: 1019010 - DNA, 15 bp, Homo sapiens
tgggctactatcaaa

SEQ ID NO: 1019011 - DNA, 15 bp, Homo sapiens
ttgggctactatcaa

SEQ ID NO: 1019012 - DNA, 15 bp, Homo sapiens
attgggctactatca

SEQ ID NO: 1019013 - DNA, 15 bp, Homo sapiens
cattgggctactatc

SEQ ID NO: 1019014 - DNA, 15 bp, Homo sapiens
acattgggctactat

SEQ ID NO: 1019015 - DNA, 15 bp, Homo sapiens
aacattgggctacta

SEQ ID NO: 1019016 - DNA, 15 bp, Homo sapiens
gaacattgggctact

SEQ ID NO: 1019017 - DNA, 15 bp, Homo sapiens
agaacattgggctac

SEQ ID NO: 1019018 - DNA, 15 bp, Homo sapiens
aagaacattgggcta

SEQ ID NO: 1019019 - DNA, 15 bp, Homo sapiens
caagaacattgggct

SEQ ID NO: 1019020 - DNA, 15 bp, Homo sapiens
tcaagaacattgggc

SEQ ID NO: 1019021 - DNA, 15 bp, Homo sapiens
atcaagaacattggg

SEQ ID NO: 1019022 - DNA, 15 bp, Homo sapiens
tatcaagaacattgg

SEQ ID NO: 1019023 - DNA, 15 bp, Homo sapiens
ttatcaagaacattg

SEQ ID NO: 1019024 - DNA, 15 bp, Homo sapiens
tttatcaagaacatt

SEQ ID NO: 1019025 - DNA, 15 bp, Homo sapiens
atttatcaagaacat

SEQ ID NO: 1019026 - DNA, 15 bp, Homo sapiens
aatttatcaagaaca

SEQ ID NO: 1019027 - DNA, 15 bp, Homo sapiens
aaatttatcaagaac

SEQ ID NO: 1019028 - DNA, 15 bp, Homo sapiens
caaatttatcaagaa

SEQ ID NO: 1019029 - DNA, 15 bp, Homo sapiens
acaaatttatcaaga

SEQ ID NO: 1019030 - DNA, 15 bp, Homo sapiens
aacaaatttatcaag

SEQ ID NO: 1019031 - DNA, 15 bp, Homo sapiens
aaacaaatttatcaa

SEQ ID NO: 1019032 - DNA, 15 bp, Homo sapiens
taaacaaatttatca

SEQ ID NO: 1019033 - DNA, 15 bp, Homo sapiens
gtaaacaaatttatc

SEQ ID NO: 1019034 - DNA, 15 bp, Homo sapiens
tgtaaacaaatttat

SEQ ID NO: 1019035 - DNA, 15 bp, Homo sapiens
ttgtaaacaaattta

SEQ ID NO: 1019036 - DNA, 15 bp, Homo sapiens
cttgtaaacaaattt

SEQ ID NO: 1019037 - DNA, 15 bp, Homo sapiens
acttgtaaacaaatt

SEQ ID NO: 1019038 - DNA, 15 bp, Homo sapiens
gacttgtaaacaaat

SEQ ID NO: 1019039 - DNA, 15 bp, Homo sapiens
tgacttgtaaacaaa

SEQ ID NO: 1019040 - DNA, 15 bp, Homo sapiens
ttgacttgtaaacaa

SEQ ID NO: 1019041 - DNA, 15 bp, Homo sapiens
cttgacttgtaaaca

SEQ ID NO: 1019042 - DNA, 15 bp, Homo sapiens
ccttgacttgtaaac

SEQ ID NO: 1019043 - DNA, 15 bp, Homo sapiens
accttgacttgtaaa

SEQ ID NO: 1019044 - DNA, 15 bp, Homo sapiens
taccttgacttgtaa

SEQ ID NO: 1019045 - DNA, 15 bp, Homo sapiens
ctaccttgacttgta

SEQ ID NO: 1019046 - DNA, 15 bp, Homo sapiens
gctaccttgacttgt

SEQ ID NO: 1019047 - DNA, 15 bp, Homo sapiens
tgctaccttgacttg

SEQ ID NO: 1019048 - DNA, 15 bp, Homo sapiens
ttgctaccttgactt

SEQ ID NO: 1019049 - DNA, 15 bp, Homo sapiens
attgctaccttgact

SEQ ID NO: 1019050 - DNA, 15 bp, Homo sapiens
tattgctaccttgac

SEQ ID NO: 1019051 - DNA, 15 bp, Homo sapiens
ttattgctaccttga

SEQ ID NO: 1019052 - DNA, 15 bp, Homo sapiens
tttattgctaccttg

SEQ ID NO: 1019053 - DNA, 15 bp, Homo sapiens
ctttattgctacctt

SEQ ID NO: 1019054 - DNA, 15 bp, Homo sapiens
actttattgctacct

SEQ ID NO: 1019055 - DNA, 15 bp, Homo sapiens
cactttattgctacc

SEQ ID NO: 1019056 - DNA, 15 bp, Homo sapiens
acactttattgctac

SEQ ID NO: 1019057 - DNA, 15 bp, Homo sapiens
gacactttattgcta

SEQ ID NO: 1019058 - DNA, 15 bp, Homo sapiens
agacactttattgct

SEQ ID NO: 1019059 - DNA, 15 bp, Homo sapiens
tagacactttattgc

SEQ ID NO: 1019060 - DNA, 15 bp, Homo sapiens
ttagacactttattg

SEQ ID NO: 1019061 - DNA, 15 bp, Homo sapiens
tttagacactttatt

SEQ ID NO: 1019062 - DNA, 15 bp, Homo sapiens
ctttagacactttat

SEQ ID NO: 1019063 - DNA, 15 bp, Homo sapiens
actttagacacttta

SEQ ID NO: 1019064 - DNA, 15 bp, Homo sapiens
gactttagacacttt

SEQ ID NO: 1019065 - DNA, 15 bp, Homo sapiens
tgactttagacactt

SEQ ID NO: 1019066 - DNA, 15 bp, Homo sapiens
ttgactttagacact

SEQ ID NO: 1019067 - DNA, 15 bp, Homo sapiens
attgactttagacac

SEQ ID NO: 1019068 - DNA, 15 bp, Homo sapiens
aattgactttagaca

SEQ ID NO: 1019069 - DNA, 15 bp, Homo sapiens
aaattgactttagac

SEQ ID NO: 1019070 - DNA, 15 bp, Homo sapiens
caaattgactttaga

SEQ ID NO: 1019071 - DNA, 15 bp, Homo sapiens
acaaattgactttag

SEQ ID NO: 1019072 - DNA, 15 bp, Homo sapiens
gacaaattgacttta

SEQ ID NO: 1019073 - DNA, 15 bp, Homo sapiens
ggacaaattgacttt

SEQ ID NO: 1019074 - DNA, 15 bp, Homo sapiens
tggacaaattgactt

SEQ ID NO: 1019075 - DNA, 15 bp, Homo sapiens
atggacaaattgact

SEQ ID NO: 1019076 - DNA, 15 bp, Homo sapiens
aatggacaaattgac

SEQ ID NO: 1019077 - DNA, 15 bp, Homo sapiens
gaatggacaaattga

SEQ ID NO: 1019078 - DNA, 15 bp, Homo sapiens
agaatggacaaattg

SEQ ID NO: 1019079 - DNA, 15 bp, Homo sapiens
cagaatggacaaatt

SEQ ID NO: 1019080 - DNA, 15 bp, Homo sapiens
acagaatggacaaat

SEQ ID NO: 1019081 - DNA, 15 bp, Homo sapiens
gacagaatggacaaa

SEQ ID NO: 1019082 - DNA, 15 bp, Homo sapiens
ggacagaatggacaa

SEQ ID NO: 1019083 - DNA, 15 bp, Homo sapiens
aggacagaatggaca

SEQ ID NO: 1019084 - DNA, 15 bp, Homo sapiens
taggacagaatggac

SEQ ID NO: 1019085 - DNA, 15 bp, Homo sapiens
ctaggacagaatgga

SEQ ID NO: 1019086 - DNA, 15 bp, Homo sapiens
gctaggacagaatgg

SEQ ID NO: 1019087 - DNA, 15 bp, Homo sapiens
tgctaggacagaatg

SEQ ID NO: 1019088 - DNA, 15 bp, Homo sapiens
ttgctaggacagaat

SEQ ID NO: 1019089 - DNA, 15 bp, Homo sapiens
cttgctaggacagaa

SEQ ID NO: 1019090 - DNA, 15 bp, Homo sapiens
acttgctaggacaga

SEQ ID NO: 1019091 - DNA, 15 bp, Homo sapiens
cacttgctaggacag

SEQ ID NO: 1019092 - DNA, 15 bp, Homo sapiens
acacttgctaggaca

SEQ ID NO: 1019093 - DNA, 15 bp, Homo sapiens
aacacttgctaggac

SEQ ID NO: 1019094 - DNA, 15 bp, Homo sapiens
aaacacttgctagga

SEQ ID NO: 1019095 - DNA, 15 bp, Homo sapiens
aaaacacttgctagg

SEQ ID NO: 1019096 - DNA, 15 bp, Homo sapiens
gaaaacacttgctag

SEQ ID NO: 1019097 - DNA, 15 bp, Homo sapiens
ggaaaacacttgcta

SEQ ID NO: 1019098 - DNA, 15 bp, Homo sapiens
tggaaaacacttgct

SEQ ID NO: 1019099 - DNA, 15 bp, Homo sapiens
atggaaaacacttgc

SEQ ID NO: 1019100 - DNA, 15 bp, Homo sapiens
aatggaaaacacttg

SEQ ID NO: 1019101 - DNA, 15 bp, Homo sapiens
aaatggaaaacactt

SEQ ID NO: 1019102 - DNA, 15 bp, Homo sapiens
gaaatggaaaacact

SEQ ID NO: 1019103 - DNA, 15 bp, Homo sapiens
tgaaatggaaaacac

SEQ ID NO: 1019104 - DNA, 15 bp, Homo sapiens
ctgaaatggaaaaca

SEQ ID NO: 1019105 - DNA, 15 bp, Homo sapiens
tctgaaatggaaaac

SEQ ID NO: 1019106 - DNA, 15 bp, Homo sapiens
atctgaaatggaaaa

SEQ ID NO: 1019107 - DNA, 15 bp, Homo sapiens
aatctgaaatggaaa

SEQ ID NO: 1019108 - DNA, 15 bp, Homo sapiens
gaatctgaaatggaa

SEQ ID NO: 1019109 - DNA, 15 bp, Homo sapiens
agaatctgaaatgga

SEQ ID NO: 1019110 - DNA, 15 bp, Homo sapiens
gagaatctgaaatgg

SEQ ID NO: 1019111 - DNA, 15 bp, Homo sapiens
agagaatctgaaatg

SEQ ID NO: 1019112 - DNA, 15 bp, Homo sapiens
tagagaatctgaaat

SEQ ID NO: 1019113 - DNA, 15 bp, Homo sapiens
gtagagaatctgaaa

SEQ ID NO: 1019114 - DNA, 15 bp, Homo sapiens
agtagagaatctgaa

SEQ ID NO: 1019115 - DNA, 15 bp, Homo sapiens
aagtagagaatctga

SEQ ID NO: 1019116 - DNA, 15 bp, Homo sapiens
gaagtagagaatctg

SEQ ID NO: 1019117 - DNA, 15 bp, Homo sapiens
tgaagtagagaatct

SEQ ID NO: 1019118 - DNA, 15 bp, Homo sapiens
atgaagtagagaatc

SEQ ID NO: 1019119 - DNA, 15 bp, Homo sapiens
tatgaagtagagaat

SEQ ID NO: 1019120 - DNA, 15 bp, Homo sapiens
ctatgaagtagagaa

SEQ ID NO: 1019121 - DNA, 15 bp, Homo sapiens
gctatgaagtagaga

SEQ ID NO: 1019122 - DNA, 15 bp, Homo sapiens
ggctatgaagtagag

SEQ ID NO: 1019123 - DNA, 15 bp, Homo sapiens
tggctatgaagtaga

SEQ ID NO: 1019124 - DNA, 15 bp, Homo sapiens
atggctatgaagtag

SEQ ID NO: 1019125 - DNA, 15 bp, Homo sapiens
tatggctatgaagta

SEQ ID NO: 1019126 - DNA, 15 bp, Homo sapiens
ctatggctatgaagt

SEQ ID NO: 1019127 - DNA, 15 bp, Homo sapiens
cctatggctatgaag

SEQ ID NO: 1019128 - DNA, 15 bp, Homo sapiens
acctatggctatgaa

SEQ ID NO: 1019129 - DNA, 15 bp, Homo sapiens
cacctatggctatga

SEQ ID NO: 1019130 - DNA, 15 bp, Homo sapiens
acacctatggctatg

SEQ ID NO: 1019131 - DNA, 15 bp, Homo sapiens
gacacctatggctat

SEQ ID NO: 1019132 - DNA, 15 bp, Homo sapiens
agacacctatggcta

SEQ ID NO: 1019133 - DNA, 15 bp, Homo sapiens
aagacacctatggct

SEQ ID NO: 1019134 - DNA, 15 bp, Homo sapiens
taagacacctatggc

SEQ ID NO: 1019135 - DNA, 15 bp, Homo sapiens
ataagacacctatgg

SEQ ID NO: 1019136 - DNA, 15 bp, Homo sapiens
aataagacacctatg

SEQ ID NO: 1019137 - DNA, 15 bp, Homo sapiens
gaataagacacctat

SEQ ID NO: 1019138 - DNA, 15 bp, Homo sapiens
ggaataagacaccta

SEQ ID NO: 1019139 - DNA, 15 bp, Homo sapiens
aggaataagacacct

SEQ ID NO: 1019140 - DNA, 15 bp, Homo sapiens
taggaataagacacc

SEQ ID NO: 1019141 - DNA, 15 bp, Homo sapiens
gtaggaataagacac

SEQ ID NO: 1019142 - DNA, 15 bp, Homo sapiens
agtaggaataagaca

SEQ ID NO: 1019143 - DNA, 15 bp, Homo sapiens
aagtaggaataagac

SEQ ID NO: 1019144 - DNA, 15 bp, Homo sapiens
aaagtaggaataaga

SEQ ID NO: 1019145 - DNA, 15 bp, Homo sapiens
taaagtaggaataag

SEQ ID NO: 1019146 - DNA, 15 bp, Homo sapiens
gtaaagtaggaataa

SEQ ID NO: 1019147 - DNA, 15 bp, Homo sapiens
tgtaaagtaggaata

SEQ ID NO: 1019148 - DNA, 15 bp, Homo sapiens
ctgtaaagtaggaat

SEQ ID NO: 1019149 - DNA, 15 bp, Homo sapiens
cctgtaaagtaggaa

SEQ ID NO: 1019150 - DNA, 15 bp, Homo sapiens
acctgtaaagtagga

SEQ ID NO: 1019151 - DNA, 15 bp, Homo sapiens
gacctgtaaagtagg

SEQ ID NO: 1019152 - DNA, 15 bp, Homo sapiens
agacctgtaaagtag

SEQ ID NO: 1019153 - DNA, 15 bp, Homo sapiens
cagacctgtaaagta

SEQ ID NO: 1019154 - DNA, 15 bp, Homo sapiens
tcagacctgtaaagt

SEQ ID NO: 1019155 - DNA, 15 bp, Homo sapiens
atcagacctgtaaag

SEQ ID NO: 1019156 - DNA, 15 bp, Homo sapiens
aatcagacctgtaaa

SEQ ID NO: 1019157 - DNA, 15 bp, Homo sapiens
caatcagacctgtaa

SEQ ID NO: 1019158 - DNA, 15 bp, Homo sapiens
ccaatcagacctgta

SEQ ID NO: 1019159 - DNA, 15 bp, Homo sapiens
tccaatcagacctgt

SEQ ID NO: 1019160 - DNA, 15 bp, Homo sapiens
atccaatcagacctg

SEQ ID NO: 1019161 - DNA, 15 bp, Homo sapiens
catccaatcagacct

SEQ ID NO: 1019162 - DNA, 15 bp, Homo sapiens
gcatccaatcagacc

SEQ ID NO: 1019163 - DNA, 15 bp, Homo sapiens
ggcatccaatcagac

SEQ ID NO: 1019164 - DNA, 15 bp, Homo sapiens
tggcatccaatcaga

SEQ ID NO: 1019165 - DNA, 15 bp, Homo sapiens
gtggcatccaatcag

SEQ ID NO: 1019166 - DNA, 15 bp, Homo sapiens
tgtggcatccaatca

SEQ ID NO: 1019167 - DNA, 15 bp, Homo sapiens
ctgtggcatccaatc

SEQ ID NO: 1019168 - DNA, 15 bp, Homo sapiens
cctgtggcatccaat

SEQ ID NO: 1019169 - DNA, 15 bp, Homo sapiens
tcctgtggcatccaa

SEQ ID NO: 1019170 - DNA, 15 bp, Homo sapiens
ttcctgtggcatcca

SEQ ID NO: 1019171 - DNA, 15 bp, Homo sapiens
tttcctgtggcatcc

SEQ ID NO: 1019172 - DNA, 15 bp, Homo sapiens
atttcctgtggcatc

SEQ ID NO: 1019173 - DNA, 15 bp, Homo sapiens
gatttcctgtggcat

SEQ ID NO: 1019174 - DNA, 15 bp, Homo sapiens
tgatttcctgtggca

SEQ ID NO: 1019175 - DNA, 15 bp, Homo sapiens
ctgatttcctgtggc

SEQ ID NO: 1019176 - DNA, 15 bp, Homo sapiens
actgatttcctgtgg

SEQ ID NO: 1019177 - DNA, 15 bp, Homo sapiens
gactgatttcctgtg

SEQ ID NO: 1019178 - DNA, 15 bp, Homo sapiens
agactgatttcctgt

SEQ ID NO: 1019179 - DNA, 15 bp, Homo sapiens
tagactgatttcctg

SEQ ID NO: 1019180 - DNA, 15 bp, Homo sapiens
atagactgatttcct

SEQ ID NO: 1019181 - DNA, 15 bp, Homo sapiens
aatagactgatttcc

SEQ ID NO: 1019182 - DNA, 15 bp, Homo sapiens
caatagactgatttc

SEQ ID NO: 1019183 - DNA, 15 bp, Homo sapiens
ccaatagactgattt

SEQ ID NO: 1019184 - DNA, 15 bp, Homo sapiens
gccaatagactgatt

SEQ ID NO: 1019185 - DNA, 15 bp, Homo sapiens
tgccaatagactgat

SEQ ID NO: 1019186 - DNA, 15 bp, Homo sapiens
atgccaatagactga

SEQ ID NO: 1019187 - DNA, 15 bp, Homo sapiens
catgccaatagactg

SEQ ID NO: 1019188 - DNA, 15 bp, Homo sapiens
acatgccaatagact

SEQ ID NO: 1019189 - DNA, 15 bp, Homo sapiens
cacatgccaatagac

SEQ ID NO: 1019190 - DNA, 15 bp, Homo sapiens
tcacatgccaataga

SEQ ID NO: 1019191 - DNA, 15 bp, Homo sapiens
atcacatgccaatag

SEQ ID NO: 1019192 - DNA, 15 bp, Homo sapiens
aatcacatgccaata

SEQ ID NO: 1019193 - DNA, 15 bp, Homo sapiens
caatcacatgccaat

SEQ ID NO: 1019194 - DNA, 15 bp, Homo sapiens
ccaatcacatgccaa

SEQ ID NO: 1019195 - DNA, 15 bp, Homo sapiens
tccaatcacatgcca

SEQ ID NO: 1019196 - DNA, 15 bp, Homo sapiens
ttccaatcacatgcc

SEQ ID NO: 1019197 - DNA, 15 bp, Homo sapiens
attccaatcacatgc

SEQ ID NO: 1019198 - DNA, 15 bp, Homo sapiens
cattccaatcacatg

SEQ ID NO: 1019199 - DNA, 15 bp, Homo sapiens
ccattccaatcacat

SEQ ID NO: 1019200 - DNA, 15 bp, Homo sapiens
cccattccaatcaca

SEQ ID NO: 1019201 - DNA, 15 bp, Homo sapiens
gcccattccaatcac

SEQ ID NO: 1019202 - DNA, 15 bp, Homo sapiens
tgcccattccaatca

SEQ ID NO: 1019203 - DNA, 15 bp, Homo sapiens
gtgcccattccaatc

SEQ ID NO: 1019204 - DNA, 15 bp, Homo sapiens
ggtgcccattccaat

SEQ ID NO: 1019205 - DNA, 15 bp, Homo sapiens
tggtgcccattccaa

SEQ ID NO: 1019206 - DNA, 15 bp, Homo sapiens
gtggtgcccattcca

SEQ ID NO: 1019207 - DNA, 15 bp, Homo sapiens
agtggtgcccattcc

SEQ ID NO: 1019208 - DNA, 15 bp, Homo sapiens
gagtggtgcccattc

SEQ ID NO: 1019209 - DNA, 15 bp, Homo sapiens
ggagtggtgcccatt

SEQ ID NO: 1019210 - DNA, 15 bp, Homo sapiens
aggagtggtgcccat

SEQ ID NO: 1019211 - DNA, 15 bp, Homo sapiens
caggagtggtgccca

SEQ ID NO: 1019212 - DNA, 15 bp, Homo sapiens
tcaggagtggtgccc

SEQ ID NO: 1019213 - DNA, 15 bp, Homo sapiens
ttcaggagtggtgcc

SEQ ID NO: 1019214 - DNA, 15 bp, Homo sapiens
cttcaggagtggtgc

SEQ ID NO: 1019215 - DNA, 15 bp, Homo sapiens
acttcaggagtggtg

SEQ ID NO: 1019216 - DNA, 15 bp, Homo sapiens
cacttcaggagtggt

SEQ ID NO: 1019217 - DNA, 15 bp, Homo sapiens
gcacttcaggagtgg

SEQ ID NO: 1019218 - DNA, 15 bp, Homo sapiens
tgcacttcaggagtg

SEQ ID NO: 1019219 - DNA, 15 bp, Homo sapiens
gtgcacttcaggagt

SEQ ID NO: 1019220 - DNA, 15 bp, Homo sapiens
agtgcacttcaggag

SEQ ID NO: 1019221 - DNA, 15 bp, Homo sapiens
gagtgcacttcagga

SEQ ID NO: 1019222 - DNA, 15 bp, Homo sapiens
tgagtgcacttcagg

SEQ ID NO: 1019223 - DNA, 15 bp, Homo sapiens
ttgagtgcacttcag

SEQ ID NO: 1019224 - DNA, 15 bp, Homo sapiens
attgagtgcacttca

SEQ ID NO: 1019225 - DNA, 15 bp, Homo sapiens
tattgagtgcacttc

SEQ ID NO: 1019226 - DNA, 15 bp, Homo sapiens
atattgagtgcactt

SEQ ID NO: 1019227 - DNA, 15 bp, Homo sapiens
aatattgagtgcact

SEQ ID NO: 1019228 - DNA, 15 bp, Homo sapiens
gaatattgagtgcac

SEQ ID NO: 1019229 - DNA, 15 bp, Homo sapiens
ggaatattgagtgca

SEQ ID NO: 1019230 - DNA, 15 bp, Homo sapiens
aggaatattgagtgc

SEQ ID NO: 1019231 - DNA, 15 bp, Homo sapiens
gaggaatattgagtg

SEQ ID NO: 1019232 - DNA, 15 bp, Homo sapiens
cgaggaatattgagt

SEQ ID NO: 1019233 - DNA, 15 bp, Homo sapiens
tcgaggaatattgag

SEQ ID NO: 1019234 - DNA, 15 bp, Homo sapiens
ttcgaggaatattga

SEQ ID NO: 1019235 - DNA, 15 bp, Homo sapiens
cttcgaggaatattg

SEQ ID NO: 1019236 - DNA, 15 bp, Homo sapiens
ccttcgaggaatatt

SEQ ID NO: 1019237 - DNA, 15 bp, Homo sapiens
accttcgaggaatat

SEQ ID NO: 1019238 - DNA, 15 bp, Homo sapiens
gaccttcgaggaata

SEQ ID NO: 1019239 - DNA, 15 bp, Homo sapiens
tgaccttcgaggaat

SEQ ID NO: 1019240 - DNA, 15 bp, Homo sapiens
gtgaccttcgaggaa

SEQ ID NO: 1019241 - DNA, 15 bp, Homo sapiens
tgtgaccttcgagga

SEQ ID NO: 1019242 - DNA, 15 bp, Homo sapiens
gtgtgaccttcgagg

SEQ ID NO: 1019243 - DNA, 15 bp, Homo sapiens
tgtgtgaccttcgag

SEQ ID NO: 1019244 - DNA, 15 bp, Homo sapiens
atgtgtgaccttcga

SEQ ID NO: 1019245 - DNA, 15 bp, Homo sapiens
aatgtgtgaccttcg

SEQ ID NO: 1019246 - DNA, 15 bp, Homo sapiens
aaatgtgtgaccttc

SEQ ID NO: 1019247 - DNA, 15 bp, Homo sapiens
gaaatgtgtgacctt

SEQ ID NO: 1019248 - DNA, 15 bp, Homo sapiens
agaaatgtgtgacct

SEQ ID NO: 1019249 - DNA, 15 bp, Homo sapiens
aagaaatgtgtgacc

SEQ ID NO: 1019250 - DNA, 15 bp, Homo sapiens
caagaaatgtgtgac

SEQ ID NO: 1019251 - DNA, 15 bp, Homo sapiens
acaagaaatgtgtga

SEQ ID NO: 1019252 - DNA, 15 bp, Homo sapiens
cacaagaaatgtgtg

SEQ ID NO: 1019253 - DNA, 15 bp, Homo sapiens
tcacaagaaatgtgt

SEQ ID NO: 1019254 - DNA, 15 bp, Homo sapiens
ctcacaagaaatgtg

SEQ ID NO: 1019255 - DNA, 15 bp, Homo sapiens
cctcacaagaaatgt

SEQ ID NO: 1019256 - DNA, 15 bp, Homo sapiens
tcctcacaagaaatg

SEQ ID NO: 1019257 - DNA, 15 bp, Homo sapiens
ttcctcacaagaaat

SEQ ID NO: 1019258 - DNA, 15 bp, Homo sapiens
gttcctcacaagaaa

SEQ ID NO: 1019259 - DNA, 15 bp, Homo sapiens
ggttcctcacaagaa

SEQ ID NO: 1019260 - DNA, 15 bp, Homo sapiens
tggttcctcacaaga

SEQ ID NO: 1019261 - DNA, 15 bp, Homo sapiens
atggttcctcacaag

SEQ ID NO: 1019262 - DNA, 15 bp, Homo sapiens
gatggttcctcacaa

SEQ ID NO: 1019263 - DNA, 15 bp, Homo sapiens
cgatggttcctcaca

SEQ ID NO: 1019264 - DNA, 15 bp, Homo sapiens
gcgatggttcctcac

SEQ ID NO: 1019265 - DNA, 15 bp, Homo sapiens
ggcgatggttcctca

SEQ ID NO: 1019266 - DNA, 15 bp, Homo sapiens
tggcgatggttcctc

SEQ ID NO: 1019267 - DNA, 15 bp, Homo sapiens
ctggcgatggttcct

SEQ ID NO: 1019268 - DNA, 15 bp, Homo sapiens
cctggcgatggttcc

SEQ ID NO: 1019269 - DNA, 15 bp, Homo sapiens
gcctggcgatggttc

SEQ ID NO: 1019270 - DNA, 15 bp, Homo sapiens
cgcctggcgatggtt

SEQ ID NO: 1019271 - DNA, 15 bp, Homo sapiens
acgcctggcgatggt

SEQ ID NO: 1019272 - DNA, 15 bp, Homo sapiens
gacgcctggcgatgg

SEQ ID NO: 1019273 - DNA, 15 bp, Homo sapiens
ggacgcctggcgatg

SEQ ID NO: 1019274 - DNA, 15 bp, Homo sapiens
aggacgcctggcgat

SEQ ID NO: 1019275 - DNA, 15 bp, Homo sapiens
aaggacgcctggcga

SEQ ID NO: 1019276 - DNA, 15 bp, Homo sapiens
caaggacgcctggcg

SEQ ID NO: 1019277 - DNA, 15 bp, Homo sapiens
ccaaggacgcctggc

SEQ ID NO: 1019278 - DNA, 15 bp, Homo sapiens
tccaaggacgcctgg

SEQ ID NO: 1019279 - DNA, 15 bp, Homo sapiens
ttccaaggacgcctg

SEQ ID NO: 1019280 - DNA, 15 bp, Homo sapiens
tttccaaggacgcct

SEQ ID NO: 1019281 - DNA, 15 bp, Homo sapiens
atttccaaggacgcc

SEQ ID NO: 1019282 - DNA, 15 bp, Homo sapiens
gatttccaaggacgc

SEQ ID NO: 1019283 - DNA, 15 bp, Homo sapiens
agatttccaaggacg

SEQ ID NO: 1019284 - DNA, 15 bp, Homo sapiens
gagatttccaaggac

SEQ ID NO: 1019285 - DNA, 15 bp, Homo sapiens
cgagatttccaagga

SEQ ID NO: 1019286 - DNA, 15 bp, Homo sapiens
gcgagatttccaagg

SEQ ID NO: 1019287 - DNA, 15 bp, Homo sapiens
ggcgagatttccaag

SEQ ID NO: 1019288 - DNA, 15 bp, Homo sapiens
tggcgagatttccaa

SEQ ID NO: 1019289 - DNA, 15 bp, Homo sapiens
ttggcgagatttcca

SEQ ID NO: 1019290 - DNA, 15 bp, Homo sapiens
attggcgagatttcc

SEQ ID NO: 1019291 - DNA, 15 bp, Homo sapiens
tattggcgagatttc

SEQ ID NO: 1019292 - DNA, 15 bp, Homo sapiens
ttattggcgagattt

SEQ ID NO: 1019293 - DNA, 15 bp, Homo sapiens
gttattggcgagatt

SEQ ID NO: 1019294 - DNA, 15 bp, Homo sapiens
agttattggcgagat

SEQ ID NO: 1019295 - DNA, 15 bp, Homo sapiens
aagttattggcgaga

SEQ ID NO: 1019296 - DNA, 15 bp, Homo sapiens
aaagttattggcgag

SEQ ID NO: 1019297 - DNA, 15 bp, Homo sapiens
gaaagttattggcga

SEQ ID NO: 1019298 - DNA, 15 bp, Homo sapiens
ggaaagttattggcg

SEQ ID NO: 1019299 - DNA, 15 bp, Homo sapiens
aggaaagttattggc

SEQ ID NO: 1019300 - DNA, 15 bp, Homo sapiens
aaggaaagttattgg

SEQ ID NO: 1019301 - DNA, 15 bp, Homo sapiens
taaggaaagttattg

SEQ ID NO: 1019302 - DNA, 15 bp, Homo sapiens
gtaaggaaagttatt

SEQ ID NO: 1019303 - DNA, 15 bp, Homo sapiens
agtaaggaaagttat

SEQ ID NO: 1019304 - DNA, 15 bp, Homo sapiens
cagtaaggaaagtta

SEQ ID NO: 1019305 - DNA, 15 bp, Homo sapiens
gcagtaaggaaagtt

SEQ ID NO: 1019306 - DNA, 15 bp, Homo sapiens
agcagtaaggaaagt

SEQ ID NO: 1019307 - DNA, 15 bp, Homo sapiens
gagcagtaaggaaag

SEQ ID NO: 1019308 - DNA, 15 bp, Homo sapiens
tgagcagtaaggaaa

SEQ ID NO: 1019309 - DNA, 15 bp, Homo sapiens
ttgagcagtaaggaa

SEQ ID NO: 1019310 - DNA, 15 bp, Homo sapiens
tttgagcagtaagga

SEQ ID NO: 1019311 - DNA, 15 bp, Homo sapiens
gtttgagcagtaagg

SEQ ID NO: 1019312 - DNA, 15 bp, Homo sapiens
tgtttgagcagtaag

SEQ ID NO: 1019313 - DNA, 15 bp, Homo sapiens
gtgtttgagcagtaa

SEQ ID NO: 1019314 - DNA, 15 bp, Homo sapiens
agtgtttgagcagta

SEQ ID NO: 1019315 - DNA, 15 bp, Homo sapiens
gagtgtttgagcagt

SEQ ID NO: 1019316 - DNA, 15 bp, Homo sapiens
agagtgtttgagcag

SEQ ID NO: 1019317 - DNA, 15 bp, Homo sapiens
aagagtgtttgagca

SEQ ID NO: 1019318 - DNA, 15 bp, Homo sapiens
caagagtgtttgagc

SEQ ID NO: 1019319 - DNA, 15 bp, Homo sapiens
tcaagagtgtttgag

SEQ ID NO: 1019320 - DNA, 15 bp, Homo sapiens
atcaagagtgtttga

SEQ ID NO: 1019321 - DNA, 15 bp, Homo sapiens
catcaagagtgtttg

SEQ ID NO: 1019322 - DNA, 15 bp, Homo sapiens
ccatcaagagtgttt

SEQ ID NO: 1019323 - DNA, 15 bp, Homo sapiens
tccatcaagagtgtt

SEQ ID NO: 1019324 - DNA, 15 bp, Homo sapiens
gtccatcaagagtgt

SEQ ID NO: 1019325 - DNA, 15 bp, Homo sapiens
ggtccatcaagagtg

SEQ ID NO: 1019326 - DNA, 15 bp, Homo sapiens
aggtccatcaagagt

SEQ ID NO: 1019327 - DNA, 15 bp, Homo sapiens
aaggtccatcaagag

SEQ ID NO: 1019328 - DNA, 15 bp, Homo sapiens
caaggtccatcaaga

SEQ ID NO: 1019329 - DNA, 15 bp, Homo sapiens
ccaaggtccatcaag

SEQ ID NO: 1019330 - DNA, 15 bp, Homo sapiens
tccaaggtccatcaa

SEQ ID NO: 1019331 - DNA, 15 bp, Homo sapiens
gtccaaggtccatca

SEQ ID NO: 1019332 - DNA, 15 bp, Homo sapiens
tgtccaaggtccatc

SEQ ID NO: 1019333 - DNA, 15 bp, Homo sapiens
ctgtccaaggtccat

SEQ ID NO: 1019334 - DNA, 15 bp, Homo sapiens
actgtccaaggtcca

SEQ ID NO: 1019335 - DNA, 15 bp, Homo sapiens
aactgtccaaggtcc

SEQ ID NO: 1019336 - DNA, 15 bp, Homo sapiens
aaactgtccaaggtc

SEQ ID NO: 1019337 - DNA, 15 bp, Homo sapiens
gaaactgtccaaggt

SEQ ID NO: 1019338 - DNA, 15 bp, Homo sapiens
agaaactgtccaagg

SEQ ID NO: 1019339 - DNA, 15 bp, Homo sapiens
tagaaactgtccaag

SEQ ID NO: 1019340 - DNA, 15 bp, Homo sapiens
gtagaaactgtccaa

SEQ ID NO: 1019341 - DNA, 15 bp, Homo sapiens
agtagaaactgtcca

SEQ ID NO: 1019342 - DNA, 15 bp, Homo sapiens
cagtagaaactgtcc

SEQ ID NO: 1019343 - DNA, 15 bp, Homo sapiens
acagtagaaactgtc

SEQ ID NO: 1019344 - DNA, 15 bp, Homo sapiens
aacagtagaaactgt

SEQ ID NO: 1019345 - DNA, 15 bp, Homo sapiens
aaacagtagaaactg

SEQ ID NO: 1019346 - DNA, 15 bp, Homo sapiens
aaaacagtagaaact

SEQ ID NO: 1019347 - DNA, 15 bp, Homo sapiens
caaaacagtagaaac

SEQ ID NO: 1019348 - DNA, 15 bp, Homo sapiens
acaaaacagtagaaa

SEQ ID NO: 1019349 - DNA, 15 bp, Homo sapiens
gacaaaacagtagaa

SEQ ID NO: 1019350 - DNA, 15 bp, Homo sapiens
tgacaaaacagtaga

SEQ ID NO: 1019351 - DNA, 15 bp, Homo sapiens
atgacaaaacagtag

SEQ ID NO: 1019352 - DNA, 15 bp, Homo sapiens
tatgacaaaacagta

SEQ ID NO: 1019353 - DNA, 15 bp, Homo sapiens
atatgacaaaacagt

SEQ ID NO: 1019354 - DNA, 15 bp, Homo sapiens
gatatgacaaaacag

SEQ ID NO: 1019355 - DNA, 15 bp, Homo sapiens
agatatgacaaaaca

SEQ ID NO: 1019356 - DNA, 15 bp, Homo sapiens
gagatatgacaaaac

SEQ ID NO: 1019357 - DNA, 15 bp, Homo sapiens
agagatatgacaaaa

SEQ ID NO: 1019358 - DNA, 15 bp, Homo sapiens
aagagatatgacaaa

SEQ ID NO: 1019359 - DNA, 15 bp, Homo sapiens
gaagagatatgacaa

SEQ ID NO: 1019360 - DNA, 15 bp, Homo sapiens
ggaagagatatgaca

SEQ ID NO: 1019361 - DNA, 15 bp, Homo sapiens
gggaagagatatgac

SEQ ID NO: 1019362 - DNA, 15 bp, Homo sapiens
tgggaagagatatga

SEQ ID NO: 1019363 - DNA, 15 bp, Homo sapiens
gtgggaagagatatg

SEQ ID NO: 1019364 - DNA, 15 bp, Homo sapiens
ggtgggaagagatat

SEQ ID NO: 1019365 - DNA, 15 bp, Homo sapiens
tggtgggaagagata

SEQ ID NO: 1019366 - DNA, 15 bp, Homo sapiens
ttggtgggaagagat

SEQ ID NO: 1019367 - DNA, 15 bp, Homo sapiens
gttggtgggaagaga

SEQ ID NO: 1019368 - DNA, 15 bp, Homo sapiens
tgttggtgggaagag

SEQ ID NO: 1019369 - DNA, 15 bp, Homo sapiens
atgttggtgggaaga

SEQ ID NO: 1019370 - DNA, 15 bp, Homo sapiens
catgttggtgggaag

SEQ ID NO: 1019371 - DNA, 15 bp, Homo sapiens
ccatgttggtgggaa

SEQ ID NO: 1019372 - DNA, 15 bp, Homo sapiens
accatgttggtggga

SEQ ID NO: 1019373 - DNA, 15 bp, Homo sapiens
taccatgttggtggg

SEQ ID NO: 1019374 - DNA, 15 bp, Homo sapiens
ttaccatgttggtgg

SEQ ID NO: 1019375 - DNA, 15 bp, Homo sapiens
attaccatgttggtg

SEQ ID NO: 1019376 - DNA, 15 bp, Homo sapiens
tattaccatgttggt

SEQ ID NO: 1019377 - DNA, 15 bp, Homo sapiens
atattaccatgttgg

SEQ ID NO: 1019378 - DNA, 15 bp, Homo sapiens
gatattaccatgttg

SEQ ID NO: 1019379 - DNA, 15 bp, Homo sapiens
agatattaccatgtt

SEQ ID NO: 1019380 - DNA, 15 bp, Homo sapiens
aagatattaccatgt

SEQ ID NO: 1019381 - DNA, 15 bp, Homo sapiens
caagatattaccatg

SEQ ID NO: 1019382 - DNA, 15 bp, Homo sapiens
ccaagatattaccat

SEQ ID NO: 1019383 - DNA, 15 bp, Homo sapiens
tccaagatattacca

SEQ ID NO: 1019384 - DNA, 15 bp, Homo sapiens
atccaagatattacc

SEQ ID NO: 1019385 - DNA, 15 bp, Homo sapiens
gatccaagatattac

SEQ ID NO: 1019386 - DNA, 15 bp, Homo sapiens
agatccaagatatta

SEQ ID NO: 1019387 - DNA, 15 bp, Homo sapiens
aagatccaagatatt

SEQ ID NO: 1019388 - DNA, 15 bp, Homo sapiens
aaagatccaagatat

SEQ ID NO: 1019389 - DNA, 15 bp, Homo sapiens
taaagatccaagata

SEQ ID NO: 1019390 - DNA, 15 bp, Homo sapiens
ttaaagatccaagat

SEQ ID NO: 1019391 - DNA, 15 bp, Homo sapiens
tttaaagatccaaga

SEQ ID NO: 1019392 - DNA, 15 bp, Homo sapiens
ttttaaagatccaag

SEQ ID NO: 1019393 - DNA, 15 bp, Homo sapiens
attttaaagatccaa

SEQ ID NO: 1019394 - DNA, 15 bp, Homo sapiens
cattttaaagatcca

SEQ ID NO: 1019395 - DNA, 15 bp, Homo sapiens
tcattttaaagatcc

SEQ ID NO: 1019396 - DNA, 15 bp, Homo sapiens
ttcattttaaagatc

SEQ ID NO: 1019397 - DNA, 15 bp, Homo sapiens
attcattttaaagat

SEQ ID NO: 1019398 - DNA, 15 bp, Homo sapiens
tattcattttaaaga

SEQ ID NO: 1019399 - DNA, 15 bp, Homo sapiens
atattcattttaaag

SEQ ID NO: 1019400 - DNA, 15 bp, Homo sapiens
aatattcattttaaa

SEQ ID NO: 1019401 - DNA, 15 bp, Homo sapiens
taatattcattttaa

SEQ ID NO: 1019402 - DNA, 15 bp, Homo sapiens
ataatattcatttta

SEQ ID NO: 1019403 - DNA, 15 bp, Homo sapiens
tataatattcatttt

SEQ ID NO: 1019404 - DNA, 15 bp, Homo sapiens
ttataatattcattt

SEQ ID NO: 1019405 - DNA, 15 bp, Homo sapiens
tttataatattcatt

SEQ ID NO: 1019406 - DNA, 15 bp, Homo sapiens
atttataatattcat

SEQ ID NO: 1019407 - DNA, 15 bp, Homo sapiens
tatttataatattca

SEQ ID NO: 1019408 - DNA, 15 bp, Homo sapiens
atatttataatattc

SEQ ID NO: 1019409 - DNA, 15 bp, Homo sapiens
gatatttataatatt

SEQ ID NO: 1019410 - DNA, 15 bp, Homo sapiens
ggatatttataatat

SEQ ID NO: 1019411 - DNA, 15 bp, Homo sapiens
tggatatttataata

SEQ ID NO: 1019412 - DNA, 15 bp, Homo sapiens
ctggatatttataat

SEQ ID NO: 1019413 - DNA, 15 bp, Homo sapiens
actggatatttataa

SEQ ID NO: 1019414 - DNA, 15 bp, Homo sapiens
gactggatatttata

SEQ ID NO: 1019415 - DNA, 15 bp, Homo sapiens
ggactggatatttat

SEQ ID NO: 1019416 - DNA, 15 bp, Homo sapiens
aggactggatattta

SEQ ID NO: 1019417 - DNA, 15 bp, Homo sapiens
taggactggatattt

SEQ ID NO: 1019418 - DNA, 15 bp, Homo sapiens
gtaggactggatatt

SEQ ID NO: 1019419 - DNA, 15 bp, Homo sapiens
agtaggactggatat

SEQ ID NO: 1019420 - DNA, 15 bp, Homo sapiens
aagtaggactggata

SEQ ID NO: 1019421 - DNA, 15 bp, Homo sapiens
aaagtaggactggat

SEQ ID NO: 1019422 - DNA, 15 bp, Homo sapiens
aaaagtaggactgga

SEQ ID NO: 1019423 - DNA, 15 bp, Homo sapiens
taaaagtaggactgg

SEQ ID NO: 1019424 - DNA, 15 bp, Homo sapiens
ttaaaagtaggactg

SEQ ID NO: 1019425 - DNA, 15 bp, Homo sapiens
attaaaagtaggact

SEQ ID NO: 1019426 - DNA, 15 bp, Homo sapiens
tattaaaagtaggac

SEQ ID NO: 1019427 - DNA, 15 bp, Homo sapiens
ttattaaaagtagga

SEQ ID NO: 1019428 - DNA, 15 bp, Homo sapiens
tttattaaaagtagg

SEQ ID NO: 1019429 - DNA, 15 bp, Homo sapiens
ttttattaaaagtag

SEQ ID NO: 1019430 - DNA, 15 bp, Homo sapiens
attttattaaaagta

SEQ ID NO: 1019431 - DNA, 15 bp, Homo sapiens
aattttattaaaagt

SEQ ID NO: 1019432 - DNA, 15 bp, Homo sapiens
aaattttattaaaag

SEQ ID NO: 1019433 - DNA, 15 bp, Homo sapiens
taaattttattaaaa

SEQ ID NO: 1019434 - DNA, 15 bp, Homo sapiens
gtaaattttattaaa

SEQ ID NO: 1019435 - DNA, 15 bp, Homo sapiens
agtaaattttattaa

SEQ ID NO: 1019436 - DNA, 15 bp, Homo sapiens
cagtaaattttatta

SEQ ID NO: 1019437 - DNA, 15 bp, Homo sapiens
ccagtaaattttatt

SEQ ID NO: 1019438 - DNA, 15 bp, Homo sapiens
tccagtaaattttat

SEQ ID NO: 1019439 - DNA, 15 bp, Homo sapiens
gtccagtaaatttta

SEQ ID NO: 1019440 - DNA, 15 bp, Homo sapiens
tgtccagtaaatttt

SEQ ID NO: 1019441 - DNA, 15 bp, Homo sapiens
ttgtccagtaaattt

SEQ ID NO: 1019442 - DNA, 15 bp, Homo sapiens
attgtccagtaaatt

SEQ ID NO: 1019443 - DNA, 15 bp, Homo sapiens
cattgtccagtaaat

SEQ ID NO: 1019444 - DNA, 15 bp, Homo sapiens
acattgtccagtaaa

SEQ ID NO: 1019445 - DNA, 15 bp, Homo sapiens
tacattgtccagtaa

SEQ ID NO: 1019446 - DNA, 15 bp, Homo sapiens
gtacattgtccagta

SEQ ID NO: 1019447 - DNA, 15 bp, Homo sapiens
tgtacattgtccagt

SEQ ID NO: 1019448 - DNA, 15 bp, Homo sapiens
ctgtacattgtccag

SEQ ID NO: 1019449 - DNA, 15 bp, Homo sapiens
cctgtacattgtcca

SEQ ID NO: 1019450 - DNA, 15 bp, Homo sapiens
tcctgtacattgtcc

SEQ ID NO: 1019451 - DNA, 15 bp, Homo sapiens
ttcctgtacattgtc

SEQ ID NO: 1019452 - DNA, 15 bp, Homo sapiens
attcctgtacattgt

SEQ ID NO: 1019453 - DNA, 15 bp, Homo sapiens
tattcctgtacattg

SEQ ID NO: 1019454 - DNA, 15 bp, Homo sapiens
atattcctgtacatt

SEQ ID NO: 1019455 - DNA, 15 bp, Homo sapiens
tatattcctgtacat

SEQ ID NO: 1019456 - DNA, 15 bp, Homo sapiens
ctatattcctgtaca

SEQ ID NO: 1019457 - DNA, 15 bp, Homo sapiens
actatattcctgtac

SEQ ID NO: 1019458 - DNA, 15 bp, Homo sapiens
cactatattcctgta

SEQ ID NO: 1019459 - DNA, 15 bp, Homo sapiens
acactatattcctgt

SEQ ID NO: 1019460 - DNA, 15 bp, Homo sapiens
cacactatattcctg

SEQ ID NO: 1019461 - DNA, 15 bp, Homo sapiens
acacactatattcct

SEQ ID NO: 1019462 - DNA, 15 bp, Homo sapiens
aacacactatattcc

SEQ ID NO: 1019463 - DNA, 15 bp, Homo sapiens
caacacactatattc

SEQ ID NO: 1019464 - DNA, 15 bp, Homo sapiens
gcaacacactatatt

SEQ ID NO: 1019465 - DNA, 15 bp, Homo sapiens
agcaacacactatat

SEQ ID NO: 1019466 - DNA, 15 bp, Homo sapiens
cagcaacacactata

SEQ ID NO: 1019467 - DNA, 15 bp, Homo sapiens
tcagcaacacactat

SEQ ID NO: 1019468 - DNA, 15 bp, Homo sapiens
ttcagcaacacacta

SEQ ID NO: 1019469 - DNA, 15 bp, Homo sapiens
cttcagcaacacact

SEQ ID NO: 1019470 - DNA, 15 bp, Homo sapiens
ccttcagcaacacac

SEQ ID NO: 1019471 - DNA, 15 bp, Homo sapiens
cccttcagcaacaca

SEQ ID NO: 1019472 - DNA, 15 bp, Homo sapiens
ccccttcagcaacac

SEQ ID NO: 1019473 - DNA, 15 bp, Homo sapiens
tccccttcagcaaca

SEQ ID NO: 1019474 - DNA, 15 bp, Homo sapiens
gtccccttcagcaac

SEQ ID NO: 1019475 - DNA, 15 bp, Homo sapiens
tgtccccttcagcaa

SEQ ID NO: 1019476 - DNA, 15 bp, Homo sapiens
atgtccccttcagca

SEQ ID NO: 1019477 - DNA, 15 bp, Homo sapiens
aatgtccccttcagc

SEQ ID NO: 1019478 - DNA, 15 bp, Homo sapiens
taatgtccccttcag

SEQ ID NO: 1019479 - DNA, 15 bp, Homo sapiens
ataatgtccccttca

SEQ ID NO: 1019480 - DNA, 15 bp, Homo sapiens
tataatgtccccttc

SEQ ID NO: 1019481 - DNA, 15 bp, Homo sapiens
ctataatgtcccctt

SEQ ID NO: 1019482 - DNA, 15 bp, Homo sapiens
tctataatgtcccct

SEQ ID NO: 1019483 - DNA, 15 bp, Homo sapiens
ctctataatgtcccc

SEQ ID NO: 1019484 - DNA, 15 bp, Homo sapiens
actctataatgtccc

SEQ ID NO: 1019485 - DNA, 15 bp, Homo sapiens
aactctataatgtcc

SEQ ID NO: 1019486 - DNA, 15 bp, Homo sapiens
taactctataatgtc

SEQ ID NO: 1019487 - DNA, 15 bp, Homo sapiens
gtaactctataatgt

SEQ ID NO: 1019488 - DNA, 15 bp, Homo sapiens
agtaactctataatg

SEQ ID NO: 1019489 - DNA, 15 bp, Homo sapiens
cagtaactctataat

SEQ ID NO: 1019490 - DNA, 15 bp, Homo sapiens
acagtaactctataa

SEQ ID NO: 1019491 - DNA, 15 bp, Homo sapiens
tacagtaactctata

SEQ ID NO: 1019492 - DNA, 15 bp, Homo sapiens
atacagtaactctat

SEQ ID NO: 1019493 - DNA, 15 bp, Homo sapiens
aatacagtaactcta

SEQ ID NO: 1019494 - DNA, 15 bp, Homo sapiens
taatacagtaactct

SEQ ID NO: 1019495 - DNA, 15 bp, Homo sapiens
ctaatacagtaactc

SEQ ID NO: 1019496 - DNA, 15 bp, Homo sapiens
tctaatacagtaact

SEQ ID NO: 1019497 - DNA, 15 bp, Homo sapiens
gtctaatacagtaac

SEQ ID NO: 1019498 - DNA, 15 bp, Homo sapiens
ggtctaatacagtaa

SEQ ID NO: 1019499 - DNA, 15 bp, Homo sapiens
aggtctaatacagta

SEQ ID NO: 1019500 - DNA, 15 bp, Homo sapiens
gaggtctaatacagt

SEQ ID NO: 1019501 - DNA, 15 bp, Homo sapiens
tgaggtctaatacag

SEQ ID NO: 1019502 - DNA, 15 bp, Homo sapiens
ctgaggtctaataca

SEQ ID NO: 1019503 - DNA, 15 bp, Homo sapiens
gctgaggtctaatac

SEQ ID NO: 1019504 - DNA, 15 bp, Homo sapiens
ggctgaggtctaata

SEQ ID NO: 1019505 - DNA, 15 bp, Homo sapiens
tggctgaggtctaat

SEQ ID NO: 1019506 - DNA, 15 bp, Homo sapiens
ttggctgaggtctaa

SEQ ID NO: 1019507 - DNA, 15 bp, Homo sapiens
cttggctgaggtcta

SEQ ID NO: 1019508 - DNA, 15 bp, Homo sapiens
tcttggctgaggtct

SEQ ID NO: 1019509 - DNA, 15 bp, Homo sapiens
atcttggctgaggtc

SEQ ID NO: 1019510 - DNA, 15 bp, Homo sapiens
gatcttggctgaggt

SEQ ID NO: 1019511 - DNA, 15 bp, Homo sapiens
ggatcttggctgagg

SEQ ID NO: 1019512 - DNA, 15 bp, Homo sapiens
gggatcttggctgag

SEQ ID NO: 1019513 - DNA, 15 bp, Homo sapiens
ggggatcttggctga

SEQ ID NO: 1019514 - DNA, 15 bp, Homo sapiens
aggggatcttggctg

SEQ ID NO: 1019515 - DNA, 15 bp, Homo sapiens
taggggatcttggct

SEQ ID NO: 1019516 - DNA, 15 bp, Homo sapiens
ctaggggatcttggc

SEQ ID NO: 1019517 - DNA, 15 bp, Homo sapiens
actaggggatcttgg

SEQ ID NO: 1019518 - DNA, 15 bp, Homo sapiens
aactaggggatcttg

SEQ ID NO: 1019519 - DNA, 15 bp, Homo sapiens
aaactaggggatctt

SEQ ID NO: 1019520 - DNA, 15 bp, Homo sapiens
gaaactaggggatct

SEQ ID NO: 1019521 - DNA, 15 bp, Homo sapiens
ggaaactaggggatc

SEQ ID NO: 1019522 - DNA, 15 bp, Homo sapiens
tggaaactaggggat

SEQ ID NO: 1019523 - DNA, 15 bp, Homo sapiens
ctggaaactagggga

SEQ ID NO: 1019524 - DNA, 15 bp, Homo sapiens
gctggaaactagggg

SEQ ID NO: 1019525 - DNA, 15 bp, Homo sapiens
agctggaaactaggg

SEQ ID NO: 1019526 - DNA, 15 bp, Homo sapiens
aagctggaaactagg

SEQ ID NO: 1019527 - DNA, 15 bp, Homo sapiens
gaagctggaaactag

SEQ ID NO: 1019528 - DNA, 15 bp, Homo sapiens
ggaagctggaaacta

SEQ ID NO: 1019529 - DNA, 15 bp, Homo sapiens
tggaagctggaaact

SEQ ID NO: 1019530 - DNA, 15 bp, Homo sapiens
ctggaagctggaaac

SEQ ID NO: 1019531 - DNA, 15 bp, Homo sapiens
actggaagctggaaa

SEQ ID NO: 1019532 - DNA, 15 bp, Homo sapiens
cactggaagctggaa

SEQ ID NO: 1019533 - DNA, 15 bp, Homo sapiens
acactggaagctgga

SEQ ID NO: 1019534 - DNA, 15 bp, Homo sapiens
tacactggaagctgg

SEQ ID NO: 1019535 - DNA, 15 bp, Homo sapiens
ttacactggaagctg

SEQ ID NO: 1019536 - DNA, 15 bp, Homo sapiens
tttacactggaagct

SEQ ID NO: 1019537 - DNA, 15 bp, Homo sapiens
ctttacactggaagc

SEQ ID NO: 1019538 - DNA, 15 bp, Homo sapiens
actttacactggaag

SEQ ID NO: 1019539 - DNA, 15 bp, Homo sapiens
aactttacactggaa

SEQ ID NO: 1019540 - DNA, 15 bp, Homo sapiens
aaactttacactgga

SEQ ID NO: 1019541 - DNA, 15 bp, Homo sapiens
aaaactttacactgg

SEQ ID NO: 1019542 - DNA, 15 bp, Homo sapiens
aaaaactttacactg

SEQ ID NO: 1019543 - DNA, 15 bp, Homo sapiens
taaaaactttacact

SEQ ID NO: 1019544 - DNA, 15 bp, Homo sapiens
gtaaaaactttacac

SEQ ID NO: 1019545 - DNA, 15 bp, Homo sapiens
ggtaaaaactttaca

SEQ ID NO: 1019546 - DNA, 15 bp, Homo sapiens
aggtaaaaactttac

SEQ ID NO: 1019547 - DNA, 15 bp, Homo sapiens
aaggtaaaaacttta

SEQ ID NO: 1019548 - DNA, 15 bp, Homo sapiens
caaggtaaaaacttt

SEQ ID NO: 1019549 - DNA, 15 bp, Homo sapiens
tcaaggtaaaaactt

SEQ ID NO: 1019550 - DNA, 15 bp, Homo sapiens
gtcaaggtaaaaact

SEQ ID NO: 1019551 - DNA, 15 bp, Homo sapiens
agtcaaggtaaaaac

SEQ ID NO: 1019552 - DNA, 15 bp, Homo sapiens
tagtcaaggtaaaaa

SEQ ID NO: 1019553 - DNA, 15 bp, Homo sapiens
atagtcaaggtaaaa

SEQ ID NO: 1019554 - DNA, 15 bp, Homo sapiens
tatagtcaaggtaaa

SEQ ID NO: 1019555 - DNA, 15 bp, Homo sapiens
ttatagtcaaggtaa

SEQ ID NO: 1019556 - DNA, 15 bp, Homo sapiens
tttatagtcaaggta

SEQ ID NO: 1019557 - DNA, 15 bp, Homo sapiens
ttttatagtcaaggt

SEQ ID NO: 1019558 - DNA, 15 bp, Homo sapiens
cttttatagtcaagg

SEQ ID NO: 1019559 - DNA, 15 bp, Homo sapiens
ccttttatagtcaag

SEQ ID NO: 1019560 - DNA, 15 bp, Homo sapiens
cccttttatagtcaa

SEQ ID NO: 1019561 - DNA, 15 bp, Homo sapiens
gcccttttatagtca

SEQ ID NO: 1019562 - DNA, 15 bp, Homo sapiens
agcccttttatagtc

SEQ ID NO: 1019563 - DNA, 15 bp, Homo sapiens
aagcccttttatagt

SEQ ID NO: 1019564 - DNA, 15 bp, Homo sapiens
caagcccttttatag

SEQ ID NO: 1019565 - DNA, 15 bp, Homo sapiens
tcaagcccttttata

SEQ ID NO: 1019566 - DNA, 15 bp, Homo sapiens
ctcaagcccttttat

SEQ ID NO: 1019567 - DNA, 15 bp, Homo sapiens
actcaagccctttta

SEQ ID NO: 1019568 - DNA, 15 bp, Homo sapiens
tactcaagccctttt

SEQ ID NO: 1019569 - DNA, 15 bp, Homo sapiens
atactcaagcccttt

SEQ ID NO: 1019570 - DNA, 15 bp, Homo sapiens
aatactcaagccctt

SEQ ID NO: 1019571 - DNA, 15 bp, Homo sapiens
taatactcaagccct

SEQ ID NO: 1019572 - DNA, 15 bp, Homo sapiens
ctaatactcaagccc

SEQ ID NO: 1019573 - DNA, 15 bp, Homo sapiens
actaatactcaagcc

SEQ ID NO: 1019574 - DNA, 15 bp, Homo sapiens
tactaatactcaagc

SEQ ID NO: 1019575 - DNA, 15 bp, Homo sapiens
ctactaatactcaag

SEQ ID NO: 1019576 - DNA, 15 bp, Homo sapiens
cctactaatactcaa

SEQ ID NO: 1019577 - DNA, 15 bp, Homo sapiens
tcctactaatactca

SEQ ID NO: 1019578 - DNA, 15 bp, Homo sapiens
gtcctactaatactc

SEQ ID NO: 1019579 - DNA, 15 bp, Homo sapiens
agtcctactaatact

SEQ ID NO: 1019580 - DNA, 15 bp, Homo sapiens
gagtcctactaatac

SEQ ID NO: 1019581 - DNA, 15 bp, Homo sapiens
tgagtcctactaata

SEQ ID NO: 1019582 - DNA, 15 bp, Homo sapiens
atgagtcctactaat

SEQ ID NO: 1019583 - DNA, 15 bp, Homo sapiens
catgagtcctactaa

SEQ ID NO: 1019584 - DNA, 15 bp, Homo sapiens
ccatgagtcctacta

SEQ ID NO: 1019585 - DNA, 15 bp, Homo sapiens
tccatgagtcctact

SEQ ID NO: 1019586 - DNA, 15 bp, Homo sapiens
atccatgagtcctac

SEQ ID NO: 1019587 - DNA, 15 bp, Homo sapiens
aatccatgagtccta

SEQ ID NO: 1019588 - DNA, 15 bp, Homo sapiens
aaatccatgagtcct

SEQ ID NO: 1019589 - DNA, 15 bp, Homo sapiens
aaaatccatgagtcc

SEQ ID NO: 1019590 - DNA, 15 bp, Homo sapiens
aaaaatccatgagtc

SEQ ID NO: 1019591 - DNA, 15 bp, Homo sapiens
taaaaatccatgagt

SEQ ID NO: 1019592 - DNA, 15 bp, Homo sapiens
ctaaaaatccatgag

SEQ ID NO: 1019593 - DNA, 15 bp, Homo sapiens
actaaaaatccatga

SEQ ID NO: 1019594 - DNA, 15 bp, Homo sapiens
aactaaaaatccatg

SEQ ID NO: 1019595 - DNA, 15 bp, Homo sapiens
taactaaaaatccat

SEQ ID NO: 1019596 - DNA, 15 bp, Homo sapiens
ttaactaaaaatcca

SEQ ID NO: 1019597 - DNA, 15 bp, Homo sapiens
tttaactaaaaatcc

SEQ ID NO: 1019598 - DNA, 15 bp, Homo sapiens
atttaactaaaaatc

SEQ ID NO: 1019599 - DNA, 15 bp, Homo sapiens
catttaactaaaaat

SEQ ID NO: 1019600 - DNA, 15 bp, Homo sapiens
acatttaactaaaaa

SEQ ID NO: 1019601 - DNA, 15 bp, Homo sapiens
gacatttaactaaaa

SEQ ID NO: 1019602 - DNA, 15 bp, Homo sapiens
agacatttaactaaa

SEQ ID NO: 1019603 - DNA, 15 bp, Homo sapiens
cagacatttaactaa

SEQ ID NO: 1019604 - DNA, 15 bp, Homo sapiens
acagacatttaacta

SEQ ID NO: 1019605 - DNA, 15 bp, Homo sapiens
cacagacatttaact

SEQ ID NO: 1019606 - DNA, 15 bp, Homo sapiens
tcacagacatttaac

SEQ ID NO: 1019607 - DNA, 15 bp, Homo sapiens
atcacagacatttaa

SEQ ID NO: 1019608 - DNA, 15 bp, Homo sapiens
catcacagacattta

SEQ ID NO: 1019609 - DNA, 15 bp, Homo sapiens
ccatcacagacattt

SEQ ID NO: 1019610 - DNA, 15 bp, Homo sapiens
tccatcacagacatt

SEQ ID NO: 1019611 - DNA, 15 bp, Homo sapiens
ctccatcacagacat

SEQ ID NO: 1019612 - DNA, 15 bp, Homo sapiens
tctccatcacagaca

SEQ ID NO: 1019613 - DNA, 15 bp, Homo sapiens
ttctccatcacagac

SEQ ID NO: 1019614 - DNA, 15 bp, Homo sapiens
tttctccatcacaga

SEQ ID NO: 1019615 - DNA, 15 bp, Homo sapiens
ttttctccatcacag

SEQ ID NO: 1019616 - DNA, 15 bp, Homo sapiens
cttttctccatcaca

SEQ ID NO: 1019617 - DNA, 15 bp, Homo sapiens
tcttttctccatcac

SEQ ID NO: 1019618 - DNA, 15 bp, Homo sapiens
atcttttctccatca

SEQ ID NO: 1019619 - DNA, 15 bp, Homo sapiens
catcttttctccatc

SEQ ID NO: 1019620 - DNA, 15 bp, Homo sapiens
ccatcttttctccat

SEQ ID NO: 1019621 - DNA, 15 bp, Homo sapiens
gccatcttttctcca

SEQ ID NO: 1019622 - DNA, 15 bp, Homo sapiens
agccatcttttctcc

SEQ ID NO: 1019623 - DNA, 15 bp, Homo sapiens
aagccatcttttctc

SEQ ID NO: 1019624 - DNA, 15 bp, Homo sapiens
taagccatcttttct

SEQ ID NO: 1019625 - DNA, 15 bp, Homo sapiens
ataagccatcttttc

SEQ ID NO: 1019626 - DNA, 15 bp, Homo sapiens
cataagccatctttt

SEQ ID NO: 1019627 - DNA, 15 bp, Homo sapiens
ccataagccatcttt

SEQ ID NO: 1019628 - DNA, 15 bp, Homo sapiens
tccataagccatctt

SEQ ID NO: 1019629 - DNA, 15 bp, Homo sapiens
atccataagccatct

SEQ ID NO: 1019630 - DNA, 15 bp, Homo sapiens
catccataagccatc

SEQ ID NO: 1019631 - DNA, 15 bp, Homo sapiens
tcatccataagccat

SEQ ID NO: 1019632 - DNA, 15 bp, Homo sapiens
atcatccataagcca

SEQ ID NO: 1019633 - DNA, 15 bp, Homo sapiens
aatcatccataagcc

SEQ ID NO: 1019634 - DNA, 15 bp, Homo sapiens
caatcatccataagc

SEQ ID NO: 1019635 - DNA, 15 bp, Homo sapiens
tcaatcatccataag

SEQ ID NO: 1019636 - DNA, 15 bp, Homo sapiens
ctcaatcatccataa

SEQ ID NO: 1019637 - DNA, 15 bp, Homo sapiens
cctcaatcatccata

SEQ ID NO: 1019638 - DNA, 15 bp, Homo sapiens
acctcaatcatccat

SEQ ID NO: 1019639 - DNA, 15 bp, Homo sapiens
cacctcaatcatcca

SEQ ID NO: 1019640 - DNA, 15 bp, Homo sapiens
ccacctcaatcatcc

SEQ ID NO: 1019641 - DNA, 15 bp, Homo sapiens
cccacctcaatcatc

SEQ ID NO: 1019642 - DNA, 15 bp, Homo sapiens
tcccacctcaatcat

SEQ ID NO: 1019643 - DNA, 15 bp, Homo sapiens
ttcccacctcaatca

SEQ ID NO: 1019644 - DNA, 15 bp, Homo sapiens
tttcccacctcaatc

SEQ ID NO: 1019645 - DNA, 15 bp, Homo sapiens
ttttcccacctcaat

SEQ ID NO: 1019646 - DNA, 15 bp, Homo sapiens
attttcccacctcaa

SEQ ID NO: 1019647 - DNA, 15 bp, Homo sapiens
cattttcccacctca

SEQ ID NO: 1019648 - DNA, 15 bp, Homo sapiens
tcattttcccacctc

SEQ ID NO: 1019649 - DNA, 15 bp, Homo sapiens
ctcattttcccacct

SEQ ID NO: 1019650 - DNA, 15 bp, Homo sapiens
cctcattttcccacc

SEQ ID NO: 1019651 - DNA, 15 bp, Homo sapiens
tcctcattttcccac

SEQ ID NO: 1019652 - DNA, 15 bp, Homo sapiens
ctcctcattttccca

SEQ ID NO: 1019653 - DNA, 15 bp, Homo sapiens
tctcctcattttccc

SEQ ID NO: 1019654 - DNA, 15 bp, Homo sapiens
ttctcctcattttcc

SEQ ID NO: 1019655 - DNA, 15 bp, Homo sapiens
attctcctcattttc

SEQ ID NO: 1019656 - DNA, 15 bp, Homo sapiens
tattctcctcatttt

SEQ ID NO: 1019657 - DNA, 15 bp, Homo sapiens
ctattctcctcattt

SEQ ID NO: 1019658 - DNA, 15 bp, Homo sapiens
actattctcctcatt

SEQ ID NO: 1019659 - DNA, 15 bp, Homo sapiens
tactattctcctcat

SEQ ID NO: 1019660 - DNA, 15 bp, Homo sapiens
atactattctcctca

SEQ ID NO: 1019661 - DNA, 15 bp, Homo sapiens
catactattctcctc

SEQ ID NO: 1019662 - DNA, 15 bp, Homo sapiens
gcatactattctcct

SEQ ID NO: 1019663 - DNA, 15 bp, Homo sapiens
ggcatactattctcc

SEQ ID NO: 1019664 - DNA, 15 bp, Homo sapiens
gggcatactattctc

SEQ ID NO: 1019665 - DNA, 15 bp, Homo sapiens
agggcatactattct

SEQ ID NO: 1019666 - DNA, 15 bp, Homo sapiens
aagggcatactattc

SEQ ID NO: 1019667 - DNA, 15 bp, Homo sapiens
caagggcatactatt

SEQ ID NO: 1019668 - DNA, 15 bp, Homo sapiens
ccaagggcatactat

SEQ ID NO: 1019669 - DNA, 15 bp, Homo sapiens
accaagggcatacta

SEQ ID NO: 1019670 - DNA, 15 bp, Homo sapiens
aaccaagggcatact

SEQ ID NO: 1019671 - DNA, 15 bp, Homo sapiens
aaaccaagggcatac

SEQ ID NO: 1019672 - DNA, 15 bp, Homo sapiens
gaaaccaagggcata

SEQ ID NO: 1019673 - DNA, 15 bp, Homo sapiens
agaaaccaagggcat

SEQ ID NO: 1019674 - DNA, 15 bp, Homo sapiens
gagaaaccaagggca

SEQ ID NO: 1019675 - DNA, 15 bp, Homo sapiens
tgagaaaccaagggc

SEQ ID NO: 1019676 - DNA, 15 bp, Homo sapiens
ctgagaaaccaaggg

SEQ ID NO: 1019677 - DNA, 15 bp, Homo sapiens
gctgagaaaccaagg

SEQ ID NO: 1019678 - DNA, 15 bp, Homo sapiens
ggctgagaaaccaag

SEQ ID NO: 1019679 - DNA, 15 bp, Homo sapiens
aggctgagaaaccaa

SEQ ID NO: 1019680 - DNA, 15 bp, Homo sapiens
aaggctgagaaacca

SEQ ID NO: 1019681 - DNA, 15 bp, Homo sapiens
taaggctgagaaacc

SEQ ID NO: 1019682 - DNA, 15 bp, Homo sapiens
ataaggctgagaaac

SEQ ID NO: 1019683 - DNA, 15 bp, Homo sapiens
gataaggctgagaaa

SEQ ID NO: 1019684 - DNA, 15 bp, Homo sapiens
ggataaggctgagaa

SEQ ID NO: 1019685 - DNA, 15 bp, Homo sapiens
gggataaggctgaga

SEQ ID NO: 1019686 - DNA, 15 bp, Homo sapiens
tgggataaggctgag

SEQ ID NO: 1019687 - DNA, 15 bp, Homo sapiens
atgggataaggctga

SEQ ID NO: 1019688 - DNA, 15 bp, Homo sapiens
aatgggataaggctg

SEQ ID NO: 1019689 - DNA, 15 bp, Homo sapiens
taatgggataaggct

SEQ ID NO: 1019690 - DNA, 15 bp, Homo sapiens
ttaatgggataaggc

SEQ ID NO: 1019691 - DNA, 15 bp, Homo sapiens
attaatgggataagg

SEQ ID NO: 1019692 - DNA, 15 bp, Homo sapiens
aattaatgggataag

SEQ ID NO: 1019693 - DNA, 15 bp, Homo sapiens
taattaatgggataa

SEQ ID NO: 1019694 - DNA, 15 bp, Homo sapiens
gtaattaatgggata

SEQ ID NO: 1019695 - DNA, 15 bp, Homo sapiens
cgtaattaatgggat

SEQ ID NO: 1019696 - DNA, 15 bp, Homo sapiens
gcgtaattaatggga

SEQ ID NO: 1019697 - DNA, 15 bp, Homo sapiens
agcgtaattaatggg

SEQ ID NO: 1019698 - DNA, 15 bp, Homo sapiens
gagcgtaattaatgg

SEQ ID NO: 1019699 - DNA, 15 bp, Homo sapiens
ggagcgtaattaatg

SEQ ID NO: 1019700 - DNA, 15 bp, Homo sapiens
tggagcgtaattaat

SEQ ID NO: 1019701 - DNA, 15 bp, Homo sapiens
ttggagcgtaattaa

SEQ ID NO: 1019702 - DNA, 15 bp, Homo sapiens
attggagcgtaatta

SEQ ID NO: 1019703 - DNA, 15 bp, Homo sapiens
tattggagcgtaatt

SEQ ID NO: 1019704 - DNA, 15 bp, Homo sapiens
atattggagcgtaat

SEQ ID NO: 1019705 - DNA, 15 bp, Homo sapiens
aatattggagcgtaa

SEQ ID NO: 1019706 - DNA, 15 bp, Homo sapiens
taatattggagcgta

SEQ ID NO: 1019707 - DNA, 15 bp, Homo sapiens
ataatattggagcgt

SEQ ID NO: 1019708 - DNA, 15 bp, Homo sapiens
cataatattggagcg

SEQ ID NO: 1019709 - DNA, 15 bp, Homo sapiens
ccataatattggagc

SEQ ID NO: 1019710 - DNA, 15 bp, Homo sapiens
tccataatattggag

SEQ ID NO: 1019711 - DNA, 15 bp, Homo sapiens
ctccataatattgga

SEQ ID NO: 1019712 - DNA, 15 bp, Homo sapiens
tctccataatattgg

SEQ ID NO: 1019713 - DNA, 15 bp, Homo sapiens
ctctccataatattg

SEQ ID NO: 1019714 - DNA, 15 bp, Homo sapiens
tctctccataatatt

SEQ ID NO: 1019715 - DNA, 15 bp, Homo sapiens
ctctctccataatat

SEQ ID NO: 1019716 - DNA, 15 bp, Homo sapiens
cctctctccataata

SEQ ID NO: 1019717 - DNA, 15 bp, Homo sapiens
tcctctctccataat

SEQ ID NO: 1019718 - DNA, 15 bp, Homo sapiens
ttcctctctccataa

SEQ ID NO: 1019719 - DNA, 15 bp, Homo sapiens
gttcctctctccata

SEQ ID NO: 1019720 - DNA, 15 bp, Homo sapiens
agttcctctctccat

SEQ ID NO: 1019721 - DNA, 15 bp, Homo sapiens
gcagttcctctctcc

SEQ ID NO: 1019722 - DNA, 15 bp, Homo sapiens
tgcagttcctctctc

SEQ ID NO: 1019723 - DNA, 15 bp, Homo sapiens
ttgcagttcctctct

SEQ ID NO: 1019724 - DNA, 15 bp, Homo sapiens
cttgcagttcctctc

SEQ ID NO: 1019725 - DNA, 15 bp, Homo sapiens
acttgcagttcctct

SEQ ID NO: 1019726 - DNA, 15 bp, Homo sapiens
aacttgcagttcctc

SEQ ID NO: 1019727 - DNA, 15 bp, Homo sapiens
caacttgcagttcct

SEQ ID NO: 1019728 - DNA, 15 bp, Homo sapiens
acaacttgcagttcc

SEQ ID NO: 1019729 - DNA, 15 bp, Homo sapiens
tacaacttgcagttc

SEQ ID NO: 1019730 - DNA, 15 bp, Homo sapiens
ctacaacttgcagtt

SEQ ID NO: 1019731 - DNA, 15 bp, Homo sapiens
gctacaacttgcagt

SEQ ID NO: 1019732 - DNA, 15 bp, Homo sapiens
agctacaacttgcag

SEQ ID NO: 1019733 - DNA, 15 bp, Homo sapiens
cagctacaacttgca

SEQ ID NO: 1019734 - DNA, 15 bp, Homo sapiens
tcagctacaacttgc

SEQ ID NO: 1019735 - DNA, 15 bp, Homo sapiens
ttcagctacaacttg

SEQ ID NO: 1019736 - DNA, 15 bp, Homo sapiens
cttcagctacaactt

SEQ ID NO: 1019737 - DNA, 15 bp, Homo sapiens
tcttcagctacaact

SEQ ID NO: 1019738 - DNA, 15 bp, Homo sapiens
ctcttcagctacaac

SEQ ID NO: 1019739 - DNA, 15 bp, Homo sapiens
tctcttcagctacaa

SEQ ID NO: 1019740 - DNA, 15 bp, Homo sapiens
atctcttcagctaca

SEQ ID NO: 1019741 - DNA, 15 bp, Homo sapiens
aatctcttcagctac

SEQ ID NO: 1019742 - DNA, 15 bp, Homo sapiens
aaatctcttcagcta

SEQ ID NO: 1019743 - DNA, 15 bp, Homo sapiens
aaaatctcttcagct

SEQ ID NO: 1019744 - DNA, 15 bp, Homo sapiens
aaaaatctcttcagc

SEQ ID NO: 1019745 - DNA, 15 bp, Homo sapiens
aaaaaatctcttcag

SEQ ID NO: 1019746 - DNA, 15 bp, Homo sapiens
aaaaaaatctcttca

SEQ ID NO: 1019747 - DNA, 15 bp, Homo sapiens
aaaaaaaatctcttc

SEQ ID NO: 1019748 - DNA, 15 bp, Homo sapiens
aaaaaaaaatctctt

SEQ ID NO: 1019749 - DNA, 15 bp, Homo sapiens
tccaaaaaaaaaaaa

SEQ ID NO: 1019750 - DNA, 15 bp, Homo sapiens
ctccaaaaaaaaaaa

SEQ ID NO: 1019751 - DNA, 15 bp, Homo sapiens
tctccaaaaaaaaaa

SEQ ID NO: 1019752 - DNA, 15 bp, Homo sapiens
ttctccaaaaaaaaa

SEQ ID NO: 1019753 - DNA, 15 bp, Homo sapiens
tttctccaaaaaaaa

SEQ ID NO: 1019754 - DNA, 15 bp, Homo sapiens
atttctccaaaaaaa

SEQ ID NO: 1019755 - DNA, 15 bp, Homo sapiens
gatttctccaaaaaa

SEQ ID NO: 1019756 - DNA, 15 bp, Homo sapiens
agatttctccaaaaa

SEQ ID NO: 1019757 - DNA, 15 bp, Homo sapiens
tagatttctccaaaa

SEQ ID NO: 1019758 - DNA, 15 bp, Homo sapiens
ctagatttctccaaa

SEQ ID NO: 1019759 - DNA, 15 bp, Homo sapiens
cctagatttctccaa

SEQ ID NO: 1019760 - DNA, 15 bp, Homo sapiens
ccctagatttctcca

SEQ ID NO: 1019761 - DNA, 15 bp, Homo sapiens
tccctagatttctcc

SEQ ID NO: 1019762 - DNA, 15 bp, Homo sapiens
ttccctagatttctc

SEQ ID NO: 1019763 - DNA, 15 bp, Homo sapiens
tttccctagatttct

SEQ ID NO: 1019764 - DNA, 15 bp, Homo sapiens
atttccctagatttc

SEQ ID NO: 1019765 - DNA, 15 bp, Homo sapiens
catttccctagattt

SEQ ID NO: 1019766 - DNA, 15 bp, Homo sapiens
ccatttccctagatt

SEQ ID NO: 1019767 - DNA, 15 bp, Homo sapiens
cccatttccctagat

SEQ ID NO: 1019768 - DNA, 15 bp, Homo sapiens
tcccatttccctaga

SEQ ID NO: 1019769 - DNA, 15 bp, Homo sapiens
ttcccatttccctag

SEQ ID NO: 1019770 - DNA, 15 bp, Homo sapiens
tttcccatttcccta

SEQ ID NO: 1019771 - DNA, 15 bp, Homo sapiens
ttttcccatttccct

SEQ ID NO: 1019772 - DNA, 15 bp, Homo sapiens
tttttcccatttccc

SEQ ID NO: 1019773 - DNA, 15 bp, Homo sapiens
ttttttcccatttcc

SEQ ID NO: 1019774 - DNA, 15 bp, Homo sapiens
tttttttcccatttc

SEQ ID NO: 1019775 - DNA, 15 bp, Homo sapiens
ctttttttcccattt

SEQ ID NO: 1019776 - DNA, 15 bp, Homo sapiens
cctttttttcccatt

SEQ ID NO: 1019777 - DNA, 15 bp, Homo sapiens
gcctttttttcccat

SEQ ID NO: 1019778 - DNA, 15 bp, Homo sapiens
atgcctttttttccc

SEQ ID NO: 1019779 - DNA, 15 bp, Homo sapiens
aatgcctttttttcc

SEQ ID NO: 1019780 - DNA, 15 bp, Homo sapiens
caatgcctttttttc

SEQ ID NO: 1019781 - DNA, 15 bp, Homo sapiens
acaatgccttttttt

SEQ ID NO: 1019782 - DNA, 15 bp, Homo sapiens
gacaatgcctttttt

SEQ ID NO: 1019783 - DNA, 15 bp, Homo sapiens
ggacaatgccttttt

SEQ ID NO: 1019784 - DNA, 15 bp, Homo sapiens
tggacaatgcctttt

SEQ ID NO: 1019785 - DNA, 15 bp, Homo sapiens
ctggacaatgccttt

SEQ ID NO: 1019786 - DNA, 15 bp, Homo sapiens
tctggacaatgcctt

SEQ ID NO: 1019787 - DNA, 15 bp, Homo sapiens
atctggacaatgcct

SEQ ID NO: 1019788 - DNA, 15 bp, Homo sapiens
aatctggacaatgcc

SEQ ID NO: 1019789 - DNA, 15 bp, Homo sapiens
caatctggacaatgc

SEQ ID NO: 1019790 - DNA, 15 bp, Homo sapiens
gcaatctggacaatg

SEQ ID NO: 1019791 - DNA, 15 bp, Homo sapiens
tgcaatctggacaat

SEQ ID NO: 1019792 - DNA, 15 bp, Homo sapiens
ttgcaatctggacaa

SEQ ID NO: 1019793 - DNA, 15 bp, Homo sapiens
gttgcaatctggaca

SEQ ID NO: 1019794 - DNA, 15 bp, Homo sapiens
agttgcaatctggac

SEQ ID NO: 1019795 - DNA, 15 bp, Homo sapiens
cagttgcaatctgga

SEQ ID NO: 1019796 - DNA, 15 bp, Homo sapiens
acagttgcaatctgg

SEQ ID NO: 1019797 - DNA, 15 bp, Homo sapiens
tacagttgcaatctg

SEQ ID NO: 1019798 - DNA, 15 bp, Homo sapiens
ttacagttgcaatct

SEQ ID NO: 1019799 - DNA, 15 bp, Homo sapiens
cttacagttgcaatc

SEQ ID NO: 1019800 - DNA, 15 bp, Homo sapiens
ccttacagttgcaat

SEQ ID NO: 1019801 - DNA, 15 bp, Homo sapiens
cccttacagttgcaa

SEQ ID NO: 1019802 - DNA, 15 bp, Homo sapiens
gcccttacagttgca

SEQ ID NO: 1019803 - DNA, 15 bp, Homo sapiens
agcccttacagttgc

SEQ ID NO: 1019804 - DNA, 15 bp, Homo sapiens
gagcccttacagttg

SEQ ID NO: 1019805 - DNA, 15 bp, Homo sapiens
ggagcccttacagtt

SEQ ID NO: 1019806 - DNA, 15 bp, Homo sapiens
tggagcccttacagt

SEQ ID NO: 1019807 - DNA, 15 bp, Homo sapiens
gtggagcccttacag

SEQ ID NO: 1019808 - DNA, 15 bp, Homo sapiens
agtggagcccttaca

SEQ ID NO: 1019809 - DNA, 15 bp, Homo sapiens
tagtggagcccttac

SEQ ID NO: 1019810 - DNA, 15 bp, Homo sapiens
atagtggagccctta

SEQ ID NO: 1019811 - DNA, 15 bp, Homo sapiens
tatagtggagccctt

SEQ ID NO: 1019812 - DNA, 15 bp, Homo sapiens
atatagtggagccct

SEQ ID NO: 1019813 - DNA, 15 bp, Homo sapiens
gatatagtggagccc

SEQ ID NO: 1019814 - DNA, 15 bp, Homo sapiens
tgatatagtggagcc

SEQ ID NO: 1019815 - DNA, 15 bp, Homo sapiens
atgatatagtggagc

SEQ ID NO: 1019816 - DNA, 15 bp, Homo sapiens
aatgatatagtggag

SEQ ID NO: 1019817 - DNA, 15 bp, Homo sapiens
taatgatatagtgga

SEQ ID NO: 1019818 - DNA, 15 bp, Homo sapiens
ctaatgatatagtgg

SEQ ID NO: 1019819 - DNA, 15 bp, Homo sapiens
actaatgatatagtg

SEQ ID NO: 1019820 - DNA, 15 bp, Homo sapiens
tactaatgatatagt

SEQ ID NO: 1019821 - DNA, 15 bp, Homo sapiens
ttactaatgatatag

SEQ ID NO: 1019822 - DNA, 15 bp, Homo sapiens
attactaatgatata

SEQ ID NO: 1019823 - DNA, 15 bp, Homo sapiens
cattactaatgatat

SEQ ID NO: 1019824 - DNA, 15 bp, Homo sapiens
gcattactaatgata

SEQ ID NO: 1019825 - DNA, 15 bp, Homo sapiens
ggcattactaatgat

SEQ ID NO: 1019826 - DNA, 15 bp, Homo sapiens
gggcattactaatga

SEQ ID NO: 1019827 - DNA, 15 bp, Homo sapiens
tgggcattactaatg

SEQ ID NO: 1019828 - DNA, 15 bp, Homo sapiens
ctgggcattactaat

SEQ ID NO: 1019829 - DNA, 15 bp, Homo sapiens
tctgggcattactaa

SEQ ID NO: 1019830 - DNA, 15 bp, Homo sapiens
ctctgggcattacta

SEQ ID NO: 1019831 - DNA, 15 bp, Homo sapiens
gctctgggcattact

SEQ ID NO: 1019832 - DNA, 15 bp, Homo sapiens
tgctctgggcattac

SEQ ID NO: 1019833 - DNA, 15 bp, Homo sapiens
ctgctctgggcatta

SEQ ID NO: 1019834 - DNA, 15 bp, Homo sapiens
actgctctgggcatt

SEQ ID NO: 1019835 - DNA, 15 bp, Homo sapiens
tactgctctgggcat

SEQ ID NO: 1019836 - DNA, 15 bp, Homo sapiens
ttactgctctgggca

SEQ ID NO: 1019837 - DNA, 15 bp, Homo sapiens
tttactgctctgggc

SEQ ID NO: 1019838 - DNA, 15 bp, Homo sapiens
atttactgctctggg

SEQ ID NO: 1019839 - DNA, 15 bp, Homo sapiens
tatttactgctctgg

SEQ ID NO: 1019840 - DNA, 15 bp, Homo sapiens
ctatttactgctctg

SEQ ID NO: 1019841 - DNA, 15 bp, Homo sapiens
gctatttactgctct

SEQ ID NO: 1019842 - DNA, 15 bp, Homo sapiens
tgctatttactgctc

SEQ ID NO: 1019843 - DNA, 15 bp, Homo sapiens
ttgctatttactgct

SEQ ID NO: 1019844 - DNA, 15 bp, Homo sapiens
tttgctatttactgc

SEQ ID NO: 1019845 - DNA, 15 bp, Homo sapiens
atttgctatttactg

SEQ ID NO: 1019846 - DNA, 15 bp, Homo sapiens
tatttgctatttact

SEQ ID NO: 1019847 - DNA, 15 bp, Homo sapiens
atatttgctatttac

SEQ ID NO: 1019848 - DNA, 15 bp, Homo sapiens
catatttgctattta

SEQ ID NO: 1019849 - DNA, 15 bp, Homo sapiens
tcatatttgctattt

SEQ ID NO: 1019850 - DNA, 15 bp, Homo sapiens
gtcatatttgctatt

SEQ ID NO: 1019851 - DNA, 15 bp, Homo sapiens
tgtcatatttgctat

SEQ ID NO: 1019852 - DNA, 15 bp, Homo sapiens
ctgtcatatttgcta

SEQ ID NO: 1019853 - DNA, 15 bp, Homo sapiens
cctgtcatatttgct

SEQ ID NO: 1019854 - DNA, 15 bp, Homo sapiens
gcctgtcatatttgc

SEQ ID NO: 1019855 - DNA, 15 bp, Homo sapiens
agcctgtcatatttg

SEQ ID NO: 1019856 - DNA, 15 bp, Homo sapiens
tagcctgtcatattt

SEQ ID NO: 1019857 - DNA, 15 bp, Homo sapiens
atagcctgtcatatt

SEQ ID NO: 1019858 - DNA, 15 bp, Homo sapiens
aatagcctgtcatat

SEQ ID NO: 1019859 - DNA, 15 bp, Homo sapiens
caatagcctgtcata

SEQ ID NO: 1019860 - DNA, 15 bp, Homo sapiens
acaatagcctgtcat

SEQ ID NO: 1019861 - DNA, 15 bp, Homo sapiens
tacaatagcctgtca

SEQ ID NO: 1019862 - DNA, 15 bp, Homo sapiens
ctacaatagcctgtc

SEQ ID NO: 1019863 - DNA, 15 bp, Homo sapiens
tctacaatagcctgt

SEQ ID NO: 1019864 - DNA, 15 bp, Homo sapiens
ctctacaatagcctg

SEQ ID NO: 1019865 - DNA, 15 bp, Homo sapiens
gctctacaatagcct

SEQ ID NO: 1019866 - DNA, 15 bp, Homo sapiens
agctctacaatagcc

SEQ ID NO: 1019867 - DNA, 15 bp, Homo sapiens
aagctctacaatagc

SEQ ID NO: 1019868 - DNA, 15 bp, Homo sapiens
caagctctacaatag

SEQ ID NO: 1019869 - DNA, 15 bp, Homo sapiens
tcaagctctacaata

SEQ ID NO: 1019870 - DNA, 15 bp, Homo sapiens
gtcaagctctacaat

SEQ ID NO: 1019871 - DNA, 15 bp, Homo sapiens
agtcaagctctacaa

SEQ ID NO: 1019872 - DNA, 15 bp, Homo sapiens
aagtcaagctctaca

SEQ ID NO: 1019873 - DNA, 15 bp, Homo sapiens
gaagtcaagctctac

SEQ ID NO: 1019874 - DNA, 15 bp, Homo sapiens
tgaagtcaagctcta

SEQ ID NO: 1019875 - DNA, 15 bp, Homo sapiens
ctgaagtcaagctct

SEQ ID NO: 1019876 - DNA, 15 bp, Homo sapiens
tctgaagtcaagctc

SEQ ID NO: 1019877 - DNA, 15 bp, Homo sapiens
gtctgaagtcaagct

SEQ ID NO: 1019878 - DNA, 15 bp, Homo sapiens
tgtctgaagtcaagc

SEQ ID NO: 1019879 - DNA, 15 bp, Homo sapiens
gtgtctgaagtcaag

SEQ ID NO: 1019880 - DNA, 15 bp, Homo sapiens
ggtgtctgaagtcaa

SEQ ID NO: 1019881 - DNA, 15 bp, Homo sapiens
tggtgtctgaagtca

SEQ ID NO: 1019882 - DNA, 15 bp, Homo sapiens
ctggtgtctgaagtc

SEQ ID NO: 1019883 - DNA, 15 bp, Homo sapiens
tctggtgtctgaagt

SEQ ID NO: 1019884 - DNA, 15 bp, Homo sapiens
gtctggtgtctgaag

SEQ ID NO: 1019885 - DNA, 15 bp, Homo sapiens
tgtctggtgtctgaa

SEQ ID NO: 1019886 - DNA, 15 bp, Homo sapiens
ctgtctggtgtctga

SEQ ID NO: 1019887 - DNA, 15 bp, Homo sapiens
gctgtctggtgtctg

SEQ ID NO: 1019888 - DNA, 15 bp, Homo sapiens
ggctgtctggtgtct

SEQ ID NO: 1019889 - DNA, 15 bp, Homo sapiens
tggctgtctggtgtc

SEQ ID NO: 1019890 - DNA, 15 bp, Homo sapiens
ctggctgtctggtgt

SEQ ID NO: 1019891 - DNA, 15 bp, Homo sapiens
tctggctgtctggtg

SEQ ID NO: 1019892 - DNA, 15 bp, Homo sapiens
ctctggctgtctggt

SEQ ID NO: 1019893 - DNA, 15 bp, Homo sapiens
cctctggctgtctgg

SEQ ID NO: 1019894 - DNA, 15 bp, Homo sapiens
gcctctggctgtctg

SEQ ID NO: 1019895 - DNA, 15 bp, Homo sapiens
tgcctctggctgtct

SEQ ID NO: 1019896 - DNA, 15 bp, Homo sapiens
gtgcctctggctgtc

SEQ ID NO: 1019897 - DNA, 15 bp, Homo sapiens
agtgcctctggctgt

SEQ ID NO: 1019898 - DNA, 15 bp, Homo sapiens
gagtgcctctggctg

SEQ ID NO: 1019899 - DNA, 15 bp, Homo sapiens
agagtgcctctggct

SEQ ID NO: 1019900 - DNA, 15 bp, Homo sapiens
cagagtgcctctggc

SEQ ID NO: 1019901 - DNA, 15 bp, Homo sapiens
acagagtgcctctgg

SEQ ID NO: 1019902 - DNA, 15 bp, Homo sapiens
tacagagtgcctctg

SEQ ID NO: 1019903 - DNA, 15 bp, Homo sapiens
ctacagagtgcctct

SEQ ID NO: 1019904 - DNA, 15 bp, Homo sapiens
tctacagagtgcctc

SEQ ID NO: 1019905 - DNA, 15 bp, Homo sapiens
atctacagagtgcct

SEQ ID NO: 1019906 - DNA, 15 bp, Homo sapiens
tatctacagagtgcc

SEQ ID NO: 1019907 - DNA, 15 bp, Homo sapiens
gtatctacagagtgc

SEQ ID NO: 1019908 - DNA, 15 bp, Homo sapiens
ggtatctacagagtg

SEQ ID NO: 1019909 - DNA, 15 bp, Homo sapiens
aggtatctacagagt

SEQ ID NO: 1019910 - DNA, 15 bp, Homo sapiens
caggtatctacagag

SEQ ID NO: 1019911 - DNA, 15 bp, Homo sapiens
ccaggtatctacaga

SEQ ID NO: 1019912 - DNA, 15 bp, Homo sapiens
gccaggtatctacag

SEQ ID NO: 1019913 - DNA, 15 bp, Homo sapiens
tgccaggtatctaca

SEQ ID NO: 1019914 - DNA, 15 bp, Homo sapiens
ctgccaggtatctac

SEQ ID NO: 1019915 - DNA, 15 bp, Homo sapiens
actgccaggtatcta

SEQ ID NO: 1019916 - DNA, 15 bp, Homo sapiens
tactgccaggtatct

SEQ ID NO: 1019917 - DNA, 15 bp, Homo sapiens
ctactgccaggtatc

SEQ ID NO: 1019918 - DNA, 15 bp, Homo sapiens
tctactgccaggtat

SEQ ID NO: 1019919 - DNA, 15 bp, Homo sapiens
atctactgccaggta

SEQ ID NO: 1019920 - DNA, 15 bp, Homo sapiens
catctactgccaggt

SEQ ID NO: 1019921 - DNA, 15 bp, Homo sapiens
tcatctactgccagg

SEQ ID NO: 1019922 - DNA, 15 bp, Homo sapiens
ctcatctactgccag

SEQ ID NO: 1019923 - DNA, 15 bp, Homo sapiens
tctcatctactgcca

SEQ ID NO: 1019924 - DNA, 15 bp, Homo sapiens
ctctcatctactgcc

SEQ ID NO: 1019925 - DNA, 15 bp, Homo sapiens
tctctcatctactgc

SEQ ID NO: 1019926 - DNA, 15 bp, Homo sapiens
gtctctcatctactg

SEQ ID NO: 1019927 - DNA, 15 bp, Homo sapiens
tgtctctcatctact

SEQ ID NO: 1019928 - DNA, 15 bp, Homo sapiens
gtgtctctcatctac

SEQ ID NO: 1019929 - DNA, 15 bp, Homo sapiens
ggtgtctctcatcta

SEQ ID NO: 1019930 - DNA, 15 bp, Homo sapiens
aggtgtctctcatct

SEQ ID NO: 1019931 - DNA, 15 bp, Homo sapiens
caggtgtctctcatc

SEQ ID NO: 1019932 - DNA, 15 bp, Homo sapiens
acaggtgtctctcat

SEQ ID NO: 1019933 - DNA, 15 bp, Homo sapiens
cacaggtgtctctca

SEQ ID NO: 1019934 - DNA, 15 bp, Homo sapiens
tcacaggtgtctctc

SEQ ID NO: 1019935 - DNA, 15 bp, Homo sapiens
ttcacaggtgtctct

SEQ ID NO: 1019936 - DNA, 15 bp, Homo sapiens
tttcacaggtgtctc

SEQ ID NO: 1019937 - DNA, 15 bp, Homo sapiens
gtttcacaggtgtct

SEQ ID NO: 1019938 - DNA, 15 bp, Homo sapiens
agtttcacaggtgtc

SEQ ID NO: 1019939 - DNA, 15 bp, Homo sapiens
cagtttcacaggtgt

SEQ ID NO: 1019940 - DNA, 15 bp, Homo sapiens
tcagtttcacaggtg

SEQ ID NO: 1019941 - DNA, 15 bp, Homo sapiens
ctcagtttcacaggt

SEQ ID NO: 1019942 - DNA, 15 bp, Homo sapiens
cctcagtttcacagg

SEQ ID NO: 1019943 - DNA, 15 bp, Homo sapiens
ccctcagtttcacag

SEQ ID NO: 1019944 - DNA, 15 bp, Homo sapiens
gccctcagtttcaca

SEQ ID NO: 1019945 - DNA, 15 bp, Homo sapiens
tgccctcagtttcac

SEQ ID NO: 1019946 - DNA, 15 bp, Homo sapiens
ctgccctcagtttca

SEQ ID NO: 1019947 - DNA, 15 bp, Homo sapiens
cctgccctcagtttc

SEQ ID NO: 1019948 - DNA, 15 bp, Homo sapiens
acctgccctcagttt

SEQ ID NO: 1019949 - DNA, 15 bp, Homo sapiens
gacctgccctcagtt

SEQ ID NO: 1019950 - DNA, 15 bp, Homo sapiens
tgacctgccctcagt

SEQ ID NO: 1019951 - DNA, 15 bp, Homo sapiens
ctgacctgccctcag

SEQ ID NO: 1019952 - DNA, 15 bp, Homo sapiens
cctgacctgccctca

SEQ ID NO: 1019953 - DNA, 15 bp, Homo sapiens
tcctgacctgccctc

SEQ ID NO: 1019954 - DNA, 15 bp, Homo sapiens
ctcctgacctgccct

SEQ ID NO: 1019955 - DNA, 15 bp, Homo sapiens
gctcctgacctgccc

SEQ ID NO: 1019956 - DNA, 15 bp, Homo sapiens
agctcctgacctgcc

SEQ ID NO: 1019957 - DNA, 15 bp, Homo sapiens
tagctcctgacctgc

SEQ ID NO: 1019958 - DNA, 15 bp, Homo sapiens
ctagctcctgacctg

SEQ ID NO: 1019959 - DNA, 15 bp, Homo sapiens
actagctcctgacct

SEQ ID NO: 1019960 - DNA, 15 bp, Homo sapiens
cactagctcctgacc

SEQ ID NO: 1019961 - DNA, 15 bp, Homo sapiens
tcactagctcctgac

SEQ ID NO: 1019962 - DNA, 15 bp, Homo sapiens
ttcactagctcctga

SEQ ID NO: 1019963 - DNA, 15 bp, Homo sapiens
attcactagctcctg

SEQ ID NO: 1019964 - DNA, 15 bp, Homo sapiens
aattcactagctcct

SEQ ID NO: 1019965 - DNA, 15 bp, Homo sapiens
aaattcactagctcc

SEQ ID NO: 1019966 - DNA, 15 bp, Homo sapiens
aaaattcactagctc

SEQ ID NO: 1019967 - DNA, 15 bp, Homo sapiens
taaaattcactagct

SEQ ID NO: 1019968 - DNA, 15 bp, Homo sapiens
ctaaaattcactagc

SEQ ID NO: 1019969 - DNA, 15 bp, Homo sapiens
tctaaaattcactag

SEQ ID NO: 1019970 - DNA, 15 bp, Homo sapiens
ttctaaaattcacta

SEQ ID NO: 1019971 - DNA, 15 bp, Homo sapiens
cttctaaaattcact

SEQ ID NO: 1019972 - DNA, 15 bp, Homo sapiens
acttctaaaattcac

SEQ ID NO: 1019973 - DNA, 15 bp, Homo sapiens
tacttctaaaattca

SEQ ID NO: 1019974 - DNA, 15 bp, Homo sapiens
ttacttctaaaattc

SEQ ID NO: 1019975 - DNA, 15 bp, Homo sapiens
gttacttctaaaatt

SEQ ID NO: 1019976 - DNA, 15 bp, Homo sapiens
tgttacttctaaaat

SEQ ID NO: 1019977 - DNA, 15 bp, Homo sapiens
atgttacttctaaaa

SEQ ID NO: 1019978 - DNA, 15 bp, Homo sapiens
catgttacttctaaa

SEQ ID NO: 1019979 - DNA, 15 bp, Homo sapiens
ccatgttacttctaa

SEQ ID NO: 1019980 - DNA, 15 bp, Homo sapiens
cccatgttacttcta

SEQ ID NO: 1019981 - DNA, 15 bp, Homo sapiens
tcccatgttacttct

SEQ ID NO: 1019982 - DNA, 15 bp, Homo sapiens
atcccatgttacttc

SEQ ID NO: 1019983 - DNA, 15 bp, Homo sapiens
aatcccatgttactt

SEQ ID NO: 1019984 - DNA, 15 bp, Homo sapiens
caatcccatgttact

SEQ ID NO: 1019985 - DNA, 15 bp, Homo sapiens
tcaatcccatgttac

SEQ ID NO: 1019986 - DNA, 15 bp, Homo sapiens
ttcaatcccatgtta

SEQ ID NO: 1019987 - DNA, 15 bp, Homo sapiens
tttcaatcccatgtt

SEQ ID NO: 1019988 - DNA, 15 bp, Homo sapiens
ctttcaatcccatgt

SEQ ID NO: 1019989 - DNA, 15 bp, Homo sapiens
cctttcaatcccatg

SEQ ID NO: 1019990 - DNA, 15 bp, Homo sapiens
tcctttcaatcccat

SEQ ID NO: 1019991 - DNA, 15 bp, Homo sapiens
gtcctttcaatccca

SEQ ID NO: 1019992 - DNA, 15 bp, Homo sapiens
agtcctttcaatccc

SEQ ID NO: 1019993 - DNA, 15 bp, Homo sapiens
tagtcctttcaatcc

SEQ ID NO: 1019994 - DNA, 15 bp, Homo sapiens
atagtcctttcaatc

SEQ ID NO: 1019995 - DNA, 15 bp, Homo sapiens
aatagtcctttcaat

SEQ ID NO: 1019996 - DNA, 15 bp, Homo sapiens
aaatagtcctttcaa

SEQ ID NO: 1019997 - DNA, 15 bp, Homo sapiens
caaatagtcctttca

SEQ ID NO: 1019998 - DNA, 15 bp, Homo sapiens
ccaaatagtcctttc

SEQ ID NO: 1019999 - DNA, 15 bp, Homo sapiens
accaaatagtccttt

SEQ ID NO: 1020000 - DNA, 15 bp, Homo sapiens
caccaaatagtcctt

SEQ ID NO: 1020001 - DNA, 15 bp, Homo sapiens
ccaccaaatagtcct

SEQ ID NO: 1020002 - DNA, 15 bp, Homo sapiens
cccaccaaatagtcc

SEQ ID NO: 1020003 - DNA, 15 bp, Homo sapiens
tcccaccaaatagtc

SEQ ID NO: 1020004 - DNA, 15 bp, Homo sapiens
ttcccaccaaatagt

SEQ ID NO: 1020005 - DNA, 15 bp, Homo sapiens
gttcccaccaaatag

SEQ ID NO: 1020006 - DNA, 15 bp, Homo sapiens
agttcccaccaaata

SEQ ID NO: 1020007 - DNA, 15 bp, Homo sapiens
aagttcccaccaaat

SEQ ID NO: 1020008 - DNA, 15 bp, Homo sapiens
aaagttcccaccaaa

SEQ ID NO: 1020009 - DNA, 15 bp, Homo sapiens
caaagttcccaccaa

SEQ ID NO: 1020010 - DNA, 15 bp, Homo sapiens
ccaaagttcccacca

SEQ ID NO: 1020011 - DNA, 15 bp, Homo sapiens
tccaaagttcccacc

SEQ ID NO: 1020012 - DNA, 15 bp, Homo sapiens
ttccaaagttcccac

SEQ ID NO: 1020013 - DNA, 15 bp, Homo sapiens
tttccaaagttccca

SEQ ID NO: 1020014 - DNA, 15 bp, Homo sapiens
ctttccaaagttccc

SEQ ID NO: 1020015 - DNA, 15 bp, Homo sapiens
cctttccaaagttcc

SEQ ID NO: 1020016 - DNA, 15 bp, Homo sapiens
ccctttccaaagttc

SEQ ID NO: 1020017 - DNA, 15 bp, Homo sapiens
accctttccaaagtt

SEQ ID NO: 1020018 - DNA, 15 bp, Homo sapiens
gaccctttccaaagt

SEQ ID NO: 1020019 - DNA, 15 bp, Homo sapiens
tgaccctttccaaag

SEQ ID NO: 1020020 - DNA, 15 bp, Homo sapiens
ttgaccctttccaaa

SEQ ID NO: 1020021 - DNA, 15 bp, Homo sapiens
tttgaccctttccaa

SEQ ID NO: 1020022 - DNA, 15 bp, Homo sapiens
ctttgaccctttcca

SEQ ID NO: 1020023 - DNA, 15 bp, Homo sapiens
cctttgaccctttcc

SEQ ID NO: 1020024 - DNA, 15 bp, Homo sapiens
acctttgaccctttc

SEQ ID NO: 1020025 - DNA, 15 bp, Homo sapiens
aacctttgacccttt

SEQ ID NO: 1020026 - DNA, 15 bp, Homo sapiens
gaacctttgaccctt

SEQ ID NO: 1020027 - DNA, 15 bp, Homo sapiens
agaacctttgaccct

SEQ ID NO: 1020028 - DNA, 15 bp, Homo sapiens
cagaacctttgaccc

SEQ ID NO: 1020029 - DNA, 15 bp, Homo sapiens
acagaacctttgacc

SEQ ID NO: 1020030 - DNA, 15 bp, Homo sapiens
cacagaacctttgac

SEQ ID NO: 1020031 - DNA, 15 bp, Homo sapiens
acacagaacctttga

SEQ ID NO: 1020032 - DNA, 15 bp, Homo sapiens
tacacagaacctttg

SEQ ID NO: 1020033 - DNA, 15 bp, Homo sapiens
ttacacagaaccttt

SEQ ID NO: 1020034 - DNA, 15 bp, Homo sapiens
cttacacagaacctt

SEQ ID NO: 1020035 - DNA, 15 bp, Homo sapiens
gcttacacagaacct

SEQ ID NO: 1020036 - DNA, 15 bp, Homo sapiens
tgcttacacagaacc

SEQ ID NO: 1020037 - DNA, 15 bp, Homo sapiens
ttgcttacacagaac

SEQ ID NO: 1020038 - DNA, 15 bp, Homo sapiens
tttgcttacacagaa

SEQ ID NO: 1020039 - DNA, 15 bp, Homo sapiens
atttgcttacacaga

SEQ ID NO: 1020040 - DNA, 15 bp, Homo sapiens
aatttgcttacacag

SEQ ID NO: 1020041 - DNA, 15 bp, Homo sapiens
taatttgcttacaca

SEQ ID NO: 1020042 - DNA, 15 bp, Homo sapiens
ctaatttgcttacac

SEQ ID NO: 1020043 - DNA, 15 bp, Homo sapiens
cctaatttgcttaca

SEQ ID NO: 1020044 - DNA, 15 bp, Homo sapiens
tcctaatttgcttac

SEQ ID NO: 1020045 - DNA, 15 bp, Homo sapiens
gtcctaatttgctta

SEQ ID NO: 1020046 - DNA, 15 bp, Homo sapiens
cgtcctaatttgctt

SEQ ID NO: 1020047 - DNA, 15 bp, Homo sapiens
tcgtcctaatttgct

SEQ ID NO: 1020048 - DNA, 15 bp, Homo sapiens
atcgtcctaatttgc

SEQ ID NO: 1020049 - DNA, 15 bp, Homo sapiens
catcgtcctaatttg

SEQ ID NO: 1020050 - DNA, 15 bp, Homo sapiens
ccatcgtcctaattt

SEQ ID NO: 1020051 - DNA, 15 bp, Homo sapiens
accatcgtcctaatt

SEQ ID NO: 1020052 - DNA, 15 bp, Homo sapiens
taccatcgtcctaat

SEQ ID NO: 1020053 - DNA, 15 bp, Homo sapiens
ttaccatcgtcctaa

SEQ ID NO: 1020054 - DNA, 15 bp, Homo sapiens
gttaccatcgtccta

SEQ ID NO: 1020055 - DNA, 15 bp, Homo sapiens
agttaccatcgtcct

SEQ ID NO: 1020056 - DNA, 15 bp, Homo sapiens
tagttaccatcgtcc

SEQ ID NO: 1020057 - DNA, 15 bp, Homo sapiens
gtagttaccatcgtc

SEQ ID NO: 1020058 - DNA, 15 bp, Homo sapiens
tgtagttaccatcgt

SEQ ID NO: 1020059 - DNA, 15 bp, Homo sapiens
ctgtagttaccatcg

SEQ ID NO: 1020060 - DNA, 15 bp, Homo sapiens
actgtagttaccatc

SEQ ID NO: 1020061 - DNA, 15 bp, Homo sapiens
aactgtagttaccat

SEQ ID NO: 1020062 - DNA, 15 bp, Homo sapiens
aaactgtagttacca

SEQ ID NO: 1020063 - DNA, 15 bp, Homo sapiens
aaaactgtagttacc

SEQ ID NO: 1020064 - DNA, 15 bp, Homo sapiens
taaaactgtagttac

SEQ ID NO: 1020065 - DNA, 15 bp, Homo sapiens
ttaaaactgtagtta

SEQ ID NO: 1020066 - DNA, 15 bp, Homo sapiens
atttaaaactgtagt

SEQ ID NO: 1020067 - DNA, 15 bp, Homo sapiens
aatttaaaactgtag

SEQ ID NO: 1020068 - DNA, 15 bp, Homo sapiens
taatttaaaactgta

SEQ ID NO: 1020069 - DNA, 15 bp, Homo sapiens
ataatttaaaactgt

SEQ ID NO: 1020070 - DNA, 15 bp, Homo sapiens
aataatttaaaactg

SEQ ID NO: 1020071 - DNA, 15 bp, Homo sapiens
caataatttaaaact

SEQ ID NO: 1020072 - DNA, 15 bp, Homo sapiens
acaataatttaaaac

SEQ ID NO: 1020073 - DNA, 15 bp, Homo sapiens
aacaataatttaaaa

SEQ ID NO: 1020074 - DNA, 15 bp, Homo sapiens
taacaataatttaaa

SEQ ID NO: 1020075 - DNA, 15 bp, Homo sapiens
ttaacaataatttaa

SEQ ID NO: 1020076 - DNA, 15 bp, Homo sapiens
attaacaataattta

SEQ ID NO: 1020077 - DNA, 15 bp, Homo sapiens
cattaacaataattt

SEQ ID NO: 1020078 - DNA, 15 bp, Homo sapiens
acattaacaataatt

SEQ ID NO: 1020079 - DNA, 15 bp, Homo sapiens
tacattaacaataat

SEQ ID NO: 1020080 - DNA, 15 bp, Homo sapiens
ttacattaacaataa

SEQ ID NO: 1020081 - DNA, 15 bp, Homo sapiens
gttacattaacaata

SEQ ID NO: 1020082 - DNA, 15 bp, Homo sapiens
agttacattaacaat

SEQ ID NO: 1020083 - DNA, 15 bp, Homo sapiens
aagttacattaacaa

SEQ ID NO: 1020084 - DNA, 15 bp, Homo sapiens
aaagttacattaaca

SEQ ID NO: 1020085 - DNA, 15 bp, Homo sapiens
taaagttacattaac

SEQ ID NO: 1020086 - DNA, 15 bp, Homo sapiens
ataaagttacattaa

SEQ ID NO: 1020087 - DNA, 15 bp, Homo sapiens
aataaagttacatta

SEQ ID NO: 1020088 - DNA, 15 bp, Homo sapiens
aaataaagttacatt

SEQ ID NO: 1020089 - DNA, 15 bp, Homo sapiens
caaataaagttacat

SEQ ID NO: 1020090 - DNA, 15 bp, Homo sapiens
acaaataaagttaca

SEQ ID NO: 1020091 - DNA, 15 bp, Homo sapiens
tacaaataaagttac

SEQ ID NO: 1020092 - DNA, 15 bp, Homo sapiens
ttacaaataaagtta

SEQ ID NO: 1020093 - DNA, 15 bp, Homo sapiens
gttacaaataaagtt

SEQ ID NO: 1020094 - DNA, 15 bp, Homo sapiens
agttacaaataaagt

SEQ ID NO: 1020095 - DNA, 15 bp, Homo sapiens
cagttacaaataaag

SEQ ID NO: 1020096 - DNA, 15 bp, Homo sapiens
gcagttacaaataaa

SEQ ID NO: 1020097 - DNA, 15 bp, Homo sapiens
agcagttacaaataa

SEQ ID NO: 1020098 - DNA, 15 bp, Homo sapiens
tagcagttacaaata

SEQ ID NO: 1020099 - DNA, 15 bp, Homo sapiens
ctagcagttacaaat

SEQ ID NO: 1020100 - DNA, 15 bp, Homo sapiens
actagcagttacaaa

SEQ ID NO: 1020101 - DNA, 15 bp, Homo sapiens
aactagcagttacaa

SEQ ID NO: 1020102 - DNA, 15 bp, Homo sapiens
caactagcagttaca

SEQ ID NO: 1020103 - DNA, 15 bp, Homo sapiens
acaactagcagttac

SEQ ID NO: 1020104 - DNA, 15 bp, Homo sapiens
cacaactagcagtta

SEQ ID NO: 1020105 - DNA, 15 bp, Homo sapiens
gcacaactagcagtt

SEQ ID NO: 1020106 - DNA, 15 bp, Homo sapiens
tgcacaactagcagt

SEQ ID NO: 1020107 - DNA, 15 bp, Homo sapiens
ttgcacaactagcag

SEQ ID NO: 1020108 - DNA, 15 bp, Homo sapiens
tttgcacaactagca

SEQ ID NO: 1020109 - DNA, 15 bp, Homo sapiens
atttgcacaactagc

SEQ ID NO: 1020110 - DNA, 15 bp, Homo sapiens
aatttgcacaactag

SEQ ID NO: 1020111 - DNA, 15 bp, Homo sapiens
gaatttgcacaacta

SEQ ID NO: 1020112 - DNA, 15 bp, Homo sapiens
tgaatttgcacaact

SEQ ID NO: 1020113 - DNA, 15 bp, Homo sapiens
ctgaatttgcacaac

SEQ ID NO: 1020114 - DNA, 15 bp, Homo sapiens
tctgaatttgcacaa

SEQ ID NO: 1020115 - DNA, 15 bp, Homo sapiens
atctgaatttgcaca

SEQ ID NO: 1020116 - DNA, 15 bp, Homo sapiens
aatctgaatttgcac

SEQ ID NO: 1020117 - DNA, 15 bp, Homo sapiens
caatctgaatttgca

SEQ ID NO: 1020118 - DNA, 15 bp, Homo sapiens
gcaatctgaatttgc

SEQ ID NO: 1020119 - DNA, 15 bp, Homo sapiens
tgcaatctgaatttg

SEQ ID NO: 1020120 - DNA, 15 bp, Homo sapiens
atgcaatctgaattt

SEQ ID NO: 1020121 - DNA, 15 bp, Homo sapiens
gatgcaatctgaatt

SEQ ID NO: 1020122 - DNA, 15 bp, Homo sapiens
tgatgcaatctgaat

SEQ ID NO: 1020123 - DNA, 15 bp, Homo sapiens
atgatgcaatctgaa

SEQ ID NO: 1020124 - DNA, 15 bp, Homo sapiens
gatgatgcaatctga

SEQ ID NO: 1020125 - DNA, 15 bp, Homo sapiens
tgatgatgcaatctg

SEQ ID NO: 1020126 - DNA, 15 bp, Homo sapiens
atgatgatgcaatct

SEQ ID NO: 1020127 - DNA, 15 bp, Homo sapiens
aatgatgatgcaatc

SEQ ID NO: 1020128 - DNA, 15 bp, Homo sapiens
aaatgatgatgcaat

SEQ ID NO: 1020129 - DNA, 15 bp, Homo sapiens
gaaatgatgatgcaa

SEQ ID NO: 1020130 - DNA, 15 bp, Homo sapiens
tgaaatgatgatgca

SEQ ID NO: 1020131 - DNA, 15 bp, Homo sapiens
gtgaaatgatgatgc

SEQ ID NO: 1020132 - DNA, 15 bp, Homo sapiens
ggtgaaatgatgatg

SEQ ID NO: 1020133 - DNA, 15 bp, Homo sapiens
gggtgaaatgatgat

SEQ ID NO: 1020134 - DNA, 15 bp, Homo sapiens
ggggtgaaatgatga

SEQ ID NO: 1020135 - DNA, 15 bp, Homo sapiens
tggggtgaaatgatg

SEQ ID NO: 1020136 - DNA, 15 bp, Homo sapiens
ttggggtgaaatgat

SEQ ID NO: 1020137 - DNA, 15 bp, Homo sapiens
attggggtgaaatga

SEQ ID NO: 1020138 - DNA, 15 bp, Homo sapiens
aattggggtgaaatg

SEQ ID NO: 1020139 - DNA, 15 bp, Homo sapiens
aaattggggtgaaat

SEQ ID NO: 1020140 - DNA, 15 bp, Homo sapiens
aaaattggggtgaaa

SEQ ID NO: 1020141 - DNA, 15 bp, Homo sapiens
gaaaattggggtgaa

SEQ ID NO: 1020142 - DNA, 15 bp, Homo sapiens
ggaaaattggggtga

SEQ ID NO: 1020143 - DNA, 15 bp, Homo sapiens
aggaaaattggggtg

SEQ ID NO: 1020144 - DNA, 15 bp, Homo sapiens
aaggaaaattggggt

SEQ ID NO: 1020145 - DNA, 15 bp, Homo sapiens
taaggaaaattgggg

SEQ ID NO: 1020146 - DNA, 15 bp, Homo sapiens
gtaaggaaaattggg

SEQ ID NO: 1020147 - DNA, 15 bp, Homo sapiens
agtaaggaaaattgg

SEQ ID NO: 1020148 - DNA, 15 bp, Homo sapiens
aagtaaggaaaattg

SEQ ID NO: 1020149 - DNA, 15 bp, Homo sapiens
aaagtaaggaaaatt

SEQ ID NO: 1020150 - DNA, 15 bp, Homo sapiens
aaaagtaaggaaaat

SEQ ID NO: 1020151 - DNA, 15 bp, Homo sapiens
caaaagtaaggaaaa

SEQ ID NO: 1020152 - DNA, 15 bp, Homo sapiens
acaaaagtaaggaaa

SEQ ID NO: 1020153 - DNA, 15 bp, Homo sapiens
tacaaaagtaaggaa

SEQ ID NO: 1020154 - DNA, 15 bp, Homo sapiens
atacaaaagtaagga

SEQ ID NO: 1020155 - DNA, 15 bp, Homo sapiens
aatacaaaagtaagg

SEQ ID NO: 1020156 - DNA, 15 bp, Homo sapiens
aaatacaaaagtaag

SEQ ID NO: 1020157 - DNA, 15 bp, Homo sapiens
taaatacaaaagtaa

SEQ ID NO: 1020158 - DNA, 15 bp, Homo sapiens
ataaatacaaaagta

SEQ ID NO: 1020159 - DNA, 15 bp, Homo sapiens
aataaatacaaaagt

SEQ ID NO: 1020160 - DNA, 15 bp, Homo sapiens
gaataaatacaaaag

SEQ ID NO: 1020161 - DNA, 15 bp, Homo sapiens
agaataaatacaaaa

SEQ ID NO: 1020162 - DNA, 15 bp, Homo sapiens
cagaataaatacaaa

SEQ ID NO: 1020163 - DNA, 15 bp, Homo sapiens
gcagaataaatacaa

SEQ ID NO: 1020164 - DNA, 15 bp, Homo sapiens
agcagaataaataca

SEQ ID NO: 1020165 - DNA, 15 bp, Homo sapiens
tagcagaataaatac

SEQ ID NO: 1020166 - DNA, 15 bp, Homo sapiens
ttagcagaataaata

SEQ ID NO: 1020167 - DNA, 15 bp, Homo sapiens
gttagcagaataaat

SEQ ID NO: 1020168 - DNA, 15 bp, Homo sapiens
agttagcagaataaa

SEQ ID NO: 1020169 - DNA, 15 bp, Homo sapiens
gagttagcagaataa

SEQ ID NO: 1020170 - DNA, 15 bp, Homo sapiens
agagttagcagaata

SEQ ID NO: 1020171 - DNA, 15 bp, Homo sapiens
aagagttagcagaat

SEQ ID NO: 1020172 - DNA, 15 bp, Homo sapiens
taagagttagcagaa

SEQ ID NO: 1020173 - DNA, 15 bp, Homo sapiens
ttaagagttagcaga

SEQ ID NO: 1020174 - DNA, 15 bp, Homo sapiens
attaagagttagcag

SEQ ID NO: 1020175 - DNA, 15 bp, Homo sapiens
gattaagagttagca

SEQ ID NO: 1020176 - DNA, 15 bp, Homo sapiens
agattaagagttagc

SEQ ID NO: 1020177 - DNA, 15 bp, Homo sapiens
aagattaagagttag

SEQ ID NO: 1020178 - DNA, 15 bp, Homo sapiens
caagattaagagtta

SEQ ID NO: 1020179 - DNA, 15 bp, Homo sapiens
ccaagattaagagtt

SEQ ID NO: 1020180 - DNA, 15 bp, Homo sapiens
tccaagattaagagt

SEQ ID NO: 1020181 - DNA, 15 bp, Homo sapiens
atccaagattaagag

SEQ ID NO: 1020182 - DNA, 15 bp, Homo sapiens
gatccaagattaaga

SEQ ID NO: 1020183 - DNA, 15 bp, Homo sapiens
tgatccaagattaag

SEQ ID NO: 1020184 - DNA, 15 bp, Homo sapiens
ttgatccaagattaa

SEQ ID NO: 1020185 - DNA, 15 bp, Homo sapiens
gttgatccaagatta

SEQ ID NO: 1020186 - DNA, 15 bp, Homo sapiens
ggttgatccaagatt

SEQ ID NO: 1020187 - DNA, 15 bp, Homo sapiens
aggttgatccaagat

SEQ ID NO: 1020188 - DNA, 15 bp, Homo sapiens
taggttgatccaaga

SEQ ID NO: 1020189 - DNA, 15 bp, Homo sapiens
ttaggttgatccaag

SEQ ID NO: 1020190 - DNA, 15 bp, Homo sapiens
attaggttgatccaa

SEQ ID NO: 1020191 - DNA, 15 bp, Homo sapiens
tattaggttgatcca

SEQ ID NO: 1020192 - DNA, 15 bp, Homo sapiens
ttattaggttgatcc

SEQ ID NO: 1020193 - DNA, 15 bp, Homo sapiens
gttattaggttgatc

SEQ ID NO: 1020194 - DNA, 15 bp, Homo sapiens
ggttattaggttgat

SEQ ID NO: 1020195 - DNA, 15 bp, Homo sapiens
gggttattaggttga

SEQ ID NO: 1020196 - DNA, 15 bp, Homo sapiens
agggttattaggttg

SEQ ID NO: 1020197 - DNA, 15 bp, Homo sapiens
gagggttattaggtt

SEQ ID NO: 1020198 - DNA, 15 bp, Homo sapiens
agagggttattaggt

SEQ ID NO: 1020199 - DNA, 15 bp, Homo sapiens
aagagggttattagg

SEQ ID NO: 1020200 - DNA, 15 bp, Homo sapiens
aaagagggttattag

SEQ ID NO: 1020201 - DNA, 15 bp, Homo sapiens
gaaagagggttatta

SEQ ID NO: 1020202 - DNA, 15 bp, Homo sapiens
agaaagagggttatt

SEQ ID NO: 1020203 - DNA, 15 bp, Homo sapiens
gagaaagagggttat

SEQ ID NO: 1020204 - DNA, 15 bp, Homo sapiens
agagaaagagggtta

SEQ ID NO: 1020205 - DNA, 15 bp, Homo sapiens
tagagaaagagggtt

SEQ ID NO: 1020206 - DNA, 15 bp, Homo sapiens
gtagagaaagagggt

SEQ ID NO: 1020207 - DNA, 15 bp, Homo sapiens
ggtagagaaagaggg

SEQ ID NO: 1020208 - DNA, 15 bp, Homo sapiens
gggtagagaaagagg

SEQ ID NO: 1020209 - DNA, 15 bp, Homo sapiens
ggggtagagaaagag

SEQ ID NO: 1020210 - DNA, 15 bp, Homo sapiens
aggggtagagaaaga

SEQ ID NO: 1020211 - DNA, 15 bp, Homo sapiens
gaggggtagagaaag

SEQ ID NO: 1020212 - DNA, 15 bp, Homo sapiens
agaggggtagagaaa

SEQ ID NO: 1020213 - DNA, 15 bp, Homo sapiens
gagaggggtagagaa

SEQ ID NO: 1020214 - DNA, 15 bp, Homo sapiens
cgagaggggtagaga

SEQ ID NO: 1020215 - DNA, 15 bp, Homo sapiens
acgagaggggtagag

SEQ ID NO: 1020216 - DNA, 15 bp, Homo sapiens
cacgagaggggtaga

SEQ ID NO: 1020217 - DNA, 15 bp, Homo sapiens
ccacgagaggggtag

SEQ ID NO: 1020218 - DNA, 15 bp, Homo sapiens
gccacgagaggggta

SEQ ID NO: 1020219 - DNA, 15 bp, Homo sapiens
ggccacgagaggggt

SEQ ID NO: 1020220 - DNA, 15 bp, Homo sapiens
tggccacgagagggg

SEQ ID NO: 1020221 - DNA, 15 bp, Homo sapiens
atggccacgagaggg

SEQ ID NO: 1020222 - DNA, 15 bp, Homo sapiens
aatggccacgagagg

SEQ ID NO: 1020223 - DNA, 15 bp, Homo sapiens
caatggccacgagag

SEQ ID NO: 1020224 - DNA, 15 bp, Homo sapiens
tcaatggccacgaga

SEQ ID NO: 1020225 - DNA, 15 bp, Homo sapiens
ttcaatggccacgag

SEQ ID NO: 1020226 - DNA, 15 bp, Homo sapiens
cttcaatggccacga

SEQ ID NO: 1020227 - DNA, 15 bp, Homo sapiens
ccttcaatggccacg

SEQ ID NO: 1020228 - DNA, 15 bp, Homo sapiens
gccttcaatggccac

SEQ ID NO: 1020229 - DNA, 15 bp, Homo sapiens
agccttcaatggcca

SEQ ID NO: 1020230 - DNA, 15 bp, Homo sapiens
gagccttcaatggcc

SEQ ID NO: 1020231 - DNA, 15 bp, Homo sapiens
agagccttcaatggc

SEQ ID NO: 1020232 - DNA, 15 bp, Homo sapiens
aagagccttcaatgg

SEQ ID NO: 1020233 - DNA, 15 bp, Homo sapiens
taagagccttcaatg

SEQ ID NO: 1020234 - DNA, 15 bp, Homo sapiens
ctaagagccttcaat

SEQ ID NO: 1020235 - DNA, 15 bp, Homo sapiens
actaagagccttcaa

SEQ ID NO: 1020236 - DNA, 15 bp, Homo sapiens
gactaagagccttca

SEQ ID NO: 1020237 - DNA, 15 bp, Homo sapiens
tgactaagagccttc

SEQ ID NO: 1020238 - DNA, 15 bp, Homo sapiens
ctgactaagagcctt

SEQ ID NO: 1020239 - DNA, 15 bp, Homo sapiens
actgactaagagcct

SEQ ID NO: 1020240 - DNA, 15 bp, Homo sapiens
aactgactaagagcc

SEQ ID NO: 1020241 - DNA, 15 bp, Homo sapiens
aaactgactaagagc

SEQ ID NO: 1020242 - DNA, 15 bp, Homo sapiens
caaactgactaagag

SEQ ID NO: 1020243 - DNA, 15 bp, Homo sapiens
acaaactgactaaga

SEQ ID NO: 1020244 - DNA, 15 bp, Homo sapiens
cacaaactgactaag

SEQ ID NO: 1020245 - DNA, 15 bp, Homo sapiens
gcacaaactgactaa

SEQ ID NO: 1020246 - DNA, 15 bp, Homo sapiens
agcacaaactgacta

SEQ ID NO: 1020247 - DNA, 15 bp, Homo sapiens
cagcacaaactgact

SEQ ID NO: 1020248 - DNA, 15 bp, Homo sapiens
gcagcacaaactgac

SEQ ID NO: 1020249 - DNA, 15 bp, Homo sapiens
tgcagcacaaactga

SEQ ID NO: 1020250 - DNA, 15 bp, Homo sapiens
ttgcagcacaaactg

SEQ ID NO: 1020251 - DNA, 15 bp, Homo sapiens
attgcagcacaaact

SEQ ID NO: 1020252 - DNA, 15 bp, Homo sapiens
tattgcagcacaaac

SEQ ID NO: 1020253 - DNA, 15 bp, Homo sapiens
ttattgcagcacaaa

SEQ ID NO: 1020254 - DNA, 15 bp, Homo sapiens
gttattgcagcacaa

SEQ ID NO: 1020255 - DNA, 15 bp, Homo sapiens
tgttattgcagcaca

SEQ ID NO: 1020256 - DNA, 15 bp, Homo sapiens
ctgttattgcagcac

SEQ ID NO: 1020257 - DNA, 15 bp, Homo sapiens
actgttattgcagca

SEQ ID NO: 1020258 - DNA, 15 bp, Homo sapiens
tactgttattgcagc

SEQ ID NO: 1020259 - DNA, 15 bp, Homo sapiens
atactgttattgcag

SEQ ID NO: 1020260 - DNA, 15 bp, Homo sapiens
tatactgttattgca

SEQ ID NO: 1020261 - DNA, 15 bp, Homo sapiens
gtatactgttattgc

SEQ ID NO: 1020262 - DNA, 15 bp, Homo sapiens
ggtatactgttattg

SEQ ID NO: 1020263 - DNA, 15 bp, Homo sapiens
tggtatactgttatt

SEQ ID NO: 1020264 - DNA, 15 bp, Homo sapiens
gtggtatactgttat

SEQ ID NO: 1020265 - DNA, 15 bp, Homo sapiens
tgtggtatactgtta

SEQ ID NO: 1020266 - DNA, 15 bp, Homo sapiens
ctgtggtatactgtt

SEQ ID NO: 1020267 - DNA, 15 bp, Homo sapiens
tctgtggtatactgt

SEQ ID NO: 1020268 - DNA, 15 bp, Homo sapiens
ttctgtggtatactg

SEQ ID NO: 1020269 - DNA, 15 bp, Homo sapiens
attctgtggtatact

SEQ ID NO: 1020270 - DNA, 15 bp, Homo sapiens
cattctgtggtatac

SEQ ID NO: 1020271 - DNA, 15 bp, Homo sapiens
ccattctgtggtata

SEQ ID NO: 1020272 - DNA, 15 bp, Homo sapiens
cccattctgtggtat

SEQ ID NO: 1020273 - DNA, 15 bp, Homo sapiens
acccattctgtggta

SEQ ID NO: 1020274 - DNA, 15 bp, Homo sapiens
tacccattctgtggt

SEQ ID NO: 1020275 - DNA, 15 bp, Homo sapiens
ttacccattctgtgg

SEQ ID NO: 1020276 - DNA, 15 bp, Homo sapiens
attacccattctgtg

SEQ ID NO: 1020277 - DNA, 15 bp, Homo sapiens
aattacccattctgt

SEQ ID NO: 1020278 - DNA, 15 bp, Homo sapiens
aaattacccattctg

SEQ ID NO: 1020279 - DNA, 15 bp, Homo sapiens
taaattacccattct

SEQ ID NO: 1020280 - DNA, 15 bp, Homo sapiens
ataaattacccattc

SEQ ID NO: 1020281 - DNA, 15 bp, Homo sapiens
tataaattacccatt

SEQ ID NO: 1020282 - DNA, 15 bp, Homo sapiens
ttataaattacccat

SEQ ID NO: 1020283 - DNA, 15 bp, Homo sapiens
attataaattaccca

SEQ ID NO: 1020284 - DNA, 15 bp, Homo sapiens
cattataaattaccc

SEQ ID NO: 1020285 - DNA, 15 bp, Homo sapiens
ccattataaattacc

SEQ ID NO: 1020286 - DNA, 15 bp, Homo sapiens
tccattataaattac

SEQ ID NO: 1020287 - DNA, 15 bp, Homo sapiens
gtccattataaatta

SEQ ID NO: 1020288 - DNA, 15 bp, Homo sapiens
tgtccattataaatt

SEQ ID NO: 1020289 - DNA, 15 bp, Homo sapiens
ctgtccattataaat

SEQ ID NO: 1020290 - DNA, 15 bp, Homo sapiens
tctgtccattataaa

SEQ ID NO: 1020291 - DNA, 15 bp, Homo sapiens
ttctgtccattataa

SEQ ID NO: 1020292 - DNA, 15 bp, Homo sapiens
tttctgtccattata

SEQ ID NO: 1020293 - DNA, 15 bp, Homo sapiens
atttctgtccattat

SEQ ID NO: 1020294 - DNA, 15 bp, Homo sapiens
aatttctgtccatta

SEQ ID NO: 1020295 - DNA, 15 bp, Homo sapiens
aaatttctgtccatt

SEQ ID NO: 1020296 - DNA, 15 bp, Homo sapiens
taaatttctgtccat

SEQ ID NO: 1020297 - DNA, 15 bp, Homo sapiens
ataaatttctgtcca

SEQ ID NO: 1020298 - DNA, 15 bp, Homo sapiens
aataaatttctgtcc

SEQ ID NO: 1020299 - DNA, 15 bp, Homo sapiens
caataaatttctgtc

SEQ ID NO: 1020300 - DNA, 15 bp, Homo sapiens
ccaataaatttctgt

SEQ ID NO: 1020301 - DNA, 15 bp, Homo sapiens
gccaataaatttctg

SEQ ID NO: 1020302 - DNA, 15 bp, Homo sapiens
agccaataaatttct

SEQ ID NO: 1020303 - DNA, 15 bp, Homo sapiens
gagccaataaatttc

SEQ ID NO: 1020304 - DNA, 15 bp, Homo sapiens
tgagccaataaattt

SEQ ID NO: 1020305 - DNA, 15 bp, Homo sapiens
gtgagccaataaatt

SEQ ID NO: 1020306 - DNA, 15 bp, Homo sapiens
tgtgagccaataaat

SEQ ID NO: 1020307 - DNA, 15 bp, Homo sapiens
atgtgagccaataaa

SEQ ID NO: 1020308 - DNA, 15 bp, Homo sapiens
aatgtgagccaataa

SEQ ID NO: 1020309 - DNA, 15 bp, Homo sapiens
aaatgtgagccaata

SEQ ID NO: 1020310 - DNA, 15 bp, Homo sapiens
gaaatgtgagccaat

SEQ ID NO: 1020311 - DNA, 15 bp, Homo sapiens
agaaatgtgagccaa

SEQ ID NO: 1020312 - DNA, 15 bp, Homo sapiens
cagaaatgtgagcca

SEQ ID NO: 1020313 - DNA, 15 bp, Homo sapiens
ccagaaatgtgagcc

SEQ ID NO: 1020314 - DNA, 15 bp, Homo sapiens
cccagaaatgtgagc

SEQ ID NO: 1020315 - DNA, 15 bp, Homo sapiens
ccccagaaatgtgag

SEQ ID NO: 1020316 - DNA, 15 bp, Homo sapiens
cccccagaaatgtga

SEQ ID NO: 1020317 - DNA, 15 bp, Homo sapiens
gcccccagaaatgtg

SEQ ID NO: 1020318 - DNA, 15 bp, Homo sapiens
agcccccagaaatgt

SEQ ID NO: 1020319 - DNA, 15 bp, Homo sapiens
cagcccccagaaatg

SEQ ID NO: 1020320 - DNA, 15 bp, Homo sapiens
ccagcccccagaaat

SEQ ID NO: 1020321 - DNA, 15 bp, Homo sapiens
cccagcccccagaaa

SEQ ID NO: 1020322 - DNA, 15 bp, Homo sapiens
tcccagcccccagaa

SEQ ID NO: 1020323 - DNA, 15 bp, Homo sapiens
ctcccagcccccaga

SEQ ID NO: 1020324 - DNA, 15 bp, Homo sapiens
cctcccagcccccag

SEQ ID NO: 1020325 - DNA, 15 bp, Homo sapiens
acctcccagccccca

SEQ ID NO: 1020326 - DNA, 15 bp, Homo sapiens
gacctcccagccccc

SEQ ID NO: 1020327 - DNA, 15 bp, Homo sapiens
ggacctcccagcccc

SEQ ID NO: 1020328 - DNA, 15 bp, Homo sapiens
tggacctcccagccc

SEQ ID NO: 1020329 - DNA, 15 bp, Homo sapiens
ttggacctcccagcc

SEQ ID NO: 1020330 - DNA, 15 bp, Homo sapiens
attggacctcccagc

SEQ ID NO: 1020331 - DNA, 15 bp, Homo sapiens
tattggacctcccag

SEQ ID NO: 1020332 - DNA, 15 bp, Homo sapiens
atattggacctccca

SEQ ID NO: 1020333 - DNA, 15 bp, Homo sapiens
gatattggacctccc

SEQ ID NO: 1020334 - DNA, 15 bp, Homo sapiens
tgatattggacctcc

SEQ ID NO: 1020335 - DNA, 15 bp, Homo sapiens
ttgatattggacctc

SEQ ID NO: 1020336 - DNA, 15 bp, Homo sapiens
cttgatattggacct

SEQ ID NO: 1020337 - DNA, 15 bp, Homo sapiens
acttgatattggacc

SEQ ID NO: 1020338 - DNA, 15 bp, Homo sapiens
aacttgatattggac

SEQ ID NO: 1020339 - DNA, 15 bp, Homo sapiens
caacttgatattgga

SEQ ID NO: 1020340 - DNA, 15 bp, Homo sapiens
gcaacttgatattgg

SEQ ID NO: 1020341 - DNA, 15 bp, Homo sapiens
ggcaacttgatattg

SEQ ID NO: 1020342 - DNA, 15 bp, Homo sapiens
aggcaacttgatatt

SEQ ID NO: 1020343 - DNA, 15 bp, Homo sapiens
aaggcaacttgatat

SEQ ID NO: 1020344 - DNA, 15 bp, Homo sapiens
aaaggcaacttgata

SEQ ID NO: 1020345 - DNA, 15 bp, Homo sapiens
aaaaggcaacttgat

SEQ ID NO: 1020346 - DNA, 15 bp, Homo sapiens
aaaaaggcaacttga

SEQ ID NO: 1020347 - DNA, 15 bp, Homo sapiens
gaaaaaggcaacttg

SEQ ID NO: 1020348 - DNA, 15 bp, Homo sapiens
agaaaaaggcaactt

SEQ ID NO: 1020349 - DNA, 15 bp, Homo sapiens
cagaaaaaggcaact

SEQ ID NO: 1020350 - DNA, 15 bp, Homo sapiens
gcagaaaaaggcaac

SEQ ID NO: 1020351 - DNA, 15 bp, Homo sapiens
cgcagaaaaaggcaa

SEQ ID NO: 1020352 - DNA, 15 bp, Homo sapiens
acgcagaaaaaggca

SEQ ID NO: 1020353 - DNA, 15 bp, Homo sapiens
gacgcagaaaaaggc

SEQ ID NO: 1020354 - DNA, 15 bp, Homo sapiens
agacgcagaaaaagg

SEQ ID NO: 1020355 - DNA, 15 bp, Homo sapiens
aagacgcagaaaaag

SEQ ID NO: 1020356 - DNA, 15 bp, Homo sapiens
taagacgcagaaaaa

SEQ ID NO: 1020357 - DNA, 15 bp, Homo sapiens
ttaagacgcagaaaa

SEQ ID NO: 1020358 - DNA, 15 bp, Homo sapiens
gttaagacgcagaaa

SEQ ID NO: 1020359 - DNA, 15 bp, Homo sapiens
tgttaagacgcagaa

SEQ ID NO: 1020360 - DNA, 15 bp, Homo sapiens
atgttaagacgcaga

SEQ ID NO: 1020361 - DNA, 15 bp, Homo sapiens
catgttaagacgcag

SEQ ID NO: 1020362 - DNA, 15 bp, Homo sapiens
ccatgttaagacgca

SEQ ID NO: 1020363 - DNA, 15 bp, Homo sapiens
accatgttaagacgc

SEQ ID NO: 1020364 - DNA, 15 bp, Homo sapiens
caccatgttaagacg

SEQ ID NO: 1020365 - DNA, 15 bp, Homo sapiens
ccaccatgttaagac

SEQ ID NO: 1020366 - DNA, 15 bp, Homo sapiens
tccaccatgttaaga

SEQ ID NO: 1020367 - DNA, 15 bp, Homo sapiens
ttccaccatgttaag

SEQ ID NO: 1020368 - DNA, 15 bp, Homo sapiens
cttccaccatgttaa

SEQ ID NO: 1020369 - DNA, 15 bp, Homo sapiens
ccttccaccatgtta

SEQ ID NO: 1020370 - DNA, 15 bp, Homo sapiens
gccttccaccatgtt

SEQ ID NO: 1020371 - DNA, 15 bp, Homo sapiens
tgccttccaccatgt

SEQ ID NO: 1020372 - DNA, 15 bp, Homo sapiens
atgccttccaccatg

SEQ ID NO: 1020373 - DNA, 15 bp, Homo sapiens
aatgccttccaccat

SEQ ID NO: 1020374 - DNA, 15 bp, Homo sapiens
taatgccttccacca

SEQ ID NO: 1020375 - DNA, 15 bp, Homo sapiens
ataatgccttccacc

SEQ ID NO: 1020376 - DNA, 15 bp, Homo sapiens
tataatgccttccac

SEQ ID NO: 1020377 - DNA, 15 bp, Homo sapiens
atataatgccttcca

SEQ ID NO: 1020378 - DNA, 15 bp, Homo sapiens
catataatgccttcc

SEQ ID NO: 1020379 - DNA, 15 bp, Homo sapiens
tcatataatgccttc

SEQ ID NO: 1020380 - DNA, 15 bp, Homo sapiens
gtcatataatgcctt

SEQ ID NO: 1020381 - DNA, 15 bp, Homo sapiens
tgtcatataatgcct

SEQ ID NO: 1020382 - DNA, 15 bp, Homo sapiens
ttgtcatataatgcc

SEQ ID NO: 1020383 - DNA, 15 bp, Homo sapiens
tttgtcatataatgc

SEQ ID NO: 1020384 - DNA, 15 bp, Homo sapiens
ttttgtcatataatg

SEQ ID NO: 1020385 - DNA, 15 bp, Homo sapiens
cttttgtcatataat

SEQ ID NO: 1020386 - DNA, 15 bp, Homo sapiens
ccttttgtcatataa

SEQ ID NO: 1020387 - DNA, 15 bp, Homo sapiens
cccttttgtcatata

SEQ ID NO: 1020388 - DNA, 15 bp, Homo sapiens
gcccttttgtcatat

SEQ ID NO: 1020389 - DNA, 15 bp, Homo sapiens
tgcccttttgtcata

SEQ ID NO: 1020390 - DNA, 15 bp, Homo sapiens
ttgcccttttgtcat

SEQ ID NO: 1020391 - DNA, 15 bp, Homo sapiens
tttgcccttttgtca

SEQ ID NO: 1020392 - DNA, 15 bp, Homo sapiens
ctttgcccttttgtc

SEQ ID NO: 1020393 - DNA, 15 bp, Homo sapiens
tctttgcccttttgt

SEQ ID NO: 1020394 - DNA, 15 bp, Homo sapiens
ttctttgcccttttg

SEQ ID NO: 1020395 - DNA, 15 bp, Homo sapiens
tttctttgccctttt

SEQ ID NO: 1020396 - DNA, 15 bp, Homo sapiens
ctttctttgcccttt

SEQ ID NO: 1020397 - DNA, 15 bp, Homo sapiens
cctttctttgccctt

SEQ ID NO: 1020398 - DNA, 15 bp, Homo sapiens
ccctttctttgccct

SEQ ID NO: 1020399 - DNA, 15 bp, Homo sapiens
accctttctttgccc

SEQ ID NO: 1020400 - DNA, 15 bp, Homo sapiens
caccctttctttgcc

SEQ ID NO: 1020401 - DNA, 15 bp, Homo sapiens
tcaccctttctttgc

SEQ ID NO: 1020402 - DNA, 15 bp, Homo sapiens
ctcaccctttctttg

SEQ ID NO: 1020403 - DNA, 15 bp, Homo sapiens
tctcaccctttcttt

SEQ ID NO: 1020404 - DNA, 15 bp, Homo sapiens
ctctcaccctttctt

SEQ ID NO: 1020405 - DNA, 15 bp, Homo sapiens
tctctcaccctttct

SEQ ID NO: 1020406 - DNA, 15 bp, Homo sapiens
ctctctcaccctttc

SEQ ID NO: 1020407 - DNA, 15 bp, Homo sapiens
tctctctcacccttt

SEQ ID NO: 1020408 - DNA, 15 bp, Homo sapiens
ctctctctcaccctt

SEQ ID NO: 1020409 - DNA, 15 bp, Homo sapiens
gctctctctcaccct

SEQ ID NO: 1020410 - DNA, 15 bp, Homo sapiens
tgctctctctcaccc

SEQ ID NO: 1020411 - DNA, 15 bp, Homo sapiens
ttgctctctctcacc

SEQ ID NO: 1020412 - DNA, 15 bp, Homo sapiens
cttgctctctctcac

SEQ ID NO: 1020413 - DNA, 15 bp, Homo sapiens
tcttgctctctctca

SEQ ID NO: 1020414 - DNA, 15 bp, Homo sapiens
ctcttgctctctctc

SEQ ID NO: 1020415 - DNA, 15 bp, Homo sapiens
cctcttgctctctct

SEQ ID NO: 1020416 - DNA, 15 bp, Homo sapiens
tcctcttgctctctc

SEQ ID NO: 1020417 - DNA, 15 bp, Homo sapiens
ctcctcttgctctct

SEQ ID NO: 1020418 - DNA, 15 bp, Homo sapiens
cctcctcttgctctc

SEQ ID NO: 1020419 - DNA, 15 bp, Homo sapiens
ccctcctcttgctct

SEQ ID NO: 1020420 - DNA, 15 bp, Homo sapiens
accctcctcttgctc

SEQ ID NO: 1020421 - DNA, 15 bp, Homo sapiens
caccctcctcttgct

SEQ ID NO: 1020422 - DNA, 15 bp, Homo sapiens
tcaccctcctcttgc

SEQ ID NO: 1020423 - DNA, 15 bp, Homo sapiens
ctcaccctcctcttg

SEQ ID NO: 1020424 - DNA, 15 bp, Homo sapiens
gctcaccctcctctt

SEQ ID NO: 1020425 - DNA, 15 bp, Homo sapiens
agctcaccctcctct

SEQ ID NO: 1020426 - DNA, 15 bp, Homo sapiens
gagctcaccctcctc

SEQ ID NO: 1020427 - DNA, 15 bp, Homo sapiens
tgagctcaccctcct

SEQ ID NO: 1020428 - DNA, 15 bp, Homo sapiens
gtgagctcaccctcc

SEQ ID NO: 1020429 - DNA, 15 bp, Homo sapiens
agtgagctcaccctc

SEQ ID NO: 1020430 - DNA, 15 bp, Homo sapiens
gagtgagctcaccct

SEQ ID NO: 1020431 - DNA, 15 bp, Homo sapiens
ggagtgagctcaccc

SEQ ID NO: 1020432 - DNA, 15 bp, Homo sapiens
aggagtgagctcacc

SEQ ID NO: 1020433 - DNA, 15 bp, Homo sapiens
caggagtgagctcac

SEQ ID NO: 1020434 - DNA, 15 bp, Homo sapiens
acaggagtgagctca

SEQ ID NO: 1020435 - DNA, 15 bp, Homo sapiens
cacaggagtgagctc

SEQ ID NO: 1020436 - DNA, 15 bp, Homo sapiens
tcacaggagtgagct

SEQ ID NO: 1020437 - DNA, 15 bp, Homo sapiens
atcacaggagtgagc

SEQ ID NO: 1020438 - DNA, 15 bp, Homo sapiens
tatcacaggagtgag

SEQ ID NO: 1020439 - DNA, 15 bp, Homo sapiens
ttatcacaggagtga

SEQ ID NO: 1020440 - DNA, 15 bp, Homo sapiens
gttatcacaggagtg

SEQ ID NO: 1020441 - DNA, 15 bp, Homo sapiens
tgttatcacaggagt

SEQ ID NO: 1020442 - DNA, 15 bp, Homo sapiens
ttgttatcacaggag

SEQ ID NO: 1020443 - DNA, 15 bp, Homo sapiens
tttgttatcacagga

SEQ ID NO: 1020444 - DNA, 15 bp, Homo sapiens
atttgttatcacagg

SEQ ID NO: 1020445 - DNA, 15 bp, Homo sapiens
gatttgttatcacag

SEQ ID NO: 1020446 - DNA, 15 bp, Homo sapiens
ggatttgttatcaca

SEQ ID NO: 1020447 - DNA, 15 bp, Homo sapiens
tggatttgttatcac

SEQ ID NO: 1020448 - DNA, 15 bp, Homo sapiens
gtggatttgttatca

SEQ ID NO: 1020449 - DNA, 15 bp, Homo sapiens
agtggatttgttatc

SEQ ID NO: 1020450 - DNA, 15 bp, Homo sapiens
gagtggatttgttat

SEQ ID NO: 1020451 - DNA, 15 bp, Homo sapiens
ggagtggatttgtta

SEQ ID NO: 1020452 - DNA, 15 bp, Homo sapiens
gggagtggatttgtt

SEQ ID NO: 1020453 - DNA, 15 bp, Homo sapiens
tgggagtggatttgt

SEQ ID NO: 1020454 - DNA, 15 bp, Homo sapiens
atgggagtggatttg

SEQ ID NO: 1020455 - DNA, 15 bp, Homo sapiens
catgggagtggattt

SEQ ID NO: 1020456 - DNA, 15 bp, Homo sapiens
tcatgggagtggatt

SEQ ID NO: 1020457 - DNA, 15 bp, Homo sapiens
ttcatgggagtggat

SEQ ID NO: 1020458 - DNA, 15 bp, Homo sapiens
gttcatgggagtgga

SEQ ID NO: 1020459 - DNA, 15 bp, Homo sapiens
tgttcatgggagtgg

SEQ ID NO: 1020460 - DNA, 15 bp, Homo sapiens
gtgttcatgggagtg

SEQ ID NO: 1020461 - DNA, 15 bp, Homo sapiens
agtgttcatgggagt

SEQ ID NO: 1020462 - DNA, 15 bp, Homo sapiens
aagtgttcatgggag

SEQ ID NO: 1020463 - DNA, 15 bp, Homo sapiens
aaagtgttcatggga

SEQ ID NO: 1020464 - DNA, 15 bp, Homo sapiens
gaaagtgttcatggg

SEQ ID NO: 1020465 - DNA, 15 bp, Homo sapiens
ggaaagtgttcatgg

SEQ ID NO: 1020466 - DNA, 15 bp, Homo sapiens
gggaaagtgttcatg

SEQ ID NO: 1020467 - DNA, 15 bp, Homo sapiens
ggggaaagtgttcat

SEQ ID NO: 1020468 - DNA, 15 bp, Homo sapiens
tggggaaagtgttca

SEQ ID NO: 1020469 - DNA, 15 bp, Homo sapiens
ctggggaaagtgttc

SEQ ID NO: 1020470 - DNA, 15 bp, Homo sapiens
tctggggaaagtgtt

SEQ ID NO: 1020471 - DNA, 15 bp, Homo sapiens
atctggggaaagtgt

SEQ ID NO: 1020472 - DNA, 15 bp, Homo sapiens
tatctggggaaagtg

SEQ ID NO: 1020473 - DNA, 15 bp, Homo sapiens
ttatctggggaaagt

SEQ ID NO: 1020474 - DNA, 15 bp, Homo sapiens
gttatctggggaaag

SEQ ID NO: 1020475 - DNA, 15 bp, Homo sapiens
agttatctggggaaa

SEQ ID NO: 1020476 - DNA, 15 bp, Homo sapiens
cagttatctggggaa

SEQ ID NO: 1020477 - DNA, 15 bp, Homo sapiens
gcagttatctgggga

SEQ ID NO: 1020478 - DNA, 15 bp, Homo sapiens
tgcagttatctgggg

SEQ ID NO: 1020479 - DNA, 15 bp, Homo sapiens
atgcagttatctggg

SEQ ID NO: 1020480 - DNA, 15 bp, Homo sapiens
aatgcagttatctgg

SEQ ID NO: 1020481 - DNA, 15 bp, Homo sapiens
taatgcagttatctg

SEQ ID NO: 1020482 - DNA, 15 bp, Homo sapiens
ctaatgcagttatct

SEQ ID NO: 1020483 - DNA, 15 bp, Homo sapiens
actaatgcagttatc

SEQ ID NO: 1020484 - DNA, 15 bp, Homo sapiens
gactaatgcagttat

SEQ ID NO: 1020485 - DNA, 15 bp, Homo sapiens
ggactaatgcagtta

SEQ ID NO: 1020486 - DNA, 15 bp, Homo sapiens
tggactaatgcagtt

SEQ ID NO: 1020487 - DNA, 15 bp, Homo sapiens
atggactaatgcagt

SEQ ID NO: 1020488 - DNA, 15 bp, Homo sapiens
aatggactaatgcag

SEQ ID NO: 1020489 - DNA, 15 bp, Homo sapiens
gaatggactaatgca

SEQ ID NO: 1020490 - DNA, 15 bp, Homo sapiens
tgaatggactaatgc

SEQ ID NO: 1020491 - DNA, 15 bp, Homo sapiens
atgaatggactaatg

SEQ ID NO: 1020492 - DNA, 15 bp, Homo sapiens
catgaatggactaat

SEQ ID NO: 1020493 - DNA, 15 bp, Homo sapiens
tcatgaatggactaa

SEQ ID NO: 1020494 - DNA, 15 bp, Homo sapiens
ctcatgaatggacta

SEQ ID NO: 1020495 - DNA, 15 bp, Homo sapiens
cctcatgaatggact

SEQ ID NO: 1020496 - DNA, 15 bp, Homo sapiens
ccctcatgaatggac

SEQ ID NO: 1020497 - DNA, 15 bp, Homo sapiens
accctcatgaatgga

SEQ ID NO: 1020498 - DNA, 15 bp, Homo sapiens
caccctcatgaatgg

SEQ ID NO: 1020499 - DNA, 15 bp, Homo sapiens
ccaccctcatgaatg

SEQ ID NO: 1020500 - DNA, 15 bp, Homo sapiens
tccaccctcatgaat

SEQ ID NO: 1020501 - DNA, 15 bp, Homo sapiens
ttccaccctcatgaa

SEQ ID NO: 1020502 - DNA, 15 bp, Homo sapiens
gttccaccctcatga

SEQ ID NO: 1020503 - DNA, 15 bp, Homo sapiens
cgttccaccctcatg

SEQ ID NO: 1020504 - DNA, 15 bp, Homo sapiens
gcgttccaccctcat

SEQ ID NO: 1020505 - DNA, 15 bp, Homo sapiens
agcgttccaccctca

SEQ ID NO: 1020506 - DNA, 15 bp, Homo sapiens
aagcgttccaccctc

SEQ ID NO: 1020507 - DNA, 15 bp, Homo sapiens
taagcgttccaccct

SEQ ID NO: 1020508 - DNA, 15 bp, Homo sapiens
ataagcgttccaccc

SEQ ID NO: 1020509 - DNA, 15 bp, Homo sapiens
cataagcgttccacc

SEQ ID NO: 1020510 - DNA, 15 bp, Homo sapiens
tcataagcgttccac

SEQ ID NO: 1020511 - DNA, 15 bp, Homo sapiens
gtcataagcgttcca

SEQ ID NO: 1020512 - DNA, 15 bp, Homo sapiens
ggtcataagcgttcc

SEQ ID NO: 1020513 - DNA, 15 bp, Homo sapiens
aggtcataagcgttc

SEQ ID NO: 1020514 - DNA, 15 bp, Homo sapiens
taggtcataagcgtt

SEQ ID NO: 1020515 - DNA, 15 bp, Homo sapiens
ttaggtcataagcgt

SEQ ID NO: 1020516 - DNA, 15 bp, Homo sapiens
tttaggtcataagcg

SEQ ID NO: 1020517 - DNA, 15 bp, Homo sapiens
gtttaggtcataagc

SEQ ID NO: 1020518 - DNA, 15 bp, Homo sapiens
tgtttaggtcataag

SEQ ID NO: 1020519 - DNA, 15 bp, Homo sapiens
gtgtttaggtcataa

SEQ ID NO: 1020520 - DNA, 15 bp, Homo sapiens
ggtgtttaggtcata

SEQ ID NO: 1020521 - DNA, 15 bp, Homo sapiens
aggtgtttaggtcat

SEQ ID NO: 1020522 - DNA, 15 bp, Homo sapiens
aaggtgtttaggtca

SEQ ID NO: 1020523 - DNA, 15 bp, Homo sapiens
aaaggtgtttaggtc

SEQ ID NO: 1020524 - DNA, 15 bp, Homo sapiens
aaaaggtgtttaggt

SEQ ID NO: 1020525 - DNA, 15 bp, Homo sapiens
taaaaggtgtttagg

SEQ ID NO: 1020526 - DNA, 15 bp, Homo sapiens
ataaaaggtgtttag

SEQ ID NO: 1020527 - DNA, 15 bp, Homo sapiens
tataaaaggtgttta

SEQ ID NO: 1020528 - DNA, 15 bp, Homo sapiens
atataaaaggtgttt

SEQ ID NO: 1020529 - DNA, 15 bp, Homo sapiens
catataaaaggtgtt

SEQ ID NO: 1020530 - DNA, 15 bp, Homo sapiens
acatataaaaggtgt

SEQ ID NO: 1020531 - DNA, 15 bp, Homo sapiens
aacatataaaaggtg

SEQ ID NO: 1020532 - DNA, 15 bp, Homo sapiens
gaacatataaaaggt

SEQ ID NO: 1020533 - DNA, 15 bp, Homo sapiens
tgaacatataaaagg

SEQ ID NO: 1020534 - DNA, 15 bp, Homo sapiens
gtgaacatataaaag

SEQ ID NO: 1020535 - DNA, 15 bp, Homo sapiens
ggtgaacatataaaa

SEQ ID NO: 1020536 - DNA, 15 bp, Homo sapiens
aggtgaacatataaa

SEQ ID NO: 1020537 - DNA, 15 bp, Homo sapiens
gaggtgaacatataa

SEQ ID NO: 1020538 - DNA, 15 bp, Homo sapiens
agaggtgaacatata

SEQ ID NO: 1020539 - DNA, 15 bp, Homo sapiens
gagaggtgaacatat

SEQ ID NO: 1020540 - DNA, 15 bp, Homo sapiens
tgagaggtgaacata

SEQ ID NO: 1020541 - DNA, 15 bp, Homo sapiens
ttgagaggtgaacat

SEQ ID NO: 1020542 - DNA, 15 bp, Homo sapiens
attgagaggtgaaca

SEQ ID NO: 1020543 - DNA, 15 bp, Homo sapiens
tattgagaggtgaac

SEQ ID NO: 1020544 - DNA, 15 bp, Homo sapiens
gtattgagaggtgaa

SEQ ID NO: 1020545 - DNA, 15 bp, Homo sapiens
ggtattgagaggtga

SEQ ID NO: 1020546 - DNA, 15 bp, Homo sapiens
tggtattgagaggtg

SEQ ID NO: 1020547 - DNA, 15 bp, Homo sapiens
atggtattgagaggt

SEQ ID NO: 1020548 - DNA, 15 bp, Homo sapiens
gatggtattgagagg

SEQ ID NO: 1020549 - DNA, 15 bp, Homo sapiens
tgatggtattgagag

SEQ ID NO: 1020550 - DNA, 15 bp, Homo sapiens
gtgatggtattgaga

SEQ ID NO: 1020551 - DNA, 15 bp, Homo sapiens
cgtgatggtattgag

SEQ ID NO: 1020552 - DNA, 15 bp, Homo sapiens
tcgtgatggtattga

SEQ ID NO: 1020553 - DNA, 15 bp, Homo sapiens
atcgtgatggtattg

SEQ ID NO: 1020554 - DNA, 15 bp, Homo sapiens
catcgtgatggtatt

SEQ ID NO: 1020555 - DNA, 15 bp, Homo sapiens
tcatcgtgatggtat

SEQ ID NO: 1020556 - DNA, 15 bp, Homo sapiens
atcatcgtgatggta

SEQ ID NO: 1020557 - DNA, 15 bp, Homo sapiens
tatcatcgtgatggt

SEQ ID NO: 1020558 - DNA, 15 bp, Homo sapiens
ttatcatcgtgatgg

SEQ ID NO: 1020559 - DNA, 15 bp, Homo sapiens
attatcatcgtgatg

SEQ ID NO: 1020560 - DNA, 15 bp, Homo sapiens
aattatcatcgtgat

SEQ ID NO: 1020561 - DNA, 15 bp, Homo sapiens
taattatcatcgtga

SEQ ID NO: 1020562 - DNA, 15 bp, Homo sapiens
ttaattatcatcgtg

SEQ ID NO: 1020563 - DNA, 15 bp, Homo sapiens
tttaattatcatcgt

SEQ ID NO: 1020564 - DNA, 15 bp, Homo sapiens
atttaattatcatcg

SEQ ID NO: 1020565 - DNA, 15 bp, Homo sapiens
aatttaattatcatc

SEQ ID NO: 1020566 - DNA, 15 bp, Homo sapiens
aaatttaattatcat

SEQ ID NO: 1020567 - DNA, 15 bp, Homo sapiens
gaaatttaattatca

SEQ ID NO: 1020568 - DNA, 15 bp, Homo sapiens
tgaaatttaattatc

SEQ ID NO: 1020569 - DNA, 15 bp, Homo sapiens
ttgaaatttaattat

SEQ ID NO: 1020570 - DNA, 15 bp, Homo sapiens
attgaaatttaatta

SEQ ID NO: 1020571 - DNA, 15 bp, Homo sapiens
tattgaaatttaatt

SEQ ID NO: 1020572 - DNA, 15 bp, Homo sapiens
atattgaaatttaat

SEQ ID NO: 1020573 - DNA, 15 bp, Homo sapiens
catattgaaatttaa

SEQ ID NO: 1020574 - DNA, 15 bp, Homo sapiens
tcatattgaaattta

SEQ ID NO: 1020575 - DNA, 15 bp, Homo sapiens
ctcatattgaaattt

SEQ ID NO: 1020576 - DNA, 15 bp, Homo sapiens
actcatattgaaatt

SEQ ID NO: 1020577 - DNA, 15 bp, Homo sapiens
aactcatattgaaat

SEQ ID NO: 1020578 - DNA, 15 bp, Homo sapiens
aaactcatattgaaa

SEQ ID NO: 1020579 - DNA, 15 bp, Homo sapiens
gaaactcatattgaa

SEQ ID NO: 1020580 - DNA, 15 bp, Homo sapiens
cgaaactcatattga

SEQ ID NO: 1020581 - DNA, 15 bp, Homo sapiens
ccgaaactcatattg

SEQ ID NO: 1020582 - DNA, 15 bp, Homo sapiens
tccgaaactcatatt

SEQ ID NO: 1020583 - DNA, 15 bp, Homo sapiens
cctccgaaactcata

SEQ ID NO: 1020584 - DNA, 15 bp, Homo sapiens
ccctccgaaactcat

SEQ ID NO: 1020585 - DNA, 15 bp, Homo sapiens
cccctccgaaactca

SEQ ID NO: 1020586 - DNA, 15 bp, Homo sapiens
tcccctccgaaactc

SEQ ID NO: 1020587 - DNA, 15 bp, Homo sapiens
gtcccctccgaaact

SEQ ID NO: 1020588 - DNA, 15 bp, Homo sapiens
tgtcccctccgaaac

SEQ ID NO: 1020589 - DNA, 15 bp, Homo sapiens
ctgtcccctccgaaa

SEQ ID NO: 1020590 - DNA, 15 bp, Homo sapiens
tctgtcccctccgaa

SEQ ID NO: 1020591 - DNA, 15 bp, Homo sapiens
gtctgtcccctccga

SEQ ID NO: 1020592 - DNA, 15 bp, Homo sapiens
tgtctgtcccctccg

SEQ ID NO: 1020593 - DNA, 15 bp, Homo sapiens
aatgtctgtcccctc

SEQ ID NO: 1020594 - DNA, 15 bp, Homo sapiens
gaatgtctgtcccct

SEQ ID NO: 1020595 - DNA, 15 bp, Homo sapiens
tgaatgtctgtcccc

SEQ ID NO: 1020596 - DNA, 15 bp, Homo sapiens
ttgaatgtctgtccc

SEQ ID NO: 1020597 - DNA, 15 bp, Homo sapiens
tttgaatgtctgtcc

SEQ ID NO: 1020598 - DNA, 15 bp, Homo sapiens
gtttgaatgtctgtc

SEQ ID NO: 1020599 - DNA, 15 bp, Homo sapiens
ggtttgaatgtctgt

SEQ ID NO: 1020600 - DNA, 15 bp, Homo sapiens
tggtttgaatgtctg

SEQ ID NO: 1020601 - DNA, 15 bp, Homo sapiens
atggtttgaatgtct

SEQ ID NO: 1020602 - DNA, 15 bp, Homo sapiens
tatggtttgaatgtc

SEQ ID NO: 1020603 - DNA, 15 bp, Homo sapiens
ctatggtttgaatgt

SEQ ID NO: 1020604 - DNA, 15 bp, Homo sapiens
gctatggtttgaatg

SEQ ID NO: 1020605 - DNA, 15 bp, Homo sapiens
tgctatggtttgaat

SEQ ID NO: 1020606 - DNA, 15 bp, Homo sapiens
ttgctatggtttgaa

SEQ ID NO: 1020607 - DNA, 15 bp, Homo sapiens
cttgctatggtttga

SEQ ID NO: 1020608 - DNA, 15 bp, Homo sapiens
tcttgctatggtttg

SEQ ID NO: 1020609 - DNA, 15 bp, Homo sapiens
ctcttgctatggttt

SEQ ID NO: 1020610 - DNA, 15 bp, Homo sapiens
actcttgctatggtt

SEQ ID NO: 1020611 - DNA, 15 bp, Homo sapiens
aactcttgctatggt

SEQ ID NO: 1020612 - DNA, 15 bp, Homo sapiens
taactcttgctatgg

SEQ ID NO: 1020613 - DNA, 15 bp, Homo sapiens
ataactcttgctatg

SEQ ID NO: 1020614 - DNA, 15 bp, Homo sapiens
aataactcttgctat

SEQ ID NO: 1020615 - DNA, 15 bp, Homo sapiens
caataactcttgcta

SEQ ID NO: 1020616 - DNA, 15 bp, Homo sapiens
ccaataactcttgct

SEQ ID NO: 1020617 - DNA, 15 bp, Homo sapiens
tccaataactcttgc

SEQ ID NO: 1020618 - DNA, 15 bp, Homo sapiens
ctccaataactcttg

SEQ ID NO: 1020619 - DNA, 15 bp, Homo sapiens
tctccaataactctt

SEQ ID NO: 1020620 - DNA, 15 bp, Homo sapiens
ttctccaataactct

SEQ ID NO: 1020621 - DNA, 15 bp, Homo sapiens
tttctccaataactc

SEQ ID NO: 1020622 - DNA, 15 bp, Homo sapiens
ttttctccaataact

SEQ ID NO: 1020623 - DNA, 15 bp, Homo sapiens
tttttctccaataac

SEQ ID NO: 1020624 - DNA, 15 bp, Homo sapiens
atttttctccaataa

SEQ ID NO: 1020625 - DNA, 15 bp, Homo sapiens
catttttctccaata

SEQ ID NO: 1020626 - DNA, 15 bp, Homo sapiens
acatttttctccaat

SEQ ID NO: 1020627 - DNA, 15 bp, Homo sapiens
gacatttttctccaa

SEQ ID NO: 1020628 - DNA, 15 bp, Homo sapiens
cgacatttttctcca

SEQ ID NO: 1020629 - DNA, 15 bp, Homo sapiens
ccgacatttttctcc

SEQ ID NO: 1020630 - DNA, 15 bp, Homo sapiens
tccgacatttttctc

SEQ ID NO: 1020631 - DNA, 15 bp, Homo sapiens
ctccgacatttttct

SEQ ID NO: 1020632 - DNA, 15 bp, Homo sapiens
tctccgacatttttc

SEQ ID NO: 1020633 - DNA, 15 bp, Homo sapiens
ctctccgacattttt

SEQ ID NO: 1020634 - DNA, 15 bp, Homo sapiens
cctctccgacatttt

SEQ ID NO: 1020635 - DNA, 15 bp, Homo sapiens
gcctctccgacattt

SEQ ID NO: 1020636 - DNA, 15 bp, Homo sapiens
ggcctctccgacatt

SEQ ID NO: 1020637 - DNA, 15 bp, Homo sapiens
aggcctctccgacat

SEQ ID NO: 1020638 - DNA, 15 bp, Homo sapiens
taggcctctccgaca

SEQ ID NO: 1020639 - DNA, 15 bp, Homo sapiens
ttaggcctctccgac

SEQ ID NO: 1020640 - DNA, 15 bp, Homo sapiens
attaggcctctccga

SEQ ID NO: 1020641 - DNA, 15 bp, Homo sapiens
gattaggcctctccg

SEQ ID NO: 1020642 - DNA, 15 bp, Homo sapiens
agattaggcctctcc

SEQ ID NO: 1020643 - DNA, 15 bp, Homo sapiens
aagattaggcctctc

SEQ ID NO: 1020644 - DNA, 15 bp, Homo sapiens
aaagattaggcctct

SEQ ID NO: 1020645 - DNA, 15 bp, Homo sapiens
aaaagattaggcctc

SEQ ID NO: 1020646 - DNA, 15 bp, Homo sapiens
taaaagattaggcct

SEQ ID NO: 1020647 - DNA, 15 bp, Homo sapiens
ataaaagattaggcc

SEQ ID NO: 1020648 - DNA, 15 bp, Homo sapiens
tataaaagattaggc

SEQ ID NO: 1020649 - DNA, 15 bp, Homo sapiens
atataaaagattagg

SEQ ID NO: 1020650 - DNA, 15 bp, Homo sapiens
aatataaaagattag

SEQ ID NO: 1020651 - DNA, 15 bp, Homo sapiens
aaatataaaagatta

SEQ ID NO: 1020652 - DNA, 15 bp, Homo sapiens
taaatataaaagatt

SEQ ID NO: 1020653 - DNA, 15 bp, Homo sapiens
ttaaatataaaagat

SEQ ID NO: 1020654 - DNA, 15 bp, Homo sapiens
attaaatataaaaga

SEQ ID NO: 1020655 - DNA, 15 bp, Homo sapiens
tattaaatataaaag

SEQ ID NO: 1020656 - DNA, 15 bp, Homo sapiens
ctattaaatataaaa

SEQ ID NO: 1020657 - DNA, 15 bp, Homo sapiens
gctattaaatataaa

SEQ ID NO: 1020658 - DNA, 15 bp, Homo sapiens
tgctattaaatataa

SEQ ID NO: 1020659 - DNA, 15 bp, Homo sapiens
atgctattaaatata

SEQ ID NO: 1020660 - DNA, 15 bp, Homo sapiens
aatgctattaaatat

SEQ ID NO: 1020661 - DNA, 15 bp, Homo sapiens
aaatgctattaaata

SEQ ID NO: 1020662 - DNA, 15 bp, Homo sapiens
gaaatgctattaaat

SEQ ID NO: 1020663 - DNA, 15 bp, Homo sapiens
agaaatgctattaaa

SEQ ID NO: 1020664 - DNA, 15 bp, Homo sapiens
aagaaatgctattaa

SEQ ID NO: 1020665 - DNA, 15 bp, Homo sapiens
aaagaaatgctatta

SEQ ID NO: 1020666 - DNA, 15 bp, Homo sapiens
gaaagaaatgctatt

SEQ ID NO: 1020667 - DNA, 15 bp, Homo sapiens
agaaagaaatgctat

SEQ ID NO: 1020668 - DNA, 15 bp, Homo sapiens
aagaaagaaatgcta

SEQ ID NO: 1020669 - DNA, 15 bp, Homo sapiens
gaagaaagaaatgct

SEQ ID NO: 1020670 - DNA, 15 bp, Homo sapiens
ggaagaaagaaatgc

SEQ ID NO: 1020671 - DNA, 15 bp, Homo sapiens
aggaagaaagaaatg

SEQ ID NO: 1020672 - DNA, 15 bp, Homo sapiens
taggaagaaagaaat

SEQ ID NO: 1020673 - DNA, 15 bp, Homo sapiens
ataggaagaaagaaa

SEQ ID NO: 1020674 - DNA, 15 bp, Homo sapiens
aataggaagaaagaa

SEQ ID NO: 1020675 - DNA, 15 bp, Homo sapiens
taataggaagaaaga

SEQ ID NO: 1020676 - DNA, 15 bp, Homo sapiens
gtaataggaagaaag

SEQ ID NO: 1020677 - DNA, 15 bp, Homo sapiens
agtaataggaagaaa

SEQ ID NO: 1020678 - DNA, 15 bp, Homo sapiens
gagtaataggaagaa

SEQ ID NO: 1020679 - DNA, 15 bp, Homo sapiens
agagtaataggaaga

SEQ ID NO: 1020680 - DNA, 15 bp, Homo sapiens
gagagtaataggaag

SEQ ID NO: 1020681 - DNA, 15 bp, Homo sapiens
tgagagtaataggaa

SEQ ID NO: 1020682 - DNA, 15 bp, Homo sapiens
atgagagtaatagga

SEQ ID NO: 1020683 - DNA, 15 bp, Homo sapiens
tatgagagtaatagg

SEQ ID NO: 1020684 - DNA, 15 bp, Homo sapiens
atatgagagtaatag

SEQ ID NO: 1020685 - DNA, 15 bp, Homo sapiens
aatatgagagtaata

SEQ ID NO: 1020686 - DNA, 15 bp, Homo sapiens
taatatgagagtaat

SEQ ID NO: 1020687 - DNA, 15 bp, Homo sapiens
ttaatatgagagtaa

SEQ ID NO: 1020688 - DNA, 15 bp, Homo sapiens
gttaatatgagagta

SEQ ID NO: 1020689 - DNA, 15 bp, Homo sapiens
ggttaatatgagagt

SEQ ID NO: 1020690 - DNA, 15 bp, Homo sapiens
aggttaatatgagag

SEQ ID NO: 1020691 - DNA, 15 bp, Homo sapiens
aaggttaatatgaga

SEQ ID NO: 1020692 - DNA, 15 bp, Homo sapiens
gaaggttaatatgag

SEQ ID NO: 1020693 - DNA, 15 bp, Homo sapiens
agaaggttaatatga

SEQ ID NO: 1020694 - DNA, 15 bp, Homo sapiens
gagaaggttaatatg

SEQ ID NO: 1020695 - DNA, 15 bp, Homo sapiens
ggagaaggttaatat

SEQ ID NO: 1020696 - DNA, 15 bp, Homo sapiens
aggagaaggttaata

SEQ ID NO: 1020697 - DNA, 15 bp, Homo sapiens
gaggagaaggttaat

SEQ ID NO: 1020698 - DNA, 15 bp, Homo sapiens
tgaggagaaggttaa

SEQ ID NO: 1020699 - DNA, 15 bp, Homo sapiens
ctgaggagaaggtta

SEQ ID NO: 1020700 - DNA, 15 bp, Homo sapiens
cctgaggagaaggtt

SEQ ID NO: 1020701 - DNA, 15 bp, Homo sapiens
acctgaggagaaggt

SEQ ID NO: 1020702 - DNA, 15 bp, Homo sapiens
aacctgaggagaagg

SEQ ID NO: 1020703 - DNA, 15 bp, Homo sapiens
gaacctgaggagaag

SEQ ID NO: 1020704 - DNA, 15 bp, Homo sapiens
ggaacctgaggagaa

SEQ ID NO: 1020705 - DNA, 15 bp, Homo sapiens
aggaacctgaggaga

SEQ ID NO: 1020706 - DNA, 15 bp, Homo sapiens
aaggaacctgaggag

SEQ ID NO: 1020707 - DNA, 15 bp, Homo sapiens
caaggaacctgagga

SEQ ID NO: 1020708 - DNA, 15 bp, Homo sapiens
ccaaggaacctgagg

SEQ ID NO: 1020709 - DNA, 15 bp, Homo sapiens
accaaggaacctgag

SEQ ID NO: 1020710 - DNA, 15 bp, Homo sapiens
aaccaaggaacctga

SEQ ID NO: 1020711 - DNA, 15 bp, Homo sapiens
caaccaaggaacctg

SEQ ID NO: 1020712 - DNA, 15 bp, Homo sapiens
tcaaccaaggaacct

SEQ ID NO: 1020713 - DNA, 15 bp, Homo sapiens
gtcaaccaaggaacc

SEQ ID NO: 1020714 - DNA, 15 bp, Homo sapiens
agtcaaccaaggaac

SEQ ID NO: 1020715 - DNA, 15 bp, Homo sapiens
aagtcaaccaaggaa

SEQ ID NO: 1020716 - DNA, 15 bp, Homo sapiens
taagtcaaccaagga

SEQ ID NO: 1020717 - DNA, 15 bp, Homo sapiens
ctaagtcaaccaagg

SEQ ID NO: 1020718 - DNA, 15 bp, Homo sapiens
tctaagtcaaccaag

SEQ ID NO: 1020719 - DNA, 15 bp, Homo sapiens
ttctaagtcaaccaa

SEQ ID NO: 1020720 - DNA, 15 bp, Homo sapiens
tttctaagtcaacca

SEQ ID NO: 1020721 - DNA, 15 bp, Homo sapiens
ttttctaagtcaacc

SEQ ID NO: 1020722 - DNA, 15 bp, Homo sapiens
cttttctaagtcaac

SEQ ID NO: 1020723 - DNA, 15 bp, Homo sapiens
tcttttctaagtcaa

SEQ ID NO: 1020724 - DNA, 15 bp, Homo sapiens
ctcttttctaagtca

SEQ ID NO: 1020725 - DNA, 15 bp, Homo sapiens
tctcttttctaagtc

SEQ ID NO: 1020726 - DNA, 15 bp, Homo sapiens
ttctcttttctaagt

SEQ ID NO: 1020727 - DNA, 15 bp, Homo sapiens
attctcttttctaag

SEQ ID NO: 1020728 - DNA, 15 bp, Homo sapiens
aattctcttttctaa

SEQ ID NO: 1020729 - DNA, 15 bp, Homo sapiens
caattctcttttcta

SEQ ID NO: 1020730 - DNA, 15 bp, Homo sapiens
tcaattctcttttct

SEQ ID NO: 1020731 - DNA, 15 bp, Homo sapiens
atcaattctcttttc

SEQ ID NO: 1020732 - DNA, 15 bp, Homo sapiens
gatcaattctctttt

SEQ ID NO: 1020733 - DNA, 15 bp, Homo sapiens
agatcaattctcttt

SEQ ID NO: 1020734 - DNA, 15 bp, Homo sapiens
aagatcaattctctt

SEQ ID NO: 1020735 - DNA, 15 bp, Homo sapiens
caagatcaattctct

SEQ ID NO: 1020736 - DNA, 15 bp, Homo sapiens
gcaagatcaattctc

SEQ ID NO: 1020737 - DNA, 15 bp, Homo sapiens
ggcaagatcaattct

SEQ ID NO: 1020738 - DNA, 15 bp, Homo sapiens
tggcaagatcaattc

SEQ ID NO: 1020739 - DNA, 15 bp, Homo sapiens
atggcaagatcaatt

SEQ ID NO: 1020740 - DNA, 15 bp, Homo sapiens
catggcaagatcaat

SEQ ID NO: 1020741 - DNA, 15 bp, Homo sapiens
gcatggcaagatcaa

SEQ ID NO: 1020742 - DNA, 15 bp, Homo sapiens
tgcatggcaagatca

SEQ ID NO: 1020743 - DNA, 15 bp, Homo sapiens
atgcatggcaagatc

SEQ ID NO: 1020744 - DNA, 15 bp, Homo sapiens
gatgcatggcaagat

SEQ ID NO: 1020745 - DNA, 15 bp, Homo sapiens
ggatgcatggcaaga

SEQ ID NO: 1020746 - DNA, 15 bp, Homo sapiens
tggatgcatggcaag

SEQ ID NO: 1020747 - DNA, 15 bp, Homo sapiens
gtggatgcatggcaa

SEQ ID NO: 1020748 - DNA, 15 bp, Homo sapiens
ggtggatgcatggca

SEQ ID NO: 1020749 - DNA, 15 bp, Homo sapiens
tggtggatgcatggc

SEQ ID NO: 1020750 - DNA, 15 bp, Homo sapiens
atggtggatgcatgg

SEQ ID NO: 1020751 - DNA, 15 bp, Homo sapiens
aatggtggatgcatg

SEQ ID NO: 1020752 - DNA, 15 bp, Homo sapiens
aaatggtggatgcat

SEQ ID NO: 1020753 - DNA, 15 bp, Homo sapiens
aaaatggtggatgca

SEQ ID NO: 1020754 - DNA, 15 bp, Homo sapiens
gaaaatggtggatgc

SEQ ID NO: 1020755 - DNA, 15 bp, Homo sapiens
ggaaaatggtggatg

SEQ ID NO: 1020756 - DNA, 15 bp, Homo sapiens
aggaaaatggtggat

SEQ ID NO: 1020757 - DNA, 15 bp, Homo sapiens
gaggaaaatggtgga

SEQ ID NO: 1020758 - DNA, 15 bp, Homo sapiens
ggaggaaaatggtgg

SEQ ID NO: 1020759 - DNA, 15 bp, Homo sapiens
aggaggaaaatggtg

SEQ ID NO: 1020760 - DNA, 15 bp, Homo sapiens
aaggaggaaaatggt

SEQ ID NO: 1020761 - DNA, 15 bp, Homo sapiens
taaggaggaaaatgg

SEQ ID NO: 1020762 - DNA, 15 bp, Homo sapiens
ataaggaggaaaatg

SEQ ID NO: 1020763 - DNA, 15 bp, Homo sapiens
cataaggaggaaaat

SEQ ID NO: 1020764 - DNA, 15 bp, Homo sapiens
acataaggaggaaaa

SEQ ID NO: 1020765 - DNA, 15 bp, Homo sapiens
aacataaggaggaaa

SEQ ID NO: 1020766 - DNA, 15 bp, Homo sapiens
gaacataaggaggaa

SEQ ID NO: 1020767 - DNA, 15 bp, Homo sapiens
agaacataaggagga

SEQ ID NO: 1020768 - DNA, 15 bp, Homo sapiens
tagaacataaggagg

SEQ ID NO: 1020769 - DNA, 15 bp, Homo sapiens
atagaacataaggag

SEQ ID NO: 1020770 - DNA, 15 bp, Homo sapiens
aatagaacataagga

SEQ ID NO: 1020771 - DNA, 15 bp, Homo sapiens
taatagaacataagg

SEQ ID NO: 1020772 - DNA, 15 bp, Homo sapiens
ctaatagaacataag

SEQ ID NO: 1020773 - DNA, 15 bp, Homo sapiens
actaatagaacataa

SEQ ID NO: 1020774 - DNA, 15 bp, Homo sapiens
cactaatagaacata

SEQ ID NO: 1020775 - DNA, 15 bp, Homo sapiens
tcactaatagaacat

SEQ ID NO: 1020776 - DNA, 15 bp, Homo sapiens
gtcactaatagaaca

SEQ ID NO: 1020777 - DNA, 15 bp, Homo sapiens
ggtcactaatagaac

SEQ ID NO: 1020778 - DNA, 15 bp, Homo sapiens
aggtcactaatagaa

SEQ ID NO: 1020779 - DNA, 15 bp, Homo sapiens
aaggtcactaataga

SEQ ID NO: 1020780 - DNA, 15 bp, Homo sapiens
caaggtcactaatag

SEQ ID NO: 1020781 - DNA, 15 bp, Homo sapiens
acaaggtcactaata

SEQ ID NO: 1020782 - DNA, 15 bp, Homo sapiens
aacaaggtcactaat

SEQ ID NO: 1020783 - DNA, 15 bp, Homo sapiens
aaacaaggtcactaa

SEQ ID NO: 1020784 - DNA, 15 bp, Homo sapiens
taaacaaggtcacta

SEQ ID NO: 1020785 - DNA, 15 bp, Homo sapiens
ataaacaaggtcact

SEQ ID NO: 1020786 - DNA, 15 bp, Homo sapiens
aataaacaaggtcac

SEQ ID NO: 1020787 - DNA, 15 bp, Homo sapiens
caataaacaaggtca

SEQ ID NO: 1020788 - DNA, 15 bp, Homo sapiens
acaataaacaaggtc

SEQ ID NO: 1020789 - DNA, 15 bp, Homo sapiens
gacaataaacaaggt

SEQ ID NO: 1020790 - DNA, 15 bp, Homo sapiens
agacaataaacaagg

SEQ ID NO: 1020791 - DNA, 15 bp, Homo sapiens
aagacaataaacaag

SEQ ID NO: 1020792 - DNA, 15 bp, Homo sapiens
gaagacaataaacaa

SEQ ID NO: 1020793 - DNA, 15 bp, Homo sapiens
agaagacaataaaca

SEQ ID NO: 1020794 - DNA, 15 bp, Homo sapiens
cagaagacaataaac

SEQ ID NO: 1020795 - DNA, 15 bp, Homo sapiens
acagaagacaataaa

SEQ ID NO: 1020796 - DNA, 15 bp, Homo sapiens
tacagaagacaataa

SEQ ID NO: 1020797 - DNA, 15 bp, Homo sapiens
ctacagaagacaata

SEQ ID NO: 1020798 - DNA, 15 bp, Homo sapiens
actacagaagacaat

SEQ ID NO: 1020799 - DNA, 15 bp, Homo sapiens
cactacagaagacaa

SEQ ID NO: 1020800 - DNA, 15 bp, Homo sapiens
tcactacagaagaca

SEQ ID NO: 1020801 - DNA, 15 bp, Homo sapiens
atcactacagaagac

SEQ ID NO: 1020802 - DNA, 15 bp, Homo sapiens
aatcactacagaaga

SEQ ID NO: 1020803 - DNA, 15 bp, Homo sapiens
taatcactacagaag

SEQ ID NO: 1020804 - DNA, 15 bp, Homo sapiens
ttaatcactacagaa

SEQ ID NO: 1020805 - DNA, 15 bp, Homo sapiens
cttaatcactacaga

SEQ ID NO: 1020806 - DNA, 15 bp, Homo sapiens
tcttaatcactacag

SEQ ID NO: 1020807 - DNA, 15 bp, Homo sapiens
ttcttaatcactaca

SEQ ID NO: 1020808 - DNA, 15 bp, Homo sapiens
attcttaatcactac

SEQ ID NO: 1020809 - DNA, 15 bp, Homo sapiens
tattcttaatcacta

SEQ ID NO: 1020810 - DNA, 15 bp, Homo sapiens
ctattcttaatcact

SEQ ID NO: 1020811 - DNA, 15 bp, Homo sapiens
tctattcttaatcac

SEQ ID NO: 1020812 - DNA, 15 bp, Homo sapiens
ttctattcttaatca

SEQ ID NO: 1020813 - DNA, 15 bp, Homo sapiens
tttctattcttaatc

SEQ ID NO: 1020814 - DNA, 15 bp, Homo sapiens
atttctattcttaat

SEQ ID NO: 1020815 - DNA, 15 bp, Homo sapiens
gatttctattcttaa

SEQ ID NO: 1020816 - DNA, 15 bp, Homo sapiens
agatttctattctta

SEQ ID NO: 1020817 - DNA, 15 bp, Homo sapiens
gagatttctattctt

SEQ ID NO: 1020818 - DNA, 15 bp, Homo sapiens
agagatttctattct

SEQ ID NO: 1020819 - DNA, 15 bp, Homo sapiens
gagagatttctattc

SEQ ID NO: 1020820 - DNA, 15 bp, Homo sapiens
agagagatttctatt

SEQ ID NO: 1020821 - DNA, 15 bp, Homo sapiens
aagagagatttctat

SEQ ID NO: 1020822 - DNA, 15 bp, Homo sapiens
gaagagagatttcta

SEQ ID NO: 1020823 - DNA, 15 bp, Homo sapiens
ggaagagagatttct

SEQ ID NO: 1020824 - DNA, 15 bp, Homo sapiens
gggaagagagatttc

SEQ ID NO: 1020825 - DNA, 15 bp, Homo sapiens
ggggaagagagattt

SEQ ID NO: 1020826 - DNA, 15 bp, Homo sapiens
tggggaagagagatt

SEQ ID NO: 1020827 - DNA, 15 bp, Homo sapiens
atggggaagagagat

SEQ ID NO: 1020828 - DNA, 15 bp, Homo sapiens
catggggaagagaga

SEQ ID NO: 1020829 - DNA, 15 bp, Homo sapiens
acatggggaagagag

SEQ ID NO: 1020830 - DNA, 15 bp, Homo sapiens
cacatggggaagaga

SEQ ID NO: 1020831 - DNA, 15 bp, Homo sapiens
acacatggggaagag

SEQ ID NO: 1020832 - DNA, 15 bp, Homo sapiens
gacacatggggaaga

SEQ ID NO: 1020833 - DNA, 15 bp, Homo sapiens
tgacacatggggaag

SEQ ID NO: 1020834 - DNA, 15 bp, Homo sapiens
gtgacacatggggaa

SEQ ID NO: 1020835 - DNA, 15 bp, Homo sapiens
tgtgacacatgggga

SEQ ID NO: 1020836 - DNA, 15 bp, Homo sapiens
atgtgacacatgggg

SEQ ID NO: 1020837 - DNA, 15 bp, Homo sapiens
tatgtgacacatggg

SEQ ID NO: 1020838 - DNA, 15 bp, Homo sapiens
ttatgtgacacatgg

SEQ ID NO: 1020839 - DNA, 15 bp, Homo sapiens
attatgtgacacatg

SEQ ID NO: 1020840 - DNA, 15 bp, Homo sapiens
tattatgtgacacat

SEQ ID NO: 1020841 - DNA, 15 bp, Homo sapiens
atattatgtgacaca

SEQ ID NO: 1020842 - DNA, 15 bp, Homo sapiens
aatattatgtgacac

SEQ ID NO: 1020843 - DNA, 15 bp, Homo sapiens
aaatattatgtgaca

SEQ ID NO: 1020844 - DNA, 15 bp, Homo sapiens
taaatattatgtgac

SEQ ID NO: 1020845 - DNA, 15 bp, Homo sapiens
ataaatattatgtga

SEQ ID NO: 1020846 - DNA, 15 bp, Homo sapiens
cataaatattatgtg

SEQ ID NO: 1020847 - DNA, 15 bp, Homo sapiens
ccataaatattatgt

SEQ ID NO: 1020848 - DNA, 15 bp, Homo sapiens
tccataaatattatg

SEQ ID NO: 1020849 - DNA, 15 bp, Homo sapiens
ttccataaatattat

SEQ ID NO: 1020850 - DNA, 15 bp, Homo sapiens
attccataaatatta

SEQ ID NO: 1020851 - DNA, 15 bp, Homo sapiens
aattccataaatatt

SEQ ID NO: 1020852 - DNA, 15 bp, Homo sapiens
aaattccataaatat

SEQ ID NO: 1020853 - DNA, 15 bp, Homo sapiens
aaaattccataaata

SEQ ID NO: 1020854 - DNA, 15 bp, Homo sapiens
caaaattccataaat

SEQ ID NO: 1020855 - DNA, 15 bp, Homo sapiens
tcaaaattccataaa

SEQ ID NO: 1020856 - DNA, 15 bp, Homo sapiens
gtcaaaattccataa

SEQ ID NO: 1020857 - DNA, 15 bp, Homo sapiens
tgtcaaaattccata

SEQ ID NO: 1020858 - DNA, 15 bp, Homo sapiens
ttgtcaaaattccat

SEQ ID NO: 1020859 - DNA, 15 bp, Homo sapiens
cttgtcaaaattcca

SEQ ID NO: 1020860 - DNA, 15 bp, Homo sapiens
tcttgtcaaaattcc

SEQ ID NO: 1020861 - DNA, 15 bp, Homo sapiens
gtcttgtcaaaattc

SEQ ID NO: 1020862 - DNA, 15 bp, Homo sapiens
ggtcttgtcaaaatt

SEQ ID NO: 1020863 - DNA, 15 bp, Homo sapiens
aggtcttgtcaaaat

SEQ ID NO: 1020864 - DNA, 15 bp, Homo sapiens
aaggtcttgtcaaaa

SEQ ID NO: 1020865 - DNA, 15 bp, Homo sapiens
taaggtcttgtcaaa

SEQ ID NO: 1020866 - DNA, 15 bp, Homo sapiens
ctaaggtcttgtcaa

SEQ ID NO: 1020867 - DNA, 15 bp, Homo sapiens
actaaggtcttgtca

SEQ ID NO: 1020868 - DNA, 15 bp, Homo sapiens
cactaaggtcttgtc

SEQ ID NO: 1020869 - DNA, 15 bp, Homo sapiens
ccactaaggtcttgt

SEQ ID NO: 1020870 - DNA, 15 bp, Homo sapiens
tccactaaggtcttg

SEQ ID NO: 1020871 - DNA, 15 bp, Homo sapiens
gtccactaaggtctt

SEQ ID NO: 1020872 - DNA, 15 bp, Homo sapiens
tgtccactaaggtct

SEQ ID NO: 1020873 - DNA, 15 bp, Homo sapiens
ttgtccactaaggtc

SEQ ID NO: 1020874 - DNA, 15 bp, Homo sapiens
tttgtccactaaggt

SEQ ID NO: 1020875 - DNA, 15 bp, Homo sapiens
ttttgtccactaagg

SEQ ID NO: 1020876 - DNA, 15 bp, Homo sapiens
attttgtccactaag

SEQ ID NO: 1020877 - DNA, 15 bp, Homo sapiens
cattttgtccactaa

SEQ ID NO: 1020878 - DNA, 15 bp, Homo sapiens
acattttgtccacta

SEQ ID NO: 1020879 - DNA, 15 bp, Homo sapiens
cacattttgtccact

SEQ ID NO: 1020880 - DNA, 15 bp, Homo sapiens
acacattttgtccac

SEQ ID NO: 1020881 - DNA, 15 bp, Homo sapiens
gacacattttgtcca

SEQ ID NO: 1020882 - DNA, 15 bp, Homo sapiens
tgacacattttgtcc

SEQ ID NO: 1020883 - DNA, 15 bp, Homo sapiens
atgacacattttgtc

SEQ ID NO: 1020884 - DNA, 15 bp, Homo sapiens
tatgacacattttgt

SEQ ID NO: 1020885 - DNA, 15 bp, Homo sapiens
gtatgacacattttg

SEQ ID NO: 1020886 - DNA, 15 bp, Homo sapiens
agtatgacacatttt

SEQ ID NO: 1020887 - DNA, 15 bp, Homo sapiens
cagtatgacacattt

SEQ ID NO: 1020888 - DNA, 15 bp, Homo sapiens
tcagtatgacacatt

SEQ ID NO: 1020889 - DNA, 15 bp, Homo sapiens
ttcagtatgacacat

SEQ ID NO: 1020890 - DNA, 15 bp, Homo sapiens
attcagtatgacaca

SEQ ID NO: 1020891 - DNA, 15 bp, Homo sapiens
cattcagtatgacac

SEQ ID NO: 1020892 - DNA, 15 bp, Homo sapiens
tcattcagtatgaca

SEQ ID NO: 1020893 - DNA, 15 bp, Homo sapiens
ctcattcagtatgac

SEQ ID NO: 1020894 - DNA, 15 bp, Homo sapiens
actcattcagtatga

SEQ ID NO: 1020895 - DNA, 15 bp, Homo sapiens
tactcattcagtatg

SEQ ID NO: 1020896 - DNA, 15 bp, Homo sapiens
ttactcattcagtat

SEQ ID NO: 1020897 - DNA, 15 bp, Homo sapiens
gttactcattcagta

SEQ ID NO: 1020898 - DNA, 15 bp, Homo sapiens
tgttactcattcagt

SEQ ID NO: 1020899 - DNA, 15 bp, Homo sapiens
ctgttactcattcag

SEQ ID NO: 1020900 - DNA, 15 bp, Homo sapiens
cctgttactcattca

SEQ ID NO: 1020901 - DNA, 15 bp, Homo sapiens
tcctgttactcattc

SEQ ID NO: 1020902 - DNA, 15 bp, Homo sapiens
ttcctgttactcatt

SEQ ID NO: 1020903 - DNA, 15 bp, Homo sapiens
cttcctgttactcat

SEQ ID NO: 1020904 - DNA, 15 bp, Homo sapiens
acttcctgttactca

SEQ ID NO: 1020905 - DNA, 15 bp, Homo sapiens
aacttcctgttactc

SEQ ID NO: 1020906 - DNA, 15 bp, Homo sapiens
caacttcctgttact

SEQ ID NO: 1020907 - DNA, 15 bp, Homo sapiens
tcaacttcctgttac

SEQ ID NO: 1020908 - DNA, 15 bp, Homo sapiens
atcaacttcctgtta

SEQ ID NO: 1020909 - DNA, 15 bp, Homo sapiens
catcaacttcctgtt

SEQ ID NO: 1020910 - DNA, 15 bp, Homo sapiens
gcatcaacttcctgt

SEQ ID NO: 1020911 - DNA, 15 bp, Homo sapiens
tgcatcaacttcctg

SEQ ID NO: 1020912 - DNA, 15 bp, Homo sapiens
gtgcatcaacttcct

SEQ ID NO: 1020913 - DNA, 15 bp, Homo sapiens
tgtgcatcaacttcc

SEQ ID NO: 1020914 - DNA, 15 bp, Homo sapiens
ttgtgcatcaacttc

SEQ ID NO: 1020915 - DNA, 15 bp, Homo sapiens
tttgtgcatcaactt

SEQ ID NO: 1020916 - DNA, 15 bp, Homo sapiens
gtttgtgcatcaact

SEQ ID NO: 1020917 - DNA, 15 bp, Homo sapiens
tgtttgtgcatcaac

SEQ ID NO: 1020918 - DNA, 15 bp, Homo sapiens
ttgtttgtgcatcaa

SEQ ID NO: 1020919 - DNA, 15 bp, Homo sapiens
gttgtttgtgcatca

SEQ ID NO: 1020920 - DNA, 15 bp, Homo sapiens
tgttgtttgtgcatc

SEQ ID NO: 1020921 - DNA, 15 bp, Homo sapiens
atgttgtttgtgcat

SEQ ID NO: 1020922 - DNA, 15 bp, Homo sapiens
aatgttgtttgtgca

SEQ ID NO: 1020923 - DNA, 15 bp, Homo sapiens
gaatgttgtttgtgc

SEQ ID NO: 1020924 - DNA, 15 bp, Homo sapiens
agaatgttgtttgtg

SEQ ID NO: 1020925 - DNA, 15 bp, Homo sapiens
aagaatgttgtttgt

SEQ ID NO: 1020926 - DNA, 15 bp, Homo sapiens
caagaatgttgtttg

SEQ ID NO: 1020927 - DNA, 15 bp, Homo sapiens
gcaagaatgttgttt

SEQ ID NO: 1020928 - DNA, 15 bp, Homo sapiens
tgcaagaatgttgtt

SEQ ID NO: 1020929 - DNA, 15 bp, Homo sapiens
ctgcaagaatgttgt

SEQ ID NO: 1020930 - DNA, 15 bp, Homo sapiens
cctgcaagaatgttg

SEQ ID NO: 1020931 - DNA, 15 bp, Homo sapiens
gcctgcaagaatgtt

SEQ ID NO: 1020932 - DNA, 15 bp, Homo sapiens
tgcctgcaagaatgt

SEQ ID NO: 1020933 - DNA, 15 bp, Homo sapiens
gtgcctgcaagaatg

SEQ ID NO: 1020934 - DNA, 15 bp, Homo sapiens
tgtgcctgcaagaat

SEQ ID NO: 1020935 - DNA, 15 bp, Homo sapiens
ctgtgcctgcaagaa

SEQ ID NO: 1020936 - DNA, 15 bp, Homo sapiens
tctgtgcctgcaaga

SEQ ID NO: 1020937 - DNA, 15 bp, Homo sapiens
ctctgtgcctgcaag

SEQ ID NO: 1020938 - DNA, 15 bp, Homo sapiens
cctctgtgcctgcaa

SEQ ID NO: 1020939 - DNA, 15 bp, Homo sapiens
tcctctgtgcctgca

SEQ ID NO: 1020940 - DNA, 15 bp, Homo sapiens
ttcctctgtgcctgc

SEQ ID NO: 1020941 - DNA, 15 bp, Homo sapiens
attcctctgtgcctg

SEQ ID NO: 1020942 - DNA, 15 bp, Homo sapiens
tattcctctgtgcct

SEQ ID NO: 1020943 - DNA, 15 bp, Homo sapiens
ctattcctctgtgcc

SEQ ID NO: 1020944 - DNA, 15 bp, Homo sapiens
cctattcctctgtgc

SEQ ID NO: 1020945 - DNA, 15 bp, Homo sapiens
acctattcctctgtg

SEQ ID NO: 1020946 - DNA, 15 bp, Homo sapiens
gacctattcctctgt

SEQ ID NO: 1020947 - DNA, 15 bp, Homo sapiens
tgacctattcctctg

SEQ ID NO: 1020948 - DNA, 15 bp, Homo sapiens
atgacctattcctct

SEQ ID NO: 1020949 - DNA, 15 bp, Homo sapiens
aatgacctattcctc

SEQ ID NO: 1020950 - DNA, 15 bp, Homo sapiens
aaatgacctattcct

SEQ ID NO: 1020951 - DNA, 15 bp, Homo sapiens
taaatgacctattcc

SEQ ID NO: 1020952 - DNA, 15 bp, Homo sapiens
gtaaatgacctattc

SEQ ID NO: 1020953 - DNA, 15 bp, Homo sapiens
agtaaatgacctatt

SEQ ID NO: 1020954 - DNA, 15 bp, Homo sapiens
aagtaaatgacctat

SEQ ID NO: 1020955 - DNA, 15 bp, Homo sapiens
caagtaaatgaccta

SEQ ID NO: 1020956 - DNA, 15 bp, Homo sapiens
acaagtaaatgacct

SEQ ID NO: 1020957 - DNA, 15 bp, Homo sapiens
tacaagtaaatgacc

SEQ ID NO: 1020958 - DNA, 15 bp, Homo sapiens
atacaagtaaatgac

SEQ ID NO: 1020959 - DNA, 15 bp, Homo sapiens
tatacaagtaaatga

SEQ ID NO: 1020960 - DNA, 15 bp, Homo sapiens
atatacaagtaaatg

SEQ ID NO: 1020961 - DNA, 15 bp, Homo sapiens
catatacaagtaaat

SEQ ID NO: 1020962 - DNA, 15 bp, Homo sapiens
tcatatacaagtaaa

SEQ ID NO: 1020963 - DNA, 15 bp, Homo sapiens
atcatatacaagtaa

SEQ ID NO: 1020964 - DNA, 15 bp, Homo sapiens
gatcatatacaagta

SEQ ID NO: 1020965 - DNA, 15 bp, Homo sapiens
tgatcatatacaagt

SEQ ID NO: 1020966 - DNA, 15 bp, Homo sapiens
atgatcatatacaag

SEQ ID NO: 1020967 - DNA, 15 bp, Homo sapiens
aatgatcatatacaa

SEQ ID NO: 1020968 - DNA, 15 bp, Homo sapiens
caatgatcatataca

SEQ ID NO: 1020969 - DNA, 15 bp, Homo sapiens
acaatgatcatatac

SEQ ID NO: 1020970 - DNA, 15 bp, Homo sapiens
gacaatgatcatata

SEQ ID NO: 1020971 - DNA, 15 bp, Homo sapiens
tgacaatgatcatat

SEQ ID NO: 1020972 - DNA, 15 bp, Homo sapiens
ttgacaatgatcata

SEQ ID NO: 1020973 - DNA, 15 bp, Homo sapiens
attgacaatgatcat

SEQ ID NO: 1020974 - DNA, 15 bp, Homo sapiens
gattgacaatgatca

SEQ ID NO: 1020975 - DNA, 15 bp, Homo sapiens
tgattgacaatgatc

SEQ ID NO: 1020976 - DNA, 15 bp, Homo sapiens
ttgattgacaatgat

SEQ ID NO: 1020977 - DNA, 15 bp, Homo sapiens
attgattgacaatga

SEQ ID NO: 1020978 - DNA, 15 bp, Homo sapiens
gattgattgacaatg

SEQ ID NO: 1020979 - DNA, 15 bp, Homo sapiens
tgattgattgacaat

SEQ ID NO: 1020980 - DNA, 15 bp, Homo sapiens
atgattgattgacaa

SEQ ID NO: 1020981 - DNA, 15 bp, Homo sapiens
aatgattgattgaca

SEQ ID NO: 1020982 - DNA, 15 bp, Homo sapiens
caatgattgattgac

SEQ ID NO: 1020983 - DNA, 15 bp, Homo sapiens
acaatgattgattga

SEQ ID NO: 1020984 - DNA, 15 bp, Homo sapiens
gacaatgattgattg

SEQ ID NO: 1020985 - DNA, 15 bp, Homo sapiens
ggacaatgattgatt

SEQ ID NO: 1020986 - DNA, 15 bp, Homo sapiens
tggacaatgattgat

SEQ ID NO: 1020987 - DNA, 15 bp, Homo sapiens
ctggacaatgattga

SEQ ID NO: 1020988 - DNA, 15 bp, Homo sapiens
actggacaatgattg

SEQ ID NO: 1020989 - DNA, 15 bp, Homo sapiens
aactggacaatgatt

SEQ ID NO: 1020990 - DNA, 15 bp, Homo sapiens
caactggacaatgat

SEQ ID NO: 1020991 - DNA, 15 bp, Homo sapiens
ccaactggacaatga

SEQ ID NO: 1020992 - DNA, 15 bp, Homo sapiens
tccaactggacaatg

SEQ ID NO: 1020993 - DNA, 15 bp, Homo sapiens
gtccaactggacaat

SEQ ID NO: 1020994 - DNA, 15 bp, Homo sapiens
ggtccaactggacaa

SEQ ID NO: 1020995 - DNA, 15 bp, Homo sapiens
gggtccaactggaca

SEQ ID NO: 1020996 - DNA, 15 bp, Homo sapiens
ggggtccaactggac

SEQ ID NO: 1020997 - DNA, 15 bp, Homo sapiens
cggggtccaactgga

SEQ ID NO: 1020998 - DNA, 15 bp, Homo sapiens
tcggggtccaactgg

SEQ ID NO: 1020999 - DNA, 15 bp, Homo sapiens
atcggggtccaactg

SEQ ID NO: 1021000 - DNA, 15 bp, Homo sapiens
aatcggggtccaact

SEQ ID NO: 1021001 - DNA, 15 bp, Homo sapiens
gaatcggggtccaac

SEQ ID NO: 1021002 - DNA, 15 bp, Homo sapiens
tgaatcggggtccaa

SEQ ID NO: 1021003 - DNA, 15 bp, Homo sapiens
ctgaatcggggtcca

SEQ ID NO: 1021004 - DNA, 15 bp, Homo sapiens
actgaatcggggtcc

SEQ ID NO: 1021005 - DNA, 15 bp, Homo sapiens
aactgaatcggggtc

SEQ ID NO: 1021006 - DNA, 15 bp, Homo sapiens
aaactgaatcggggt

SEQ ID NO: 1021007 - DNA, 15 bp, Homo sapiens
taaactgaatcgggg

SEQ ID NO: 1021008 - DNA, 15 bp, Homo sapiens
ataaactgaatcggg

SEQ ID NO: 1021009 - DNA, 15 bp, Homo sapiens
aataaactgaatcgg

SEQ ID NO: 1021010 - DNA, 15 bp, Homo sapiens
aaataaactgaatcg

SEQ ID NO: 1021011 - DNA, 15 bp, Homo sapiens
aaaataaactgaatc

SEQ ID NO: 1021012 - DNA, 15 bp, Homo sapiens
aaaaaataaactgaa

SEQ ID NO: 1021013 - DNA, 15 bp, Homo sapiens
caaaaaataaactga

SEQ ID NO: 1021014 - DNA, 15 bp, Homo sapiens
acaaaaaataaactg

SEQ ID NO: 1021015 - DNA, 15 bp, Homo sapiens
aacaaaaaataaact

SEQ ID NO: 1021016 - DNA, 15 bp, Homo sapiens
aaacaaaaaataaac

SEQ ID NO: 1021017 - DNA, 15 bp, Homo sapiens
aaaacaaaaaataaa

SEQ ID NO: 1021018 - DNA, 15 bp, Homo sapiens
caaaacaaaaaataa

SEQ ID NO: 1021019 - DNA, 15 bp, Homo sapiens
acaaaacaaaaaata

SEQ ID NO: 1021020 - DNA, 15 bp, Homo sapiens
agaaaaacaaaacaa

SEQ ID NO: 1021021 - DNA, 15 bp, Homo sapiens
gagaaaaacaaaaca

SEQ ID NO: 1021022 - DNA, 15 bp, Homo sapiens
ggagaaaaacaaaac

SEQ ID NO: 1021023 - DNA, 15 bp, Homo sapiens
aggagaaaaacaaaa

SEQ ID NO: 1021024 - DNA, 15 bp, Homo sapiens
aaggagaaaaacaaa

SEQ ID NO: 1021025 - DNA, 15 bp, Homo sapiens
aaaggagaaaaacaa

SEQ ID NO: 1021026 - DNA, 15 bp, Homo sapiens
aaaaggagaaaaaca

SEQ ID NO: 1021027 - DNA, 15 bp, Homo sapiens
gaaaaggagaaaaac

SEQ ID NO: 1021028 - DNA, 15 bp, Homo sapiens
tgaaaaggagaaaaa

SEQ ID NO: 1021029 - DNA, 15 bp, Homo sapiens
gtgaaaaggagaaaa

SEQ ID NO: 1021030 - DNA, 15 bp, Homo sapiens
tgtgaaaaggagaaa

SEQ ID NO: 1021031 - DNA, 15 bp, Homo sapiens
ctgtgaaaaggagaa

SEQ ID NO: 1021032 - DNA, 15 bp, Homo sapiens
tctgtgaaaaggaga

SEQ ID NO: 1021033 - DNA, 15 bp, Homo sapiens
atctgtgaaaaggag

SEQ ID NO: 1021034 - DNA, 15 bp, Homo sapiens
aatctgtgaaaagga

SEQ ID NO: 1021035 - DNA, 15 bp, Homo sapiens
gaatctgtgaaaagg

SEQ ID NO: 1021036 - DNA, 15 bp, Homo sapiens
agaatctgtgaaaag

SEQ ID NO: 1021037 - DNA, 15 bp, Homo sapiens
tagaatctgtgaaaa

SEQ ID NO: 1021038 - DNA, 15 bp, Homo sapiens
atagaatctgtgaaa

SEQ ID NO: 1021039 - DNA, 15 bp, Homo sapiens
gatagaatctgtgaa

SEQ ID NO: 1021040 - DNA, 15 bp, Homo sapiens
ggatagaatctgtga

SEQ ID NO: 1021041 - DNA, 15 bp, Homo sapiens
tggatagaatctgtg

SEQ ID NO: 1021042 - DNA, 15 bp, Homo sapiens
gtggatagaatctgt

SEQ ID NO: 1021043 - DNA, 15 bp, Homo sapiens
agtggatagaatctg

SEQ ID NO: 1021044 - DNA, 15 bp, Homo sapiens
tagtggatagaatct

SEQ ID NO: 1021045 - DNA, 15 bp, Homo sapiens
ttagtggatagaatc

SEQ ID NO: 1021046 - DNA, 15 bp, Homo sapiens
attagtggatagaat

SEQ ID NO: 1021047 - DNA, 15 bp, Homo sapiens
aattagtggatagaa

SEQ ID NO: 1021048 - DNA, 15 bp, Homo sapiens
aaattagtggataga

SEQ ID NO: 1021049 - DNA, 15 bp, Homo sapiens
aaaattagtggatag

SEQ ID NO: 1021050 - DNA, 15 bp, Homo sapiens
taaaattagtggata

SEQ ID NO: 1021051 - DNA, 15 bp, Homo sapiens
ttaaaattagtggat

SEQ ID NO: 1021052 - DNA, 15 bp, Homo sapiens
attaaaattagtgga

SEQ ID NO: 1021053 - DNA, 15 bp, Homo sapiens
gattaaaattagtgg

SEQ ID NO: 1021054 - DNA, 15 bp, Homo sapiens
agattaaaattagtg

SEQ ID NO: 1021055 - DNA, 15 bp, Homo sapiens
aagattaaaattagt

SEQ ID NO: 1021056 - DNA, 15 bp, Homo sapiens
aaagattaaaattag

SEQ ID NO: 1021057 - DNA, 15 bp, Homo sapiens
taaagattaaaatta

SEQ ID NO: 1021058 - DNA, 15 bp, Homo sapiens
ataaagattaaaatt

SEQ ID NO: 1021059 - DNA, 15 bp, Homo sapiens
aaataaagattaaaa

SEQ ID NO: 1021060 - DNA, 15 bp, Homo sapiens
gaaaaataaagatta

SEQ ID NO: 1021061 - DNA, 15 bp, Homo sapiens
tgaaaaataaagatt

SEQ ID NO: 1021062 - DNA, 15 bp, Homo sapiens
ctgaaaaataaagat

SEQ ID NO: 1021063 - DNA, 15 bp, Homo sapiens
tctgaaaaataaaga

SEQ ID NO: 1021064 - DNA, 15 bp, Homo sapiens
ttctgaaaaataaag

SEQ ID NO: 1021065 - DNA, 15 bp, Homo sapiens
tttctgaaaaataaa

SEQ ID NO: 1021066 - DNA, 15 bp, Homo sapiens
ttttctgaaaaataa

SEQ ID NO: 1021067 - DNA, 15 bp, Homo sapiens
tttttctgaaaaata

SEQ ID NO: 1021068 - DNA, 15 bp, Homo sapiens
ttttttctgaaaaat

SEQ ID NO: 1021069 - DNA, 15 bp, Homo sapiens
tttttttctgaaaaa

SEQ ID NO: 1021070 - DNA, 15 bp, Homo sapiens
atttttttctgaaaa

SEQ ID NO: 1021071 - DNA, 15 bp, Homo sapiens
catttttttctgaaa

SEQ ID NO: 1021072 - DNA, 15 bp, Homo sapiens
gcatttttttctgaa

SEQ ID NO: 1021073 - DNA, 15 bp, Homo sapiens
agcatttttttctga

SEQ ID NO: 1021074 - DNA, 15 bp, Homo sapiens
aagcatttttttctg

SEQ ID NO: 1021075 - DNA, 15 bp, Homo sapiens
aaagcatttttttct

SEQ ID NO: 1021076 - DNA, 15 bp, Homo sapiens
taaagcatttttttc

SEQ ID NO: 1021077 - DNA, 15 bp, Homo sapiens
ataaagcattttttt

SEQ ID NO: 1021078 - DNA, 15 bp, Homo sapiens
gataaagcatttttt

SEQ ID NO: 1021079 - DNA, 15 bp, Homo sapiens
agataaagcattttt

SEQ ID NO: 1021080 - DNA, 15 bp, Homo sapiens
aagataaagcatttt

SEQ ID NO: 1021081 - DNA, 15 bp, Homo sapiens
taagataaagcattt

SEQ ID NO: 1021082 - DNA, 15 bp, Homo sapiens
ataagataaagcatt

SEQ ID NO: 1021083 - DNA, 15 bp, Homo sapiens
aataagataaagcat

SEQ ID NO: 1021084 - DNA, 15 bp, Homo sapiens
caataagataaagca

SEQ ID NO: 1021085 - DNA, 15 bp, Homo sapiens
tcaataagataaagc

SEQ ID NO: 1021086 - DNA, 15 bp, Homo sapiens
ttcaataagataaag

SEQ ID NO: 1021087 - DNA, 15 bp, Homo sapiens
gttcaataagataaa

SEQ ID NO: 1021088 - DNA, 15 bp, Homo sapiens
ggttcaataagataa

SEQ ID NO: 1021089 - DNA, 15 bp, Homo sapiens
aggttcaataagata

SEQ ID NO: 1021090 - DNA, 15 bp, Homo sapiens
gaggttcaataagat

SEQ ID NO: 1021091 - DNA, 15 bp, Homo sapiens
tgaggttcaataaga

SEQ ID NO: 1021092 - DNA, 15 bp, Homo sapiens
ctgaggttcaataag

SEQ ID NO: 1021093 - DNA, 15 bp, Homo sapiens
tctgaggttcaataa

SEQ ID NO: 1021094 - DNA, 15 bp, Homo sapiens
gtctgaggttcaata

SEQ ID NO: 1021095 - DNA, 15 bp, Homo sapiens
ggtctgaggttcaat

SEQ ID NO: 1021096 - DNA, 15 bp, Homo sapiens
tggtctgaggttcaa

SEQ ID NO: 1021097 - DNA, 15 bp, Homo sapiens
ttggtctgaggttca

SEQ ID NO: 1021098 - DNA, 15 bp, Homo sapiens
tttggtctgaggttc

SEQ ID NO: 1021099 - DNA, 15 bp, Homo sapiens
gtttggtctgaggtt

SEQ ID NO: 1021100 - DNA, 15 bp, Homo sapiens
tgtttggtctgaggt

SEQ ID NO: 1021101 - DNA, 15 bp, Homo sapiens
gtgtttggtctgagg

SEQ ID NO: 1021102 - DNA, 15 bp, Homo sapiens
agtgtttggtctgag

SEQ ID NO: 1021103 - DNA, 15 bp, Homo sapiens
aagtgtttggtctga

SEQ ID NO: 1021104 - DNA, 15 bp, Homo sapiens
aaagtgtttggtctg

SEQ ID NO: 1021105 - DNA, 15 bp, Homo sapiens
caaagtgtttggtct

SEQ ID NO: 1021106 - DNA, 15 bp, Homo sapiens
acaaagtgtttggtc

SEQ ID NO: 1021107 - DNA, 15 bp, Homo sapiens
aacaaagtgtttggt

SEQ ID NO: 1021108 - DNA, 15 bp, Homo sapiens
aaacaaagtgtttgg

SEQ ID NO: 1021109 - DNA, 15 bp, Homo sapiens
aaaacaaagtgtttg

SEQ ID NO: 1021110 - DNA, 15 bp, Homo sapiens
aaaaacaaagtgttt

SEQ ID NO: 1021111 - DNA, 15 bp, Homo sapiens
gaaaaacaaagtgtt

SEQ ID NO: 1021112 - DNA, 15 bp, Homo sapiens
cgaaaaacaaagtgt

SEQ ID NO: 1021113 - DNA, 15 bp, Homo sapiens
tcgaaaaacaaagtg

SEQ ID NO: 1021114 - DNA, 15 bp, Homo sapiens
atcgaaaaacaaagt

SEQ ID NO: 1021115 - DNA, 15 bp, Homo sapiens
catcgaaaaacaaag

SEQ ID NO: 1021116 - DNA, 15 bp, Homo sapiens
gcatcgaaaaacaaa

SEQ ID NO: 1021117 - DNA, 15 bp, Homo sapiens
tgcatcgaaaaacaa

SEQ ID NO: 1021118 - DNA, 15 bp, Homo sapiens
ctgcatcgaaaaaca

SEQ ID NO: 1021119 - DNA, 15 bp, Homo sapiens
tctgcatcgaaaaac

SEQ ID NO: 1021120 - DNA, 15 bp, Homo sapiens
gtctgcatcgaaaaa

SEQ ID NO: 1021121 - DNA, 15 bp, Homo sapiens
agtctgcatcgaaaa

SEQ ID NO: 1021122 - DNA, 15 bp, Homo sapiens
cagtctgcatcgaaa

SEQ ID NO: 1021123 - DNA, 15 bp, Homo sapiens
tcagtctgcatcgaa

SEQ ID NO: 1021124 - DNA, 15 bp, Homo sapiens
ctcagtctgcatcga

SEQ ID NO: 1021125 - DNA, 15 bp, Homo sapiens
actcagtctgcatcg

SEQ ID NO: 1021126 - DNA, 15 bp, Homo sapiens
aactcagtctgcatc

SEQ ID NO: 1021127 - DNA, 15 bp, Homo sapiens
taactcagtctgcat

SEQ ID NO: 1021128 - DNA, 15 bp, Homo sapiens
ataactcagtctgca

SEQ ID NO: 1021129 - DNA, 15 bp, Homo sapiens
cataactcagtctgc

SEQ ID NO: 1021130 - DNA, 15 bp, Homo sapiens
acataactcagtctg

SEQ ID NO: 1021131 - DNA, 15 bp, Homo sapiens
aacataactcagtct

SEQ ID NO: 1021132 - DNA, 15 bp, Homo sapiens
aaacataactcagtc

SEQ ID NO: 1021133 - DNA, 15 bp, Homo sapiens
taaacataactcagt

SEQ ID NO: 1021134 - DNA, 15 bp, Homo sapiens
ttaaacataactcag

SEQ ID NO: 1021135 - DNA, 15 bp, Homo sapiens
cttaaacataactca

SEQ ID NO: 1021136 - DNA, 15 bp, Homo sapiens
ccttaaacataactc

SEQ ID NO: 1021137 - DNA, 15 bp, Homo sapiens
gccttaaacataact

SEQ ID NO: 1021138 - DNA, 15 bp, Homo sapiens
agccttaaacataac

SEQ ID NO: 1021139 - DNA, 15 bp, Homo sapiens
tagccttaaacataa

SEQ ID NO: 1021140 - DNA, 15 bp, Homo sapiens
gtagccttaaacata

SEQ ID NO: 1021141 - DNA, 15 bp, Homo sapiens
tgtagccttaaacat

SEQ ID NO: 1021142 - DNA, 15 bp, Homo sapiens
atgtagccttaaaca

SEQ ID NO: 1021143 - DNA, 15 bp, Homo sapiens
catgtagccttaaac

SEQ ID NO: 1021144 - DNA, 15 bp, Homo sapiens
tcatgtagccttaaa

SEQ ID NO: 1021145 - DNA, 15 bp, Homo sapiens
ttcatgtagccttaa

SEQ ID NO: 1021146 - DNA, 15 bp, Homo sapiens
gttcatgtagcctta

SEQ ID NO: 1021147 - DNA, 15 bp, Homo sapiens
ggttcatgtagcctt

SEQ ID NO: 1021148 - DNA, 15 bp, Homo sapiens
gggttcatgtagcct

SEQ ID NO: 1021149 - DNA, 15 bp, Homo sapiens
ggggttcatgtagcc

SEQ ID NO: 1021150 - DNA, 15 bp, Homo sapiens
tggggttcatgtagc

SEQ ID NO: 1021151 - DNA, 15 bp, Homo sapiens
ctggggttcatgtag

SEQ ID NO: 1021152 - DNA, 15 bp, Homo sapiens
tctggggttcatgta

SEQ ID NO: 1021153 - DNA, 15 bp, Homo sapiens
gtctggggttcatgt

SEQ ID NO: 1021154 - DNA, 15 bp, Homo sapiens
agtctggggttcatg

SEQ ID NO: 1021155 - DNA, 15 bp, Homo sapiens
tagtctggggttcat

SEQ ID NO: 1021156 - DNA, 15 bp, Homo sapiens
ctagtctggggttca

SEQ ID NO: 1021157 - DNA, 15 bp, Homo sapiens
actagtctggggttc

SEQ ID NO: 1021158 - DNA, 15 bp, Homo sapiens
aactagtctggggtt

SEQ ID NO: 1021159 - DNA, 15 bp, Homo sapiens
caactagtctggggt

SEQ ID NO: 1021160 - DNA, 15 bp, Homo sapiens
acaactagtctgggg

SEQ ID NO: 1021161 - DNA, 15 bp, Homo sapiens
aacaactagtctggg

SEQ ID NO: 1021162 - DNA, 15 bp, Homo sapiens
aaacaactagtctgg

SEQ ID NO: 1021163 - DNA, 15 bp, Homo sapiens
caaacaactagtctg

SEQ ID NO: 1021164 - DNA, 15 bp, Homo sapiens
gcaaacaactagtct

SEQ ID NO: 1021165 - DNA, 15 bp, Homo sapiens
agcaaacaactagtc

SEQ ID NO: 1021166 - DNA, 15 bp, Homo sapiens
cagcaaacaactagt

SEQ ID NO: 1021167 - DNA, 15 bp, Homo sapiens
gcagcaaacaactag

SEQ ID NO: 1021168 - DNA, 15 bp, Homo sapiens
agcagcaaacaacta

SEQ ID NO: 1021169 - DNA, 15 bp, Homo sapiens
gagcagcaaacaact

SEQ ID NO: 1021170 - DNA, 15 bp, Homo sapiens
ggagcagcaaacaac

SEQ ID NO: 1021171 - DNA, 15 bp, Homo sapiens
aggagcagcaaacaa

SEQ ID NO: 1021172 - DNA, 15 bp, Homo sapiens
taggagcagcaaaca

SEQ ID NO: 1021173 - DNA, 15 bp, Homo sapiens
ttaggagcagcaaac

SEQ ID NO: 1021174 - DNA, 15 bp, Homo sapiens
tttaggagcagcaaa

SEQ ID NO: 1021175 - DNA, 15 bp, Homo sapiens
ttttaggagcagcaa

SEQ ID NO: 1021176 - DNA, 15 bp, Homo sapiens
gttttaggagcagca

SEQ ID NO: 1021177 - DNA, 15 bp, Homo sapiens
ggttttaggagcagc

SEQ ID NO: 1021178 - DNA, 15 bp, Homo sapiens
aggttttaggagcag

SEQ ID NO: 1021179 - DNA, 15 bp, Homo sapiens
aaggttttaggagca

SEQ ID NO: 1021180 - DNA, 15 bp, Homo sapiens
gaaggttttaggagc

SEQ ID NO: 1021181 - DNA, 15 bp, Homo sapiens
ggaaggttttaggag

SEQ ID NO: 1021182 - DNA, 15 bp, Homo sapiens
gggaaggttttagga

SEQ ID NO: 1021183 - DNA, 15 bp, Homo sapiens
agggaaggttttagg

SEQ ID NO: 1021184 - DNA, 15 bp, Homo sapiens
cagggaaggttttag

SEQ ID NO: 1021185 - DNA, 15 bp, Homo sapiens
acagggaaggtttta

SEQ ID NO: 1021186 - DNA, 15 bp, Homo sapiens
aacagggaaggtttt

SEQ ID NO: 1021187 - DNA, 15 bp, Homo sapiens
gaacagggaaggttt

SEQ ID NO: 1021188 - DNA, 15 bp, Homo sapiens
ggaacagggaaggtt

SEQ ID NO: 1021189 - DNA, 15 bp, Homo sapiens
aggaacagggaaggt

SEQ ID NO: 1021190 - DNA, 15 bp, Homo sapiens
gaggaacagggaagg

SEQ ID NO: 1021191 - DNA, 15 bp, Homo sapiens
tgaggaacagggaag

SEQ ID NO: 1021192 - DNA, 15 bp, Homo sapiens
atgaggaacagggaa

SEQ ID NO: 1021193 - DNA, 15 bp, Homo sapiens
tatgaggaacaggga

SEQ ID NO: 1021194 - DNA, 15 bp, Homo sapiens
ttatgaggaacaggg

SEQ ID NO: 1021195 - DNA, 15 bp, Homo sapiens
attatgaggaacagg

SEQ ID NO: 1021196 - DNA, 15 bp, Homo sapiens
gattatgaggaacag

SEQ ID NO: 1021197 - DNA, 15 bp, Homo sapiens
tgattatgaggaaca

SEQ ID NO: 1021198 - DNA, 15 bp, Homo sapiens
ttgattatgaggaac

SEQ ID NO: 1021199 - DNA, 15 bp, Homo sapiens
cttgattatgaggaa

SEQ ID NO: 1021200 - DNA, 15 bp, Homo sapiens
acttgattatgagga

SEQ ID NO: 1021201 - DNA, 15 bp, Homo sapiens
tacttgattatgagg

SEQ ID NO: 1021202 - DNA, 15 bp, Homo sapiens
ttacttgattatgag

SEQ ID NO: 1021203 - DNA, 15 bp, Homo sapiens
tttacttgattatga

SEQ ID NO: 1021204 - DNA, 15 bp, Homo sapiens
gtttacttgattatg

SEQ ID NO: 1021205 - DNA, 15 bp, Homo sapiens
tgtttacttgattat

SEQ ID NO: 1021206 - DNA, 15 bp, Homo sapiens
ctgtttacttgatta

SEQ ID NO: 1021207 - DNA, 15 bp, Homo sapiens
cctgtttacttgatt

SEQ ID NO: 1021208 - DNA, 15 bp, Homo sapiens
acctgtttacttgat

SEQ ID NO: 1021209 - DNA, 15 bp, Homo sapiens
gacctgtttacttga

SEQ ID NO: 1021210 - DNA, 15 bp, Homo sapiens
agacctgtttacttg

SEQ ID NO: 1021211 - DNA, 15 bp, Homo sapiens
gagacctgtttactt

SEQ ID NO: 1021212 - DNA, 15 bp, Homo sapiens
ggagacctgtttact

SEQ ID NO: 1021213 - DNA, 15 bp, Homo sapiens
gggagacctgtttac

SEQ ID NO: 1021214 - DNA, 15 bp, Homo sapiens
agggagacctgttta

SEQ ID NO: 1021215 - DNA, 15 bp, Homo sapiens
aagggagacctgttt

SEQ ID NO: 1021216 - DNA, 15 bp, Homo sapiens
gaagggagacctgtt

SEQ ID NO: 1021217 - DNA, 15 bp, Homo sapiens
agaagggagacctgt

SEQ ID NO: 1021218 - DNA, 15 bp, Homo sapiens
aagaagggagacctg

SEQ ID NO: 1021219 - DNA, 15 bp, Homo sapiens
taagaagggagacct

SEQ ID NO: 1021220 - DNA, 15 bp, Homo sapiens
ctaagaagggagacc

SEQ ID NO: 1021221 - DNA, 15 bp, Homo sapiens
tctaagaagggagac

SEQ ID NO: 1021222 - DNA, 15 bp, Homo sapiens
ttctaagaagggaga

SEQ ID NO: 1021223 - DNA, 15 bp, Homo sapiens
cttctaagaagggag

SEQ ID NO: 1021224 - DNA, 15 bp, Homo sapiens
acttctaagaaggga

SEQ ID NO: 1021225 - DNA, 15 bp, Homo sapiens
tacttctaagaaggg

SEQ ID NO: 1021226 - DNA, 15 bp, Homo sapiens
atacttctaagaagg

SEQ ID NO: 1021227 - DNA, 15 bp, Homo sapiens
aatacttctaagaag

SEQ ID NO: 1021228 - DNA, 15 bp, Homo sapiens
aaatacttctaagaa

SEQ ID NO: 1021229 - DNA, 15 bp, Homo sapiens
caaatacttctaaga

SEQ ID NO: 1021230 - DNA, 15 bp, Homo sapiens
tcaaatacttctaag

SEQ ID NO: 1021231 - DNA, 15 bp, Homo sapiens
atcaaatacttctaa

SEQ ID NO: 1021232 - DNA, 15 bp, Homo sapiens
gatcaaatacttcta

SEQ ID NO: 1021233 - DNA, 15 bp, Homo sapiens
agatcaaatacttct

SEQ ID NO: 1021234 - DNA, 15 bp, Homo sapiens
aagatcaaatacttc

SEQ ID NO: 1021235 - DNA, 15 bp, Homo sapiens
gaagatcaaatactt

SEQ ID NO: 1021236 - DNA, 15 bp, Homo sapiens
tgaagatcaaatact

SEQ ID NO: 1021237 - DNA, 15 bp, Homo sapiens
ttgaagatcaaatac

SEQ ID NO: 1021238 - DNA, 15 bp, Homo sapiens
tttgaagatcaaata

SEQ ID NO: 1021239 - DNA, 15 bp, Homo sapiens
ttttgaagatcaaat

SEQ ID NO: 1021240 - DNA, 15 bp, Homo sapiens
attttgaagatcaaa

SEQ ID NO: 1021241 - DNA, 15 bp, Homo sapiens
aattttgaagatcaa

SEQ ID NO: 1021242 - DNA, 15 bp, Homo sapiens
caattttgaagatca

SEQ ID NO: 1021243 - DNA, 15 bp, Homo sapiens
gcaattttgaagatc

SEQ ID NO: 1021244 - DNA, 15 bp, Homo sapiens
ggcaattttgaagat

SEQ ID NO: 1021245 - DNA, 15 bp, Homo sapiens
gggcaattttgaaga

SEQ ID NO: 1021246 - DNA, 15 bp, Homo sapiens
agggcaattttgaag

SEQ ID NO: 1021247 - DNA, 15 bp, Homo sapiens
cagggcaattttgaa

SEQ ID NO: 1021248 - DNA, 15 bp, Homo sapiens
acagggcaattttga

SEQ ID NO: 1021249 - DNA, 15 bp, Homo sapiens
cacagggcaattttg

SEQ ID NO: 1021250 - DNA, 15 bp, Homo sapiens
ccacagggcaatttt

SEQ ID NO: 1021251 - DNA, 15 bp, Homo sapiens
accacagggcaattt

SEQ ID NO: 1021252 - DNA, 15 bp, Homo sapiens
taccacagggcaatt

SEQ ID NO: 1021253 - DNA, 15 bp, Homo sapiens
ataccacagggcaat

SEQ ID NO: 1021254 - DNA, 15 bp, Homo sapiens
tataccacagggcaa

SEQ ID NO: 1021255 - DNA, 15 bp, Homo sapiens
ttataccacagggca

SEQ ID NO: 1021256 - DNA, 15 bp, Homo sapiens
tttataccacagggc

SEQ ID NO: 1021257 - DNA, 15 bp, Homo sapiens
atttataccacaggg

SEQ ID NO: 1021258 - DNA, 15 bp, Homo sapiens
tatttataccacagg

SEQ ID NO: 1021259 - DNA, 15 bp, Homo sapiens
ctatttataccacag

SEQ ID NO: 1021260 - DNA, 15 bp, Homo sapiens
cctatttataccaca

SEQ ID NO: 1021261 - DNA, 15 bp, Homo sapiens
ccctatttataccac

SEQ ID NO: 1021262 - DNA, 15 bp, Homo sapiens
gccctatttatacca

SEQ ID NO: 1021263 - DNA, 15 bp, Homo sapiens
tgccctatttatacc

SEQ ID NO: 1021264 - DNA, 15 bp, Homo sapiens
ctgccctatttatac

SEQ ID NO: 1021265 - DNA, 15 bp, Homo sapiens
cctgccctatttata

SEQ ID NO: 1021266 - DNA, 15 bp, Homo sapiens
tcctgccctatttat

SEQ ID NO: 1021267 - DNA, 15 bp, Homo sapiens
ttcctgccctattta

SEQ ID NO: 1021268 - DNA, 15 bp, Homo sapiens
attcctgccctattt

SEQ ID NO: 1021269 - DNA, 15 bp, Homo sapiens
aattcctgccctatt

SEQ ID NO: 1021270 - DNA, 15 bp, Homo sapiens
taattcctgccctat

SEQ ID NO: 1021271 - DNA, 15 bp, Homo sapiens
ataattcctgcccta

SEQ ID NO: 1021272 - DNA, 15 bp, Homo sapiens
aataattcctgccct

SEQ ID NO: 1021273 - DNA, 15 bp, Homo sapiens
taataattcctgccc

SEQ ID NO: 1021274 - DNA, 15 bp, Homo sapiens
ataataattcctgcc

SEQ ID NO: 1021275 - DNA, 15 bp, Homo sapiens
aataataattcctgc

SEQ ID NO: 1021276 - DNA, 15 bp, Homo sapiens
taataataattcctg

SEQ ID NO: 1021277 - DNA, 15 bp, Homo sapiens
ataataataattcct

SEQ ID NO: 1021278 - DNA, 15 bp, Homo sapiens
gataataataattcc

SEQ ID NO: 1021279 - DNA, 15 bp, Homo sapiens
ggataataataattc

SEQ ID NO: 1021280 - DNA, 15 bp, Homo sapiens
tggataataataatt

SEQ ID NO: 1021281 - DNA, 15 bp, Homo sapiens
atggataataataat

SEQ ID NO: 1021282 - DNA, 15 bp, Homo sapiens
aatggataataataa

SEQ ID NO: 1021283 - DNA, 15 bp, Homo sapiens
aaatggataataata

SEQ ID NO: 1021284 - DNA, 15 bp, Homo sapiens
aaaatggataataat

SEQ ID NO: 1021285 - DNA, 15 bp, Homo sapiens
taaaatggataataa

SEQ ID NO: 1021286 - DNA, 15 bp, Homo sapiens
gtaaaatggataata

SEQ ID NO: 1021287 - DNA, 15 bp, Homo sapiens
tgtaaaatggataat

SEQ ID NO: 1021288 - DNA, 15 bp, Homo sapiens
ttgtaaaatggataa

SEQ ID NO: 1021289 - DNA, 15 bp, Homo sapiens
tttgtaaaatggata

SEQ ID NO: 1021290 - DNA, 15 bp, Homo sapiens
ctttgtaaaatggat

SEQ ID NO: 1021291 - DNA, 15 bp, Homo sapiens
gctttgtaaaatgga

SEQ ID NO: 1021292 - DNA, 15 bp, Homo sapiens
tgctttgtaaaatgg

SEQ ID NO: 1021293 - DNA, 15 bp, Homo sapiens
atgctttgtaaaatg

SEQ ID NO: 1021294 - DNA, 15 bp, Homo sapiens
catgctttgtaaaat

SEQ ID NO: 1021295 - DNA, 15 bp, Homo sapiens
tcatgctttgtaaaa

SEQ ID NO: 1021296 - DNA, 15 bp, Homo sapiens
ttcatgctttgtaaa

SEQ ID NO: 1021297 - DNA, 15 bp, Homo sapiens
cttcatgctttgtaa

SEQ ID NO: 1021298 - DNA, 15 bp, Homo sapiens
tcttcatgctttgta

SEQ ID NO: 1021299 - DNA, 15 bp, Homo sapiens
atcttcatgctttgt

SEQ ID NO: 1021300 - DNA, 15 bp, Homo sapiens
catcttcatgctttg

SEQ ID NO: 1021301 - DNA, 15 bp, Homo sapiens
tcatcttcatgcttt

SEQ ID NO: 1021302 - DNA, 15 bp, Homo sapiens
ctcatcttcatgctt

SEQ ID NO: 1021303 - DNA, 15 bp, Homo sapiens
tctcatcttcatgct

SEQ ID NO: 1021304 - DNA, 15 bp, Homo sapiens
gtctcatcttcatgc

SEQ ID NO: 1021305 - DNA, 15 bp, Homo sapiens
agtctcatcttcatg

SEQ ID NO: 1021306 - DNA, 15 bp, Homo sapiens
cagtctcatcttcat

SEQ ID NO: 1021307 - DNA, 15 bp, Homo sapiens
tcagtctcatcttca

SEQ ID NO: 1021308 - DNA, 15 bp, Homo sapiens
ctcagtctcatcttc

SEQ ID NO: 1021309 - DNA, 15 bp, Homo sapiens
tctcagtctcatctt

SEQ ID NO: 1021310 - DNA, 15 bp, Homo sapiens
ttctcagtctcatct

SEQ ID NO: 1021311 - DNA, 15 bp, Homo sapiens
attctcagtctcatc

SEQ ID NO: 1021312 - DNA, 15 bp, Homo sapiens
cattctcagtctcat

SEQ ID NO: 1021313 - DNA, 15 bp, Homo sapiens
acattctcagtctca

SEQ ID NO: 1021314 - DNA, 15 bp, Homo sapiens
aacattctcagtctc

SEQ ID NO: 1021315 - DNA, 15 bp, Homo sapiens
caacattctcagtct

SEQ ID NO: 1021316 - DNA, 15 bp, Homo sapiens
tcaacattctcagtc

SEQ ID NO: 1021317 - DNA, 15 bp, Homo sapiens
ttcaacattctcagt

SEQ ID NO: 1021318 - DNA, 15 bp, Homo sapiens
attcaacattctcag

SEQ ID NO: 1021319 - DNA, 15 bp, Homo sapiens
tattcaacattctca

SEQ ID NO: 1021320 - DNA, 15 bp, Homo sapiens
gtattcaacattctc

SEQ ID NO: 1021321 - DNA, 15 bp, Homo sapiens
tgtattcaacattct

SEQ ID NO: 1021322 - DNA, 15 bp, Homo sapiens
atgtattcaacattc

SEQ ID NO: 1021323 - DNA, 15 bp, Homo sapiens
aatgtattcaacatt

SEQ ID NO: 1021324 - DNA, 15 bp, Homo sapiens
aaatgtattcaacat

SEQ ID NO: 1021325 - DNA, 15 bp, Homo sapiens
caaatgtattcaaca

SEQ ID NO: 1021326 - DNA, 15 bp, Homo sapiens
gcaaatgtattcaac

SEQ ID NO: 1021327 - DNA, 15 bp, Homo sapiens
ggcaaatgtattcaa

SEQ ID NO: 1021328 - DNA, 15 bp, Homo sapiens
tggcaaatgtattca

SEQ ID NO: 1021329 - DNA, 15 bp, Homo sapiens
atggcaaatgtattc

SEQ ID NO: 1021330 - DNA, 15 bp, Homo sapiens
tatggcaaatgtatt

SEQ ID NO: 1021331 - DNA, 15 bp, Homo sapiens
ctatggcaaatgtat

SEQ ID NO: 1021332 - DNA, 15 bp, Homo sapiens
cctatggcaaatgta

SEQ ID NO: 1021333 - DNA, 15 bp, Homo sapiens
ccctatggcaaatgt

SEQ ID NO: 1021334 - DNA, 15 bp, Homo sapiens
accctatggcaaatg

SEQ ID NO: 1021335 - DNA, 15 bp, Homo sapiens
aaccctatggcaaat

SEQ ID NO: 1021336 - DNA, 15 bp, Homo sapiens
aaaccctatggcaaa

SEQ ID NO: 1021337 - DNA, 15 bp, Homo sapiens
taaaccctatggcaa

SEQ ID NO: 1021338 - DNA, 15 bp, Homo sapiens
gtaaaccctatggca

SEQ ID NO: 1021339 - DNA, 15 bp, Homo sapiens
tgtaaaccctatggc

SEQ ID NO: 1021340 - DNA, 15 bp, Homo sapiens
ttgtaaaccctatgg

SEQ ID NO: 1021341 - DNA, 15 bp, Homo sapiens
gttgtaaaccctatg

SEQ ID NO: 1021342 - DNA, 15 bp, Homo sapiens
agttgtaaaccctat

SEQ ID NO: 1021343 - DNA, 15 bp, Homo sapiens
tagttgtaaacccta

SEQ ID NO: 1021344 - DNA, 15 bp, Homo sapiens
ctagttgtaaaccct

SEQ ID NO: 1021345 - DNA, 15 bp, Homo sapiens
actagttgtaaaccc

SEQ ID NO: 1021346 - DNA, 15 bp, Homo sapiens
gactagttgtaaacc

SEQ ID NO: 1021347 - DNA, 15 bp, Homo sapiens
tgactagttgtaaac

SEQ ID NO: 1021348 - DNA, 15 bp, Homo sapiens
gtgactagttgtaaa

SEQ ID NO: 1021349 - DNA, 15 bp, Homo sapiens
tgtgactagttgtaa

SEQ ID NO: 1021350 - DNA, 15 bp, Homo sapiens
ctgtgactagttgta

SEQ ID NO: 1021351 - DNA, 15 bp, Homo sapiens
cctgtgactagttgt

SEQ ID NO: 1021352 - DNA, 15 bp, Homo sapiens
gcctgtgactagttg

SEQ ID NO: 1021353 - DNA, 15 bp, Homo sapiens
tgcctgtgactagtt

SEQ ID NO: 1021354 - DNA, 15 bp, Homo sapiens
ctgcctgtgactagt

SEQ ID NO: 1021355 - DNA, 15 bp, Homo sapiens
tctgcctgtgactag

SEQ ID NO: 1021356 - DNA, 15 bp, Homo sapiens
gtctgcctgtgacta

SEQ ID NO: 1021357 - DNA, 15 bp, Homo sapiens
tgtctgcctgtgact

SEQ ID NO: 1021358 - DNA, 15 bp, Homo sapiens
atgtctgcctgtgac

SEQ ID NO: 1021359 - DNA, 15 bp, Homo sapiens
catgtctgcctgtga

SEQ ID NO: 1021360 - DNA, 15 bp, Homo sapiens
gcatgtctgcctgtg

SEQ ID NO: 1021361 - DNA, 15 bp, Homo sapiens
agcatgtctgcctgt

SEQ ID NO: 1021362 - DNA, 15 bp, Homo sapiens
gagcatgtctgcctg

SEQ ID NO: 1021363 - DNA, 15 bp, Homo sapiens
agagcatgtctgcct

SEQ ID NO: 1021364 - DNA, 15 bp, Homo sapiens
aagagcatgtctgcc

SEQ ID NO: 1021365 - DNA, 15 bp, Homo sapiens
taagagcatgtctgc

SEQ ID NO: 1021366 - DNA, 15 bp, Homo sapiens
ttaagagcatgtctg

SEQ ID NO: 1021367 - DNA, 15 bp, Homo sapiens
tttaagagcatgtct

SEQ ID NO: 1021368 - DNA, 15 bp, Homo sapiens
ttttaagagcatgtc

SEQ ID NO: 1021369 - DNA, 15 bp, Homo sapiens
attttaagagcatgt

SEQ ID NO: 1021370 - DNA, 15 bp, Homo sapiens
tattttaagagcatg

SEQ ID NO: 1021371 - DNA, 15 bp, Homo sapiens
atattttaagagcat

SEQ ID NO: 1021372 - DNA, 15 bp, Homo sapiens
tatattttaagagca

SEQ ID NO: 1021373 - DNA, 15 bp, Homo sapiens
atatattttaagagc

SEQ ID NO: 1021374 - DNA, 15 bp, Homo sapiens
tatatattttaagag

SEQ ID NO: 1021375 - DNA, 15 bp, Homo sapiens
atatatattttaaga

SEQ ID NO: 1021376 - DNA, 15 bp, Homo sapiens
gatatatattttaag

SEQ ID NO: 1021377 - DNA, 15 bp, Homo sapiens
agatatatattttaa

SEQ ID NO: 1021378 - DNA, 15 bp, Homo sapiens
gagatatatatttta

SEQ ID NO: 1021379 - DNA, 15 bp, Homo sapiens
ggagatatatatttt

SEQ ID NO: 1021380 - DNA, 15 bp, Homo sapiens
aggagatatatattt

SEQ ID NO: 1021381 - DNA, 15 bp, Homo sapiens
aaggagatatatatt

SEQ ID NO: 1021382 - DNA, 15 bp, Homo sapiens
caaggagatatatat

SEQ ID NO: 1021383 - DNA, 15 bp, Homo sapiens
tcaaggagatatata

SEQ ID NO: 1021384 - DNA, 15 bp, Homo sapiens
atcaaggagatatat

SEQ ID NO: 1021385 - DNA, 15 bp, Homo sapiens
aatcaaggagatata

SEQ ID NO: 1021386 - DNA, 15 bp, Homo sapiens
aaatcaaggagatat

SEQ ID NO: 1021387 - DNA, 15 bp, Homo sapiens
aaaatcaaggagata

SEQ ID NO: 1021388 - DNA, 15 bp, Homo sapiens
taaaatcaaggagat

SEQ ID NO: 1021389 - DNA, 15 bp, Homo sapiens
ttaaaatcaaggaga

SEQ ID NO: 1021390 - DNA, 15 bp, Homo sapiens
cttaaaatcaaggag

SEQ ID NO: 1021391 - DNA, 15 bp, Homo sapiens
acttaaaatcaagga

SEQ ID NO: 1021392 - DNA, 15 bp, Homo sapiens
aacttaaaatcaagg

SEQ ID NO: 1021393 - DNA, 15 bp, Homo sapiens
caacttaaaatcaag

SEQ ID NO: 1021394 - DNA, 15 bp, Homo sapiens
acaacttaaaatcaa

SEQ ID NO: 1021395 - DNA, 15 bp, Homo sapiens
tacaacttaaaatca

SEQ ID NO: 1021396 - DNA, 15 bp, Homo sapiens
atacaacttaaaatc

SEQ ID NO: 1021397 - DNA, 15 bp, Homo sapiens
gatacaacttaaaat

SEQ ID NO: 1021398 - DNA, 15 bp, Homo sapiens
agatacaacttaaaa

SEQ ID NO: 1021399 - DNA, 15 bp, Homo sapiens
aagatacaacttaaa

SEQ ID NO: 1021400 - DNA, 15 bp, Homo sapiens
caagatacaacttaa

SEQ ID NO: 1021401 - DNA, 15 bp, Homo sapiens
gacaagatacaactt

SEQ ID NO: 1021402 - DNA, 15 bp, Homo sapiens
tgacaagatacaact

SEQ ID NO: 1021403 - DNA, 15 bp, Homo sapiens
atgacaagatacaac

SEQ ID NO: 1021404 - DNA, 15 bp, Homo sapiens
catgacaagatacaa

SEQ ID NO: 1021405 - DNA, 15 bp, Homo sapiens
ccatgacaagataca

SEQ ID NO: 1021406 - DNA, 15 bp, Homo sapiens
accatgacaagatac

SEQ ID NO: 1021407 - DNA, 15 bp, Homo sapiens
aaccatgacaagata

SEQ ID NO: 1021408 - DNA, 15 bp, Homo sapiens
aaaccatgacaagat

SEQ ID NO: 1021409 - DNA, 15 bp, Homo sapiens
aaaaccatgacaaga

SEQ ID NO: 1021410 - DNA, 15 bp, Homo sapiens
taaaaccatgacaag

SEQ ID NO: 1021411 - DNA, 15 bp, Homo sapiens
ataaaaccatgacaa

SEQ ID NO: 1021412 - DNA, 15 bp, Homo sapiens
cataaaaccatgaca

SEQ ID NO: 1021413 - DNA, 15 bp, Homo sapiens
tcataaaaccatgac

SEQ ID NO: 1021414 - DNA, 15 bp, Homo sapiens
ttcataaaaccatga

SEQ ID NO: 1021415 - DNA, 15 bp, Homo sapiens
gttcataaaaccatg

SEQ ID NO: 1021416 - DNA, 15 bp, Homo sapiens
agttcataaaaccat

SEQ ID NO: 1021417 - DNA, 15 bp, Homo sapiens
aagttcataaaacca

SEQ ID NO: 1021418 - DNA, 15 bp, Homo sapiens
caagttcataaaacc

SEQ ID NO: 1021419 - DNA, 15 bp, Homo sapiens
ccaagttcataaaac

SEQ ID NO: 1021420 - DNA, 15 bp, Homo sapiens
tccaagttcataaaa

SEQ ID NO: 1021421 - DNA, 15 bp, Homo sapiens
ttccaagttcataaa

SEQ ID NO: 1021422 - DNA, 15 bp, Homo sapiens
gttccaagttcataa

SEQ ID NO: 1021423 - DNA, 15 bp, Homo sapiens
tgttccaagttcata

SEQ ID NO: 1021424 - DNA, 15 bp, Homo sapiens
atgttccaagttcat

SEQ ID NO: 1021425 - DNA, 15 bp, Homo sapiens
catgttccaagttca

SEQ ID NO: 1021426 - DNA, 15 bp, Homo sapiens
acatgttccaagttc

SEQ ID NO: 1021427 - DNA, 15 bp, Homo sapiens
gacatgttccaagtt

SEQ ID NO: 1021428 - DNA, 15 bp, Homo sapiens
agacatgttccaagt

SEQ ID NO: 1021429 - DNA, 15 bp, Homo sapiens
aagacatgttccaag

SEQ ID NO: 1021430 - DNA, 15 bp, Homo sapiens
taagacatgttccaa

SEQ ID NO: 1021431 - DNA, 15 bp, Homo sapiens
ttaagacatgttcca

SEQ ID NO: 1021432 - DNA, 15 bp, Homo sapiens
tttaagacatgttcc

SEQ ID NO: 1021433 - DNA, 15 bp, Homo sapiens
ctttaagacatgttc

SEQ ID NO: 1021434 - DNA, 15 bp, Homo sapiens
actttaagacatgtt

SEQ ID NO: 1021435 - DNA, 15 bp, Homo sapiens
aactttaagacatgt

SEQ ID NO: 1021436 - DNA, 15 bp, Homo sapiens
aaactttaagacatg

SEQ ID NO: 1021437 - DNA, 15 bp, Homo sapiens
taaactttaagacat

SEQ ID NO: 1021438 - DNA, 15 bp, Homo sapiens
ataaactttaagaca

SEQ ID NO: 1021439 - DNA, 15 bp, Homo sapiens
tataaactttaagac

SEQ ID NO: 1021440 - DNA, 15 bp, Homo sapiens
atataaactttaaga

SEQ ID NO: 1021441 - DNA, 15 bp, Homo sapiens
gatataaactttaag

SEQ ID NO: 1021442 - DNA, 15 bp, Homo sapiens
agatataaactttaa

SEQ ID NO: 1021443 - DNA, 15 bp, Homo sapiens
tagatataaacttta

SEQ ID NO: 1021444 - DNA, 15 bp, Homo sapiens
gtagatataaacttt

SEQ ID NO: 1021445 - DNA, 15 bp, Homo sapiens
tgtagatataaactt

SEQ ID NO: 1021446 - DNA, 15 bp, Homo sapiens
gtgtagatataaact

SEQ ID NO: 1021447 - DNA, 15 bp, Homo sapiens
agtgtagatataaac

SEQ ID NO: 1021448 - DNA, 15 bp, Homo sapiens
tagtgtagatataaa

SEQ ID NO: 1021449 - DNA, 15 bp, Homo sapiens
ttagtgtagatataa

SEQ ID NO: 1021450 - DNA, 15 bp, Homo sapiens
gttagtgtagatata

SEQ ID NO: 1021451 - DNA, 15 bp, Homo sapiens
tgttagtgtagatat

SEQ ID NO: 1021452 - DNA, 15 bp, Homo sapiens
atgttagtgtagata

SEQ ID NO: 1021453 - DNA, 15 bp, Homo sapiens
aatgttagtgtagat

SEQ ID NO: 1021454 - DNA, 15 bp, Homo sapiens
aaatgttagtgtaga

SEQ ID NO: 1021455 - DNA, 15 bp, Homo sapiens
aaaatgttagtgtag

SEQ ID NO: 1021456 - DNA, 15 bp, Homo sapiens
aaaaatgttagtgta

SEQ ID NO: 1021457 - DNA, 15 bp, Homo sapiens
gaaaaatgttagtgt

SEQ ID NO: 1021458 - DNA, 15 bp, Homo sapiens
ggaaaaatgttagtg

SEQ ID NO: 1021459 - DNA, 15 bp, Homo sapiens
gggaaaaatgttagt

SEQ ID NO: 1021460 - DNA, 15 bp, Homo sapiens
tgggaaaaatgttag

SEQ ID NO: 1021461 - DNA, 15 bp, Homo sapiens
ttgggaaaaatgtta

SEQ ID NO: 1021462 - DNA, 15 bp, Homo sapiens
attgggaaaaatgtt

SEQ ID NO: 1021463 - DNA, 15 bp, Homo sapiens
tattgggaaaaatgt

SEQ ID NO: 1021464 - DNA, 15 bp, Homo sapiens
ttattgggaaaaatg

SEQ ID NO: 1021465 - DNA, 15 bp, Homo sapiens
cttattgggaaaaat

SEQ ID NO: 1021466 - DNA, 15 bp, Homo sapiens
gcttattgggaaaaa

SEQ ID NO: 1021467 - DNA, 15 bp, Homo sapiens
agcttattgggaaaa

SEQ ID NO: 1021468 - DNA, 15 bp, Homo sapiens
cagcttattgggaaa

SEQ ID NO: 1021469 - DNA, 15 bp, Homo sapiens
acagcttattgggaa

SEQ ID NO: 1021470 - DNA, 15 bp, Homo sapiens
aacagcttattggga

SEQ ID NO: 1021471 - DNA, 15 bp, Homo sapiens
taacagcttattggg

SEQ ID NO: 1021472 - DNA, 15 bp, Homo sapiens
ataacagcttattgg

SEQ ID NO: 1021473 - DNA, 15 bp, Homo sapiens
aataacagcttattg

SEQ ID NO: 1021474 - DNA, 15 bp, Homo sapiens
taataacagcttatt

SEQ ID NO: 1021475 - DNA, 15 bp, Homo sapiens
ttaataacagcttat

SEQ ID NO: 1021476 - DNA, 15 bp, Homo sapiens
tttaataacagctta

SEQ ID NO: 1021477 - DNA, 15 bp, Homo sapiens
atttaataacagctt

SEQ ID NO: 1021478 - DNA, 15 bp, Homo sapiens
gatttaataacagct

SEQ ID NO: 1021479 - DNA, 15 bp, Homo sapiens
tgatttaataacagc

SEQ ID NO: 1021480 - DNA, 15 bp, Homo sapiens
ttgatttaataacag

SEQ ID NO: 1021481 - DNA, 15 bp, Homo sapiens
attgatttaataaca

SEQ ID NO: 1021482 - DNA, 15 bp, Homo sapiens
cattgatttaataac

SEQ ID NO: 1021483 - DNA, 15 bp, Homo sapiens
tcattgatttaataa

SEQ ID NO: 1021484 - DNA, 15 bp, Homo sapiens
atcattgatttaata

SEQ ID NO: 1021485 - DNA, 15 bp, Homo sapiens
aatcattgatttaat

SEQ ID NO: 1021486 - DNA, 15 bp, Homo sapiens
aaatcattgatttaa

SEQ ID NO: 1021487 - DNA, 15 bp, Homo sapiens
caaatcattgattta

SEQ ID NO: 1021488 - DNA, 15 bp, Homo sapiens
acaaatcattgattt

SEQ ID NO: 1021489 - DNA, 15 bp, Homo sapiens
cacaaatcattgatt

SEQ ID NO: 1021490 - DNA, 15 bp, Homo sapiens
ccacaaatcattgat

SEQ ID NO: 1021491 - DNA, 15 bp, Homo sapiens
gccacaaatcattga

SEQ ID NO: 1021492 - DNA, 15 bp, Homo sapiens
tgccacaaatcattg

SEQ ID NO: 1021493 - DNA, 15 bp, Homo sapiens
ttgccacaaatcatt

SEQ ID NO: 1021494 - DNA, 15 bp, Homo sapiens
cttgccacaaatcat

SEQ ID NO: 1021495 - DNA, 15 bp, Homo sapiens
tcttgccacaaatca

SEQ ID NO: 1021496 - DNA, 15 bp, Homo sapiens
ttcttgccacaaatc

SEQ ID NO: 1021497 - DNA, 15 bp, Homo sapiens
cttcttgccacaaat

SEQ ID NO: 1021498 - DNA, 15 bp, Homo sapiens
ccttcttgccacaaa

SEQ ID NO: 1021499 - DNA, 15 bp, Homo sapiens
cccttcttgccacaa

SEQ ID NO: 1021500 - DNA, 15 bp, Homo sapiens
tcccttcttgccaca

SEQ ID NO: 1021501 - DNA, 15 bp, Homo sapiens
atcccttcttgccac

SEQ ID NO: 1021502 - DNA, 15 bp, Homo sapiens
tatcccttcttgcca

SEQ ID NO: 1021503 - DNA, 15 bp, Homo sapiens
ctatcccttcttgcc

SEQ ID NO: 1021504 - DNA, 15 bp, Homo sapiens
actatcccttcttgc

SEQ ID NO: 1021505 - DNA, 15 bp, Homo sapiens
cactatcccttcttg

SEQ ID NO: 1021506 - DNA, 15 bp, Homo sapiens
tcactatcccttctt

SEQ ID NO: 1021507 - DNA, 15 bp, Homo sapiens
atcactatcccttct

SEQ ID NO: 1021508 - DNA, 15 bp, Homo sapiens
catcactatcccttc

SEQ ID NO: 1021509 - DNA, 15 bp, Homo sapiens
acatcactatccctt

SEQ ID NO: 1021510 - DNA, 15 bp, Homo sapiens
cacatcactatccct

SEQ ID NO: 1021511 - DNA, 15 bp, Homo sapiens
ccacatcactatccc

SEQ ID NO: 1021512 - DNA, 15 bp, Homo sapiens
tccacatcactatcc

SEQ ID NO: 1021513 - DNA, 15 bp, Homo sapiens
ttccacatcactatc

SEQ ID NO: 1021514 - DNA, 15 bp, Homo sapiens
tttccacatcactat

SEQ ID NO: 1021515 - DNA, 15 bp, Homo sapiens
ctttccacatcacta

SEQ ID NO: 1021516 - DNA, 15 bp, Homo sapiens
cctttccacatcact

SEQ ID NO: 1021517 - DNA, 15 bp, Homo sapiens
ccctttccacatcac

SEQ ID NO: 1021518 - DNA, 15 bp, Homo sapiens
cccctttccacatca

SEQ ID NO: 1021519 - DNA, 15 bp, Homo sapiens
ccccctttccacatc

SEQ ID NO: 1021520 - DNA, 15 bp, Homo sapiens
cccccctttccacat

SEQ ID NO: 1021521 - DNA, 15 bp, Homo sapiens
ccccccctttccaca

SEQ ID NO: 1021522 - DNA, 15 bp, Homo sapiens
accccccctttccac

SEQ ID NO: 1021523 - DNA, 15 bp, Homo sapiens
taccccccctttcca

SEQ ID NO: 1021524 - DNA, 15 bp, Homo sapiens
gtaccccccctttcc

SEQ ID NO: 1021525 - DNA, 15 bp, Homo sapiens
agtaccccccctttc

SEQ ID NO: 1021526 - DNA, 15 bp, Homo sapiens
aagtacccccccttt

SEQ ID NO: 1021527 - DNA, 15 bp, Homo sapiens
taagtaccccccctt

SEQ ID NO: 1021528 - DNA, 15 bp, Homo sapiens
ctaagtaccccccct

SEQ ID NO: 1021529 - DNA, 15 bp, Homo sapiens
cctaagtaccccccc

SEQ ID NO: 1021530 - DNA, 15 bp, Homo sapiens
ccctaagtacccccc

SEQ ID NO: 1021531 - DNA, 15 bp, Homo sapiens
cccctaagtaccccc

SEQ ID NO: 1021532 - DNA, 15 bp, Homo sapiens
tcccctaagtacccc

SEQ ID NO: 1021533 - DNA, 15 bp, Homo sapiens
ctcccctaagtaccc

SEQ ID NO: 1021534 - DNA, 15 bp, Homo sapiens
tctcccctaagtacc

SEQ ID NO: 1021535 - DNA, 15 bp, Homo sapiens
ctctcccctaagtac

SEQ ID NO: 1021536 - DNA, 15 bp, Homo sapiens
gctctcccctaagta

SEQ ID NO: 1021537 - DNA, 15 bp, Homo sapiens
ggctctcccctaagt

SEQ ID NO: 1021538 - DNA, 15 bp, Homo sapiens
aggctctcccctaag

SEQ ID NO: 1021539 - DNA, 15 bp, Homo sapiens
caggctctcccctaa

SEQ ID NO: 1021540 - DNA, 15 bp, Homo sapiens
ccaggctctccccta

SEQ ID NO: 1021541 - DNA, 15 bp, Homo sapiens
tccaggctctcccct

SEQ ID NO: 1021542 - DNA, 15 bp, Homo sapiens
ttccaggctctcccc

SEQ ID NO: 1021543 - DNA, 15 bp, Homo sapiens
cttccaggctctccc

SEQ ID NO: 1021544 - DNA, 15 bp, Homo sapiens
ccttccaggctctcc

SEQ ID NO: 1021545 - DNA, 15 bp, Homo sapiens
gccttccaggctctc

SEQ ID NO: 1021546 - DNA, 15 bp, Homo sapiens
ggccttccaggctct

SEQ ID NO: 1021547 - DNA, 15 bp, Homo sapiens
aggccttccaggctc

SEQ ID NO: 1021548 - DNA, 15 bp, Homo sapiens
taggccttccaggct

SEQ ID NO: 1021549 - DNA, 15 bp, Homo sapiens
ttaggccttccaggc

SEQ ID NO: 1021550 - DNA, 15 bp, Homo sapiens
attaggccttccagg

SEQ ID NO: 1021551 - DNA, 15 bp, Homo sapiens
tattaggccttccag

SEQ ID NO: 1021552 - DNA, 15 bp, Homo sapiens
ttattaggccttcca

SEQ ID NO: 1021553 - DNA, 15 bp, Homo sapiens
cttattaggccttcc

SEQ ID NO: 1021554 - DNA, 15 bp, Homo sapiens
tcttattaggccttc

SEQ ID NO: 1021555 - DNA, 15 bp, Homo sapiens
ctcttattaggcctt

SEQ ID NO: 1021556 - DNA, 15 bp, Homo sapiens
tctcttattaggcct

SEQ ID NO: 1021557 - DNA, 15 bp, Homo sapiens
ctctcttattaggcc

SEQ ID NO: 1021558 - DNA, 15 bp, Homo sapiens
tctctcttattaggc

SEQ ID NO: 1021559 - DNA, 15 bp, Homo sapiens
ttctctcttattagg

SEQ ID NO: 1021560 - DNA, 15 bp, Homo sapiens
tttctctcttattag

SEQ ID NO: 1021561 - DNA, 15 bp, Homo sapiens
ctttctctcttatta

SEQ ID NO: 1021562 - DNA, 15 bp, Homo sapiens
tctttctctcttatt

SEQ ID NO: 1021563 - DNA, 15 bp, Homo sapiens
ttctttctctcttat

SEQ ID NO: 1021564 - DNA, 15 bp, Homo sapiens
cttctttctctctta

SEQ ID NO: 1021565 - DNA, 15 bp, Homo sapiens
acttctttctctctt

SEQ ID NO: 1021566 - DNA, 15 bp, Homo sapiens
gacttctttctctct

SEQ ID NO: 1021567 - DNA, 15 bp, Homo sapiens
tgacttctttctctc

SEQ ID NO: 1021568 - DNA, 15 bp, Homo sapiens
atgacttctttctct

SEQ ID NO: 1021569 - DNA, 15 bp, Homo sapiens
tatgacttctttctc

SEQ ID NO: 1021570 - DNA, 15 bp, Homo sapiens
ttatgacttctttct

SEQ ID NO: 1021571 - DNA, 15 bp, Homo sapiens
tttatgacttctttc

SEQ ID NO: 1021572 - DNA, 15 bp, Homo sapiens
ttttatgacttcttt

SEQ ID NO: 1021573 - DNA, 15 bp, Homo sapiens
cttttatgacttctt

SEQ ID NO: 1021574 - DNA, 15 bp, Homo sapiens
acttttatgacttct

SEQ ID NO: 1021575 - DNA, 15 bp, Homo sapiens
aacttttatgacttc

SEQ ID NO: 1021576 - DNA, 15 bp, Homo sapiens
taacttttatgactt

SEQ ID NO: 1021577 - DNA, 15 bp, Homo sapiens
ttaacttttatgact

SEQ ID NO: 1021578 - DNA, 15 bp, Homo sapiens
cttaacttttatgac

SEQ ID NO: 1021579 - DNA, 15 bp, Homo sapiens
ccttaacttttatga

SEQ ID NO: 1021580 - DNA, 15 bp, Homo sapiens
gccttaacttttatg

SEQ ID NO: 1021581 - DNA, 15 bp, Homo sapiens
tgccttaacttttat

SEQ ID NO: 1021582 - DNA, 15 bp, Homo sapiens
ttgccttaactttta

SEQ ID NO: 1021583 - DNA, 15 bp, Homo sapiens
cttgccttaactttt

SEQ ID NO: 1021584 - DNA, 15 bp, Homo sapiens
acttgccttaacttt

SEQ ID NO: 1021585 - DNA, 15 bp, Homo sapiens
cacttgccttaactt

SEQ ID NO: 1021586 - DNA, 15 bp, Homo sapiens
tcacttgccttaact

SEQ ID NO: 1021587 - DNA, 15 bp, Homo sapiens
atcacttgccttaac

SEQ ID NO: 1021588 - DNA, 15 bp, Homo sapiens
tatcacttgccttaa

SEQ ID NO: 1021589 - DNA, 15 bp, Homo sapiens
atatcacttgcctta

SEQ ID NO: 1021590 - DNA, 15 bp, Homo sapiens
catatcacttgcctt

SEQ ID NO: 1021591 - DNA, 15 bp, Homo sapiens
ccatatcacttgcct

SEQ ID NO: 1021592 - DNA, 15 bp, Homo sapiens
accatatcacttgcc

SEQ ID NO: 1021593 - DNA, 15 bp, Homo sapiens
aaccatatcacttgc

SEQ ID NO: 1021594 - DNA, 15 bp, Homo sapiens
aaaccatatcacttg

SEQ ID NO: 1021595 - DNA, 15 bp, Homo sapiens
caaaccatatcactt

SEQ ID NO: 1021596 - DNA, 15 bp, Homo sapiens
ccaaaccatatcact

SEQ ID NO: 1021597 - DNA, 15 bp, Homo sapiens
tccaaaccatatcac

SEQ ID NO: 1021598 - DNA, 15 bp, Homo sapiens
atccaaaccatatca

SEQ ID NO: 1021599 - DNA, 15 bp, Homo sapiens
tatccaaaccatatc

SEQ ID NO: 1021600 - DNA, 15 bp, Homo sapiens
atatccaaaccatat

SEQ ID NO: 1021601 - DNA, 15 bp, Homo sapiens
aattttggctcagtc

SEQ ID NO: 1021602 - DNA, 15 bp, Homo sapiens
gaattttggctcagt

SEQ ID NO: 1021603 - DNA, 15 bp, Homo sapiens
tgaattttggctcag

SEQ ID NO: 1021604 - DNA, 15 bp, Homo sapiens
ttgaattttggctca

SEQ ID NO: 1021605 - DNA, 15 bp, Homo sapiens
tttgaattttggctc

SEQ ID NO: 1021606 - DNA, 15 bp, Homo sapiens
atttgaattttggct

SEQ ID NO: 1021607 - DNA, 15 bp, Homo sapiens
aatttgaattttggc

SEQ ID NO: 1021608 - DNA, 15 bp, Homo sapiens
gaatttgaattttgg

SEQ ID NO: 1021609 - DNA, 15 bp, Homo sapiens
agaatttgaattttg

SEQ ID NO: 1021610 - DNA, 15 bp, Homo sapiens
cagaatttgaatttt

SEQ ID NO: 1021611 - DNA, 15 bp, Homo sapiens
tcagaatttgaattt

SEQ ID NO: 1021612 - DNA, 15 bp, Homo sapiens
atcagaatttgaatt

SEQ ID NO: 1021613 - DNA, 15 bp, Homo sapiens
tatcagaatttgaat

SEQ ID NO: 1021614 - DNA, 15 bp, Homo sapiens
ctatcagaatttgaa

SEQ ID NO: 1021615 - DNA, 15 bp, Homo sapiens
actatcagaatttga

SEQ ID NO: 1021616 - DNA, 15 bp, Homo sapiens
aactatcagaatttg

SEQ ID NO: 1021617 - DNA, 15 bp, Homo sapiens
caactatcagaattt

SEQ ID NO: 1021618 - DNA, 15 bp, Homo sapiens
ccaactatcagaatt

SEQ ID NO: 1021619 - DNA, 15 bp, Homo sapiens
cccaactatcagaat

SEQ ID NO: 1021620 - DNA, 15 bp, Homo sapiens
gcccaactatcagaa

SEQ ID NO: 1021621 - DNA, 15 bp, Homo sapiens
agcccaactatcaga

SEQ ID NO: 1021622 - DNA, 15 bp, Homo sapiens
gagcccaactatcag

SEQ ID NO: 1021623 - DNA, 15 bp, Homo sapiens
ggagcccaactatca

SEQ ID NO: 1021624 - DNA, 15 bp, Homo sapiens
tggagcccaactatc

SEQ ID NO: 1021625 - DNA, 15 bp, Homo sapiens
ctggagcccaactat

SEQ ID NO: 1021626 - DNA, 15 bp, Homo sapiens
tctggagcccaacta

SEQ ID NO: 1021627 - DNA, 15 bp, Homo sapiens
ttctggagcccaact

SEQ ID NO: 1021628 - DNA, 15 bp, Homo sapiens
gttctggagcccaac

SEQ ID NO: 1021629 - DNA, 15 bp, Homo sapiens
ggttctggagcccaa

SEQ ID NO: 1021630 - DNA, 15 bp, Homo sapiens
gggttctggagccca

SEQ ID NO: 1021631 - DNA, 15 bp, Homo sapiens
agggttctggagccc

SEQ ID NO: 1021632 - DNA, 15 bp, Homo sapiens
tagggttctggagcc

SEQ ID NO: 1021633 - DNA, 15 bp, Homo sapiens
ttagggttctggagc

SEQ ID NO: 1021634 - DNA, 15 bp, Homo sapiens
gttagggttctggag

SEQ ID NO: 1021635 - DNA, 15 bp, Homo sapiens
agttagggttctgga

SEQ ID NO: 1021636 - DNA, 15 bp, Homo sapiens
cagttagggttctgg

SEQ ID NO: 1021637 - DNA, 15 bp, Homo sapiens
ccagttagggttctg

SEQ ID NO: 1021638 - DNA, 15 bp, Homo sapiens
accagttagggttct

SEQ ID NO: 1021639 - DNA, 15 bp, Homo sapiens
taccagttagggttc

SEQ ID NO: 1021640 - DNA, 15 bp, Homo sapiens
ttaccagttagggtt

SEQ ID NO: 1021641 - DNA, 15 bp, Homo sapiens
attaccagttagggt

SEQ ID NO: 1021642 - DNA, 15 bp, Homo sapiens
gattaccagttaggg

SEQ ID NO: 1021643 - DNA, 15 bp, Homo sapiens
cgattaccagttagg

SEQ ID NO: 1021644 - DNA, 15 bp, Homo sapiens
acgattaccagttag

SEQ ID NO: 1021645 - DNA, 15 bp, Homo sapiens
aacgattaccagtta

SEQ ID NO: 1021646 - DNA, 15 bp, Homo sapiens
caacgattaccagtt

SEQ ID NO: 1021647 - DNA, 15 bp, Homo sapiens
acaacgattaccagt

SEQ ID NO: 1021648 - DNA, 15 bp, Homo sapiens
tacaacgattaccag

SEQ ID NO: 1021649 - DNA, 15 bp, Homo sapiens
gtacaacgattacca

SEQ ID NO: 1021650 - DNA, 15 bp, Homo sapiens
agtacaacgattacc

SEQ ID NO: 1021651 - DNA, 15 bp, Homo sapiens
tagtacaacgattac

SEQ ID NO: 1021652 - DNA, 15 bp, Homo sapiens
gtagtacaacgatta

SEQ ID NO: 1021653 - DNA, 15 bp, Homo sapiens
tgtagtacaacgatt

SEQ ID NO: 1021654 - DNA, 15 bp, Homo sapiens
gtgtagtacaacgat

SEQ ID NO: 1021655 - DNA, 15 bp, Homo sapiens
agtgtagtacaacga

SEQ ID NO: 1021656 - DNA, 15 bp, Homo sapiens
cagtgtagtacaacg

SEQ ID NO: 1021657 - DNA, 15 bp, Homo sapiens
acagtgtagtacaac

SEQ ID NO: 1021658 - DNA, 15 bp, Homo sapiens
aacagtgtagtacaa

SEQ ID NO: 1021659 - DNA, 15 bp, Homo sapiens
aaacagtgtagtaca

SEQ ID NO: 1021660 - DNA, 15 bp, Homo sapiens
gaaacagtgtagtac

SEQ ID NO: 1021661 - DNA, 15 bp, Homo sapiens
ggaaacagtgtagta

SEQ ID NO: 1021662 - DNA, 15 bp, Homo sapiens
cggaaacagtgtagt

SEQ ID NO: 1021663 - DNA, 15 bp, Homo sapiens
ccggaaacagtgtag

SEQ ID NO: 1021664 - DNA, 15 bp, Homo sapiens
tccggaaacagtgta

SEQ ID NO: 1021665 - DNA, 15 bp, Homo sapiens
ttccggaaacagtgt

SEQ ID NO: 1021666 - DNA, 15 bp, Homo sapiens
attccggaaacagtg

SEQ ID NO: 1021667 - DNA, 15 bp, Homo sapiens
cattccggaaacagt

SEQ ID NO: 1021668 - DNA, 15 bp, Homo sapiens
gcattccggaaacag

SEQ ID NO: 1021669 - DNA, 15 bp, Homo sapiens
agcattccggaaaca

SEQ ID NO: 1021670 - DNA, 15 bp, Homo sapiens
gagcattccggaaac

SEQ ID NO: 1021671 - DNA, 15 bp, Homo sapiens
ggagcattccggaaa

SEQ ID NO: 1021672 - DNA, 15 bp, Homo sapiens
gggagcattccggaa

SEQ ID NO: 1021673 - DNA, 15 bp, Homo sapiens
agggagcattccgga

SEQ ID NO: 1021674 - DNA, 15 bp, Homo sapiens
aagggagcattccgg

SEQ ID NO: 1021675 - DNA, 15 bp, Homo sapiens
aaagggagcattccg

SEQ ID NO: 1021676 - DNA, 15 bp, Homo sapiens
taaagggagcattcc

SEQ ID NO: 1021677 - DNA, 15 bp, Homo sapiens
ttaaagggagcattc

SEQ ID NO: 1021678 - DNA, 15 bp, Homo sapiens
cttaaagggagcatt

SEQ ID NO: 1021679 - DNA, 15 bp, Homo sapiens
acttaaagggagcat

SEQ ID NO: 1021680 - DNA, 15 bp, Homo sapiens
aacttaaagggagca

SEQ ID NO: 1021681 - DNA, 15 bp, Homo sapiens
caacttaaagggagc

SEQ ID NO: 1021682 - DNA, 15 bp, Homo sapiens
tcaacttaaagggag

SEQ ID NO: 1021683 - DNA, 15 bp, Homo sapiens
atcaacttaaaggga

SEQ ID NO: 1021684 - DNA, 15 bp, Homo sapiens
tatcaacttaaaggg

SEQ ID NO: 1021685 - DNA, 15 bp, Homo sapiens
ttatcaacttaaagg

SEQ ID NO: 1021686 - DNA, 15 bp, Homo sapiens
gttatcaacttaaag

SEQ ID NO: 1021687 - DNA, 15 bp, Homo sapiens
ggttatcaacttaaa

SEQ ID NO: 1021688 - DNA, 15 bp, Homo sapiens
tggttatcaacttaa

SEQ ID NO: 1021689 - DNA, 15 bp, Homo sapiens
atggttatcaactta

SEQ ID NO: 1021690 - DNA, 15 bp, Homo sapiens
gatggttatcaactt

SEQ ID NO: 1021691 - DNA, 15 bp, Homo sapiens
agatggttatcaact

SEQ ID NO: 1021692 - DNA, 15 bp, Homo sapiens
tagatggttatcaac

SEQ ID NO: 1021693 - DNA, 15 bp, Homo sapiens
atagatggttatcaa

SEQ ID NO: 1021694 - DNA, 15 bp, Homo sapiens
aatagatggttatca

SEQ ID NO: 1021695 - DNA, 15 bp, Homo sapiens
taatagatggttatc

SEQ ID NO: 1021696 - DNA, 15 bp, Homo sapiens
ttaatagatggttat

SEQ ID NO: 1021697 - DNA, 15 bp, Homo sapiens
gttaatagatggtta

SEQ ID NO: 1021698 - DNA, 15 bp, Homo sapiens
agttaatagatggtt

SEQ ID NO: 1021699 - DNA, 15 bp, Homo sapiens
cagttaatagatggt

SEQ ID NO: 1021700 - DNA, 15 bp, Homo sapiens
acagttaatagatgg

SEQ ID NO: 1021701 - DNA, 15 bp, Homo sapiens
gacagttaatagatg

SEQ ID NO: 1021702 - DNA, 15 bp, Homo sapiens
tgacagttaatagat

SEQ ID NO: 1021703 - DNA, 15 bp, Homo sapiens
gtgacagttaataga

SEQ ID NO: 1021704 - DNA, 15 bp, Homo sapiens
agtgacagttaatag

SEQ ID NO: 1021705 - DNA, 15 bp, Homo sapiens
cagtgacagttaata

SEQ ID NO: 1021706 - DNA, 15 bp, Homo sapiens
acagtgacagttaat

SEQ ID NO: 1021707 - DNA, 15 bp, Homo sapiens
aacagtgacagttaa

SEQ ID NO: 1021708 - DNA, 15 bp, Homo sapiens
gaacagtgacagtta

SEQ ID NO: 1021709 - DNA, 15 bp, Homo sapiens
tgaacagtgacagtt

SEQ ID NO: 1021710 - DNA, 15 bp, Homo sapiens
gtgaacagtgacagt

SEQ ID NO: 1021711 - DNA, 15 bp, Homo sapiens
agtgaacagtgacag

SEQ ID NO: 1021712 - DNA, 15 bp, Homo sapiens
aagtgaacagtgaca

SEQ ID NO: 1021713 - DNA, 15 bp, Homo sapiens
caagtgaacagtgac

SEQ ID NO: 1021714 - DNA, 15 bp, Homo sapiens
acaagtgaacagtga

SEQ ID NO: 1021715 - DNA, 15 bp, Homo sapiens
cacaagtgaacagtg

SEQ ID NO: 1021716 - DNA, 15 bp, Homo sapiens
ccacaagtgaacagt

SEQ ID NO: 1021717 - DNA, 15 bp, Homo sapiens
accacaagtgaacag

SEQ ID NO: 1021718 - DNA, 15 bp, Homo sapiens
taccacaagtgaaca

SEQ ID NO: 1021719 - DNA, 15 bp, Homo sapiens
ttaccacaagtgaac

SEQ ID NO: 1021720 - DNA, 15 bp, Homo sapiens
attaccacaagtgaa

SEQ ID NO: 1021721 - DNA, 15 bp, Homo sapiens
aattaccacaagtga

SEQ ID NO: 1021722 - DNA, 15 bp, Homo sapiens
taattaccacaagtg

SEQ ID NO: 1021723 - DNA, 15 bp, Homo sapiens
ttaattaccacaagt

SEQ ID NO: 1021724 - DNA, 15 bp, Homo sapiens
tttaattaccacaag

SEQ ID NO: 1021725 - DNA, 15 bp, Homo sapiens
gtttaattaccacaa

SEQ ID NO: 1021726 - DNA, 15 bp, Homo sapiens
ggtttaattaccaca

SEQ ID NO: 1021727 - DNA, 15 bp, Homo sapiens
tggtttaattaccac

SEQ ID NO: 1021728 - DNA, 15 bp, Homo sapiens
ctggtttaattacca

SEQ ID NO: 1021729 - DNA, 15 bp, Homo sapiens
actggtttaattacc

SEQ ID NO: 1021730 - DNA, 15 bp, Homo sapiens
aactggtttaattac

SEQ ID NO: 1021731 - DNA, 15 bp, Homo sapiens
taactggtttaatta

SEQ ID NO: 1021732 - DNA, 15 bp, Homo sapiens
gtaactggtttaatt

SEQ ID NO: 1021733 - DNA, 15 bp, Homo sapiens
tgtaactggtttaat

SEQ ID NO: 1021734 - DNA, 15 bp, Homo sapiens
ttgtaactggtttaa

SEQ ID NO: 1021735 - DNA, 15 bp, Homo sapiens
tttgtaactggttta

SEQ ID NO: 1021736 - DNA, 15 bp, Homo sapiens
atttgtaactggttt

SEQ ID NO: 1021737 - DNA, 15 bp, Homo sapiens
gatttgtaactggtt

SEQ ID NO: 1021738 - DNA, 15 bp, Homo sapiens
ggatttgtaactggt

SEQ ID NO: 1021739 - DNA, 15 bp, Homo sapiens
tggatttgtaactgg

SEQ ID NO: 1021740 - DNA, 15 bp, Homo sapiens
gtggatttgtaactg

SEQ ID NO: 1021741 - DNA, 15 bp, Homo sapiens
ggtggatttgtaact

SEQ ID NO: 1021742 - DNA, 15 bp, Homo sapiens
aggtggatttgtaac

SEQ ID NO: 1021743 - DNA, 15 bp, Homo sapiens
taggtggatttgtaa

SEQ ID NO: 1021744 - DNA, 15 bp, Homo sapiens
ctaggtggatttgta

SEQ ID NO: 1021745 - DNA, 15 bp, Homo sapiens
actaggtggatttgt

SEQ ID NO: 1021746 - DNA, 15 bp, Homo sapiens
aactaggtggatttg

SEQ ID NO: 1021747 - DNA, 15 bp, Homo sapiens
taactaggtggattt

SEQ ID NO: 1021748 - DNA, 15 bp, Homo sapiens
ataactaggtggatt

SEQ ID NO: 1021749 - DNA, 15 bp, Homo sapiens
cataactaggtggat

SEQ ID NO: 1021750 - DNA, 15 bp, Homo sapiens
acataactaggtgga

SEQ ID NO: 1021751 - DNA, 15 bp, Homo sapiens
aacataactaggtgg

SEQ ID NO: 1021752 - DNA, 15 bp, Homo sapiens
taacataactaggtg

SEQ ID NO: 1021753 - DNA, 15 bp, Homo sapiens
ataacataactaggt

SEQ ID NO: 1021754 - DNA, 15 bp, Homo sapiens
gataacataactagg

SEQ ID NO: 1021755 - DNA, 15 bp, Homo sapiens
tgataacataactag

SEQ ID NO: 1021756 - DNA, 15 bp, Homo sapiens
atgataacataacta

SEQ ID NO: 1021757 - DNA, 15 bp, Homo sapiens
gatgataacataact

SEQ ID NO: 1021758 - DNA, 15 bp, Homo sapiens
agatgataacataac

SEQ ID NO: 1021759 - DNA, 15 bp, Homo sapiens
tagatgataacataa

SEQ ID NO: 1021760 - DNA, 15 bp, Homo sapiens
gtagatgataacata

SEQ ID NO: 1021761 - DNA, 15 bp, Homo sapiens
ggtagatgataacat

SEQ ID NO: 1021762 - DNA, 15 bp, Homo sapiens
tggtagatgataaca

SEQ ID NO: 1021763 - DNA, 15 bp, Homo sapiens
gtggtagatgataac

SEQ ID NO: 1021764 - DNA, 15 bp, Homo sapiens
agtggtagatgataa

SEQ ID NO: 1021765 - DNA, 15 bp, Homo sapiens
tagtggtagatgata

SEQ ID NO: 1021766 - DNA, 15 bp, Homo sapiens
atagtggtagatgat

SEQ ID NO: 1021767 - DNA, 15 bp, Homo sapiens
aatagtggtagatga

SEQ ID NO: 1021768 - DNA, 15 bp, Homo sapiens
caatagtggtagatg

SEQ ID NO: 1021769 - DNA, 15 bp, Homo sapiens
tcaatagtggtagat

SEQ ID NO: 1021770 - DNA, 15 bp, Homo sapiens
ttcaatagtggtaga

SEQ ID NO: 1021771 - DNA, 15 bp, Homo sapiens
attcaatagtggtag

SEQ ID NO: 1021772 - DNA, 15 bp, Homo sapiens
gattcaatagtggta

SEQ ID NO: 1021773 - DNA, 15 bp, Homo sapiens
cgattcaatagtggt

SEQ ID NO: 1021774 - DNA, 15 bp, Homo sapiens
gcgattcaatagtgg

SEQ ID NO: 1021775 - DNA, 15 bp, Homo sapiens
ggcgattcaatagtg

SEQ ID NO: 1021776 - DNA, 15 bp, Homo sapiens
aggcgattcaatagt

SEQ ID NO: 1021777 - DNA, 15 bp, Homo sapiens
aaggcgattcaatag

SEQ ID NO: 1021778 - DNA, 15 bp, Homo sapiens
taaggcgattcaata

SEQ ID NO: 1021779 - DNA, 15 bp, Homo sapiens
ataaggcgattcaat

SEQ ID NO: 1021780 - DNA, 15 bp, Homo sapiens
gataaggcgattcaa

SEQ ID NO: 1021781 - DNA, 15 bp, Homo sapiens
agataaggcgattca

SEQ ID NO: 1021782 - DNA, 15 bp, Homo sapiens
aagataaggcgattc

SEQ ID NO: 1021783 - DNA, 15 bp, Homo sapiens
gaagataaggcgatt

SEQ ID NO: 1021784 - DNA, 15 bp, Homo sapiens
tgaagataaggcgat

SEQ ID NO: 1021785 - DNA, 15 bp, Homo sapiens
ttgaagataaggcga

SEQ ID NO: 1021786 - DNA, 15 bp, Homo sapiens
cttgaagataaggcg

SEQ ID NO: 1021787 - DNA, 15 bp, Homo sapiens
ccttgaagataaggc

SEQ ID NO: 1021788 - DNA, 15 bp, Homo sapiens
accttgaagataagg

SEQ ID NO: 1021789 - DNA, 15 bp, Homo sapiens
caccttgaagataag

SEQ ID NO: 1021790 - DNA, 15 bp, Homo sapiens
ccaccttgaagataa

SEQ ID NO: 1021791 - DNA, 15 bp, Homo sapiens
accaccttgaagata

SEQ ID NO: 1021792 - DNA, 15 bp, Homo sapiens
aaccaccttgaagat

SEQ ID NO: 1021793 - DNA, 15 bp, Homo sapiens
aaaccaccttgaaga

SEQ ID NO: 1021794 - DNA, 15 bp, Homo sapiens
aaaaccaccttgaag

SEQ ID NO: 1021795 - DNA, 15 bp, Homo sapiens
caaaaccaccttgaa

SEQ ID NO: 1021796 - DNA, 15 bp, Homo sapiens
gcaaaaccaccttga

SEQ ID NO: 1021797 - DNA, 15 bp, Homo sapiens
ggcaaaaccaccttg

SEQ ID NO: 1021798 - DNA, 15 bp, Homo sapiens
tggcaaaaccacctt

SEQ ID NO: 1021799 - DNA, 15 bp, Homo sapiens
atggcaaaaccacct

SEQ ID NO: 1021800 - DNA, 15 bp, Homo sapiens
gatggcaaaaccacc

SEQ ID NO: 1021801 - DNA, 15 bp, Homo sapiens
agatggcaaaaccac

SEQ ID NO: 1021802 - DNA, 15 bp, Homo sapiens
cagatggcaaaacca

SEQ ID NO: 1021803 - DNA, 15 bp, Homo sapiens
acagatggcaaaacc

SEQ ID NO: 1021804 - DNA, 15 bp, Homo sapiens
gacagatggcaaaac

SEQ ID NO: 1021805 - DNA, 15 bp, Homo sapiens
ggacagatggcaaaa

SEQ ID NO: 1021806 - DNA, 15 bp, Homo sapiens
aggacagatggcaaa

SEQ ID NO: 1021807 - DNA, 15 bp, Homo sapiens
taggacagatggcaa

SEQ ID NO: 1021808 - DNA, 15 bp, Homo sapiens
gtaggacagatggca

SEQ ID NO: 1021809 - DNA, 15 bp, Homo sapiens
agtaggacagatggc

SEQ ID NO: 1021810 - DNA, 15 bp, Homo sapiens
tagtaggacagatgg

SEQ ID NO: 1021811 - DNA, 15 bp, Homo sapiens
ttagtaggacagatg

SEQ ID NO: 1021812 - DNA, 15 bp, Homo sapiens
cttagtaggacagat

SEQ ID NO: 1021813 - DNA, 15 bp, Homo sapiens
ccttagtaggacaga

SEQ ID NO: 1021814 - DNA, 15 bp, Homo sapiens
accttagtaggacag

SEQ ID NO: 1021815 - DNA, 15 bp, Homo sapiens
gaccttagtaggaca

SEQ ID NO: 1021816 - DNA, 15 bp, Homo sapiens
ggaccttagtaggac

SEQ ID NO: 1021817 - DNA, 15 bp, Homo sapiens
tggaccttagtagga

SEQ ID NO: 1021818 - DNA, 15 bp, Homo sapiens
ctggaccttagtagg

SEQ ID NO: 1021819 - DNA, 15 bp, Homo sapiens
gctggaccttagtag

SEQ ID NO: 1021820 - DNA, 15 bp, Homo sapiens
agctggaccttagta

SEQ ID NO: 1021821 - DNA, 15 bp, Homo sapiens
tagctggaccttagt

SEQ ID NO: 1021822 - DNA, 15 bp, Homo sapiens
ctagctggaccttag

SEQ ID NO: 1021823 - DNA, 15 bp, Homo sapiens
tctagctggacctta

SEQ ID NO: 1021824 - DNA, 15 bp, Homo sapiens
gtctagctggacctt

SEQ ID NO: 1021825 - DNA, 15 bp, Homo sapiens
agtctagctggacct

SEQ ID NO: 1021826 - DNA, 15 bp, Homo sapiens
aagtctagctggacc

SEQ ID NO: 1021827 - DNA, 15 bp, Homo sapiens
aaagtctagctggac

SEQ ID NO: 1021828 - DNA, 15 bp, Homo sapiens
aaaagtctagctgga

SEQ ID NO: 1021829 - DNA, 15 bp, Homo sapiens
aaaaagtctagctgg

SEQ ID NO: 1021830 - DNA, 15 bp, Homo sapiens
taaaaagtctagctg

SEQ ID NO: 1021831 - DNA, 15 bp, Homo sapiens
ataaaaagtctagct

SEQ ID NO: 1021832 - DNA, 15 bp, Homo sapiens
tataaaaagtctagc

SEQ ID NO: 1021833 - DNA, 15 bp, Homo sapiens
ctataaaaagtctag

SEQ ID NO: 1021834 - DNA, 15 bp, Homo sapiens
tctataaaaagtcta

SEQ ID NO: 1021835 - DNA, 15 bp, Homo sapiens
atctataaaaagtct

SEQ ID NO: 1021836 - DNA, 15 bp, Homo sapiens
gatctataaaaagtc

SEQ ID NO: 1021837 - DNA, 15 bp, Homo sapiens
agatctataaaaagt

SEQ ID NO: 1021838 - DNA, 15 bp, Homo sapiens
gagatctataaaaag

SEQ ID NO: 1021839 - DNA, 15 bp, Homo sapiens
cgagatctataaaaa

SEQ ID NO: 1021840 - DNA, 15 bp, Homo sapiens
acgagatctataaaa

SEQ ID NO: 1021841 - DNA, 15 bp, Homo sapiens
tacgagatctataaa

SEQ ID NO: 1021842 - DNA, 15 bp, Homo sapiens
ttacgagatctataa

SEQ ID NO: 1021843 - DNA, 15 bp, Homo sapiens
gttacgagatctata

SEQ ID NO: 1021844 - DNA, 15 bp, Homo sapiens
agttacgagatctat

SEQ ID NO: 1021845 - DNA, 15 bp, Homo sapiens
aagttacgagatcta

SEQ ID NO: 1021846 - DNA, 15 bp, Homo sapiens
aaagttacgagatct

SEQ ID NO: 1021847 - DNA, 15 bp, Homo sapiens
taaagttacgagatc

SEQ ID NO: 1021848 - DNA, 15 bp, Homo sapiens
ataaagttacgagat

SEQ ID NO: 1021849 - DNA, 15 bp, Homo sapiens
tataaagttacgaga

SEQ ID NO: 1021850 - DNA, 15 bp, Homo sapiens
ttacagaaattgact

SEQ ID NO: 1021851 - DNA, 15 bp, Homo sapiens
tttacagaaattgac

SEQ ID NO: 1021852 - DNA, 15 bp, Homo sapiens
ctttacagaaattga

SEQ ID NO: 1021853 - DNA, 15 bp, Homo sapiens
actttacagaaattg

SEQ ID NO: 1021854 - DNA, 15 bp, Homo sapiens
tactttacagaaatt

SEQ ID NO: 1021855 - DNA, 15 bp, Homo sapiens
ctactttacagaaat

SEQ ID NO: 1021856 - DNA, 15 bp, Homo sapiens
tctactttacagaaa

SEQ ID NO: 1021857 - DNA, 15 bp, Homo sapiens
ttctactttacagaa

SEQ ID NO: 1021858 - DNA, 15 bp, Homo sapiens
gttctactttacaga

SEQ ID NO: 1021859 - DNA, 15 bp, Homo sapiens
ggttctactttacag

SEQ ID NO: 1021860 - DNA, 15 bp, Homo sapiens
gggttctactttaca

SEQ ID NO: 1021861 - DNA, 15 bp, Homo sapiens
ggggttctactttac

SEQ ID NO: 1021862 - DNA, 15 bp, Homo sapiens
aggggttctacttta

SEQ ID NO: 1021863 - DNA, 15 bp, Homo sapiens
caggggttctacttt

SEQ ID NO: 1021864 - DNA, 15 bp, Homo sapiens
tcaggggttctactt

SEQ ID NO: 1021865 - DNA, 15 bp, Homo sapiens
atcaggggttctact

SEQ ID NO: 1021866 - DNA, 15 bp, Homo sapiens
tatcaggggttctac

SEQ ID NO: 1021867 - DNA, 15 bp, Homo sapiens
ttatcaggggttcta

SEQ ID NO: 1021868 - DNA, 15 bp, Homo sapiens
attatcaggggttct

SEQ ID NO: 1021869 - DNA, 15 bp, Homo sapiens
aattatcaggggttc

SEQ ID NO: 1021870 - DNA, 15 bp, Homo sapiens
taattatcaggggtt

SEQ ID NO: 1021871 - DNA, 15 bp, Homo sapiens
ataattatcaggggt

SEQ ID NO: 1021872 - DNA, 15 bp, Homo sapiens
gataattatcagggg

SEQ ID NO: 1021873 - DNA, 15 bp, Homo sapiens
tgataattatcaggg

SEQ ID NO: 1021874 - DNA, 15 bp, Homo sapiens
gtgataattatcagg

SEQ ID NO: 1021875 - DNA, 15 bp, Homo sapiens
ggtgataattatcag

SEQ ID NO: 1021876 - DNA, 15 bp, Homo sapiens
aggtgataattatca

SEQ ID NO: 1021877 - DNA, 15 bp, Homo sapiens
taggtgataattatc

SEQ ID NO: 1021878 - DNA, 15 bp, Homo sapiens
ttaggtgataattat

SEQ ID NO: 1021879 - DNA, 15 bp, Homo sapiens
tttaggtgataatta

SEQ ID NO: 1021880 - DNA, 15 bp, Homo sapiens
ctttaggtgataatt

SEQ ID NO: 1021881 - DNA, 15 bp, Homo sapiens
tctttaggtgataat

SEQ ID NO: 1021882 - DNA, 15 bp, Homo sapiens
ttctttaggtgataa

SEQ ID NO: 1021883 - DNA, 15 bp, Homo sapiens
cttctttaggtgata

SEQ ID NO: 1021884 - DNA, 15 bp, Homo sapiens
gcttctttaggtgat

SEQ ID NO: 1021885 - DNA, 15 bp, Homo sapiens
tgcttctttaggtga

SEQ ID NO: 1021886 - DNA, 15 bp, Homo sapiens
ctgcttctttaggtg

SEQ ID NO: 1021887 - DNA, 15 bp, Homo sapiens
gctgcttctttaggt

SEQ ID NO: 1021888 - DNA, 15 bp, Homo sapiens
agctgcttctttagg

SEQ ID NO: 1021889 - DNA, 15 bp, Homo sapiens
aagctgcttctttag

SEQ ID NO: 1021890 - DNA, 15 bp, Homo sapiens
gaagctgcttcttta

SEQ ID NO: 1021891 - DNA, 15 bp, Homo sapiens
tgaagctgcttcttt

SEQ ID NO: 1021892 - DNA, 15 bp, Homo sapiens
ctgaagctgcttctt

SEQ ID NO: 1021893 - DNA, 15 bp, Homo sapiens
cctgaagctgcttct

SEQ ID NO: 1021894 - DNA, 15 bp, Homo sapiens
tcctgaagctgcttc

SEQ ID NO: 1021895 - DNA, 15 bp, Homo sapiens
atcctgaagctgctt

SEQ ID NO: 1021896 - DNA, 15 bp, Homo sapiens
catcctgaagctgct

SEQ ID NO: 1021897 - DNA, 15 bp, Homo sapiens
acatcctgaagctgc

SEQ ID NO: 1021898 - DNA, 15 bp, Homo sapiens
tacatcctgaagctg

SEQ ID NO: 1021899 - DNA, 15 bp, Homo sapiens
atacatcctgaagct

SEQ ID NO: 1021900 - DNA, 15 bp, Homo sapiens
tatacatcctgaagc

SEQ ID NO: 1021901 - DNA, 15 bp, Homo sapiens
atatacatcctgaag

SEQ ID NO: 1021902 - DNA, 15 bp, Homo sapiens
tatatacatcctgaa

SEQ ID NO: 1021903 - DNA, 15 bp, Homo sapiens
ctatatacatcctga

SEQ ID NO: 1021904 - DNA, 15 bp, Homo sapiens
tctatatacatcctg

SEQ ID NO: 1021905 - DNA, 15 bp, Homo sapiens
gtctatatacatcct

SEQ ID NO: 1021906 - DNA, 15 bp, Homo sapiens
tgtctatatacatcc

SEQ ID NO: 1021907 - DNA, 15 bp, Homo sapiens
ctgtctatatacatc

SEQ ID NO: 1021908 - DNA, 15 bp, Homo sapiens
cctgtctatatacat

SEQ ID NO: 1021909 - DNA, 15 bp, Homo sapiens
ccctgtctatataca

SEQ ID NO: 1021910 - DNA, 15 bp, Homo sapiens
tccctgtctatatac

SEQ ID NO: 1021911 - DNA, 15 bp, Homo sapiens
ttccctgtctatata

SEQ ID NO: 1021912 - DNA, 15 bp, Homo sapiens
gttccctgtctatat

SEQ ID NO: 1021913 - DNA, 15 bp, Homo sapiens
agttccctgtctata

SEQ ID NO: 1021914 - DNA, 15 bp, Homo sapiens
tagttccctgtctat

SEQ ID NO: 1021915 - DNA, 15 bp, Homo sapiens
atagttccctgtcta

SEQ ID NO: 1021916 - DNA, 15 bp, Homo sapiens
tatagttccctgtct

SEQ ID NO: 1021917 - DNA, 15 bp, Homo sapiens
ttatagttccctgtc

SEQ ID NO: 1021918 - DNA, 15 bp, Homo sapiens
attatagttccctgt

SEQ ID NO: 1021919 - DNA, 15 bp, Homo sapiens
aattatagttccctg

SEQ ID NO: 1021920 - DNA, 15 bp, Homo sapiens
aaattatagttccct

SEQ ID NO: 1021921 - DNA, 15 bp, Homo sapiens
gaaattatagttccc

SEQ ID NO: 1021922 - DNA, 15 bp, Homo sapiens
ggaaattatagttcc

SEQ ID NO: 1021923 - DNA, 15 bp, Homo sapiens
aggaaattatagttc

SEQ ID NO: 1021924 - DNA, 15 bp, Homo sapiens
taggaaattatagtt

SEQ ID NO: 1021925 - DNA, 15 bp, Homo sapiens
gtaggaaattatagt

SEQ ID NO: 1021926 - DNA, 15 bp, Homo sapiens
agtaggaaattatag

SEQ ID NO: 1021927 - DNA, 15 bp, Homo sapiens
gagtaggaaattata

SEQ ID NO: 1021928 - DNA, 15 bp, Homo sapiens
agagtaggaaattat

SEQ ID NO: 1021929 - DNA, 15 bp, Homo sapiens
aagagtaggaaatta

SEQ ID NO: 1021930 - DNA, 15 bp, Homo sapiens
aaagagtaggaaatt

SEQ ID NO: 1021931 - DNA, 15 bp, Homo sapiens
gaaagagtaggaaat

SEQ ID NO: 1021932 - DNA, 15 bp, Homo sapiens
agaaagagtaggaaa

SEQ ID NO: 1021933 - DNA, 15 bp, Homo sapiens
cagaaagagtaggaa

SEQ ID NO: 1021934 - DNA, 15 bp, Homo sapiens
acagaaagagtagga

SEQ ID NO: 1021935 - DNA, 15 bp, Homo sapiens
gacagaaagagtagg

SEQ ID NO: 1021936 - DNA, 15 bp, Homo sapiens
agacagaaagagtag

SEQ ID NO: 1021937 - DNA, 15 bp, Homo sapiens
gagacagaaagagta

SEQ ID NO: 1021938 - DNA, 15 bp, Homo sapiens
ggagacagaaagagt

SEQ ID NO: 1021939 - DNA, 15 bp, Homo sapiens
tggagacagaaagag

SEQ ID NO: 1021940 - DNA, 15 bp, Homo sapiens
gtggagacagaaaga

SEQ ID NO: 1021941 - DNA, 15 bp, Homo sapiens
tgtggagacagaaag

SEQ ID NO: 1021942 - DNA, 15 bp, Homo sapiens
atgtggagacagaaa

SEQ ID NO: 1021943 - DNA, 15 bp, Homo sapiens
aatgtggagacagaa

SEQ ID NO: 1021944 - DNA, 15 bp, Homo sapiens
taatgtggagacaga

SEQ ID NO: 1021945 - DNA, 15 bp, Homo sapiens
gtaatgtggagacag

SEQ ID NO: 1021946 - DNA, 15 bp, Homo sapiens
ggtaatgtggagaca

SEQ ID NO: 1021947 - DNA, 15 bp, Homo sapiens
tggtaatgtggagac

SEQ ID NO: 1021948 - DNA, 15 bp, Homo sapiens
ttggtaatgtggaga

SEQ ID NO: 1021949 - DNA, 15 bp, Homo sapiens
attggtaatgtggag

SEQ ID NO: 1021950 - DNA, 15 bp, Homo sapiens
gattggtaatgtgga

SEQ ID NO: 1021951 - DNA, 15 bp, Homo sapiens
tgattggtaatgtgg

SEQ ID NO: 1021952 - DNA, 15 bp, Homo sapiens
gtgattggtaatgtg

SEQ ID NO: 1021953 - DNA, 15 bp, Homo sapiens
agtgattggtaatgt

SEQ ID NO: 1021954 - DNA, 15 bp, Homo sapiens
aagtgattggtaatg

SEQ ID NO: 1021955 - DNA, 15 bp, Homo sapiens
aaagtgattggtaat

SEQ ID NO: 1021956 - DNA, 15 bp, Homo sapiens
caaagtgattggtaa

SEQ ID NO: 1021957 - DNA, 15 bp, Homo sapiens
tcaaagtgattggta

SEQ ID NO: 1021958 - DNA, 15 bp, Homo sapiens
ttcaaagtgattggt

SEQ ID NO: 1021959 - DNA, 15 bp, Homo sapiens
cttcaaagtgattgg

SEQ ID NO: 1021960 - DNA, 15 bp, Homo sapiens
gcttcaaagtgattg

SEQ ID NO: 1021961 - DNA, 15 bp, Homo sapiens
tgcttcaaagtgatt

SEQ ID NO: 1021962 - DNA, 15 bp, Homo sapiens
ttgcttcaaagtgat

SEQ ID NO: 1021963 - DNA, 15 bp, Homo sapiens
attgcttcaaagtga

SEQ ID NO: 1021964 - DNA, 15 bp, Homo sapiens
cattgcttcaaagtg

SEQ ID NO: 1021965 - DNA, 15 bp, Homo sapiens
tcattgcttcaaagt

SEQ ID NO: 1021966 - DNA, 15 bp, Homo sapiens
ttcattgcttcaaag

SEQ ID NO: 1021967 - DNA, 15 bp, Homo sapiens
tttcattgcttcaaa

SEQ ID NO: 1021968 - DNA, 15 bp, Homo sapiens
ttttcattgcttcaa

SEQ ID NO: 1021969 - DNA, 15 bp, Homo sapiens
attttcattgcttca

SEQ ID NO: 1021970 - DNA, 15 bp, Homo sapiens
aattttcattgcttc

SEQ ID NO: 1021971 - DNA, 15 bp, Homo sapiens
aaattttcattgctt

SEQ ID NO: 1021972 - DNA, 15 bp, Homo sapiens
gaaattttcattgct

SEQ ID NO: 1021973 - DNA, 15 bp, Homo sapiens
tgaaattttcattgc

SEQ ID NO: 1021974 - DNA, 15 bp, Homo sapiens
ctgaaattttcattg

SEQ ID NO: 1021975 - DNA, 15 bp, Homo sapiens
tctgaaattttcatt

SEQ ID NO: 1021976 - DNA, 15 bp, Homo sapiens
ctctgaaattttcat

SEQ ID NO: 1021977 - DNA, 15 bp, Homo sapiens
actctgaaattttca

SEQ ID NO: 1021978 - DNA, 15 bp, Homo sapiens
gactctgaaattttc

SEQ ID NO: 1021979 - DNA, 15 bp, Homo sapiens
tgactctgaaatttt

SEQ ID NO: 1021980 - DNA, 15 bp, Homo sapiens
ttgactctgaaattt

SEQ ID NO: 1021981 - DNA, 15 bp, Homo sapiens
tttgactctgaaatt

SEQ ID NO: 1021982 - DNA, 15 bp, Homo sapiens
atttgactctgaaat

SEQ ID NO: 1021983 - DNA, 15 bp, Homo sapiens
tatttgactctgaaa

SEQ ID NO: 1021984 - DNA, 15 bp, Homo sapiens
gtatttgactctgaa

SEQ ID NO: 1021985 - DNA, 15 bp, Homo sapiens
agtatttgactctga

SEQ ID NO: 1021986 - DNA, 15 bp, Homo sapiens
gagtatttgactctg

SEQ ID NO: 1021987 - DNA, 15 bp, Homo sapiens
tgagtatttgactct

SEQ ID NO: 1021988 - DNA, 15 bp, Homo sapiens
ctgagtatttgactc

SEQ ID NO: 1021989 - DNA, 15 bp, Homo sapiens
gctgagtatttgact

SEQ ID NO: 1021990 - DNA, 15 bp, Homo sapiens
agctgagtatttgac

SEQ ID NO: 1021991 - DNA, 15 bp, Homo sapiens
gagctgagtatttga

SEQ ID NO: 1021992 - DNA, 15 bp, Homo sapiens
cgagctgagtatttg

SEQ ID NO: 1021993 - DNA, 15 bp, Homo sapiens
acgagctgagtattt

SEQ ID NO: 1021994 - DNA, 15 bp, Homo sapiens
gacgagctgagtatt

SEQ ID NO: 1021995 - DNA, 15 bp, Homo sapiens
agacgagctgagtat

SEQ ID NO: 1021996 - DNA, 15 bp, Homo sapiens
cagacgagctgagta

SEQ ID NO: 1021997 - DNA, 15 bp, Homo sapiens
acagacgagctgagt

SEQ ID NO: 1021998 - DNA, 15 bp, Homo sapiens
cacagacgagctgag

SEQ ID NO: 1021999 - DNA, 15 bp, Homo sapiens
acacagacgagctga

SEQ ID NO: 1022000 - DNA, 15 bp, Homo sapiens
cacacagacgagctg

SEQ ID NO: 1022001 - DNA, 15 bp, Homo sapiens
acacacagacgagct

SEQ ID NO: 1022002 - DNA, 15 bp, Homo sapiens
gacacacagacgagc

SEQ ID NO: 1022003 - DNA, 15 bp, Homo sapiens
agacacacagacgag

SEQ ID NO: 1022004 - DNA, 15 bp, Homo sapiens
tagacacacagacga

SEQ ID NO: 1022005 - DNA, 15 bp, Homo sapiens
ttagacacacagacg

SEQ ID NO: 1022006 - DNA, 15 bp, Homo sapiens
attagacacacagac

SEQ ID NO: 1022007 - DNA, 15 bp, Homo sapiens
gattagacacacaga

SEQ ID NO: 1022008 - DNA, 15 bp, Homo sapiens
agattagacacacag

SEQ ID NO: 1022009 - DNA, 15 bp, Homo sapiens
aagattagacacaca

SEQ ID NO: 1022010 - DNA, 15 bp, Homo sapiens
aaagattagacacac

SEQ ID NO: 1022011 - DNA, 15 bp, Homo sapiens
aaaagattagacaca

SEQ ID NO: 1022012 - DNA, 15 bp, Homo sapiens
taaaagattagacac

SEQ ID NO: 1022013 - DNA, 15 bp, Homo sapiens
ttaaaagattagaca

SEQ ID NO: 1022014 - DNA, 15 bp, Homo sapiens
tttaaaagattagac

SEQ ID NO: 1022015 - DNA, 15 bp, Homo sapiens
ttttaaaagattaga

SEQ ID NO: 1022016 - DNA, 15 bp, Homo sapiens
tttttaaaagattag

SEQ ID NO: 1022017 - DNA, 15 bp, Homo sapiens
ctttttaaaagatta

SEQ ID NO: 1022018 - DNA, 15 bp, Homo sapiens
ctctttttaaaagat

SEQ ID NO: 1022019 - DNA, 15 bp, Homo sapiens
tctctttttaaaaga

SEQ ID NO: 1022020 - DNA, 15 bp, Homo sapiens
ttctctttttaaaag

SEQ ID NO: 1022021 - DNA, 15 bp, Homo sapiens
tttctctttttaaaa

SEQ ID NO: 1022022 - DNA, 15 bp, Homo sapiens
ttttctctttttaaa

SEQ ID NO: 1022023 - DNA, 15 bp, Homo sapiens
attttctctttttaa

SEQ ID NO: 1022024 - DNA, 15 bp, Homo sapiens
tattttctcttttta

SEQ ID NO: 1022025 - DNA, 15 bp, Homo sapiens
ctattttctcttttt

SEQ ID NO: 1022026 - DNA, 15 bp, Homo sapiens
cctattttctctttt

SEQ ID NO: 1022027 - DNA, 15 bp, Homo sapiens
tcctattttctcttt

SEQ ID NO: 1022028 - DNA, 15 bp, Homo sapiens
atcctattttctctt

SEQ ID NO: 1022029 - DNA, 15 bp, Homo sapiens
aatcctattttctct

SEQ ID NO: 1022030 - DNA, 15 bp, Homo sapiens
aaatcctattttctc

SEQ ID NO: 1022031 - DNA, 15 bp, Homo sapiens
caaatcctattttct

SEQ ID NO: 1022032 - DNA, 15 bp, Homo sapiens
ccaaatcctattttc

SEQ ID NO: 1022033 - DNA, 15 bp, Homo sapiens
tccaaatcctatttt

SEQ ID NO: 1022034 - DNA, 15 bp, Homo sapiens
atccaaatcctattt

SEQ ID NO: 1022035 - DNA, 15 bp, Homo sapiens
tatccaaatcctatt

SEQ ID NO: 1022036 - DNA, 15 bp, Homo sapiens
ttatccaaatcctat

SEQ ID NO: 1022037 - DNA, 15 bp, Homo sapiens
tttatccaaatccta

SEQ ID NO: 1022038 - DNA, 15 bp, Homo sapiens
gtttatccaaatcct

SEQ ID NO: 1022039 - DNA, 15 bp, Homo sapiens
tgtttatccaaatcc

SEQ ID NO: 1022040 - DNA, 15 bp, Homo sapiens
atgtttatccaaatc

SEQ ID NO: 1022041 - DNA, 15 bp, Homo sapiens
gatgtttatccaaat

SEQ ID NO: 1022042 - DNA, 15 bp, Homo sapiens
agatgtttatccaaa

SEQ ID NO: 1022043 - DNA, 15 bp, Homo sapiens
tagatgtttatccaa

SEQ ID NO: 1022044 - DNA, 15 bp, Homo sapiens
atagatgtttatcca

SEQ ID NO: 1022045 - DNA, 15 bp, Homo sapiens
catagatgtttatcc

SEQ ID NO: 1022046 - DNA, 15 bp, Homo sapiens
gcatagatgtttatc

SEQ ID NO: 1022047 - DNA, 15 bp, Homo sapiens
ggcatagatgtttat

SEQ ID NO: 1022048 - DNA, 15 bp, Homo sapiens
gggcatagatgttta

SEQ ID NO: 1022049 - DNA, 15 bp, Homo sapiens
ggggcatagatgttt

SEQ ID NO: 1022050 - DNA, 15 bp, Homo sapiens
aggggcatagatgtt

SEQ ID NO: 1022051 - DNA, 15 bp, Homo sapiens
gaggggcatagatgt

SEQ ID NO: 1022052 - DNA, 15 bp, Homo sapiens
agaggggcatagatg

SEQ ID NO: 1022053 - DNA, 15 bp, Homo sapiens
aagaggggcatagat

SEQ ID NO: 1022054 - DNA, 15 bp, Homo sapiens
aaagaggggcataga

SEQ ID NO: 1022055 - DNA, 15 bp, Homo sapiens
gaaagaggggcatag

SEQ ID NO: 1022056 - DNA, 15 bp, Homo sapiens
ggaaagaggggcata

SEQ ID NO: 1022057 - DNA, 15 bp, Homo sapiens
gggaaagaggggcat

SEQ ID NO: 1022058 - DNA, 15 bp, Homo sapiens
agggaaagaggggca

SEQ ID NO: 1022059 - DNA, 15 bp, Homo sapiens
gagggaaagaggggc

SEQ ID NO: 1022060 - DNA, 15 bp, Homo sapiens
ggagggaaagagggg

SEQ ID NO: 1022061 - DNA, 15 bp, Homo sapiens
tggagggaaagaggg

SEQ ID NO: 1022062 - DNA, 15 bp, Homo sapiens
ttggagggaaagagg

SEQ ID NO: 1022063 - DNA, 15 bp, Homo sapiens
gttggagggaaagag

SEQ ID NO: 1022064 - DNA, 15 bp, Homo sapiens
tgttggagggaaaga

SEQ ID NO: 1022065 - DNA, 15 bp, Homo sapiens
ttgttggagggaaag

SEQ ID NO: 1022066 - DNA, 15 bp, Homo sapiens
tttgttggagggaaa

SEQ ID NO: 1022067 - DNA, 15 bp, Homo sapiens
ttttgttggagggaa

SEQ ID NO: 1022068 - DNA, 15 bp, Homo sapiens
tttttgttggaggga

SEQ ID NO: 1022069 - DNA, 15 bp, Homo sapiens
atttttgttggaggg

SEQ ID NO: 1022070 - DNA, 15 bp, Homo sapiens
gatttttgttggagg

SEQ ID NO: 1022071 - DNA, 15 bp, Homo sapiens
agatttttgttggag

SEQ ID NO: 1022072 - DNA, 15 bp, Homo sapiens
tagatttttgttgga

SEQ ID NO: 1022073 - DNA, 15 bp, Homo sapiens
ctagatttttgttgg

SEQ ID NO: 1022074 - DNA, 15 bp, Homo sapiens
cctagatttttgttg

SEQ ID NO: 1022075 - DNA, 15 bp, Homo sapiens
tcctagatttttgtt

SEQ ID NO: 1022076 - DNA, 15 bp, Homo sapiens
ctcctagatttttgt

SEQ ID NO: 1022077 - DNA, 15 bp, Homo sapiens
tctcctagatttttg

SEQ ID NO: 1022078 - DNA, 15 bp, Homo sapiens
ttctcctagattttt

SEQ ID NO: 1022079 - DNA, 15 bp, Homo sapiens
tttctcctagatttt

SEQ ID NO: 1022080 - DNA, 15 bp, Homo sapiens
gtttctcctagattt

SEQ ID NO: 1022081 - DNA, 15 bp, Homo sapiens
agtttctcctagatt

SEQ ID NO: 1022082 - DNA, 15 bp, Homo sapiens
aagtttctcctagat

SEQ ID NO: 1022083 - DNA, 15 bp, Homo sapiens
gaagtttctcctaga

SEQ ID NO: 1022084 - DNA, 15 bp, Homo sapiens
tgaagtttctcctag

SEQ ID NO: 1022085 - DNA, 15 bp, Homo sapiens
ctgaagtttctccta

SEQ ID NO: 1022086 - DNA, 15 bp, Homo sapiens
gctgaagtttctcct

SEQ ID NO: 1022087 - DNA, 15 bp, Homo sapiens
agctgaagtttctcc

SEQ ID NO: 1022088 - DNA, 15 bp, Homo sapiens
gagctgaagtttctc

SEQ ID NO: 1022089 - DNA, 15 bp, Homo sapiens
tgagctgaagtttct

SEQ ID NO: 1022090 - DNA, 15 bp, Homo sapiens
gtgagctgaagtttc

SEQ ID NO: 1022091 - DNA, 15 bp, Homo sapiens
tgtgagctgaagttt

SEQ ID NO: 1022092 - DNA, 15 bp, Homo sapiens
ttgtgagctgaagtt

SEQ ID NO: 1022093 - DNA, 15 bp, Homo sapiens
tttgtgagctgaagt

SEQ ID NO: 1022094 - DNA, 15 bp, Homo sapiens
ttttgtgagctgaag

SEQ ID NO: 1022095 - DNA, 15 bp, Homo sapiens
attttgtgagctgaa

SEQ ID NO: 1022096 - DNA, 15 bp, Homo sapiens
gattttgtgagctga

SEQ ID NO: 1022097 - DNA, 15 bp, Homo sapiens
agattttgtgagctg

SEQ ID NO: 1022098 - DNA, 15 bp, Homo sapiens
cagattttgtgagct

SEQ ID NO: 1022099 - DNA, 15 bp, Homo sapiens
tcagattttgtgagc

SEQ ID NO: 1022100 - DNA, 15 bp, Homo sapiens
atcagattttgtgag

SEQ ID NO: 1022101 - DNA, 15 bp, Homo sapiens
aatcagattttgtga

SEQ ID NO: 1022102 - DNA, 15 bp, Homo sapiens
aaatcagattttgtg

SEQ ID NO: 1022103 - DNA, 15 bp, Homo sapiens
aaaatcagattttgt

SEQ ID NO: 1022104 - DNA, 15 bp, Homo sapiens
taaaatcagattttg

SEQ ID NO: 1022105 - DNA, 15 bp, Homo sapiens
ttaaaatcagatttt

SEQ ID NO: 1022106 - DNA, 15 bp, Homo sapiens
tttaaaatcagattt

SEQ ID NO: 1022107 - DNA, 15 bp, Homo sapiens
ttttaaaatcagatt

SEQ ID NO: 1022108 - DNA, 15 bp, Homo sapiens
gttttaaaatcagat

SEQ ID NO: 1022109 - DNA, 15 bp, Homo sapiens
tgttttaaaatcaga

SEQ ID NO: 1022110 - DNA, 15 bp, Homo sapiens
gtgttttaaaatcag

SEQ ID NO: 1022111 - DNA, 15 bp, Homo sapiens
tgtgttttaaaatca

SEQ ID NO: 1022112 - DNA, 15 bp, Homo sapiens
gtgtgttttaaaatc

SEQ ID NO: 1022113 - DNA, 15 bp, Homo sapiens
agtgtgttttaaaat

SEQ ID NO: 1022114 - DNA, 15 bp, Homo sapiens
tagtgtgttttaaaa

SEQ ID NO: 1022115 - DNA, 15 bp, Homo sapiens
ttagtgtgttttaaa

SEQ ID NO: 1022116 - DNA, 15 bp, Homo sapiens
cttagtgtgttttaa

SEQ ID NO: 1022117 - DNA, 15 bp, Homo sapiens
tcttagtgtgtttta

SEQ ID NO: 1022118 - DNA, 15 bp, Homo sapiens
ttcttagtgtgtttt

SEQ ID NO: 1022119 - DNA, 15 bp, Homo sapiens
tttcttagtgtgttt

SEQ ID NO: 1022120 - DNA, 15 bp, Homo sapiens
ttttcttagtgtgtt

SEQ ID NO: 1022121 - DNA, 15 bp, Homo sapiens
attttcttagtgtgt

SEQ ID NO: 1022122 - DNA, 15 bp, Homo sapiens
tattttcttagtgtg

SEQ ID NO: 1022123 - DNA, 15 bp, Homo sapiens
ttattttcttagtgt

SEQ ID NO: 1022124 - DNA, 15 bp, Homo sapiens
tttattttcttagtg

SEQ ID NO: 1022125 - DNA, 15 bp, Homo sapiens
ttttattttcttagt

SEQ ID NO: 1022126 - DNA, 15 bp, Homo sapiens
tttttattttcttag

SEQ ID NO: 1022127 - DNA, 15 bp, Homo sapiens
gtttttattttctta

SEQ ID NO: 1022128 - DNA, 15 bp, Homo sapiens
tgtttttattttctt

SEQ ID NO: 1022129 - DNA, 15 bp, Homo sapiens
atgtttttattttct

SEQ ID NO: 1022130 - DNA, 15 bp, Homo sapiens
catgtttttattttc

SEQ ID NO: 1022131 - DNA, 15 bp, Homo sapiens
acatgtttttatttt

SEQ ID NO: 1022132 - DNA, 15 bp, Homo sapiens
gacatgtttttattt

SEQ ID NO: 1022133 - DNA, 15 bp, Homo sapiens
ggacatgtttttatt

SEQ ID NO: 1022134 - DNA, 15 bp, Homo sapiens
aggacatgtttttat

SEQ ID NO: 1022135 - DNA, 15 bp, Homo sapiens
aaggacatgttttta

SEQ ID NO: 1022136 - DNA, 15 bp, Homo sapiens
aaaggacatgttttt

SEQ ID NO: 1022137 - DNA, 15 bp, Homo sapiens
taaaggacatgtttt

SEQ ID NO: 1022138 - DNA, 15 bp, Homo sapiens
gtaaaggacatgttt

SEQ ID NO: 1022139 - DNA, 15 bp, Homo sapiens
tgtaaaggacatgtt

SEQ ID NO: 1022140 - DNA, 15 bp, Homo sapiens
atgtaaaggacatgt

SEQ ID NO: 1022141 - DNA, 15 bp, Homo sapiens
aatgtaaaggacatg

SEQ ID NO: 1022142 - DNA, 15 bp, Homo sapiens
aaatgtaaaggacat

SEQ ID NO: 1022143 - DNA, 15 bp, Homo sapiens
caaatgtaaaggaca

SEQ ID NO: 1022144 - DNA, 15 bp, Homo sapiens
tcaaatgtaaaggac

SEQ ID NO: 1022145 - DNA, 15 bp, Homo sapiens
atcaaatgtaaagga

SEQ ID NO: 1022146 - DNA, 15 bp, Homo sapiens
gatcaaatgtaaagg

SEQ ID NO: 1022147 - DNA, 15 bp, Homo sapiens
agatcaaatgtaaag

SEQ ID NO: 1022148 - DNA, 15 bp, Homo sapiens
gagatcaaatgtaaa

SEQ ID NO: 1022149 - DNA, 15 bp, Homo sapiens
agagatcaaatgtaa

SEQ ID NO: 1022150 - DNA, 15 bp, Homo sapiens
aagagatcaaatgta

SEQ ID NO: 1022151 - DNA, 15 bp, Homo sapiens
taagagatcaaatgt

SEQ ID NO: 1022152 - DNA, 15 bp, Homo sapiens
ataagagatcaaatg

SEQ ID NO: 1022153 - DNA, 15 bp, Homo sapiens
gataagagatcaaat

SEQ ID NO: 1022154 - DNA, 15 bp, Homo sapiens
agataagagatcaaa

SEQ ID NO: 1022155 - DNA, 15 bp, Homo sapiens
tagataagagatcaa

SEQ ID NO: 1022156 - DNA, 15 bp, Homo sapiens
ctagataagagatca

SEQ ID NO: 1022157 - DNA, 15 bp, Homo sapiens
cctagataagagatc

SEQ ID NO: 1022158 - DNA, 15 bp, Homo sapiens
ccctagataagagat

SEQ ID NO: 1022159 - DNA, 15 bp, Homo sapiens
tccctagataagaga

SEQ ID NO: 1022160 - DNA, 15 bp, Homo sapiens
ttccctagataagag

SEQ ID NO: 1022161 - DNA, 15 bp, Homo sapiens
cttccctagataaga

SEQ ID NO: 1022162 - DNA, 15 bp, Homo sapiens
gcttccctagataag

SEQ ID NO: 1022163 - DNA, 15 bp, Homo sapiens
ggcttccctagataa

SEQ ID NO: 1022164 - DNA, 15 bp, Homo sapiens
tggcttccctagata

SEQ ID NO: 1022165 - DNA, 15 bp, Homo sapiens
ctggcttccctagat

SEQ ID NO: 1022166 - DNA, 15 bp, Homo sapiens
cctggcttccctaga

SEQ ID NO: 1022167 - DNA, 15 bp, Homo sapiens
acctggcttccctag

SEQ ID NO: 1022168 - DNA, 15 bp, Homo sapiens
aacctggcttcccta

SEQ ID NO: 1022169 - DNA, 15 bp, Homo sapiens
gaacctggcttccct

SEQ ID NO: 1022170 - DNA, 15 bp, Homo sapiens
ggaacctggcttccc

SEQ ID NO: 1022171 - DNA, 15 bp, Homo sapiens
gggaacctggcttcc

SEQ ID NO: 1022172 - DNA, 15 bp, Homo sapiens
agggaacctggcttc

SEQ ID NO: 1022173 - DNA, 15 bp, Homo sapiens
gagggaacctggctt

SEQ ID NO: 1022174 - DNA, 15 bp, Homo sapiens
tgagggaacctggct

SEQ ID NO: 1022175 - DNA, 15 bp, Homo sapiens
ctgagggaacctggc

SEQ ID NO: 1022176 - DNA, 15 bp, Homo sapiens
tctgagggaacctgg

SEQ ID NO: 1022177 - DNA, 15 bp, Homo sapiens
ctctgagggaacctg

SEQ ID NO: 1022178 - DNA, 15 bp, Homo sapiens
cctctgagggaacct

SEQ ID NO: 1022179 - DNA, 15 bp, Homo sapiens
ccctctgagggaacc

SEQ ID NO: 1022180 - DNA, 15 bp, Homo sapiens
tccctctgagggaac

SEQ ID NO: 1022181 - DNA, 15 bp, Homo sapiens
gtccctctgagggaa

SEQ ID NO: 1022182 - DNA, 15 bp, Homo sapiens
agtccctctgaggga

SEQ ID NO: 1022183 - DNA, 15 bp, Homo sapiens
gagtccctctgaggg

SEQ ID NO: 1022184 - DNA, 15 bp, Homo sapiens
agagtccctctgagg

SEQ ID NO: 1022185 - DNA, 15 bp, Homo sapiens
gagagtccctctgag

SEQ ID NO: 1022186 - DNA, 15 bp, Homo sapiens
tgagagtccctctga

SEQ ID NO: 1022187 - DNA, 15 bp, Homo sapiens
ttgagagtccctctg

SEQ ID NO: 1022188 - DNA, 15 bp, Homo sapiens
cttgagagtccctct

SEQ ID NO: 1022189 - DNA, 15 bp, Homo sapiens
ccttgagagtccctc

SEQ ID NO: 1022190 - DNA, 15 bp, Homo sapiens
gccttgagagtccct

SEQ ID NO: 1022191 - DNA, 15 bp, Homo sapiens
agccttgagagtccc

SEQ ID NO: 1022192 - DNA, 15 bp, Homo sapiens
cagccttgagagtcc

SEQ ID NO: 1022193 - DNA, 15 bp, Homo sapiens
acagccttgagagtc

SEQ ID NO: 1022194 - DNA, 15 bp, Homo sapiens
cacagccttgagagt

SEQ ID NO: 1022195 - DNA, 15 bp, Homo sapiens
tcacagccttgagag

SEQ ID NO: 1022196 - DNA, 15 bp, Homo sapiens
ctcacagccttgaga

SEQ ID NO: 1022197 - DNA, 15 bp, Homo sapiens
actcacagccttgag

SEQ ID NO: 1022198 - DNA, 15 bp, Homo sapiens
gactcacagccttga

SEQ ID NO: 1022199 - DNA, 15 bp, Homo sapiens
ggactcacagccttg

SEQ ID NO: 1022200 - DNA, 15 bp, Homo sapiens
gggactcacagcctt

SEQ ID NO: 1022201 - DNA, 15 bp, Homo sapiens
ggggactcacagcct

SEQ ID NO: 1022202 - DNA, 15 bp, Homo sapiens
tggggactcacagcc

SEQ ID NO: 1022203 - DNA, 15 bp, Homo sapiens
ctggggactcacagc

SEQ ID NO: 1022204 - DNA, 15 bp, Homo sapiens
actggggactcacag

SEQ ID NO: 1022205 - DNA, 15 bp, Homo sapiens
cactggggactcaca

SEQ ID NO: 1022206 - DNA, 15 bp, Homo sapiens
acactggggactcac

SEQ ID NO: 1022207 - DNA, 15 bp, Homo sapiens
aacactggggactca

SEQ ID NO: 1022208 - DNA, 15 bp, Homo sapiens
aaacactggggactc

SEQ ID NO: 1022209 - DNA, 15 bp, Homo sapiens
taaacactggggact

SEQ ID NO: 1022210 - DNA, 15 bp, Homo sapiens
ataaacactggggac

SEQ ID NO: 1022211 - DNA, 15 bp, Homo sapiens
aataaacactgggga

SEQ ID NO: 1022212 - DNA, 15 bp, Homo sapiens
caataaacactgggg

SEQ ID NO: 1022213 - DNA, 15 bp, Homo sapiens
acaataaacactggg

SEQ ID NO: 1022214 - DNA, 15 bp, Homo sapiens
cacaataaacactgg

SEQ ID NO: 1022215 - DNA, 15 bp, Homo sapiens
acacaataaacactg

SEQ ID NO: 1022216 - DNA, 15 bp, Homo sapiens
aacacaataaacact

SEQ ID NO: 1022217 - DNA, 15 bp, Homo sapiens
aaacacaataaacac

SEQ ID NO: 1022218 - DNA, 15 bp, Homo sapiens
taaacacaataaaca

SEQ ID NO: 1022219 - DNA, 15 bp, Homo sapiens
ctaaacacaataaac

SEQ ID NO: 1022220 - DNA, 15 bp, Homo sapiens
actaaacacaataaa

SEQ ID NO: 1022221 - DNA, 15 bp, Homo sapiens
cactaaacacaataa

SEQ ID NO: 1022222 - DNA, 15 bp, Homo sapiens
ccactaaacacaata

SEQ ID NO: 1022223 - DNA, 15 bp, Homo sapiens
cccactaaacacaat

SEQ ID NO: 1022224 - DNA, 15 bp, Homo sapiens
gcccactaaacacaa

SEQ ID NO: 1022225 - DNA, 15 bp, Homo sapiens
ggcccactaaacaca

SEQ ID NO: 1022226 - DNA, 15 bp, Homo sapiens
tggcccactaaacac

SEQ ID NO: 1022227 - DNA, 15 bp, Homo sapiens
gtggcccactaaaca

SEQ ID NO: 1022228 - DNA, 15 bp, Homo sapiens
tgtggcccactaaac

SEQ ID NO: 1022229 - DNA, 15 bp, Homo sapiens
atgtggcccactaaa

SEQ ID NO: 1022230 - DNA, 15 bp, Homo sapiens
aatgtggcccactaa

SEQ ID NO: 1022231 - DNA, 15 bp, Homo sapiens
caatgtggcccacta

SEQ ID NO: 1022232 - DNA, 15 bp, Homo sapiens
acaatgtggcccact

SEQ ID NO: 1022233 - DNA, 15 bp, Homo sapiens
aacaatgtggcccac

SEQ ID NO: 1022234 - DNA, 15 bp, Homo sapiens
aaacaatgtggccca

SEQ ID NO: 1022235 - DNA, 15 bp, Homo sapiens
gaaacaatgtggccc

SEQ ID NO: 1022236 - DNA, 15 bp, Homo sapiens
cgaaacaatgtggcc

SEQ ID NO: 1022237 - DNA, 15 bp, Homo sapiens
acgaaacaatgtggc

SEQ ID NO: 1022238 - DNA, 15 bp, Homo sapiens
cacgaaacaatgtgg

SEQ ID NO: 1022239 - DNA, 15 bp, Homo sapiens
acacgaaacaatgtg

SEQ ID NO: 1022240 - DNA, 15 bp, Homo sapiens
aacacgaaacaatgt

SEQ ID NO: 1022241 - DNA, 15 bp, Homo sapiens
gaacacgaaacaatg

SEQ ID NO: 1022242 - DNA, 15 bp, Homo sapiens
tgaacacgaaacaat

SEQ ID NO: 1022243 - DNA, 15 bp, Homo sapiens
ctgaacacgaaacaa

SEQ ID NO: 1022244 - DNA, 15 bp, Homo sapiens
gctgaacacgaaaca

SEQ ID NO: 1022245 - DNA, 15 bp, Homo sapiens
agctgaacacgaaac

SEQ ID NO: 1022246 - DNA, 15 bp, Homo sapiens
cagctgaacacgaaa

SEQ ID NO: 1022247 - DNA, 15 bp, Homo sapiens
acagctgaacacgaa

SEQ ID NO: 1022248 - DNA, 15 bp, Homo sapiens
cacagctgaacacga

SEQ ID NO: 1022249 - DNA, 15 bp, Homo sapiens
tcacagctgaacacg

SEQ ID NO: 1022250 - DNA, 15 bp, Homo sapiens
ttcacagctgaacac

SEQ ID NO: 1022251 - DNA, 15 bp, Homo sapiens
tttcacagctgaaca

SEQ ID NO: 1022252 - DNA, 15 bp, Homo sapiens
atttcacagctgaac

SEQ ID NO: 1022253 - DNA, 15 bp, Homo sapiens
catttcacagctgaa

SEQ ID NO: 1022254 - DNA, 15 bp, Homo sapiens
gcatttcacagctga

SEQ ID NO: 1022255 - DNA, 15 bp, Homo sapiens
tgcatttcacagctg

SEQ ID NO: 1022256 - DNA, 15 bp, Homo sapiens
atgcatttcacagct

SEQ ID NO: 1022257 - DNA, 15 bp, Homo sapiens
aatgcatttcacagc

SEQ ID NO: 1022258 - DNA, 15 bp, Homo sapiens
caatgcatttcacag

SEQ ID NO: 1022259 - DNA, 15 bp, Homo sapiens
tcaatgcatttcaca

SEQ ID NO: 1022260 - DNA, 15 bp, Homo sapiens
ttcaatgcatttcac

SEQ ID NO: 1022261 - DNA, 15 bp, Homo sapiens
cttcaatgcatttca

SEQ ID NO: 1022262 - DNA, 15 bp, Homo sapiens
acttcaatgcatttc

SEQ ID NO: 1022263 - DNA, 15 bp, Homo sapiens
tacttcaatgcattt

SEQ ID NO: 1022264 - DNA, 15 bp, Homo sapiens
gtacttcaatgcatt

SEQ ID NO: 1022265 - DNA, 15 bp, Homo sapiens
agtacttcaatgcat

SEQ ID NO: 1022266 - DNA, 15 bp, Homo sapiens
tagtacttcaatgca

SEQ ID NO: 1022267 - DNA, 15 bp, Homo sapiens
gtagtacttcaatgc

SEQ ID NO: 1022268 - DNA, 15 bp, Homo sapiens
agtagtacttcaatg

SEQ ID NO: 1022269 - DNA, 15 bp, Homo sapiens
cagtagtacttcaat

SEQ ID NO: 1022270 - DNA, 15 bp, Homo sapiens
tcagtagtacttcaa

SEQ ID NO: 1022271 - DNA, 15 bp, Homo sapiens
ctcagtagtacttca

SEQ ID NO: 1022272 - DNA, 15 bp, Homo sapiens
actcagtagtacttc

SEQ ID NO: 1022273 - DNA, 15 bp, Homo sapiens
cactcagtagtactt

SEQ ID NO: 1022274 - DNA, 15 bp, Homo sapiens
ccactcagtagtact

SEQ ID NO: 1022275 - DNA, 15 bp, Homo sapiens
accactcagtagtac

SEQ ID NO: 1022276 - DNA, 15 bp, Homo sapiens
gaccactcagtagta

SEQ ID NO: 1022277 - DNA, 15 bp, Homo sapiens
tgaccactcagtagt

SEQ ID NO: 1022278 - DNA, 15 bp, Homo sapiens
atgaccactcagtag

SEQ ID NO: 1022279 - DNA, 15 bp, Homo sapiens
catgaccactcagta

SEQ ID NO: 1022280 - DNA, 15 bp, Homo sapiens
gcatgaccactcagt

SEQ ID NO: 1022281 - DNA, 15 bp, Homo sapiens
agcatgaccactcag

SEQ ID NO: 1022282 - DNA, 15 bp, Homo sapiens
cagcatgaccactca

SEQ ID NO: 1022283 - DNA, 15 bp, Homo sapiens
acagcatgaccactc

SEQ ID NO: 1022284 - DNA, 15 bp, Homo sapiens
gacagcatgaccact

SEQ ID NO: 1022285 - DNA, 15 bp, Homo sapiens
agacagcatgaccac

SEQ ID NO: 1022286 - DNA, 15 bp, Homo sapiens
gagacagcatgacca

SEQ ID NO: 1022287 - DNA, 15 bp, Homo sapiens
agagacagcatgacc

SEQ ID NO: 1022288 - DNA, 15 bp, Homo sapiens
gagagacagcatgac

SEQ ID NO: 1022289 - DNA, 15 bp, Homo sapiens
agagagacagcatga

SEQ ID NO: 1022290 - DNA, 15 bp, Homo sapiens
cagagagacagcatg

SEQ ID NO: 1022291 - DNA, 15 bp, Homo sapiens
ccagagagacagcat

SEQ ID NO: 1022292 - DNA, 15 bp, Homo sapiens
cccagagagacagca

SEQ ID NO: 1022293 - DNA, 15 bp, Homo sapiens
tcccagagagacagc

SEQ ID NO: 1022294 - DNA, 15 bp, Homo sapiens
gtcccagagagacag

SEQ ID NO: 1022295 - DNA, 15 bp, Homo sapiens
ggtcccagagagaca

SEQ ID NO: 1022296 - DNA, 15 bp, Homo sapiens
gggtcccagagagac

SEQ ID NO: 1022297 - DNA, 15 bp, Homo sapiens
ggggtcccagagaga

SEQ ID NO: 1022298 - DNA, 15 bp, Homo sapiens
tggggtcccagagag

SEQ ID NO: 1022299 - DNA, 15 bp, Homo sapiens
gtggggtcccagaga

SEQ ID NO: 1022300 - DNA, 15 bp, Homo sapiens
agtggggtcccagag

SEQ ID NO: 1022301 - DNA, 15 bp, Homo sapiens
cagtggggtcccaga

SEQ ID NO: 1022302 - DNA, 15 bp, Homo sapiens
acagtggggtcccag

SEQ ID NO: 1022303 - DNA, 15 bp, Homo sapiens
gacagtggggtccca

SEQ ID NO: 1022304 - DNA, 15 bp, Homo sapiens
ggacagtggggtccc

SEQ ID NO: 1022305 - DNA, 15 bp, Homo sapiens
gggacagtggggtcc

SEQ ID NO: 1022306 - DNA, 15 bp, Homo sapiens
ggggacagtggggtc

SEQ ID NO: 1022307 - DNA, 15 bp, Homo sapiens
aggggacagtggggt

SEQ ID NO: 1022308 - DNA, 15 bp, Homo sapiens
caggggacagtgggg

SEQ ID NO: 1022309 - DNA, 15 bp, Homo sapiens
acaggggacagtggg

SEQ ID NO: 1022310 - DNA, 15 bp, Homo sapiens
gacaggggacagtgg

SEQ ID NO: 1022311 - DNA, 15 bp, Homo sapiens
agacaggggacagtg

SEQ ID NO: 1022312 - DNA, 15 bp, Homo sapiens
cagacaggggacagt

SEQ ID NO: 1022313 - DNA, 15 bp, Homo sapiens
acagacaggggacag

SEQ ID NO: 1022314 - DNA, 15 bp, Homo sapiens
gacagacaggggaca

SEQ ID NO: 1022315 - DNA, 15 bp, Homo sapiens
tgacagacaggggac

SEQ ID NO: 1022316 - DNA, 15 bp, Homo sapiens
ttgacagacagggga

SEQ ID NO: 1022317 - DNA, 15 bp, Homo sapiens
tttgacagacagggg

SEQ ID NO: 1022318 - DNA, 15 bp, Homo sapiens
ctttgacagacaggg

SEQ ID NO: 1022319 - DNA, 15 bp, Homo sapiens
actttgacagacagg

SEQ ID NO: 1022320 - DNA, 15 bp, Homo sapiens
aactttgacagacag

SEQ ID NO: 1022321 - DNA, 15 bp, Homo sapiens
caactttgacagaca

SEQ ID NO: 1022322 - DNA, 15 bp, Homo sapiens
tcaactttgacagac

SEQ ID NO: 1022323 - DNA, 15 bp, Homo sapiens
ctcaactttgacaga

SEQ ID NO: 1022324 - DNA, 15 bp, Homo sapiens
cctcaactttgacag

SEQ ID NO: 1022325 - DNA, 15 bp, Homo sapiens
ccctcaactttgaca

SEQ ID NO: 1022326 - DNA, 15 bp, Homo sapiens
accctcaactttgac

SEQ ID NO: 1022327 - DNA, 15 bp, Homo sapiens
taccctcaactttga

SEQ ID NO: 1022328 - DNA, 15 bp, Homo sapiens
ttaccctcaactttg

SEQ ID NO: 1022329 - DNA, 15 bp, Homo sapiens
attaccctcaacttt

SEQ ID NO: 1022330 - DNA, 15 bp, Homo sapiens
tattaccctcaactt

SEQ ID NO: 1022331 - DNA, 15 bp, Homo sapiens
ttattaccctcaact

SEQ ID NO: 1022332 - DNA, 15 bp, Homo sapiens
attattaccctcaac

SEQ ID NO: 1022333 - DNA, 15 bp, Homo sapiens
tattattaccctcaa

SEQ ID NO: 1022334 - DNA, 15 bp, Homo sapiens
ttattattaccctca

SEQ ID NO: 1022335 - DNA, 15 bp, Homo sapiens
attattattaccctc

SEQ ID NO: 1022336 - DNA, 15 bp, Homo sapiens
tattattattaccct

SEQ ID NO: 1022337 - DNA, 15 bp, Homo sapiens
ttattattattaccc

SEQ ID NO: 1022338 - DNA, 15 bp, Homo sapiens
attattattattacc

SEQ ID NO: 1022339 - DNA, 15 bp, Homo sapiens
gattattattattac

SEQ ID NO: 1022340 - DNA, 15 bp, Homo sapiens
tgattattattatta

SEQ ID NO: 1022341 - DNA, 15 bp, Homo sapiens
ttgattattattatt

SEQ ID NO: 1022342 - DNA, 15 bp, Homo sapiens
tttgattattattat

SEQ ID NO: 1022343 - DNA, 15 bp, Homo sapiens
gtttgattattatta

SEQ ID NO: 1022344 - DNA, 15 bp, Homo sapiens
tgtttgattattatt

SEQ ID NO: 1022345 - DNA, 15 bp, Homo sapiens
atgtttgattattat

SEQ ID NO: 1022346 - DNA, 15 bp, Homo sapiens
gatgtttgattatta

SEQ ID NO: 1022347 - DNA, 15 bp, Homo sapiens
tgatgtttgattatt

SEQ ID NO: 1022348 - DNA, 15 bp, Homo sapiens
ctgatgtttgattat

SEQ ID NO: 1022349 - DNA, 15 bp, Homo sapiens
tctgatgtttgatta

SEQ ID NO: 1022350 - DNA, 15 bp, Homo sapiens
gtctgatgtttgatt

SEQ ID NO: 1022351 - DNA, 15 bp, Homo sapiens
tgtctgatgtttgat

SEQ ID NO: 1022352 - DNA, 15 bp, Homo sapiens
atgtctgatgtttga

SEQ ID NO: 1022353 - DNA, 15 bp, Homo sapiens
gatgtctgatgtttg

SEQ ID NO: 1022354 - DNA, 15 bp, Homo sapiens
tgatgtctgatgttt

SEQ ID NO: 1022355 - DNA, 15 bp, Homo sapiens
ctgatgtctgatgtt

SEQ ID NO: 1022356 - DNA, 15 bp, Homo sapiens
tctgatgtctgatgt

SEQ ID NO: 1022357 - DNA, 15 bp, Homo sapiens
gtctgatgtctgatg

SEQ ID NO: 1022358 - DNA, 15 bp, Homo sapiens
ggtctgatgtctgat

SEQ ID NO: 1022359 - DNA, 15 bp, Homo sapiens
tggtctgatgtctga

SEQ ID NO: 1022360 - DNA, 15 bp, Homo sapiens
ttggtctgatgtctg

SEQ ID NO: 1022361 - DNA, 15 bp, Homo sapiens
attggtctgatgtct

SEQ ID NO: 1022362 - DNA, 15 bp, Homo sapiens
tattggtctgatgtc

SEQ ID NO: 1022363 - DNA, 15 bp, Homo sapiens
atattggtctgatgt

SEQ ID NO: 1022364 - DNA, 15 bp, Homo sapiens
aatattggtctgatg

SEQ ID NO: 1022365 - DNA, 15 bp, Homo sapiens
aaatattggtctgat

SEQ ID NO: 1022366 - DNA, 15 bp, Homo sapiens
taaatattggtctga

SEQ ID NO: 1022367 - DNA, 15 bp, Homo sapiens
ttaaatattggtctg

SEQ ID NO: 1022368 - DNA, 15 bp, Homo sapiens
attaaatattggtct

SEQ ID NO: 1022369 - DNA, 15 bp, Homo sapiens
gattaaatattggtc

SEQ ID NO: 1022370 - DNA, 15 bp, Homo sapiens
tgattaaatattggt

SEQ ID NO: 1022371 - DNA, 15 bp, Homo sapiens
ctgattaaatattgg

SEQ ID NO: 1022372 - DNA, 15 bp, Homo sapiens
tctgattaaatattg

SEQ ID NO: 1022373 - DNA, 15 bp, Homo sapiens
gtctgattaaatatt

SEQ ID NO: 1022374 - DNA, 15 bp, Homo sapiens
tgtctgattaaatat

SEQ ID NO: 1022375 - DNA, 15 bp, Homo sapiens
ttgtctgattaaata

SEQ ID NO: 1022376 - DNA, 15 bp, Homo sapiens
cttgtctgattaaat

SEQ ID NO: 1022377 - DNA, 15 bp, Homo sapiens
acttgtctgattaaa

SEQ ID NO: 1022378 - DNA, 15 bp, Homo sapiens
tacttgtctgattaa

SEQ ID NO: 1022379 - DNA, 15 bp, Homo sapiens
atacttgtctgatta

SEQ ID NO: 1022380 - DNA, 15 bp, Homo sapiens
aatacttgtctgatt

SEQ ID NO: 1022381 - DNA, 15 bp, Homo sapiens
aaatacttgtctgat

SEQ ID NO: 1022382 - DNA, 15 bp, Homo sapiens
taaatacttgtctga

SEQ ID NO: 1022383 - DNA, 15 bp, Homo sapiens
ataaatacttgtctg

SEQ ID NO: 1022384 - DNA, 15 bp, Homo sapiens
cataaatacttgtct

SEQ ID NO: 1022385 - DNA, 15 bp, Homo sapiens
gcataaatacttgtc

SEQ ID NO: 1022386 - DNA, 15 bp, Homo sapiens
tgcataaatacttgt

SEQ ID NO: 1022387 - DNA, 15 bp, Homo sapiens
ctgcataaatacttg

SEQ ID NO: 1022388 - DNA, 15 bp, Homo sapiens
gctgcataaatactt

SEQ ID NO: 1022389 - DNA, 15 bp, Homo sapiens
tgctgcataaatact

SEQ ID NO: 1022390 - DNA, 15 bp, Homo sapiens
atgctgcataaatac

SEQ ID NO: 1022391 - DNA, 15 bp, Homo sapiens
gatgctgcataaata

SEQ ID NO: 1022392 - DNA, 15 bp, Homo sapiens
agatgctgcataaat

SEQ ID NO: 1022393 - DNA, 15 bp, Homo sapiens
aagatgctgcataaa

SEQ ID NO: 1022394 - DNA, 15 bp, Homo sapiens
aaagatgctgcataa

SEQ ID NO: 1022395 - DNA, 15 bp, Homo sapiens
aaaagatgctgcata

SEQ ID NO: 1022396 - DNA, 15 bp, Homo sapiens
gaaaagatgctgcat

SEQ ID NO: 1022397 - DNA, 15 bp, Homo sapiens
agaaaagatgctgca

SEQ ID NO: 1022398 - DNA, 15 bp, Homo sapiens
gagaaaagatgctgc

SEQ ID NO: 1022399 - DNA, 15 bp, Homo sapiens
agagaaaagatgctg

SEQ ID NO: 1022400 - DNA, 15 bp, Homo sapiens
gagagaaaagatgct

SEQ ID NO: 1022401 - DNA, 15 bp, Homo sapiens
agagagaaaagatgc

SEQ ID NO: 1022402 - DNA, 15 bp, Homo sapiens
tagagagaaaagatg

SEQ ID NO: 1022403 - DNA, 15 bp, Homo sapiens
ctagagagaaaagat

SEQ ID NO: 1022404 - DNA, 15 bp, Homo sapiens
tctagagagaaaaga

SEQ ID NO: 1022405 - DNA, 15 bp, Homo sapiens
ttctagagagaaaag

SEQ ID NO: 1022406 - DNA, 15 bp, Homo sapiens
cttctagagagaaaa

SEQ ID NO: 1022407 - DNA, 15 bp, Homo sapiens
acttctagagagaaa

SEQ ID NO: 1022408 - DNA, 15 bp, Homo sapiens
aacttctagagagaa

SEQ ID NO: 1022409 - DNA, 15 bp, Homo sapiens
taacttctagagaga

SEQ ID NO: 1022410 - DNA, 15 bp, Homo sapiens
ctaacttctagagag

SEQ ID NO: 1022411 - DNA, 15 bp, Homo sapiens
tctaacttctagaga

SEQ ID NO: 1022412 - DNA, 15 bp, Homo sapiens
ttctaacttctagag

SEQ ID NO: 1022413 - DNA, 15 bp, Homo sapiens
cttctaacttctaga

SEQ ID NO: 1022414 - DNA, 15 bp, Homo sapiens
gcttctaacttctag

SEQ ID NO: 1022415 - DNA, 15 bp, Homo sapiens
tgcttctaacttcta

SEQ ID NO: 1022416 - DNA, 15 bp, Homo sapiens
gtgcttctaacttct

SEQ ID NO: 1022417 - DNA, 15 bp, Homo sapiens
agtgcttctaacttc

SEQ ID NO: 1022418 - DNA, 15 bp, Homo sapiens
aagtgcttctaactt

SEQ ID NO: 1022419 - DNA, 15 bp, Homo sapiens
caagtgcttctaact

SEQ ID NO: 1022420 - DNA, 15 bp, Homo sapiens
tcaagtgcttctaac

SEQ ID NO: 1022421 - DNA, 15 bp, Homo sapiens
gtcaagtgcttctaa

SEQ ID NO: 1022422 - DNA, 15 bp, Homo sapiens
ggtcaagtgcttcta

SEQ ID NO: 1022423 - DNA, 15 bp, Homo sapiens
tggtcaagtgcttct

SEQ ID NO: 1022424 - DNA, 15 bp, Homo sapiens
ttggtcaagtgcttc

SEQ ID NO: 1022425 - DNA, 15 bp, Homo sapiens
tttggtcaagtgctt

SEQ ID NO: 1022426 - DNA, 15 bp, Homo sapiens
gtttggtcaagtgct

SEQ ID NO: 1022427 - DNA, 15 bp, Homo sapiens
tgtttggtcaagtgc

SEQ ID NO: 1022428 - DNA, 15 bp, Homo sapiens
atgtttggtcaagtg

SEQ ID NO: 1022429 - DNA, 15 bp, Homo sapiens
tatgtttggtcaagt

SEQ ID NO: 1022430 - DNA, 15 bp, Homo sapiens
atatgtttggtcaag

SEQ ID NO: 1022431 - DNA, 15 bp, Homo sapiens
gatatgtttggtcaa

SEQ ID NO: 1022432 - DNA, 15 bp, Homo sapiens
agatatgtttggtca

SEQ ID NO: 1022433 - DNA, 15 bp, Homo sapiens
gagatatgtttggtc

SEQ ID NO: 1022434 - DNA, 15 bp, Homo sapiens
tgagatatgtttggt

SEQ ID NO: 1022435 - DNA, 15 bp, Homo sapiens
ctgagatatgtttgg

SEQ ID NO: 1022436 - DNA, 15 bp, Homo sapiens
actgagatatgtttg

SEQ ID NO: 1022437 - DNA, 15 bp, Homo sapiens
aactgagatatgttt

SEQ ID NO: 1022438 - DNA, 15 bp, Homo sapiens
gaactgagatatgtt

SEQ ID NO: 1022439 - DNA, 15 bp, Homo sapiens
agaactgagatatgt

SEQ ID NO: 1022440 - DNA, 15 bp, Homo sapiens
gagaactgagatatg

SEQ ID NO: 1022441 - DNA, 15 bp, Homo sapiens
ggagaactgagatat

SEQ ID NO: 1022442 - DNA, 15 bp, Homo sapiens
tggagaactgagata

SEQ ID NO: 1022443 - DNA, 15 bp, Homo sapiens
ttggagaactgagat

SEQ ID NO: 1022444 - DNA, 15 bp, Homo sapiens
tttggagaactgaga

SEQ ID NO: 1022445 - DNA, 15 bp, Homo sapiens
ctttggagaactgag

SEQ ID NO: 1022446 - DNA, 15 bp, Homo sapiens
tctttggagaactga

SEQ ID NO: 1022447 - DNA, 15 bp, Homo sapiens
gtctttggagaactg

SEQ ID NO: 1022448 - DNA, 15 bp, Homo sapiens
agtctttggagaact

SEQ ID NO: 1022449 - DNA, 15 bp, Homo sapiens
cagtctttggagaac

SEQ ID NO: 1022450 - DNA, 15 bp, Homo sapiens
acagtctttggagaa

SEQ ID NO: 1022451 - DNA, 15 bp, Homo sapiens
gacagtctttggaga

SEQ ID NO: 1022452 - DNA, 15 bp, Homo sapiens
ggacagtctttggag

SEQ ID NO: 1022453 - DNA, 15 bp, Homo sapiens
aggacagtctttgga

SEQ ID NO: 1022454 - DNA, 15 bp, Homo sapiens
aaggacagtctttgg

SEQ ID NO: 1022455 - DNA, 15 bp, Homo sapiens
taaggacagtctttg

SEQ ID NO: 1022456 - DNA, 15 bp, Homo sapiens
ttaaggacagtcttt

SEQ ID NO: 1022457 - DNA, 15 bp, Homo sapiens
cttaaggacagtctt

SEQ ID NO: 1022458 - DNA, 15 bp, Homo sapiens
gcttaaggacagtct

SEQ ID NO: 1022459 - DNA, 15 bp, Homo sapiens
tgcttaaggacagtc

SEQ ID NO: 1022460 - DNA, 15 bp, Homo sapiens
gtgcttaaggacagt

SEQ ID NO: 1022461 - DNA, 15 bp, Homo sapiens
agtgcttaaggacag

SEQ ID NO: 1022462 - DNA, 15 bp, Homo sapiens
tagtgcttaaggaca

SEQ ID NO: 1022463 - DNA, 15 bp, Homo sapiens
ctagtgcttaaggac

SEQ ID NO: 1022464 - DNA, 15 bp, Homo sapiens
actagtgcttaagga

SEQ ID NO: 1022465 - DNA, 15 bp, Homo sapiens
cactagtgcttaagg

SEQ ID NO: 1022466 - DNA, 15 bp, Homo sapiens
gcactagtgcttaag

SEQ ID NO: 1022467 - DNA, 15 bp, Homo sapiens
tgcactagtgcttaa

SEQ ID NO: 1022468 - DNA, 15 bp, Homo sapiens
gtgcactagtgctta

SEQ ID NO: 1022469 - DNA, 15 bp, Homo sapiens
agtgcactagtgctt

SEQ ID NO: 1022470 - DNA, 15 bp, Homo sapiens
tagtgcactagtgct

SEQ ID NO: 1022471 - DNA, 15 bp, Homo sapiens
ctagtgcactagtgc

SEQ ID NO: 1022472 - DNA, 15 bp, Homo sapiens
gctagtgcactagtg

SEQ ID NO: 1022473 - DNA, 15 bp, Homo sapiens
tgctagtgcactagt

SEQ ID NO: 1022474 - DNA, 15 bp, Homo sapiens
atgctagtgcactag

SEQ ID NO: 1022475 - DNA, 15 bp, Homo sapiens
aatgctagtgcacta

SEQ ID NO: 1022476 - DNA, 15 bp, Homo sapiens
taatgctagtgcact

SEQ ID NO: 1022477 - DNA, 15 bp, Homo sapiens
ctaatgctagtgcac

SEQ ID NO: 1022478 - DNA, 15 bp, Homo sapiens
cctaatgctagtgca

SEQ ID NO: 1022479 - DNA, 15 bp, Homo sapiens
ccctaatgctagtgc

SEQ ID NO: 1022480 - DNA, 15 bp, Homo sapiens
tccctaatgctagtg

SEQ ID NO: 1022481 - DNA, 15 bp, Homo sapiens
atccctaatgctagt

SEQ ID NO: 1022482 - DNA, 15 bp, Homo sapiens
tatccctaatgctag

SEQ ID NO: 1022483 - DNA, 15 bp, Homo sapiens
atatccctaatgcta

SEQ ID NO: 1022484 - DNA, 15 bp, Homo sapiens
gatatccctaatgct

SEQ ID NO: 1022485 - DNA, 15 bp, Homo sapiens
tgatatccctaatgc

SEQ ID NO: 1022486 - DNA, 15 bp, Homo sapiens
atgatatccctaatg

SEQ ID NO: 1022487 - DNA, 15 bp, Homo sapiens
catgatatccctaat

SEQ ID NO: 1022488 - DNA, 15 bp, Homo sapiens
acatgatatccctaa

SEQ ID NO: 1022489 - DNA, 15 bp, Homo sapiens
tacatgatatcccta

SEQ ID NO: 1022490 - DNA, 15 bp, Homo sapiens
atacatgatatccct

SEQ ID NO: 1022491 - DNA, 15 bp, Homo sapiens
tatacatgatatccc

SEQ ID NO: 1022492 - DNA, 15 bp, Homo sapiens
gtatacatgatatcc

SEQ ID NO: 1022493 - DNA, 15 bp, Homo sapiens
ggtatacatgatatc

SEQ ID NO: 1022494 - DNA, 15 bp, Homo sapiens
aggtatacatgatat

SEQ ID NO: 1022495 - DNA, 15 bp, Homo sapiens
aaggtatacatgata

SEQ ID NO: 1022496 - DNA, 15 bp, Homo sapiens
gaaggtatacatgat

SEQ ID NO: 1022497 - DNA, 15 bp, Homo sapiens
agaaggtatacatga

SEQ ID NO: 1022498 - DNA, 15 bp, Homo sapiens
gagaaggtatacatg

SEQ ID NO: 1022499 - DNA, 15 bp, Homo sapiens
tgagaaggtatacat

SEQ ID NO: 1022500 - DNA, 15 bp, Homo sapiens
atgagaaggtataca

SEQ ID NO: 1022501 - DNA, 15 bp, Homo sapiens
aatgagaaggtatac

SEQ ID NO: 1022502 - DNA, 15 bp, Homo sapiens
gaatgagaaggtata

SEQ ID NO: 1022503 - DNA, 15 bp, Homo sapiens
tgaatgagaaggtat

SEQ ID NO: 1022504 - DNA, 15 bp, Homo sapiens
ttgaatgagaaggta

SEQ ID NO: 1022505 - DNA, 15 bp, Homo sapiens
gttgaatgagaaggt

SEQ ID NO: 1022506 - DNA, 15 bp, Homo sapiens
agttgaatgagaagg

SEQ ID NO: 1022507 - DNA, 15 bp, Homo sapiens
tagttgaatgagaag

SEQ ID NO: 1022508 - DNA, 15 bp, Homo sapiens
atagttgaatgagaa

SEQ ID NO: 1022509 - DNA, 15 bp, Homo sapiens
gatagttgaatgaga

SEQ ID NO: 1022510 - DNA, 15 bp, Homo sapiens
agatagttgaatgag

SEQ ID NO: 1022511 - DNA, 15 bp, Homo sapiens
gagatagttgaatga

SEQ ID NO: 1022512 - DNA, 15 bp, Homo sapiens
ggagatagttgaatg

SEQ ID NO: 1022513 - DNA, 15 bp, Homo sapiens
aggagatagttgaat

SEQ ID NO: 1022514 - DNA, 15 bp, Homo sapiens
gaggagatagttgaa

SEQ ID NO: 1022515 - DNA, 15 bp, Homo sapiens
tgaggagatagttga

SEQ ID NO: 1022516 - DNA, 15 bp, Homo sapiens
atgaggagatagttg

SEQ ID NO: 1022517 - DNA, 15 bp, Homo sapiens
catgaggagatagtt

SEQ ID NO: 1022518 - DNA, 15 bp, Homo sapiens
gcatgaggagatagt

SEQ ID NO: 1022519 - DNA, 15 bp, Homo sapiens
agcatgaggagatag

SEQ ID NO: 1022520 - DNA, 15 bp, Homo sapiens
aagcatgaggagata

SEQ ID NO: 1022521 - DNA, 15 bp, Homo sapiens
gaagcatgaggagat

SEQ ID NO: 1022522 - DNA, 15 bp, Homo sapiens
tgaagcatgaggaga

SEQ ID NO: 1022523 - DNA, 15 bp, Homo sapiens
gtgaagcatgaggag

SEQ ID NO: 1022524 - DNA, 15 bp, Homo sapiens
ggtgaagcatgagga

SEQ ID NO: 1022525 - DNA, 15 bp, Homo sapiens
gggtgaagcatgagg

SEQ ID NO: 1022526 - DNA, 15 bp, Homo sapiens
ggggtgaagcatgag

SEQ ID NO: 1022527 - DNA, 15 bp, Homo sapiens
tggggtgaagcatga

SEQ ID NO: 1022528 - DNA, 15 bp, Homo sapiens
gtggggtgaagcatg

SEQ ID NO: 1022529 - DNA, 15 bp, Homo sapiens
agtggggtgaagcat

SEQ ID NO: 1022530 - DNA, 15 bp, Homo sapiens
gagtggggtgaagca

SEQ ID NO: 1022531 - DNA, 15 bp, Homo sapiens
ggagtggggtgaagc

SEQ ID NO: 1022532 - DNA, 15 bp, Homo sapiens
aggagtggggtgaag

SEQ ID NO: 1022533 - DNA, 15 bp, Homo sapiens
taggagtggggtgaa

SEQ ID NO: 1022534 - DNA, 15 bp, Homo sapiens
gtaggagtggggtga

SEQ ID NO: 1022535 - DNA, 15 bp, Homo sapiens
ggtaggagtggggtg

SEQ ID NO: 1022536 - DNA, 15 bp, Homo sapiens
tggtaggagtggggt

SEQ ID NO: 1022537 - DNA, 15 bp, Homo sapiens
ctggtaggagtgggg

SEQ ID NO: 1022538 - DNA, 15 bp, Homo sapiens
gctggtaggagtggg

SEQ ID NO: 1022539 - DNA, 15 bp, Homo sapiens
ggctggtaggagtgg

SEQ ID NO: 1022540 - DNA, 15 bp, Homo sapiens
gggctggtaggagtg

SEQ ID NO: 1022541 - DNA, 15 bp, Homo sapiens
ggggctggtaggagt

SEQ ID NO: 1022542 - DNA, 15 bp, Homo sapiens
tggggctggtaggag

SEQ ID NO: 1022543 - DNA, 15 bp, Homo sapiens
atggggctggtagga

SEQ ID NO: 1022544 - DNA, 15 bp, Homo sapiens
aatggggctggtagg

SEQ ID NO: 1022545 - DNA, 15 bp, Homo sapiens
taatggggctggtag

SEQ ID NO: 1022546 - DNA, 15 bp, Homo sapiens
ttaatggggctggta

SEQ ID NO: 1022547 - DNA, 15 bp, Homo sapiens
cttaatggggctggt

SEQ ID NO: 1022548 - DNA, 15 bp, Homo sapiens
tcttaatggggctgg

SEQ ID NO: 1022549 - DNA, 15 bp, Homo sapiens
ttcttaatggggctg

SEQ ID NO: 1022550 - DNA, 15 bp, Homo sapiens
tttcttaatggggct

SEQ ID NO: 1022551 - DNA, 15 bp, Homo sapiens
atttcttaatggggc

SEQ ID NO: 1022552 - DNA, 15 bp, Homo sapiens
tatttcttaatgggg

SEQ ID NO: 1022553 - DNA, 15 bp, Homo sapiens
atatttcttaatggg

SEQ ID NO: 1022554 - DNA, 15 bp, Homo sapiens
tatatttcttaatgg

SEQ ID NO: 1022555 - DNA, 15 bp, Homo sapiens
gtatatttcttaatg

SEQ ID NO: 1022556 - DNA, 15 bp, Homo sapiens
ggtatatttcttaat

SEQ ID NO: 1022557 - DNA, 15 bp, Homo sapiens
aggtatatttcttaa

SEQ ID NO: 1022558 - DNA, 15 bp, Homo sapiens
taggtatatttctta

SEQ ID NO: 1022559 - DNA, 15 bp, Homo sapiens
ttaggtatatttctt

SEQ ID NO: 1022560 - DNA, 15 bp, Homo sapiens
tttaggtatatttct

SEQ ID NO: 1022561 - DNA, 15 bp, Homo sapiens
ttttaggtatatttc

SEQ ID NO: 1022562 - DNA, 15 bp, Homo sapiens
gttttaggtatattt

SEQ ID NO: 1022563 - DNA, 15 bp, Homo sapiens
ggttttaggtatatt

SEQ ID NO: 1022564 - DNA, 15 bp, Homo sapiens
aggttttaggtatat

SEQ ID NO: 1022565 - DNA, 15 bp, Homo sapiens
aaggttttaggtata

SEQ ID NO: 1022566 - DNA, 15 bp, Homo sapiens
aaaggttttaggtat

SEQ ID NO: 1022567 - DNA, 15 bp, Homo sapiens
taaaggttttaggta

SEQ ID NO: 1022568 - DNA, 15 bp, Homo sapiens
ataaaggttttaggt

SEQ ID NO: 1022569 - DNA, 15 bp, Homo sapiens
cataaaggttttagg

SEQ ID NO: 1022570 - DNA, 15 bp, Homo sapiens
acataaaggttttag

SEQ ID NO: 1022571 - DNA, 15 bp, Homo sapiens
gacataaaggtttta

SEQ ID NO: 1022572 - DNA, 15 bp, Homo sapiens
tgacataaaggtttt

SEQ ID NO: 1022573 - DNA, 15 bp, Homo sapiens
ttgacataaaggttt

SEQ ID NO: 1022574 - DNA, 15 bp, Homo sapiens
tttgacataaaggtt

SEQ ID NO: 1022575 - DNA, 15 bp, Homo sapiens
atttgacataaaggt

SEQ ID NO: 1022576 - DNA, 15 bp, Homo sapiens
catttgacataaagg

SEQ ID NO: 1022577 - DNA, 15 bp, Homo sapiens
acatttgacataaag

SEQ ID NO: 1022578 - DNA, 15 bp, Homo sapiens
tacatttgacataaa

SEQ ID NO: 1022579 - DNA, 15 bp, Homo sapiens
ttacatttgacataa

SEQ ID NO: 1022580 - DNA, 15 bp, Homo sapiens
attacatttgacata

SEQ ID NO: 1022581 - DNA, 15 bp, Homo sapiens
aattacatttgacat

SEQ ID NO: 1022582 - DNA, 15 bp, Homo sapiens
caattacatttgaca

SEQ ID NO: 1022583 - DNA, 15 bp, Homo sapiens
ccaattacatttgac

SEQ ID NO: 1022584 - DNA, 15 bp, Homo sapiens
gccaattacatttga

SEQ ID NO: 1022585 - DNA, 15 bp, Homo sapiens
tgccaattacatttg

SEQ ID NO: 1022586 - DNA, 15 bp, Homo sapiens
atgccaattacattt

SEQ ID NO: 1022587 - DNA, 15 bp, Homo sapiens
aatgccaattacatt

SEQ ID NO: 1022588 - DNA, 15 bp, Homo sapiens
caatgccaattacat

SEQ ID NO: 1022589 - DNA, 15 bp, Homo sapiens
ccaatgccaattaca

SEQ ID NO: 1022590 - DNA, 15 bp, Homo sapiens
accaatgccaattac

SEQ ID NO: 1022591 - DNA, 15 bp, Homo sapiens
caccaatgccaatta

SEQ ID NO: 1022592 - DNA, 15 bp, Homo sapiens
gcaccaatgccaatt

SEQ ID NO: 1022593 - DNA, 15 bp, Homo sapiens
tgcaccaatgccaat

SEQ ID NO: 1022594 - DNA, 15 bp, Homo sapiens
ctgcaccaatgccaa

SEQ ID NO: 1022595 - DNA, 15 bp, Homo sapiens
gctgcaccaatgcca

SEQ ID NO: 1022596 - DNA, 15 bp, Homo sapiens
agctgcaccaatgcc

SEQ ID NO: 1022597 - DNA, 15 bp, Homo sapiens
aagctgcaccaatgc

SEQ ID NO: 1022598 - DNA, 15 bp, Homo sapiens
caagctgcaccaatg

SEQ ID NO: 1022599 - DNA, 15 bp, Homo sapiens
tcaagctgcaccaat

SEQ ID NO: 1022600 - DNA, 15 bp, Homo sapiens
gtcaagctgcaccaa

SEQ ID NO: 1022601 - DNA, 15 bp, Homo sapiens
agtcaagctgcacca

SEQ ID NO: 1022602 - DNA, 15 bp, Homo sapiens
aagtcaagctgcacc

SEQ ID NO: 1022603 - DNA, 15 bp, Homo sapiens
gaagtcaagctgcac

SEQ ID NO: 1022604 - DNA, 15 bp, Homo sapiens
agaagtcaagctgca

SEQ ID NO: 1022605 - DNA, 15 bp, Homo sapiens
tagaagtcaagctgc

SEQ ID NO: 1022606 - DNA, 15 bp, Homo sapiens
ctagaagtcaagctg

SEQ ID NO: 1022607 - DNA, 15 bp, Homo sapiens
gctagaagtcaagct

SEQ ID NO: 1022608 - DNA, 15 bp, Homo sapiens
tgctagaagtcaagc

SEQ ID NO: 1022609 - DNA, 15 bp, Homo sapiens
ttgctagaagtcaag

SEQ ID NO: 1022610 - DNA, 15 bp, Homo sapiens
cttgctagaagtcaa

SEQ ID NO: 1022611 - DNA, 15 bp, Homo sapiens
gcttgctagaagtca

SEQ ID NO: 1022612 - DNA, 15 bp, Homo sapiens
agcttgctagaagtc

SEQ ID NO: 1022613 - DNA, 15 bp, Homo sapiens
aagcttgctagaagt

SEQ ID NO: 1022614 - DNA, 15 bp, Homo sapiens
aaagcttgctagaag

SEQ ID NO: 1022615 - DNA, 15 bp, Homo sapiens
gaaagcttgctagaa

SEQ ID NO: 1022616 - DNA, 15 bp, Homo sapiens
agaaagcttgctaga

SEQ ID NO: 1022617 - DNA, 15 bp, Homo sapiens
aagaaagcttgctag

SEQ ID NO: 1022618 - DNA, 15 bp, Homo sapiens
aaagaaagcttgcta

SEQ ID NO: 1022619 - DNA, 15 bp, Homo sapiens
gaaagaaagcttgct

SEQ ID NO: 1022620 - DNA, 15 bp, Homo sapiens
agaaagaaagcttgc

SEQ ID NO: 1022621 - DNA, 15 bp, Homo sapiens
aagaaagaaagcttg

SEQ ID NO: 1022622 - DNA, 15 bp, Homo sapiens
aaagaaagaaagctt

SEQ ID NO: 1022623 - DNA, 15 bp, Homo sapiens
gaaagaaagaaagct

SEQ ID NO: 1022624 - DNA, 15 bp, Homo sapiens
agaaagaaagaaagc

SEQ ID NO: 1022625 - DNA, 15 bp, Homo sapiens
ggaaagaaagaaaga

SEQ ID NO: 1022626 - DNA, 15 bp, Homo sapiens
aggaaagaaagaaag

SEQ ID NO: 1022627 - DNA, 15 bp, Homo sapiens
gaaggaaagaaagaa

SEQ ID NO: 1022628 - DNA, 15 bp, Homo sapiens
agaaggaaagaaaga

SEQ ID NO: 1022629 - DNA, 15 bp, Homo sapiens
aagaaggaaagaaag

SEQ ID NO: 1022630 - DNA, 15 bp, Homo sapiens
aaagaaggaaagaaa

SEQ ID NO: 1022631 - DNA, 15 bp, Homo sapiens
gaagaaagaaggaaa

SEQ ID NO: 1022632 - DNA, 15 bp, Homo sapiens
agaagaaagaaggaa

SEQ ID NO: 1022633 - DNA, 15 bp, Homo sapiens
aagaagaaagaagga

SEQ ID NO: 1022634 - DNA, 15 bp, Homo sapiens
gaaagaagaaagaag

SEQ ID NO: 1022635 - DNA, 15 bp, Homo sapiens
agaaagaagaaagaa

SEQ ID NO: 1022636 - DNA, 15 bp, Homo sapiens
aagaaagaagaaaga

SEQ ID NO: 1022637 - DNA, 15 bp, Homo sapiens
aaagaaagaagaaag

SEQ ID NO: 1022638 - DNA, 15 bp, Homo sapiens
gaaagaaagaagaaa

SEQ ID NO: 1022639 - DNA, 15 bp, Homo sapiens
agaaagaaagaagaa

SEQ ID NO: 1022640 - DNA, 15 bp, Homo sapiens
aaagaagaaagaaag

SEQ ID NO: 1022641 - DNA, 15 bp, Homo sapiens
gaaagaagaaagaaa

SEQ ID NO: 1022642 - DNA, 15 bp, Homo sapiens
gagaaagaagaaaga

SEQ ID NO: 1022643 - DNA, 15 bp, Homo sapiens
agagaaagaagaaag

SEQ ID NO: 1022644 - DNA, 15 bp, Homo sapiens
gagagaaagaagaaa

SEQ ID NO: 1022645 - DNA, 15 bp, Homo sapiens
agagagaaagaagaa

SEQ ID NO: 1022646 - DNA, 15 bp, Homo sapiens
gagagagaaagaaga

SEQ ID NO: 1022647 - DNA, 15 bp, Homo sapiens
agagagagaaagaag

SEQ ID NO: 1022648 - DNA, 15 bp, Homo sapiens
gagagagagaaagaa

SEQ ID NO: 1022649 - DNA, 15 bp, Homo sapiens
gagagagagagaaag

SEQ ID NO: 1022650 - DNA, 15 bp, Homo sapiens
aagagagagagagaa

SEQ ID NO: 1022651 - DNA, 15 bp, Homo sapiens
tttaaaaaaaagaga

SEQ ID NO: 1022652 - DNA, 15 bp, Homo sapiens
atttaaaaaaaagag

SEQ ID NO: 1022653 - DNA, 15 bp, Homo sapiens
aatttaaaaaaaaga

SEQ ID NO: 1022654 - DNA, 15 bp, Homo sapiens
taatttaaaaaaaag

SEQ ID NO: 1022655 - DNA, 15 bp, Homo sapiens
ttaatttaaaaaaaa

SEQ ID NO: 1022656 - DNA, 15 bp, Homo sapiens
cttaatttaaaaaaa

SEQ ID NO: 1022657 - DNA, 15 bp, Homo sapiens
ccttaatttaaaaaa

SEQ ID NO: 1022658 - DNA, 15 bp, Homo sapiens
accttaatttaaaaa

SEQ ID NO: 1022659 - DNA, 15 bp, Homo sapiens
gaccttaatttaaaa

SEQ ID NO: 1022660 - DNA, 15 bp, Homo sapiens
tgaccttaatttaaa

SEQ ID NO: 1022661 - DNA, 15 bp, Homo sapiens
ctgaccttaatttaa

SEQ ID NO: 1022662 - DNA, 15 bp, Homo sapiens
tctgaccttaattta

SEQ ID NO: 1022663 - DNA, 15 bp, Homo sapiens
ttctgaccttaattt

SEQ ID NO: 1022664 - DNA, 15 bp, Homo sapiens
tttctgaccttaatt

SEQ ID NO: 1022665 - DNA, 15 bp, Homo sapiens
ctttctgaccttaat

SEQ ID NO: 1022666 - DNA, 15 bp, Homo sapiens
tctttctgaccttaa

SEQ ID NO: 1022667 - DNA, 15 bp, Homo sapiens
ttctttctgacctta

SEQ ID NO: 1022668 - DNA, 15 bp, Homo sapiens
tttctttctgacctt

SEQ ID NO: 1022669 - DNA, 15 bp, Homo sapiens
ctttctttctgacct

SEQ ID NO: 1022670 - DNA, 15 bp, Homo sapiens
cctttctttctgacc

SEQ ID NO: 1022671 - DNA, 15 bp, Homo sapiens
tcctttctttctgac

SEQ ID NO: 1022672 - DNA, 15 bp, Homo sapiens
ttcctttctttctga

SEQ ID NO: 1022673 - DNA, 15 bp, Homo sapiens
cttcctttctttctg

SEQ ID NO: 1022674 - DNA, 15 bp, Homo sapiens
ctcttcctttctttc

SEQ ID NO: 1022675 - DNA, 15 bp, Homo sapiens
cctcttcctttcttt

SEQ ID NO: 1022676 - DNA, 15 bp, Homo sapiens
tcctcttcctttctt

SEQ ID NO: 1022677 - DNA, 15 bp, Homo sapiens
ttcctcttcctttct

SEQ ID NO: 1022678 - DNA, 15 bp, Homo sapiens
tttcctcttcctttc

SEQ ID NO: 1022679 - DNA, 15 bp, Homo sapiens
ttttcctcttccttt

SEQ ID NO: 1022680 - DNA, 15 bp, Homo sapiens
tttttcctcttcctt

SEQ ID NO: 1022681 - DNA, 15 bp, Homo sapiens
ctttttcctcttcct

SEQ ID NO: 1022682 - DNA, 15 bp, Homo sapiens
tctttttcctcttcc

SEQ ID NO: 1022683 - DNA, 15 bp, Homo sapiens
atctttttcctcttc

SEQ ID NO: 1022684 - DNA, 15 bp, Homo sapiens
tatctttttcctctt

SEQ ID NO: 1022685 - DNA, 15 bp, Homo sapiens
ttatctttttcctct

SEQ ID NO: 1022686 - DNA, 15 bp, Homo sapiens
attatctttttcctc

SEQ ID NO: 1022687 - DNA, 15 bp, Homo sapiens
cattatctttttcct

SEQ ID NO: 1022688 - DNA, 15 bp, Homo sapiens
ccattatctttttcc

SEQ ID NO: 1022689 - DNA, 15 bp, Homo sapiens
gccattatctttttc

SEQ ID NO: 1022690 - DNA, 15 bp, Homo sapiens
tgccattatcttttt

SEQ ID NO: 1022691 - DNA, 15 bp, Homo sapiens
atgccattatctttt

SEQ ID NO: 1022692 - DNA, 15 bp, Homo sapiens
gatgccattatcttt

SEQ ID NO: 1022693 - DNA, 15 bp, Homo sapiens
agatgccattatctt

SEQ ID NO: 1022694 - DNA, 15 bp, Homo sapiens
tagatgccattatct

SEQ ID NO: 1022695 - DNA, 15 bp, Homo sapiens
atagatgccattatc

SEQ ID NO: 1022696 - DNA, 15 bp, Homo sapiens
catagatgccattat

SEQ ID NO: 1022697 - DNA, 15 bp, Homo sapiens
gcatagatgccatta

SEQ ID NO: 1022698 - DNA, 15 bp, Homo sapiens
agcatagatgccatt

SEQ ID NO: 1022699 - DNA, 15 bp, Homo sapiens
gagcatagatgccat

SEQ ID NO: 1022700 - DNA, 15 bp, Homo sapiens
agagcatagatgcca

SEQ ID NO: 1022701 - DNA, 15 bp, Homo sapiens
cagagcatagatgcc

SEQ ID NO: 1022702 - DNA, 15 bp, Homo sapiens
ccagagcatagatgc

SEQ ID NO: 1022703 - DNA, 15 bp, Homo sapiens
accagagcatagatg

SEQ ID NO: 1022704 - DNA, 15 bp, Homo sapiens
aaccagagcatagat

SEQ ID NO: 1022705 - DNA, 15 bp, Homo sapiens
taaccagagcataga

SEQ ID NO: 1022706 - DNA, 15 bp, Homo sapiens
ttaaccagagcatag

SEQ ID NO: 1022707 - DNA, 15 bp, Homo sapiens
gttaaccagagcata

SEQ ID NO: 1022708 - DNA, 15 bp, Homo sapiens
cgttaaccagagcat

SEQ ID NO: 1022709 - DNA, 15 bp, Homo sapiens
acgttaaccagagca

SEQ ID NO: 1022710 - DNA, 15 bp, Homo sapiens
aacgttaaccagagc

SEQ ID NO: 1022711 - DNA, 15 bp, Homo sapiens
caacgttaaccagag

SEQ ID NO: 1022712 - DNA, 15 bp, Homo sapiens
acaacgttaaccaga

SEQ ID NO: 1022713 - DNA, 15 bp, Homo sapiens
aacaacgttaaccag

SEQ ID NO: 1022714 - DNA, 15 bp, Homo sapiens
gaacaacgttaacca

SEQ ID NO: 1022715 - DNA, 15 bp, Homo sapiens
agaacaacgttaacc

SEQ ID NO: 1022716 - DNA, 15 bp, Homo sapiens
gagaacaacgttaac

SEQ ID NO: 1022717 - DNA, 15 bp, Homo sapiens
agagaacaacgttaa

SEQ ID NO: 1022718 - DNA, 15 bp, Homo sapiens
tagagaacaacgtta

SEQ ID NO: 1022719 - DNA, 15 bp, Homo sapiens
atagagaacaacgtt

SEQ ID NO: 1022720 - DNA, 15 bp, Homo sapiens
aatagagaacaacgt

SEQ ID NO: 1022721 - DNA, 15 bp, Homo sapiens
taatagagaacaacg

SEQ ID NO: 1022722 - DNA, 15 bp, Homo sapiens
ttaatagagaacaac

SEQ ID NO: 1022723 - DNA, 15 bp, Homo sapiens
gttaatagagaacaa

SEQ ID NO: 1022724 - DNA, 15 bp, Homo sapiens
ggttaatagagaaca

SEQ ID NO: 1022725 - DNA, 15 bp, Homo sapiens
aggttaatagagaac

SEQ ID NO: 1022726 - DNA, 15 bp, Homo sapiens
gaggttaatagagaa

SEQ ID NO: 1022727 - DNA, 15 bp, Homo sapiens
tgaggttaatagaga

SEQ ID NO: 1022728 - DNA, 15 bp, Homo sapiens
ctgaggttaatagag

SEQ ID NO: 1022729 - DNA, 15 bp, Homo sapiens
actgaggttaataga

SEQ ID NO: 1022730 - DNA, 15 bp, Homo sapiens
cactgaggttaatag

SEQ ID NO: 1022731 - DNA, 15 bp, Homo sapiens
ccactgaggttaata

SEQ ID NO: 1022732 - DNA, 15 bp, Homo sapiens
gccactgaggttaat

SEQ ID NO: 1022733 - DNA, 15 bp, Homo sapiens
agccactgaggttaa

SEQ ID NO: 1022734 - DNA, 15 bp, Homo sapiens
tagccactgaggtta

SEQ ID NO: 1022735 - DNA, 15 bp, Homo sapiens
gtagccactgaggtt

SEQ ID NO: 1022736 - DNA, 15 bp, Homo sapiens
tgtagccactgaggt

SEQ ID NO: 1022737 - DNA, 15 bp, Homo sapiens
ctgtagccactgagg

SEQ ID NO: 1022738 - DNA, 15 bp, Homo sapiens
actgtagccactgag

SEQ ID NO: 1022739 - DNA, 15 bp, Homo sapiens
tactgtagccactga

SEQ ID NO: 1022740 - DNA, 15 bp, Homo sapiens
atactgtagccactg

SEQ ID NO: 1022741 - DNA, 15 bp, Homo sapiens
catactgtagccact

SEQ ID NO: 1022742 - DNA, 15 bp, Homo sapiens
acatactgtagccac

SEQ ID NO: 1022743 - DNA, 15 bp, Homo sapiens
aacatactgtagcca

SEQ ID NO: 1022744 - DNA, 15 bp, Homo sapiens
aaacatactgtagcc

SEQ ID NO: 1022745 - DNA, 15 bp, Homo sapiens
aaaacatactgtagc

SEQ ID NO: 1022746 - DNA, 15 bp, Homo sapiens
caaaacatactgtag

SEQ ID NO: 1022747 - DNA, 15 bp, Homo sapiens
acaaaacatactgta

SEQ ID NO: 1022748 - DNA, 15 bp, Homo sapiens
tacaaaacatactgt

SEQ ID NO: 1022749 - DNA, 15 bp, Homo sapiens
atacaaaacatactg

SEQ ID NO: 1022750 - DNA, 15 bp, Homo sapiens
aatacaaaacatact

SEQ ID NO: 1022751 - DNA, 15 bp, Homo sapiens
aaatacaaaacatac

SEQ ID NO: 1022752 - DNA, 15 bp, Homo sapiens
gaaatacaaaacata

SEQ ID NO: 1022753 - DNA, 15 bp, Homo sapiens
agaaatacaaaacat

SEQ ID NO: 1022754 - DNA, 15 bp, Homo sapiens
cagaaatacaaaaca

SEQ ID NO: 1022755 - DNA, 15 bp, Homo sapiens
acagaaatacaaaac

SEQ ID NO: 1022756 - DNA, 15 bp, Homo sapiens
cacagaaatacaaaa

SEQ ID NO: 1022757 - DNA, 15 bp, Homo sapiens
ccacagaaatacaaa

SEQ ID NO: 1022758 - DNA, 15 bp, Homo sapiens
gccacagaaatacaa

SEQ ID NO: 1022759 - DNA, 15 bp, Homo sapiens
tgccacagaaataca

SEQ ID NO: 1022760 - DNA, 15 bp, Homo sapiens
gtgccacagaaatac

SEQ ID NO: 1022761 - DNA, 15 bp, Homo sapiens
agtgccacagaaata

SEQ ID NO: 1022762 - DNA, 15 bp, Homo sapiens
aagtgccacagaaat

SEQ ID NO: 1022763 - DNA, 15 bp, Homo sapiens
aaagtgccacagaaa

SEQ ID NO: 1022764 - DNA, 15 bp, Homo sapiens
aaaagtgccacagaa

SEQ ID NO: 1022765 - DNA, 15 bp, Homo sapiens
gaaaagtgccacaga

SEQ ID NO: 1022766 - DNA, 15 bp, Homo sapiens
agaaaagtgccacag

SEQ ID NO: 1022767 - DNA, 15 bp, Homo sapiens
gagaaaagtgccaca

SEQ ID NO: 1022768 - DNA, 15 bp, Homo sapiens
tgagaaaagtgccac

SEQ ID NO: 1022769 - DNA, 15 bp, Homo sapiens
ttgagaaaagtgcca

SEQ ID NO: 1022770 - DNA, 15 bp, Homo sapiens
tttgagaaaagtgcc

SEQ ID NO: 1022771 - DNA, 15 bp, Homo sapiens
ctttgagaaaagtgc

SEQ ID NO: 1022772 - DNA, 15 bp, Homo sapiens
cctttgagaaaagtg

SEQ ID NO: 1022773 - DNA, 15 bp, Homo sapiens
acctttgagaaaagt

SEQ ID NO: 1022774 - DNA, 15 bp, Homo sapiens
cacctttgagaaaag

SEQ ID NO: 1022775 - DNA, 15 bp, Homo sapiens
acacctttgagaaaa

SEQ ID NO: 1022776 - DNA, 15 bp, Homo sapiens
gacacctttgagaaa

SEQ ID NO: 1022777 - DNA, 15 bp, Homo sapiens
ggacacctttgagaa

SEQ ID NO: 1022778 - DNA, 15 bp, Homo sapiens
gggacacctttgaga

SEQ ID NO: 1022779 - DNA, 15 bp, Homo sapiens
tgggacacctttgag

SEQ ID NO: 1022780 - DNA, 15 bp, Homo sapiens
ttgggacacctttga

SEQ ID NO: 1022781 - DNA, 15 bp, Homo sapiens
tttgggacacctttg

SEQ ID NO: 1022782 - DNA, 15 bp, Homo sapiens
ctttgggacaccttt

SEQ ID NO: 1022783 - DNA, 15 bp, Homo sapiens
cctttgggacacctt

SEQ ID NO: 1022784 - DNA, 15 bp, Homo sapiens
tcctttgggacacct

SEQ ID NO: 1022785 - DNA, 15 bp, Homo sapiens
atcctttgggacacc

SEQ ID NO: 1022786 - DNA, 15 bp, Homo sapiens
aatcctttgggacac

SEQ ID NO: 1022787 - DNA, 15 bp, Homo sapiens
aaatcctttgggaca

SEQ ID NO: 1022788 - DNA, 15 bp, Homo sapiens
caaatcctttgggac

SEQ ID NO: 1022789 - DNA, 15 bp, Homo sapiens
ccaaatcctttggga

SEQ ID NO: 1022790 - DNA, 15 bp, Homo sapiens
cccaaatcctttggg

SEQ ID NO: 1022791 - DNA, 15 bp, Homo sapiens
ccccaaatcctttgg

SEQ ID NO: 1022792 - DNA, 15 bp, Homo sapiens
accccaaatcctttg

SEQ ID NO: 1022793 - DNA, 15 bp, Homo sapiens
aaccccaaatccttt

SEQ ID NO: 1022794 - DNA, 15 bp, Homo sapiens
aaaccccaaatcctt

SEQ ID NO: 1022795 - DNA, 15 bp, Homo sapiens
aaaaccccaaatcct

SEQ ID NO: 1022796 - DNA, 15 bp, Homo sapiens
aaaaaccccaaatcc

SEQ ID NO: 1022797 - DNA, 15 bp, Homo sapiens
aaaaaaccccaaatc

SEQ ID NO: 1022798 - DNA, 15 bp, Homo sapiens
gaaaaaaccccaaat

SEQ ID NO: 1022799 - DNA, 15 bp, Homo sapiens
ggaaaaaaccccaaa

SEQ ID NO: 1022800 - DNA, 15 bp, Homo sapiens
tggaaaaaaccccaa

SEQ ID NO: 1022801 - DNA, 15 bp, Homo sapiens
ttggaaaaaacccca

SEQ ID NO: 1022802 - DNA, 15 bp, Homo sapiens
gttggaaaaaacccc

SEQ ID NO: 1022803 - DNA, 15 bp, Homo sapiens
tagttggaaaaaacc

SEQ ID NO: 1022804 - DNA, 15 bp, Homo sapiens
ttagttggaaaaaac

SEQ ID NO: 1022805 - DNA, 15 bp, Homo sapiens
gttagttggaaaaaa

SEQ ID NO: 1022806 - DNA, 15 bp, Homo sapiens
tgttagttggaaaaa

SEQ ID NO: 1022807 - DNA, 15 bp, Homo sapiens
gtgttagttggaaaa

SEQ ID NO: 1022808 - DNA, 15 bp, Homo sapiens
tgtgttagttggaaa

SEQ ID NO: 1022809 - DNA, 15 bp, Homo sapiens
ttgtgttagttggaa

SEQ ID NO: 1022810 - DNA, 15 bp, Homo sapiens
attgtgttagttgga

SEQ ID NO: 1022811 - DNA, 15 bp, Homo sapiens
gattgtgttagttgg

SEQ ID NO: 1022812 - DNA, 15 bp, Homo sapiens
tgattgtgttagttg

SEQ ID NO: 1022813 - DNA, 15 bp, Homo sapiens
atgattgtgttagtt

SEQ ID NO: 1022814 - DNA, 15 bp, Homo sapiens
gatgattgtgttagt

SEQ ID NO: 1022815 - DNA, 15 bp, Homo sapiens
agatgattgtgttag

SEQ ID NO: 1022816 - DNA, 15 bp, Homo sapiens
aagatgattgtgtta

SEQ ID NO: 1022817 - DNA, 15 bp, Homo sapiens
gaagatgattgtgtt

SEQ ID NO: 1022818 - DNA, 15 bp, Homo sapiens
ggaagatgattgtgt

SEQ ID NO: 1022819 - DNA, 15 bp, Homo sapiens
tggaagatgattgtg

SEQ ID NO: 1022820 - DNA, 15 bp, Homo sapiens
gtggaagatgattgt

SEQ ID NO: 1022821 - DNA, 15 bp, Homo sapiens
ggtggaagatgattg

SEQ ID NO: 1022822 - DNA, 15 bp, Homo sapiens
aggtggaagatgatt

SEQ ID NO: 1022823 - DNA, 15 bp, Homo sapiens
gaggtggaagatgat

SEQ ID NO: 1022824 - DNA, 15 bp, Homo sapiens
tgaggtggaagatga

SEQ ID NO: 1022825 - DNA, 15 bp, Homo sapiens
ttgaggtggaagatg

SEQ ID NO: 1022826 - DNA, 15 bp, Homo sapiens
tttgaggtggaagat

SEQ ID NO: 1022827 - DNA, 15 bp, Homo sapiens
ctttgaggtggaaga

SEQ ID NO: 1022828 - DNA, 15 bp, Homo sapiens
actttgaggtggaag

SEQ ID NO: 1022829 - DNA, 15 bp, Homo sapiens
gactttgaggtggaa

SEQ ID NO: 1022830 - DNA, 15 bp, Homo sapiens
agactttgaggtgga

SEQ ID NO: 1022831 - DNA, 15 bp, Homo sapiens
gagactttgaggtgg

SEQ ID NO: 1022832 - DNA, 15 bp, Homo sapiens
tgagactttgaggtg

SEQ ID NO: 1022833 - DNA, 15 bp, Homo sapiens
ttgagactttgaggt

SEQ ID NO: 1022834 - DNA, 15 bp, Homo sapiens
attgagactttgagg

SEQ ID NO: 1022835 - DNA, 15 bp, Homo sapiens
cattgagactttgag

SEQ ID NO: 1022836 - DNA, 15 bp, Homo sapiens
ccattgagactttga

SEQ ID NO: 1022837 - DNA, 15 bp, Homo sapiens
cccattgagactttg

SEQ ID NO: 1022838 - DNA, 15 bp, Homo sapiens
acccattgagacttt

SEQ ID NO: 1022839 - DNA, 15 bp, Homo sapiens
cacccattgagactt

SEQ ID NO: 1022840 - DNA, 15 bp, Homo sapiens
ccacccattgagact

SEQ ID NO: 1022841 - DNA, 15 bp, Homo sapiens
tccacccattgagac

SEQ ID NO: 1022842 - DNA, 15 bp, Homo sapiens
gtccacccattgaga

SEQ ID NO: 1022843 - DNA, 15 bp, Homo sapiens
ggtccacccattgag

SEQ ID NO: 1022844 - DNA, 15 bp, Homo sapiens
tggtccacccattga

SEQ ID NO: 1022845 - DNA, 15 bp, Homo sapiens
ctggtccacccattg

SEQ ID NO: 1022846 - DNA, 15 bp, Homo sapiens
actggtccacccatt

SEQ ID NO: 1022847 - DNA, 15 bp, Homo sapiens
aactggtccacccat

SEQ ID NO: 1022848 - DNA, 15 bp, Homo sapiens
caactggtccaccca

SEQ ID NO: 1022849 - DNA, 15 bp, Homo sapiens
acaactggtccaccc

SEQ ID NO: 1022850 - DNA, 15 bp, Homo sapiens
gacaactggtccacc

SEQ ID NO: 1022851 - DNA, 15 bp, Homo sapiens
ggacaactggtccac

SEQ ID NO: 1022852 - DNA, 15 bp, Homo sapiens
gggacaactggtcca

SEQ ID NO: 1022853 - DNA, 15 bp, Homo sapiens
tgggacaactggtcc

SEQ ID NO: 1022854 - DNA, 15 bp, Homo sapiens
gtgggacaactggtc

SEQ ID NO: 1022855 - DNA, 15 bp, Homo sapiens
agtgggacaactggt

SEQ ID NO: 1022856 - DNA, 15 bp, Homo sapiens
aagtgggacaactgg

SEQ ID NO: 1022857 - DNA, 15 bp, Homo sapiens
taagtgggacaactg

SEQ ID NO: 1022858 - DNA, 15 bp, Homo sapiens
ataagtgggacaact

SEQ ID NO: 1022859 - DNA, 15 bp, Homo sapiens
cataagtgggacaac

SEQ ID NO: 1022860 - DNA, 15 bp, Homo sapiens
gcataagtgggacaa

SEQ ID NO: 1022861 - DNA, 15 bp, Homo sapiens
tgcataagtgggaca

SEQ ID NO: 1022862 - DNA, 15 bp, Homo sapiens
ttgcataagtgggac

SEQ ID NO: 1022863 - DNA, 15 bp, Homo sapiens
attgcataagtggga

SEQ ID NO: 1022864 - DNA, 15 bp, Homo sapiens
aattgcataagtggg

SEQ ID NO: 1022865 - DNA, 15 bp, Homo sapiens
taattgcataagtgg

SEQ ID NO: 1022866 - DNA, 15 bp, Homo sapiens
ataattgcataagtg

SEQ ID NO: 1022867 - DNA, 15 bp, Homo sapiens
cataattgcataagt

SEQ ID NO: 1022868 - DNA, 15 bp, Homo sapiens
acataattgcataag

SEQ ID NO: 1022869 - DNA, 15 bp, Homo sapiens
aacataattgcataa

SEQ ID NO: 1022870 - DNA, 15 bp, Homo sapiens
aaacataattgcata

SEQ ID NO: 1022871 - DNA, 15 bp, Homo sapiens
aaaacataattgcat

SEQ ID NO: 1022872 - DNA, 15 bp, Homo sapiens
caaaacataattgca

SEQ ID NO: 1022873 - DNA, 15 bp, Homo sapiens
ccaaaacataattgc

SEQ ID NO: 1022874 - DNA, 15 bp, Homo sapiens
tccaaaacataattg

SEQ ID NO: 1022875 - DNA, 15 bp, Homo sapiens
atccaaaacataatt

SEQ ID NO: 1022876 - DNA, 15 bp, Homo sapiens
gatccaaaacataat

SEQ ID NO: 1022877 - DNA, 15 bp, Homo sapiens
ggatccaaaacataa

SEQ ID NO: 1022878 - DNA, 15 bp, Homo sapiens
aggatccaaaacata

SEQ ID NO: 1022879 - DNA, 15 bp, Homo sapiens
aaggatccaaaacat

SEQ ID NO: 1022880 - DNA, 15 bp, Homo sapiens
aaaggatccaaaaca

SEQ ID NO: 1022881 - DNA, 15 bp, Homo sapiens
taaaggatccaaaac

SEQ ID NO: 1022882 - DNA, 15 bp, Homo sapiens
ttaaaggatccaaaa

SEQ ID NO: 1022883 - DNA, 15 bp, Homo sapiens
tttaaaggatccaaa

SEQ ID NO: 1022884 - DNA, 15 bp, Homo sapiens
ctttaaaggatccaa

SEQ ID NO: 1022885 - DNA, 15 bp, Homo sapiens
actttaaaggatcca

SEQ ID NO: 1022886 - DNA, 15 bp, Homo sapiens
cactttaaaggatcc

SEQ ID NO: 1022887 - DNA, 15 bp, Homo sapiens
ccactttaaaggatc

SEQ ID NO: 1022888 - DNA, 15 bp, Homo sapiens
gccactttaaaggat

SEQ ID NO: 1022889 - DNA, 15 bp, Homo sapiens
agccactttaaagga

SEQ ID NO: 1022890 - DNA, 15 bp, Homo sapiens
cagccactttaaagg

SEQ ID NO: 1022891 - DNA, 15 bp, Homo sapiens
tcagccactttaaag

SEQ ID NO: 1022892 - DNA, 15 bp, Homo sapiens
atcagccactttaaa

SEQ ID NO: 1022893 - DNA, 15 bp, Homo sapiens
aatcagccactttaa

SEQ ID NO: 1022894 - DNA, 15 bp, Homo sapiens
gaatcagccacttta

SEQ ID NO: 1022895 - DNA, 15 bp, Homo sapiens
tgaatcagccacttt

SEQ ID NO: 1022896 - DNA, 15 bp, Homo sapiens
atgaatcagccactt

SEQ ID NO: 1022897 - DNA, 15 bp, Homo sapiens
aatgaatcagccact

SEQ ID NO: 1022898 - DNA, 15 bp, Homo sapiens
aaatgaatcagccac

SEQ ID NO: 1022899 - DNA, 15 bp, Homo sapiens
gaaatgaatcagcca

SEQ ID NO: 1022900 - DNA, 15 bp, Homo sapiens
ggaaatgaatcagcc

SEQ ID NO: 1022901 - DNA, 15 bp, Homo sapiens
gggaaatgaatcagc

SEQ ID NO: 1022902 - DNA, 15 bp, Homo sapiens
tgggaaatgaatcag

SEQ ID NO: 1022903 - DNA, 15 bp, Homo sapiens
atgggaaatgaatca

SEQ ID NO: 1022904 - DNA, 15 bp, Homo sapiens
gatgggaaatgaatc

SEQ ID NO: 1022905 - DNA, 15 bp, Homo sapiens
tgatgggaaatgaat

SEQ ID NO: 1022906 - DNA, 15 bp, Homo sapiens
ttgatgggaaatgaa

SEQ ID NO: 1022907 - DNA, 15 bp, Homo sapiens
tttgatgggaaatga

SEQ ID NO: 1022908 - DNA, 15 bp, Homo sapiens
gtttgatgggaaatg

SEQ ID NO: 1022909 - DNA, 15 bp, Homo sapiens
agtttgatgggaaat

SEQ ID NO: 1022910 - DNA, 15 bp, Homo sapiens
cagtttgatgggaaa

SEQ ID NO: 1022911 - DNA, 15 bp, Homo sapiens
acagtttgatgggaa

SEQ ID NO: 1022912 - DNA, 15 bp, Homo sapiens
tacagtttgatggga

SEQ ID NO: 1022913 - DNA, 15 bp, Homo sapiens
ttacagtttgatggg

SEQ ID NO: 1022914 - DNA, 15 bp, Homo sapiens
attacagtttgatgg

SEQ ID NO: 1022915 - DNA, 15 bp, Homo sapiens
cattacagtttgatg

SEQ ID NO: 1022916 - DNA, 15 bp, Homo sapiens
acattacagtttgat

SEQ ID NO: 1022917 - DNA, 15 bp, Homo sapiens
gacattacagtttga

SEQ ID NO: 1022918 - DNA, 15 bp, Homo sapiens
tgacattacagtttg

SEQ ID NO: 1022919 - DNA, 15 bp, Homo sapiens
atgacattacagttt

SEQ ID NO: 1022920 - DNA, 15 bp, Homo sapiens
catgacattacagtt

SEQ ID NO: 1022921 - DNA, 15 bp, Homo sapiens
gcatgacattacagt

SEQ ID NO: 1022922 - DNA, 15 bp, Homo sapiens
agcatgacattacag

SEQ ID NO: 1022923 - DNA, 15 bp, Homo sapiens
aagcatgacattaca

SEQ ID NO: 1022924 - DNA, 15 bp, Homo sapiens
aaagcatgacattac

SEQ ID NO: 1022925 - DNA, 15 bp, Homo sapiens
aaaagcatgacatta

SEQ ID NO: 1022926 - DNA, 15 bp, Homo sapiens
aaaaagcatgacatt

SEQ ID NO: 1022927 - DNA, 15 bp, Homo sapiens
gaaaaagcatgacat

SEQ ID NO: 1022928 - DNA, 15 bp, Homo sapiens
agaaaaagcatgaca

SEQ ID NO: 1022929 - DNA, 15 bp, Homo sapiens
tagaaaaagcatgac

SEQ ID NO: 1022930 - DNA, 15 bp, Homo sapiens
gtagaaaaagcatga

SEQ ID NO: 1022931 - DNA, 15 bp, Homo sapiens
tgtagaaaaagcatg

SEQ ID NO: 1022932 - DNA, 15 bp, Homo sapiens
ttgtagaaaaagcat

SEQ ID NO: 1022933 - DNA, 15 bp, Homo sapiens
cttgtagaaaaagca

SEQ ID NO: 1022934 - DNA, 15 bp, Homo sapiens
ccttgtagaaaaagc

SEQ ID NO: 1022935 - DNA, 15 bp, Homo sapiens
tccttgtagaaaaag

SEQ ID NO: 1022936 - DNA, 15 bp, Homo sapiens
ctccttgtagaaaaa

SEQ ID NO: 1022937 - DNA, 15 bp, Homo sapiens
actccttgtagaaaa

SEQ ID NO: 1022938 - DNA, 15 bp, Homo sapiens
gactccttgtagaaa

SEQ ID NO: 1022939 - DNA, 15 bp, Homo sapiens
ggactccttgtagaa

SEQ ID NO: 1022940 - DNA, 15 bp, Homo sapiens
gggactccttgtaga

SEQ ID NO: 1022941 - DNA, 15 bp, Homo sapiens
tgggactccttgtag

SEQ ID NO: 1022942 - DNA, 15 bp, Homo sapiens
ttgggactccttgta

SEQ ID NO: 1022943 - DNA, 15 bp, Homo sapiens
tttgggactccttgt

SEQ ID NO: 1022944 - DNA, 15 bp, Homo sapiens
gtttgggactccttg

SEQ ID NO: 1022945 - DNA, 15 bp, Homo sapiens
agtttgggactcctt

SEQ ID NO: 1022946 - DNA, 15 bp, Homo sapiens
aagtttgggactcct

SEQ ID NO: 1022947 - DNA, 15 bp, Homo sapiens
aaagtttgggactcc

SEQ ID NO: 1022948 - DNA, 15 bp, Homo sapiens
taaagtttgggactc

SEQ ID NO: 1022949 - DNA, 15 bp, Homo sapiens
ataaagtttgggact

SEQ ID NO: 1022950 - DNA, 15 bp, Homo sapiens
cataaagtttgggac

SEQ ID NO: 1022951 - DNA, 15 bp, Homo sapiens
gcataaagtttggga

SEQ ID NO: 1022952 - DNA, 15 bp, Homo sapiens
agcataaagtttggg

SEQ ID NO: 1022953 - DNA, 15 bp, Homo sapiens
aagcataaagtttgg

SEQ ID NO: 1022954 - DNA, 15 bp, Homo sapiens
aaagcataaagtttg

SEQ ID NO: 1022955 - DNA, 15 bp, Homo sapiens
gaaagcataaagttt

SEQ ID NO: 1022956 - DNA, 15 bp, Homo sapiens
agaaagcataaagtt

SEQ ID NO: 1022957 - DNA, 15 bp, Homo sapiens
aagaaagcataaagt

SEQ ID NO: 1022958 - DNA, 15 bp, Homo sapiens
aaagaaagcataaag

SEQ ID NO: 1022959 - DNA, 15 bp, Homo sapiens
aaaagaaagcataaa

SEQ ID NO: 1022960 - DNA, 15 bp, Homo sapiens
taaaagaaagcataa

SEQ ID NO: 1022961 - DNA, 15 bp, Homo sapiens
ttaaaagaaagcata

SEQ ID NO: 1022962 - DNA, 15 bp, Homo sapiens
attaaaagaaagcat

SEQ ID NO: 1022963 - DNA, 15 bp, Homo sapiens
aattaaaagaaagca

SEQ ID NO: 1022964 - DNA, 15 bp, Homo sapiens
gaattaaaagaaagc

SEQ ID NO: 1022965 - DNA, 15 bp, Homo sapiens
agaattaaaagaaag

SEQ ID NO: 1022966 - DNA, 15 bp, Homo sapiens
cagaattaaaagaaa

SEQ ID NO: 1022967 - DNA, 15 bp, Homo sapiens
acagaattaaaagaa

SEQ ID NO: 1022968 - DNA, 15 bp, Homo sapiens
aacagaattaaaaga

SEQ ID NO: 1022969 - DNA, 15 bp, Homo sapiens
gaacagaattaaaag

SEQ ID NO: 1022970 - DNA, 15 bp, Homo sapiens
agaacagaattaaaa

SEQ ID NO: 1022971 - DNA, 15 bp, Homo sapiens
gagaacagaattaaa

SEQ ID NO: 1022972 - DNA, 15 bp, Homo sapiens
agagaacagaattaa

SEQ ID NO: 1022973 - DNA, 15 bp, Homo sapiens
aagagaacagaatta

SEQ ID NO: 1022974 - DNA, 15 bp, Homo sapiens
aaagagaacagaatt

SEQ ID NO: 1022975 - DNA, 15 bp, Homo sapiens
gaaagagaacagaat

SEQ ID NO: 1022976 - DNA, 15 bp, Homo sapiens
ggaaagagaacagaa

SEQ ID NO: 1022977 - DNA, 15 bp, Homo sapiens
aggaaagagaacaga

SEQ ID NO: 1022978 - DNA, 15 bp, Homo sapiens
gaggaaagagaacag

SEQ ID NO: 1022979 - DNA, 15 bp, Homo sapiens
ggaggaaagagaaca

SEQ ID NO: 1022980 - DNA, 15 bp, Homo sapiens
aggaggaaagagaac

SEQ ID NO: 1022981 - DNA, 15 bp, Homo sapiens
aaggaggaaagagaa

SEQ ID NO: 1022982 - DNA, 15 bp, Homo sapiens
aaaggaggaaagaga

SEQ ID NO: 1022983 - DNA, 15 bp, Homo sapiens
aaaaggaggaaagag

SEQ ID NO: 1022984 - DNA, 15 bp, Homo sapiens
gaaaaggaggaaaga

SEQ ID NO: 1022985 - DNA, 15 bp, Homo sapiens
tgaaaaggaggaaag

SEQ ID NO: 1022986 - DNA, 15 bp, Homo sapiens
ctgaaaaggaggaaa

SEQ ID NO: 1022987 - DNA, 15 bp, Homo sapiens
cctgaaaaggaggaa

SEQ ID NO: 1022988 - DNA, 15 bp, Homo sapiens
ccctgaaaaggagga

SEQ ID NO: 1022989 - DNA, 15 bp, Homo sapiens
accctgaaaaggagg

SEQ ID NO: 1022990 - DNA, 15 bp, Homo sapiens
aaccctgaaaaggag

SEQ ID NO: 1022991 - DNA, 15 bp, Homo sapiens
caaccctgaaaagga

SEQ ID NO: 1022992 - DNA, 15 bp, Homo sapiens
tcaaccctgaaaagg

SEQ ID NO: 1022993 - DNA, 15 bp, Homo sapiens
ctcaaccctgaaaag

SEQ ID NO: 1022994 - DNA, 15 bp, Homo sapiens
actcaaccctgaaaa

SEQ ID NO: 1022995 - DNA, 15 bp, Homo sapiens
tactcaaccctgaaa

SEQ ID NO: 1022996 - DNA, 15 bp, Homo sapiens
ttactcaaccctgaa

SEQ ID NO: 1022997 - DNA, 15 bp, Homo sapiens
cttactcaaccctga

SEQ ID NO: 1022998 - DNA, 15 bp, Homo sapiens
ccttactcaaccctg

SEQ ID NO: 1022999 - DNA, 15 bp, Homo sapiens
gccttactcaaccct

SEQ ID NO: 1023000 - DNA, 15 bp, Homo sapiens
ggccttactcaaccc

SEQ ID NO: 1023001 - DNA, 15 bp, Homo sapiens
tggccttactcaacc

SEQ ID NO: 1023002 - DNA, 15 bp, Homo sapiens
ctggccttactcaac

SEQ ID NO: 1023003 - DNA, 15 bp, Homo sapiens
tctggccttactcaa

SEQ ID NO: 1023004 - DNA, 15 bp, Homo sapiens
atctggccttactca

SEQ ID NO: 1023005 - DNA, 15 bp, Homo sapiens
aatctggccttactc

SEQ ID NO: 1023006 - DNA, 15 bp, Homo sapiens
caatctggccttact

SEQ ID NO: 1023007 - DNA, 15 bp, Homo sapiens
tcaatctggccttac

SEQ ID NO: 1023008 - DNA, 15 bp, Homo sapiens
atcaatctggcctta

SEQ ID NO: 1023009 - DNA, 15 bp, Homo sapiens
tatcaatctggcctt

SEQ ID NO: 1023010 - DNA, 15 bp, Homo sapiens
ttatcaatctggcct

SEQ ID NO: 1023011 - DNA, 15 bp, Homo sapiens
tttatcaatctggcc

SEQ ID NO: 1023012 - DNA, 15 bp, Homo sapiens
ctttatcaatctggc

SEQ ID NO: 1023013 - DNA, 15 bp, Homo sapiens
tctttatcaatctgg

SEQ ID NO: 1023014 - DNA, 15 bp, Homo sapiens
ttctttatcaatctg

SEQ ID NO: 1023015 - DNA, 15 bp, Homo sapiens
tttctttatcaatct

SEQ ID NO: 1023016 - DNA, 15 bp, Homo sapiens
ttttctttatcaatc

SEQ ID NO: 1023017 - DNA, 15 bp, Homo sapiens
cttttctttatcaat

SEQ ID NO: 1023018 - DNA, 15 bp, Homo sapiens
atcttttctttatca

SEQ ID NO: 1023019 - DNA, 15 bp, Homo sapiens
tatcttttctttatc

SEQ ID NO: 1023020 - DNA, 15 bp, Homo sapiens
ctatcttttctttat

SEQ ID NO: 1023021 - DNA, 15 bp, Homo sapiens
gctatcttttcttta

SEQ ID NO: 1023022 - DNA, 15 bp, Homo sapiens
tgctatcttttcttt

SEQ ID NO: 1023023 - DNA, 15 bp, Homo sapiens
ttgctatcttttctt

SEQ ID NO: 1023024 - DNA, 15 bp, Homo sapiens
attgctatcttttct

SEQ ID NO: 1023025 - DNA, 15 bp, Homo sapiens
gattgctatcttttc

SEQ ID NO: 1023026 - DNA, 15 bp, Homo sapiens
agattgctatctttt

SEQ ID NO: 1023027 - DNA, 15 bp, Homo sapiens
aagattgctatcttt

SEQ ID NO: 1023028 - DNA, 15 bp, Homo sapiens
aaagattgctatctt

SEQ ID NO: 1023029 - DNA, 15 bp, Homo sapiens
caaagattgctatct

SEQ ID NO: 1023030 - DNA, 15 bp, Homo sapiens
gcaaagattgctatc

SEQ ID NO: 1023031 - DNA, 15 bp, Homo sapiens
tgcaaagattgctat

SEQ ID NO: 1023032 - DNA, 15 bp, Homo sapiens
ttgcaaagattgcta

SEQ ID NO: 1023033 - DNA, 15 bp, Homo sapiens
tttgcaaagattgct

SEQ ID NO: 1023034 - DNA, 15 bp, Homo sapiens
atttgcaaagattgc

SEQ ID NO: 1023035 - DNA, 15 bp, Homo sapiens
gatttgcaaagattg

SEQ ID NO: 1023036 - DNA, 15 bp, Homo sapiens
agatttgcaaagatt

SEQ ID NO: 1023037 - DNA, 15 bp, Homo sapiens
aagatttgcaaagat

SEQ ID NO: 1023038 - DNA, 15 bp, Homo sapiens
aaagatttgcaaaga

SEQ ID NO: 1023039 - DNA, 15 bp, Homo sapiens
caaagatttgcaaag

SEQ ID NO: 1023040 - DNA, 15 bp, Homo sapiens
gcaaagatttgcaaa

SEQ ID NO: 1023041 - DNA, 15 bp, Homo sapiens
ggcaaagatttgcaa

SEQ ID NO: 1023042 - DNA, 15 bp, Homo sapiens
aggcaaagatttgca

SEQ ID NO: 1023043 - DNA, 15 bp, Homo sapiens
aaggcaaagatttgc

SEQ ID NO: 1023044 - DNA, 15 bp, Homo sapiens
gaaggcaaagatttg

SEQ ID NO: 1023045 - DNA, 15 bp, Homo sapiens
agaaggcaaagattt

SEQ ID NO: 1023046 - DNA, 15 bp, Homo sapiens
gagaaggcaaagatt

SEQ ID NO: 1023047 - DNA, 15 bp, Homo sapiens
tgagaaggcaaagat

SEQ ID NO: 1023048 - DNA, 15 bp, Homo sapiens
atgagaaggcaaaga

SEQ ID NO: 1023049 - DNA, 15 bp, Homo sapiens
gatgagaaggcaaag

SEQ ID NO: 1023050 - DNA, 15 bp, Homo sapiens
tgatgagaaggcaaa

SEQ ID NO: 1023051 - DNA, 15 bp, Homo sapiens
ttgatgagaaggcaa

SEQ ID NO: 1023052 - DNA, 15 bp, Homo sapiens
attgatgagaaggca

SEQ ID NO: 1023053 - DNA, 15 bp, Homo sapiens
tattgatgagaaggc

SEQ ID NO: 1023054 - DNA, 15 bp, Homo sapiens
ctattgatgagaagg

SEQ ID NO: 1023055 - DNA, 15 bp, Homo sapiens
gctattgatgagaag

SEQ ID NO: 1023056 - DNA, 15 bp, Homo sapiens
tgctattgatgagaa

SEQ ID NO: 1023057 - DNA, 15 bp, Homo sapiens
ttgctattgatgaga

SEQ ID NO: 1023058 - DNA, 15 bp, Homo sapiens
tttgctattgatgag

SEQ ID NO: 1023059 - DNA, 15 bp, Homo sapiens
ctttgctattgatga

SEQ ID NO: 1023060 - DNA, 15 bp, Homo sapiens
actttgctattgatg

SEQ ID NO: 1023061 - DNA, 15 bp, Homo sapiens
cactttgctattgat

SEQ ID NO: 1023062 - DNA, 15 bp, Homo sapiens
tcactttgctattga

SEQ ID NO: 1023063 - DNA, 15 bp, Homo sapiens
atcactttgctattg

SEQ ID NO: 1023064 - DNA, 15 bp, Homo sapiens
tatcactttgctatt

SEQ ID NO: 1023065 - DNA, 15 bp, Homo sapiens
atatcactttgctat

SEQ ID NO: 1023066 - DNA, 15 bp, Homo sapiens
aatatcactttgcta

SEQ ID NO: 1023067 - DNA, 15 bp, Homo sapiens
taatatcactttgct

SEQ ID NO: 1023068 - DNA, 15 bp, Homo sapiens
gtaatatcactttgc

SEQ ID NO: 1023069 - DNA, 15 bp, Homo sapiens
agtaatatcactttg

SEQ ID NO: 1023070 - DNA, 15 bp, Homo sapiens
gagtaatatcacttt

SEQ ID NO: 1023071 - DNA, 15 bp, Homo sapiens
tgagtaatatcactt

SEQ ID NO: 1023072 - DNA, 15 bp, Homo sapiens
ctgagtaatatcact

SEQ ID NO: 1023073 - DNA, 15 bp, Homo sapiens
cctgagtaatatcac

SEQ ID NO: 1023074 - DNA, 15 bp, Homo sapiens
acctgagtaatatca

SEQ ID NO: 1023075 - DNA, 15 bp, Homo sapiens
gacctgagtaatatc

SEQ ID NO: 1023076 - DNA, 15 bp, Homo sapiens
ggacctgagtaatat

SEQ ID NO: 1023077 - DNA, 15 bp, Homo sapiens
aggacctgagtaata

SEQ ID NO: 1023078 - DNA, 15 bp, Homo sapiens
aaggacctgagtaat

SEQ ID NO: 1023079 - DNA, 15 bp, Homo sapiens
aaaggacctgagtaa

SEQ ID NO: 1023080 - DNA, 15 bp, Homo sapiens
aaaaggacctgagta

SEQ ID NO: 1023081 - DNA, 15 bp, Homo sapiens
gaaaaggacctgagt

SEQ ID NO: 1023082 - DNA, 15 bp, Homo sapiens
tgaaaaggacctgag

SEQ ID NO: 1023083 - DNA, 15 bp, Homo sapiens
gtgaaaaggacctga

SEQ ID NO: 1023084 - DNA, 15 bp, Homo sapiens
agtgaaaaggacctg

SEQ ID NO: 1023085 - DNA, 15 bp, Homo sapiens
gagtgaaaaggacct

SEQ ID NO: 1023086 - DNA, 15 bp, Homo sapiens
ggagtgaaaaggacc

SEQ ID NO: 1023087 - DNA, 15 bp, Homo sapiens
aggagtgaaaaggac

SEQ ID NO: 1023088 - DNA, 15 bp, Homo sapiens
aaggagtgaaaagga

SEQ ID NO: 1023089 - DNA, 15 bp, Homo sapiens
aaaggagtgaaaagg

SEQ ID NO: 1023090 - DNA, 15 bp, Homo sapiens
gaaaggagtgaaaag

SEQ ID NO: 1023091 - DNA, 15 bp, Homo sapiens
agaaaggagtgaaaa

SEQ ID NO: 1023092 - DNA, 15 bp, Homo sapiens
gagaaaggagtgaaa

SEQ ID NO: 1023093 - DNA, 15 bp, Homo sapiens
ggagaaaggagtgaa

SEQ ID NO: 1023094 - DNA, 15 bp, Homo sapiens
gggagaaaggagtga

SEQ ID NO: 1023095 - DNA, 15 bp, Homo sapiens
ggggagaaaggagtg

SEQ ID NO: 1023096 - DNA, 15 bp, Homo sapiens
tggggagaaaggagt

SEQ ID NO: 1023097 - DNA, 15 bp, Homo sapiens
ctggggagaaaggag

SEQ ID NO: 1023098 - DNA, 15 bp, Homo sapiens
cctggggagaaagga

SEQ ID NO: 1023099 - DNA, 15 bp, Homo sapiens
tcctggggagaaagg

SEQ ID NO: 1023100 - DNA, 15 bp, Homo sapiens
gtcctggggagaaag

SEQ ID NO: 1023101 - DNA, 15 bp, Homo sapiens
tgtcctggggagaaa

SEQ ID NO: 1023102 - DNA, 15 bp, Homo sapiens
gtgtcctggggagaa

SEQ ID NO: 1023103 - DNA, 15 bp, Homo sapiens
tgtgtcctggggaga

SEQ ID NO: 1023104 - DNA, 15 bp, Homo sapiens
gtgtgtcctggggag

SEQ ID NO: 1023105 - DNA, 15 bp, Homo sapiens
cgtgtgtcctgggga

SEQ ID NO: 1023106 - DNA, 15 bp, Homo sapiens
tcgtgtgtcctgggg

SEQ ID NO: 1023107 - DNA, 15 bp, Homo sapiens
ttcgtgtgtcctggg

SEQ ID NO: 1023108 - DNA, 15 bp, Homo sapiens
attcgtgtgtcctgg

SEQ ID NO: 1023109 - DNA, 15 bp, Homo sapiens
cattcgtgtgtcctg

SEQ ID NO: 1023110 - DNA, 15 bp, Homo sapiens
tcattcgtgtgtcct

SEQ ID NO: 1023111 - DNA, 15 bp, Homo sapiens
ttcattcgtgtgtcc

SEQ ID NO: 1023112 - DNA, 15 bp, Homo sapiens
attcattcgtgtgtc

SEQ ID NO: 1023113 - DNA, 15 bp, Homo sapiens
cattcattcgtgtgt

SEQ ID NO: 1023114 - DNA, 15 bp, Homo sapiens
tcattcattcgtgtg

SEQ ID NO: 1023115 - DNA, 15 bp, Homo sapiens
gtcattcattcgtgt

SEQ ID NO: 1023116 - DNA, 15 bp, Homo sapiens
agtcattcattcgtg

SEQ ID NO: 1023117 - DNA, 15 bp, Homo sapiens
cagtcattcattcgt

SEQ ID NO: 1023118 - DNA, 15 bp, Homo sapiens
tcagtcattcattcg

SEQ ID NO: 1023119 - DNA, 15 bp, Homo sapiens
atcagtcattcattc

SEQ ID NO: 1023120 - DNA, 15 bp, Homo sapiens
aatcagtcattcatt

SEQ ID NO: 1023121 - DNA, 15 bp, Homo sapiens
gaatcagtcattcat

SEQ ID NO: 1023122 - DNA, 15 bp, Homo sapiens
ggaatcagtcattca

SEQ ID NO: 1023123 - DNA, 15 bp, Homo sapiens
tggaatcagtcattc

SEQ ID NO: 1023124 - DNA, 15 bp, Homo sapiens
atggaatcagtcatt

SEQ ID NO: 1023125 - DNA, 15 bp, Homo sapiens
gatggaatcagtcat

SEQ ID NO: 1023126 - DNA, 15 bp, Homo sapiens
tgatggaatcagtca

SEQ ID NO: 1023127 - DNA, 15 bp, Homo sapiens
ctgatggaatcagtc

SEQ ID NO: 1023128 - DNA, 15 bp, Homo sapiens
tctgatggaatcagt

SEQ ID NO: 1023129 - DNA, 15 bp, Homo sapiens
ttctgatggaatcag

SEQ ID NO: 1023130 - DNA, 15 bp, Homo sapiens
tttctgatggaatca

SEQ ID NO: 1023131 - DNA, 15 bp, Homo sapiens
ttttctgatggaatc

SEQ ID NO: 1023132 - DNA, 15 bp, Homo sapiens
tttttctgatggaat

SEQ ID NO: 1023133 - DNA, 15 bp, Homo sapiens
ctttttctgatggaa

SEQ ID NO: 1023134 - DNA, 15 bp, Homo sapiens
gctttttctgatgga

SEQ ID NO: 1023135 - DNA, 15 bp, Homo sapiens
tgctttttctgatgg

SEQ ID NO: 1023136 - DNA, 15 bp, Homo sapiens
atgctttttctgatg

SEQ ID NO: 1023137 - DNA, 15 bp, Homo sapiens
aatgctttttctgat

SEQ ID NO: 1023138 - DNA, 15 bp, Homo sapiens
gaatgctttttctga

SEQ ID NO: 1023139 - DNA, 15 bp, Homo sapiens
ggaatgctttttctg

SEQ ID NO: 1023140 - DNA, 15 bp, Homo sapiens
tggaatgctttttct

SEQ ID NO: 1023141 - DNA, 15 bp, Homo sapiens
gtggaatgctttttc

SEQ ID NO: 1023142 - DNA, 15 bp, Homo sapiens
agtggaatgcttttt

SEQ ID NO: 1023143 - DNA, 15 bp, Homo sapiens
gagtggaatgctttt

SEQ ID NO: 1023144 - DNA, 15 bp, Homo sapiens
agagtggaatgcttt

SEQ ID NO: 1023145 - DNA, 15 bp, Homo sapiens
aagagtggaatgctt

SEQ ID NO: 1023146 - DNA, 15 bp, Homo sapiens
taagagtggaatgct

SEQ ID NO: 1023147 - DNA, 15 bp, Homo sapiens
ttaagagtggaatgc

SEQ ID NO: 1023148 - DNA, 15 bp, Homo sapiens
cttaagagtggaatg

SEQ ID NO: 1023149 - DNA, 15 bp, Homo sapiens
tcttaagagtggaat

SEQ ID NO: 1023150 - DNA, 15 bp, Homo sapiens
ttcttaagagtggaa

SEQ ID NO: 1023151 - DNA, 15 bp, Homo sapiens
attcttaagagtgga

SEQ ID NO: 1023152 - DNA, 15 bp, Homo sapiens
gattcttaagagtgg

SEQ ID NO: 1023153 - DNA, 15 bp, Homo sapiens
tgattcttaagagtg

SEQ ID NO: 1023154 - DNA, 15 bp, Homo sapiens
atgattcttaagagt

SEQ ID NO: 1023155 - DNA, 15 bp, Homo sapiens
tatgattcttaagag

SEQ ID NO: 1023156 - DNA, 15 bp, Homo sapiens
gtatgattcttaaga

SEQ ID NO: 1023157 - DNA, 15 bp, Homo sapiens
agtatgattcttaag

SEQ ID NO: 1023158 - DNA, 15 bp, Homo sapiens
cagtatgattcttaa

SEQ ID NO: 1023159 - DNA, 15 bp, Homo sapiens
tcagtatgattctta

SEQ ID NO: 1023160 - DNA, 15 bp, Homo sapiens
ttcagtatgattctt

SEQ ID NO: 1023161 - DNA, 15 bp, Homo sapiens
tttcagtatgattct

SEQ ID NO: 1023162 - DNA, 15 bp, Homo sapiens
atttcagtatgattc

SEQ ID NO: 1023163 - DNA, 15 bp, Homo sapiens
aatttcagtatgatt

SEQ ID NO: 1023164 - DNA, 15 bp, Homo sapiens
taatttcagtatgat

SEQ ID NO: 1023165 - DNA, 15 bp, Homo sapiens
ataatttcagtatga

SEQ ID NO: 1023166 - DNA, 15 bp, Homo sapiens
aataatttcagtatg

SEQ ID NO: 1023167 - DNA, 15 bp, Homo sapiens
caataatttcagtat

SEQ ID NO: 1023168 - DNA, 15 bp, Homo sapiens
gcaataatttcagta

SEQ ID NO: 1023169 - DNA, 15 bp, Homo sapiens
tgcaataatttcagt

SEQ ID NO: 1023170 - DNA, 15 bp, Homo sapiens
ttgcaataatttcag

SEQ ID NO: 1023171 - DNA, 15 bp, Homo sapiens
tttgcaataatttca

SEQ ID NO: 1023172 - DNA, 15 bp, Homo sapiens
ctttgcaataatttc

SEQ ID NO: 1023173 - DNA, 15 bp, Homo sapiens
cctttgcaataattt

SEQ ID NO: 1023174 - DNA, 15 bp, Homo sapiens
tcctttgcaataatt

SEQ ID NO: 1023175 - DNA, 15 bp, Homo sapiens
atcctttgcaataat

SEQ ID NO: 1023176 - DNA, 15 bp, Homo sapiens
aatcctttgcaataa

SEQ ID NO: 1023177 - DNA, 15 bp, Homo sapiens
taatcctttgcaata

SEQ ID NO: 1023178 - DNA, 15 bp, Homo sapiens
ttaatcctttgcaat

SEQ ID NO: 1023179 - DNA, 15 bp, Homo sapiens
attaatcctttgcaa

SEQ ID NO: 1023180 - DNA, 15 bp, Homo sapiens
aattaatcctttgca

SEQ ID NO: 1023181 - DNA, 15 bp, Homo sapiens
gaattaatcctttgc

SEQ ID NO: 1023182 - DNA, 15 bp, Homo sapiens
ggaattaatcctttg

SEQ ID NO: 1023183 - DNA, 15 bp, Homo sapiens
tggaattaatccttt

SEQ ID NO: 1023184 - DNA, 15 bp, Homo sapiens
atggaattaatcctt

SEQ ID NO: 1023185 - DNA, 15 bp, Homo sapiens
tatggaattaatcct

SEQ ID NO: 1023186 - DNA, 15 bp, Homo sapiens
ctatggaattaatcc

SEQ ID NO: 1023187 - DNA, 15 bp, Homo sapiens
actatggaattaatc

SEQ ID NO: 1023188 - DNA, 15 bp, Homo sapiens
aactatggaattaat

SEQ ID NO: 1023189 - DNA, 15 bp, Homo sapiens
aaactatggaattaa

SEQ ID NO: 1023190 - DNA, 15 bp, Homo sapiens
aaaactatggaatta

SEQ ID NO: 1023191 - DNA, 15 bp, Homo sapiens
aaaaactatggaatt

SEQ ID NO: 1023192 - DNA, 15 bp, Homo sapiens
taaaaactatggaat

SEQ ID NO: 1023193 - DNA, 15 bp, Homo sapiens
ttaaaaactatggaa

SEQ ID NO: 1023194 - DNA, 15 bp, Homo sapiens
tttaaaaactatgga

SEQ ID NO: 1023195 - DNA, 15 bp, Homo sapiens
gtttaaaaactatgg

SEQ ID NO: 1023196 - DNA, 15 bp, Homo sapiens
tgtttaaaaactatg

SEQ ID NO: 1023197 - DNA, 15 bp, Homo sapiens
ctgtttaaaaactat

SEQ ID NO: 1023198 - DNA, 15 bp, Homo sapiens
cctgtttaaaaacta

SEQ ID NO: 1023199 - DNA, 15 bp, Homo sapiens
tcctgtttaaaaact

SEQ ID NO: 1023200 - DNA, 15 bp, Homo sapiens
ctcctgtttaaaaac

SEQ ID NO: 1023201 - DNA, 15 bp, Homo sapiens
gctcctgtttaaaaa

SEQ ID NO: 1023202 - DNA, 15 bp, Homo sapiens
tgctcctgtttaaaa

SEQ ID NO: 1023203 - DNA, 15 bp, Homo sapiens
ctgctcctgtttaaa

SEQ ID NO: 1023204 - DNA, 15 bp, Homo sapiens
gctgctcctgtttaa

SEQ ID NO: 1023205 - DNA, 15 bp, Homo sapiens
tgctgctcctgttta

SEQ ID NO: 1023206 - DNA, 15 bp, Homo sapiens
ttgctgctcctgttt

SEQ ID NO: 1023207 - DNA, 15 bp, Homo sapiens
attgctgctcctgtt

SEQ ID NO: 1023208 - DNA, 15 bp, Homo sapiens
cattgctgctcctgt

SEQ ID NO: 1023209 - DNA, 15 bp, Homo sapiens
ccattgctgctcctg

SEQ ID NO: 1023210 - DNA, 15 bp, Homo sapiens
tccattgctgctcct

SEQ ID NO: 1023211 - DNA, 15 bp, Homo sapiens
ctccattgctgctcc

SEQ ID NO: 1023212 - DNA, 15 bp, Homo sapiens
tctccattgctgctc

SEQ ID NO: 1023213 - DNA, 15 bp, Homo sapiens
ttctccattgctgct

SEQ ID NO: 1023214 - DNA, 15 bp, Homo sapiens
attctccattgctgc

SEQ ID NO: 1023215 - DNA, 15 bp, Homo sapiens
tattctccattgctg

SEQ ID NO: 1023216 - DNA, 15 bp, Homo sapiens
atattctccattgct

SEQ ID NO: 1023217 - DNA, 15 bp, Homo sapiens
aatattctccattgc

SEQ ID NO: 1023218 - DNA, 15 bp, Homo sapiens
aaatattctccattg

SEQ ID NO: 1023219 - DNA, 15 bp, Homo sapiens
gaaatattctccatt

SEQ ID NO: 1023220 - DNA, 15 bp, Homo sapiens
ggaaatattctccat

SEQ ID NO: 1023221 - DNA, 15 bp, Homo sapiens
gggaaatattctcca

SEQ ID NO: 1023222 - DNA, 15 bp, Homo sapiens
tgggaaatattctcc

SEQ ID NO: 1023223 - DNA, 15 bp, Homo sapiens
ttgggaaatattctc

SEQ ID NO: 1023224 - DNA, 15 bp, Homo sapiens
attgggaaatattct

SEQ ID NO: 1023225 - DNA, 15 bp, Homo sapiens
tattgggaaatattc

SEQ ID NO: 1023226 - DNA, 15 bp, Homo sapiens
ttattgggaaatatt

SEQ ID NO: 1023227 - DNA, 15 bp, Homo sapiens
gttattgggaaatat

SEQ ID NO: 1023228 - DNA, 15 bp, Homo sapiens
ggttattgggaaata

SEQ ID NO: 1023229 - DNA, 15 bp, Homo sapiens
aggttattgggaaat

SEQ ID NO: 1023230 - DNA, 15 bp, Homo sapiens
caggttattgggaaa

SEQ ID NO: 1023231 - DNA, 15 bp, Homo sapiens
tcaggttattgggaa

SEQ ID NO: 1023232 - DNA, 15 bp, Homo sapiens
ttcaggttattggga

SEQ ID NO: 1023233 - DNA, 15 bp, Homo sapiens
tttcaggttattggg

SEQ ID NO: 1023234 - DNA, 15 bp, Homo sapiens
ttttcaggttattgg

SEQ ID NO: 1023235 - DNA, 15 bp, Homo sapiens
tttttcaggttattg

SEQ ID NO: 1023236 - DNA, 15 bp, Homo sapiens
ttttttcaggttatt

SEQ ID NO: 1023237 - DNA, 15 bp, Homo sapiens
attttttcaggttat

SEQ ID NO: 1023238 - DNA, 15 bp, Homo sapiens
tattttttcaggtta

SEQ ID NO: 1023239 - DNA, 15 bp, Homo sapiens
atattttttcaggtt

SEQ ID NO: 1023240 - DNA, 15 bp, Homo sapiens
tatattttttcaggt

SEQ ID NO: 1023241 - DNA, 15 bp, Homo sapiens
atatattttttcagg

SEQ ID NO: 1023242 - DNA, 15 bp, Homo sapiens
tatatattttttcag

SEQ ID NO: 1023243 - DNA, 15 bp, Homo sapiens
ttatatattttttca

SEQ ID NO: 1023244 - DNA, 15 bp, Homo sapiens
gttatatattttttc

SEQ ID NO: 1023245 - DNA, 15 bp, Homo sapiens
ggttatatatttttt

SEQ ID NO: 1023246 - DNA, 15 bp, Homo sapiens
tggttatatattttt

SEQ ID NO: 1023247 - DNA, 15 bp, Homo sapiens
atggttatatatttt

SEQ ID NO: 1023248 - DNA, 15 bp, Homo sapiens
tatggttatatattt

SEQ ID NO: 1023249 - DNA, 15 bp, Homo sapiens
ctatggttatatatt

SEQ ID NO: 1023250 - DNA, 15 bp, Homo sapiens
tctatggttatatat

SEQ ID NO: 1023251 - DNA, 15 bp, Homo sapiens
atctatggttatata

SEQ ID NO: 1023252 - DNA, 15 bp, Homo sapiens
catctatggttatat

SEQ ID NO: 1023253 - DNA, 15 bp, Homo sapiens
tcatctatggttata

SEQ ID NO: 1023254 - DNA, 15 bp, Homo sapiens
ttcatctatggttat

SEQ ID NO: 1023255 - DNA, 15 bp, Homo sapiens
tttcatctatggtta

SEQ ID NO: 1023256 - DNA, 15 bp, Homo sapiens
gtttcatctatggtt

SEQ ID NO: 1023257 - DNA, 15 bp, Homo sapiens
agtttcatctatggt

SEQ ID NO: 1023258 - DNA, 15 bp, Homo sapiens
tagtttcatctatgg

SEQ ID NO: 1023259 - DNA, 15 bp, Homo sapiens
ctagtttcatctatg

SEQ ID NO: 1023260 - DNA, 15 bp, Homo sapiens
gctagtttcatctat

SEQ ID NO: 1023261 - DNA, 15 bp, Homo sapiens
tgctagtttcatcta

SEQ ID NO: 1023262 - DNA, 15 bp, Homo sapiens
ttgctagtttcatct

SEQ ID NO: 1023263 - DNA, 15 bp, Homo sapiens
attgctagtttcatc

SEQ ID NO: 1023264 - DNA, 15 bp, Homo sapiens
cattgctagtttcat

SEQ ID NO: 1023265 - DNA, 15 bp, Homo sapiens
acattgctagtttca

SEQ ID NO: 1023266 - DNA, 15 bp, Homo sapiens
cacattgctagtttc

SEQ ID NO: 1023267 - DNA, 15 bp, Homo sapiens
gcacattgctagttt

SEQ ID NO: 1023268 - DNA, 15 bp, Homo sapiens
agcacattgctagtt

SEQ ID NO: 1023269 - DNA, 15 bp, Homo sapiens
gagcacattgctagt

SEQ ID NO: 1023270 - DNA, 15 bp, Homo sapiens
ggagcacattgctag

SEQ ID NO: 1023271 - DNA, 15 bp, Homo sapiens
aggagcacattgcta

SEQ ID NO: 1023272 - DNA, 15 bp, Homo sapiens
aaggagcacattgct

SEQ ID NO: 1023273 - DNA, 15 bp, Homo sapiens
taaggagcacattgc

SEQ ID NO: 1023274 - DNA, 15 bp, Homo sapiens
ctaaggagcacattg

SEQ ID NO: 1023275 - DNA, 15 bp, Homo sapiens
tctaaggagcacatt

SEQ ID NO: 1023276 - DNA, 15 bp, Homo sapiens
ttctaaggagcacat

SEQ ID NO: 1023277 - DNA, 15 bp, Homo sapiens
attctaaggagcaca

SEQ ID NO: 1023278 - DNA, 15 bp, Homo sapiens
aattctaaggagcac

SEQ ID NO: 1023279 - DNA, 15 bp, Homo sapiens
taattctaaggagca

SEQ ID NO: 1023280 - DNA, 15 bp, Homo sapiens
ataattctaaggagc

SEQ ID NO: 1023281 - DNA, 15 bp, Homo sapiens
cataattctaaggag

SEQ ID NO: 1023282 - DNA, 15 bp, Homo sapiens
acataattctaagga

SEQ ID NO: 1023283 - DNA, 15 bp, Homo sapiens
tacataattctaagg

SEQ ID NO: 1023284 - DNA, 15 bp, Homo sapiens
ttacataattctaag

SEQ ID NO: 1023285 - DNA, 15 bp, Homo sapiens
attacataattctaa

SEQ ID NO: 1023286 - DNA, 15 bp, Homo sapiens
aattacataattcta

SEQ ID NO: 1023287 - DNA, 15 bp, Homo sapiens
aaattacataattct

SEQ ID NO: 1023288 - DNA, 15 bp, Homo sapiens
aaaattacataattc

SEQ ID NO: 1023289 - DNA, 15 bp, Homo sapiens
taaaattacataatt

SEQ ID NO: 1023290 - DNA, 15 bp, Homo sapiens
ttaaaattacataat

SEQ ID NO: 1023291 - DNA, 15 bp, Homo sapiens
cttaaaattacataa

SEQ ID NO: 1023292 - DNA, 15 bp, Homo sapiens
gcttaaaattacata

SEQ ID NO: 1023293 - DNA, 15 bp, Homo sapiens
agcttaaaattacat

SEQ ID NO: 1023294 - DNA, 15 bp, Homo sapiens
tagcttaaaattaca

SEQ ID NO: 1023295 - DNA, 15 bp, Homo sapiens
ctagcttaaaattac

SEQ ID NO: 1023296 - DNA, 15 bp, Homo sapiens
tctagcttaaaatta

SEQ ID NO: 1023297 - DNA, 15 bp, Homo sapiens
ttctagcttaaaatt

SEQ ID NO: 1023298 - DNA, 15 bp, Homo sapiens
attctagcttaaaat

SEQ ID NO: 1023299 - DNA, 15 bp, Homo sapiens
tattctagcttaaaa

SEQ ID NO: 1023300 - DNA, 15 bp, Homo sapiens
ctattctagcttaaa

SEQ ID NO: 1023301 - DNA, 15 bp, Homo sapiens
cctattctagcttaa

SEQ ID NO: 1023302 - DNA, 15 bp, Homo sapiens
gcctattctagctta

SEQ ID NO: 1023303 - DNA, 15 bp, Homo sapiens
ggcctattctagctt

SEQ ID NO: 1023304 - DNA, 15 bp, Homo sapiens
aggcctattctagct

SEQ ID NO: 1023305 - DNA, 15 bp, Homo sapiens
gaggcctattctagc

SEQ ID NO: 1023306 - DNA, 15 bp, Homo sapiens
tgaggcctattctag

SEQ ID NO: 1023307 - DNA, 15 bp, Homo sapiens
ctgaggcctattcta

SEQ ID NO: 1023308 - DNA, 15 bp, Homo sapiens
tctgaggcctattct

SEQ ID NO: 1023309 - DNA, 15 bp, Homo sapiens
ctctgaggcctattc

SEQ ID NO: 1023310 - DNA, 15 bp, Homo sapiens
tctctgaggcctatt

SEQ ID NO: 1023311 - DNA, 15 bp, Homo sapiens
atctctgaggcctat

SEQ ID NO: 1023312 - DNA, 15 bp, Homo sapiens
aatctctgaggccta

SEQ ID NO: 1023313 - DNA, 15 bp, Homo sapiens
taatctctgaggcct

SEQ ID NO: 1023314 - DNA, 15 bp, Homo sapiens
ataatctctgaggcc

SEQ ID NO: 1023315 - DNA, 15 bp, Homo sapiens
cataatctctgaggc

SEQ ID NO: 1023316 - DNA, 15 bp, Homo sapiens
acataatctctgagg

SEQ ID NO: 1023317 - DNA, 15 bp, Homo sapiens
tacataatctctgag

SEQ ID NO: 1023318 - DNA, 15 bp, Homo sapiens
ttacataatctctga

SEQ ID NO: 1023319 - DNA, 15 bp, Homo sapiens
attacataatctctg

SEQ ID NO: 1023320 - DNA, 15 bp, Homo sapiens
tattacataatctct

SEQ ID NO: 1023321 - DNA, 15 bp, Homo sapiens
ttattacataatctc

SEQ ID NO: 1023322 - DNA, 15 bp, Homo sapiens
tttattacataatct

SEQ ID NO: 1023323 - DNA, 15 bp, Homo sapiens
ttttattacataatc

SEQ ID NO: 1023324 - DNA, 15 bp, Homo sapiens
attttattacataat

SEQ ID NO: 1023325 - DNA, 15 bp, Homo sapiens
tattttattacataa

SEQ ID NO: 1023326 - DNA, 15 bp, Homo sapiens
atattttattacata

SEQ ID NO: 1023327 - DNA, 15 bp, Homo sapiens
tatattttattacat

SEQ ID NO: 1023328 - DNA, 15 bp, Homo sapiens
ttatattttattaca

SEQ ID NO: 1023329 - DNA, 15 bp, Homo sapiens
attatattttattac

SEQ ID NO: 1023330 - DNA, 15 bp, Homo sapiens
tattatattttatta

SEQ ID NO: 1023331 - DNA, 15 bp, Homo sapiens
ttattatattttatt

SEQ ID NO: 1023332 - DNA, 15 bp, Homo sapiens
tttattatattttat

SEQ ID NO: 1023333 - DNA, 15 bp, Homo sapiens
atttattatatttta

SEQ ID NO: 1023334 - DNA, 15 bp, Homo sapiens
aatttattatatttt

SEQ ID NO: 1023335 - DNA, 15 bp, Homo sapiens
taatttattatattt

SEQ ID NO: 1023336 - DNA, 15 bp, Homo sapiens
ttaatttattatatt

SEQ ID NO: 1023337 - DNA, 15 bp, Homo sapiens
attaatttattatat

SEQ ID NO: 1023338 - DNA, 15 bp, Homo sapiens
aattaatttattata

SEQ ID NO: 1023339 - DNA, 15 bp, Homo sapiens
caattaatttattat

SEQ ID NO: 1023340 - DNA, 15 bp, Homo sapiens
tcaattaatttatta

SEQ ID NO: 1023341 - DNA, 15 bp, Homo sapiens
atcaattaatttatt

SEQ ID NO: 1023342 - DNA, 15 bp, Homo sapiens
catcaattaatttat

SEQ ID NO: 1023343 - DNA, 15 bp, Homo sapiens
acatcaattaattta

SEQ ID NO: 1023344 - DNA, 15 bp, Homo sapiens
aacatcaattaattt

SEQ ID NO: 1023345 - DNA, 15 bp, Homo sapiens
aaacatcaattaatt

SEQ ID NO: 1023346 - DNA, 15 bp, Homo sapiens
taaacatcaattaat

SEQ ID NO: 1023347 - DNA, 15 bp, Homo sapiens
ataaacatcaattaa

SEQ ID NO: 1023348 - DNA, 15 bp, Homo sapiens
cataaacatcaatta

SEQ ID NO: 1023349 - DNA, 15 bp, Homo sapiens
tcataaacatcaatt

SEQ ID NO: 1023350 - DNA, 15 bp, Homo sapiens
ttcataaacatcaat

SEQ ID NO: 1023351 - DNA, 15 bp, Homo sapiens
cttcataaacatcaa

SEQ ID NO: 1023352 - DNA, 15 bp, Homo sapiens
tcttcataaacatca

SEQ ID NO: 1023353 - DNA, 15 bp, Homo sapiens
ctcttcataaacatc

SEQ ID NO: 1023354 - DNA, 15 bp, Homo sapiens
tctcttcataaacat

SEQ ID NO: 1023355 - DNA, 15 bp, Homo sapiens
gtctcttcataaaca

SEQ ID NO: 1023356 - DNA, 15 bp, Homo sapiens
tgtctcttcataaac

SEQ ID NO: 1023357 - DNA, 15 bp, Homo sapiens
ttgtctcttcataaa

SEQ ID NO: 1023358 - DNA, 15 bp, Homo sapiens
tttgtctcttcataa

SEQ ID NO: 1023359 - DNA, 15 bp, Homo sapiens
gtttgtctcttcata

SEQ ID NO: 1023360 - DNA, 15 bp, Homo sapiens
agtttgtctcttcat

SEQ ID NO: 1023361 - DNA, 15 bp, Homo sapiens
aagtttgtctcttca

SEQ ID NO: 1023362 - DNA, 15 bp, Homo sapiens
caagtttgtctcttc

SEQ ID NO: 1023363 - DNA, 15 bp, Homo sapiens
tcaagtttgtctctt

SEQ ID NO: 1023364 - DNA, 15 bp, Homo sapiens
ctcaagtttgtctct

SEQ ID NO: 1023365 - DNA, 15 bp, Homo sapiens
tctcaagtttgtctc

SEQ ID NO: 1023366 - DNA, 15 bp, Homo sapiens
ttctcaagtttgtct

SEQ ID NO: 1023367 - DNA, 15 bp, Homo sapiens
cttctcaagtttgtc

SEQ ID NO: 1023368 - DNA, 15 bp, Homo sapiens
tcttctcaagtttgt

SEQ ID NO: 1023369 - DNA, 15 bp, Homo sapiens
ttcttctcaagtttg

SEQ ID NO: 1023370 - DNA, 15 bp, Homo sapiens
tttcttctcaagttt

SEQ ID NO: 1023371 - DNA, 15 bp, Homo sapiens
ttttcttctcaagtt

SEQ ID NO: 1023372 - DNA, 15 bp, Homo sapiens
tttttcttctcaagt

SEQ ID NO: 1023373 - DNA, 15 bp, Homo sapiens
atttttcttctcaag

SEQ ID NO: 1023374 - DNA, 15 bp, Homo sapiens
aatttttcttctcaa

SEQ ID NO: 1023375 - DNA, 15 bp, Homo sapiens
aaatttttcttctca

SEQ ID NO: 1023376 - DNA, 15 bp, Homo sapiens
caaatttttcttctc

SEQ ID NO: 1023377 - DNA, 15 bp, Homo sapiens
gcaaatttttcttct

SEQ ID NO: 1023378 - DNA, 15 bp, Homo sapiens
agcaaatttttcttc

SEQ ID NO: 1023379 - DNA, 15 bp, Homo sapiens
tagcaaatttttctt

SEQ ID NO: 1023380 - DNA, 15 bp, Homo sapiens
ttagcaaatttttct

SEQ ID NO: 1023381 - DNA, 15 bp, Homo sapiens
cttagcaaatttttc

SEQ ID NO: 1023382 - DNA, 15 bp, Homo sapiens
ccttagcaaattttt

SEQ ID NO: 1023383 - DNA, 15 bp, Homo sapiens
cccttagcaaatttt

SEQ ID NO: 1023384 - DNA, 15 bp, Homo sapiens
tcccttagcaaattt

SEQ ID NO: 1023385 - DNA, 15 bp, Homo sapiens
ctcccttagcaaatt

SEQ ID NO: 1023386 - DNA, 15 bp, Homo sapiens
actcccttagcaaat

SEQ ID NO: 1023387 - DNA, 15 bp, Homo sapiens
aactcccttagcaaa

SEQ ID NO: 1023388 - DNA, 15 bp, Homo sapiens
caactcccttagcaa

SEQ ID NO: 1023389 - DNA, 15 bp, Homo sapiens
ccaactcccttagca

SEQ ID NO: 1023390 - DNA, 15 bp, Homo sapiens
tccaactcccttagc

SEQ ID NO: 1023391 - DNA, 15 bp, Homo sapiens
ctccaactcccttag

SEQ ID NO: 1023392 - DNA, 15 bp, Homo sapiens
cctccaactccctta

SEQ ID NO: 1023393 - DNA, 15 bp, Homo sapiens
ccctccaactccctt

SEQ ID NO: 1023394 - DNA, 15 bp, Homo sapiens
tccctccaactccct

SEQ ID NO: 1023395 - DNA, 15 bp, Homo sapiens
atccctccaactccc

SEQ ID NO: 1023396 - DNA, 15 bp, Homo sapiens
catccctccaactcc

SEQ ID NO: 1023397 - DNA, 15 bp, Homo sapiens
tcatccctccaactc

SEQ ID NO: 1023398 - DNA, 15 bp, Homo sapiens
ttcatccctccaact

SEQ ID NO: 1023399 - DNA, 15 bp, Homo sapiens
tttcatccctccaac

SEQ ID NO: 1023400 - DNA, 15 bp, Homo sapiens
ttttcatccctccaa

SEQ ID NO: 1023401 - DNA, 15 bp, Homo sapiens
attttcatccctcca

SEQ ID NO: 1023402 - DNA, 15 bp, Homo sapiens
tattttcatccctcc

SEQ ID NO: 1023403 - DNA, 15 bp, Homo sapiens
gtattttcatccctc

SEQ ID NO: 1023404 - DNA, 15 bp, Homo sapiens
tgtattttcatccct

SEQ ID NO: 1023405 - DNA, 15 bp, Homo sapiens
ctgtattttcatccc

SEQ ID NO: 1023406 - DNA, 15 bp, Homo sapiens
actgtattttcatcc

SEQ ID NO: 1023407 - DNA, 15 bp, Homo sapiens
tactgtattttcatc

SEQ ID NO: 1023408 - DNA, 15 bp, Homo sapiens
gtactgtattttcat

SEQ ID NO: 1023409 - DNA, 15 bp, Homo sapiens
tgtactgtattttca

SEQ ID NO: 1023410 - DNA, 15 bp, Homo sapiens
atgtactgtattttc

SEQ ID NO: 1023411 - DNA, 15 bp, Homo sapiens
tatgtactgtatttt

SEQ ID NO: 1023412 - DNA, 15 bp, Homo sapiens
ttatgtactgtattt

SEQ ID NO: 1023413 - DNA, 15 bp, Homo sapiens
tttatgtactgtatt

SEQ ID NO: 1023414 - DNA, 15 bp, Homo sapiens
ttttatgtactgtat

SEQ ID NO: 1023415 - DNA, 15 bp, Homo sapiens
gttttatgtactgta

SEQ ID NO: 1023416 - DNA, 15 bp, Homo sapiens
agttttatgtactgt

SEQ ID NO: 1023417 - DNA, 15 bp, Homo sapiens
aagttttatgtactg

SEQ ID NO: 1023418 - DNA, 15 bp, Homo sapiens
aaagttttatgtact

SEQ ID NO: 1023419 - DNA, 15 bp, Homo sapiens
caaagttttatgtac

SEQ ID NO: 1023420 - DNA, 15 bp, Homo sapiens
ccaaagttttatgta

SEQ ID NO: 1023421 - DNA, 15 bp, Homo sapiens
accaaagttttatgt

SEQ ID NO: 1023422 - DNA, 15 bp, Homo sapiens
gaccaaagttttatg

SEQ ID NO: 1023423 - DNA, 15 bp, Homo sapiens
agaccaaagttttat

SEQ ID NO: 1023424 - DNA, 15 bp, Homo sapiens
aagaccaaagtttta

SEQ ID NO: 1023425 - DNA, 15 bp, Homo sapiens
taagaccaaagtttt

SEQ ID NO: 1023426 - DNA, 15 bp, Homo sapiens
ctaagaccaaagttt

SEQ ID NO: 1023427 - DNA, 15 bp, Homo sapiens
tctaagaccaaagtt

SEQ ID NO: 1023428 - DNA, 15 bp, Homo sapiens
ttctaagaccaaagt

SEQ ID NO: 1023429 - DNA, 15 bp, Homo sapiens
gttctaagaccaaag

SEQ ID NO: 1023430 - DNA, 15 bp, Homo sapiens
agttctaagaccaaa

SEQ ID NO: 1023431 - DNA, 15 bp, Homo sapiens
gagttctaagaccaa

SEQ ID NO: 1023432 - DNA, 15 bp, Homo sapiens
ggagttctaagacca

SEQ ID NO: 1023433 - DNA, 15 bp, Homo sapiens
aggagttctaagacc

SEQ ID NO: 1023434 - DNA, 15 bp, Homo sapiens
gaggagttctaagac

SEQ ID NO: 1023435 - DNA, 15 bp, Homo sapiens
agaggagttctaaga

SEQ ID NO: 1023436 - DNA, 15 bp, Homo sapiens
aagaggagttctaag

SEQ ID NO: 1023437 - DNA, 15 bp, Homo sapiens
aaagaggagttctaa

SEQ ID NO: 1023438 - DNA, 15 bp, Homo sapiens
caaagaggagttcta

SEQ ID NO: 1023439 - DNA, 15 bp, Homo sapiens
gcaaagaggagttct

SEQ ID NO: 1023440 - DNA, 15 bp, Homo sapiens
agcaaagaggagttc

SEQ ID NO: 1023441 - DNA, 15 bp, Homo sapiens
aagcaaagaggagtt

SEQ ID NO: 1023442 - DNA, 15 bp, Homo sapiens
aaagcaaagaggagt

SEQ ID NO: 1023443 - DNA, 15 bp, Homo sapiens
taaagcaaagaggag

SEQ ID NO: 1023444 - DNA, 15 bp, Homo sapiens
ttaaagcaaagagga

SEQ ID NO: 1023445 - DNA, 15 bp, Homo sapiens
attaaagcaaagagg

SEQ ID NO: 1023446 - DNA, 15 bp, Homo sapiens
cattaaagcaaagag

SEQ ID NO: 1023447 - DNA, 15 bp, Homo sapiens
gcattaaagcaaaga

SEQ ID NO: 1023448 - DNA, 15 bp, Homo sapiens
tgcattaaagcaaag

SEQ ID NO: 1023449 - DNA, 15 bp, Homo sapiens
atgcattaaagcaaa

SEQ ID NO: 1023450 - DNA, 15 bp, Homo sapiens
tatgcattaaagcaa

SEQ ID NO: 1023451 - DNA, 15 bp, Homo sapiens
ttatgcattaaagca

SEQ ID NO: 1023452 - DNA, 15 bp, Homo sapiens
attatgcattaaagc

SEQ ID NO: 1023453 - DNA, 15 bp, Homo sapiens
gattatgcattaaag

SEQ ID NO: 1023454 - DNA, 15 bp, Homo sapiens
agattatgcattaaa

SEQ ID NO: 1023455 - DNA, 15 bp, Homo sapiens
aagattatgcattaa

SEQ ID NO: 1023456 - DNA, 15 bp, Homo sapiens
taagattatgcatta

SEQ ID NO: 1023457 - DNA, 15 bp, Homo sapiens
ataagattatgcatt

SEQ ID NO: 1023458 - DNA, 15 bp, Homo sapiens
aataagattatgcat

SEQ ID NO: 1023459 - DNA, 15 bp, Homo sapiens
aaataagattatgca

SEQ ID NO: 1023460 - DNA, 15 bp, Homo sapiens
caaataagattatgc

SEQ ID NO: 1023461 - DNA, 15 bp, Homo sapiens
acaaataagattatg

SEQ ID NO: 1023462 - DNA, 15 bp, Homo sapiens
gacaaataagattat

SEQ ID NO: 1023463 - DNA, 15 bp, Homo sapiens
ggacaaataagatta

SEQ ID NO: 1023464 - DNA, 15 bp, Homo sapiens
aggacaaataagatt

SEQ ID NO: 1023465 - DNA, 15 bp, Homo sapiens
gaggacaaataagat

SEQ ID NO: 1023466 - DNA, 15 bp, Homo sapiens
ggaggacaaataaga

SEQ ID NO: 1023467 - DNA, 15 bp, Homo sapiens
tggaggacaaataag

SEQ ID NO: 1023468 - DNA, 15 bp, Homo sapiens
ttggaggacaaataa

SEQ ID NO: 1023469 - DNA, 15 bp, Homo sapiens
attggaggacaaata

SEQ ID NO: 1023470 - DNA, 15 bp, Homo sapiens
tattggaggacaaat

SEQ ID NO: 1023471 - DNA, 15 bp, Homo sapiens
ttattggaggacaaa

SEQ ID NO: 1023472 - DNA, 15 bp, Homo sapiens
gttattggaggacaa

SEQ ID NO: 1023473 - DNA, 15 bp, Homo sapiens
ggttattggaggaca

SEQ ID NO: 1023474 - DNA, 15 bp, Homo sapiens
aggttattggaggac

SEQ ID NO: 1023475 - DNA, 15 bp, Homo sapiens
caggttattggagga

SEQ ID NO: 1023476 - DNA, 15 bp, Homo sapiens
tcaggttattggagg

SEQ ID NO: 1023477 - DNA, 15 bp, Homo sapiens
gtcaggttattggag

SEQ ID NO: 1023478 - DNA, 15 bp, Homo sapiens
ggtcaggttattgga

SEQ ID NO: 1023479 - DNA, 15 bp, Homo sapiens
aggtcaggttattgg

SEQ ID NO: 1023480 - DNA, 15 bp, Homo sapiens
gaggtcaggttattg

SEQ ID NO: 1023481 - DNA, 15 bp, Homo sapiens
agaggtcaggttatt

SEQ ID NO: 1023482 - DNA, 15 bp, Homo sapiens
cagaggtcaggttat

SEQ ID NO: 1023483 - DNA, 15 bp, Homo sapiens
gcagaggtcaggtta

SEQ ID NO: 1023484 - DNA, 15 bp, Homo sapiens
tgcagaggtcaggtt

SEQ ID NO: 1023485 - DNA, 15 bp, Homo sapiens
atgcagaggtcaggt

SEQ ID NO: 1023486 - DNA, 15 bp, Homo sapiens
gatgcagaggtcagg

SEQ ID NO: 1023487 - DNA, 15 bp, Homo sapiens
ggatgcagaggtcag

SEQ ID NO: 1023488 - DNA, 15 bp, Homo sapiens
aggatgcagaggtca

SEQ ID NO: 1023489 - DNA, 15 bp, Homo sapiens
gaggatgcagaggtc

SEQ ID NO: 1023490 - DNA, 15 bp, Homo sapiens
tgaggatgcagaggt

SEQ ID NO: 1023491 - DNA, 15 bp, Homo sapiens
ttgaggatgcagagg

SEQ ID NO: 1023492 - DNA, 15 bp, Homo sapiens
attgaggatgcagag

SEQ ID NO: 1023493 - DNA, 15 bp, Homo sapiens
gattgaggatgcaga

SEQ ID NO: 1023494 - DNA, 15 bp, Homo sapiens
ggattgaggatgcag

SEQ ID NO: 1023495 - DNA, 15 bp, Homo sapiens
aggattgaggatgca

SEQ ID NO: 1023496 - DNA, 15 bp, Homo sapiens
taggattgaggatgc

SEQ ID NO: 1023497 - DNA, 15 bp, Homo sapiens
ctaggattgaggatg

SEQ ID NO: 1023498 - DNA, 15 bp, Homo sapiens
cctaggattgaggat

SEQ ID NO: 1023499 - DNA, 15 bp, Homo sapiens
ccctaggattgagga

SEQ ID NO: 1023500 - DNA, 15 bp, Homo sapiens
gccctaggattgagg

SEQ ID NO: 1023501 - DNA, 15 bp, Homo sapiens
tgccctaggattgag

SEQ ID NO: 1023502 - DNA, 15 bp, Homo sapiens
gtgccctaggattga

SEQ ID NO: 1023503 - DNA, 15 bp, Homo sapiens
tgtgccctaggattg

SEQ ID NO: 1023504 - DNA, 15 bp, Homo sapiens
atgtgccctaggatt

SEQ ID NO: 1023505 - DNA, 15 bp, Homo sapiens
aatgtgccctaggat

SEQ ID NO: 1023506 - DNA, 15 bp, Homo sapiens
taatgtgccctagga

SEQ ID NO: 1023507 - DNA, 15 bp, Homo sapiens
gtaatgtgccctagg

SEQ ID NO: 1023508 - DNA, 15 bp, Homo sapiens
tgtaatgtgccctag

SEQ ID NO: 1023509 - DNA, 15 bp, Homo sapiens
atgtaatgtgcccta

SEQ ID NO: 1023510 - DNA, 15 bp, Homo sapiens
tatgtaatgtgccct

SEQ ID NO: 1023511 - DNA, 15 bp, Homo sapiens
atatgtaatgtgccc

SEQ ID NO: 1023512 - DNA, 15 bp, Homo sapiens
catatgtaatgtgcc

SEQ ID NO: 1023513 - DNA, 15 bp, Homo sapiens
gcatatgtaatgtgc

SEQ ID NO: 1023514 - DNA, 15 bp, Homo sapiens
agcatatgtaatgtg

SEQ ID NO: 1023515 - DNA, 15 bp, Homo sapiens
aagcatatgtaatgt

SEQ ID NO: 1023516 - DNA, 15 bp, Homo sapiens
caagcatatgtaatg

SEQ ID NO: 1023517 - DNA, 15 bp, Homo sapiens
tcaagcatatgtaat

SEQ ID NO: 1023518 - DNA, 15 bp, Homo sapiens
atcaagcatatgtaa

SEQ ID NO: 1023519 - DNA, 15 bp, Homo sapiens
aatcaagcatatgta

SEQ ID NO: 1023520 - DNA, 15 bp, Homo sapiens
aaatcaagcatatgt

SEQ ID NO: 1023521 - DNA, 15 bp, Homo sapiens
taaatcaagcatatg

SEQ ID NO: 1023522 - DNA, 15 bp, Homo sapiens
ataaatcaagcatat

SEQ ID NO: 1023523 - DNA, 15 bp, Homo sapiens
cataaatcaagcata

SEQ ID NO: 1023524 - DNA, 15 bp, Homo sapiens
tcataaatcaagcat

SEQ ID NO: 1023525 - DNA, 15 bp, Homo sapiens
ttcataaatcaagca

SEQ ID NO: 1023526 - DNA, 15 bp, Homo sapiens
attcataaatcaagc

SEQ ID NO: 1023527 - DNA, 15 bp, Homo sapiens
cattcataaatcaag

SEQ ID NO: 1023528 - DNA, 15 bp, Homo sapiens
ccattcataaatcaa

SEQ ID NO: 1023529 - DNA, 15 bp, Homo sapiens
cccattcataaatca

SEQ ID NO: 1023530 - DNA, 15 bp, Homo sapiens
tcccattcataaatc

SEQ ID NO: 1023531 - DNA, 15 bp, Homo sapiens
ctcccattcataaat

SEQ ID NO: 1023532 - DNA, 15 bp, Homo sapiens
cctcccattcataaa

SEQ ID NO: 1023533 - DNA, 15 bp, Homo sapiens
tcctcccattcataa

SEQ ID NO: 1023534 - DNA, 15 bp, Homo sapiens
ctcctcccattcata

SEQ ID NO: 1023535 - DNA, 15 bp, Homo sapiens
cctcctcccattcat

SEQ ID NO: 1023536 - DNA, 15 bp, Homo sapiens
ccctcctcccattca

SEQ ID NO: 1023537 - DNA, 15 bp, Homo sapiens
accctcctcccattc

SEQ ID NO: 1023538 - DNA, 15 bp, Homo sapiens
taccctcctcccatt

SEQ ID NO: 1023539 - DNA, 15 bp, Homo sapiens
ttaccctcctcccat

SEQ ID NO: 1023540 - DNA, 15 bp, Homo sapiens
tttaccctcctccca

SEQ ID NO: 1023541 - DNA, 15 bp, Homo sapiens
acagatttaccctcc

SEQ ID NO: 1023542 - DNA, 15 bp, Homo sapiens
aacagatttaccctc

SEQ ID NO: 1023543 - DNA, 15 bp, Homo sapiens
aaacagatttaccct

SEQ ID NO: 1023544 - DNA, 15 bp, Homo sapiens
caaacagatttaccc

SEQ ID NO: 1023545 - DNA, 15 bp, Homo sapiens
gcaaacagatttacc

SEQ ID NO: 1023546 - DNA, 15 bp, Homo sapiens
agcaaacagatttac

SEQ ID NO: 1023547 - DNA, 15 bp, Homo sapiens
aagcaaacagattta

SEQ ID NO: 1023548 - DNA, 15 bp, Homo sapiens
caagcaaacagattt

SEQ ID NO: 1023549 - DNA, 15 bp, Homo sapiens
acaagcaaacagatt

SEQ ID NO: 1023550 - DNA, 15 bp, Homo sapiens
cacaagcaaacagat

SEQ ID NO: 1023551 - DNA, 15 bp, Homo sapiens
ccacaagcaaacaga

SEQ ID NO: 1023552 - DNA, 15 bp, Homo sapiens
cccacaagcaaacag

SEQ ID NO: 1023553 - DNA, 15 bp, Homo sapiens
tcccacaagcaaaca

SEQ ID NO: 1023554 - DNA, 15 bp, Homo sapiens
ctcccacaagcaaac

SEQ ID NO: 1023555 - DNA, 15 bp, Homo sapiens
tctcccacaagcaaa

SEQ ID NO: 1023556 - DNA, 15 bp, Homo sapiens
ttctcccacaagcaa

SEQ ID NO: 1023557 - DNA, 15 bp, Homo sapiens
gttctcccacaagca

SEQ ID NO: 1023558 - DNA, 15 bp, Homo sapiens
agttctcccacaagc

SEQ ID NO: 1023559 - DNA, 15 bp, Homo sapiens
aagttctcccacaag

SEQ ID NO: 1023560 - DNA, 15 bp, Homo sapiens
aaagttctcccacaa

SEQ ID NO: 1023561 - DNA, 15 bp, Homo sapiens
aaaagttctcccaca

SEQ ID NO: 1023562 - DNA, 15 bp, Homo sapiens
gaaaagttctcccac

SEQ ID NO: 1023563 - DNA, 15 bp, Homo sapiens
agaaaagttctccca

SEQ ID NO: 1023564 - DNA, 15 bp, Homo sapiens
cagaaaagttctccc

SEQ ID NO: 1023565 - DNA, 15 bp, Homo sapiens
gcagaaaagttctcc

SEQ ID NO: 1023566 - DNA, 15 bp, Homo sapiens
agcagaaaagttctc

SEQ ID NO: 1023567 - DNA, 15 bp, Homo sapiens
tagcagaaaagttct

SEQ ID NO: 1023568 - DNA, 15 bp, Homo sapiens
atagcagaaaagttc

SEQ ID NO: 1023569 - DNA, 15 bp, Homo sapiens
tatagcagaaaagtt

SEQ ID NO: 1023570 - DNA, 15 bp, Homo sapiens
gtatagcagaaaagt

SEQ ID NO: 1023571 - DNA, 15 bp, Homo sapiens
ggtatagcagaaaag

SEQ ID NO: 1023572 - DNA, 15 bp, Homo sapiens
cggtatagcagaaaa

SEQ ID NO: 1023573 - DNA, 15 bp, Homo sapiens
ccggtatagcagaaa

SEQ ID NO: 1023574 - DNA, 15 bp, Homo sapiens
accggtatagcagaa

SEQ ID NO: 1023575 - DNA, 15 bp, Homo sapiens
taccggtatagcaga

SEQ ID NO: 1023576 - DNA, 15 bp, Homo sapiens
ataccggtatagcag

SEQ ID NO: 1023577 - DNA, 15 bp, Homo sapiens
cataccggtatagca

SEQ ID NO: 1023578 - DNA, 15 bp, Homo sapiens
tcataccggtatagc

SEQ ID NO: 1023579 - DNA, 15 bp, Homo sapiens
ttcataccggtatag

SEQ ID NO: 1023580 - DNA, 15 bp, Homo sapiens
attcataccggtata

SEQ ID NO: 1023581 - DNA, 15 bp, Homo sapiens
cattcataccggtat

SEQ ID NO: 1023582 - DNA, 15 bp, Homo sapiens
ccattcataccggta

SEQ ID NO: 1023583 - DNA, 15 bp, Homo sapiens
gccattcataccggt

SEQ ID NO: 1023584 - DNA, 15 bp, Homo sapiens
tgccattcataccgg

SEQ ID NO: 1023585 - DNA, 15 bp, Homo sapiens
ctgccattcataccg

SEQ ID NO: 1023586 - DNA, 15 bp, Homo sapiens
tctgccattcatacc

SEQ ID NO: 1023587 - DNA, 15 bp, Homo sapiens
atctgccattcatac

SEQ ID NO: 1023588 - DNA, 15 bp, Homo sapiens
gatctgccattcata

SEQ ID NO: 1023589 - DNA, 15 bp, Homo sapiens
ggatctgccattcat

SEQ ID NO: 1023590 - DNA, 15 bp, Homo sapiens
gggatctgccattca

SEQ ID NO: 1023591 - DNA, 15 bp, Homo sapiens
agggatctgccattc

SEQ ID NO: 1023592 - DNA, 15 bp, Homo sapiens
gagggatctgccatt

SEQ ID NO: 1023593 - DNA, 15 bp, Homo sapiens
cgagggatctgccat

SEQ ID NO: 1023594 - DNA, 15 bp, Homo sapiens
gcgagggatctgcca

SEQ ID NO: 1023595 - DNA, 15 bp, Homo sapiens
ggcgagggatctgcc

SEQ ID NO: 1023596 - DNA, 15 bp, Homo sapiens
gggcgagggatctgc

SEQ ID NO: 1023597 - DNA, 15 bp, Homo sapiens
ggggcgagggatctg

SEQ ID NO: 1023598 - DNA, 15 bp, Homo sapiens
tggggcgagggatct

SEQ ID NO: 1023599 - DNA, 15 bp, Homo sapiens
ctggggcgagggatc

SEQ ID NO: 1023600 - DNA, 15 bp, Homo sapiens
gctggggcgagggat

SEQ ID NO: 1023601 - DNA, 15 bp, Homo sapiens
tgctggggcgaggga

SEQ ID NO: 1023602 - DNA, 15 bp, Homo sapiens
ctgctggggcgaggg

SEQ ID NO: 1023603 - DNA, 15 bp, Homo sapiens
gctgctggggcgagg

SEQ ID NO: 1023604 - DNA, 15 bp, Homo sapiens
ggctgctggggcgag

SEQ ID NO: 1023605 - DNA, 15 bp, Homo sapiens
gggctgctggggcga

SEQ ID NO: 1023606 - DNA, 15 bp, Homo sapiens
ggggctgctggggcg

SEQ ID NO: 1023607 - DNA, 15 bp, Homo sapiens
aggggctgctggggc

SEQ ID NO: 1023608 - DNA, 15 bp, Homo sapiens
gaggggctgctgggg

SEQ ID NO: 1023609 - DNA, 15 bp, Homo sapiens
agaggggctgctggg

SEQ ID NO: 1023610 - DNA, 15 bp, Homo sapiens
aagaggggctgctgg

SEQ ID NO: 1023611 - DNA, 15 bp, Homo sapiens
aaagaggggctgctg

SEQ ID NO: 1023612 - DNA, 15 bp, Homo sapiens
aaaagaggggctgct

SEQ ID NO: 1023613 - DNA, 15 bp, Homo sapiens
caaaagaggggctgc

SEQ ID NO: 1023614 - DNA, 15 bp, Homo sapiens
gcaaaagaggggctg

SEQ ID NO: 1023615 - DNA, 15 bp, Homo sapiens
ggcaaaagaggggct

SEQ ID NO: 1023616 - DNA, 15 bp, Homo sapiens
gggcaaaagaggggc

SEQ ID NO: 1023617 - DNA, 15 bp, Homo sapiens
ggggcaaaagagggg

SEQ ID NO: 1023618 - DNA, 15 bp, Homo sapiens
aggggcaaaagaggg

SEQ ID NO: 1023619 - DNA, 15 bp, Homo sapiens
gaggggcaaaagagg

SEQ ID NO: 1023620 - DNA, 15 bp, Homo sapiens
ggaggggcaaaagag

SEQ ID NO: 1023621 - DNA, 15 bp, Homo sapiens
aggaggggcaaaaga

SEQ ID NO: 1023622 - DNA, 15 bp, Homo sapiens
caggaggggcaaaag

SEQ ID NO: 1023623 - DNA, 15 bp, Homo sapiens
gcaggaggggcaaaa

SEQ ID NO: 1023624 - DNA, 15 bp, Homo sapiens
agcaggaggggcaaa

SEQ ID NO: 1023625 - DNA, 15 bp, Homo sapiens
tagcaggaggggcaa

SEQ ID NO: 1023626 - DNA, 15 bp, Homo sapiens
gtagcaggaggggca

SEQ ID NO: 1023627 - DNA, 15 bp, Homo sapiens
ggtagcaggaggggc

SEQ ID NO: 1023628 - DNA, 15 bp, Homo sapiens
gggtagcaggagggg

SEQ ID NO: 1023629 - DNA, 15 bp, Homo sapiens
tgggtagcaggaggg

SEQ ID NO: 1023630 - DNA, 15 bp, Homo sapiens
atgggtagcaggagg

SEQ ID NO: 1023631 - DNA, 15 bp, Homo sapiens
gatgggtagcaggag

SEQ ID NO: 1023632 - DNA, 15 bp, Homo sapiens
ggatgggtagcagga

SEQ ID NO: 1023633 - DNA, 15 bp, Homo sapiens
tggatgggtagcagg

SEQ ID NO: 1023634 - DNA, 15 bp, Homo sapiens
ttggatgggtagcag

SEQ ID NO: 1023635 - DNA, 15 bp, Homo sapiens
cttggatgggtagca

SEQ ID NO: 1023636 - DNA, 15 bp, Homo sapiens
ccttggatgggtagc

SEQ ID NO: 1023637 - DNA, 15 bp, Homo sapiens
tccttggatgggtag

SEQ ID NO: 1023638 - DNA, 15 bp, Homo sapiens
atccttggatgggta

SEQ ID NO: 1023639 - DNA, 15 bp, Homo sapiens
aatccttggatgggt

SEQ ID NO: 1023640 - DNA, 15 bp, Homo sapiens
aaatccttggatggg

SEQ ID NO: 1023641 - DNA, 15 bp, Homo sapiens
aaaatccttggatgg

SEQ ID NO: 1023642 - DNA, 15 bp, Homo sapiens
gaaaatccttggatg

SEQ ID NO: 1023643 - DNA, 15 bp, Homo sapiens
agaaaatccttggat

SEQ ID NO: 1023644 - DNA, 15 bp, Homo sapiens
aagaaaatccttgga

SEQ ID NO: 1023645 - DNA, 15 bp, Homo sapiens
gaagaaaatccttgg

SEQ ID NO: 1023646 - DNA, 15 bp, Homo sapiens
agaagaaaatccttg

SEQ ID NO: 1023647 - DNA, 15 bp, Homo sapiens
tagaagaaaatcctt

SEQ ID NO: 1023648 - DNA, 15 bp, Homo sapiens
gtagaagaaaatcct

SEQ ID NO: 1023649 - DNA, 15 bp, Homo sapiens
tgtagaagaaaatcc

SEQ ID NO: 1023650 - DNA, 15 bp, Homo sapiens
gtgtagaagaaaatc

SEQ ID NO: 1023651 - DNA, 15 bp, Homo sapiens
ggtgtagaagaaaat

SEQ ID NO: 1023652 - DNA, 15 bp, Homo sapiens
aggtgtagaagaaaa

SEQ ID NO: 1023653 - DNA, 15 bp, Homo sapiens
caggtgtagaagaaa

SEQ ID NO: 1023654 - DNA, 15 bp, Homo sapiens
ccaggtgtagaagaa

SEQ ID NO: 1023655 - DNA, 15 bp, Homo sapiens
cccaggtgtagaaga

SEQ ID NO: 1023656 - DNA, 15 bp, Homo sapiens
tcccaggtgtagaag

SEQ ID NO: 1023657 - DNA, 15 bp, Homo sapiens
atcccaggtgtagaa

SEQ ID NO: 1023658 - DNA, 15 bp, Homo sapiens
tatcccaggtgtaga

SEQ ID NO: 1023659 - DNA, 15 bp, Homo sapiens
atatcccaggtgtag

SEQ ID NO: 1023660 - DNA, 15 bp, Homo sapiens
catatcccaggtgta

SEQ ID NO: 1023661 - DNA, 15 bp, Homo sapiens
acatatcccaggtgt

SEQ ID NO: 1023662 - DNA, 15 bp, Homo sapiens
tacatatcccaggtg

SEQ ID NO: 1023663 - DNA, 15 bp, Homo sapiens
atacatatcccaggt

SEQ ID NO: 1023664 - DNA, 15 bp, Homo sapiens
catacatatcccagg

SEQ ID NO: 1023665 - DNA, 15 bp, Homo sapiens
tcatacatatcccag

SEQ ID NO: 1023666 - DNA, 15 bp, Homo sapiens
ctcatacatatccca

SEQ ID NO: 1023667 - DNA, 15 bp, Homo sapiens
actcatacatatccc

SEQ ID NO: 1023668 - DNA, 15 bp, Homo sapiens
cactcatacatatcc

SEQ ID NO: 1023669 - DNA, 15 bp, Homo sapiens
acactcatacatatc

SEQ ID NO: 1023670 - DNA, 15 bp, Homo sapiens
cacactcatacatat

SEQ ID NO: 1023671 - DNA, 15 bp, Homo sapiens
gcacactcatacata

SEQ ID NO: 1023672 - DNA, 15 bp, Homo sapiens
ggcacactcatacat

SEQ ID NO: 1023673 - DNA, 15 bp, Homo sapiens
aggcacactcataca

SEQ ID NO: 1023674 - DNA, 15 bp, Homo sapiens
gaggcacactcatac

SEQ ID NO: 1023675 - DNA, 15 bp, Homo sapiens
agaggcacactcata

SEQ ID NO: 1023676 - DNA, 15 bp, Homo sapiens
aagaggcacactcat

SEQ ID NO: 1023677 - DNA, 15 bp, Homo sapiens
aaagaggcacactca

SEQ ID NO: 1023678 - DNA, 15 bp, Homo sapiens
gaaagaggcacactc

SEQ ID NO: 1023679 - DNA, 15 bp, Homo sapiens
agaaagaggcacact

SEQ ID NO: 1023680 - DNA, 15 bp, Homo sapiens
gagaaagaggcacac

SEQ ID NO: 1023681 - DNA, 15 bp, Homo sapiens
agagaaagaggcaca

SEQ ID NO: 1023682 - DNA, 15 bp, Homo sapiens
gagagaaagaggcac

SEQ ID NO: 1023683 - DNA, 15 bp, Homo sapiens
agagagaaagaggca

SEQ ID NO: 1023684 - DNA, 15 bp, Homo sapiens
cagagagagagagag

SEQ ID NO: 1023685 - DNA, 15 bp, Homo sapiens
gcagagagagagaga

SEQ ID NO: 1023686 - DNA, 15 bp, Homo sapiens
ggcagagagagagag

SEQ ID NO: 1023687 - DNA, 15 bp, Homo sapiens
aggcagagagagaga

SEQ ID NO: 1023688 - DNA, 15 bp, Homo sapiens
caggcagagagagag

SEQ ID NO: 1023689 - DNA, 15 bp, Homo sapiens
acaggcagagagaga

SEQ ID NO: 1023690 - DNA, 15 bp, Homo sapiens
cacaggcagagagag

SEQ ID NO: 1023691 - DNA, 15 bp, Homo sapiens
acacaggcagagaga

SEQ ID NO: 1023692 - DNA, 15 bp, Homo sapiens
cacacaggcagagag

SEQ ID NO: 1023693 - DNA, 15 bp, Homo sapiens
acacacaggcagaga

SEQ ID NO: 1023694 - DNA, 15 bp, Homo sapiens
cacacacaggcagag

SEQ ID NO: 1023695 - DNA, 15 bp, Homo sapiens
acacacacaggcaga

SEQ ID NO: 1023696 - DNA, 15 bp, Homo sapiens
cacacacacaggcag

SEQ ID NO: 1023697 - DNA, 15 bp, Homo sapiens
acacacacacaggca

SEQ ID NO: 1023698 - DNA, 15 bp, Homo sapiens
cacacacacacaggc

SEQ ID NO: 1023699 - DNA, 15 bp, Homo sapiens
acacacacacacagg

SEQ ID NO: 1023700 - DNA, 15 bp, Homo sapiens
accaacacacacaca

SEQ ID NO: 1023701 - DNA, 15 bp, Homo sapiens
taccaacacacacac

SEQ ID NO: 1023702 - DNA, 15 bp, Homo sapiens
gtaccaacacacaca

SEQ ID NO: 1023703 - DNA, 15 bp, Homo sapiens
tgtaccaacacacac

SEQ ID NO: 1023704 - DNA, 15 bp, Homo sapiens
atgtaccaacacaca

SEQ ID NO: 1023705 - DNA, 15 bp, Homo sapiens
catgtaccaacacac

SEQ ID NO: 1023706 - DNA, 15 bp, Homo sapiens
tcatgtaccaacaca

SEQ ID NO: 1023707 - DNA, 15 bp, Homo sapiens
atcatgtaccaacac

SEQ ID NO: 1023708 - DNA, 15 bp, Homo sapiens
catcatgtaccaaca

SEQ ID NO: 1023709 - DNA, 15 bp, Homo sapiens
ccatcatgtaccaac

SEQ ID NO: 1023710 - DNA, 15 bp, Homo sapiens
cccatcatgtaccaa

SEQ ID NO: 1023711 - DNA, 15 bp, Homo sapiens
tcccatcatgtacca

SEQ ID NO: 1023712 - DNA, 15 bp, Homo sapiens
ttcccatcatgtacc

SEQ ID NO: 1023713 - DNA, 15 bp, Homo sapiens
attcccatcatgtac

SEQ ID NO: 1023714 - DNA, 15 bp, Homo sapiens
gattcccatcatgta

SEQ ID NO: 1023715 - DNA, 15 bp, Homo sapiens
cgattcccatcatgt

SEQ ID NO: 1023716 - DNA, 15 bp, Homo sapiens
tcgattcccatcatg

SEQ ID NO: 1023717 - DNA, 15 bp, Homo sapiens
ttcgattcccatcat

SEQ ID NO: 1023718 - DNA, 15 bp, Homo sapiens
cttcgattcccatca

SEQ ID NO: 1023719 - DNA, 15 bp, Homo sapiens
ccttcgattcccatc

SEQ ID NO: 1023720 - DNA, 15 bp, Homo sapiens
accttcgattcccat

SEQ ID NO: 1023721 - DNA, 15 bp, Homo sapiens
gaccttcgattccca

SEQ ID NO: 1023722 - DNA, 15 bp, Homo sapiens
tgaccttcgattccc

SEQ ID NO: 1023723 - DNA, 15 bp, Homo sapiens
gtgaccttcgattcc

SEQ ID NO: 1023724 - DNA, 15 bp, Homo sapiens
tgtgaccttcgattc

SEQ ID NO: 1023725 - DNA, 15 bp, Homo sapiens
gtgtgaccttcgatt

SEQ ID NO: 1023726 - DNA, 15 bp, Homo sapiens
tgtgtgaccttcgat

SEQ ID NO: 1023727 - DNA, 15 bp, Homo sapiens
gtgtgtgaccttcga

SEQ ID NO: 1023728 - DNA, 15 bp, Homo sapiens
tgtgtgtgaccttcg

SEQ ID NO: 1023729 - DNA, 15 bp, Homo sapiens
atgtgtgtgaccttc

SEQ ID NO: 1023730 - DNA, 15 bp, Homo sapiens
gatgtgtgtgacctt

SEQ ID NO: 1023731 - DNA, 15 bp, Homo sapiens
ggatgtgtgtgacct

SEQ ID NO: 1023732 - DNA, 15 bp, Homo sapiens
aggatgtgtgtgacc

SEQ ID NO: 1023733 - DNA, 15 bp, Homo sapiens
caggatgtgtgtgac

SEQ ID NO: 1023734 - DNA, 15 bp, Homo sapiens
ccaggatgtgtgtga

SEQ ID NO: 1023735 - DNA, 15 bp, Homo sapiens
tccaggatgtgtgtg

SEQ ID NO: 1023736 - DNA, 15 bp, Homo sapiens
ttccaggatgtgtgt

SEQ ID NO: 1023737 - DNA, 15 bp, Homo sapiens
attccaggatgtgtg

SEQ ID NO: 1023738 - DNA, 15 bp, Homo sapiens
gattccaggatgtgt

SEQ ID NO: 1023739 - DNA, 15 bp, Homo sapiens
ggattccaggatgtg

SEQ ID NO: 1023740 - DNA, 15 bp, Homo sapiens
tggattccaggatgt

SEQ ID NO: 1023741 - DNA, 15 bp, Homo sapiens
ttggattccaggatg

SEQ ID NO: 1023742 - DNA, 15 bp, Homo sapiens
tttggattccaggat

SEQ ID NO: 1023743 - DNA, 15 bp, Homo sapiens
ctttggattccagga

SEQ ID NO: 1023744 - DNA, 15 bp, Homo sapiens
gctttggattccagg

SEQ ID NO: 1023745 - DNA, 15 bp, Homo sapiens
cgctttggattccag

SEQ ID NO: 1023746 - DNA, 15 bp, Homo sapiens
tcgctttggattcca

SEQ ID NO: 1023747 - DNA, 15 bp, Homo sapiens
gtcgctttggattcc

SEQ ID NO: 1023748 - DNA, 15 bp, Homo sapiens
ggtcgctttggattc

SEQ ID NO: 1023749 - DNA, 15 bp, Homo sapiens
gggtcgctttggatt

SEQ ID NO: 1023750 - DNA, 15 bp, Homo sapiens
ggggtcgctttggat

SEQ ID NO: 1023751 - DNA, 15 bp, Homo sapiens
aggggtcgctttgga

SEQ ID NO: 1023752 - DNA, 15 bp, Homo sapiens
caggggtcgctttgg

SEQ ID NO: 1023753 - DNA, 15 bp, Homo sapiens
acaggggtcgctttg

SEQ ID NO: 1023754 - DNA, 15 bp, Homo sapiens
gacaggggtcgcttt

SEQ ID NO: 1023755 - DNA, 15 bp, Homo sapiens
agacaggggtcgctt

SEQ ID NO: 1023756 - DNA, 15 bp, Homo sapiens
cagacaggggtcgct

SEQ ID NO: 1023757 - DNA, 15 bp, Homo sapiens
tcagacaggggtcgc

SEQ ID NO: 1023758 - DNA, 15 bp, Homo sapiens
atcagacaggggtcg

SEQ ID NO: 1023759 - DNA, 15 bp, Homo sapiens
gatcagacaggggtc

SEQ ID NO: 1023760 - DNA, 15 bp, Homo sapiens
tgatcagacaggggt

SEQ ID NO: 1023761 - DNA, 15 bp, Homo sapiens
atgatcagacagggg

SEQ ID NO: 1023762 - DNA, 15 bp, Homo sapiens
aatgatcagacaggg

SEQ ID NO: 1023763 - DNA, 15 bp, Homo sapiens
gaatgatcagacagg

SEQ ID NO: 1023764 - DNA, 15 bp, Homo sapiens
agaatgatcagacag

SEQ ID NO: 1023765 - DNA, 15 bp, Homo sapiens
aagaatgatcagaca

SEQ ID NO: 1023766 - DNA, 15 bp, Homo sapiens
aaagaatgatcagac

SEQ ID NO: 1023767 - DNA, 15 bp, Homo sapiens
gaaagaatgatcaga

SEQ ID NO: 1023768 - DNA, 15 bp, Homo sapiens
ggaaagaatgatcag

SEQ ID NO: 1023769 - DNA, 15 bp, Homo sapiens
tggaaagaatgatca

SEQ ID NO: 1023770 - DNA, 15 bp, Homo sapiens
atggaaagaatgatc

SEQ ID NO: 1023771 - DNA, 15 bp, Homo sapiens
catggaaagaatgat

SEQ ID NO: 1023772 - DNA, 15 bp, Homo sapiens
ccatggaaagaatga

SEQ ID NO: 1023773 - DNA, 15 bp, Homo sapiens
accatggaaagaatg

SEQ ID NO: 1023774 - DNA, 15 bp, Homo sapiens
gaccatggaaagaat

SEQ ID NO: 1023775 - DNA, 15 bp, Homo sapiens
ggaccatggaaagaa

SEQ ID NO: 1023776 - DNA, 15 bp, Homo sapiens
aggaccatggaaaga

SEQ ID NO: 1023777 - DNA, 15 bp, Homo sapiens
aaggaccatggaaag

SEQ ID NO: 1023778 - DNA, 15 bp, Homo sapiens
caaggaccatggaaa

SEQ ID NO: 1023779 - DNA, 15 bp, Homo sapiens
gcaaggaccatggaa

SEQ ID NO: 1023780 - DNA, 15 bp, Homo sapiens
agcaaggaccatgga

SEQ ID NO: 1023781 - DNA, 15 bp, Homo sapiens
gagcaaggaccatgg

SEQ ID NO: 1023782 - DNA, 15 bp, Homo sapiens
agagcaaggaccatg

SEQ ID NO: 1023783 - DNA, 15 bp, Homo sapiens
tagagcaaggaccat

SEQ ID NO: 1023784 - DNA, 15 bp, Homo sapiens
ctagagcaaggacca

SEQ ID NO: 1023785 - DNA, 15 bp, Homo sapiens
actagagcaaggacc

SEQ ID NO: 1023786 - DNA, 15 bp, Homo sapiens
aactagagcaaggac

SEQ ID NO: 1023787 - DNA, 15 bp, Homo sapiens
taactagagcaagga

SEQ ID NO: 1023788 - DNA, 15 bp, Homo sapiens
gtaactagagcaagg

SEQ ID NO: 1023789 - DNA, 15 bp, Homo sapiens
agtaactagagcaag

SEQ ID NO: 1023790 - DNA, 15 bp, Homo sapiens
cagtaactagagcaa

SEQ ID NO: 1023791 - DNA, 15 bp, Homo sapiens
gcagtaactagagca

SEQ ID NO: 1023792 - DNA, 15 bp, Homo sapiens
ggcagtaactagagc

SEQ ID NO: 1023793 - DNA, 15 bp, Homo sapiens
aggcagtaactagag

SEQ ID NO: 1023794 - DNA, 15 bp, Homo sapiens
gaggcagtaactaga

SEQ ID NO: 1023795 - DNA, 15 bp, Homo sapiens
agaggcagtaactag

SEQ ID NO: 1023796 - DNA, 15 bp, Homo sapiens
tagaggcagtaacta

SEQ ID NO: 1023797 - DNA, 15 bp, Homo sapiens
atagaggcagtaact

SEQ ID NO: 1023798 - DNA, 15 bp, Homo sapiens
aatagaggcagtaac

SEQ ID NO: 1023799 - DNA, 15 bp, Homo sapiens
aaatagaggcagtaa

SEQ ID NO: 1023800 - DNA, 15 bp, Homo sapiens
gaaatagaggcagta

SEQ ID NO: 1023801 - DNA, 15 bp, Homo sapiens
ggaaatagaggcagt

SEQ ID NO: 1023802 - DNA, 15 bp, Homo sapiens
aggaaatagaggcag

SEQ ID NO: 1023803 - DNA, 15 bp, Homo sapiens
caggaaatagaggca

SEQ ID NO: 1023804 - DNA, 15 bp, Homo sapiens
tcaggaaatagaggc

SEQ ID NO: 1023805 - DNA, 15 bp, Homo sapiens
ttcaggaaatagagg

SEQ ID NO: 1023806 - DNA, 15 bp, Homo sapiens
gttcaggaaatagag

SEQ ID NO: 1023807 - DNA, 15 bp, Homo sapiens
agttcaggaaataga

SEQ ID NO: 1023808 - DNA, 15 bp, Homo sapiens
aagttcaggaaatag

SEQ ID NO: 1023809 - DNA, 15 bp, Homo sapiens
taagttcaggaaata

SEQ ID NO: 1023810 - DNA, 15 bp, Homo sapiens
ataagttcaggaaat

SEQ ID NO: 1023811 - DNA, 15 bp, Homo sapiens
gataagttcaggaaa

SEQ ID NO: 1023812 - DNA, 15 bp, Homo sapiens
agataagttcaggaa

SEQ ID NO: 1023813 - DNA, 15 bp, Homo sapiens
gagataagttcagga

SEQ ID NO: 1023814 - DNA, 15 bp, Homo sapiens
cgagataagttcagg

SEQ ID NO: 1023815 - DNA, 15 bp, Homo sapiens
gcgagataagttcag

SEQ ID NO: 1023816 - DNA, 15 bp, Homo sapiens
agcgagataagttca

SEQ ID NO: 1023817 - DNA, 15 bp, Homo sapiens
gagcgagataagttc

SEQ ID NO: 1023818 - DNA, 15 bp, Homo sapiens
tgagcgagataagtt

SEQ ID NO: 1023819 - DNA, 15 bp, Homo sapiens
gtgagcgagataagt

SEQ ID NO: 1023820 - DNA, 15 bp, Homo sapiens
agtgagcgagataag

SEQ ID NO: 1023821 - DNA, 15 bp, Homo sapiens
tagtgagcgagataa

SEQ ID NO: 1023822 - DNA, 15 bp, Homo sapiens
ctagtgagcgagata

SEQ ID NO: 1023823 - DNA, 15 bp, Homo sapiens
tctagtgagcgagat

SEQ ID NO: 1023824 - DNA, 15 bp, Homo sapiens
atctagtgagcgaga

SEQ ID NO: 1023825 - DNA, 15 bp, Homo sapiens
aatctagtgagcgag

SEQ ID NO: 1023826 - DNA, 15 bp, Homo sapiens
aaatctagtgagcga

SEQ ID NO: 1023827 - DNA, 15 bp, Homo sapiens
gaaatctagtgagcg

SEQ ID NO: 1023828 - DNA, 15 bp, Homo sapiens
ggaaatctagtgagc

SEQ ID NO: 1023829 - DNA, 15 bp, Homo sapiens
gggaaatctagtgag

SEQ ID NO: 1023830 - DNA, 15 bp, Homo sapiens
tgggaaatctagtga

SEQ ID NO: 1023831 - DNA, 15 bp, Homo sapiens
gtgggaaatctagtg

SEQ ID NO: 1023832 - DNA, 15 bp, Homo sapiens
ggtgggaaatctagt

SEQ ID NO: 1023833 - DNA, 15 bp, Homo sapiens
gggtgggaaatctag

SEQ ID NO: 1023834 - DNA, 15 bp, Homo sapiens
ggggtgggaaatcta

SEQ ID NO: 1023835 - DNA, 15 bp, Homo sapiens
aggggtgggaaatct

SEQ ID NO: 1023836 - DNA, 15 bp, Homo sapiens
aaggggtgggaaatc

SEQ ID NO: 1023837 - DNA, 15 bp, Homo sapiens
gaaggggtgggaaat

SEQ ID NO: 1023838 - DNA, 15 bp, Homo sapiens
agaaggggtgggaaa

SEQ ID NO: 1023839 - DNA, 15 bp, Homo sapiens
gagaaggggtgggaa

SEQ ID NO: 1023840 - DNA, 15 bp, Homo sapiens
agagaaggggtggga

SEQ ID NO: 1023841 - DNA, 15 bp, Homo sapiens
gagagaaggggtggg

SEQ ID NO: 1023842 - DNA, 15 bp, Homo sapiens
agagagaaggggtgg

SEQ ID NO: 1023843 - DNA, 15 bp, Homo sapiens
gagagagaaggggtg

SEQ ID NO: 1023844 - DNA, 15 bp, Homo sapiens
ggagagagaaggggt

SEQ ID NO: 1023845 - DNA, 15 bp, Homo sapiens
gggagagagaagggg

SEQ ID NO: 1023846 - DNA, 15 bp, Homo sapiens
agggagagagaaggg

SEQ ID NO: 1023847 - DNA, 15 bp, Homo sapiens
cagggagagagaagg

SEQ ID NO: 1023848 - DNA, 15 bp, Homo sapiens
tcagggagagagaag

SEQ ID NO: 1023849 - DNA, 15 bp, Homo sapiens
ttcagggagagagaa

SEQ ID NO: 1023850 - DNA, 15 bp, Homo sapiens
tttcagggagagaga

SEQ ID NO: 1023851 - DNA, 15 bp, Homo sapiens
atttcagggagagag

SEQ ID NO: 1023852 - DNA, 15 bp, Homo sapiens
catttcagggagaga

SEQ ID NO: 1023853 - DNA, 15 bp, Homo sapiens
gcatttcagggagag

SEQ ID NO: 1023854 - DNA, 15 bp, Homo sapiens
ggcatttcagggaga

SEQ ID NO: 1023855 - DNA, 15 bp, Homo sapiens
gggcatttcagggag

SEQ ID NO: 1023856 - DNA, 15 bp, Homo sapiens
cgggcatttcaggga

SEQ ID NO: 1023857 - DNA, 15 bp, Homo sapiens
ccgggcatttcaggg

SEQ ID NO: 1023858 - DNA, 15 bp, Homo sapiens
cccgggcatttcagg

SEQ ID NO: 1023859 - DNA, 15 bp, Homo sapiens
tcccgggcatttcag

SEQ ID NO: 1023860 - DNA, 15 bp, Homo sapiens
ctcccgggcatttca

SEQ ID NO: 1023861 - DNA, 15 bp, Homo sapiens
gctcccgggcatttc

SEQ ID NO: 1023862 - DNA, 15 bp, Homo sapiens
agctcccgggcattt

SEQ ID NO: 1023863 - DNA, 15 bp, Homo sapiens
gagctcccgggcatt

SEQ ID NO: 1023864 - DNA, 15 bp, Homo sapiens
tgagctcccgggcat

SEQ ID NO: 1023865 - DNA, 15 bp, Homo sapiens
ttgagctcccgggca

SEQ ID NO: 1023866 - DNA, 15 bp, Homo sapiens
attgagctcccgggc

SEQ ID NO: 1023867 - DNA, 15 bp, Homo sapiens
gattgagctcccggg

SEQ ID NO: 1023868 - DNA, 15 bp, Homo sapiens
agattgagctcccgg

SEQ ID NO: 1023869 - DNA, 15 bp, Homo sapiens
tagattgagctcccg

SEQ ID NO: 1023870 - DNA, 15 bp, Homo sapiens
ctagattgagctccc

SEQ ID NO: 1023871 - DNA, 15 bp, Homo sapiens
cctagattgagctcc

SEQ ID NO: 1023872 - DNA, 15 bp, Homo sapiens
acctagattgagctc

SEQ ID NO: 1023873 - DNA, 15 bp, Homo sapiens
aacctagattgagct

SEQ ID NO: 1023874 - DNA, 15 bp, Homo sapiens
aaacctagattgagc

SEQ ID NO: 1023875 - DNA, 15 bp, Homo sapiens
caaacctagattgag

SEQ ID NO: 1023876 - DNA, 15 bp, Homo sapiens
gcaaacctagattga

SEQ ID NO: 1023877 - DNA, 15 bp, Homo sapiens
tgcaaacctagattg

SEQ ID NO: 1023878 - DNA, 15 bp, Homo sapiens
ctgcaaacctagatt

SEQ ID NO: 1023879 - DNA, 15 bp, Homo sapiens
gctgcaaacctagat

SEQ ID NO: 1023880 - DNA, 15 bp, Homo sapiens
ggctgcaaacctaga

SEQ ID NO: 1023881 - DNA, 15 bp, Homo sapiens
aggctgcaaacctag

SEQ ID NO: 1023882 - DNA, 15 bp, Homo sapiens
caggctgcaaaccta

SEQ ID NO: 1023883 - DNA, 15 bp, Homo sapiens
acaggctgcaaacct

SEQ ID NO: 1023884 - DNA, 15 bp, Homo sapiens
gacaggctgcaaacc

SEQ ID NO: 1023885 - DNA, 15 bp, Homo sapiens
tgacaggctgcaaac

SEQ ID NO: 1023886 - DNA, 15 bp, Homo sapiens
ttgacaggctgcaaa

SEQ ID NO: 1023887 - DNA, 15 bp, Homo sapiens
cttgacaggctgcaa

SEQ ID NO: 1023888 - DNA, 15 bp, Homo sapiens
ccttgacaggctgca

SEQ ID NO: 1023889 - DNA, 15 bp, Homo sapiens
cccttgacaggctgc

SEQ ID NO: 1023890 - DNA, 15 bp, Homo sapiens
gcccttgacaggctg

SEQ ID NO: 1023891 - DNA, 15 bp, Homo sapiens
agcccttgacaggct

SEQ ID NO: 1023892 - DNA, 15 bp, Homo sapiens
tagcccttgacaggc

SEQ ID NO: 1023893 - DNA, 15 bp, Homo sapiens
gtagcccttgacagg

SEQ ID NO: 1023894 - DNA, 15 bp, Homo sapiens
tgtagcccttgacag

SEQ ID NO: 1023895 - DNA, 15 bp, Homo sapiens
ttgtagcccttgaca

SEQ ID NO: 1023896 - DNA, 15 bp, Homo sapiens
cttgtagcccttgac

SEQ ID NO: 1023897 - DNA, 15 bp, Homo sapiens
tcttgtagcccttga

SEQ ID NO: 1023898 - DNA, 15 bp, Homo sapiens
ctcttgtagcccttg

SEQ ID NO: 1023899 - DNA, 15 bp, Homo sapiens
cctcttgtagccctt

SEQ ID NO: 1023900 - DNA, 15 bp, Homo sapiens
tcctcttgtagccct

SEQ ID NO: 1023901 - DNA, 15 bp, Homo sapiens
atcctcttgtagccc

SEQ ID NO: 1023902 - DNA, 15 bp, Homo sapiens
catcctcttgtagcc

SEQ ID NO: 1023903 - DNA, 15 bp, Homo sapiens
gcatcctcttgtagc

SEQ ID NO: 1023904 - DNA, 15 bp, Homo sapiens
tgcatcctcttgtag

SEQ ID NO: 1023905 - DNA, 15 bp, Homo sapiens
ctgcatcctcttgta

SEQ ID NO: 1023906 - DNA, 15 bp, Homo sapiens
tctgcatcctcttgt

SEQ ID NO: 1023907 - DNA, 15 bp, Homo sapiens
atctgcatcctcttg

SEQ ID NO: 1023908 - DNA, 15 bp, Homo sapiens
tatctgcatcctctt

SEQ ID NO: 1023909 - DNA, 15 bp, Homo sapiens
ttatctgcatcctct

SEQ ID NO: 1023910 - DNA, 15 bp, Homo sapiens
attatctgcatcctc

SEQ ID NO: 1023911 - DNA, 15 bp, Homo sapiens
cattatctgcatcct

SEQ ID NO: 1023912 - DNA, 15 bp, Homo sapiens
tcattatctgcatcc

SEQ ID NO: 1023913 - DNA, 15 bp, Homo sapiens
ctcattatctgcatc

SEQ ID NO: 1023914 - DNA, 15 bp, Homo sapiens
tctcattatctgcat

SEQ ID NO: 1023915 - DNA, 15 bp, Homo sapiens
ctctcattatctgca

SEQ ID NO: 1023916 - DNA, 15 bp, Homo sapiens
tctctcattatctgc

SEQ ID NO: 1023917 - DNA, 15 bp, Homo sapiens
tatctctcattatct

SEQ ID NO: 1023918 - DNA, 15 bp, Homo sapiens
ttatctctcattatc

SEQ ID NO: 1023919 - DNA, 15 bp, Homo sapiens
cttatctctcattat

SEQ ID NO: 1023920 - DNA, 15 bp, Homo sapiens
ccttatctctcatta

SEQ ID NO: 1023921 - DNA, 15 bp, Homo sapiens
tccttatctctcatt

SEQ ID NO: 1023922 - DNA, 15 bp, Homo sapiens
ctccttatctctcat

SEQ ID NO: 1023923 - DNA, 15 bp, Homo sapiens
cctccttatctctca

SEQ ID NO: 1023924 - DNA, 15 bp, Homo sapiens
ccctccttatctctc

SEQ ID NO: 1023925 - DNA, 15 bp, Homo sapiens
accctccttatctct

SEQ ID NO: 1023926 - DNA, 15 bp, Homo sapiens
caccctccttatctc

SEQ ID NO: 1023927 - DNA, 15 bp, Homo sapiens
tcaccctccttatct

SEQ ID NO: 1023928 - DNA, 15 bp, Homo sapiens
gtcaccctccttatc

SEQ ID NO: 1023929 - DNA, 15 bp, Homo sapiens
agtcaccctccttat

SEQ ID NO: 1023930 - DNA, 15 bp, Homo sapiens
gagtcaccctcctta

SEQ ID NO: 1023931 - DNA, 15 bp, Homo sapiens
ggagtcaccctcctt

SEQ ID NO: 1023932 - DNA, 15 bp, Homo sapiens
gggagtcaccctcct

SEQ ID NO: 1023933 - DNA, 15 bp, Homo sapiens
agggagtcaccctcc

SEQ ID NO: 1023934 - DNA, 15 bp, Homo sapiens
cagggagtcaccctc

SEQ ID NO: 1023935 - DNA, 15 bp, Homo sapiens
acagggagtcaccct

SEQ ID NO: 1023936 - DNA, 15 bp, Homo sapiens
aacagggagtcaccc

SEQ ID NO: 1023937 - DNA, 15 bp, Homo sapiens
caacagggagtcacc

SEQ ID NO: 1023938 - DNA, 15 bp, Homo sapiens
ccaacagggagtcac

SEQ ID NO: 1023939 - DNA, 15 bp, Homo sapiens
gccaacagggagtca

SEQ ID NO: 1023940 - DNA, 15 bp, Homo sapiens
agccaacagggagtc

SEQ ID NO: 1023941 - DNA, 15 bp, Homo sapiens
tagccaacagggagt

SEQ ID NO: 1023942 - DNA, 15 bp, Homo sapiens
gtagccaacagggag

SEQ ID NO: 1023943 - DNA, 15 bp, Homo sapiens
ggtagccaacaggga

SEQ ID NO: 1023944 - DNA, 15 bp, Homo sapiens
gggtagccaacaggg

SEQ ID NO: 1023945 - DNA, 15 bp, Homo sapiens
agggtagccaacagg

SEQ ID NO: 1023946 - DNA, 15 bp, Homo sapiens
aagggtagccaacag

SEQ ID NO: 1023947 - DNA, 15 bp, Homo sapiens
aaagggtagccaaca

SEQ ID NO: 1023948 - DNA, 15 bp, Homo sapiens
taaagggtagccaac

SEQ ID NO: 1023949 - DNA, 15 bp, Homo sapiens
ttaaagggtagccaa

SEQ ID NO: 1023950 - DNA, 15 bp, Homo sapiens
tttaaagggtagcca

SEQ ID NO: 1023951 - DNA, 15 bp, Homo sapiens
ttttaaagggtagcc

SEQ ID NO: 1023952 - DNA, 15 bp, Homo sapiens
attttaaagggtagc

SEQ ID NO: 1023953 - DNA, 15 bp, Homo sapiens
gattttaaagggtag

SEQ ID NO: 1023954 - DNA, 15 bp, Homo sapiens
agattttaaagggta

SEQ ID NO: 1023955 - DNA, 15 bp, Homo sapiens
cagattttaaagggt

SEQ ID NO: 1023956 - DNA, 15 bp, Homo sapiens
tcagattttaaaggg

SEQ ID NO: 1023957 - DNA, 15 bp, Homo sapiens
ttcagattttaaagg

SEQ ID NO: 1023958 - DNA, 15 bp, Homo sapiens
tttcagattttaaag

SEQ ID NO: 1023959 - DNA, 15 bp, Homo sapiens
atttcagattttaaa

SEQ ID NO: 1023960 - DNA, 15 bp, Homo sapiens
aatttcagattttaa

SEQ ID NO: 1023961 - DNA, 15 bp, Homo sapiens
caatttcagatttta

SEQ ID NO: 1023962 - DNA, 15 bp, Homo sapiens
gcaatttcagatttt

SEQ ID NO: 1023963 - DNA, 15 bp, Homo sapiens
agcaatttcagattt

SEQ ID NO: 1023964 - DNA, 15 bp, Homo sapiens
aagcaatttcagatt

SEQ ID NO: 1023965 - DNA, 15 bp, Homo sapiens
caagcaatttcagat

SEQ ID NO: 1023966 - DNA, 15 bp, Homo sapiens
acaagcaatttcaga

SEQ ID NO: 1023967 - DNA, 15 bp, Homo sapiens
aacaagcaatttcag

SEQ ID NO: 1023968 - DNA, 15 bp, Homo sapiens
aaacaagcaatttca

SEQ ID NO: 1023969 - DNA, 15 bp, Homo sapiens
caaacaagcaatttc

SEQ ID NO: 1023970 - DNA, 15 bp, Homo sapiens
tcaaacaagcaattt

SEQ ID NO: 1023971 - DNA, 15 bp, Homo sapiens
ttcaaacaagcaatt

SEQ ID NO: 1023972 - DNA, 15 bp, Homo sapiens
cttcaaacaagcaat

SEQ ID NO: 1023973 - DNA, 15 bp, Homo sapiens
gcttcaaacaagcaa

SEQ ID NO: 1023974 - DNA, 15 bp, Homo sapiens
tgcttcaaacaagca

SEQ ID NO: 1023975 - DNA, 15 bp, Homo sapiens
gtgcttcaaacaagc

SEQ ID NO: 1023976 - DNA, 15 bp, Homo sapiens
tgtgcttcaaacaag

SEQ ID NO: 1023977 - DNA, 15 bp, Homo sapiens
ctgtgcttcaaacaa

SEQ ID NO: 1023978 - DNA, 15 bp, Homo sapiens
cctgtgcttcaaaca

SEQ ID NO: 1023979 - DNA, 15 bp, Homo sapiens
tcctgtgcttcaaac

SEQ ID NO: 1023980 - DNA, 15 bp, Homo sapiens
ttcctgtgcttcaaa

SEQ ID NO: 1023981 - DNA, 15 bp, Homo sapiens
cttcctgtgcttcaa

SEQ ID NO: 1023982 - DNA, 15 bp, Homo sapiens
acttcctgtgcttca

SEQ ID NO: 1023983 - DNA, 15 bp, Homo sapiens
cacttcctgtgcttc

SEQ ID NO: 1023984 - DNA, 15 bp, Homo sapiens
ccacttcctgtgctt

SEQ ID NO: 1023985 - DNA, 15 bp, Homo sapiens
gccacttcctgtgct

SEQ ID NO: 1023986 - DNA, 15 bp, Homo sapiens
agccacttcctgtgc

SEQ ID NO: 1023987 - DNA, 15 bp, Homo sapiens
aagccacttcctgtg

SEQ ID NO: 1023988 - DNA, 15 bp, Homo sapiens
aaagccacttcctgt

SEQ ID NO: 1023989 - DNA, 15 bp, Homo sapiens
gaaagccacttcctg

SEQ ID NO: 1023990 - DNA, 15 bp, Homo sapiens
agaaagccacttcct

SEQ ID NO: 1023991 - DNA, 15 bp, Homo sapiens
aagaaagccacttcc

SEQ ID NO: 1023992 - DNA, 15 bp, Homo sapiens
gaagaaagccacttc

SEQ ID NO: 1023993 - DNA, 15 bp, Homo sapiens
ggaagaaagccactt

SEQ ID NO: 1023994 - DNA, 15 bp, Homo sapiens
aggaagaaagccact

SEQ ID NO: 1023995 - DNA, 15 bp, Homo sapiens
aaggaagaaagccac

SEQ ID NO: 1023996 - DNA, 15 bp, Homo sapiens
gaaggaagaaagcca

SEQ ID NO: 1023997 - DNA, 15 bp, Homo sapiens
tgaaggaagaaagcc

SEQ ID NO: 1023998 - DNA, 15 bp, Homo sapiens
gtgaaggaagaaagc

SEQ ID NO: 1023999 - DNA, 15 bp, Homo sapiens
ggtgaaggaagaaag

SEQ ID NO: 1024000 - DNA, 15 bp, Homo sapiens
tggtgaaggaagaaa

SEQ ID NO: 1024001 - DNA, 15 bp, Homo sapiens
atggtgaaggaagaa

SEQ ID NO: 1024002 - DNA, 15 bp, Homo sapiens
gatggtgaaggaaga

SEQ ID NO: 1024003 - DNA, 15 bp, Homo sapiens
tgatggtgaaggaag

SEQ ID NO: 1024004 - DNA, 15 bp, Homo sapiens
atgatggtgaaggaa

SEQ ID NO: 1024005 - DNA, 15 bp, Homo sapiens
aatgatggtgaagga

SEQ ID NO: 1024006 - DNA, 15 bp, Homo sapiens
taatgatggtgaagg

SEQ ID NO: 1024007 - DNA, 15 bp, Homo sapiens
ttaatgatggtgaag

SEQ ID NO: 1024008 - DNA, 15 bp, Homo sapiens
tttaatgatggtgaa

SEQ ID NO: 1024009 - DNA, 15 bp, Homo sapiens
ttttaatgatggtga

SEQ ID NO: 1024010 - DNA, 15 bp, Homo sapiens
cttttaatgatggtg

SEQ ID NO: 1024011 - DNA, 15 bp, Homo sapiens
gcttttaatgatggt

SEQ ID NO: 1024012 - DNA, 15 bp, Homo sapiens
tgcttttaatgatgg

SEQ ID NO: 1024013 - DNA, 15 bp, Homo sapiens
ttgcttttaatgatg

SEQ ID NO: 1024014 - DNA, 15 bp, Homo sapiens
tttgcttttaatgat

SEQ ID NO: 1024015 - DNA, 15 bp, Homo sapiens
ttttgcttttaatga

SEQ ID NO: 1024016 - DNA, 15 bp, Homo sapiens
tttttgcttttaatg

SEQ ID NO: 1024017 - DNA, 15 bp, Homo sapiens
ctttttgcttttaat

SEQ ID NO: 1024018 - DNA, 15 bp, Homo sapiens
tctttttgcttttaa

SEQ ID NO: 1024019 - DNA, 15 bp, Homo sapiens
ttctttttgctttta

SEQ ID NO: 1024020 - DNA, 15 bp, Homo sapiens
attctttttgctttt

SEQ ID NO: 1024021 - DNA, 15 bp, Homo sapiens
tattctttttgcttt

SEQ ID NO: 1024022 - DNA, 15 bp, Homo sapiens
ctattctttttgctt

SEQ ID NO: 1024023 - DNA, 15 bp, Homo sapiens
tctattctttttgct

SEQ ID NO: 1024024 - DNA, 15 bp, Homo sapiens
ttctattctttttgc

SEQ ID NO: 1024025 - DNA, 15 bp, Homo sapiens
tttctattctttttg

SEQ ID NO: 1024026 - DNA, 15 bp, Homo sapiens
ttttctattcttttt

SEQ ID NO: 1024027 - DNA, 15 bp, Homo sapiens
attttctattctttt

SEQ ID NO: 1024028 - DNA, 15 bp, Homo sapiens
gattttctattcttt

SEQ ID NO: 1024029 - DNA, 15 bp, Homo sapiens
ggattttctattctt

SEQ ID NO: 1024030 - DNA, 15 bp, Homo sapiens
tggattttctattct

SEQ ID NO: 1024031 - DNA, 15 bp, Homo sapiens
gtggattttctattc

SEQ ID NO: 1024032 - DNA, 15 bp, Homo sapiens
tgtggattttctatt

SEQ ID NO: 1024033 - DNA, 15 bp, Homo sapiens
ttgtggattttctat

SEQ ID NO: 1024034 - DNA, 15 bp, Homo sapiens
tttgtggattttcta

SEQ ID NO: 1024035 - DNA, 15 bp, Homo sapiens
ctttgtggattttct

SEQ ID NO: 1024036 - DNA, 15 bp, Homo sapiens
cctttgtggattttc

SEQ ID NO: 1024037 - DNA, 15 bp, Homo sapiens
tcctttgtggatttt

SEQ ID NO: 1024038 - DNA, 15 bp, Homo sapiens
ctcctttgtggattt

SEQ ID NO: 1024039 - DNA, 15 bp, Homo sapiens
cctcctttgtggatt

SEQ ID NO: 1024040 - DNA, 15 bp, Homo sapiens
gcctcctttgtggat

SEQ ID NO: 1024041 - DNA, 15 bp, Homo sapiens
tgcctcctttgtgga

SEQ ID NO: 1024042 - DNA, 15 bp, Homo sapiens
ctgcctcctttgtgg

SEQ ID NO: 1024043 - DNA, 15 bp, Homo sapiens
tctgcctcctttgtg

SEQ ID NO: 1024044 - DNA, 15 bp, Homo sapiens
ttctgcctcctttgt

SEQ ID NO: 1024045 - DNA, 15 bp, Homo sapiens
tttctgcctcctttg

SEQ ID NO: 1024046 - DNA, 15 bp, Homo sapiens
gtttctgcctccttt

SEQ ID NO: 1024047 - DNA, 15 bp, Homo sapiens
agtttctgcctcctt

SEQ ID NO: 1024048 - DNA, 15 bp, Homo sapiens
gagtttctgcctcct

SEQ ID NO: 1024049 - DNA, 15 bp, Homo sapiens
tgagtttctgcctcc

SEQ ID NO: 1024050 - DNA, 15 bp, Homo sapiens
ctgagtttctgcctc

SEQ ID NO: 1024051 - DNA, 15 bp, Homo sapiens
cctgagtttctgcct

SEQ ID NO: 1024052 - DNA, 15 bp, Homo sapiens
ccctgagtttctgcc

SEQ ID NO: 1024053 - DNA, 15 bp, Homo sapiens
accctgagtttctgc

SEQ ID NO: 1024054 - DNA, 15 bp, Homo sapiens
caccctgagtttctg

SEQ ID NO: 1024055 - DNA, 15 bp, Homo sapiens
ccaccctgagtttct

SEQ ID NO: 1024056 - DNA, 15 bp, Homo sapiens
accaccctgagtttc

SEQ ID NO: 1024057 - DNA, 15 bp, Homo sapiens
aaccaccctgagttt

SEQ ID NO: 1024058 - DNA, 15 bp, Homo sapiens
aaaccaccctgagtt

SEQ ID NO: 1024059 - DNA, 15 bp, Homo sapiens
aaaaccaccctgagt

SEQ ID NO: 1024060 - DNA, 15 bp, Homo sapiens
caaaaccaccctgag

SEQ ID NO: 1024061 - DNA, 15 bp, Homo sapiens
ccaaaaccaccctga

SEQ ID NO: 1024062 - DNA, 15 bp, Homo sapiens
tccaaaaccaccctg

SEQ ID NO: 1024063 - DNA, 15 bp, Homo sapiens
atccaaaaccaccct

SEQ ID NO: 1024064 - DNA, 15 bp, Homo sapiens
aatccaaaaccaccc

SEQ ID NO: 1024065 - DNA, 15 bp, Homo sapiens
aaatccaaaaccacc

SEQ ID NO: 1024066 - DNA, 15 bp, Homo sapiens
aaaatccaaaaccac

SEQ ID NO: 1024067 - DNA, 15 bp, Homo sapiens
taaaatccaaaacca

SEQ ID NO: 1024068 - DNA, 15 bp, Homo sapiens
ataaaatccaaaacc

SEQ ID NO: 1024069 - DNA, 15 bp, Homo sapiens
cataaaatccaaaac

SEQ ID NO: 1024070 - DNA, 15 bp, Homo sapiens
acataaaatccaaaa

SEQ ID NO: 1024071 - DNA, 15 bp, Homo sapiens
cacataaaatccaaa

SEQ ID NO: 1024072 - DNA, 15 bp, Homo sapiens
ccacataaaatccaa

SEQ ID NO: 1024073 - DNA, 15 bp, Homo sapiens
tccacataaaatcca

SEQ ID NO: 1024074 - DNA, 15 bp, Homo sapiens
ctccacataaaatcc

SEQ ID NO: 1024075 - DNA, 15 bp, Homo sapiens
actccacataaaatc

SEQ ID NO: 1024076 - DNA, 15 bp, Homo sapiens
cactccacataaaat

SEQ ID NO: 1024077 - DNA, 15 bp, Homo sapiens
tcactccacataaaa

SEQ ID NO: 1024078 - DNA, 15 bp, Homo sapiens
ttcactccacataaa

SEQ ID NO: 1024079 - DNA, 15 bp, Homo sapiens
tttcactccacataa

SEQ ID NO: 1024080 - DNA, 15 bp, Homo sapiens
ttttcactccacata

SEQ ID NO: 1024081 - DNA, 15 bp, Homo sapiens
cttttcactccacat

SEQ ID NO: 1024082 - DNA, 15 bp, Homo sapiens
tcttttcactccaca

SEQ ID NO: 1024083 - DNA, 15 bp, Homo sapiens
ttcttttcactccac

SEQ ID NO: 1024084 - DNA, 15 bp, Homo sapiens
gttcttttcactcca

SEQ ID NO: 1024085 - DNA, 15 bp, Homo sapiens
ggttcttttcactcc

SEQ ID NO: 1024086 - DNA, 15 bp, Homo sapiens
tggttcttttcactc

SEQ ID NO: 1024087 - DNA, 15 bp, Homo sapiens
atggttcttttcact

SEQ ID NO: 1024088 - DNA, 15 bp, Homo sapiens
tatggttcttttcac

SEQ ID NO: 1024089 - DNA, 15 bp, Homo sapiens
ttatggttcttttca

SEQ ID NO: 1024090 - DNA, 15 bp, Homo sapiens
tttatggttcttttc

SEQ ID NO: 1024091 - DNA, 15 bp, Homo sapiens
ctttatggttctttt

SEQ ID NO: 1024092 - DNA, 15 bp, Homo sapiens
tctttatggttcttt

SEQ ID NO: 1024093 - DNA, 15 bp, Homo sapiens
gtctttatggttctt

SEQ ID NO: 1024094 - DNA, 15 bp, Homo sapiens
tgtctttatggttct

SEQ ID NO: 1024095 - DNA, 15 bp, Homo sapiens
ctgtctttatggttc

SEQ ID NO: 1024096 - DNA, 15 bp, Homo sapiens
cctgtctttatggtt

SEQ ID NO: 1024097 - DNA, 15 bp, Homo sapiens
tcctgtctttatggt

SEQ ID NO: 1024098 - DNA, 15 bp, Homo sapiens
ctcctgtctttatgg

SEQ ID NO: 1024099 - DNA, 15 bp, Homo sapiens
gctcctgtctttatg

SEQ ID NO: 1024100 - DNA, 15 bp, Homo sapiens
tgctcctgtctttat

SEQ ID NO: 1024101 - DNA, 15 bp, Homo sapiens
gtgctcctgtcttta

SEQ ID NO: 1024102 - DNA, 15 bp, Homo sapiens
agtgctcctgtcttt

SEQ ID NO: 1024103 - DNA, 15 bp, Homo sapiens
cagtgctcctgtctt

SEQ ID NO: 1024104 - DNA, 15 bp, Homo sapiens
gcagtgctcctgtct

SEQ ID NO: 1024105 - DNA, 15 bp, Homo sapiens
agcagtgctcctgtc

SEQ ID NO: 1024106 - DNA, 15 bp, Homo sapiens
aagcagtgctcctgt

SEQ ID NO: 1024107 - DNA, 15 bp, Homo sapiens
aaagcagtgctcctg

SEQ ID NO: 1024108 - DNA, 15 bp, Homo sapiens
caaagcagtgctcct

SEQ ID NO: 1024109 - DNA, 15 bp, Homo sapiens
gcaaagcagtgctcc

SEQ ID NO: 1024110 - DNA, 15 bp, Homo sapiens
agcaaagcagtgctc

SEQ ID NO: 1024111 - DNA, 15 bp, Homo sapiens
aagcaaagcagtgct

SEQ ID NO: 1024112 - DNA, 15 bp, Homo sapiens
aaagcaaagcagtgc

SEQ ID NO: 1024113 - DNA, 15 bp, Homo sapiens
taaagcaaagcagtg

SEQ ID NO: 1024114 - DNA, 15 bp, Homo sapiens
ataaagcaaagcagt

SEQ ID NO: 1024115 - DNA, 15 bp, Homo sapiens
tataaagcaaagcag

SEQ ID NO: 1024116 - DNA, 15 bp, Homo sapiens
gtataaagcaaagca

SEQ ID NO: 1024117 - DNA, 15 bp, Homo sapiens
tgtataaagcaaagc

SEQ ID NO: 1024118 - DNA, 15 bp, Homo sapiens
gtgtataaagcaaag

SEQ ID NO: 1024119 - DNA, 15 bp, Homo sapiens
tgtgtataaagcaaa

SEQ ID NO: 1024120 - DNA, 15 bp, Homo sapiens
ttgtgtataaagcaa

SEQ ID NO: 1024121 - DNA, 15 bp, Homo sapiens
tttgtgtataaagca

SEQ ID NO: 1024122 - DNA, 15 bp, Homo sapiens
ctttgtgtataaagc

SEQ ID NO: 1024123 - DNA, 15 bp, Homo sapiens
gctttgtgtataaag

SEQ ID NO: 1024124 - DNA, 15 bp, Homo sapiens
ggctttgtgtataaa

SEQ ID NO: 1024125 - DNA, 15 bp, Homo sapiens
tggctttgtgtataa

SEQ ID NO: 1024126 - DNA, 15 bp, Homo sapiens
gtggctttgtgtata

SEQ ID NO: 1024127 - DNA, 15 bp, Homo sapiens
tgtggctttgtgtat

SEQ ID NO: 1024128 - DNA, 15 bp, Homo sapiens
gtgtggctttgtgta

SEQ ID NO: 1024129 - DNA, 15 bp, Homo sapiens
tgtgtggctttgtgt

SEQ ID NO: 1024130 - DNA, 15 bp, Homo sapiens
atgtgtggctttgtg

SEQ ID NO: 1024131 - DNA, 15 bp, Homo sapiens
catgtgtggctttgt

SEQ ID NO: 1024132 - DNA, 15 bp, Homo sapiens
ccatgtgtggctttg

SEQ ID NO: 1024133 - DNA, 15 bp, Homo sapiens
gccatgtgtggcttt

SEQ ID NO: 1024134 - DNA, 15 bp, Homo sapiens
tgccatgtgtggctt

SEQ ID NO: 1024135 - DNA, 15 bp, Homo sapiens
ttgccatgtgtggct

SEQ ID NO: 1024136 - DNA, 15 bp, Homo sapiens
tttgccatgtgtggc

SEQ ID NO: 1024137 - DNA, 15 bp, Homo sapiens
ctttgccatgtgtgg

SEQ ID NO: 1024138 - DNA, 15 bp, Homo sapiens
gctttgccatgtgtg

SEQ ID NO: 1024139 - DNA, 15 bp, Homo sapiens
tgctttgccatgtgt

SEQ ID NO: 1024140 - DNA, 15 bp, Homo sapiens
ttgctttgccatgtg

SEQ ID NO: 1024141 - DNA, 15 bp, Homo sapiens
tttgctttgccatgt

SEQ ID NO: 1024142 - DNA, 15 bp, Homo sapiens
ttttgctttgccatg

SEQ ID NO: 1024143 - DNA, 15 bp, Homo sapiens
gttttgctttgccat

SEQ ID NO: 1024144 - DNA, 15 bp, Homo sapiens
tgttttgctttgcca

SEQ ID NO: 1024145 - DNA, 15 bp, Homo sapiens
ttgttttgctttgcc

SEQ ID NO: 1024146 - DNA, 15 bp, Homo sapiens
tttgttttgctttgc

SEQ ID NO: 1024147 - DNA, 15 bp, Homo sapiens
gtttgttttgctttg

SEQ ID NO: 1024148 - DNA, 15 bp, Homo sapiens
tgtttgttttgcttt

SEQ ID NO: 1024149 - DNA, 15 bp, Homo sapiens
ttgtttgttttgctt

SEQ ID NO: 1024150 - DNA, 15 bp, Homo sapiens
tttgtttgttttgct

SEQ ID NO: 1024151 - DNA, 15 bp, Homo sapiens
ttttgtttgttttgc

SEQ ID NO: 1024152 - DNA, 15 bp, Homo sapiens
gttttgtttgttttg

SEQ ID NO: 1024153 - DNA, 15 bp, Homo sapiens
gtgttttgttttgtt

SEQ ID NO: 1024154 - DNA, 15 bp, Homo sapiens
tgtgttttgttttgt

SEQ ID NO: 1024155 - DNA, 15 bp, Homo sapiens
atgtgttttgttttg

SEQ ID NO: 1024156 - DNA, 15 bp, Homo sapiens
aatgtgttttgtttt

SEQ ID NO: 1024157 - DNA, 15 bp, Homo sapiens
caatgtgttttgttt

SEQ ID NO: 1024158 - DNA, 15 bp, Homo sapiens
acaatgtgttttgtt

SEQ ID NO: 1024159 - DNA, 15 bp, Homo sapiens
cacaatgtgttttgt

SEQ ID NO: 1024160 - DNA, 15 bp, Homo sapiens
ccacaatgtgttttg

SEQ ID NO: 1024161 - DNA, 15 bp, Homo sapiens
cccacaatgtgtttt

SEQ ID NO: 1024162 - DNA, 15 bp, Homo sapiens
acccacaatgtgttt

SEQ ID NO: 1024163 - DNA, 15 bp, Homo sapiens
aacccacaatgtgtt

SEQ ID NO: 1024164 - DNA, 15 bp, Homo sapiens
gaacccacaatgtgt

SEQ ID NO: 1024165 - DNA, 15 bp, Homo sapiens
tgaacccacaatgtg

SEQ ID NO: 1024166 - DNA, 15 bp, Homo sapiens
atgaacccacaatgt

SEQ ID NO: 1024167 - DNA, 15 bp, Homo sapiens
tatgaacccacaatg

SEQ ID NO: 1024168 - DNA, 15 bp, Homo sapiens
ttatgaacccacaat

SEQ ID NO: 1024169 - DNA, 15 bp, Homo sapiens
attatgaacccacaa

SEQ ID NO: 1024170 - DNA, 15 bp, Homo sapiens
tattatgaacccaca

SEQ ID NO: 1024171 - DNA, 15 bp, Homo sapiens
ctattatgaacccac

SEQ ID NO: 1024172 - DNA, 15 bp, Homo sapiens
tctattatgaaccca

SEQ ID NO: 1024173 - DNA, 15 bp, Homo sapiens
atctattatgaaccc

SEQ ID NO: 1024174 - DNA, 15 bp, Homo sapiens
tatctattatgaacc

SEQ ID NO: 1024175 - DNA, 15 bp, Homo sapiens
gtatctattatgaac

SEQ ID NO: 1024176 - DNA, 15 bp, Homo sapiens
agtatctattatgaa

SEQ ID NO: 1024177 - DNA, 15 bp, Homo sapiens
cagtatctattatga

SEQ ID NO: 1024178 - DNA, 15 bp, Homo sapiens
tcagtatctattatg

SEQ ID NO: 1024179 - DNA, 15 bp, Homo sapiens
atcagtatctattat

SEQ ID NO: 1024180 - DNA, 15 bp, Homo sapiens
gatcagtatctatta

SEQ ID NO: 1024181 - DNA, 15 bp, Homo sapiens
tgatcagtatctatt

SEQ ID NO: 1024182 - DNA, 15 bp, Homo sapiens
atgatcagtatctat

SEQ ID NO: 1024183 - DNA, 15 bp, Homo sapiens
gatgatcagtatcta

SEQ ID NO: 1024184 - DNA, 15 bp, Homo sapiens
tgatgatcagtatct

SEQ ID NO: 1024185 - DNA, 15 bp, Homo sapiens
ctgatgatcagtatc

SEQ ID NO: 1024186 - DNA, 15 bp, Homo sapiens
tctgatgatcagtat

SEQ ID NO: 1024187 - DNA, 15 bp, Homo sapiens
ctctgatgatcagta

SEQ ID NO: 1024188 - DNA, 15 bp, Homo sapiens
actctgatgatcagt

SEQ ID NO: 1024189 - DNA, 15 bp, Homo sapiens
tactctgatgatcag

SEQ ID NO: 1024190 - DNA, 15 bp, Homo sapiens
ctactctgatgatca

SEQ ID NO: 1024191 - DNA, 15 bp, Homo sapiens
cctactctgatgatc

SEQ ID NO: 1024192 - DNA, 15 bp, Homo sapiens
acctactctgatgat

SEQ ID NO: 1024193 - DNA, 15 bp, Homo sapiens
aacctactctgatga

SEQ ID NO: 1024194 - DNA, 15 bp, Homo sapiens
gaacctactctgatg

SEQ ID NO: 1024195 - DNA, 15 bp, Homo sapiens
agaacctactctgat

SEQ ID NO: 1024196 - DNA, 15 bp, Homo sapiens
tagaacctactctga

SEQ ID NO: 1024197 - DNA, 15 bp, Homo sapiens
ctagaacctactctg

SEQ ID NO: 1024198 - DNA, 15 bp, Homo sapiens
tctagaacctactct

SEQ ID NO: 1024199 - DNA, 15 bp, Homo sapiens
ttctagaacctactc

SEQ ID NO: 1024200 - DNA, 15 bp, Homo sapiens
cttctagaacctact

SEQ ID NO: 1024201 - DNA, 15 bp, Homo sapiens
ccttctagaacctac

SEQ ID NO: 1024202 - DNA, 15 bp, Homo sapiens
cccttctagaaccta

SEQ ID NO: 1024203 - DNA, 15 bp, Homo sapiens
acccttctagaacct

SEQ ID NO: 1024204 - DNA, 15 bp, Homo sapiens
aacccttctagaacc

SEQ ID NO: 1024205 - DNA, 15 bp, Homo sapiens
caacccttctagaac

SEQ ID NO: 1024206 - DNA, 15 bp, Homo sapiens
tcaacccttctagaa

SEQ ID NO: 1024207 - DNA, 15 bp, Homo sapiens
ctcaacccttctaga

SEQ ID NO: 1024208 - DNA, 15 bp, Homo sapiens
actcaacccttctag

SEQ ID NO: 1024209 - DNA, 15 bp, Homo sapiens
cactcaacccttcta

SEQ ID NO: 1024210 - DNA, 15 bp, Homo sapiens
tcactcaacccttct

SEQ ID NO: 1024211 - DNA, 15 bp, Homo sapiens
ttcactcaacccttc

SEQ ID NO: 1024212 - DNA, 15 bp, Homo sapiens
tttcactcaaccctt

SEQ ID NO: 1024213 - DNA, 15 bp, Homo sapiens
gtttcactcaaccct

SEQ ID NO: 1024214 - DNA, 15 bp, Homo sapiens
cgtttcactcaaccc

SEQ ID NO: 1024215 - DNA, 15 bp, Homo sapiens
tcgtttcactcaacc

SEQ ID NO: 1024216 - DNA, 15 bp, Homo sapiens
ctcgtttcactcaac

SEQ ID NO: 1024217 - DNA, 15 bp, Homo sapiens
actcgtttcactcaa

SEQ ID NO: 1024218 - DNA, 15 bp, Homo sapiens
gactcgtttcactca

SEQ ID NO: 1024219 - DNA, 15 bp, Homo sapiens
tgactcgtttcactc

SEQ ID NO: 1024220 - DNA, 15 bp, Homo sapiens
gtgactcgtttcact

SEQ ID NO: 1024221 - DNA, 15 bp, Homo sapiens
ggtgactcgtttcac

SEQ ID NO: 1024222 - DNA, 15 bp, Homo sapiens
tggtgactcgtttca

SEQ ID NO: 1024223 - DNA, 15 bp, Homo sapiens
atggtgactcgtttc

SEQ ID NO: 1024224 - DNA, 15 bp, Homo sapiens
aatggtgactcgttt

SEQ ID NO: 1024225 - DNA, 15 bp, Homo sapiens
caatggtgactcgtt

SEQ ID NO: 1024226 - DNA, 15 bp, Homo sapiens
acaatggtgactcgt

SEQ ID NO: 1024227 - DNA, 15 bp, Homo sapiens
aacaatggtgactcg

SEQ ID NO: 1024228 - DNA, 15 bp, Homo sapiens
aaacaatggtgactc

SEQ ID NO: 1024229 - DNA, 15 bp, Homo sapiens
taaacaatggtgact

SEQ ID NO: 1024230 - DNA, 15 bp, Homo sapiens
ataaacaatggtgac

SEQ ID NO: 1024231 - DNA, 15 bp, Homo sapiens
aataaacaatggtga

SEQ ID NO: 1024232 - DNA, 15 bp, Homo sapiens
gaataaacaatggtg

SEQ ID NO: 1024233 - DNA, 15 bp, Homo sapiens
ggaataaacaatggt

SEQ ID NO: 1024234 - DNA, 15 bp, Homo sapiens
gggaataaacaatgg

SEQ ID NO: 1024235 - DNA, 15 bp, Homo sapiens
agggaataaacaatg

SEQ ID NO: 1024236 - DNA, 15 bp, Homo sapiens
aagggaataaacaat

SEQ ID NO: 1024237 - DNA, 15 bp, Homo sapiens
aaagggaataaacaa

SEQ ID NO: 1024238 - DNA, 15 bp, Homo sapiens
aaaagggaataaaca

SEQ ID NO: 1024239 - DNA, 15 bp, Homo sapiens
taaaagggaataaac

SEQ ID NO: 1024240 - DNA, 15 bp, Homo sapiens
gtaaaagggaataaa

SEQ ID NO: 1024241 - DNA, 15 bp, Homo sapiens
agtaaaagggaataa

SEQ ID NO: 1024242 - DNA, 15 bp, Homo sapiens
aagtaaaagggaata

SEQ ID NO: 1024243 - DNA, 15 bp, Homo sapiens
taagtaaaagggaat

SEQ ID NO: 1024244 - DNA, 15 bp, Homo sapiens
gtaagtaaaagggaa

SEQ ID NO: 1024245 - DNA, 15 bp, Homo sapiens
agtaagtaaaaggga

SEQ ID NO: 1024246 - DNA, 15 bp, Homo sapiens
aagtaagtaaaaggg

SEQ ID NO: 1024247 - DNA, 15 bp, Homo sapiens
caagtaagtaaaagg

SEQ ID NO: 1024248 - DNA, 15 bp, Homo sapiens
ccaagtaagtaaaag

SEQ ID NO: 1024249 - DNA, 15 bp, Homo sapiens
tccaagtaagtaaaa

SEQ ID NO: 1024250 - DNA, 15 bp, Homo sapiens
ctccaagtaagtaaa

SEQ ID NO: 1024251 - DNA, 15 bp, Homo sapiens
tctccaagtaagtaa

SEQ ID NO: 1024252 - DNA, 15 bp, Homo sapiens
ttctccaagtaagta

SEQ ID NO: 1024253 - DNA, 15 bp, Homo sapiens
tttctccaagtaagt

SEQ ID NO: 1024254 - DNA, 15 bp, Homo sapiens
gtttctccaagtaag

SEQ ID NO: 1024255 - DNA, 15 bp, Homo sapiens
ggtttctccaagtaa

SEQ ID NO: 1024256 - DNA, 15 bp, Homo sapiens
tggtttctccaagta

SEQ ID NO: 1024257 - DNA, 15 bp, Homo sapiens
ttggtttctccaagt

SEQ ID NO: 1024258 - DNA, 15 bp, Homo sapiens
tttggtttctccaag

SEQ ID NO: 1024259 - DNA, 15 bp, Homo sapiens
atttggtttctccaa

SEQ ID NO: 1024260 - DNA, 15 bp, Homo sapiens
gatttggtttctcca

SEQ ID NO: 1024261 - DNA, 15 bp, Homo sapiens
tgatttggtttctcc

SEQ ID NO: 1024262 - DNA, 15 bp, Homo sapiens
atgatttggtttctc

SEQ ID NO: 1024263 - DNA, 15 bp, Homo sapiens
catgatttggtttct

SEQ ID NO: 1024264 - DNA, 15 bp, Homo sapiens
ccatgatttggtttc

SEQ ID NO: 1024265 - DNA, 15 bp, Homo sapiens
gccatgatttggttt

SEQ ID NO: 1024266 - DNA, 15 bp, Homo sapiens
tgccatgatttggtt

SEQ ID NO: 1024267 - DNA, 15 bp, Homo sapiens
ttgccatgatttggt

SEQ ID NO: 1024268 - DNA, 15 bp, Homo sapiens
tttgccatgatttgg

SEQ ID NO: 1024269 - DNA, 15 bp, Homo sapiens
ttttgccatgatttg

SEQ ID NO: 1024270 - DNA, 15 bp, Homo sapiens
attttgccatgattt

SEQ ID NO: 1024271 - DNA, 15 bp, Homo sapiens
tattttgccatgatt

SEQ ID NO: 1024272 - DNA, 15 bp, Homo sapiens
atattttgccatgat

SEQ ID NO: 1024273 - DNA, 15 bp, Homo sapiens
aatattttgccatga

SEQ ID NO: 1024274 - DNA, 15 bp, Homo sapiens
taatattttgccatg

SEQ ID NO: 1024275 - DNA, 15 bp, Homo sapiens
ataatattttgccat

SEQ ID NO: 1024276 - DNA, 15 bp, Homo sapiens
aataatattttgcca

SEQ ID NO: 1024277 - DNA, 15 bp, Homo sapiens
gaataatattttgcc

SEQ ID NO: 1024278 - DNA, 15 bp, Homo sapiens
ggaataatattttgc

SEQ ID NO: 1024279 - DNA, 15 bp, Homo sapiens
tggaataatattttg

SEQ ID NO: 1024280 - DNA, 15 bp, Homo sapiens
gtggaataatatttt

SEQ ID NO: 1024281 - DNA, 15 bp, Homo sapiens
tgtggaataatattt

SEQ ID NO: 1024282 - DNA, 15 bp, Homo sapiens
ctgtggaataatatt

SEQ ID NO: 1024283 - DNA, 15 bp, Homo sapiens
actgtggaataatat

SEQ ID NO: 1024284 - DNA, 15 bp, Homo sapiens
aactgtggaataata

SEQ ID NO: 1024285 - DNA, 15 bp, Homo sapiens
caactgtggaataat

SEQ ID NO: 1024286 - DNA, 15 bp, Homo sapiens
acaactgtggaataa

SEQ ID NO: 1024287 - DNA, 15 bp, Homo sapiens
tacaactgtggaata

SEQ ID NO: 1024288 - DNA, 15 bp, Homo sapiens
atacaactgtggaat

SEQ ID NO: 1024289 - DNA, 15 bp, Homo sapiens
aatacaactgtggaa

SEQ ID NO: 1024290 - DNA, 15 bp, Homo sapiens
caatacaactgtgga

SEQ ID NO: 1024291 - DNA, 15 bp, Homo sapiens
ccaatacaactgtgg

SEQ ID NO: 1024292 - DNA, 15 bp, Homo sapiens
accaatacaactgtg

SEQ ID NO: 1024293 - DNA, 15 bp, Homo sapiens
aaccaatacaactgt

SEQ ID NO: 1024294 - DNA, 15 bp, Homo sapiens
aaaccaatacaactg

SEQ ID NO: 1024295 - DNA, 15 bp, Homo sapiens
taaaccaatacaact

SEQ ID NO: 1024296 - DNA, 15 bp, Homo sapiens
gtaaaccaatacaac

SEQ ID NO: 1024297 - DNA, 15 bp, Homo sapiens
agtaaaccaatacaa

SEQ ID NO: 1024298 - DNA, 15 bp, Homo sapiens
tagtaaaccaataca

SEQ ID NO: 1024299 - DNA, 15 bp, Homo sapiens
ctagtaaaccaatac

SEQ ID NO: 1024300 - DNA, 15 bp, Homo sapiens
tctagtaaaccaata

SEQ ID NO: 1024301 - DNA, 15 bp, Homo sapiens
ctctagtaaaccaat

SEQ ID NO: 1024302 - DNA, 15 bp, Homo sapiens
gctctagtaaaccaa

SEQ ID NO: 1024303 - DNA, 15 bp, Homo sapiens
agctctagtaaacca

SEQ ID NO: 1024304 - DNA, 15 bp, Homo sapiens
cagctctagtaaacc

SEQ ID NO: 1024305 - DNA, 15 bp, Homo sapiens
gcagctctagtaaac

SEQ ID NO: 1024306 - DNA, 15 bp, Homo sapiens
ggcagctctagtaaa

SEQ ID NO: 1024307 - DNA, 15 bp, Homo sapiens
tggcagctctagtaa

SEQ ID NO: 1024308 - DNA, 15 bp, Homo sapiens
atggcagctctagta

SEQ ID NO: 1024309 - DNA, 15 bp, Homo sapiens
tatggcagctctagt

SEQ ID NO: 1024310 - DNA, 15 bp, Homo sapiens
gtatggcagctctag

SEQ ID NO: 1024311 - DNA, 15 bp, Homo sapiens
tgtatggcagctcta

SEQ ID NO: 1024312 - DNA, 15 bp, Homo sapiens
ctgtatggcagctct

SEQ ID NO: 1024313 - DNA, 15 bp, Homo sapiens
tctgtatggcagctc

SEQ ID NO: 1024314 - DNA, 15 bp, Homo sapiens
ctctgtatggcagct

SEQ ID NO: 1024315 - DNA, 15 bp, Homo sapiens
actctgtatggcagc

SEQ ID NO: 1024316 - DNA, 15 bp, Homo sapiens
tactctgtatggcag

SEQ ID NO: 1024317 - DNA, 15 bp, Homo sapiens
gtactctgtatggca

SEQ ID NO: 1024318 - DNA, 15 bp, Homo sapiens
ggtactctgtatggc

SEQ ID NO: 1024319 - DNA, 15 bp, Homo sapiens
tggtactctgtatgg

SEQ ID NO: 1024320 - DNA, 15 bp, Homo sapiens
atggtactctgtatg

SEQ ID NO: 1024321 - DNA, 15 bp, Homo sapiens
tatggtactctgtat

SEQ ID NO: 1024322 - DNA, 15 bp, Homo sapiens
ctatggtactctgta

SEQ ID NO: 1024323 - DNA, 15 bp, Homo sapiens
tctatggtactctgt

SEQ ID NO: 1024324 - DNA, 15 bp, Homo sapiens
atctatggtactctg

SEQ ID NO: 1024325 - DNA, 15 bp, Homo sapiens
aatctatggtactct

SEQ ID NO: 1024326 - DNA, 15 bp, Homo sapiens
aaatctatggtactc

SEQ ID NO: 1024327 - DNA, 15 bp, Homo sapiens
gaaatctatggtact

SEQ ID NO: 1024328 - DNA, 15 bp, Homo sapiens
cgaaatctatggtac

SEQ ID NO: 1024329 - DNA, 15 bp, Homo sapiens
acgaaatctatggta

SEQ ID NO: 1024330 - DNA, 15 bp, Homo sapiens
cacgaaatctatggt

SEQ ID NO: 1024331 - DNA, 15 bp, Homo sapiens
ccacgaaatctatgg

SEQ ID NO: 1024332 - DNA, 15 bp, Homo sapiens
gccacgaaatctatg

SEQ ID NO: 1024333 - DNA, 15 bp, Homo sapiens
agccacgaaatctat

SEQ ID NO: 1024334 - DNA, 15 bp, Homo sapiens
cagccacgaaatcta

SEQ ID NO: 1024335 - DNA, 15 bp, Homo sapiens
ccagccacgaaatct

SEQ ID NO: 1024336 - DNA, 15 bp, Homo sapiens
tccagccacgaaatc

SEQ ID NO: 1024337 - DNA, 15 bp, Homo sapiens
ctccagccacgaaat

SEQ ID NO: 1024338 - DNA, 15 bp, Homo sapiens
gctccagccacgaaa

SEQ ID NO: 1024339 - DNA, 15 bp, Homo sapiens
tgctccagccacgaa

SEQ ID NO: 1024340 - DNA, 15 bp, Homo sapiens
atgctccagccacga

SEQ ID NO: 1024341 - DNA, 15 bp, Homo sapiens
gatgctccagccacg

SEQ ID NO: 1024342 - DNA, 15 bp, Homo sapiens
tgatgctccagccac

SEQ ID NO: 1024343 - DNA, 15 bp, Homo sapiens
ctgatgctccagcca

SEQ ID NO: 1024344 - DNA, 15 bp, Homo sapiens
tctgatgctccagcc

SEQ ID NO: 1024345 - DNA, 15 bp, Homo sapiens
ttctgatgctccagc

SEQ ID NO: 1024346 - DNA, 15 bp, Homo sapiens
tttctgatgctccag

SEQ ID NO: 1024347 - DNA, 15 bp, Homo sapiens
atttctgatgctcca

SEQ ID NO: 1024348 - DNA, 15 bp, Homo sapiens
aatttctgatgctcc

SEQ ID NO: 1024349 - DNA, 15 bp, Homo sapiens
caatttctgatgctc

SEQ ID NO: 1024350 - DNA, 15 bp, Homo sapiens
tcaatttctgatgct

SEQ ID NO: 1024351 - DNA, 15 bp, Homo sapiens
atcaatttctgatgc

SEQ ID NO: 1024352 - DNA, 15 bp, Homo sapiens
aatcaatttctgatg

SEQ ID NO: 1024353 - DNA, 15 bp, Homo sapiens
aaatcaatttctgat

SEQ ID NO: 1024354 - DNA, 15 bp, Homo sapiens
gaaatcaatttctga

SEQ ID NO: 1024355 - DNA, 15 bp, Homo sapiens
ggaaatcaatttctg

SEQ ID NO: 1024356 - DNA, 15 bp, Homo sapiens
aggaaatcaatttct

SEQ ID NO: 1024357 - DNA, 15 bp, Homo sapiens
gaggaaatcaatttc

SEQ ID NO: 1024358 - DNA, 15 bp, Homo sapiens
cgaggaaatcaattt

SEQ ID NO: 1024359 - DNA, 15 bp, Homo sapiens
tcgaggaaatcaatt

SEQ ID NO: 1024360 - DNA, 15 bp, Homo sapiens
ttcgaggaaatcaat

SEQ ID NO: 1024361 - DNA, 15 bp, Homo sapiens
cttcgaggaaatcaa

SEQ ID NO: 1024362 - DNA, 15 bp, Homo sapiens
acttcgaggaaatca

SEQ ID NO: 1024363 - DNA, 15 bp, Homo sapiens
aacttcgaggaaatc

SEQ ID NO: 1024364 - DNA, 15 bp, Homo sapiens
gaacttcgaggaaat

SEQ ID NO: 1024365 - DNA, 15 bp, Homo sapiens
agaacttcgaggaaa

SEQ ID NO: 1024366 - DNA, 15 bp, Homo sapiens
cagaacttcgaggaa

SEQ ID NO: 1024367 - DNA, 15 bp, Homo sapiens
ccagaacttcgagga

SEQ ID NO: 1024368 - DNA, 15 bp, Homo sapiens
tccagaacttcgagg

SEQ ID NO: 1024369 - DNA, 15 bp, Homo sapiens
ctccagaacttcgag

SEQ ID NO: 1024370 - DNA, 15 bp, Homo sapiens
cctccagaacttcga

SEQ ID NO: 1024371 - DNA, 15 bp, Homo sapiens
gcctccagaacttcg

SEQ ID NO: 1024372 - DNA, 15 bp, Homo sapiens
agcctccagaacttc

SEQ ID NO: 1024373 - DNA, 15 bp, Homo sapiens
cagcctccagaactt

SEQ ID NO: 1024374 - DNA, 15 bp, Homo sapiens
tcagcctccagaact

SEQ ID NO: 1024375 - DNA, 15 bp, Homo sapiens
ttcagcctccagaac

SEQ ID NO: 1024376 - DNA, 15 bp, Homo sapiens
tttcagcctccagaa

SEQ ID NO: 1024377 - DNA, 15 bp, Homo sapiens
ctttcagcctccaga

SEQ ID NO: 1024378 - DNA, 15 bp, Homo sapiens
actttcagcctccag

SEQ ID NO: 1024379 - DNA, 15 bp, Homo sapiens
gactttcagcctcca

SEQ ID NO: 1024380 - DNA, 15 bp, Homo sapiens
ggactttcagcctcc

SEQ ID NO: 1024381 - DNA, 15 bp, Homo sapiens
tggactttcagcctc

SEQ ID NO: 1024382 - DNA, 15 bp, Homo sapiens
atggactttcagcct

SEQ ID NO: 1024383 - DNA, 15 bp, Homo sapiens
catggactttcagcc

SEQ ID NO: 1024384 - DNA, 15 bp, Homo sapiens
tcatggactttcagc

SEQ ID NO: 1024385 - DNA, 15 bp, Homo sapiens
atcatggactttcag

SEQ ID NO: 1024386 - DNA, 15 bp, Homo sapiens
gatcatggactttca

SEQ ID NO: 1024387 - DNA, 15 bp, Homo sapiens
tgatcatggactttc

SEQ ID NO: 1024388 - DNA, 15 bp, Homo sapiens
ttgatcatggacttt

SEQ ID NO: 1024389 - DNA, 15 bp, Homo sapiens
cttgatcatggactt

SEQ ID NO: 1024390 - DNA, 15 bp, Homo sapiens
acttgatcatggact

SEQ ID NO: 1024391 - DNA, 15 bp, Homo sapiens
aacttgatcatggac

SEQ ID NO: 1024392 - DNA, 15 bp, Homo sapiens
taacttgatcatgga

SEQ ID NO: 1024393 - DNA, 15 bp, Homo sapiens
ataacttgatcatgg

SEQ ID NO: 1024394 - DNA, 15 bp, Homo sapiens
gataacttgatcatg

SEQ ID NO: 1024395 - DNA, 15 bp, Homo sapiens
tgataacttgatcat

SEQ ID NO: 1024396 - DNA, 15 bp, Homo sapiens
ctgataacttgatca

SEQ ID NO: 1024397 - DNA, 15 bp, Homo sapiens
gctgataacttgatc

SEQ ID NO: 1024398 - DNA, 15 bp, Homo sapiens
tgctgataacttgat

SEQ ID NO: 1024399 - DNA, 15 bp, Homo sapiens
ttgctgataacttga

SEQ ID NO: 1024400 - DNA, 15 bp, Homo sapiens
cttgctgataacttg

SEQ ID NO: 1024401 - DNA, 15 bp, Homo sapiens
acttgctgataactt

SEQ ID NO: 1024402 - DNA, 15 bp, Homo sapiens
aacttgctgataact

SEQ ID NO: 1024403 - DNA, 15 bp, Homo sapiens
caacttgctgataac

SEQ ID NO: 1024404 - DNA, 15 bp, Homo sapiens
tcaacttgctgataa

SEQ ID NO: 1024405 - DNA, 15 bp, Homo sapiens
atcaacttgctgata

SEQ ID NO: 1024406 - DNA, 15 bp, Homo sapiens
catcaacttgctgat

SEQ ID NO: 1024407 - DNA, 15 bp, Homo sapiens
acatcaacttgctga

SEQ ID NO: 1024408 - DNA, 15 bp, Homo sapiens
gacatcaacttgctg

SEQ ID NO: 1024409 - DNA, 15 bp, Homo sapiens
agacatcaacttgct

SEQ ID NO: 1024410 - DNA, 15 bp, Homo sapiens
aagacatcaacttgc

SEQ ID NO: 1024411 - DNA, 15 bp, Homo sapiens
gaagacatcaacttg

SEQ ID NO: 1024412 - DNA, 15 bp, Homo sapiens
agaagacatcaactt

SEQ ID NO: 1024413 - DNA, 15 bp, Homo sapiens
cagaagacatcaact

SEQ ID NO: 1024414 - DNA, 15 bp, Homo sapiens
tcagaagacatcaac

SEQ ID NO: 1024415 - DNA, 15 bp, Homo sapiens
ctcagaagacatcaa

SEQ ID NO: 1024416 - DNA, 15 bp, Homo sapiens
cctcagaagacatca

SEQ ID NO: 1024417 - DNA, 15 bp, Homo sapiens
acctcagaagacatc

SEQ ID NO: 1024418 - DNA, 15 bp, Homo sapiens
gacctcagaagacat

SEQ ID NO: 1024419 - DNA, 15 bp, Homo sapiens
agacctcagaagaca

SEQ ID NO: 1024420 - DNA, 15 bp, Homo sapiens
gagacctcagaagac

SEQ ID NO: 1024421 - DNA, 15 bp, Homo sapiens
ggagacctcagaaga

SEQ ID NO: 1024422 - DNA, 15 bp, Homo sapiens
gggagacctcagaag

SEQ ID NO: 1024423 - DNA, 15 bp, Homo sapiens
agggagacctcagaa

SEQ ID NO: 1024424 - DNA, 15 bp, Homo sapiens
aagggagacctcaga

SEQ ID NO: 1024425 - DNA, 15 bp, Homo sapiens
gaagggagacctcag

SEQ ID NO: 1024426 - DNA, 15 bp, Homo sapiens
agaagggagacctca

SEQ ID NO: 1024427 - DNA, 15 bp, Homo sapiens
aagaagggagacctc

SEQ ID NO: 1024428 - DNA, 15 bp, Homo sapiens
caagaagggagacct

SEQ ID NO: 1024429 - DNA, 15 bp, Homo sapiens
ccaagaagggagacc

SEQ ID NO: 1024430 - DNA, 15 bp, Homo sapiens
gccaagaagggagac

SEQ ID NO: 1024431 - DNA, 15 bp, Homo sapiens
agccaagaagggaga

SEQ ID NO: 1024432 - DNA, 15 bp, Homo sapiens
tagccaagaagggag

SEQ ID NO: 1024433 - DNA, 15 bp, Homo sapiens
ctagccaagaaggga

SEQ ID NO: 1024434 - DNA, 15 bp, Homo sapiens
actagccaagaaggg

SEQ ID NO: 1024435 - DNA, 15 bp, Homo sapiens
gactagccaagaagg

SEQ ID NO: 1024436 - DNA, 15 bp, Homo sapiens
cgactagccaagaag

SEQ ID NO: 1024437 - DNA, 15 bp, Homo sapiens
ccgactagccaagaa

SEQ ID NO: 1024438 - DNA, 15 bp, Homo sapiens
accgactagccaaga

SEQ ID NO: 1024439 - DNA, 15 bp, Homo sapiens
caccgactagccaag

SEQ ID NO: 1024440 - DNA, 15 bp, Homo sapiens
ccaccgactagccaa

SEQ ID NO: 1024441 - DNA, 15 bp, Homo sapiens
gccaccgactagcca

SEQ ID NO: 1024442 - DNA, 15 bp, Homo sapiens
agccaccgactagcc

SEQ ID NO: 1024443 - DNA, 15 bp, Homo sapiens
cagccaccgactagc

SEQ ID NO: 1024444 - DNA, 15 bp, Homo sapiens
gcagccaccgactag

SEQ ID NO: 1024445 - DNA, 15 bp, Homo sapiens
agcagccaccgacta

SEQ ID NO: 1024446 - DNA, 15 bp, Homo sapiens
aagcagccaccgact

SEQ ID NO: 1024447 - DNA, 15 bp, Homo sapiens
aaagcagccaccgac

SEQ ID NO: 1024448 - DNA, 15 bp, Homo sapiens
aaaagcagccaccga

SEQ ID NO: 1024449 - DNA, 15 bp, Homo sapiens
caaaagcagccaccg

SEQ ID NO: 1024450 - DNA, 15 bp, Homo sapiens
gcaaaagcagccacc

SEQ ID NO: 1024451 - DNA, 15 bp, Homo sapiens
acagtgcaaaagcag

SEQ ID NO: 1024452 - DNA, 15 bp, Homo sapiens
cacagtgcaaaagca

SEQ ID NO: 1024453 - DNA, 15 bp, Homo sapiens
acacagtgcaaaagc

SEQ ID NO: 1024454 - DNA, 15 bp, Homo sapiens
cacacagtgcaaaag

SEQ ID NO: 1024455 - DNA, 15 bp, Homo sapiens
gcacacagtgcaaaa

SEQ ID NO: 1024456 - DNA, 15 bp, Homo sapiens
agcacacagtgcaaa

SEQ ID NO: 1024457 - DNA, 15 bp, Homo sapiens
gagcacacagtgcaa

SEQ ID NO: 1024458 - DNA, 15 bp, Homo sapiens
tgagcacacagtgca

SEQ ID NO: 1024459 - DNA, 15 bp, Homo sapiens
gtgagcacacagtgc

SEQ ID NO: 1024460 - DNA, 15 bp, Homo sapiens
tgtgagcacacagtg

SEQ ID NO: 1024461 - DNA, 15 bp, Homo sapiens
gtgtgagcacacagt

SEQ ID NO: 1024462 - DNA, 15 bp, Homo sapiens
cgtgtgagcacacag

SEQ ID NO: 1024463 - DNA, 15 bp, Homo sapiens
ccgtgtgagcacaca

SEQ ID NO: 1024464 - DNA, 15 bp, Homo sapiens
cccgtgtgagcacac

SEQ ID NO: 1024465 - DNA, 15 bp, Homo sapiens
gcccgtgtgagcaca

SEQ ID NO: 1024466 - DNA, 15 bp, Homo sapiens
agcccgtgtgagcac

SEQ ID NO: 1024467 - DNA, 15 bp, Homo sapiens
aagcccgtgtgagca

SEQ ID NO: 1024468 - DNA, 15 bp, Homo sapiens
aaagcccgtgtgagc

SEQ ID NO: 1024469 - DNA, 15 bp, Homo sapiens
gaaagcccgtgtgag

SEQ ID NO: 1024470 - DNA, 15 bp, Homo sapiens
ggaaagcccgtgtga

SEQ ID NO: 1024471 - DNA, 15 bp, Homo sapiens
aggaaagcccgtgtg

SEQ ID NO: 1024472 - DNA, 15 bp, Homo sapiens
gaggaaagcccgtgt

SEQ ID NO: 1024473 - DNA, 15 bp, Homo sapiens
agaggaaagcccgtg

SEQ ID NO: 1024474 - DNA, 15 bp, Homo sapiens
cagaggaaagcccgt

SEQ ID NO: 1024475 - DNA, 15 bp, Homo sapiens
acagaggaaagcccg

SEQ ID NO: 1024476 - DNA, 15 bp, Homo sapiens
tacagaggaaagccc

SEQ ID NO: 1024477 - DNA, 15 bp, Homo sapiens
ttacagaggaaagcc

SEQ ID NO: 1024478 - DNA, 15 bp, Homo sapiens
attacagaggaaagc

SEQ ID NO: 1024479 - DNA, 15 bp, Homo sapiens
gattacagaggaaag

SEQ ID NO: 1024480 - DNA, 15 bp, Homo sapiens
cgattacagaggaaa

SEQ ID NO: 1024481 - DNA, 15 bp, Homo sapiens
gcgattacagaggaa

SEQ ID NO: 1024482 - DNA, 15 bp, Homo sapiens
tgcgattacagagga

SEQ ID NO: 1024483 - DNA, 15 bp, Homo sapiens
gtgcgattacagagg

SEQ ID NO: 1024484 - DNA, 15 bp, Homo sapiens
tgtgcgattacagag

SEQ ID NO: 1024485 - DNA, 15 bp, Homo sapiens
atgtgcgattacaga

SEQ ID NO: 1024486 - DNA, 15 bp, Homo sapiens
catgtgcgattacag

SEQ ID NO: 1024487 - DNA, 15 bp, Homo sapiens
acatgtgcgattaca

SEQ ID NO: 1024488 - DNA, 15 bp, Homo sapiens
gacatgtgcgattac

SEQ ID NO: 1024489 - DNA, 15 bp, Homo sapiens
agacatgtgcgatta

SEQ ID NO: 1024490 - DNA, 15 bp, Homo sapiens
cagacatgtgcgatt

SEQ ID NO: 1024491 - DNA, 15 bp, Homo sapiens
acagacatgtgcgat

SEQ ID NO: 1024492 - DNA, 15 bp, Homo sapiens
cacagacatgtgcga

SEQ ID NO: 1024493 - DNA, 15 bp, Homo sapiens
tcacagacatgtgcg

SEQ ID NO: 1024494 - DNA, 15 bp, Homo sapiens
gtcacagacatgtgc

SEQ ID NO: 1024495 - DNA, 15 bp, Homo sapiens
ggtcacagacatgtg

SEQ ID NO: 1024496 - DNA, 15 bp, Homo sapiens
aggtcacagacatgt

SEQ ID NO: 1024497 - DNA, 15 bp, Homo sapiens
taggtcacagacatg

SEQ ID NO: 1024498 - DNA, 15 bp, Homo sapiens
ttaggtcacagacat

SEQ ID NO: 1024499 - DNA, 15 bp, Homo sapiens
attaggtcacagaca

SEQ ID NO: 1024500 - DNA, 15 bp, Homo sapiens
gattaggtcacagac

SEQ ID NO: 1024501 - DNA, 15 bp, Homo sapiens
agattaggtcacaga

SEQ ID NO: 1024502 - DNA, 15 bp, Homo sapiens
gagattaggtcacag

SEQ ID NO: 1024503 - DNA, 15 bp, Homo sapiens
ggagattaggtcaca

SEQ ID NO: 1024504 - DNA, 15 bp, Homo sapiens
aggagattaggtcac

SEQ ID NO: 1024505 - DNA, 15 bp, Homo sapiens
gaggagattaggtca

SEQ ID NO: 1024506 - DNA, 15 bp, Homo sapiens
agaggagattaggtc

SEQ ID NO: 1024507 - DNA, 15 bp, Homo sapiens
aagaggagattaggt

SEQ ID NO: 1024508 - DNA, 15 bp, Homo sapiens
gaagaggagattagg

SEQ ID NO: 1024509 - DNA, 15 bp, Homo sapiens
agaagaggagattag

SEQ ID NO: 1024510 - DNA, 15 bp, Homo sapiens
aagaagaggagatta

SEQ ID NO: 1024511 - DNA, 15 bp, Homo sapiens
taagaagaggagatt

SEQ ID NO: 1024512 - DNA, 15 bp, Homo sapiens
ataagaagaggagat

SEQ ID NO: 1024513 - DNA, 15 bp, Homo sapiens
tataagaagaggaga

SEQ ID NO: 1024514 - DNA, 15 bp, Homo sapiens
ttataagaagaggag

SEQ ID NO: 1024515 - DNA, 15 bp, Homo sapiens
cttataagaagagga

SEQ ID NO: 1024516 - DNA, 15 bp, Homo sapiens
ccttataagaagagg

SEQ ID NO: 1024517 - DNA, 15 bp, Homo sapiens
tccttataagaagag

SEQ ID NO: 1024518 - DNA, 15 bp, Homo sapiens
gtccttataagaaga

SEQ ID NO: 1024519 - DNA, 15 bp, Homo sapiens
tgtccttataagaag

SEQ ID NO: 1024520 - DNA, 15 bp, Homo sapiens
gtgtccttataagaa

SEQ ID NO: 1024521 - DNA, 15 bp, Homo sapiens
ggtgtccttataaga

SEQ ID NO: 1024522 - DNA, 15 bp, Homo sapiens
tggtgtccttataag

SEQ ID NO: 1024523 - DNA, 15 bp, Homo sapiens
ctggtgtccttataa

SEQ ID NO: 1024524 - DNA, 15 bp, Homo sapiens
actggtgtccttata

SEQ ID NO: 1024525 - DNA, 15 bp, Homo sapiens
gactggtgtccttat

SEQ ID NO: 1024526 - DNA, 15 bp, Homo sapiens
tgactggtgtcctta

SEQ ID NO: 1024527 - DNA, 15 bp, Homo sapiens
atgactggtgtcctt

SEQ ID NO: 1024528 - DNA, 15 bp, Homo sapiens
tatgactggtgtcct

SEQ ID NO: 1024529 - DNA, 15 bp, Homo sapiens
ctatgactggtgtcc

SEQ ID NO: 1024530 - DNA, 15 bp, Homo sapiens
actatgactggtgtc

SEQ ID NO: 1024531 - DNA, 15 bp, Homo sapiens
cactatgactggtgt

SEQ ID NO: 1024532 - DNA, 15 bp, Homo sapiens
ccactatgactggtg

SEQ ID NO: 1024533 - DNA, 15 bp, Homo sapiens
tccactatgactggt

SEQ ID NO: 1024534 - DNA, 15 bp, Homo sapiens
atccactatgactgg

SEQ ID NO: 1024535 - DNA, 15 bp, Homo sapiens
tatccactatgactg

SEQ ID NO: 1024536 - DNA, 15 bp, Homo sapiens
ttatccactatgact

SEQ ID NO: 1024537 - DNA, 15 bp, Homo sapiens
attatccactatgac

SEQ ID NO: 1024538 - DNA, 15 bp, Homo sapiens
cattatccactatga

SEQ ID NO: 1024539 - DNA, 15 bp, Homo sapiens
ccattatccactatg

SEQ ID NO: 1024540 - DNA, 15 bp, Homo sapiens
gccattatccactat

SEQ ID NO: 1024541 - DNA, 15 bp, Homo sapiens
ggccattatccacta

SEQ ID NO: 1024542 - DNA, 15 bp, Homo sapiens
gggccattatccact

SEQ ID NO: 1024543 - DNA, 15 bp, Homo sapiens
tgggccattatccac

SEQ ID NO: 1024544 - DNA, 15 bp, Homo sapiens
gtgggccattatcca

SEQ ID NO: 1024545 - DNA, 15 bp, Homo sapiens
ggtgggccattatcc

SEQ ID NO: 1024546 - DNA, 15 bp, Homo sapiens
gggtgggccattatc

SEQ ID NO: 1024547 - DNA, 15 bp, Homo sapiens
agggtgggccattat

SEQ ID NO: 1024548 - DNA, 15 bp, Homo sapiens
tagggtgggccatta

SEQ ID NO: 1024549 - DNA, 15 bp, Homo sapiens
atagggtgggccatt

SEQ ID NO: 1024550 - DNA, 15 bp, Homo sapiens
catagggtgggccat

SEQ ID NO: 1024551 - DNA, 15 bp, Homo sapiens
tcatagggtgggcca

SEQ ID NO: 1024552 - DNA, 15 bp, Homo sapiens
atcatagggtgggcc

SEQ ID NO: 1024553 - DNA, 15 bp, Homo sapiens
gatcatagggtgggc

SEQ ID NO: 1024554 - DNA, 15 bp, Homo sapiens
agatcatagggtggg

SEQ ID NO: 1024555 - DNA, 15 bp, Homo sapiens
gagatcatagggtgg

SEQ ID NO: 1024556 - DNA, 15 bp, Homo sapiens
tgagatcatagggtg

SEQ ID NO: 1024557 - DNA, 15 bp, Homo sapiens
atgagatcatagggt

SEQ ID NO: 1024558 - DNA, 15 bp, Homo sapiens
aatgagatcataggg

SEQ ID NO: 1024559 - DNA, 15 bp, Homo sapiens
aaatgagatcatagg

SEQ ID NO: 1024560 - DNA, 15 bp, Homo sapiens
aaaatgagatcatag

SEQ ID NO: 1024561 - DNA, 15 bp, Homo sapiens
taaaatgagatcata

SEQ ID NO: 1024562 - DNA, 15 bp, Homo sapiens
gtaaaatgagatcat

SEQ ID NO: 1024563 - DNA, 15 bp, Homo sapiens
ggtaaaatgagatca

SEQ ID NO: 1024564 - DNA, 15 bp, Homo sapiens
aggtaaaatgagatc

SEQ ID NO: 1024565 - DNA, 15 bp, Homo sapiens
aaggtaaaatgagat

SEQ ID NO: 1024566 - DNA, 15 bp, Homo sapiens
caaggtaaaatgaga

SEQ ID NO: 1024567 - DNA, 15 bp, Homo sapiens
acaaggtaaaatgag

SEQ ID NO: 1024568 - DNA, 15 bp, Homo sapiens
aacaaggtaaaatga

SEQ ID NO: 1024569 - DNA, 15 bp, Homo sapiens
gaacaaggtaaaatg

SEQ ID NO: 1024570 - DNA, 15 bp, Homo sapiens
tgaacaaggtaaaat

SEQ ID NO: 1024571 - DNA, 15 bp, Homo sapiens
gtgaacaaggtaaaa

SEQ ID NO: 1024572 - DNA, 15 bp, Homo sapiens
ggtgaacaaggtaaa

SEQ ID NO: 1024573 - DNA, 15 bp, Homo sapiens
gggtgaacaaggtaa

SEQ ID NO: 1024574 - DNA, 15 bp, Homo sapiens
agggtgaacaaggta

SEQ ID NO: 1024575 - DNA, 15 bp, Homo sapiens
aagggtgaacaaggt

SEQ ID NO: 1024576 - DNA, 15 bp, Homo sapiens
aaagggtgaacaagg

SEQ ID NO: 1024577 - DNA, 15 bp, Homo sapiens
gaaagggtgaacaag

SEQ ID NO: 1024578 - DNA, 15 bp, Homo sapiens
agaaagggtgaacaa

SEQ ID NO: 1024579 - DNA, 15 bp, Homo sapiens
tagaaagggtgaaca

SEQ ID NO: 1024580 - DNA, 15 bp, Homo sapiens
ttagaaagggtgaac

SEQ ID NO: 1024581 - DNA, 15 bp, Homo sapiens
cttagaaagggtgaa

SEQ ID NO: 1024582 - DNA, 15 bp, Homo sapiens
ccttagaaagggtga

SEQ ID NO: 1024583 - DNA, 15 bp, Homo sapiens
gccttagaaagggtg

SEQ ID NO: 1024584 - DNA, 15 bp, Homo sapiens
ggccttagaaagggt

SEQ ID NO: 1024585 - DNA, 15 bp, Homo sapiens
gggccttagaaaggg

SEQ ID NO: 1024586 - DNA, 15 bp, Homo sapiens
agggccttagaaagg

SEQ ID NO: 1024587 - DNA, 15 bp, Homo sapiens
cagggccttagaaag

SEQ ID NO: 1024588 - DNA, 15 bp, Homo sapiens
acagggccttagaaa

SEQ ID NO: 1024589 - DNA, 15 bp, Homo sapiens
tacagggccttagaa

SEQ ID NO: 1024590 - DNA, 15 bp, Homo sapiens
atacagggccttaga

SEQ ID NO: 1024591 - DNA, 15 bp, Homo sapiens
gatacagggccttag

SEQ ID NO: 1024592 - DNA, 15 bp, Homo sapiens
ggatacagggcctta

SEQ ID NO: 1024593 - DNA, 15 bp, Homo sapiens
gggatacagggcctt

SEQ ID NO: 1024594 - DNA, 15 bp, Homo sapiens
tgggatacagggcct

SEQ ID NO: 1024595 - DNA, 15 bp, Homo sapiens
atgggatacagggcc

SEQ ID NO: 1024596 - DNA, 15 bp, Homo sapiens
gatgggatacagggc

SEQ ID NO: 1024597 - DNA, 15 bp, Homo sapiens
tgatgggatacaggg

SEQ ID NO: 1024598 - DNA, 15 bp, Homo sapiens
ctgatgggatacagg

SEQ ID NO: 1024599 - DNA, 15 bp, Homo sapiens
gctgatgggatacag

SEQ ID NO: 1024600 - DNA, 15 bp, Homo sapiens
cgctgatgggataca

SEQ ID NO: 1024601 - DNA, 15 bp, Homo sapiens
acgctgatgggatac

SEQ ID NO: 1024602 - DNA, 15 bp, Homo sapiens
gacgctgatgggata

SEQ ID NO: 1024603 - DNA, 15 bp, Homo sapiens
tgacgctgatgggat

SEQ ID NO: 1024604 - DNA, 15 bp, Homo sapiens
gtgacgctgatggga

SEQ ID NO: 1024605 - DNA, 15 bp, Homo sapiens
tgtgacgctgatggg

SEQ ID NO: 1024606 - DNA, 15 bp, Homo sapiens
atgtgacgctgatgg

SEQ ID NO: 1024607 - DNA, 15 bp, Homo sapiens
aatgtgacgctgatg

SEQ ID NO: 1024608 - DNA, 15 bp, Homo sapiens
gaatgtgacgctgat

SEQ ID NO: 1024609 - DNA, 15 bp, Homo sapiens
agaatgtgacgctga

SEQ ID NO: 1024610 - DNA, 15 bp, Homo sapiens
cagaatgtgacgctg

SEQ ID NO: 1024611 - DNA, 15 bp, Homo sapiens
tcagaatgtgacgct

SEQ ID NO: 1024612 - DNA, 15 bp, Homo sapiens
ttcagaatgtgacgc

SEQ ID NO: 1024613 - DNA, 15 bp, Homo sapiens
cttcagaatgtgacg

SEQ ID NO: 1024614 - DNA, 15 bp, Homo sapiens
acttcagaatgtgac

SEQ ID NO: 1024615 - DNA, 15 bp, Homo sapiens
tacttcagaatgtga

SEQ ID NO: 1024616 - DNA, 15 bp, Homo sapiens
atacttcagaatgtg

SEQ ID NO: 1024617 - DNA, 15 bp, Homo sapiens
aatacttcagaatgt

SEQ ID NO: 1024618 - DNA, 15 bp, Homo sapiens
caatacttcagaatg

SEQ ID NO: 1024619 - DNA, 15 bp, Homo sapiens
ccaatacttcagaat

SEQ ID NO: 1024620 - DNA, 15 bp, Homo sapiens
tccaatacttcagaa

SEQ ID NO: 1024621 - DNA, 15 bp, Homo sapiens
ctccaatacttcaga

SEQ ID NO: 1024622 - DNA, 15 bp, Homo sapiens
gctccaatacttcag

SEQ ID NO: 1024623 - DNA, 15 bp, Homo sapiens
agctccaatacttca

SEQ ID NO: 1024624 - DNA, 15 bp, Homo sapiens
aagctccaatacttc

SEQ ID NO: 1024625 - DNA, 15 bp, Homo sapiens
taagctccaatactt

SEQ ID NO: 1024626 - DNA, 15 bp, Homo sapiens
ctaagctccaatact

SEQ ID NO: 1024627 - DNA, 15 bp, Homo sapiens
cctaagctccaatac

SEQ ID NO: 1024628 - DNA, 15 bp, Homo sapiens
ccctaagctccaata

SEQ ID NO: 1024629 - DNA, 15 bp, Homo sapiens
gccctaagctccaat

SEQ ID NO: 1024630 - DNA, 15 bp, Homo sapiens
agccctaagctccaa

SEQ ID NO: 1024631 - DNA, 15 bp, Homo sapiens
aagccctaagctcca

SEQ ID NO: 1024632 - DNA, 15 bp, Homo sapiens
gaagccctaagctcc

SEQ ID NO: 1024633 - DNA, 15 bp, Homo sapiens
tgaagccctaagctc

SEQ ID NO: 1024634 - DNA, 15 bp, Homo sapiens
ttgaagccctaagct

SEQ ID NO: 1024635 - DNA, 15 bp, Homo sapiens
gttgaagccctaagc

SEQ ID NO: 1024636 - DNA, 15 bp, Homo sapiens
agttgaagccctaag

SEQ ID NO: 1024637 - DNA, 15 bp, Homo sapiens
aagttgaagccctaa

SEQ ID NO: 1024638 - DNA, 15 bp, Homo sapiens
caagttgaagcccta

SEQ ID NO: 1024639 - DNA, 15 bp, Homo sapiens
acaagttgaagccct

SEQ ID NO: 1024640 - DNA, 15 bp, Homo sapiens
cacaagttgaagccc

SEQ ID NO: 1024641 - DNA, 15 bp, Homo sapiens
tcacaagttgaagcc

SEQ ID NO: 1024642 - DNA, 15 bp, Homo sapiens
ttcacaagttgaagc

SEQ ID NO: 1024643 - DNA, 15 bp, Homo sapiens
attcacaagttgaag

SEQ ID NO: 1024644 - DNA, 15 bp, Homo sapiens
aattcacaagttgaa

SEQ ID NO: 1024645 - DNA, 15 bp, Homo sapiens
aaattcacaagttga

SEQ ID NO: 1024646 - DNA, 15 bp, Homo sapiens
caaattcacaagttg

SEQ ID NO: 1024647 - DNA, 15 bp, Homo sapiens
ccaaattcacaagtt

SEQ ID NO: 1024648 - DNA, 15 bp, Homo sapiens
tccaaattcacaagt

SEQ ID NO: 1024649 - DNA, 15 bp, Homo sapiens
ttccaaattcacaag

SEQ ID NO: 1024650 - DNA, 15 bp, Homo sapiens
cttccaaattcacaa

SEQ ID NO: 1024651 - DNA, 15 bp, Homo sapiens
acttccaaattcaca

SEQ ID NO: 1024652 - DNA, 15 bp, Homo sapiens
cacttccaaattcac

SEQ ID NO: 1024653 - DNA, 15 bp, Homo sapiens
tcacttccaaattca

SEQ ID NO: 1024654 - DNA, 15 bp, Homo sapiens
atcacttccaaattc

SEQ ID NO: 1024655 - DNA, 15 bp, Homo sapiens
tatcacttccaaatt

SEQ ID NO: 1024656 - DNA, 15 bp, Homo sapiens
ttatcacttccaaat

SEQ ID NO: 1024657 - DNA, 15 bp, Homo sapiens
tttatcacttccaaa

SEQ ID NO: 1024658 - DNA, 15 bp, Homo sapiens
ttttatcacttccaa

SEQ ID NO: 1024659 - DNA, 15 bp, Homo sapiens
attttatcacttcca

SEQ ID NO: 1024660 - DNA, 15 bp, Homo sapiens
aattttatcacttcc

SEQ ID NO: 1024661 - DNA, 15 bp, Homo sapiens
gaattttatcacttc

SEQ ID NO: 1024662 - DNA, 15 bp, Homo sapiens
tgaattttatcactt

SEQ ID NO: 1024663 - DNA, 15 bp, Homo sapiens
ctgaattttatcact

SEQ ID NO: 1024664 - DNA, 15 bp, Homo sapiens
gctgaattttatcac

SEQ ID NO: 1024665 - DNA, 15 bp, Homo sapiens
ggctgaattttatca

SEQ ID NO: 1024666 - DNA, 15 bp, Homo sapiens
gggctgaattttatc

SEQ ID NO: 1024667 - DNA, 15 bp, Homo sapiens
tgggctgaattttat

SEQ ID NO: 1024668 - DNA, 15 bp, Homo sapiens
atgggctgaatttta

SEQ ID NO: 1024669 - DNA, 15 bp, Homo sapiens
tatgggctgaatttt

SEQ ID NO: 1024670 - DNA, 15 bp, Homo sapiens
ctatgggctgaattt

SEQ ID NO: 1024671 - DNA, 15 bp, Homo sapiens
actatgggctgaatt

SEQ ID NO: 1024672 - DNA, 15 bp, Homo sapiens
cactatgggctgaat

SEQ ID NO: 1024673 - DNA, 15 bp, Homo sapiens
gcactatgggctgaa

SEQ ID NO: 1024674 - DNA, 15 bp, Homo sapiens
ggcactatgggctga

SEQ ID NO: 1024675 - DNA, 15 bp, Homo sapiens
gggcactatgggctg

SEQ ID NO: 1024676 - DNA, 15 bp, Homo sapiens
cgggcactatgggct

SEQ ID NO: 1024677 - DNA, 15 bp, Homo sapiens
acgggcactatgggc

SEQ ID NO: 1024678 - DNA, 15 bp, Homo sapiens
gacgggcactatggg

SEQ ID NO: 1024679 - DNA, 15 bp, Homo sapiens
tgacgggcactatgg

SEQ ID NO: 1024680 - DNA, 15 bp, Homo sapiens
atgacgggcactatg

SEQ ID NO: 1024681 - DNA, 15 bp, Homo sapiens
gatgacgggcactat

SEQ ID NO: 1024682 - DNA, 15 bp, Homo sapiens
tgatgacgggcacta

SEQ ID NO: 1024683 - DNA, 15 bp, Homo sapiens
ctgatgacgggcact

SEQ ID NO: 1024684 - DNA, 15 bp, Homo sapiens
cctgatgacgggcac

SEQ ID NO: 1024685 - DNA, 15 bp, Homo sapiens
tcctgatgacgggca

SEQ ID NO: 1024686 - DNA, 15 bp, Homo sapiens
ctcctgatgacgggc

SEQ ID NO: 1024687 - DNA, 15 bp, Homo sapiens
gctcctgatgacggg

SEQ ID NO: 1024688 - DNA, 15 bp, Homo sapiens
tgctcctgatgacgg

SEQ ID NO: 1024689 - DNA, 15 bp, Homo sapiens
gtgctcctgatgacg

SEQ ID NO: 1024690 - DNA, 15 bp, Homo sapiens
tgtgctcctgatgac

SEQ ID NO: 1024691 - DNA, 15 bp, Homo sapiens
ttgtgctcctgatga

SEQ ID NO: 1024692 - DNA, 15 bp, Homo sapiens
gttgtgctcctgatg

SEQ ID NO: 1024693 - DNA, 15 bp, Homo sapiens
ggttgtgctcctgat

SEQ ID NO: 1024694 - DNA, 15 bp, Homo sapiens
tggttgtgctcctga

SEQ ID NO: 1024695 - DNA, 15 bp, Homo sapiens
ttggttgtgctcctg

SEQ ID NO: 1024696 - DNA, 15 bp, Homo sapiens
cttggttgtgctcct

SEQ ID NO: 1024697 - DNA, 15 bp, Homo sapiens
tcttggttgtgctcc

SEQ ID NO: 1024698 - DNA, 15 bp, Homo sapiens
gtcttggttgtgctc

SEQ ID NO: 1024699 - DNA, 15 bp, Homo sapiens
agtcttggttgtgct

SEQ ID NO: 1024700 - DNA, 15 bp, Homo sapiens
cagtcttggttgtgc

SEQ ID NO: 1024701 - DNA, 15 bp, Homo sapiens
ccagtcttggttgtg

SEQ ID NO: 1024702 - DNA, 15 bp, Homo sapiens
tccagtcttggttgt

SEQ ID NO: 1024703 - DNA, 15 bp, Homo sapiens
ttccagtcttggttg

SEQ ID NO: 1024704 - DNA, 15 bp, Homo sapiens
gttccagtcttggtt

SEQ ID NO: 1024705 - DNA, 15 bp, Homo sapiens
ggttccagtcttggt

SEQ ID NO: 1024706 - DNA, 15 bp, Homo sapiens
gggttccagtcttgg

SEQ ID NO: 1024707 - DNA, 15 bp, Homo sapiens
tgggttccagtcttg

SEQ ID NO: 1024708 - DNA, 15 bp, Homo sapiens
ttgggttccagtctt

SEQ ID NO: 1024709 - DNA, 15 bp, Homo sapiens
tttgggttccagtct

SEQ ID NO: 1024710 - DNA, 15 bp, Homo sapiens
ctttgggttccagtc

SEQ ID NO: 1024711 - DNA, 15 bp, Homo sapiens
actttgggttccagt

SEQ ID NO: 1024712 - DNA, 15 bp, Homo sapiens
aactttgggttccag

SEQ ID NO: 1024713 - DNA, 15 bp, Homo sapiens
gaactttgggttcca

SEQ ID NO: 1024714 - DNA, 15 bp, Homo sapiens
ggaactttgggttcc

SEQ ID NO: 1024715 - DNA, 15 bp, Homo sapiens
aggaactttgggttc

SEQ ID NO: 1024716 - DNA, 15 bp, Homo sapiens
taggaactttgggtt

SEQ ID NO: 1024717 - DNA, 15 bp, Homo sapiens
ttaggaactttgggt

SEQ ID NO: 1024718 - DNA, 15 bp, Homo sapiens
attaggaactttggg

SEQ ID NO: 1024719 - DNA, 15 bp, Homo sapiens
gattaggaactttgg

SEQ ID NO: 1024720 - DNA, 15 bp, Homo sapiens
ggattaggaactttg

SEQ ID NO: 1024721 - DNA, 15 bp, Homo sapiens
aggattaggaacttt

SEQ ID NO: 1024722 - DNA, 15 bp, Homo sapiens
taggattaggaactt

SEQ ID NO: 1024723 - DNA, 15 bp, Homo sapiens
ctaggattaggaact

SEQ ID NO: 1024724 - DNA, 15 bp, Homo sapiens
tctaggattaggaac

SEQ ID NO: 1024725 - DNA, 15 bp, Homo sapiens
ttctaggattaggaa

SEQ ID NO: 1024726 - DNA, 15 bp, Homo sapiens
gttctaggattagga

SEQ ID NO: 1024727 - DNA, 15 bp, Homo sapiens
tgttctaggattagg

SEQ ID NO: 1024728 - DNA, 15 bp, Homo sapiens
atgttctaggattag

SEQ ID NO: 1024729 - DNA, 15 bp, Homo sapiens
aatgttctaggatta

SEQ ID NO: 1024730 - DNA, 15 bp, Homo sapiens
taatgttctaggatt

SEQ ID NO: 1024731 - DNA, 15 bp, Homo sapiens
ttaatgttctaggat

SEQ ID NO: 1024732 - DNA, 15 bp, Homo sapiens
attaatgttctagga

SEQ ID NO: 1024733 - DNA, 15 bp, Homo sapiens
aattaatgttctagg

SEQ ID NO: 1024734 - DNA, 15 bp, Homo sapiens
aaattaatgttctag

SEQ ID NO: 1024735 - DNA, 15 bp, Homo sapiens
caaattaatgttcta

SEQ ID NO: 1024736 - DNA, 15 bp, Homo sapiens
gcaaattaatgttct

SEQ ID NO: 1024737 - DNA, 15 bp, Homo sapiens
ggcaaattaatgttc

SEQ ID NO: 1024738 - DNA, 15 bp, Homo sapiens
aggcaaattaatgtt

SEQ ID NO: 1024739 - DNA, 15 bp, Homo sapiens
aaggcaaattaatgt

SEQ ID NO: 1024740 - DNA, 15 bp, Homo sapiens
taaggcaaattaatg

SEQ ID NO: 1024741 - DNA, 15 bp, Homo sapiens
ataaggcaaattaat

SEQ ID NO: 1024742 - DNA, 15 bp, Homo sapiens
cataaggcaaattaa

SEQ ID NO: 1024743 - DNA, 15 bp, Homo sapiens
acataaggcaaatta

SEQ ID NO: 1024744 - DNA, 15 bp, Homo sapiens
aacataaggcaaatt

SEQ ID NO: 1024745 - DNA, 15 bp, Homo sapiens
gaacataaggcaaat

SEQ ID NO: 1024746 - DNA, 15 bp, Homo sapiens
tgaacataaggcaaa

SEQ ID NO: 1024747 - DNA, 15 bp, Homo sapiens
atgaacataaggcaa

SEQ ID NO: 1024748 - DNA, 15 bp, Homo sapiens
tatgaacataaggca

SEQ ID NO: 1024749 - DNA, 15 bp, Homo sapiens
atatgaacataaggc

SEQ ID NO: 1024750 - DNA, 15 bp, Homo sapiens
gatatgaacataagg

SEQ ID NO: 1024751 - DNA, 15 bp, Homo sapiens
ggatatgaacataag

SEQ ID NO: 1024752 - DNA, 15 bp, Homo sapiens
aggatatgaacataa

SEQ ID NO: 1024753 - DNA, 15 bp, Homo sapiens
aaggatatgaacata

SEQ ID NO: 1024754 - DNA, 15 bp, Homo sapiens
aaaggatatgaacat

SEQ ID NO: 1024755 - DNA, 15 bp, Homo sapiens
gaaaggatatgaaca

SEQ ID NO: 1024756 - DNA, 15 bp, Homo sapiens
ggaaaggatatgaac

SEQ ID NO: 1024757 - DNA, 15 bp, Homo sapiens
gggaaaggatatgaa

SEQ ID NO: 1024758 - DNA, 15 bp, Homo sapiens
ggggaaaggatatga

SEQ ID NO: 1024759 - DNA, 15 bp, Homo sapiens
cggggaaaggatatg

SEQ ID NO: 1024760 - DNA, 15 bp, Homo sapiens
ccggggaaaggatat

SEQ ID NO: 1024761 - DNA, 15 bp, Homo sapiens
cccggggaaaggata

SEQ ID NO: 1024762 - DNA, 15 bp, Homo sapiens
gcccggggaaaggat

SEQ ID NO: 1024763 - DNA, 15 bp, Homo sapiens
agcccggggaaagga

SEQ ID NO: 1024764 - DNA, 15 bp, Homo sapiens
tagcccggggaaagg

SEQ ID NO: 1024765 - DNA, 15 bp, Homo sapiens
ttagcccggggaaag

SEQ ID NO: 1024766 - DNA, 15 bp, Homo sapiens
tttagcccggggaaa

SEQ ID NO: 1024767 - DNA, 15 bp, Homo sapiens
atttagcccggggaa

SEQ ID NO: 1024768 - DNA, 15 bp, Homo sapiens
tatttagcccgggga

SEQ ID NO: 1024769 - DNA, 15 bp, Homo sapiens
ttatttagcccgggg

SEQ ID NO: 1024770 - DNA, 15 bp, Homo sapiens
attatttagcccggg

SEQ ID NO: 1024771 - DNA, 15 bp, Homo sapiens
gattatttagcccgg

SEQ ID NO: 1024772 - DNA, 15 bp, Homo sapiens
agattatttagcccg

SEQ ID NO: 1024773 - DNA, 15 bp, Homo sapiens
aagattatttagccc

SEQ ID NO: 1024774 - DNA, 15 bp, Homo sapiens
taagattatttagcc

SEQ ID NO: 1024775 - DNA, 15 bp, Homo sapiens
gtaagattatttagc

SEQ ID NO: 1024776 - DNA, 15 bp, Homo sapiens
tgtaagattatttag

SEQ ID NO: 1024777 - DNA, 15 bp, Homo sapiens
ctgtaagattattta

SEQ ID NO: 1024778 - DNA, 15 bp, Homo sapiens
tctgtaagattattt

SEQ ID NO: 1024779 - DNA, 15 bp, Homo sapiens
ttctgtaagattatt

SEQ ID NO: 1024780 - DNA, 15 bp, Homo sapiens
cttctgtaagattat

SEQ ID NO: 1024781 - DNA, 15 bp, Homo sapiens
acttctgtaagatta

SEQ ID NO: 1024782 - DNA, 15 bp, Homo sapiens
tacttctgtaagatt

SEQ ID NO: 1024783 - DNA, 15 bp, Homo sapiens
atacttctgtaagat

SEQ ID NO: 1024784 - DNA, 15 bp, Homo sapiens
tatacttctgtaaga

SEQ ID NO: 1024785 - DNA, 15 bp, Homo sapiens
ctatacttctgtaag

SEQ ID NO: 1024786 - DNA, 15 bp, Homo sapiens
gctatacttctgtaa

SEQ ID NO: 1024787 - DNA, 15 bp, Homo sapiens
tgctatacttctgta

SEQ ID NO: 1024788 - DNA, 15 bp, Homo sapiens
atgctatacttctgt

SEQ ID NO: 1024789 - DNA, 15 bp, Homo sapiens
catgctatacttctg

SEQ ID NO: 1024790 - DNA, 15 bp, Homo sapiens
acatgctatacttct

SEQ ID NO: 1024791 - DNA, 15 bp, Homo sapiens
aacatgctatacttc

SEQ ID NO: 1024792 - DNA, 15 bp, Homo sapiens
gaacatgctatactt

SEQ ID NO: 1024793 - DNA, 15 bp, Homo sapiens
tgaacatgctatact

SEQ ID NO: 1024794 - DNA, 15 bp, Homo sapiens
ttgaacatgctatac

SEQ ID NO: 1024795 - DNA, 15 bp, Homo sapiens
tttgaacatgctata

SEQ ID NO: 1024796 - DNA, 15 bp, Homo sapiens
atttgaacatgctat

SEQ ID NO: 1024797 - DNA, 15 bp, Homo sapiens
aatttgaacatgcta

SEQ ID NO: 1024798 - DNA, 15 bp, Homo sapiens
aaatttgaacatgct

SEQ ID NO: 1024799 - DNA, 15 bp, Homo sapiens
caaatttgaacatgc

SEQ ID NO: 1024800 - DNA, 15 bp, Homo sapiens
tcaaatttgaacatg

SEQ ID NO: 1024801 - DNA, 15 bp, Homo sapiens
ttcaaatttgaacat

SEQ ID NO: 1024802 - DNA, 15 bp, Homo sapiens
tttcaaatttgaaca

SEQ ID NO: 1024803 - DNA, 15 bp, Homo sapiens
ctttcaaatttgaac

SEQ ID NO: 1024804 - DNA, 15 bp, Homo sapiens
actttcaaatttgaa

SEQ ID NO: 1024805 - DNA, 15 bp, Homo sapiens
tactttcaaatttga

SEQ ID NO: 1024806 - DNA, 15 bp, Homo sapiens
atactttcaaatttg

SEQ ID NO: 1024807 - DNA, 15 bp, Homo sapiens
aatactttcaaattt

SEQ ID NO: 1024808 - DNA, 15 bp, Homo sapiens
aaatactttcaaatt

SEQ ID NO: 1024809 - DNA, 15 bp, Homo sapiens
gaaatactttcaaat

SEQ ID NO: 1024810 - DNA, 15 bp, Homo sapiens
tgaaatactttcaaa

SEQ ID NO: 1024811 - DNA, 15 bp, Homo sapiens
atgaaatactttcaa

SEQ ID NO: 1024812 - DNA, 15 bp, Homo sapiens
catgaaatactttca

SEQ ID NO: 1024813 - DNA, 15 bp, Homo sapiens
tcatgaaatactttc

SEQ ID NO: 1024814 - DNA, 15 bp, Homo sapiens
atcatgaaatacttt

SEQ ID NO: 1024815 - DNA, 15 bp, Homo sapiens
catcatgaaatactt

SEQ ID NO: 1024816 - DNA, 15 bp, Homo sapiens
tcatcatgaaatact

SEQ ID NO: 1024817 - DNA, 15 bp, Homo sapiens
atcatcatgaaatac

SEQ ID NO: 1024818 - DNA, 15 bp, Homo sapiens
tatcatcatgaaata

SEQ ID NO: 1024819 - DNA, 15 bp, Homo sapiens
atatcatcatgaaat

SEQ ID NO: 1024820 - DNA, 15 bp, Homo sapiens
tatatcatcatgaaa

SEQ ID NO: 1024821 - DNA, 15 bp, Homo sapiens
ttatatcatcatgaa

SEQ ID NO: 1024822 - DNA, 15 bp, Homo sapiens
attatatcatcatga

SEQ ID NO: 1024823 - DNA, 15 bp, Homo sapiens
cattatatcatcatg

SEQ ID NO: 1024824 - DNA, 15 bp, Homo sapiens
acattatatcatcat

SEQ ID NO: 1024825 - DNA, 15 bp, Homo sapiens
tacattatatcatca

SEQ ID NO: 1024826 - DNA, 15 bp, Homo sapiens
ctacattatatcatc

SEQ ID NO: 1024827 - DNA, 15 bp, Homo sapiens
gctacattatatcat

SEQ ID NO: 1024828 - DNA, 15 bp, Homo sapiens
ggctacattatatca

SEQ ID NO: 1024829 - DNA, 15 bp, Homo sapiens
gggctacattatatc

SEQ ID NO: 1024830 - DNA, 15 bp, Homo sapiens
agggctacattatat

SEQ ID NO: 1024831 - DNA, 15 bp, Homo sapiens
gagggctacattata

SEQ ID NO: 1024832 - DNA, 15 bp, Homo sapiens
agagggctacattat

SEQ ID NO: 1024833 - DNA, 15 bp, Homo sapiens
gagagggctacatta

SEQ ID NO: 1024834 - DNA, 15 bp, Homo sapiens
tgagagggctacatt

SEQ ID NO: 1024835 - DNA, 15 bp, Homo sapiens
atgagagggctacat

SEQ ID NO: 1024836 - DNA, 15 bp, Homo sapiens
aatgagagggctaca

SEQ ID NO: 1024837 - DNA, 15 bp, Homo sapiens
aaatgagagggctac

SEQ ID NO: 1024838 - DNA, 15 bp, Homo sapiens
caaatgagagggcta

SEQ ID NO: 1024839 - DNA, 15 bp, Homo sapiens
gcaaatgagagggct

SEQ ID NO: 1024840 - DNA, 15 bp, Homo sapiens
ggcaaatgagagggc

SEQ ID NO: 1024841 - DNA, 15 bp, Homo sapiens
tggcaaatgagaggg

SEQ ID NO: 1024842 - DNA, 15 bp, Homo sapiens
ttggcaaatgagagg

SEQ ID NO: 1024843 - DNA, 15 bp, Homo sapiens
tttggcaaatgagag

SEQ ID NO: 1024844 - DNA, 15 bp, Homo sapiens
ctttggcaaatgaga

SEQ ID NO: 1024845 - DNA, 15 bp, Homo sapiens
tctttggcaaatgag

SEQ ID NO: 1024846 - DNA, 15 bp, Homo sapiens
ttctttggcaaatga

SEQ ID NO: 1024847 - DNA, 15 bp, Homo sapiens
cttctttggcaaatg

SEQ ID NO: 1024848 - DNA, 15 bp, Homo sapiens
ccttctttggcaaat

SEQ ID NO: 1024849 - DNA, 15 bp, Homo sapiens
tccttctttggcaaa

SEQ ID NO: 1024850 - DNA, 15 bp, Homo sapiens
ttccttctttggcaa

SEQ ID NO: 1024851 - DNA, 15 bp, Homo sapiens
cttccttctttggca

SEQ ID NO: 1024852 - DNA, 15 bp, Homo sapiens
gcttccttctttggc

SEQ ID NO: 1024853 - DNA, 15 bp, Homo sapiens
agcttccttctttgg

SEQ ID NO: 1024854 - DNA, 15 bp, Homo sapiens
tagcttccttctttg

SEQ ID NO: 1024855 - DNA, 15 bp, Homo sapiens
ttagcttccttcttt

SEQ ID NO: 1024856 - DNA, 15 bp, Homo sapiens
cttagcttccttctt

SEQ ID NO: 1024857 - DNA, 15 bp, Homo sapiens
acttagcttccttct

SEQ ID NO: 1024858 - DNA, 15 bp, Homo sapiens
gacttagcttccttc

SEQ ID NO: 1024859 - DNA, 15 bp, Homo sapiens
ggacttagcttcctt

SEQ ID NO: 1024860 - DNA, 15 bp, Homo sapiens
aggacttagcttcct

SEQ ID NO: 1024861 - DNA, 15 bp, Homo sapiens
taggacttagcttcc

SEQ ID NO: 1024862 - DNA, 15 bp, Homo sapiens
ttaggacttagcttc

SEQ ID NO: 1024863 - DNA, 15 bp, Homo sapiens
attaggacttagctt

SEQ ID NO: 1024864 - DNA, 15 bp, Homo sapiens
aattaggacttagct

SEQ ID NO: 1024865 - DNA, 15 bp, Homo sapiens
caattaggacttagc

SEQ ID NO: 1024866 - DNA, 15 bp, Homo sapiens
acaattaggacttag

SEQ ID NO: 1024867 - DNA, 15 bp, Homo sapiens
gacaattaggactta

SEQ ID NO: 1024868 - DNA, 15 bp, Homo sapiens
agacaattaggactt

SEQ ID NO: 1024869 - DNA, 15 bp, Homo sapiens
aagacaattaggact

SEQ ID NO: 1024870 - DNA, 15 bp, Homo sapiens
caagacaattaggac

SEQ ID NO: 1024871 - DNA, 15 bp, Homo sapiens
gcaagacaattagga

SEQ ID NO: 1024872 - DNA, 15 bp, Homo sapiens
agcaagacaattagg

SEQ ID NO: 1024873 - DNA, 15 bp, Homo sapiens
gagcaagacaattag

SEQ ID NO: 1024874 - DNA, 15 bp, Homo sapiens
tgagcaagacaatta

SEQ ID NO: 1024875 - DNA, 15 bp, Homo sapiens
ctgagcaagacaatt

SEQ ID NO: 1024876 - DNA, 15 bp, Homo sapiens
tctgagcaagacaat

SEQ ID NO: 1024877 - DNA, 15 bp, Homo sapiens
ttctgagcaagacaa

SEQ ID NO: 1024878 - DNA, 15 bp, Homo sapiens
attctgagcaagaca

SEQ ID NO: 1024879 - DNA, 15 bp, Homo sapiens
cattctgagcaagac

SEQ ID NO: 1024880 - DNA, 15 bp, Homo sapiens
tcattctgagcaaga

SEQ ID NO: 1024881 - DNA, 15 bp, Homo sapiens
atcattctgagcaag

SEQ ID NO: 1024882 - DNA, 15 bp, Homo sapiens
catcattctgagcaa

SEQ ID NO: 1024883 - DNA, 15 bp, Homo sapiens
ccatcattctgagca

SEQ ID NO: 1024884 - DNA, 15 bp, Homo sapiens
tccatcattctgagc

SEQ ID NO: 1024885 - DNA, 15 bp, Homo sapiens
ctccatcattctgag

SEQ ID NO: 1024886 - DNA, 15 bp, Homo sapiens
actccatcattctga

SEQ ID NO: 1024887 - DNA, 15 bp, Homo sapiens
cactccatcattctg

SEQ ID NO: 1024888 - DNA, 15 bp, Homo sapiens
gcactccatcattct

SEQ ID NO: 1024889 - DNA, 15 bp, Homo sapiens
tgcactccatcattc

SEQ ID NO: 1024890 - DNA, 15 bp, Homo sapiens
atgcactccatcatt

SEQ ID NO: 1024891 - DNA, 15 bp, Homo sapiens
catgcactccatcat

SEQ ID NO: 1024892 - DNA, 15 bp, Homo sapiens
ccatgcactccatca

SEQ ID NO: 1024893 - DNA, 15 bp, Homo sapiens
tccatgcactccatc

SEQ ID NO: 1024894 - DNA, 15 bp, Homo sapiens
atccatgcactccat

SEQ ID NO: 1024895 - DNA, 15 bp, Homo sapiens
catccatgcactcca

SEQ ID NO: 1024896 - DNA, 15 bp, Homo sapiens
tcatccatgcactcc

SEQ ID NO: 1024897 - DNA, 15 bp, Homo sapiens
atcatccatgcactc

SEQ ID NO: 1024898 - DNA, 15 bp, Homo sapiens
aatcatccatgcact

SEQ ID NO: 1024899 - DNA, 15 bp, Homo sapiens
gaatcatccatgcac

SEQ ID NO: 1024900 - DNA, 15 bp, Homo sapiens
tgaatcatccatgca

SEQ ID NO: 1024901 - DNA, 15 bp, Homo sapiens
ctgaatcatccatgc

SEQ ID NO: 1024902 - DNA, 15 bp, Homo sapiens
tctgaatcatccatg

SEQ ID NO: 1024903 - DNA, 15 bp, Homo sapiens
ctctgaatcatccat

SEQ ID NO: 1024904 - DNA, 15 bp, Homo sapiens
cctctgaatcatcca

SEQ ID NO: 1024905 - DNA, 15 bp, Homo sapiens
ccctctgaatcatcc

SEQ ID NO: 1024906 - DNA, 15 bp, Homo sapiens
cccctctgaatcatc

SEQ ID NO: 1024907 - DNA, 15 bp, Homo sapiens
gcccctctgaatcat

SEQ ID NO: 1024908 - DNA, 15 bp, Homo sapiens
tgcccctctgaatca

SEQ ID NO: 1024909 - DNA, 15 bp, Homo sapiens
gtgcccctctgaatc

SEQ ID NO: 1024910 - DNA, 15 bp, Homo sapiens
agtgcccctctgaat

SEQ ID NO: 1024911 - DNA, 15 bp, Homo sapiens
cagtgcccctctgaa

SEQ ID NO: 1024912 - DNA, 15 bp, Homo sapiens
gcagtgcccctctga

SEQ ID NO: 1024913 - DNA, 15 bp, Homo sapiens
ggcagtgcccctctg

SEQ ID NO: 1024914 - DNA, 15 bp, Homo sapiens
gggcagtgcccctct

SEQ ID NO: 1024915 - DNA, 15 bp, Homo sapiens
tgggcagtgcccctc

SEQ ID NO: 1024916 - DNA, 15 bp, Homo sapiens
ctgggcagtgcccct

SEQ ID NO: 1024917 - DNA, 15 bp, Homo sapiens
tctgggcagtgcccc

SEQ ID NO: 1024918 - DNA, 15 bp, Homo sapiens
atctgggcagtgccc

SEQ ID NO: 1024919 - DNA, 15 bp, Homo sapiens
tatctgggcagtgcc

SEQ ID NO: 1024920 - DNA, 15 bp, Homo sapiens
atatctgggcagtgc

SEQ ID NO: 1024921 - DNA, 15 bp, Homo sapiens
gatatctgggcagtg

SEQ ID NO: 1024922 - DNA, 15 bp, Homo sapiens
agatatctgggcagt

SEQ ID NO: 1024923 - DNA, 15 bp, Homo sapiens
aagatatctgggcag

SEQ ID NO: 1024924 - DNA, 15 bp, Homo sapiens
gaagatatctgggca

SEQ ID NO: 1024925 - DNA, 15 bp, Homo sapiens
agaagatatctgggc

SEQ ID NO: 1024926 - DNA, 15 bp, Homo sapiens
gagaagatatctggg

SEQ ID NO: 1024927 - DNA, 15 bp, Homo sapiens
ggagaagatatctgg

SEQ ID NO: 1024928 - DNA, 15 bp, Homo sapiens
aggagaagatatctg

SEQ ID NO: 1024929 - DNA, 15 bp, Homo sapiens
caggagaagatatct

SEQ ID NO: 1024930 - DNA, 15 bp, Homo sapiens
gcaggagaagatatc

SEQ ID NO: 1024931 - DNA, 15 bp, Homo sapiens
agcaggagaagatat

SEQ ID NO: 1024932 - DNA, 15 bp, Homo sapiens
gagcaggagaagata

SEQ ID NO: 1024933 - DNA, 15 bp, Homo sapiens
agagcaggagaagat

SEQ ID NO: 1024934 - DNA, 15 bp, Homo sapiens
gagagcaggagaaga

SEQ ID NO: 1024935 - DNA, 15 bp, Homo sapiens
ggagagcaggagaag

SEQ ID NO: 1024936 - DNA, 15 bp, Homo sapiens
aggagagcaggagaa

SEQ ID NO: 1024937 - DNA, 15 bp, Homo sapiens
taggagagcaggaga

SEQ ID NO: 1024938 - DNA, 15 bp, Homo sapiens
gtaggagagcaggag

SEQ ID NO: 1024939 - DNA, 15 bp, Homo sapiens
agtaggagagcagga

SEQ ID NO: 1024940 - DNA, 15 bp, Homo sapiens
cagtaggagagcagg

SEQ ID NO: 1024941 - DNA, 15 bp, Homo sapiens
ccagtaggagagcag

SEQ ID NO: 1024942 - DNA, 15 bp, Homo sapiens
tccagtaggagagca

SEQ ID NO: 1024943 - DNA, 15 bp, Homo sapiens
ctccagtaggagagc

SEQ ID NO: 1024944 - DNA, 15 bp, Homo sapiens
actccagtaggagag

SEQ ID NO: 1024945 - DNA, 15 bp, Homo sapiens
cactccagtaggaga

SEQ ID NO: 1024946 - DNA, 15 bp, Homo sapiens
gcactccagtaggag

SEQ ID NO: 1024947 - DNA, 15 bp, Homo sapiens
ggcactccagtagga

SEQ ID NO: 1024948 - DNA, 15 bp, Homo sapiens
gggcactccagtagg

SEQ ID NO: 1024949 - DNA, 15 bp, Homo sapiens
agggcactccagtag

SEQ ID NO: 1024950 - DNA, 15 bp, Homo sapiens
aagggcactccagta

SEQ ID NO: 1024951 - DNA, 15 bp, Homo sapiens
gaagggcactccagt

SEQ ID NO: 1024952 - DNA, 15 bp, Homo sapiens
agaagggcactccag

SEQ ID NO: 1024953 - DNA, 15 bp, Homo sapiens
aagaagggcactcca

SEQ ID NO: 1024954 - DNA, 15 bp, Homo sapiens
caagaagggcactcc

SEQ ID NO: 1024955 - DNA, 15 bp, Homo sapiens
ccaagaagggcactc

SEQ ID NO: 1024956 - DNA, 15 bp, Homo sapiens
tccaagaagggcact

SEQ ID NO: 1024957 - DNA, 15 bp, Homo sapiens
atccaagaagggcac

SEQ ID NO: 1024958 - DNA, 15 bp, Homo sapiens
aatccaagaagggca

SEQ ID NO: 1024959 - DNA, 15 bp, Homo sapiens
gaatccaagaagggc

SEQ ID NO: 1024960 - DNA, 15 bp, Homo sapiens
ggaatccaagaaggg

SEQ ID NO: 1024961 - DNA, 15 bp, Homo sapiens
tggaatccaagaagg

SEQ ID NO: 1024962 - DNA, 15 bp, Homo sapiens
ttggaatccaagaag

SEQ ID NO: 1024963 - DNA, 15 bp, Homo sapiens
attggaatccaagaa

SEQ ID NO: 1024964 - DNA, 15 bp, Homo sapiens
gattggaatccaaga

SEQ ID NO: 1024965 - DNA, 15 bp, Homo sapiens
agattggaatccaag

SEQ ID NO: 1024966 - DNA, 15 bp, Homo sapiens
gagattggaatccaa

SEQ ID NO: 1024967 - DNA, 15 bp, Homo sapiens
agagattggaatcca

SEQ ID NO: 1024968 - DNA, 15 bp, Homo sapiens
aagagattggaatcc

SEQ ID NO: 1024969 - DNA, 15 bp, Homo sapiens
caagagattggaatc

SEQ ID NO: 1024970 - DNA, 15 bp, Homo sapiens
gcaagagattggaat

SEQ ID NO: 1024971 - DNA, 15 bp, Homo sapiens
agcaagagattggaa

SEQ ID NO: 1024972 - DNA, 15 bp, Homo sapiens
cagcaagagattgga

SEQ ID NO: 1024973 - DNA, 15 bp, Homo sapiens
gcagcaagagattgg

SEQ ID NO: 1024974 - DNA, 15 bp, Homo sapiens
agcagcaagagattg

SEQ ID NO: 1024975 - DNA, 15 bp, Homo sapiens
cagcagcaagagatt

SEQ ID NO: 1024976 - DNA, 15 bp, Homo sapiens
acagcagcaagagat

SEQ ID NO: 1024977 - DNA, 15 bp, Homo sapiens
tacagcagcaagaga

SEQ ID NO: 1024978 - DNA, 15 bp, Homo sapiens
ttacagcagcaagag

SEQ ID NO: 1024979 - DNA, 15 bp, Homo sapiens
gttacagcagcaaga

SEQ ID NO: 1024980 - DNA, 15 bp, Homo sapiens
ggttacagcagcaag

SEQ ID NO: 1024981 - DNA, 15 bp, Homo sapiens
aggttacagcagcaa

SEQ ID NO: 1024982 - DNA, 15 bp, Homo sapiens
gaggttacagcagca

SEQ ID NO: 1024983 - DNA, 15 bp, Homo sapiens
ggaggttacagcagc

SEQ ID NO: 1024984 - DNA, 15 bp, Homo sapiens
tggaggttacagcag

SEQ ID NO: 1024985 - DNA, 15 bp, Homo sapiens
gtggaggttacagca

SEQ ID NO: 1024986 - DNA, 15 bp, Homo sapiens
tgtggaggttacagc

SEQ ID NO: 1024987 - DNA, 15 bp, Homo sapiens
gtgtggaggttacag

SEQ ID NO: 1024988 - DNA, 15 bp, Homo sapiens
cgtgtggaggttaca

SEQ ID NO: 1024989 - DNA, 15 bp, Homo sapiens
tcgtgtggaggttac

SEQ ID NO: 1024990 - DNA, 15 bp, Homo sapiens
ctcgtgtggaggtta

SEQ ID NO: 1024991 - DNA, 15 bp, Homo sapiens
tctcgtgtggaggtt

SEQ ID NO: 1024992 - DNA, 15 bp, Homo sapiens
ctctcgtgtggaggt

SEQ ID NO: 1024993 - DNA, 15 bp, Homo sapiens
actctcgtgtggagg

SEQ ID NO: 1024994 - DNA, 15 bp, Homo sapiens
gactctcgtgtggag

SEQ ID NO: 1024995 - DNA, 15 bp, Homo sapiens
agactctcgtgtgga

SEQ ID NO: 1024996 - DNA, 15 bp, Homo sapiens
gagactctcgtgtgg

SEQ ID NO: 1024997 - DNA, 15 bp, Homo sapiens
agagactctcgtgtg

SEQ ID NO: 1024998 - DNA, 15 bp, Homo sapiens
aagagactctcgtgt

SEQ ID NO: 1024999 - DNA, 15 bp, Homo sapiens
aaagagactctcgtg

SEQ ID NO: 1025000 - DNA, 15 bp, Homo sapiens
gaaagagactctcgt

SEQ ID NO: 1025001 - DNA, 15 bp, Homo sapiens
agaaagagactctcg

SEQ ID NO: 1025002 - DNA, 15 bp, Homo sapiens
tagaaagagactctc

SEQ ID NO: 1025003 - DNA, 15 bp, Homo sapiens
gtagaaagagactct

SEQ ID NO: 1025004 - DNA, 15 bp, Homo sapiens
ggtagaaagagactc

SEQ ID NO: 1025005 - DNA, 15 bp, Homo sapiens
gggtagaaagagact

SEQ ID NO: 1025006 - DNA, 15 bp, Homo sapiens
tgggtagaaagagac

SEQ ID NO: 1025007 - DNA, 15 bp, Homo sapiens
ctgggtagaaagaga

SEQ ID NO: 1025008 - DNA, 15 bp, Homo sapiens
cctgggtagaaagag

SEQ ID NO: 1025009 - DNA, 15 bp, Homo sapiens
gcctgggtagaaaga

SEQ ID NO: 1025010 - DNA, 15 bp, Homo sapiens
agcctgggtagaaag

SEQ ID NO: 1025011 - DNA, 15 bp, Homo sapiens
gagcctgggtagaaa

SEQ ID NO: 1025012 - DNA, 15 bp, Homo sapiens
agagcctgggtagaa

SEQ ID NO: 1025013 - DNA, 15 bp, Homo sapiens
cagagcctgggtaga

SEQ ID NO: 1025014 - DNA, 15 bp, Homo sapiens
gcagagcctgggtag

SEQ ID NO: 1025015 - DNA, 15 bp, Homo sapiens
tgcagagcctgggta

SEQ ID NO: 1025016 - DNA, 15 bp, Homo sapiens
atgcagagcctgggt

SEQ ID NO: 1025017 - DNA, 15 bp, Homo sapiens
aatgcagagcctggg

SEQ ID NO: 1025018 - DNA, 15 bp, Homo sapiens
caatgcagagcctgg

SEQ ID NO: 1025019 - DNA, 15 bp, Homo sapiens
gcaatgcagagcctg

SEQ ID NO: 1025020 - DNA, 15 bp, Homo sapiens
tgcaatgcagagcct

SEQ ID NO: 1025021 - DNA, 15 bp, Homo sapiens
ttgcaatgcagagcc

SEQ ID NO: 1025022 - DNA, 15 bp, Homo sapiens
tttgcaatgcagagc

SEQ ID NO: 1025023 - DNA, 15 bp, Homo sapiens
atttgcaatgcagag

SEQ ID NO: 1025024 - DNA, 15 bp, Homo sapiens
gatttgcaatgcaga

SEQ ID NO: 1025025 - DNA, 15 bp, Homo sapiens
agatttgcaatgcag

SEQ ID NO: 1025026 - DNA, 15 bp, Homo sapiens
tagatttgcaatgca

SEQ ID NO: 1025027 - DNA, 15 bp, Homo sapiens
atagatttgcaatgc

SEQ ID NO: 1025028 - DNA, 15 bp, Homo sapiens
catagatttgcaatg

SEQ ID NO: 1025029 - DNA, 15 bp, Homo sapiens
ccatagatttgcaat

SEQ ID NO: 1025030 - DNA, 15 bp, Homo sapiens
gccatagatttgcaa

SEQ ID NO: 1025031 - DNA, 15 bp, Homo sapiens
ggccatagatttgca

SEQ ID NO: 1025032 - DNA, 15 bp, Homo sapiens
gggccatagatttgc

SEQ ID NO: 1025033 - DNA, 15 bp, Homo sapiens
tgggccatagatttg

SEQ ID NO: 1025034 - DNA, 15 bp, Homo sapiens
ctgggccatagattt

SEQ ID NO: 1025035 - DNA, 15 bp, Homo sapiens
cctgggccatagatt

SEQ ID NO: 1025036 - DNA, 15 bp, Homo sapiens
ccctgggccatagat

SEQ ID NO: 1025037 - DNA, 15 bp, Homo sapiens
tccctgggccataga

SEQ ID NO: 1025038 - DNA, 15 bp, Homo sapiens
ttccctgggccatag

SEQ ID NO: 1025039 - DNA, 15 bp, Homo sapiens
cttccctgggccata

SEQ ID NO: 1025040 - DNA, 15 bp, Homo sapiens
gcttccctgggccat

SEQ ID NO: 1025041 - DNA, 15 bp, Homo sapiens
tgcttccctgggcca

SEQ ID NO: 1025042 - DNA, 15 bp, Homo sapiens
ctgcttccctgggcc

SEQ ID NO: 1025043 - DNA, 15 bp, Homo sapiens
gctgcttccctgggc

SEQ ID NO: 1025044 - DNA, 15 bp, Homo sapiens
agctgcttccctggg

SEQ ID NO: 1025045 - DNA, 15 bp, Homo sapiens
aagctgcttccctgg

SEQ ID NO: 1025046 - DNA, 15 bp, Homo sapiens
caagctgcttccctg

SEQ ID NO: 1025047 - DNA, 15 bp, Homo sapiens
ccaagctgcttccct

SEQ ID NO: 1025048 - DNA, 15 bp, Homo sapiens
accaagctgcttccc

SEQ ID NO: 1025049 - DNA, 15 bp, Homo sapiens
taccaagctgcttcc

SEQ ID NO: 1025050 - DNA, 15 bp, Homo sapiens
ataccaagctgcttc

SEQ ID NO: 1025051 - DNA, 15 bp, Homo sapiens
tataccaagctgctt

SEQ ID NO: 1025052 - DNA, 15 bp, Homo sapiens
ctataccaagctgct

SEQ ID NO: 1025053 - DNA, 15 bp, Homo sapiens
cctataccaagctgc

SEQ ID NO: 1025054 - DNA, 15 bp, Homo sapiens
gcctataccaagctg

SEQ ID NO: 1025055 - DNA, 15 bp, Homo sapiens
agcctataccaagct

SEQ ID NO: 1025056 - DNA, 15 bp, Homo sapiens
cagcctataccaagc

SEQ ID NO: 1025057 - DNA, 15 bp, Homo sapiens
ccagcctataccaag

SEQ ID NO: 1025058 - DNA, 15 bp, Homo sapiens
gccagcctataccaa

SEQ ID NO: 1025059 - DNA, 15 bp, Homo sapiens
cgccagcctatacca

SEQ ID NO: 1025060 - DNA, 15 bp, Homo sapiens
tcgccagcctatacc

SEQ ID NO: 1025061 - DNA, 15 bp, Homo sapiens
ctcgccagcctatac

SEQ ID NO: 1025062 - DNA, 15 bp, Homo sapiens
cctcgccagcctata

SEQ ID NO: 1025063 - DNA, 15 bp, Homo sapiens
ccctcgccagcctat

SEQ ID NO: 1025064 - DNA, 15 bp, Homo sapiens
tccctcgccagccta

SEQ ID NO: 1025065 - DNA, 15 bp, Homo sapiens
ctccctcgccagcct

SEQ ID NO: 1025066 - DNA, 15 bp, Homo sapiens
gctccctcgccagcc

SEQ ID NO: 1025067 - DNA, 15 bp, Homo sapiens
tgctccctcgccagc

SEQ ID NO: 1025068 - DNA, 15 bp, Homo sapiens
atgctccctcgccag

SEQ ID NO: 1025069 - DNA, 15 bp, Homo sapiens
tatgctccctcgcca

SEQ ID NO: 1025070 - DNA, 15 bp, Homo sapiens
ttatgctccctcgcc

SEQ ID NO: 1025071 - DNA, 15 bp, Homo sapiens
gttatgctccctcgc

SEQ ID NO: 1025072 - DNA, 15 bp, Homo sapiens
agttatgctccctcg

SEQ ID NO: 1025073 - DNA, 15 bp, Homo sapiens
cagttatgctccctc

SEQ ID NO: 1025074 - DNA, 15 bp, Homo sapiens
acagttatgctccct

SEQ ID NO: 1025075 - DNA, 15 bp, Homo sapiens
cacagttatgctccc

SEQ ID NO: 1025076 - DNA, 15 bp, Homo sapiens
ccacagttatgctcc

SEQ ID NO: 1025077 - DNA, 15 bp, Homo sapiens
cccacagttatgctc

SEQ ID NO: 1025078 - DNA, 15 bp, Homo sapiens
ccccacagttatgct

SEQ ID NO: 1025079 - DNA, 15 bp, Homo sapiens
gccccacagttatgc

SEQ ID NO: 1025080 - DNA, 15 bp, Homo sapiens
tgccccacagttatg

SEQ ID NO: 1025081 - DNA, 15 bp, Homo sapiens
ttgccccacagttat

SEQ ID NO: 1025082 - DNA, 15 bp, Homo sapiens
cttgccccacagtta

SEQ ID NO: 1025083 - DNA, 15 bp, Homo sapiens
tcttgccccacagtt

SEQ ID NO: 1025084 - DNA, 15 bp, Homo sapiens
ttcttgccccacagt

SEQ ID NO: 1025085 - DNA, 15 bp, Homo sapiens
gttcttgccccacag

SEQ ID NO: 1025086 - DNA, 15 bp, Homo sapiens
ggttcttgccccaca

SEQ ID NO: 1025087 - DNA, 15 bp, Homo sapiens
gggttcttgccccac

SEQ ID NO: 1025088 - DNA, 15 bp, Homo sapiens
ggggttcttgcccca

SEQ ID NO: 1025089 - DNA, 15 bp, Homo sapiens
gggggttcttgcccc

SEQ ID NO: 1025090 - DNA, 15 bp, Homo sapiens
agggggttcttgccc

SEQ ID NO: 1025091 - DNA, 15 bp, Homo sapiens
gagggggttcttgcc

SEQ ID NO: 1025092 - DNA, 15 bp, Homo sapiens
ggagggggttcttgc

SEQ ID NO: 1025093 - DNA, 15 bp, Homo sapiens
gggagggggttcttg

SEQ ID NO: 1025094 - DNA, 15 bp, Homo sapiens
ggggagggggttctt

SEQ ID NO: 1025095 - DNA, 15 bp, Homo sapiens
tggggagggggttct

SEQ ID NO: 1025096 - DNA, 15 bp, Homo sapiens
gtggggagggggttc

SEQ ID NO: 1025097 - DNA, 15 bp, Homo sapiens
ggtggggagggggtt

SEQ ID NO: 1025098 - DNA, 15 bp, Homo sapiens
gggtggggagggggt

SEQ ID NO: 1025099 - DNA, 15 bp, Homo sapiens
ggggtggggaggggg

SEQ ID NO: 1025100 - DNA, 15 bp, Homo sapiens
tggggtggggagggg

SEQ ID NO: 1025101 - DNA, 15 bp, Homo sapiens
atggggtggggaggg

SEQ ID NO: 1025102 - DNA, 15 bp, Homo sapiens
aatggggtggggagg

SEQ ID NO: 1025103 - DNA, 15 bp, Homo sapiens
gaatggggtggggag

SEQ ID NO: 1025104 - DNA, 15 bp, Homo sapiens
agaatggggtgggga

SEQ ID NO: 1025105 - DNA, 15 bp, Homo sapiens
gagaatggggtgggg

SEQ ID NO: 1025106 - DNA, 15 bp, Homo sapiens
ggagaatggggtggg

SEQ ID NO: 1025107 - DNA, 15 bp, Homo sapiens
gggagaatggggtgg

SEQ ID NO: 1025108 - DNA, 15 bp, Homo sapiens
agggagaatggggtg

SEQ ID NO: 1025109 - DNA, 15 bp, Homo sapiens
aagggagaatggggt

SEQ ID NO: 1025110 - DNA, 15 bp, Homo sapiens
aaagggagaatgggg

SEQ ID NO: 1025111 - DNA, 15 bp, Homo sapiens
aaaagggagaatggg

SEQ ID NO: 1025112 - DNA, 15 bp, Homo sapiens
caaaagggagaatgg

SEQ ID NO: 1025113 - DNA, 15 bp, Homo sapiens
tcaaaagggagaatg

SEQ ID NO: 1025114 - DNA, 15 bp, Homo sapiens
ctcaaaagggagaat

SEQ ID NO: 1025115 - DNA, 15 bp, Homo sapiens
cctcaaaagggagaa

SEQ ID NO: 1025116 - DNA, 15 bp, Homo sapiens
ccctcaaaagggaga

SEQ ID NO: 1025117 - DNA, 15 bp, Homo sapiens
cccctcaaaagggag

SEQ ID NO: 1025118 - DNA, 15 bp, Homo sapiens
acccctcaaaaggga

SEQ ID NO: 1025119 - DNA, 15 bp, Homo sapiens
tacccctcaaaaggg

SEQ ID NO: 1025120 - DNA, 15 bp, Homo sapiens
ttacccctcaaaagg

SEQ ID NO: 1025121 - DNA, 15 bp, Homo sapiens
cttacccctcaaaag

SEQ ID NO: 1025122 - DNA, 15 bp, Homo sapiens
acttacccctcaaaa

SEQ ID NO: 1025123 - DNA, 15 bp, Homo sapiens
aacttacccctcaaa

SEQ ID NO: 1025124 - DNA, 15 bp, Homo sapiens
caacttacccctcaa

SEQ ID NO: 1025125 - DNA, 15 bp, Homo sapiens
ccaacttacccctca

SEQ ID NO: 1025126 - DNA, 15 bp, Homo sapiens
gccaacttacccctc

SEQ ID NO: 1025127 - DNA, 15 bp, Homo sapiens
agccaacttacccct

SEQ ID NO: 1025128 - DNA, 15 bp, Homo sapiens
aagccaacttacccc

SEQ ID NO: 1025129 - DNA, 15 bp, Homo sapiens
aaagccaacttaccc

SEQ ID NO: 1025130 - DNA, 15 bp, Homo sapiens
taaagccaacttacc

SEQ ID NO: 1025131 - DNA, 15 bp, Homo sapiens
ttaaagccaacttac

SEQ ID NO: 1025132 - DNA, 15 bp, Homo sapiens
attaaagccaactta

SEQ ID NO: 1025133 - DNA, 15 bp, Homo sapiens
cattaaagccaactt

SEQ ID NO: 1025134 - DNA, 15 bp, Homo sapiens
tcattaaagccaact

SEQ ID NO: 1025135 - DNA, 15 bp, Homo sapiens
ctcattaaagccaac

SEQ ID NO: 1025136 - DNA, 15 bp, Homo sapiens
actcattaaagccaa

SEQ ID NO: 1025137 - DNA, 15 bp, Homo sapiens
gactcattaaagcca

SEQ ID NO: 1025138 - DNA, 15 bp, Homo sapiens
ggactcattaaagcc

SEQ ID NO: 1025139 - DNA, 15 bp, Homo sapiens
aggactcattaaagc

SEQ ID NO: 1025140 - DNA, 15 bp, Homo sapiens
gaggactcattaaag

SEQ ID NO: 1025141 - DNA, 15 bp, Homo sapiens
ggaggactcattaaa

SEQ ID NO: 1025142 - DNA, 15 bp, Homo sapiens
gggaggactcattaa

SEQ ID NO: 1025143 - DNA, 15 bp, Homo sapiens
agggaggactcatta

SEQ ID NO: 1025144 - DNA, 15 bp, Homo sapiens
cagggaggactcatt

SEQ ID NO: 1025145 - DNA, 15 bp, Homo sapiens
gcagggaggactcat

SEQ ID NO: 1025146 - DNA, 15 bp, Homo sapiens
ggcagggaggactca

SEQ ID NO: 1025147 - DNA, 15 bp, Homo sapiens
gggcagggaggactc

SEQ ID NO: 1025148 - DNA, 15 bp, Homo sapiens
ggggcagggaggact

SEQ ID NO: 1025149 - DNA, 15 bp, Homo sapiens
gggggcagggaggac

SEQ ID NO: 1025150 - DNA, 15 bp, Homo sapiens
tgggggcagggagga

SEQ ID NO: 1025151 - DNA, 15 bp, Homo sapiens
ctgggggcagggagg

SEQ ID NO: 1025152 - DNA, 15 bp, Homo sapiens
gctgggggcagggag

SEQ ID NO: 1025153 - DNA, 15 bp, Homo sapiens
agctgggggcaggga

SEQ ID NO: 1025154 - DNA, 15 bp, Homo sapiens
cagctgggggcaggg

SEQ ID NO: 1025155 - DNA, 15 bp, Homo sapiens
gcagctgggggcagg

SEQ ID NO: 1025156 - DNA, 15 bp, Homo sapiens
ggcagctgggggcag

SEQ ID NO: 1025157 - DNA, 15 bp, Homo sapiens
aggcagctgggggca

SEQ ID NO: 1025158 - DNA, 15 bp, Homo sapiens
gaggcagctgggggc

SEQ ID NO: 1025159 - DNA, 15 bp, Homo sapiens
agaggcagctggggg

SEQ ID NO: 1025160 - DNA, 15 bp, Homo sapiens
gagaggcagctgggg

SEQ ID NO: 1025161 - DNA, 15 bp, Homo sapiens
agagaggcagctggg

SEQ ID NO: 1025162 - DNA, 15 bp, Homo sapiens
gagagaggcagctgg

SEQ ID NO: 1025163 - DNA, 15 bp, Homo sapiens
agagagaggcagctg

SEQ ID NO: 1025164 - DNA, 15 bp, Homo sapiens
aagagagaggcagct

SEQ ID NO: 1025165 - DNA, 15 bp, Homo sapiens
caagagagaggcagc

SEQ ID NO: 1025166 - DNA, 15 bp, Homo sapiens
gcaagagagaggcag

SEQ ID NO: 1025167 - DNA, 15 bp, Homo sapiens
agcaagagagaggca

SEQ ID NO: 1025168 - DNA, 15 bp, Homo sapiens
gagcaagagagaggc

SEQ ID NO: 1025169 - DNA, 15 bp, Homo sapiens
ggagcaagagagagg

SEQ ID NO: 1025170 - DNA, 15 bp, Homo sapiens
aggagcaagagagag

SEQ ID NO: 1025171 - DNA, 15 bp, Homo sapiens
caggagcaagagaga

SEQ ID NO: 1025172 - DNA, 15 bp, Homo sapiens
acaggagcaagagag

SEQ ID NO: 1025173 - DNA, 15 bp, Homo sapiens
aacaggagcaagaga

SEQ ID NO: 1025174 - DNA, 15 bp, Homo sapiens
aaacaggagcaagag

SEQ ID NO: 1025175 - DNA, 15 bp, Homo sapiens
gaaacaggagcaaga

SEQ ID NO: 1025176 - DNA, 15 bp, Homo sapiens
tgaaacaggagcaag

SEQ ID NO: 1025177 - DNA, 15 bp, Homo sapiens
atgaaacaggagcaa

SEQ ID NO: 1025178 - DNA, 15 bp, Homo sapiens
catgaaacaggagca

SEQ ID NO: 1025179 - DNA, 15 bp, Homo sapiens
ccatgaaacaggagc

SEQ ID NO: 1025180 - DNA, 15 bp, Homo sapiens
gccatgaaacaggag

SEQ ID NO: 1025181 - DNA, 15 bp, Homo sapiens
tgccatgaaacagga

SEQ ID NO: 1025182 - DNA, 15 bp, Homo sapiens
ctgccatgaaacagg

SEQ ID NO: 1025183 - DNA, 15 bp, Homo sapiens
gctgccatgaaacag

SEQ ID NO: 1025184 - DNA, 15 bp, Homo sapiens
agctgccatgaaaca

SEQ ID NO: 1025185 - DNA, 15 bp, Homo sapiens
cagctgccatgaaac

SEQ ID NO: 1025186 - DNA, 15 bp, Homo sapiens
acagctgccatgaaa

SEQ ID NO: 1025187 - DNA, 15 bp, Homo sapiens
aacagctgccatgaa

SEQ ID NO: 1025188 - DNA, 15 bp, Homo sapiens
caacagctgccatga

SEQ ID NO: 1025189 - DNA, 15 bp, Homo sapiens
gcaacagctgccatg

SEQ ID NO: 1025190 - DNA, 15 bp, Homo sapiens
ggcaacagctgccat

SEQ ID NO: 1025191 - DNA, 15 bp, Homo sapiens
tggcaacagctgcca

SEQ ID NO: 1025192 - DNA, 15 bp, Homo sapiens
ttggcaacagctgcc

SEQ ID NO: 1025193 - DNA, 15 bp, Homo sapiens
attggcaacagctgc

SEQ ID NO: 1025194 - DNA, 15 bp, Homo sapiens
aattggcaacagctg

SEQ ID NO: 1025195 - DNA, 15 bp, Homo sapiens
aaattggcaacagct

SEQ ID NO: 1025196 - DNA, 15 bp, Homo sapiens
gaaattggcaacagc

SEQ ID NO: 1025197 - DNA, 15 bp, Homo sapiens
tgaaattggcaacag

SEQ ID NO: 1025198 - DNA, 15 bp, Homo sapiens
ctgaaattggcaaca

SEQ ID NO: 1025199 - DNA, 15 bp, Homo sapiens
gctgaaattggcaac

SEQ ID NO: 1025200 - DNA, 15 bp, Homo sapiens
tgctgaaattggcaa

SEQ ID NO: 1025201 - DNA, 15 bp, Homo sapiens
ttgctgaaattggca

SEQ ID NO: 1025202 - DNA, 15 bp, Homo sapiens
attgctgaaattggc

SEQ ID NO: 1025203 - DNA, 15 bp, Homo sapiens
aattgctgaaattgg

SEQ ID NO: 1025204 - DNA, 15 bp, Homo sapiens
aaattgctgaaattg

SEQ ID NO: 1025205 - DNA, 15 bp, Homo sapiens
aaaattgctgaaatt

SEQ ID NO: 1025206 - DNA, 15 bp, Homo sapiens
gaaaattgctgaaat

SEQ ID NO: 1025207 - DNA, 15 bp, Homo sapiens
agaaaattgctgaaa

SEQ ID NO: 1025208 - DNA, 15 bp, Homo sapiens
aagaaaattgctgaa

SEQ ID NO: 1025209 - DNA, 15 bp, Homo sapiens
gaagaaaattgctga

SEQ ID NO: 1025210 - DNA, 15 bp, Homo sapiens
ggaagaaaattgctg

SEQ ID NO: 1025211 - DNA, 15 bp, Homo sapiens
cggaagaaaattgct

SEQ ID NO: 1025212 - DNA, 15 bp, Homo sapiens
ccggaagaaaattgc

SEQ ID NO: 1025213 - DNA, 15 bp, Homo sapiens
accggaagaaaattg

SEQ ID NO: 1025214 - DNA, 15 bp, Homo sapiens
caccggaagaaaatt

SEQ ID NO: 1025215 - DNA, 15 bp, Homo sapiens
tcaccggaagaaaat

SEQ ID NO: 1025216 - DNA, 15 bp, Homo sapiens
ttcaccggaagaaaa

SEQ ID NO: 1025217 - DNA, 15 bp, Homo sapiens
attcaccggaagaaa

SEQ ID NO: 1025218 - DNA, 15 bp, Homo sapiens
aattcaccggaagaa

SEQ ID NO: 1025219 - DNA, 15 bp, Homo sapiens
caattcaccggaaga

SEQ ID NO: 1025220 - DNA, 15 bp, Homo sapiens
tcaattcaccggaag

SEQ ID NO: 1025221 - DNA, 15 bp, Homo sapiens
ttcaattcaccggaa

SEQ ID NO: 1025222 - DNA, 15 bp, Homo sapiens
cttcaattcaccgga

SEQ ID NO: 1025223 - DNA, 15 bp, Homo sapiens
ccttcaattcaccgg

SEQ ID NO: 1025224 - DNA, 15 bp, Homo sapiens
gccttcaattcaccg

SEQ ID NO: 1025225 - DNA, 15 bp, Homo sapiens
agccttcaattcacc

SEQ ID NO: 1025226 - DNA, 15 bp, Homo sapiens
gagccttcaattcac

SEQ ID NO: 1025227 - DNA, 15 bp, Homo sapiens
ggagccttcaattca

SEQ ID NO: 1025228 - DNA, 15 bp, Homo sapiens
tggagccttcaattc

SEQ ID NO: 1025229 - DNA, 15 bp, Homo sapiens
ctggagccttcaatt

SEQ ID NO: 1025230 - DNA, 15 bp, Homo sapiens
cctggagccttcaat

SEQ ID NO: 1025231 - DNA, 15 bp, Homo sapiens
acctggagccttcaa

SEQ ID NO: 1025232 - DNA, 15 bp, Homo sapiens
cacctggagccttca

SEQ ID NO: 1025233 - DNA, 15 bp, Homo sapiens
tcacctggagccttc

SEQ ID NO: 1025234 - DNA, 15 bp, Homo sapiens
gtcacctggagcctt

SEQ ID NO: 1025235 - DNA, 15 bp, Homo sapiens
tgtcacctggagcct

SEQ ID NO: 1025236 - DNA, 15 bp, Homo sapiens
ttgtcacctggagcc

SEQ ID NO: 1025237 - DNA, 15 bp, Homo sapiens
tttgtcacctggagc

SEQ ID NO: 1025238 - DNA, 15 bp, Homo sapiens
ctttgtcacctggag

SEQ ID NO: 1025239 - DNA, 15 bp, Homo sapiens
cctttgtcacctgga

SEQ ID NO: 1025240 - DNA, 15 bp, Homo sapiens
ccctttgtcacctgg

SEQ ID NO: 1025241 - DNA, 15 bp, Homo sapiens
tccctttgtcacctg

SEQ ID NO: 1025242 - DNA, 15 bp, Homo sapiens
ctccctttgtcacct

SEQ ID NO: 1025243 - DNA, 15 bp, Homo sapiens
actccctttgtcacc

SEQ ID NO: 1025244 - DNA, 15 bp, Homo sapiens
aactccctttgtcac

SEQ ID NO: 1025245 - DNA, 15 bp, Homo sapiens
caactccctttgtca

SEQ ID NO: 1025246 - DNA, 15 bp, Homo sapiens
ccaactccctttgtc

SEQ ID NO: 1025247 - DNA, 15 bp, Homo sapiens
gccaactccctttgt

SEQ ID NO: 1025248 - DNA, 15 bp, Homo sapiens
ggccaactccctttg

SEQ ID NO: 1025249 - DNA, 15 bp, Homo sapiens
tggccaactcccttt

SEQ ID NO: 1025250 - DNA, 15 bp, Homo sapiens
atggccaactccctt

SEQ ID NO: 1025251 - DNA, 15 bp, Homo sapiens
tatggccaactccct

SEQ ID NO: 1025252 - DNA, 15 bp, Homo sapiens
atatggccaactccc

SEQ ID NO: 1025253 - DNA, 15 bp, Homo sapiens
gatatggccaactcc

SEQ ID NO: 1025254 - DNA, 15 bp, Homo sapiens
ggatatggccaactc

SEQ ID NO: 1025255 - DNA, 15 bp, Homo sapiens
aggatatggccaact

SEQ ID NO: 1025256 - DNA, 15 bp, Homo sapiens
gaggatatggccaac

SEQ ID NO: 1025257 - DNA, 15 bp, Homo sapiens
ggaggatatggccaa

SEQ ID NO: 1025258 - DNA, 15 bp, Homo sapiens
aggaggatatggcca

SEQ ID NO: 1025259 - DNA, 15 bp, Homo sapiens
caggaggatatggcc

SEQ ID NO: 1025260 - DNA, 15 bp, Homo sapiens
ccaggaggatatggc

SEQ ID NO: 1025261 - DNA, 15 bp, Homo sapiens
tccaggaggatatgg

SEQ ID NO: 1025262 - DNA, 15 bp, Homo sapiens
ttccaggaggatatg

SEQ ID NO: 1025263 - DNA, 15 bp, Homo sapiens
tttccaggaggatat

SEQ ID NO: 1025264 - DNA, 15 bp, Homo sapiens
ttttccaggaggata

SEQ ID NO: 1025265 - DNA, 15 bp, Homo sapiens
attttccaggaggat

SEQ ID NO: 1025266 - DNA, 15 bp, Homo sapiens
tattttccaggagga

SEQ ID NO: 1025267 - DNA, 15 bp, Homo sapiens
ttattttccaggagg

SEQ ID NO: 1025268 - DNA, 15 bp, Homo sapiens
cttattttccaggag

SEQ ID NO: 1025269 - DNA, 15 bp, Homo sapiens
tcttattttccagga

SEQ ID NO: 1025270 - DNA, 15 bp, Homo sapiens
atcttattttccagg

SEQ ID NO: 1025271 - DNA, 15 bp, Homo sapiens
tatcttattttccag

SEQ ID NO: 1025272 - DNA, 15 bp, Homo sapiens
ctatcttattttcca

SEQ ID NO: 1025273 - DNA, 15 bp, Homo sapiens
gctatcttattttcc

SEQ ID NO: 1025274 - DNA, 15 bp, Homo sapiens
ggctatcttattttc

SEQ ID NO: 1025275 - DNA, 15 bp, Homo sapiens
aggctatcttatttt

SEQ ID NO: 1025276 - DNA, 15 bp, Homo sapiens
caggctatcttattt

SEQ ID NO: 1025277 - DNA, 15 bp, Homo sapiens
ccaggctatcttatt

SEQ ID NO: 1025278 - DNA, 15 bp, Homo sapiens
cccaggctatcttat

SEQ ID NO: 1025279 - DNA, 15 bp, Homo sapiens
acccaggctatctta

SEQ ID NO: 1025280 - DNA, 15 bp, Homo sapiens
aacccaggctatctt

SEQ ID NO: 1025281 - DNA, 15 bp, Homo sapiens
gaacccaggctatct

SEQ ID NO: 1025282 - DNA, 15 bp, Homo sapiens
ggaacccaggctatc

SEQ ID NO: 1025283 - DNA, 15 bp, Homo sapiens
tggaacccaggctat

SEQ ID NO: 1025284 - DNA, 15 bp, Homo sapiens
gtggaacccaggcta

SEQ ID NO: 1025285 - DNA, 15 bp, Homo sapiens
agtggaacccaggct

SEQ ID NO: 1025286 - DNA, 15 bp, Homo sapiens
gagtggaacccaggc

SEQ ID NO: 1025287 - DNA, 15 bp, Homo sapiens
agagtggaacccagg

SEQ ID NO: 1025288 - DNA, 15 bp, Homo sapiens
gagagtggaacccag

SEQ ID NO: 1025289 - DNA, 15 bp, Homo sapiens
tgagagtggaaccca

SEQ ID NO: 1025290 - DNA, 15 bp, Homo sapiens
gtgagagtggaaccc

SEQ ID NO: 1025291 - DNA, 15 bp, Homo sapiens
ggtgagagtggaacc

SEQ ID NO: 1025292 - DNA, 15 bp, Homo sapiens
gggtgagagtggaac

SEQ ID NO: 1025293 - DNA, 15 bp, Homo sapiens
ggggtgagagtggaa

SEQ ID NO: 1025294 - DNA, 15 bp, Homo sapiens
tggggtgagagtgga

SEQ ID NO: 1025295 - DNA, 15 bp, Homo sapiens
gtggggtgagagtgg

SEQ ID NO: 1025296 - DNA, 15 bp, Homo sapiens
ggtggggtgagagtg

SEQ ID NO: 1025297 - DNA, 15 bp, Homo sapiens
gggtggggtgagagt

SEQ ID NO: 1025298 - DNA, 15 bp, Homo sapiens
ggggtggggtgagag

SEQ ID NO: 1025299 - DNA, 15 bp, Homo sapiens
aggggtggggtgaga

SEQ ID NO: 1025300 - DNA, 15 bp, Homo sapiens
caggggtggggtgag

SEQ ID NO: 1025301 - DNA, 15 bp, Homo sapiens
tcaggggtggggtga

SEQ ID NO: 1025302 - DNA, 15 bp, Homo sapiens
gtcaggggtggggtg

SEQ ID NO: 1025303 - DNA, 15 bp, Homo sapiens
ggtcaggggtggggt

SEQ ID NO: 1025304 - DNA, 15 bp, Homo sapiens
gggtcaggggtgggg

SEQ ID NO: 1025305 - DNA, 15 bp, Homo sapiens
agggtcaggggtggg

SEQ ID NO: 1025306 - DNA, 15 bp, Homo sapiens
cagggtcaggggtgg

SEQ ID NO: 1025307 - DNA, 15 bp, Homo sapiens
ccagggtcaggggtg

SEQ ID NO: 1025308 - DNA, 15 bp, Homo sapiens
tccagggtcaggggt

SEQ ID NO: 1025309 - DNA, 15 bp, Homo sapiens
gtccagggtcagggg

SEQ ID NO: 1025310 - DNA, 15 bp, Homo sapiens
agtccagggtcaggg

SEQ ID NO: 1025311 - DNA, 15 bp, Homo sapiens
cagtccagggtcagg

SEQ ID NO: 1025312 - DNA, 15 bp, Homo sapiens
ccagtccagggtcag

SEQ ID NO: 1025313 - DNA, 15 bp, Homo sapiens
cccagtccagggtca

SEQ ID NO: 1025314 - DNA, 15 bp, Homo sapiens
acccagtccagggtc

SEQ ID NO: 1025315 - DNA, 15 bp, Homo sapiens
cacccagtccagggt

SEQ ID NO: 1025316 - DNA, 15 bp, Homo sapiens
ccacccagtccaggg

SEQ ID NO: 1025317 - DNA, 15 bp, Homo sapiens
gccacccagtccagg

SEQ ID NO: 1025318 - DNA, 15 bp, Homo sapiens
agccacccagtccag

SEQ ID NO: 1025319 - DNA, 15 bp, Homo sapiens
tagccacccagtcca

SEQ ID NO: 1025320 - DNA, 15 bp, Homo sapiens
ctagccacccagtcc

SEQ ID NO: 1025321 - DNA, 15 bp, Homo sapiens
cctagccacccagtc

SEQ ID NO: 1025322 - DNA, 15 bp, Homo sapiens
ccctagccacccagt

SEQ ID NO: 1025323 - DNA, 15 bp, Homo sapiens
gccctagccacccag

SEQ ID NO: 1025324 - DNA, 15 bp, Homo sapiens
agccctagccaccca

SEQ ID NO: 1025325 - DNA, 15 bp, Homo sapiens
gagccctagccaccc

SEQ ID NO: 1025326 - DNA, 15 bp, Homo sapiens
tgagccctagccacc

SEQ ID NO: 1025327 - DNA, 15 bp, Homo sapiens
gtgagccctagccac

SEQ ID NO: 1025328 - DNA, 15 bp, Homo sapiens
agtgagccctagcca

SEQ ID NO: 1025329 - DNA, 15 bp, Homo sapiens
aagtgagccctagcc

SEQ ID NO: 1025330 - DNA, 15 bp, Homo sapiens
aaagtgagccctagc

SEQ ID NO: 1025331 - DNA, 15 bp, Homo sapiens
gaaagtgagccctag

SEQ ID NO: 1025332 - DNA, 15 bp, Homo sapiens
ggaaagtgagcccta

SEQ ID NO: 1025333 - DNA, 15 bp, Homo sapiens
gggaaagtgagccct

SEQ ID NO: 1025334 - DNA, 15 bp, Homo sapiens
tgggaaagtgagccc

SEQ ID NO: 1025335 - DNA, 15 bp, Homo sapiens
ctgggaaagtgagcc

SEQ ID NO: 1025336 - DNA, 15 bp, Homo sapiens
actgggaaagtgagc

SEQ ID NO: 1025337 - DNA, 15 bp, Homo sapiens
cactgggaaagtgag

SEQ ID NO: 1025338 - DNA, 15 bp, Homo sapiens
tcactgggaaagtga

SEQ ID NO: 1025339 - DNA, 15 bp, Homo sapiens
ctcactgggaaagtg

SEQ ID NO: 1025340 - DNA, 15 bp, Homo sapiens
gctcactgggaaagt

SEQ ID NO: 1025341 - DNA, 15 bp, Homo sapiens
tgctcactgggaaag

SEQ ID NO: 1025342 - DNA, 15 bp, Homo sapiens
atgctcactgggaaa

SEQ ID NO: 1025343 - DNA, 15 bp, Homo sapiens
catgctcactgggaa

SEQ ID NO: 1025344 - DNA, 15 bp, Homo sapiens
acatgctcactggga

SEQ ID NO: 1025345 - DNA, 15 bp, Homo sapiens
gacatgctcactggg

SEQ ID NO: 1025346 - DNA, 15 bp, Homo sapiens
tgacatgctcactgg

SEQ ID NO: 1025347 - DNA, 15 bp, Homo sapiens
gtgacatgctcactg

SEQ ID NO: 1025348 - DNA, 15 bp, Homo sapiens
tgtgacatgctcact

SEQ ID NO: 1025349 - DNA, 15 bp, Homo sapiens
ttgtgacatgctcac

SEQ ID NO: 1025350 - DNA, 15 bp, Homo sapiens
gttgtgacatgctca

SEQ ID NO: 1025351 - DNA, 15 bp, Homo sapiens
ggttgtgacatgctc

SEQ ID NO: 1025352 - DNA, 15 bp, Homo sapiens
gggttgtgacatgct

SEQ ID NO: 1025353 - DNA, 15 bp, Homo sapiens
agggttgtgacatgc

SEQ ID NO: 1025354 - DNA, 15 bp, Homo sapiens
aagggttgtgacatg

SEQ ID NO: 1025355 - DNA, 15 bp, Homo sapiens
gaagggttgtgacat

SEQ ID NO: 1025356 - DNA, 15 bp, Homo sapiens
ggaagggttgtgaca

SEQ ID NO: 1025357 - DNA, 15 bp, Homo sapiens
gggaagggttgtgac

SEQ ID NO: 1025358 - DNA, 15 bp, Homo sapiens
tgggaagggttgtga

SEQ ID NO: 1025359 - DNA, 15 bp, Homo sapiens
atgggaagggttgtg

SEQ ID NO: 1025360 - DNA, 15 bp, Homo sapiens
gatgggaagggttgt

SEQ ID NO: 1025361 - DNA, 15 bp, Homo sapiens
tgatgggaagggttg

SEQ ID NO: 1025362 - DNA, 15 bp, Homo sapiens
gtgatgggaagggtt

SEQ ID NO: 1025363 - DNA, 15 bp, Homo sapiens
ggtgatgggaagggt

SEQ ID NO: 1025364 - DNA, 15 bp, Homo sapiens
tggtgatgggaaggg

SEQ ID NO: 1025365 - DNA, 15 bp, Homo sapiens
gtggtgatgggaagg

SEQ ID NO: 1025366 - DNA, 15 bp, Homo sapiens
ggtggtgatgggaag

SEQ ID NO: 1025367 - DNA, 15 bp, Homo sapiens
gggtggtgatgggaa

SEQ ID NO: 1025368 - DNA, 15 bp, Homo sapiens
ggggtggtgatggga

SEQ ID NO: 1025369 - DNA, 15 bp, Homo sapiens
gggggtggtgatggg

SEQ ID NO: 1025370 - DNA, 15 bp, Homo sapiens
ggggggtggtgatgg

SEQ ID NO: 1025371 - DNA, 15 bp, Homo sapiens
tggggggtggtgatg

SEQ ID NO: 1025372 - DNA, 15 bp, Homo sapiens
gtggggggtggtgat

SEQ ID NO: 1025373 - DNA, 15 bp, Homo sapiens
ggtggggggtggtga

SEQ ID NO: 1025374 - DNA, 15 bp, Homo sapiens
tggtggggggtggtg

SEQ ID NO: 1025375 - DNA, 15 bp, Homo sapiens
gtggtggggggtggt

SEQ ID NO: 1025376 - DNA, 15 bp, Homo sapiens
tgtggtggggggtgg

SEQ ID NO: 1025377 - DNA, 15 bp, Homo sapiens
atgtggtggggggtg

SEQ ID NO: 1025378 - DNA, 15 bp, Homo sapiens
tatgtggtggggggt

SEQ ID NO: 1025379 - DNA, 15 bp, Homo sapiens
gtatgtggtgggggg

SEQ ID NO: 1025380 - DNA, 15 bp, Homo sapiens
tgtatgtggtggggg

SEQ ID NO: 1025381 - DNA, 15 bp, Homo sapiens
gtgtatgtggtgggg

SEQ ID NO: 1025382 - DNA, 15 bp, Homo sapiens
tgtgtatgtggtggg

SEQ ID NO: 1025383 - DNA, 15 bp, Homo sapiens
gtgtgtatgtggtgg

SEQ ID NO: 1025384 - DNA, 15 bp, Homo sapiens
tgtgtgtatgtggtg

SEQ ID NO: 1025385 - DNA, 15 bp, Homo sapiens
gtgtgtgtatgtggt

SEQ ID NO: 1025386 - DNA, 15 bp, Homo sapiens
tgtgtgtgtatgtgg

SEQ ID NO: 1025387 - DNA, 15 bp, Homo sapiens
gtgtgtgtgtatgtg

SEQ ID NO: 1025388 - DNA, 15 bp, Homo sapiens
ctgtgtgtgtgtatg

SEQ ID NO: 1025389 - DNA, 15 bp, Homo sapiens
gctgtgtgtgtgtat

SEQ ID NO: 1025390 - DNA, 15 bp, Homo sapiens
tgctgtgtgtgtgta

SEQ ID NO: 1025391 - DNA, 15 bp, Homo sapiens
ctgctgtgtgtgtgt

SEQ ID NO: 1025392 - DNA, 15 bp, Homo sapiens
cctgctgtgtgtgtg

SEQ ID NO: 1025393 - DNA, 15 bp, Homo sapiens
gcctgctgtgtgtgt

SEQ ID NO: 1025394 - DNA, 15 bp, Homo sapiens
agcctgctgtgtgtg

SEQ ID NO: 1025395 - DNA, 15 bp, Homo sapiens
aagcctgctgtgtgt

SEQ ID NO: 1025396 - DNA, 15 bp, Homo sapiens
gaagcctgctgtgtg

SEQ ID NO: 1025397 - DNA, 15 bp, Homo sapiens
ggaagcctgctgtgt

SEQ ID NO: 1025398 - DNA, 15 bp, Homo sapiens
tggaagcctgctgtg

SEQ ID NO: 1025399 - DNA, 15 bp, Homo sapiens
ctggaagcctgctgt

SEQ ID NO: 1025400 - DNA, 15 bp, Homo sapiens
cctggaagcctgctg

SEQ ID NO: 1025401 - DNA, 15 bp, Homo sapiens
acctggaagcctgct

SEQ ID NO: 1025402 - DNA, 15 bp, Homo sapiens
cacctggaagcctgc

SEQ ID NO: 1025403 - DNA, 15 bp, Homo sapiens
acacctggaagcctg

SEQ ID NO: 1025404 - DNA, 15 bp, Homo sapiens
tacacctggaagcct

SEQ ID NO: 1025405 - DNA, 15 bp, Homo sapiens
atacacctggaagcc

SEQ ID NO: 1025406 - DNA, 15 bp, Homo sapiens
catacacctggaagc

SEQ ID NO: 1025407 - DNA, 15 bp, Homo sapiens
acatacacctggaag

SEQ ID NO: 1025408 - DNA, 15 bp, Homo sapiens
gacatacacctggaa

SEQ ID NO: 1025409 - DNA, 15 bp, Homo sapiens
ggacatacacctgga

SEQ ID NO: 1025410 - DNA, 15 bp, Homo sapiens
tggacatacacctgg

SEQ ID NO: 1025411 - DNA, 15 bp, Homo sapiens
atggacatacacctg

SEQ ID NO: 1025412 - DNA, 15 bp, Homo sapiens
aatggacatacacct

SEQ ID NO: 1025413 - DNA, 15 bp, Homo sapiens
aaatggacatacacc

SEQ ID NO: 1025414 - DNA, 15 bp, Homo sapiens
gaaatggacatacac

SEQ ID NO: 1025415 - DNA, 15 bp, Homo sapiens
agaaatggacataca

SEQ ID NO: 1025416 - DNA, 15 bp, Homo sapiens
aagaaatggacatac

SEQ ID NO: 1025417 - DNA, 15 bp, Homo sapiens
taagaaatggacata

SEQ ID NO: 1025418 - DNA, 15 bp, Homo sapiens
ttaagaaatggacat

SEQ ID NO: 1025419 - DNA, 15 bp, Homo sapiens
tttaagaaatggaca

SEQ ID NO: 1025420 - DNA, 15 bp, Homo sapiens
gtttaagaaatggac

SEQ ID NO: 1025421 - DNA, 15 bp, Homo sapiens
ggtttaagaaatgga

SEQ ID NO: 1025422 - DNA, 15 bp, Homo sapiens
gggtttaagaaatgg

SEQ ID NO: 1025423 - DNA, 15 bp, Homo sapiens
agggtttaagaaatg

SEQ ID NO: 1025424 - DNA, 15 bp, Homo sapiens
cagggtttaagaaat

SEQ ID NO: 1025425 - DNA, 15 bp, Homo sapiens
acagggtttaagaaa

SEQ ID NO: 1025426 - DNA, 15 bp, Homo sapiens
aacagggtttaagaa

SEQ ID NO: 1025427 - DNA, 15 bp, Homo sapiens
aaacagggtttaaga

SEQ ID NO: 1025428 - DNA, 15 bp, Homo sapiens
caaacagggtttaag

SEQ ID NO: 1025429 - DNA, 15 bp, Homo sapiens
tcaaacagggtttaa

SEQ ID NO: 1025430 - DNA, 15 bp, Homo sapiens
ttcaaacagggttta

SEQ ID NO: 1025431 - DNA, 15 bp, Homo sapiens
tttcaaacagggttt

SEQ ID NO: 1025432 - DNA, 15 bp, Homo sapiens
ctttcaaacagggtt

SEQ ID NO: 1025433 - DNA, 15 bp, Homo sapiens
cctttcaaacagggt

SEQ ID NO: 1025434 - DNA, 15 bp, Homo sapiens
tcctttcaaacaggg

SEQ ID NO: 1025435 - DNA, 15 bp, Homo sapiens
ttcctttcaaacagg

SEQ ID NO: 1025436 - DNA, 15 bp, Homo sapiens
gttcctttcaaacag

SEQ ID NO: 1025437 - DNA, 15 bp, Homo sapiens
agttcctttcaaaca

SEQ ID NO: 1025438 - DNA, 15 bp, Homo sapiens
aagttcctttcaaac

SEQ ID NO: 1025439 - DNA, 15 bp, Homo sapiens
gaagttcctttcaaa

SEQ ID NO: 1025440 - DNA, 15 bp, Homo sapiens
tgaagttcctttcaa

SEQ ID NO: 1025441 - DNA, 15 bp, Homo sapiens
ctgaagttcctttca

SEQ ID NO: 1025442 - DNA, 15 bp, Homo sapiens
tctgaagttcctttc

SEQ ID NO: 1025443 - DNA, 15 bp, Homo sapiens
atctgaagttccttt

SEQ ID NO: 1025444 - DNA, 15 bp, Homo sapiens
aatctgaagttcctt

SEQ ID NO: 1025445 - DNA, 15 bp, Homo sapiens
gaatctgaagttcct

SEQ ID NO: 1025446 - DNA, 15 bp, Homo sapiens
agaatctgaagttcc

SEQ ID NO: 1025447 - DNA, 15 bp, Homo sapiens
aagaatctgaagttc

SEQ ID NO: 1025448 - DNA, 15 bp, Homo sapiens
gaagaatctgaagtt

SEQ ID NO: 1025449 - DNA, 15 bp, Homo sapiens
ggaagaatctgaagt

SEQ ID NO: 1025450 - DNA, 15 bp, Homo sapiens
aggaagaatctgaag

SEQ ID NO: 1025451 - DNA, 15 bp, Homo sapiens
gaggaagaatctgaa

SEQ ID NO: 1025452 - DNA, 15 bp, Homo sapiens
tgaggaagaatctga

SEQ ID NO: 1025453 - DNA, 15 bp, Homo sapiens
ctgaggaagaatctg

SEQ ID NO: 1025454 - DNA, 15 bp, Homo sapiens
actgaggaagaatct

SEQ ID NO: 1025455 - DNA, 15 bp, Homo sapiens
aactgaggaagaatc

SEQ ID NO: 1025456 - DNA, 15 bp, Homo sapiens
gaactgaggaagaat

SEQ ID NO: 1025457 - DNA, 15 bp, Homo sapiens
tgaactgaggaagaa

SEQ ID NO: 1025458 - DNA, 15 bp, Homo sapiens
atgaactgaggaaga

SEQ ID NO: 1025459 - DNA, 15 bp, Homo sapiens
aatgaactgaggaag

SEQ ID NO: 1025460 - DNA, 15 bp, Homo sapiens
gaatgaactgaggaa

SEQ ID NO: 1025461 - DNA, 15 bp, Homo sapiens
agaatgaactgagga

SEQ ID NO: 1025462 - DNA, 15 bp, Homo sapiens
gagaatgaactgagg

SEQ ID NO: 1025463 - DNA, 15 bp, Homo sapiens
tgagaatgaactgag

SEQ ID NO: 1025464 - DNA, 15 bp, Homo sapiens
ctgagaatgaactga

SEQ ID NO: 1025465 - DNA, 15 bp, Homo sapiens
gctgagaatgaactg

SEQ ID NO: 1025466 - DNA, 15 bp, Homo sapiens
agctgagaatgaact

SEQ ID NO: 1025467 - DNA, 15 bp, Homo sapiens
gagctgagaatgaac

SEQ ID NO: 1025468 - DNA, 15 bp, Homo sapiens
tgagctgagaatgaa

SEQ ID NO: 1025469 - DNA, 15 bp, Homo sapiens
atgagctgagaatga

SEQ ID NO: 1025470 - DNA, 15 bp, Homo sapiens
gatgagctgagaatg

SEQ ID NO: 1025471 - DNA, 15 bp, Homo sapiens
agatgagctgagaat

SEQ ID NO: 1025472 - DNA, 15 bp, Homo sapiens
cagatgagctgagaa

SEQ ID NO: 1025473 - DNA, 15 bp, Homo sapiens
acagatgagctgaga

SEQ ID NO: 1025474 - DNA, 15 bp, Homo sapiens
aacagatgagctgag

SEQ ID NO: 1025475 - DNA, 15 bp, Homo sapiens
aaacagatgagctga

SEQ ID NO: 1025476 - DNA, 15 bp, Homo sapiens
aaaacagatgagctg

SEQ ID NO: 1025477 - DNA, 15 bp, Homo sapiens
gaaaacagatgagct

SEQ ID NO: 1025478 - DNA, 15 bp, Homo sapiens
ggaaaacagatgagc

SEQ ID NO: 1025479 - DNA, 15 bp, Homo sapiens
aggaaaacagatgag

SEQ ID NO: 1025480 - DNA, 15 bp, Homo sapiens
taggaaaacagatga

SEQ ID NO: 1025481 - DNA, 15 bp, Homo sapiens
ttaggaaaacagatg

SEQ ID NO: 1025482 - DNA, 15 bp, Homo sapiens
cttaggaaaacagat

SEQ ID NO: 1025483 - DNA, 15 bp, Homo sapiens
tcttaggaaaacaga

SEQ ID NO: 1025484 - DNA, 15 bp, Homo sapiens
gtcttaggaaaacag

SEQ ID NO: 1025485 - DNA, 15 bp, Homo sapiens
ggtcttaggaaaaca

SEQ ID NO: 1025486 - DNA, 15 bp, Homo sapiens
tggtcttaggaaaac

SEQ ID NO: 1025487 - DNA, 15 bp, Homo sapiens
gtggtcttaggaaaa

SEQ ID NO: 1025488 - DNA, 15 bp, Homo sapiens
ggtggtcttaggaaa

SEQ ID NO: 1025489 - DNA, 15 bp, Homo sapiens
tggtggtcttaggaa

SEQ ID NO: 1025490 - DNA, 15 bp, Homo sapiens
ttggtggtcttagga

SEQ ID NO: 1025491 - DNA, 15 bp, Homo sapiens
cttggtggtcttagg

SEQ ID NO: 1025492 - DNA, 15 bp, Homo sapiens
tcttggtggtcttag

SEQ ID NO: 1025493 - DNA, 15 bp, Homo sapiens
atcttggtggtctta

SEQ ID NO: 1025494 - DNA, 15 bp, Homo sapiens
aatcttggtggtctt

SEQ ID NO: 1025495 - DNA, 15 bp, Homo sapiens
aaatcttggtggtct

SEQ ID NO: 1025496 - DNA, 15 bp, Homo sapiens
aaaatcttggtggtc

SEQ ID NO: 1025497 - DNA, 15 bp, Homo sapiens
caaaatcttggtggt

SEQ ID NO: 1025498 - DNA, 15 bp, Homo sapiens
tcaaaatcttggtgg

SEQ ID NO: 1025499 - DNA, 15 bp, Homo sapiens
atcaaaatcttggtg

SEQ ID NO: 1025500 - DNA, 15 bp, Homo sapiens
gatcaaaatcttggt

SEQ ID NO: 1025501 - DNA, 15 bp, Homo sapiens
tgatcaaaatcttgg

SEQ ID NO: 1025502 - DNA, 15 bp, Homo sapiens
atgatcaaaatcttg

SEQ ID NO: 1025503 - DNA, 15 bp, Homo sapiens
aatgatcaaaatctt

SEQ ID NO: 1025504 - DNA, 15 bp, Homo sapiens
aaatgatcaaaatct

SEQ ID NO: 1025505 - DNA, 15 bp, Homo sapiens
caaatgatcaaaatc

SEQ ID NO: 1025506 - DNA, 15 bp, Homo sapiens
gcaaatgatcaaaat

SEQ ID NO: 1025507 - DNA, 15 bp, Homo sapiens
ggcaaatgatcaaaa

SEQ ID NO: 1025508 - DNA, 15 bp, Homo sapiens
aggcaaatgatcaaa

SEQ ID NO: 1025509 - DNA, 15 bp, Homo sapiens
taggcaaatgatcaa

SEQ ID NO: 1025510 - DNA, 15 bp, Homo sapiens
ttaggcaaatgatca

SEQ ID NO: 1025511 - DNA, 15 bp, Homo sapiens
gttaggcaaatgatc

SEQ ID NO: 1025512 - DNA, 15 bp, Homo sapiens
ggttaggcaaatgat

SEQ ID NO: 1025513 - DNA, 15 bp, Homo sapiens
gggttaggcaaatga

SEQ ID NO: 1025514 - DNA, 15 bp, Homo sapiens
agggttaggcaaatg

SEQ ID NO: 1025515 - DNA, 15 bp, Homo sapiens
aagggttaggcaaat

SEQ ID NO: 1025516 - DNA, 15 bp, Homo sapiens
caagggttaggcaaa

SEQ ID NO: 1025517 - DNA, 15 bp, Homo sapiens
ccaagggttaggcaa

SEQ ID NO: 1025518 - DNA, 15 bp, Homo sapiens
tccaagggttaggca

SEQ ID NO: 1025519 - DNA, 15 bp, Homo sapiens
ttccaagggttaggc

SEQ ID NO: 1025520 - DNA, 15 bp, Homo sapiens
attccaagggttagg

SEQ ID NO: 1025521 - DNA, 15 bp, Homo sapiens
cattccaagggttag

SEQ ID NO: 1025522 - DNA, 15 bp, Homo sapiens
tcattccaagggtta

SEQ ID NO: 1025523 - DNA, 15 bp, Homo sapiens
ctcattccaagggtt

SEQ ID NO: 1025524 - DNA, 15 bp, Homo sapiens
gctcattccaagggt

SEQ ID NO: 1025525 - DNA, 15 bp, Homo sapiens
tgctcattccaaggg

SEQ ID NO: 1025526 - DNA, 15 bp, Homo sapiens
gtgctcattccaagg

SEQ ID NO: 1025527 - DNA, 15 bp, Homo sapiens
ggtgctcattccaag

SEQ ID NO: 1025528 - DNA, 15 bp, Homo sapiens
gggtgctcattccaa

SEQ ID NO: 1025529 - DNA, 15 bp, Homo sapiens
tgggtgctcattcca

SEQ ID NO: 1025530 - DNA, 15 bp, Homo sapiens
atgggtgctcattcc

SEQ ID NO: 1025531 - DNA, 15 bp, Homo sapiens
aatgggtgctcattc

SEQ ID NO: 1025532 - DNA, 15 bp, Homo sapiens
gaatgggtgctcatt

SEQ ID NO: 1025533 - DNA, 15 bp, Homo sapiens
agaatgggtgctcat

SEQ ID NO: 1025534 - DNA, 15 bp, Homo sapiens
cagaatgggtgctca

SEQ ID NO: 1025535 - DNA, 15 bp, Homo sapiens
ccagaatgggtgctc

SEQ ID NO: 1025536 - DNA, 15 bp, Homo sapiens
gccagaatgggtgct

SEQ ID NO: 1025537 - DNA, 15 bp, Homo sapiens
agccagaatgggtgc

SEQ ID NO: 1025538 - DNA, 15 bp, Homo sapiens
aagccagaatgggtg

SEQ ID NO: 1025539 - DNA, 15 bp, Homo sapiens
gaagccagaatgggt

SEQ ID NO: 1025540 - DNA, 15 bp, Homo sapiens
agaagccagaatggg

SEQ ID NO: 1025541 - DNA, 15 bp, Homo sapiens
tagaagccagaatgg

SEQ ID NO: 1025542 - DNA, 15 bp, Homo sapiens
ttagaagccagaatg

SEQ ID NO: 1025543 - DNA, 15 bp, Homo sapiens
tttagaagccagaat

SEQ ID NO: 1025544 - DNA, 15 bp, Homo sapiens
ttttagaagccagaa

SEQ ID NO: 1025545 - DNA, 15 bp, Homo sapiens
attttagaagccaga

SEQ ID NO: 1025546 - DNA, 15 bp, Homo sapiens
gattttagaagccag

SEQ ID NO: 1025547 - DNA, 15 bp, Homo sapiens
tgattttagaagcca

SEQ ID NO: 1025548 - DNA, 15 bp, Homo sapiens
gtgattttagaagcc

SEQ ID NO: 1025549 - DNA, 15 bp, Homo sapiens
tgtgattttagaagc

SEQ ID NO: 1025550 - DNA, 15 bp, Homo sapiens
ctgtgattttagaag

SEQ ID NO: 1025551 - DNA, 15 bp, Homo sapiens
cctgtgattttagaa

SEQ ID NO: 1025552 - DNA, 15 bp, Homo sapiens
tcctgtgattttaga

SEQ ID NO: 1025553 - DNA, 15 bp, Homo sapiens
ttcctgtgattttag

SEQ ID NO: 1025554 - DNA, 15 bp, Homo sapiens
cttcctgtgatttta

SEQ ID NO: 1025555 - DNA, 15 bp, Homo sapiens
tcttcctgtgatttt

SEQ ID NO: 1025556 - DNA, 15 bp, Homo sapiens
ttcttcctgtgattt

SEQ ID NO: 1025557 - DNA, 15 bp, Homo sapiens
attcttcctgtgatt

SEQ ID NO: 1025558 - DNA, 15 bp, Homo sapiens
cattcttcctgtgat

SEQ ID NO: 1025559 - DNA, 15 bp, Homo sapiens
ccattcttcctgtga

SEQ ID NO: 1025560 - DNA, 15 bp, Homo sapiens
cccattcttcctgtg

SEQ ID NO: 1025561 - DNA, 15 bp, Homo sapiens
tcccattcttcctgt

SEQ ID NO: 1025562 - DNA, 15 bp, Homo sapiens
ttcccattcttcctg

SEQ ID NO: 1025563 - DNA, 15 bp, Homo sapiens
tttcccattcttcct

SEQ ID NO: 1025564 - DNA, 15 bp, Homo sapiens
atttcccattcttcc

SEQ ID NO: 1025565 - DNA, 15 bp, Homo sapiens
tatttcccattcttc

SEQ ID NO: 1025566 - DNA, 15 bp, Homo sapiens
ctatttcccattctt

SEQ ID NO: 1025567 - DNA, 15 bp, Homo sapiens
cctatttcccattct

SEQ ID NO: 1025568 - DNA, 15 bp, Homo sapiens
tcctatttcccattc

SEQ ID NO: 1025569 - DNA, 15 bp, Homo sapiens
gtcctatttcccatt

SEQ ID NO: 1025570 - DNA, 15 bp, Homo sapiens
tgtcctatttcccat

SEQ ID NO: 1025571 - DNA, 15 bp, Homo sapiens
gtgtcctatttccca

SEQ ID NO: 1025572 - DNA, 15 bp, Homo sapiens
tgtgtcctatttccc

SEQ ID NO: 1025573 - DNA, 15 bp, Homo sapiens
gtgtgtcctatttcc

SEQ ID NO: 1025574 - DNA, 15 bp, Homo sapiens
tgtgtgtcctatttc

SEQ ID NO: 1025575 - DNA, 15 bp, Homo sapiens
gtgtgtgtcctattt

SEQ ID NO: 1025576 - DNA, 15 bp, Homo sapiens
tgtgtgtgtcctatt

SEQ ID NO: 1025577 - DNA, 15 bp, Homo sapiens
gtgtgtgtgtcctat

SEQ ID NO: 1025578 - DNA, 15 bp, Homo sapiens
tgtgtgtgtgtccta

SEQ ID NO: 1025579 - DNA, 15 bp, Homo sapiens
gtgtatgtgtgtgtg

SEQ ID NO: 1025580 - DNA, 15 bp, Homo sapiens
tgtgtatgtgtgtgt

SEQ ID NO: 1025581 - DNA, 15 bp, Homo sapiens
gtgtgtatgtgtgtg

SEQ ID NO: 1025582 - DNA, 15 bp, Homo sapiens
tgtgtgtatgtgtgt

SEQ ID NO: 1025583 - DNA, 15 bp, Homo sapiens
gtgtgtgtatgtgtg

SEQ ID NO: 1025584 - DNA, 15 bp, Homo sapiens
tgtgtgtgtatgtgt

SEQ ID NO: 1025585 - DNA, 15 bp, Homo sapiens
ctcatgtgtgtgtgt

SEQ ID NO: 1025586 - DNA, 15 bp, Homo sapiens
actcatgtgtgtgtg

SEQ ID NO: 1025587 - DNA, 15 bp, Homo sapiens
aactcatgtgtgtgt

SEQ ID NO: 1025588 - DNA, 15 bp, Homo sapiens
aaactcatgtgtgtg

SEQ ID NO: 1025589 - DNA, 15 bp, Homo sapiens
gaaactcatgtgtgt

SEQ ID NO: 1025590 - DNA, 15 bp, Homo sapiens
cgaaactcatgtgtg

SEQ ID NO: 1025591 - DNA, 15 bp, Homo sapiens
acgaaactcatgtgt

SEQ ID NO: 1025592 - DNA, 15 bp, Homo sapiens
tacgaaactcatgtg

SEQ ID NO: 1025593 - DNA, 15 bp, Homo sapiens
gtacgaaactcatgt

SEQ ID NO: 1025594 - DNA, 15 bp, Homo sapiens
tgtacgaaactcatg

SEQ ID NO: 1025595 - DNA, 15 bp, Homo sapiens
ttgtacgaaactcat

SEQ ID NO: 1025596 - DNA, 15 bp, Homo sapiens
tttgtacgaaactca

SEQ ID NO: 1025597 - DNA, 15 bp, Homo sapiens
ctttgtacgaaactc

SEQ ID NO: 1025598 - DNA, 15 bp, Homo sapiens
gctttgtacgaaact

SEQ ID NO: 1025599 - DNA, 15 bp, Homo sapiens
ggctttgtacgaaac

SEQ ID NO: 1025600 - DNA, 15 bp, Homo sapiens
aggctttgtacgaaa

SEQ ID NO: 1025601 - DNA, 15 bp, Homo sapiens
taggctttgtacgaa

SEQ ID NO: 1025602 - DNA, 15 bp, Homo sapiens
ctaggctttgtacga

SEQ ID NO: 1025603 - DNA, 15 bp, Homo sapiens
cctaggctttgtacg

SEQ ID NO: 1025604 - DNA, 15 bp, Homo sapiens
tcctaggctttgtac

SEQ ID NO: 1025605 - DNA, 15 bp, Homo sapiens
gtcctaggctttgta

SEQ ID NO: 1025606 - DNA, 15 bp, Homo sapiens
tgtcctaggctttgt

SEQ ID NO: 1025607 - DNA, 15 bp, Homo sapiens
gtgtcctaggctttg

SEQ ID NO: 1025608 - DNA, 15 bp, Homo sapiens
agtgtcctaggcttt

SEQ ID NO: 1025609 - DNA, 15 bp, Homo sapiens
cagtgtcctaggctt

SEQ ID NO: 1025610 - DNA, 15 bp, Homo sapiens
ccagtgtcctaggct

SEQ ID NO: 1025611 - DNA, 15 bp, Homo sapiens
gccagtgtcctaggc

SEQ ID NO: 1025612 - DNA, 15 bp, Homo sapiens
ggccagtgtcctagg

SEQ ID NO: 1025613 - DNA, 15 bp, Homo sapiens
aggccagtgtcctag

SEQ ID NO: 1025614 - DNA, 15 bp, Homo sapiens
gaggccagtgtccta

SEQ ID NO: 1025615 - DNA, 15 bp, Homo sapiens
agaggccagtgtcct

SEQ ID NO: 1025616 - DNA, 15 bp, Homo sapiens
gagaggccagtgtcc

SEQ ID NO: 1025617 - DNA, 15 bp, Homo sapiens
ggagaggccagtgtc

SEQ ID NO: 1025618 - DNA, 15 bp, Homo sapiens
tggagaggccagtgt

SEQ ID NO: 1025619 - DNA, 15 bp, Homo sapiens
atggagaggccagtg

SEQ ID NO: 1025620 - DNA, 15 bp, Homo sapiens
gatggagaggccagt

SEQ ID NO: 1025621 - DNA, 15 bp, Homo sapiens
agatggagaggccag

SEQ ID NO: 1025622 - DNA, 15 bp, Homo sapiens
cagatggagaggcca

SEQ ID NO: 1025623 - DNA, 15 bp, Homo sapiens
acagatggagaggcc

SEQ ID NO: 1025624 - DNA, 15 bp, Homo sapiens
cacagatggagaggc

SEQ ID NO: 1025625 - DNA, 15 bp, Homo sapiens
tcacagatggagagg

SEQ ID NO: 1025626 - DNA, 15 bp, Homo sapiens
gtcacagatggagag

SEQ ID NO: 1025627 - DNA, 15 bp, Homo sapiens
ggtcacagatggaga

SEQ ID NO: 1025628 - DNA, 15 bp, Homo sapiens
tggtcacagatggag

SEQ ID NO: 1025629 - DNA, 15 bp, Homo sapiens
atggtcacagatgga

SEQ ID NO: 1025630 - DNA, 15 bp, Homo sapiens
gatggtcacagatgg

SEQ ID NO: 1025631 - DNA, 15 bp, Homo sapiens
agatggtcacagatg

SEQ ID NO: 1025632 - DNA, 15 bp, Homo sapiens
gagatggtcacagat

SEQ ID NO: 1025633 - DNA, 15 bp, Homo sapiens
ggagatggtcacaga

SEQ ID NO: 1025634 - DNA, 15 bp, Homo sapiens
gggagatggtcacag

SEQ ID NO: 1025635 - DNA, 15 bp, Homo sapiens
tgggagatggtcaca

SEQ ID NO: 1025636 - DNA, 15 bp, Homo sapiens
ctgggagatggtcac

SEQ ID NO: 1025637 - DNA, 15 bp, Homo sapiens
cctgggagatggtca

SEQ ID NO: 1025638 - DNA, 15 bp, Homo sapiens
ccctgggagatggtc

SEQ ID NO: 1025639 - DNA, 15 bp, Homo sapiens
accctgggagatggt

SEQ ID NO: 1025640 - DNA, 15 bp, Homo sapiens
caccctgggagatgg

SEQ ID NO: 1025641 - DNA, 15 bp, Homo sapiens
gcaccctgggagatg

SEQ ID NO: 1025642 - DNA, 15 bp, Homo sapiens
agcaccctgggagat

SEQ ID NO: 1025643 - DNA, 15 bp, Homo sapiens
aagcaccctgggaga

SEQ ID NO: 1025644 - DNA, 15 bp, Homo sapiens
caagcaccctgggag

SEQ ID NO: 1025645 - DNA, 15 bp, Homo sapiens
ccaagcaccctggga

SEQ ID NO: 1025646 - DNA, 15 bp, Homo sapiens
tccaagcaccctggg

SEQ ID NO: 1025647 - DNA, 15 bp, Homo sapiens
ttccaagcaccctgg

SEQ ID NO: 1025648 - DNA, 15 bp, Homo sapiens
cttccaagcaccctg

SEQ ID NO: 1025649 - DNA, 15 bp, Homo sapiens
ccttccaagcaccct

SEQ ID NO: 1025650 - DNA, 15 bp, Homo sapiens
cccttccaagcaccc

SEQ ID NO: 1025651 - DNA, 15 bp, Homo sapiens
ccccttccaagcacc

SEQ ID NO: 1025652 - DNA, 15 bp, Homo sapiens
gccccttccaagcac

SEQ ID NO: 1025653 - DNA, 15 bp, Homo sapiens
tgccccttccaagca

SEQ ID NO: 1025654 - DNA, 15 bp, Homo sapiens
atgccccttccaagc

SEQ ID NO: 1025655 - DNA, 15 bp, Homo sapiens
catgccccttccaag

SEQ ID NO: 1025656 - DNA, 15 bp, Homo sapiens
tcatgccccttccaa

SEQ ID NO: 1025657 - DNA, 15 bp, Homo sapiens
atcatgccccttcca

SEQ ID NO: 1025658 - DNA, 15 bp, Homo sapiens
gatcatgccccttcc

SEQ ID NO: 1025659 - DNA, 15 bp, Homo sapiens
agatcatgccccttc

SEQ ID NO: 1025660 - DNA, 15 bp, Homo sapiens
gagatcatgcccctt

SEQ ID NO: 1025661 - DNA, 15 bp, Homo sapiens
agagatcatgcccct

SEQ ID NO: 1025662 - DNA, 15 bp, Homo sapiens
gagagatcatgcccc

SEQ ID NO: 1025663 - DNA, 15 bp, Homo sapiens
agagagatcatgccc

SEQ ID NO: 1025664 - DNA, 15 bp, Homo sapiens
tagagagatcatgcc

SEQ ID NO: 1025665 - DNA, 15 bp, Homo sapiens
ctagagagatcatgc

SEQ ID NO: 1025666 - DNA, 15 bp, Homo sapiens
actagagagatcatg

SEQ ID NO: 1025667 - DNA, 15 bp, Homo sapiens
aactagagagatcat

SEQ ID NO: 1025668 - DNA, 15 bp, Homo sapiens
taactagagagatca

SEQ ID NO: 1025669 - DNA, 15 bp, Homo sapiens
ttaactagagagatc

SEQ ID NO: 1025670 - DNA, 15 bp, Homo sapiens
tttaactagagagat

SEQ ID NO: 1025671 - DNA, 15 bp, Homo sapiens
gtttaactagagaga

SEQ ID NO: 1025672 - DNA, 15 bp, Homo sapiens
ggtttaactagagag

SEQ ID NO: 1025673 - DNA, 15 bp, Homo sapiens
tggtttaactagaga

SEQ ID NO: 1025674 - DNA, 15 bp, Homo sapiens
atggtttaactagag

SEQ ID NO: 1025675 - DNA, 15 bp, Homo sapiens
aatggtttaactaga

SEQ ID NO: 1025676 - DNA, 15 bp, Homo sapiens
aaatggtttaactag

SEQ ID NO: 1025677 - DNA, 15 bp, Homo sapiens
taaatggtttaacta

SEQ ID NO: 1025678 - DNA, 15 bp, Homo sapiens
ataaatggtttaact

SEQ ID NO: 1025679 - DNA, 15 bp, Homo sapiens
cataaatggtttaac

SEQ ID NO: 1025680 - DNA, 15 bp, Homo sapiens
gcataaatggtttaa

SEQ ID NO: 1025681 - DNA, 15 bp, Homo sapiens
tgcataaatggttta

SEQ ID NO: 1025682 - DNA, 15 bp, Homo sapiens
gtgcataaatggttt

SEQ ID NO: 1025683 - DNA, 15 bp, Homo sapiens
tgtgcataaatggtt

SEQ ID NO: 1025684 - DNA, 15 bp, Homo sapiens
ttgtgcataaatggt

SEQ ID NO: 1025685 - DNA, 15 bp, Homo sapiens
tttgtgcataaatgg

SEQ ID NO: 1025686 - DNA, 15 bp, Homo sapiens
atttgtgcataaatg

SEQ ID NO: 1025687 - DNA, 15 bp, Homo sapiens
catttgtgcataaat

SEQ ID NO: 1025688 - DNA, 15 bp, Homo sapiens
tcatttgtgcataaa

SEQ ID NO: 1025689 - DNA, 15 bp, Homo sapiens
ttcatttgtgcataa

SEQ ID NO: 1025690 - DNA, 15 bp, Homo sapiens
cttcatttgtgcata

SEQ ID NO: 1025691 - DNA, 15 bp, Homo sapiens
gcttcatttgtgcat

SEQ ID NO: 1025692 - DNA, 15 bp, Homo sapiens
tgcttcatttgtgca

SEQ ID NO: 1025693 - DNA, 15 bp, Homo sapiens
ctgcttcatttgtgc

SEQ ID NO: 1025694 - DNA, 15 bp, Homo sapiens
tctgcttcatttgtg

SEQ ID NO: 1025695 - DNA, 15 bp, Homo sapiens
gtctgcttcatttgt

SEQ ID NO: 1025696 - DNA, 15 bp, Homo sapiens
ggtctgcttcatttg

SEQ ID NO: 1025697 - DNA, 15 bp, Homo sapiens
gggtctgcttcattt

SEQ ID NO: 1025698 - DNA, 15 bp, Homo sapiens
tgggtctgcttcatt

SEQ ID NO: 1025699 - DNA, 15 bp, Homo sapiens
atgggtctgcttcat

SEQ ID NO: 1025700 - DNA, 15 bp, Homo sapiens
catgggtctgcttca

SEQ ID NO: 1025701 - DNA, 15 bp, Homo sapiens
tcatgggtctgcttc

SEQ ID NO: 1025702 - DNA, 15 bp, Homo sapiens
ctcatgggtctgctt

SEQ ID NO: 1025703 - DNA, 15 bp, Homo sapiens
gctcatgggtctgct

SEQ ID NO: 1025704 - DNA, 15 bp, Homo sapiens
tgctcatgggtctgc

SEQ ID NO: 1025705 - DNA, 15 bp, Homo sapiens
gtgctcatgggtctg

SEQ ID NO: 1025706 - DNA, 15 bp, Homo sapiens
agtgctcatgggtct

SEQ ID NO: 1025707 - DNA, 15 bp, Homo sapiens
cagtgctcatgggtc

SEQ ID NO: 1025708 - DNA, 15 bp, Homo sapiens
tcagtgctcatgggt

SEQ ID NO: 1025709 - DNA, 15 bp, Homo sapiens
atcagtgctcatggg

SEQ ID NO: 1025710 - DNA, 15 bp, Homo sapiens
aatcagtgctcatgg

SEQ ID NO: 1025711 - DNA, 15 bp, Homo sapiens
aaatcagtgctcatg

SEQ ID NO: 1025712 - DNA, 15 bp, Homo sapiens
aaaatcagtgctcat

SEQ ID NO: 1025713 - DNA, 15 bp, Homo sapiens
taaaatcagtgctca

SEQ ID NO: 1025714 - DNA, 15 bp, Homo sapiens
ataaaatcagtgctc

SEQ ID NO: 1025715 - DNA, 15 bp, Homo sapiens
cataaaatcagtgct

SEQ ID NO: 1025716 - DNA, 15 bp, Homo sapiens
acataaaatcagtgc

SEQ ID NO: 1025717 - DNA, 15 bp, Homo sapiens
tacataaaatcagtg

SEQ ID NO: 1025718 - DNA, 15 bp, Homo sapiens
ttacataaaatcagt

SEQ ID NO: 1025719 - DNA, 15 bp, Homo sapiens
gttacataaaatcag

SEQ ID NO: 1025720 - DNA, 15 bp, Homo sapiens
ggttacataaaatca

SEQ ID NO: 1025721 - DNA, 15 bp, Homo sapiens
gggttacataaaatc

SEQ ID NO: 1025722 - DNA, 15 bp, Homo sapiens
agggttacataaaat

SEQ ID NO: 1025723 - DNA, 15 bp, Homo sapiens
gagggttacataaaa

SEQ ID NO: 1025724 - DNA, 15 bp, Homo sapiens
ggagggttacataaa

SEQ ID NO: 1025725 - DNA, 15 bp, Homo sapiens
gggagggttacataa

SEQ ID NO: 1025726 - DNA, 15 bp, Homo sapiens
agggagggttacata

SEQ ID NO: 1025727 - DNA, 15 bp, Homo sapiens
cagggagggttacat

SEQ ID NO: 1025728 - DNA, 15 bp, Homo sapiens
gcagggagggttaca

SEQ ID NO: 1025729 - DNA, 15 bp, Homo sapiens
tgcagggagggttac

SEQ ID NO: 1025730 - DNA, 15 bp, Homo sapiens
ttgcagggagggtta

SEQ ID NO: 1025731 - DNA, 15 bp, Homo sapiens
tttgcagggagggtt

SEQ ID NO: 1025732 - DNA, 15 bp, Homo sapiens
ctttgcagggagggt

SEQ ID NO: 1025733 - DNA, 15 bp, Homo sapiens
gctttgcagggaggg

SEQ ID NO: 1025734 - DNA, 15 bp, Homo sapiens
tgctttgcagggagg

SEQ ID NO: 1025735 - DNA, 15 bp, Homo sapiens
ctgctttgcagggag

SEQ ID NO: 1025736 - DNA, 15 bp, Homo sapiens
tctgctttgcaggga

SEQ ID NO: 1025737 - DNA, 15 bp, Homo sapiens
ttctgctttgcaggg

SEQ ID NO: 1025738 - DNA, 15 bp, Homo sapiens
tttctgctttgcagg

SEQ ID NO: 1025739 - DNA, 15 bp, Homo sapiens
ttttctgctttgcag

SEQ ID NO: 1025740 - DNA, 15 bp, Homo sapiens
attttctgctttgca

SEQ ID NO: 1025741 - DNA, 15 bp, Homo sapiens
cattttctgctttgc

SEQ ID NO: 1025742 - DNA, 15 bp, Homo sapiens
tcattttctgctttg

SEQ ID NO: 1025743 - DNA, 15 bp, Homo sapiens
gattcattttctgct

SEQ ID NO: 1025744 - DNA, 15 bp, Homo sapiens
tgattcattttctgc

SEQ ID NO: 1025745 - DNA, 15 bp, Homo sapiens
ctgattcattttctg

SEQ ID NO: 1025746 - DNA, 15 bp, Homo sapiens
actgattcattttct

SEQ ID NO: 1025747 - DNA, 15 bp, Homo sapiens
tactgattcattttc

SEQ ID NO: 1025748 - DNA, 15 bp, Homo sapiens
atactgattcatttt

SEQ ID NO: 1025749 - DNA, 15 bp, Homo sapiens
gatactgattcattt

SEQ ID NO: 1025750 - DNA, 15 bp, Homo sapiens
tgatactgattcatt

SEQ ID NO: 1025751 - DNA, 15 bp, Homo sapiens
gtgatactgattcat

SEQ ID NO: 1025752 - DNA, 15 bp, Homo sapiens
agtgatactgattca

SEQ ID NO: 1025753 - DNA, 15 bp, Homo sapiens
gagtgatactgattc

SEQ ID NO: 1025754 - DNA, 15 bp, Homo sapiens
tgagtgatactgatt

SEQ ID NO: 1025755 - DNA, 15 bp, Homo sapiens
ctgagtgatactgat

SEQ ID NO: 1025756 - DNA, 15 bp, Homo sapiens
cctgagtgatactga

SEQ ID NO: 1025757 - DNA, 15 bp, Homo sapiens
acctgagtgatactg

SEQ ID NO: 1025758 - DNA, 15 bp, Homo sapiens
tacctgagtgatact

SEQ ID NO: 1025759 - DNA, 15 bp, Homo sapiens
ttacctgagtgatac

SEQ ID NO: 1025760 - DNA, 15 bp, Homo sapiens
tttacctgagtgata

SEQ ID NO: 1025761 - DNA, 15 bp, Homo sapiens
ttttacctgagtgat

SEQ ID NO: 1025762 - DNA, 15 bp, Homo sapiens
gttttacctgagtga

SEQ ID NO: 1025763 - DNA, 15 bp, Homo sapiens
agttttacctgagtg

SEQ ID NO: 1025764 - DNA, 15 bp, Homo sapiens
aagttttacctgagt

SEQ ID NO: 1025765 - DNA, 15 bp, Homo sapiens
aaagttttacctgag

SEQ ID NO: 1025766 - DNA, 15 bp, Homo sapiens
gaaagttttacctga

SEQ ID NO: 1025767 - DNA, 15 bp, Homo sapiens
ggaaagttttacctg

SEQ ID NO: 1025768 - DNA, 15 bp, Homo sapiens
aggaaagttttacct

SEQ ID NO: 1025769 - DNA, 15 bp, Homo sapiens
caggaaagttttacc

SEQ ID NO: 1025770 - DNA, 15 bp, Homo sapiens
acaggaaagttttac

SEQ ID NO: 1025771 - DNA, 15 bp, Homo sapiens
gacaggaaagtttta

SEQ ID NO: 1025772 - DNA, 15 bp, Homo sapiens
tgacaggaaagtttt

SEQ ID NO: 1025773 - DNA, 15 bp, Homo sapiens
ctgacaggaaagttt

SEQ ID NO: 1025774 - DNA, 15 bp, Homo sapiens
actgacaggaaagtt

SEQ ID NO: 1025775 - DNA, 15 bp, Homo sapiens
aactgacaggaaagt

SEQ ID NO: 1025776 - DNA, 15 bp, Homo sapiens
aaactgacaggaaag

SEQ ID NO: 1025777 - DNA, 15 bp, Homo sapiens
aaaactgacaggaaa

SEQ ID NO: 1025778 - DNA, 15 bp, Homo sapiens
aaaaactgacaggaa

SEQ ID NO: 1025779 - DNA, 15 bp, Homo sapiens
gaaaaactgacagga

SEQ ID NO: 1025780 - DNA, 15 bp, Homo sapiens
ggaaaaactgacagg

SEQ ID NO: 1025781 - DNA, 15 bp, Homo sapiens
aggaaaaactgacag

SEQ ID NO: 1025782 - DNA, 15 bp, Homo sapiens
aaggaaaaactgaca

SEQ ID NO: 1025783 - DNA, 15 bp, Homo sapiens
taaggaaaaactgac

SEQ ID NO: 1025784 - DNA, 15 bp, Homo sapiens
ttaaggaaaaactga

SEQ ID NO: 1025785 - DNA, 15 bp, Homo sapiens
acaaaagtgtcacat

SEQ ID NO: 1025786 - DNA, 15 bp, Homo sapiens
aacaaaagtgtcaca

SEQ ID NO: 1025787 - DNA, 15 bp, Homo sapiens
aaacaaaagtgtcac

SEQ ID NO: 1025788 - DNA, 15 bp, Homo sapiens
aaaacaaaagtgtca

SEQ ID NO: 1025789 - DNA, 15 bp, Homo sapiens
caaaacaaaagtgtc

SEQ ID NO: 1025790 - DNA, 15 bp, Homo sapiens
acaaaacaaaagtgt

SEQ ID NO: 1025791 - DNA, 15 bp, Homo sapiens
aacaaaacaaaagtg

SEQ ID NO: 1025792 - DNA, 15 bp, Homo sapiens
aaacaaaacaaaagt

SEQ ID NO: 1025793 - DNA, 15 bp, Homo sapiens
caaacaaaacaaaag

SEQ ID NO: 1025794 - DNA, 15 bp, Homo sapiens
aacaaacaaaacaaa

SEQ ID NO: 1025795 - DNA, 15 bp, Homo sapiens
aaacaaacaaaacaa

SEQ ID NO: 1025796 - DNA, 15 bp, Homo sapiens
aaaacaaacaaaaca

SEQ ID NO: 1025797 - DNA, 15 bp, Homo sapiens
taaaacaaacaaaac

SEQ ID NO: 1025798 - DNA, 15 bp, Homo sapiens
ataaaacaaacaaaa

SEQ ID NO: 1025799 - DNA, 15 bp, Homo sapiens
tataaaacaaacaaa

SEQ ID NO: 1025800 - DNA, 15 bp, Homo sapiens
atataaaacaaacaa

SEQ ID NO: 1025801 - DNA, 15 bp, Homo sapiens
aatataaaacaaaca

SEQ ID NO: 1025802 - DNA, 15 bp, Homo sapiens
aaatataaaacaaac

SEQ ID NO: 1025803 - DNA, 15 bp, Homo sapiens
gaaatataaaacaaa

SEQ ID NO: 1025804 - DNA, 15 bp, Homo sapiens
agaaatataaaacaa

SEQ ID NO: 1025805 - DNA, 15 bp, Homo sapiens
cagaaatataaaaca

SEQ ID NO: 1025806 - DNA, 15 bp, Homo sapiens
acagaaatataaaac

SEQ ID NO: 1025807 - DNA, 15 bp, Homo sapiens
aacagaaatataaaa

SEQ ID NO: 1025808 - DNA, 15 bp, Homo sapiens
taacagaaatataaa

SEQ ID NO: 1025809 - DNA, 15 bp, Homo sapiens
ataacagaaatataa

SEQ ID NO: 1025810 - DNA, 15 bp, Homo sapiens
cataacagaaatata

SEQ ID NO: 1025811 - DNA, 15 bp, Homo sapiens
tcataacagaaatat

SEQ ID NO: 1025812 - DNA, 15 bp, Homo sapiens
ctcataacagaaata

SEQ ID NO: 1025813 - DNA, 15 bp, Homo sapiens
actcataacagaaat

SEQ ID NO: 1025814 - DNA, 15 bp, Homo sapiens
aactcataacagaaa

SEQ ID NO: 1025815 - DNA, 15 bp, Homo sapiens
taactcataacagaa

SEQ ID NO: 1025816 - DNA, 15 bp, Homo sapiens
ataactcataacaga

SEQ ID NO: 1025817 - DNA, 15 bp, Homo sapiens
aataactcataacag

SEQ ID NO: 1025818 - DNA, 15 bp, Homo sapiens
caataactcataaca

SEQ ID NO: 1025819 - DNA, 15 bp, Homo sapiens
ccaataactcataac

SEQ ID NO: 1025820 - DNA, 15 bp, Homo sapiens
accaataactcataa

SEQ ID NO: 1025821 - DNA, 15 bp, Homo sapiens
aaccaataactcata

SEQ ID NO: 1025822 - DNA, 15 bp, Homo sapiens
taaccaataactcat

SEQ ID NO: 1025823 - DNA, 15 bp, Homo sapiens
ctaaccaataactca

SEQ ID NO: 1025824 - DNA, 15 bp, Homo sapiens
tctaaccaataactc

SEQ ID NO: 1025825 - DNA, 15 bp, Homo sapiens
gtctaaccaataact

SEQ ID NO: 1025826 - DNA, 15 bp, Homo sapiens
tgtctaaccaataac

SEQ ID NO: 1025827 - DNA, 15 bp, Homo sapiens
ctgtctaaccaataa

SEQ ID NO: 1025828 - DNA, 15 bp, Homo sapiens
tctgtctaaccaata

SEQ ID NO: 1025829 - DNA, 15 bp, Homo sapiens
ttctgtctaaccaat

SEQ ID NO: 1025830 - DNA, 15 bp, Homo sapiens
cttctgtctaaccaa

SEQ ID NO: 1025831 - DNA, 15 bp, Homo sapiens
ccttctgtctaacca

SEQ ID NO: 1025832 - DNA, 15 bp, Homo sapiens
cccttctgtctaacc

SEQ ID NO: 1025833 - DNA, 15 bp, Homo sapiens
tcccttctgtctaac

SEQ ID NO: 1025834 - DNA, 15 bp, Homo sapiens
ctcccttctgtctaa

SEQ ID NO: 1025835 - DNA, 15 bp, Homo sapiens
cctcccttctgtcta

SEQ ID NO: 1025836 - DNA, 15 bp, Homo sapiens
acctcccttctgtct

SEQ ID NO: 1025837 - DNA, 15 bp, Homo sapiens
tacctcccttctgtc

SEQ ID NO: 1025838 - DNA, 15 bp, Homo sapiens
ctacctcccttctgt

SEQ ID NO: 1025839 - DNA, 15 bp, Homo sapiens
gctacctcccttctg

SEQ ID NO: 1025840 - DNA, 15 bp, Homo sapiens
agctacctcccttct

SEQ ID NO: 1025841 - DNA, 15 bp, Homo sapiens
aagctacctcccttc

SEQ ID NO: 1025842 - DNA, 15 bp, Homo sapiens
taagctacctccctt

SEQ ID NO: 1025843 - DNA, 15 bp, Homo sapiens
ttaagctacctccct

SEQ ID NO: 1025844 - DNA, 15 bp, Homo sapiens
attaagctacctccc

SEQ ID NO: 1025845 - DNA, 15 bp, Homo sapiens
tattaagctacctcc

SEQ ID NO: 1025846 - DNA, 15 bp, Homo sapiens
ctattaagctacctc

SEQ ID NO: 1025847 - DNA, 15 bp, Homo sapiens
actattaagctacct

SEQ ID NO: 1025848 - DNA, 15 bp, Homo sapiens
aactattaagctacc

SEQ ID NO: 1025849 - DNA, 15 bp, Homo sapiens
caactattaagctac

SEQ ID NO: 1025850 - DNA, 15 bp, Homo sapiens
acaactattaagcta

SEQ ID NO: 1025851 - DNA, 15 bp, Homo sapiens
aacaactattaagct

SEQ ID NO: 1025852 - DNA, 15 bp, Homo sapiens
gaacaactattaagc

SEQ ID NO: 1025853 - DNA, 15 bp, Homo sapiens
ggaacaactattaag

SEQ ID NO: 1025854 - DNA, 15 bp, Homo sapiens
tggaacaactattaa

SEQ ID NO: 1025855 - DNA, 15 bp, Homo sapiens
gtggaacaactatta

SEQ ID NO: 1025856 - DNA, 15 bp, Homo sapiens
agtggaacaactatt

SEQ ID NO: 1025857 - DNA, 15 bp, Homo sapiens
aagtggaacaactat

SEQ ID NO: 1025858 - DNA, 15 bp, Homo sapiens
gaagtggaacaacta

SEQ ID NO: 1025859 - DNA, 15 bp, Homo sapiens
agaagtggaacaact

SEQ ID NO: 1025860 - DNA, 15 bp, Homo sapiens
gagaagtggaacaac

SEQ ID NO: 1025861 - DNA, 15 bp, Homo sapiens
agagaagtggaacaa

SEQ ID NO: 1025862 - DNA, 15 bp, Homo sapiens
cagagaagtggaaca

SEQ ID NO: 1025863 - DNA, 15 bp, Homo sapiens
gcagagaagtggaac

SEQ ID NO: 1025864 - DNA, 15 bp, Homo sapiens
ggcagagaagtggaa

SEQ ID NO: 1025865 - DNA, 15 bp, Homo sapiens
aggcagagaagtgga

SEQ ID NO: 1025866 - DNA, 15 bp, Homo sapiens
taggcagagaagtgg

SEQ ID NO: 1025867 - DNA, 15 bp, Homo sapiens
ttaggcagagaagtg

SEQ ID NO: 1025868 - DNA, 15 bp, Homo sapiens
cttaggcagagaagt

SEQ ID NO: 1025869 - DNA, 15 bp, Homo sapiens
ccttaggcagagaag

SEQ ID NO: 1025870 - DNA, 15 bp, Homo sapiens
tccttaggcagagaa

SEQ ID NO: 1025871 - DNA, 15 bp, Homo sapiens
atccttaggcagaga

SEQ ID NO: 1025872 - DNA, 15 bp, Homo sapiens
tatccttaggcagag

SEQ ID NO: 1025873 - DNA, 15 bp, Homo sapiens
atatccttaggcaga

SEQ ID NO: 1025874 - DNA, 15 bp, Homo sapiens
gatatccttaggcag

SEQ ID NO: 1025875 - DNA, 15 bp, Homo sapiens
tgatatccttaggca

SEQ ID NO: 1025876 - DNA, 15 bp, Homo sapiens
ctgatatccttaggc

SEQ ID NO: 1025877 - DNA, 15 bp, Homo sapiens
actgatatccttagg

SEQ ID NO: 1025878 - DNA, 15 bp, Homo sapiens
cactgatatccttag

SEQ ID NO: 1025879 - DNA, 15 bp, Homo sapiens
acactgatatcctta

SEQ ID NO: 1025880 - DNA, 15 bp, Homo sapiens
cacactgatatcctt

SEQ ID NO: 1025881 - DNA, 15 bp, Homo sapiens
tcacactgatatcct

SEQ ID NO: 1025882 - DNA, 15 bp, Homo sapiens
ttcacactgatatcc

SEQ ID NO: 1025883 - DNA, 15 bp, Homo sapiens
gttcacactgatatc

SEQ ID NO: 1025884 - DNA, 15 bp, Homo sapiens
cgttcacactgatat

SEQ ID NO: 1025885 - DNA, 15 bp, Homo sapiens
acgttcacactgata

SEQ ID NO: 1025886 - DNA, 15 bp, Homo sapiens
aacgttcacactgat

SEQ ID NO: 1025887 - DNA, 15 bp, Homo sapiens
caacgttcacactga

SEQ ID NO: 1025888 - DNA, 15 bp, Homo sapiens
ccaacgttcacactg

SEQ ID NO: 1025889 - DNA, 15 bp, Homo sapiens
cccaacgttcacact

SEQ ID NO: 1025890 - DNA, 15 bp, Homo sapiens
acccaacgttcacac

SEQ ID NO: 1025891 - DNA, 15 bp, Homo sapiens
cacccaacgttcaca

SEQ ID NO: 1025892 - DNA, 15 bp, Homo sapiens
acacccaacgttcac

SEQ ID NO: 1025893 - DNA, 15 bp, Homo sapiens
gacacccaacgttca

SEQ ID NO: 1025894 - DNA, 15 bp, Homo sapiens
agacacccaacgttc

SEQ ID NO: 1025895 - DNA, 15 bp, Homo sapiens
tagacacccaacgtt

SEQ ID NO: 1025896 - DNA, 15 bp, Homo sapiens
ctagacacccaacgt

SEQ ID NO: 1025897 - DNA, 15 bp, Homo sapiens
gctagacacccaacg

SEQ ID NO: 1025898 - DNA, 15 bp, Homo sapiens
agctagacacccaac

SEQ ID NO: 1025899 - DNA, 15 bp, Homo sapiens
cagctagacacccaa

SEQ ID NO: 1025900 - DNA, 15 bp, Homo sapiens
acagctagacaccca

SEQ ID NO: 1025901 - DNA, 15 bp, Homo sapiens
cacagctagacaccc

SEQ ID NO: 1025902 - DNA, 15 bp, Homo sapiens
tcacagctagacacc

SEQ ID NO: 1025903 - DNA, 15 bp, Homo sapiens
ttcacagctagacac

SEQ ID NO: 1025904 - DNA, 15 bp, Homo sapiens
gttcacagctagaca

SEQ ID NO: 1025905 - DNA, 15 bp, Homo sapiens
tgttcacagctagac

SEQ ID NO: 1025906 - DNA, 15 bp, Homo sapiens
ttgttcacagctaga

SEQ ID NO: 1025907 - DNA, 15 bp, Homo sapiens
tttgttcacagctag

SEQ ID NO: 1025908 - DNA, 15 bp, Homo sapiens
ttttgttcacagcta

SEQ ID NO: 1025909 - DNA, 15 bp, Homo sapiens
gttttgttcacagct

SEQ ID NO: 1025910 - DNA, 15 bp, Homo sapiens
tgttttgttcacagc

SEQ ID NO: 1025911 - DNA, 15 bp, Homo sapiens
ttgttttgttcacag

SEQ ID NO: 1025912 - DNA, 15 bp, Homo sapiens
cttgttttgttcaca

SEQ ID NO: 1025913 - DNA, 15 bp, Homo sapiens
gcttgttttgttcac

SEQ ID NO: 1025914 - DNA, 15 bp, Homo sapiens
agcttgttttgttca

SEQ ID NO: 1025915 - DNA, 15 bp, Homo sapiens
gagcttgttttgttc

SEQ ID NO: 1025916 - DNA, 15 bp, Homo sapiens
tgagcttgttttgtt

SEQ ID NO: 1025917 - DNA, 15 bp, Homo sapiens
ttgagcttgttttgt

SEQ ID NO: 1025918 - DNA, 15 bp, Homo sapiens
gttgagcttgttttg

SEQ ID NO: 1025919 - DNA, 15 bp, Homo sapiens
agttgagcttgtttt

SEQ ID NO: 1025920 - DNA, 15 bp, Homo sapiens
aagttgagcttgttt

SEQ ID NO: 1025921 - DNA, 15 bp, Homo sapiens
aaagttgagcttgtt

SEQ ID NO: 1025922 - DNA, 15 bp, Homo sapiens
aaaagttgagcttgt

SEQ ID NO: 1025923 - DNA, 15 bp, Homo sapiens
caaaagttgagcttg

SEQ ID NO: 1025924 - DNA, 15 bp, Homo sapiens
gcaaaagttgagctt

SEQ ID NO: 1025925 - DNA, 15 bp, Homo sapiens
agcaaaagttgagct

SEQ ID NO: 1025926 - DNA, 15 bp, Homo sapiens
aagcaaaagttgagc

SEQ ID NO: 1025927 - DNA, 15 bp, Homo sapiens
aaagcaaaagttgag

SEQ ID NO: 1025928 - DNA, 15 bp, Homo sapiens
gaaagcaaaagttga

SEQ ID NO: 1025929 - DNA, 15 bp, Homo sapiens
tgaaagcaaaagttg

SEQ ID NO: 1025930 - DNA, 15 bp, Homo sapiens
ctgaaagcaaaagtt

SEQ ID NO: 1025931 - DNA, 15 bp, Homo sapiens
cctgaaagcaaaagt

SEQ ID NO: 1025932 - DNA, 15 bp, Homo sapiens
ccctgaaagcaaaag

SEQ ID NO: 1025933 - DNA, 15 bp, Homo sapiens
tccctgaaagcaaaa

SEQ ID NO: 1025934 - DNA, 15 bp, Homo sapiens
ctccctgaaagcaaa

SEQ ID NO: 1025935 - DNA, 15 bp, Homo sapiens
gctccctgaaagcaa

SEQ ID NO: 1025936 - DNA, 15 bp, Homo sapiens
agctccctgaaagca

SEQ ID NO: 1025937 - DNA, 15 bp, Homo sapiens
aagctccctgaaagc

SEQ ID NO: 1025938 - DNA, 15 bp, Homo sapiens
taagctccctgaaag

SEQ ID NO: 1025939 - DNA, 15 bp, Homo sapiens
gtaagctccctgaaa

SEQ ID NO: 1025940 - DNA, 15 bp, Homo sapiens
tgtaagctccctgaa

SEQ ID NO: 1025941 - DNA, 15 bp, Homo sapiens
ttgtaagctccctga

SEQ ID NO: 1025942 - DNA, 15 bp, Homo sapiens
cttgtaagctccctg

SEQ ID NO: 1025943 - DNA, 15 bp, Homo sapiens
ccttgtaagctccct

SEQ ID NO: 1025944 - DNA, 15 bp, Homo sapiens
accttgtaagctccc

SEQ ID NO: 1025945 - DNA, 15 bp, Homo sapiens
taccttgtaagctcc

SEQ ID NO: 1025946 - DNA, 15 bp, Homo sapiens
ataccttgtaagctc

SEQ ID NO: 1025947 - DNA, 15 bp, Homo sapiens
aataccttgtaagct

SEQ ID NO: 1025948 - DNA, 15 bp, Homo sapiens
caataccttgtaagc

SEQ ID NO: 1025949 - DNA, 15 bp, Homo sapiens
ccaataccttgtaag

SEQ ID NO: 1025950 - DNA, 15 bp, Homo sapiens
tccaataccttgtaa

SEQ ID NO: 1025951 - DNA, 15 bp, Homo sapiens
ttccaataccttgta

SEQ ID NO: 1025952 - DNA, 15 bp, Homo sapiens
cttccaataccttgt

SEQ ID NO: 1025953 - DNA, 15 bp, Homo sapiens
ccttccaataccttg

SEQ ID NO: 1025954 - DNA, 15 bp, Homo sapiens
tccttccaatacctt

SEQ ID NO: 1025955 - DNA, 15 bp, Homo sapiens
ctccttccaatacct

SEQ ID NO: 1025956 - DNA, 15 bp, Homo sapiens
tctccttccaatacc

SEQ ID NO: 1025957 - DNA, 15 bp, Homo sapiens
gtctccttccaatac

SEQ ID NO: 1025958 - DNA, 15 bp, Homo sapiens
tgtctccttccaata

SEQ ID NO: 1025959 - DNA, 15 bp, Homo sapiens
ttgtctccttccaat

SEQ ID NO: 1025960 - DNA, 15 bp, Homo sapiens
tttgtctccttccaa

SEQ ID NO: 1025961 - DNA, 15 bp, Homo sapiens
gtttgtctccttcca

SEQ ID NO: 1025962 - DNA, 15 bp, Homo sapiens
tgtttgtctccttcc

SEQ ID NO: 1025963 - DNA, 15 bp, Homo sapiens
atgtttgtctccttc

SEQ ID NO: 1025964 - DNA, 15 bp, Homo sapiens
aatgtttgtctcctt

SEQ ID NO: 1025965 - DNA, 15 bp, Homo sapiens
taatgtttgtctcct

SEQ ID NO: 1025966 - DNA, 15 bp, Homo sapiens
ttaatgtttgtctcc

SEQ ID NO: 1025967 - DNA, 15 bp, Homo sapiens
tttaatgtttgtctc

SEQ ID NO: 1025968 - DNA, 15 bp, Homo sapiens
gtttaatgtttgtct

SEQ ID NO: 1025969 - DNA, 15 bp, Homo sapiens
tgtttaatgtttgtc

SEQ ID NO: 1025970 - DNA, 15 bp, Homo sapiens
ctgtttaatgtttgt

SEQ ID NO: 1025971 - DNA, 15 bp, Homo sapiens
tctgtttaatgtttg

SEQ ID NO: 1025972 - DNA, 15 bp, Homo sapiens
atctgtttaatgttt

SEQ ID NO: 1025973 - DNA, 15 bp, Homo sapiens
tatctgtttaatgtt

SEQ ID NO: 1025974 - DNA, 15 bp, Homo sapiens
gtatctgtttaatgt

SEQ ID NO: 1025975 - DNA, 15 bp, Homo sapiens
tgtatctgtttaatg

SEQ ID NO: 1025976 - DNA, 15 bp, Homo sapiens
atgtatctgtttaat

SEQ ID NO: 1025977 - DNA, 15 bp, Homo sapiens
gatgtatctgtttaa

SEQ ID NO: 1025978 - DNA, 15 bp, Homo sapiens
agatgtatctgttta

SEQ ID NO: 1025979 - DNA, 15 bp, Homo sapiens
tagatgtatctgttt

SEQ ID NO: 1025980 - DNA, 15 bp, Homo sapiens
gtagatgtatctgtt

SEQ ID NO: 1025981 - DNA, 15 bp, Homo sapiens
tgtagatgtatctgt

SEQ ID NO: 1025982 - DNA, 15 bp, Homo sapiens
ttgtagatgtatctg

SEQ ID NO: 1025983 - DNA, 15 bp, Homo sapiens
tttgtagatgtatct

SEQ ID NO: 1025984 - DNA, 15 bp, Homo sapiens
atttgtagatgtatc

SEQ ID NO: 1025985 - DNA, 15 bp, Homo sapiens
tatttgtagatgtat

SEQ ID NO: 1025986 - DNA, 15 bp, Homo sapiens
ttatttgtagatgta

SEQ ID NO: 1025987 - DNA, 15 bp, Homo sapiens
cttatttgtagatgt

SEQ ID NO: 1025988 - DNA, 15 bp, Homo sapiens
ccttatttgtagatg

SEQ ID NO: 1025989 - DNA, 15 bp, Homo sapiens
tccttatttgtagat

SEQ ID NO: 1025990 - DNA, 15 bp, Homo sapiens
atccttatttgtaga

SEQ ID NO: 1025991 - DNA, 15 bp, Homo sapiens
catccttatttgtag

SEQ ID NO: 1025992 - DNA, 15 bp, Homo sapiens
gcatccttatttgta

SEQ ID NO: 1025993 - DNA, 15 bp, Homo sapiens
tgcatccttatttgt

SEQ ID NO: 1025994 - DNA, 15 bp, Homo sapiens
ttgcatccttatttg

SEQ ID NO: 1025995 - DNA, 15 bp, Homo sapiens
attgcatccttattt

SEQ ID NO: 1025996 - DNA, 15 bp, Homo sapiens
tattgcatccttatt

SEQ ID NO: 1025997 - DNA, 15 bp, Homo sapiens
ttattgcatccttat

SEQ ID NO: 1025998 - DNA, 15 bp, Homo sapiens
gttattgcatcctta

SEQ ID NO: 1025999 - DNA, 15 bp, Homo sapiens
tgttattgcatcctt

SEQ ID NO: 1026000 - DNA, 15 bp, Homo sapiens
ttgttattgcatcct

SEQ ID NO: 1026001 - DNA, 15 bp, Homo sapiens
gttgttattgcatcc

SEQ ID NO: 1026002 - DNA, 15 bp, Homo sapiens
agttgttattgcatc

SEQ ID NO: 1026003 - DNA, 15 bp, Homo sapiens
cagttgttattgcat

SEQ ID NO: 1026004 - DNA, 15 bp, Homo sapiens
acagttgttattgca

SEQ ID NO: 1026005 - DNA, 15 bp, Homo sapiens
cacagttgttattgc

SEQ ID NO: 1026006 - DNA, 15 bp, Homo sapiens
tcacagttgttattg

SEQ ID NO: 1026007 - DNA, 15 bp, Homo sapiens
ttcacagttgttatt

SEQ ID NO: 1026008 - DNA, 15 bp, Homo sapiens
tttcacagttgttat

SEQ ID NO: 1026009 - DNA, 15 bp, Homo sapiens
ttttcacagttgtta

SEQ ID NO: 1026010 - DNA, 15 bp, Homo sapiens
attttcacagttgtt

SEQ ID NO: 1026011 - DNA, 15 bp, Homo sapiens
cattttcacagttgt

SEQ ID NO: 1026012 - DNA, 15 bp, Homo sapiens
acattttcacagttg

SEQ ID NO: 1026013 - DNA, 15 bp, Homo sapiens
cacattttcacagtt

SEQ ID NO: 1026014 - DNA, 15 bp, Homo sapiens
tcacattttcacagt

SEQ ID NO: 1026015 - DNA, 15 bp, Homo sapiens
ttcacattttcacag

SEQ ID NO: 1026016 - DNA, 15 bp, Homo sapiens
cttcacattttcaca

SEQ ID NO: 1026017 - DNA, 15 bp, Homo sapiens
tcttcacattttcac

SEQ ID NO: 1026018 - DNA, 15 bp, Homo sapiens
ttcttcacattttca

SEQ ID NO: 1026019 - DNA, 15 bp, Homo sapiens
cttcttcacattttc

SEQ ID NO: 1026020 - DNA, 15 bp, Homo sapiens
ccttcttcacatttt

SEQ ID NO: 1026021 - DNA, 15 bp, Homo sapiens
tccttcttcacattt

SEQ ID NO: 1026022 - DNA, 15 bp, Homo sapiens
ttccttcttcacatt

SEQ ID NO: 1026023 - DNA, 15 bp, Homo sapiens
cttccttcttcacat

SEQ ID NO: 1026024 - DNA, 15 bp, Homo sapiens
tcttccttcttcaca

SEQ ID NO: 1026025 - DNA, 15 bp, Homo sapiens
ctcttccttcttcac

SEQ ID NO: 1026026 - DNA, 15 bp, Homo sapiens
gctcttccttcttca

SEQ ID NO: 1026027 - DNA, 15 bp, Homo sapiens
agctcttccttcttc

SEQ ID NO: 1026028 - DNA, 15 bp, Homo sapiens
aagctcttccttctt

SEQ ID NO: 1026029 - DNA, 15 bp, Homo sapiens
gaagctcttccttct

SEQ ID NO: 1026030 - DNA, 15 bp, Homo sapiens
tgaagctcttccttc

SEQ ID NO: 1026031 - DNA, 15 bp, Homo sapiens
ttgaagctcttcctt

SEQ ID NO: 1026032 - DNA, 15 bp, Homo sapiens
tttgaagctcttcct

SEQ ID NO: 1026033 - DNA, 15 bp, Homo sapiens
atttgaagctcttcc

SEQ ID NO: 1026034 - DNA, 15 bp, Homo sapiens
gatttgaagctcttc

SEQ ID NO: 1026035 - DNA, 15 bp, Homo sapiens
agatttgaagctctt

SEQ ID NO: 1026036 - DNA, 15 bp, Homo sapiens
tagatttgaagctct

SEQ ID NO: 1026037 - DNA, 15 bp, Homo sapiens
ctagatttgaagctc

SEQ ID NO: 1026038 - DNA, 15 bp, Homo sapiens
tctagatttgaagct

SEQ ID NO: 1026039 - DNA, 15 bp, Homo sapiens
ttctagatttgaagc

SEQ ID NO: 1026040 - DNA, 15 bp, Homo sapiens
cttctagatttgaag

SEQ ID NO: 1026041 - DNA, 15 bp, Homo sapiens
ccttctagatttgaa

SEQ ID NO: 1026042 - DNA, 15 bp, Homo sapiens
tccttctagatttga

SEQ ID NO: 1026043 - DNA, 15 bp, Homo sapiens
atccttctagatttg

SEQ ID NO: 1026044 - DNA, 15 bp, Homo sapiens
catccttctagattt

SEQ ID NO: 1026045 - DNA, 15 bp, Homo sapiens
acatccttctagatt

SEQ ID NO: 1026046 - DNA, 15 bp, Homo sapiens
tacatccttctagat

SEQ ID NO: 1026047 - DNA, 15 bp, Homo sapiens
gtacatccttctaga

SEQ ID NO: 1026048 - DNA, 15 bp, Homo sapiens
ggtacatccttctag

SEQ ID NO: 1026049 - DNA, 15 bp, Homo sapiens
gggtacatccttcta

SEQ ID NO: 1026050 - DNA, 15 bp, Homo sapiens
tgggtacatccttct

SEQ ID NO: 1026051 - DNA, 15 bp, Homo sapiens
ttgggtacatccttc

SEQ ID NO: 1026052 - DNA, 15 bp, Homo sapiens
cttgggtacatcctt

SEQ ID NO: 1026053 - DNA, 15 bp, Homo sapiens
acttgggtacatcct

SEQ ID NO: 1026054 - DNA, 15 bp, Homo sapiens
cacttgggtacatcc

SEQ ID NO: 1026055 - DNA, 15 bp, Homo sapiens
tcacttgggtacatc

SEQ ID NO: 1026056 - DNA, 15 bp, Homo sapiens
atcacttgggtacat

SEQ ID NO: 1026057 - DNA, 15 bp, Homo sapiens
gatcacttgggtaca

SEQ ID NO: 1026058 - DNA, 15 bp, Homo sapiens
agatcacttgggtac

SEQ ID NO: 1026059 - DNA, 15 bp, Homo sapiens
gagatcacttgggta

SEQ ID NO: 1026060 - DNA, 15 bp, Homo sapiens
agagatcacttgggt

SEQ ID NO: 1026061 - DNA, 15 bp, Homo sapiens
aagagatcacttggg

SEQ ID NO: 1026062 - DNA, 15 bp, Homo sapiens
taagagatcacttgg

SEQ ID NO: 1026063 - DNA, 15 bp, Homo sapiens
ctaagagatcacttg

SEQ ID NO: 1026064 - DNA, 15 bp, Homo sapiens
tctaagagatcactt

SEQ ID NO: 1026065 - DNA, 15 bp, Homo sapiens
ttctaagagatcact

SEQ ID NO: 1026066 - DNA, 15 bp, Homo sapiens
tttctaagagatcac

SEQ ID NO: 1026067 - DNA, 15 bp, Homo sapiens
atttctaagagatca

SEQ ID NO: 1026068 - DNA, 15 bp, Homo sapiens
gatttctaagagatc

SEQ ID NO: 1026069 - DNA, 15 bp, Homo sapiens
agatttctaagagat

SEQ ID NO: 1026070 - DNA, 15 bp, Homo sapiens
gagatttctaagaga

SEQ ID NO: 1026071 - DNA, 15 bp, Homo sapiens
agagatttctaagag

SEQ ID NO: 1026072 - DNA, 15 bp, Homo sapiens
gagagatttctaaga

SEQ ID NO: 1026073 - DNA, 15 bp, Homo sapiens
agagagatttctaag

SEQ ID NO: 1026074 - DNA, 15 bp, Homo sapiens
gagagagatttctaa

SEQ ID NO: 1026075 - DNA, 15 bp, Homo sapiens
tgagagagatttcta

SEQ ID NO: 1026076 - DNA, 15 bp, Homo sapiens
ctgagagagatttct

SEQ ID NO: 1026077 - DNA, 15 bp, Homo sapiens
cctgagagagatttc

SEQ ID NO: 1026078 - DNA, 15 bp, Homo sapiens
tcctgagagagattt

SEQ ID NO: 1026079 - DNA, 15 bp, Homo sapiens
ttcctgagagagatt

SEQ ID NO: 1026080 - DNA, 15 bp, Homo sapiens
tttcctgagagagat

SEQ ID NO: 1026081 - DNA, 15 bp, Homo sapiens
ttttcctgagagaga

SEQ ID NO: 1026082 - DNA, 15 bp, Homo sapiens
cttttcctgagagag

SEQ ID NO: 1026083 - DNA, 15 bp, Homo sapiens
tcttttcctgagaga

SEQ ID NO: 1026084 - DNA, 15 bp, Homo sapiens
ttcttttcctgagag

SEQ ID NO: 1026085 - DNA, 15 bp, Homo sapiens
cttcttttcctgaga

SEQ ID NO: 1026086 - DNA, 15 bp, Homo sapiens
ccttcttttcctgag

SEQ ID NO: 1026087 - DNA, 15 bp, Homo sapiens
tccttcttttcctga

SEQ ID NO: 1026088 - DNA, 15 bp, Homo sapiens
ttccttcttttcctg

SEQ ID NO: 1026089 - DNA, 15 bp, Homo sapiens
cttccttcttttcct

SEQ ID NO: 1026090 - DNA, 15 bp, Homo sapiens
ccttccttcttttcc

SEQ ID NO: 1026091 - DNA, 15 bp, Homo sapiens
ctccttctttccttc

SEQ ID NO: 1026092 - DNA, 15 bp, Homo sapiens
cctccttctttcctt

SEQ ID NO: 1026093 - DNA, 15 bp, Homo sapiens
ccctccttctttcct

SEQ ID NO: 1026094 - DNA, 15 bp, Homo sapiens
tccctccttctttcc

SEQ ID NO: 1026095 - DNA, 15 bp, Homo sapiens
ttccctccttctttc

SEQ ID NO: 1026096 - DNA, 15 bp, Homo sapiens
cttccctccttcttt

SEQ ID NO: 1026097 - DNA, 15 bp, Homo sapiens
ccttccctccttctt

SEQ ID NO: 1026098 - DNA, 15 bp, Homo sapiens
tccttccctccttct

SEQ ID NO: 1026099 - DNA, 15 bp, Homo sapiens
ctccttccctccttc

SEQ ID NO: 1026100 - DNA, 15 bp, Homo sapiens
cctccttccctcctt

SEQ ID NO: 1026101 - DNA, 15 bp, Homo sapiens
ccctccttccctcct

SEQ ID NO: 1026102 - DNA, 15 bp, Homo sapiens
tccctccttccctcc

SEQ ID NO: 1026103 - DNA, 15 bp, Homo sapiens
ttccctccttccctc

SEQ ID NO: 1026104 - DNA, 15 bp, Homo sapiens
cttccctccttccct

SEQ ID NO: 1026105 - DNA, 15 bp, Homo sapiens
ccttccctccttccc

SEQ ID NO: 1026106 - DNA, 15 bp, Homo sapiens
tccttccctccttcc

SEQ ID NO: 1026107 - DNA, 15 bp, Homo sapiens
tcttccctccttccc

SEQ ID NO: 1026108 - DNA, 15 bp, Homo sapiens
ttcttccctccttcc

SEQ ID NO: 1026109 - DNA, 15 bp, Homo sapiens
cttcttccctccttc

SEQ ID NO: 1026110 - DNA, 15 bp, Homo sapiens
tcttcttccctcctt

SEQ ID NO: 1026111 - DNA, 15 bp, Homo sapiens
ttcttcttccctcct

SEQ ID NO: 1026112 - DNA, 15 bp, Homo sapiens
tttcttcttccctcc

SEQ ID NO: 1026113 - DNA, 15 bp, Homo sapiens
ttttcttcttccctc

SEQ ID NO: 1026114 - DNA, 15 bp, Homo sapiens
cttttcttcttccct

SEQ ID NO: 1026115 - DNA, 15 bp, Homo sapiens
ccttttcttcttccc

SEQ ID NO: 1026116 - DNA, 15 bp, Homo sapiens
tccttttcttcttcc

SEQ ID NO: 1026117 - DNA, 15 bp, Homo sapiens
ctccttttcttcttc

SEQ ID NO: 1026118 - DNA, 15 bp, Homo sapiens
cctccttttcttctt

SEQ ID NO: 1026119 - DNA, 15 bp, Homo sapiens
ccctccttttcttct

SEQ ID NO: 1026120 - DNA, 15 bp, Homo sapiens
tccctccttttcttc

SEQ ID NO: 1026121 - DNA, 15 bp, Homo sapiens
ctccctccttttctt

SEQ ID NO: 1026122 - DNA, 15 bp, Homo sapiens
cctccctccttttct

SEQ ID NO: 1026123 - DNA, 15 bp, Homo sapiens
ccctccctccttttc

SEQ ID NO: 1026124 - DNA, 15 bp, Homo sapiens
tccctccctcctttt

SEQ ID NO: 1026125 - DNA, 15 bp, Homo sapiens
ctccctccctccttt

SEQ ID NO: 1026126 - DNA, 15 bp, Homo sapiens
cctccctccctcctt

SEQ ID NO: 1026127 - DNA, 15 bp, Homo sapiens
ccctccctccctcct

SEQ ID NO: 1026128 - DNA, 15 bp, Homo sapiens
ttccctccctccctc

SEQ ID NO: 1026129 - DNA, 15 bp, Homo sapiens
cttccctccctccct

SEQ ID NO: 1026130 - DNA, 15 bp, Homo sapiens
tcttccctccctccc

SEQ ID NO: 1026131 - DNA, 15 bp, Homo sapiens
ttcttccctccctcc

SEQ ID NO: 1026132 - DNA, 15 bp, Homo sapiens
cttcttccctccctc

SEQ ID NO: 1026133 - DNA, 15 bp, Homo sapiens
ccttcttccctccct

SEQ ID NO: 1026134 - DNA, 15 bp, Homo sapiens
cccttcttccctccc

SEQ ID NO: 1026135 - DNA, 15 bp, Homo sapiens
ccccttcttccctcc

SEQ ID NO: 1026136 - DNA, 15 bp, Homo sapiens
tccccttcttccctc

SEQ ID NO: 1026137 - DNA, 15 bp, Homo sapiens
ttccccttcttccct

SEQ ID NO: 1026138 - DNA, 15 bp, Homo sapiens
tttccccttcttccc

SEQ ID NO: 1026139 - DNA, 15 bp, Homo sapiens
ttttccccttcttcc

SEQ ID NO: 1026140 - DNA, 15 bp, Homo sapiens
tttttccccttcttc

SEQ ID NO: 1026141 - DNA, 15 bp, Homo sapiens
gtttttccccttctt

SEQ ID NO: 1026142 - DNA, 15 bp, Homo sapiens
agtttttccccttct

SEQ ID NO: 1026143 - DNA, 15 bp, Homo sapiens
cagtttttccccttc

SEQ ID NO: 1026144 - DNA, 15 bp, Homo sapiens
tcagtttttcccctt

SEQ ID NO: 1026145 - DNA, 15 bp, Homo sapiens
ctcagtttttcccct

SEQ ID NO: 1026146 - DNA, 15 bp, Homo sapiens
cctcagtttttcccc

SEQ ID NO: 1026147 - DNA, 15 bp, Homo sapiens
tcctcagtttttccc

SEQ ID NO: 1026148 - DNA, 15 bp, Homo sapiens
atcctcagtttttcc

SEQ ID NO: 1026149 - DNA, 15 bp, Homo sapiens
catcctcagtttttc

SEQ ID NO: 1026150 - DNA, 15 bp, Homo sapiens
ccatcctcagttttt

SEQ ID NO: 1026151 - DNA, 15 bp, Homo sapiens
accatcctcagtttt

SEQ ID NO: 1026152 - DNA, 15 bp, Homo sapiens
caccatcctcagttt

SEQ ID NO: 1026153 - DNA, 15 bp, Homo sapiens
tcaccatcctcagtt

SEQ ID NO: 1026154 - DNA, 15 bp, Homo sapiens
ctcaccatcctcagt

SEQ ID NO: 1026155 - DNA, 15 bp, Homo sapiens
tctcaccatcctcag

SEQ ID NO: 1026156 - DNA, 15 bp, Homo sapiens
atctcaccatcctca

SEQ ID NO: 1026157 - DNA, 15 bp, Homo sapiens
tatctcaccatcctc

SEQ ID NO: 1026158 - DNA, 15 bp, Homo sapiens
atatctcaccatcct

SEQ ID NO: 1026159 - DNA, 15 bp, Homo sapiens
aatatctcaccatcc

SEQ ID NO: 1026160 - DNA, 15 bp, Homo sapiens
gaatatctcaccatc

SEQ ID NO: 1026161 - DNA, 15 bp, Homo sapiens
cgaatatctcaccat

SEQ ID NO: 1026162 - DNA, 15 bp, Homo sapiens
tcgaatatctcacca

SEQ ID NO: 1026163 - DNA, 15 bp, Homo sapiens
gtcgaatatctcacc

SEQ ID NO: 1026164 - DNA, 15 bp, Homo sapiens
tgtcgaatatctcac

SEQ ID NO: 1026165 - DNA, 15 bp, Homo sapiens
ttgtcgaatatctca

SEQ ID NO: 1026166 - DNA, 15 bp, Homo sapiens
attgtcgaatatctc

SEQ ID NO: 1026167 - DNA, 15 bp, Homo sapiens
aattgtcgaatatct

SEQ ID NO: 1026168 - DNA, 15 bp, Homo sapiens
aaattgtcgaatatc

SEQ ID NO: 1026169 - DNA, 15 bp, Homo sapiens
caaattgtcgaatat

SEQ ID NO: 1026170 - DNA, 15 bp, Homo sapiens
acaaattgtcgaata

SEQ ID NO: 1026171 - DNA, 15 bp, Homo sapiens
aacaaattgtcgaat

SEQ ID NO: 1026172 - DNA, 15 bp, Homo sapiens
aaacaaattgtcgaa

SEQ ID NO: 1026173 - DNA, 15 bp, Homo sapiens
taaacaaattgtcga

SEQ ID NO: 1026174 - DNA, 15 bp, Homo sapiens
ctaaacaaattgtcg

SEQ ID NO: 1026175 - DNA, 15 bp, Homo sapiens
actaaacaaattgtc

SEQ ID NO: 1026176 - DNA, 15 bp, Homo sapiens
gactaaacaaattgt

SEQ ID NO: 1026177 - DNA, 15 bp, Homo sapiens
ggactaaacaaattg

SEQ ID NO: 1026178 - DNA, 15 bp, Homo sapiens
aggactaaacaaatt

SEQ ID NO: 1026179 - DNA, 15 bp, Homo sapiens
gaggactaaacaaat

SEQ ID NO: 1026180 - DNA, 15 bp, Homo sapiens
tgaggactaaacaaa

SEQ ID NO: 1026181 - DNA, 15 bp, Homo sapiens
gtgaggactaaacaa

SEQ ID NO: 1026182 - DNA, 15 bp, Homo sapiens
agtgaggactaaaca

SEQ ID NO: 1026183 - DNA, 15 bp, Homo sapiens
aagtgaggactaaac

SEQ ID NO: 1026184 - DNA, 15 bp, Homo sapiens
aaagtgaggactaaa

SEQ ID NO: 1026185 - DNA, 15 bp, Homo sapiens
gaaagtgaggactaa

SEQ ID NO: 1026186 - DNA, 15 bp, Homo sapiens
agaaagtgaggacta

SEQ ID NO: 1026187 - DNA, 15 bp, Homo sapiens
gagaaagtgaggact

SEQ ID NO: 1026188 - DNA, 15 bp, Homo sapiens
agagaaagtgaggac

SEQ ID NO: 1026189 - DNA, 15 bp, Homo sapiens
tagagaaagtgagga

SEQ ID NO: 1026190 - DNA, 15 bp, Homo sapiens
ttagagaaagtgagg

SEQ ID NO: 1026191 - DNA, 15 bp, Homo sapiens
attagagaaagtgag

SEQ ID NO: 1026192 - DNA, 15 bp, Homo sapiens
tattagagaaagtga

SEQ ID NO: 1026193 - DNA, 15 bp, Homo sapiens
gtattagagaaagtg

SEQ ID NO: 1026194 - DNA, 15 bp, Homo sapiens
tgtattagagaaagt

SEQ ID NO: 1026195 - DNA, 15 bp, Homo sapiens
ctgtattagagaaag

SEQ ID NO: 1026196 - DNA, 15 bp, Homo sapiens
gctgtattagagaaa

SEQ ID NO: 1026197 - DNA, 15 bp, Homo sapiens
agctgtattagagaa

SEQ ID NO: 1026198 - DNA, 15 bp, Homo sapiens
cagctgtattagaga

SEQ ID NO: 1026199 - DNA, 15 bp, Homo sapiens
tcagctgtattagag

SEQ ID NO: 1026200 - DNA, 15 bp, Homo sapiens
ttcagctgtattaga

SEQ ID NO: 1026201 - DNA, 15 bp, Homo sapiens
cttcagctgtattag

SEQ ID NO: 1026202 - DNA, 15 bp, Homo sapiens
gcttcagctgtatta

SEQ ID NO: 1026203 - DNA, 15 bp, Homo sapiens
ggcttcagctgtatt

SEQ ID NO: 1026204 - DNA, 15 bp, Homo sapiens
aggcttcagctgtat

SEQ ID NO: 1026205 - DNA, 15 bp, Homo sapiens
aaggcttcagctgta

SEQ ID NO: 1026206 - DNA, 15 bp, Homo sapiens
gaaggcttcagctgt

SEQ ID NO: 1026207 - DNA, 15 bp, Homo sapiens
tgaaggcttcagctg

SEQ ID NO: 1026208 - DNA, 15 bp, Homo sapiens
atgaaggcttcagct

SEQ ID NO: 1026209 - DNA, 15 bp, Homo sapiens
aatgaaggcttcagc

SEQ ID NO: 1026210 - DNA, 15 bp, Homo sapiens
aaatgaaggcttcag

SEQ ID NO: 1026211 - DNA, 15 bp, Homo sapiens
aaaatgaaggcttca

SEQ ID NO: 1026212 - DNA, 15 bp, Homo sapiens
gaaaatgaaggcttc

SEQ ID NO: 1026213 - DNA, 15 bp, Homo sapiens
tgaaaatgaaggctt

SEQ ID NO: 1026214 - DNA, 15 bp, Homo sapiens
ttgaaaatgaaggct

SEQ ID NO: 1026215 - DNA, 15 bp, Homo sapiens
cttgaaaatgaaggc

SEQ ID NO: 1026216 - DNA, 15 bp, Homo sapiens
acttgaaaatgaagg

SEQ ID NO: 1026217 - DNA, 15 bp, Homo sapiens
gacttgaaaatgaag

SEQ ID NO: 1026218 - DNA, 15 bp, Homo sapiens
agacttgaaaatgaa

SEQ ID NO: 1026219 - DNA, 15 bp, Homo sapiens
gagacttgaaaatga

SEQ ID NO: 1026220 - DNA, 15 bp, Homo sapiens
ggagacttgaaaatg

SEQ ID NO: 1026221 - DNA, 15 bp, Homo sapiens
tggagacttgaaaat

SEQ ID NO: 1026222 - DNA, 15 bp, Homo sapiens
ctggagacttgaaaa

SEQ ID NO: 1026223 - DNA, 15 bp, Homo sapiens
cctggagacttgaaa

SEQ ID NO: 1026224 - DNA, 15 bp, Homo sapiens
acctggagacttgaa

SEQ ID NO: 1026225 - DNA, 15 bp, Homo sapiens
aacctggagacttga

SEQ ID NO: 1026226 - DNA, 15 bp, Homo sapiens
aaacctggagacttg

SEQ ID NO: 1026227 - DNA, 15 bp, Homo sapiens
gaaacctggagactt

SEQ ID NO: 1026228 - DNA, 15 bp, Homo sapiens
ggaaacctggagact

SEQ ID NO: 1026229 - DNA, 15 bp, Homo sapiens
aggaaacctggagac

SEQ ID NO: 1026230 - DNA, 15 bp, Homo sapiens
taggaaacctggaga

SEQ ID NO: 1026231 - DNA, 15 bp, Homo sapiens
ttaggaaacctggag

SEQ ID NO: 1026232 - DNA, 15 bp, Homo sapiens
tttaggaaacctgga

SEQ ID NO: 1026233 - DNA, 15 bp, Homo sapiens
ctttaggaaacctgg

SEQ ID NO: 1026234 - DNA, 15 bp, Homo sapiens
tctttaggaaacctg

SEQ ID NO: 1026235 - DNA, 15 bp, Homo sapiens
atctttaggaaacct

SEQ ID NO: 1026236 - DNA, 15 bp, Homo sapiens
tatctttaggaaacc

SEQ ID NO: 1026237 - DNA, 15 bp, Homo sapiens
ttatctttaggaaac

SEQ ID NO: 1026238 - DNA, 15 bp, Homo sapiens
attatctttaggaaa

SEQ ID NO: 1026239 - DNA, 15 bp, Homo sapiens
gattatctttaggaa

SEQ ID NO: 1026240 - DNA, 15 bp, Homo sapiens
agattatctttagga

SEQ ID NO: 1026241 - DNA, 15 bp, Homo sapiens
tagattatctttagg

SEQ ID NO: 1026242 - DNA, 15 bp, Homo sapiens
atagattatctttag

SEQ ID NO: 1026243 - DNA, 15 bp, Homo sapiens
gatagattatcttta

SEQ ID NO: 1026244 - DNA, 15 bp, Homo sapiens
agatagattatcttt

SEQ ID NO: 1026245 - DNA, 15 bp, Homo sapiens
aagatagattatctt

SEQ ID NO: 1026246 - DNA, 15 bp, Homo sapiens
gaagatagattatct

SEQ ID NO: 1026247 - DNA, 15 bp, Homo sapiens
tgaagatagattatc

SEQ ID NO: 1026248 - DNA, 15 bp, Homo sapiens
ttgaagatagattat

SEQ ID NO: 1026249 - DNA, 15 bp, Homo sapiens
tttgaagatagatta

SEQ ID NO: 1026250 - DNA, 15 bp, Homo sapiens
ttttgaagatagatt

SEQ ID NO: 1026251 - DNA, 15 bp, Homo sapiens
attttgaagatagat

SEQ ID NO: 1026252 - DNA, 15 bp, Homo sapiens
cattttgaagataga

SEQ ID NO: 1026253 - DNA, 15 bp, Homo sapiens
gcattttgaagatag

SEQ ID NO: 1026254 - DNA, 15 bp, Homo sapiens
tgcattttgaagata

SEQ ID NO: 1026255 - DNA, 15 bp, Homo sapiens
atgcattttgaagat

SEQ ID NO: 1026256 - DNA, 15 bp, Homo sapiens
catgcattttgaaga

SEQ ID NO: 1026257 - DNA, 15 bp, Homo sapiens
tcatgcattttgaag

SEQ ID NO: 1026258 - DNA, 15 bp, Homo sapiens
gtcatgcattttgaa

SEQ ID NO: 1026259 - DNA, 15 bp, Homo sapiens
tgtcatgcattttga

SEQ ID NO: 1026260 - DNA, 15 bp, Homo sapiens
atgtcatgcattttg

SEQ ID NO: 1026261 - DNA, 15 bp, Homo sapiens
gatgtcatgcatttt

SEQ ID NO: 1026262 - DNA, 15 bp, Homo sapiens
tgatgtcatgcattt

SEQ ID NO: 1026263 - DNA, 15 bp, Homo sapiens
ctgatgtcatgcatt

SEQ ID NO: 1026264 - DNA, 15 bp, Homo sapiens
cctgatgtcatgcat

SEQ ID NO: 1026265 - DNA, 15 bp, Homo sapiens
ccctgatgtcatgca

SEQ ID NO: 1026266 - DNA, 15 bp, Homo sapiens
accctgatgtcatgc

SEQ ID NO: 1026267 - DNA, 15 bp, Homo sapiens
taccctgatgtcatg

SEQ ID NO: 1026268 - DNA, 15 bp, Homo sapiens
ctaccctgatgtcat

SEQ ID NO: 1026269 - DNA, 15 bp, Homo sapiens
cctaccctgatgtca

SEQ ID NO: 1026270 - DNA, 15 bp, Homo sapiens
tcctaccctgatgtc

SEQ ID NO: 1026271 - DNA, 15 bp, Homo sapiens
atcctaccctgatgt

SEQ ID NO: 1026272 - DNA, 15 bp, Homo sapiens
catcctaccctgatg

SEQ ID NO: 1026273 - DNA, 15 bp, Homo sapiens
gcatcctaccctgat

SEQ ID NO: 1026274 - DNA, 15 bp, Homo sapiens
tgcatcctaccctga

SEQ ID NO: 1026275 - DNA, 15 bp, Homo sapiens
atgcatcctaccctg

SEQ ID NO: 1026276 - DNA, 15 bp, Homo sapiens
aatgcatcctaccct

SEQ ID NO: 1026277 - DNA, 15 bp, Homo sapiens
taatgcatcctaccc

SEQ ID NO: 1026278 - DNA, 15 bp, Homo sapiens
ataatgcatcctacc

SEQ ID NO: 1026279 - DNA, 15 bp, Homo sapiens
gataatgcatcctac

SEQ ID NO: 1026280 - DNA, 15 bp, Homo sapiens
agataatgcatccta

SEQ ID NO: 1026281 - DNA, 15 bp, Homo sapiens
cagataatgcatcct

SEQ ID NO: 1026282 - DNA, 15 bp, Homo sapiens
tcagataatgcatcc

SEQ ID NO: 1026283 - DNA, 15 bp, Homo sapiens
atcagataatgcatc

SEQ ID NO: 1026284 - DNA, 15 bp, Homo sapiens
tatcagataatgcat

SEQ ID NO: 1026285 - DNA, 15 bp, Homo sapiens
atatcagataatgca

SEQ ID NO: 1026286 - DNA, 15 bp, Homo sapiens
tatatcagataatgc

SEQ ID NO: 1026287 - DNA, 15 bp, Homo sapiens
ctatatcagataatg

SEQ ID NO: 1026288 - DNA, 15 bp, Homo sapiens
cctatatcagataat

SEQ ID NO: 1026289 - DNA, 15 bp, Homo sapiens
tcctatatcagataa

SEQ ID NO: 1026290 - DNA, 15 bp, Homo sapiens
ctcctatatcagata

SEQ ID NO: 1026291 - DNA, 15 bp, Homo sapiens
gctcctatatcagat

SEQ ID NO: 1026292 - DNA, 15 bp, Homo sapiens
tgctcctatatcaga

SEQ ID NO: 1026293 - DNA, 15 bp, Homo sapiens
atgctcctatatcag

SEQ ID NO: 1026294 - DNA, 15 bp, Homo sapiens
gatgctcctatatca

SEQ ID NO: 1026295 - DNA, 15 bp, Homo sapiens
agatgctcctatatc

SEQ ID NO: 1026296 - DNA, 15 bp, Homo sapiens
tagatgctcctatat

SEQ ID NO: 1026297 - DNA, 15 bp, Homo sapiens
gtagatgctcctata

SEQ ID NO: 1026298 - DNA, 15 bp, Homo sapiens
agtagatgctcctat

SEQ ID NO: 1026299 - DNA, 15 bp, Homo sapiens
cagtagatgctccta

SEQ ID NO: 1026300 - DNA, 15 bp, Homo sapiens
acagtagatgctcct

SEQ ID NO: 1026301 - DNA, 15 bp, Homo sapiens
aacagtagatgctcc

SEQ ID NO: 1026302 - DNA, 15 bp, Homo sapiens
aaacagtagatgctc

SEQ ID NO: 1026303 - DNA, 15 bp, Homo sapiens
aaaacagtagatgct

SEQ ID NO: 1026304 - DNA, 15 bp, Homo sapiens
taaaacagtagatgc

SEQ ID NO: 1026305 - DNA, 15 bp, Homo sapiens
ataaaacagtagatg

SEQ ID NO: 1026306 - DNA, 15 bp, Homo sapiens
aataaaacagtagat

SEQ ID NO: 1026307 - DNA, 15 bp, Homo sapiens
aaataaaacagtaga

SEQ ID NO: 1026308 - DNA, 15 bp, Homo sapiens
caaataaaacagtag

SEQ ID NO: 1026309 - DNA, 15 bp, Homo sapiens
gcaaataaaacagta

SEQ ID NO: 1026310 - DNA, 15 bp, Homo sapiens
tgcaaataaaacagt

SEQ ID NO: 1026311 - DNA, 15 bp, Homo sapiens
ctgcaaataaaacag

SEQ ID NO: 1026312 - DNA, 15 bp, Homo sapiens
actgcaaataaaaca

SEQ ID NO: 1026313 - DNA, 15 bp, Homo sapiens
aactgcaaataaaac

SEQ ID NO: 1026314 - DNA, 15 bp, Homo sapiens
caactgcaaataaaa

SEQ ID NO: 1026315 - DNA, 15 bp, Homo sapiens
acaactgcaaataaa

SEQ ID NO: 1026316 - DNA, 15 bp, Homo sapiens
aacaactgcaaataa

SEQ ID NO: 1026317 - DNA, 15 bp, Homo sapiens
aaacaactgcaaata

SEQ ID NO: 1026318 - DNA, 15 bp, Homo sapiens
caaacaactgcaaat

SEQ ID NO: 1026319 - DNA, 15 bp, Homo sapiens
ccaaacaactgcaaa

SEQ ID NO: 1026320 - DNA, 15 bp, Homo sapiens
tccaaacaactgcaa

SEQ ID NO: 1026321 - DNA, 15 bp, Homo sapiens
ttccaaacaactgca

SEQ ID NO: 1026322 - DNA, 15 bp, Homo sapiens
attccaaacaactgc

SEQ ID NO: 1026323 - DNA, 15 bp, Homo sapiens
tattccaaacaactg

SEQ ID NO: 1026324 - DNA, 15 bp, Homo sapiens
ctattccaaacaact

SEQ ID NO: 1026325 - DNA, 15 bp, Homo sapiens
gctattccaaacaac

SEQ ID NO: 1026326 - DNA, 15 bp, Homo sapiens
tgctattccaaacaa

SEQ ID NO: 1026327 - DNA, 15 bp, Homo sapiens
atgctattccaaaca

SEQ ID NO: 1026328 - DNA, 15 bp, Homo sapiens
catgctattccaaac

SEQ ID NO: 1026329 - DNA, 15 bp, Homo sapiens
gcatgctattccaaa

SEQ ID NO: 1026330 - DNA, 15 bp, Homo sapiens
agcatgctattccaa

SEQ ID NO: 1026331 - DNA, 15 bp, Homo sapiens
aagcatgctattcca

SEQ ID NO: 1026332 - DNA, 15 bp, Homo sapiens
caagcatgctattcc

SEQ ID NO: 1026333 - DNA, 15 bp, Homo sapiens
acaagcatgctattc

SEQ ID NO: 1026334 - DNA, 15 bp, Homo sapiens
aacaagcatgctatt

SEQ ID NO: 1026335 - DNA, 15 bp, Homo sapiens
gaacaagcatgctat

SEQ ID NO: 1026336 - DNA, 15 bp, Homo sapiens
ggaacaagcatgcta

SEQ ID NO: 1026337 - DNA, 15 bp, Homo sapiens
aggaacaagcatgct

SEQ ID NO: 1026338 - DNA, 15 bp, Homo sapiens
aaggaacaagcatgc

SEQ ID NO: 1026339 - DNA, 15 bp, Homo sapiens
aaaggaacaagcatg

SEQ ID NO: 1026340 - DNA, 15 bp, Homo sapiens
caaaggaacaagcat

SEQ ID NO: 1026341 - DNA, 15 bp, Homo sapiens
ccaaaggaacaagca

SEQ ID NO: 1026342 - DNA, 15 bp, Homo sapiens
cccaaaggaacaagc

SEQ ID NO: 1026343 - DNA, 15 bp, Homo sapiens
tcccaaaggaacaag

SEQ ID NO: 1026344 - DNA, 15 bp, Homo sapiens
ctcccaaaggaacaa

SEQ ID NO: 1026345 - DNA, 15 bp, Homo sapiens
cctcccaaaggaaca

SEQ ID NO: 1026346 - DNA, 15 bp, Homo sapiens
ccctcccaaaggaac

SEQ ID NO: 1026347 - DNA, 15 bp, Homo sapiens
tccctcccaaaggaa

SEQ ID NO: 1026348 - DNA, 15 bp, Homo sapiens
ttccctcccaaagga

SEQ ID NO: 1026349 - DNA, 15 bp, Homo sapiens
cttccctcccaaagg

SEQ ID NO: 1026350 - DNA, 15 bp, Homo sapiens
tcttccctcccaaag

SEQ ID NO: 1026351 - DNA, 15 bp, Homo sapiens
atcttccctcccaaa

SEQ ID NO: 1026352 - DNA, 15 bp, Homo sapiens
catcttccctcccaa

SEQ ID NO: 1026353 - DNA, 15 bp, Homo sapiens
tcatcttccctccca

SEQ ID NO: 1026354 - DNA, 15 bp, Homo sapiens
atcatcttccctccc

SEQ ID NO: 1026355 - DNA, 15 bp, Homo sapiens
gatcatcttccctcc

SEQ ID NO: 1026356 - DNA, 15 bp, Homo sapiens
agatcatcttccctc

SEQ ID NO: 1026357 - DNA, 15 bp, Homo sapiens
gagatcatcttccct

SEQ ID NO: 1026358 - DNA, 15 bp, Homo sapiens
ggagatcatcttccc

SEQ ID NO: 1026359 - DNA, 15 bp, Homo sapiens
gggagatcatcttcc

SEQ ID NO: 1026360 - DNA, 15 bp, Homo sapiens
ggggagatcatcttc

SEQ ID NO: 1026361 - DNA, 15 bp, Homo sapiens
tggggagatcatctt

SEQ ID NO: 1026362 - DNA, 15 bp, Homo sapiens
ttggggagatcatct

SEQ ID NO: 1026363 - DNA, 15 bp, Homo sapiens
cttggggagatcatc

SEQ ID NO: 1026364 - DNA, 15 bp, Homo sapiens
tcttggggagatcat

SEQ ID NO: 1026365 - DNA, 15 bp, Homo sapiens
ttcttggggagatca

SEQ ID NO: 1026366 - DNA, 15 bp, Homo sapiens
attcttggggagatc

SEQ ID NO: 1026367 - DNA, 15 bp, Homo sapiens
gattcttggggagat

SEQ ID NO: 1026368 - DNA, 15 bp, Homo sapiens
ggattcttggggaga

SEQ ID NO: 1026369 - DNA, 15 bp, Homo sapiens
gggattcttggggag

SEQ ID NO: 1026370 - DNA, 15 bp, Homo sapiens
tgggattcttgggga

SEQ ID NO: 1026371 - DNA, 15 bp, Homo sapiens
ttgggattcttgggg

SEQ ID NO: 1026372 - DNA, 15 bp, Homo sapiens
cttgggattcttggg

SEQ ID NO: 1026373 - DNA, 15 bp, Homo sapiens
tcttgggattcttgg

SEQ ID NO: 1026374 - DNA, 15 bp, Homo sapiens
ttcttgggattcttg

SEQ ID NO: 1026375 - DNA, 15 bp, Homo sapiens
gttcttgggattctt

SEQ ID NO: 1026376 - DNA, 15 bp, Homo sapiens
tgttcttgggattct

SEQ ID NO: 1026377 - DNA, 15 bp, Homo sapiens
ttgttcttgggattc

SEQ ID NO: 1026378 - DNA, 15 bp, Homo sapiens
tttgttcttgggatt

SEQ ID NO: 1026379 - DNA, 15 bp, Homo sapiens
ttttgttcttgggat

SEQ ID NO: 1026380 - DNA, 15 bp, Homo sapiens
tttttgttcttggga

SEQ ID NO: 1026381 - DNA, 15 bp, Homo sapiens
atttttgttcttggg

SEQ ID NO: 1026382 - DNA, 15 bp, Homo sapiens
gatttttgttcttgg

SEQ ID NO: 1026383 - DNA, 15 bp, Homo sapiens
agatttttgttcttg

SEQ ID NO: 1026384 - DNA, 15 bp, Homo sapiens
cagatttttgttctt

SEQ ID NO: 1026385 - DNA, 15 bp, Homo sapiens
ccagatttttgttct

SEQ ID NO: 1026386 - DNA, 15 bp, Homo sapiens
cccagatttttgttc

SEQ ID NO: 1026387 - DNA, 15 bp, Homo sapiens
ccccagatttttgtt

SEQ ID NO: 1026388 - DNA, 15 bp, Homo sapiens
gccccagatttttgt

SEQ ID NO: 1026389 - DNA, 15 bp, Homo sapiens
tgccccagatttttg

SEQ ID NO: 1026390 - DNA, 15 bp, Homo sapiens
ctgccccagattttt

SEQ ID NO: 1026391 - DNA, 15 bp, Homo sapiens
actgccccagatttt

SEQ ID NO: 1026392 - DNA, 15 bp, Homo sapiens
cactgccccagattt

SEQ ID NO: 1026393 - DNA, 15 bp, Homo sapiens
ccactgccccagatt

SEQ ID NO: 1026394 - DNA, 15 bp, Homo sapiens
gccactgccccagat

SEQ ID NO: 1026395 - DNA, 15 bp, Homo sapiens
agccactgccccaga

SEQ ID NO: 1026396 - DNA, 15 bp, Homo sapiens
gagccactgccccag

SEQ ID NO: 1026397 - DNA, 15 bp, Homo sapiens
agagccactgcccca

SEQ ID NO: 1026398 - DNA, 15 bp, Homo sapiens
tagagccactgcccc

SEQ ID NO: 1026399 - DNA, 15 bp, Homo sapiens
ctagagccactgccc

SEQ ID NO: 1026400 - DNA, 15 bp, Homo sapiens
actagagccactgcc

SEQ ID NO: 1026401 - DNA, 15 bp, Homo sapiens
gactagagccactgc

SEQ ID NO: 1026402 - DNA, 15 bp, Homo sapiens
ggactagagccactg

SEQ ID NO: 1026403 - DNA, 15 bp, Homo sapiens
aggactagagccact

SEQ ID NO: 1026404 - DNA, 15 bp, Homo sapiens
aaggactagagccac

SEQ ID NO: 1026405 - DNA, 15 bp, Homo sapiens
gaaggactagagcca

SEQ ID NO: 1026406 - DNA, 15 bp, Homo sapiens
tgaaggactagagcc

SEQ ID NO: 1026407 - DNA, 15 bp, Homo sapiens
ctgaaggactagagc

SEQ ID NO: 1026408 - DNA, 15 bp, Homo sapiens
cctgaaggactagag

SEQ ID NO: 1026409 - DNA, 15 bp, Homo sapiens
gcctgaaggactaga

SEQ ID NO: 1026410 - DNA, 15 bp, Homo sapiens
ggcctgaaggactag

SEQ ID NO: 1026411 - DNA, 15 bp, Homo sapiens
gggcctgaaggacta

SEQ ID NO: 1026412 - DNA, 15 bp, Homo sapiens
ggggcctgaaggact

SEQ ID NO: 1026413 - DNA, 15 bp, Homo sapiens
gggggcctgaaggac

SEQ ID NO: 1026414 - DNA, 15 bp, Homo sapiens
ggggggcctgaagga

SEQ ID NO: 1026415 - DNA, 15 bp, Homo sapiens
gggggggcctgaagg

SEQ ID NO: 1026416 - DNA, 15 bp, Homo sapiens
ggggggggcctgaag

SEQ ID NO: 1026417 - DNA, 15 bp, Homo sapiens
gggggggggcctgaa

SEQ ID NO: 1026418 - DNA, 15 bp, Homo sapiens
agggggggggcctga

SEQ ID NO: 1026419 - DNA, 15 bp, Homo sapiens
gagggggggggcctg

SEQ ID NO: 1026420 - DNA, 15 bp, Homo sapiens
ggagggggggggcct

SEQ ID NO: 1026421 - DNA, 15 bp, Homo sapiens
gggagggggggggcc

SEQ ID NO: 1026422 - DNA, 15 bp, Homo sapiens
ggggagggggggggc

SEQ ID NO: 1026423 - DNA, 15 bp, Homo sapiens
tggggaggggggggg

SEQ ID NO: 1026424 - DNA, 15 bp, Homo sapiens
ctggggagggggggg

SEQ ID NO: 1026425 - DNA, 15 bp, Homo sapiens
cctggggaggggggg

SEQ ID NO: 1026426 - DNA, 15 bp, Homo sapiens
gcctggggagggggg

SEQ ID NO: 1026427 - DNA, 15 bp, Homo sapiens
ggcctggggaggggg

SEQ ID NO: 1026428 - DNA, 15 bp, Homo sapiens
gggcctggggagggg

SEQ ID NO: 1026429 - DNA, 15 bp, Homo sapiens
ggggcctggggaggg

SEQ ID NO: 1026430 - DNA, 15 bp, Homo sapiens
gggggcctggggagg

SEQ ID NO: 1026431 - DNA, 15 bp, Homo sapiens
agggggcctggggag

SEQ ID NO: 1026432 - DNA, 15 bp, Homo sapiens
cagggggcctgggga

SEQ ID NO: 1026433 - DNA, 15 bp, Homo sapiens
acagggggcctgggg

SEQ ID NO: 1026434 - DNA, 15 bp, Homo sapiens
gacagggggcctggg

SEQ ID NO: 1026435 - DNA, 15 bp, Homo sapiens
agacagggggcctgg

SEQ ID NO: 1026436 - DNA, 15 bp, Homo sapiens
aagacagggggcctg

SEQ ID NO: 1026437 - DNA, 15 bp, Homo sapiens
caagacagggggcct

SEQ ID NO: 1026438 - DNA, 15 bp, Homo sapiens
acaagacagggggcc

SEQ ID NO: 1026439 - DNA, 15 bp, Homo sapiens
aacaagacagggggc

SEQ ID NO: 1026440 - DNA, 15 bp, Homo sapiens
aaacaagacaggggg

SEQ ID NO: 1026441 - DNA, 15 bp, Homo sapiens
aaaacaagacagggg

SEQ ID NO: 1026442 - DNA, 15 bp, Homo sapiens
aggaaaacaagacag

SEQ ID NO: 1026443 - DNA, 15 bp, Homo sapiens
taggaaaacaagaca

SEQ ID NO: 1026444 - DNA, 15 bp, Homo sapiens
ttaggaaaacaagac

SEQ ID NO: 1026445 - DNA, 15 bp, Homo sapiens
cttaggaaaacaaga

SEQ ID NO: 1026446 - DNA, 15 bp, Homo sapiens
gcttaggaaaacaag

SEQ ID NO: 1026447 - DNA, 15 bp, Homo sapiens
tgcttaggaaaacaa

SEQ ID NO: 1026448 - DNA, 15 bp, Homo sapiens
ttgcttaggaaaaca

SEQ ID NO: 1026449 - DNA, 15 bp, Homo sapiens
attgcttaggaaaac

SEQ ID NO: 1026450 - DNA, 15 bp, Homo sapiens
cattgcttaggaaaa

SEQ ID NO: 1026451 - DNA, 15 bp, Homo sapiens
ccattgcttaggaaa

SEQ ID NO: 1026452 - DNA, 15 bp, Homo sapiens
accattgcttaggaa

SEQ ID NO: 1026453 - DNA, 15 bp, Homo sapiens
gaccattgcttagga

SEQ ID NO: 1026454 - DNA, 15 bp, Homo sapiens
tgaccattgcttagg

SEQ ID NO: 1026455 - DNA, 15 bp, Homo sapiens
ctgaccattgcttag

SEQ ID NO: 1026456 - DNA, 15 bp, Homo sapiens
cctgaccattgctta

SEQ ID NO: 1026457 - DNA, 15 bp, Homo sapiens
tcctgaccattgctt

SEQ ID NO: 1026458 - DNA, 15 bp, Homo sapiens
ttcctgaccattgct

SEQ ID NO: 1026459 - DNA, 15 bp, Homo sapiens
attcctgaccattgc

SEQ ID NO: 1026460 - DNA, 15 bp, Homo sapiens
cattcctgaccattg

SEQ ID NO: 1026461 - DNA, 15 bp, Homo sapiens
acattcctgaccatt

SEQ ID NO: 1026462 - DNA, 15 bp, Homo sapiens
cacattcctgaccat

SEQ ID NO: 1026463 - DNA, 15 bp, Homo sapiens
ccacattcctgacca

SEQ ID NO: 1026464 - DNA, 15 bp, Homo sapiens
cccacattcctgacc

SEQ ID NO: 1026465 - DNA, 15 bp, Homo sapiens
ccccacattcctgac

SEQ ID NO: 1026466 - DNA, 15 bp, Homo sapiens
gccccacattcctga

SEQ ID NO: 1026467 - DNA, 15 bp, Homo sapiens
cgccccacattcctg

SEQ ID NO: 1026468 - DNA, 15 bp, Homo sapiens
ccgccccacattcct

SEQ ID NO: 1026469 - DNA, 15 bp, Homo sapiens
cccgccccacattcc

SEQ ID NO: 1026470 - DNA, 15 bp, Homo sapiens
ccccgccccacattc

SEQ ID NO: 1026471 - DNA, 15 bp, Homo sapiens
cccccgccccacatt

SEQ ID NO: 1026472 - DNA, 15 bp, Homo sapiens
ccccccgccccacat

SEQ ID NO: 1026473 - DNA, 15 bp, Homo sapiens
gccccccgccccaca

SEQ ID NO: 1026474 - DNA, 15 bp, Homo sapiens
tgccccccgccccac

SEQ ID NO: 1026475 - DNA, 15 bp, Homo sapiens
ctgccccccgcccca

SEQ ID NO: 1026476 - DNA, 15 bp, Homo sapiens
gctgccccccgcccc

SEQ ID NO: 1026477 - DNA, 15 bp, Homo sapiens
ggctgccccccgccc

SEQ ID NO: 1026478 - DNA, 15 bp, Homo sapiens
gggctgccccccgcc

SEQ ID NO: 1026479 - DNA, 15 bp, Homo sapiens
tgggctgccccccgc

SEQ ID NO: 1026480 - DNA, 15 bp, Homo sapiens
ctgggctgccccccg

SEQ ID NO: 1026481 - DNA, 15 bp, Homo sapiens
gctgggctgcccccc

SEQ ID NO: 1026482 - DNA, 15 bp, Homo sapiens
ggctgggctgccccc

SEQ ID NO: 1026483 - DNA, 15 bp, Homo sapiens
gggctgggctgcccc

SEQ ID NO: 1026484 - DNA, 15 bp, Homo sapiens
agggctgggctgccc

SEQ ID NO: 1026485 - DNA, 15 bp, Homo sapiens
gagggctgggctgcc

SEQ ID NO: 1026486 - DNA, 15 bp, Homo sapiens
agagggctgggctgc

SEQ ID NO: 1026487 - DNA, 15 bp, Homo sapiens
cagagggctgggctg

SEQ ID NO: 1026488 - DNA, 15 bp, Homo sapiens
acagagggctgggct

SEQ ID NO: 1026489 - DNA, 15 bp, Homo sapiens
cacagagggctgggc

SEQ ID NO: 1026490 - DNA, 15 bp, Homo sapiens
gcacagagggctggg

SEQ ID NO: 1026491 - DNA, 15 bp, Homo sapiens
ggcacagagggctgg

SEQ ID NO: 1026492 - DNA, 15 bp, Homo sapiens
gggcacagagggctg

SEQ ID NO: 1026493 - DNA, 15 bp, Homo sapiens
tgggcacagagggct

SEQ ID NO: 1026494 - DNA, 15 bp, Homo sapiens
ctgggcacagagggc

SEQ ID NO: 1026495 - DNA, 15 bp, Homo sapiens
gctgggcacagaggg

SEQ ID NO: 1026496 - DNA, 15 bp, Homo sapiens
ggctgggcacagagg

SEQ ID NO: 1026497 - DNA, 15 bp, Homo sapiens
gggctgggcacagag

SEQ ID NO: 1026498 - DNA, 15 bp, Homo sapiens
tgggctgggcacaga

SEQ ID NO: 1026499 - DNA, 15 bp, Homo sapiens
ctgggctgggcacag

SEQ ID NO: 1026500 - DNA, 15 bp, Homo sapiens
cctgggctgggcaca

SEQ ID NO: 1026501 - DNA, 15 bp, Homo sapiens
gcctgggctgggcac

SEQ ID NO: 1026502 - DNA, 15 bp, Homo sapiens
tgcctgggctgggca

SEQ ID NO: 1026503 - DNA, 15 bp, Homo sapiens
ctgcctgggctgggc

SEQ ID NO: 1026504 - DNA, 15 bp, Homo sapiens
gctgcctgggctggg

SEQ ID NO: 1026505 - DNA, 15 bp, Homo sapiens
ggctgcctgggctgg

SEQ ID NO: 1026506 - DNA, 15 bp, Homo sapiens
gggctgcctgggctg

SEQ ID NO: 1026507 - DNA, 15 bp, Homo sapiens
ggggctgcctgggct

SEQ ID NO: 1026508 - DNA, 15 bp, Homo sapiens
tggggctgcctgggc

SEQ ID NO: 1026509 - DNA, 15 bp, Homo sapiens
ctggggctgcctggg

SEQ ID NO: 1026510 - DNA, 15 bp, Homo sapiens
actggggctgcctgg

SEQ ID NO: 1026511 - DNA, 15 bp, Homo sapiens
gactggggctgcctg

SEQ ID NO: 1026512 - DNA, 15 bp, Homo sapiens
tgactggggctgcct

SEQ ID NO: 1026513 - DNA, 15 bp, Homo sapiens
gtgactggggctgcc

SEQ ID NO: 1026514 - DNA, 15 bp, Homo sapiens
tgtgactggggctgc

SEQ ID NO: 1026515 - DNA, 15 bp, Homo sapiens
ctgtgactggggctg

SEQ ID NO: 1026516 - DNA, 15 bp, Homo sapiens
actgtgactggggct

SEQ ID NO: 1026517 - DNA, 15 bp, Homo sapiens
gactgtgactggggc

SEQ ID NO: 1026518 - DNA, 15 bp, Homo sapiens
ggactgtgactgggg

SEQ ID NO: 1026519 - DNA, 15 bp, Homo sapiens
gggactgtgactggg

SEQ ID NO: 1026520 - DNA, 15 bp, Homo sapiens
tgggactgtgactgg

SEQ ID NO: 1026521 - DNA, 15 bp, Homo sapiens
ctgggactgtgactg

SEQ ID NO: 1026522 - DNA, 15 bp, Homo sapiens
cctgggactgtgact

SEQ ID NO: 1026523 - DNA, 15 bp, Homo sapiens
gcctgggactgtgac

SEQ ID NO: 1026524 - DNA, 15 bp, Homo sapiens
agcctgggactgtga

SEQ ID NO: 1026525 - DNA, 15 bp, Homo sapiens
cagcctgggactgtg

SEQ ID NO: 1026526 - DNA, 15 bp, Homo sapiens
ccagcctgggactgt

SEQ ID NO: 1026527 - DNA, 15 bp, Homo sapiens
gccagcctgggactg

SEQ ID NO: 1026528 - DNA, 15 bp, Homo sapiens
ggccagcctgggact

SEQ ID NO: 1026529 - DNA, 15 bp, Homo sapiens
aggccagcctgggac

SEQ ID NO: 1026530 - DNA, 15 bp, Homo sapiens
aaggccagcctggga

SEQ ID NO: 1026531 - DNA, 15 bp, Homo sapiens
aaaggccagcctggg

SEQ ID NO: 1026532 - DNA, 15 bp, Homo sapiens
gaaaggccagcctgg

SEQ ID NO: 1026533 - DNA, 15 bp, Homo sapiens
tgaaaggccagcctg

SEQ ID NO: 1026534 - DNA, 15 bp, Homo sapiens
gtgaaaggccagcct

SEQ ID NO: 1026535 - DNA, 15 bp, Homo sapiens
ggtgaaaggccagcc

SEQ ID NO: 1026536 - DNA, 15 bp, Homo sapiens
aggtgaaaggccagc

SEQ ID NO: 1026537 - DNA, 15 bp, Homo sapiens
gaggtgaaaggccag

SEQ ID NO: 1026538 - DNA, 15 bp, Homo sapiens
tgaggtgaaaggcca

SEQ ID NO: 1026539 - DNA, 15 bp, Homo sapiens
atgaggtgaaaggcc

SEQ ID NO: 1026540 - DNA, 15 bp, Homo sapiens
aatgaggtgaaaggc

SEQ ID NO: 1026541 - DNA, 15 bp, Homo sapiens
caatgaggtgaaagg

SEQ ID NO: 1026542 - DNA, 15 bp, Homo sapiens
gcaatgaggtgaaag

SEQ ID NO: 1026543 - DNA, 15 bp, Homo sapiens
agcaatgaggtgaaa

SEQ ID NO: 1026544 - DNA, 15 bp, Homo sapiens
gagcaatgaggtgaa

SEQ ID NO: 1026545 - DNA, 15 bp, Homo sapiens
agagcaatgaggtga

SEQ ID NO: 1026546 - DNA, 15 bp, Homo sapiens
gagagcaatgaggtg

SEQ ID NO: 1026547 - DNA, 15 bp, Homo sapiens
ggagagcaatgaggt

SEQ ID NO: 1026548 - DNA, 15 bp, Homo sapiens
gggagagcaatgagg

SEQ ID NO: 1026549 - DNA, 15 bp, Homo sapiens
cgggagagcaatgag

SEQ ID NO: 1026550 - DNA, 15 bp, Homo sapiens
ccgggagagcaatga

SEQ ID NO: 1026551 - DNA, 15 bp, Homo sapiens
gccgggagagcaatg

SEQ ID NO: 1026552 - DNA, 15 bp, Homo sapiens
agccgggagagcaat

SEQ ID NO: 1026553 - DNA, 15 bp, Homo sapiens
cagccgggagagcaa

SEQ ID NO: 1026554 - DNA, 15 bp, Homo sapiens
gcagccgggagagca

SEQ ID NO: 1026555 - DNA, 15 bp, Homo sapiens
agcagccgggagagc

SEQ ID NO: 1026556 - DNA, 15 bp, Homo sapiens
gagcagccgggagag

SEQ ID NO: 1026557 - DNA, 15 bp, Homo sapiens
agagcagccgggaga

SEQ ID NO: 1026558 - DNA, 15 bp, Homo sapiens
aagagcagccgggag

SEQ ID NO: 1026559 - DNA, 15 bp, Homo sapiens
taagagcagccggga

SEQ ID NO: 1026560 - DNA, 15 bp, Homo sapiens
ataagagcagccggg

SEQ ID NO: 1026561 - DNA, 15 bp, Homo sapiens
aataagagcagccgg

SEQ ID NO: 1026562 - DNA, 15 bp, Homo sapiens
taataagagcagccg

SEQ ID NO: 1026563 - DNA, 15 bp, Homo sapiens
ttaataagagcagcc

SEQ ID NO: 1026564 - DNA, 15 bp, Homo sapiens
cttaataagagcagc

SEQ ID NO: 1026565 - DNA, 15 bp, Homo sapiens
gcttaataagagcag

SEQ ID NO: 1026566 - DNA, 15 bp, Homo sapiens
tgcttaataagagca

SEQ ID NO: 1026567 - DNA, 15 bp, Homo sapiens
ctgcttaataagagc

SEQ ID NO: 1026568 - DNA, 15 bp, Homo sapiens
gctgcttaataagag

SEQ ID NO: 1026569 - DNA, 15 bp, Homo sapiens
tgctgcttaataaga

SEQ ID NO: 1026570 - DNA, 15 bp, Homo sapiens
ttgctgcttaataag

SEQ ID NO: 1026571 - DNA, 15 bp, Homo sapiens
tttgctgcttaataa

SEQ ID NO: 1026572 - DNA, 15 bp, Homo sapiens
ttttgctgcttaata

SEQ ID NO: 1026573 - DNA, 15 bp, Homo sapiens
attttgctgcttaat

SEQ ID NO: 1026574 - DNA, 15 bp, Homo sapiens
cattttgctgcttaa

SEQ ID NO: 1026575 - DNA, 15 bp, Homo sapiens
acattttgctgctta

SEQ ID NO: 1026576 - DNA, 15 bp, Homo sapiens
aacattttgctgctt

SEQ ID NO: 1026577 - DNA, 15 bp, Homo sapiens
aaacattttgctgct

SEQ ID NO: 1026578 - DNA, 15 bp, Homo sapiens
gaaacattttgctgc

SEQ ID NO: 1026579 - DNA, 15 bp, Homo sapiens
tgaaacattttgctg

SEQ ID NO: 1026580 - DNA, 15 bp, Homo sapiens
ttgaaacattttgct

SEQ ID NO: 1026581 - DNA, 15 bp, Homo sapiens
attgaaacattttgc

SEQ ID NO: 1026582 - DNA, 15 bp, Homo sapiens
tattgaaacattttg

SEQ ID NO: 1026583 - DNA, 15 bp, Homo sapiens
atattgaaacatttt

SEQ ID NO: 1026584 - DNA, 15 bp, Homo sapiens
catattgaaacattt

SEQ ID NO: 1026585 - DNA, 15 bp, Homo sapiens
acatattgaaacatt

SEQ ID NO: 1026586 - DNA, 15 bp, Homo sapiens
cacatattgaaacat

SEQ ID NO: 1026587 - DNA, 15 bp, Homo sapiens
ccacatattgaaaca

SEQ ID NO: 1026588 - DNA, 15 bp, Homo sapiens
tccacatattgaaac

SEQ ID NO: 1026589 - DNA, 15 bp, Homo sapiens
ttccacatattgaaa

SEQ ID NO: 1026590 - DNA, 15 bp, Homo sapiens
gttccacatattgaa

SEQ ID NO: 1026591 - DNA, 15 bp, Homo sapiens
agttccacatattga

SEQ ID NO: 1026592 - DNA, 15 bp, Homo sapiens
gagttccacatattg

SEQ ID NO: 1026593 - DNA, 15 bp, Homo sapiens
agagttccacatatt

SEQ ID NO: 1026594 - DNA, 15 bp, Homo sapiens
cagagttccacatat

SEQ ID NO: 1026595 - DNA, 15 bp, Homo sapiens
ccagagttccacata

SEQ ID NO: 1026596 - DNA, 15 bp, Homo sapiens
cccagagttccacat

SEQ ID NO: 1026597 - DNA, 15 bp, Homo sapiens
ccccagagttccaca

SEQ ID NO: 1026598 - DNA, 15 bp, Homo sapiens
cccccagagttccac

SEQ ID NO: 1026599 - DNA, 15 bp, Homo sapiens
tcccccagagttcca

SEQ ID NO: 1026600 - DNA, 15 bp, Homo sapiens
ctcccccagagttcc

SEQ ID NO: 1026601 - DNA, 15 bp, Homo sapiens
cctcccccagagttc

SEQ ID NO: 1026602 - DNA, 15 bp, Homo sapiens
ccctcccccagagtt

SEQ ID NO: 1026603 - DNA, 15 bp, Homo sapiens
tccctcccccagagt

SEQ ID NO: 1026604 - DNA, 15 bp, Homo sapiens
atccctcccccagag

SEQ ID NO: 1026605 - DNA, 15 bp, Homo sapiens
catccctcccccaga

SEQ ID NO: 1026606 - DNA, 15 bp, Homo sapiens
ccatccctcccccag

SEQ ID NO: 1026607 - DNA, 15 bp, Homo sapiens
cccatccctccccca

SEQ ID NO: 1026608 - DNA, 15 bp, Homo sapiens
tcccatccctccccc

SEQ ID NO: 1026609 - DNA, 15 bp, Homo sapiens
ctcccatccctcccc

SEQ ID NO: 1026610 - DNA, 15 bp, Homo sapiens
tctcccatccctccc

SEQ ID NO: 1026611 - DNA, 15 bp, Homo sapiens
ctctcccatccctcc

SEQ ID NO: 1026612 - DNA, 15 bp, Homo sapiens
tctctcccatccctc

SEQ ID NO: 1026613 - DNA, 15 bp, Homo sapiens
ttctctcccatccct

SEQ ID NO: 1026614 - DNA, 15 bp, Homo sapiens
tttctctcccatccc

SEQ ID NO: 1026615 - DNA, 15 bp, Homo sapiens
ttttctctcccatcc

SEQ ID NO: 1026616 - DNA, 15 bp, Homo sapiens
tttttctctcccatc

SEQ ID NO: 1026617 - DNA, 15 bp, Homo sapiens
atttttctctcccat

SEQ ID NO: 1026618 - DNA, 15 bp, Homo sapiens
gatttttctctccca

SEQ ID NO: 1026619 - DNA, 15 bp, Homo sapiens
cgatttttctctccc

SEQ ID NO: 1026620 - DNA, 15 bp, Homo sapiens
ccgatttttctctcc

SEQ ID NO: 1026621 - DNA, 15 bp, Homo sapiens
cccgatttttctctc

SEQ ID NO: 1026622 - DNA, 15 bp, Homo sapiens
tcccgatttttctct

SEQ ID NO: 1026623 - DNA, 15 bp, Homo sapiens
atcccgatttttctc

SEQ ID NO: 1026624 - DNA, 15 bp, Homo sapiens
tatcccgatttttct

SEQ ID NO: 1026625 - DNA, 15 bp, Homo sapiens
atatcccgatttttc

SEQ ID NO: 1026626 - DNA, 15 bp, Homo sapiens
aatatcccgattttt

SEQ ID NO: 1026627 - DNA, 15 bp, Homo sapiens
caatatcccgatttt

SEQ ID NO: 1026628 - DNA, 15 bp, Homo sapiens
acaatatcccgattt

SEQ ID NO: 1026629 - DNA, 15 bp, Homo sapiens
aacaatatcccgatt

SEQ ID NO: 1026630 - DNA, 15 bp, Homo sapiens
caacaatatcccgat

SEQ ID NO: 1026631 - DNA, 15 bp, Homo sapiens
tcaacaatatcccga

SEQ ID NO: 1026632 - DNA, 15 bp, Homo sapiens
ctcaacaatatcccg

SEQ ID NO: 1026633 - DNA, 15 bp, Homo sapiens
tctcaacaatatccc

SEQ ID NO: 1026634 - DNA, 15 bp, Homo sapiens
ttctcaacaatatcc

SEQ ID NO: 1026635 - DNA, 15 bp, Homo sapiens
cttctcaacaatatc

SEQ ID NO: 1026636 - DNA, 15 bp, Homo sapiens
ccttctcaacaatat

SEQ ID NO: 1026637 - DNA, 15 bp, Homo sapiens
tccttctcaacaata

SEQ ID NO: 1026638 - DNA, 15 bp, Homo sapiens
ttccttctcaacaat

SEQ ID NO: 1026639 - DNA, 15 bp, Homo sapiens
tttccttctcaacaa

SEQ ID NO: 1026640 - DNA, 15 bp, Homo sapiens
atttccttctcaaca

SEQ ID NO: 1026641 - DNA, 15 bp, Homo sapiens
tatttccttctcaac

SEQ ID NO: 1026642 - DNA, 15 bp, Homo sapiens
ttatttccttctcaa

SEQ ID NO: 1026643 - DNA, 15 bp, Homo sapiens
gttatttccttctca

SEQ ID NO: 1026644 - DNA, 15 bp, Homo sapiens
cgttatttccttctc

SEQ ID NO: 1026645 - DNA, 15 bp, Homo sapiens
tcgttatttccttct

SEQ ID NO: 1026646 - DNA, 15 bp, Homo sapiens
ttcgttatttccttc

SEQ ID NO: 1026647 - DNA, 15 bp, Homo sapiens
attcgttatttcctt

SEQ ID NO: 1026648 - DNA, 15 bp, Homo sapiens
tattcgttatttcct

SEQ ID NO: 1026649 - DNA, 15 bp, Homo sapiens
ttattcgttatttcc

SEQ ID NO: 1026650 - DNA, 15 bp, Homo sapiens
gttattcgttatttc

SEQ ID NO: 1026651 - DNA, 15 bp, Homo sapiens
ggttattcgttattt

SEQ ID NO: 1026652 - DNA, 15 bp, Homo sapiens
gggttattcgttatt

SEQ ID NO: 1026653 - DNA, 15 bp, Homo sapiens
agggttattcgttat

SEQ ID NO: 1026654 - DNA, 15 bp, Homo sapiens
cagggttattcgtta

SEQ ID NO: 1026655 - DNA, 15 bp, Homo sapiens
gcagggttattcgtt

SEQ ID NO: 1026656 - DNA, 15 bp, Homo sapiens
ggcagggttattcgt

SEQ ID NO: 1026657 - DNA, 15 bp, Homo sapiens
cggcagggttattcg

SEQ ID NO: 1026658 - DNA, 15 bp, Homo sapiens
gcggcagggttattc

SEQ ID NO: 1026659 - DNA, 15 bp, Homo sapiens
ggcggcagggttatt

SEQ ID NO: 1026660 - DNA, 15 bp, Homo sapiens
tggcggcagggttat

SEQ ID NO: 1026661 - DNA, 15 bp, Homo sapiens
ctggcggcagggtta

SEQ ID NO: 1026662 - DNA, 15 bp, Homo sapiens
gctggcggcagggtt

SEQ ID NO: 1026663 - DNA, 15 bp, Homo sapiens
ggctggcggcagggt

SEQ ID NO: 1026664 - DNA, 15 bp, Homo sapiens
gggctggcggcaggg

SEQ ID NO: 1026665 - DNA, 15 bp, Homo sapiens
agggctggcggcagg

SEQ ID NO: 1026666 - DNA, 15 bp, Homo sapiens
gagggctggcggcag

SEQ ID NO: 1026667 - DNA, 15 bp, Homo sapiens
tgagggctggcggca

SEQ ID NO: 1026668 - DNA, 15 bp, Homo sapiens
atgagggctggcggc

SEQ ID NO: 1026669 - DNA, 15 bp, Homo sapiens
tatgagggctggcgg

SEQ ID NO: 1026670 - DNA, 15 bp, Homo sapiens
gtatgagggctggcg

SEQ ID NO: 1026671 - DNA, 15 bp, Homo sapiens
ggtatgagggctggc

SEQ ID NO: 1026672 - DNA, 15 bp, Homo sapiens
gggtatgagggctgg

SEQ ID NO: 1026673 - DNA, 15 bp, Homo sapiens
ggggtatgagggctg

SEQ ID NO: 1026674 - DNA, 15 bp, Homo sapiens
gggggtatgagggct

SEQ ID NO: 1026675 - DNA, 15 bp, Homo sapiens
ggggggtatgagggc

SEQ ID NO: 1026676 - DNA, 15 bp, Homo sapiens
tggggggtatgaggg

SEQ ID NO: 1026677 - DNA, 15 bp, Homo sapiens
gtggggggtatgagg

SEQ ID NO: 1026678 - DNA, 15 bp, Homo sapiens
cgtggggggtatgag

SEQ ID NO: 1026679 - DNA, 15 bp, Homo sapiens
acgtggggggtatga

SEQ ID NO: 1026680 - DNA, 15 bp, Homo sapiens
cacgtggggggtatg

SEQ ID NO: 1026681 - DNA, 15 bp, Homo sapiens
ccacgtggggggtat

SEQ ID NO: 1026682 - DNA, 15 bp, Homo sapiens
cccacgtggggggta

SEQ ID NO: 1026683 - DNA, 15 bp, Homo sapiens
ccccacgtggggggt

SEQ ID NO: 1026684 - DNA, 15 bp, Homo sapiens
tccccacgtgggggg

SEQ ID NO: 1026685 - DNA, 15 bp, Homo sapiens
ctccccacgtggggg

SEQ ID NO: 1026686 - DNA, 15 bp, Homo sapiens
tctccccacgtgggg

SEQ ID NO: 1026687 - DNA, 15 bp, Homo sapiens
atctccccacgtggg

SEQ ID NO: 1026688 - DNA, 15 bp, Homo sapiens
gatctccccacgtgg

SEQ ID NO: 1026689 - DNA, 15 bp, Homo sapiens
agatctccccacgtg

SEQ ID NO: 1026690 - DNA, 15 bp, Homo sapiens
cagatctccccacgt

SEQ ID NO: 1026691 - DNA, 15 bp, Homo sapiens
ccagatctccccacg

SEQ ID NO: 1026692 - DNA, 15 bp, Homo sapiens
tccagatctccccac

SEQ ID NO: 1026693 - DNA, 15 bp, Homo sapiens
atccagatctcccca

SEQ ID NO: 1026694 - DNA, 15 bp, Homo sapiens
catccagatctcccc

SEQ ID NO: 1026695 - DNA, 15 bp, Homo sapiens
tcatccagatctccc

SEQ ID NO: 1026696 - DNA, 15 bp, Homo sapiens
atcatccagatctcc

SEQ ID NO: 1026697 - DNA, 15 bp, Homo sapiens
tatcatccagatctc

SEQ ID NO: 1026698 - DNA, 15 bp, Homo sapiens
ctatcatccagatct

SEQ ID NO: 1026699 - DNA, 15 bp, Homo sapiens
cctatcatccagatc

SEQ ID NO: 1026700 - DNA, 15 bp, Homo sapiens
acctatcatccagat

SEQ ID NO: 1026701 - DNA, 15 bp, Homo sapiens
cacctatcatccaga

SEQ ID NO: 1026702 - DNA, 15 bp, Homo sapiens
acacctatcatccag

SEQ ID NO: 1026703 - DNA, 15 bp, Homo sapiens
cacacctatcatcca

SEQ ID NO: 1026704 - DNA, 15 bp, Homo sapiens
acacacctatcatcc

SEQ ID NO: 1026705 - DNA, 15 bp, Homo sapiens
aacacacctatcatc

SEQ ID NO: 1026706 - DNA, 15 bp, Homo sapiens
aaacacacctatcat

SEQ ID NO: 1026707 - DNA, 15 bp, Homo sapiens
aaaacacacctatca

SEQ ID NO: 1026708 - DNA, 15 bp, Homo sapiens
gaaaacacacctatc

SEQ ID NO: 1026709 - DNA, 15 bp, Homo sapiens
agaaaacacacctat

SEQ ID NO: 1026710 - DNA, 15 bp, Homo sapiens
gagaaaacacaccta

SEQ ID NO: 1026711 - DNA, 15 bp, Homo sapiens
ggagaaaacacacct

SEQ ID NO: 1026712 - DNA, 15 bp, Homo sapiens
aggagaaaacacacc

SEQ ID NO: 1026713 - DNA, 15 bp, Homo sapiens
caggagaaaacacac

SEQ ID NO: 1026714 - DNA, 15 bp, Homo sapiens
tcaggagaaaacaca

SEQ ID NO: 1026715 - DNA, 15 bp, Homo sapiens
ttcaggagaaaacac

SEQ ID NO: 1026716 - DNA, 15 bp, Homo sapiens
tttcaggagaaaaca

SEQ ID NO: 1026717 - DNA, 15 bp, Homo sapiens
atttcaggagaaaac

SEQ ID NO: 1026718 - DNA, 15 bp, Homo sapiens
catttcaggagaaaa

SEQ ID NO: 1026719 - DNA, 15 bp, Homo sapiens
ccatttcaggagaaa

SEQ ID NO: 1026720 - DNA, 15 bp, Homo sapiens
tccatttcaggagaa

SEQ ID NO: 1026721 - DNA, 15 bp, Homo sapiens
ttccatttcaggaga

SEQ ID NO: 1026722 - DNA, 15 bp, Homo sapiens
attccatttcaggag

SEQ ID NO: 1026723 - DNA, 15 bp, Homo sapiens
gattccatttcagga

SEQ ID NO: 1026724 - DNA, 15 bp, Homo sapiens
ggattccatttcagg

SEQ ID NO: 1026725 - DNA, 15 bp, Homo sapiens
aggattccatttcag

SEQ ID NO: 1026726 - DNA, 15 bp, Homo sapiens
taggattccatttca

SEQ ID NO: 1026727 - DNA, 15 bp, Homo sapiens
gtaggattccatttc

SEQ ID NO: 1026728 - DNA, 15 bp, Homo sapiens
agtaggattccattt

SEQ ID NO: 1026729 - DNA, 15 bp, Homo sapiens
tagtaggattccatt

SEQ ID NO: 1026730 - DNA, 15 bp, Homo sapiens
ttagtaggattccat

SEQ ID NO: 1026731 - DNA, 15 bp, Homo sapiens
attagtaggattcca

SEQ ID NO: 1026732 - DNA, 15 bp, Homo sapiens
aattagtaggattcc

SEQ ID NO: 1026733 - DNA, 15 bp, Homo sapiens
caattagtaggattc

SEQ ID NO: 1026734 - DNA, 15 bp, Homo sapiens
gcaattagtaggatt

SEQ ID NO: 1026735 - DNA, 15 bp, Homo sapiens
ggcaattagtaggat

SEQ ID NO: 1026736 - DNA, 15 bp, Homo sapiens
aggcaattagtagga

SEQ ID NO: 1026737 - DNA, 15 bp, Homo sapiens
aaggcaattagtagg

SEQ ID NO: 1026738 - DNA, 15 bp, Homo sapiens
aaaggcaattagtag

SEQ ID NO: 1026739 - DNA, 15 bp, Homo sapiens
aaaaggcaattagta

SEQ ID NO: 1026740 - DNA, 15 bp, Homo sapiens
caaaaggcaattagt

SEQ ID NO: 1026741 - DNA, 15 bp, Homo sapiens
ccaaaaggcaattag

SEQ ID NO: 1026742 - DNA, 15 bp, Homo sapiens
accaaaaggcaatta

SEQ ID NO: 1026743 - DNA, 15 bp, Homo sapiens
gaccaaaaggcaatt

SEQ ID NO: 1026744 - DNA, 15 bp, Homo sapiens
tgaccaaaaggcaat

SEQ ID NO: 1026745 - DNA, 15 bp, Homo sapiens
ctgaccaaaaggcaa

SEQ ID NO: 1026746 - DNA, 15 bp, Homo sapiens
tctgaccaaaaggca

SEQ ID NO: 1026747 - DNA, 15 bp, Homo sapiens
ttctgaccaaaaggc

SEQ ID NO: 1026748 - DNA, 15 bp, Homo sapiens
tttctgaccaaaagg

SEQ ID NO: 1026749 - DNA, 15 bp, Homo sapiens
atttctgaccaaaag

SEQ ID NO: 1026750 - DNA, 15 bp, Homo sapiens
catttctgaccaaaa

SEQ ID NO: 1026751 - DNA, 15 bp, Homo sapiens
acatttctgaccaaa

SEQ ID NO: 1026752 - DNA, 15 bp, Homo sapiens
gacatttctgaccaa

SEQ ID NO: 1026753 - DNA, 15 bp, Homo sapiens
ggacatttctgacca

SEQ ID NO: 1026754 - DNA, 15 bp, Homo sapiens
tggacatttctgacc

SEQ ID NO: 1026755 - DNA, 15 bp, Homo sapiens
ctggacatttctgac

SEQ ID NO: 1026756 - DNA, 15 bp, Homo sapiens
tctggacatttctga

SEQ ID NO: 1026757 - DNA, 15 bp, Homo sapiens
ctctggacatttctg

SEQ ID NO: 1026758 - DNA, 15 bp, Homo sapiens
gctctggacatttct

SEQ ID NO: 1026759 - DNA, 15 bp, Homo sapiens
ggctctggacatttc

SEQ ID NO: 1026760 - DNA, 15 bp, Homo sapiens
tggctctggacattt

SEQ ID NO: 1026761 - DNA, 15 bp, Homo sapiens
ttggctctggacatt

SEQ ID NO: 1026762 - DNA, 15 bp, Homo sapiens
attggctctggacat

SEQ ID NO: 1026763 - DNA, 15 bp, Homo sapiens
aattggctctggaca

SEQ ID NO: 1026764 - DNA, 15 bp, Homo sapiens
caattggctctggac

SEQ ID NO: 1026765 - DNA, 15 bp, Homo sapiens
ccaattggctctgga

SEQ ID NO: 1026766 - DNA, 15 bp, Homo sapiens
cccaattggctctgg

SEQ ID NO: 1026767 - DNA, 15 bp, Homo sapiens
ccccaattggctctg

SEQ ID NO: 1026768 - DNA, 15 bp, Homo sapiens
tccccaattggctct

SEQ ID NO: 1026769 - DNA, 15 bp, Homo sapiens
ttccccaattggctc

SEQ ID NO: 1026770 - DNA, 15 bp, Homo sapiens
cttccccaattggct

SEQ ID NO: 1026771 - DNA, 15 bp, Homo sapiens
ccttccccaattggc

SEQ ID NO: 1026772 - DNA, 15 bp, Homo sapiens
cccttccccaattgg

SEQ ID NO: 1026773 - DNA, 15 bp, Homo sapiens
ccccttccccaattg

SEQ ID NO: 1026774 - DNA, 15 bp, Homo sapiens
cccccttccccaatt

SEQ ID NO: 1026775 - DNA, 15 bp, Homo sapiens
acccccttccccaat

SEQ ID NO: 1026776 - DNA, 15 bp, Homo sapiens
tacccccttccccaa

SEQ ID NO: 1026777 - DNA, 15 bp, Homo sapiens
ctacccccttcccca

SEQ ID NO: 1026778 - DNA, 15 bp, Homo sapiens
cctacccccttcccc

SEQ ID NO: 1026779 - DNA, 15 bp, Homo sapiens
ccctacccccttccc

SEQ ID NO: 1026780 - DNA, 15 bp, Homo sapiens
cccctacccccttcc

SEQ ID NO: 1026781 - DNA, 15 bp, Homo sapiens
ccccctacccccttc

SEQ ID NO: 1026782 - DNA, 15 bp, Homo sapiens
tccccctaccccctt

SEQ ID NO: 1026783 - DNA, 15 bp, Homo sapiens
ctccccctaccccct

SEQ ID NO: 1026784 - DNA, 15 bp, Homo sapiens
gctccccctaccccc

SEQ ID NO: 1026785 - DNA, 15 bp, Homo sapiens
tgctccccctacccc

SEQ ID NO: 1026786 - DNA, 15 bp, Homo sapiens
ctgctccccctaccc

SEQ ID NO: 1026787 - DNA, 15 bp, Homo sapiens
cctgctccccctacc

SEQ ID NO: 1026788 - DNA, 15 bp, Homo sapiens
acctgctccccctac

SEQ ID NO: 1026789 - DNA, 15 bp, Homo sapiens
tacctgctcccccta

SEQ ID NO: 1026790 - DNA, 15 bp, Homo sapiens
gtacctgctccccct

SEQ ID NO: 1026791 - DNA, 15 bp, Homo sapiens
agtacctgctccccc

SEQ ID NO: 1026792 - DNA, 15 bp, Homo sapiens
tagtacctgctcccc

SEQ ID NO: 1026793 - DNA, 15 bp, Homo sapiens
ttagtacctgctccc

SEQ ID NO: 1026794 - DNA, 15 bp, Homo sapiens
tttagtacctgctcc

SEQ ID NO: 1026795 - DNA, 15 bp, Homo sapiens
atttagtacctgctc

SEQ ID NO: 1026796 - DNA, 15 bp, Homo sapiens
tatttagtacctgct

SEQ ID NO: 1026797 - DNA, 15 bp, Homo sapiens
ttatttagtacctgc

SEQ ID NO: 1026798 - DNA, 15 bp, Homo sapiens
tttatttagtacctg

SEQ ID NO: 1026799 - DNA, 15 bp, Homo sapiens
atttatttagtacct

SEQ ID NO: 1026800 - DNA, 15 bp, Homo sapiens
aatttatttagtacc

SEQ ID NO: 1026801 - DNA, 15 bp, Homo sapiens
aaatttatttagtac

SEQ ID NO: 1026802 - DNA, 15 bp, Homo sapiens
aaaatttatttagta

SEQ ID NO: 1026803 - DNA, 15 bp, Homo sapiens
gaaaatttatttagt

SEQ ID NO: 1026804 - DNA, 15 bp, Homo sapiens
agaaaatttatttag

SEQ ID NO: 1026805 - DNA, 15 bp, Homo sapiens
gagaaaatttattta

SEQ ID NO: 1026806 - DNA, 15 bp, Homo sapiens
cgagaaaatttattt

SEQ ID NO: 1026807 - DNA, 15 bp, Homo sapiens
tcgagaaaatttatt

SEQ ID NO: 1026808 - DNA, 15 bp, Homo sapiens
ttcgagaaaatttat

SEQ ID NO: 1026809 - DNA, 15 bp, Homo sapiens
cttcgagaaaattta

SEQ ID NO: 1026810 - DNA, 15 bp, Homo sapiens
ccttcgagaaaattt

SEQ ID NO: 1026811 - DNA, 15 bp, Homo sapiens
accttcgagaaaatt

SEQ ID NO: 1026812 - DNA, 15 bp, Homo sapiens
aaccttcgagaaaat

SEQ ID NO: 1026813 - DNA, 15 bp, Homo sapiens
gaaccttcgagaaaa

SEQ ID NO: 1026814 - DNA, 15 bp, Homo sapiens
ggaaccttcgagaaa

SEQ ID NO: 1026815 - DNA, 15 bp, Homo sapiens
tggaaccttcgagaa

SEQ ID NO: 1026816 - DNA, 15 bp, Homo sapiens
ctggaaccttcgaga

SEQ ID NO: 1026817 - DNA, 15 bp, Homo sapiens
tctggaaccttcgag

SEQ ID NO: 1026818 - DNA, 15 bp, Homo sapiens
ctctggaaccttcga

SEQ ID NO: 1026819 - DNA, 15 bp, Homo sapiens
gctctggaaccttcg

SEQ ID NO: 1026820 - DNA, 15 bp, Homo sapiens
tgctctggaaccttc

SEQ ID NO: 1026821 - DNA, 15 bp, Homo sapiens
ttgctctggaacctt

SEQ ID NO: 1026822 - DNA, 15 bp, Homo sapiens
tttgctctggaacct

SEQ ID NO: 1026823 - DNA, 15 bp, Homo sapiens
ctttgctctggaacc

SEQ ID NO: 1026824 - DNA, 15 bp, Homo sapiens
gctttgctctggaac

SEQ ID NO: 1026825 - DNA, 15 bp, Homo sapiens
tgctttgctctggaa

SEQ ID NO: 1026826 - DNA, 15 bp, Homo sapiens
ctgctttgctctgga

SEQ ID NO: 1026827 - DNA, 15 bp, Homo sapiens
actgctttgctctgg

SEQ ID NO: 1026828 - DNA, 15 bp, Homo sapiens
gactgctttgctctg

SEQ ID NO: 1026829 - DNA, 15 bp, Homo sapiens
tgactgctttgctct

SEQ ID NO: 1026830 - DNA, 15 bp, Homo sapiens
ctgactgctttgctc

SEQ ID NO: 1026831 - DNA, 15 bp, Homo sapiens
cctgactgctttgct

SEQ ID NO: 1026832 - DNA, 15 bp, Homo sapiens
ccctgactgctttgc

SEQ ID NO: 1026833 - DNA, 15 bp, Homo sapiens
tccctgactgctttg

SEQ ID NO: 1026834 - DNA, 15 bp, Homo sapiens
atccctgactgcttt

SEQ ID NO: 1026835 - DNA, 15 bp, Homo sapiens
gatccctgactgctt

SEQ ID NO: 1026836 - DNA, 15 bp, Homo sapiens
agatccctgactgct

SEQ ID NO: 1026837 - DNA, 15 bp, Homo sapiens
cagatccctgactgc

SEQ ID NO: 1026838 - DNA, 15 bp, Homo sapiens
ccagatccctgactg

SEQ ID NO: 1026839 - DNA, 15 bp, Homo sapiens
cccagatccctgact

SEQ ID NO: 1026840 - DNA, 15 bp, Homo sapiens
acccagatccctgac

SEQ ID NO: 1026841 - DNA, 15 bp, Homo sapiens
tacccagatccctga

SEQ ID NO: 1026842 - DNA, 15 bp, Homo sapiens
gtacccagatccctg

SEQ ID NO: 1026843 - DNA, 15 bp, Homo sapiens
ggtacccagatccct

SEQ ID NO: 1026844 - DNA, 15 bp, Homo sapiens
gggtacccagatccc

SEQ ID NO: 1026845 - DNA, 15 bp, Homo sapiens
tgggtacccagatcc

SEQ ID NO: 1026846 - DNA, 15 bp, Homo sapiens
ttgggtacccagatc

SEQ ID NO: 1026847 - DNA, 15 bp, Homo sapiens
cttgggtacccagat

SEQ ID NO: 1026848 - DNA, 15 bp, Homo sapiens
tcttgggtacccaga

SEQ ID NO: 1026849 - DNA, 15 bp, Homo sapiens
ttcttgggtacccag

SEQ ID NO: 1026850 - DNA, 15 bp, Homo sapiens
cttcttgggtaccca

SEQ ID NO: 1026851 - DNA, 15 bp, Homo sapiens
ccttcttgggtaccc

SEQ ID NO: 1026852 - DNA, 15 bp, Homo sapiens
tccttcttgggtacc

SEQ ID NO: 1026853 - DNA, 15 bp, Homo sapiens
ttccttcttgggtac

SEQ ID NO: 1026854 - DNA, 15 bp, Homo sapiens
cttccttcttgggta

SEQ ID NO: 1026855 - DNA, 15 bp, Homo sapiens
ccttccttcttgggt

SEQ ID NO: 1026856 - DNA, 15 bp, Homo sapiens
tccttccttcttggg

SEQ ID NO: 1026857 - DNA, 15 bp, Homo sapiens
ttccttccttcttgg

SEQ ID NO: 1026858 - DNA, 15 bp, Homo sapiens
cttccttccttcttg

SEQ ID NO: 1026859 - DNA, 15 bp, Homo sapiens
tcttccttccttctt

SEQ ID NO: 1026860 - DNA, 15 bp, Homo sapiens
ctcttccttccttct

SEQ ID NO: 1026861 - DNA, 15 bp, Homo sapiens
tctcttccttccttc

SEQ ID NO: 1026862 - DNA, 15 bp, Homo sapiens
ttctcttccttcctt

SEQ ID NO: 1026863 - DNA, 15 bp, Homo sapiens
gttctcttccttcct

SEQ ID NO: 1026864 - DNA, 15 bp, Homo sapiens
cgttctcttccttcc

SEQ ID NO: 1026865 - DNA, 15 bp, Homo sapiens
gcgttctcttccttc

SEQ ID NO: 1026866 - DNA, 15 bp, Homo sapiens
agcgttctcttcctt

SEQ ID NO: 1026867 - DNA, 15 bp, Homo sapiens
aagcgttctcttcct

SEQ ID NO: 1026868 - DNA, 15 bp, Homo sapiens
caagcgttctcttcc

SEQ ID NO: 1026869 - DNA, 15 bp, Homo sapiens
tcaagcgttctcttc

SEQ ID NO: 1026870 - DNA, 15 bp, Homo sapiens
ctcaagcgttctctt

SEQ ID NO: 1026871 - DNA, 15 bp, Homo sapiens
tctcaagcgttctct

SEQ ID NO: 1026872 - DNA, 15 bp, Homo sapiens
ttctcaagcgttctc

SEQ ID NO: 1026873 - DNA, 15 bp, Homo sapiens
tttctcaagcgttct

SEQ ID NO: 1026874 - DNA, 15 bp, Homo sapiens
gtttctcaagcgttc

SEQ ID NO: 1026875 - DNA, 15 bp, Homo sapiens
tgtttctcaagcgtt

SEQ ID NO: 1026876 - DNA, 15 bp, Homo sapiens
ctgtttctcaagcgt

SEQ ID NO: 1026877 - DNA, 15 bp, Homo sapiens
tctgtttctcaagcg

SEQ ID NO: 1026878 - DNA, 15 bp, Homo sapiens
ttctgtttctcaagc

SEQ ID NO: 1026879 - DNA, 15 bp, Homo sapiens
cttctgtttctcaag

SEQ ID NO: 1026880 - DNA, 15 bp, Homo sapiens
gcttctgtttctcaa

SEQ ID NO: 1026881 - DNA, 15 bp, Homo sapiens
ggcttctgtttctca

SEQ ID NO: 1026882 - DNA, 15 bp, Homo sapiens
tggcttctgtttctc

SEQ ID NO: 1026883 - DNA, 15 bp, Homo sapiens
ttggcttctgtttct

SEQ ID NO: 1026884 - DNA, 15 bp, Homo sapiens
gttggcttctgtttc

SEQ ID NO: 1026885 - DNA, 15 bp, Homo sapiens
agttggcttctgttt

SEQ ID NO: 1026886 - DNA, 15 bp, Homo sapiens
gagttggcttctgtt

SEQ ID NO: 1026887 - DNA, 15 bp, Homo sapiens
tgagttggcttctgt

SEQ ID NO: 1026888 - DNA, 15 bp, Homo sapiens
ctgagttggcttctg

SEQ ID NO: 1026889 - DNA, 15 bp, Homo sapiens
tctgagttggcttct

SEQ ID NO: 1026890 - DNA, 15 bp, Homo sapiens
ctctgagttggcttc

SEQ ID NO: 1026891 - DNA, 15 bp, Homo sapiens
actctgagttggctt

SEQ ID NO: 1026892 - DNA, 15 bp, Homo sapiens
cactctgagttggct

SEQ ID NO: 1026893 - DNA, 15 bp, Homo sapiens
ccactctgagttggc

SEQ ID NO: 1026894 - DNA, 15 bp, Homo sapiens
accactctgagttgg

SEQ ID NO: 1026895 - DNA, 15 bp, Homo sapiens
caccactctgagttg

SEQ ID NO: 1026896 - DNA, 15 bp, Homo sapiens
gcaccactctgagtt

SEQ ID NO: 1026897 - DNA, 15 bp, Homo sapiens
tgcaccactctgagt

SEQ ID NO: 1026898 - DNA, 15 bp, Homo sapiens
ctgcaccactctgag

SEQ ID NO: 1026899 - DNA, 15 bp, Homo sapiens
cctgcaccactctga

SEQ ID NO: 1026900 - DNA, 15 bp, Homo sapiens
tcctgcaccactctg

SEQ ID NO: 1026901 - DNA, 15 bp, Homo sapiens
ttcctgcaccactct

SEQ ID NO: 1026902 - DNA, 15 bp, Homo sapiens
cttcctgcaccactc

SEQ ID NO: 1026903 - DNA, 15 bp, Homo sapiens
gcttcctgcaccact

SEQ ID NO: 1026904 - DNA, 15 bp, Homo sapiens
agcttcctgcaccac

SEQ ID NO: 1026905 - DNA, 15 bp, Homo sapiens
cagcttcctgcacca

SEQ ID NO: 1026906 - DNA, 15 bp, Homo sapiens
acagcttcctgcacc

SEQ ID NO: 1026907 - DNA, 15 bp, Homo sapiens
cacagcttcctgcac

SEQ ID NO: 1026908 - DNA, 15 bp, Homo sapiens
ccacagcttcctgca

SEQ ID NO: 1026909 - DNA, 15 bp, Homo sapiens
cccacagcttcctgc

SEQ ID NO: 1026910 - DNA, 15 bp, Homo sapiens
ccccacagcttcctg

SEQ ID NO: 1026911 - DNA, 15 bp, Homo sapiens
accccacagcttcct

SEQ ID NO: 1026912 - DNA, 15 bp, Homo sapiens
aaccccacagcttcc

SEQ ID NO: 1026913 - DNA, 15 bp, Homo sapiens
aaaccccacagcttc

SEQ ID NO: 1026914 - DNA, 15 bp, Homo sapiens
caaaccccacagctt

SEQ ID NO: 1026915 - DNA, 15 bp, Homo sapiens
gcaaaccccacagct

SEQ ID NO: 1026916 - DNA, 15 bp, Homo sapiens
agcaaaccccacagc

SEQ ID NO: 1026917 - DNA, 15 bp, Homo sapiens
aagcaaaccccacag

SEQ ID NO: 1026918 - DNA, 15 bp, Homo sapiens
aaagcaaaccccaca

SEQ ID NO: 1026919 - DNA, 15 bp, Homo sapiens
aaaagcaaaccccac

SEQ ID NO: 1026920 - DNA, 15 bp, Homo sapiens
caaaagcaaacccca

SEQ ID NO: 1026921 - DNA, 15 bp, Homo sapiens
gcaaaagcaaacccc

SEQ ID NO: 1026922 - DNA, 15 bp, Homo sapiens
agcaaaagcaaaccc

SEQ ID NO: 1026923 - DNA, 15 bp, Homo sapiens
tagcaaaagcaaacc

SEQ ID NO: 1026924 - DNA, 15 bp, Homo sapiens
ttagcaaaagcaaac

SEQ ID NO: 1026925 - DNA, 15 bp, Homo sapiens
gttagcaaaagcaaa

SEQ ID NO: 1026926 - DNA, 15 bp, Homo sapiens
agttagcaaaagcaa

SEQ ID NO: 1026927 - DNA, 15 bp, Homo sapiens
cagttagcaaaagca

SEQ ID NO: 1026928 - DNA, 15 bp, Homo sapiens
tcagttagcaaaagc

SEQ ID NO: 1026929 - DNA, 15 bp, Homo sapiens
gtcagttagcaaaag

SEQ ID NO: 1026930 - DNA, 15 bp, Homo sapiens
tgtcagttagcaaaa

SEQ ID NO: 1026931 - DNA, 15 bp, Homo sapiens
atgtcagttagcaaa

SEQ ID NO: 1026932 - DNA, 15 bp, Homo sapiens
tatgtcagttagcaa

SEQ ID NO: 1026933 - DNA, 15 bp, Homo sapiens
gtatgtcagttagca

SEQ ID NO: 1026934 - DNA, 15 bp, Homo sapiens
agtatgtcagttagc

SEQ ID NO: 1026935 - DNA, 15 bp, Homo sapiens
gagtatgtcagttag

SEQ ID NO: 1026936 - DNA, 15 bp, Homo sapiens
ggagtatgtcagtta

SEQ ID NO: 1026937 - DNA, 15 bp, Homo sapiens
gggagtatgtcagtt

SEQ ID NO: 1026938 - DNA, 15 bp, Homo sapiens
tgggagtatgtcagt

SEQ ID NO: 1026939 - DNA, 15 bp, Homo sapiens
atgggagtatgtcag

SEQ ID NO: 1026940 - DNA, 15 bp, Homo sapiens
gatgggagtatgtca

SEQ ID NO: 1026941 - DNA, 15 bp, Homo sapiens
agatgggagtatgtc

SEQ ID NO: 1026942 - DNA, 15 bp, Homo sapiens
gagatgggagtatgt

SEQ ID NO: 1026943 - DNA, 15 bp, Homo sapiens
ggagatgggagtatg

SEQ ID NO: 1026944 - DNA, 15 bp, Homo sapiens
tggagatgggagtat

SEQ ID NO: 1026945 - DNA, 15 bp, Homo sapiens
atggagatgggagta

SEQ ID NO: 1026946 - DNA, 15 bp, Homo sapiens
gatggagatgggagt

SEQ ID NO: 1026947 - DNA, 15 bp, Homo sapiens
ggatggagatgggag

SEQ ID NO: 1026948 - DNA, 15 bp, Homo sapiens
aggatggagatggga

SEQ ID NO: 1026949 - DNA, 15 bp, Homo sapiens
aaggatggagatggg

SEQ ID NO: 1026950 - DNA, 15 bp, Homo sapiens
taaggatggagatgg

SEQ ID NO: 1026951 - DNA, 15 bp, Homo sapiens
gtaaggatggagatg

SEQ ID NO: 1026952 - DNA, 15 bp, Homo sapiens
ggtaaggatggagat

SEQ ID NO: 1026953 - DNA, 15 bp, Homo sapiens
aggtaaggatggaga

SEQ ID NO: 1026954 - DNA, 15 bp, Homo sapiens
caggtaaggatggag

SEQ ID NO: 1026955 - DNA, 15 bp, Homo sapiens
acaggtaaggatgga

SEQ ID NO: 1026956 - DNA, 15 bp, Homo sapiens
gacaggtaaggatgg

SEQ ID NO: 1026957 - DNA, 15 bp, Homo sapiens
tgacaggtaaggatg

SEQ ID NO: 1026958 - DNA, 15 bp, Homo sapiens
gtgacaggtaaggat

SEQ ID NO: 1026959 - DNA, 15 bp, Homo sapiens
ggtgacaggtaagga

SEQ ID NO: 1026960 - DNA, 15 bp, Homo sapiens
aggtgacaggtaagg

SEQ ID NO: 1026961 - DNA, 15 bp, Homo sapiens
gaggtgacaggtaag

SEQ ID NO: 1026962 - DNA, 15 bp, Homo sapiens
agaggtgacaggtaa

SEQ ID NO: 1026963 - DNA, 15 bp, Homo sapiens
gagaggtgacaggta

SEQ ID NO: 1026964 - DNA, 15 bp, Homo sapiens
ggagaggtgacaggt

SEQ ID NO: 1026965 - DNA, 15 bp, Homo sapiens
gggagaggtgacagg

SEQ ID NO: 1026966 - DNA, 15 bp, Homo sapiens
ggggagaggtgacag

SEQ ID NO: 1026967 - DNA, 15 bp, Homo sapiens
aggggagaggtgaca

SEQ ID NO: 1026968 - DNA, 15 bp, Homo sapiens
caggggagaggtgac

SEQ ID NO: 1026969 - DNA, 15 bp, Homo sapiens
gcaggggagaggtga

SEQ ID NO: 1026970 - DNA, 15 bp, Homo sapiens
ggcaggggagaggtg

SEQ ID NO: 1026971 - DNA, 15 bp, Homo sapiens
tggcaggggagaggt

SEQ ID NO: 1026972 - DNA, 15 bp, Homo sapiens
gtggcaggggagagg

SEQ ID NO: 1026973 - DNA, 15 bp, Homo sapiens
ggtggcaggggagag

SEQ ID NO: 1026974 - DNA, 15 bp, Homo sapiens
gggtggcaggggaga

SEQ ID NO: 1026975 - DNA, 15 bp, Homo sapiens
agggtggcaggggag

SEQ ID NO: 1026976 - DNA, 15 bp, Homo sapiens
cagggtggcagggga

SEQ ID NO: 1026977 - DNA, 15 bp, Homo sapiens
gcagggtggcagggg

SEQ ID NO: 1026978 - DNA, 15 bp, Homo sapiens
ggcagggtggcaggg

SEQ ID NO: 1026979 - DNA, 15 bp, Homo sapiens
gggcagggtggcagg

SEQ ID NO: 1026980 - DNA, 15 bp, Homo sapiens
ggggcagggtggcag

SEQ ID NO: 1026981 - DNA, 15 bp, Homo sapiens
gggggcagggtggca

SEQ ID NO: 1026982 - DNA, 15 bp, Homo sapiens
ggggggcagggtggc

SEQ ID NO: 1026983 - DNA, 15 bp, Homo sapiens
gggggggcagggtgg

SEQ ID NO: 1026984 - DNA, 15 bp, Homo sapiens
ggggggggcagggtg

SEQ ID NO: 1026985 - DNA, 15 bp, Homo sapiens
gggggggggcagggt

SEQ ID NO: 1026986 - DNA, 15 bp, Homo sapiens
ggggggggggcaggg

SEQ ID NO: 1026987 - DNA, 15 bp, Homo sapiens
gggggggggggcagg

SEQ ID NO: 1026988 - DNA, 15 bp, Homo sapiens
tgggggggggggcag

SEQ ID NO: 1026989 - DNA, 15 bp, Homo sapiens
gtgggggggggggca

SEQ ID NO: 1026990 - DNA, 15 bp, Homo sapiens
tgtgggggggggggc

SEQ ID NO: 1026991 - DNA, 15 bp, Homo sapiens
gtgtggggggggggg

SEQ ID NO: 1026992 - DNA, 15 bp, Homo sapiens
ggtgtgggggggggg

SEQ ID NO: 1026993 - DNA, 15 bp, Homo sapiens
gggtgtggggggggg

SEQ ID NO: 1026994 - DNA, 15 bp, Homo sapiens
tgggtgtgggggggg

SEQ ID NO: 1026995 - DNA, 15 bp, Homo sapiens
ctgggtgtggggggg

SEQ ID NO: 1026996 - DNA, 15 bp, Homo sapiens
cctgggtgtgggggg

SEQ ID NO: 1026997 - DNA, 15 bp, Homo sapiens
acctgggtgtggggg

SEQ ID NO: 1026998 - DNA, 15 bp, Homo sapiens
aacctgggtgtgggg

SEQ ID NO: 1026999 - DNA, 15 bp, Homo sapiens
taacctgggtgtggg

SEQ ID NO: 1027000 - DNA, 15 bp, Homo sapiens
ctaacctgggtgtgg

SEQ ID NO: 1027001 - DNA, 15 bp, Homo sapiens
tctaacctgggtgtg

SEQ ID NO: 1027002 - DNA, 15 bp, Homo sapiens
ttctaacctgggtgt

SEQ ID NO: 1027003 - DNA, 15 bp, Homo sapiens
tttctaacctgggtg

SEQ ID NO: 1027004 - DNA, 15 bp, Homo sapiens
gtttctaacctgggt

SEQ ID NO: 1027005 - DNA, 15 bp, Homo sapiens
tgtttctaacctggg

SEQ ID NO: 1027006 - DNA, 15 bp, Homo sapiens
ttgtttctaacctgg

SEQ ID NO: 1027007 - DNA, 15 bp, Homo sapiens
gttgtttctaacctg

SEQ ID NO: 1027008 - DNA, 15 bp, Homo sapiens
agttgtttctaacct

SEQ ID NO: 1027009 - DNA, 15 bp, Homo sapiens
cagttgtttctaacc

SEQ ID NO: 1027010 - DNA, 15 bp, Homo sapiens
acagttgtttctaac

SEQ ID NO: 1027011 - DNA, 15 bp, Homo sapiens
cacagttgtttctaa

SEQ ID NO: 1027012 - DNA, 15 bp, Homo sapiens
tcacagttgtttcta

SEQ ID NO: 1027013 - DNA, 15 bp, Homo sapiens
ttcacagttgtttct

SEQ ID NO: 1027014 - DNA, 15 bp, Homo sapiens
gttcacagttgtttc

SEQ ID NO: 1027015 - DNA, 15 bp, Homo sapiens
tgttcacagttgttt

SEQ ID NO: 1027016 - DNA, 15 bp, Homo sapiens
ttgttcacagttgtt

SEQ ID NO: 1027017 - DNA, 15 bp, Homo sapiens
gttgttcacagttgt

SEQ ID NO: 1027018 - DNA, 15 bp, Homo sapiens
agttgttcacagttg

SEQ ID NO: 1027019 - DNA, 15 bp, Homo sapiens
gagttgttcacagtt

SEQ ID NO: 1027020 - DNA, 15 bp, Homo sapiens
ggagttgttcacagt

SEQ ID NO: 1027021 - DNA, 15 bp, Homo sapiens
gggagttgttcacag

SEQ ID NO: 1027022 - DNA, 15 bp, Homo sapiens
agggagttgttcaca

SEQ ID NO: 1027023 - DNA, 15 bp, Homo sapiens
cagggagttgttcac

SEQ ID NO: 1027024 - DNA, 15 bp, Homo sapiens
acagggagttgttca

SEQ ID NO: 1027025 - DNA, 15 bp, Homo sapiens
aacagggagttgttc

SEQ ID NO: 1027026 - DNA, 15 bp, Homo sapiens
caacagggagttgtt

SEQ ID NO: 1027027 - DNA, 15 bp, Homo sapiens
gcaacagggagttgt

SEQ ID NO: 1027028 - DNA, 15 bp, Homo sapiens
ggcaacagggagttg

SEQ ID NO: 1027029 - DNA, 15 bp, Homo sapiens
tggcaacagggagtt

SEQ ID NO: 1027030 - DNA, 15 bp, Homo sapiens
ctggcaacagggagt

SEQ ID NO: 1027031 - DNA, 15 bp, Homo sapiens
tctggcaacagggag

SEQ ID NO: 1027032 - DNA, 15 bp, Homo sapiens
ctctggcaacaggga

SEQ ID NO: 1027033 - DNA, 15 bp, Homo sapiens
tctctggcaacaggg

SEQ ID NO: 1027034 - DNA, 15 bp, Homo sapiens
atctctggcaacagg

SEQ ID NO: 1027035 - DNA, 15 bp, Homo sapiens
gatctctggcaacag

SEQ ID NO: 1027036 - DNA, 15 bp, Homo sapiens
ggatctctggcaaca

SEQ ID NO: 1027037 - DNA, 15 bp, Homo sapiens
tggatctctggcaac

SEQ ID NO: 1027038 - DNA, 15 bp, Homo sapiens
gtggatctctggcaa

SEQ ID NO: 1027039 - DNA, 15 bp, Homo sapiens
tgtggatctctggca

SEQ ID NO: 1027040 - DNA, 15 bp, Homo sapiens
ctgtggatctctggc

SEQ ID NO: 1027041 - DNA, 15 bp, Homo sapiens
tctgtggatctctgg

SEQ ID NO: 1027042 - DNA, 15 bp, Homo sapiens
ctctgtggatctctg

SEQ ID NO: 1027043 - DNA, 15 bp, Homo sapiens
cctctgtggatctct

SEQ ID NO: 1027044 - DNA, 15 bp, Homo sapiens
tcctctgtggatctc

SEQ ID NO: 1027045 - DNA, 15 bp, Homo sapiens
ctcctctgtggatct

SEQ ID NO: 1027046 - DNA, 15 bp, Homo sapiens
tctcctctgtggatc

SEQ ID NO: 1027047 - DNA, 15 bp, Homo sapiens
ctctcctctgtggat

SEQ ID NO: 1027048 - DNA, 15 bp, Homo sapiens
actctcctctgtgga

SEQ ID NO: 1027049 - DNA, 15 bp, Homo sapiens
cactctcctctgtgg

SEQ ID NO: 1027050 - DNA, 15 bp, Homo sapiens
tcactctcctctgtg

SEQ ID NO: 1027051 - DNA, 15 bp, Homo sapiens
ctcactctcctctgt

SEQ ID NO: 1027052 - DNA, 15 bp, Homo sapiens
cctcactctcctctg

SEQ ID NO: 1027053 - DNA, 15 bp, Homo sapiens
ccctcactctcctct

SEQ ID NO: 1027054 - DNA, 15 bp, Homo sapiens
cccctcactctcctc

SEQ ID NO: 1027055 - DNA, 15 bp, Homo sapiens
acccctcactctcct

SEQ ID NO: 1027056 - DNA, 15 bp, Homo sapiens
cacccctcactctcc

SEQ ID NO: 1027057 - DNA, 15 bp, Homo sapiens
ccacccctcactctc

SEQ ID NO: 1027058 - DNA, 15 bp, Homo sapiens
cccacccctcactct

SEQ ID NO: 1027059 - DNA, 15 bp, Homo sapiens
ccccacccctcactc

SEQ ID NO: 1027060 - DNA, 15 bp, Homo sapiens
accccacccctcact

SEQ ID NO: 1027061 - DNA, 15 bp, Homo sapiens
caccccacccctcac

SEQ ID NO: 1027062 - DNA, 15 bp, Homo sapiens
gcaccccacccctca

SEQ ID NO: 1027063 - DNA, 15 bp, Homo sapiens
ggcaccccacccctc

SEQ ID NO: 1027064 - DNA, 15 bp, Homo sapiens
cggcaccccacccct

SEQ ID NO: 1027065 - DNA, 15 bp, Homo sapiens
gcggcaccccacccc

SEQ ID NO: 1027066 - DNA, 15 bp, Homo sapiens
ggcggcaccccaccc

SEQ ID NO: 1027067 - DNA, 15 bp, Homo sapiens
gggcggcaccccacc

SEQ ID NO: 1027068 - DNA, 15 bp, Homo sapiens
tgggcggcaccccac

SEQ ID NO: 1027069 - DNA, 15 bp, Homo sapiens
gtgggcggcacccca

SEQ ID NO: 1027070 - DNA, 15 bp, Homo sapiens
ggtgggcggcacccc

SEQ ID NO: 1027071 - DNA, 15 bp, Homo sapiens
gggtgggcggcaccc

SEQ ID NO: 1027072 - DNA, 15 bp, Homo sapiens
ggggtgggcggcacc

SEQ ID NO: 1027073 - DNA, 15 bp, Homo sapiens
tggggtgggcggcac

SEQ ID NO: 1027074 - DNA, 15 bp, Homo sapiens
ttggggtgggcggca

SEQ ID NO: 1027075 - DNA, 15 bp, Homo sapiens
tttggggtgggcggc

SEQ ID NO: 1027076 - DNA, 15 bp, Homo sapiens
ctttggggtgggcgg

SEQ ID NO: 1027077 - DNA, 15 bp, Homo sapiens
gctttggggtgggcg

SEQ ID NO: 1027078 - DNA, 15 bp, Homo sapiens
tgctttggggtgggc

SEQ ID NO: 1027079 - DNA, 15 bp, Homo sapiens
gtgctttggggtggg

SEQ ID NO: 1027080 - DNA, 15 bp, Homo sapiens
tgtgctttggggtgg

SEQ ID NO: 1027081 - DNA, 15 bp, Homo sapiens
ttgtgctttggggtg

SEQ ID NO: 1027082 - DNA, 15 bp, Homo sapiens
gttgtgctttggggt

SEQ ID NO: 1027083 - DNA, 15 bp, Homo sapiens
ggttgtgctttgggg

SEQ ID NO: 1027084 - DNA, 15 bp, Homo sapiens
tggttgtgctttggg

SEQ ID NO: 1027085 - DNA, 15 bp, Homo sapiens
ttggttgtgctttgg

SEQ ID NO: 1027086 - DNA, 15 bp, Homo sapiens
gttggttgtgctttg

SEQ ID NO: 1027087 - DNA, 15 bp, Homo sapiens
agttggttgtgcttt

SEQ ID NO: 1027088 - DNA, 15 bp, Homo sapiens
gagttggttgtgctt

SEQ ID NO: 1027089 - DNA, 15 bp, Homo sapiens
tgagttggttgtgct

SEQ ID NO: 1027090 - DNA, 15 bp, Homo sapiens
ctgagttggttgtgc

SEQ ID NO: 1027091 - DNA, 15 bp, Homo sapiens
gctgagttggttgtg

SEQ ID NO: 1027092 - DNA, 15 bp, Homo sapiens
tgctgagttggttgt

SEQ ID NO: 1027093 - DNA, 15 bp, Homo sapiens
ttgctgagttggttg

SEQ ID NO: 1027094 - DNA, 15 bp, Homo sapiens
attgctgagttggtt

SEQ ID NO: 1027095 - DNA, 15 bp, Homo sapiens
cattgctgagttggt

SEQ ID NO: 1027096 - DNA, 15 bp, Homo sapiens
gcattgctgagttgg

SEQ ID NO: 1027097 - DNA, 15 bp, Homo sapiens
tgcattgctgagttg

SEQ ID NO: 1027098 - DNA, 15 bp, Homo sapiens
ctgcattgctgagtt

SEQ ID NO: 1027099 - DNA, 15 bp, Homo sapiens
tctgcattgctgagt

SEQ ID NO: 1027100 - DNA, 15 bp, Homo sapiens
atctgcattgctgag

SEQ ID NO: 1027101 - DNA, 15 bp, Homo sapiens
aatctgcattgctga

SEQ ID NO: 1027102 - DNA, 15 bp, Homo sapiens
gaatctgcattgctg

SEQ ID NO: 1027103 - DNA, 15 bp, Homo sapiens
agaatctgcattgct

SEQ ID NO: 1027104 - DNA, 15 bp, Homo sapiens
tagaatctgcattgc

SEQ ID NO: 1027105 - DNA, 15 bp, Homo sapiens
atagaatctgcattg

SEQ ID NO: 1027106 - DNA, 15 bp, Homo sapiens
aatagaatctgcatt

SEQ ID NO: 1027107 - DNA, 15 bp, Homo sapiens
aaatagaatctgcat

SEQ ID NO: 1027108 - DNA, 15 bp, Homo sapiens
aaaatagaatctgca

SEQ ID NO: 1027109 - DNA, 15 bp, Homo sapiens
caaaatagaatctgc

SEQ ID NO: 1027110 - DNA, 15 bp, Homo sapiens
acaaaatagaatctg

SEQ ID NO: 1027111 - DNA, 15 bp, Homo sapiens
cacaaaatagaatct

SEQ ID NO: 1027112 - DNA, 15 bp, Homo sapiens
ccacaaaatagaatc

SEQ ID NO: 1027113 - DNA, 15 bp, Homo sapiens
cccacaaaatagaat

SEQ ID NO: 1027114 - DNA, 15 bp, Homo sapiens
acccacaaaatagaa

SEQ ID NO: 1027115 - DNA, 15 bp, Homo sapiens
tacccacaaaataga

SEQ ID NO: 1027116 - DNA, 15 bp, Homo sapiens
ttacccacaaaatag

SEQ ID NO: 1027117 - DNA, 15 bp, Homo sapiens
attacccacaaaata

SEQ ID NO: 1027118 - DNA, 15 bp, Homo sapiens
cattacccacaaaat

SEQ ID NO: 1027119 - DNA, 15 bp, Homo sapiens
ccattacccacaaaa

SEQ ID NO: 1027120 - DNA, 15 bp, Homo sapiens
gccattacccacaaa

SEQ ID NO: 1027121 - DNA, 15 bp, Homo sapiens
ggccattacccacaa

SEQ ID NO: 1027122 - DNA, 15 bp, Homo sapiens
gggccattacccaca

SEQ ID NO: 1027123 - DNA, 15 bp, Homo sapiens
agggccattacccac

SEQ ID NO: 1027124 - DNA, 15 bp, Homo sapiens
cagggccattaccca

SEQ ID NO: 1027125 - DNA, 15 bp, Homo sapiens
ccagggccattaccc

SEQ ID NO: 1027126 - DNA, 15 bp, Homo sapiens
cccagggccattacc

SEQ ID NO: 1027127 - DNA, 15 bp, Homo sapiens
tcccagggccattac

SEQ ID NO: 1027128 - DNA, 15 bp, Homo sapiens
atcccagggccatta

SEQ ID NO: 1027129 - DNA, 15 bp, Homo sapiens
aatcccagggccatt

SEQ ID NO: 1027130 - DNA, 15 bp, Homo sapiens
caatcccagggccat

SEQ ID NO: 1027131 - DNA, 15 bp, Homo sapiens
ccaatcccagggcca

SEQ ID NO: 1027132 - DNA, 15 bp, Homo sapiens
cccaatcccagggcc

SEQ ID NO: 1027133 - DNA, 15 bp, Homo sapiens
gcccaatcccagggc

SEQ ID NO: 1027134 - DNA, 15 bp, Homo sapiens
tgcccaatcccaggg

SEQ ID NO: 1027135 - DNA, 15 bp, Homo sapiens
ctgcccaatcccagg

SEQ ID NO: 1027136 - DNA, 15 bp, Homo sapiens
actgcccaatcccag

SEQ ID NO: 1027137 - DNA, 15 bp, Homo sapiens
cactgcccaatccca

SEQ ID NO: 1027138 - DNA, 15 bp, Homo sapiens
ccactgcccaatccc

SEQ ID NO: 1027139 - DNA, 15 bp, Homo sapiens
tccactgcccaatcc

SEQ ID NO: 1027140 - DNA, 15 bp, Homo sapiens
ttccactgcccaatc

SEQ ID NO: 1027141 - DNA, 15 bp, Homo sapiens
tttccactgcccaat

SEQ ID NO: 1027142 - DNA, 15 bp, Homo sapiens
ctttccactgcccaa

SEQ ID NO: 1027143 - DNA, 15 bp, Homo sapiens
cctttccactgccca

SEQ ID NO: 1027144 - DNA, 15 bp, Homo sapiens
ccctttccactgccc

SEQ ID NO: 1027145 - DNA, 15 bp, Homo sapiens
gccctttccactgcc

SEQ ID NO: 1027146 - DNA, 15 bp, Homo sapiens
ggccctttccactgc

SEQ ID NO: 1027147 - DNA, 15 bp, Homo sapiens
gggccctttccactg

SEQ ID NO: 1027148 - DNA, 15 bp, Homo sapiens
tgggccctttccact

SEQ ID NO: 1027149 - DNA, 15 bp, Homo sapiens
atgggccctttccac

SEQ ID NO: 1027150 - DNA, 15 bp, Homo sapiens
atatgggccctttcc

SEQ ID NO: 1027151 - DNA, 15 bp, Homo sapiens
catatgggccctttc

SEQ ID NO: 1027152 - DNA, 15 bp, Homo sapiens
tcatatgggcccttt

SEQ ID NO: 1027153 - DNA, 15 bp, Homo sapiens
ctcatatgggccctt

SEQ ID NO: 1027154 - DNA, 15 bp, Homo sapiens
gctcatatgggccct

SEQ ID NO: 1027155 - DNA, 15 bp, Homo sapiens
tgctcatatgggccc

SEQ ID NO: 1027156 - DNA, 15 bp, Homo sapiens
atgctcatatgggcc

SEQ ID NO: 1027157 - DNA, 15 bp, Homo sapiens
aatgctcatatgggc

SEQ ID NO: 1027158 - DNA, 15 bp, Homo sapiens
caatgctcatatggg

SEQ ID NO: 1027159 - DNA, 15 bp, Homo sapiens
tcaatgctcatatgg

SEQ ID NO: 1027160 - DNA, 15 bp, Homo sapiens
gtcaatgctcatatg

SEQ ID NO: 1027161 - DNA, 15 bp, Homo sapiens
agtcaatgctcatat

SEQ ID NO: 1027162 - DNA, 15 bp, Homo sapiens
gagtcaatgctcata

SEQ ID NO: 1027163 - DNA, 15 bp, Homo sapiens
tgagtcaatgctcat

SEQ ID NO: 1027164 - DNA, 15 bp, Homo sapiens
ctgagtcaatgctca

SEQ ID NO: 1027165 - DNA, 15 bp, Homo sapiens
tctgagtcaatgctc

SEQ ID NO: 1027166 - DNA, 15 bp, Homo sapiens
ttctgagtcaatgct

SEQ ID NO: 1027167 - DNA, 15 bp, Homo sapiens
tttctgagtcaatgc

SEQ ID NO: 1027168 - DNA, 15 bp, Homo sapiens
atttctgagtcaatg

SEQ ID NO: 1027169 - DNA, 15 bp, Homo sapiens
gatttctgagtcaat

SEQ ID NO: 1027170 - DNA, 15 bp, Homo sapiens
agatttctgagtcaa

SEQ ID NO: 1027171 - DNA, 15 bp, Homo sapiens
cagatttctgagtca

SEQ ID NO: 1027172 - DNA, 15 bp, Homo sapiens
tcagatttctgagtc

SEQ ID NO: 1027173 - DNA, 15 bp, Homo sapiens
ctcagatttctgagt

SEQ ID NO: 1027174 - DNA, 15 bp, Homo sapiens
gctcagatttctgag

SEQ ID NO: 1027175 - DNA, 15 bp, Homo sapiens
ggctcagatttctga

SEQ ID NO: 1027176 - DNA, 15 bp, Homo sapiens
gggctcagatttctg

SEQ ID NO: 1027177 - DNA, 15 bp, Homo sapiens
ggggctcagatttct

SEQ ID NO: 1027178 - DNA, 15 bp, Homo sapiens
tggggctcagatttc

SEQ ID NO: 1027179 - DNA, 15 bp, Homo sapiens
atggggctcagattt

SEQ ID NO: 1027180 - DNA, 15 bp, Homo sapiens
aatggggctcagatt

SEQ ID NO: 1027181 - DNA, 15 bp, Homo sapiens
gaatggggctcagat

SEQ ID NO: 1027182 - DNA, 15 bp, Homo sapiens
cgaatggggctcaga

SEQ ID NO: 1027183 - DNA, 15 bp, Homo sapiens
tcgaatggggctcag

SEQ ID NO: 1027184 - DNA, 15 bp, Homo sapiens
ctcgaatggggctca

SEQ ID NO: 1027185 - DNA, 15 bp, Homo sapiens
actcgaatggggctc

SEQ ID NO: 1027186 - DNA, 15 bp, Homo sapiens
cactcgaatggggct

SEQ ID NO: 1027187 - DNA, 15 bp, Homo sapiens
tcactcgaatggggc

SEQ ID NO: 1027188 - DNA, 15 bp, Homo sapiens
ttcactcgaatgggg

SEQ ID NO: 1027189 - DNA, 15 bp, Homo sapiens
tttcactcgaatggg

SEQ ID NO: 1027190 - DNA, 15 bp, Homo sapiens
ctttcactcgaatgg

SEQ ID NO: 1027191 - DNA, 15 bp, Homo sapiens
tctttcactcgaatg

SEQ ID NO: 1027192 - DNA, 15 bp, Homo sapiens
ttctttcactcgaat

SEQ ID NO: 1027193 - DNA, 15 bp, Homo sapiens
attctttcactcgaa

SEQ ID NO: 1027194 - DNA, 15 bp, Homo sapiens
cattctttcactcga

SEQ ID NO: 1027195 - DNA, 15 bp, Homo sapiens
tcattctttcactcg

SEQ ID NO: 1027196 - DNA, 15 bp, Homo sapiens
ctcattctttcactc

SEQ ID NO: 1027197 - DNA, 15 bp, Homo sapiens
gctcattctttcact

SEQ ID NO: 1027198 - DNA, 15 bp, Homo sapiens
tgctcattctttcac

SEQ ID NO: 1027199 - DNA, 15 bp, Homo sapiens
ttgctcattctttca

SEQ ID NO: 1027200 - DNA, 15 bp, Homo sapiens
gttgctcattctttc

SEQ ID NO: 1027201 - DNA, 15 bp, Homo sapiens
cgttgctcattcttt

SEQ ID NO: 1027202 - DNA, 15 bp, Homo sapiens
acgttgctcattctt

SEQ ID NO: 1027203 - DNA, 15 bp, Homo sapiens
aacgttgctcattct

SEQ ID NO: 1027204 - DNA, 15 bp, Homo sapiens
gaacgttgctcattc

SEQ ID NO: 1027205 - DNA, 15 bp, Homo sapiens
ggaacgttgctcatt

SEQ ID NO: 1027206 - DNA, 15 bp, Homo sapiens
tggaacgttgctcat

SEQ ID NO: 1027207 - DNA, 15 bp, Homo sapiens
ttggaacgttgctca

SEQ ID NO: 1027208 - DNA, 15 bp, Homo sapiens
tttggaacgttgctc

SEQ ID NO: 1027209 - DNA, 15 bp, Homo sapiens
atttggaacgttgct

SEQ ID NO: 1027210 - DNA, 15 bp, Homo sapiens
aatttggaacgttgc

SEQ ID NO: 1027211 - DNA, 15 bp, Homo sapiens
aaatttggaacgttg

SEQ ID NO: 1027212 - DNA, 15 bp, Homo sapiens
aaaatttggaacgtt

SEQ ID NO: 1027213 - DNA, 15 bp, Homo sapiens
taaaatttggaacgt

SEQ ID NO: 1027214 - DNA, 15 bp, Homo sapiens
ttaaaatttggaacg

SEQ ID NO: 1027215 - DNA, 15 bp, Homo sapiens
cttaaaatttggaac

SEQ ID NO: 1027216 - DNA, 15 bp, Homo sapiens
tcttaaaatttggaa

SEQ ID NO: 1027217 - DNA, 15 bp, Homo sapiens
ttcttaaaatttgga

SEQ ID NO: 1027218 - DNA, 15 bp, Homo sapiens
tttcttaaaatttgg

SEQ ID NO: 1027219 - DNA, 15 bp, Homo sapiens
ttttcttaaaatttg

SEQ ID NO: 1027220 - DNA, 15 bp, Homo sapiens
gttttcttaaaattt

SEQ ID NO: 1027221 - DNA, 15 bp, Homo sapiens
tgttttcttaaaatt

SEQ ID NO: 1027222 - DNA, 15 bp, Homo sapiens
gtgttttcttaaaat

SEQ ID NO: 1027223 - DNA, 15 bp, Homo sapiens
tgtgttttcttaaaa

SEQ ID NO: 1027224 - DNA, 15 bp, Homo sapiens
ttgtgttttcttaaa

SEQ ID NO: 1027225 - DNA, 15 bp, Homo sapiens
tttgtgttttcttaa

SEQ ID NO: 1027226 - DNA, 15 bp, Homo sapiens
atttgtgttttctta

SEQ ID NO: 1027227 - DNA, 15 bp, Homo sapiens
aatttgtgttttctt

SEQ ID NO: 1027228 - DNA, 15 bp, Homo sapiens
aaatttgtgttttct

SEQ ID NO: 1027229 - DNA, 15 bp, Homo sapiens
caaatttgtgttttc

SEQ ID NO: 1027230 - DNA, 15 bp, Homo sapiens
tcaaatttgtgtttt

SEQ ID NO: 1027231 - DNA, 15 bp, Homo sapiens
gtcaaatttgtgttt

SEQ ID NO: 1027232 - DNA, 15 bp, Homo sapiens
tgtcaaatttgtgtt

SEQ ID NO: 1027233 - DNA, 15 bp, Homo sapiens
ttgtcaaatttgtgt

SEQ ID NO: 1027234 - DNA, 15 bp, Homo sapiens
gttgtcaaatttgtg

SEQ ID NO: 1027235 - DNA, 15 bp, Homo sapiens
ggttgtcaaatttgt

SEQ ID NO: 1027236 - DNA, 15 bp, Homo sapiens
gggttgtcaaatttg

SEQ ID NO: 1027237 - DNA, 15 bp, Homo sapiens
tgggttgtcaaattt

SEQ ID NO: 1027238 - DNA, 15 bp, Homo sapiens
ctgggttgtcaaatt

SEQ ID NO: 1027239 - DNA, 15 bp, Homo sapiens
tctgggttgtcaaat

SEQ ID NO: 1027240 - DNA, 15 bp, Homo sapiens
ttctgggttgtcaaa

SEQ ID NO: 1027241 - DNA, 15 bp, Homo sapiens
tttctgggttgtcaa

SEQ ID NO: 1027242 - DNA, 15 bp, Homo sapiens
gtttctgggttgtca

SEQ ID NO: 1027243 - DNA, 15 bp, Homo sapiens
tgtttctgggttgtc

SEQ ID NO: 1027244 - DNA, 15 bp, Homo sapiens
ttgtttctgggttgt

SEQ ID NO: 1027245 - DNA, 15 bp, Homo sapiens
gttgtttctgggttg

SEQ ID NO: 1027246 - DNA, 15 bp, Homo sapiens
agttgtttctgggtt

SEQ ID NO: 1027247 - DNA, 15 bp, Homo sapiens
gagttgtttctgggt

SEQ ID NO: 1027248 - DNA, 15 bp, Homo sapiens
ggagttgtttctggg

SEQ ID NO: 1027249 - DNA, 15 bp, Homo sapiens
aggagttgtttctgg

SEQ ID NO: 1027250 - DNA, 15 bp, Homo sapiens
aaggagttgtttctg

SEQ ID NO: 1027251 - DNA, 15 bp, Homo sapiens
taaggagttgtttct

SEQ ID NO: 1027252 - DNA, 15 bp, Homo sapiens
ttaaggagttgtttc

SEQ ID NO: 1027253 - DNA, 15 bp, Homo sapiens
gttaaggagttgttt

SEQ ID NO: 1027254 - DNA, 15 bp, Homo sapiens
tgttaaggagttgtt

SEQ ID NO: 1027255 - DNA, 15 bp, Homo sapiens
ttgttaaggagttgt

SEQ ID NO: 1027256 - DNA, 15 bp, Homo sapiens
cttgttaaggagttg

SEQ ID NO: 1027257 - DNA, 15 bp, Homo sapiens
tcttgttaaggagtt

SEQ ID NO: 1027258 - DNA, 15 bp, Homo sapiens
ttcttgttaaggagt

SEQ ID NO: 1027259 - DNA, 15 bp, Homo sapiens
attcttgttaaggag

SEQ ID NO: 1027260 - DNA, 15 bp, Homo sapiens
cattcttgttaagga

SEQ ID NO: 1027261 - DNA, 15 bp, Homo sapiens
gcattcttgttaagg

SEQ ID NO: 1027262 - DNA, 15 bp, Homo sapiens
agcattcttgttaag

SEQ ID NO: 1027263 - DNA, 15 bp, Homo sapiens
aagcattcttgttaa

SEQ ID NO: 1027264 - DNA, 15 bp, Homo sapiens
aaagcattcttgtta

SEQ ID NO: 1027265 - DNA, 15 bp, Homo sapiens
aaaagcattcttgtt

SEQ ID NO: 1027266 - DNA, 15 bp, Homo sapiens
taaaagcattcttgt

SEQ ID NO: 1027267 - DNA, 15 bp, Homo sapiens
ttaaaagcattcttg

SEQ ID NO: 1027268 - DNA, 15 bp, Homo sapiens
tttaaaagcattctt

SEQ ID NO: 1027269 - DNA, 15 bp, Homo sapiens
atttaaaagcattct

SEQ ID NO: 1027270 - DNA, 15 bp, Homo sapiens
catttaaaagcattc

SEQ ID NO: 1027271 - DNA, 15 bp, Homo sapiens
acatttaaaagcatt

SEQ ID NO: 1027272 - DNA, 15 bp, Homo sapiens
aacatttaaaagcat

SEQ ID NO: 1027273 - DNA, 15 bp, Homo sapiens
aaacatttaaaagca

SEQ ID NO: 1027274 - DNA, 15 bp, Homo sapiens
caaacatttaaaagc

SEQ ID NO: 1027275 - DNA, 15 bp, Homo sapiens
tcaaacatttaaaag

SEQ ID NO: 1027276 - DNA, 15 bp, Homo sapiens
ctcaaacatttaaaa

SEQ ID NO: 1027277 - DNA, 15 bp, Homo sapiens
cctcaaacatttaaa

SEQ ID NO: 1027278 - DNA, 15 bp, Homo sapiens
acctcaaacatttaa

SEQ ID NO: 1027279 - DNA, 15 bp, Homo sapiens
aacctcaaacattta

SEQ ID NO: 1027280 - DNA, 15 bp, Homo sapiens
aaacctcaaacattt

SEQ ID NO: 1027281 - DNA, 15 bp, Homo sapiens
aaaacctcaaacatt

SEQ ID NO: 1027282 - DNA, 15 bp, Homo sapiens
aaaaacctcaaacat

SEQ ID NO: 1027283 - DNA, 15 bp, Homo sapiens
aaaaaacctcaaaca

SEQ ID NO: 1027284 - DNA, 15 bp, Homo sapiens
taaaaaacctcaaac

SEQ ID NO: 1027285 - DNA, 15 bp, Homo sapiens
ttaaaaaacctcaaa

SEQ ID NO: 1027286 - DNA, 15 bp, Homo sapiens
tttaaaaaacctcaa

SEQ ID NO: 1027287 - DNA, 15 bp, Homo sapiens
atttaaaaaacctca

SEQ ID NO: 1027288 - DNA, 15 bp, Homo sapiens
aatttaaaaaacctc

SEQ ID NO: 1027289 - DNA, 15 bp, Homo sapiens
taatttaaaaaacct

SEQ ID NO: 1027290 - DNA, 15 bp, Homo sapiens
ttaatttaaaaaacc

SEQ ID NO: 1027291 - DNA, 15 bp, Homo sapiens
tttaatttaaaaaac

SEQ ID NO: 1027292 - DNA, 15 bp, Homo sapiens
ttttaatttaaaaaa

SEQ ID NO: 1027293 - DNA, 15 bp, Homo sapiens
gttttaatttaaaaa

SEQ ID NO: 1027294 - DNA, 15 bp, Homo sapiens
ggttttaatttaaaa

SEQ ID NO: 1027295 - DNA, 15 bp, Homo sapiens
aggttttaatttaaa

SEQ ID NO: 1027296 - DNA, 15 bp, Homo sapiens
gaggttttaatttaa

SEQ ID NO: 1027297 - DNA, 15 bp, Homo sapiens
tgaggttttaattta

SEQ ID NO: 1027298 - DNA, 15 bp, Homo sapiens
atgaggttttaattt

SEQ ID NO: 1027299 - DNA, 15 bp, Homo sapiens
tatgaggttttaatt

SEQ ID NO: 1027300 - DNA, 15 bp, Homo sapiens
ttatgaggttttaat

SEQ ID NO: 1027301 - DNA, 15 bp, Homo sapiens
attatgaggttttaa

SEQ ID NO: 1027302 - DNA, 15 bp, Homo sapiens
tattatgaggtttta

SEQ ID NO: 1027303 - DNA, 15 bp, Homo sapiens
atattatgaggtttt

SEQ ID NO: 1027304 - DNA, 15 bp, Homo sapiens
catattatgaggttt

SEQ ID NO: 1027305 - DNA, 15 bp, Homo sapiens
ccatattatgaggtt

SEQ ID NO: 1027306 - DNA, 15 bp, Homo sapiens
gccatattatgaggt

SEQ ID NO: 1027307 - DNA, 15 bp, Homo sapiens
agccatattatgagg

SEQ ID NO: 1027308 - DNA, 15 bp, Homo sapiens
tagccatattatgag

SEQ ID NO: 1027309 - DNA, 15 bp, Homo sapiens
atagccatattatga

SEQ ID NO: 1027310 - DNA, 15 bp, Homo sapiens
aatagccatattatg

SEQ ID NO: 1027311 - DNA, 15 bp, Homo sapiens
aaatagccatattat

SEQ ID NO: 1027312 - DNA, 15 bp, Homo sapiens
gaaatagccatatta

SEQ ID NO: 1027313 - DNA, 15 bp, Homo sapiens
agaaatagccatatt

SEQ ID NO: 1027314 - DNA, 15 bp, Homo sapiens
tagaaatagccatat

SEQ ID NO: 1027315 - DNA, 15 bp, Homo sapiens
atagaaatagccata

SEQ ID NO: 1027316 - DNA, 15 bp, Homo sapiens
catagaaatagccat

SEQ ID NO: 1027317 - DNA, 15 bp, Homo sapiens
ccatagaaatagcca

SEQ ID NO: 1027318 - DNA, 15 bp, Homo sapiens
gccatagaaatagcc

SEQ ID NO: 1027319 - DNA, 15 bp, Homo sapiens
tgccatagaaatagc

SEQ ID NO: 1027320 - DNA, 15 bp, Homo sapiens
atgccatagaaatag

SEQ ID NO: 1027321 - DNA, 15 bp, Homo sapiens
aatgccatagaaata

SEQ ID NO: 1027322 - DNA, 15 bp, Homo sapiens
aaatgccatagaaat

SEQ ID NO: 1027323 - DNA, 15 bp, Homo sapiens
caaatgccatagaaa

SEQ ID NO: 1027324 - DNA, 15 bp, Homo sapiens
gcaaatgccatagaa

SEQ ID NO: 1027325 - DNA, 15 bp, Homo sapiens
tgcaaatgccataga

SEQ ID NO: 1027326 - DNA, 15 bp, Homo sapiens
ttgcaaatgccatag

SEQ ID NO: 1027327 - DNA, 15 bp, Homo sapiens
attgcaaatgccata

SEQ ID NO: 1027328 - DNA, 15 bp, Homo sapiens
gattgcaaatgccat

SEQ ID NO: 1027329 - DNA, 15 bp, Homo sapiens
ggattgcaaatgcca

SEQ ID NO: 1027330 - DNA, 15 bp, Homo sapiens
tggattgcaaatgcc

SEQ ID NO: 1027331 - DNA, 15 bp, Homo sapiens
gtggattgcaaatgc

SEQ ID NO: 1027332 - DNA, 15 bp, Homo sapiens
agtggattgcaaatg

SEQ ID NO: 1027333 - DNA, 15 bp, Homo sapiens
aagtggattgcaaat

SEQ ID NO: 1027334 - DNA, 15 bp, Homo sapiens
aaagtggattgcaaa

SEQ ID NO: 1027335 - DNA, 15 bp, Homo sapiens
attcccttcgccgcc

SEQ ID NO: 1027336 - DNA, 15 bp, Homo sapiens
gattcccttcgccgc

SEQ ID NO: 1027337 - DNA, 15 bp, Homo sapiens
agattcccttcgccg

SEQ ID NO: 1027338 - DNA, 15 bp, Homo sapiens
gagattcccttcgcc

SEQ ID NO: 1027339 - DNA, 15 bp, Homo sapiens
agagattcccttcgc

SEQ ID NO: 1027340 - DNA, 15 bp, Homo sapiens
cagagattcccttcg

SEQ ID NO: 1027341 - DNA, 15 bp, Homo sapiens
ccagagattcccttc

SEQ ID NO: 1027342 - DNA, 15 bp, Homo sapiens
cccagagattccctt

SEQ ID NO: 1027343 - DNA, 15 bp, Homo sapiens
gcccagagattccct

SEQ ID NO: 1027344 - DNA, 15 bp, Homo sapiens
ggcccagagattccc

SEQ ID NO: 1027345 - DNA, 15 bp, Homo sapiens
gggcccagagattcc

SEQ ID NO: 1027346 - DNA, 15 bp, Homo sapiens
cgggcccagagattc

SEQ ID NO: 1027347 - DNA, 15 bp, Homo sapiens
tcgggcccagagatt

SEQ ID NO: 1027348 - DNA, 15 bp, Homo sapiens
ctcgggcccagagat

SEQ ID NO: 1027349 - DNA, 15 bp, Homo sapiens
cctcgggcccagaga

SEQ ID NO: 1027350 - DNA, 15 bp, Homo sapiens
tcctcgggcccagag

SEQ ID NO: 1027351 - DNA, 15 bp, Homo sapiens
ttcctcgggcccaga

SEQ ID NO: 1027352 - DNA, 15 bp, Homo sapiens
attcctcgggcccag

SEQ ID NO: 1027353 - DNA, 15 bp, Homo sapiens
tattcctcgggccca

SEQ ID NO: 1027354 - DNA, 15 bp, Homo sapiens
atattcctcgggccc

SEQ ID NO: 1027355 - DNA, 15 bp, Homo sapiens
tatattcctcgggcc

SEQ ID NO: 1027356 - DNA, 15 bp, Homo sapiens
gtatattcctcgggc

SEQ ID NO: 1027357 - DNA, 15 bp, Homo sapiens
ggtatattcctcggg

SEQ ID NO: 1027358 - DNA, 15 bp, Homo sapiens
aggtatattcctcgg

SEQ ID NO: 1027359 - DNA, 15 bp, Homo sapiens
aaggtatattcctcg

SEQ ID NO: 1027360 - DNA, 15 bp, Homo sapiens
caaggtatattcctc

SEQ ID NO: 1027361 - DNA, 15 bp, Homo sapiens
acaaggtatattcct

SEQ ID NO: 1027362 - DNA, 15 bp, Homo sapiens
gacaaggtatattcc

SEQ ID NO: 1027363 - DNA, 15 bp, Homo sapiens
ggacaaggtatattc

SEQ ID NO: 1027364 - DNA, 15 bp, Homo sapiens
gggacaaggtatatt

SEQ ID NO: 1027365 - DNA, 15 bp, Homo sapiens
agggacaaggtatat

SEQ ID NO: 1027366 - DNA, 15 bp, Homo sapiens
cagggacaaggtata

SEQ ID NO: 1027367 - DNA, 15 bp, Homo sapiens
gcagggacaaggtat

SEQ ID NO: 1027368 - DNA, 15 bp, Homo sapiens
tgcagggacaaggta

SEQ ID NO: 1027369 - DNA, 15 bp, Homo sapiens
gtgcagggacaaggt

SEQ ID NO: 1027370 - DNA, 15 bp, Homo sapiens
agtgcagggacaagg

SEQ ID NO: 1027371 - DNA, 15 bp, Homo sapiens
tagtgcagggacaag

SEQ ID NO: 1027372 - DNA, 15 bp, Homo sapiens
ctagtgcagggacaa

SEQ ID NO: 1027373 - DNA, 15 bp, Homo sapiens
actagtgcagggaca

SEQ ID NO: 1027374 - DNA, 15 bp, Homo sapiens
cactagtgcagggac

SEQ ID NO: 1027375 - DNA, 15 bp, Homo sapiens
acactagtgcaggga

SEQ ID NO: 1027376 - DNA, 15 bp, Homo sapiens
cacactagtgcaggg

SEQ ID NO: 1027377 - DNA, 15 bp, Homo sapiens
acacactagtgcagg

SEQ ID NO: 1027378 - DNA, 15 bp, Homo sapiens
cacacactagtgcag

SEQ ID NO: 1027379 - DNA, 15 bp, Homo sapiens
acacacactagtgca

SEQ ID NO: 1027380 - DNA, 15 bp, Homo sapiens
aacacacactagtgc

SEQ ID NO: 1027381 - DNA, 15 bp, Homo sapiens
gaacacacactagtg

SEQ ID NO: 1027382 - DNA, 15 bp, Homo sapiens
agaacacacactagt

SEQ ID NO: 1027383 - DNA, 15 bp, Homo sapiens
gagaacacacactag

SEQ ID NO: 1027384 - DNA, 15 bp, Homo sapiens
agagaacacacacta

SEQ ID NO: 1027385 - DNA, 15 bp, Homo sapiens
aagagaacacacact

SEQ ID NO: 1027386 - DNA, 15 bp, Homo sapiens
caagagaacacacac

SEQ ID NO: 1027387 - DNA, 15 bp, Homo sapiens
acaagagaacacaca

SEQ ID NO: 1027388 - DNA, 15 bp, Homo sapiens
cacaagagaacacac

SEQ ID NO: 1027389 - DNA, 15 bp, Homo sapiens
ccacaagagaacaca

SEQ ID NO: 1027390 - DNA, 15 bp, Homo sapiens
gccacaagagaacac

SEQ ID NO: 1027391 - DNA, 15 bp, Homo sapiens
agccacaagagaaca

SEQ ID NO: 1027392 - DNA, 15 bp, Homo sapiens
aagccacaagagaac

SEQ ID NO: 1027393 - DNA, 15 bp, Homo sapiens
caagccacaagagaa

SEQ ID NO: 1027394 - DNA, 15 bp, Homo sapiens
tcaagccacaagaga

SEQ ID NO: 1027395 - DNA, 15 bp, Homo sapiens
ctcaagccacaagag

SEQ ID NO: 1027396 - DNA, 15 bp, Homo sapiens
cctcaagccacaaga

SEQ ID NO: 1027397 - DNA, 15 bp, Homo sapiens
tcctcaagccacaag

SEQ ID NO: 1027398 - DNA, 15 bp, Homo sapiens
ctcctcaagccacaa

SEQ ID NO: 1027399 - DNA, 15 bp, Homo sapiens
gctcctcaagccaca

SEQ ID NO: 1027400 - DNA, 15 bp, Homo sapiens
ggctcctcaagccac

SEQ ID NO: 1027401 - DNA, 15 bp, Homo sapiens
tggctcctcaagcca

SEQ ID NO: 1027402 - DNA, 15 bp, Homo sapiens
ttggctcctcaagcc

SEQ ID NO: 1027403 - DNA, 15 bp, Homo sapiens
tttggctcctcaagc

SEQ ID NO: 1027404 - DNA, 15 bp, Homo sapiens
ttttggctcctcaag

SEQ ID NO: 1027405 - DNA, 15 bp, Homo sapiens
tttttggctcctcaa

SEQ ID NO: 1027406 - DNA, 15 bp, Homo sapiens
ttttttggctcctca

SEQ ID NO: 1027407 - DNA, 15 bp, Homo sapiens
tttttttggctcctc

SEQ ID NO: 1027408 - DNA, 15 bp, Homo sapiens
ttttttttggctcct

SEQ ID NO: 1027409 - DNA, 15 bp, Homo sapiens
tttttttttggctcc

SEQ ID NO: 1027410 - DNA, 15 bp, Homo sapiens
ttttttttttggctc

SEQ ID NO: 1027411 - DNA, 15 bp, Homo sapiens
tttttttttttggct

SEQ ID NO: 1027412 - DNA, 15 bp, Homo sapiens
ttttttttttttggc

SEQ ID NO: 1027413 - DNA, 15 bp, Homo sapiens
cagcttttttttttt

SEQ ID NO: 1027414 - DNA, 15 bp, Homo sapiens
ccagctttttttttt

SEQ ID NO: 1027415 - DNA, 15 bp, Homo sapiens
tccagcttttttttt

SEQ ID NO: 1027416 - DNA, 15 bp, Homo sapiens
ttccagctttttttt

SEQ ID NO: 1027417 - DNA, 15 bp, Homo sapiens
attccagcttttttt

SEQ ID NO: 1027418 - DNA, 15 bp, Homo sapiens
aattccagctttttt

SEQ ID NO: 1027419 - DNA, 15 bp, Homo sapiens
aaattccagcttttt

SEQ ID NO: 1027420 - DNA, 15 bp, Homo sapiens
caaattccagctttt

SEQ ID NO: 1027421 - DNA, 15 bp, Homo sapiens
acaaattccagcttt

SEQ ID NO: 1027422 - DNA, 15 bp, Homo sapiens
aacaaattccagctt

SEQ ID NO: 1027423 - DNA, 15 bp, Homo sapiens
taacaaattccagct

SEQ ID NO: 1027424 - DNA, 15 bp, Homo sapiens
ctaacaaattccagc

SEQ ID NO: 1027425 - DNA, 15 bp, Homo sapiens
actaacaaattccag

SEQ ID NO: 1027426 - DNA, 15 bp, Homo sapiens
cactaacaaattcca

SEQ ID NO: 1027427 - DNA, 15 bp, Homo sapiens
ccactaacaaattcc

SEQ ID NO: 1027428 - DNA, 15 bp, Homo sapiens
cccactaacaaattc

SEQ ID NO: 1027429 - DNA, 15 bp, Homo sapiens
ccccactaacaaatt

SEQ ID NO: 1027430 - DNA, 15 bp, Homo sapiens
tccccactaacaaat

SEQ ID NO: 1027431 - DNA, 15 bp, Homo sapiens
ctccccactaacaaa

SEQ ID NO: 1027432 - DNA, 15 bp, Homo sapiens
tctccccactaacaa

SEQ ID NO: 1027433 - DNA, 15 bp, Homo sapiens
ttctccccactaaca

SEQ ID NO: 1027434 - DNA, 15 bp, Homo sapiens
tttctccccactaac

SEQ ID NO: 1027435 - DNA, 15 bp, Homo sapiens
ttttctccccactaa

SEQ ID NO: 1027436 - DNA, 15 bp, Homo sapiens
cttttctccccacta

SEQ ID NO: 1027437 - DNA, 15 bp, Homo sapiens
acttttctccccact

SEQ ID NO: 1027438 - DNA, 15 bp, Homo sapiens
cacttttctccccac

SEQ ID NO: 1027439 - DNA, 15 bp, Homo sapiens
gcacttttctcccca

SEQ ID NO: 1027440 - DNA, 15 bp, Homo sapiens
agcacttttctcccc

SEQ ID NO: 1027441 - DNA, 15 bp, Homo sapiens
aagcacttttctccc

SEQ ID NO: 1027442 - DNA, 15 bp, Homo sapiens
aaagcacttttctcc

SEQ ID NO: 1027443 - DNA, 15 bp, Homo sapiens
taaagcacttttctc

SEQ ID NO: 1027444 - DNA, 15 bp, Homo sapiens
ataaagcacttttct

SEQ ID NO: 1027445 - DNA, 15 bp, Homo sapiens
gataaagcacttttc

SEQ ID NO: 1027446 - DNA, 15 bp, Homo sapiens
tgataaagcactttt

SEQ ID NO: 1027447 - DNA, 15 bp, Homo sapiens
ctgataaagcacttt

SEQ ID NO: 1027448 - DNA, 15 bp, Homo sapiens
tctgataaagcactt

SEQ ID NO: 1027449 - DNA, 15 bp, Homo sapiens
ttctgataaagcact

SEQ ID NO: 1027450 - DNA, 15 bp, Homo sapiens
tttctgataaagcac

SEQ ID NO: 1027451 - DNA, 15 bp, Homo sapiens
gtttctgataaagca

SEQ ID NO: 1027452 - DNA, 15 bp, Homo sapiens
tgtttctgataaagc

SEQ ID NO: 1027453 - DNA, 15 bp, Homo sapiens
gtgtttctgataaag

SEQ ID NO: 1027454 - DNA, 15 bp, Homo sapiens
tgtgtttctgataaa

SEQ ID NO: 1027455 - DNA, 15 bp, Homo sapiens
atgtgtttctgataa

SEQ ID NO: 1027456 - DNA, 15 bp, Homo sapiens
aatgtgtttctgata

SEQ ID NO: 1027457 - DNA, 15 bp, Homo sapiens
caatgtgtttctgat

SEQ ID NO: 1027458 - DNA, 15 bp, Homo sapiens
ccaatgtgtttctga

SEQ ID NO: 1027459 - DNA, 15 bp, Homo sapiens
gccaatgtgtttctg

SEQ ID NO: 1027460 - DNA, 15 bp, Homo sapiens
agccaatgtgtttct

SEQ ID NO: 1027461 - DNA, 15 bp, Homo sapiens
cagccaatgtgtttc

SEQ ID NO: 1027462 - DNA, 15 bp, Homo sapiens
gcagccaatgtgttt

SEQ ID NO: 1027463 - DNA, 15 bp, Homo sapiens
ggcagccaatgtgtt

SEQ ID NO: 1027464 - DNA, 15 bp, Homo sapiens
tggcagccaatgtgt

SEQ ID NO: 1027465 - DNA, 15 bp, Homo sapiens
ctggcagccaatgtg

SEQ ID NO: 1027466 - DNA, 15 bp, Homo sapiens
tctggcagccaatgt

SEQ ID NO: 1027467 - DNA, 15 bp, Homo sapiens
ctctggcagccaatg

SEQ ID NO: 1027468 - DNA, 15 bp, Homo sapiens
tctctggcagccaat

SEQ ID NO: 1027469 - DNA, 15 bp, Homo sapiens
ttctctggcagccaa

SEQ ID NO: 1027470 - DNA, 15 bp, Homo sapiens
cttctctggcagcca

SEQ ID NO: 1027471 - DNA, 15 bp, Homo sapiens
gcttctctggcagcc

SEQ ID NO: 1027472 - DNA, 15 bp, Homo sapiens
agcttctctggcagc

SEQ ID NO: 1027473 - DNA, 15 bp, Homo sapiens
cagcttctctggcag

SEQ ID NO: 1027474 - DNA, 15 bp, Homo sapiens
acagcttctctggca

SEQ ID NO: 1027475 - DNA, 15 bp, Homo sapiens
cacagcttctctggc

SEQ ID NO: 1027476 - DNA, 15 bp, Homo sapiens
tcacagcttctctgg

SEQ ID NO: 1027477 - DNA, 15 bp, Homo sapiens
ctcacagcttctctg

SEQ ID NO: 1027478 - DNA, 15 bp, Homo sapiens
gctcacagcttctct

SEQ ID NO: 1027479 - DNA, 15 bp, Homo sapiens
ggctcacagcttctc

SEQ ID NO: 1027480 - DNA, 15 bp, Homo sapiens
cggctcacagcttct

SEQ ID NO: 1027481 - DNA, 15 bp, Homo sapiens
gcggctcacagcttc

SEQ ID NO: 1027482 - DNA, 15 bp, Homo sapiens
ggcggctcacagctt

SEQ ID NO: 1027483 - DNA, 15 bp, Homo sapiens
tggcggctcacagct

SEQ ID NO: 1027484 - DNA, 15 bp, Homo sapiens
gtggcggctcacagc

SEQ ID NO: 1027485 - DNA, 15 bp, Homo sapiens
cgtggcggctcacag

SEQ ID NO: 1027486 - DNA, 15 bp, Homo sapiens
acgtggcggctcaca

SEQ ID NO: 1027487 - DNA, 15 bp, Homo sapiens
aacgtggcggctcac

SEQ ID NO: 1027488 - DNA, 15 bp, Homo sapiens
taacgtggcggctca

SEQ ID NO: 1027489 - DNA, 15 bp, Homo sapiens
ttaacgtggcggctc

SEQ ID NO: 1027490 - DNA, 15 bp, Homo sapiens
tttaacgtggcggct

SEQ ID NO: 1027491 - DNA, 15 bp, Homo sapiens
ctttaacgtggcggc

SEQ ID NO: 1027492 - DNA, 15 bp, Homo sapiens
tctttaacgtggcgg

SEQ ID NO: 1027493 - DNA, 15 bp, Homo sapiens
atctttaacgtggcg

SEQ ID NO: 1027494 - DNA, 15 bp, Homo sapiens
catctttaacgtggc

SEQ ID NO: 1027495 - DNA, 15 bp, Homo sapiens
ccatctttaacgtgg

SEQ ID NO: 1027496 - DNA, 15 bp, Homo sapiens
accatctttaacgtg

SEQ ID NO: 1027497 - DNA, 15 bp, Homo sapiens
aaccatctttaacgt

SEQ ID NO: 1027498 - DNA, 15 bp, Homo sapiens
taaccatctttaacg

SEQ ID NO: 1027499 - DNA, 15 bp, Homo sapiens
ttaaccatctttaac

SEQ ID NO: 1027500 - DNA, 15 bp, Homo sapiens
cttaaccatctttaa

SEQ ID NO: 1027501 - DNA, 15 bp, Homo sapiens
tcttaaccatcttta

SEQ ID NO: 1027502 - DNA, 15 bp, Homo sapiens
ctcttaaccatcttt

SEQ ID NO: 1027503 - DNA, 15 bp, Homo sapiens
tctcttaaccatctt

SEQ ID NO: 1027504 - DNA, 15 bp, Homo sapiens
ttctcttaaccatct

SEQ ID NO: 1027505 - DNA, 15 bp, Homo sapiens
cttctcttaaccatc

SEQ ID NO: 1027506 - DNA, 15 bp, Homo sapiens
ccttctcttaaccat

SEQ ID NO: 1027507 - DNA, 15 bp, Homo sapiens
tccttctcttaacca

SEQ ID NO: 1027508 - DNA, 15 bp, Homo sapiens
ttccttctcttaacc

SEQ ID NO: 1027509 - DNA, 15 bp, Homo sapiens
cttccttctcttaac

SEQ ID NO: 1027510 - DNA, 15 bp, Homo sapiens
ccttccttctcttaa

SEQ ID NO: 1027511 - DNA, 15 bp, Homo sapiens
tccttccttctctta

SEQ ID NO: 1027512 - DNA, 15 bp, Homo sapiens
ttccttccttctctt

SEQ ID NO: 1027513 - DNA, 15 bp, Homo sapiens
tttccttccttctct

SEQ ID NO: 1027514 - DNA, 15 bp, Homo sapiens
ctttccttccttctc

SEQ ID NO: 1027515 - DNA, 15 bp, Homo sapiens
cctttccttccttct

SEQ ID NO: 1027516 - DNA, 15 bp, Homo sapiens
tcctttccttccttc

SEQ ID NO: 1027517 - DNA, 15 bp, Homo sapiens
ttcctttccttcctt

SEQ ID NO: 1027518 - DNA, 15 bp, Homo sapiens
cttcctttccttcct

SEQ ID NO: 1027519 - DNA, 15 bp, Homo sapiens
tcttcctttccttcc

SEQ ID NO: 1027520 - DNA, 15 bp, Homo sapiens
ctcttcctttccttc

SEQ ID NO: 1027521 - DNA, 15 bp, Homo sapiens
cctcttcctttcctt

SEQ ID NO: 1027522 - DNA, 15 bp, Homo sapiens
tcctcttcctttcct

SEQ ID NO: 1027523 - DNA, 15 bp, Homo sapiens
ctcctcttcctttcc

SEQ ID NO: 1027524 - DNA, 15 bp, Homo sapiens
tctcctcttcctttc

SEQ ID NO: 1027525 - DNA, 15 bp, Homo sapiens
ctctcctcttccttt

SEQ ID NO: 1027526 - DNA, 15 bp, Homo sapiens
tctctcctcttcctt

SEQ ID NO: 1027527 - DNA, 15 bp, Homo sapiens
atctctcctcttcct

SEQ ID NO: 1027528 - DNA, 15 bp, Homo sapiens
tatctctcctcttcc

SEQ ID NO: 1027529 - DNA, 15 bp, Homo sapiens
gtatctctcctcttc

SEQ ID NO: 1027530 - DNA, 15 bp, Homo sapiens
cgtatctctcctctt

SEQ ID NO: 1027531 - DNA, 15 bp, Homo sapiens
ccgtatctctcctct

SEQ ID NO: 1027532 - DNA, 15 bp, Homo sapiens
gccgtatctctcctc

SEQ ID NO: 1027533 - DNA, 15 bp, Homo sapiens
ggccgtatctctcct

SEQ ID NO: 1027534 - DNA, 15 bp, Homo sapiens
cggccgtatctctcc

SEQ ID NO: 1027535 - DNA, 15 bp, Homo sapiens
gcggccgtatctctc

SEQ ID NO: 1027536 - DNA, 15 bp, Homo sapiens
ggcggccgtatctct

SEQ ID NO: 1027537 - DNA, 15 bp, Homo sapiens
tggcggccgtatctc

SEQ ID NO: 1027538 - DNA, 15 bp, Homo sapiens
ctggcggccgtatct

SEQ ID NO: 1027539 - DNA, 15 bp, Homo sapiens
tctggcggccgtatc

SEQ ID NO: 1027540 - DNA, 15 bp, Homo sapiens
gtctggcggccgtat

SEQ ID NO: 1027541 - DNA, 15 bp, Homo sapiens
agtctggcggccgta

SEQ ID NO: 1027542 - DNA, 15 bp, Homo sapiens
cagtctggcggccgt

SEQ ID NO: 1027543 - DNA, 15 bp, Homo sapiens
ccagtctggcggccg

SEQ ID NO: 1027544 - DNA, 15 bp, Homo sapiens
cccagtctggcggcc

SEQ ID NO: 1027545 - DNA, 15 bp, Homo sapiens
gcccagtctggcggc

SEQ ID NO: 1027546 - DNA, 15 bp, Homo sapiens
agcccagtctggcgg

SEQ ID NO: 1027547 - DNA, 15 bp, Homo sapiens
tagcccagtctggcg

SEQ ID NO: 1027548 - DNA, 15 bp, Homo sapiens
ttagcccagtctggc

SEQ ID NO: 1027549 - DNA, 15 bp, Homo sapiens
cttagcccagtctgg

SEQ ID NO: 1027550 - DNA, 15 bp, Homo sapiens
acttagcccagtctg

SEQ ID NO: 1027551 - DNA, 15 bp, Homo sapiens
gacttagcccagtct

SEQ ID NO: 1027552 - DNA, 15 bp, Homo sapiens
tgacttagcccagtc

SEQ ID NO: 1027553 - DNA, 15 bp, Homo sapiens
ctgacttagcccagt

SEQ ID NO: 1027554 - DNA, 15 bp, Homo sapiens
cctgacttagcccag

SEQ ID NO: 1027555 - DNA, 15 bp, Homo sapiens
ccctgacttagccca

SEQ ID NO: 1027556 - DNA, 15 bp, Homo sapiens
tccctgacttagccc

SEQ ID NO: 1027557 - DNA, 15 bp, Homo sapiens
ctccctgacttagcc

SEQ ID NO: 1027558 - DNA, 15 bp, Homo sapiens
tctccctgacttagc

SEQ ID NO: 1027559 - DNA, 15 bp, Homo sapiens
ctctccctgacttag

SEQ ID NO: 1027560 - DNA, 15 bp, Homo sapiens
tctctccctgactta

SEQ ID NO: 1027561 - DNA, 15 bp, Homo sapiens
gtctctccctgactt

SEQ ID NO: 1027562 - DNA, 15 bp, Homo sapiens
ggtctctccctgact

SEQ ID NO: 1027563 - DNA, 15 bp, Homo sapiens
gggtctctccctgac

SEQ ID NO: 1027564 - DNA, 15 bp, Homo sapiens
tgggtctctccctga

SEQ ID NO: 1027565 - DNA, 15 bp, Homo sapiens
gtgggtctctccctg

SEQ ID NO: 1027566 - DNA, 15 bp, Homo sapiens
agtgggtctctccct

SEQ ID NO: 1027567 - DNA, 15 bp, Homo sapiens
gagtgggtctctccc

SEQ ID NO: 1027568 - DNA, 15 bp, Homo sapiens
tgagtgggtctctcc

SEQ ID NO: 1027569 - DNA, 15 bp, Homo sapiens
gtgagtgggtctctc

SEQ ID NO: 1027570 - DNA, 15 bp, Homo sapiens
cgtgagtgggtctct

SEQ ID NO: 1027571 - DNA, 15 bp, Homo sapiens
gcgtgagtgggtctc

SEQ ID NO: 1027572 - DNA, 15 bp, Homo sapiens
tgcgtgagtgggtct

SEQ ID NO: 1027573 - DNA, 15 bp, Homo sapiens
ctgcgtgagtgggtc

SEQ ID NO: 1027574 - DNA, 15 bp, Homo sapiens
tctgcgtgagtgggt

SEQ ID NO: 1027575 - DNA, 15 bp, Homo sapiens
ctctgcgtgagtggg

SEQ ID NO: 1027576 - DNA, 15 bp, Homo sapiens
cctctgcgtgagtgg

SEQ ID NO: 1027577 - DNA, 15 bp, Homo sapiens
gcctctgcgtgagtg

SEQ ID NO: 1027578 - DNA, 15 bp, Homo sapiens
tgcctctgcgtgagt

SEQ ID NO: 1027579 - DNA, 15 bp, Homo sapiens
gtgcctctgcgtgag

SEQ ID NO: 1027580 - DNA, 15 bp, Homo sapiens
ggtgcctctgcgtga

SEQ ID NO: 1027581 - DNA, 15 bp, Homo sapiens
aggtgcctctgcgtg

SEQ ID NO: 1027582 - DNA, 15 bp, Homo sapiens
caggtgcctctgcgt

SEQ ID NO: 1027583 - DNA, 15 bp, Homo sapiens
ccaggtgcctctgcg

SEQ ID NO: 1027584 - DNA, 15 bp, Homo sapiens
gccaggtgcctctgc

SEQ ID NO: 1027585 - DNA, 15 bp, Homo sapiens
tgccaggtgcctctg

SEQ ID NO: 1027586 - DNA, 15 bp, Homo sapiens
ttgccaggtgcctct

SEQ ID NO: 1027587 - DNA, 15 bp, Homo sapiens
gttgccaggtgcctc

SEQ ID NO: 1027588 - DNA, 15 bp, Homo sapiens
ggttgccaggtgcct

SEQ ID NO: 1027589 - DNA, 15 bp, Homo sapiens
aggttgccaggtgcc

SEQ ID NO: 1027590 - DNA, 15 bp, Homo sapiens
taggttgccaggtgc

SEQ ID NO: 1027591 - DNA, 15 bp, Homo sapiens
ctaggttgccaggtg

SEQ ID NO: 1027592 - DNA, 15 bp, Homo sapiens
cctaggttgccaggt

SEQ ID NO: 1027593 - DNA, 15 bp, Homo sapiens
ccctaggttgccagg

SEQ ID NO: 1027594 - DNA, 15 bp, Homo sapiens
accctaggttgccag

SEQ ID NO: 1027595 - DNA, 15 bp, Homo sapiens
caccctaggttgcca

SEQ ID NO: 1027596 - DNA, 15 bp, Homo sapiens
ccaccctaggttgcc

SEQ ID NO: 1027597 - DNA, 15 bp, Homo sapiens
gccaccctaggttgc

SEQ ID NO: 1027598 - DNA, 15 bp, Homo sapiens
agccaccctaggttg

SEQ ID NO: 1027599 - DNA, 15 bp, Homo sapiens
aagccaccctaggtt

SEQ ID NO: 1027600 - DNA, 15 bp, Homo sapiens
aaagccaccctaggt

SEQ ID NO: 1027601 - DNA, 15 bp, Homo sapiens
aaaagccaccctagg

SEQ ID NO: 1027602 - DNA, 15 bp, Homo sapiens
caaaagccaccctag

SEQ ID NO: 1027603 - DNA, 15 bp, Homo sapiens
gcaaaagccacccta

SEQ ID NO: 1027604 - DNA, 15 bp, Homo sapiens
cgcaaaagccaccct

SEQ ID NO: 1027605 - DNA, 15 bp, Homo sapiens
gcgcaaaagccaccc

SEQ ID NO: 1027606 - DNA, 15 bp, Homo sapiens
ggcgcaaaagccacc

SEQ ID NO: 1027607 - DNA, 15 bp, Homo sapiens
aggcgcaaaagccac

SEQ ID NO: 1027608 - DNA, 15 bp, Homo sapiens
aaggcgcaaaagcca

SEQ ID NO: 1027609 - DNA, 15 bp, Homo sapiens
gaaggcgcaaaagcc

SEQ ID NO: 1027610 - DNA, 15 bp, Homo sapiens
ggaaggcgcaaaagc

SEQ ID NO: 1027611 - DNA, 15 bp, Homo sapiens
tggaaggcgcaaaag

SEQ ID NO: 1027612 - DNA, 15 bp, Homo sapiens
ctggaaggcgcaaaa

SEQ ID NO: 1027613 - DNA, 15 bp, Homo sapiens
gctggaaggcgcaaa

SEQ ID NO: 1027614 - DNA, 15 bp, Homo sapiens
ggctggaaggcgcaa

SEQ ID NO: 1027615 - DNA, 15 bp, Homo sapiens
gggctggaaggcgca

SEQ ID NO: 1027616 - DNA, 15 bp, Homo sapiens
tgggctggaaggcgc

SEQ ID NO: 1027617 - DNA, 15 bp, Homo sapiens
ttgggctggaaggcg

SEQ ID NO: 1027618 - DNA, 15 bp, Homo sapiens
tttgggctggaaggc

SEQ ID NO: 1027619 - DNA, 15 bp, Homo sapiens
atttgggctggaagg

SEQ ID NO: 1027620 - DNA, 15 bp, Homo sapiens
aatttgggctggaag

SEQ ID NO: 1027621 - DNA, 15 bp, Homo sapiens
taatttgggctggaa

SEQ ID NO: 1027622 - DNA, 15 bp, Homo sapiens
ataatttgggctgga

SEQ ID NO: 1027623 - DNA, 15 bp, Homo sapiens
gataatttgggctgg

SEQ ID NO: 1027624 - DNA, 15 bp, Homo sapiens
tgataatttgggctg

SEQ ID NO: 1027625 - DNA, 15 bp, Homo sapiens
ctgataatttgggct

SEQ ID NO: 1027626 - DNA, 15 bp, Homo sapiens
tctgataatttgggc

SEQ ID NO: 1027627 - DNA, 15 bp, Homo sapiens
gtctgataatttggg

SEQ ID NO: 1027628 - DNA, 15 bp, Homo sapiens
ggtctgataatttgg

SEQ ID NO: 1027629 - DNA, 15 bp, Homo sapiens
aggtctgataatttg

SEQ ID NO: 1027630 - DNA, 15 bp, Homo sapiens
taggtctgataattt

SEQ ID NO: 1027631 - DNA, 15 bp, Homo sapiens
ttaggtctgataatt

SEQ ID NO: 1027632 - DNA, 15 bp, Homo sapiens
cttaggtctgataat

SEQ ID NO: 1027633 - DNA, 15 bp, Homo sapiens
acttaggtctgataa

SEQ ID NO: 1027634 - DNA, 15 bp, Homo sapiens
tacttaggtctgata

SEQ ID NO: 1027635 - DNA, 15 bp, Homo sapiens
ttacttaggtctgat

SEQ ID NO: 1027636 - DNA, 15 bp, Homo sapiens
cttacttaggtctga

SEQ ID NO: 1027637 - DNA, 15 bp, Homo sapiens
tcttacttaggtctg

SEQ ID NO: 1027638 - DNA, 15 bp, Homo sapiens
gtcttacttaggtct

SEQ ID NO: 1027639 - DNA, 15 bp, Homo sapiens
agtcttacttaggtc

SEQ ID NO: 1027640 - DNA, 15 bp, Homo sapiens
gagtcttacttaggt

SEQ ID NO: 1027641 - DNA, 15 bp, Homo sapiens
agagtcttacttagg

SEQ ID NO: 1027642 - DNA, 15 bp, Homo sapiens
gagagtcttacttag

SEQ ID NO: 1027643 - DNA, 15 bp, Homo sapiens
ggagagtcttactta

SEQ ID NO: 1027644 - DNA, 15 bp, Homo sapiens
aggagagtcttactt

SEQ ID NO: 1027645 - DNA, 15 bp, Homo sapiens
caggagagtcttact

SEQ ID NO: 1027646 - DNA, 15 bp, Homo sapiens
gcaggagagtcttac

SEQ ID NO: 1027647 - DNA, 15 bp, Homo sapiens
ggcaggagagtctta

SEQ ID NO: 1027648 - DNA, 15 bp, Homo sapiens
tggcaggagagtctt

SEQ ID NO: 1027649 - DNA, 15 bp, Homo sapiens
gtggcaggagagtct

SEQ ID NO: 1027650 - DNA, 15 bp, Homo sapiens
agtggcaggagagtc

SEQ ID NO: 1027651 - DNA, 15 bp, Homo sapiens
tagtggcaggagagt

SEQ ID NO: 1027652 - DNA, 15 bp, Homo sapiens
ttagtggcaggagag

SEQ ID NO: 1027653 - DNA, 15 bp, Homo sapiens
tttagtggcaggaga

SEQ ID NO: 1027654 - DNA, 15 bp, Homo sapiens
ttttagtggcaggag

SEQ ID NO: 1027655 - DNA, 15 bp, Homo sapiens
tttttagtggcagga

SEQ ID NO: 1027656 - DNA, 15 bp, Homo sapiens
atttttagtggcagg

SEQ ID NO: 1027657 - DNA, 15 bp, Homo sapiens
catttttagtggcag

SEQ ID NO: 1027658 - DNA, 15 bp, Homo sapiens
tcatttttagtggca

SEQ ID NO: 1027659 - DNA, 15 bp, Homo sapiens
ctcatttttagtggc

SEQ ID NO: 1027660 - DNA, 15 bp, Homo sapiens
cctcatttttagtgg

SEQ ID NO: 1027661 - DNA, 15 bp, Homo sapiens
tcctcatttttagtg

SEQ ID NO: 1027662 - DNA, 15 bp, Homo sapiens
gtcctcatttttagt

SEQ ID NO: 1027663 - DNA, 15 bp, Homo sapiens
ggtcctcatttttag

SEQ ID NO: 1027664 - DNA, 15 bp, Homo sapiens
aggtcctcattttta

SEQ ID NO: 1027665 - DNA, 15 bp, Homo sapiens
caggtcctcattttt

SEQ ID NO: 1027666 - DNA, 15 bp, Homo sapiens
tcaggtcctcatttt

SEQ ID NO: 1027667 - DNA, 15 bp, Homo sapiens
gtcaggtcctcattt

SEQ ID NO: 1027668 - DNA, 15 bp, Homo sapiens
tgtcaggtcctcatt

SEQ ID NO: 1027669 - DNA, 15 bp, Homo sapiens
ctgtcaggtcctcat

SEQ ID NO: 1027670 - DNA, 15 bp, Homo sapiens
actgtcaggtcctca

SEQ ID NO: 1027671 - DNA, 15 bp, Homo sapiens
gactgtcaggtcctc

SEQ ID NO: 1027672 - DNA, 15 bp, Homo sapiens
tgactgtcaggtcct

SEQ ID NO: 1027673 - DNA, 15 bp, Homo sapiens
atgactgtcaggtcc

SEQ ID NO: 1027674 - DNA, 15 bp, Homo sapiens
aatgactgtcaggtc

SEQ ID NO: 1027675 - DNA, 15 bp, Homo sapiens
caatgactgtcaggt

SEQ ID NO: 1027676 - DNA, 15 bp, Homo sapiens
acaatgactgtcagg

SEQ ID NO: 1027677 - DNA, 15 bp, Homo sapiens
tacaatgactgtcag

SEQ ID NO: 1027678 - DNA, 15 bp, Homo sapiens
ctacaatgactgtca

SEQ ID NO: 1027679 - DNA, 15 bp, Homo sapiens
gctacaatgactgtc

SEQ ID NO: 1027680 - DNA, 15 bp, Homo sapiens
tgctacaatgactgt

SEQ ID NO: 1027681 - DNA, 15 bp, Homo sapiens
ctgctacaatgactg

SEQ ID NO: 1027682 - DNA, 15 bp, Homo sapiens
actgctacaatgact

SEQ ID NO: 1027683 - DNA, 15 bp, Homo sapiens
gactgctacaatgac

SEQ ID NO: 1027684 - DNA, 15 bp, Homo sapiens
agactgctacaatga

SEQ ID NO: 1027685 - DNA, 15 bp, Homo sapiens
gagactgctacaatg

SEQ ID NO: 1027686 - DNA, 15 bp, Homo sapiens
agagactgctacaat

SEQ ID NO: 1027687 - DNA, 15 bp, Homo sapiens
aagagactgctacaa

SEQ ID NO: 1027688 - DNA, 15 bp, Homo sapiens
gaagagactgctaca

SEQ ID NO: 1027689 - DNA, 15 bp, Homo sapiens
ggaagagactgctac

SEQ ID NO: 1027690 - DNA, 15 bp, Homo sapiens
gggaagagactgcta

SEQ ID NO: 1027691 - DNA, 15 bp, Homo sapiens
tgggaagagactgct

SEQ ID NO: 1027692 - DNA, 15 bp, Homo sapiens
ttgggaagagactgc

SEQ ID NO: 1027693 - DNA, 15 bp, Homo sapiens
tttgggaagagactg

SEQ ID NO: 1027694 - DNA, 15 bp, Homo sapiens
ttttgggaagagact

SEQ ID NO: 1027695 - DNA, 15 bp, Homo sapiens
tttttgggaagagac

SEQ ID NO: 1027696 - DNA, 15 bp, Homo sapiens
gtttttgggaagaga

SEQ ID NO: 1027697 - DNA, 15 bp, Homo sapiens
ggtttttgggaagag

SEQ ID NO: 1027698 - DNA, 15 bp, Homo sapiens
aggtttttgggaaga

SEQ ID NO: 1027699 - DNA, 15 bp, Homo sapiens
taggtttttgggaag

SEQ ID NO: 1027700 - DNA, 15 bp, Homo sapiens
ataggtttttgggaa

SEQ ID NO: 1027701 - DNA, 15 bp, Homo sapiens
aataggtttttggga

SEQ ID NO: 1027702 - DNA, 15 bp, Homo sapiens
aaataggtttttggg

SEQ ID NO: 1027703 - DNA, 15 bp, Homo sapiens
aaaataggtttttgg

SEQ ID NO: 1027704 - DNA, 15 bp, Homo sapiens
gaaaataggtttttg

SEQ ID NO: 1027705 - DNA, 15 bp, Homo sapiens
agaaaataggttttt

SEQ ID NO: 1027706 - DNA, 15 bp, Homo sapiens
tagaaaataggtttt

SEQ ID NO: 1027707 - DNA, 15 bp, Homo sapiens
ttagaaaataggttt

SEQ ID NO: 1027708 - DNA, 15 bp, Homo sapiens
cttagaaaataggtt

SEQ ID NO: 1027709 - DNA, 15 bp, Homo sapiens
ccttagaaaataggt

SEQ ID NO: 1027710 - DNA, 15 bp, Homo sapiens
cccttagaaaatagg

SEQ ID NO: 1027711 - DNA, 15 bp, Homo sapiens
ccccttagaaaatag

SEQ ID NO: 1027712 - DNA, 15 bp, Homo sapiens
gccccttagaaaata

SEQ ID NO: 1027713 - DNA, 15 bp, Homo sapiens
ggccccttagaaaat

SEQ ID NO: 1027714 - DNA, 15 bp, Homo sapiens
aggccccttagaaaa

SEQ ID NO: 1027715 - DNA, 15 bp, Homo sapiens
gaggccccttagaaa

SEQ ID NO: 1027716 - DNA, 15 bp, Homo sapiens
ggaggccccttagaa

SEQ ID NO: 1027717 - DNA, 15 bp, Homo sapiens
tggaggccccttaga

SEQ ID NO: 1027718 - DNA, 15 bp, Homo sapiens
gtggaggccccttag

SEQ ID NO: 1027719 - DNA, 15 bp, Homo sapiens
tgtggaggcccctta

SEQ ID NO: 1027720 - DNA, 15 bp, Homo sapiens
ctgtggaggcccctt

SEQ ID NO: 1027721 - DNA, 15 bp, Homo sapiens
tctgtggaggcccct

SEQ ID NO: 1027722 - DNA, 15 bp, Homo sapiens
gtctgtggaggcccc

SEQ ID NO: 1027723 - DNA, 15 bp, Homo sapiens
ggtctgtggaggccc

SEQ ID NO: 1027724 - DNA, 15 bp, Homo sapiens
aggtctgtggaggcc

SEQ ID NO: 1027725 - DNA, 15 bp, Homo sapiens
gaggtctgtggaggc

SEQ ID NO: 1027726 - DNA, 15 bp, Homo sapiens
ggaggtctgtggagg

SEQ ID NO: 1027727 - DNA, 15 bp, Homo sapiens
gggaggtctgtggag

SEQ ID NO: 1027728 - DNA, 15 bp, Homo sapiens
agggaggtctgtgga

SEQ ID NO: 1027729 - DNA, 15 bp, Homo sapiens
tagggaggtctgtgg

SEQ ID NO: 1027730 - DNA, 15 bp, Homo sapiens
ttagggaggtctgtg

SEQ ID NO: 1027731 - DNA, 15 bp, Homo sapiens
gttagggaggtctgt

SEQ ID NO: 1027732 - DNA, 15 bp, Homo sapiens
ggttagggaggtctg

SEQ ID NO: 1027733 - DNA, 15 bp, Homo sapiens
aggttagggaggtct

SEQ ID NO: 1027734 - DNA, 15 bp, Homo sapiens
aaggttagggaggtc

SEQ ID NO: 1027735 - DNA, 15 bp, Homo sapiens
caaggttagggaggt

SEQ ID NO: 1027736 - DNA, 15 bp, Homo sapiens
gcaaggttagggagg

SEQ ID NO: 1027737 - DNA, 15 bp, Homo sapiens
cgcaaggttagggag

SEQ ID NO: 1027738 - DNA, 15 bp, Homo sapiens
acgcaaggttaggga

SEQ ID NO: 1027739 - DNA, 15 bp, Homo sapiens
aacgcaaggttaggg

SEQ ID NO: 1027740 - DNA, 15 bp, Homo sapiens
taacgcaaggttagg

SEQ ID NO: 1027741 - DNA, 15 bp, Homo sapiens
ctaacgcaaggttag

SEQ ID NO: 1027742 - DNA, 15 bp, Homo sapiens
actaacgcaaggtta

SEQ ID NO: 1027743 - DNA, 15 bp, Homo sapiens
gactaacgcaaggtt

SEQ ID NO: 1027744 - DNA, 15 bp, Homo sapiens
agactaacgcaaggt

SEQ ID NO: 1027745 - DNA, 15 bp, Homo sapiens
aagactaacgcaagg

SEQ ID NO: 1027746 - DNA, 15 bp, Homo sapiens
gaagactaacgcaag

SEQ ID NO: 1027747 - DNA, 15 bp, Homo sapiens
ggaagactaacgcaa

SEQ ID NO: 1027748 - DNA, 15 bp, Homo sapiens
aggaagactaacgca

SEQ ID NO: 1027749 - DNA, 15 bp, Homo sapiens
gaggaagactaacgc

SEQ ID NO: 1027750 - DNA, 15 bp, Homo sapiens
ggaggaagactaacg

SEQ ID NO: 1027751 - DNA, 15 bp, Homo sapiens
cggaggaagactaac

SEQ ID NO: 1027752 - DNA, 15 bp, Homo sapiens
acggaggaagactaa

SEQ ID NO: 1027753 - DNA, 15 bp, Homo sapiens
gacggaggaagacta

SEQ ID NO: 1027754 - DNA, 15 bp, Homo sapiens
ggacggaggaagact

SEQ ID NO: 1027755 - DNA, 15 bp, Homo sapiens
gggacggaggaagac

SEQ ID NO: 1027756 - DNA, 15 bp, Homo sapiens
ggggacggaggaaga

SEQ ID NO: 1027757 - DNA, 15 bp, Homo sapiens
cggggacggaggaag

SEQ ID NO: 1027758 - DNA, 15 bp, Homo sapiens
ccggggacggaggaa

SEQ ID NO: 1027759 - DNA, 15 bp, Homo sapiens
cccggggacggagga

SEQ ID NO: 1027760 - DNA, 15 bp, Homo sapiens
gcccggggacggagg

SEQ ID NO: 1027761 - DNA, 15 bp, Homo sapiens
ggcccggggacggag

SEQ ID NO: 1027762 - DNA, 15 bp, Homo sapiens
tggcccggggacgga

SEQ ID NO: 1027763 - DNA, 15 bp, Homo sapiens
gtggcccggggacgg

SEQ ID NO: 1027764 - DNA, 15 bp, Homo sapiens
ggtggcccggggacg

SEQ ID NO: 1027765 - DNA, 15 bp, Homo sapiens
tggtggcccggggac

SEQ ID NO: 1027766 - DNA, 15 bp, Homo sapiens
ctggtggcccgggga

SEQ ID NO: 1027767 - DNA, 15 bp, Homo sapiens
gctggtggcccgggg

SEQ ID NO: 1027768 - DNA, 15 bp, Homo sapiens
tgctggtggcccggg

SEQ ID NO: 1027769 - DNA, 15 bp, Homo sapiens
ctgctggtggcccgg

SEQ ID NO: 1027770 - DNA, 15 bp, Homo sapiens
cctgctggtggcccg

SEQ ID NO: 1027771 - DNA, 15 bp, Homo sapiens
ccctgctggtggccc

SEQ ID NO: 1027772 - DNA, 15 bp, Homo sapiens
tccctgctggtggcc

SEQ ID NO: 1027773 - DNA, 15 bp, Homo sapiens
ttccctgctggtggc

SEQ ID NO: 1027774 - DNA, 15 bp, Homo sapiens
cttccctgctggtgg

SEQ ID NO: 1027775 - DNA, 15 bp, Homo sapiens
tcttccctgctggtg

SEQ ID NO: 1027776 - DNA, 15 bp, Homo sapiens
ctcttccctgctggt

SEQ ID NO: 1027777 - DNA, 15 bp, Homo sapiens
gctcttccctgctgg

SEQ ID NO: 1027778 - DNA, 15 bp, Homo sapiens
tgctcttccctgctg

SEQ ID NO: 1027779 - DNA, 15 bp, Homo sapiens
ctgctcttccctgct

SEQ ID NO: 1027780 - DNA, 15 bp, Homo sapiens
gctgctcttccctgc

SEQ ID NO: 1027781 - DNA, 15 bp, Homo sapiens
cgctgctcttccctg

SEQ ID NO: 1027782 - DNA, 15 bp, Homo sapiens
gcgctgctcttccct

SEQ ID NO: 1027783 - DNA, 15 bp, Homo sapiens
tgcgctgctcttccc

SEQ ID NO: 1027784 - DNA, 15 bp, Homo sapiens
ctgcgctgctcttcc

SEQ ID NO: 1027785 - DNA, 15 bp, Homo sapiens
gctgcgctgctcttc

SEQ ID NO: 1027786 - DNA, 15 bp, Homo sapiens
agctgcgctgctctt

SEQ ID NO: 1027787 - DNA, 15 bp, Homo sapiens
cagctgcgctgctct

SEQ ID NO: 1027788 - DNA, 15 bp, Homo sapiens
ccagctgcgctgctc

SEQ ID NO: 1027789 - DNA, 15 bp, Homo sapiens
tccagctgcgctgct

SEQ ID NO: 1027790 - DNA, 15 bp, Homo sapiens
atccagctgcgctgc

SEQ ID NO: 1027791 - DNA, 15 bp, Homo sapiens
catccagctgcgctg

SEQ ID NO: 1027792 - DNA, 15 bp, Homo sapiens
gcatccagctgcgct

SEQ ID NO: 1027793 - DNA, 15 bp, Homo sapiens
agcatccagctgcgc

SEQ ID NO: 1027794 - DNA, 15 bp, Homo sapiens
cagcatccagctgcg

SEQ ID NO: 1027795 - DNA, 15 bp, Homo sapiens
ccagcatccagctgc

SEQ ID NO: 1027796 - DNA, 15 bp, Homo sapiens
gccagcatccagctg

SEQ ID NO: 1027797 - DNA, 15 bp, Homo sapiens
tgccagcatccagct

SEQ ID NO: 1027798 - DNA, 15 bp, Homo sapiens
ctgccagcatccagc

SEQ ID NO: 1027799 - DNA, 15 bp, Homo sapiens
tctgccagcatccag

SEQ ID NO: 1027800 - DNA, 15 bp, Homo sapiens
ctctgccagcatcca

SEQ ID NO: 1027801 - DNA, 15 bp, Homo sapiens
tctctgccagcatcc

SEQ ID NO: 1027802 - DNA, 15 bp, Homo sapiens
ttctctgccagcatc

SEQ ID NO: 1027803 - DNA, 15 bp, Homo sapiens
tttctctgccagcat

SEQ ID NO: 1027804 - DNA, 15 bp, Homo sapiens
ctttctctgccagca

SEQ ID NO: 1027805 - DNA, 15 bp, Homo sapiens
cctttctctgccagc

SEQ ID NO: 1027806 - DNA, 15 bp, Homo sapiens
ccctttctctgccag

SEQ ID NO: 1027807 - DNA, 15 bp, Homo sapiens
accctttctctgcca

SEQ ID NO: 1027808 - DNA, 15 bp, Homo sapiens
caccctttctctgcc

SEQ ID NO: 1027809 - DNA, 15 bp, Homo sapiens
ccaccctttctctgc

SEQ ID NO: 1027810 - DNA, 15 bp, Homo sapiens
accaccctttctctg

SEQ ID NO: 1027811 - DNA, 15 bp, Homo sapiens
caccaccctttctct

SEQ ID NO: 1027812 - DNA, 15 bp, Homo sapiens
tcaccaccctttctc

SEQ ID NO: 1027813 - DNA, 15 bp, Homo sapiens
ctcaccaccctttct

SEQ ID NO: 1027814 - DNA, 15 bp, Homo sapiens
cctcaccaccctttc

SEQ ID NO: 1027815 - DNA, 15 bp, Homo sapiens
tcctcaccacccttt

SEQ ID NO: 1027816 - DNA, 15 bp, Homo sapiens
ttcctcaccaccctt

SEQ ID NO: 1027817 - DNA, 15 bp, Homo sapiens
cttcctcaccaccct

SEQ ID NO: 1027818 - DNA, 15 bp, Homo sapiens
acttcctcaccaccc

SEQ ID NO: 1027819 - DNA, 15 bp, Homo sapiens
gacttcctcaccacc

SEQ ID NO: 1027820 - DNA, 15 bp, Homo sapiens
tgacttcctcaccac

SEQ ID NO: 1027821 - DNA, 15 bp, Homo sapiens
ttgacttcctcacca

SEQ ID NO: 1027822 - DNA, 15 bp, Homo sapiens
cttgacttcctcacc

SEQ ID NO: 1027823 - DNA, 15 bp, Homo sapiens
gcttgacttcctcac

SEQ ID NO: 1027824 - DNA, 15 bp, Homo sapiens
tgcttgacttcctca

SEQ ID NO: 1027825 - DNA, 15 bp, Homo sapiens
ctgcttgacttcctc

SEQ ID NO: 1027826 - DNA, 15 bp, Homo sapiens
cctgcttgacttcct

SEQ ID NO: 1027827 - DNA, 15 bp, Homo sapiens
acctgcttgacttcc

SEQ ID NO: 1027828 - DNA, 15 bp, Homo sapiens
gacctgcttgacttc

SEQ ID NO: 1027829 - DNA, 15 bp, Homo sapiens
agacctgcttgactt

SEQ ID NO: 1027830 - DNA, 15 bp, Homo sapiens
cagacctgcttgact

SEQ ID NO: 1027831 - DNA, 15 bp, Homo sapiens
acagacctgcttgac

SEQ ID NO: 1027832 - DNA, 15 bp, Homo sapiens
cacagacctgcttga

SEQ ID NO: 1027833 - DNA, 15 bp, Homo sapiens
gcacagacctgcttg

SEQ ID NO: 1027834 - DNA, 15 bp, Homo sapiens
tgcacagacctgctt

SEQ ID NO: 1027835 - DNA, 15 bp, Homo sapiens
gtgcacagacctgct

SEQ ID NO: 1027836 - DNA, 15 bp, Homo sapiens
agtgcacagacctgc

SEQ ID NO: 1027837 - DNA, 15 bp, Homo sapiens
cagtgcacagacctg

SEQ ID NO: 1027838 - DNA, 15 bp, Homo sapiens
tcagtgcacagacct

SEQ ID NO: 1027839 - DNA, 15 bp, Homo sapiens
ctcagtgcacagacc

SEQ ID NO: 1027840 - DNA, 15 bp, Homo sapiens
cctcagtgcacagac

SEQ ID NO: 1027841 - DNA, 15 bp, Homo sapiens
ccctcagtgcacaga

SEQ ID NO: 1027842 - DNA, 15 bp, Homo sapiens
cccctcagtgcacag

SEQ ID NO: 1027843 - DNA, 15 bp, Homo sapiens
gcccctcagtgcaca

SEQ ID NO: 1027844 - DNA, 15 bp, Homo sapiens
cgcccctcagtgcac

SEQ ID NO: 1027845 - DNA, 15 bp, Homo sapiens
tcgcccctcagtgca

SEQ ID NO: 1027846 - DNA, 15 bp, Homo sapiens
ctcgcccctcagtgc

SEQ ID NO: 1027847 - DNA, 15 bp, Homo sapiens
actcgcccctcagtg

SEQ ID NO: 1027848 - DNA, 15 bp, Homo sapiens
cactcgcccctcagt

SEQ ID NO: 1027849 - DNA, 15 bp, Homo sapiens
acactcgcccctcag

SEQ ID NO: 1027850 - DNA, 15 bp, Homo sapiens
aacactcgcccctca

SEQ ID NO: 1027851 - DNA, 15 bp, Homo sapiens
caacactcgcccctc

SEQ ID NO: 1027852 - DNA, 15 bp, Homo sapiens
ccaacactcgcccct

SEQ ID NO: 1027853 - DNA, 15 bp, Homo sapiens
gccaacactcgcccc

SEQ ID NO: 1027854 - DNA, 15 bp, Homo sapiens
tgccaacactcgccc

SEQ ID NO: 1027855 - DNA, 15 bp, Homo sapiens
ctgccaacactcgcc

SEQ ID NO: 1027856 - DNA, 15 bp, Homo sapiens
gctgccaacactcgc

SEQ ID NO: 1027857 - DNA, 15 bp, Homo sapiens
agctgccaacactcg

SEQ ID NO: 1027858 - DNA, 15 bp, Homo sapiens
gagctgccaacactc

SEQ ID NO: 1027859 - DNA, 15 bp, Homo sapiens
agagctgccaacact

SEQ ID NO: 1027860 - DNA, 15 bp, Homo sapiens
cagagctgccaacac

SEQ ID NO: 1027861 - DNA, 15 bp, Homo sapiens
acagagctgccaaca

SEQ ID NO: 1027862 - DNA, 15 bp, Homo sapiens
tacagagctgccaac

SEQ ID NO: 1027863 - DNA, 15 bp, Homo sapiens
ttacagagctgccaa

SEQ ID NO: 1027864 - DNA, 15 bp, Homo sapiens
cttacagagctgcca

SEQ ID NO: 1027865 - DNA, 15 bp, Homo sapiens
gcttacagagctgcc

SEQ ID NO: 1027866 - DNA, 15 bp, Homo sapiens
agcttacagagctgc

SEQ ID NO: 1027867 - DNA, 15 bp, Homo sapiens
aagcttacagagctg

SEQ ID NO: 1027868 - DNA, 15 bp, Homo sapiens
gaagcttacagagct

SEQ ID NO: 1027869 - DNA, 15 bp, Homo sapiens
agaagcttacagagc

SEQ ID NO: 1027870 - DNA, 15 bp, Homo sapiens
cagaagcttacagag

SEQ ID NO: 1027871 - DNA, 15 bp, Homo sapiens
gcagaagcttacaga

SEQ ID NO: 1027872 - DNA, 15 bp, Homo sapiens
agcagaagcttacag

SEQ ID NO: 1027873 - DNA, 15 bp, Homo sapiens
gagcagaagcttaca

SEQ ID NO: 1027874 - DNA, 15 bp, Homo sapiens
ggagcagaagcttac

SEQ ID NO: 1027875 - DNA, 15 bp, Homo sapiens
aggagcagaagctta

SEQ ID NO: 1027876 - DNA, 15 bp, Homo sapiens
gaggagcagaagctt

SEQ ID NO: 1027877 - DNA, 15 bp, Homo sapiens
tgaggagcagaagct

SEQ ID NO: 1027878 - DNA, 15 bp, Homo sapiens
ctgaggagcagaagc

SEQ ID NO: 1027879 - DNA, 15 bp, Homo sapiens
gctgaggagcagaag

SEQ ID NO: 1027880 - DNA, 15 bp, Homo sapiens
ggctgaggagcagaa

SEQ ID NO: 1027881 - DNA, 15 bp, Homo sapiens
aggctgaggagcaga

SEQ ID NO: 1027882 - DNA, 15 bp, Homo sapiens
caggctgaggagcag

SEQ ID NO: 1027883 - DNA, 15 bp, Homo sapiens
gcaggctgaggagca

SEQ ID NO: 1027884 - DNA, 15 bp, Homo sapiens
tgcaggctgaggagc

SEQ ID NO: 1027885 - DNA, 15 bp, Homo sapiens
ttgcaggctgaggag

SEQ ID NO: 1027886 - DNA, 15 bp, Homo sapiens
cttgcaggctgagga

SEQ ID NO: 1027887 - DNA, 15 bp, Homo sapiens
tcttgcaggctgagg

SEQ ID NO: 1027888 - DNA, 15 bp, Homo sapiens
ttcttgcaggctgag

SEQ ID NO: 1027889 - DNA, 15 bp, Homo sapiens
tttcttgcaggctga

SEQ ID NO: 1027890 - DNA, 15 bp, Homo sapiens
ctttcttgcaggctg

SEQ ID NO: 1027891 - DNA, 15 bp, Homo sapiens
cctttcttgcaggct

SEQ ID NO: 1027892 - DNA, 15 bp, Homo sapiens
ccctttcttgcaggc

SEQ ID NO: 1027893 - DNA, 15 bp, Homo sapiens
cccctttcttgcagg

SEQ ID NO: 1027894 - DNA, 15 bp, Homo sapiens
tcccctttcttgcag

SEQ ID NO: 1027895 - DNA, 15 bp, Homo sapiens
ctcccctttcttgca

SEQ ID NO: 1027896 - DNA, 15 bp, Homo sapiens
actcccctttcttgc

SEQ ID NO: 1027897 - DNA, 15 bp, Homo sapiens
gactcccctttcttg

SEQ ID NO: 1027898 - DNA, 15 bp, Homo sapiens
ggactcccctttctt

SEQ ID NO: 1027899 - DNA, 15 bp, Homo sapiens
aggactcccctttct

SEQ ID NO: 1027900 - DNA, 15 bp, Homo sapiens
taggactcccctttc

SEQ ID NO: 1027901 - DNA, 15 bp, Homo sapiens
gtaggactccccttt

SEQ ID NO: 1027902 - DNA, 15 bp, Homo sapiens
ggtaggactcccctt

SEQ ID NO: 1027903 - DNA, 15 bp, Homo sapiens
aggtaggactcccct

SEQ ID NO: 1027904 - DNA, 15 bp, Homo sapiens
gaggtaggactcccc

SEQ ID NO: 1027905 - DNA, 15 bp, Homo sapiens
agaggtaggactccc

SEQ ID NO: 1027906 - DNA, 15 bp, Homo sapiens
cagaggtaggactcc

SEQ ID NO: 1027907 - DNA, 15 bp, Homo sapiens
acagaggtaggactc

SEQ ID NO: 1027908 - DNA, 15 bp, Homo sapiens
gacagaggtaggact

SEQ ID NO: 1027909 - DNA, 15 bp, Homo sapiens
ggacagaggtaggac

SEQ ID NO: 1027910 - DNA, 15 bp, Homo sapiens
aggacagaggtagga

SEQ ID NO: 1027911 - DNA, 15 bp, Homo sapiens
caggacagaggtagg

SEQ ID NO: 1027912 - DNA, 15 bp, Homo sapiens
ccaggacagaggtag

SEQ ID NO: 1027913 - DNA, 15 bp, Homo sapiens
accaggacagaggta

SEQ ID NO: 1027914 - DNA, 15 bp, Homo sapiens
gaccaggacagaggt

SEQ ID NO: 1027915 - DNA, 15 bp, Homo sapiens
cgaccaggacagagg

SEQ ID NO: 1027916 - DNA, 15 bp, Homo sapiens
gcgaccaggacagag

SEQ ID NO: 1027917 - DNA, 15 bp, Homo sapiens
cgcgaccaggacaga

SEQ ID NO: 1027918 - DNA, 15 bp, Homo sapiens
acgcgaccaggacag

SEQ ID NO: 1027919 - DNA, 15 bp, Homo sapiens
aacgcgaccaggaca

SEQ ID NO: 1027920 - DNA, 15 bp, Homo sapiens
gaacgcgaccaggac

SEQ ID NO: 1027921 - DNA, 15 bp, Homo sapiens
agaacgcgaccagga

SEQ ID NO: 1027922 - DNA, 15 bp, Homo sapiens
gagaacgcgaccagg

SEQ ID NO: 1027923 - DNA, 15 bp, Homo sapiens
agagaacgcgaccag

SEQ ID NO: 1027924 - DNA, 15 bp, Homo sapiens
gagagaacgcgacca

SEQ ID NO: 1027925 - DNA, 15 bp, Homo sapiens
ggagagaacgcgacc

SEQ ID NO: 1027926 - DNA, 15 bp, Homo sapiens
aggagagaacgcgac

SEQ ID NO: 1027927 - DNA, 15 bp, Homo sapiens
gaggagagaacgcga

SEQ ID NO: 1027928 - DNA, 15 bp, Homo sapiens
tgaggagagaacgcg

SEQ ID NO: 1027929 - DNA, 15 bp, Homo sapiens
ttgaggagagaacgc

SEQ ID NO: 1027930 - DNA, 15 bp, Homo sapiens
gttgaggagagaacg

SEQ ID NO: 1027931 - DNA, 15 bp, Homo sapiens
tgttgaggagagaac

SEQ ID NO: 1027932 - DNA, 15 bp, Homo sapiens
gtgttgaggagagaa

SEQ ID NO: 1027933 - DNA, 15 bp, Homo sapiens
cgtgttgaggagaga

SEQ ID NO: 1027934 - DNA, 15 bp, Homo sapiens
gcgtgttgaggagag

SEQ ID NO: 1027935 - DNA, 15 bp, Homo sapiens
tgcgtgttgaggaga

SEQ ID NO: 1027936 - DNA, 15 bp, Homo sapiens
gtgcgtgttgaggag

SEQ ID NO: 1027937 - DNA, 15 bp, Homo sapiens
ggtgcgtgttgagga

SEQ ID NO: 1027938 - DNA, 15 bp, Homo sapiens
tggtgcgtgttgagg

SEQ ID NO: 1027939 - DNA, 15 bp, Homo sapiens
ttggtgcgtgttgag

SEQ ID NO: 1027940 - DNA, 15 bp, Homo sapiens
cttggtgcgtgttga

SEQ ID NO: 1027941 - DNA, 15 bp, Homo sapiens
tcttggtgcgtgttg

SEQ ID NO: 1027942 - DNA, 15 bp, Homo sapiens
ttcttggtgcgtgtt

SEQ ID NO: 1027943 - DNA, 15 bp, Homo sapiens
gttcttggtgcgtgt

SEQ ID NO: 1027944 - DNA, 15 bp, Homo sapiens
agttcttggtgcgtg

SEQ ID NO: 1027945 - DNA, 15 bp, Homo sapiens
tagttcttggtgcgt

SEQ ID NO: 1027946 - DNA, 15 bp, Homo sapiens
ctagttcttggtgcg

SEQ ID NO: 1027947 - DNA, 15 bp, Homo sapiens
tctagttcttggtgc

SEQ ID NO: 1027948 - DNA, 15 bp, Homo sapiens
ttctagttcttggtg

SEQ ID NO: 1027949 - DNA, 15 bp, Homo sapiens
gttctagttcttggt

SEQ ID NO: 1027950 - DNA, 15 bp, Homo sapiens
tgttctagttcttgg

SEQ ID NO: 1027951 - DNA, 15 bp, Homo sapiens
atgttctagttcttg

SEQ ID NO: 1027952 - DNA, 15 bp, Homo sapiens
gatgttctagttctt

SEQ ID NO: 1027953 - DNA, 15 bp, Homo sapiens
ggatgttctagttct

SEQ ID NO: 1027954 - DNA, 15 bp, Homo sapiens
aggatgttctagttc

SEQ ID NO: 1027955 - DNA, 15 bp, Homo sapiens
caggatgttctagtt

SEQ ID NO: 1027956 - DNA, 15 bp, Homo sapiens
ccaggatgttctagt

SEQ ID NO: 1027957 - DNA, 15 bp, Homo sapiens
accaggatgttctag

SEQ ID NO: 1027958 - DNA, 15 bp, Homo sapiens
aaccaggatgttcta

SEQ ID NO: 1027959 - DNA, 15 bp, Homo sapiens
aaaccaggatgttct

SEQ ID NO: 1027960 - DNA, 15 bp, Homo sapiens
gaaaccaggatgttc

SEQ ID NO: 1027961 - DNA, 15 bp, Homo sapiens
ggaaaccaggatgtt

SEQ ID NO: 1027962 - DNA, 15 bp, Homo sapiens
tggaaaccaggatgt

SEQ ID NO: 1027963 - DNA, 15 bp, Homo sapiens
ctggaaaccaggatg

SEQ ID NO: 1027964 - DNA, 15 bp, Homo sapiens
tctggaaaccaggat

SEQ ID NO: 1027965 - DNA, 15 bp, Homo sapiens
ttctggaaaccagga

SEQ ID NO: 1027966 - DNA, 15 bp, Homo sapiens
gttctggaaaccagg

SEQ ID NO: 1027967 - DNA, 15 bp, Homo sapiens
tgttctggaaaccag

SEQ ID NO: 1027968 - DNA, 15 bp, Homo sapiens
ttgttctggaaacca

SEQ ID NO: 1027969 - DNA, 15 bp, Homo sapiens
cttgttctggaaacc

SEQ ID NO: 1027970 - DNA, 15 bp, Homo sapiens
gcttgttctggaaac

SEQ ID NO: 1027971 - DNA, 15 bp, Homo sapiens
agcttgttctggaaa

SEQ ID NO: 1027972 - DNA, 15 bp, Homo sapiens
cagcttgttctggaa

SEQ ID NO: 1027973 - DNA, 15 bp, Homo sapiens
gcagcttgttctgga

SEQ ID NO: 1027974 - DNA, 15 bp, Homo sapiens
cgcagcttgttctgg

SEQ ID NO: 1027975 - DNA, 15 bp, Homo sapiens
ccgcagcttgttctg

SEQ ID NO: 1027976 - DNA, 15 bp, Homo sapiens
cccgcagcttgttct

SEQ ID NO: 1027977 - DNA, 15 bp, Homo sapiens
gcccgcagcttgttc

SEQ ID NO: 1027978 - DNA, 15 bp, Homo sapiens
tgcccgcagcttgtt

SEQ ID NO: 1027979 - DNA, 15 bp, Homo sapiens
atgcccgcagcttgt

SEQ ID NO: 1027980 - DNA, 15 bp, Homo sapiens
gatgcccgcagcttg

SEQ ID NO: 1027981 - DNA, 15 bp, Homo sapiens
ggatgcccgcagctt

SEQ ID NO: 1027982 - DNA, 15 bp, Homo sapiens
gggatgcccgcagct

SEQ ID NO: 1027983 - DNA, 15 bp, Homo sapiens
ggggatgcccgcagc

SEQ ID NO: 1027984 - DNA, 15 bp, Homo sapiens
tggggatgcccgcag

SEQ ID NO: 1027985 - DNA, 15 bp, Homo sapiens
ctggggatgcccgca

SEQ ID NO: 1027986 - DNA, 15 bp, Homo sapiens
actggggatgcccgc

SEQ ID NO: 1027987 - DNA, 15 bp, Homo sapiens
aactggggatgcccg

SEQ ID NO: 1027988 - DNA, 15 bp, Homo sapiens
gaactggggatgccc

SEQ ID NO: 1027989 - DNA, 15 bp, Homo sapiens
cgaactggggatgcc

SEQ ID NO: 1027990 - DNA, 15 bp, Homo sapiens
tcgaactggggatgc

SEQ ID NO: 1027991 - DNA, 15 bp, Homo sapiens
ttcgaactggggatg

SEQ ID NO: 1027992 - DNA, 15 bp, Homo sapiens
tttcgaactggggat

SEQ ID NO: 1027993 - DNA, 15 bp, Homo sapiens
gtttcgaactgggga

SEQ ID NO: 1027994 - DNA, 15 bp, Homo sapiens
agtttcgaactgggg

SEQ ID NO: 1027995 - DNA, 15 bp, Homo sapiens
cagtttcgaactggg

SEQ ID NO: 1027996 - DNA, 15 bp, Homo sapiens
gcagtttcgaactgg

SEQ ID NO: 1027997 - DNA, 15 bp, Homo sapiens
ggcagtttcgaactg

SEQ ID NO: 1027998 - DNA, 15 bp, Homo sapiens
gggcagtttcgaact

SEQ ID NO: 1027999 - DNA, 15 bp, Homo sapiens
tgggcagtttcgaac

SEQ ID NO: 1028000 - DNA, 15 bp, Homo sapiens
ctgggcagtttcgaa

SEQ ID NO: 1028001 - DNA, 15 bp, Homo sapiens
cctgggcagtttcga

SEQ ID NO: 1028002 - DNA, 15 bp, Homo sapiens
gcctgggcagtttcg

SEQ ID NO: 1028003 - DNA, 15 bp, Homo sapiens
ggcctgggcagtttc

SEQ ID NO: 1028004 - DNA, 15 bp, Homo sapiens
gggcctgggcagttt

SEQ ID NO: 1028005 - DNA, 15 bp, Homo sapiens
agggcctgggcagtt

SEQ ID NO: 1028006 - DNA, 15 bp, Homo sapiens
cagggcctgggcagt

SEQ ID NO: 1028007 - DNA, 15 bp, Homo sapiens
ccagggcctgggcag

SEQ ID NO: 1028008 - DNA, 15 bp, Homo sapiens
cccagggcctgggca

SEQ ID NO: 1028009 - DNA, 15 bp, Homo sapiens
ccccagggcctgggc

SEQ ID NO: 1028010 - DNA, 15 bp, Homo sapiens
cccccagggcctggg

SEQ ID NO: 1028011 - DNA, 15 bp, Homo sapiens
tcccccagggcctgg

SEQ ID NO: 1028012 - DNA, 15 bp, Homo sapiens
ctcccccagggcctg

SEQ ID NO: 1028013 - DNA, 15 bp, Homo sapiens
cctcccccagggcct

SEQ ID NO: 1028014 - DNA, 15 bp, Homo sapiens
gcctcccccagggcc

SEQ ID NO: 1028015 - DNA, 15 bp, Homo sapiens
cgcctcccccagggc

SEQ ID NO: 1028016 - DNA, 15 bp, Homo sapiens
ccgcctcccccaggg

SEQ ID NO: 1028017 - DNA, 15 bp, Homo sapiens
gccgcctcccccagg

SEQ ID NO: 1028018 - DNA, 15 bp, Homo sapiens
tgccgcctcccccag

SEQ ID NO: 1028019 - DNA, 15 bp, Homo sapiens
ctgccgcctccccca

SEQ ID NO: 1028020 - DNA, 15 bp, Homo sapiens
actgccgcctccccc

SEQ ID NO: 1028021 - DNA, 15 bp, Homo sapiens
gactgccgcctcccc

SEQ ID NO: 1028022 - DNA, 15 bp, Homo sapiens
agactgccgcctccc

SEQ ID NO: 1028023 - DNA, 15 bp, Homo sapiens
cagactgccgcctcc

SEQ ID NO: 1028024 - DNA, 15 bp, Homo sapiens
tcagactgccgcctc

SEQ ID NO: 1028025 - DNA, 15 bp, Homo sapiens
atcagactgccgcct

SEQ ID NO: 1028026 - DNA, 15 bp, Homo sapiens
aatcagactgccgcc

SEQ ID NO: 1028027 - DNA, 15 bp, Homo sapiens
aaatcagactgccgc

SEQ ID NO: 1028028 - DNA, 15 bp, Homo sapiens
gaaatcagactgccg

SEQ ID NO: 1028029 - DNA, 15 bp, Homo sapiens
cgaaatcagactgcc

SEQ ID NO: 1028030 - DNA, 15 bp, Homo sapiens
ccgaaatcagactgc

SEQ ID NO: 1028031 - DNA, 15 bp, Homo sapiens
cccgaaatcagactg

SEQ ID NO: 1028032 - DNA, 15 bp, Homo sapiens
gcccgaaatcagact

SEQ ID NO: 1028033 - DNA, 15 bp, Homo sapiens
tgcccgaaatcagac

SEQ ID NO: 1028034 - DNA, 15 bp, Homo sapiens
ctgcccgaaatcaga

SEQ ID NO: 1028035 - DNA, 15 bp, Homo sapiens
cctgcccgaaatcag

SEQ ID NO: 1028036 - DNA, 15 bp, Homo sapiens
ccctgcccgaaatca

SEQ ID NO: 1028037 - DNA, 15 bp, Homo sapiens
cccctgcccgaaatc

SEQ ID NO: 1028038 - DNA, 15 bp, Homo sapiens
tcccctgcccgaaat

SEQ ID NO: 1028039 - DNA, 15 bp, Homo sapiens
ctcccctgcccgaaa

SEQ ID NO: 1028040 - DNA, 15 bp, Homo sapiens
tctcccctgcccgaa

SEQ ID NO: 1028041 - DNA, 15 bp, Homo sapiens
ctctcccctgcccga

SEQ ID NO: 1028042 - DNA, 15 bp, Homo sapiens
actctcccctgcccg

SEQ ID NO: 1028043 - DNA, 15 bp, Homo sapiens
tactctcccctgccc

SEQ ID NO: 1028044 - DNA, 15 bp, Homo sapiens
ttactctcccctgcc

SEQ ID NO: 1028045 - DNA, 15 bp, Homo sapiens
tttactctcccctgc

SEQ ID NO: 1028046 - DNA, 15 bp, Homo sapiens
ttttactctcccctg

SEQ ID NO: 1028047 - DNA, 15 bp, Homo sapiens
cttttactctcccct

SEQ ID NO: 1028048 - DNA, 15 bp, Homo sapiens
ccttttactctcccc

SEQ ID NO: 1028049 - DNA, 15 bp, Homo sapiens
tccttttactctccc

SEQ ID NO: 1028050 - DNA, 15 bp, Homo sapiens
gtccttttactctcc

SEQ ID NO: 1028051 - DNA, 15 bp, Homo sapiens
agtccttttactctc

SEQ ID NO: 1028052 - DNA, 15 bp, Homo sapiens
cagtccttttactct

SEQ ID NO: 1028053 - DNA, 15 bp, Homo sapiens
acagtccttttactc

SEQ ID NO: 1028054 - DNA, 15 bp, Homo sapiens
tacagtccttttact

SEQ ID NO: 1028055 - DNA, 15 bp, Homo sapiens
ctacagtccttttac

SEQ ID NO: 1028056 - DNA, 15 bp, Homo sapiens
cctacagtcctttta

SEQ ID NO: 1028057 - DNA, 15 bp, Homo sapiens
ccctacagtcctttt

SEQ ID NO: 1028058 - DNA, 15 bp, Homo sapiens
tccctacagtccttt

SEQ ID NO: 1028059 - DNA, 15 bp, Homo sapiens
ctccctacagtcctt

SEQ ID NO: 1028060 - DNA, 15 bp, Homo sapiens
cctccctacagtcct

SEQ ID NO: 1028061 - DNA, 15 bp, Homo sapiens
tcctccctacagtcc

SEQ ID NO: 1028062 - DNA, 15 bp, Homo sapiens
ctcctccctacagtc

SEQ ID NO: 1028063 - DNA, 15 bp, Homo sapiens
tctcctccctacagt

SEQ ID NO: 1028064 - DNA, 15 bp, Homo sapiens
gtctcctccctacag

SEQ ID NO: 1028065 - DNA, 15 bp, Homo sapiens
ggtctcctccctaca

SEQ ID NO: 1028066 - DNA, 15 bp, Homo sapiens
gggtctcctccctac

SEQ ID NO: 1028067 - DNA, 15 bp, Homo sapiens
tgggtctcctcccta

SEQ ID NO: 1028068 - DNA, 15 bp, Homo sapiens
ttgggtctcctccct

SEQ ID NO: 1028069 - DNA, 15 bp, Homo sapiens
attgggtctcctccc

SEQ ID NO: 1028070 - DNA, 15 bp, Homo sapiens
cattgggtctcctcc

SEQ ID NO: 1028071 - DNA, 15 bp, Homo sapiens
ccattgggtctcctc

SEQ ID NO: 1028072 - DNA, 15 bp, Homo sapiens
accattgggtctcct

SEQ ID NO: 1028073 - DNA, 15 bp, Homo sapiens
caccattgggtctcc

SEQ ID NO: 1028074 - DNA, 15 bp, Homo sapiens
acaccattgggtctc

SEQ ID NO: 1028075 - DNA, 15 bp, Homo sapiens
cacaccattgggtct

SEQ ID NO: 1028076 - DNA, 15 bp, Homo sapiens
tcacaccattgggtc

SEQ ID NO: 1028077 - DNA, 15 bp, Homo sapiens
ctcacaccattgggt

SEQ ID NO: 1028078 - DNA, 15 bp, Homo sapiens
cctcacaccattggg

SEQ ID NO: 1028079 - DNA, 15 bp, Homo sapiens
acctcacaccattgg

SEQ ID NO: 1028080 - DNA, 15 bp, Homo sapiens
cacctcacaccattg

SEQ ID NO: 1028081 - DNA, 15 bp, Homo sapiens
ccacctcacaccatt

SEQ ID NO: 1028082 - DNA, 15 bp, Homo sapiens
gccacctcacaccat

SEQ ID NO: 1028083 - DNA, 15 bp, Homo sapiens
agccacctcacacca

SEQ ID NO: 1028084 - DNA, 15 bp, Homo sapiens
gagccacctcacacc

SEQ ID NO: 1028085 - DNA, 15 bp, Homo sapiens
agagccacctcacac

SEQ ID NO: 1028086 - DNA, 15 bp, Homo sapiens
gagagccacctcaca

SEQ ID NO: 1028087 - DNA, 15 bp, Homo sapiens
tgagagccacctcac

SEQ ID NO: 1028088 - DNA, 15 bp, Homo sapiens
ctgagagccacctca

SEQ ID NO: 1028089 - DNA, 15 bp, Homo sapiens
actgagagccacctc

SEQ ID NO: 1028090 - DNA, 15 bp, Homo sapiens
aactgagagccacct

SEQ ID NO: 1028091 - DNA, 15 bp, Homo sapiens
gaactgagagccacc

SEQ ID NO: 1028092 - DNA, 15 bp, Homo sapiens
agaactgagagccac

SEQ ID NO: 1028093 - DNA, 15 bp, Homo sapiens
gagaactgagagcca

SEQ ID NO: 1028094 - DNA, 15 bp, Homo sapiens
tgagaactgagagcc

SEQ ID NO: 1028095 - DNA, 15 bp, Homo sapiens
gtgagaactgagagc

SEQ ID NO: 1028096 - DNA, 15 bp, Homo sapiens
ggtgagaactgagag

SEQ ID NO: 1028097 - DNA, 15 bp, Homo sapiens
cggtgagaactgaga

SEQ ID NO: 1028098 - DNA, 15 bp, Homo sapiens
acggtgagaactgag

SEQ ID NO: 1028099 - DNA, 15 bp, Homo sapiens
gacggtgagaactga

SEQ ID NO: 1028100 - DNA, 15 bp, Homo sapiens
ggacggtgagaactg

SEQ ID NO: 1028101 - DNA, 15 bp, Homo sapiens
gggacggtgagaact

SEQ ID NO: 1028102 - DNA, 15 bp, Homo sapiens
ggggacggtgagaac

SEQ ID NO: 1028103 - DNA, 15 bp, Homo sapiens
aggggacggtgagaa

SEQ ID NO: 1028104 - DNA, 15 bp, Homo sapiens
caggggacggtgaga

SEQ ID NO: 1028105 - DNA, 15 bp, Homo sapiens
ccaggggacggtgag

SEQ ID NO: 1028106 - DNA, 15 bp, Homo sapiens
gccaggggacggtga

SEQ ID NO: 1028107 - DNA, 15 bp, Homo sapiens
ggccaggggacggtg

SEQ ID NO: 1028108 - DNA, 15 bp, Homo sapiens
aggccaggggacggt

SEQ ID NO: 1028109 - DNA, 15 bp, Homo sapiens
caggccaggggacgg

SEQ ID NO: 1028110 - DNA, 15 bp, Homo sapiens
tcaggccaggggacg

SEQ ID NO: 1028111 - DNA, 15 bp, Homo sapiens
ttcaggccaggggac

SEQ ID NO: 1028112 - DNA, 15 bp, Homo sapiens
cttcaggccagggga

SEQ ID NO: 1028113 - DNA, 15 bp, Homo sapiens
gcttcaggccagggg

SEQ ID NO: 1028114 - DNA, 15 bp, Homo sapiens
ggcttcaggccaggg

SEQ ID NO: 1028115 - DNA, 15 bp, Homo sapiens
gggcttcaggccagg

SEQ ID NO: 1028116 - DNA, 15 bp, Homo sapiens
cgggcttcaggccag

SEQ ID NO: 1028117 - DNA, 15 bp, Homo sapiens
ccgggcttcaggcca

SEQ ID NO: 1028118 - DNA, 15 bp, Homo sapiens
cccgggcttcaggcc

SEQ ID NO: 1028119 - DNA, 15 bp, Homo sapiens
ccccgggcttcaggc

SEQ ID NO: 1028120 - DNA, 15 bp, Homo sapiens
tccccgggcttcagg

SEQ ID NO: 1028121 - DNA, 15 bp, Homo sapiens
gtccccgggcttcag

SEQ ID NO: 1028122 - DNA, 15 bp, Homo sapiens
cgtccccgggcttca

SEQ ID NO: 1028123 - DNA, 15 bp, Homo sapiens
ccgtccccgggcttc

SEQ ID NO: 1028124 - DNA, 15 bp, Homo sapiens
cccgtccccgggctt

SEQ ID NO: 1028125 - DNA, 15 bp, Homo sapiens
tcccgtccccgggct

SEQ ID NO: 1028126 - DNA, 15 bp, Homo sapiens
gtcccgtccccgggc

SEQ ID NO: 1028127 - DNA, 15 bp, Homo sapiens
agtcccgtccccggg

SEQ ID NO: 1028128 - DNA, 15 bp, Homo sapiens
cagtcccgtccccgg

SEQ ID NO: 1028129 - DNA, 15 bp, Homo sapiens
tcagtcccgtccccg

SEQ ID NO: 1028130 - DNA, 15 bp, Homo sapiens
ctcagtcccgtcccc

SEQ ID NO: 1028131 - DNA, 15 bp, Homo sapiens
cctcagtcccgtccc

SEQ ID NO: 1028132 - DNA, 15 bp, Homo sapiens
gcctcagtcccgtcc

SEQ ID NO: 1028133 - DNA, 15 bp, Homo sapiens
cgcctcagtcccgtc

SEQ ID NO: 1028134 - DNA, 15 bp, Homo sapiens
acgcctcagtcccgt

SEQ ID NO: 1028135 - DNA, 15 bp, Homo sapiens
tacgcctcagtcccg

SEQ ID NO: 1028136 - DNA, 15 bp, Homo sapiens
ctacgcctcagtccc

SEQ ID NO: 1028137 - DNA, 15 bp, Homo sapiens
cctacgcctcagtcc

SEQ ID NO: 1028138 - DNA, 15 bp, Homo sapiens
ccctacgcctcagtc

SEQ ID NO: 1028139 - DNA, 15 bp, Homo sapiens
tccctacgcctcagt

SEQ ID NO: 1028140 - DNA, 15 bp, Homo sapiens
ctccctacgcctcag

SEQ ID NO: 1028141 - DNA, 15 bp, Homo sapiens
tctccctacgcctca

SEQ ID NO: 1028142 - DNA, 15 bp, Homo sapiens
ctctccctacgcctc

SEQ ID NO: 1028143 - DNA, 15 bp, Homo sapiens
actctccctacgcct

SEQ ID NO: 1028144 - DNA, 15 bp, Homo sapiens
cactctccctacgcc

SEQ ID NO: 1028145 - DNA, 15 bp, Homo sapiens
gcactctccctacgc

SEQ ID NO: 1028146 - DNA, 15 bp, Homo sapiens
agcactctccctacg

SEQ ID NO: 1028147 - DNA, 15 bp, Homo sapiens
gagcactctccctac

SEQ ID NO: 1028148 - DNA, 15 bp, Homo sapiens
tgagcactctcccta

SEQ ID NO: 1028149 - DNA, 15 bp, Homo sapiens
ttgagcactctccct

SEQ ID NO: 1028150 - DNA, 15 bp, Homo sapiens
gttgagcactctccc

SEQ ID NO: 1028151 - DNA, 15 bp, Homo sapiens
tgttgagcactctcc

SEQ ID NO: 1028152 - DNA, 15 bp, Homo sapiens
gtgttgagcactctc

SEQ ID NO: 1028153 - DNA, 15 bp, Homo sapiens
ggtgttgagcactct

SEQ ID NO: 1028154 - DNA, 15 bp, Homo sapiens
gggtgttgagcactc

SEQ ID NO: 1028155 - DNA, 15 bp, Homo sapiens
tgggtgttgagcact

SEQ ID NO: 1028156 - DNA, 15 bp, Homo sapiens
ttgggtgttgagcac

SEQ ID NO: 1028157 - DNA, 15 bp, Homo sapiens
gttgggtgttgagca

SEQ ID NO: 1028158 - DNA, 15 bp, Homo sapiens
ggttgggtgttgagc

SEQ ID NO: 1028159 - DNA, 15 bp, Homo sapiens
tggttgggtgttgag

SEQ ID NO: 1028160 - DNA, 15 bp, Homo sapiens
gtggttgggtgttga

SEQ ID NO: 1028161 - DNA, 15 bp, Homo sapiens
agtggttgggtgttg

SEQ ID NO: 1028162 - DNA, 15 bp, Homo sapiens
gagtggttgggtgtt

SEQ ID NO: 1028163 - DNA, 15 bp, Homo sapiens
cgagtggttgggtgt

SEQ ID NO: 1028164 - DNA, 15 bp, Homo sapiens
ccgagtggttgggtg

SEQ ID NO: 1028165 - DNA, 15 bp, Homo sapiens
tccgagtggttgggt

SEQ ID NO: 1028166 - DNA, 15 bp, Homo sapiens
gtccgagtggttggg

SEQ ID NO: 1028167 - DNA, 15 bp, Homo sapiens
ggtccgagtggttgg

SEQ ID NO: 1028168 - DNA, 15 bp, Homo sapiens
gggtccgagtggttg

SEQ ID NO: 1028169 - DNA, 15 bp, Homo sapiens
agggtccgagtggtt

SEQ ID NO: 1028170 - DNA, 15 bp, Homo sapiens
gagggtccgagtggt

SEQ ID NO: 1028171 - DNA, 15 bp, Homo sapiens
ggagggtccgagtgg

SEQ ID NO: 1028172 - DNA, 15 bp, Homo sapiens
gggagggtccgagtg

SEQ ID NO: 1028173 - DNA, 15 bp, Homo sapiens
agggagggtccgagt

SEQ ID NO: 1028174 - DNA, 15 bp, Homo sapiens
gagggagggtccgag

SEQ ID NO: 1028175 - DNA, 15 bp, Homo sapiens
cgagggagggtccga

SEQ ID NO: 1028176 - DNA, 15 bp, Homo sapiens
gcgagggagggtccg

SEQ ID NO: 1028177 - DNA, 15 bp, Homo sapiens
ggcgagggagggtcc

SEQ ID NO: 1028178 - DNA, 15 bp, Homo sapiens
cggcgagggagggtc

SEQ ID NO: 1028179 - DNA, 15 bp, Homo sapiens
ccggcgagggagggt

SEQ ID NO: 1028180 - DNA, 15 bp, Homo sapiens
tccggcgagggaggg

SEQ ID NO: 1028181 - DNA, 15 bp, Homo sapiens
gtccggcgagggagg

SEQ ID NO: 1028182 - DNA, 15 bp, Homo sapiens
agtccggcgagggag

SEQ ID NO: 1028183 - DNA, 15 bp, Homo sapiens
tagtccggcgaggga

SEQ ID NO: 1028184 - DNA, 15 bp, Homo sapiens
ctagtccggcgaggg

SEQ ID NO: 1028185 - DNA, 15 bp, Homo sapiens
cctagtccggcgagg

SEQ ID NO: 1028186 - DNA, 15 bp, Homo sapiens
gcctagtccggcgag

SEQ ID NO: 1028187 - DNA, 15 bp, Homo sapiens
cgcctagtccggcga

SEQ ID NO: 1028188 - DNA, 15 bp, Homo sapiens
ccgcctagtccggcg

SEQ ID NO: 1028189 - DNA, 15 bp, Homo sapiens
tccgcctagtccggc

SEQ ID NO: 1028190 - DNA, 15 bp, Homo sapiens
atccgcctagtccgg

SEQ ID NO: 1028191 - DNA, 15 bp, Homo sapiens
gatccgcctagtccg

SEQ ID NO: 1028192 - DNA, 15 bp, Homo sapiens
agatccgcctagtcc

SEQ ID NO: 1028193 - DNA, 15 bp, Homo sapiens
cagatccgcctagtc

SEQ ID NO: 1028194 - DNA, 15 bp, Homo sapiens
tcagatccgcctagt

SEQ ID NO: 1028195 - DNA, 15 bp, Homo sapiens
ctcagatccgcctag

SEQ ID NO: 1028196 - DNA, 15 bp, Homo sapiens
gctcagatccgccta

SEQ ID NO: 1028197 - DNA, 15 bp, Homo sapiens
agctcagatccgcct

SEQ ID NO: 1028198 - DNA, 15 bp, Homo sapiens
aagctcagatccgcc

SEQ ID NO: 1028199 - DNA, 15 bp, Homo sapiens
gaagctcagatccgc

SEQ ID NO: 1028200 - DNA, 15 bp, Homo sapiens
ggaagctcagatccg

SEQ ID NO: 1028201 - DNA, 15 bp, Homo sapiens
gggaagctcagatcc

SEQ ID NO: 1028202 - DNA, 15 bp, Homo sapiens
tgggaagctcagatc

SEQ ID NO: 1028203 - DNA, 15 bp, Homo sapiens
ttgggaagctcagat

SEQ ID NO: 1028204 - DNA, 15 bp, Homo sapiens
tttgggaagctcaga

SEQ ID NO: 1028205 - DNA, 15 bp, Homo sapiens
gtttgggaagctcag

SEQ ID NO: 1028206 - DNA, 15 bp, Homo sapiens
ggtttgggaagctca

SEQ ID NO: 1028207 - DNA, 15 bp, Homo sapiens
gggtttgggaagctc

SEQ ID NO: 1028208 - DNA, 15 bp, Homo sapiens
ggggtttgggaagct

SEQ ID NO: 1028209 - DNA, 15 bp, Homo sapiens
aggggtttgggaagc

SEQ ID NO: 1028210 - DNA, 15 bp, Homo sapiens
taggggtttgggaag

SEQ ID NO: 1028211 - DNA, 15 bp, Homo sapiens
gtaggggtttgggaa

SEQ ID NO: 1028212 - DNA, 15 bp, Homo sapiens
tgtaggggtttggga

SEQ ID NO: 1028213 - DNA, 15 bp, Homo sapiens
ctgtaggggtttggg

SEQ ID NO: 1028214 - DNA, 15 bp, Homo sapiens
actgtaggggtttgg

SEQ ID NO: 1028215 - DNA, 15 bp, Homo sapiens
gactgtaggggtttg

SEQ ID NO: 1028216 - DNA, 15 bp, Homo sapiens
agactgtaggggttt

SEQ ID NO: 1028217 - DNA, 15 bp, Homo sapiens
gagactgtaggggtt

SEQ ID NO: 1028218 - DNA, 15 bp, Homo sapiens
agagactgtaggggt

SEQ ID NO: 1028219 - DNA, 15 bp, Homo sapiens
gagagactgtagggg

SEQ ID NO: 1028220 - DNA, 15 bp, Homo sapiens
ggagagactgtaggg

SEQ ID NO: 1028221 - DNA, 15 bp, Homo sapiens
tggagagactgtagg

SEQ ID NO: 1028222 - DNA, 15 bp, Homo sapiens
atggagagactgtag

SEQ ID NO: 1028223 - DNA, 15 bp, Homo sapiens
gatggagagactgta

SEQ ID NO: 1028224 - DNA, 15 bp, Homo sapiens
agatggagagactgt

SEQ ID NO: 1028225 - DNA, 15 bp, Homo sapiens
cagatggagagactg

SEQ ID NO: 1028226 - DNA, 15 bp, Homo sapiens
gcagatggagagact

SEQ ID NO: 1028227 - DNA, 15 bp, Homo sapiens
tgcagatggagagac

SEQ ID NO: 1028228 - DNA, 15 bp, Homo sapiens
atgcagatggagaga

SEQ ID NO: 1028229 - DNA, 15 bp, Homo sapiens
gatgcagatggagag

SEQ ID NO: 1028230 - DNA, 15 bp, Homo sapiens
ggatgcagatggaga

SEQ ID NO: 1028231 - DNA, 15 bp, Homo sapiens
gggatgcagatggag

SEQ ID NO: 1028232 - DNA, 15 bp, Homo sapiens
ggggatgcagatgga

SEQ ID NO: 1028233 - DNA, 15 bp, Homo sapiens
tggggatgcagatgg

SEQ ID NO: 1028234 - DNA, 15 bp, Homo sapiens
gtggggatgcagatg

SEQ ID NO: 1028235 - DNA, 15 bp, Homo sapiens
agtggggatgcagat

SEQ ID NO: 1028236 - DNA, 15 bp, Homo sapiens
aagtggggatgcaga

SEQ ID NO: 1028237 - DNA, 15 bp, Homo sapiens
gaagtggggatgcag

SEQ ID NO: 1028238 - DNA, 15 bp, Homo sapiens
tgaagtggggatgca

SEQ ID NO: 1028239 - DNA, 15 bp, Homo sapiens
atgaagtggggatgc

SEQ ID NO: 1028240 - DNA, 15 bp, Homo sapiens
gatgaagtggggatg

SEQ ID NO: 1028241 - DNA, 15 bp, Homo sapiens
tgatgaagtggggat

SEQ ID NO: 1028242 - DNA, 15 bp, Homo sapiens
gtgatgaagtgggga

SEQ ID NO: 1028243 - DNA, 15 bp, Homo sapiens
ggtgatgaagtgggg

SEQ ID NO: 1028244 - DNA, 15 bp, Homo sapiens
tggtgatgaagtggg

SEQ ID NO: 1028245 - DNA, 15 bp, Homo sapiens
atggtgatgaagtgg

SEQ ID NO: 1028246 - DNA, 15 bp, Homo sapiens
gatggtgatgaagtg

SEQ ID NO: 1028247 - DNA, 15 bp, Homo sapiens
ggatggtgatgaagt

SEQ ID NO: 1028248 - DNA, 15 bp, Homo sapiens
gggatggtgatgaag

SEQ ID NO: 1028249 - DNA, 15 bp, Homo sapiens
tgggatggtgatgaa

SEQ ID NO: 1028250 - DNA, 15 bp, Homo sapiens
gtgggatggtgatga

SEQ ID NO: 1028251 - DNA, 15 bp, Homo sapiens
ggtgggatggtgatg

SEQ ID NO: 1028252 - DNA, 15 bp, Homo sapiens
cggtgggatggtgat

SEQ ID NO: 1028253 - DNA, 15 bp, Homo sapiens
acggtgggatggtga

SEQ ID NO: 1028254 - DNA, 15 bp, Homo sapiens
gacggtgggatggtg

SEQ ID NO: 1028255 - DNA, 15 bp, Homo sapiens
agacggtgggatggt

SEQ ID NO: 1028256 - DNA, 15 bp, Homo sapiens
gagacggtgggatgg

SEQ ID NO: 1028257 - DNA, 15 bp, Homo sapiens
agagacggtgggatg

SEQ ID NO: 1028258 - DNA, 15 bp, Homo sapiens
gagagacggtgggat

SEQ ID NO: 1028259 - DNA, 15 bp, Homo sapiens
ggagagacggtggga

SEQ ID NO: 1028260 - DNA, 15 bp, Homo sapiens
gggagagacggtggg

SEQ ID NO: 1028261 - DNA, 15 bp, Homo sapiens
agggagagacggtgg

SEQ ID NO: 1028262 - DNA, 15 bp, Homo sapiens
gagggagagacggtg

SEQ ID NO: 1028263 - DNA, 15 bp, Homo sapiens
cgagggagagacggt

SEQ ID NO: 1028264 - DNA, 15 bp, Homo sapiens
gcgagggagagacgg

SEQ ID NO: 1028265 - DNA, 15 bp, Homo sapiens
agcgagggagagacg

SEQ ID NO: 1028266 - DNA, 15 bp, Homo sapiens
gagcgagggagagac

SEQ ID NO: 1028267 - DNA, 15 bp, Homo sapiens
ggagcgagggagaga

SEQ ID NO: 1028268 - DNA, 15 bp, Homo sapiens
tggagcgagggagag

SEQ ID NO: 1028269 - DNA, 15 bp, Homo sapiens
gtggagcgagggaga

SEQ ID NO: 1028270 - DNA, 15 bp, Homo sapiens
agtggagcgagggag

SEQ ID NO: 1028271 - DNA, 15 bp, Homo sapiens
gagtggagcgaggga

SEQ ID NO: 1028272 - DNA, 15 bp, Homo sapiens
cgagtggagcgaggg

SEQ ID NO: 1028273 - DNA, 15 bp, Homo sapiens
gcgagtggagcgagg

SEQ ID NO: 1028274 - DNA, 15 bp, Homo sapiens
cgcgagtggagcgag

SEQ ID NO: 1028275 - DNA, 15 bp, Homo sapiens
ccgcgagtggagcga

SEQ ID NO: 1028276 - DNA, 15 bp, Homo sapiens
cccgcgagtggagcg

SEQ ID NO: 1028277 - DNA, 15 bp, Homo sapiens
acccgcgagtggagc

SEQ ID NO: 1028278 - DNA, 15 bp, Homo sapiens
tacccgcgagtggag

SEQ ID NO: 1028279 - DNA, 15 bp, Homo sapiens
ttacccgcgagtgga

SEQ ID NO: 1028280 - DNA, 15 bp, Homo sapiens
gttacccgcgagtgg

SEQ ID NO: 1028281 - DNA, 15 bp, Homo sapiens
ggttacccgcgagtg

SEQ ID NO: 1028282 - DNA, 15 bp, Homo sapiens
cggttacccgcgagt

SEQ ID NO: 1028283 - DNA, 15 bp, Homo sapiens
tcggttacccgcgag

SEQ ID NO: 1028284 - DNA, 15 bp, Homo sapiens
ctcggttacccgcga

SEQ ID NO: 1028285 - DNA, 15 bp, Homo sapiens
cctcggttacccgcg

SEQ ID NO: 1028286 - DNA, 15 bp, Homo sapiens
gcctcggttacccgc

SEQ ID NO: 1028287 - DNA, 15 bp, Homo sapiens
agcctcggttacccg

SEQ ID NO: 1028288 - DNA, 15 bp, Homo sapiens
aagcctcggttaccc

SEQ ID NO: 1028289 - DNA, 15 bp, Homo sapiens
gaagcctcggttacc

SEQ ID NO: 1028290 - DNA, 15 bp, Homo sapiens
agaagcctcggttac

SEQ ID NO: 1028291 - DNA, 15 bp, Homo sapiens
gagaagcctcggtta

SEQ ID NO: 1028292 - DNA, 15 bp, Homo sapiens
ggagaagcctcggtt

SEQ ID NO: 1028293 - DNA, 15 bp, Homo sapiens
gggagaagcctcggt

SEQ ID NO: 1028294 - DNA, 15 bp, Homo sapiens
agggagaagcctcgg

SEQ ID NO: 1028295 - DNA, 15 bp, Homo sapiens
gagggagaagcctcg

SEQ ID NO: 1028296 - DNA, 15 bp, Homo sapiens
ggagggagaagcctc

SEQ ID NO: 1028297 - DNA, 15 bp, Homo sapiens
gggagggagaagcct

SEQ ID NO: 1028298 - DNA, 15 bp, Homo sapiens
tgggagggagaagcc

SEQ ID NO: 1028299 - DNA, 15 bp, Homo sapiens
ctgggagggagaagc

SEQ ID NO: 1028300 - DNA, 15 bp, Homo sapiens
cctgggagggagaag

SEQ ID NO: 1028301 - DNA, 15 bp, Homo sapiens
gcctgggagggagaa

SEQ ID NO: 1028302 - DNA, 15 bp, Homo sapiens
agcctgggagggaga

SEQ ID NO: 1028303 - DNA, 15 bp, Homo sapiens
cagcctgggagggag

SEQ ID NO: 1028304 - DNA, 15 bp, Homo sapiens
accagcctgggaggg

SEQ ID NO: 1028305 - DNA, 15 bp, Homo sapiens
aaccagcctgggagg

SEQ ID NO: 1028306 - DNA, 15 bp, Homo sapiens
gaaccagcctgggag

SEQ ID NO: 1028307 - DNA, 15 bp, Homo sapiens
agaaccagcctggga

SEQ ID NO: 1028308 - DNA, 15 bp, Homo sapiens
aagaaccagcctggg

SEQ ID NO: 1028309 - DNA, 15 bp, Homo sapiens
caagaaccagcctgg

SEQ ID NO: 1028310 - DNA, 15 bp, Homo sapiens
ccaagaaccagcctg

SEQ ID NO: 1028311 - DNA, 15 bp, Homo sapiens
cccaagaaccagcct

SEQ ID NO: 1028312 - DNA, 15 bp, Homo sapiens
gcccaagaaccagcc

SEQ ID NO: 1028313 - DNA, 15 bp, Homo sapiens
cgcccaagaaccagc

SEQ ID NO: 1028314 - DNA, 15 bp, Homo sapiens
acgcccaagaaccag

SEQ ID NO: 1028315 - DNA, 15 bp, Homo sapiens
aacgcccaagaacca

SEQ ID NO: 1028316 - DNA, 15 bp, Homo sapiens
gaacgcccaagaacc

SEQ ID NO: 1028317 - DNA, 15 bp, Homo sapiens
ggaacgcccaagaac

SEQ ID NO: 1028318 - DNA, 15 bp, Homo sapiens
gggaacgcccaagaa

SEQ ID NO: 1028319 - DNA, 15 bp, Homo sapiens
cgggaacgcccaaga

SEQ ID NO: 1028320 - DNA, 15 bp, Homo sapiens
tcgggaacgcccaag

SEQ ID NO: 1028321 - DNA, 15 bp, Homo sapiens
gtcgggaacgcccaa

SEQ ID NO: 1028322 - DNA, 15 bp, Homo sapiens
ggtcgggaacgccca

SEQ ID NO: 1028323 - DNA, 15 bp, Homo sapiens
gggtcgggaacgccc

SEQ ID NO: 1028324 - DNA, 15 bp, Homo sapiens
agggtcgggaacgcc

SEQ ID NO: 1028325 - DNA, 15 bp, Homo sapiens
aagggtcgggaacgc

SEQ ID NO: 1028326 - DNA, 15 bp, Homo sapiens
taagggtcgggaacg

SEQ ID NO: 1028327 - DNA, 15 bp, Homo sapiens
ctaagggtcgggaac

SEQ ID NO: 1028328 - DNA, 15 bp, Homo sapiens
gctaagggtcgggaa

SEQ ID NO: 1028329 - DNA, 15 bp, Homo sapiens
agctaagggtcggga

SEQ ID NO: 1028330 - DNA, 15 bp, Homo sapiens
tagctaagggtcggg

SEQ ID NO: 1028331 - DNA, 15 bp, Homo sapiens
gtagctaagggtcgg

SEQ ID NO: 1028332 - DNA, 15 bp, Homo sapiens
ggtagctaagggtcg

SEQ ID NO: 1028333 - DNA, 15 bp, Homo sapiens
gggtagctaagggtc

SEQ ID NO: 1028334 - DNA, 15 bp, Homo sapiens
tgggtagctaagggt

SEQ ID NO: 1028335 - DNA, 15 bp, Homo sapiens
gtgggtagctaaggg

SEQ ID NO: 1028336 - DNA, 15 bp, Homo sapiens
cgtgggtagctaagg

SEQ ID NO: 1028337 - DNA, 15 bp, Homo sapiens
tcgtgggtagctaag

SEQ ID NO: 1028338 - DNA, 15 bp, Homo sapiens
atcgtgggtagctaa

SEQ ID NO: 1028339 - DNA, 15 bp, Homo sapiens
catcgtgggtagcta

SEQ ID NO: 1028340 - DNA, 15 bp, Homo sapiens
acatcgtgggtagct

SEQ ID NO: 1028341 - DNA, 15 bp, Homo sapiens
aacatcgtgggtagc

SEQ ID NO: 1028342 - DNA, 15 bp, Homo sapiens
aaacatcgtgggtag

SEQ ID NO: 1028343 - DNA, 15 bp, Homo sapiens
gaaacatcgtgggta

SEQ ID NO: 1028344 - DNA, 15 bp, Homo sapiens
tgaaacatcgtgggt

SEQ ID NO: 1028345 - DNA, 15 bp, Homo sapiens
ctgaaacatcgtggg

SEQ ID NO: 1028346 - DNA, 15 bp, Homo sapiens
tctgaaacatcgtgg

SEQ ID NO: 1028347 - DNA, 15 bp, Homo sapiens
gtctgaaacatcgtg

SEQ ID NO: 1028348 - DNA, 15 bp, Homo sapiens
tgtctgaaacatcgt

SEQ ID NO: 1028349 - DNA, 15 bp, Homo sapiens
ctgtctgaaacatcg

SEQ ID NO: 1028350 - DNA, 15 bp, Homo sapiens
actgtctgaaacatc

SEQ ID NO: 1028351 - DNA, 15 bp, Homo sapiens
gactgtctgaaacat

SEQ ID NO: 1028352 - DNA, 15 bp, Homo sapiens
ggactgtctgaaaca

SEQ ID NO: 1028353 - DNA, 15 bp, Homo sapiens
gggactgtctgaaac

SEQ ID NO: 1028354 - DNA, 15 bp, Homo sapiens
ggggactgtctgaaa

SEQ ID NO: 1028355 - DNA, 15 bp, Homo sapiens
cggggactgtctgaa

SEQ ID NO: 1028356 - DNA, 15 bp, Homo sapiens
tcggggactgtctga

SEQ ID NO: 1028357 - DNA, 15 bp, Homo sapiens
gtcggggactgtctg

SEQ ID NO: 1028358 - DNA, 15 bp, Homo sapiens
tgtcggggactgtct

SEQ ID NO: 1028359 - DNA, 15 bp, Homo sapiens
gtgtcggggactgtc

SEQ ID NO: 1028360 - DNA, 15 bp, Homo sapiens
cgtgtcggggactgt

SEQ ID NO: 1028361 - DNA, 15 bp, Homo sapiens
acgtgtcggggactg

SEQ ID NO: 1028362 - DNA, 15 bp, Homo sapiens
gacgtgtcggggact

SEQ ID NO: 1028363 - DNA, 15 bp, Homo sapiens
cgacgtgtcggggac

SEQ ID NO: 1028364 - DNA, 15 bp, Homo sapiens
acgacgtgtcgggga

SEQ ID NO: 1028365 - DNA, 15 bp, Homo sapiens
gacgacgtgtcgggg

SEQ ID NO: 1028366 - DNA, 15 bp, Homo sapiens
agacgacgtgtcggg

SEQ ID NO: 1028367 - DNA, 15 bp, Homo sapiens
aagacgacgtgtcgg

SEQ ID NO: 1028368 - DNA, 15 bp, Homo sapiens
taagacgacgtgtcg

SEQ ID NO: 1028369 - DNA, 15 bp, Homo sapiens
gtaagacgacgtgtc

SEQ ID NO: 1028370 - DNA, 15 bp, Homo sapiens
tgtaagacgacgtgt

SEQ ID NO: 1028371 - DNA, 15 bp, Homo sapiens
atgtaagacgacgtg

SEQ ID NO: 1028372 - DNA, 15 bp, Homo sapiens
gatgtaagacgacgt

SEQ ID NO: 1028373 - DNA, 15 bp, Homo sapiens
tgatgtaagacgacg

SEQ ID NO: 1028374 - DNA, 15 bp, Homo sapiens
ttgatgtaagacgac

SEQ ID NO: 1028375 - DNA, 15 bp, Homo sapiens
cttgatgtaagacga

SEQ ID NO: 1028376 - DNA, 15 bp, Homo sapiens
ccttgatgtaagacg

SEQ ID NO: 1028377 - DNA, 15 bp, Homo sapiens
accttgatgtaagac

SEQ ID NO: 1028378 - DNA, 15 bp, Homo sapiens
taccttgatgtaaga

SEQ ID NO: 1028379 - DNA, 15 bp, Homo sapiens
ttaccttgatgtaag

SEQ ID NO: 1028380 - DNA, 15 bp, Homo sapiens
cttaccttgatgtaa

SEQ ID NO: 1028381 - DNA, 15 bp, Homo sapiens
tcttaccttgatgta

SEQ ID NO: 1028382 - DNA, 15 bp, Homo sapiens
gtcttaccttgatgt

SEQ ID NO: 1028383 - DNA, 15 bp, Homo sapiens
tgtcttaccttgatg

SEQ ID NO: 1028384 - DNA, 15 bp, Homo sapiens
atgtcttaccttgat

SEQ ID NO: 1028385 - DNA, 15 bp, Homo sapiens
catgtcttaccttga

SEQ ID NO: 1028386 - DNA, 15 bp, Homo sapiens
ccatgtcttaccttg

SEQ ID NO: 1028387 - DNA, 15 bp, Homo sapiens
gccatgtcttacctt

SEQ ID NO: 1028388 - DNA, 15 bp, Homo sapiens
tgccatgtcttacct

SEQ ID NO: 1028389 - DNA, 15 bp, Homo sapiens
ctgccatgtcttacc

SEQ ID NO: 1028390 - DNA, 15 bp, Homo sapiens
gctgccatgtcttac

SEQ ID NO: 1028391 - DNA, 15 bp, Homo sapiens
cgctgccatgtctta

SEQ ID NO: 1028392 - DNA, 15 bp, Homo sapiens
acgctgccatgtctt

SEQ ID NO: 1028393 - DNA, 15 bp, Homo sapiens
gacgctgccatgtct

SEQ ID NO: 1028394 - DNA, 15 bp, Homo sapiens
agacgctgccatgtc

SEQ ID NO: 1028395 - DNA, 15 bp, Homo sapiens
aagacgctgccatgt

SEQ ID NO: 1028396 - DNA, 15 bp, Homo sapiens
aaagacgctgccatg

SEQ ID NO: 1028397 - DNA, 15 bp, Homo sapiens
taaagacgctgccat

SEQ ID NO: 1028398 - DNA, 15 bp, Homo sapiens
ttaaagacgctgcca

SEQ ID NO: 1028399 - DNA, 15 bp, Homo sapiens
tttaaagacgctgcc

SEQ ID NO: 1028400 - DNA, 15 bp, Homo sapiens
gtttaaagacgctgc

SEQ ID NO: 1028401 - DNA, 15 bp, Homo sapiens
tgtttaaagacgctg

SEQ ID NO: 1028402 - DNA, 15 bp, Homo sapiens
ctgtttaaagacgct

SEQ ID NO: 1028403 - DNA, 15 bp, Homo sapiens
cctgtttaaagacgc

SEQ ID NO: 1028404 - DNA, 15 bp, Homo sapiens
acctgtttaaagacg

SEQ ID NO: 1028405 - DNA, 15 bp, Homo sapiens
cacctgtttaaagac

SEQ ID NO: 1028406 - DNA, 15 bp, Homo sapiens
tcacctgtttaaaga

SEQ ID NO: 1028407 - DNA, 15 bp, Homo sapiens
atcacctgtttaaag

SEQ ID NO: 1028408 - DNA, 15 bp, Homo sapiens
catcacctgtttaaa

SEQ ID NO: 1028409 - DNA, 15 bp, Homo sapiens
tcatcacctgtttaa

SEQ ID NO: 1028410 - DNA, 15 bp, Homo sapiens
gtcatcacctgttta

SEQ ID NO: 1028411 - DNA, 15 bp, Homo sapiens
ggtcatcacctgttt

SEQ ID NO: 1028412 - DNA, 15 bp, Homo sapiens
gggtcatcacctgtt

SEQ ID NO: 1028413 - DNA, 15 bp, Homo sapiens
ggggtcatcacctgt

SEQ ID NO: 1028414 - DNA, 15 bp, Homo sapiens
gggggtcatcacctg

SEQ ID NO: 1028415 - DNA, 15 bp, Homo sapiens
tgggggtcatcacct

SEQ ID NO: 1028416 - DNA, 15 bp, Homo sapiens
ctgggggtcatcacc

SEQ ID NO: 1028417 - DNA, 15 bp, Homo sapiens
gctgggggtcatcac

SEQ ID NO: 1028418 - DNA, 15 bp, Homo sapiens
agctgggggtcatca

SEQ ID NO: 1028419 - DNA, 15 bp, Homo sapiens
aagctgggggtcatc

SEQ ID NO: 1028420 - DNA, 15 bp, Homo sapiens
gaagctgggggtcat

SEQ ID NO: 1028421 - DNA, 15 bp, Homo sapiens
agaagctgggggtca

SEQ ID NO: 1028422 - DNA, 15 bp, Homo sapiens
tagaagctgggggtc

SEQ ID NO: 1028423 - DNA, 15 bp, Homo sapiens
gtagaagctgggggt

SEQ ID NO: 1028424 - DNA, 15 bp, Homo sapiens
ggtagaagctggggg

SEQ ID NO: 1028425 - DNA, 15 bp, Homo sapiens
gggtagaagctgggg

SEQ ID NO: 1028426 - DNA, 15 bp, Homo sapiens
ggggtagaagctggg

SEQ ID NO: 1028427 - DNA, 15 bp, Homo sapiens
tggggtagaagctgg

SEQ ID NO: 1028428 - DNA, 15 bp, Homo sapiens
gtggggtagaagctg

SEQ ID NO: 1028429 - DNA, 15 bp, Homo sapiens
ggtggggtagaagct

SEQ ID NO: 1028430 - DNA, 15 bp, Homo sapiens
gggtggggtagaagc

SEQ ID NO: 1028431 - DNA, 15 bp, Homo sapiens
cgggtggggtagaag

SEQ ID NO: 1028432 - DNA, 15 bp, Homo sapiens
ccgggtggggtagaa

SEQ ID NO: 1028433 - DNA, 15 bp, Homo sapiens
cccgggtggggtaga

SEQ ID NO: 1028434 - DNA, 15 bp, Homo sapiens
gcccgggtggggtag

SEQ ID NO: 1028435 - DNA, 15 bp, Homo sapiens
ggcccgggtggggta

SEQ ID NO: 1028436 - DNA, 15 bp, Homo sapiens
aggcccgggtggggt

SEQ ID NO: 1028437 - DNA, 15 bp, Homo sapiens
taggcccgggtgggg

SEQ ID NO: 1028438 - DNA, 15 bp, Homo sapiens
ataggcccgggtggg

SEQ ID NO: 1028439 - DNA, 15 bp, Homo sapiens
cataggcccgggtgg

SEQ ID NO: 1028440 - DNA, 15 bp, Homo sapiens
ccataggcccgggtg

SEQ ID NO: 1028441 - DNA, 15 bp, Homo sapiens
accataggcccgggt

SEQ ID NO: 1028442 - DNA, 15 bp, Homo sapiens
gaccataggcccggg

SEQ ID NO: 1028443 - DNA, 15 bp, Homo sapiens
ggaccataggcccgg

SEQ ID NO: 1028444 - DNA, 15 bp, Homo sapiens
gggaccataggcccg

SEQ ID NO: 1028445 - DNA, 15 bp, Homo sapiens
agggaccataggccc

SEQ ID NO: 1028446 - DNA, 15 bp, Homo sapiens
aagggaccataggcc

SEQ ID NO: 1028447 - DNA, 15 bp, Homo sapiens
aaagggaccataggc

SEQ ID NO: 1028448 - DNA, 15 bp, Homo sapiens
aaaagggaccatagg

SEQ ID NO: 1028449 - DNA, 15 bp, Homo sapiens
gaaaagggaccatag

SEQ ID NO: 1028450 - DNA, 15 bp, Homo sapiens
ggaaaagggaccata

SEQ ID NO: 1028451 - DNA, 15 bp, Homo sapiens
gggaaaagggaccat

SEQ ID NO: 1028452 - DNA, 15 bp, Homo sapiens
agggaaaagggacca

SEQ ID NO: 1028453 - DNA, 15 bp, Homo sapiens
aagggaaaagggacc

SEQ ID NO: 1028454 - DNA, 15 bp, Homo sapiens
aaagggaaaagggac

SEQ ID NO: 1028455 - DNA, 15 bp, Homo sapiens
gaaagggaaaaggga

SEQ ID NO: 1028456 - DNA, 15 bp, Homo sapiens
ggaaagggaaaaggg

SEQ ID NO: 1028457 - DNA, 15 bp, Homo sapiens
gggaaagggaaaagg

SEQ ID NO: 1028458 - DNA, 15 bp, Homo sapiens
ggggaaagggaaaag

SEQ ID NO: 1028459 - DNA, 15 bp, Homo sapiens
cggggaaagggaaaa

SEQ ID NO: 1028460 - DNA, 15 bp, Homo sapiens
ccggggaaagggaaa

SEQ ID NO: 1028461 - DNA, 15 bp, Homo sapiens
cccggggaaagggaa

SEQ ID NO: 1028462 - DNA, 15 bp, Homo sapiens
tcccggggaaaggga

SEQ ID NO: 1028463 - DNA, 15 bp, Homo sapiens
ttcccggggaaaggg

SEQ ID NO: 1028464 - DNA, 15 bp, Homo sapiens
tttcccggggaaagg

SEQ ID NO: 1028465 - DNA, 15 bp, Homo sapiens
ttttcccggggaaag

SEQ ID NO: 1028466 - DNA, 15 bp, Homo sapiens
tttttcccggggaaa

SEQ ID NO: 1028467 - DNA, 15 bp, Homo sapiens
ctttttcccggggaa

SEQ ID NO: 1028468 - DNA, 15 bp, Homo sapiens
cctttttcccgggga

SEQ ID NO: 1028469 - DNA, 15 bp, Homo sapiens
ccctttttcccgggg

SEQ ID NO: 1028470 - DNA, 15 bp, Homo sapiens
cccctttttcccggg

SEQ ID NO: 1028471 - DNA, 15 bp, Homo sapiens
acccctttttcccgg

SEQ ID NO: 1028472 - DNA, 15 bp, Homo sapiens
tacccctttttcccg

SEQ ID NO: 1028473 - DNA, 15 bp, Homo sapiens
ctacccctttttccc

SEQ ID NO: 1028474 - DNA, 15 bp, Homo sapiens
cctacccctttttcc

SEQ ID NO: 1028475 - DNA, 15 bp, Homo sapiens
ccctacccctttttc

SEQ ID NO: 1028476 - DNA, 15 bp, Homo sapiens
cccctaccccttttt

SEQ ID NO: 1028477 - DNA, 15 bp, Homo sapiens
acccctacccctttt

SEQ ID NO: 1028478 - DNA, 15 bp, Homo sapiens
cacccctaccccttt

SEQ ID NO: 1028479 - DNA, 15 bp, Homo sapiens
ccacccctacccctt

SEQ ID NO: 1028480 - DNA, 15 bp, Homo sapiens
tccacccctacccct

SEQ ID NO: 1028481 - DNA, 15 bp, Homo sapiens
ttccacccctacccc

SEQ ID NO: 1028482 - DNA, 15 bp, Homo sapiens
cttccacccctaccc

SEQ ID NO: 1028483 - DNA, 15 bp, Homo sapiens
acttccacccctacc

SEQ ID NO: 1028484 - DNA, 15 bp, Homo sapiens
cacttccacccctac

SEQ ID NO: 1028485 - DNA, 15 bp, Homo sapiens
ccacttccaccccta

SEQ ID NO: 1028486 - DNA, 15 bp, Homo sapiens
cccacttccacccct

SEQ ID NO: 1028487 - DNA, 15 bp, Homo sapiens
gcccacttccacccc

SEQ ID NO: 1028488 - DNA, 15 bp, Homo sapiens
ggcccacttccaccc

SEQ ID NO: 1028489 - DNA, 15 bp, Homo sapiens
gggcccacttccacc

SEQ ID NO: 1028490 - DNA, 15 bp, Homo sapiens
agggcccacttccac

SEQ ID NO: 1028491 - DNA, 15 bp, Homo sapiens
tagggcccacttcca

SEQ ID NO: 1028492 - DNA, 15 bp, Homo sapiens
gtagggcccacttcc

SEQ ID NO: 1028493 - DNA, 15 bp, Homo sapiens
agtagggcccacttc

SEQ ID NO: 1028494 - DNA, 15 bp, Homo sapiens
gagtagggcccactt

SEQ ID NO: 1028495 - DNA, 15 bp, Homo sapiens
agagtagggcccact

SEQ ID NO: 1028496 - DNA, 15 bp, Homo sapiens
gagagtagggcccac

SEQ ID NO: 1028497 - DNA, 15 bp, Homo sapiens
cgagagtagggccca

SEQ ID NO: 1028498 - DNA, 15 bp, Homo sapiens
ccgagagtagggccc

SEQ ID NO: 1028499 - DNA, 15 bp, Homo sapiens
gccgagagtagggcc

SEQ ID NO: 1028500 - DNA, 15 bp, Homo sapiens
agccgagagtagggc

SEQ ID NO: 1028501 - DNA, 15 bp, Homo sapiens
gagccgagagtaggg

SEQ ID NO: 1028502 - DNA, 15 bp, Homo sapiens
cgagccgagagtagg

SEQ ID NO: 1028503 - DNA, 15 bp, Homo sapiens
acgagccgagagtag

SEQ ID NO: 1028504 - DNA, 15 bp, Homo sapiens
cacgagccgagagta

SEQ ID NO: 1028505 - DNA, 15 bp, Homo sapiens
ccacgagccgagagt

SEQ ID NO: 1028506 - DNA, 15 bp, Homo sapiens
tccacgagccgagag

SEQ ID NO: 1028507 - DNA, 15 bp, Homo sapiens
atccacgagccgaga

SEQ ID NO: 1028508 - DNA, 15 bp, Homo sapiens
gatccacgagccgag

SEQ ID NO: 1028509 - DNA, 15 bp, Homo sapiens
agatccacgagccga

SEQ ID NO: 1028510 - DNA, 15 bp, Homo sapiens
gagatccacgagccg

SEQ ID NO: 1028511 - DNA, 15 bp, Homo sapiens
tgagatccacgagcc

SEQ ID NO: 1028512 - DNA, 15 bp, Homo sapiens
ttgagatccacgagc

SEQ ID NO: 1028513 - DNA, 15 bp, Homo sapiens
cttgagatccacgag

SEQ ID NO: 1028514 - DNA, 15 bp, Homo sapiens
gcttgagatccacga

SEQ ID NO: 1028515 - DNA, 15 bp, Homo sapiens
agcttgagatccacg

SEQ ID NO: 1028516 - DNA, 15 bp, Homo sapiens
tagcttgagatccac

SEQ ID NO: 1028517 - DNA, 15 bp, Homo sapiens
ctagcttgagatcca

SEQ ID NO: 1028518 - DNA, 15 bp, Homo sapiens
cctagcttgagatcc

SEQ ID NO: 1028519 - DNA, 15 bp, Homo sapiens
ccctagcttgagatc

SEQ ID NO: 1028520 - DNA, 15 bp, Homo sapiens
gccctagcttgagat

SEQ ID NO: 1028521 - DNA, 15 bp, Homo sapiens
cgccctagcttgaga

SEQ ID NO: 1028522 - DNA, 15 bp, Homo sapiens
gcgccctagcttgag

SEQ ID NO: 1028523 - DNA, 15 bp, Homo sapiens
agcgccctagcttga

SEQ ID NO: 1028524 - DNA, 15 bp, Homo sapiens
gagcgccctagcttg

SEQ ID NO: 1028525 - DNA, 15 bp, Homo sapiens
ggagcgccctagctt

SEQ ID NO: 1028526 - DNA, 15 bp, Homo sapiens
aggagcgccctagct

SEQ ID NO: 1028527 - DNA, 15 bp, Homo sapiens
caggagcgccctagc

SEQ ID NO: 1028528 - DNA, 15 bp, Homo sapiens
ccaggagcgccctag

SEQ ID NO: 1028529 - DNA, 15 bp, Homo sapiens
gccaggagcgcccta

SEQ ID NO: 1028530 - DNA, 15 bp, Homo sapiens
ggccaggagcgccct

SEQ ID NO: 1028531 - DNA, 15 bp, Homo sapiens
tggccaggagcgccc

SEQ ID NO: 1028532 - DNA, 15 bp, Homo sapiens
ctggccaggagcgcc

SEQ ID NO: 1028533 - DNA, 15 bp, Homo sapiens
tctggccaggagcgc

SEQ ID NO: 1028534 - DNA, 15 bp, Homo sapiens
atctggccaggagcg

SEQ ID NO: 1028535 - DNA, 15 bp, Homo sapiens
catctggccaggagc

SEQ ID NO: 1028536 - DNA, 15 bp, Homo sapiens
tcatctggccaggag

SEQ ID NO: 1028537 - DNA, 15 bp, Homo sapiens
ctcatctggccagga

SEQ ID NO: 1028538 - DNA, 15 bp, Homo sapiens
tctcatctggccagg

SEQ ID NO: 1028539 - DNA, 15 bp, Homo sapiens
ctctcatctggccag

SEQ ID NO: 1028540 - DNA, 15 bp, Homo sapiens
actctcatctggcca

SEQ ID NO: 1028541 - DNA, 15 bp, Homo sapiens
cactctcatctggcc

SEQ ID NO: 1028542 - DNA, 15 bp, Homo sapiens
ccactctcatctggc

SEQ ID NO: 1028543 - DNA, 15 bp, Homo sapiens
gccactctcatctgg

SEQ ID NO: 1028544 - DNA, 15 bp, Homo sapiens
tgccactctcatctg

SEQ ID NO: 1028545 - DNA, 15 bp, Homo sapiens
gtgccactctcatct

SEQ ID NO: 1028546 - DNA, 15 bp, Homo sapiens
tgtgccactctcatc

SEQ ID NO: 1028547 - DNA, 15 bp, Homo sapiens
ctgtgccactctcat

SEQ ID NO: 1028548 - DNA, 15 bp, Homo sapiens
tctgtgccactctca

SEQ ID NO: 1028549 - DNA, 15 bp, Homo sapiens
gtctgtgccactctc

SEQ ID NO: 1028550 - DNA, 15 bp, Homo sapiens
ggtctgtgccactct

SEQ ID NO: 1028551 - DNA, 15 bp, Homo sapiens
gggtctgtgccactc

SEQ ID NO: 1028552 - DNA, 15 bp, Homo sapiens
agggtctgtgccact

SEQ ID NO: 1028553 - DNA, 15 bp, Homo sapiens
gagggtctgtgccac

SEQ ID NO: 1028554 - DNA, 15 bp, Homo sapiens
cgagggtctgtgcca

SEQ ID NO: 1028555 - DNA, 15 bp, Homo sapiens
ccgagggtctgtgcc

SEQ ID NO: 1028556 - DNA, 15 bp, Homo sapiens
cccgagggtctgtgc

SEQ ID NO: 1028557 - DNA, 15 bp, Homo sapiens
tcccgagggtctgtg

SEQ ID NO: 1028558 - DNA, 15 bp, Homo sapiens
ttcccgagggtctgt

SEQ ID NO: 1028559 - DNA, 15 bp, Homo sapiens
attcccgagggtctg

SEQ ID NO: 1028560 - DNA, 15 bp, Homo sapiens
gattcccgagggtct

SEQ ID NO: 1028561 - DNA, 15 bp, Homo sapiens
ggattcccgagggtc

SEQ ID NO: 1028562 - DNA, 15 bp, Homo sapiens
aggattcccgagggt

SEQ ID NO: 1028563 - DNA, 15 bp, Homo sapiens
taggattcccgaggg

SEQ ID NO: 1028564 - DNA, 15 bp, Homo sapiens
ctaggattcccgagg

SEQ ID NO: 1028565 - DNA, 15 bp, Homo sapiens
cctaggattcccgag

SEQ ID NO: 1028566 - DNA, 15 bp, Homo sapiens
acctaggattcccga

SEQ ID NO: 1028567 - DNA, 15 bp, Homo sapiens
aacctaggattcccg

SEQ ID NO: 1028568 - DNA, 15 bp, Homo sapiens
caacctaggattccc

SEQ ID NO: 1028569 - DNA, 15 bp, Homo sapiens
tcaacctaggattcc

SEQ ID NO: 1028570 - DNA, 15 bp, Homo sapiens
ctcaacctaggattc

SEQ ID NO: 1028571 - DNA, 15 bp, Homo sapiens
tctcaacctaggatt

SEQ ID NO: 1028572 - DNA, 15 bp, Homo sapiens
ttctcaacctaggat

SEQ ID NO: 1028573 - DNA, 15 bp, Homo sapiens
cttctcaacctagga

SEQ ID NO: 1028574 - DNA, 15 bp, Homo sapiens
gcttctcaacctagg

SEQ ID NO: 1028575 - DNA, 15 bp, Homo sapiens
tgcttctcaacctag

SEQ ID NO: 1028576 - DNA, 15 bp, Homo sapiens
ttgcttctcaaccta

SEQ ID NO: 1028577 - DNA, 15 bp, Homo sapiens
gttgcttctcaacct

SEQ ID NO: 1028578 - DNA, 15 bp, Homo sapiens
cgttgcttctcaacc

SEQ ID NO: 1028579 - DNA, 15 bp, Homo sapiens
gcgttgcttctcaac

SEQ ID NO: 1028580 - DNA, 15 bp, Homo sapiens
agcgttgcttctcaa

SEQ ID NO: 1028581 - DNA, 15 bp, Homo sapiens
gagcgttgcttctca

SEQ ID NO: 1028582 - DNA, 15 bp, Homo sapiens
ggagcgttgcttctc

SEQ ID NO: 1028583 - DNA, 15 bp, Homo sapiens
aggagcgttgcttct

SEQ ID NO: 1028584 - DNA, 15 bp, Homo sapiens
caggagcgttgcttc

SEQ ID NO: 1028585 - DNA, 15 bp, Homo sapiens
ccaggagcgttgctt

SEQ ID NO: 1028586 - DNA, 15 bp, Homo sapiens
gccaggagcgttgct

SEQ ID NO: 1028587 - DNA, 15 bp, Homo sapiens
cgccaggagcgttgc

SEQ ID NO: 1028588 - DNA, 15 bp, Homo sapiens
ccgccaggagcgttg

SEQ ID NO: 1028589 - DNA, 15 bp, Homo sapiens
gccgccaggagcgtt

SEQ ID NO: 1028590 - DNA, 15 bp, Homo sapiens
agccgccaggagcgt

SEQ ID NO: 1028591 - DNA, 15 bp, Homo sapiens
tagccgccaggagcg

SEQ ID NO: 1028592 - DNA, 15 bp, Homo sapiens
ctagccgccaggagc

SEQ ID NO: 1028593 - DNA, 15 bp, Homo sapiens
actagccgccaggag

SEQ ID NO: 1028594 - DNA, 15 bp, Homo sapiens
cactagccgccagga

SEQ ID NO: 1028595 - DNA, 15 bp, Homo sapiens
acactagccgccagg

SEQ ID NO: 1028596 - DNA, 15 bp, Homo sapiens
aacactagccgccag

SEQ ID NO: 1028597 - DNA, 15 bp, Homo sapiens
aaacactagccgcca

SEQ ID NO: 1028598 - DNA, 15 bp, Homo sapiens
caaacactagccgcc

SEQ ID NO: 1028599 - DNA, 15 bp, Homo sapiens
ccaaacactagccgc

SEQ ID NO: 1028600 - DNA, 15 bp, Homo sapiens
cccaaacactagccg

SEQ ID NO: 1028601 - DNA, 15 bp, Homo sapiens
tcccaaacactagcc

SEQ ID NO: 1028602 - DNA, 15 bp, Homo sapiens
ttcccaaacactagc

SEQ ID NO: 1028603 - DNA, 15 bp, Homo sapiens
tttcccaaacactag

SEQ ID NO: 1028604 - DNA, 15 bp, Homo sapiens
gtttcccaaacacta

SEQ ID NO: 1028605 - DNA, 15 bp, Homo sapiens
agtttcccaaacact

SEQ ID NO: 1028606 - DNA, 15 bp, Homo sapiens
aagtttcccaaacac

SEQ ID NO: 1028607 - DNA, 15 bp, Homo sapiens
caagtttcccaaaca

SEQ ID NO: 1028608 - DNA, 15 bp, Homo sapiens
ccaagtttcccaaac

SEQ ID NO: 1028609 - DNA, 15 bp, Homo sapiens
tccaagtttcccaaa

SEQ ID NO: 1028610 - DNA, 15 bp, Homo sapiens
ctccaagtttcccaa

SEQ ID NO: 1028611 - DNA, 15 bp, Homo sapiens
gctccaagtttccca

SEQ ID NO: 1028612 - DNA, 15 bp, Homo sapiens
tgctccaagtttccc

SEQ ID NO: 1028613 - DNA, 15 bp, Homo sapiens
ctgctccaagtttcc

SEQ ID NO: 1028614 - DNA, 15 bp, Homo sapiens
cctgctccaagtttc

SEQ ID NO: 1028615 - DNA, 15 bp, Homo sapiens
tcctgctccaagttt

SEQ ID NO: 1028616 - DNA, 15 bp, Homo sapiens
ctcctgctccaagtt

SEQ ID NO: 1028617 - DNA, 15 bp, Homo sapiens
tctcctgctccaagt

SEQ ID NO: 1028618 - DNA, 15 bp, Homo sapiens
ctctcctgctccaag

SEQ ID NO: 1028619 - DNA, 15 bp, Homo sapiens
gctctcctgctccaa

SEQ ID NO: 1028620 - DNA, 15 bp, Homo sapiens
ggctctcctgctcca

SEQ ID NO: 1028621 - DNA, 15 bp, Homo sapiens
aggctctcctgctcc

SEQ ID NO: 1028622 - DNA, 15 bp, Homo sapiens
caggctctcctgctc

SEQ ID NO: 1028623 - DNA, 15 bp, Homo sapiens
ccaggctctcctgct

SEQ ID NO: 1028624 - DNA, 15 bp, Homo sapiens
gccaggctctcctgc

SEQ ID NO: 1028625 - DNA, 15 bp, Homo sapiens
cgccaggctctcctg

SEQ ID NO: 1028626 - DNA, 15 bp, Homo sapiens
tcgccaggctctcct

SEQ ID NO: 1028627 - DNA, 15 bp, Homo sapiens
ttcgccaggctctcc

SEQ ID NO: 1028628 - DNA, 15 bp, Homo sapiens
cttcgccaggctctc

SEQ ID NO: 1028629 - DNA, 15 bp, Homo sapiens
gcttcgccaggctct

SEQ ID NO: 1028630 - DNA, 15 bp, Homo sapiens
ggcttcgccaggctc

SEQ ID NO: 1028631 - DNA, 15 bp, Homo sapiens
aggcttcgccaggct

SEQ ID NO: 1028632 - DNA, 15 bp, Homo sapiens
caggcttcgccaggc

SEQ ID NO: 1028633 - DNA, 15 bp, Homo sapiens
acaggcttcgccagg

SEQ ID NO: 1028634 - DNA, 15 bp, Homo sapiens
cacaggcttcgccag

SEQ ID NO: 1028635 - DNA, 15 bp, Homo sapiens
gcacaggcttcgcca

SEQ ID NO: 1028636 - DNA, 15 bp, Homo sapiens
tgcacaggcttcgcc

SEQ ID NO: 1028637 - DNA, 15 bp, Homo sapiens
ctgcacaggcttcgc

SEQ ID NO: 1028638 - DNA, 15 bp, Homo sapiens
cctgcacaggcttcg

SEQ ID NO: 1028639 - DNA, 15 bp, Homo sapiens
tcctgcacaggcttc

SEQ ID NO: 1028640 - DNA, 15 bp, Homo sapiens
ttcctgcacaggctt

SEQ ID NO: 1028641 - DNA, 15 bp, Homo sapiens
cttcctgcacaggct

SEQ ID NO: 1028642 - DNA, 15 bp, Homo sapiens
tcttcctgcacaggc

SEQ ID NO: 1028643 - DNA, 15 bp, Homo sapiens
gtcttcctgcacagg

SEQ ID NO: 1028644 - DNA, 15 bp, Homo sapiens
ggtcttcctgcacag

SEQ ID NO: 1028645 - DNA, 15 bp, Homo sapiens
cggtcttcctgcaca

SEQ ID NO: 1028646 - DNA, 15 bp, Homo sapiens
tcggtcttcctgcac

SEQ ID NO: 1028647 - DNA, 15 bp, Homo sapiens
ctcggtcttcctgca

SEQ ID NO: 1028648 - DNA, 15 bp, Homo sapiens
gctcggtcttcctgc

SEQ ID NO: 1028649 - DNA, 15 bp, Homo sapiens
tgctcggtcttcctg

SEQ ID NO: 1028650 - DNA, 15 bp, Homo sapiens
ctgctcggtcttcct

SEQ ID NO: 1028651 - DNA, 15 bp, Homo sapiens
gctgctcggtcttcc

SEQ ID NO: 1028652 - DNA, 15 bp, Homo sapiens
agctgctcggtcttc

SEQ ID NO: 1028653 - DNA, 15 bp, Homo sapiens
gagctgctcggtctt

SEQ ID NO: 1028654 - DNA, 15 bp, Homo sapiens
cgagctgctcggtct

SEQ ID NO: 1028655 - DNA, 15 bp, Homo sapiens
gcgagctgctcggtc

SEQ ID NO: 1028656 - DNA, 15 bp, Homo sapiens
ggcgagctgctcggt

SEQ ID NO: 1028657 - DNA, 15 bp, Homo sapiens
cggcgagctgctcgg

SEQ ID NO: 1028658 - DNA, 15 bp, Homo sapiens
gcggcgagctgctcg

SEQ ID NO: 1028659 - DNA, 15 bp, Homo sapiens
cgcggcgagctgctc

SEQ ID NO: 1028660 - DNA, 15 bp, Homo sapiens
acgcggcgagctgct

SEQ ID NO: 1028661 - DNA, 15 bp, Homo sapiens
gacgcggcgagctgc

SEQ ID NO: 1028662 - DNA, 15 bp, Homo sapiens
tgacgcggcgagctg

SEQ ID NO: 1028663 - DNA, 15 bp, Homo sapiens
ctgacgcggcgagct

SEQ ID NO: 1028664 - DNA, 15 bp, Homo sapiens
cctgacgcggcgagc

SEQ ID NO: 1028665 - DNA, 15 bp, Homo sapiens
acctgacgcggcgag

SEQ ID NO: 1028666 - DNA, 15 bp, Homo sapiens
gacctgacgcggcga

SEQ ID NO: 1028667 - DNA, 15 bp, Homo sapiens
ggacctgacgcggcg

SEQ ID NO: 1028668 - DNA, 15 bp, Homo sapiens
gggacctgacgcggc

SEQ ID NO: 1028669 - DNA, 15 bp, Homo sapiens
tgggacctgacgcgg

SEQ ID NO: 1028670 - DNA, 15 bp, Homo sapiens
ttgggacctgacgcg

SEQ ID NO: 1028671 - DNA, 15 bp, Homo sapiens
gttgggacctgacgc

SEQ ID NO: 1028672 - DNA, 15 bp, Homo sapiens
cgttgggacctgacg

SEQ ID NO: 1028673 - DNA, 15 bp, Homo sapiens
ccgttgggacctgac

SEQ ID NO: 1028674 - DNA, 15 bp, Homo sapiens
cccgttgggacctga

SEQ ID NO: 1028675 - DNA, 15 bp, Homo sapiens
acccgttgggacctg

SEQ ID NO: 1028676 - DNA, 15 bp, Homo sapiens
cacccgttgggacct

SEQ ID NO: 1028677 - DNA, 15 bp, Homo sapiens
ccacccgttgggacc

SEQ ID NO: 1028678 - DNA, 15 bp, Homo sapiens
cccacccgttgggac

SEQ ID NO: 1028679 - DNA, 15 bp, Homo sapiens
ccccacccgttggga

SEQ ID NO: 1028680 - DNA, 15 bp, Homo sapiens
accccacccgttggg

SEQ ID NO: 1028681 - DNA, 15 bp, Homo sapiens
caccccacccgttgg

SEQ ID NO: 1028682 - DNA, 15 bp, Homo sapiens
gcaccccacccgttg

SEQ ID NO: 1028683 - DNA, 15 bp, Homo sapiens
agcaccccacccgtt

SEQ ID NO: 1028684 - DNA, 15 bp, Homo sapiens
gagcaccccacccgt

SEQ ID NO: 1028685 - DNA, 15 bp, Homo sapiens
agagcaccccacccg

SEQ ID NO: 1028686 - DNA, 15 bp, Homo sapiens
cagagcaccccaccc

SEQ ID NO: 1028687 - DNA, 15 bp, Homo sapiens
tcagagcaccccacc

SEQ ID NO: 1028688 - DNA, 15 bp, Homo sapiens
ctcagagcaccccac

SEQ ID NO: 1028689 - DNA, 15 bp, Homo sapiens
gctcagagcacccca

SEQ ID NO: 1028690 - DNA, 15 bp, Homo sapiens
cgctcagagcacccc

SEQ ID NO: 1028691 - DNA, 15 bp, Homo sapiens
ccgctcagagcaccc

SEQ ID NO: 1028692 - DNA, 15 bp, Homo sapiens
gccgctcagagcacc

SEQ ID NO: 1028693 - DNA, 15 bp, Homo sapiens
agccgctcagagcac

SEQ ID NO: 1028694 - DNA, 15 bp, Homo sapiens
cagccgctcagagca

SEQ ID NO: 1028695 - DNA, 15 bp, Homo sapiens
ccagccgctcagagc

SEQ ID NO: 1028696 - DNA, 15 bp, Homo sapiens
gccagccgctcagag

SEQ ID NO: 1028697 - DNA, 15 bp, Homo sapiens
cgccagccgctcaga

SEQ ID NO: 1028698 - DNA, 15 bp, Homo sapiens
gcgccagccgctcag

SEQ ID NO: 1028699 - DNA, 15 bp, Homo sapiens
tgcgccagccgctca

SEQ ID NO: 1028700 - DNA, 15 bp, Homo sapiens
gtgcgccagccgctc

SEQ ID NO: 1028701 - DNA, 15 bp, Homo sapiens
tgtgcgccagccgct

SEQ ID NO: 1028702 - DNA, 15 bp, Homo sapiens
ctgtgcgccagccgc

SEQ ID NO: 1028703 - DNA, 15 bp, Homo sapiens
gctgtgcgccagccg

SEQ ID NO: 1028704 - DNA, 15 bp, Homo sapiens
cgctgtgcgccagcc

SEQ ID NO: 1028705 - DNA, 15 bp, Homo sapiens
acgctgtgcgccagc

SEQ ID NO: 1028706 - DNA, 15 bp, Homo sapiens
cacgctgtgcgccag

SEQ ID NO: 1028707 - DNA, 15 bp, Homo sapiens
acacgctgtgcgcca

SEQ ID NO: 1028708 - DNA, 15 bp, Homo sapiens
aacacgctgtgcgcc

SEQ ID NO: 1028709 - DNA, 15 bp, Homo sapiens
gaacacgctgtgcgc

SEQ ID NO: 1028710 - DNA, 15 bp, Homo sapiens
ggaacacgctgtgcg

SEQ ID NO: 1028711 - DNA, 15 bp, Homo sapiens
gggaacacgctgtgc

SEQ ID NO: 1028712 - DNA, 15 bp, Homo sapiens
agggaacacgctgtg

SEQ ID NO: 1028713 - DNA, 15 bp, Homo sapiens
cagggaacacgctgt

SEQ ID NO: 1028714 - DNA, 15 bp, Homo sapiens
gcagggaacacgctg

SEQ ID NO: 1028715 - DNA, 15 bp, Homo sapiens
tgcagggaacacgct

SEQ ID NO: 1028716 - DNA, 15 bp, Homo sapiens
atgcagggaacacgc

SEQ ID NO: 1028717 - DNA, 15 bp, Homo sapiens
aatgcagggaacacg

SEQ ID NO: 1028718 - DNA, 15 bp, Homo sapiens
taatgcagggaacac

SEQ ID NO: 1028719 - DNA, 15 bp, Homo sapiens
ttaatgcagggaaca

SEQ ID NO: 1028720 - DNA, 15 bp, Homo sapiens
cttaatgcagggaac

SEQ ID NO: 1028721 - DNA, 15 bp, Homo sapiens
gcttaatgcagggaa

SEQ ID NO: 1028722 - DNA, 15 bp, Homo sapiens
cgcttaatgcaggga

SEQ ID NO: 1028723 - DNA, 15 bp, Homo sapiens
gcgcttaatgcaggg

SEQ ID NO: 1028724 - DNA, 15 bp, Homo sapiens
cgcgcttaatgcagg

SEQ ID NO: 1028725 - DNA, 15 bp, Homo sapiens
acgcgcttaatgcag

SEQ ID NO: 1028726 - DNA, 15 bp, Homo sapiens
cacgcgcttaatgca

SEQ ID NO: 1028727 - DNA, 15 bp, Homo sapiens
gcacgcgcttaatgc

SEQ ID NO: 1028728 - DNA, 15 bp, Homo sapiens
cgcacgcgcttaatg

SEQ ID NO: 1028729 - DNA, 15 bp, Homo sapiens
gcgcacgcgcttaat

SEQ ID NO: 1028730 - DNA, 15 bp, Homo sapiens
cgcgcacgcgcttaa

SEQ ID NO: 1028731 - DNA, 15 bp, Homo sapiens
gcgcgcacgcgctta

SEQ ID NO: 1028732 - DNA, 15 bp, Homo sapiens
cgcgcgcacgcgctt

SEQ ID NO: 1028733 - DNA, 15 bp, Homo sapiens
gcgcgcgcacgcgct

SEQ ID NO: 1028734 - DNA, 15 bp, Homo sapiens
agcgcgcgcacgcgc

SEQ ID NO: 1028735 - DNA, 15 bp, Homo sapiens
aagcgcgcgcacgcg

SEQ ID NO: 1028736 - DNA, 15 bp, Homo sapiens
caagcgcgcgcacgc

SEQ ID NO: 1028737 - DNA, 15 bp, Homo sapiens
acaagcgcgcgcacg

SEQ ID NO: 1028738 - DNA, 15 bp, Homo sapiens
cacaagcgcgcgcac

SEQ ID NO: 1028739 - DNA, 15 bp, Homo sapiens
acacaagcgcgcgca

SEQ ID NO: 1028740 - DNA, 15 bp, Homo sapiens
cacacaagcgcgcgc

SEQ ID NO: 1028741 - DNA, 15 bp, Homo sapiens
acacacaagcgcgcg

SEQ ID NO: 1028742 - DNA, 15 bp, Homo sapiens
cacacacaagcgcgc

SEQ ID NO: 1028743 - DNA, 15 bp, Homo sapiens
tcacacacaagcgcg

SEQ ID NO: 1028744 - DNA, 15 bp, Homo sapiens
ctcacacacaagcgc

SEQ ID NO: 1028745 - DNA, 15 bp, Homo sapiens
gctcacacacaagcg

SEQ ID NO: 1028746 - DNA, 15 bp, Homo sapiens
cgctcacacacaagc

SEQ ID NO: 1028747 - DNA, 15 bp, Homo sapiens
gcgctcacacacaag

SEQ ID NO: 1028748 - DNA, 15 bp, Homo sapiens
cgcgctcacacacaa

SEQ ID NO: 1028749 - DNA, 15 bp, Homo sapiens
acgcgctcacacaca

SEQ ID NO: 1028750 - DNA, 15 bp, Homo sapiens
gacgcgctcacacac

SEQ ID NO: 1028751 - DNA, 15 bp, Homo sapiens
agacgcgctcacaca

SEQ ID NO: 1028752 - DNA, 15 bp, Homo sapiens
cagacgcgctcacac

SEQ ID NO: 1028753 - DNA, 15 bp, Homo sapiens
acagacgcgctcaca

SEQ ID NO: 1028754 - DNA, 15 bp, Homo sapiens
cacagacgcgctcac

SEQ ID NO: 1028755 - DNA, 15 bp, Homo sapiens
gcacagacgcgctca

SEQ ID NO: 1028756 - DNA, 15 bp, Homo sapiens
tgcacagacgcgctc

SEQ ID NO: 1028757 - DNA, 15 bp, Homo sapiens
atgcacagacgcgct

SEQ ID NO: 1028758 - DNA, 15 bp, Homo sapiens
catgcacagacgcgc

SEQ ID NO: 1028759 - DNA, 15 bp, Homo sapiens
acatgcacagacgcg

SEQ ID NO: 1028760 - DNA, 15 bp, Homo sapiens
cacatgcacagacgc

SEQ ID NO: 1028761 - DNA, 15 bp, Homo sapiens
acacatgcacagacg

SEQ ID NO: 1028762 - DNA, 15 bp, Homo sapiens
cacacatgcacagac

SEQ ID NO: 1028763 - DNA, 15 bp, Homo sapiens
gcacacatgcacaga

SEQ ID NO: 1028764 - DNA, 15 bp, Homo sapiens
tgcacacatgcacag

SEQ ID NO: 1028765 - DNA, 15 bp, Homo sapiens
atgcacacatgcaca

SEQ ID NO: 1028766 - DNA, 15 bp, Homo sapiens
catgcacacatgcac

SEQ ID NO: 1028767 - DNA, 15 bp, Homo sapiens
gcatgcacacatgca

SEQ ID NO: 1028768 - DNA, 15 bp, Homo sapiens
cgcatgcacacatgc

SEQ ID NO: 1028769 - DNA, 15 bp, Homo sapiens
acgcatgcacacatg

SEQ ID NO: 1028770 - DNA, 15 bp, Homo sapiens
cacgcatgcacacat

SEQ ID NO: 1028771 - DNA, 15 bp, Homo sapiens
gcacgcatgcacaca

SEQ ID NO: 1028772 - DNA, 15 bp, Homo sapiens
tatctctctctctct

SEQ ID NO: 1028773 - DNA, 15 bp, Homo sapiens
ctatctctctctctc

SEQ ID NO: 1028774 - DNA, 15 bp, Homo sapiens
cctatctctctctct

SEQ ID NO: 1028775 - DNA, 15 bp, Homo sapiens
tcctatctctctctc

SEQ ID NO: 1028776 - DNA, 15 bp, Homo sapiens
gtcctatctctctct

SEQ ID NO: 1028777 - DNA, 15 bp, Homo sapiens
agtcctatctctctc

SEQ ID NO: 1028778 - DNA, 15 bp, Homo sapiens
aagtcctatctctct

SEQ ID NO: 1028779 - DNA, 15 bp, Homo sapiens
gaagtcctatctctc

SEQ ID NO: 1028780 - DNA, 15 bp, Homo sapiens
ggaagtcctatctct

SEQ ID NO: 1028781 - DNA, 15 bp, Homo sapiens
aggaagtcctatctc

SEQ ID NO: 1028782 - DNA, 15 bp, Homo sapiens
gaggaagtcctatct

SEQ ID NO: 1028783 - DNA, 15 bp, Homo sapiens
ggaggaagtcctatc

SEQ ID NO: 1028784 - DNA, 15 bp, Homo sapiens
gggaggaagtcctat

SEQ ID NO: 1028785 - DNA, 15 bp, Homo sapiens
ggggaggaagtccta

SEQ ID NO: 1028786 - DNA, 15 bp, Homo sapiens
cggggaggaagtcct

SEQ ID NO: 1028787 - DNA, 15 bp, Homo sapiens
tcggggaggaagtcc

SEQ ID NO: 1028788 - DNA, 15 bp, Homo sapiens
atcggggaggaagtc

SEQ ID NO: 1028789 - DNA, 15 bp, Homo sapiens
aatcggggaggaagt

SEQ ID NO: 1028790 - DNA, 15 bp, Homo sapiens
gaatcggggaggaag

SEQ ID NO: 1028791 - DNA, 15 bp, Homo sapiens
cgaatcggggaggaa

SEQ ID NO: 1028792 - DNA, 15 bp, Homo sapiens
gcgaatcggggagga

SEQ ID NO: 1028793 - DNA, 15 bp, Homo sapiens
tgcgaatcggggagg

SEQ ID NO: 1028794 - DNA, 15 bp, Homo sapiens
ttgcgaatcggggag

SEQ ID NO: 1028795 - DNA, 15 bp, Homo sapiens
tttgcgaatcgggga

SEQ ID NO: 1028796 - DNA, 15 bp, Homo sapiens
ctttgcgaatcgggg

SEQ ID NO: 1028797 - DNA, 15 bp, Homo sapiens
actttgcgaatcggg

SEQ ID NO: 1028798 - DNA, 15 bp, Homo sapiens
cactttgcgaatcgg

SEQ ID NO: 1028799 - DNA, 15 bp, Homo sapiens
tcactttgcgaatcg

SEQ ID NO: 1028800 - DNA, 15 bp, Homo sapiens
ttcactttgcgaatc

SEQ ID NO: 1028801 - DNA, 15 bp, Homo sapiens
cttcactttgcgaat

SEQ ID NO: 1028802 - DNA, 15 bp, Homo sapiens
acttcactttgcgaa

SEQ ID NO: 1028803 - DNA, 15 bp, Homo sapiens
gacttcactttgcga

SEQ ID NO: 1028804 - DNA, 15 bp, Homo sapiens
tgacttcactttgcg

SEQ ID NO: 1028805 - DNA, 15 bp, Homo sapiens
gtgacttcactttgc

SEQ ID NO: 1028806 - DNA, 15 bp, Homo sapiens
agtgacttcactttg

SEQ ID NO: 1028807 - DNA, 15 bp, Homo sapiens
aagtgacttcacttt

SEQ ID NO: 1028808 - DNA, 15 bp, Homo sapiens
gaagtgacttcactt

SEQ ID NO: 1028809 - DNA, 15 bp, Homo sapiens
ggaagtgacttcact

SEQ ID NO: 1028810 - DNA, 15 bp, Homo sapiens
gggaagtgacttcac

SEQ ID NO: 1028811 - DNA, 15 bp, Homo sapiens
tgggaagtgacttca

SEQ ID NO: 1028812 - DNA, 15 bp, Homo sapiens
ttgggaagtgacttc

SEQ ID NO: 1028813 - DNA, 15 bp, Homo sapiens
tttgggaagtgactt

SEQ ID NO: 1028814 - DNA, 15 bp, Homo sapiens
ttttgggaagtgact

SEQ ID NO: 1028815 - DNA, 15 bp, Homo sapiens
attttgggaagtgac

SEQ ID NO: 1028816 - DNA, 15 bp, Homo sapiens
aattttgggaagtga

SEQ ID NO: 1028817 - DNA, 15 bp, Homo sapiens
taattttgggaagtg

SEQ ID NO: 1028818 - DNA, 15 bp, Homo sapiens
ctaattttgggaagt

SEQ ID NO: 1028819 - DNA, 15 bp, Homo sapiens
gctaattttgggaag

SEQ ID NO: 1028820 - DNA, 15 bp, Homo sapiens
agctaattttgggaa

SEQ ID NO: 1028821 - DNA, 15 bp, Homo sapiens
cagctaattttggga

SEQ ID NO: 1028822 - DNA, 15 bp, Homo sapiens
tcagctaattttggg

SEQ ID NO: 1028823 - DNA, 15 bp, Homo sapiens
ttcagctaattttgg

SEQ ID NO: 1028824 - DNA, 15 bp, Homo sapiens
tttcagctaattttg

SEQ ID NO: 1028825 - DNA, 15 bp, Homo sapiens
ttttcagctaatttt

SEQ ID NO: 1028826 - DNA, 15 bp, Homo sapiens
tttttcagctaattt

SEQ ID NO: 1028827 - DNA, 15 bp, Homo sapiens
ttttttcagctaatt

SEQ ID NO: 1028828 - DNA, 15 bp, Homo sapiens
tttttttcagctaat

SEQ ID NO: 1028829 - DNA, 15 bp, Homo sapiens
ttttttttcagctaa

SEQ ID NO: 1028830 - DNA, 15 bp, Homo sapiens
cttttttttcagcta

SEQ ID NO: 1028831 - DNA, 15 bp, Homo sapiens
acttttttttcagct

SEQ ID NO: 1028832 - DNA, 15 bp, Homo sapiens
aacttttttttcagc

SEQ ID NO: 1028833 - DNA, 15 bp, Homo sapiens
aaacttttttttcag

SEQ ID NO: 1028834 - DNA, 15 bp, Homo sapiens
gaaacttttttttca

SEQ ID NO: 1028835 - DNA, 15 bp, Homo sapiens
tgaaacttttttttc

SEQ ID NO: 1028836 - DNA, 15 bp, Homo sapiens
atgaaactttttttt

SEQ ID NO: 1028837 - DNA, 15 bp, Homo sapiens
gatgaaacttttttt

SEQ ID NO: 1028838 - DNA, 15 bp, Homo sapiens
ggatgaaactttttt

SEQ ID NO: 1028839 - DNA, 15 bp, Homo sapiens
cggatgaaacttttt

SEQ ID NO: 1028840 - DNA, 15 bp, Homo sapiens
ccggatgaaactttt

SEQ ID NO: 1028841 - DNA, 15 bp, Homo sapiens
accggatgaaacttt

SEQ ID NO: 1028842 - DNA, 15 bp, Homo sapiens
aaccggatgaaactt

SEQ ID NO: 1028843 - DNA, 15 bp, Homo sapiens
taaccggatgaaact

SEQ ID NO: 1028844 - DNA, 15 bp, Homo sapiens
ttaaccggatgaaac

SEQ ID NO: 1028845 - DNA, 15 bp, Homo sapiens
gttaaccggatgaaa

SEQ ID NO: 1028846 - DNA, 15 bp, Homo sapiens
agttaaccggatgaa

SEQ ID NO: 1028847 - DNA, 15 bp, Homo sapiens
cagttaaccggatga

SEQ ID NO: 1028848 - DNA, 15 bp, Homo sapiens
acagttaaccggatg

SEQ ID NO: 1028849 - DNA, 15 bp, Homo sapiens
gacagttaaccggat

SEQ ID NO: 1028850 - DNA, 15 bp, Homo sapiens
agacagttaaccgga

SEQ ID NO: 1028851 - DNA, 15 bp, Homo sapiens
gagacagttaaccgg

SEQ ID NO: 1028852 - DNA, 15 bp, Homo sapiens
agagacagttaaccg

SEQ ID NO: 1028853 - DNA, 15 bp, Homo sapiens
aagagacagttaacc

SEQ ID NO: 1028854 - DNA, 15 bp, Homo sapiens
aaagagacagttaac

SEQ ID NO: 1028855 - DNA, 15 bp, Homo sapiens
gaaagagacagttaa

SEQ ID NO: 1028856 - DNA, 15 bp, Homo sapiens
cgaaagagacagtta

SEQ ID NO: 1028857 - DNA, 15 bp, Homo sapiens
gcgaaagagacagtt

SEQ ID NO: 1028858 - DNA, 15 bp, Homo sapiens
agcgaaagagacagt

SEQ ID NO: 1028859 - DNA, 15 bp, Homo sapiens
gagcgaaagagacag

SEQ ID NO: 1028860 - DNA, 15 bp, Homo sapiens
ggagcgaaagagaca

SEQ ID NO: 1028861 - DNA, 15 bp, Homo sapiens
cggagcgaaagagac

SEQ ID NO: 1028862 - DNA, 15 bp, Homo sapiens
gcggagcgaaagaga

SEQ ID NO: 1028863 - DNA, 15 bp, Homo sapiens
agcggagcgaaagag

SEQ ID NO: 1028864 - DNA, 15 bp, Homo sapiens
tagcggagcgaaaga

SEQ ID NO: 1028865 - DNA, 15 bp, Homo sapiens
gtagcggagcgaaag

SEQ ID NO: 1028866 - DNA, 15 bp, Homo sapiens
tgtagcggagcgaaa

SEQ ID NO: 1028867 - DNA, 15 bp, Homo sapiens
ttgtagcggagcgaa

SEQ ID NO: 1028868 - DNA, 15 bp, Homo sapiens
gttgtagcggagcga

SEQ ID NO: 1028869 - DNA, 15 bp, Homo sapiens
tgttgtagcggagcg

SEQ ID NO: 1028870 - DNA, 15 bp, Homo sapiens
ttgttgtagcggagc

SEQ ID NO: 1028871 - DNA, 15 bp, Homo sapiens
gttgttgtagcggag

SEQ ID NO: 1028872 - DNA, 15 bp, Homo sapiens
tgttgttgtagcgga

SEQ ID NO: 1028873 - DNA, 15 bp, Homo sapiens
ttgttgttgtagcgg

SEQ ID NO: 1028874 - DNA, 15 bp, Homo sapiens
tttgttgttgtagcg

SEQ ID NO: 1028875 - DNA, 15 bp, Homo sapiens
gtttgttgttgtagc

SEQ ID NO: 1028876 - DNA, 15 bp, Homo sapiens
cgtttgttgttgtag

SEQ ID NO: 1028877 - DNA, 15 bp, Homo sapiens
acgtttgttgttgta

SEQ ID NO: 1028878 - DNA, 15 bp, Homo sapiens
cacgtttgttgttgt

SEQ ID NO: 1028879 - DNA, 15 bp, Homo sapiens
gcacgtttgttgttg

SEQ ID NO: 1028880 - DNA, 15 bp, Homo sapiens
tgcacgtttgttgtt

SEQ ID NO: 1028881 - DNA, 15 bp, Homo sapiens
gtgcacgtttgttgt

SEQ ID NO: 1028882 - DNA, 15 bp, Homo sapiens
tgtgcacgtttgttg

SEQ ID NO: 1028883 - DNA, 15 bp, Homo sapiens
ctgtgcacgtttgtt

SEQ ID NO: 1028884 - DNA, 15 bp, Homo sapiens
cctgtgcacgtttgt

SEQ ID NO: 1028885 - DNA, 15 bp, Homo sapiens
ccctgtgcacgtttg

SEQ ID NO: 1028886 - DNA, 15 bp, Homo sapiens
cccctgtgcacgttt

SEQ ID NO: 1028887 - DNA, 15 bp, Homo sapiens
tcccctgtgcacgtt

SEQ ID NO: 1028888 - DNA, 15 bp, Homo sapiens
ctcccctgtgcacgt

SEQ ID NO: 1028889 - DNA, 15 bp, Homo sapiens
actcccctgtgcacg

SEQ ID NO: 1028890 - DNA, 15 bp, Homo sapiens
cactcccctgtgcac

SEQ ID NO: 1028891 - DNA, 15 bp, Homo sapiens
tcactcccctgtgca

SEQ ID NO: 1028892 - DNA, 15 bp, Homo sapiens
ctcactcccctgtgc

SEQ ID NO: 1028893 - DNA, 15 bp, Homo sapiens
cctcactcccctgtg

SEQ ID NO: 1028894 - DNA, 15 bp, Homo sapiens
ccctcactcccctgt

SEQ ID NO: 1028895 - DNA, 15 bp, Homo sapiens
gccctcactcccctg

SEQ ID NO: 1028896 - DNA, 15 bp, Homo sapiens
tgccctcactcccct

SEQ ID NO: 1028897 - DNA, 15 bp, Homo sapiens
ctgccctcactcccc

SEQ ID NO: 1028898 - DNA, 15 bp, Homo sapiens
cctgccctcactccc

SEQ ID NO: 1028899 - DNA, 15 bp, Homo sapiens
ccctgccctcactcc

SEQ ID NO: 1028900 - DNA, 15 bp, Homo sapiens
gccctgccctcactc

SEQ ID NO: 1028901 - DNA, 15 bp, Homo sapiens
cgccctgccctcact

SEQ ID NO: 1028902 - DNA, 15 bp, Homo sapiens
gcgccctgccctcac

SEQ ID NO: 1028903 - DNA, 15 bp, Homo sapiens
agcgccctgccctca

SEQ ID NO: 1028904 - DNA, 15 bp, Homo sapiens
gagcgccctgccctc

SEQ ID NO: 1028905 - DNA, 15 bp, Homo sapiens
cgagcgccctgccct

SEQ ID NO: 1028906 - DNA, 15 bp, Homo sapiens
gcgagcgccctgccc

SEQ ID NO: 1028907 - DNA, 15 bp, Homo sapiens
tgcgagcgccctgcc

SEQ ID NO: 1028908 - DNA, 15 bp, Homo sapiens
ctgcgagcgccctgc

SEQ ID NO: 1028909 - DNA, 15 bp, Homo sapiens
cctgcgagcgccctg

SEQ ID NO: 1028910 - DNA, 15 bp, Homo sapiens
ccctgcgagcgccct

SEQ ID NO: 1028911 - DNA, 15 bp, Homo sapiens
cccctgcgagcgccc

SEQ ID NO: 1028912 - DNA, 15 bp, Homo sapiens
ccccctgcgagcgcc

SEQ ID NO: 1028913 - DNA, 15 bp, Homo sapiens
gccccctgcgagcgc

SEQ ID NO: 1028914 - DNA, 15 bp, Homo sapiens
tgccccctgcgagcg

SEQ ID NO: 1028915 - DNA, 15 bp, Homo sapiens
gtgccccctgcgagc

SEQ ID NO: 1028916 - DNA, 15 bp, Homo sapiens
cgtgccccctgcgag

SEQ ID NO: 1028917 - DNA, 15 bp, Homo sapiens
gcgtgccccctgcga

SEQ ID NO: 1028918 - DNA, 15 bp, Homo sapiens
tgcgtgccccctgcg

SEQ ID NO: 1028919 - DNA, 15 bp, Homo sapiens
ctgcgtgccccctgc

SEQ ID NO: 1028920 - DNA, 15 bp, Homo sapiens
cctgcgtgccccctg

SEQ ID NO: 1028921 - DNA, 15 bp, Homo sapiens
ccctgcgtgccccct

SEQ ID NO: 1028922 - DNA, 15 bp, Homo sapiens
tccctgcgtgccccc

SEQ ID NO: 1028923 - DNA, 15 bp, Homo sapiens
ctccctgcgtgcccc

SEQ ID NO: 1028924 - DNA, 15 bp, Homo sapiens
cctccctgcgtgccc

SEQ ID NO: 1028925 - DNA, 15 bp, Homo sapiens
ccctccctgcgtgcc

SEQ ID NO: 1028926 - DNA, 15 bp, Homo sapiens
gccctccctgcgtgc

SEQ ID NO: 1028927 - DNA, 15 bp, Homo sapiens
ggccctccctgcgtg

SEQ ID NO: 1028928 - DNA, 15 bp, Homo sapiens
gggccctccctgcgt

SEQ ID NO: 1028929 - DNA, 15 bp, Homo sapiens
tgggccctccctgcg

SEQ ID NO: 1028930 - DNA, 15 bp, Homo sapiens
ctgggccctccctgc

SEQ ID NO: 1028931 - DNA, 15 bp, Homo sapiens
cctgggccctccctg

SEQ ID NO: 1028932 - DNA, 15 bp, Homo sapiens
ccctgggccctccct

SEQ ID NO: 1028933 - DNA, 15 bp, Homo sapiens
gccctgggccctccc

SEQ ID NO: 1028934 - DNA, 15 bp, Homo sapiens
cgccctgggccctcc

SEQ ID NO: 1028935 - DNA, 15 bp, Homo sapiens
gcgccctgggccctc

SEQ ID NO: 1028936 - DNA, 15 bp, Homo sapiens
ggcgccctgggccct

SEQ ID NO: 1028937 - DNA, 15 bp, Homo sapiens
tggcgccctgggccc

SEQ ID NO: 1028938 - DNA, 15 bp, Homo sapiens
ctggcgccctgggcc

SEQ ID NO: 1028939 - DNA, 15 bp, Homo sapiens
cctggcgccctgggc

SEQ ID NO: 1028940 - DNA, 15 bp, Homo sapiens
ccctggcgccctggg

SEQ ID NO: 1028941 - DNA, 15 bp, Homo sapiens
tccctggcgccctgg

SEQ ID NO: 1028942 - DNA, 15 bp, Homo sapiens
ctccctggcgccctg

SEQ ID NO: 1028943 - DNA, 15 bp, Homo sapiens
cctccctggcgccct

SEQ ID NO: 1028944 - DNA, 15 bp, Homo sapiens
gcctccctggcgccc

SEQ ID NO: 1028945 - DNA, 15 bp, Homo sapiens
ggcctccctggcgcc

SEQ ID NO: 1028946 - DNA, 15 bp, Homo sapiens
cggcctccctggcgc

SEQ ID NO: 1028947 - DNA, 15 bp, Homo sapiens
gcggcctccctggcg

SEQ ID NO: 1028948 - DNA, 15 bp, Homo sapiens
cgcggcctccctggc

SEQ ID NO: 1028949 - DNA, 15 bp, Homo sapiens
gcgcggcctccctgg

SEQ ID NO: 1028950 - DNA, 15 bp, Homo sapiens
ggcgcggcctccctg

SEQ ID NO: 1028951 - DNA, 15 bp, Homo sapiens
cggcgcggcctccct

SEQ ID NO: 1028952 - DNA, 15 bp, Homo sapiens
ccggcgcggcctccc

SEQ ID NO: 1028953 - DNA, 15 bp, Homo sapiens
cccggcgcggcctcc

SEQ ID NO: 1028954 - DNA, 15 bp, Homo sapiens
gcccggcgcggcctc

SEQ ID NO: 1028955 - DNA, 15 bp, Homo sapiens
agcccggcgcggcct

SEQ ID NO: 1028956 - DNA, 15 bp, Homo sapiens
tagcccggcgcggcc

SEQ ID NO: 1028957 - DNA, 15 bp, Homo sapiens
ttagcccggcgcggc

SEQ ID NO: 1028958 - DNA, 15 bp, Homo sapiens
attagcccggcgcgg

SEQ ID NO: 1028959 - DNA, 15 bp, Homo sapiens
gattagcccggcgcg

SEQ ID NO: 1028960 - DNA, 15 bp, Homo sapiens
ggattagcccggcgc

SEQ ID NO: 1028961 - DNA, 15 bp, Homo sapiens
cggattagcccggcg

SEQ ID NO: 1028962 - DNA, 15 bp, Homo sapiens
tcggattagcccggc

SEQ ID NO: 1028963 - DNA, 15 bp, Homo sapiens
ttcggattagcccgg

SEQ ID NO: 1028964 - DNA, 15 bp, Homo sapiens
cttcggattagcccg

SEQ ID NO: 1028965 - DNA, 15 bp, Homo sapiens
ccttcggattagccc

SEQ ID NO: 1028966 - DNA, 15 bp, Homo sapiens
cccttcggattagcc

SEQ ID NO: 1028967 - DNA, 15 bp, Homo sapiens
ccccttcggattagc

SEQ ID NO: 1028968 - DNA, 15 bp, Homo sapiens
gccccttcggattag

SEQ ID NO: 1028969 - DNA, 15 bp, Homo sapiens
agccccttcggatta

SEQ ID NO: 1028970 - DNA, 15 bp, Homo sapiens
cagccccttcggatt

SEQ ID NO: 1028971 - DNA, 15 bp, Homo sapiens
gcagccccttcggat

SEQ ID NO: 1028972 - DNA, 15 bp, Homo sapiens
cgcagccccttcgga

SEQ ID NO: 1028973 - DNA, 15 bp, Homo sapiens
tcgcagccccttcgg

SEQ ID NO: 1028974 - DNA, 15 bp, Homo sapiens
ctcgcagccccttcg

SEQ ID NO: 1028975 - DNA, 15 bp, Homo sapiens
cctcgcagccccttc

SEQ ID NO: 1028976 - DNA, 15 bp, Homo sapiens
acctcgcagcccctt

SEQ ID NO: 1028977 - DNA, 15 bp, Homo sapiens
gacctcgcagcccct

SEQ ID NO: 1028978 - DNA, 15 bp, Homo sapiens
tgacctcgcagcccc

SEQ ID NO: 1028979 - DNA, 15 bp, Homo sapiens
ctgacctcgcagccc

SEQ ID NO: 1028980 - DNA, 15 bp, Homo sapiens
cctgacctcgcagcc

SEQ ID NO: 1028981 - DNA, 15 bp, Homo sapiens
gcctgacctcgcagc

SEQ ID NO: 1028982 - DNA, 15 bp, Homo sapiens
agcctgacctcgcag

SEQ ID NO: 1028983 - DNA, 15 bp, Homo sapiens
cagcctgacctcgca

SEQ ID NO: 1028984 - DNA, 15 bp, Homo sapiens
acagcctgacctcgc

SEQ ID NO: 1028985 - DNA, 15 bp, Homo sapiens
tacagcctgacctcg

SEQ ID NO: 1028986 - DNA, 15 bp, Homo sapiens
ttacagcctgacctc

SEQ ID NO: 1028987 - DNA, 15 bp, Homo sapiens
gttacagcctgacct

SEQ ID NO: 1028988 - DNA, 15 bp, Homo sapiens
ggttacagcctgacc

SEQ ID NO: 1028989 - DNA, 15 bp, Homo sapiens
cggttacagcctgac

SEQ ID NO: 1028990 - DNA, 15 bp, Homo sapiens
ccggttacagcctga

SEQ ID NO: 1028991 - DNA, 15 bp, Homo sapiens
cccggttacagcctg

SEQ ID NO: 1028992 - DNA, 15 bp, Homo sapiens
acccggttacagcct

SEQ ID NO: 1028993 - DNA, 15 bp, Homo sapiens
gacccggttacagcc

SEQ ID NO: 1028994 - DNA, 15 bp, Homo sapiens
tgacccggttacagc

SEQ ID NO: 1028995 - DNA, 15 bp, Homo sapiens
ttgacccggttacag

SEQ ID NO: 1028996 - DNA, 15 bp, Homo sapiens
attgacccggttaca

SEQ ID NO: 1028997 - DNA, 15 bp, Homo sapiens
cattgacccggttac

SEQ ID NO: 1028998 - DNA, 15 bp, Homo sapiens
acattgacccggtta

SEQ ID NO: 1028999 - DNA, 15 bp, Homo sapiens
cacattgacccggtt

SEQ ID NO: 1029000 - DNA, 15 bp, Homo sapiens
acacattgacccggt

SEQ ID NO: 1029001 - DNA, 15 bp, Homo sapiens
cacacattgacccgg

SEQ ID NO: 1029002 - DNA, 15 bp, Homo sapiens
ccacacattgacccg

SEQ ID NO: 1029003 - DNA, 15 bp, Homo sapiens
tccacacattgaccc

SEQ ID NO: 1029004 - DNA, 15 bp, Homo sapiens
ttccacacattgacc

SEQ ID NO: 1029005 - DNA, 15 bp, Homo sapiens
attccacacattgac

SEQ ID NO: 1029006 - DNA, 15 bp, Homo sapiens
tattccacacattga

SEQ ID NO: 1029007 - DNA, 15 bp, Homo sapiens
atattccacacattg

SEQ ID NO: 1029008 - DNA, 15 bp, Homo sapiens
aatattccacacatt

SEQ ID NO: 1029009 - DNA, 15 bp, Homo sapiens
caatattccacacat

SEQ ID NO: 1029010 - DNA, 15 bp, Homo sapiens
ccaatattccacaca

SEQ ID NO: 1029011 - DNA, 15 bp, Homo sapiens
cccaatattccacac

SEQ ID NO: 1029012 - DNA, 15 bp, Homo sapiens
ccccaatattccaca

SEQ ID NO: 1029013 - DNA, 15 bp, Homo sapiens
cccccaatattccac

SEQ ID NO: 1029014 - DNA, 15 bp, Homo sapiens
ccccccaatattcca

SEQ ID NO: 1029015 - DNA, 15 bp, Homo sapiens
gccccccaatattcc

SEQ ID NO: 1029016 - DNA, 15 bp, Homo sapiens
agccccccaatattc

SEQ ID NO: 1029017 - DNA, 15 bp, Homo sapiens
gagccccccaatatt

SEQ ID NO: 1029018 - DNA, 15 bp, Homo sapiens
cgagccccccaatat

SEQ ID NO: 1029019 - DNA, 15 bp, Homo sapiens
ccgagccccccaata

SEQ ID NO: 1029020 - DNA, 15 bp, Homo sapiens
gccgagccccccaat

SEQ ID NO: 1029021 - DNA, 15 bp, Homo sapiens
agccgagccccccaa

SEQ ID NO: 1029022 - DNA, 15 bp, Homo sapiens
cagccgagcccccca

SEQ ID NO: 1029023 - DNA, 15 bp, Homo sapiens
gcagccgagcccccc

SEQ ID NO: 1029024 - DNA, 15 bp, Homo sapiens
tgcagccgagccccc

SEQ ID NO: 1029025 - DNA, 15 bp, Homo sapiens
ctgcagccgagcccc

SEQ ID NO: 1029026 - DNA, 15 bp, Homo sapiens
tctgcagccgagccc

SEQ ID NO: 1029027 - DNA, 15 bp, Homo sapiens
gtctgcagccgagcc

SEQ ID NO: 1029028 - DNA, 15 bp, Homo sapiens
agtctgcagccgagc

SEQ ID NO: 1029029 - DNA, 15 bp, Homo sapiens
aagtctgcagccgag

SEQ ID NO: 1029030 - DNA, 15 bp, Homo sapiens
caagtctgcagccga

SEQ ID NO: 1029031 - DNA, 15 bp, Homo sapiens
ccaagtctgcagccg

SEQ ID NO: 1029032 - DNA, 15 bp, Homo sapiens
gccaagtctgcagcc

SEQ ID NO: 1029033 - DNA, 15 bp, Homo sapiens
ggccaagtctgcagc

SEQ ID NO: 1029034 - DNA, 15 bp, Homo sapiens
tggccaagtctgcag

SEQ ID NO: 1029035 - DNA, 15 bp, Homo sapiens
ttggccaagtctgca

SEQ ID NO: 1029036 - DNA, 15 bp, Homo sapiens
tttggccaagtctgc

SEQ ID NO: 1029037 - DNA, 15 bp, Homo sapiens
atttggccaagtctg

SEQ ID NO: 1029038 - DNA, 15 bp, Homo sapiens
catttggccaagtct

SEQ ID NO: 1029039 - DNA, 15 bp, Homo sapiens
ccatttggccaagtc

SEQ ID NO: 1029040 - DNA, 15 bp, Homo sapiens
tccatttggccaagt

SEQ ID NO: 1029041 - DNA, 15 bp, Homo sapiens
gtccatttggccaag

SEQ ID NO: 1029042 - DNA, 15 bp, Homo sapiens
cgtccatttggccaa

SEQ ID NO: 1029043 - DNA, 15 bp, Homo sapiens
ccgtccatttggcca

SEQ ID NO: 1029044 - DNA, 15 bp, Homo sapiens
cccgtccatttggcc

SEQ ID NO: 1029045 - DNA, 15 bp, Homo sapiens
tcccgtccatttggc

SEQ ID NO: 1029046 - DNA, 15 bp, Homo sapiens
gtcccgtccatttgg

SEQ ID NO: 1029047 - DNA, 15 bp, Homo sapiens
agtcccgtccatttg

SEQ ID NO: 1029048 - DNA, 15 bp, Homo sapiens
tagtcccgtccattt

SEQ ID NO: 1029049 - DNA, 15 bp, Homo sapiens
atagtcccgtccatt

SEQ ID NO: 1029050 - DNA, 15 bp, Homo sapiens
aatagtcccgtccat

SEQ ID NO: 1029051 - DNA, 15 bp, Homo sapiens
taatagtcccgtcca

SEQ ID NO: 1029052 - DNA, 15 bp, Homo sapiens
ttaatagtcccgtcc

SEQ ID NO: 1029053 - DNA, 15 bp, Homo sapiens
cttaatagtcccgtc

SEQ ID NO: 1029054 - DNA, 15 bp, Homo sapiens
ccttaatagtcccgt

SEQ ID NO: 1029055 - DNA, 15 bp, Homo sapiens
accttaatagtcccg

SEQ ID NO: 1029056 - DNA, 15 bp, Homo sapiens
taccttaatagtccc

SEQ ID NO: 1029057 - DNA, 15 bp, Homo sapiens
ttaccttaatagtcc

SEQ ID NO: 1029058 - DNA, 15 bp, Homo sapiens
cttaccttaatagtc

SEQ ID NO: 1029059 - DNA, 15 bp, Homo sapiens
gcttaccttaatagt

SEQ ID NO: 1029060 - DNA, 15 bp, Homo sapiens
cgcttaccttaatag

SEQ ID NO: 1029061 - DNA, 15 bp, Homo sapiens
ccgcttaccttaata

SEQ ID NO: 1029062 - DNA, 15 bp, Homo sapiens
gccgcttaccttaat

SEQ ID NO: 1029063 - DNA, 15 bp, Homo sapiens
cgccgcttaccttaa

SEQ ID NO: 1029064 - DNA, 15 bp, Homo sapiens
ccgccgcttacctta

SEQ ID NO: 1029065 - DNA, 15 bp, Homo sapiens
cccgccgcttacctt

SEQ ID NO: 1029066 - DNA, 15 bp, Homo sapiens
ccccgccgcttacct

SEQ ID NO: 1029067 - DNA, 15 bp, Homo sapiens
gccccgccgcttacc

SEQ ID NO: 1029068 - DNA, 15 bp, Homo sapiens
tgccccgccgcttac

SEQ ID NO: 1029069 - DNA, 15 bp, Homo sapiens
ttgccccgccgctta

SEQ ID NO: 1029070 - DNA, 15 bp, Homo sapiens
gttgccccgccgctt

SEQ ID NO: 1029071 - DNA, 15 bp, Homo sapiens
cgttgccccgccgct

SEQ ID NO: 1029072 - DNA, 15 bp, Homo sapiens
ccgttgccccgccgc

SEQ ID NO: 1029073 - DNA, 15 bp, Homo sapiens
tccgttgccccgccg

SEQ ID NO: 1029074 - DNA, 15 bp, Homo sapiens
gtccgttgccccgcc

SEQ ID NO: 1029075 - DNA, 15 bp, Homo sapiens
cgtccgttgccccgc

SEQ ID NO: 1029076 - DNA, 15 bp, Homo sapiens
gcgtccgttgccccg

SEQ ID NO: 1029077 - DNA, 15 bp, Homo sapiens
cgcgtccgttgcccc

SEQ ID NO: 1029078 - DNA, 15 bp, Homo sapiens
ccgcgtccgttgccc

SEQ ID NO: 1029079 - DNA, 15 bp, Homo sapiens
cccgcgtccgttgcc

SEQ ID NO: 1029080 - DNA, 15 bp, Homo sapiens
gcccgcgtccgttgc

SEQ ID NO: 1029081 - DNA, 15 bp, Homo sapiens
cgcccgcgtccgttg

SEQ ID NO: 1029082 - DNA, 15 bp, Homo sapiens
ccgcccgcgtccgtt

SEQ ID NO: 1029083 - DNA, 15 bp, Homo sapiens
gccgcccgcgtccgt

SEQ ID NO: 1029084 - DNA, 15 bp, Homo sapiens
cgccgcccgcgtccg

SEQ ID NO: 1029085 - DNA, 15 bp, Homo sapiens
ccgccgcccgcgtcc

SEQ ID NO: 1029086 - DNA, 15 bp, Homo sapiens
cccgccgcccgcgtc

SEQ ID NO: 1029087 - DNA, 15 bp, Homo sapiens
ccccgccgcccgcgt

SEQ ID NO: 1029088 - DNA, 15 bp, Homo sapiens
tccccgccgcccgcg

SEQ ID NO: 1029089 - DNA, 15 bp, Homo sapiens
gtccccgccgcccgc

SEQ ID NO: 1029090 - DNA, 15 bp, Homo sapiens
ggtccccgccgcccg

SEQ ID NO: 1029091 - DNA, 15 bp, Homo sapiens
cggtccccgccgccc

SEQ ID NO: 1029092 - DNA, 15 bp, Homo sapiens
ccggtccccgccgcc

SEQ ID NO: 1029093 - DNA, 15 bp, Homo sapiens
gccggtccccgccgc

SEQ ID NO: 1029094 - DNA, 15 bp, Homo sapiens
ggccggtccccgccg

SEQ ID NO: 1029095 - DNA, 15 bp, Homo sapiens
cggccggtccccgcc

SEQ ID NO: 1029096 - DNA, 15 bp, Homo sapiens
ccggccggtccccgc

SEQ ID NO: 1029097 - DNA, 15 bp, Homo sapiens
cccggccggtccccg

SEQ ID NO: 1029098 - DNA, 15 bp, Homo sapiens
ccccggccggtcccc

SEQ ID NO: 1029099 - DNA, 15 bp, Homo sapiens
tccccggccggtccc

SEQ ID NO: 1029100 - DNA, 15 bp, Homo sapiens
ctccccggccggtcc

SEQ ID NO: 1029101 - DNA, 15 bp, Homo sapiens
cctccccggccggtc

SEQ ID NO: 1029102 - DNA, 15 bp, Homo sapiens
gcctccccggccggt

SEQ ID NO: 1029103 - DNA, 15 bp, Homo sapiens
cgcctccccggccgg

SEQ ID NO: 1029104 - DNA, 15 bp, Homo sapiens
tcgcctccccggccg

SEQ ID NO: 1029105 - DNA, 15 bp, Homo sapiens
ttcgcctccccggcc

SEQ ID NO: 1029106 - DNA, 15 bp, Homo sapiens
cttcgcctccccggc

SEQ ID NO: 1029107 - DNA, 15 bp, Homo sapiens
gcttcgcctccccgg

SEQ ID NO: 1029108 - DNA, 15 bp, Homo sapiens
cgcttcgcctccccg

SEQ ID NO: 1029109 - DNA, 15 bp, Homo sapiens
ccgcttcgcctcccc

SEQ ID NO: 1029110 - DNA, 15 bp, Homo sapiens
gccgcttcgcctccc

SEQ ID NO: 1029111 - DNA, 15 bp, Homo sapiens
cgccgcttcgcctcc

SEQ ID NO: 1029112 - DNA, 15 bp, Homo sapiens
ccgccgcttcgcctc

SEQ ID NO: 1029113 - DNA, 15 bp, Homo sapiens
cccgccgcttcgcct

SEQ ID NO: 1029114 - DNA, 15 bp, Homo sapiens
gcccgccgcttcgcc

SEQ ID NO: 1029115 - DNA, 15 bp, Homo sapiens
cgcccgccgcttcgc

SEQ ID NO: 1029116 - DNA, 15 bp, Homo sapiens
ccgcccgccgcttcg

SEQ ID NO: 1029117 - DNA, 15 bp, Homo sapiens
cccgcccgccgcttc

SEQ ID NO: 1029118 - DNA, 15 bp, Homo sapiens
acccgcccgccgctt

SEQ ID NO: 1029119 - DNA, 15 bp, Homo sapiens
tacccgcccgccgct

SEQ ID NO: 1029120 - DNA, 15 bp, Homo sapiens
ctacccgcccgccgc

SEQ ID NO: 1029121 - DNA, 15 bp, Homo sapiens
cctacccgcccgccg

SEQ ID NO: 1029122 - DNA, 15 bp, Homo sapiens
acctacccgcccgcc

SEQ ID NO: 1029123 - DNA, 15 bp, Homo sapiens
cacctacccgcccgc

SEQ ID NO: 1029124 - DNA, 15 bp, Homo sapiens
gcacctacccgcccg

SEQ ID NO: 1029125 - DNA, 15 bp, Homo sapiens
cgcacctacccgccc

SEQ ID NO: 1029126 - DNA, 15 bp, Homo sapiens
ccgcacctacccgcc

SEQ ID NO: 1029127 - DNA, 15 bp, Homo sapiens
cccgcacctacccgc

SEQ ID NO: 1029128 - DNA, 15 bp, Homo sapiens
ccccgcacctacccg

SEQ ID NO: 1029129 - DNA, 15 bp, Homo sapiens
gccccgcacctaccc

SEQ ID NO: 1029130 - DNA, 15 bp, Homo sapiens
ggccccgcacctacc

SEQ ID NO: 1029131 - DNA, 15 bp, Homo sapiens
gggccccgcacctac

SEQ ID NO: 1029132 - DNA, 15 bp, Homo sapiens
cgggccccgcaccta

SEQ ID NO: 1029133 - DNA, 15 bp, Homo sapiens
gcgggccccgcacct

SEQ ID NO: 1029134 - DNA, 15 bp, Homo sapiens
cgcgggccccgcacc

SEQ ID NO: 1029135 - DNA, 15 bp, Homo sapiens
acgcgggccccgcac

SEQ ID NO: 1029136 - DNA, 15 bp, Homo sapiens
gacgcgggccccgca

SEQ ID NO: 1029137 - DNA, 15 bp, Homo sapiens
ggacgcgggccccgc

SEQ ID NO: 1029138 - DNA, 15 bp, Homo sapiens
gggacgcgggccccg

SEQ ID NO: 1029139 - DNA, 15 bp, Homo sapiens
cgggacgcgggcccc

SEQ ID NO: 1029140 - DNA, 15 bp, Homo sapiens
ccgggacgcgggccc

SEQ ID NO: 1029141 - DNA, 15 bp, Homo sapiens
tccgggacgcgggcc

SEQ ID NO: 1029142 - DNA, 15 bp, Homo sapiens
ttccgggacgcgggc

SEQ ID NO: 1029143 - DNA, 15 bp, Homo sapiens
cttccgggacgcggg

SEQ ID NO: 1029144 - DNA, 15 bp, Homo sapiens
tcttccgggacgcgg

SEQ ID NO: 1029145 - DNA, 15 bp, Homo sapiens
gtcttccgggacgcg

SEQ ID NO: 1029146 - DNA, 15 bp, Homo sapiens
cgtcttccgggacgc

SEQ ID NO: 1029147 - DNA, 15 bp, Homo sapiens
acgtcttccgggacg

SEQ ID NO: 1029148 - DNA, 15 bp, Homo sapiens
cacgtcttccgggac

SEQ ID NO: 1029149 - DNA, 15 bp, Homo sapiens
ccacgtcttccggga

SEQ ID NO: 1029150 - DNA, 15 bp, Homo sapiens
gccacgtcttccggg

SEQ ID NO: 1029151 - DNA, 15 bp, Homo sapiens
ggccacgtcttccgg

SEQ ID NO: 1029152 - DNA, 15 bp, Homo sapiens
aggccacgtcttccg

SEQ ID NO: 1029153 - DNA, 15 bp, Homo sapiens
gaggccacgtcttcc

SEQ ID NO: 1029154 - DNA, 15 bp, Homo sapiens
agaggccacgtcttc

SEQ ID NO: 1029155 - DNA, 15 bp, Homo sapiens
gagaggccacgtctt

SEQ ID NO: 1029156 - DNA, 15 bp, Homo sapiens
agagaggccacgtct

SEQ ID NO: 1029157 - DNA, 15 bp, Homo sapiens
gagagaggccacgtc

SEQ ID NO: 1029158 - DNA, 15 bp, Homo sapiens
ggagagaggccacgt

SEQ ID NO: 1029159 - DNA, 15 bp, Homo sapiens
gggagagaggccacg

SEQ ID NO: 1029160 - DNA, 15 bp, Homo sapiens
agggagagaggccac

SEQ ID NO: 1029161 - DNA, 15 bp, Homo sapiens
aagggagagaggcca

SEQ ID NO: 1029162 - DNA, 15 bp, Homo sapiens
gaagggagagaggcc

SEQ ID NO: 1029163 - DNA, 15 bp, Homo sapiens
ggaagggagagaggc

SEQ ID NO: 1029164 - DNA, 15 bp, Homo sapiens
gggaagggagagagg

SEQ ID NO: 1029165 - DNA, 15 bp, Homo sapiens
agggaagggagagag

SEQ ID NO: 1029166 - DNA, 15 bp, Homo sapiens
gagggaagggagaga

SEQ ID NO: 1029167 - DNA, 15 bp, Homo sapiens
ggagggaagggagag

SEQ ID NO: 1029168 - DNA, 15 bp, Homo sapiens
cggagggaagggaga

SEQ ID NO: 1029169 - DNA, 15 bp, Homo sapiens
gcggagggaagggag

SEQ ID NO: 1029170 - DNA, 15 bp, Homo sapiens
cgcggagggaaggga

SEQ ID NO: 1029171 - DNA, 15 bp, Homo sapiens
gcgcggagggaaggg

SEQ ID NO: 1029172 - DNA, 15 bp, Homo sapiens
ggcgcggagggaagg

SEQ ID NO: 1029173 - DNA, 15 bp, Homo sapiens
gggcgcggagggaag

SEQ ID NO: 1029174 - DNA, 15 bp, Homo sapiens
ggggcgcggagggaa

SEQ ID NO: 1029175 - DNA, 15 bp, Homo sapiens
cggggcgcggaggga

SEQ ID NO: 1029176 - DNA, 15 bp, Homo sapiens
ccggggcgcggaggg

SEQ ID NO: 1029177 - DNA, 15 bp, Homo sapiens
gccggggcgcggagg

SEQ ID NO: 1029178 - DNA, 15 bp, Homo sapiens
agccggggcgcggag

SEQ ID NO: 1029179 - DNA, 15 bp, Homo sapiens
aagccggggcgcgga

SEQ ID NO: 1029180 - DNA, 15 bp, Homo sapiens
gaagccggggcgcgg

SEQ ID NO: 1029181 - DNA, 15 bp, Homo sapiens
cgaagccggggcgcg

SEQ ID NO: 1029182 - DNA, 15 bp, Homo sapiens
gcgaagccggggcgc

SEQ ID NO: 1029183 - DNA, 15 bp, Homo sapiens
cgcgaagccggggcg

SEQ ID NO: 1029184 - DNA, 15 bp, Homo sapiens
gcgcgaagccggggc

SEQ ID NO: 1029185 - DNA, 15 bp, Homo sapiens
ggcgcgaagccgggg

SEQ ID NO: 1029186 - DNA, 15 bp, Homo sapiens
cggcgcgaagccggg

SEQ ID NO: 1029187 - DNA, 15 bp, Homo sapiens
ccggcgcgaagccgg

SEQ ID NO: 1029188 - DNA, 15 bp, Homo sapiens
gccggcgcgaagccg

SEQ ID NO: 1029189 - DNA, 15 bp, Homo sapiens
agccggcgcgaagcc

SEQ ID NO: 1029190 - DNA, 15 bp, Homo sapiens
gagccggcgcgaagc

SEQ ID NO: 1029191 - DNA, 15 bp, Homo sapiens
ggagccggcgcgaag

SEQ ID NO: 1029192 - DNA, 15 bp, Homo sapiens
aggagccggcgcgaa

SEQ ID NO: 1029193 - DNA, 15 bp, Homo sapiens
gaggagccggcgcga

SEQ ID NO: 1029194 - DNA, 15 bp, Homo sapiens
ggaggagccggcgcg

SEQ ID NO: 1029195 - DNA, 15 bp, Homo sapiens
cggaggagccggcgc

SEQ ID NO: 1029196 - DNA, 15 bp, Homo sapiens
ccggaggagccggcg

SEQ ID NO: 1029197 - DNA, 15 bp, Homo sapiens
gccggaggagccggc

SEQ ID NO: 1029198 - DNA, 15 bp, Homo sapiens
cgccggaggagccgg

SEQ ID NO: 1029199 - DNA, 15 bp, Homo sapiens
gcgccggaggagccg

SEQ ID NO: 1029200 - DNA, 15 bp, Homo sapiens
agcgccggaggagcc

SEQ ID NO: 1029201 - DNA, 15 bp, Homo sapiens
gagcgccggaggagc

SEQ ID NO: 1029202 - DNA, 15 bp, Homo sapiens
cgagcgccggaggag

SEQ ID NO: 1029203 - DNA, 15 bp, Homo sapiens
ccgagcgccggagga

SEQ ID NO: 1029204 - DNA, 15 bp, Homo sapiens
cccgagcgccggagg

SEQ ID NO: 1029205 - DNA, 15 bp, Homo sapiens
acccgagcgccggag

SEQ ID NO: 1029206 - DNA, 15 bp, Homo sapiens
cacccgagcgccgga

SEQ ID NO: 1029207 - DNA, 15 bp, Homo sapiens
ccacccgagcgccgg

SEQ ID NO: 1029208 - DNA, 15 bp, Homo sapiens
gccacccgagcgccg

SEQ ID NO: 1029209 - DNA, 15 bp, Homo sapiens
cgccacccgagcgcc

SEQ ID NO: 1029210 - DNA, 15 bp, Homo sapiens
tcgccacccgagcgc

SEQ ID NO: 1029211 - DNA, 15 bp, Homo sapiens
ctcgccacccgagcg

SEQ ID NO: 1029212 - DNA, 15 bp, Homo sapiens
actcgccacccgagc

SEQ ID NO: 1029213 - DNA, 15 bp, Homo sapiens
gactcgccacccgag

SEQ ID NO: 1029214 - DNA, 15 bp, Homo sapiens
ggactcgccacccga

SEQ ID NO: 1029215 - DNA, 15 bp, Homo sapiens
aggactcgccacccg

SEQ ID NO: 1029216 - DNA, 15 bp, Homo sapiens
taggactcgccaccc

SEQ ID NO: 1029217 - DNA, 15 bp, Homo sapiens
gtaggactcgccacc

SEQ ID NO: 1029218 - DNA, 15 bp, Homo sapiens
agtaggactcgccac

SEQ ID NO: 1029219 - DNA, 15 bp, Homo sapiens
gagtaggactcgcca

SEQ ID NO: 1029220 - DNA, 15 bp, Homo sapiens
cgagtaggactcgcc

SEQ ID NO: 1029221 - DNA, 15 bp, Homo sapiens
gcgagtaggactcgc

SEQ ID NO: 1029222 - DNA, 15 bp, Homo sapiens
cgcgagtaggactcg

SEQ ID NO: 1029223 - DNA, 15 bp, Homo sapiens
ccgcgagtaggactc

SEQ ID NO: 1029224 - DNA, 15 bp, Homo sapiens
cccgcgagtaggact

SEQ ID NO: 1029225 - DNA, 15 bp, Homo sapiens
gcccgcgagtaggac

SEQ ID NO: 1029226 - DNA, 15 bp, Homo sapiens
ggcccgcgagtagga

SEQ ID NO: 1029227 - DNA, 15 bp, Homo sapiens
tggcccgcgagtagg

SEQ ID NO: 1029228 - DNA, 15 bp, Homo sapiens
ctggcccgcgagtag

SEQ ID NO: 1029229 - DNA, 15 bp, Homo sapiens
gctggcccgcgagta

SEQ ID NO: 1029230 - DNA, 15 bp, Homo sapiens
ggctggcccgcgagt

SEQ ID NO: 1029231 - DNA, 15 bp, Homo sapiens
cggctggcccgcgag

SEQ ID NO: 1029232 - DNA, 15 bp, Homo sapiens
ccggctggcccgcga

SEQ ID NO: 1029233 - DNA, 15 bp, Homo sapiens
gccggctggcccgcg

SEQ ID NO: 1029234 - DNA, 15 bp, Homo sapiens
ggccggctggcccgc

SEQ ID NO: 1029235 - DNA, 15 bp, Homo sapiens
tggccggctggcccg

SEQ ID NO: 1029236 - DNA, 15 bp, Homo sapiens
ctggccggctggccc

SEQ ID NO: 1029237 - DNA, 15 bp, Homo sapiens
cctggccggctggcc

SEQ ID NO: 1029238 - DNA, 15 bp, Homo sapiens
gcctggccggctggc

SEQ ID NO: 1029239 - DNA, 15 bp, Homo sapiens
cgcctggccggctgg

SEQ ID NO: 1029240 - DNA, 15 bp, Homo sapiens
gcgcctggccggctg

SEQ ID NO: 1029241 - DNA, 15 bp, Homo sapiens
ggcgcctggccggct

SEQ ID NO: 1029242 - DNA, 15 bp, Homo sapiens
gggcgcctggccggc

SEQ ID NO: 1029243 - DNA, 15 bp, Homo sapiens
cgggcgcctggccgg

SEQ ID NO: 1029244 - DNA, 15 bp, Homo sapiens
gcgggcgcctggccg

SEQ ID NO: 1029245 - DNA, 15 bp, Homo sapiens
tgcgggcgcctggcc

SEQ ID NO: 1029246 - DNA, 15 bp, Homo sapiens
atgcgggcgcctggc

SEQ ID NO: 1029247 - DNA, 15 bp, Homo sapiens
aatgcgggcgcctgg

SEQ ID NO: 1029248 - DNA, 15 bp, Homo sapiens
caatgcgggcgcctg

SEQ ID NO: 1029249 - DNA, 15 bp, Homo sapiens
tcaatgcgggcgcct

SEQ ID NO: 1029250 - DNA, 15 bp, Homo sapiens
ctcaatgcgggcgcc

SEQ ID NO: 1029251 - DNA, 15 bp, Homo sapiens
cctcaatgcgggcgc

SEQ ID NO: 1029252 - DNA, 15 bp, Homo sapiens
ccctcaatgcgggcg

SEQ ID NO: 1029253 - DNA, 15 bp, Homo sapiens
gccctcaatgcgggc

SEQ ID NO: 1029254 - DNA, 15 bp, Homo sapiens
cgccctcaatgcggg

SEQ ID NO: 1029255 - DNA, 15 bp, Homo sapiens
tcgccctcaatgcgg

SEQ ID NO: 1029256 - DNA, 15 bp, Homo sapiens
gtcgccctcaatgcg

SEQ ID NO: 1029257 - DNA, 15 bp, Homo sapiens
ggtcgccctcaatgc

SEQ ID NO: 1029258 - DNA, 15 bp, Homo sapiens
gggtcgccctcaatg

SEQ ID NO: 1029259 - DNA, 15 bp, Homo sapiens
agggtcgccctcaat

SEQ ID NO: 1029260 - DNA, 15 bp, Homo sapiens
gagggtcgccctcaa

SEQ ID NO: 1029261 - DNA, 15 bp, Homo sapiens
ggagggtcgccctca

SEQ ID NO: 1029262 - DNA, 15 bp, Homo sapiens
gggagggtcgccctc

SEQ ID NO: 1029263 - DNA, 15 bp, Homo sapiens
ggggagggtcgccct

SEQ ID NO: 1029264 - DNA, 15 bp, Homo sapiens
gggggagggtcgccc

SEQ ID NO: 1029265 - DNA, 15 bp, Homo sapiens
cgggggagggtcgcc

SEQ ID NO: 1029266 - DNA, 15 bp, Homo sapiens
tcgggggagggtcgc

SEQ ID NO: 1029267 - DNA, 15 bp, Homo sapiens
ttcgggggagggtcg

SEQ ID NO: 1029268 - DNA, 15 bp, Homo sapiens
tttcgggggagggtc

SEQ ID NO: 1029269 - DNA, 15 bp, Homo sapiens
atttcgggggagggt

SEQ ID NO: 1029270 - DNA, 15 bp, Homo sapiens
gatttcgggggaggg

SEQ ID NO: 1029271 - DNA, 15 bp, Homo sapiens
ggatttcgggggagg

SEQ ID NO: 1029272 - DNA, 15 bp, Homo sapiens
gggatttcgggggag

SEQ ID NO: 1029273 - DNA, 15 bp, Homo sapiens
tgggatttcggggga

SEQ ID NO: 1029274 - DNA, 15 bp, Homo sapiens
ctgggatttcggggg

SEQ ID NO: 1029275 - DNA, 15 bp, Homo sapiens
gctgggatttcgggg

SEQ ID NO: 1029276 - DNA, 15 bp, Homo sapiens
ggctgggatttcggg

SEQ ID NO: 1029277 - DNA, 15 bp, Homo sapiens
gggctgggatttcgg

SEQ ID NO: 1029278 - DNA, 15 bp, Homo sapiens
ggggctgggatttcg

SEQ ID NO: 1029279 - DNA, 15 bp, Homo sapiens
gggggctgggatttc

SEQ ID NO: 1029280 - DNA, 15 bp, Homo sapiens
tgggggctgggattt

SEQ ID NO: 1029281 - DNA, 15 bp, Homo sapiens
ttgggggctgggatt

SEQ ID NO: 1029282 - DNA, 15 bp, Homo sapiens
tttgggggctgggat

SEQ ID NO: 1029283 - DNA, 15 bp, Homo sapiens
ctttgggggctggga

SEQ ID NO: 1029284 - DNA, 15 bp, Homo sapiens
actttgggggctggg

SEQ ID NO: 1029285 - DNA, 15 bp, Homo sapiens
cactttgggggctgg

SEQ ID NO: 1029286 - DNA, 15 bp, Homo sapiens
ccactttgggggctg

SEQ ID NO: 1029287 - DNA, 15 bp, Homo sapiens
tccactttgggggct

SEQ ID NO: 1029288 - DNA, 15 bp, Homo sapiens
tacctaagtcagcat

SEQ ID NO: 1029289 - DNA, 15 bp, Homo sapiens
ttacctaagtcagca

SEQ ID NO: 1029290 - DNA, 15 bp, Homo sapiens
tttacctaagtcagc

SEQ ID NO: 1029291 - DNA, 15 bp, Homo sapiens
ttttacctaagtcag

SEQ ID NO: 1029292 - DNA, 15 bp, Homo sapiens
cttttacctaagtca

SEQ ID NO: 1029293 - DNA, 15 bp, Homo sapiens
tcttttacctaagtc

SEQ ID NO: 1029294 - DNA, 15 bp, Homo sapiens
gtcttttacctaagt

SEQ ID NO: 1029295 - DNA, 15 bp, Homo sapiens
tgtcttttacctaag

SEQ ID NO: 1029296 - DNA, 15 bp, Homo sapiens
gtgtcttttacctaa

SEQ ID NO: 1029297 - DNA, 15 bp, Homo sapiens
ggtgtcttttaccta

SEQ ID NO: 1029298 - DNA, 15 bp, Homo sapiens
tggtgtcttttacct

SEQ ID NO: 1029299 - DNA, 15 bp, Homo sapiens
ttggtgtcttttacc

SEQ ID NO: 1029300 - DNA, 15 bp, Homo sapiens
gttggtgtcttttac

SEQ ID NO: 1029301 - DNA, 15 bp, Homo sapiens
ggttggtgtctttta

SEQ ID NO: 1029302 - DNA, 15 bp, Homo sapiens
cggttggtgtctttt

SEQ ID NO: 1029303 - DNA, 15 bp, Homo sapiens
tcggttggtgtcttt

SEQ ID NO: 1029304 - DNA, 15 bp, Homo sapiens
ttcggttggtgtctt

SEQ ID NO: 1029305 - DNA, 15 bp, Homo sapiens
cttcggttggtgtct

SEQ ID NO: 1029306 - DNA, 15 bp, Homo sapiens
ccttcggttggtgtc

SEQ ID NO: 1029307 - DNA, 15 bp, Homo sapiens
tccttcggttggtgt

SEQ ID NO: 1029308 - DNA, 15 bp, Homo sapiens
ttccttcggttggtg

SEQ ID NO: 1029309 - DNA, 15 bp, Homo sapiens
gttccttcggttggt

SEQ ID NO: 1029310 - DNA, 15 bp, Homo sapiens
agttccttcggttgg

SEQ ID NO: 1029311 - DNA, 15 bp, Homo sapiens
aagttccttcggttg

SEQ ID NO: 1029312 - DNA, 15 bp, Homo sapiens
caagttccttcggtt

SEQ ID NO: 1029313 - DNA, 15 bp, Homo sapiens
gcaagttccttcggt

SEQ ID NO: 1029314 - DNA, 15 bp, Homo sapiens
tgcaagttccttcgg

SEQ ID NO: 1029315 - DNA, 15 bp, Homo sapiens
ttgcaagttccttcg

SEQ ID NO: 1029316 - DNA, 15 bp, Homo sapiens
tttgcaagttccttc

SEQ ID NO: 1029317 - DNA, 15 bp, Homo sapiens
atttgcaagttcctt

SEQ ID NO: 1029318 - DNA, 15 bp, Homo sapiens
gatttgcaagttcct

SEQ ID NO: 1029319 - DNA, 15 bp, Homo sapiens
agatttgcaagttcc

SEQ ID NO: 1029320 - DNA, 15 bp, Homo sapiens
cagatttgcaagttc

SEQ ID NO: 1029321 - DNA, 15 bp, Homo sapiens
ccagatttgcaagtt

SEQ ID NO: 1029322 - DNA, 15 bp, Homo sapiens
tccagatttgcaagt

SEQ ID NO: 1029323 - DNA, 15 bp, Homo sapiens
ctccagatttgcaag

SEQ ID NO: 1029324 - DNA, 15 bp, Homo sapiens
tctccagatttgcaa

SEQ ID NO: 1029325 - DNA, 15 bp, Homo sapiens
atctccagatttgca

SEQ ID NO: 1029326 - DNA, 15 bp, Homo sapiens
catctccagatttgc

SEQ ID NO: 1029327 - DNA, 15 bp, Homo sapiens
tcatctccagatttg

SEQ ID NO: 1029328 - DNA, 15 bp, Homo sapiens
ctcatctccagattt

SEQ ID NO: 1029329 - DNA, 15 bp, Homo sapiens
tctcatctccagatt

SEQ ID NO: 1029330 - DNA, 15 bp, Homo sapiens
atctcatctccagat

SEQ ID NO: 1029331 - DNA, 15 bp, Homo sapiens
tatctcatctccaga

SEQ ID NO: 1029332 - DNA, 15 bp, Homo sapiens
ttatctcatctccag

SEQ ID NO: 1029333 - DNA, 15 bp, Homo sapiens
gttatctcatctcca

SEQ ID NO: 1029334 - DNA, 15 bp, Homo sapiens
agttatctcatctcc

SEQ ID NO: 1029335 - DNA, 15 bp, Homo sapiens
cagttatctcatctc

SEQ ID NO: 1029336 - DNA, 15 bp, Homo sapiens
tcagttatctcatct

SEQ ID NO: 1029337 - DNA, 15 bp, Homo sapiens
gtcagttatctcatc

SEQ ID NO: 1029338 - DNA, 15 bp, Homo sapiens
agtcagttatctcat

SEQ ID NO: 1029339 - DNA, 15 bp, Homo sapiens
cagtcagttatctca

SEQ ID NO: 1029340 - DNA, 15 bp, Homo sapiens
acagtcagttatctc

SEQ ID NO: 1029341 - DNA, 15 bp, Homo sapiens
cacagtcagttatct

SEQ ID NO: 1029342 - DNA, 15 bp, Homo sapiens
tcacagtcagttatc

SEQ ID NO: 1029343 - DNA, 15 bp, Homo sapiens
atcacagtcagttat

SEQ ID NO: 1029344 - DNA, 15 bp, Homo sapiens
catcacagtcagtta

SEQ ID NO: 1029345 - DNA, 15 bp, Homo sapiens
ccatcacagtcagtt

SEQ ID NO: 1029346 - DNA, 15 bp, Homo sapiens
cccatcacagtcagt

SEQ ID NO: 1029347 - DNA, 15 bp, Homo sapiens
acccatcacagtcag

SEQ ID NO: 1029348 - DNA, 15 bp, Homo sapiens
aacccatcacagtca

SEQ ID NO: 1029349 - DNA, 15 bp, Homo sapiens
taacccatcacagtc

SEQ ID NO: 1029350 - DNA, 15 bp, Homo sapiens
ttaacccatcacagt

SEQ ID NO: 1029351 - DNA, 15 bp, Homo sapiens
tttaacccatcacag

SEQ ID NO: 1029352 - DNA, 15 bp, Homo sapiens
ctttaacccatcaca

SEQ ID NO: 1029353 - DNA, 15 bp, Homo sapiens
cctttaacccatcac

SEQ ID NO: 1029354 - DNA, 15 bp, Homo sapiens
ccctttaacccatca

SEQ ID NO: 1029355 - DNA, 15 bp, Homo sapiens
tccctttaacccatc

SEQ ID NO: 1029356 - DNA, 15 bp, Homo sapiens
ctccctttaacccat

SEQ ID NO: 1029357 - DNA, 15 bp, Homo sapiens
gctccctttaaccca

SEQ ID NO: 1029358 - DNA, 15 bp, Homo sapiens
agctccctttaaccc

SEQ ID NO: 1029359 - DNA, 15 bp, Homo sapiens
tagctccctttaacc

SEQ ID NO: 1029360 - DNA, 15 bp, Homo sapiens
atagctccctttaac

SEQ ID NO: 1029361 - DNA, 15 bp, Homo sapiens
tatagctccctttaa

SEQ ID NO: 1029362 - DNA, 15 bp, Homo sapiens
ttatagctcccttta

SEQ ID NO: 1029363 - DNA, 15 bp, Homo sapiens
cttatagctcccttt

SEQ ID NO: 1029364 - DNA, 15 bp, Homo sapiens
tcttatagctccctt

SEQ ID NO: 1029365 - DNA, 15 bp, Homo sapiens
ctcttatagctccct

SEQ ID NO: 1029366 - DNA, 15 bp, Homo sapiens
gctcttatagctccc

SEQ ID NO: 1029367 - DNA, 15 bp, Homo sapiens
ggctcttatagctcc

SEQ ID NO: 1029368 - DNA, 15 bp, Homo sapiens
aggctcttatagctc

SEQ ID NO: 1029369 - DNA, 15 bp, Homo sapiens
taggctcttatagct

SEQ ID NO: 1029370 - DNA, 15 bp, Homo sapiens
ataggctcttatagc

SEQ ID NO: 1029371 - DNA, 15 bp, Homo sapiens
tataggctcttatag

SEQ ID NO: 1029372 - DNA, 15 bp, Homo sapiens
ttataggctcttata

SEQ ID NO: 1029373 - DNA, 15 bp, Homo sapiens
cttataggctcttat

SEQ ID NO: 1029374 - DNA, 15 bp, Homo sapiens
tcttataggctctta

SEQ ID NO: 1029375 - DNA, 15 bp, Homo sapiens
ctcttataggctctt

SEQ ID NO: 1029376 - DNA, 15 bp, Homo sapiens
gctcttataggctct

SEQ ID NO: 1029377 - DNA, 15 bp, Homo sapiens
ggctcttataggctc

SEQ ID NO: 1029378 - DNA, 15 bp, Homo sapiens
aggctcttataggct

SEQ ID NO: 1029379 - DNA, 15 bp, Homo sapiens
caggctcttataggc

SEQ ID NO: 1029380 - DNA, 15 bp, Homo sapiens
ccaggctcttatagg

SEQ ID NO: 1029381 - DNA, 15 bp, Homo sapiens
cccaggctcttatag

SEQ ID NO: 1029382 - DNA, 15 bp, Homo sapiens
acccaggctcttata

SEQ ID NO: 1029383 - DNA, 15 bp, Homo sapiens
aacccaggctcttat

SEQ ID NO: 1029384 - DNA, 15 bp, Homo sapiens
gaacccaggctctta

SEQ ID NO: 1029385 - DNA, 15 bp, Homo sapiens
ggaacccaggctctt

SEQ ID NO: 1029386 - DNA, 15 bp, Homo sapiens
aggaacccaggctct

SEQ ID NO: 1029387 - DNA, 15 bp, Homo sapiens
gaggaacccaggctc

SEQ ID NO: 1029388 - DNA, 15 bp, Homo sapiens
tgaggaacccaggct

SEQ ID NO: 1029389 - DNA, 15 bp, Homo sapiens
ttgaggaacccaggc

SEQ ID NO: 1029390 - DNA, 15 bp, Homo sapiens
tttgaggaacccagg

SEQ ID NO: 1029391 - DNA, 15 bp, Homo sapiens
gtttgaggaacccag

SEQ ID NO: 1029392 - DNA, 15 bp, Homo sapiens
ggtttgaggaaccca

SEQ ID NO: 1029393 - DNA, 15 bp, Homo sapiens
gggtttgaggaaccc

SEQ ID NO: 1029394 - DNA, 15 bp, Homo sapiens
tgggtttgaggaacc

SEQ ID NO: 1029395 - DNA, 15 bp, Homo sapiens
ttgggtttgaggaac

SEQ ID NO: 1029396 - DNA, 15 bp, Homo sapiens
tttgggtttgaggaa

SEQ ID NO: 1029397 - DNA, 15 bp, Homo sapiens
ctttgggtttgagga

SEQ ID NO: 1029398 - DNA, 15 bp, Homo sapiens
actttgggtttgagg

SEQ ID NO: 1029399 - DNA, 15 bp, Homo sapiens
cactttgggtttgag

SEQ ID NO: 1029400 - DNA, 15 bp, Homo sapiens
tcactttgggtttga

SEQ ID NO: 1029401 - DNA, 15 bp, Homo sapiens
ctcactttgggtttg

SEQ ID NO: 1029402 - DNA, 15 bp, Homo sapiens
actcactttgggttt

SEQ ID NO: 1029403 - DNA, 15 bp, Homo sapiens
ctactcactttgggt

SEQ ID NO: 1029404 - DNA, 15 bp, Homo sapiens
cctactcactttggg

SEQ ID NO: 1029405 - DNA, 15 bp, Homo sapiens
acctactcactttgg

SEQ ID NO: 1029406 - DNA, 15 bp, Homo sapiens
cacctactcactttg

SEQ ID NO: 1029407 - DNA, 15 bp, Homo sapiens
tcacctactcacttt

SEQ ID NO: 1029408 - DNA, 15 bp, Homo sapiens
ctcacctactcactt

SEQ ID NO: 1029409 - DNA, 15 bp, Homo sapiens
tctcacctactcact

SEQ ID NO: 1029410 - DNA, 15 bp, Homo sapiens
ttctcacctactcac

SEQ ID NO: 1029411 - DNA, 15 bp, Homo sapiens
cttctcacctactca

SEQ ID NO: 1029412 - DNA, 15 bp, Homo sapiens
acttctcacctactc

SEQ ID NO: 1029413 - DNA, 15 bp, Homo sapiens
tacttctcacctact

SEQ ID NO: 1029414 - DNA, 15 bp, Homo sapiens
ctacttctcacctac

SEQ ID NO: 1029415 - DNA, 15 bp, Homo sapiens
cctacttctcaccta

SEQ ID NO: 1029416 - DNA, 15 bp, Homo sapiens
tcacctacttctcac

SEQ ID NO: 1029417 - DNA, 15 bp, Homo sapiens
ctcacctacttctca

SEQ ID NO: 1029418 - DNA, 15 bp, Homo sapiens
tctcacctacttctc

SEQ ID NO: 1029419 - DNA, 15 bp, Homo sapiens
ctctcacctacttct

SEQ ID NO: 1029420 - DNA, 15 bp, Homo sapiens
cctctcacctacttc

SEQ ID NO: 1029421 - DNA, 15 bp, Homo sapiens
ccctctcacctactt

SEQ ID NO: 1029422 - DNA, 15 bp, Homo sapiens
cccctctcacctact

SEQ ID NO: 1029423 - DNA, 15 bp, Homo sapiens
tcccctctcacctac

SEQ ID NO: 1029424 - DNA, 15 bp, Homo sapiens
atcccctctcaccta

SEQ ID NO: 1029425 - DNA, 15 bp, Homo sapiens
aatcccctctcacct

SEQ ID NO: 1029426 - DNA, 15 bp, Homo sapiens
gaatcccctctcacc

SEQ ID NO: 1029427 - DNA, 15 bp, Homo sapiens
ggaatcccctctcac

SEQ ID NO: 1029428 - DNA, 15 bp, Homo sapiens
aggaatcccctctca

SEQ ID NO: 1029429 - DNA, 15 bp, Homo sapiens
caggaatcccctctc

SEQ ID NO: 1029430 - DNA, 15 bp, Homo sapiens
gcaggaatcccctct

SEQ ID NO: 1029431 - DNA, 15 bp, Homo sapiens
tgcaggaatcccctc

SEQ ID NO: 1029432 - DNA, 15 bp, Homo sapiens
ttgcaggaatcccct

SEQ ID NO: 1029433 - DNA, 15 bp, Homo sapiens
tttgcaggaatcccc

SEQ ID NO: 1029434 - DNA, 15 bp, Homo sapiens
ctttgcaggaatccc

SEQ ID NO: 1029435 - DNA, 15 bp, Homo sapiens
tctttgcaggaatcc

SEQ ID NO: 1029436 - DNA, 15 bp, Homo sapiens
gtctttgcaggaatc

SEQ ID NO: 1029437 - DNA, 15 bp, Homo sapiens
ggtctttgcaggaat

SEQ ID NO: 1029438 - DNA, 15 bp, Homo sapiens
gggtctttgcaggaa

SEQ ID NO: 1029439 - DNA, 15 bp, Homo sapiens
cgggtctttgcagga

SEQ ID NO: 1029440 - DNA, 15 bp, Homo sapiens
tcgggtctttgcagg

SEQ ID NO: 1029441 - DNA, 15 bp, Homo sapiens
ctcgggtctttgcag

SEQ ID NO: 1029442 - DNA, 15 bp, Homo sapiens
tctcgggtctttgca

SEQ ID NO: 1029443 - DNA, 15 bp, Homo sapiens
ctctcgggtctttgc

SEQ ID NO: 1029444 - DNA, 15 bp, Homo sapiens
actctcgggtctttg

SEQ ID NO: 1029445 - DNA, 15 bp, Homo sapiens
cactctcgggtcttt

SEQ ID NO: 1029446 - DNA, 15 bp, Homo sapiens
ccactctcgggtctt

SEQ ID NO: 1029447 - DNA, 15 bp, Homo sapiens
cccactctcgggtct

SEQ ID NO: 1029448 - DNA, 15 bp, Homo sapiens
ccccactctcgggtc

SEQ ID NO: 1029449 - DNA, 15 bp, Homo sapiens
cccccactctcgggt

SEQ ID NO: 1029450 - DNA, 15 bp, Homo sapiens
acccccactctcggg

SEQ ID NO: 1029451 - DNA, 15 bp, Homo sapiens
gacccccactctcgg

SEQ ID NO: 1029452 - DNA, 15 bp, Homo sapiens
tgacccccactctcg

SEQ ID NO: 1029453 - DNA, 15 bp, Homo sapiens
atgacccccactctc

SEQ ID NO: 1029454 - DNA, 15 bp, Homo sapiens
aatgacccccactct

SEQ ID NO: 1029455 - DNA, 15 bp, Homo sapiens
caatgacccccactc

SEQ ID NO: 1029456 - DNA, 15 bp, Homo sapiens
ccaatgacccccact

SEQ ID NO: 1029457 - DNA, 15 bp, Homo sapiens
cccaatgacccccac

SEQ ID NO: 1029458 - DNA, 15 bp, Homo sapiens
gcccaatgaccccca

SEQ ID NO: 1029459 - DNA, 15 bp, Homo sapiens
ggcccaatgaccccc

SEQ ID NO: 1029460 - DNA, 15 bp, Homo sapiens
tggcccaatgacccc

SEQ ID NO: 1029461 - DNA, 15 bp, Homo sapiens
atggcccaatgaccc

SEQ ID NO: 1029462 - DNA, 15 bp, Homo sapiens
aatggcccaatgacc

SEQ ID NO: 1029463 - DNA, 15 bp, Homo sapiens
aaatggcccaatgac

SEQ ID NO: 1029464 - DNA, 15 bp, Homo sapiens
aaaatggcccaatga

SEQ ID NO: 1029465 - DNA, 15 bp, Homo sapiens
taaaatggcccaatg

SEQ ID NO: 1029466 - DNA, 15 bp, Homo sapiens
ataaaatggcccaat

SEQ ID NO: 1029467 - DNA, 15 bp, Homo sapiens
cataaaatggcccaa

SEQ ID NO: 1029468 - DNA, 15 bp, Homo sapiens
gcataaaatggccca

SEQ ID NO: 1029469 - DNA, 15 bp, Homo sapiens
ggcataaaatggccc

SEQ ID NO: 1029470 - DNA, 15 bp, Homo sapiens
aggcataaaatggcc

SEQ ID NO: 1029471 - DNA, 15 bp, Homo sapiens
caggcataaaatggc

SEQ ID NO: 1029472 - DNA, 15 bp, Homo sapiens
acaggcataaaatgg

SEQ ID NO: 1029473 - DNA, 15 bp, Homo sapiens
aacaggcataaaatg

SEQ ID NO: 1029474 - DNA, 15 bp, Homo sapiens
aaacaggcataaaat

SEQ ID NO: 1029475 - DNA, 15 bp, Homo sapiens
gaaacaggcataaaa

SEQ ID NO: 1029476 - DNA, 15 bp, Homo sapiens
agaaacaggcataaa

SEQ ID NO: 1029477 - DNA, 15 bp, Homo sapiens
gagaaacaggcataa

SEQ ID NO: 1029478 - DNA, 15 bp, Homo sapiens
agagaaacaggcata

SEQ ID NO: 1029479 - DNA, 15 bp, Homo sapiens
cagagaaacaggcat

SEQ ID NO: 1029480 - DNA, 15 bp, Homo sapiens
gcagagaaacaggca

SEQ ID NO: 1029481 - DNA, 15 bp, Homo sapiens
agcagagaaacaggc

SEQ ID NO: 1029482 - DNA, 15 bp, Homo sapiens
aagcagagaaacagg

SEQ ID NO: 1029483 - DNA, 15 bp, Homo sapiens
ggaagcagagaaaca

SEQ ID NO: 1029484 - DNA, 15 bp, Homo sapiens
aggaagcagagaaac

SEQ ID NO: 1029485 - DNA, 15 bp, Homo sapiens
caggaagcagagaaa

SEQ ID NO: 1029486 - DNA, 15 bp, Homo sapiens
acaggaagcagagaa

SEQ ID NO: 1029487 - DNA, 15 bp, Homo sapiens
aacaggaagcagaga

SEQ ID NO: 1029488 - DNA, 15 bp, Homo sapiens
caacaggaagcagag

SEQ ID NO: 1029489 - DNA, 15 bp, Homo sapiens
tcaacaggaagcaga

SEQ ID NO: 1029490 - DNA, 15 bp, Homo sapiens
atcaacaggaagcag

SEQ ID NO: 1029491 - DNA, 15 bp, Homo sapiens
catcaacaggaagca

SEQ ID NO: 1029492 - DNA, 15 bp, Homo sapiens
acatcaacaggaagc

SEQ ID NO: 1029493 - DNA, 15 bp, Homo sapiens
cacatcaacaggaag

SEQ ID NO: 1029494 - DNA, 15 bp, Homo sapiens
acacatcaacaggaa

SEQ ID NO: 1029495 - DNA, 15 bp, Homo sapiens
aacacatcaacagga

SEQ ID NO: 1029496 - DNA, 15 bp, Homo sapiens
gaacacatcaacagg

SEQ ID NO: 1029497 - DNA, 15 bp, Homo sapiens
tgaacacatcaacag

SEQ ID NO: 1029498 - DNA, 15 bp, Homo sapiens
atgaacacatcaaca

SEQ ID NO: 1029499 - DNA, 15 bp, Homo sapiens
catgaacacatcaac

SEQ ID NO: 1029500 - DNA, 15 bp, Homo sapiens
gcatgaacacatcaa

SEQ ID NO: 1029501 - DNA, 15 bp, Homo sapiens
tgcatgaacacatca

SEQ ID NO: 1029502 - DNA, 15 bp, Homo sapiens
ttgcatgaacacatc

SEQ ID NO: 1029503 - DNA, 15 bp, Homo sapiens
cttgcatgaacacat

SEQ ID NO: 1029504 - DNA, 15 bp, Homo sapiens
acttgcatgaacaca

SEQ ID NO: 1029505 - DNA, 15 bp, Homo sapiens
cacttgcatgaacac

SEQ ID NO: 1029506 - DNA, 15 bp, Homo sapiens
acacttgcatgaaca

SEQ ID NO: 1029507 - DNA, 15 bp, Homo sapiens
gacacttgcatgaac

SEQ ID NO: 1029508 - DNA, 15 bp, Homo sapiens
agacacttgcatgaa

SEQ ID NO: 1029509 - DNA, 15 bp, Homo sapiens
gagacacttgcatga

SEQ ID NO: 1029510 - DNA, 15 bp, Homo sapiens
agagacacttgcatg

SEQ ID NO: 1029511 - DNA, 15 bp, Homo sapiens
cagagacacttgcat

SEQ ID NO: 1029512 - DNA, 15 bp, Homo sapiens
acagagacacttgca

SEQ ID NO: 1029513 - DNA, 15 bp, Homo sapiens
tacagagacacttgc

SEQ ID NO: 1029514 - DNA, 15 bp, Homo sapiens
atacagagacacttg

SEQ ID NO: 1029515 - DNA, 15 bp, Homo sapiens
aatacagagacactt

SEQ ID NO: 1029516 - DNA, 15 bp, Homo sapiens
aaatacagagacact

SEQ ID NO: 1029517 - DNA, 15 bp, Homo sapiens
gaaatacagagacac

SEQ ID NO: 1029518 - DNA, 15 bp, Homo sapiens
agaaatacagagaca

SEQ ID NO: 1029519 - DNA, 15 bp, Homo sapiens
cagaaatacagagac

SEQ ID NO: 1029520 - DNA, 15 bp, Homo sapiens
ccagaaatacagaga

SEQ ID NO: 1029521 - DNA, 15 bp, Homo sapiens
cccagaaatacagag

SEQ ID NO: 1029522 - DNA, 15 bp, Homo sapiens
acccagaaatacaga

SEQ ID NO: 1029523 - DNA, 15 bp, Homo sapiens
aacccagaaatacag

SEQ ID NO: 1029524 - DNA, 15 bp, Homo sapiens
aaacccagaaataca

SEQ ID NO: 1029525 - DNA, 15 bp, Homo sapiens
taaacccagaaatac

SEQ ID NO: 1029526 - DNA, 15 bp, Homo sapiens
ctaaacccagaaata

SEQ ID NO: 1029527 - DNA, 15 bp, Homo sapiens
actaaacccagaaat

SEQ ID NO: 1029528 - DNA, 15 bp, Homo sapiens
tactaaacccagaaa

SEQ ID NO: 1029529 - DNA, 15 bp, Homo sapiens
ttactaaacccagaa

SEQ ID NO: 1029530 - DNA, 15 bp, Homo sapiens
attactaaacccaga

SEQ ID NO: 1029531 - DNA, 15 bp, Homo sapiens
cattactaaacccag

SEQ ID NO: 1029532 - DNA, 15 bp, Homo sapiens
tcattactaaaccca

SEQ ID NO: 1029533 - DNA, 15 bp, Homo sapiens
ctcattactaaaccc

SEQ ID NO: 1029534 - DNA, 15 bp, Homo sapiens
tctcattactaaacc

SEQ ID NO: 1029535 - DNA, 15 bp, Homo sapiens
atctcattactaaac

SEQ ID NO: 1029536 - DNA, 15 bp, Homo sapiens
catctcattactaaa

SEQ ID NO: 1029537 - DNA, 15 bp, Homo sapiens
gcatctcattactaa

SEQ ID NO: 1029538 - DNA, 15 bp, Homo sapiens
agcatctcattacta

SEQ ID NO: 1029539 - DNA, 15 bp, Homo sapiens
gagcatctcattact

SEQ ID NO: 1029540 - DNA, 15 bp, Homo sapiens
ggagcatctcattac

SEQ ID NO: 1029541 - DNA, 15 bp, Homo sapiens
gggagcatctcatta

SEQ ID NO: 1029542 - DNA, 15 bp, Homo sapiens
ggggagcatctcatt

SEQ ID NO: 1029543 - DNA, 15 bp, Homo sapiens
aggggagcatctcat

SEQ ID NO: 1029544 - DNA, 15 bp, Homo sapiens
gaggggagcatctca

SEQ ID NO: 1029545 - DNA, 15 bp, Homo sapiens
agaggggagcatctc

SEQ ID NO: 1029546 - DNA, 15 bp, Homo sapiens
tagaggggagcatct

SEQ ID NO: 1029547 - DNA, 15 bp, Homo sapiens
ctagaggggagcatc

SEQ ID NO: 1029548 - DNA, 15 bp, Homo sapiens
tctagaggggagcat

SEQ ID NO: 1029549 - DNA, 15 bp, Homo sapiens
ttctagaggggagca

SEQ ID NO: 1029550 - DNA, 15 bp, Homo sapiens
tttctagaggggagc

SEQ ID NO: 1029551 - DNA, 15 bp, Homo sapiens
ttttctagaggggag

SEQ ID NO: 1029552 - DNA, 15 bp, Homo sapiens
gttttctagagggga

SEQ ID NO: 1029553 - DNA, 15 bp, Homo sapiens
agttttctagagggg

SEQ ID NO: 1029554 - DNA, 15 bp, Homo sapiens
gagttttctagaggg

SEQ ID NO: 1029555 - DNA, 15 bp, Homo sapiens
ggagttttctagagg

SEQ ID NO: 1029556 - DNA, 15 bp, Homo sapiens
gggagttttctagag

SEQ ID NO: 1029557 - DNA, 15 bp, Homo sapiens
agggagttttctaga

SEQ ID NO: 1029558 - DNA, 15 bp, Homo sapiens
gagggagttttctag

SEQ ID NO: 1029559 - DNA, 15 bp, Homo sapiens
cgagggagttttcta

SEQ ID NO: 1029560 - DNA, 15 bp, Homo sapiens
gcgagggagttttct

SEQ ID NO: 1029561 - DNA, 15 bp, Homo sapiens
ggcgagggagttttc

SEQ ID NO: 1029562 - DNA, 15 bp, Homo sapiens
gggcgagggagtttt

SEQ ID NO: 1029563 - DNA, 15 bp, Homo sapiens
ggggcgagggagttt

SEQ ID NO: 1029564 - DNA, 15 bp, Homo sapiens
tggggcgagggagtt

SEQ ID NO: 1029565 - DNA, 15 bp, Homo sapiens
ttggggcgagggagt

SEQ ID NO: 1029566 - DNA, 15 bp, Homo sapiens
attggggcgagggag

SEQ ID NO: 1029567 - DNA, 15 bp, Homo sapiens
gattggggcgaggga

SEQ ID NO: 1029568 - DNA, 15 bp, Homo sapiens
tgattggggcgaggg

SEQ ID NO: 1029569 - DNA, 15 bp, Homo sapiens
ctgattggggcgagg

SEQ ID NO: 1029570 - DNA, 15 bp, Homo sapiens
cctgattggggcgag

SEQ ID NO: 1029571 - DNA, 15 bp, Homo sapiens
tcctgattggggcga

SEQ ID NO: 1029572 - DNA, 15 bp, Homo sapiens
gtcctgattggggcg

SEQ ID NO: 1029573 - DNA, 15 bp, Homo sapiens
tgtcctgattggggc

SEQ ID NO: 1029574 - DNA, 15 bp, Homo sapiens
ctgtcctgattgggg

SEQ ID NO: 1029575 - DNA, 15 bp, Homo sapiens
actgtcctgattggg

SEQ ID NO: 1029576 - DNA, 15 bp, Homo sapiens
aactgtcctgattgg

SEQ ID NO: 1029577 - DNA, 15 bp, Homo sapiens
taactgtcctgattg

SEQ ID NO: 1029578 - DNA, 15 bp, Homo sapiens
gtaactgtcctgatt

SEQ ID NO: 1029579 - DNA, 15 bp, Homo sapiens
ggtaactgtcctgat

SEQ ID NO: 1029580 - DNA, 15 bp, Homo sapiens
tggtaactgtcctga

SEQ ID NO: 1029581 - DNA, 15 bp, Homo sapiens
gtggtaactgtcctg

SEQ ID NO: 1029582 - DNA, 15 bp, Homo sapiens
agtggtaactgtcct

SEQ ID NO: 1029583 - DNA, 15 bp, Homo sapiens
aagtggtaactgtcc

SEQ ID NO: 1029584 - DNA, 15 bp, Homo sapiens
taagtggtaactgtc

SEQ ID NO: 1029585 - DNA, 15 bp, Homo sapiens
gtaagtggtaactgt

SEQ ID NO: 1029586 - DNA, 15 bp, Homo sapiens
agtaagtggtaactg

SEQ ID NO: 1029587 - DNA, 15 bp, Homo sapiens
gagtaagtggtaact

SEQ ID NO: 1029588 - DNA, 15 bp, Homo sapiens
agagtaagtggtaac

SEQ ID NO: 1029589 - DNA, 15 bp, Homo sapiens
cagagtaagtggtaa

SEQ ID NO: 1029590 - DNA, 15 bp, Homo sapiens
tcagagtaagtggta

SEQ ID NO: 1029591 - DNA, 15 bp, Homo sapiens
ttcagagtaagtggt

SEQ ID NO: 1029592 - DNA, 15 bp, Homo sapiens
cttcagagtaagtgg

SEQ ID NO: 1029593 - DNA, 15 bp, Homo sapiens
ccttcagagtaagtg

SEQ ID NO: 1029594 - DNA, 15 bp, Homo sapiens
gccttcagagtaagt

SEQ ID NO: 1029595 - DNA, 15 bp, Homo sapiens
ggccttcagagtaag

SEQ ID NO: 1029596 - DNA, 15 bp, Homo sapiens
aggccttcagagtaa

SEQ ID NO: 1029597 - DNA, 15 bp, Homo sapiens
gaggccttcagagta

SEQ ID NO: 1029598 - DNA, 15 bp, Homo sapiens
agaggccttcagagt

SEQ ID NO: 1029599 - DNA, 15 bp, Homo sapiens
aagaggccttcagag

SEQ ID NO: 1029600 - DNA, 15 bp, Homo sapiens
gaagaggccttcaga

SEQ ID NO: 1029601 - DNA, 15 bp, Homo sapiens
agaagaggccttcag

SEQ ID NO: 1029602 - DNA, 15 bp, Homo sapiens
cagaagaggccttca

SEQ ID NO: 1029603 - DNA, 15 bp, Homo sapiens
tcagaagaggccttc

SEQ ID NO: 1029604 - DNA, 15 bp, Homo sapiens
atcagaagaggcctt

SEQ ID NO: 1029605 - DNA, 15 bp, Homo sapiens
gatcagaagaggcct

SEQ ID NO: 1029606 - DNA, 15 bp, Homo sapiens
ggatcagaagaggcc

SEQ ID NO: 1029607 - DNA, 15 bp, Homo sapiens
tggatcagaagaggc

SEQ ID NO: 1029608 - DNA, 15 bp, Homo sapiens
ctggatcagaagagg

SEQ ID NO: 1029609 - DNA, 15 bp, Homo sapiens
tctggatcagaagag

SEQ ID NO: 1029610 - DNA, 15 bp, Homo sapiens
ttctggatcagaaga

SEQ ID NO: 1029611 - DNA, 15 bp, Homo sapiens
cttctggatcagaag

SEQ ID NO: 1029612 - DNA, 15 bp, Homo sapiens
ccttctggatcagaa

SEQ ID NO: 1029613 - DNA, 15 bp, Homo sapiens
cccttctggatcaga

SEQ ID NO: 1029614 - DNA, 15 bp, Homo sapiens
acccttctggatcag

SEQ ID NO: 1029615 - DNA, 15 bp, Homo sapiens
cacccttctggatca

SEQ ID NO: 1029616 - DNA, 15 bp, Homo sapiens
ccacccttctggatc

SEQ ID NO: 1029617 - DNA, 15 bp, Homo sapiens
accacccttctggat

SEQ ID NO: 1029618 - DNA, 15 bp, Homo sapiens
taccacccttctgga

SEQ ID NO: 1029619 - DNA, 15 bp, Homo sapiens
ttaccacccttctgg

SEQ ID NO: 1029620 - DNA, 15 bp, Homo sapiens
cttaccacccttctg

SEQ ID NO: 1029621 - DNA, 15 bp, Homo sapiens
tcttaccacccttct

SEQ ID NO: 1029622 - DNA, 15 bp, Homo sapiens
atcttaccacccttc

SEQ ID NO: 1029623 - DNA, 15 bp, Homo sapiens
catcttaccaccctt

SEQ ID NO: 1029624 - DNA, 15 bp, Homo sapiens
ccatcttaccaccct

SEQ ID NO: 1029625 - DNA, 15 bp, Homo sapiens
gccatcttaccaccc

SEQ ID NO: 1029626 - DNA, 15 bp, Homo sapiens
ggccatcttaccacc

SEQ ID NO: 1029627 - DNA, 15 bp, Homo sapiens
aggccatcttaccac

SEQ ID NO: 1029628 - DNA, 15 bp, Homo sapiens
gaggccatcttacca

SEQ ID NO: 1029629 - DNA, 15 bp, Homo sapiens
tgaggccatcttacc

SEQ ID NO: 1029630 - DNA, 15 bp, Homo sapiens
ctgaggccatcttac

SEQ ID NO: 1029631 - DNA, 15 bp, Homo sapiens
cctgaggccatctta

SEQ ID NO: 1029632 - DNA, 15 bp, Homo sapiens
ccctgaggccatctt

SEQ ID NO: 1029633 - DNA, 15 bp, Homo sapiens
accctgaggccatct

SEQ ID NO: 1029634 - DNA, 15 bp, Homo sapiens
gaccctgaggccatc

SEQ ID NO: 1029635 - DNA, 15 bp, Homo sapiens
agaccctgaggccat

SEQ ID NO: 1029636 - DNA, 15 bp, Homo sapiens
aagaccctgaggcca

SEQ ID NO: 1029637 - DNA, 15 bp, Homo sapiens
caagaccctgaggcc

SEQ ID NO: 1029638 - DNA, 15 bp, Homo sapiens
tcaagaccctgaggc

SEQ ID NO: 1029639 - DNA, 15 bp, Homo sapiens
atcaagaccctgagg

SEQ ID NO: 1029640 - DNA, 15 bp, Homo sapiens
catcaagaccctgag

SEQ ID NO: 1029641 - DNA, 15 bp, Homo sapiens
acatcaagaccctga

SEQ ID NO: 1029642 - DNA, 15 bp, Homo sapiens
cacatcaagaccctg

SEQ ID NO: 1029643 - DNA, 15 bp, Homo sapiens
ccacatcaagaccct

SEQ ID NO: 1029644 - DNA, 15 bp, Homo sapiens
tccacatcaagaccc

SEQ ID NO: 1029645 - DNA, 15 bp, Homo sapiens
gtccacatcaagacc

SEQ ID NO: 1029646 - DNA, 15 bp, Homo sapiens
tgtccacatcaagac

SEQ ID NO: 1029647 - DNA, 15 bp, Homo sapiens
gtgtccacatcaaga

SEQ ID NO: 1029648 - DNA, 15 bp, Homo sapiens
ggtgtccacatcaag

SEQ ID NO: 1029649 - DNA, 15 bp, Homo sapiens
gggtgtccacatcaa

SEQ ID NO: 1029650 - DNA, 15 bp, Homo sapiens
agggtgtccacatca

SEQ ID NO: 1029651 - DNA, 15 bp, Homo sapiens
tagggtgtccacatc

SEQ ID NO: 1029652 - DNA, 15 bp, Homo sapiens
ttagggtgtccacat

SEQ ID NO: 1029653 - DNA, 15 bp, Homo sapiens
cttagggtgtccaca

SEQ ID NO: 1029654 - DNA, 15 bp, Homo sapiens
ccttagggtgtccac

SEQ ID NO: 1029655 - DNA, 15 bp, Homo sapiens
tccttagggtgtcca

SEQ ID NO: 1029656 - DNA, 15 bp, Homo sapiens
ttccttagggtgtcc

SEQ ID NO: 1029657 - DNA, 15 bp, Homo sapiens
tttccttagggtgtc

SEQ ID NO: 1029658 - DNA, 15 bp, Homo sapiens
ttttccttagggtgt

SEQ ID NO: 1029659 - DNA, 15 bp, Homo sapiens
cttttccttagggtg

SEQ ID NO: 1029660 - DNA, 15 bp, Homo sapiens
acttttccttagggt

SEQ ID NO: 1029661 - DNA, 15 bp, Homo sapiens
cacttttccttaggg

SEQ ID NO: 1029662 - DNA, 15 bp, Homo sapiens
tcacttttccttagg

SEQ ID NO: 1029663 - DNA, 15 bp, Homo sapiens
ttcacttttccttag

SEQ ID NO: 1029664 - DNA, 15 bp, Homo sapiens
cttcacttttcctta

SEQ ID NO: 1029665 - DNA, 15 bp, Homo sapiens
tcttcacttttcctt

SEQ ID NO: 1029666 - DNA, 15 bp, Homo sapiens
ttcttcacttttcct

SEQ ID NO: 1029667 - DNA, 15 bp, Homo sapiens
tttcttcacttttcc

SEQ ID NO: 1029668 - DNA, 15 bp, Homo sapiens
atttcttcacttttc

SEQ ID NO: 1029669 - DNA, 15 bp, Homo sapiens
tatttcttcactttt

SEQ ID NO: 1029670 - DNA, 15 bp, Homo sapiens
atatttcttcacttt

SEQ ID NO: 1029671 - DNA, 15 bp, Homo sapiens
gatatttcttcactt

SEQ ID NO: 1029672 - DNA, 15 bp, Homo sapiens
agatatttcttcact

SEQ ID NO: 1029673 - DNA, 15 bp, Homo sapiens
gagatatttcttcac

SEQ ID NO: 1029674 - DNA, 15 bp, Homo sapiens
ggagatatttcttca

SEQ ID NO: 1029675 - DNA, 15 bp, Homo sapiens
tggagatatttcttc

SEQ ID NO: 1029676 - DNA, 15 bp, Homo sapiens
gtggagatatttctt

SEQ ID NO: 1029677 - DNA, 15 bp, Homo sapiens
tgtggagatatttct

SEQ ID NO: 1029678 - DNA, 15 bp, Homo sapiens
gtgtggagatatttc

SEQ ID NO: 1029679 - DNA, 15 bp, Homo sapiens
agtgtggagatattt

SEQ ID NO: 1029680 - DNA, 15 bp, Homo sapiens
cagtgtggagatatt

SEQ ID NO: 1029681 - DNA, 15 bp, Homo sapiens
gcagtgtggagatat

SEQ ID NO: 1029682 - DNA, 15 bp, Homo sapiens
agcagtgtggagata

SEQ ID NO: 1029683 - DNA, 15 bp, Homo sapiens
aagcagtgtggagat

SEQ ID NO: 1029684 - DNA, 15 bp, Homo sapiens
taagcagtgtggaga

SEQ ID NO: 1029685 - DNA, 15 bp, Homo sapiens
ttaagcagtgtggag

SEQ ID NO: 1029686 - DNA, 15 bp, Homo sapiens
tttaagcagtgtgga

SEQ ID NO: 1029687 - DNA, 15 bp, Homo sapiens
gtttaagcagtgtgg

SEQ ID NO: 1029688 - DNA, 15 bp, Homo sapiens
agtttaagcagtgtg

SEQ ID NO: 1029689 - DNA, 15 bp, Homo sapiens
gagtttaagcagtgt

SEQ ID NO: 1029690 - DNA, 15 bp, Homo sapiens
agagtttaagcagtg

SEQ ID NO: 1029691 - DNA, 15 bp, Homo sapiens
tagagtttaagcagt

SEQ ID NO: 1029692 - DNA, 15 bp, Homo sapiens
gtagagtttaagcag

SEQ ID NO: 1029693 - DNA, 15 bp, Homo sapiens
cgtagagtttaagca

SEQ ID NO: 1029694 - DNA, 15 bp, Homo sapiens
gcgtagagtttaagc

SEQ ID NO: 1029695 - DNA, 15 bp, Homo sapiens
tgcgtagagtttaag

SEQ ID NO: 1029696 - DNA, 15 bp, Homo sapiens
gtgcgtagagtttaa

SEQ ID NO: 1029697 - DNA, 15 bp, Homo sapiens
tgtgcgtagagttta

SEQ ID NO: 1029698 - DNA, 15 bp, Homo sapiens
ctgtgcgtagagttt

SEQ ID NO: 1029699 - DNA, 15 bp, Homo sapiens
cctgtgcgtagagtt

SEQ ID NO: 1029700 - DNA, 15 bp, Homo sapiens
gcctgtgcgtagagt

SEQ ID NO: 1029701 - DNA, 15 bp, Homo sapiens
ggcctgtgcgtagag

SEQ ID NO: 1029702 - DNA, 15 bp, Homo sapiens
gggcctgtgcgtaga

SEQ ID NO: 1029703 - DNA, 15 bp, Homo sapiens
agggcctgtgcgtag

SEQ ID NO: 1029704 - DNA, 15 bp, Homo sapiens
cagggcctgtgcgta

SEQ ID NO: 1029705 - DNA, 15 bp, Homo sapiens
tcagggcctgtgcgt

SEQ ID NO: 1029706 - DNA, 15 bp, Homo sapiens
ctcagggcctgtgcg

SEQ ID NO: 1029707 - DNA, 15 bp, Homo sapiens
gctcagggcctgtgc

SEQ ID NO: 1029708 - DNA, 15 bp, Homo sapiens
tgctcagggcctgtg

SEQ ID NO: 1029709 - DNA, 15 bp, Homo sapiens
ttgctcagggcctgt

SEQ ID NO: 1029710 - DNA, 15 bp, Homo sapiens
tttgctcagggcctg

SEQ ID NO: 1029711 - DNA, 15 bp, Homo sapiens
ttttgctcagggcct

SEQ ID NO: 1029712 - DNA, 15 bp, Homo sapiens
cttttgctcagggcc

SEQ ID NO: 1029713 - DNA, 15 bp, Homo sapiens
ccttttgctcagggc

SEQ ID NO: 1029714 - DNA, 15 bp, Homo sapiens
tccttttgctcaggg

SEQ ID NO: 1029715 - DNA, 15 bp, Homo sapiens
ctccttttgctcagg

SEQ ID NO: 1029716 - DNA, 15 bp, Homo sapiens
cctccttttgctcag

SEQ ID NO: 1029717 - DNA, 15 bp, Homo sapiens
tcctccttttgctca

SEQ ID NO: 1029718 - DNA, 15 bp, Homo sapiens
ttcctccttttgctc

SEQ ID NO: 1029719 - DNA, 15 bp, Homo sapiens
cttcctccttttgct

SEQ ID NO: 1029720 - DNA, 15 bp, Homo sapiens
gcttcctccttttgc

SEQ ID NO: 1029721 - DNA, 15 bp, Homo sapiens
agcttcctccttttg

SEQ ID NO: 1029722 - DNA, 15 bp, Homo sapiens
cagcttcctcctttt

SEQ ID NO: 1029723 - DNA, 15 bp, Homo sapiens
acagcttcctccttt

SEQ ID NO: 1029724 - DNA, 15 bp, Homo sapiens
cacagcttcctcctt

SEQ ID NO: 1029725 - DNA, 15 bp, Homo sapiens
ccacagcttcctcct

SEQ ID NO: 1029726 - DNA, 15 bp, Homo sapiens
accacagcttcctcc

SEQ ID NO: 1029727 - DNA, 15 bp, Homo sapiens
gaccacagcttcctc

SEQ ID NO: 1029728 - DNA, 15 bp, Homo sapiens
agaccacagcttcct

SEQ ID NO: 1029729 - DNA, 15 bp, Homo sapiens
cagaccacagcttcc

SEQ ID NO: 1029730 - DNA, 15 bp, Homo sapiens
acagaccacagcttc

SEQ ID NO: 1029731 - DNA, 15 bp, Homo sapiens
cacagaccacagctt

SEQ ID NO: 1029732 - DNA, 15 bp, Homo sapiens
acacagaccacagct

SEQ ID NO: 1029733 - DNA, 15 bp, Homo sapiens
tacacagaccacagc

SEQ ID NO: 1029734 - DNA, 15 bp, Homo sapiens
gtacacagaccacag

SEQ ID NO: 1029735 - DNA, 15 bp, Homo sapiens
ggtacacagaccaca

SEQ ID NO: 1029736 - DNA, 15 bp, Homo sapiens
gggtacacagaccac

SEQ ID NO: 1029737 - DNA, 15 bp, Homo sapiens
tgggtacacagacca

SEQ ID NO: 1029738 - DNA, 15 bp, Homo sapiens
ctgggtacacagacc

SEQ ID NO: 1029739 - DNA, 15 bp, Homo sapiens
cctgggtacacagac

SEQ ID NO: 1029740 - DNA, 15 bp, Homo sapiens
tcctgggtacacaga

SEQ ID NO: 1029741 - DNA, 15 bp, Homo sapiens
atcctgggtacacag

SEQ ID NO: 1029742 - DNA, 15 bp, Homo sapiens
catcctgggtacaca

SEQ ID NO: 1029743 - DNA, 15 bp, Homo sapiens
acatcctgggtacac

SEQ ID NO: 1029744 - DNA, 15 bp, Homo sapiens
cacatcctgggtaca

SEQ ID NO: 1029745 - DNA, 15 bp, Homo sapiens
gcacatcctgggtac

SEQ ID NO: 1029746 - DNA, 15 bp, Homo sapiens
agcacatcctgggta

SEQ ID NO: 1029747 - DNA, 15 bp, Homo sapiens
tagcacatcctgggt

SEQ ID NO: 1029748 - DNA, 15 bp, Homo sapiens
ttagcacatcctggg

SEQ ID NO: 1029749 - DNA, 15 bp, Homo sapiens
gttagcacatcctgg

SEQ ID NO: 1029750 - DNA, 15 bp, Homo sapiens
ggttagcacatcctg

SEQ ID NO: 1029751 - DNA, 15 bp, Homo sapiens
aggttagcacatcct

SEQ ID NO: 1029752 - DNA, 15 bp, Homo sapiens
gaggttagcacatcc

SEQ ID NO: 1029753 - DNA, 15 bp, Homo sapiens
agaggttagcacatc

SEQ ID NO: 1029754 - DNA, 15 bp, Homo sapiens
aagaggttagcacat

SEQ ID NO: 1029755 - DNA, 15 bp, Homo sapiens
aaagaggttagcaca

SEQ ID NO: 1029756 - DNA, 15 bp, Homo sapiens
taaagaggttagcac

SEQ ID NO: 1029757 - DNA, 15 bp, Homo sapiens
ctaaagaggttagca

SEQ ID NO: 1029758 - DNA, 15 bp, Homo sapiens
tctaaagaggttagc

SEQ ID NO: 1029759 - DNA, 15 bp, Homo sapiens
atctaaagaggttag

SEQ ID NO: 1029760 - DNA, 15 bp, Homo sapiens
tatctaaagaggtta

SEQ ID NO: 1029761 - DNA, 15 bp, Homo sapiens
gtatctaaagaggtt

SEQ ID NO: 1029762 - DNA, 15 bp, Homo sapiens
tgtatctaaagaggt

SEQ ID NO: 1029763 - DNA, 15 bp, Homo sapiens
gtgtatctaaagagg

SEQ ID NO: 1029764 - DNA, 15 bp, Homo sapiens
tgtgtatctaaagag

SEQ ID NO: 1029765 - DNA, 15 bp, Homo sapiens
gtgtgtatctaaaga

SEQ ID NO: 1029766 - DNA, 15 bp, Homo sapiens
tgtgtgtatctaaag

SEQ ID NO: 1029767 - DNA, 15 bp, Homo sapiens
ctgtgtgtatctaaa

SEQ ID NO: 1029768 - DNA, 15 bp, Homo sapiens
cctgtgtgtatctaa

SEQ ID NO: 1029769 - DNA, 15 bp, Homo sapiens
ccctgtgtgtatcta

SEQ ID NO: 1029770 - DNA, 15 bp, Homo sapiens
tccctgtgtgtatct

SEQ ID NO: 1029771 - DNA, 15 bp, Homo sapiens
atccctgtgtgtatc

SEQ ID NO: 1029772 - DNA, 15 bp, Homo sapiens
aatccctgtgtgtat

SEQ ID NO: 1029773 - DNA, 15 bp, Homo sapiens
caatccctgtgtgta

SEQ ID NO: 1029774 - DNA, 15 bp, Homo sapiens
ccaatccctgtgtgt

SEQ ID NO: 1029775 - DNA, 15 bp, Homo sapiens
gccaatccctgtgtg

SEQ ID NO: 1029776 - DNA, 15 bp, Homo sapiens
tgccaatccctgtgt

SEQ ID NO: 1029777 - DNA, 15 bp, Homo sapiens
atgccaatccctgtg

SEQ ID NO: 1029778 - DNA, 15 bp, Homo sapiens
catgccaatccctgt

SEQ ID NO: 1029779 - DNA, 15 bp, Homo sapiens
ccatgccaatccctg

SEQ ID NO: 1029780 - DNA, 15 bp, Homo sapiens
gccatgccaatccct

SEQ ID NO: 1029781 - DNA, 15 bp, Homo sapiens
tgccatgccaatccc

SEQ ID NO: 1029782 - DNA, 15 bp, Homo sapiens
ctgccatgccaatcc

SEQ ID NO: 1029783 - DNA, 15 bp, Homo sapiens
cctgccatgccaatc

SEQ ID NO: 1029784 - DNA, 15 bp, Homo sapiens
gcctgccatgccaat

SEQ ID NO: 1029785 - DNA, 15 bp, Homo sapiens
ggcctgccatgccaa

SEQ ID NO: 1029786 - DNA, 15 bp, Homo sapiens
aggcctgccatgcca

SEQ ID NO: 1029787 - DNA, 15 bp, Homo sapiens
gaggcctgccatgcc

SEQ ID NO: 1029788 - DNA, 15 bp, Homo sapiens
cgaggcctgccatgc

SEQ ID NO: 1029789 - DNA, 15 bp, Homo sapiens
tcgaggcctgccatg

SEQ ID NO: 1029790 - DNA, 15 bp, Homo sapiens
ctcgaggcctgccat

SEQ ID NO: 1029791 - DNA, 15 bp, Homo sapiens
tctcgaggcctgcca

SEQ ID NO: 1029792 - DNA, 15 bp, Homo sapiens
ttctcgaggcctgcc

SEQ ID NO: 1029793 - DNA, 15 bp, Homo sapiens
gttctcgaggcctgc

SEQ ID NO: 1029794 - DNA, 15 bp, Homo sapiens
tgttctcgaggcctg

SEQ ID NO: 1029795 - DNA, 15 bp, Homo sapiens
ctgttctcgaggcct

SEQ ID NO: 1029796 - DNA, 15 bp, Homo sapiens
cctgttctcgaggcc

SEQ ID NO: 1029797 - DNA, 15 bp, Homo sapiens
gcctgttctcgaggc

SEQ ID NO: 1029798 - DNA, 15 bp, Homo sapiens
agcctgttctcgagg

SEQ ID NO: 1029799 - DNA, 15 bp, Homo sapiens
aagcctgttctcgag

SEQ ID NO: 1029800 - DNA, 15 bp, Homo sapiens
taagcctgttctcga

SEQ ID NO: 1029801 - DNA, 15 bp, Homo sapiens
ctaagcctgttctcg

SEQ ID NO: 1029802 - DNA, 15 bp, Homo sapiens
tctaagcctgttctc

SEQ ID NO: 1029803 - DNA, 15 bp, Homo sapiens
ctctaagcctgttct

SEQ ID NO: 1029804 - DNA, 15 bp, Homo sapiens
gctctaagcctgttc

SEQ ID NO: 1029805 - DNA, 15 bp, Homo sapiens
tgctctaagcctgtt

SEQ ID NO: 1029806 - DNA, 15 bp, Homo sapiens
ctgctctaagcctgt

SEQ ID NO: 1029807 - DNA, 15 bp, Homo sapiens
cctgctctaagcctg

SEQ ID NO: 1029808 - DNA, 15 bp, Homo sapiens
tcctgctctaagcct

SEQ ID NO: 1029809 - DNA, 15 bp, Homo sapiens
ttcctgctctaagcc

SEQ ID NO: 1029810 - DNA, 15 bp, Homo sapiens
gttcctgctctaagc

SEQ ID NO: 1029811 - DNA, 15 bp, Homo sapiens
ggttcctgctctaag

SEQ ID NO: 1029812 - DNA, 15 bp, Homo sapiens
aggttcctgctctaa

SEQ ID NO: 1029813 - DNA, 15 bp, Homo sapiens
caggttcctgctcta

SEQ ID NO: 1029814 - DNA, 15 bp, Homo sapiens
tcaggttcctgctct

SEQ ID NO: 1029815 - DNA, 15 bp, Homo sapiens
gtcaggttcctgctc

SEQ ID NO: 1029816 - DNA, 15 bp, Homo sapiens
tgtcaggttcctgct

SEQ ID NO: 1029817 - DNA, 15 bp, Homo sapiens
gtgtcaggttcctgc

SEQ ID NO: 1029818 - DNA, 15 bp, Homo sapiens
agtgtcaggttcctg

SEQ ID NO: 1029819 - DNA, 15 bp, Homo sapiens
aagtgtcaggttcct

SEQ ID NO: 1029820 - DNA, 15 bp, Homo sapiens
gaagtgtcaggttcc

SEQ ID NO: 1029821 - DNA, 15 bp, Homo sapiens
tgaagtgtcaggttc

SEQ ID NO: 1029822 - DNA, 15 bp, Homo sapiens
ctgaagtgtcaggtt

SEQ ID NO: 1029823 - DNA, 15 bp, Homo sapiens
cctgaagtgtcaggt

SEQ ID NO: 1029824 - DNA, 15 bp, Homo sapiens
gcctgaagtgtcagg

SEQ ID NO: 1029825 - DNA, 15 bp, Homo sapiens
ggcctgaagtgtcag

SEQ ID NO: 1029826 - DNA, 15 bp, Homo sapiens
tggcctgaagtgtca

SEQ ID NO: 1029827 - DNA, 15 bp, Homo sapiens
ttggcctgaagtgtc

SEQ ID NO: 1029828 - DNA, 15 bp, Homo sapiens
cttggcctgaagtgt

SEQ ID NO: 1029829 - DNA, 15 bp, Homo sapiens
ccttggcctgaagtg

SEQ ID NO: 1029830 - DNA, 15 bp, Homo sapiens
tccttggcctgaagt

SEQ ID NO: 1029831 - DNA, 15 bp, Homo sapiens
atccttggcctgaag

SEQ ID NO: 1029832 - DNA, 15 bp, Homo sapiens
catccttggcctgaa

SEQ ID NO: 1029833 - DNA, 15 bp, Homo sapiens
ccatccttggcctga

SEQ ID NO: 1029834 - DNA, 15 bp, Homo sapiens
cccatccttggcctg

SEQ ID NO: 1029835 - DNA, 15 bp, Homo sapiens
tcccatccttggcct

SEQ ID NO: 1029836 - DNA, 15 bp, Homo sapiens
ctcccatccttggcc

SEQ ID NO: 1029837 - DNA, 15 bp, Homo sapiens
actcccatccttggc

SEQ ID NO: 1029838 - DNA, 15 bp, Homo sapiens
cactcccatccttgg

SEQ ID NO: 1029839 - DNA, 15 bp, Homo sapiens
tcactcccatccttg

SEQ ID NO: 1029840 - DNA, 15 bp, Homo sapiens
ttcactcccatcctt

SEQ ID NO: 1029841 - DNA, 15 bp, Homo sapiens
tttcactcccatcct

SEQ ID NO: 1029842 - DNA, 15 bp, Homo sapiens
ctttcactcccatcc

SEQ ID NO: 1029843 - DNA, 15 bp, Homo sapiens
actttcactcccatc

SEQ ID NO: 1029844 - DNA, 15 bp, Homo sapiens
gactttcactcccat

SEQ ID NO: 1029845 - DNA, 15 bp, Homo sapiens
ggactttcactccca

SEQ ID NO: 1029846 - DNA, 15 bp, Homo sapiens
aggactttcactccc

SEQ ID NO: 1029847 - DNA, 15 bp, Homo sapiens
aaggactttcactcc

SEQ ID NO: 1029848 - DNA, 15 bp, Homo sapiens
gaaggactttcactc

SEQ ID NO: 1029849 - DNA, 15 bp, Homo sapiens
ggaaggactttcact

SEQ ID NO: 1029850 - DNA, 15 bp, Homo sapiens
aggaaggactttcac

SEQ ID NO: 1029851 - DNA, 15 bp, Homo sapiens
aaggaaggactttca

SEQ ID NO: 1029852 - DNA, 15 bp, Homo sapiens
aaaggaaggactttc

SEQ ID NO: 1029853 - DNA, 15 bp, Homo sapiens
aaaaggaaggacttt

SEQ ID NO: 1029854 - DNA, 15 bp, Homo sapiens
aaaaaggaaggactt

SEQ ID NO: 1029855 - DNA, 15 bp, Homo sapiens
aaaaaaggaaggact

SEQ ID NO: 1029856 - DNA, 15 bp, Homo sapiens
aaaaaaaggaaggac

SEQ ID NO: 1029857 - DNA, 15 bp, Homo sapiens
caaaaaaaggaagga

SEQ ID NO: 1029858 - DNA, 15 bp, Homo sapiens
acaaaaaaaggaagg

SEQ ID NO: 1029859 - DNA, 15 bp, Homo sapiens
cacaaaaaaaggaag

SEQ ID NO: 1029860 - DNA, 15 bp, Homo sapiens
ccacaaaaaaaggaa

SEQ ID NO: 1029861 - DNA, 15 bp, Homo sapiens
cccacaaaaaaagga

SEQ ID NO: 1029862 - DNA, 15 bp, Homo sapiens
acccacaaaaaaagg

SEQ ID NO: 1029863 - DNA, 15 bp, Homo sapiens
cacccacaaaaaaag

SEQ ID NO: 1029864 - DNA, 15 bp, Homo sapiens
ccacccacaaaaaaa

SEQ ID NO: 1029865 - DNA, 15 bp, Homo sapiens
accacccacaaaaaa

SEQ ID NO: 1029866 - DNA, 15 bp, Homo sapiens
taccacccacaaaaa

SEQ ID NO: 1029867 - DNA, 15 bp, Homo sapiens
ctaccacccacaaaa

SEQ ID NO: 1029868 - DNA, 15 bp, Homo sapiens
cctaccacccacaaa

SEQ ID NO: 1029869 - DNA, 15 bp, Homo sapiens
tcctaccacccacaa

SEQ ID NO: 1029870 - DNA, 15 bp, Homo sapiens
ctcctaccacccaca

SEQ ID NO: 1029871 - DNA, 15 bp, Homo sapiens
gctcctaccacccac

SEQ ID NO: 1029872 - DNA, 15 bp, Homo sapiens
ggctcctaccaccca

SEQ ID NO: 1029873 - DNA, 15 bp, Homo sapiens
tggctcctaccaccc

SEQ ID NO: 1029874 - DNA, 15 bp, Homo sapiens
atggctcctaccacc

SEQ ID NO: 1029875 - DNA, 15 bp, Homo sapiens
catggctcctaccac

SEQ ID NO: 1029876 - DNA, 15 bp, Homo sapiens
tcatggctcctacca

SEQ ID NO: 1029877 - DNA, 15 bp, Homo sapiens
ctcatggctcctacc

SEQ ID NO: 1029878 - DNA, 15 bp, Homo sapiens
gctcatggctcctac

SEQ ID NO: 1029879 - DNA, 15 bp, Homo sapiens
agctcatggctccta

SEQ ID NO: 1029880 - DNA, 15 bp, Homo sapiens
gagctcatggctcct

SEQ ID NO: 1029881 - DNA, 15 bp, Homo sapiens
ggagctcatggctcc

SEQ ID NO: 1029882 - DNA, 15 bp, Homo sapiens
gaggagctcatggct

SEQ ID NO: 1029883 - DNA, 15 bp, Homo sapiens
ggaggagctcatggc

SEQ ID NO: 1029884 - DNA, 15 bp, Homo sapiens
tggaggagctcatgg

SEQ ID NO: 1029885 - DNA, 15 bp, Homo sapiens
ttggaggagctcatg

SEQ ID NO: 1029886 - DNA, 15 bp, Homo sapiens
tttggaggagctcat

SEQ ID NO: 1029887 - DNA, 15 bp, Homo sapiens
gtttggaggagctca

SEQ ID NO: 1029888 - DNA, 15 bp, Homo sapiens
ggtttggaggagctc

SEQ ID NO: 1029889 - DNA, 15 bp, Homo sapiens
gggtttggaggagct

SEQ ID NO: 1029890 - DNA, 15 bp, Homo sapiens
agggtttggaggagc

SEQ ID NO: 1029891 - DNA, 15 bp, Homo sapiens
gagggtttggaggag

SEQ ID NO: 1029892 - DNA, 15 bp, Homo sapiens
ggagggtttggagga

SEQ ID NO: 1029893 - DNA, 15 bp, Homo sapiens
gggagggtttggagg

SEQ ID NO: 1029894 - DNA, 15 bp, Homo sapiens
agggagggtttggag

SEQ ID NO: 1029895 - DNA, 15 bp, Homo sapiens
cagggagggtttgga

SEQ ID NO: 1029896 - DNA, 15 bp, Homo sapiens
acagggagggtttgg

SEQ ID NO: 1029897 - DNA, 15 bp, Homo sapiens
cacagggagggtttg

SEQ ID NO: 1029898 - DNA, 15 bp, Homo sapiens
tcacagggagggttt

SEQ ID NO: 1029899 - DNA, 15 bp, Homo sapiens
ctcacagggagggtt

SEQ ID NO: 1029900 - DNA, 15 bp, Homo sapiens
gctcacagggagggt

SEQ ID NO: 1029901 - DNA, 15 bp, Homo sapiens
tgctcacagggaggg

SEQ ID NO: 1029902 - DNA, 15 bp, Homo sapiens
ttgctcacagggagg

SEQ ID NO: 1029903 - DNA, 15 bp, Homo sapiens
gttgctcacagggag

SEQ ID NO: 1029904 - DNA, 15 bp, Homo sapiens
ggttgctcacaggga

SEQ ID NO: 1029905 - DNA, 15 bp, Homo sapiens
aggttgctcacaggg

SEQ ID NO: 1029906 - DNA, 15 bp, Homo sapiens
caggttgctcacagg

SEQ ID NO: 1029907 - DNA, 15 bp, Homo sapiens
acaggttgctcacag

SEQ ID NO: 1029908 - DNA, 15 bp, Homo sapiens
gacaggttgctcaca

SEQ ID NO: 1029909 - DNA, 15 bp, Homo sapiens
tgacaggttgctcac

SEQ ID NO: 1029910 - DNA, 15 bp, Homo sapiens
atgacaggttgctca

SEQ ID NO: 1029911 - DNA, 15 bp, Homo sapiens
aatgacaggttgctc

SEQ ID NO: 1029912 - DNA, 15 bp, Homo sapiens
gaatgacaggttgct

SEQ ID NO: 1029913 - DNA, 15 bp, Homo sapiens
tgaatgacaggttgc

SEQ ID NO: 1029914 - DNA, 15 bp, Homo sapiens
gtgaatgacaggttg

SEQ ID NO: 1029915 - DNA, 15 bp, Homo sapiens
ggtgaatgacaggtt

SEQ ID NO: 1029916 - DNA, 15 bp, Homo sapiens
aggtgaatgacaggt

SEQ ID NO: 1029917 - DNA, 15 bp, Homo sapiens
taggtgaatgacagg

SEQ ID NO: 1029918 - DNA, 15 bp, Homo sapiens
ttaggtgaatgacag

SEQ ID NO: 1029919 - DNA, 15 bp, Homo sapiens
cttaggtgaatgaca

SEQ ID NO: 1029920 - DNA, 15 bp, Homo sapiens
acttaggtgaatgac

SEQ ID NO: 1029921 - DNA, 15 bp, Homo sapiens
aacttaggtgaatga

SEQ ID NO: 1029922 - DNA, 15 bp, Homo sapiens
taacttaggtgaatg

SEQ ID NO: 1029923 - DNA, 15 bp, Homo sapiens
gtaacttaggtgaat

SEQ ID NO: 1029924 - DNA, 15 bp, Homo sapiens
ggtaacttaggtgaa

SEQ ID NO: 1029925 - DNA, 15 bp, Homo sapiens
aggtaacttaggtga

SEQ ID NO: 1029926 - DNA, 15 bp, Homo sapiens
caggtaacttaggtg

SEQ ID NO: 1029927 - DNA, 15 bp, Homo sapiens
ccaggtaacttaggt

SEQ ID NO: 1029928 - DNA, 15 bp, Homo sapiens
gccaggtaacttagg

SEQ ID NO: 1029929 - DNA, 15 bp, Homo sapiens
agccaggtaacttag

SEQ ID NO: 1029930 - DNA, 15 bp, Homo sapiens
tagccaggtaactta

SEQ ID NO: 1029931 - DNA, 15 bp, Homo sapiens
ctagccaggtaactt

SEQ ID NO: 1029932 - DNA, 15 bp, Homo sapiens
cctagccaggtaact

SEQ ID NO: 1029933 - DNA, 15 bp, Homo sapiens
gcctagccaggtaac

SEQ ID NO: 1029934 - DNA, 15 bp, Homo sapiens
agcctagccaggtaa

SEQ ID NO: 1029935 - DNA, 15 bp, Homo sapiens
cagcctagccaggta

SEQ ID NO: 1029936 - DNA, 15 bp, Homo sapiens
tcagcctagccaggt

SEQ ID NO: 1029937 - DNA, 15 bp, Homo sapiens
ctcagcctagccagg

SEQ ID NO: 1029938 - DNA, 15 bp, Homo sapiens
actcagcctagccag

SEQ ID NO: 1029939 - DNA, 15 bp, Homo sapiens
gactcagcctagcca

SEQ ID NO: 1029940 - DNA, 15 bp, Homo sapiens
ggactcagcctagcc

SEQ ID NO: 1029941 - DNA, 15 bp, Homo sapiens
gggactcagcctagc

SEQ ID NO: 1029942 - DNA, 15 bp, Homo sapiens
ggggactcagcctag

SEQ ID NO: 1029943 - DNA, 15 bp, Homo sapiens
tggggactcagccta

SEQ ID NO: 1029944 - DNA, 15 bp, Homo sapiens
gtggggactcagcct

SEQ ID NO: 1029945 - DNA, 15 bp, Homo sapiens
tgtggggactcagcc

SEQ ID NO: 1029946 - DNA, 15 bp, Homo sapiens
ctgtggggactcagc

SEQ ID NO: 1029947 - DNA, 15 bp, Homo sapiens
tctgtggggactcag

SEQ ID NO: 1029948 - DNA, 15 bp, Homo sapiens
ctctgtggggactca

SEQ ID NO: 1029949 - DNA, 15 bp, Homo sapiens
gctctgtggggactc

SEQ ID NO: 1029950 - DNA, 15 bp, Homo sapiens
agctctgtggggact

SEQ ID NO: 1029951 - DNA, 15 bp, Homo sapiens
tagctctgtggggac

SEQ ID NO: 1029952 - DNA, 15 bp, Homo sapiens
gtagctctgtgggga

SEQ ID NO: 1029953 - DNA, 15 bp, Homo sapiens
ggtagctctgtgggg

SEQ ID NO: 1029954 - DNA, 15 bp, Homo sapiens
aggtagctctgtggg

SEQ ID NO: 1029955 - DNA, 15 bp, Homo sapiens
aaggtagctctgtgg

SEQ ID NO: 1029956 - DNA, 15 bp, Homo sapiens
gaaggtagctctgtg

SEQ ID NO: 1029957 - DNA, 15 bp, Homo sapiens
tgaaggtagctctgt

SEQ ID NO: 1029958 - DNA, 15 bp, Homo sapiens
ctgaaggtagctctg

SEQ ID NO: 1029959 - DNA, 15 bp, Homo sapiens
actgaaggtagctct

SEQ ID NO: 1029960 - DNA, 15 bp, Homo sapiens
gactgaaggtagctc

SEQ ID NO: 1029961 - DNA, 15 bp, Homo sapiens
agactgaaggtagct

SEQ ID NO: 1029962 - DNA, 15 bp, Homo sapiens
gagactgaaggtagc

SEQ ID NO: 1029963 - DNA, 15 bp, Homo sapiens
ggagactgaaggtag

SEQ ID NO: 1029964 - DNA, 15 bp, Homo sapiens
tggagactgaaggta

SEQ ID NO: 1029965 - DNA, 15 bp, Homo sapiens
ttggagactgaaggt

SEQ ID NO: 1029966 - DNA, 15 bp, Homo sapiens
cttggagactgaagg

SEQ ID NO: 1029967 - DNA, 15 bp, Homo sapiens
gcttggagactgaag

SEQ ID NO: 1029968 - DNA, 15 bp, Homo sapiens
tgcttggagactgaa

SEQ ID NO: 1029969 - DNA, 15 bp, Homo sapiens
atgcttggagactga

SEQ ID NO: 1029970 - DNA, 15 bp, Homo sapiens
aatgcttggagactg

SEQ ID NO: 1029971 - DNA, 15 bp, Homo sapiens
gaatgcttggagact

SEQ ID NO: 1029972 - DNA, 15 bp, Homo sapiens
agaatgcttggagac

SEQ ID NO: 1029973 - DNA, 15 bp, Homo sapiens
cagaatgcttggaga

SEQ ID NO: 1029974 - DNA, 15 bp, Homo sapiens
gcagaatgcttggag

SEQ ID NO: 1029975 - DNA, 15 bp, Homo sapiens
tgcagaatgcttgga

SEQ ID NO: 1029976 - DNA, 15 bp, Homo sapiens
ttgcagaatgcttgg

SEQ ID NO: 1029977 - DNA, 15 bp, Homo sapiens
cttgcagaatgcttg

SEQ ID NO: 1029978 - DNA, 15 bp, Homo sapiens
tcttgcagaatgctt

SEQ ID NO: 1029979 - DNA, 15 bp, Homo sapiens
atcttgcagaatgct

SEQ ID NO: 1029980 - DNA, 15 bp, Homo sapiens
aatcttgcagaatgc

SEQ ID NO: 1029981 - DNA, 15 bp, Homo sapiens
caatcttgcagaatg

SEQ ID NO: 1029982 - DNA, 15 bp, Homo sapiens
tcaatcttgcagaat

SEQ ID NO: 1029983 - DNA, 15 bp, Homo sapiens
ctcaatcttgcagaa

SEQ ID NO: 1029984 - DNA, 15 bp, Homo sapiens
gctcaatcttgcaga

SEQ ID NO: 1029985 - DNA, 15 bp, Homo sapiens
ggctcaatcttgcag

SEQ ID NO: 1029986 - DNA, 15 bp, Homo sapiens
aggctcaatcttgca

SEQ ID NO: 1029987 - DNA, 15 bp, Homo sapiens
aaggctcaatcttgc

SEQ ID NO: 1029988 - DNA, 15 bp, Homo sapiens
aaaggctcaatcttg

SEQ ID NO: 1029989 - DNA, 15 bp, Homo sapiens
taaaggctcaatctt

SEQ ID NO: 1029990 - DNA, 15 bp, Homo sapiens
ctaaaggctcaatct

SEQ ID NO: 1029991 - DNA, 15 bp, Homo sapiens
actaaaggctcaatc

SEQ ID NO: 1029992 - DNA, 15 bp, Homo sapiens
cactaaaggctcaat

SEQ ID NO: 1029993 - DNA, 15 bp, Homo sapiens
acactaaaggctcaa

SEQ ID NO: 1029994 - DNA, 15 bp, Homo sapiens
cacactaaaggctca

SEQ ID NO: 1029995 - DNA, 15 bp, Homo sapiens
acacactaaaggctc

SEQ ID NO: 1029996 - DNA, 15 bp, Homo sapiens
cacacactaaaggct

SEQ ID NO: 1029997 - DNA, 15 bp, Homo sapiens
acacacactaaaggc

SEQ ID NO: 1029998 - DNA, 15 bp, Homo sapiens
cacacacactaaagg

SEQ ID NO: 1029999 - DNA, 15 bp, Homo sapiens
acacacacactaaag

SEQ ID NO: 1030000 - DNA, 15 bp, Homo sapiens
aacacacacactaaa

SEQ ID NO: 1030001 - DNA, 15 bp, Homo sapiens
caacacacacactaa

SEQ ID NO: 1030002 - DNA, 15 bp, Homo sapiens
ccaacacacacacta

SEQ ID NO: 1030003 - DNA, 15 bp, Homo sapiens
accaacacacacact

SEQ ID NO: 1030004 - DNA, 15 bp, Homo sapiens
caccaacacacacac

SEQ ID NO: 1030005 - DNA, 15 bp, Homo sapiens
acaccaacacacaca

SEQ ID NO: 1030006 - DNA, 15 bp, Homo sapiens
aacaccaacacacac

SEQ ID NO: 1030007 - DNA, 15 bp, Homo sapiens
aaacaccaacacaca

SEQ ID NO: 1030008 - DNA, 15 bp, Homo sapiens
taaacaccaacacac

SEQ ID NO: 1030009 - DNA, 15 bp, Homo sapiens
ttaaacaccaacaca

SEQ ID NO: 1030010 - DNA, 15 bp, Homo sapiens
cttaaacaccaacac

SEQ ID NO: 1030011 - DNA, 15 bp, Homo sapiens
acttaaacaccaaca

SEQ ID NO: 1030012 - DNA, 15 bp, Homo sapiens
aacttaaacaccaac

SEQ ID NO: 1030013 - DNA, 15 bp, Homo sapiens
caacttaaacaccaa

SEQ ID NO: 1030014 - DNA, 15 bp, Homo sapiens
acaacttaaacacca

SEQ ID NO: 1030015 - DNA, 15 bp, Homo sapiens
cacaacttaaacacc

SEQ ID NO: 1030016 - DNA, 15 bp, Homo sapiens
acacaacttaaacac

SEQ ID NO: 1030017 - DNA, 15 bp, Homo sapiens
cacacaacttaaaca

SEQ ID NO: 1030018 - DNA, 15 bp, Homo sapiens
tcacacaacttaaac

SEQ ID NO: 1030019 - DNA, 15 bp, Homo sapiens
ttcacacaacttaaa

SEQ ID NO: 1030020 - DNA, 15 bp, Homo sapiens
tttcacacaacttaa

SEQ ID NO: 1030021 - DNA, 15 bp, Homo sapiens
ctttcacacaactta

SEQ ID NO: 1030022 - DNA, 15 bp, Homo sapiens
gctttcacacaactt

SEQ ID NO: 1030023 - DNA, 15 bp, Homo sapiens
ggctttcacacaact

SEQ ID NO: 1030024 - DNA, 15 bp, Homo sapiens
tggctttcacacaac

SEQ ID NO: 1030025 - DNA, 15 bp, Homo sapiens
gtggctttcacacaa

SEQ ID NO: 1030026 - DNA, 15 bp, Homo sapiens
tgtggctttcacaca

SEQ ID NO: 1030027 - DNA, 15 bp, Homo sapiens
ctgtggctttcacac

SEQ ID NO: 1030028 - DNA, 15 bp, Homo sapiens
actgtggctttcaca

SEQ ID NO: 1030029 - DNA, 15 bp, Homo sapiens
aactgtggctttcac

SEQ ID NO: 1030030 - DNA, 15 bp, Homo sapiens
aaactgtggctttca

SEQ ID NO: 1030031 - DNA, 15 bp, Homo sapiens
aaaactgtggctttc

SEQ ID NO: 1030032 - DNA, 15 bp, Homo sapiens
gaaaactgtggcttt

SEQ ID NO: 1030033 - DNA, 15 bp, Homo sapiens
agaaaactgtggctt

SEQ ID NO: 1030034 - DNA, 15 bp, Homo sapiens
cagaaaactgtggct

SEQ ID NO: 1030035 - DNA, 15 bp, Homo sapiens
acagaaaactgtggc

SEQ ID NO: 1030036 - DNA, 15 bp, Homo sapiens
aacagaaaactgtgg

SEQ ID NO: 1030037 - DNA, 15 bp, Homo sapiens
gaacagaaaactgtg

SEQ ID NO: 1030038 - DNA, 15 bp, Homo sapiens
cgaacagaaaactgt

SEQ ID NO: 1030039 - DNA, 15 bp, Homo sapiens
gcgaacagaaaactg

SEQ ID NO: 1030040 - DNA, 15 bp, Homo sapiens
tgcgaacagaaaact

SEQ ID NO: 1030041 - DNA, 15 bp, Homo sapiens
atgcgaacagaaaac

SEQ ID NO: 1030042 - DNA, 15 bp, Homo sapiens
catgcgaacagaaaa

SEQ ID NO: 1030043 - DNA, 15 bp, Homo sapiens
acatgcgaacagaaa

SEQ ID NO: 1030044 - DNA, 15 bp, Homo sapiens
cacatgcgaacagaa

SEQ ID NO: 1030045 - DNA, 15 bp, Homo sapiens
tcacatgcgaacaga

SEQ ID NO: 1030046 - DNA, 15 bp, Homo sapiens
gtcacatgcgaacag

SEQ ID NO: 1030047 - DNA, 15 bp, Homo sapiens
ggtcacatgcgaaca

SEQ ID NO: 1030048 - DNA, 15 bp, Homo sapiens
aggtcacatgcgaac

SEQ ID NO: 1030049 - DNA, 15 bp, Homo sapiens
gaggtcacatgcgaa

SEQ ID NO: 1030050 - DNA, 15 bp, Homo sapiens
agaggtcacatgcga

SEQ ID NO: 1030051 - DNA, 15 bp, Homo sapiens
cagaggtcacatgcg

SEQ ID NO: 1030052 - DNA, 15 bp, Homo sapiens
ccagaggtcacatgc

SEQ ID NO: 1030053 - DNA, 15 bp, Homo sapiens
tccagaggtcacatg

SEQ ID NO: 1030054 - DNA, 15 bp, Homo sapiens
atccagaggtcacat

SEQ ID NO: 1030055 - DNA, 15 bp, Homo sapiens
gatccagaggtcaca

SEQ ID NO: 1030056 - DNA, 15 bp, Homo sapiens
agatccagaggtcac

SEQ ID NO: 1030057 - DNA, 15 bp, Homo sapiens
aagatccagaggtca

SEQ ID NO: 1030058 - DNA, 15 bp, Homo sapiens
caagatccagaggtc

SEQ ID NO: 1030059 - DNA, 15 bp, Homo sapiens
ccaagatccagaggt

SEQ ID NO: 1030060 - DNA, 15 bp, Homo sapiens
cccaagatccagagg

SEQ ID NO: 1030061 - DNA, 15 bp, Homo sapiens
ccccaagatccagag

SEQ ID NO: 1030062 - DNA, 15 bp, Homo sapiens
accccaagatccaga

SEQ ID NO: 1030063 - DNA, 15 bp, Homo sapiens
aaccccaagatccag

SEQ ID NO: 1030064 - DNA, 15 bp, Homo sapiens
aaaccccaagatcca

SEQ ID NO: 1030065 - DNA, 15 bp, Homo sapiens
gaaaccccaagatcc

SEQ ID NO: 1030066 - DNA, 15 bp, Homo sapiens
ggaaaccccaagatc

SEQ ID NO: 1030067 - DNA, 15 bp, Homo sapiens
tggaaaccccaagat

SEQ ID NO: 1030068 - DNA, 15 bp, Homo sapiens
ctggaaaccccaaga

SEQ ID NO: 1030069 - DNA, 15 bp, Homo sapiens
tctggaaaccccaag

SEQ ID NO: 1030070 - DNA, 15 bp, Homo sapiens
atctggaaaccccaa

SEQ ID NO: 1030071 - DNA, 15 bp, Homo sapiens
gatctggaaacccca

SEQ ID NO: 1030072 - DNA, 15 bp, Homo sapiens
ggatctggaaacccc

SEQ ID NO: 1030073 - DNA, 15 bp, Homo sapiens
aggatctggaaaccc

SEQ ID NO: 1030074 - DNA, 15 bp, Homo sapiens
caggatctggaaacc

SEQ ID NO: 1030075 - DNA, 15 bp, Homo sapiens
acaggatctggaaac

SEQ ID NO: 1030076 - DNA, 15 bp, Homo sapiens
aacaggatctggaaa

SEQ ID NO: 1030077 - DNA, 15 bp, Homo sapiens
gaacaggatctggaa

SEQ ID NO: 1030078 - DNA, 15 bp, Homo sapiens
ggaacaggatctgga

SEQ ID NO: 1030079 - DNA, 15 bp, Homo sapiens
gggaacaggatctgg

SEQ ID NO: 1030080 - DNA, 15 bp, Homo sapiens
tgggaacaggatctg

SEQ ID NO: 1030081 - DNA, 15 bp, Homo sapiens
gtgggaacaggatct

SEQ ID NO: 1030082 - DNA, 15 bp, Homo sapiens
tgtgggaacaggatc

SEQ ID NO: 1030083 - DNA, 15 bp, Homo sapiens
ttgtgggaacaggat

SEQ ID NO: 1030084 - DNA, 15 bp, Homo sapiens
attgtgggaacagga

SEQ ID NO: 1030085 - DNA, 15 bp, Homo sapiens
tattgtgggaacagg

SEQ ID NO: 1030086 - DNA, 15 bp, Homo sapiens
ctattgtgggaacag

SEQ ID NO: 1030087 - DNA, 15 bp, Homo sapiens
actattgtgggaaca

SEQ ID NO: 1030088 - DNA, 15 bp, Homo sapiens
aactattgtgggaac

SEQ ID NO: 1030089 - DNA, 15 bp, Homo sapiens
gaactattgtgggaa

SEQ ID NO: 1030090 - DNA, 15 bp, Homo sapiens
tgaactattgtggga

SEQ ID NO: 1030091 - DNA, 15 bp, Homo sapiens
ttgaactattgtggg

SEQ ID NO: 1030092 - DNA, 15 bp, Homo sapiens
tttgaactattgtgg

SEQ ID NO: 1030093 - DNA, 15 bp, Homo sapiens
atttgaactattgtg

SEQ ID NO: 1030094 - DNA, 15 bp, Homo sapiens
tatttgaactattgt

SEQ ID NO: 1030095 - DNA, 15 bp, Homo sapiens
gtatttgaactattg

SEQ ID NO: 1030096 - DNA, 15 bp, Homo sapiens
agtatttgaactatt

SEQ ID NO: 1030097 - DNA, 15 bp, Homo sapiens
cagtatttgaactat

SEQ ID NO: 1030098 - DNA, 15 bp, Homo sapiens
acagtatttgaacta

SEQ ID NO: 1030099 - DNA, 15 bp, Homo sapiens
cacagtatttgaact

SEQ ID NO: 1030100 - DNA, 15 bp, Homo sapiens
gcacagtatttgaac

SEQ ID NO: 1030101 - DNA, 15 bp, Homo sapiens
agcacagtatttgaa

SEQ ID NO: 1030102 - DNA, 15 bp, Homo sapiens
aagcacagtatttga

SEQ ID NO: 1030103 - DNA, 15 bp, Homo sapiens
caagcacagtatttg

SEQ ID NO: 1030104 - DNA, 15 bp, Homo sapiens
ccaagcacagtattt

SEQ ID NO: 1030105 - DNA, 15 bp, Homo sapiens
tccaagcacagtatt

SEQ ID NO: 1030106 - DNA, 15 bp, Homo sapiens
ctccaagcacagtat

SEQ ID NO: 1030107 - DNA, 15 bp, Homo sapiens
tctccaagcacagta

SEQ ID NO: 1030108 - DNA, 15 bp, Homo sapiens
ctctccaagcacagt

SEQ ID NO: 1030109 - DNA, 15 bp, Homo sapiens
cctctccaagcacag

SEQ ID NO: 1030110 - DNA, 15 bp, Homo sapiens
tcctctccaagcaca

SEQ ID NO: 1030111 - DNA, 15 bp, Homo sapiens
gtcctctccaagcac

SEQ ID NO: 1030112 - DNA, 15 bp, Homo sapiens
tgtcctctccaagca

SEQ ID NO: 1030113 - DNA, 15 bp, Homo sapiens
ctgtcctctccaagc

SEQ ID NO: 1030114 - DNA, 15 bp, Homo sapiens
actgtcctctccaag

SEQ ID NO: 1030115 - DNA, 15 bp, Homo sapiens
cactgtcctctccaa

SEQ ID NO: 1030116 - DNA, 15 bp, Homo sapiens
ccactgtcctctcca

SEQ ID NO: 1030117 - DNA, 15 bp, Homo sapiens
tccactgtcctctcc

SEQ ID NO: 1030118 - DNA, 15 bp, Homo sapiens
gtccactgtcctctc

SEQ ID NO: 1030119 - DNA, 15 bp, Homo sapiens
ggtccactgtcctct

SEQ ID NO: 1030120 - DNA, 15 bp, Homo sapiens
tggtccactgtcctc

SEQ ID NO: 1030121 - DNA, 15 bp, Homo sapiens
ctggtccactgtcct

SEQ ID NO: 1030122 - DNA, 15 bp, Homo sapiens
cctggtccactgtcc

SEQ ID NO: 1030123 - DNA, 15 bp, Homo sapiens
tcctggtccactgtc

SEQ ID NO: 1030124 - DNA, 15 bp, Homo sapiens
ctcctggtccactgt

SEQ ID NO: 1030125 - DNA, 15 bp, Homo sapiens
tctcctggtccactg

SEQ ID NO: 1030126 - DNA, 15 bp, Homo sapiens
ctctcctggtccact

SEQ ID NO: 1030127 - DNA, 15 bp, Homo sapiens
tctctcctggtccac

SEQ ID NO: 1030128 - DNA, 15 bp, Homo sapiens
ctctctcctggtcca

SEQ ID NO: 1030129 - DNA, 15 bp, Homo sapiens
cctctctcctggtcc

SEQ ID NO: 1030130 - DNA, 15 bp, Homo sapiens
gcctctctcctggtc

SEQ ID NO: 1030131 - DNA, 15 bp, Homo sapiens
ggcctctctcctggt

SEQ ID NO: 1030132 - DNA, 15 bp, Homo sapiens
tggcctctctcctgg

SEQ ID NO: 1030133 - DNA, 15 bp, Homo sapiens
ctggcctctctcctg

SEQ ID NO: 1030134 - DNA, 15 bp, Homo sapiens
gctggcctctctcct

SEQ ID NO: 1030135 - DNA, 15 bp, Homo sapiens
tgctggcctctctcc

SEQ ID NO: 1030136 - DNA, 15 bp, Homo sapiens
atgctggcctctctc

SEQ ID NO: 1030137 - DNA, 15 bp, Homo sapiens
aatgctggcctctct

SEQ ID NO: 1030138 - DNA, 15 bp, Homo sapiens
gaatgctggcctctc

SEQ ID NO: 1030139 - DNA, 15 bp, Homo sapiens
agaatgctggcctct

SEQ ID NO: 1030140 - DNA, 15 bp, Homo sapiens
aagaatgctggcctc

SEQ ID NO: 1030141 - DNA, 15 bp, Homo sapiens
gaagaatgctggcct

SEQ ID NO: 1030142 - DNA, 15 bp, Homo sapiens
agaagaatgctggcc

SEQ ID NO: 1030143 - DNA, 15 bp, Homo sapiens
cagaagaatgctggc

SEQ ID NO: 1030144 - DNA, 15 bp, Homo sapiens
gcagaagaatgctgg

SEQ ID NO: 1030145 - DNA, 15 bp, Homo sapiens
agcagaagaatgctg

SEQ ID NO: 1030146 - DNA, 15 bp, Homo sapiens
gagcagaagaatgct

SEQ ID NO: 1030147 - DNA, 15 bp, Homo sapiens
agagcagaagaatgc

SEQ ID NO: 1030148 - DNA, 15 bp, Homo sapiens
gagagcagaagaatg

SEQ ID NO: 1030149 - DNA, 15 bp, Homo sapiens
agagagcagaagaat

SEQ ID NO: 1030150 - DNA, 15 bp, Homo sapiens
aagagagcagaagaa

SEQ ID NO: 1030151 - DNA, 15 bp, Homo sapiens
caagagagcagaaga

SEQ ID NO: 1030152 - DNA, 15 bp, Homo sapiens
ccaagagagcagaag

SEQ ID NO: 1030153 - DNA, 15 bp, Homo sapiens
accaagagagcagaa

SEQ ID NO: 1030154 - DNA, 15 bp, Homo sapiens
caccaagagagcaga

SEQ ID NO: 1030155 - DNA, 15 bp, Homo sapiens
tcaccaagagagcag

SEQ ID NO: 1030156 - DNA, 15 bp, Homo sapiens
ctcaccaagagagca

SEQ ID NO: 1030157 - DNA, 15 bp, Homo sapiens
tctcaccaagagagc

SEQ ID NO: 1030158 - DNA, 15 bp, Homo sapiens
ttctcaccaagagag

SEQ ID NO: 1030159 - DNA, 15 bp, Homo sapiens
attctcaccaagaga

SEQ ID NO: 1030160 - DNA, 15 bp, Homo sapiens
cattctcaccaagag

SEQ ID NO: 1030161 - DNA, 15 bp, Homo sapiens
tcattctcaccaaga

SEQ ID NO: 1030162 - DNA, 15 bp, Homo sapiens
ttcattctcaccaag

SEQ ID NO: 1030163 - DNA, 15 bp, Homo sapiens
gttcattctcaccaa

SEQ ID NO: 1030164 - DNA, 15 bp, Homo sapiens
ggttcattctcacca

SEQ ID NO: 1030165 - DNA, 15 bp, Homo sapiens
cggttcattctcacc

SEQ ID NO: 1030166 - DNA, 15 bp, Homo sapiens
acggttcattctcac

SEQ ID NO: 1030167 - DNA, 15 bp, Homo sapiens
gacggttcattctca

SEQ ID NO: 1030168 - DNA, 15 bp, Homo sapiens
ggacggttcattctc

SEQ ID NO: 1030169 - DNA, 15 bp, Homo sapiens
tggacggttcattct

SEQ ID NO: 1030170 - DNA, 15 bp, Homo sapiens
atggacggttcattc

SEQ ID NO: 1030171 - DNA, 15 bp, Homo sapiens
aatggacggttcatt

SEQ ID NO: 1030172 - DNA, 15 bp, Homo sapiens
taatggacggttcat

SEQ ID NO: 1030173 - DNA, 15 bp, Homo sapiens
ttaatggacggttca

SEQ ID NO: 1030174 - DNA, 15 bp, Homo sapiens
cttaatggacggttc

SEQ ID NO: 1030175 - DNA, 15 bp, Homo sapiens
gcttaatggacggtt

SEQ ID NO: 1030176 - DNA, 15 bp, Homo sapiens
ggcttaatggacggt

SEQ ID NO: 1030177 - DNA, 15 bp, Homo sapiens
aggcttaatggacgg

SEQ ID NO: 1030178 - DNA, 15 bp, Homo sapiens
caggcttaatggacg

SEQ ID NO: 1030179 - DNA, 15 bp, Homo sapiens
acaggcttaatggac

SEQ ID NO: 1030180 - DNA, 15 bp, Homo sapiens
aacaggcttaatgga

SEQ ID NO: 1030181 - DNA, 15 bp, Homo sapiens
aaacaggcttaatgg

SEQ ID NO: 1030182 - DNA, 15 bp, Homo sapiens
caaacaggcttaatg

SEQ ID NO: 1030183 - DNA, 15 bp, Homo sapiens
tcaaacaggcttaat

SEQ ID NO: 1030184 - DNA, 15 bp, Homo sapiens
ctcaaacaggcttaa

SEQ ID NO: 1030185 - DNA, 15 bp, Homo sapiens
tctcaaacaggctta

SEQ ID NO: 1030186 - DNA, 15 bp, Homo sapiens
atctcaaacaggctt

SEQ ID NO: 1030187 - DNA, 15 bp, Homo sapiens
aatctcaaacaggct

SEQ ID NO: 1030188 - DNA, 15 bp, Homo sapiens
gaatctcaaacaggc

SEQ ID NO: 1030189 - DNA, 15 bp, Homo sapiens
tgaatctcaaacagg

SEQ ID NO: 1030190 - DNA, 15 bp, Homo sapiens
atgaatctcaaacag

SEQ ID NO: 1030191 - DNA, 15 bp, Homo sapiens
tatgaatctcaaaca

SEQ ID NO: 1030192 - DNA, 15 bp, Homo sapiens
ctatgaatctcaaac

SEQ ID NO: 1030193 - DNA, 15 bp, Homo sapiens
actatgaatctcaaa

SEQ ID NO: 1030194 - DNA, 15 bp, Homo sapiens
gactatgaatctcaa

SEQ ID NO: 1030195 - DNA, 15 bp, Homo sapiens
tgactatgaatctca

SEQ ID NO: 1030196 - DNA, 15 bp, Homo sapiens
atgactatgaatctc

SEQ ID NO: 1030197 - DNA, 15 bp, Homo sapiens
gatgactatgaatct

SEQ ID NO: 1030198 - DNA, 15 bp, Homo sapiens
tgatgactatgaatc

SEQ ID NO: 1030199 - DNA, 15 bp, Homo sapiens
gtgatgactatgaat

SEQ ID NO: 1030200 - DNA, 15 bp, Homo sapiens
tgtgatgactatgaa

SEQ ID NO: 1030201 - DNA, 15 bp, Homo sapiens
ttgtgatgactatga

SEQ ID NO: 1030202 - DNA, 15 bp, Homo sapiens
tttgtgatgactatg

SEQ ID NO: 1030203 - DNA, 15 bp, Homo sapiens
ttttgtgatgactat

SEQ ID NO: 1030204 - DNA, 15 bp, Homo sapiens
tttttgtgatgacta

SEQ ID NO: 1030205 - DNA, 15 bp, Homo sapiens
atttttgtgatgact

SEQ ID NO: 1030206 - DNA, 15 bp, Homo sapiens
catttttgtgatgac

SEQ ID NO: 1030207 - DNA, 15 bp, Homo sapiens
tcatttttgtgatga

SEQ ID NO: 1030208 - DNA, 15 bp, Homo sapiens
ttcatttttgtgatg

SEQ ID NO: 1030209 - DNA, 15 bp, Homo sapiens
tttcatttttgtgat

SEQ ID NO: 1030210 - DNA, 15 bp, Homo sapiens
gtttcatttttgtga

SEQ ID NO: 1030211 - DNA, 15 bp, Homo sapiens
tgtttcatttttgtg

SEQ ID NO: 1030212 - DNA, 15 bp, Homo sapiens
ctgtttcatttttgt

SEQ ID NO: 1030213 - DNA, 15 bp, Homo sapiens
actgtttcatttttg

SEQ ID NO: 1030214 - DNA, 15 bp, Homo sapiens
cactgtttcattttt

SEQ ID NO: 1030215 - DNA, 15 bp, Homo sapiens
ccactgtttcatttt

SEQ ID NO: 1030216 - DNA, 15 bp, Homo sapiens
tccactgtttcattt

SEQ ID NO: 1030217 - DNA, 15 bp, Homo sapiens
ttccactgtttcatt

SEQ ID NO: 1030218 - DNA, 15 bp, Homo sapiens
gttccactgtttcat

SEQ ID NO: 1030219 - DNA, 15 bp, Homo sapiens
agttccactgtttca

SEQ ID NO: 1030220 - DNA, 15 bp, Homo sapiens
tagttccactgtttc

SEQ ID NO: 1030221 - DNA, 15 bp, Homo sapiens
ctagttccactgttt

SEQ ID NO: 1030222 - DNA, 15 bp, Homo sapiens
cctagttccactgtt

SEQ ID NO: 1030223 - DNA, 15 bp, Homo sapiens
acctagttccactgt

SEQ ID NO: 1030224 - DNA, 15 bp, Homo sapiens
aacctagttccactg

SEQ ID NO: 1030225 - DNA, 15 bp, Homo sapiens
taacctagttccact

SEQ ID NO: 1030226 - DNA, 15 bp, Homo sapiens
gtaacctagttccac

SEQ ID NO: 1030227 - DNA, 15 bp, Homo sapiens
ggtaacctagttcca

SEQ ID NO: 1030228 - DNA, 15 bp, Homo sapiens
aggtaacctagttcc

SEQ ID NO: 1030229 - DNA, 15 bp, Homo sapiens
gaggtaacctagttc

SEQ ID NO: 1030230 - DNA, 15 bp, Homo sapiens
agaggtaacctagtt

SEQ ID NO: 1030231 - DNA, 15 bp, Homo sapiens
tagaggtaacctagt

SEQ ID NO: 1030232 - DNA, 15 bp, Homo sapiens
gtagaggtaacctag

SEQ ID NO: 1030233 - DNA, 15 bp, Homo sapiens
tgtagaggtaaccta

SEQ ID NO: 1030234 - DNA, 15 bp, Homo sapiens
ctgtagaggtaacct

SEQ ID NO: 1030235 - DNA, 15 bp, Homo sapiens
actgtagaggtaacc

SEQ ID NO: 1030236 - DNA, 15 bp, Homo sapiens
tactgtagaggtaac

SEQ ID NO: 1030237 - DNA, 15 bp, Homo sapiens
ctactgtagaggtaa

SEQ ID NO: 1030238 - DNA, 15 bp, Homo sapiens
actactgtagaggta

SEQ ID NO: 1030239 - DNA, 15 bp, Homo sapiens
tactactgtagaggt

SEQ ID NO: 1030240 - DNA, 15 bp, Homo sapiens
atactactgtagagg

SEQ ID NO: 1030241 - DNA, 15 bp, Homo sapiens
gatactactgtagag

SEQ ID NO: 1030242 - DNA, 15 bp, Homo sapiens
agatactactgtaga

SEQ ID NO: 1030243 - DNA, 15 bp, Homo sapiens
tagatactactgtag

SEQ ID NO: 1030244 - DNA, 15 bp, Homo sapiens
ttagatactactgta

SEQ ID NO: 1030245 - DNA, 15 bp, Homo sapiens
gttagatactactgt

SEQ ID NO: 1030246 - DNA, 15 bp, Homo sapiens
ggttagatactactg

SEQ ID NO: 1030247 - DNA, 15 bp, Homo sapiens
tggttagatactact

SEQ ID NO: 1030248 - DNA, 15 bp, Homo sapiens
ttggttagatactac

SEQ ID NO: 1030249 - DNA, 15 bp, Homo sapiens
attggttagatacta

SEQ ID NO: 1030250 - DNA, 15 bp, Homo sapiens
gattggttagatact

SEQ ID NO: 1030251 - DNA, 15 bp, Homo sapiens
agattggttagatac

SEQ ID NO: 1030252 - DNA, 15 bp, Homo sapiens
aagattggttagata

SEQ ID NO: 1030253 - DNA, 15 bp, Homo sapiens
gaagattggttagat

SEQ ID NO: 1030254 - DNA, 15 bp, Homo sapiens
agaagattggttaga

SEQ ID NO: 1030255 - DNA, 15 bp, Homo sapiens
gagaagattggttag

SEQ ID NO: 1030256 - DNA, 15 bp, Homo sapiens
tgagaagattggtta

SEQ ID NO: 1030257 - DNA, 15 bp, Homo sapiens
ctgagaagattggtt

SEQ ID NO: 1030258 - DNA, 15 bp, Homo sapiens
actgagaagattggt

SEQ ID NO: 1030259 - DNA, 15 bp, Homo sapiens
cactgagaagattgg

SEQ ID NO: 1030260 - DNA, 15 bp, Homo sapiens
gcactgagaagattg

SEQ ID NO: 1030261 - DNA, 15 bp, Homo sapiens
ggcactgagaagatt

SEQ ID NO: 1030262 - DNA, 15 bp, Homo sapiens
aggcactgagaagat

SEQ ID NO: 1030263 - DNA, 15 bp, Homo sapiens
taggcactgagaaga

SEQ ID NO: 1030264 - DNA, 15 bp, Homo sapiens
ttaggcactgagaag

SEQ ID NO: 1030265 - DNA, 15 bp, Homo sapiens
tttaggcactgagaa

SEQ ID NO: 1030266 - DNA, 15 bp, Homo sapiens
ttttaggcactgaga

SEQ ID NO: 1030267 - DNA, 15 bp, Homo sapiens
attttaggcactgag

SEQ ID NO: 1030268 - DNA, 15 bp, Homo sapiens
cattttaggcactga

SEQ ID NO: 1030269 - DNA, 15 bp, Homo sapiens
acattttaggcactg

SEQ ID NO: 1030270 - DNA, 15 bp, Homo sapiens
cacattttaggcact

SEQ ID NO: 1030271 - DNA, 15 bp, Homo sapiens
gcacattttaggcac

SEQ ID NO: 1030272 - DNA, 15 bp, Homo sapiens
agcacattttaggca

SEQ ID NO: 1030273 - DNA, 15 bp, Homo sapiens
gagcacattttaggc

SEQ ID NO: 1030274 - DNA, 15 bp, Homo sapiens
tgagcacattttagg

SEQ ID NO: 1030275 - DNA, 15 bp, Homo sapiens
atgagcacattttag

SEQ ID NO: 1030276 - DNA, 15 bp, Homo sapiens
tatgagcacatttta

SEQ ID NO: 1030277 - DNA, 15 bp, Homo sapiens
atatgagcacatttt

SEQ ID NO: 1030278 - DNA, 15 bp, Homo sapiens
catatgagcacattt

SEQ ID NO: 1030279 - DNA, 15 bp, Homo sapiens
acatatgagcacatt

SEQ ID NO: 1030280 - DNA, 15 bp, Homo sapiens
cacatatgagcacat

SEQ ID NO: 1030281 - DNA, 15 bp, Homo sapiens
acacatatgagcaca

SEQ ID NO: 1030282 - DNA, 15 bp, Homo sapiens
aacacatatgagcac

SEQ ID NO: 1030283 - DNA, 15 bp, Homo sapiens
aaacacatatgagca

SEQ ID NO: 1030284 - DNA, 15 bp, Homo sapiens
taaacacatatgagc

SEQ ID NO: 1030285 - DNA, 15 bp, Homo sapiens
gtaaacacatatgag

SEQ ID NO: 1030286 - DNA, 15 bp, Homo sapiens
tgtaaacacatatga

SEQ ID NO: 1030287 - DNA, 15 bp, Homo sapiens
ttgtaaacacatatg

SEQ ID NO: 1030288 - DNA, 15 bp, Homo sapiens
cttgtaaacacatat

SEQ ID NO: 1030289 - DNA, 15 bp, Homo sapiens
tcttgtaaacacata

SEQ ID NO: 1030290 - DNA, 15 bp, Homo sapiens
ttcttgtaaacacat

SEQ ID NO: 1030291 - DNA, 15 bp, Homo sapiens
gttcttgtaaacaca

SEQ ID NO: 1030292 - DNA, 15 bp, Homo sapiens
tgttcttgtaaacac

SEQ ID NO: 1030293 - DNA, 15 bp, Homo sapiens
gtgttcttgtaaaca

SEQ ID NO: 1030294 - DNA, 15 bp, Homo sapiens
agtgttcttgtaaac

SEQ ID NO: 1030295 - DNA, 15 bp, Homo sapiens
aagtgttcttgtaaa

SEQ ID NO: 1030296 - DNA, 15 bp, Homo sapiens
caagtgttcttgtaa

SEQ ID NO: 1030297 - DNA, 15 bp, Homo sapiens
gcaagtgttcttgta

SEQ ID NO: 1030298 - DNA, 15 bp, Homo sapiens
ggcaagtgttcttgt

SEQ ID NO: 1030299 - DNA, 15 bp, Homo sapiens
aggcaagtgttcttg

SEQ ID NO: 1030300 - DNA, 15 bp, Homo sapiens
caggcaagtgttctt

SEQ ID NO: 1030301 - DNA, 15 bp, Homo sapiens
acaggcaagtgttct

SEQ ID NO: 1030302 - DNA, 15 bp, Homo sapiens
tacaggcaagtgttc

SEQ ID NO: 1030303 - DNA, 15 bp, Homo sapiens
atacaggcaagtgtt

SEQ ID NO: 1030304 - DNA, 15 bp, Homo sapiens
catacaggcaagtgt

SEQ ID NO: 1030305 - DNA, 15 bp, Homo sapiens
acatacaggcaagtg

SEQ ID NO: 1030306 - DNA, 15 bp, Homo sapiens
cacatacaggcaagt

SEQ ID NO: 1030307 - DNA, 15 bp, Homo sapiens
gcacatacaggcaag

SEQ ID NO: 1030308 - DNA, 15 bp, Homo sapiens
tgcacatacaggcaa

SEQ ID NO: 1030309 - DNA, 15 bp, Homo sapiens
gtgcacatacaggca

SEQ ID NO: 1030310 - DNA, 15 bp, Homo sapiens
agtgcacatacaggc

SEQ ID NO: 1030311 - DNA, 15 bp, Homo sapiens
tagtgcacatacagg

SEQ ID NO: 1030312 - DNA, 15 bp, Homo sapiens
ttagtgcacatacag

SEQ ID NO: 1030313 - DNA, 15 bp, Homo sapiens
tttagtgcacataca

SEQ ID NO: 1030314 - DNA, 15 bp, Homo sapiens
atttagtgcacatac

SEQ ID NO: 1030315 - DNA, 15 bp, Homo sapiens
gatttagtgcacata

SEQ ID NO: 1030316 - DNA, 15 bp, Homo sapiens
ggatttagtgcacat

SEQ ID NO: 1030317 - DNA, 15 bp, Homo sapiens
tggatttagtgcaca

SEQ ID NO: 1030318 - DNA, 15 bp, Homo sapiens
ctggatttagtgcac

SEQ ID NO: 1030319 - DNA, 15 bp, Homo sapiens
gctggatttagtgca

SEQ ID NO: 1030320 - DNA, 15 bp, Homo sapiens
ggctggatttagtgc

SEQ ID NO: 1030321 - DNA, 15 bp, Homo sapiens
gggctggatttagtg

SEQ ID NO: 1030322 - DNA, 15 bp, Homo sapiens
agggctggatttagt

SEQ ID NO: 1030323 - DNA, 15 bp, Homo sapiens
tagggctggatttag

SEQ ID NO: 1030324 - DNA, 15 bp, Homo sapiens
gtagggctggattta

SEQ ID NO: 1030325 - DNA, 15 bp, Homo sapiens
tgtagggctggattt

SEQ ID NO: 1030326 - DNA, 15 bp, Homo sapiens
gtgtagggctggatt

SEQ ID NO: 1030327 - DNA, 15 bp, Homo sapiens
agtgtagggctggat

SEQ ID NO: 1030328 - DNA, 15 bp, Homo sapiens
cagtgtagggctgga

SEQ ID NO: 1030329 - DNA, 15 bp, Homo sapiens
tcagtgtagggctgg

SEQ ID NO: 1030330 - DNA, 15 bp, Homo sapiens
atcagtgtagggctg

SEQ ID NO: 1030331 - DNA, 15 bp, Homo sapiens
gatcagtgtagggct

SEQ ID NO: 1030332 - DNA, 15 bp, Homo sapiens
cgatcagtgtagggc

SEQ ID NO: 1030333 - DNA, 15 bp, Homo sapiens
tcgatcagtgtaggg

SEQ ID NO: 1030334 - DNA, 15 bp, Homo sapiens
ctcgatcagtgtagg

SEQ ID NO: 1030335 - DNA, 15 bp, Homo sapiens
cctcgatcagtgtag

SEQ ID NO: 1030336 - DNA, 15 bp, Homo sapiens
acctcgatcagtgta

SEQ ID NO: 1030337 - DNA, 15 bp, Homo sapiens
aacctcgatcagtgt

SEQ ID NO: 1030338 - DNA, 15 bp, Homo sapiens
caacctcgatcagtg

SEQ ID NO: 1030339 - DNA, 15 bp, Homo sapiens
tcaacctcgatcagt

SEQ ID NO: 1030340 - DNA, 15 bp, Homo sapiens
gtcaacctcgatcag

SEQ ID NO: 1030341 - DNA, 15 bp, Homo sapiens
cgtcaacctcgatca

SEQ ID NO: 1030342 - DNA, 15 bp, Homo sapiens
tcgtcaacctcgatc

SEQ ID NO: 1030343 - DNA, 15 bp, Homo sapiens
gtcgtcaacctcgat

SEQ ID NO: 1030344 - DNA, 15 bp, Homo sapiens
tgtcgtcaacctcga

SEQ ID NO: 1030345 - DNA, 15 bp, Homo sapiens
gtgtcgtcaacctcg

SEQ ID NO: 1030346 - DNA, 15 bp, Homo sapiens
agtgtcgtcaacctc

SEQ ID NO: 1030347 - DNA, 15 bp, Homo sapiens
gagtgtcgtcaacct

SEQ ID NO: 1030348 - DNA, 15 bp, Homo sapiens
agagtgtcgtcaacc

SEQ ID NO: 1030349 - DNA, 15 bp, Homo sapiens
tagagtgtcgtcaac

SEQ ID NO: 1030350 - DNA, 15 bp, Homo sapiens
ctagagtgtcgtcaa

SEQ ID NO: 1030351 - DNA, 15 bp, Homo sapiens
tctagagtgtcgtca

SEQ ID NO: 1030352 - DNA, 15 bp, Homo sapiens
ctctagagtgtcgtc

SEQ ID NO: 1030353 - DNA, 15 bp, Homo sapiens
tctctagagtgtcgt

SEQ ID NO: 1030354 - DNA, 15 bp, Homo sapiens
ctctctagagtgtcg

SEQ ID NO: 1030355 - DNA, 15 bp, Homo sapiens
tctctctagagtgtc

SEQ ID NO: 1030356 - DNA, 15 bp, Homo sapiens
ttctctctagagtgt

SEQ ID NO: 1030357 - DNA, 15 bp, Homo sapiens
attctctctagagtg

SEQ ID NO: 1030358 - DNA, 15 bp, Homo sapiens
gattctctctagagt

SEQ ID NO: 1030359 - DNA, 15 bp, Homo sapiens
agattctctctagag

SEQ ID NO: 1030360 - DNA, 15 bp, Homo sapiens
tagattctctctaga

SEQ ID NO: 1030361 - DNA, 15 bp, Homo sapiens
ttagattctctctag

SEQ ID NO: 1030362 - DNA, 15 bp, Homo sapiens
attagattctctcta

SEQ ID NO: 1030363 - DNA, 15 bp, Homo sapiens
aattagattctctct

SEQ ID NO: 1030364 - DNA, 15 bp, Homo sapiens
aaattagattctctc

SEQ ID NO: 1030365 - DNA, 15 bp, Homo sapiens
caaattagattctct

SEQ ID NO: 1030366 - DNA, 15 bp, Homo sapiens
acaaattagattctc

SEQ ID NO: 1030367 - DNA, 15 bp, Homo sapiens
cacaaattagattct

SEQ ID NO: 1030368 - DNA, 15 bp, Homo sapiens
acacaaattagattc

SEQ ID NO: 1030369 - DNA, 15 bp, Homo sapiens
tacacaaattagatt

SEQ ID NO: 1030370 - DNA, 15 bp, Homo sapiens
gtacacaaattagat

SEQ ID NO: 1030371 - DNA, 15 bp, Homo sapiens
tgtacacaaattaga

SEQ ID NO: 1030372 - DNA, 15 bp, Homo sapiens
gtgtacacaaattag

SEQ ID NO: 1030373 - DNA, 15 bp, Homo sapiens
tgtgtacacaaatta

SEQ ID NO: 1030374 - DNA, 15 bp, Homo sapiens
ttgtgtacacaaatt

SEQ ID NO: 1030375 - DNA, 15 bp, Homo sapiens
gatttgtgtacacaa

SEQ ID NO: 1030376 - DNA, 15 bp, Homo sapiens
ggatttgtgtacaca

SEQ ID NO: 1030377 - DNA, 15 bp, Homo sapiens
tggatttgtgtacac

SEQ ID NO: 1030378 - DNA, 15 bp, Homo sapiens
ctggatttgtgtaca

SEQ ID NO: 1030379 - DNA, 15 bp, Homo sapiens
cctggatttgtgtac

SEQ ID NO: 1030380 - DNA, 15 bp, Homo sapiens
ccctggatttgtgta

SEQ ID NO: 1030381 - DNA, 15 bp, Homo sapiens
accctggatttgtgt

SEQ ID NO: 1030382 - DNA, 15 bp, Homo sapiens
caccctggatttgtg

SEQ ID NO: 1030383 - DNA, 15 bp, Homo sapiens
acaccctggatttgt

SEQ ID NO: 1030384 - DNA, 15 bp, Homo sapiens
gacaccctggatttg

SEQ ID NO: 1030385 - DNA, 15 bp, Homo sapiens
ggacaccctggattt

SEQ ID NO: 1030386 - DNA, 15 bp, Homo sapiens
tggacaccctggatt

SEQ ID NO: 1030387 - DNA, 15 bp, Homo sapiens
atggacaccctggat

SEQ ID NO: 1030388 - DNA, 15 bp, Homo sapiens
aatggacaccctgga

SEQ ID NO: 1030389 - DNA, 15 bp, Homo sapiens
aaatggacaccctgg

SEQ ID NO: 1030390 - DNA, 15 bp, Homo sapiens
gaaatggacaccctg

SEQ ID NO: 1030391 - DNA, 15 bp, Homo sapiens
ggaaatggacaccct

SEQ ID NO: 1030392 - DNA, 15 bp, Homo sapiens
tggaaatggacaccc

SEQ ID NO: 1030393 - DNA, 15 bp, Homo sapiens
ctggaaatggacacc

SEQ ID NO: 1030394 - DNA, 15 bp, Homo sapiens
actggaaatggacac

SEQ ID NO: 1030395 - DNA, 15 bp, Homo sapiens
aactggaaatggaca

SEQ ID NO: 1030396 - DNA, 15 bp, Homo sapiens
aaactggaaatggac

SEQ ID NO: 1030397 - DNA, 15 bp, Homo sapiens
caaactggaaatgga

SEQ ID NO: 1030398 - DNA, 15 bp, Homo sapiens
tcaaactggaaatgg

SEQ ID NO: 1030399 - DNA, 15 bp, Homo sapiens
ttcaaactggaaatg

SEQ ID NO: 1030400 - DNA, 15 bp, Homo sapiens
gttcaaactggaaat

SEQ ID NO: 1030401 - DNA, 15 bp, Homo sapiens
agttcaaactggaaa

SEQ ID NO: 1030402 - DNA, 15 bp, Homo sapiens
cagttcaaactggaa

SEQ ID NO: 1030403 - DNA, 15 bp, Homo sapiens
gcagttcaaactgga

SEQ ID NO: 1030404 - DNA, 15 bp, Homo sapiens
ggcagttcaaactgg

SEQ ID NO: 1030405 - DNA, 15 bp, Homo sapiens
aggcagttcaaactg

SEQ ID NO: 1030406 - DNA, 15 bp, Homo sapiens
caggcagttcaaact

SEQ ID NO: 1030407 - DNA, 15 bp, Homo sapiens
ccaggcagttcaaac

SEQ ID NO: 1030408 - DNA, 15 bp, Homo sapiens
tccaggcagttcaaa

SEQ ID NO: 1030409 - DNA, 15 bp, Homo sapiens
ttccaggcagttcaa

SEQ ID NO: 1030410 - DNA, 15 bp, Homo sapiens
tttccaggcagttca

SEQ ID NO: 1030411 - DNA, 15 bp, Homo sapiens
ttttccaggcagttc

SEQ ID NO: 1030412 - DNA, 15 bp, Homo sapiens
tttttccaggcagtt

SEQ ID NO: 1030413 - DNA, 15 bp, Homo sapiens
atttttccaggcagt

SEQ ID NO: 1030414 - DNA, 15 bp, Homo sapiens
gatttttccaggcag

SEQ ID NO: 1030415 - DNA, 15 bp, Homo sapiens
tgatttttccaggca

SEQ ID NO: 1030416 - DNA, 15 bp, Homo sapiens
ctgatttttccaggc

SEQ ID NO: 1030417 - DNA, 15 bp, Homo sapiens
cctgatttttccagg

SEQ ID NO: 1030418 - DNA, 15 bp, Homo sapiens
acctgatttttccag

SEQ ID NO: 1030419 - DNA, 15 bp, Homo sapiens
aacctgatttttcca

SEQ ID NO: 1030420 - DNA, 15 bp, Homo sapiens
aaacctgatttttcc

SEQ ID NO: 1030421 - DNA, 15 bp, Homo sapiens
caaacctgatttttc

SEQ ID NO: 1030422 - DNA, 15 bp, Homo sapiens
tcaaacctgattttt

SEQ ID NO: 1030423 - DNA, 15 bp, Homo sapiens
ctcaaacctgatttt

SEQ ID NO: 1030424 - DNA, 15 bp, Homo sapiens
actcaaacctgattt

SEQ ID NO: 1030425 - DNA, 15 bp, Homo sapiens
cactcaaacctgatt

SEQ ID NO: 1030426 - DNA, 15 bp, Homo sapiens
tcactcaaacctgat

SEQ ID NO: 1030427 - DNA, 15 bp, Homo sapiens
atcactcaaacctga

SEQ ID NO: 1030428 - DNA, 15 bp, Homo sapiens
aatcactcaaacctg

SEQ ID NO: 1030429 - DNA, 15 bp, Homo sapiens
gaatcactcaaacct

SEQ ID NO: 1030430 - DNA, 15 bp, Homo sapiens
agaatcactcaaacc

SEQ ID NO: 1030431 - DNA, 15 bp, Homo sapiens
tagaatcactcaaac

SEQ ID NO: 1030432 - DNA, 15 bp, Homo sapiens
ctagaatcactcaaa

SEQ ID NO: 1030433 - DNA, 15 bp, Homo sapiens
cctagaatcactcaa

SEQ ID NO: 1030434 - DNA, 15 bp, Homo sapiens
tcctagaatcactca

SEQ ID NO: 1030435 - DNA, 15 bp, Homo sapiens
atcctagaatcactc

SEQ ID NO: 1030436 - DNA, 15 bp, Homo sapiens
catcctagaatcact

SEQ ID NO: 1030437 - DNA, 15 bp, Homo sapiens
acatcctagaatcac

SEQ ID NO: 1030438 - DNA, 15 bp, Homo sapiens
cacatcctagaatca

SEQ ID NO: 1030439 - DNA, 15 bp, Homo sapiens
tcacatcctagaatc

SEQ ID NO: 1030440 - DNA, 15 bp, Homo sapiens
atcacatcctagaat

SEQ ID NO: 1030441 - DNA, 15 bp, Homo sapiens
aatcacatcctagaa

SEQ ID NO: 1030442 - DNA, 15 bp, Homo sapiens
aaatcacatcctaga

SEQ ID NO: 1030443 - DNA, 15 bp, Homo sapiens
aaaatcacatcctag

SEQ ID NO: 1030444 - DNA, 15 bp, Homo sapiens
taaaatcacatccta

SEQ ID NO: 1030445 - DNA, 15 bp, Homo sapiens
ataaaatcacatcct

SEQ ID NO: 1030446 - DNA, 15 bp, Homo sapiens
cataaaatcacatcc

SEQ ID NO: 1030447 - DNA, 15 bp, Homo sapiens
gcataaaatcacatc

SEQ ID NO: 1030448 - DNA, 15 bp, Homo sapiens
tgcataaaatcacat

SEQ ID NO: 1030449 - DNA, 15 bp, Homo sapiens
gtgcataaaatcaca

SEQ ID NO: 1030450 - DNA, 15 bp, Homo sapiens
ggtgcataaaatcac

SEQ ID NO: 1030451 - DNA, 15 bp, Homo sapiens
aggtgcataaaatca

SEQ ID NO: 1030452 - DNA, 15 bp, Homo sapiens
caggtgcataaaatc

SEQ ID NO: 1030453 - DNA, 15 bp, Homo sapiens
gcaggtgcataaaat

SEQ ID NO: 1030454 - DNA, 15 bp, Homo sapiens
tgcaggtgcataaaa

SEQ ID NO: 1030455 - DNA, 15 bp, Homo sapiens
atgcaggtgcataaa

SEQ ID NO: 1030456 - DNA, 15 bp, Homo sapiens
tatgcaggtgcataa

SEQ ID NO: 1030457 - DNA, 15 bp, Homo sapiens
ctatgcaggtgcata

SEQ ID NO: 1030458 - DNA, 15 bp, Homo sapiens
actatgcaggtgcat

SEQ ID NO: 1030459 - DNA, 15 bp, Homo sapiens
aactatgcaggtgca

SEQ ID NO: 1030460 - DNA, 15 bp, Homo sapiens
gaactatgcaggtgc

SEQ ID NO: 1030461 - DNA, 15 bp, Homo sapiens
agaactatgcaggtg

SEQ ID NO: 1030462 - DNA, 15 bp, Homo sapiens
aagaactatgcaggt

SEQ ID NO: 1030463 - DNA, 15 bp, Homo sapiens
gaagaactatgcagg

SEQ ID NO: 1030464 - DNA, 15 bp, Homo sapiens
ggaagaactatgcag

SEQ ID NO: 1030465 - DNA, 15 bp, Homo sapiens
aggaagaactatgca

SEQ ID NO: 1030466 - DNA, 15 bp, Homo sapiens
gaggaagaactatgc

SEQ ID NO: 1030467 - DNA, 15 bp, Homo sapiens
tgaggaagaactatg

SEQ ID NO: 1030468 - DNA, 15 bp, Homo sapiens
ttgaggaagaactat

SEQ ID NO: 1030469 - DNA, 15 bp, Homo sapiens
tttgaggaagaacta

SEQ ID NO: 1030470 - DNA, 15 bp, Homo sapiens
atttgaggaagaact

SEQ ID NO: 1030471 - DNA, 15 bp, Homo sapiens
tatttgaggaagaac

SEQ ID NO: 1030472 - DNA, 15 bp, Homo sapiens
atatttgaggaagaa

SEQ ID NO: 1030473 - DNA, 15 bp, Homo sapiens
tatatttgaggaaga

SEQ ID NO: 1030474 - DNA, 15 bp, Homo sapiens
ttatatttgaggaag

SEQ ID NO: 1030475 - DNA, 15 bp, Homo sapiens
cttatatttgaggaa

SEQ ID NO: 1030476 - DNA, 15 bp, Homo sapiens
acttatatttgagga

SEQ ID NO: 1030477 - DNA, 15 bp, Homo sapiens
gacttatatttgagg

SEQ ID NO: 1030478 - DNA, 15 bp, Homo sapiens
tgacttatatttgag

SEQ ID NO: 1030479 - DNA, 15 bp, Homo sapiens
atgacttatatttga

SEQ ID NO: 1030480 - DNA, 15 bp, Homo sapiens
catgacttatatttg

SEQ ID NO: 1030481 - DNA, 15 bp, Homo sapiens
acatgacttatattt

SEQ ID NO: 1030482 - DNA, 15 bp, Homo sapiens
gacatgacttatatt

SEQ ID NO: 1030483 - DNA, 15 bp, Homo sapiens
agacatgacttatat

SEQ ID NO: 1030484 - DNA, 15 bp, Homo sapiens
tagacatgacttata

SEQ ID NO: 1030485 - DNA, 15 bp, Homo sapiens
atagacatgacttat

SEQ ID NO: 1030486 - DNA, 15 bp, Homo sapiens
tatagacatgactta

SEQ ID NO: 1030487 - DNA, 15 bp, Homo sapiens
atatagacatgactt

SEQ ID NO: 1030488 - DNA, 15 bp, Homo sapiens
aatatagacatgact

SEQ ID NO: 1030489 - DNA, 15 bp, Homo sapiens
aaatatagacatgac

SEQ ID NO: 1030490 - DNA, 15 bp, Homo sapiens
gaaatatagacatga

SEQ ID NO: 1030491 - DNA, 15 bp, Homo sapiens
tgaaatatagacatg

SEQ ID NO: 1030492 - DNA, 15 bp, Homo sapiens
ttgaaatatagacat

SEQ ID NO: 1030493 - DNA, 15 bp, Homo sapiens
tttgaaatatagaca

SEQ ID NO: 1030494 - DNA, 15 bp, Homo sapiens
ttttgaaatatagac

SEQ ID NO: 1030495 - DNA, 15 bp, Homo sapiens
attttgaaatataga

SEQ ID NO: 1030496 - DNA, 15 bp, Homo sapiens
tattttgaaatatag

SEQ ID NO: 1030497 - DNA, 15 bp, Homo sapiens
gtattttgaaatata

SEQ ID NO: 1030498 - DNA, 15 bp, Homo sapiens
ggtattttgaaatat

SEQ ID NO: 1030499 - DNA, 15 bp, Homo sapiens
aggtattttgaaata

SEQ ID NO: 1030500 - DNA, 15 bp, Homo sapiens
caggtattttgaaat

SEQ ID NO: 1030501 - DNA, 15 bp, Homo sapiens
acaggtattttgaaa

SEQ ID NO: 1030502 - DNA, 15 bp, Homo sapiens
cacaggtattttgaa

SEQ ID NO: 1030503 - DNA, 15 bp, Homo sapiens
ccacaggtattttga

SEQ ID NO: 1030504 - DNA, 15 bp, Homo sapiens
cccacaggtattttg

SEQ ID NO: 1030505 - DNA, 15 bp, Homo sapiens
acccacaggtatttt

SEQ ID NO: 1030506 - DNA, 15 bp, Homo sapiens
gacccacaggtattt

SEQ ID NO: 1030507 - DNA, 15 bp, Homo sapiens
agacccacaggtatt

SEQ ID NO: 1030508 - DNA, 15 bp, Homo sapiens
aagacccacaggtat

SEQ ID NO: 1030509 - DNA, 15 bp, Homo sapiens
caagacccacaggta

SEQ ID NO: 1030510 - DNA, 15 bp, Homo sapiens
ccaagacccacaggt

SEQ ID NO: 1030511 - DNA, 15 bp, Homo sapiens
gccaagacccacagg

SEQ ID NO: 1030512 - DNA, 15 bp, Homo sapiens
tgccaagacccacag

SEQ ID NO: 1030513 - DNA, 15 bp, Homo sapiens
gtgccaagacccaca

SEQ ID NO: 1030514 - DNA, 15 bp, Homo sapiens
agtgccaagacccac

SEQ ID NO: 1030515 - DNA, 15 bp, Homo sapiens
aagtgccaagaccca

SEQ ID NO: 1030516 - DNA, 15 bp, Homo sapiens
taagtgccaagaccc

SEQ ID NO: 1030517 - DNA, 15 bp, Homo sapiens
ctaagtgccaagacc

SEQ ID NO: 1030518 - DNA, 15 bp, Homo sapiens
cctaagtgccaagac

SEQ ID NO: 1030519 - DNA, 15 bp, Homo sapiens
acctaagtgccaaga

SEQ ID NO: 1030520 - DNA, 15 bp, Homo sapiens
cacctaagtgccaag

SEQ ID NO: 1030521 - DNA, 15 bp, Homo sapiens
ccacctaagtgccaa

SEQ ID NO: 1030522 - DNA, 15 bp, Homo sapiens
accacctaagtgcca

SEQ ID NO: 1030523 - DNA, 15 bp, Homo sapiens
taccacctaagtgcc

SEQ ID NO: 1030524 - DNA, 15 bp, Homo sapiens
ataccacctaagtgc

SEQ ID NO: 1030525 - DNA, 15 bp, Homo sapiens
aataccacctaagtg

SEQ ID NO: 1030526 - DNA, 15 bp, Homo sapiens
aaataccacctaagt

SEQ ID NO: 1030527 - DNA, 15 bp, Homo sapiens
caaataccacctaag

SEQ ID NO: 1030528 - DNA, 15 bp, Homo sapiens
ccaaataccacctaa

SEQ ID NO: 1030529 - DNA, 15 bp, Homo sapiens
accaaataccaccta

SEQ ID NO: 1030530 - DNA, 15 bp, Homo sapiens
caccaaataccacct

SEQ ID NO: 1030531 - DNA, 15 bp, Homo sapiens
gcaccaaataccacc

SEQ ID NO: 1030532 - DNA, 15 bp, Homo sapiens
tgcaccaaataccac

SEQ ID NO: 1030533 - DNA, 15 bp, Homo sapiens
ctgcaccaaatacca

SEQ ID NO: 1030534 - DNA, 15 bp, Homo sapiens
cctgcaccaaatacc

SEQ ID NO: 1030535 - DNA, 15 bp, Homo sapiens
tcctgcaccaaatac

SEQ ID NO: 1030536 - DNA, 15 bp, Homo sapiens
ttcctgcaccaaata

SEQ ID NO: 1030537 - DNA, 15 bp, Homo sapiens
cttcctgcaccaaat

SEQ ID NO: 1030538 - DNA, 15 bp, Homo sapiens
gcttcctgcaccaaa

SEQ ID NO: 1030539 - DNA, 15 bp, Homo sapiens
ggcttcctgcaccaa

SEQ ID NO: 1030540 - DNA, 15 bp, Homo sapiens
tggcttcctgcacca

SEQ ID NO: 1030541 - DNA, 15 bp, Homo sapiens
ctggcttcctgcacc

SEQ ID NO: 1030542 - DNA, 15 bp, Homo sapiens
cctggcttcctgcac

SEQ ID NO: 1030543 - DNA, 15 bp, Homo sapiens
ccctggcttcctgca

SEQ ID NO: 1030544 - DNA, 15 bp, Homo sapiens
tccctggcttcctgc

SEQ ID NO: 1030545 - DNA, 15 bp, Homo sapiens
ttccctggcttcctg

SEQ ID NO: 1030546 - DNA, 15 bp, Homo sapiens
cttccctggcttcct

SEQ ID NO: 1030547 - DNA, 15 bp, Homo sapiens
acttccctggcttcc

SEQ ID NO: 1030548 - DNA, 15 bp, Homo sapiens
gacttccctggcttc

SEQ ID NO: 1030549 - DNA, 15 bp, Homo sapiens
agacttccctggctt

SEQ ID NO: 1030550 - DNA, 15 bp, Homo sapiens
cagacttccctggct

SEQ ID NO: 1030551 - DNA, 15 bp, Homo sapiens
ccagacttccctggc

SEQ ID NO: 1030552 - DNA, 15 bp, Homo sapiens
tccagacttccctgg

SEQ ID NO: 1030553 - DNA, 15 bp, Homo sapiens
atccagacttccctg

SEQ ID NO: 1030554 - DNA, 15 bp, Homo sapiens
aatccagacttccct

SEQ ID NO: 1030555 - DNA, 15 bp, Homo sapiens
aaatccagacttccc

SEQ ID NO: 1030556 - DNA, 15 bp, Homo sapiens
gaaatccagacttcc

SEQ ID NO: 1030557 - DNA, 15 bp, Homo sapiens
agaaatccagacttc

SEQ ID NO: 1030558 - DNA, 15 bp, Homo sapiens
aagaaatccagactt

SEQ ID NO: 1030559 - DNA, 15 bp, Homo sapiens
gaagaaatccagact

SEQ ID NO: 1030560 - DNA, 15 bp, Homo sapiens
tgaagaaatccagac

SEQ ID NO: 1030561 - DNA, 15 bp, Homo sapiens
gtgaagaaatccaga

SEQ ID NO: 1030562 - DNA, 15 bp, Homo sapiens
tgtgaagaaatccag

SEQ ID NO: 1030563 - DNA, 15 bp, Homo sapiens
ctgtgaagaaatcca

SEQ ID NO: 1030564 - DNA, 15 bp, Homo sapiens
tctgtgaagaaatcc

SEQ ID NO: 1030565 - DNA, 15 bp, Homo sapiens
ttctgtgaagaaatc

SEQ ID NO: 1030566 - DNA, 15 bp, Homo sapiens
cttctgtgaagaaat

SEQ ID NO: 1030567 - DNA, 15 bp, Homo sapiens
gcttctgtgaagaaa

SEQ ID NO: 1030568 - DNA, 15 bp, Homo sapiens
ggcttctgtgaagaa

SEQ ID NO: 1030569 - DNA, 15 bp, Homo sapiens
gggcttctgtgaaga

SEQ ID NO: 1030570 - DNA, 15 bp, Homo sapiens
agggcttctgtgaag

SEQ ID NO: 1030571 - DNA, 15 bp, Homo sapiens
aagggcttctgtgaa

SEQ ID NO: 1030572 - DNA, 15 bp, Homo sapiens
aaagggcttctgtga

SEQ ID NO: 1030573 - DNA, 15 bp, Homo sapiens
taaagggcttctgtg

SEQ ID NO: 1030574 - DNA, 15 bp, Homo sapiens
ataaagggcttctgt

SEQ ID NO: 1030575 - DNA, 15 bp, Homo sapiens
aataaagggcttctg

SEQ ID NO: 1030576 - DNA, 15 bp, Homo sapiens
aaataaagggcttct

SEQ ID NO: 1030577 - DNA, 15 bp, Homo sapiens
aaaataaagggcttc

SEQ ID NO: 1030578 - DNA, 15 bp, Homo sapiens
caaaataaagggctt

SEQ ID NO: 1030579 - DNA, 15 bp, Homo sapiens
acaaaataaagggct

SEQ ID NO: 1030580 - DNA, 15 bp, Homo sapiens
cacaaaataaagggc

SEQ ID NO: 1030581 - DNA, 15 bp, Homo sapiens
gcacaaaataaaggg

SEQ ID NO: 1030582 - DNA, 15 bp, Homo sapiens
tgcacaaaataaagg

SEQ ID NO: 1030583 - DNA, 15 bp, Homo sapiens
atgcacaaaataaag

SEQ ID NO: 1030584 - DNA, 15 bp, Homo sapiens
tatgcacaaaataaa

SEQ ID NO: 1030585 - DNA, 15 bp, Homo sapiens
ttatgcacaaaataa

SEQ ID NO: 1030586 - DNA, 15 bp, Homo sapiens
attatgcacaaaata

SEQ ID NO: 1030587 - DNA, 15 bp, Homo sapiens
aattatgcacaaaat

SEQ ID NO: 1030588 - DNA, 15 bp, Homo sapiens
aaattatgcacaaaa

SEQ ID NO: 1030589 - DNA, 15 bp, Homo sapiens
caaattatgcacaaa

SEQ ID NO: 1030590 - DNA, 15 bp, Homo sapiens
gcaaattatgcacaa

SEQ ID NO: 1030591 - DNA, 15 bp, Homo sapiens
tgcaaattatgcaca

SEQ ID NO: 1030592 - DNA, 15 bp, Homo sapiens
gtgcaaattatgcac

SEQ ID NO: 1030593 - DNA, 15 bp, Homo sapiens
tgtgcaaattatgca

SEQ ID NO: 1030594 - DNA, 15 bp, Homo sapiens
ttgtgcaaattatgc

SEQ ID NO: 1030595 - DNA, 15 bp, Homo sapiens
gttgtgcaaattatg

SEQ ID NO: 1030596 - DNA, 15 bp, Homo sapiens
agttgtgcaaattat

SEQ ID NO: 1030597 - DNA, 15 bp, Homo sapiens
gagttgtgcaaatta

SEQ ID NO: 1030598 - DNA, 15 bp, Homo sapiens
agagttgtgcaaatt

SEQ ID NO: 1030599 - DNA, 15 bp, Homo sapiens
tagagttgtgcaaat

SEQ ID NO: 1030600 - DNA, 15 bp, Homo sapiens
atagagttgtgcaaa

SEQ ID NO: 1030601 - DNA, 15 bp, Homo sapiens
catagagttgtgcaa

SEQ ID NO: 1030602 - DNA, 15 bp, Homo sapiens
acatagagttgtgca

SEQ ID NO: 1030603 - DNA, 15 bp, Homo sapiens
cacatagagttgtgc

SEQ ID NO: 1030604 - DNA, 15 bp, Homo sapiens
tcacatagagttgtg

SEQ ID NO: 1030605 - DNA, 15 bp, Homo sapiens
atcacatagagttgt

SEQ ID NO: 1030606 - DNA, 15 bp, Homo sapiens
aatcacatagagttg

SEQ ID NO: 1030607 - DNA, 15 bp, Homo sapiens
taatcacatagagtt

SEQ ID NO: 1030608 - DNA, 15 bp, Homo sapiens
gtaatcacatagagt

SEQ ID NO: 1030609 - DNA, 15 bp, Homo sapiens
tgtaatcacatagag

SEQ ID NO: 1030610 - DNA, 15 bp, Homo sapiens
ttgtaatcacataga

SEQ ID NO: 1030611 - DNA, 15 bp, Homo sapiens
tttgtaatcacatag

SEQ ID NO: 1030612 - DNA, 15 bp, Homo sapiens
ttttgtaatcacata

SEQ ID NO: 1030613 - DNA, 15 bp, Homo sapiens
attttgtaatcacat

SEQ ID NO: 1030614 - DNA, 15 bp, Homo sapiens
gattttgtaatcaca

SEQ ID NO: 1030615 - DNA, 15 bp, Homo sapiens
ggattttgtaatcac

SEQ ID NO: 1030616 - DNA, 15 bp, Homo sapiens
gggattttgtaatca

SEQ ID NO: 1030617 - DNA, 15 bp, Homo sapiens
tgggattttgtaatc

SEQ ID NO: 1030618 - DNA, 15 bp, Homo sapiens
ttgggattttgtaat

SEQ ID NO: 1030619 - DNA, 15 bp, Homo sapiens
attgggattttgtaa

SEQ ID NO: 1030620 - DNA, 15 bp, Homo sapiens
gattgggattttgta

SEQ ID NO: 1030621 - DNA, 15 bp, Homo sapiens
agattgggattttgt

SEQ ID NO: 1030622 - DNA, 15 bp, Homo sapiens
aagattgggattttg

SEQ ID NO: 1030623 - DNA, 15 bp, Homo sapiens
caagattgggatttt

SEQ ID NO: 1030624 - DNA, 15 bp, Homo sapiens
acaagattgggattt

SEQ ID NO: 1030625 - DNA, 15 bp, Homo sapiens
aacaagattgggatt

SEQ ID NO: 1030626 - DNA, 15 bp, Homo sapiens
caacaagattgggat

SEQ ID NO: 1030627 - DNA, 15 bp, Homo sapiens
gcaacaagattggga

SEQ ID NO: 1030628 - DNA, 15 bp, Homo sapiens
ggcaacaagattggg

SEQ ID NO: 1030629 - DNA, 15 bp, Homo sapiens
gggcaacaagattgg

SEQ ID NO: 1030630 - DNA, 15 bp, Homo sapiens
agggcaacaagattg

SEQ ID NO: 1030631 - DNA, 15 bp, Homo sapiens
gagggcaacaagatt

SEQ ID NO: 1030632 - DNA, 15 bp, Homo sapiens
ggagggcaacaagat

SEQ ID NO: 1030633 - DNA, 15 bp, Homo sapiens
aggagggcaacaaga

SEQ ID NO: 1030634 - DNA, 15 bp, Homo sapiens
aaggagggcaacaag

SEQ ID NO: 1030635 - DNA, 15 bp, Homo sapiens
taaggagggcaacaa

SEQ ID NO: 1030636 - DNA, 15 bp, Homo sapiens
ataaggagggcaaca

SEQ ID NO: 1030637 - DNA, 15 bp, Homo sapiens
tataaggagggcaac

SEQ ID NO: 1030638 - DNA, 15 bp, Homo sapiens
ttataaggagggcaa

SEQ ID NO: 1030639 - DNA, 15 bp, Homo sapiens
cttataaggagggca

SEQ ID NO: 1030640 - DNA, 15 bp, Homo sapiens
acttataaggagggc

SEQ ID NO: 1030641 - DNA, 15 bp, Homo sapiens
gacttataaggaggg

SEQ ID NO: 1030642 - DNA, 15 bp, Homo sapiens
ggacttataaggagg

SEQ ID NO: 1030643 - DNA, 15 bp, Homo sapiens
gggacttataaggag

SEQ ID NO: 1030644 - DNA, 15 bp, Homo sapiens
agggacttataagga

SEQ ID NO: 1030645 - DNA, 15 bp, Homo sapiens
gagggacttataagg

SEQ ID NO: 1030646 - DNA, 15 bp, Homo sapiens
ggagggacttataag

SEQ ID NO: 1030647 - DNA, 15 bp, Homo sapiens
tggagggacttataa

SEQ ID NO: 1030648 - DNA, 15 bp, Homo sapiens
atggagggacttata

SEQ ID NO: 1030649 - DNA, 15 bp, Homo sapiens
tatggagggacttat

SEQ ID NO: 1030650 - DNA, 15 bp, Homo sapiens
atatggagggactta

SEQ ID NO: 1030651 - DNA, 15 bp, Homo sapiens
aatatggagggactt

SEQ ID NO: 1030652 - DNA, 15 bp, Homo sapiens
taatatggagggact

SEQ ID NO: 1030653 - DNA, 15 bp, Homo sapiens
ataatatggagggac

SEQ ID NO: 1030654 - DNA, 15 bp, Homo sapiens
tataatatggaggga

SEQ ID NO: 1030655 - DNA, 15 bp, Homo sapiens
atataatatggaggg

SEQ ID NO: 1030656 - DNA, 15 bp, Homo sapiens
aatataatatggagg

SEQ ID NO: 1030657 - DNA, 15 bp, Homo sapiens
gaatataatatggag

SEQ ID NO: 1030658 - DNA, 15 bp, Homo sapiens
agaatataatatgga

SEQ ID NO: 1030659 - DNA, 15 bp, Homo sapiens
gagaatataatatgg

SEQ ID NO: 1030660 - DNA, 15 bp, Homo sapiens
agagaatataatatg

SEQ ID NO: 1030661 - DNA, 15 bp, Homo sapiens
aagagaatataatat

SEQ ID NO: 1030662 - DNA, 15 bp, Homo sapiens
gaagagaatataata

SEQ ID NO: 1030663 - DNA, 15 bp, Homo sapiens
agaagagaatataat

SEQ ID NO: 1030664 - DNA, 15 bp, Homo sapiens
gagaagagaatataa

SEQ ID NO: 1030665 - DNA, 15 bp, Homo sapiens
agagaagagaatata

SEQ ID NO: 1030666 - DNA, 15 bp, Homo sapiens
aagagaagagaatat

SEQ ID NO: 1030667 - DNA, 15 bp, Homo sapiens
aaagagaagagaata

SEQ ID NO: 1030668 - DNA, 15 bp, Homo sapiens
aaaagagaagagaat

SEQ ID NO: 1030669 - DNA, 15 bp, Homo sapiens
gaaaagagaagagaa

SEQ ID NO: 1030670 - DNA, 15 bp, Homo sapiens
ggaaaagagaagaga

SEQ ID NO: 1030671 - DNA, 15 bp, Homo sapiens
tggaaaagagaagag

SEQ ID NO: 1030672 - DNA, 15 bp, Homo sapiens
ttggaaaagagaaga

SEQ ID NO: 1030673 - DNA, 15 bp, Homo sapiens
cttggaaaagagaag

SEQ ID NO: 1030674 - DNA, 15 bp, Homo sapiens
tcttggaaaagagaa

SEQ ID NO: 1030675 - DNA, 15 bp, Homo sapiens
ttcttggaaaagaga

SEQ ID NO: 1030676 - DNA, 15 bp, Homo sapiens
gttcttggaaaagag

SEQ ID NO: 1030677 - DNA, 15 bp, Homo sapiens
cgttcttggaaaaga

SEQ ID NO: 1030678 - DNA, 15 bp, Homo sapiens
ccgttcttggaaaag

SEQ ID NO: 1030679 - DNA, 15 bp, Homo sapiens
gccgttcttggaaaa

SEQ ID NO: 1030680 - DNA, 15 bp, Homo sapiens
agccgttcttggaaa

SEQ ID NO: 1030681 - DNA, 15 bp, Homo sapiens
gagccgttcttggaa

SEQ ID NO: 1030682 - DNA, 15 bp, Homo sapiens
ggagccgttcttgga

SEQ ID NO: 1030683 - DNA, 15 bp, Homo sapiens
aggagccgttcttgg

SEQ ID NO: 1030684 - DNA, 15 bp, Homo sapiens
caggagccgttcttg

SEQ ID NO: 1030685 - DNA, 15 bp, Homo sapiens
ccaggagccgttctt

SEQ ID NO: 1030686 - DNA, 15 bp, Homo sapiens
tccaggagccgttct

SEQ ID NO: 1030687 - DNA, 15 bp, Homo sapiens
ttccaggagccgttc

SEQ ID NO: 1030688 - DNA, 15 bp, Homo sapiens
tttccaggagccgtt

SEQ ID NO: 1030689 - DNA, 15 bp, Homo sapiens
ctttccaggagccgt

SEQ ID NO: 1030690 - DNA, 15 bp, Homo sapiens
cctttccaggagccg

SEQ ID NO: 1030691 - DNA, 15 bp, Homo sapiens
gcctttccaggagcc

SEQ ID NO: 1030692 - DNA, 15 bp, Homo sapiens
agcctttccaggagc

SEQ ID NO: 1030693 - DNA, 15 bp, Homo sapiens
gagcctttccaggag

SEQ ID NO: 1030694 - DNA, 15 bp, Homo sapiens
agagcctttccagga

SEQ ID NO: 1030695 - DNA, 15 bp, Homo sapiens
cagagcctttccagg

SEQ ID NO: 1030696 - DNA, 15 bp, Homo sapiens
tcagagcctttccag

SEQ ID NO: 1030697 - DNA, 15 bp, Homo sapiens
gtcagagcctttcca

SEQ ID NO: 1030698 - DNA, 15 bp, Homo sapiens
ggtcagagcctttcc

SEQ ID NO: 1030699 - DNA, 15 bp, Homo sapiens
cggtcagagcctttc

SEQ ID NO: 1030700 - DNA, 15 bp, Homo sapiens
acggtcagagccttt

SEQ ID NO: 1030701 - DNA, 15 bp, Homo sapiens
gacggtcagagcctt

SEQ ID NO: 1030702 - DNA, 15 bp, Homo sapiens
tgacggtcagagcct

SEQ ID NO: 1030703 - DNA, 15 bp, Homo sapiens
gtgacggtcagagcc

SEQ ID NO: 1030704 - DNA, 15 bp, Homo sapiens
tgtgacggtcagagc

SEQ ID NO: 1030705 - DNA, 15 bp, Homo sapiens
atgtgacggtcagag

SEQ ID NO: 1030706 - DNA, 15 bp, Homo sapiens
aatgtgacggtcaga

SEQ ID NO: 1030707 - DNA, 15 bp, Homo sapiens
caatgtgacggtcag

SEQ ID NO: 1030708 - DNA, 15 bp, Homo sapiens
ccaatgtgacggtca

SEQ ID NO: 1030709 - DNA, 15 bp, Homo sapiens
cccaatgtgacggtc

SEQ ID NO: 1030710 - DNA, 15 bp, Homo sapiens
tcccaatgtgacggt

SEQ ID NO: 1030711 - DNA, 15 bp, Homo sapiens
ctcccaatgtgacgg

SEQ ID NO: 1030712 - DNA, 15 bp, Homo sapiens
tctcccaatgtgacg

SEQ ID NO: 1030713 - DNA, 15 bp, Homo sapiens
ttctcccaatgtgac

SEQ ID NO: 1030714 - DNA, 15 bp, Homo sapiens
cttctcccaatgtga

SEQ ID NO: 1030715 - DNA, 15 bp, Homo sapiens
gcttctcccaatgtg

SEQ ID NO: 1030716 - DNA, 15 bp, Homo sapiens
tgcttctcccaatgt

SEQ ID NO: 1030717 - DNA, 15 bp, Homo sapiens
ttgcttctcccaatg

SEQ ID NO: 1030718 - DNA, 15 bp, Homo sapiens
attgcttctcccaat

SEQ ID NO: 1030719 - DNA, 15 bp, Homo sapiens
tattgcttctcccaa

SEQ ID NO: 1030720 - DNA, 15 bp, Homo sapiens
atattgcttctccca

SEQ ID NO: 1030721 - DNA, 15 bp, Homo sapiens
aatattgcttctccc

SEQ ID NO: 1030722 - DNA, 15 bp, Homo sapiens
aaatattgcttctcc

SEQ ID NO: 1030723 - DNA, 15 bp, Homo sapiens
caaatattgcttctc

SEQ ID NO: 1030724 - DNA, 15 bp, Homo sapiens
gcaaatattgcttct

SEQ ID NO: 1030725 - DNA, 15 bp, Homo sapiens
agcaaatattgcttc

SEQ ID NO: 1030726 - DNA, 15 bp, Homo sapiens
cagcaaatattgctt

SEQ ID NO: 1030727 - DNA, 15 bp, Homo sapiens
ccagcaaatattgct

SEQ ID NO: 1030728 - DNA, 15 bp, Homo sapiens
tccagcaaatattgc

SEQ ID NO: 1030729 - DNA, 15 bp, Homo sapiens
ctccagcaaatattg

SEQ ID NO: 1030730 - DNA, 15 bp, Homo sapiens
gctccagcaaatatt

SEQ ID NO: 1030731 - DNA, 15 bp, Homo sapiens
ggctccagcaaatat

SEQ ID NO: 1030732 - DNA, 15 bp, Homo sapiens
tggctccagcaaata

SEQ ID NO: 1030733 - DNA, 15 bp, Homo sapiens
gtggctccagcaaat

SEQ ID NO: 1030734 - DNA, 15 bp, Homo sapiens
cgtggctccagcaaa

SEQ ID NO: 1030735 - DNA, 15 bp, Homo sapiens
gcgtggctccagcaa

SEQ ID NO: 1030736 - DNA, 15 bp, Homo sapiens
agcgtggctccagca

SEQ ID NO: 1030737 - DNA, 15 bp, Homo sapiens
tagcgtggctccagc

SEQ ID NO: 1030738 - DNA, 15 bp, Homo sapiens
gtagcgtggctccag

SEQ ID NO: 1030739 - DNA, 15 bp, Homo sapiens
agtagcgtggctcca

SEQ ID NO: 1030740 - DNA, 15 bp, Homo sapiens
gagtagcgtggctcc

SEQ ID NO: 1030741 - DNA, 15 bp, Homo sapiens
agagtagcgtggctc

SEQ ID NO: 1030742 - DNA, 15 bp, Homo sapiens
aagagtagcgtggct

SEQ ID NO: 1030743 - DNA, 15 bp, Homo sapiens
aaagagtagcgtggc

SEQ ID NO: 1030744 - DNA, 15 bp, Homo sapiens
aaaagagtagcgtgg

SEQ ID NO: 1030745 - DNA, 15 bp, Homo sapiens
caaaagagtagcgtg

SEQ ID NO: 1030746 - DNA, 15 bp, Homo sapiens
acaaaagagtagcgt

SEQ ID NO: 1030747 - DNA, 15 bp, Homo sapiens
gacaaaagagtagcg

SEQ ID NO: 1030748 - DNA, 15 bp, Homo sapiens
tgacaaaagagtagc

SEQ ID NO: 1030749 - DNA, 15 bp, Homo sapiens
gtgacaaaagagtag

SEQ ID NO: 1030750 - DNA, 15 bp, Homo sapiens
tgtgacaaaagagta

SEQ ID NO: 1030751 - DNA, 15 bp, Homo sapiens
ctgtgacaaaagagt

SEQ ID NO: 1030752 - DNA, 15 bp, Homo sapiens
tctgtgacaaaagag

SEQ ID NO: 1030753 - DNA, 15 bp, Homo sapiens
tgtctgtgacaaaag

SEQ ID NO: 1030754 - DNA, 15 bp, Homo sapiens
ctgtctgtgacaaaa

SEQ ID NO: 1030755 - DNA, 15 bp, Homo sapiens
cctgtctgtgacaaa

SEQ ID NO: 1030756 - DNA, 15 bp, Homo sapiens
acctgtctgtgacaa

SEQ ID NO: 1030757 - DNA, 15 bp, Homo sapiens
aacctgtctgtgaca

SEQ ID NO: 1030758 - DNA, 15 bp, Homo sapiens
taacctgtctgtgac

SEQ ID NO: 1030759 - DNA, 15 bp, Homo sapiens
ttaacctgtctgtga

SEQ ID NO: 1030760 - DNA, 15 bp, Homo sapiens
gttaacctgtctgtg

SEQ ID NO: 1030761 - DNA, 15 bp, Homo sapiens
agttaacctgtctgt

SEQ ID NO: 1030762 - DNA, 15 bp, Homo sapiens
aagttaacctgtctg

SEQ ID NO: 1030763 - DNA, 15 bp, Homo sapiens
caagttaacctgtct

SEQ ID NO: 1030764 - DNA, 15 bp, Homo sapiens
gcaagttaacctgtc

SEQ ID NO: 1030765 - DNA, 15 bp, Homo sapiens
tgcaagttaacctgt

SEQ ID NO: 1030766 - DNA, 15 bp, Homo sapiens
ctgcaagttaacctg

SEQ ID NO: 1030767 - DNA, 15 bp, Homo sapiens
actgcaagttaacct

SEQ ID NO: 1030768 - DNA, 15 bp, Homo sapiens
tactgcaagttaacc

SEQ ID NO: 1030769 - DNA, 15 bp, Homo sapiens
atactgcaagttaac

SEQ ID NO: 1030770 - DNA, 15 bp, Homo sapiens
aatactgcaagttaa

SEQ ID NO: 1030771 - DNA, 15 bp, Homo sapiens
taatactgcaagtta

SEQ ID NO: 1030772 - DNA, 15 bp, Homo sapiens
ttaatactgcaagtt

SEQ ID NO: 1030773 - DNA, 15 bp, Homo sapiens
tttaatactgcaagt

SEQ ID NO: 1030774 - DNA, 15 bp, Homo sapiens
gtttaatactgcaag

SEQ ID NO: 1030775 - DNA, 15 bp, Homo sapiens
tgtttaatactgcaa

SEQ ID NO: 1030776 - DNA, 15 bp, Homo sapiens
ttgtttaatactgca

SEQ ID NO: 1030777 - DNA, 15 bp, Homo sapiens
gttgtttaatactgc

SEQ ID NO: 1030778 - DNA, 15 bp, Homo sapiens
ggtgttgtttaatac

SEQ ID NO: 1030779 - DNA, 15 bp, Homo sapiens
gggtgttgtttaata

SEQ ID NO: 1030780 - DNA, 15 bp, Homo sapiens
cgggtgttgtttaat

SEQ ID NO: 1030781 - DNA, 15 bp, Homo sapiens
tcgggtgttgtttaa

SEQ ID NO: 1030782 - DNA, 15 bp, Homo sapiens
gtcgggtgttgttta

SEQ ID NO: 1030783 - DNA, 15 bp, Homo sapiens
ggtcgggtgttgttt

SEQ ID NO: 1030784 - DNA, 15 bp, Homo sapiens
gggtcgggtgttgtt

SEQ ID NO: 1030785 - DNA, 15 bp, Homo sapiens
tgggtcgggtgttgt

SEQ ID NO: 1030786 - DNA, 15 bp, Homo sapiens
gtgggtcgggtgttg

SEQ ID NO: 1030787 - DNA, 15 bp, Homo sapiens
cgtgggtcgggtgtt

SEQ ID NO: 1030788 - DNA, 15 bp, Homo sapiens
gcgtgggtcgggtgt

SEQ ID NO: 1030789 - DNA, 15 bp, Homo sapiens
ggcgtgggtcgggtg

SEQ ID NO: 1030790 - DNA, 15 bp, Homo sapiens
gggcgtgggtcgggt

SEQ ID NO: 1030791 - DNA, 15 bp, Homo sapiens
ggggcgtgggtcggg

SEQ ID NO: 1030792 - DNA, 15 bp, Homo sapiens
aggggcgtgggtcgg

SEQ ID NO: 1030793 - DNA, 15 bp, Homo sapiens
caggggcgtgggtcg

SEQ ID NO: 1030794 - DNA, 15 bp, Homo sapiens
gcaggggcgtgggtc

SEQ ID NO: 1030795 - DNA, 15 bp, Homo sapiens
agcaggggcgtgggt

SEQ ID NO: 1030796 - DNA, 15 bp, Homo sapiens
aagcaggggcgtggg

SEQ ID NO: 1030797 - DNA, 15 bp, Homo sapiens
gaagcaggggcgtgg

SEQ ID NO: 1030798 - DNA, 15 bp, Homo sapiens
ggaagcaggggcgtg

SEQ ID NO: 1030799 - DNA, 15 bp, Homo sapiens
gggaagcaggggcgt

SEQ ID NO: 1030800 - DNA, 15 bp, Homo sapiens
tgggaagcaggggcg

SEQ ID NO: 1030801 - DNA, 15 bp, Homo sapiens
gtgggaagcaggggc

SEQ ID NO: 1030802 - DNA, 15 bp, Homo sapiens
tgtgggaagcagggg

SEQ ID NO: 1030803 - DNA, 15 bp, Homo sapiens
gtgtgggaagcaggg

SEQ ID NO: 1030804 - DNA, 15 bp, Homo sapiens
agtgtgggaagcagg

SEQ ID NO: 1030805 - DNA, 15 bp, Homo sapiens
cagtgtgggaagcag

SEQ ID NO: 1030806 - DNA, 15 bp, Homo sapiens
tcagtgtgggaagca

SEQ ID NO: 1030807 - DNA, 15 bp, Homo sapiens
atcagtgtgggaagc

SEQ ID NO: 1030808 - DNA, 15 bp, Homo sapiens
tatcagtgtgggaag

SEQ ID NO: 1030809 - DNA, 15 bp, Homo sapiens
atatcagtgtgggaa

SEQ ID NO: 1030810 - DNA, 15 bp, Homo sapiens
aatatcagtgtggga

SEQ ID NO: 1030811 - DNA, 15 bp, Homo sapiens
taatatcagtgtggg

SEQ ID NO: 1030812 - DNA, 15 bp, Homo sapiens
ataatatcagtgtgg

SEQ ID NO: 1030813 - DNA, 15 bp, Homo sapiens
gataatatcagtgtg

SEQ ID NO: 1030814 - DNA, 15 bp, Homo sapiens
tgataatatcagtgt

SEQ ID NO: 1030815 - DNA, 15 bp, Homo sapiens
ctgataatatcagtg

SEQ ID NO: 1030816 - DNA, 15 bp, Homo sapiens
actgataatatcagt

SEQ ID NO: 1030817 - DNA, 15 bp, Homo sapiens
cactgataatatcag

SEQ ID NO: 1030818 - DNA, 15 bp, Homo sapiens
acactgataatatca

SEQ ID NO: 1030819 - DNA, 15 bp, Homo sapiens
aacactgataatatc

SEQ ID NO: 1030820 - DNA, 15 bp, Homo sapiens
taacactgataatat

SEQ ID NO: 1030821 - DNA, 15 bp, Homo sapiens
ttaacactgataata

SEQ ID NO: 1030822 - DNA, 15 bp, Homo sapiens
tttaacactgataat

SEQ ID NO: 1030823 - DNA, 15 bp, Homo sapiens
ttttaacactgataa

SEQ ID NO: 1030824 - DNA, 15 bp, Homo sapiens
tttttaacactgata

SEQ ID NO: 1030825 - DNA, 15 bp, Homo sapiens
ctttttaacactgat

SEQ ID NO: 1030826 - DNA, 15 bp, Homo sapiens
gctttttaacactga

SEQ ID NO: 1030827 - DNA, 15 bp, Homo sapiens
tgctttttaacactg

SEQ ID NO: 1030828 - DNA, 15 bp, Homo sapiens
gtgctttttaacact

SEQ ID NO: 1030829 - DNA, 15 bp, Homo sapiens
tgtgctttttaacac

SEQ ID NO: 1030830 - DNA, 15 bp, Homo sapiens
atgtgctttttaaca

SEQ ID NO: 1030831 - DNA, 15 bp, Homo sapiens
catgtgctttttaac

SEQ ID NO: 1030832 - DNA, 15 bp, Homo sapiens
tcatgtgctttttaa

SEQ ID NO: 1030833 - DNA, 15 bp, Homo sapiens
atcatgtgcttttta

SEQ ID NO: 1030834 - DNA, 15 bp, Homo sapiens
tatcatgtgcttttt

SEQ ID NO: 1030835 - DNA, 15 bp, Homo sapiens
gtatcatgtgctttt

SEQ ID NO: 1030836 - DNA, 15 bp, Homo sapiens
agtatcatgtgcttt

SEQ ID NO: 1030837 - DNA, 15 bp, Homo sapiens
cagtatcatgtgctt

SEQ ID NO: 1030838 - DNA, 15 bp, Homo sapiens
acagtatcatgtgct

SEQ ID NO: 1030839 - DNA, 15 bp, Homo sapiens
aacagtatcatgtgc

SEQ ID NO: 1030840 - DNA, 15 bp, Homo sapiens
aaacagtatcatgtg

SEQ ID NO: 1030841 - DNA, 15 bp, Homo sapiens
caaacagtatcatgt

SEQ ID NO: 1030842 - DNA, 15 bp, Homo sapiens
gcaaacagtatcatg

SEQ ID NO: 1030843 - DNA, 15 bp, Homo sapiens
agcaaacagtatcat

SEQ ID NO: 1030844 - DNA, 15 bp, Homo sapiens
cagcaaacagtatca

SEQ ID NO: 1030845 - DNA, 15 bp, Homo sapiens
gcagcaaacagtatc

SEQ ID NO: 1030846 - DNA, 15 bp, Homo sapiens
agcagcaaacagtat

SEQ ID NO: 1030847 - DNA, 15 bp, Homo sapiens
aagcagcaaacagta

SEQ ID NO: 1030848 - DNA, 15 bp, Homo sapiens
aaagcagcaaacagt

SEQ ID NO: 1030849 - DNA, 15 bp, Homo sapiens
taaagcagcaaacag

SEQ ID NO: 1030850 - DNA, 15 bp, Homo sapiens
ttaaagcagcaaaca

SEQ ID NO: 1030851 - DNA, 15 bp, Homo sapiens
cttaaagcagcaaac

SEQ ID NO: 1030852 - DNA, 15 bp, Homo sapiens
tcttaaagcagcaaa

SEQ ID NO: 1030853 - DNA, 15 bp, Homo sapiens
ttcttaaagcagcaa

SEQ ID NO: 1030854 - DNA, 15 bp, Homo sapiens
tttcttaaagcagca

SEQ ID NO: 1030855 - DNA, 15 bp, Homo sapiens
atttcttaaagcagc

SEQ ID NO: 1030856 - DNA, 15 bp, Homo sapiens
catttcttaaagcag

SEQ ID NO: 1030857 - DNA, 15 bp, Homo sapiens
tcatttcttaaagca

SEQ ID NO: 1030858 - DNA, 15 bp, Homo sapiens
gtcatttcttaaagc

SEQ ID NO: 1030859 - DNA, 15 bp, Homo sapiens
ggtcatttcttaaag

SEQ ID NO: 1030860 - DNA, 15 bp, Homo sapiens
aggtcatttcttaaa

SEQ ID NO: 1030861 - DNA, 15 bp, Homo sapiens
caggtcatttcttaa

SEQ ID NO: 1030862 - DNA, 15 bp, Homo sapiens
ccaggtcatttctta

SEQ ID NO: 1030863 - DNA, 15 bp, Homo sapiens
accaggtcatttctt

SEQ ID NO: 1030864 - DNA, 15 bp, Homo sapiens
aaccaggtcatttct

SEQ ID NO: 1030865 - DNA, 15 bp, Homo sapiens
aaaccaggtcatttc

SEQ ID NO: 1030866 - DNA, 15 bp, Homo sapiens
gaaaccaggtcattt

SEQ ID NO: 1030867 - DNA, 15 bp, Homo sapiens
tgaaaccaggtcatt

SEQ ID NO: 1030868 - DNA, 15 bp, Homo sapiens
ttgaaaccaggtcat

SEQ ID NO: 1030869 - DNA, 15 bp, Homo sapiens
tttgaaaccaggtca

SEQ ID NO: 1030870 - DNA, 15 bp, Homo sapiens
ttttgaaaccaggtc

SEQ ID NO: 1030871 - DNA, 15 bp, Homo sapiens
tttttgaaaccaggt

SEQ ID NO: 1030872 - DNA, 15 bp, Homo sapiens
gtttttgaaaccagg

SEQ ID NO: 1030873 - DNA, 15 bp, Homo sapiens
agtttttgaaaccag

SEQ ID NO: 1030874 - DNA, 15 bp, Homo sapiens
cagtttttgaaacca

SEQ ID NO: 1030875 - DNA, 15 bp, Homo sapiens
gcagtttttgaaacc

SEQ ID NO: 1030876 - DNA, 15 bp, Homo sapiens
tgcagtttttgaaac

SEQ ID NO: 1030877 - DNA, 15 bp, Homo sapiens
atgcagtttttgaaa

SEQ ID NO: 1030878 - DNA, 15 bp, Homo sapiens
gatgcagtttttgaa

SEQ ID NO: 1030879 - DNA, 15 bp, Homo sapiens
agatgcagtttttga

SEQ ID NO: 1030880 - DNA, 15 bp, Homo sapiens
aagatgcagtttttg

SEQ ID NO: 1030881 - DNA, 15 bp, Homo sapiens
taagatgcagttttt

SEQ ID NO: 1030882 - DNA, 15 bp, Homo sapiens
ttaagatgcagtttt

SEQ ID NO: 1030883 - DNA, 15 bp, Homo sapiens
attaagatgcagttt

SEQ ID NO: 1030884 - DNA, 15 bp, Homo sapiens
aattaagatgcagtt

SEQ ID NO: 1030885 - DNA, 15 bp, Homo sapiens
aaattaagatgcagt

SEQ ID NO: 1030886 - DNA, 15 bp, Homo sapiens
aaaattaagatgcag

SEQ ID NO: 1030887 - DNA, 15 bp, Homo sapiens
taaaattaagatgca

SEQ ID NO: 1030888 - DNA, 15 bp, Homo sapiens
ctaaaattaagatgc

SEQ ID NO: 1030889 - DNA, 15 bp, Homo sapiens
cctaaaattaagatg

SEQ ID NO: 1030890 - DNA, 15 bp, Homo sapiens
gcctaaaattaagat

SEQ ID NO: 1030891 - DNA, 15 bp, Homo sapiens
agcctaaaattaaga

SEQ ID NO: 1030892 - DNA, 15 bp, Homo sapiens
cagcctaaaattaag

SEQ ID NO: 1030893 - DNA, 15 bp, Homo sapiens
ccagcctaaaattaa

SEQ ID NO: 1030894 - DNA, 15 bp, Homo sapiens
gccagcctaaaatta

SEQ ID NO: 1030895 - DNA, 15 bp, Homo sapiens
agccagcctaaaatt

SEQ ID NO: 1030896 - DNA, 15 bp, Homo sapiens
aagccagcctaaaat

SEQ ID NO: 1030897 - DNA, 15 bp, Homo sapiens
gaagccagcctaaaa

SEQ ID NO: 1030898 - DNA, 15 bp, Homo sapiens
tgaagccagcctaaa

SEQ ID NO: 1030899 - DNA, 15 bp, Homo sapiens
ctgaagccagcctaa

SEQ ID NO: 1030900 - DNA, 15 bp, Homo sapiens
actgaagccagccta

SEQ ID NO: 1030901 - DNA, 15 bp, Homo sapiens
aactgaagccagcct

SEQ ID NO: 1030902 - DNA, 15 bp, Homo sapiens
caactgaagccagcc

SEQ ID NO: 1030903 - DNA, 15 bp, Homo sapiens
tcaactgaagccagc

SEQ ID NO: 1030904 - DNA, 15 bp, Homo sapiens
ttcaactgaagccag

SEQ ID NO: 1030905 - DNA, 15 bp, Homo sapiens
attcaactgaagcca

SEQ ID NO: 1030906 - DNA, 15 bp, Homo sapiens
gattcaactgaagcc

SEQ ID NO: 1030907 - DNA, 15 bp, Homo sapiens
ggattcaactgaagc

SEQ ID NO: 1030908 - DNA, 15 bp, Homo sapiens
tggattcaactgaag

SEQ ID NO: 1030909 - DNA, 15 bp, Homo sapiens
ctggattcaactgaa

SEQ ID NO: 1030910 - DNA, 15 bp, Homo sapiens
actggattcaactga

SEQ ID NO: 1030911 - DNA, 15 bp, Homo sapiens
aactggattcaactg

SEQ ID NO: 1030912 - DNA, 15 bp, Homo sapiens
taactggattcaact

SEQ ID NO: 1030913 - DNA, 15 bp, Homo sapiens
ttaactggattcaac

SEQ ID NO: 1030914 - DNA, 15 bp, Homo sapiens
attaactggattcaa

SEQ ID NO: 1030915 - DNA, 15 bp, Homo sapiens
aattaactggattca

SEQ ID NO: 1030916 - DNA, 15 bp, Homo sapiens
aaattaactggattc

SEQ ID NO: 1030917 - DNA, 15 bp, Homo sapiens
aaaattaactggatt

SEQ ID NO: 1030918 - DNA, 15 bp, Homo sapiens
taaaattaactggat

SEQ ID NO: 1030919 - DNA, 15 bp, Homo sapiens
ataaaattaactgga

SEQ ID NO: 1030920 - DNA, 15 bp, Homo sapiens
gataaaattaactgg

SEQ ID NO: 1030921 - DNA, 15 bp, Homo sapiens
agataaaattaactg

SEQ ID NO: 1030922 - DNA, 15 bp, Homo sapiens
tagataaaattaact

SEQ ID NO: 1030923 - DNA, 15 bp, Homo sapiens
atagataaaattaac

SEQ ID NO: 1030924 - DNA, 15 bp, Homo sapiens
catagataaaattaa

SEQ ID NO: 1030925 - DNA, 15 bp, Homo sapiens
tcatagataaaatta

SEQ ID NO: 1030926 - DNA, 15 bp, Homo sapiens
ttcatagataaaatt

SEQ ID NO: 1030927 - DNA, 15 bp, Homo sapiens
attcatagataaaat

SEQ ID NO: 1030928 - DNA, 15 bp, Homo sapiens
cattcatagataaaa

SEQ ID NO: 1030929 - DNA, 15 bp, Homo sapiens
gcattcatagataaa

SEQ ID NO: 1030930 - DNA, 15 bp, Homo sapiens
ggcattcatagataa

SEQ ID NO: 1030931 - DNA, 15 bp, Homo sapiens
aggcattcatagata

SEQ ID NO: 1030932 - DNA, 15 bp, Homo sapiens
caggcattcatagat

SEQ ID NO: 1030933 - DNA, 15 bp, Homo sapiens
tcaggcattcataga

SEQ ID NO: 1030934 - DNA, 15 bp, Homo sapiens
gtcaggcattcatag

SEQ ID NO: 1030935 - DNA, 15 bp, Homo sapiens
agtcaggcattcata

SEQ ID NO: 1030936 - DNA, 15 bp, Homo sapiens
gagtcaggcattcat

SEQ ID NO: 1030937 - DNA, 15 bp, Homo sapiens
tgagtcaggcattca

SEQ ID NO: 1030938 - DNA, 15 bp, Homo sapiens
ctgagtcaggcattc

SEQ ID NO: 1030939 - DNA, 15 bp, Homo sapiens
actgagtcaggcatt

SEQ ID NO: 1030940 - DNA, 15 bp, Homo sapiens
cactgagtcaggcat

SEQ ID NO: 1030941 - DNA, 15 bp, Homo sapiens
gcactgagtcaggca

SEQ ID NO: 1030942 - DNA, 15 bp, Homo sapiens
tgcactgagtcaggc

SEQ ID NO: 1030943 - DNA, 15 bp, Homo sapiens
gtgcactgagtcagg

SEQ ID NO: 1030944 - DNA, 15 bp, Homo sapiens
cgtgcactgagtcag

SEQ ID NO: 1030945 - DNA, 15 bp, Homo sapiens
acgtgcactgagtca

SEQ ID NO: 1030946 - DNA, 15 bp, Homo sapiens
cacgtgcactgagtc

SEQ ID NO: 1030947 - DNA, 15 bp, Homo sapiens
ccacgtgcactgagt

SEQ ID NO: 1030948 - DNA, 15 bp, Homo sapiens
accacgtgcactgag

SEQ ID NO: 1030949 - DNA, 15 bp, Homo sapiens
caccacgtgcactga

SEQ ID NO: 1030950 - DNA, 15 bp, Homo sapiens
acaccacgtgcactg

SEQ ID NO: 1030951 - DNA, 15 bp, Homo sapiens
gacaccacgtgcact

SEQ ID NO: 1030952 - DNA, 15 bp, Homo sapiens
tgacaccacgtgcac

SEQ ID NO: 1030953 - DNA, 15 bp, Homo sapiens
atgacaccacgtgca

SEQ ID NO: 1030954 - DNA, 15 bp, Homo sapiens
aatgacaccacgtgc

SEQ ID NO: 1030955 - DNA, 15 bp, Homo sapiens
taatgacaccacgtg

SEQ ID NO: 1030956 - DNA, 15 bp, Homo sapiens
gtaatgacaccacgt

SEQ ID NO: 1030957 - DNA, 15 bp, Homo sapiens
tgtaatgacaccacg

SEQ ID NO: 1030958 - DNA, 15 bp, Homo sapiens
ctgtaatgacaccac

SEQ ID NO: 1030959 - DNA, 15 bp, Homo sapiens
tctgtaatgacacca

SEQ ID NO: 1030960 - DNA, 15 bp, Homo sapiens
atctgtaatgacacc

SEQ ID NO: 1030961 - DNA, 15 bp, Homo sapiens
catctgtaatgacac

SEQ ID NO: 1030962 - DNA, 15 bp, Homo sapiens
ccatctgtaatgaca

SEQ ID NO: 1030963 - DNA, 15 bp, Homo sapiens
cccatctgtaatgac

SEQ ID NO: 1030964 - DNA, 15 bp, Homo sapiens
ccccatctgtaatga

SEQ ID NO: 1030965 - DNA, 15 bp, Homo sapiens
tccccatctgtaatg

SEQ ID NO: 1030966 - DNA, 15 bp, Homo sapiens
ctccccatctgtaat

SEQ ID NO: 1030967 - DNA, 15 bp, Homo sapiens
tctccccatctgtaa

SEQ ID NO: 1030968 - DNA, 15 bp, Homo sapiens
gtctccccatctgta

SEQ ID NO: 1030969 - DNA, 15 bp, Homo sapiens
tgtctccccatctgt

SEQ ID NO: 1030970 - DNA, 15 bp, Homo sapiens
ctgtctccccatctg

SEQ ID NO: 1030971 - DNA, 15 bp, Homo sapiens
tctgtctccccatct

SEQ ID NO: 1030972 - DNA, 15 bp, Homo sapiens
ctctgtctccccatc

SEQ ID NO: 1030973 - DNA, 15 bp, Homo sapiens
tctctgtctccccat

SEQ ID NO: 1030974 - DNA, 15 bp, Homo sapiens
ttctctgtctcccca

SEQ ID NO: 1030975 - DNA, 15 bp, Homo sapiens
cttctctgtctcccc

SEQ ID NO: 1030976 - DNA, 15 bp, Homo sapiens
tcttctctgtctccc

SEQ ID NO: 1030977 - DNA, 15 bp, Homo sapiens
gtcttctctgtctcc

SEQ ID NO: 1030978 - DNA, 15 bp, Homo sapiens
tgtcttctctgtctc

SEQ ID NO: 1030979 - DNA, 15 bp, Homo sapiens
ctgtcttctctgtct

SEQ ID NO: 1030980 - DNA, 15 bp, Homo sapiens
tctgtcttctctgtc

SEQ ID NO: 1030981 - DNA, 15 bp, Homo sapiens
gtctgtcttctctgt

SEQ ID NO: 1030982 - DNA, 15 bp, Homo sapiens
tgtctgtcttctctg

SEQ ID NO: 1030983 - DNA, 15 bp, Homo sapiens
atgtctgtcttctct

SEQ ID NO: 1030984 - DNA, 15 bp, Homo sapiens
catgtctgtcttctc

SEQ ID NO: 1030985 - DNA, 15 bp, Homo sapiens
ccatgtctgtcttct

SEQ ID NO: 1030986 - DNA, 15 bp, Homo sapiens
accatgtctgtcttc

SEQ ID NO: 1030987 - DNA, 15 bp, Homo sapiens
caccatgtctgtctt

SEQ ID NO: 1030988 - DNA, 15 bp, Homo sapiens
tcaccatgtctgtct

SEQ ID NO: 1030989 - DNA, 15 bp, Homo sapiens
ttcaccatgtctgtc

SEQ ID NO: 1030990 - DNA, 15 bp, Homo sapiens
attcaccatgtctgt

SEQ ID NO: 1030991 - DNA, 15 bp, Homo sapiens
cattcaccatgtctg

SEQ ID NO: 1030992 - DNA, 15 bp, Homo sapiens
tcattcaccatgtct

SEQ ID NO: 1030993 - DNA, 15 bp, Homo sapiens
ttcattcaccatgtc

SEQ ID NO: 1030994 - DNA, 15 bp, Homo sapiens
cttcattcaccatgt

SEQ ID NO: 1030995 - DNA, 15 bp, Homo sapiens
ccttcattcaccatg

SEQ ID NO: 1030996 - DNA, 15 bp, Homo sapiens
accttcattcaccat

SEQ ID NO: 1030997 - DNA, 15 bp, Homo sapiens
caccttcattcacca

SEQ ID NO: 1030998 - DNA, 15 bp, Homo sapiens
ccaccttcattcacc

SEQ ID NO: 1030999 - DNA, 15 bp, Homo sapiens
cccaccttcattcac

SEQ ID NO: 1031000 - DNA, 15 bp, Homo sapiens
tcccaccttcattca

SEQ ID NO: 1031001 - DNA, 15 bp, Homo sapiens
ttcccaccttcattc

SEQ ID NO: 1031002 - DNA, 15 bp, Homo sapiens
tttcccaccttcatt

SEQ ID NO: 1031003 - DNA, 15 bp, Homo sapiens
atttcccaccttcat

SEQ ID NO: 1031004 - DNA, 15 bp, Homo sapiens
tatttcccaccttca

SEQ ID NO: 1031005 - DNA, 15 bp, Homo sapiens
ctatttcccaccttc

SEQ ID NO: 1031006 - DNA, 15 bp, Homo sapiens
tctatttcccacctt

SEQ ID NO: 1031007 - DNA, 15 bp, Homo sapiens
ctctatttcccacct

SEQ ID NO: 1031008 - DNA, 15 bp, Homo sapiens
tctctatttcccacc

SEQ ID NO: 1031009 - DNA, 15 bp, Homo sapiens
ttctctatttcccac

SEQ ID NO: 1031010 - DNA, 15 bp, Homo sapiens
attctctatttccca

SEQ ID NO: 1031011 - DNA, 15 bp, Homo sapiens
cattctctatttccc

SEQ ID NO: 1031012 - DNA, 15 bp, Homo sapiens
tcattctctatttcc

SEQ ID NO: 1031013 - DNA, 15 bp, Homo sapiens
ttcattctctatttc

SEQ ID NO: 1031014 - DNA, 15 bp, Homo sapiens
gttcattctctattt

SEQ ID NO: 1031015 - DNA, 15 bp, Homo sapiens
tgttcattctctatt

SEQ ID NO: 1031016 - DNA, 15 bp, Homo sapiens
ctgttcattctctat

SEQ ID NO: 1031017 - DNA, 15 bp, Homo sapiens
actgttcattctcta

SEQ ID NO: 1031018 - DNA, 15 bp, Homo sapiens
cactgttcattctct

SEQ ID NO: 1031019 - DNA, 15 bp, Homo sapiens
ccactgttcattctc

SEQ ID NO: 1031020 - DNA, 15 bp, Homo sapiens
tccactgttcattct

SEQ ID NO: 1031021 - DNA, 15 bp, Homo sapiens
atccactgttcattc

SEQ ID NO: 1031022 - DNA, 15 bp, Homo sapiens
aatccactgttcatt

SEQ ID NO: 1031023 - DNA, 15 bp, Homo sapiens
aaatccactgttcat

SEQ ID NO: 1031024 - DNA, 15 bp, Homo sapiens
caaatccactgttca

SEQ ID NO: 1031025 - DNA, 15 bp, Homo sapiens
ccaaatccactgttc

SEQ ID NO: 1031026 - DNA, 15 bp, Homo sapiens
tccaaatccactgtt

SEQ ID NO: 1031027 - DNA, 15 bp, Homo sapiens
ctccaaatccactgt

SEQ ID NO: 1031028 - DNA, 15 bp, Homo sapiens
actccaaatccactg

SEQ ID NO: 1031029 - DNA, 15 bp, Homo sapiens
gactccaaatccact

SEQ ID NO: 1031030 - DNA, 15 bp, Homo sapiens
tgactccaaatccac

SEQ ID NO: 1031031 - DNA, 15 bp, Homo sapiens
ctgactccaaatcca

SEQ ID NO: 1031032 - DNA, 15 bp, Homo sapiens
tctgactccaaatcc

SEQ ID NO: 1031033 - DNA, 15 bp, Homo sapiens
ttctgactccaaatc

SEQ ID NO: 1031034 - DNA, 15 bp, Homo sapiens
tttctgactccaaat

SEQ ID NO: 1031035 - DNA, 15 bp, Homo sapiens
ctttctgactccaaa

SEQ ID NO: 1031036 - DNA, 15 bp, Homo sapiens
gctttctgactccaa

SEQ ID NO: 1031037 - DNA, 15 bp, Homo sapiens
ggctttctgactcca

SEQ ID NO: 1031038 - DNA, 15 bp, Homo sapiens
gggctttctgactcc

SEQ ID NO: 1031039 - DNA, 15 bp, Homo sapiens
cgggctttctgactc

SEQ ID NO: 1031040 - DNA, 15 bp, Homo sapiens
ccgggctttctgact

SEQ ID NO: 1031041 - DNA, 15 bp, Homo sapiens
cccgggctttctgac

SEQ ID NO: 1031042 - DNA, 15 bp, Homo sapiens
acccgggctttctga

SEQ ID NO: 1031043 - DNA, 15 bp, Homo sapiens
aacccgggctttctg

SEQ ID NO: 1031044 - DNA, 15 bp, Homo sapiens
gaacccgggctttct

SEQ ID NO: 1031045 - DNA, 15 bp, Homo sapiens
tgaacccgggctttc

SEQ ID NO: 1031046 - DNA, 15 bp, Homo sapiens
atgaacccgggcttt

SEQ ID NO: 1031047 - DNA, 15 bp, Homo sapiens
aatgaacccgggctt

SEQ ID NO: 1031048 - DNA, 15 bp, Homo sapiens
gaatgaacccgggct

SEQ ID NO: 1031049 - DNA, 15 bp, Homo sapiens
agaatgaacccgggc

SEQ ID NO: 1031050 - DNA, 15 bp, Homo sapiens
gagaatgaacccggg

SEQ ID NO: 1031051 - DNA, 15 bp, Homo sapiens
tgagaatgaacccgg

SEQ ID NO: 1031052 - DNA, 15 bp, Homo sapiens
ctgagaatgaacccg

SEQ ID NO: 1031053 - DNA, 15 bp, Homo sapiens
gctgagaatgaaccc

SEQ ID NO: 1031054 - DNA, 15 bp, Homo sapiens
agctgagaatgaacc

SEQ ID NO: 1031055 - DNA, 15 bp, Homo sapiens
agagctgagaatgaa

SEQ ID NO: 1031056 - DNA, 15 bp, Homo sapiens
cagagctgagaatga

SEQ ID NO: 1031057 - DNA, 15 bp, Homo sapiens
gcagagctgagaatg

SEQ ID NO: 1031058 - DNA, 15 bp, Homo sapiens
agcagagctgagaat

SEQ ID NO: 1031059 - DNA, 15 bp, Homo sapiens
tagcagagctgagaa

SEQ ID NO: 1031060 - DNA, 15 bp, Homo sapiens
gtagcagagctgaga

SEQ ID NO: 1031061 - DNA, 15 bp, Homo sapiens
ggtagcagagctgag

SEQ ID NO: 1031062 - DNA, 15 bp, Homo sapiens
aggtagcagagctga

SEQ ID NO: 1031063 - DNA, 15 bp, Homo sapiens
taggtagcagagctg

SEQ ID NO: 1031064 - DNA, 15 bp, Homo sapiens
ctaggtagcagagct

SEQ ID NO: 1031065 - DNA, 15 bp, Homo sapiens
actaggtagcagagc

SEQ ID NO: 1031066 - DNA, 15 bp, Homo sapiens
tactaggtagcagag

SEQ ID NO: 1031067 - DNA, 15 bp, Homo sapiens
ctactaggtagcaga

SEQ ID NO: 1031068 - DNA, 15 bp, Homo sapiens
gctactaggtagcag

SEQ ID NO: 1031069 - DNA, 15 bp, Homo sapiens
agctactaggtagca

SEQ ID NO: 1031070 - DNA, 15 bp, Homo sapiens
cagctactaggtagc

SEQ ID NO: 1031071 - DNA, 15 bp, Homo sapiens
acagctactaggtag

SEQ ID NO: 1031072 - DNA, 15 bp, Homo sapiens
cacagctactaggta

SEQ ID NO: 1031073 - DNA, 15 bp, Homo sapiens
acacagctactaggt

SEQ ID NO: 1031074 - DNA, 15 bp, Homo sapiens
cacacagctactagg

SEQ ID NO: 1031075 - DNA, 15 bp, Homo sapiens
gcacacagctactag

SEQ ID NO: 1031076 - DNA, 15 bp, Homo sapiens
ggcacacagctacta

SEQ ID NO: 1031077 - DNA, 15 bp, Homo sapiens
aggcacacagctact

SEQ ID NO: 1031078 - DNA, 15 bp, Homo sapiens
aaggcacacagctac

SEQ ID NO: 1031079 - DNA, 15 bp, Homo sapiens
taaggcacacagcta

SEQ ID NO: 1031080 - DNA, 15 bp, Homo sapiens
ataaggcacacagct

SEQ ID NO: 1031081 - DNA, 15 bp, Homo sapiens
tataaggcacacagc

SEQ ID NO: 1031082 - DNA, 15 bp, Homo sapiens
ctataaggcacacag

SEQ ID NO: 1031083 - DNA, 15 bp, Homo sapiens
gctataaggcacaca

SEQ ID NO: 1031084 - DNA, 15 bp, Homo sapiens
tgctataaggcacac

SEQ ID NO: 1031085 - DNA, 15 bp, Homo sapiens
ttgctataaggcaca

SEQ ID NO: 1031086 - DNA, 15 bp, Homo sapiens
cttgctataaggcac

SEQ ID NO: 1031087 - DNA, 15 bp, Homo sapiens
ccttgctataaggca

SEQ ID NO: 1031088 - DNA, 15 bp, Homo sapiens
gccttgctataaggc

SEQ ID NO: 1031089 - DNA, 15 bp, Homo sapiens
tgccttgctataagg

SEQ ID NO: 1031090 - DNA, 15 bp, Homo sapiens
gtgccttgctataag

SEQ ID NO: 1031091 - DNA, 15 bp, Homo sapiens
agtgccttgctataa

SEQ ID NO: 1031092 - DNA, 15 bp, Homo sapiens
aagtgccttgctata

SEQ ID NO: 1031093 - DNA, 15 bp, Homo sapiens
gaagtgccttgctat

SEQ ID NO: 1031094 - DNA, 15 bp, Homo sapiens
agaagtgccttgcta

SEQ ID NO: 1031095 - DNA, 15 bp, Homo sapiens
aagaagtgccttgct

SEQ ID NO: 1031096 - DNA, 15 bp, Homo sapiens
caagaagtgccttgc

SEQ ID NO: 1031097 - DNA, 15 bp, Homo sapiens
acaagaagtgccttg

SEQ ID NO: 1031098 - DNA, 15 bp, Homo sapiens
tacaagaagtgcctt

SEQ ID NO: 1031099 - DNA, 15 bp, Homo sapiens
atacaagaagtgcct

SEQ ID NO: 1031100 - DNA, 15 bp, Homo sapiens
gatacaagaagtgcc

SEQ ID NO: 1031101 - DNA, 15 bp, Homo sapiens
agatacaagaagtgc

SEQ ID NO: 1031102 - DNA, 15 bp, Homo sapiens
cagatacaagaagtg

SEQ ID NO: 1031103 - DNA, 15 bp, Homo sapiens
acagatacaagaagt

SEQ ID NO: 1031104 - DNA, 15 bp, Homo sapiens
aacagatacaagaag

SEQ ID NO: 1031105 - DNA, 15 bp, Homo sapiens
aaacagatacaagaa

SEQ ID NO: 1031106 - DNA, 15 bp, Homo sapiens
gaaacagatacaaga

SEQ ID NO: 1031107 - DNA, 15 bp, Homo sapiens
ggaaacagatacaag

SEQ ID NO: 1031108 - DNA, 15 bp, Homo sapiens
aggaaacagatacaa

SEQ ID NO: 1031109 - DNA, 15 bp, Homo sapiens
aaggaaacagataca

SEQ ID NO: 1031110 - DNA, 15 bp, Homo sapiens
taaggaaacagatac

SEQ ID NO: 1031111 - DNA, 15 bp, Homo sapiens
ataaggaaacagata

SEQ ID NO: 1031112 - DNA, 15 bp, Homo sapiens
gataaggaaacagat

SEQ ID NO: 1031113 - DNA, 15 bp, Homo sapiens
agataaggaaacaga

SEQ ID NO: 1031114 - DNA, 15 bp, Homo sapiens
tagataaggaaacag

SEQ ID NO: 1031115 - DNA, 15 bp, Homo sapiens
ctagataaggaaaca

SEQ ID NO: 1031116 - DNA, 15 bp, Homo sapiens
tctagataaggaaac

SEQ ID NO: 1031117 - DNA, 15 bp, Homo sapiens
ttctagataaggaaa

SEQ ID NO: 1031118 - DNA, 15 bp, Homo sapiens
tttctagataaggaa

SEQ ID NO: 1031119 - DNA, 15 bp, Homo sapiens
ttttctagataagga

SEQ ID NO: 1031120 - DNA, 15 bp, Homo sapiens
attttctagataagg

SEQ ID NO: 1031121 - DNA, 15 bp, Homo sapiens
cattttctagataag

SEQ ID NO: 1031122 - DNA, 15 bp, Homo sapiens
ccattttctagataa

SEQ ID NO: 1031123 - DNA, 15 bp, Homo sapiens
cccattttctagata

SEQ ID NO: 1031124 - DNA, 15 bp, Homo sapiens
ccccattttctagat

SEQ ID NO: 1031125 - DNA, 15 bp, Homo sapiens
gccccattttctaga

SEQ ID NO: 1031126 - DNA, 15 bp, Homo sapiens
ggccccattttctag

SEQ ID NO: 1031127 - DNA, 15 bp, Homo sapiens
tggccccattttcta

SEQ ID NO: 1031128 - DNA, 15 bp, Homo sapiens
ttggccccattttct

SEQ ID NO: 1031129 - DNA, 15 bp, Homo sapiens
tttggccccattttc

SEQ ID NO: 1031130 - DNA, 15 bp, Homo sapiens
ctttggccccatttt

SEQ ID NO: 1031131 - DNA, 15 bp, Homo sapiens
gctttggccccattt

SEQ ID NO: 1031132 - DNA, 15 bp, Homo sapiens
tgctttggccccatt

SEQ ID NO: 1031133 - DNA, 15 bp, Homo sapiens
gtgctttggccccat

SEQ ID NO: 1031134 - DNA, 15 bp, Homo sapiens
ggtgctttggcccca

SEQ ID NO: 1031135 - DNA, 15 bp, Homo sapiens
aggtgctttggcccc

SEQ ID NO: 1031136 - DNA, 15 bp, Homo sapiens
gaggtgctttggccc

SEQ ID NO: 1031137 - DNA, 15 bp, Homo sapiens
ggaggtgctttggcc

SEQ ID NO: 1031138 - DNA, 15 bp, Homo sapiens
aggaggtgctttggc

SEQ ID NO: 1031139 - DNA, 15 bp, Homo sapiens
aaggaggtgctttgg

SEQ ID NO: 1031140 - DNA, 15 bp, Homo sapiens
caaggaggtgctttg

SEQ ID NO: 1031141 - DNA, 15 bp, Homo sapiens
gcaaggaggtgcttt

SEQ ID NO: 1031142 - DNA, 15 bp, Homo sapiens
ggcaaggaggtgctt

SEQ ID NO: 1031143 - DNA, 15 bp, Homo sapiens
tggcaaggaggtgct

SEQ ID NO: 1031144 - DNA, 15 bp, Homo sapiens
gtggcaaggaggtgc

SEQ ID NO: 1031145 - DNA, 15 bp, Homo sapiens
tgtggcaaggaggtg

SEQ ID NO: 1031146 - DNA, 15 bp, Homo sapiens
ttgtggcaaggaggt

SEQ ID NO: 1031147 - DNA, 15 bp, Homo sapiens
cttgtggcaaggagg

SEQ ID NO: 1031148 - DNA, 15 bp, Homo sapiens
gcttgtggcaaggag

SEQ ID NO: 1031149 - DNA, 15 bp, Homo sapiens
ggcttgtggcaagga

SEQ ID NO: 1031150 - DNA, 15 bp, Homo sapiens
tggcttgtggcaagg

SEQ ID NO: 1031151 - DNA, 15 bp, Homo sapiens
atggcttgtggcaag

SEQ ID NO: 1031152 - DNA, 15 bp, Homo sapiens
tatggcttgtggcaa

SEQ ID NO: 1031153 - DNA, 15 bp, Homo sapiens
ctatggcttgtggca

SEQ ID NO: 1031154 - DNA, 15 bp, Homo sapiens
cctatggcttgtggc

SEQ ID NO: 1031155 - DNA, 15 bp, Homo sapiens
tcctatggcttgtgg

SEQ ID NO: 1031156 - DNA, 15 bp, Homo sapiens
ttcctatggcttgtg

SEQ ID NO: 1031157 - DNA, 15 bp, Homo sapiens
cttcctatggcttgt

SEQ ID NO: 1031158 - DNA, 15 bp, Homo sapiens
tcttcctatggcttg

SEQ ID NO: 1031159 - DNA, 15 bp, Homo sapiens
ttcttcctatggctt

SEQ ID NO: 1031160 - DNA, 15 bp, Homo sapiens
attcttcctatggct

SEQ ID NO: 1031161 - DNA, 15 bp, Homo sapiens
aattcttcctatggc

SEQ ID NO: 1031162 - DNA, 15 bp, Homo sapiens
aaattcttcctatgg

SEQ ID NO: 1031163 - DNA, 15 bp, Homo sapiens
aaaattcttcctatg

SEQ ID NO: 1031164 - DNA, 15 bp, Homo sapiens
aaaaattcttcctat

SEQ ID NO: 1031165 - DNA, 15 bp, Homo sapiens
taaaaattcttccta

SEQ ID NO: 1031166 - DNA, 15 bp, Homo sapiens
ttaaaaattcttcct

SEQ ID NO: 1031167 - DNA, 15 bp, Homo sapiens
tttaaaaattcttcc

SEQ ID NO: 1031168 - DNA, 15 bp, Homo sapiens
ctttaaaaattcttc

SEQ ID NO: 1031169 - DNA, 15 bp, Homo sapiens
actttaaaaattctt

SEQ ID NO: 1031170 - DNA, 15 bp, Homo sapiens
gactttaaaaattct

SEQ ID NO: 1031171 - DNA, 15 bp, Homo sapiens
agactttaaaaattc

SEQ ID NO: 1031172 - DNA, 15 bp, Homo sapiens
cagactttaaaaatt

SEQ ID NO: 1031173 - DNA, 15 bp, Homo sapiens
gcagactttaaaaat

SEQ ID NO: 1031174 - DNA, 15 bp, Homo sapiens
agcagactttaaaaa

SEQ ID NO: 1031175 - DNA, 15 bp, Homo sapiens
tagcagactttaaaa

SEQ ID NO: 1031176 - DNA, 15 bp, Homo sapiens
gtagcagactttaaa

SEQ ID NO: 1031177 - DNA, 15 bp, Homo sapiens
ggtagcagactttaa

SEQ ID NO: 1031178 - DNA, 15 bp, Homo sapiens
aggtagcagacttta

SEQ ID NO: 1031179 - DNA, 15 bp, Homo sapiens
aaggtagcagacttt

SEQ ID NO: 1031180 - DNA, 15 bp, Homo sapiens
taaggtagcagactt

SEQ ID NO: 1031181 - DNA, 15 bp, Homo sapiens
ctaaggtagcagact

SEQ ID NO: 1031182 - DNA, 15 bp, Homo sapiens
gctaaggtagcagac

SEQ ID NO: 1031183 - DNA, 15 bp, Homo sapiens
agctaaggtagcaga

SEQ ID NO: 1031184 - DNA, 15 bp, Homo sapiens
cagctaaggtagcag

SEQ ID NO: 1031185 - DNA, 15 bp, Homo sapiens
ccagctaaggtagca

SEQ ID NO: 1031186 - DNA, 15 bp, Homo sapiens
tccagctaaggtagc

SEQ ID NO: 1031187 - DNA, 15 bp, Homo sapiens
atccagctaaggtag

SEQ ID NO: 1031188 - DNA, 15 bp, Homo sapiens
tatccagctaaggta

SEQ ID NO: 1031189 - DNA, 15 bp, Homo sapiens
gtatccagctaaggt

SEQ ID NO: 1031190 - DNA, 15 bp, Homo sapiens
tgtatccagctaagg

SEQ ID NO: 1031191 - DNA, 15 bp, Homo sapiens
gtgtatccagctaag

SEQ ID NO: 1031192 - DNA, 15 bp, Homo sapiens
tgtgtatccagctaa

SEQ ID NO: 1031193 - DNA, 15 bp, Homo sapiens
atgtgtatccagcta

SEQ ID NO: 1031194 - DNA, 15 bp, Homo sapiens
aatgtgtatccagct

SEQ ID NO: 1031195 - DNA, 15 bp, Homo sapiens
taatgtgtatccagc

SEQ ID NO: 1031196 - DNA, 15 bp, Homo sapiens
ttaatgtgtatccag

SEQ ID NO: 1031197 - DNA, 15 bp, Homo sapiens
tttaatgtgtatcca

SEQ ID NO: 1031198 - DNA, 15 bp, Homo sapiens
atttaatgtgtatcc

SEQ ID NO: 1031199 - DNA, 15 bp, Homo sapiens
aatttaatgtgtatc

SEQ ID NO: 1031200 - DNA, 15 bp, Homo sapiens
taatttaatgtgtat

SEQ ID NO: 1031201 - DNA, 15 bp, Homo sapiens
ttaatttaatgtgta

SEQ ID NO: 1031202 - DNA, 15 bp, Homo sapiens
gttaatttaatgtgt

SEQ ID NO: 1031203 - DNA, 15 bp, Homo sapiens
agttaatttaatgtg

SEQ ID NO: 1031204 - DNA, 15 bp, Homo sapiens
aagttaatttaatgt

SEQ ID NO: 1031205 - DNA, 15 bp, Homo sapiens
gaagttaatttaatg

SEQ ID NO: 1031206 - DNA, 15 bp, Homo sapiens
tgaagttaatttaat

SEQ ID NO: 1031207 - DNA, 15 bp, Homo sapiens
atgaagttaatttaa

SEQ ID NO: 1031208 - DNA, 15 bp, Homo sapiens
catgaagttaattta

SEQ ID NO: 1031209 - DNA, 15 bp, Homo sapiens
acatgaagttaattt

SEQ ID NO: 1031210 - DNA, 15 bp, Homo sapiens
cacatgaagttaatt

SEQ ID NO: 1031211 - DNA, 15 bp, Homo sapiens
gcacatgaagttaat

SEQ ID NO: 1031212 - DNA, 15 bp, Homo sapiens
ggcacatgaagttaa

SEQ ID NO: 1031213 - DNA, 15 bp, Homo sapiens
aggcacatgaagtta

SEQ ID NO: 1031214 - DNA, 15 bp, Homo sapiens
aaggcacatgaagtt

SEQ ID NO: 1031215 - DNA, 15 bp, Homo sapiens
taaggcacatgaagt

SEQ ID NO: 1031216 - DNA, 15 bp, Homo sapiens
ataaggcacatgaag

SEQ ID NO: 1031217 - DNA, 15 bp, Homo sapiens
tataaggcacatgaa

SEQ ID NO: 1031218 - DNA, 15 bp, Homo sapiens
ctataaggcacatga

SEQ ID NO: 1031219 - DNA, 15 bp, Homo sapiens
gctataaggcacatg

SEQ ID NO: 1031220 - DNA, 15 bp, Homo sapiens
tgctataaggcacat

SEQ ID NO: 1031221 - DNA, 15 bp, Homo sapiens
ggtgccttgctataa

SEQ ID NO: 1031222 - DNA, 15 bp, Homo sapiens
aggtgccttgctata

SEQ ID NO: 1031223 - DNA, 15 bp, Homo sapiens
gaggtgccttgctat

SEQ ID NO: 1031224 - DNA, 15 bp, Homo sapiens
agaggtgccttgcta

SEQ ID NO: 1031225 - DNA, 15 bp, Homo sapiens
aagaggtgccttgct

SEQ ID NO: 1031226 - DNA, 15 bp, Homo sapiens
caagaggtgccttgc

SEQ ID NO: 1031227 - DNA, 15 bp, Homo sapiens
tcaagaggtgccttg

SEQ ID NO: 1031228 - DNA, 15 bp, Homo sapiens
ttcaagaggtgcctt

SEQ ID NO: 1031229 - DNA, 15 bp, Homo sapiens
attcaagaggtgcct

SEQ ID NO: 1031230 - DNA, 15 bp, Homo sapiens
gattcaagaggtgcc

SEQ ID NO: 1031231 - DNA, 15 bp, Homo sapiens
agattcaagaggtgc

SEQ ID NO: 1031232 - DNA, 15 bp, Homo sapiens
cagattcaagaggtg

SEQ ID NO: 1031233 - DNA, 15 bp, Homo sapiens
acagattcaagaggt

SEQ ID NO: 1031234 - DNA, 15 bp, Homo sapiens
aacagattcaagagg

SEQ ID NO: 1031235 - DNA, 15 bp, Homo sapiens
aaacagattcaagag

SEQ ID NO: 1031236 - DNA, 15 bp, Homo sapiens
gaaacagattcaaga

SEQ ID NO: 1031237 - DNA, 15 bp, Homo sapiens
ggaaacagattcaag

SEQ ID NO: 1031238 - DNA, 15 bp, Homo sapiens
aggaaacagattcaa

SEQ ID NO: 1031239 - DNA, 15 bp, Homo sapiens
aaggaaacagattca

SEQ ID NO: 1031240 - DNA, 15 bp, Homo sapiens
taaggaaacagattc

SEQ ID NO: 1031241 - DNA, 15 bp, Homo sapiens
ataaggaaacagatt

SEQ ID NO: 1031242 - DNA, 15 bp, Homo sapiens
acttgtggcaaggag

SEQ ID NO: 1031243 - DNA, 15 bp, Homo sapiens
gacttgtggcaagga

SEQ ID NO: 1031244 - DNA, 15 bp, Homo sapiens
tgacttgtggcaagg

SEQ ID NO: 1031245 - DNA, 15 bp, Homo sapiens
gtgacttgtggcaag

SEQ ID NO: 1031246 - DNA, 15 bp, Homo sapiens
tgtgacttgtggcaa

SEQ ID NO: 1031247 - DNA, 15 bp, Homo sapiens
ctgtgacttgtggca

SEQ ID NO: 1031248 - DNA, 15 bp, Homo sapiens
cctgtgacttgtggc

SEQ ID NO: 1031249 - DNA, 15 bp, Homo sapiens
tcctgtgacttgtgg

SEQ ID NO: 1031250 - DNA, 15 bp, Homo sapiens
ttcctgtgacttgtg

SEQ ID NO: 1031251 - DNA, 15 bp, Homo sapiens
attcctgtgacttgt

SEQ ID NO: 1031252 - DNA, 15 bp, Homo sapiens
tattcctgtgacttg

SEQ ID NO: 1031253 - DNA, 15 bp, Homo sapiens
ttattcctgtgactt

SEQ ID NO: 1031254 - DNA, 15 bp, Homo sapiens
attattcctgtgact

SEQ ID NO: 1031255 - DNA, 15 bp, Homo sapiens
cattattcctgtgac

SEQ ID NO: 1031256 - DNA, 15 bp, Homo sapiens
acattattcctgtga

SEQ ID NO: 1031257 - DNA, 15 bp, Homo sapiens
aacattattcctgtg

SEQ ID NO: 1031258 - DNA, 15 bp, Homo sapiens
aaacattattcctgt

SEQ ID NO: 1031259 - DNA, 15 bp, Homo sapiens
aaaacattattcctg

SEQ ID NO: 1031260 - DNA, 15 bp, Homo sapiens
taaaacattattcct

SEQ ID NO: 1031261 - DNA, 15 bp, Homo sapiens
ttaaaacattattcc

SEQ ID NO: 1031262 - DNA, 15 bp, Homo sapiens
tttaaaacattattc

SEQ ID NO: 1031263 - DNA, 15 bp, Homo sapiens
ctttaaaacattatt

SEQ ID NO: 1031264 - DNA, 15 bp, Homo sapiens
gctttaaaacattat

SEQ ID NO: 1031265 - DNA, 15 bp, Homo sapiens
ggctttaaaacatta

SEQ ID NO: 1031266 - DNA, 15 bp, Homo sapiens
gcaggctttaaaaca

SEQ ID NO: 1031267 - DNA, 15 bp, Homo sapiens
ggcaggctttaaaac

SEQ ID NO: 1031268 - DNA, 15 bp, Homo sapiens
tggcaggctttaaaa

SEQ ID NO: 1031269 - DNA, 15 bp, Homo sapiens
gtggcaggctttaaa

SEQ ID NO: 1031270 - DNA, 15 bp, Homo sapiens
ggtggcaggctttaa

SEQ ID NO: 1031271 - DNA, 15 bp, Homo sapiens
aggtggcaggcttta

SEQ ID NO: 1031272 - DNA, 15 bp, Homo sapiens
aaggtggcaggcttt

SEQ ID NO: 1031273 - DNA, 15 bp, Homo sapiens
taaggtggcaggctt

SEQ ID NO: 1031274 - DNA, 15 bp, Homo sapiens
ctaaggtggcaggct

SEQ ID NO: 1031275 - DNA, 15 bp, Homo sapiens
gctaaggtggcaggc

SEQ ID NO: 1031276 - DNA, 15 bp, Homo sapiens
agctaaggtggcagg

SEQ ID NO: 1031277 - DNA, 15 bp, Homo sapiens
cagctaaggtggcag

SEQ ID NO: 1031278 - DNA, 15 bp, Homo sapiens
ccagctaaggtggca

SEQ ID NO: 1031279 - DNA, 15 bp, Homo sapiens
tccagctaaggtggc

SEQ ID NO: 1031280 - DNA, 15 bp, Homo sapiens
atccagctaaggtgg

SEQ ID NO: 1031281 - DNA, 15 bp, Homo sapiens
tatccagctaaggtg

SEQ ID NO: 1031282 - DNA, 15 bp, Homo sapiens
attaatgtgtatcca

SEQ ID NO: 1031283 - DNA, 15 bp, Homo sapiens
aattaatgtgtatcc

SEQ ID NO: 1031284 - DNA, 15 bp, Homo sapiens
caattaatgtgtatc

SEQ ID NO: 1031285 - DNA, 15 bp, Homo sapiens
tcaattaatgtgtat

SEQ ID NO: 1031286 - DNA, 15 bp, Homo sapiens
ttcaattaatgtgta

SEQ ID NO: 1031287 - DNA, 15 bp, Homo sapiens
gttcaattaatgtgt

SEQ ID NO: 1031288 - DNA, 15 bp, Homo sapiens
agttcaattaatgtg

SEQ ID NO: 1031289 - DNA, 15 bp, Homo sapiens
aagttcaattaatgt

SEQ ID NO: 1031290 - DNA, 15 bp, Homo sapiens
aaagttcaattaatg

SEQ ID NO: 1031291 - DNA, 15 bp, Homo sapiens
caaagttcaattaat

SEQ ID NO: 1031292 - DNA, 15 bp, Homo sapiens
gcaaagttcaattaa

SEQ ID NO: 1031293 - DNA, 15 bp, Homo sapiens
agcaaagttcaatta

SEQ ID NO: 1031294 - DNA, 15 bp, Homo sapiens
aagcaaagttcaatt

SEQ ID NO: 1031295 - DNA, 15 bp, Homo sapiens
aaagcaaagttcaat

SEQ ID NO: 1031296 - DNA, 15 bp, Homo sapiens
aaaagcaaagttcaa

SEQ ID NO: 1031297 - DNA, 15 bp, Homo sapiens
caaaagcaaagttca

SEQ ID NO: 1031298 - DNA, 15 bp, Homo sapiens
ccaaaagcaaagttc

SEQ ID NO: 1031299 - DNA, 15 bp, Homo sapiens
cccaaaagcaaagtt

SEQ ID NO: 1031300 - DNA, 15 bp, Homo sapiens
tcccaaaagcaaagt

SEQ ID NO: 1031301 - DNA, 15 bp, Homo sapiens
ttcccaaaagcaaag

SEQ ID NO: 1031302 - DNA, 15 bp, Homo sapiens
attcccaaaagcaaa

SEQ ID NO: 1031303 - DNA, 15 bp, Homo sapiens
cattcccaaaagcaa

SEQ ID NO: 1031304 - DNA, 15 bp, Homo sapiens
ccattcccaaaagca

SEQ ID NO: 1031305 - DNA, 15 bp, Homo sapiens
cccattcccaaaagc

SEQ ID NO: 1031306 - DNA, 15 bp, Homo sapiens
gcccattcccaaaag

SEQ ID NO: 1031307 - DNA, 15 bp, Homo sapiens
tgcccattcccaaaa

SEQ ID NO: 1031308 - DNA, 15 bp, Homo sapiens
atgcccattcccaaa

SEQ ID NO: 1031309 - DNA, 15 bp, Homo sapiens
tatgcccattcccaa

SEQ ID NO: 1031310 - DNA, 15 bp, Homo sapiens
gtatgcccattccca

SEQ ID NO: 1031311 - DNA, 15 bp, Homo sapiens
ggtatgcccattccc

SEQ ID NO: 1031312 - DNA, 15 bp, Homo sapiens
tggtatgcccattcc

SEQ ID NO: 1031313 - DNA, 15 bp, Homo sapiens
ctggtatgcccattc

SEQ ID NO: 1031314 - DNA, 15 bp, Homo sapiens
cctggtatgcccatt

SEQ ID NO: 1031315 - DNA, 15 bp, Homo sapiens
tcctggtatgcccat

SEQ ID NO: 1031316 - DNA, 15 bp, Homo sapiens
gtcctggtatgccca

SEQ ID NO: 1031317 - DNA, 15 bp, Homo sapiens
tgtcctggtatgccc

SEQ ID NO: 1031318 - DNA, 15 bp, Homo sapiens
ctgtcctggtatgcc

SEQ ID NO: 1031319 - DNA, 15 bp, Homo sapiens
tctgtcctggtatgc

SEQ ID NO: 1031320 - DNA, 15 bp, Homo sapiens
atctgtcctggtatg

SEQ ID NO: 1031321 - DNA, 15 bp, Homo sapiens
aatctgtcctggtat

SEQ ID NO: 1031322 - DNA, 15 bp, Homo sapiens
caatctgtcctggta

SEQ ID NO: 1031323 - DNA, 15 bp, Homo sapiens
ccaatctgtcctggt

SEQ ID NO: 1031324 - DNA, 15 bp, Homo sapiens
accaatctgtcctgg

SEQ ID NO: 1031325 - DNA, 15 bp, Homo sapiens
gaccaatctgtcctg

SEQ ID NO: 1031326 - DNA, 15 bp, Homo sapiens
tgaccaatctgtcct

SEQ ID NO: 1031327 - DNA, 15 bp, Homo sapiens
ctgaccaatctgtcc

SEQ ID NO: 1031328 - DNA, 15 bp, Homo sapiens
tctgaccaatctgtc

SEQ ID NO: 1031329 - DNA, 15 bp, Homo sapiens
ttctgaccaatctgt

SEQ ID NO: 1031330 - DNA, 15 bp, Homo sapiens
tttctgaccaatctg

SEQ ID NO: 1031331 - DNA, 15 bp, Homo sapiens
ttttctgaccaatct

SEQ ID NO: 1031332 - DNA, 15 bp, Homo sapiens
attttctgaccaatc

SEQ ID NO: 1031333 - DNA, 15 bp, Homo sapiens
aattttctgaccaat

SEQ ID NO: 1031334 - DNA, 15 bp, Homo sapiens
taattttctgaccaa

SEQ ID NO: 1031335 - DNA, 15 bp, Homo sapiens
ctaattttctgacca

SEQ ID NO: 1031336 - DNA, 15 bp, Homo sapiens
tctaattttctgacc

SEQ ID NO: 1031337 - DNA, 15 bp, Homo sapiens
ttctaattttctgac

SEQ ID NO: 1031338 - DNA, 15 bp, Homo sapiens
gttctaattttctga

SEQ ID NO: 1031339 - DNA, 15 bp, Homo sapiens
tgttctaattttctg

SEQ ID NO: 1031340 - DNA, 15 bp, Homo sapiens
gtgttctaattttct

SEQ ID NO: 1031341 - DNA, 15 bp, Homo sapiens
tgtgttctaattttc

SEQ ID NO: 1031342 - DNA, 15 bp, Homo sapiens
ctgtgttctaatttt

SEQ ID NO: 1031343 - DNA, 15 bp, Homo sapiens
cctgtgttctaattt

SEQ ID NO: 1031344 - DNA, 15 bp, Homo sapiens
acctgtgttctaatt

SEQ ID NO: 1031345 - DNA, 15 bp, Homo sapiens
gacctgtgttctaat

SEQ ID NO: 1031346 - DNA, 15 bp, Homo sapiens
ggacctgtgttctaa

SEQ ID NO: 1031347 - DNA, 15 bp, Homo sapiens
tggacctgtgttcta

SEQ ID NO: 1031348 - DNA, 15 bp, Homo sapiens
ttggacctgtgttct

SEQ ID NO: 1031349 - DNA, 15 bp, Homo sapiens
tttggacctgtgttc

SEQ ID NO: 1031350 - DNA, 15 bp, Homo sapiens
atttggacctgtgtt

SEQ ID NO: 1031351 - DNA, 15 bp, Homo sapiens
aatttggacctgtgt

SEQ ID NO: 1031352 - DNA, 15 bp, Homo sapiens
aaatttggacctgtg

SEQ ID NO: 1031353 - DNA, 15 bp, Homo sapiens
taaatttggacctgt

SEQ ID NO: 1031354 - DNA, 15 bp, Homo sapiens
gtaaatttggacctg

SEQ ID NO: 1031355 - DNA, 15 bp, Homo sapiens
ggtaaatttggacct

SEQ ID NO: 1031356 - DNA, 15 bp, Homo sapiens
tggtaaatttggacc

SEQ ID NO: 1031357 - DNA, 15 bp, Homo sapiens
atggtaaatttggac

SEQ ID NO: 1031358 - DNA, 15 bp, Homo sapiens
gatggtaaatttgga

SEQ ID NO: 1031359 - DNA, 15 bp, Homo sapiens
tgatggtaaatttgg

SEQ ID NO: 1031360 - DNA, 15 bp, Homo sapiens
atgatggtaaatttg

SEQ ID NO: 1031361 - DNA, 15 bp, Homo sapiens
catgatggtaaattt

SEQ ID NO: 1031362 - DNA, 15 bp, Homo sapiens
gcatgatggtaaatt

SEQ ID NO: 1031363 - DNA, 15 bp, Homo sapiens
tgcatgatggtaaat

SEQ ID NO: 1031364 - DNA, 15 bp, Homo sapiens
atgcatgatggtaaa

SEQ ID NO: 1031365 - DNA, 15 bp, Homo sapiens
tatgcatgatggtaa

SEQ ID NO: 1031366 - DNA, 15 bp, Homo sapiens
atatgcatgatggta

SEQ ID NO: 1031367 - DNA, 15 bp, Homo sapiens
aatatgcatgatggt

SEQ ID NO: 1031368 - DNA, 15 bp, Homo sapiens
aaatatgcatgatgg

SEQ ID NO: 1031369 - DNA, 15 bp, Homo sapiens
gaaatatgcatgatg

SEQ ID NO: 1031370 - DNA, 15 bp, Homo sapiens
tgaaatatgcatgat

SEQ ID NO: 1031371 - DNA, 15 bp, Homo sapiens
atgaaatatgcatga

SEQ ID NO: 1031372 - DNA, 15 bp, Homo sapiens
aatgaaatatgcatg

SEQ ID NO: 1031373 - DNA, 15 bp, Homo sapiens
taatgaaatatgcat

SEQ ID NO: 1031374 - DNA, 15 bp, Homo sapiens
ttaatgaaatatgca

SEQ ID NO: 1031375 - DNA, 15 bp, Homo sapiens
attaatgaaatatgc

SEQ ID NO: 1031376 - DNA, 15 bp, Homo sapiens
aattaatgaaatatg

SEQ ID NO: 1031377 - DNA, 15 bp, Homo sapiens
gaattaatgaaatat

SEQ ID NO: 1031378 - DNA, 15 bp, Homo sapiens
tgaattaatgaaata

SEQ ID NO: 1031379 - DNA, 15 bp, Homo sapiens
ttgaattaatgaaat

SEQ ID NO: 1031380 - DNA, 15 bp, Homo sapiens
gttgaattaatgaaa

SEQ ID NO: 1031381 - DNA, 15 bp, Homo sapiens
tgttgaattaatgaa

SEQ ID NO: 1031382 - DNA, 15 bp, Homo sapiens
ttgttgaattaatga

SEQ ID NO: 1031383 - DNA, 15 bp, Homo sapiens
tttgttgaattaatg

SEQ ID NO: 1031384 - DNA, 15 bp, Homo sapiens
atttgttgaattaat

SEQ ID NO: 1031385 - DNA, 15 bp, Homo sapiens
catttgttgaattaa

SEQ ID NO: 1031386 - DNA, 15 bp, Homo sapiens
acatttgttgaatta

SEQ ID NO: 1031387 - DNA, 15 bp, Homo sapiens
aacatttgttgaatt

SEQ ID NO: 1031388 - DNA, 15 bp, Homo sapiens
aaacatttgttgaat

SEQ ID NO: 1031389 - DNA, 15 bp, Homo sapiens
taaacatttgttgaa

SEQ ID NO: 1031390 - DNA, 15 bp, Homo sapiens
ataaacatttgttga

SEQ ID NO: 1031391 - DNA, 15 bp, Homo sapiens
cataaacatttgttg

SEQ ID NO: 1031392 - DNA, 15 bp, Homo sapiens
tcataaacatttgtt

SEQ ID NO: 1031393 - DNA, 15 bp, Homo sapiens
atcataaacatttgt

SEQ ID NO: 1031394 - DNA, 15 bp, Homo sapiens
catcataaacatttg

SEQ ID NO: 1031395 - DNA, 15 bp, Homo sapiens
gcatcataaacattt

SEQ ID NO: 1031396 - DNA, 15 bp, Homo sapiens
tgcatcataaacatt

SEQ ID NO: 1031397 - DNA, 15 bp, Homo sapiens
atgcatcataaacat

SEQ ID NO: 1031398 - DNA, 15 bp, Homo sapiens
gatgcatcataaaca

SEQ ID NO: 1031399 - DNA, 15 bp, Homo sapiens
agatgcatcataaac

SEQ ID NO: 1031400 - DNA, 15 bp, Homo sapiens
tagatgcatcataaa

SEQ ID NO: 1031401 - DNA, 15 bp, Homo sapiens
atagatgcatcataa

SEQ ID NO: 1031402 - DNA, 15 bp, Homo sapiens
aatagatgcatcata

SEQ ID NO: 1031403 - DNA, 15 bp, Homo sapiens
taatagatgcatcat

SEQ ID NO: 1031404 - DNA, 15 bp, Homo sapiens
ataatagatgcatca

SEQ ID NO: 1031405 - DNA, 15 bp, Homo sapiens
cataatagatgcatc

SEQ ID NO: 1031406 - DNA, 15 bp, Homo sapiens
acataatagatgcat

SEQ ID NO: 1031407 - DNA, 15 bp, Homo sapiens
aacataatagatgca

SEQ ID NO: 1031408 - DNA, 15 bp, Homo sapiens
caacataatagatgc

SEQ ID NO: 1031409 - DNA, 15 bp, Homo sapiens
gcaacataatagatg

SEQ ID NO: 1031410 - DNA, 15 bp, Homo sapiens
tgcaacataatagat

SEQ ID NO: 1031411 - DNA, 15 bp, Homo sapiens
cttgcaacataatag

SEQ ID NO: 1031412 - DNA, 15 bp, Homo sapiens
ccttgcaacataata

SEQ ID NO: 1031413 - DNA, 15 bp, Homo sapiens
gccttgcaacataat

SEQ ID NO: 1031414 - DNA, 15 bp, Homo sapiens
agccttgcaacataa

SEQ ID NO: 1031415 - DNA, 15 bp, Homo sapiens
gagccttgcaacata

SEQ ID NO: 1031416 - DNA, 15 bp, Homo sapiens
agagccttgcaacat

SEQ ID NO: 1031417 - DNA, 15 bp, Homo sapiens
cagagccttgcaaca

SEQ ID NO: 1031418 - DNA, 15 bp, Homo sapiens
gcagagccttgcaac

SEQ ID NO: 1031419 - DNA, 15 bp, Homo sapiens
tgcagagccttgcaa

SEQ ID NO: 1031420 - DNA, 15 bp, Homo sapiens
gtgcagagccttgca

SEQ ID NO: 1031421 - DNA, 15 bp, Homo sapiens
agtgcagagccttgc

SEQ ID NO: 1031422 - DNA, 15 bp, Homo sapiens
cagtgcagagccttg

SEQ ID NO: 1031423 - DNA, 15 bp, Homo sapiens
acagtgcagagcctt

SEQ ID NO: 1031424 - DNA, 15 bp, Homo sapiens
cacagtgcagagcct

SEQ ID NO: 1031425 - DNA, 15 bp, Homo sapiens
acacagtgcagagcc

SEQ ID NO: 1031426 - DNA, 15 bp, Homo sapiens
tacacagtgcagagc

SEQ ID NO: 1031427 - DNA, 15 bp, Homo sapiens
atacacagtgcagag

SEQ ID NO: 1031428 - DNA, 15 bp, Homo sapiens
aatacacagtgcaga

SEQ ID NO: 1031429 - DNA, 15 bp, Homo sapiens
caatacacagtgcag

SEQ ID NO: 1031430 - DNA, 15 bp, Homo sapiens
tcaatacacagtgca

SEQ ID NO: 1031431 - DNA, 15 bp, Homo sapiens
ctcaatacacagtgc

SEQ ID NO: 1031432 - DNA, 15 bp, Homo sapiens
cctcaatacacagtg

SEQ ID NO: 1031433 - DNA, 15 bp, Homo sapiens
tcctcaatacacagt

SEQ ID NO: 1031434 - DNA, 15 bp, Homo sapiens
atcctcaatacacag

SEQ ID NO: 1031435 - DNA, 15 bp, Homo sapiens
tatcctcaatacaca

SEQ ID NO: 1031436 - DNA, 15 bp, Homo sapiens
ttatcctcaatacac

SEQ ID NO: 1031437 - DNA, 15 bp, Homo sapiens
tttatcctcaataca

SEQ ID NO: 1031438 - DNA, 15 bp, Homo sapiens
ttttatcctcaatac

SEQ ID NO: 1031439 - DNA, 15 bp, Homo sapiens
gttttatcctcaata

SEQ ID NO: 1031440 - DNA, 15 bp, Homo sapiens
tgttttatcctcaat

SEQ ID NO: 1031441 - DNA, 15 bp, Homo sapiens
ctgttttatcctcaa

SEQ ID NO: 1031442 - DNA, 15 bp, Homo sapiens
cctgttttatcctca

SEQ ID NO: 1031443 - DNA, 15 bp, Homo sapiens
ccctgttttatcctc

SEQ ID NO: 1031444 - DNA, 15 bp, Homo sapiens
cccctgttttatcct

SEQ ID NO: 1031445 - DNA, 15 bp, Homo sapiens
acccctgttttatcc

SEQ ID NO: 1031446 - DNA, 15 bp, Homo sapiens
gacccctgttttatc

SEQ ID NO: 1031447 - DNA, 15 bp, Homo sapiens
tgacccctgttttat

SEQ ID NO: 1031448 - DNA, 15 bp, Homo sapiens
ttgacccctgtttta

SEQ ID NO: 1031449 - DNA, 15 bp, Homo sapiens
tttgacccctgtttt

SEQ ID NO: 1031450 - DNA, 15 bp, Homo sapiens
ttttgacccctgttt

SEQ ID NO: 1031451 - DNA, 15 bp, Homo sapiens
gttttgacccctgtt

SEQ ID NO: 1031452 - DNA, 15 bp, Homo sapiens
ggttttgacccctgt

SEQ ID NO: 1031453 - DNA, 15 bp, Homo sapiens
gggttttgacccctg

SEQ ID NO: 1031454 - DNA, 15 bp, Homo sapiens
agggttttgacccct

SEQ ID NO: 1031455 - DNA, 15 bp, Homo sapiens
gagggttttgacccc

SEQ ID NO: 1031456 - DNA, 15 bp, Homo sapiens
ggagggttttgaccc

SEQ ID NO: 1031457 - DNA, 15 bp, Homo sapiens
tggagggttttgacc

SEQ ID NO: 1031458 - DNA, 15 bp, Homo sapiens
ctggagggttttgac

SEQ ID NO: 1031459 - DNA, 15 bp, Homo sapiens
cctggagggttttga

SEQ ID NO: 1031460 - DNA, 15 bp, Homo sapiens
tcctggagggttttg

SEQ ID NO: 1031461 - DNA, 15 bp, Homo sapiens
ttcctggagggtttt

SEQ ID NO: 1031462 - DNA, 15 bp, Homo sapiens
attcctggagggttt

SEQ ID NO: 1031463 - DNA, 15 bp, Homo sapiens
cattcctggagggtt

SEQ ID NO: 1031464 - DNA, 15 bp, Homo sapiens
acattcctggagggt

SEQ ID NO: 1031465 - DNA, 15 bp, Homo sapiens
tacattcctggaggg

SEQ ID NO: 1031466 - DNA, 15 bp, Homo sapiens
ctacattcctggagg

SEQ ID NO: 1031467 - DNA, 15 bp, Homo sapiens
tctacattcctggag

SEQ ID NO: 1031468 - DNA, 15 bp, Homo sapiens
gtctacattcctgga

SEQ ID NO: 1031469 - DNA, 15 bp, Homo sapiens
cgtctacattcctgg

SEQ ID NO: 1031470 - DNA, 15 bp, Homo sapiens
gcgtctacattcctg

SEQ ID NO: 1031471 - DNA, 15 bp, Homo sapiens
agcgtctacattcct

SEQ ID NO: 1031472 - DNA, 15 bp, Homo sapiens
tagcgtctacattcc

SEQ ID NO: 1031473 - DNA, 15 bp, Homo sapiens
ctagcgtctacattc

SEQ ID NO: 1031474 - DNA, 15 bp, Homo sapiens
actagcgtctacatt

SEQ ID NO: 1031475 - DNA, 15 bp, Homo sapiens
cactagcgtctacat

SEQ ID NO: 1031476 - DNA, 15 bp, Homo sapiens
ccactagcgtctaca

SEQ ID NO: 1031477 - DNA, 15 bp, Homo sapiens
tccactagcgtctac

SEQ ID NO: 1031478 - DNA, 15 bp, Homo sapiens
ctccactagcgtcta

SEQ ID NO: 1031479 - DNA, 15 bp, Homo sapiens
cctccactagcgtct

SEQ ID NO: 1031480 - DNA, 15 bp, Homo sapiens
ccctccactagcgtc

SEQ ID NO: 1031481 - DNA, 15 bp, Homo sapiens
tccctccactagcgt

SEQ ID NO: 1031482 - DNA, 15 bp, Homo sapiens
ctccctccactagcg

SEQ ID NO: 1031483 - DNA, 15 bp, Homo sapiens
gctccctccactagc

SEQ ID NO: 1031484 - DNA, 15 bp, Homo sapiens
agctccctccactag

SEQ ID NO: 1031485 - DNA, 15 bp, Homo sapiens
cagctccctccacta

SEQ ID NO: 1031486 - DNA, 15 bp, Homo sapiens
tcagctccctccact

SEQ ID NO: 1031487 - DNA, 15 bp, Homo sapiens
gtcagctccctccac

SEQ ID NO: 1031488 - DNA, 15 bp, Homo sapiens
tgtcagctccctcca

SEQ ID NO: 1031489 - DNA, 15 bp, Homo sapiens
gtgtcagctccctcc

SEQ ID NO: 1031490 - DNA, 15 bp, Homo sapiens
tgtgtcagctccctc

SEQ ID NO: 1031491 - DNA, 15 bp, Homo sapiens
atgtgtcagctccct

SEQ ID NO: 1031492 - DNA, 15 bp, Homo sapiens
tatgtgtcagctccc

SEQ ID NO: 1031493 - DNA, 15 bp, Homo sapiens
gtatgtgtcagctcc

SEQ ID NO: 1031494 - DNA, 15 bp, Homo sapiens
tgtatgtgtcagctc

SEQ ID NO: 1031495 - DNA, 15 bp, Homo sapiens
ctgtatgtgtcagct

SEQ ID NO: 1031496 - DNA, 15 bp, Homo sapiens
tctgtatgtgtcagc

SEQ ID NO: 1031497 - DNA, 15 bp, Homo sapiens
ctctgtatgtgtcag

SEQ ID NO: 1031498 - DNA, 15 bp, Homo sapiens
tctctgtatgtgtca

SEQ ID NO: 1031499 - DNA, 15 bp, Homo sapiens
ttctctgtatgtgtc

SEQ ID NO: 1031500 - DNA, 15 bp, Homo sapiens
gttctctgtatgtgt

SEQ ID NO: 1031501 - DNA, 15 bp, Homo sapiens
tgttctctgtatgtg

SEQ ID NO: 1031502 - DNA, 15 bp, Homo sapiens
ttgttctctgtatgt

SEQ ID NO: 1031503 - DNA, 15 bp, Homo sapiens
attgttctctgtatg

SEQ ID NO: 1031504 - DNA, 15 bp, Homo sapiens
gattgttctctgtat

SEQ ID NO: 1031505 - DNA, 15 bp, Homo sapiens
agattgttctctgta

SEQ ID NO: 1031506 - DNA, 15 bp, Homo sapiens
gagattgttctctgt

SEQ ID NO: 1031507 - DNA, 15 bp, Homo sapiens
tgagattgttctctg

SEQ ID NO: 1031508 - DNA, 15 bp, Homo sapiens
ctgagattgttctct

SEQ ID NO: 1031509 - DNA, 15 bp, Homo sapiens
actgagattgttctc

SEQ ID NO: 1031510 - DNA, 15 bp, Homo sapiens
aactgagattgttct

SEQ ID NO: 1031511 - DNA, 15 bp, Homo sapiens
caactgagattgttc

SEQ ID NO: 1031512 - DNA, 15 bp, Homo sapiens
tcaactgagattgtt

SEQ ID NO: 1031513 - DNA, 15 bp, Homo sapiens
ctcaactgagattgt

SEQ ID NO: 1031514 - DNA, 15 bp, Homo sapiens
actcaactgagattg

SEQ ID NO: 1031515 - DNA, 15 bp, Homo sapiens
cactcaactgagatt

SEQ ID NO: 1031516 - DNA, 15 bp, Homo sapiens
ccactcaactgagat

SEQ ID NO: 1031517 - DNA, 15 bp, Homo sapiens
accactcaactgaga

SEQ ID NO: 1031518 - DNA, 15 bp, Homo sapiens
caccactcaactgag

SEQ ID NO: 1031519 - DNA, 15 bp, Homo sapiens
tcaccactcaactga

SEQ ID NO: 1031520 - DNA, 15 bp, Homo sapiens
atcaccactcaactg

SEQ ID NO: 1031521 - DNA, 15 bp, Homo sapiens
tatcaccactcaact

SEQ ID NO: 1031522 - DNA, 15 bp, Homo sapiens
atatcaccactcaac

SEQ ID NO: 1031523 - DNA, 15 bp, Homo sapiens
tatatcaccactcaa

SEQ ID NO: 1031524 - DNA, 15 bp, Homo sapiens
atatatcaccactca

SEQ ID NO: 1031525 - DNA, 15 bp, Homo sapiens
gatatatcaccactc

SEQ ID NO: 1031526 - DNA, 15 bp, Homo sapiens
agatatatcaccact

SEQ ID NO: 1031527 - DNA, 15 bp, Homo sapiens
aagatatatcaccac

SEQ ID NO: 1031528 - DNA, 15 bp, Homo sapiens
gaagatatatcacca

SEQ ID NO: 1031529 - DNA, 15 bp, Homo sapiens
agaagatatatcacc

SEQ ID NO: 1031530 - DNA, 15 bp, Homo sapiens
cagaagatatatcac

SEQ ID NO: 1031531 - DNA, 15 bp, Homo sapiens
tcagaagatatatca

SEQ ID NO: 1031532 - DNA, 15 bp, Homo sapiens
ttcagaagatatatc

SEQ ID NO: 1031533 - DNA, 15 bp, Homo sapiens
cttcagaagatatat

SEQ ID NO: 1031534 - DNA, 15 bp, Homo sapiens
tcttcagaagatata

SEQ ID NO: 1031535 - DNA, 15 bp, Homo sapiens
ttcttcagaagatat

SEQ ID NO: 1031536 - DNA, 15 bp, Homo sapiens
gttcttcagaagata

SEQ ID NO: 1031537 - DNA, 15 bp, Homo sapiens
tgttcttcagaagat

SEQ ID NO: 1031538 - DNA, 15 bp, Homo sapiens
ttgttcttcagaaga

SEQ ID NO: 1031539 - DNA, 15 bp, Homo sapiens
attgttcttcagaag

SEQ ID NO: 1031540 - DNA, 15 bp, Homo sapiens
tattgttcttcagaa

SEQ ID NO: 1031541 - DNA, 15 bp, Homo sapiens
ttattgttcttcaga

SEQ ID NO: 1031542 - DNA, 15 bp, Homo sapiens
gttattgttcttcag

SEQ ID NO: 1031543 - DNA, 15 bp, Homo sapiens
cgttattgttcttca

SEQ ID NO: 1031544 - DNA, 15 bp, Homo sapiens
gcgttattgttcttc

SEQ ID NO: 1031545 - DNA, 15 bp, Homo sapiens
tgcgttattgttctt

SEQ ID NO: 1031546 - DNA, 15 bp, Homo sapiens
ctgcgttattgttct

SEQ ID NO: 1031547 - DNA, 15 bp, Homo sapiens
cctgcgttattgttc

SEQ ID NO: 1031548 - DNA, 15 bp, Homo sapiens
acctgcgttattgtt

SEQ ID NO: 1031549 - DNA, 15 bp, Homo sapiens
aacctgcgttattgt

SEQ ID NO: 1031550 - DNA, 15 bp, Homo sapiens
taacctgcgttattg

SEQ ID NO: 1031551 - DNA, 15 bp, Homo sapiens
ctaacctgcgttatt

SEQ ID NO: 1031552 - DNA, 15 bp, Homo sapiens
cctaacctgcgttat

SEQ ID NO: 1031553 - DNA, 15 bp, Homo sapiens
ccctaacctgcgtta

SEQ ID NO: 1031554 - DNA, 15 bp, Homo sapiens
tccctaacctgcgtt

SEQ ID NO: 1031555 - DNA, 15 bp, Homo sapiens
ttccctaacctgcgt

SEQ ID NO: 1031556 - DNA, 15 bp, Homo sapiens
attccctaacctgcg

SEQ ID NO: 1031557 - DNA, 15 bp, Homo sapiens
cattccctaacctgc

SEQ ID NO: 1031558 - DNA, 15 bp, Homo sapiens
ccattccctaacctg

SEQ ID NO: 1031559 - DNA, 15 bp, Homo sapiens
tccattccctaacct

SEQ ID NO: 1031560 - DNA, 15 bp, Homo sapiens
ttccattccctaacc

SEQ ID NO: 1031561 - DNA, 15 bp, Homo sapiens
tttccattccctaac

SEQ ID NO: 1031562 - DNA, 15 bp, Homo sapiens
ctttccattccctaa

SEQ ID NO: 1031563 - DNA, 15 bp, Homo sapiens
actttccattcccta

SEQ ID NO: 1031564 - DNA, 15 bp, Homo sapiens
tactttccattccct

SEQ ID NO: 1031565 - DNA, 15 bp, Homo sapiens
ttactttccattccc

SEQ ID NO: 1031566 - DNA, 15 bp, Homo sapiens
attactttccattcc

SEQ ID NO: 1031567 - DNA, 15 bp, Homo sapiens
cattactttccattc

SEQ ID NO: 1031568 - DNA, 15 bp, Homo sapiens
tcattactttccatt

SEQ ID NO: 1031569 - DNA, 15 bp, Homo sapiens
gtcattactttccat

SEQ ID NO: 1031570 - DNA, 15 bp, Homo sapiens
cgtcattactttcca

SEQ ID NO: 1031571 - DNA, 15 bp, Homo sapiens
gcgtcattactttcc

SEQ ID NO: 1031572 - DNA, 15 bp, Homo sapiens
agcgtcattactttc

SEQ ID NO: 1031573 - DNA, 15 bp, Homo sapiens
tagcgtcattacttt

SEQ ID NO: 1031574 - DNA, 15 bp, Homo sapiens
atagcgtcattactt

SEQ ID NO: 1031575 - DNA, 15 bp, Homo sapiens
tatagcgtcattact

SEQ ID NO: 1031576 - DNA, 15 bp, Homo sapiens
atatagcgtcattac

SEQ ID NO: 1031577 - DNA, 15 bp, Homo sapiens
tatatagcgtcatta

SEQ ID NO: 1031578 - DNA, 15 bp, Homo sapiens
ctatatagcgtcatt

SEQ ID NO: 1031579 - DNA, 15 bp, Homo sapiens
gctatatagcgtcat

SEQ ID NO: 1031580 - DNA, 15 bp, Homo sapiens
ggctatatagcgtca

SEQ ID NO: 1031581 - DNA, 15 bp, Homo sapiens
tggctatatagcgtc

SEQ ID NO: 1031582 - DNA, 15 bp, Homo sapiens
ctggctatatagcgt

SEQ ID NO: 1031583 - DNA, 15 bp, Homo sapiens
cctggctatatagcg

SEQ ID NO: 1031584 - DNA, 15 bp, Homo sapiens
tcctggctatatagc

SEQ ID NO: 1031585 - DNA, 15 bp, Homo sapiens
atcctggctatatag

SEQ ID NO: 1031586 - DNA, 15 bp, Homo sapiens
catcctggctatata

SEQ ID NO: 1031587 - DNA, 15 bp, Homo sapiens
ccatcctggctatat

SEQ ID NO: 1031588 - DNA, 15 bp, Homo sapiens
accatcctggctata

SEQ ID NO: 1031589 - DNA, 15 bp, Homo sapiens
caccatcctggctat

SEQ ID NO: 1031590 - DNA, 15 bp, Homo sapiens
tcaccatcctggcta

SEQ ID NO: 1031591 - DNA, 15 bp, Homo sapiens
ctcaccatcctggct

SEQ ID NO: 1031592 - DNA, 15 bp, Homo sapiens
cctcaccatcctggc

SEQ ID NO: 1031593 - DNA, 15 bp, Homo sapiens
tcctcaccatcctgg

SEQ ID NO: 1031594 - DNA, 15 bp, Homo sapiens
ctcctcaccatcctg

SEQ ID NO: 1031595 - DNA, 15 bp, Homo sapiens
tctcctcaccatcct

SEQ ID NO: 1031596 - DNA, 15 bp, Homo sapiens
ttctcctcaccatcc

SEQ ID NO: 1031597 - DNA, 15 bp, Homo sapiens
cttctcctcaccatc

SEQ ID NO: 1031598 - DNA, 15 bp, Homo sapiens
gcttctcctcaccat

SEQ ID NO: 1031599 - DNA, 15 bp, Homo sapiens
cgcttctcctcacca

SEQ ID NO: 1031600 - DNA, 15 bp, Homo sapiens
acgcttctcctcacc

SEQ ID NO: 1031601 - DNA, 15 bp, Homo sapiens
cacgcttctcctcac

SEQ ID NO: 1031602 - DNA, 15 bp, Homo sapiens
acacgcttctcctca

SEQ ID NO: 1031603 - DNA, 15 bp, Homo sapiens
gacacgcttctcctc

SEQ ID NO: 1031604 - DNA, 15 bp, Homo sapiens
agacacgcttctcct

SEQ ID NO: 1031605 - DNA, 15 bp, Homo sapiens
tagacacgcttctcc

SEQ ID NO: 1031606 - DNA, 15 bp, Homo sapiens
ttagacacgcttctc

SEQ ID NO: 1031607 - DNA, 15 bp, Homo sapiens
gttagacacgcttct

SEQ ID NO: 1031608 - DNA, 15 bp, Homo sapiens
tgttagacacgcttc

SEQ ID NO: 1031609 - DNA, 15 bp, Homo sapiens
ttgttagacacgctt

SEQ ID NO: 1031610 - DNA, 15 bp, Homo sapiens
tttgttagacacgct

SEQ ID NO: 1031611 - DNA, 15 bp, Homo sapiens
ctttgttagacacgc

SEQ ID NO: 1031612 - DNA, 15 bp, Homo sapiens
actttgttagacacg

SEQ ID NO: 1031613 - DNA, 15 bp, Homo sapiens
gactttgttagacac

SEQ ID NO: 1031614 - DNA, 15 bp, Homo sapiens
tgactttgttagaca

SEQ ID NO: 1031615 - DNA, 15 bp, Homo sapiens
gtgactttgttagac

SEQ ID NO: 1031616 - DNA, 15 bp, Homo sapiens
tgtgactttgttaga

SEQ ID NO: 1031617 - DNA, 15 bp, Homo sapiens
ctgtgactttgttag

SEQ ID NO: 1031618 - DNA, 15 bp, Homo sapiens
actgtgactttgtta

SEQ ID NO: 1031619 - DNA, 15 bp, Homo sapiens
gactgtgactttgtt

SEQ ID NO: 1031620 - DNA, 15 bp, Homo sapiens
cgactgtgactttgt

SEQ ID NO: 1031621 - DNA, 15 bp, Homo sapiens
ccgactgtgactttg

SEQ ID NO: 1031622 - DNA, 15 bp, Homo sapiens
cccgactgtgacttt

SEQ ID NO: 1031623 - DNA, 15 bp, Homo sapiens
gcccgactgtgactt

SEQ ID NO: 1031624 - DNA, 15 bp, Homo sapiens
tgcccgactgtgact

SEQ ID NO: 1031625 - DNA, 15 bp, Homo sapiens
ctgcccgactgtgac

SEQ ID NO: 1031626 - DNA, 15 bp, Homo sapiens
tctgcccgactgtga

SEQ ID NO: 1031627 - DNA, 15 bp, Homo sapiens
ctctgcccgactgtg

SEQ ID NO: 1031628 - DNA, 15 bp, Homo sapiens
cctctgcccgactgt

SEQ ID NO: 1031629 - DNA, 15 bp, Homo sapiens
gcctctgcccgactg

SEQ ID NO: 1031630 - DNA, 15 bp, Homo sapiens
tgcctctgcccgact

SEQ ID NO: 1031631 - DNA, 15 bp, Homo sapiens
gtgcctctgcccgac

SEQ ID NO: 1031632 - DNA, 15 bp, Homo sapiens
agtgcctctgcccga

SEQ ID NO: 1031633 - DNA, 15 bp, Homo sapiens
gagtgcctctgcccg

SEQ ID NO: 1031634 - DNA, 15 bp, Homo sapiens
agagtgcctctgccc

SEQ ID NO: 1031635 - DNA, 15 bp, Homo sapiens
gagagtgcctctgcc

SEQ ID NO: 1031636 - DNA, 15 bp, Homo sapiens
agagagtgcctctgc

SEQ ID NO: 1031637 - DNA, 15 bp, Homo sapiens
gagagagtgcctctg

SEQ ID NO: 1031638 - DNA, 15 bp, Homo sapiens
cgagagagtgcctct

SEQ ID NO: 1031639 - DNA, 15 bp, Homo sapiens
acgagagagtgcctc

SEQ ID NO: 1031640 - DNA, 15 bp, Homo sapiens
gacgagagagtgcct

SEQ ID NO: 1031641 - DNA, 15 bp, Homo sapiens
tgacgagagagtgcc

SEQ ID NO: 1031642 - DNA, 15 bp, Homo sapiens
atgacgagagagtgc

SEQ ID NO: 1031643 - DNA, 15 bp, Homo sapiens
aatgacgagagagtg

SEQ ID NO: 1031644 - DNA, 15 bp, Homo sapiens
taatgacgagagagt

SEQ ID NO: 1031645 - DNA, 15 bp, Homo sapiens
ttaatgacgagagag

SEQ ID NO: 1031646 - DNA, 15 bp, Homo sapiens
gttaatgacgagaga

SEQ ID NO: 1031647 - DNA, 15 bp, Homo sapiens
agttaatgacgagag

SEQ ID NO: 1031648 - DNA, 15 bp, Homo sapiens
gagttaatgacgaga

SEQ ID NO: 1031649 - DNA, 15 bp, Homo sapiens
ggagttaatgacgag

SEQ ID NO: 1031650 - DNA, 15 bp, Homo sapiens
tggagttaatgacga

SEQ ID NO: 1031651 - DNA, 15 bp, Homo sapiens
ctggagttaatgacg

SEQ ID NO: 1031652 - DNA, 15 bp, Homo sapiens
tctggagttaatgac

SEQ ID NO: 1031653 - DNA, 15 bp, Homo sapiens
ttctggagttaatga

SEQ ID NO: 1031654 - DNA, 15 bp, Homo sapiens
cttctggagttaatg

SEQ ID NO: 1031655 - DNA, 15 bp, Homo sapiens
tcttctggagttaat

SEQ ID NO: 1031656 - DNA, 15 bp, Homo sapiens
ctcttctggagttaa

SEQ ID NO: 1031657 - DNA, 15 bp, Homo sapiens
actcttctggagtta

SEQ ID NO: 1031658 - DNA, 15 bp, Homo sapiens
tactcttctggagtt

SEQ ID NO: 1031659 - DNA, 15 bp, Homo sapiens
gtactcttctggagt

SEQ ID NO: 1031660 - DNA, 15 bp, Homo sapiens
tgtactcttctggag

SEQ ID NO: 1031661 - DNA, 15 bp, Homo sapiens
ctgtactcttctgga

SEQ ID NO: 1031662 - DNA, 15 bp, Homo sapiens
gctgtactcttctgg

SEQ ID NO: 1031663 - DNA, 15 bp, Homo sapiens
tgctgtactcttctg

SEQ ID NO: 1031664 - DNA, 15 bp, Homo sapiens
gtgctgtactcttct

SEQ ID NO: 1031665 - DNA, 15 bp, Homo sapiens
ggtgctgtactcttc

SEQ ID NO: 1031666 - DNA, 15 bp, Homo sapiens
tggtgctgtactctt

SEQ ID NO: 1031667 - DNA, 15 bp, Homo sapiens
ttggtgctgtactct

SEQ ID NO: 1031668 - DNA, 15 bp, Homo sapiens
gttggtgctgtactc

SEQ ID NO: 1031669 - DNA, 15 bp, Homo sapiens
ggttggtgctgtact

SEQ ID NO: 1031670 - DNA, 15 bp, Homo sapiens
tggttggtgctgtac

SEQ ID NO: 1031671 - DNA, 15 bp, Homo sapiens
gtggttggtgctgta

SEQ ID NO: 1031672 - DNA, 15 bp, Homo sapiens
tgtggttggtgctgt

SEQ ID NO: 1031673 - DNA, 15 bp, Homo sapiens
gtgtggttggtgctg

SEQ ID NO: 1031674 - DNA, 15 bp, Homo sapiens
tgtgtggttggtgct

SEQ ID NO: 1031675 - DNA, 15 bp, Homo sapiens
ctgtgtggttggtgc

SEQ ID NO: 1031676 - DNA, 15 bp, Homo sapiens
gctgtgtggttggtg

SEQ ID NO: 1031677 - DNA, 15 bp, Homo sapiens
ggctgtgtggttggt

SEQ ID NO: 1031678 - DNA, 15 bp, Homo sapiens
tggctgtgtggttgg

SEQ ID NO: 1031679 - DNA, 15 bp, Homo sapiens
ctggctgtgtggttg

SEQ ID NO: 1031680 - DNA, 15 bp, Homo sapiens
actggctgtgtggtt

SEQ ID NO: 1031681 - DNA, 15 bp, Homo sapiens
gactggctgtgtggt

SEQ ID NO: 1031682 - DNA, 15 bp, Homo sapiens
tgactggctgtgtgg

SEQ ID NO: 1031683 - DNA, 15 bp, Homo sapiens
ttgactggctgtgtg

SEQ ID NO: 1031684 - DNA, 15 bp, Homo sapiens
gttgactggctgtgt

SEQ ID NO: 1031685 - DNA, 15 bp, Homo sapiens
tgttgactggctgtg

SEQ ID NO: 1031686 - DNA, 15 bp, Homo sapiens
ttgttgactggctgt

SEQ ID NO: 1031687 - DNA, 15 bp, Homo sapiens
attgttgactggctg

SEQ ID NO: 1031688 - DNA, 15 bp, Homo sapiens
cattgttgactggct

SEQ ID NO: 1031689 - DNA, 15 bp, Homo sapiens
ccattgttgactggc

SEQ ID NO: 1031690 - DNA, 15 bp, Homo sapiens
tccattgttgactgg

SEQ ID NO: 1031691 - DNA, 15 bp, Homo sapiens
gtccattgttgactg

SEQ ID NO: 1031692 - DNA, 15 bp, Homo sapiens
tgtccattgttgact

SEQ ID NO: 1031693 - DNA, 15 bp, Homo sapiens
ttgtccattgttgac

SEQ ID NO: 1031694 - DNA, 15 bp, Homo sapiens
cttgtccattgttga

SEQ ID NO: 1031695 - DNA, 15 bp, Homo sapiens
gcttgtccattgttg

SEQ ID NO: 1031696 - DNA, 15 bp, Homo sapiens
tgcttgtccattgtt

SEQ ID NO: 1031697 - DNA, 15 bp, Homo sapiens
gtgcttgtccattgt

SEQ ID NO: 1031698 - DNA, 15 bp, Homo sapiens
tgtgcttgtccattg

SEQ ID NO: 1031699 - DNA, 15 bp, Homo sapiens
ctgtgcttgtccatt

SEQ ID NO: 1031700 - DNA, 15 bp, Homo sapiens
gctgtgcttgtccat

SEQ ID NO: 1031701 - DNA, 15 bp, Homo sapiens
ggctgtgcttgtcca

SEQ ID NO: 1031702 - DNA, 15 bp, Homo sapiens
gggctgtgcttgtcc

SEQ ID NO: 1031703 - DNA, 15 bp, Homo sapiens
cgggctgtgcttgtc

SEQ ID NO: 1031704 - DNA, 15 bp, Homo sapiens
tcgggctgtgcttgt

SEQ ID NO: 1031705 - DNA, 15 bp, Homo sapiens
ttcgggctgtgcttg

SEQ ID NO: 1031706 - DNA, 15 bp, Homo sapiens
tttcgggctgtgctt

SEQ ID NO: 1031707 - DNA, 15 bp, Homo sapiens
ctttcgggctgtgct

SEQ ID NO: 1031708 - DNA, 15 bp, Homo sapiens
tctttcgggctgtgc

SEQ ID NO: 1031709 - DNA, 15 bp, Homo sapiens
ttctttcgggctgtg

SEQ ID NO: 1031710 - DNA, 15 bp, Homo sapiens
cttctttcgggctgt

SEQ ID NO: 1031711 - DNA, 15 bp, Homo sapiens
ccttctttcgggctg

SEQ ID NO: 1031712 - DNA, 15 bp, Homo sapiens
cccttctttcgggct

SEQ ID NO: 1031713 - DNA, 15 bp, Homo sapiens
gcccttctttcgggc

SEQ ID NO: 1031714 - DNA, 15 bp, Homo sapiens
ggcccttctttcggg

SEQ ID NO: 1031715 - DNA, 15 bp, Homo sapiens
tggcccttctttcgg

SEQ ID NO: 1031716 - DNA, 15 bp, Homo sapiens
ctggcccttctttcg

SEQ ID NO: 1031717 - DNA, 15 bp, Homo sapiens
cctggcccttctttc

SEQ ID NO: 1031718 - DNA, 15 bp, Homo sapiens
ccctggcccttcttt

SEQ ID NO: 1031719 - DNA, 15 bp, Homo sapiens
accctggcccttctt

SEQ ID NO: 1031720 - DNA, 15 bp, Homo sapiens
aaccctggcccttct

SEQ ID NO: 1031721 - DNA, 15 bp, Homo sapiens
taaccctggcccttc

SEQ ID NO: 1031722 - DNA, 15 bp, Homo sapiens
ataaccctggccctt

SEQ ID NO: 1031723 - DNA, 15 bp, Homo sapiens
cataaccctggccct

SEQ ID NO: 1031724 - DNA, 15 bp, Homo sapiens
ccataaccctggccc

SEQ ID NO: 1031725 - DNA, 15 bp, Homo sapiens
gccataaccctggcc

SEQ ID NO: 1031726 - DNA, 15 bp, Homo sapiens
agccataaccctggc

SEQ ID NO: 1031727 - DNA, 15 bp, Homo sapiens
cagccataaccctgg

SEQ ID NO: 1031728 - DNA, 15 bp, Homo sapiens
ccagccataaccctg

SEQ ID NO: 1031729 - DNA, 15 bp, Homo sapiens
gccagccataaccct

SEQ ID NO: 1031730 - DNA, 15 bp, Homo sapiens
agccagccataaccc

SEQ ID NO: 1031731 - DNA, 15 bp, Homo sapiens
gagccagccataacc

SEQ ID NO: 1031732 - DNA, 15 bp, Homo sapiens
agagccagccataac

SEQ ID NO: 1031733 - DNA, 15 bp, Homo sapiens
cagagccagccataa

SEQ ID NO: 1031734 - DNA, 15 bp, Homo sapiens
gcagagccagccata

SEQ ID NO: 1031735 - DNA, 15 bp, Homo sapiens
tgcagagccagccat

SEQ ID NO: 1031736 - DNA, 15 bp, Homo sapiens
ttgcagagccagcca

SEQ ID NO: 1031737 - DNA, 15 bp, Homo sapiens
cttgcagagccagcc

SEQ ID NO: 1031738 - DNA, 15 bp, Homo sapiens
ccttgcagagccagc

SEQ ID NO: 1031739 - DNA, 15 bp, Homo sapiens
gccttgcagagccag

SEQ ID NO: 1031740 - DNA, 15 bp, Homo sapiens
agccttgcagagcca

SEQ ID NO: 1031741 - DNA, 15 bp, Homo sapiens
gagccttgcagagcc

SEQ ID NO: 1031742 - DNA, 15 bp, Homo sapiens
agagccttgcagagc

SEQ ID NO: 1031743 - DNA, 15 bp, Homo sapiens
cagagccttgcagag

SEQ ID NO: 1031744 - DNA, 15 bp, Homo sapiens
ccagagccttgcaga

SEQ ID NO: 1031745 - DNA, 15 bp, Homo sapiens
tccagagccttgcag

SEQ ID NO: 1031746 - DNA, 15 bp, Homo sapiens
ctccagagccttgca

SEQ ID NO: 1031747 - DNA, 15 bp, Homo sapiens
cctccagagccttgc

SEQ ID NO: 1031748 - DNA, 15 bp, Homo sapiens
ccctccagagccttg

SEQ ID NO: 1031749 - DNA, 15 bp, Homo sapiens
gccctccagagcctt

SEQ ID NO: 1031750 - DNA, 15 bp, Homo sapiens
tgccctccagagcct

SEQ ID NO: 1031751 - DNA, 15 bp, Homo sapiens
ctgccctccagagcc

SEQ ID NO: 1031752 - DNA, 15 bp, Homo sapiens
cctgccctccagagc

SEQ ID NO: 1031753 - DNA, 15 bp, Homo sapiens
acctgccctccagag

SEQ ID NO: 1031754 - DNA, 15 bp, Homo sapiens
aacctgccctccaga

SEQ ID NO: 1031755 - DNA, 15 bp, Homo sapiens
caacctgccctccag

SEQ ID NO: 1031756 - DNA, 15 bp, Homo sapiens
acaacctgccctcca

SEQ ID NO: 1031757 - DNA, 15 bp, Homo sapiens
gacaacctgccctcc

SEQ ID NO: 1031758 - DNA, 15 bp, Homo sapiens
tgacaacctgccctc

SEQ ID NO: 1031759 - DNA, 15 bp, Homo sapiens
gtgacaacctgccct

SEQ ID NO: 1031760 - DNA, 15 bp, Homo sapiens
agtgacaacctgccc

SEQ ID NO: 1031761 - DNA, 15 bp, Homo sapiens
cagtgacaacctgcc

SEQ ID NO: 1031762 - DNA, 15 bp, Homo sapiens
ccagtgacaacctgc

SEQ ID NO: 1031763 - DNA, 15 bp, Homo sapiens
gccagtgacaacctg

SEQ ID NO: 1031764 - DNA, 15 bp, Homo sapiens
tgccagtgacaacct

SEQ ID NO: 1031765 - DNA, 15 bp, Homo sapiens
ctgccagtgacaacc

SEQ ID NO: 1031766 - DNA, 15 bp, Homo sapiens
cctgccagtgacaac

SEQ ID NO: 1031767 - DNA, 15 bp, Homo sapiens
ccctgccagtgacaa

SEQ ID NO: 1031768 - DNA, 15 bp, Homo sapiens
gccctgccagtgaca

SEQ ID NO: 1031769 - DNA, 15 bp, Homo sapiens
tgccctgccagtgac

SEQ ID NO: 1031770 - DNA, 15 bp, Homo sapiens
ctgccctgccagtga

SEQ ID NO: 1031771 - DNA, 15 bp, Homo sapiens
cctgccctgccagtg

SEQ ID NO: 1031772 - DNA, 15 bp, Homo sapiens
ccctgccctgccagt

SEQ ID NO: 1031773 - DNA, 15 bp, Homo sapiens
tccctgccctgccag

SEQ ID NO: 1031774 - DNA, 15 bp, Homo sapiens
ttccctgccctgcca

SEQ ID NO: 1031775 - DNA, 15 bp, Homo sapiens
tttccctgccctgcc

SEQ ID NO: 1031776 - DNA, 15 bp, Homo sapiens
gtttccctgccctgc

SEQ ID NO: 1031777 - DNA, 15 bp, Homo sapiens
tgtttccctgccctg

SEQ ID NO: 1031778 - DNA, 15 bp, Homo sapiens
atgtttccctgccct

SEQ ID NO: 1031779 - DNA, 15 bp, Homo sapiens
gatgtttccctgccc

SEQ ID NO: 1031780 - DNA, 15 bp, Homo sapiens
agatgtttccctgcc

SEQ ID NO: 1031781 - DNA, 15 bp, Homo sapiens
cagatgtttccctgc

SEQ ID NO: 1031782 - DNA, 15 bp, Homo sapiens
ccagatgtttccctg

SEQ ID NO: 1031783 - DNA, 15 bp, Homo sapiens
tccagatgtttccct

SEQ ID NO: 1031784 - DNA, 15 bp, Homo sapiens
gtccagatgtttccc

SEQ ID NO: 1031785 - DNA, 15 bp, Homo sapiens
tgtccagatgtttcc

SEQ ID NO: 1031786 - DNA, 15 bp, Homo sapiens
ttgtccagatgtttc

SEQ ID NO: 1031787 - DNA, 15 bp, Homo sapiens
cttgtccagatgttt

SEQ ID NO: 1031788 - DNA, 15 bp, Homo sapiens
ccttgtccagatgtt

SEQ ID NO: 1031789 - DNA, 15 bp, Homo sapiens
accttgtccagatgt

SEQ ID NO: 1031790 - DNA, 15 bp, Homo sapiens
aaccttgtccagatg

SEQ ID NO: 1031791 - DNA, 15 bp, Homo sapiens
aaaccttgtccagat

SEQ ID NO: 1031792 - DNA, 15 bp, Homo sapiens
caaaccttgtccaga

SEQ ID NO: 1031793 - DNA, 15 bp, Homo sapiens
ccaaaccttgtccag

SEQ ID NO: 1031794 - DNA, 15 bp, Homo sapiens
tccaaaccttgtcca

SEQ ID NO: 1031795 - DNA, 15 bp, Homo sapiens
ttccaaaccttgtcc

SEQ ID NO: 1031796 - DNA, 15 bp, Homo sapiens
cttccaaaccttgtc

SEQ ID NO: 1031797 - DNA, 15 bp, Homo sapiens
tcttccaaaccttgt

SEQ ID NO: 1031798 - DNA, 15 bp, Homo sapiens
ttcttccaaaccttg

SEQ ID NO: 1031799 - DNA, 15 bp, Homo sapiens
cttcttccaaacctt

SEQ ID NO: 1031800 - DNA, 15 bp, Homo sapiens
gcttcttccaaacct

SEQ ID NO: 1031801 - DNA, 15 bp, Homo sapiens
tgcttcttccaaacc

SEQ ID NO: 1031802 - DNA, 15 bp, Homo sapiens
ctgcttcttccaaac

SEQ ID NO: 1031803 - DNA, 15 bp, Homo sapiens
gctgcttcttccaaa

SEQ ID NO: 1031804 - DNA, 15 bp, Homo sapiens
tgctgcttcttccaa

SEQ ID NO: 1031805 - DNA, 15 bp, Homo sapiens
ctgctgcttcttcca

SEQ ID NO: 1031806 - DNA, 15 bp, Homo sapiens
tctgctgcttcttcc

SEQ ID NO: 1031807 - DNA, 15 bp, Homo sapiens
ctctgctgcttcttc

SEQ ID NO: 1031808 - DNA, 15 bp, Homo sapiens
actctgctgcttctt

SEQ ID NO: 1031809 - DNA, 15 bp, Homo sapiens
cactctgctgcttct

SEQ ID NO: 1031810 - DNA, 15 bp, Homo sapiens
tcactctgctgcttc

SEQ ID NO: 1031811 - DNA, 15 bp, Homo sapiens
ctcactctgctgctt

SEQ ID NO: 1031812 - DNA, 15 bp, Homo sapiens
cctcactctgctgct

SEQ ID NO: 1031813 - DNA, 15 bp, Homo sapiens
tcctcactctgctgc

SEQ ID NO: 1031814 - DNA, 15 bp, Homo sapiens
ttcctcactctgctg

SEQ ID NO: 1031815 - DNA, 15 bp, Homo sapiens
attcctcactctgct

SEQ ID NO: 1031816 - DNA, 15 bp, Homo sapiens
tattcctcactctgc

SEQ ID NO: 1031817 - DNA, 15 bp, Homo sapiens
gtattcctcactctg

SEQ ID NO: 1031818 - DNA, 15 bp, Homo sapiens
agtattcctcactct

SEQ ID NO: 1031819 - DNA, 15 bp, Homo sapiens
aagtattcctcactc

SEQ ID NO: 1031820 - DNA, 15 bp, Homo sapiens
caagtattcctcact

SEQ ID NO: 1031821 - DNA, 15 bp, Homo sapiens
ccaagtattcctcac

SEQ ID NO: 1031822 - DNA, 15 bp, Homo sapiens
cccaagtattcctca

SEQ ID NO: 1031823 - DNA, 15 bp, Homo sapiens
tcccaagtattcctc

SEQ ID NO: 1031824 - DNA, 15 bp, Homo sapiens
ttcccaagtattcct

SEQ ID NO: 1031825 - DNA, 15 bp, Homo sapiens
gttcccaagtattcc

SEQ ID NO: 1031826 - DNA, 15 bp, Homo sapiens
tgttcccaagtattc

SEQ ID NO: 1031827 - DNA, 15 bp, Homo sapiens
ctgttcccaagtatt

SEQ ID NO: 1031828 - DNA, 15 bp, Homo sapiens
tctgttcccaagtat

SEQ ID NO: 1031829 - DNA, 15 bp, Homo sapiens
ctctgttcccaagta

SEQ ID NO: 1031830 - DNA, 15 bp, Homo sapiens
cctctgttcccaagt

SEQ ID NO: 1031831 - DNA, 15 bp, Homo sapiens
gcctctgttcccaag

SEQ ID NO: 1031832 - DNA, 15 bp, Homo sapiens
agcctctgttcccaa

SEQ ID NO: 1031833 - DNA, 15 bp, Homo sapiens
aagcctctgttccca

SEQ ID NO: 1031834 - DNA, 15 bp, Homo sapiens
caagcctctgttccc

SEQ ID NO: 1031835 - DNA, 15 bp, Homo sapiens
tcaagcctctgttcc

SEQ ID NO: 1031836 - DNA, 15 bp, Homo sapiens
gtcaagcctctgttc

SEQ ID NO: 1031837 - DNA, 15 bp, Homo sapiens
agtcaagcctctgtt

SEQ ID NO: 1031838 - DNA, 15 bp, Homo sapiens
aagtcaagcctctgt

SEQ ID NO: 1031839 - DNA, 15 bp, Homo sapiens
gaagtcaagcctctg

SEQ ID NO: 1031840 - DNA, 15 bp, Homo sapiens
agaagtcaagcctct

SEQ ID NO: 1031841 - DNA, 15 bp, Homo sapiens
cagaagtcaagcctc

SEQ ID NO: 1031842 - DNA, 15 bp, Homo sapiens
acagaagtcaagcct

SEQ ID NO: 1031843 - DNA, 15 bp, Homo sapiens
gacagaagtcaagcc

SEQ ID NO: 1031844 - DNA, 15 bp, Homo sapiens
ggacagaagtcaagc

SEQ ID NO: 1031845 - DNA, 15 bp, Homo sapiens
aggacagaagtcaag

SEQ ID NO: 1031846 - DNA, 15 bp, Homo sapiens
gaggacagaagtcaa

SEQ ID NO: 1031847 - DNA, 15 bp, Homo sapiens
tgaggacagaagtca

SEQ ID NO: 1031848 - DNA, 15 bp, Homo sapiens
ttgaggacagaagtc

SEQ ID NO: 1031849 - DNA, 15 bp, Homo sapiens
cttgaggacagaagt

SEQ ID NO: 1031850 - DNA, 15 bp, Homo sapiens
tcttgaggacagaag

SEQ ID NO: 1031851 - DNA, 15 bp, Homo sapiens
ttcttgaggacagaa

SEQ ID NO: 1031852 - DNA, 15 bp, Homo sapiens
cttcttgaggacaga

SEQ ID NO: 1031853 - DNA, 15 bp, Homo sapiens
ccttcttgaggacag

SEQ ID NO: 1031854 - DNA, 15 bp, Homo sapiens
accttcttgaggaca

SEQ ID NO: 1031855 - DNA, 15 bp, Homo sapiens
caccttcttgaggac

SEQ ID NO: 1031856 - DNA, 15 bp, Homo sapiens
acaccttcttgagga

SEQ ID NO: 1031857 - DNA, 15 bp, Homo sapiens
aacaccttcttgagg

SEQ ID NO: 1031858 - DNA, 15 bp, Homo sapiens
caacaccttcttgag

SEQ ID NO: 1031859 - DNA, 15 bp, Homo sapiens
gcaacaccttcttga

SEQ ID NO: 1031860 - DNA, 15 bp, Homo sapiens
agcaacaccttcttg

SEQ ID NO: 1031861 - DNA, 15 bp, Homo sapiens
cagcaacaccttctt

SEQ ID NO: 1031862 - DNA, 15 bp, Homo sapiens
gcagcaacaccttct

SEQ ID NO: 1031863 - DNA, 15 bp, Homo sapiens
ggcagcaacaccttc

SEQ ID NO: 1031864 - DNA, 15 bp, Homo sapiens
aggcagcaacacctt

SEQ ID NO: 1031865 - DNA, 15 bp, Homo sapiens
gaggcagcaacacct

SEQ ID NO: 1031866 - DNA, 15 bp, Homo sapiens
ggaggcagcaacacc

SEQ ID NO: 1031867 - DNA, 15 bp, Homo sapiens
gggaggcagcaacac

SEQ ID NO: 1031868 - DNA, 15 bp, Homo sapiens
agggaggcagcaaca

SEQ ID NO: 1031869 - DNA, 15 bp, Homo sapiens
gagggaggcagcaac

SEQ ID NO: 1031870 - DNA, 15 bp, Homo sapiens
agagggaggcagcaa

SEQ ID NO: 1031871 - DNA, 15 bp, Homo sapiens
tagagggaggcagca

SEQ ID NO: 1031872 - DNA, 15 bp, Homo sapiens
gtagagggaggcagc

SEQ ID NO: 1031873 - DNA, 15 bp, Homo sapiens
ggtagagggaggcag

SEQ ID NO: 1031874 - DNA, 15 bp, Homo sapiens
tggtagagggaggca

SEQ ID NO: 1031875 - DNA, 15 bp, Homo sapiens
gtggtagagggaggc

SEQ ID NO: 1031876 - DNA, 15 bp, Homo sapiens
tgtggtagagggagg

SEQ ID NO: 1031877 - DNA, 15 bp, Homo sapiens
gtgtggtagagggag

SEQ ID NO: 1031878 - DNA, 15 bp, Homo sapiens
tgtgtggtagaggga

SEQ ID NO: 1031879 - DNA, 15 bp, Homo sapiens
gtgtgtggtagaggg

SEQ ID NO: 1031880 - DNA, 15 bp, Homo sapiens
tgtgtgtggtagagg

SEQ ID NO: 1031881 - DNA, 15 bp, Homo sapiens
gtgtgtgtggtagag

SEQ ID NO: 1031882 - DNA, 15 bp, Homo sapiens
ggtgtgtgtggtaga

SEQ ID NO: 1031883 - DNA, 15 bp, Homo sapiens
aggtgtgtgtggtag

SEQ ID NO: 1031884 - DNA, 15 bp, Homo sapiens
aaggtgtgtgtggta

SEQ ID NO: 1031885 - DNA, 15 bp, Homo sapiens
caaggtgtgtgtggt

SEQ ID NO: 1031886 - DNA, 15 bp, Homo sapiens
acaaggtgtgtgtgg

SEQ ID NO: 1031887 - DNA, 15 bp, Homo sapiens
tacaaggtgtgtgtg

SEQ ID NO: 1031888 - DNA, 15 bp, Homo sapiens
ttacaaggtgtgtgt

SEQ ID NO: 1031889 - DNA, 15 bp, Homo sapiens
attacaaggtgtgtg

SEQ ID NO: 1031890 - DNA, 15 bp, Homo sapiens
gattacaaggtgtgt

SEQ ID NO: 1031891 - DNA, 15 bp, Homo sapiens
agattacaaggtgtg

SEQ ID NO: 1031892 - DNA, 15 bp, Homo sapiens
gagattacaaggtgt

SEQ ID NO: 1031893 - DNA, 15 bp, Homo sapiens
ggagattacaaggtg

SEQ ID NO: 1031894 - DNA, 15 bp, Homo sapiens
tggagattacaaggt

SEQ ID NO: 1031895 - DNA, 15 bp, Homo sapiens
atggagattacaagg

SEQ ID NO: 1031896 - DNA, 15 bp, Homo sapiens
catggagattacaag

SEQ ID NO: 1031897 - DNA, 15 bp, Homo sapiens
acatggagattacaa

SEQ ID NO: 1031898 - DNA, 15 bp, Homo sapiens
gacatggagattaca

SEQ ID NO: 1031899 - DNA, 15 bp, Homo sapiens
tgacatggagattac

SEQ ID NO: 1031900 - DNA, 15 bp, Homo sapiens
gtgacatggagatta

SEQ ID NO: 1031901 - DNA, 15 bp, Homo sapiens
ggtgacatggagatt

SEQ ID NO: 1031902 - DNA, 15 bp, Homo sapiens
aggtgacatggagat

SEQ ID NO: 1031903 - DNA, 15 bp, Homo sapiens
caggtgacatggaga

SEQ ID NO: 1031904 - DNA, 15 bp, Homo sapiens
ccaggtgacatggag

SEQ ID NO: 1031905 - DNA, 15 bp, Homo sapiens
tccaggtgacatgga

SEQ ID NO: 1031906 - DNA, 15 bp, Homo sapiens
atccaggtgacatgg

SEQ ID NO: 1031907 - DNA, 15 bp, Homo sapiens
aatccaggtgacatg

SEQ ID NO: 1031908 - DNA, 15 bp, Homo sapiens
gaatccaggtgacat

SEQ ID NO: 1031909 - DNA, 15 bp, Homo sapiens
tgaatccaggtgaca

SEQ ID NO: 1031910 - DNA, 15 bp, Homo sapiens
gtgaatccaggtgac

SEQ ID NO: 1031911 - DNA, 15 bp, Homo sapiens
tgtgaatccaggtga

SEQ ID NO: 1031912 - DNA, 15 bp, Homo sapiens
ttgtgaatccaggtg

SEQ ID NO: 1031913 - DNA, 15 bp, Homo sapiens
cttgtgaatccaggt

SEQ ID NO: 1031914 - DNA, 15 bp, Homo sapiens
tcttgtgaatccagg

SEQ ID NO: 1031915 - DNA, 15 bp, Homo sapiens
ttcttgtgaatccag

SEQ ID NO: 1031916 - DNA, 15 bp, Homo sapiens
gttcttgtgaatcca

SEQ ID NO: 1031917 - DNA, 15 bp, Homo sapiens
agttcttgtgaatcc

SEQ ID NO: 1031918 - DNA, 15 bp, Homo sapiens
gagttcttgtgaatc

SEQ ID NO: 1031919 - DNA, 15 bp, Homo sapiens
tggagttcttgtgaa

SEQ ID NO: 1031920 - DNA, 15 bp, Homo sapiens
ctggagttcttgtga

SEQ ID NO: 1031921 - DNA, 15 bp, Homo sapiens
tctggagttcttgtg

SEQ ID NO: 1031922 - DNA, 15 bp, Homo sapiens
gtctggagttcttgt

SEQ ID NO: 1031923 - DNA, 15 bp, Homo sapiens
tgtctggagttcttg

SEQ ID NO: 1031924 - DNA, 15 bp, Homo sapiens
ttgtctggagttctt

SEQ ID NO: 1031925 - DNA, 15 bp, Homo sapiens
cttgtctggagttct

SEQ ID NO: 1031926 - DNA, 15 bp, Homo sapiens
tcttgtctggagttc

SEQ ID NO: 1031927 - DNA, 15 bp, Homo sapiens
atcttgtctggagtt

SEQ ID NO: 1031928 - DNA, 15 bp, Homo sapiens
catcttgtctggagt

SEQ ID NO: 1031929 - DNA, 15 bp, Homo sapiens
ccatcttgtctggag

SEQ ID NO: 1031930 - DNA, 15 bp, Homo sapiens
gccatcttgtctgga

SEQ ID NO: 1031931 - DNA, 15 bp, Homo sapiens
ggccatcttgtctgg

SEQ ID NO: 1031932 - DNA, 15 bp, Homo sapiens
aggccatcttgtctg

SEQ ID NO: 1031933 - DNA, 15 bp, Homo sapiens
gaggccatcttgtct

SEQ ID NO: 1031934 - DNA, 15 bp, Homo sapiens
agaggccatcttgtc

SEQ ID NO: 1031935 - DNA, 15 bp, Homo sapiens
cagaggccatcttgt

SEQ ID NO: 1031936 - DNA, 15 bp, Homo sapiens
acagaggccatcttg

SEQ ID NO: 1031937 - DNA, 15 bp, Homo sapiens
gacagaggccatctt

SEQ ID NO: 1031938 - DNA, 15 bp, Homo sapiens
agacagaggccatct

SEQ ID NO: 1031939 - DNA, 15 bp, Homo sapiens
tagacagaggccatc

SEQ ID NO: 1031940 - DNA, 15 bp, Homo sapiens
atagacagaggccat

SEQ ID NO: 1031941 - DNA, 15 bp, Homo sapiens
aatagacagaggcca

SEQ ID NO: 1031942 - DNA, 15 bp, Homo sapiens
caatagacagaggcc

SEQ ID NO: 1031943 - DNA, 15 bp, Homo sapiens
tcaatagacagaggc

SEQ ID NO: 1031944 - DNA, 15 bp, Homo sapiens
atcaatagacagagg

SEQ ID NO: 1031945 - DNA, 15 bp, Homo sapiens
gatcaatagacagag

SEQ ID NO: 1031946 - DNA, 15 bp, Homo sapiens
agatcaatagacaga

SEQ ID NO: 1031947 - DNA, 15 bp, Homo sapiens
cagatcaatagacag

SEQ ID NO: 1031948 - DNA, 15 bp, Homo sapiens
acagatcaatagaca

SEQ ID NO: 1031949 - DNA, 15 bp, Homo sapiens
gacagatcaatagac

SEQ ID NO: 1031950 - DNA, 15 bp, Homo sapiens
ggacagatcaataga

SEQ ID NO: 1031951 - DNA, 15 bp, Homo sapiens
gggacagatcaatag

SEQ ID NO: 1031952 - DNA, 15 bp, Homo sapiens
ggggacagatcaata

SEQ ID NO: 1031953 - DNA, 15 bp, Homo sapiens
cggggacagatcaat

SEQ ID NO: 1031954 - DNA, 15 bp, Homo sapiens
acggggacagatcaa

SEQ ID NO: 1031955 - DNA, 15 bp, Homo sapiens
cacggggacagatca

SEQ ID NO: 1031956 - DNA, 15 bp, Homo sapiens
tcacggggacagatc

SEQ ID NO: 1031957 - DNA, 15 bp, Homo sapiens
gtcacggggacagat

SEQ ID NO: 1031958 - DNA, 15 bp, Homo sapiens
ggtcacggggacaga

SEQ ID NO: 1031959 - DNA, 15 bp, Homo sapiens
tggtcacggggacag

SEQ ID NO: 1031960 - DNA, 15 bp, Homo sapiens
gtggtcacggggaca

SEQ ID NO: 1031961 - DNA, 15 bp, Homo sapiens
tgtggtcacggggac

SEQ ID NO: 1031962 - DNA, 15 bp, Homo sapiens
gtgtggtcacgggga

SEQ ID NO: 1031963 - DNA, 15 bp, Homo sapiens
tgtgtggtcacgggg

SEQ ID NO: 1031964 - DNA, 15 bp, Homo sapiens
ctgtgtggtcacggg

SEQ ID NO: 1031965 - DNA, 15 bp, Homo sapiens
tctgtgtggtcacgg

SEQ ID NO: 1031966 - DNA, 15 bp, Homo sapiens
ttctgtgtggtcacg

SEQ ID NO: 1031967 - DNA, 15 bp, Homo sapiens
attctgtgtggtcac

SEQ ID NO: 1031968 - DNA, 15 bp, Homo sapiens
aattctgtgtggtca

SEQ ID NO: 1031969 - DNA, 15 bp, Homo sapiens
caattctgtgtggtc

SEQ ID NO: 1031970 - DNA, 15 bp, Homo sapiens
gcaattctgtgtggt

SEQ ID NO: 1031971 - DNA, 15 bp, Homo sapiens
agcaattctgtgtgg

SEQ ID NO: 1031972 - DNA, 15 bp, Homo sapiens
gagcaattctgtgtg

SEQ ID NO: 1031973 - DNA, 15 bp, Homo sapiens
ggagcaattctgtgt

SEQ ID NO: 1031974 - DNA, 15 bp, Homo sapiens
gggagcaattctgtg

SEQ ID NO: 1031975 - DNA, 15 bp, Homo sapiens
ggggagcaattctgt

SEQ ID NO: 1031976 - DNA, 15 bp, Homo sapiens
aggggagcaattctg

SEQ ID NO: 1031977 - DNA, 15 bp, Homo sapiens
gaggggagcaattct

SEQ ID NO: 1031978 - DNA, 15 bp, Homo sapiens
tgaggggagcaattc

SEQ ID NO: 1031979 - DNA, 15 bp, Homo sapiens
ctgaggggagcaatt

SEQ ID NO: 1031980 - DNA, 15 bp, Homo sapiens
cctgaggggagcaat

SEQ ID NO: 1031981 - DNA, 15 bp, Homo sapiens
acctgaggggagcaa

SEQ ID NO: 1031982 - DNA, 15 bp, Homo sapiens
cacctgaggggagca

SEQ ID NO: 1031983 - DNA, 15 bp, Homo sapiens
ccacctgaggggagc

SEQ ID NO: 1031984 - DNA, 15 bp, Homo sapiens
accacctgaggggag

SEQ ID NO: 1031985 - DNA, 15 bp, Homo sapiens
aaccacctgagggga

SEQ ID NO: 1031986 - DNA, 15 bp, Homo sapiens
taaccacctgagggg

SEQ ID NO: 1031987 - DNA, 15 bp, Homo sapiens
gtaaccacctgaggg

SEQ ID NO: 1031988 - DNA, 15 bp, Homo sapiens
ggtaaccacctgagg

SEQ ID NO: 1031989 - DNA, 15 bp, Homo sapiens
tggtaaccacctgag

SEQ ID NO: 1031990 - DNA, 15 bp, Homo sapiens
ttggtaaccacctga

SEQ ID NO: 1031991 - DNA, 15 bp, Homo sapiens
cttggtaaccacctg

SEQ ID NO: 1031992 - DNA, 15 bp, Homo sapiens
acttggtaaccacct

SEQ ID NO: 1031993 - DNA, 15 bp, Homo sapiens
cacttggtaaccacc

SEQ ID NO: 1031994 - DNA, 15 bp, Homo sapiens
ccacttggtaaccac

SEQ ID NO: 1031995 - DNA, 15 bp, Homo sapiens
tccacttggtaacca

SEQ ID NO: 1031996 - DNA, 15 bp, Homo sapiens
ttccacttggtaacc

SEQ ID NO: 1031997 - DNA, 15 bp, Homo sapiens
attccacttggtaac

SEQ ID NO: 1031998 - DNA, 15 bp, Homo sapiens
gattccacttggtaa

SEQ ID NO: 1031999 - DNA, 15 bp, Homo sapiens
ggattccacttggta

SEQ ID NO: 1032000 - DNA, 15 bp, Homo sapiens
aggattccacttggt

SEQ ID NO: 1032001 - DNA, 15 bp, Homo sapiens
caggattccacttgg

SEQ ID NO: 1032002 - DNA, 15 bp, Homo sapiens
acaggattccacttg

SEQ ID NO: 1032003 - DNA, 15 bp, Homo sapiens
aacaggattccactt

SEQ ID NO: 1032004 - DNA, 15 bp, Homo sapiens
aaacaggattccact

SEQ ID NO: 1032005 - DNA, 15 bp, Homo sapiens
aaaacaggattccac

SEQ ID NO: 1032006 - DNA, 15 bp, Homo sapiens
caaaacaggattcca

SEQ ID NO: 1032007 - DNA, 15 bp, Homo sapiens
acaaaacaggattcc

SEQ ID NO: 1032008 - DNA, 15 bp, Homo sapiens
cacaaaacaggattc

SEQ ID NO: 1032009 - DNA, 15 bp, Homo sapiens
acacaaaacaggatt

SEQ ID NO: 1032010 - DNA, 15 bp, Homo sapiens
cacacaaaacaggat

SEQ ID NO: 1032011 - DNA, 15 bp, Homo sapiens
acacacaaaacagga

SEQ ID NO: 1032012 - DNA, 15 bp, Homo sapiens
cacacacaaaacagg

SEQ ID NO: 1032013 - DNA, 15 bp, Homo sapiens
tcacacacaaaacag

SEQ ID NO: 1032014 - DNA, 15 bp, Homo sapiens
ttcacacacaaaaca

SEQ ID NO: 1032015 - DNA, 15 bp, Homo sapiens
attcacacacaaaac

SEQ ID NO: 1032016 - DNA, 15 bp, Homo sapiens
tattcacacacaaaa

SEQ ID NO: 1032017 - DNA, 15 bp, Homo sapiens
ttattcacacacaaa

SEQ ID NO: 1032018 - DNA, 15 bp, Homo sapiens
attattcacacacaa

SEQ ID NO: 1032019 - DNA, 15 bp, Homo sapiens
aattattcacacaca

SEQ ID NO: 1032020 - DNA, 15 bp, Homo sapiens
aaattattcacacac

SEQ ID NO: 1032021 - DNA, 15 bp, Homo sapiens
gaaattattcacaca

SEQ ID NO: 1032022 - DNA, 15 bp, Homo sapiens
ggaaattattcacac

SEQ ID NO: 1032023 - DNA, 15 bp, Homo sapiens
tggaaattattcaca

SEQ ID NO: 1032024 - DNA, 15 bp, Homo sapiens
gtggaaattattcac

SEQ ID NO: 1032025 - DNA, 15 bp, Homo sapiens
ggtggaaattattca

SEQ ID NO: 1032026 - DNA, 15 bp, Homo sapiens
tggtggaaattattc

SEQ ID NO: 1032027 - DNA, 15 bp, Homo sapiens
ttggtggaaattatt

SEQ ID NO: 1032028 - DNA, 15 bp, Homo sapiens
tttggtggaaattat

SEQ ID NO: 1032029 - DNA, 15 bp, Homo sapiens
ttttggtggaaatta

SEQ ID NO: 1032030 - DNA, 15 bp, Homo sapiens
cttttggtggaaatt

SEQ ID NO: 1032031 - DNA, 15 bp, Homo sapiens
ccttttggtggaaat

SEQ ID NO: 1032032 - DNA, 15 bp, Homo sapiens
gccttttggtggaaa

SEQ ID NO: 1032033 - DNA, 15 bp, Homo sapiens
agccttttggtggaa

SEQ ID NO: 1032034 - DNA, 15 bp, Homo sapiens
aagccttttggtgga

SEQ ID NO: 1032035 - DNA, 15 bp, Homo sapiens
gaagccttttggtgg

SEQ ID NO: 1032036 - DNA, 15 bp, Homo sapiens
ggaagccttttggtg

SEQ ID NO: 1032037 - DNA, 15 bp, Homo sapiens
aggaagccttttggt

SEQ ID NO: 1032038 - DNA, 15 bp, Homo sapiens
aaggaagccttttgg

SEQ ID NO: 1032039 - DNA, 15 bp, Homo sapiens
gaaggaagccttttg

SEQ ID NO: 1032040 - DNA, 15 bp, Homo sapiens
ggaaggaagcctttt

SEQ ID NO: 1032041 - DNA, 15 bp, Homo sapiens
tggaaggaagccttt

SEQ ID NO: 1032042 - DNA, 15 bp, Homo sapiens
ctggaaggaagcctt

SEQ ID NO: 1032043 - DNA, 15 bp, Homo sapiens
actggaaggaagcct

SEQ ID NO: 1032044 - DNA, 15 bp, Homo sapiens
aactggaaggaagcc

SEQ ID NO: 1032045 - DNA, 15 bp, Homo sapiens
gaactggaaggaagc

SEQ ID NO: 1032046 - DNA, 15 bp, Homo sapiens
ggaactggaaggaag

SEQ ID NO: 1032047 - DNA, 15 bp, Homo sapiens
tggaactggaaggaa

SEQ ID NO: 1032048 - DNA, 15 bp, Homo sapiens
gtggaactggaagga

SEQ ID NO: 1032049 - DNA, 15 bp, Homo sapiens
agtggaactggaagg

SEQ ID NO: 1032050 - DNA, 15 bp, Homo sapiens
cagtggaactggaag

SEQ ID NO: 1032051 - DNA, 15 bp, Homo sapiens
gcagtggaactggaa

SEQ ID NO: 1032052 - DNA, 15 bp, Homo sapiens
ggcagtggaactgga

SEQ ID NO: 1032053 - DNA, 15 bp, Homo sapiens
tggcagtggaactgg

SEQ ID NO: 1032054 - DNA, 15 bp, Homo sapiens
atggcagtggaactg

SEQ ID NO: 1032055 - DNA, 15 bp, Homo sapiens
gatggcagtggaact

SEQ ID NO: 1032056 - DNA, 15 bp, Homo sapiens
ggatggcagtggaac

SEQ ID NO: 1032057 - DNA, 15 bp, Homo sapiens
tggatggcagtggaa

SEQ ID NO: 1032058 - DNA, 15 bp, Homo sapiens
ttggatggcagtgga

SEQ ID NO: 1032059 - DNA, 15 bp, Homo sapiens
tttggatggcagtgg

SEQ ID NO: 1032060 - DNA, 15 bp, Homo sapiens
atttggatggcagtg

SEQ ID NO: 1032061 - DNA, 15 bp, Homo sapiens
aatttggatggcagt

SEQ ID NO: 1032062 - DNA, 15 bp, Homo sapiens
aaatttggatggcag

SEQ ID NO: 1032063 - DNA, 15 bp, Homo sapiens
taaatttggatggca

SEQ ID NO: 1032064 - DNA, 15 bp, Homo sapiens
ttaaatttggatggc

SEQ ID NO: 1032065 - DNA, 15 bp, Homo sapiens
cttaaatttggatgg

SEQ ID NO: 1032066 - DNA, 15 bp, Homo sapiens
acttaaatttggatg

SEQ ID NO: 1032067 - DNA, 15 bp, Homo sapiens
aacttaaatttggat

SEQ ID NO: 1032068 - DNA, 15 bp, Homo sapiens
aaacttaaatttgga

SEQ ID NO: 1032069 - DNA, 15 bp, Homo sapiens
taaacttaaatttgg

SEQ ID NO: 1032070 - DNA, 15 bp, Homo sapiens
ataaacttaaatttg

SEQ ID NO: 1032071 - DNA, 15 bp, Homo sapiens
tataaacttaaattt

SEQ ID NO: 1032072 - DNA, 15 bp, Homo sapiens
ctataaacttaaatt

SEQ ID NO: 1032073 - DNA, 15 bp, Homo sapiens
cctataaacttaaat

SEQ ID NO: 1032074 - DNA, 15 bp, Homo sapiens
acctataaacttaaa

SEQ ID NO: 1032075 - DNA, 15 bp, Homo sapiens
aacctataaacttaa

SEQ ID NO: 1032076 - DNA, 15 bp, Homo sapiens
caacctataaactta

SEQ ID NO: 1032077 - DNA, 15 bp, Homo sapiens
ccaacctataaactt

SEQ ID NO: 1032078 - DNA, 15 bp, Homo sapiens
gccaacctataaact

SEQ ID NO: 1032079 - DNA, 15 bp, Homo sapiens
tgccaacctataaac

SEQ ID NO: 1032080 - DNA, 15 bp, Homo sapiens
ttgccaacctataaa

SEQ ID NO: 1032081 - DNA, 15 bp, Homo sapiens
gttgccaacctataa

SEQ ID NO: 1032082 - DNA, 15 bp, Homo sapiens
agttgccaacctata

SEQ ID NO: 1032083 - DNA, 15 bp, Homo sapiens
aagttgccaacctat

SEQ ID NO: 1032084 - DNA, 15 bp, Homo sapiens
aaagttgccaaccta

SEQ ID NO: 1032085 - DNA, 15 bp, Homo sapiens
taaagttgccaacct

SEQ ID NO: 1032086 - DNA, 15 bp, Homo sapiens
ttaaagttgccaacc

SEQ ID NO: 1032087 - DNA, 15 bp, Homo sapiens
tttaaagttgccaac

SEQ ID NO: 1032088 - DNA, 15 bp, Homo sapiens
ctttaaagttgccaa

SEQ ID NO: 1032089 - DNA, 15 bp, Homo sapiens
gctttaaagttgcca

SEQ ID NO: 1032090 - DNA, 15 bp, Homo sapiens
agctttaaagttgcc

SEQ ID NO: 1032091 - DNA, 15 bp, Homo sapiens
aagctttaaagttgc

SEQ ID NO: 1032092 - DNA, 15 bp, Homo sapiens
aaagctttaaagttg

SEQ ID NO: 1032093 - DNA, 15 bp, Homo sapiens
taaagctttaaagtt

SEQ ID NO: 1032094 - DNA, 15 bp, Homo sapiens
ctaaagctttaaagt

SEQ ID NO: 1032095 - DNA, 15 bp, Homo sapiens
tctaaagctttaaag

SEQ ID NO: 1032096 - DNA, 15 bp, Homo sapiens
ctctaaagctttaaa

SEQ ID NO: 1032097 - DNA, 15 bp, Homo sapiens
tctctaaagctttaa

SEQ ID NO: 1032098 - DNA, 15 bp, Homo sapiens
ctctctaaagcttta

SEQ ID NO: 1032099 - DNA, 15 bp, Homo sapiens
actctctaaagcttt

SEQ ID NO: 1032100 - DNA, 15 bp, Homo sapiens
cactctctaaagctt

SEQ ID NO: 1032101 - DNA, 15 bp, Homo sapiens
acactctctaaagct

SEQ ID NO: 1032102 - DNA, 15 bp, Homo sapiens
aacactctctaaagc

SEQ ID NO: 1032103 - DNA, 15 bp, Homo sapiens
aaacactctctaaag

SEQ ID NO: 1032104 - DNA, 15 bp, Homo sapiens
taaacactctctaaa

SEQ ID NO: 1032105 - DNA, 15 bp, Homo sapiens
ctaaacactctctaa

SEQ ID NO: 1032106 - DNA, 15 bp, Homo sapiens
gctaaacactctcta

SEQ ID NO: 1032107 - DNA, 15 bp, Homo sapiens
agctaaacactctct

SEQ ID NO: 1032108 - DNA, 15 bp, Homo sapiens
aagctaaacactctc

SEQ ID NO: 1032109 - DNA, 15 bp, Homo sapiens
caagctaaacactct

SEQ ID NO: 1032110 - DNA, 15 bp, Homo sapiens
tcaagctaaacactc

SEQ ID NO: 1032111 - DNA, 15 bp, Homo sapiens
ttcaagctaaacact

SEQ ID NO: 1032112 - DNA, 15 bp, Homo sapiens
attcaagctaaacac

SEQ ID NO: 1032113 - DNA, 15 bp, Homo sapiens
aattcaagctaaaca

SEQ ID NO: 1032114 - DNA, 15 bp, Homo sapiens
aaattcaagctaaac

SEQ ID NO: 1032115 - DNA, 15 bp, Homo sapiens
gaaattcaagctaaa

SEQ ID NO: 1032116 - DNA, 15 bp, Homo sapiens
agaaattcaagctaa

SEQ ID NO: 1032117 - DNA, 15 bp, Homo sapiens
gagaaattcaagcta

SEQ ID NO: 1032118 - DNA, 15 bp, Homo sapiens
tgagaaattcaagct

SEQ ID NO: 1032119 - DNA, 15 bp, Homo sapiens
gtgagaaattcaagc

SEQ ID NO: 1032120 - DNA, 15 bp, Homo sapiens
agtgagaaattcaag

SEQ ID NO: 1032121 - DNA, 15 bp, Homo sapiens
aagtgagaaattcaa

SEQ ID NO: 1032122 - DNA, 15 bp, Homo sapiens
aaagtgagaaattca

SEQ ID NO: 1032123 - DNA, 15 bp, Homo sapiens
taaagtgagaaattc

SEQ ID NO: 1032124 - DNA, 15 bp, Homo sapiens
ataaagtgagaaatt

SEQ ID NO: 1032125 - DNA, 15 bp, Homo sapiens
cataaagtgagaaat

SEQ ID NO: 1032126 - DNA, 15 bp, Homo sapiens
ccataaagtgagaaa

SEQ ID NO: 1032127 - DNA, 15 bp, Homo sapiens
cccataaagtgagaa

SEQ ID NO: 1032128 - DNA, 15 bp, Homo sapiens
acccataaagtgaga

SEQ ID NO: 1032129 - DNA, 15 bp, Homo sapiens
cacccataaagtgag

SEQ ID NO: 1032130 - DNA, 15 bp, Homo sapiens
ccacccataaagtga

SEQ ID NO: 1032131 - DNA, 15 bp, Homo sapiens
cccacccataaagtg

SEQ ID NO: 1032132 - DNA, 15 bp, Homo sapiens
ccccacccataaagt

SEQ ID NO: 1032133 - DNA, 15 bp, Homo sapiens
tccccacccataaag

SEQ ID NO: 1032134 - DNA, 15 bp, Homo sapiens
ttccccacccataaa

SEQ ID NO: 1032135 - DNA, 15 bp, Homo sapiens
tttccccacccataa

SEQ ID NO: 1032136 - DNA, 15 bp, Homo sapiens
gtttccccacccata

SEQ ID NO: 1032137 - DNA, 15 bp, Homo sapiens
agtttccccacccat

SEQ ID NO: 1032138 - DNA, 15 bp, Homo sapiens
cagtttccccaccca

SEQ ID NO: 1032139 - DNA, 15 bp, Homo sapiens
tcagtttccccaccc

SEQ ID NO: 1032140 - DNA, 15 bp, Homo sapiens
acctcagtttcccca

SEQ ID NO: 1032141 - DNA, 15 bp, Homo sapiens
gacctcagtttcccc

SEQ ID NO: 1032142 - DNA, 15 bp, Homo sapiens
agacctcagtttccc

SEQ ID NO: 1032143 - DNA, 15 bp, Homo sapiens
tagacctcagtttcc

SEQ ID NO: 1032144 - DNA, 15 bp, Homo sapiens
ctagacctcagtttc

SEQ ID NO: 1032145 - DNA, 15 bp, Homo sapiens
cctagacctcagttt

SEQ ID NO: 1032146 - DNA, 15 bp, Homo sapiens
acctagacctcagtt

SEQ ID NO: 1032147 - DNA, 15 bp, Homo sapiens
aacctagacctcagt

SEQ ID NO: 1032148 - DNA, 15 bp, Homo sapiens
caacctagacctcag

SEQ ID NO: 1032149 - DNA, 15 bp, Homo sapiens
acaacctagacctca

SEQ ID NO: 1032150 - DNA, 15 bp, Homo sapiens
aacaacctagacctc

SEQ ID NO: 1032151 - DNA, 15 bp, Homo sapiens
taacaacctagacct

SEQ ID NO: 1032152 - DNA, 15 bp, Homo sapiens
ttaacaacctagacc

SEQ ID NO: 1032153 - DNA, 15 bp, Homo sapiens
tttaacaacctagac

SEQ ID NO: 1032154 - DNA, 15 bp, Homo sapiens
atttaacaacctaga

SEQ ID NO: 1032155 - DNA, 15 bp, Homo sapiens
catttaacaacctag

SEQ ID NO: 1032156 - DNA, 15 bp, Homo sapiens
tcatttaacaaccta

SEQ ID NO: 1032157 - DNA, 15 bp, Homo sapiens
ttcatttaacaacct

SEQ ID NO: 1032158 - DNA, 15 bp, Homo sapiens
attcatttaacaacc

SEQ ID NO: 1032159 - DNA, 15 bp, Homo sapiens
aattcatttaacaac

SEQ ID NO: 1032160 - DNA, 15 bp, Homo sapiens
caattcatttaacaa

SEQ ID NO: 1032161 - DNA, 15 bp, Homo sapiens
acaattcatttaaca

SEQ ID NO: 1032162 - DNA, 15 bp, Homo sapiens
gacaattcatttaac

SEQ ID NO: 1032163 - DNA, 15 bp, Homo sapiens
ggacaattcatttaa

SEQ ID NO: 1032164 - DNA, 15 bp, Homo sapiens
tggacaattcattta

SEQ ID NO: 1032165 - DNA, 15 bp, Homo sapiens
ttggacaattcattt

SEQ ID NO: 1032166 - DNA, 15 bp, Homo sapiens
cttggacaattcatt

SEQ ID NO: 1032167 - DNA, 15 bp, Homo sapiens
tcttggacaattcat

SEQ ID NO: 1032168 - DNA, 15 bp, Homo sapiens
atcttggacaattca

SEQ ID NO: 1032169 - DNA, 15 bp, Homo sapiens
gatcttggacaattc

SEQ ID NO: 1032170 - DNA, 15 bp, Homo sapiens
tgatcttggacaatt

SEQ ID NO: 1032171 - DNA, 15 bp, Homo sapiens
gtatgatcttggaca

SEQ ID NO: 1032172 - DNA, 15 bp, Homo sapiens
tgtatgatcttggac

SEQ ID NO: 1032173 - DNA, 15 bp, Homo sapiens
ctgtatgatcttgga

SEQ ID NO: 1032174 - DNA, 15 bp, Homo sapiens
gctgtatgatcttgg

SEQ ID NO: 1032175 - DNA, 15 bp, Homo sapiens
agctgtatgatcttg

SEQ ID NO: 1032176 - DNA, 15 bp, Homo sapiens
tagctgtatgatctt

SEQ ID NO: 1032177 - DNA, 15 bp, Homo sapiens
ttagctgtatgatct

SEQ ID NO: 1032178 - DNA, 15 bp, Homo sapiens
gttagctgtatgatc

SEQ ID NO: 1032179 - DNA, 15 bp, Homo sapiens
agttagctgtatgat

SEQ ID NO: 1032180 - DNA, 15 bp, Homo sapiens
tagttagctgtatga

SEQ ID NO: 1032181 - DNA, 15 bp, Homo sapiens
gtagttagctgtatg

SEQ ID NO: 1032182 - DNA, 15 bp, Homo sapiens
ggtagttagctgtat

SEQ ID NO: 1032183 - DNA, 15 bp, Homo sapiens
tggtagttagctgta

SEQ ID NO: 1032184 - DNA, 15 bp, Homo sapiens
ttggtagttagctgt

SEQ ID NO: 1032185 - DNA, 15 bp, Homo sapiens
gttggtagttagctg

SEQ ID NO: 1032186 - DNA, 15 bp, Homo sapiens
tgttggtagttagct

SEQ ID NO: 1032187 - DNA, 15 bp, Homo sapiens
ctgttggtagttagc

SEQ ID NO: 1032188 - DNA, 15 bp, Homo sapiens
tctgttggtagttag

SEQ ID NO: 1032189 - DNA, 15 bp, Homo sapiens
ctctgttggtagtta

SEQ ID NO: 1032190 - DNA, 15 bp, Homo sapiens
actctgttggtagtt

SEQ ID NO: 1032191 - DNA, 15 bp, Homo sapiens
gactctgttggtagt

SEQ ID NO: 1032192 - DNA, 15 bp, Homo sapiens
tgactctgttggtag

SEQ ID NO: 1032193 - DNA, 15 bp, Homo sapiens
atgactctgttggta

SEQ ID NO: 1032194 - DNA, 15 bp, Homo sapiens
tatgactctgttggt

SEQ ID NO: 1032195 - DNA, 15 bp, Homo sapiens
ctatgactctgttgg

SEQ ID NO: 1032196 - DNA, 15 bp, Homo sapiens
actatgactctgttg

SEQ ID NO: 1032197 - DNA, 15 bp, Homo sapiens
cactatgactctgtt

SEQ ID NO: 1032198 - DNA, 15 bp, Homo sapiens
tcactatgactctgt

SEQ ID NO: 1032199 - DNA, 15 bp, Homo sapiens
ttcactatgactctg

SEQ ID NO: 1032200 - DNA, 15 bp, Homo sapiens
tttcactatgactct

SEQ ID NO: 1032201 - DNA, 15 bp, Homo sapiens
ctttcactatgactc

SEQ ID NO: 1032202 - DNA, 15 bp, Homo sapiens
actttcactatgact

SEQ ID NO: 1032203 - DNA, 15 bp, Homo sapiens
aactttcactatgac

SEQ ID NO: 1032204 - DNA, 15 bp, Homo sapiens
gaactttcactatga

SEQ ID NO: 1032205 - DNA, 15 bp, Homo sapiens
tgaactttcactatg

SEQ ID NO: 1032206 - DNA, 15 bp, Homo sapiens
ctgaactttcactat

SEQ ID NO: 1032207 - DNA, 15 bp, Homo sapiens
cctgaactttcacta

SEQ ID NO: 1032208 - DNA, 15 bp, Homo sapiens
ccctgaactttcact

SEQ ID NO: 1032209 - DNA, 15 bp, Homo sapiens
gccctgaactttcac

SEQ ID NO: 1032210 - DNA, 15 bp, Homo sapiens
agccctgaactttca

SEQ ID NO: 1032211 - DNA, 15 bp, Homo sapiens
gagccctgaactttc

SEQ ID NO: 1032212 - DNA, 15 bp, Homo sapiens
agagccctgaacttt

SEQ ID NO: 1032213 - DNA, 15 bp, Homo sapiens
cagagccctgaactt

SEQ ID NO: 1032214 - DNA, 15 bp, Homo sapiens
gcagagccctgaact

SEQ ID NO: 1032215 - DNA, 15 bp, Homo sapiens
tgcagagccctgaac

SEQ ID NO: 1032216 - DNA, 15 bp, Homo sapiens
gtgcagagccctgaa

SEQ ID NO: 1032217 - DNA, 15 bp, Homo sapiens
ggtgcagagccctga

SEQ ID NO: 1032218 - DNA, 15 bp, Homo sapiens
gggtgcagagccctg

SEQ ID NO: 1032219 - DNA, 15 bp, Homo sapiens
agggtgcagagccct

SEQ ID NO: 1032220 - DNA, 15 bp, Homo sapiens
aagggtgcagagccc

SEQ ID NO: 1032221 - DNA, 15 bp, Homo sapiens
taagggtgcagagcc

SEQ ID NO: 1032222 - DNA, 15 bp, Homo sapiens
ctaagggtgcagagc

SEQ ID NO: 1032223 - DNA, 15 bp, Homo sapiens
cctaagggtgcagag

SEQ ID NO: 1032224 - DNA, 15 bp, Homo sapiens
gcctaagggtgcaga

SEQ ID NO: 1032225 - DNA, 15 bp, Homo sapiens
ggcctaagggtgcag

SEQ ID NO: 1032226 - DNA, 15 bp, Homo sapiens
tggcctaagggtgca

SEQ ID NO: 1032227 - DNA, 15 bp, Homo sapiens
ctggcctaagggtgc

SEQ ID NO: 1032228 - DNA, 15 bp, Homo sapiens
actggcctaagggtg

SEQ ID NO: 1032229 - DNA, 15 bp, Homo sapiens
cactggcctaagggt

SEQ ID NO: 1032230 - DNA, 15 bp, Homo sapiens
acactggcctaaggg

SEQ ID NO: 1032231 - DNA, 15 bp, Homo sapiens
aacactggcctaagg

SEQ ID NO: 1032232 - DNA, 15 bp, Homo sapiens
gaacactggcctaag

SEQ ID NO: 1032233 - DNA, 15 bp, Homo sapiens
agaacactggcctaa

SEQ ID NO: 1032234 - DNA, 15 bp, Homo sapiens
aagaacactggccta

SEQ ID NO: 1032235 - DNA, 15 bp, Homo sapiens
aaagaacactggcct

SEQ ID NO: 1032236 - DNA, 15 bp, Homo sapiens
gaaagaacactggcc

SEQ ID NO: 1032237 - DNA, 15 bp, Homo sapiens
ggaaagaacactggc

SEQ ID NO: 1032238 - DNA, 15 bp, Homo sapiens
tggaaagaacactgg

SEQ ID NO: 1032239 - DNA, 15 bp, Homo sapiens
gtggaaagaacactg

SEQ ID NO: 1032240 - DNA, 15 bp, Homo sapiens
agtggaaagaacact

SEQ ID NO: 1032241 - DNA, 15 bp, Homo sapiens
tagtggaaagaacac

SEQ ID NO: 1032242 - DNA, 15 bp, Homo sapiens
atagtggaaagaaca

SEQ ID NO: 1032243 - DNA, 15 bp, Homo sapiens
tatagtggaaagaac

SEQ ID NO: 1032244 - DNA, 15 bp, Homo sapiens
gtatagtggaaagaa

SEQ ID NO: 1032245 - DNA, 15 bp, Homo sapiens
ggtatagtggaaaga

SEQ ID NO: 1032246 - DNA, 15 bp, Homo sapiens
tggtatagtggaaag

SEQ ID NO: 1032247 - DNA, 15 bp, Homo sapiens
atggtatagtggaaa

SEQ ID NO: 1032248 - DNA, 15 bp, Homo sapiens
catggtatagtggaa

SEQ ID NO: 1032249 - DNA, 15 bp, Homo sapiens
tcatggtatagtgga

SEQ ID NO: 1032250 - DNA, 15 bp, Homo sapiens
ttcatggtatagtgg

SEQ ID NO: 1032251 - DNA, 15 bp, Homo sapiens
tttcatggtatagtg

SEQ ID NO: 1032252 - DNA, 15 bp, Homo sapiens
ttttcatggtatagt

SEQ ID NO: 1032253 - DNA, 15 bp, Homo sapiens
attttcatggtatag

SEQ ID NO: 1032254 - DNA, 15 bp, Homo sapiens
tattttcatggtata

SEQ ID NO: 1032255 - DNA, 15 bp, Homo sapiens
atattttcatggtat

SEQ ID NO: 1032256 - DNA, 15 bp, Homo sapiens
gatattttcatggta

SEQ ID NO: 1032257 - DNA, 15 bp, Homo sapiens
tgatattttcatggt

SEQ ID NO: 1032258 - DNA, 15 bp, Homo sapiens
atgatattttcatgg

SEQ ID NO: 1032259 - DNA, 15 bp, Homo sapiens
aatgatattttcatg

SEQ ID NO: 1032260 - DNA, 15 bp, Homo sapiens
aaatgatattttcat

SEQ ID NO: 1032261 - DNA, 15 bp, Homo sapiens
caaatgatattttca

SEQ ID NO: 1032262 - DNA, 15 bp, Homo sapiens
gcaaatgatattttc

SEQ ID NO: 1032263 - DNA, 15 bp, Homo sapiens
agcaaatgatatttt

SEQ ID NO: 1032264 - DNA, 15 bp, Homo sapiens
aagcaaatgatattt

SEQ ID NO: 1032265 - DNA, 15 bp, Homo sapiens
aaagcaaatgatatt

SEQ ID NO: 1032266 - DNA, 15 bp, Homo sapiens
aaaagcaaatgatat

SEQ ID NO: 1032267 - DNA, 15 bp, Homo sapiens
caaaagcaaatgata

SEQ ID NO: 1032268 - DNA, 15 bp, Homo sapiens
acaaaagcaaatgat

SEQ ID NO: 1032269 - DNA, 15 bp, Homo sapiens
aacaaaagcaaatga

SEQ ID NO: 1032270 - DNA, 15 bp, Homo sapiens
taacaaaagcaaatg

SEQ ID NO: 1032271 - DNA, 15 bp, Homo sapiens
gtaacaaaagcaaat

SEQ ID NO: 1032272 - DNA, 15 bp, Homo sapiens
tgtaacaaaagcaaa

SEQ ID NO: 1032273 - DNA, 15 bp, Homo sapiens
atgtaacaaaagcaa

SEQ ID NO: 1032274 - DNA, 15 bp, Homo sapiens
aatgtaacaaaagca

SEQ ID NO: 1032275 - DNA, 15 bp, Homo sapiens
aaatgtaacaaaagc

SEQ ID NO: 1032276 - DNA, 15 bp, Homo sapiens
aaaatgtaacaaaag

SEQ ID NO: 1032277 - DNA, 15 bp, Homo sapiens
aaaaatgtaacaaaa

SEQ ID NO: 1032278 - DNA, 15 bp, Homo sapiens
taaaaatgtaacaaa

SEQ ID NO: 1032279 - DNA, 15 bp, Homo sapiens
ataaaaatgtaacaa

SEQ ID NO: 1032280 - DNA, 15 bp, Homo sapiens
cataaaaatgtaaca

SEQ ID NO: 1032281 - DNA, 15 bp, Homo sapiens
tcataaaaatgtaac

SEQ ID NO: 1032282 - DNA, 15 bp, Homo sapiens
ttcataaaaatgtaa

SEQ ID NO: 1032283 - DNA, 15 bp, Homo sapiens
attcataaaaatgta

SEQ ID NO: 1032284 - DNA, 15 bp, Homo sapiens
aattcataaaaatgt

SEQ ID NO: 1032285 - DNA, 15 bp, Homo sapiens
taattcataaaaatg

SEQ ID NO: 1032286 - DNA, 15 bp, Homo sapiens
ataattcataaaaat

SEQ ID NO: 1032287 - DNA, 15 bp, Homo sapiens
tataattcataaaaa

SEQ ID NO: 1032288 - DNA, 15 bp, Homo sapiens
ctataattcataaaa

SEQ ID NO: 1032289 - DNA, 15 bp, Homo sapiens
tctataattcataaa

SEQ ID NO: 1032290 - DNA, 15 bp, Homo sapiens
ttctataattcataa

SEQ ID NO: 1032291 - DNA, 15 bp, Homo sapiens
attctataattcata

SEQ ID NO: 1032292 - DNA, 15 bp, Homo sapiens
gattctataattcat

SEQ ID NO: 1032293 - DNA, 15 bp, Homo sapiens
cgattctataattca

SEQ ID NO: 1032294 - DNA, 15 bp, Homo sapiens
acgattctataattc

SEQ ID NO: 1032295 - DNA, 15 bp, Homo sapiens
cacgattctataatt

SEQ ID NO: 1032296 - DNA, 15 bp, Homo sapiens
ccacgattctataat

SEQ ID NO: 1032297 - DNA, 15 bp, Homo sapiens
tccacgattctataa

SEQ ID NO: 1032298 - DNA, 15 bp, Homo sapiens
ctccacgattctata

SEQ ID NO: 1032299 - DNA, 15 bp, Homo sapiens
cctccacgattctat

SEQ ID NO: 1032300 - DNA, 15 bp, Homo sapiens
gcctccacgattcta

SEQ ID NO: 1032301 - DNA, 15 bp, Homo sapiens
tgcctccacgattct

SEQ ID NO: 1032302 - DNA, 15 bp, Homo sapiens
ctgcctccacgattc

SEQ ID NO: 1032303 - DNA, 15 bp, Homo sapiens
actgcctccacgatt

SEQ ID NO: 1032304 - DNA, 15 bp, Homo sapiens
cactgcctccacgat

SEQ ID NO: 1032305 - DNA, 15 bp, Homo sapiens
acactgcctccacga

SEQ ID NO: 1032306 - DNA, 15 bp, Homo sapiens
cacactgcctccacg

SEQ ID NO: 1032307 - DNA, 15 bp, Homo sapiens
acacactgcctccac

SEQ ID NO: 1032308 - DNA, 15 bp, Homo sapiens
cacacactgcctcca

SEQ ID NO: 1032309 - DNA, 15 bp, Homo sapiens
acacacactgcctcc

SEQ ID NO: 1032310 - DNA, 15 bp, Homo sapiens
tacacacactgcctc

SEQ ID NO: 1032311 - DNA, 15 bp, Homo sapiens
atacacacactgcct

SEQ ID NO: 1032312 - DNA, 15 bp, Homo sapiens
catacacacactgcc

SEQ ID NO: 1032313 - DNA, 15 bp, Homo sapiens
acatacacacactgc

SEQ ID NO: 1032314 - DNA, 15 bp, Homo sapiens
aacacatacacacac

SEQ ID NO: 1032315 - DNA, 15 bp, Homo sapiens
aaacacatacacaca

SEQ ID NO: 1032316 - DNA, 15 bp, Homo sapiens
caaacacatacacac

SEQ ID NO: 1032317 - DNA, 15 bp, Homo sapiens
gcaaacacatacaca

SEQ ID NO: 1032318 - DNA, 15 bp, Homo sapiens
cgcaaacacatacac

SEQ ID NO: 1032319 - DNA, 15 bp, Homo sapiens
acgcaaacacataca

SEQ ID NO: 1032320 - DNA, 15 bp, Homo sapiens
cacgcaaacacatac

SEQ ID NO: 1032321 - DNA, 15 bp, Homo sapiens
acacgcaaacacata

SEQ ID NO: 1032322 - DNA, 15 bp, Homo sapiens
cacacgcaaacacat

SEQ ID NO: 1032323 - DNA, 15 bp, Homo sapiens
acacacgcaaacaca

SEQ ID NO: 1032324 - DNA, 15 bp, Homo sapiens
cacacacgcaaacac

SEQ ID NO: 1032325 - DNA, 15 bp, Homo sapiens
acacacacgcaaaca

SEQ ID NO: 1032326 - DNA, 15 bp, Homo sapiens
cacacacacgcaaac

SEQ ID NO: 1032327 - DNA, 15 bp, Homo sapiens
acacacacacgcaaa

SEQ ID NO: 1032328 - DNA, 15 bp, Homo sapiens
cacacacacacgcaa

SEQ ID NO: 1032329 - DNA, 15 bp, Homo sapiens
cttctctctctctct

SEQ ID NO: 1032330 - DNA, 15 bp, Homo sapiens
acttctctctctctc

SEQ ID NO: 1032331 - DNA, 15 bp, Homo sapiens
gacttctctctctct

SEQ ID NO: 1032332 - DNA, 15 bp, Homo sapiens
agacttctctctctc

SEQ ID NO: 1032333 - DNA, 15 bp, Homo sapiens
aagacttctctctct

SEQ ID NO: 1032334 - DNA, 15 bp, Homo sapiens
aaagacttctctctc

SEQ ID NO: 1032335 - DNA, 15 bp, Homo sapiens
taaagacttctctct

SEQ ID NO: 1032336 - DNA, 15 bp, Homo sapiens
ttaaagacttctctc

SEQ ID NO: 1032337 - DNA, 15 bp, Homo sapiens
tttaaagacttctct

SEQ ID NO: 1032338 - DNA, 15 bp, Homo sapiens
ttttaaagacttctc

SEQ ID NO: 1032339 - DNA, 15 bp, Homo sapiens
cttttaaagacttct

SEQ ID NO: 1032340 - DNA, 15 bp, Homo sapiens
tcttttaaagacttc

SEQ ID NO: 1032341 - DNA, 15 bp, Homo sapiens
ttcttttaaagactt

SEQ ID NO: 1032342 - DNA, 15 bp, Homo sapiens
tttcttttaaagact

SEQ ID NO: 1032343 - DNA, 15 bp, Homo sapiens
ttttcttttaaagac

SEQ ID NO: 1032344 - DNA, 15 bp, Homo sapiens
tttttcttttaaaga

SEQ ID NO: 1032345 - DNA, 15 bp, Homo sapiens
atttttcttttaaag

SEQ ID NO: 1032346 - DNA, 15 bp, Homo sapiens
gatttttcttttaaa

SEQ ID NO: 1032347 - DNA, 15 bp, Homo sapiens
tgatttttcttttaa

SEQ ID NO: 1032348 - DNA, 15 bp, Homo sapiens
atgatttttctttta

SEQ ID NO: 1032349 - DNA, 15 bp, Homo sapiens
tatgatttttctttt

SEQ ID NO: 1032350 - DNA, 15 bp, Homo sapiens
ttatgatttttcttt

SEQ ID NO: 1032351 - DNA, 15 bp, Homo sapiens
tttatgatttttctt

SEQ ID NO: 1032352 - DNA, 15 bp, Homo sapiens
ctttatgatttttct

SEQ ID NO: 1032353 - DNA, 15 bp, Homo sapiens
tctttatgatttttc

SEQ ID NO: 1032354 - DNA, 15 bp, Homo sapiens
ttctttatgattttt

SEQ ID NO: 1032355 - DNA, 15 bp, Homo sapiens
attctttatgatttt

SEQ ID NO: 1032356 - DNA, 15 bp, Homo sapiens
aattctttatgattt

SEQ ID NO: 1032357 - DNA, 15 bp, Homo sapiens
aaattctttatgatt

SEQ ID NO: 1032358 - DNA, 15 bp, Homo sapiens
caaattctttatgat

SEQ ID NO: 1032359 - DNA, 15 bp, Homo sapiens
ccaaattctttatga

SEQ ID NO: 1032360 - DNA, 15 bp, Homo sapiens
gccaaattctttatg

SEQ ID NO: 1032361 - DNA, 15 bp, Homo sapiens
tgccaaattctttat

SEQ ID NO: 1032362 - DNA, 15 bp, Homo sapiens
gtgccaaattcttta

SEQ ID NO: 1032363 - DNA, 15 bp, Homo sapiens
agtgccaaattcttt

SEQ ID NO: 1032364 - DNA, 15 bp, Homo sapiens
aagtgccaaattctt

SEQ ID NO: 1032365 - DNA, 15 bp, Homo sapiens
aaagtgccaaattct

SEQ ID NO: 1032366 - DNA, 15 bp, Homo sapiens
taaagtgccaaattc

SEQ ID NO: 1032367 - DNA, 15 bp, Homo sapiens
gtaaagtgccaaatt

SEQ ID NO: 1032368 - DNA, 15 bp, Homo sapiens
tgtaaagtgccaaat

SEQ ID NO: 1032369 - DNA, 15 bp, Homo sapiens
gtgtaaagtgccaaa

SEQ ID NO: 1032370 - DNA, 15 bp, Homo sapiens
agtgtaaagtgccaa

SEQ ID NO: 1032371 - DNA, 15 bp, Homo sapiens
tagtgtaaagtgcca

SEQ ID NO: 1032372 - DNA, 15 bp, Homo sapiens
ttagtgtaaagtgcc

SEQ ID NO: 1032373 - DNA, 15 bp, Homo sapiens
tttagtgtaaagtgc

SEQ ID NO: 1032374 - DNA, 15 bp, Homo sapiens
ctttagtgtaaagtg

SEQ ID NO: 1032375 - DNA, 15 bp, Homo sapiens
tctttagtgtaaagt

SEQ ID NO: 1032376 - DNA, 15 bp, Homo sapiens
gtctttagtgtaaag

SEQ ID NO: 1032377 - DNA, 15 bp, Homo sapiens
tgtctttagtgtaaa

SEQ ID NO: 1032378 - DNA, 15 bp, Homo sapiens
gtgtctttagtgtaa

SEQ ID NO: 1032379 - DNA, 15 bp, Homo sapiens
ggtgtctttagtgta

SEQ ID NO: 1032380 - DNA, 15 bp, Homo sapiens
aggtgtctttagtgt

SEQ ID NO: 1032381 - DNA, 15 bp, Homo sapiens
gaggtgtctttagtg

SEQ ID NO: 1032382 - DNA, 15 bp, Homo sapiens
agaggtgtctttagt

SEQ ID NO: 1032383 - DNA, 15 bp, Homo sapiens
cagaggtgtctttag

SEQ ID NO: 1032384 - DNA, 15 bp, Homo sapiens
ccagaggtgtcttta

SEQ ID NO: 1032385 - DNA, 15 bp, Homo sapiens
accagaggtgtcttt

SEQ ID NO: 1032386 - DNA, 15 bp, Homo sapiens
taccagaggtgtctt

SEQ ID NO: 1032387 - DNA, 15 bp, Homo sapiens
ataccagaggtgtct

SEQ ID NO: 1032388 - DNA, 15 bp, Homo sapiens
aataccagaggtgtc

SEQ ID NO: 1032389 - DNA, 15 bp, Homo sapiens
aaataccagaggtgt

SEQ ID NO: 1032390 - DNA, 15 bp, Homo sapiens
taaataccagaggtg

SEQ ID NO: 1032391 - DNA, 15 bp, Homo sapiens
ttaaataccagaggt

SEQ ID NO: 1032392 - DNA, 15 bp, Homo sapiens
attaaataccagagg

SEQ ID NO: 1032393 - DNA, 15 bp, Homo sapiens
cattaaataccagag

SEQ ID NO: 1032394 - DNA, 15 bp, Homo sapiens
tcattaaataccaga

SEQ ID NO: 1032395 - DNA, 15 bp, Homo sapiens
ttcattaaataccag

SEQ ID NO: 1032396 - DNA, 15 bp, Homo sapiens
tttcattaaatacca

SEQ ID NO: 1032397 - DNA, 15 bp, Homo sapiens
ttttcattaaatacc

SEQ ID NO: 1032398 - DNA, 15 bp, Homo sapiens
tttttcattaaatac

SEQ ID NO: 1032399 - DNA, 15 bp, Homo sapiens
atttttcattaaata

SEQ ID NO: 1032400 - DNA, 15 bp, Homo sapiens
tatttttcattaaat

SEQ ID NO: 1032401 - DNA, 15 bp, Homo sapiens
ttatttttcattaaa

SEQ ID NO: 1032402 - DNA, 15 bp, Homo sapiens
tttatttttcattaa

SEQ ID NO: 1032403 - DNA, 15 bp, Homo sapiens
atttatttttcatta

SEQ ID NO: 1032404 - DNA, 15 bp, Homo sapiens
tatttatttttcatt

SEQ ID NO: 1032405 - DNA, 15 bp, Homo sapiens
ttatttatttttcat

SEQ ID NO: 1032406 - DNA, 15 bp, Homo sapiens
tttatttatttttca

SEQ ID NO: 1032407 - DNA, 15 bp, Homo sapiens
attttatttattttt

SEQ ID NO: 1032408 - DNA, 15 bp, Homo sapiens
aattttatttatttt

SEQ ID NO: 1032409 - DNA, 15 bp, Homo sapiens
caattttatttattt

SEQ ID NO: 1032410 - DNA, 15 bp, Homo sapiens
acaattttatttatt

SEQ ID NO: 1032411 - DNA, 15 bp, Homo sapiens
tacaattttatttat

SEQ ID NO: 1032412 - DNA, 15 bp, Homo sapiens
atacaattttattta

SEQ ID NO: 1032413 - DNA, 15 bp, Homo sapiens
gatacaattttattt

SEQ ID NO: 1032414 - DNA, 15 bp, Homo sapiens
tgatacaattttatt

SEQ ID NO: 1032415 - DNA, 15 bp, Homo sapiens
gtgatacaattttat

SEQ ID NO: 1032416 - DNA, 15 bp, Homo sapiens
agtgatacaatttta

SEQ ID NO: 1032417 - DNA, 15 bp, Homo sapiens
tagtgatacaatttt

SEQ ID NO: 1032418 - DNA, 15 bp, Homo sapiens
gtagtgatacaattt

SEQ ID NO: 1032419 - DNA, 15 bp, Homo sapiens
ggtagtgatacaatt

SEQ ID NO: 1032420 - DNA, 15 bp, Homo sapiens
tggtagtgatacaat

SEQ ID NO: 1032421 - DNA, 15 bp, Homo sapiens
atggtagtgatacaa

SEQ ID NO: 1032422 - DNA, 15 bp, Homo sapiens
gatggtagtgataca

SEQ ID NO: 1032423 - DNA, 15 bp, Homo sapiens
agatggtagtgatac

SEQ ID NO: 1032424 - DNA, 15 bp, Homo sapiens
aagatggtagtgata

SEQ ID NO: 1032425 - DNA, 15 bp, Homo sapiens
caagatggtagtgat

SEQ ID NO: 1032426 - DNA, 15 bp, Homo sapiens
tcaagatggtagtga

SEQ ID NO: 1032427 - DNA, 15 bp, Homo sapiens
ttcaagatggtagtg

SEQ ID NO: 1032428 - DNA, 15 bp, Homo sapiens
attcaagatggtagt

SEQ ID NO: 1032429 - DNA, 15 bp, Homo sapiens
aattcaagatggtag

SEQ ID NO: 1032430 - DNA, 15 bp, Homo sapiens
taattcaagatggta

SEQ ID NO: 1032431 - DNA, 15 bp, Homo sapiens
ataattcaagatggt

SEQ ID NO: 1032432 - DNA, 15 bp, Homo sapiens
aataattcaagatgg

SEQ ID NO: 1032433 - DNA, 15 bp, Homo sapiens
aaataattcaagatg

SEQ ID NO: 1032434 - DNA, 15 bp, Homo sapiens
aaaataattcaagat

SEQ ID NO: 1032435 - DNA, 15 bp, Homo sapiens
aaaaataattcaaga

SEQ ID NO: 1032436 - DNA, 15 bp, Homo sapiens
taaaaataattcaag

SEQ ID NO: 1032437 - DNA, 15 bp, Homo sapiens
ataaaaataattcaa

SEQ ID NO: 1032438 - DNA, 15 bp, Homo sapiens
gataaaaataattca

SEQ ID NO: 1032439 - DNA, 15 bp, Homo sapiens
ggataaaaataattc

SEQ ID NO: 1032440 - DNA, 15 bp, Homo sapiens
aggataaaaataatt

SEQ ID NO: 1032441 - DNA, 15 bp, Homo sapiens
aaggataaaaataat

SEQ ID NO: 1032442 - DNA, 15 bp, Homo sapiens
taaggataaaaataa

SEQ ID NO: 1032443 - DNA, 15 bp, Homo sapiens
ttaaggataaaaata

SEQ ID NO: 1032444 - DNA, 15 bp, Homo sapiens
tttaaggataaaaat

SEQ ID NO: 1032445 - DNA, 15 bp, Homo sapiens
ctttaaggataaaaa

SEQ ID NO: 1032446 - DNA, 15 bp, Homo sapiens
tctttaaggataaaa

SEQ ID NO: 1032447 - DNA, 15 bp, Homo sapiens
ttctttaaggataaa

SEQ ID NO: 1032448 - DNA, 15 bp, Homo sapiens
tttctttaaggataa

SEQ ID NO: 1032449 - DNA, 15 bp, Homo sapiens
ttttctttaaggata

SEQ ID NO: 1032450 - DNA, 15 bp, Homo sapiens
cttttctttaaggat

SEQ ID NO: 1032451 - DNA, 15 bp, Homo sapiens
tcttttctttaagga

SEQ ID NO: 1032452 - DNA, 15 bp, Homo sapiens
ttcttttctttaagg

SEQ ID NO: 1032453 - DNA, 15 bp, Homo sapiens
cttcttttctttaag

SEQ ID NO: 1032454 - DNA, 15 bp, Homo sapiens
tcttcttttctttaa

SEQ ID NO: 1032455 - DNA, 15 bp, Homo sapiens
ttcttcttttcttta

SEQ ID NO: 1032456 - DNA, 15 bp, Homo sapiens
tttcttcttttcttt

SEQ ID NO: 1032457 - DNA, 15 bp, Homo sapiens
atttcttcttttctt

SEQ ID NO: 1032458 - DNA, 15 bp, Homo sapiens
aatttcttcttttct

SEQ ID NO: 1032459 - DNA, 15 bp, Homo sapiens
gaatttcttcttttc

SEQ ID NO: 1032460 - DNA, 15 bp, Homo sapiens
ggaatttcttctttt

SEQ ID NO: 1032461 - DNA, 15 bp, Homo sapiens
tggaatttcttcttt

SEQ ID NO: 1032462 - DNA, 15 bp, Homo sapiens
ttggaatttcttctt

SEQ ID NO: 1032463 - DNA, 15 bp, Homo sapiens
tttggaatttcttct

SEQ ID NO: 1032464 - DNA, 15 bp, Homo sapiens
atttggaatttcttc

SEQ ID NO: 1032465 - DNA, 15 bp, Homo sapiens
aatttggaatttctt

SEQ ID NO: 1032466 - DNA, 15 bp, Homo sapiens
aaatttggaatttct

SEQ ID NO: 1032467 - DNA, 15 bp, Homo sapiens
aaaatttggaatttc

SEQ ID NO: 1032468 - DNA, 15 bp, Homo sapiens
aaaaatttggaattt

SEQ ID NO: 1032469 - DNA, 15 bp, Homo sapiens
caaaaatttggaatt

SEQ ID NO: 1032470 - DNA, 15 bp, Homo sapiens
ccaaaaatttggaat

SEQ ID NO: 1032471 - DNA, 15 bp, Homo sapiens
tccaaaaatttggaa

SEQ ID NO: 1032472 - DNA, 15 bp, Homo sapiens
atccaaaaatttgga

SEQ ID NO: 1032473 - DNA, 15 bp, Homo sapiens
tatccaaaaatttgg

SEQ ID NO: 1032474 - DNA, 15 bp, Homo sapiens
ctatccaaaaatttg

SEQ ID NO: 1032475 - DNA, 15 bp, Homo sapiens
tctatccaaaaattt

SEQ ID NO: 1032476 - DNA, 15 bp, Homo sapiens
ttctatccaaaaatt

SEQ ID NO: 1032477 - DNA, 15 bp, Homo sapiens
attctatccaaaaat

SEQ ID NO: 1032478 - DNA, 15 bp, Homo sapiens
aattctatccaaaaa

SEQ ID NO: 1032479 - DNA, 15 bp, Homo sapiens
aaattctatccaaaa

SEQ ID NO: 1032480 - DNA, 15 bp, Homo sapiens
aaaattctatccaaa

SEQ ID NO: 1032481 - DNA, 15 bp, Homo sapiens
aaaaattctatccaa

SEQ ID NO: 1032482 - DNA, 15 bp, Homo sapiens
taaaaattctatcca

SEQ ID NO: 1032483 - DNA, 15 bp, Homo sapiens
ataaaaattctatcc

SEQ ID NO: 1032484 - DNA, 15 bp, Homo sapiens
tataaaaattctatc

SEQ ID NO: 1032485 - DNA, 15 bp, Homo sapiens
gtataaaaattctat

SEQ ID NO: 1032486 - DNA, 15 bp, Homo sapiens
tgtataaaaattcta

SEQ ID NO: 1032487 - DNA, 15 bp, Homo sapiens
ttgtataaaaattct

SEQ ID NO: 1032488 - DNA, 15 bp, Homo sapiens
gttgtataaaaattc

SEQ ID NO: 1032489 - DNA, 15 bp, Homo sapiens
agttgtataaaaatt

SEQ ID NO: 1032490 - DNA, 15 bp, Homo sapiens
cagttgtataaaaat

SEQ ID NO: 1032491 - DNA, 15 bp, Homo sapiens
acagttgtataaaaa

SEQ ID NO: 1032492 - DNA, 15 bp, Homo sapiens
aacagttgtataaaa

SEQ ID NO: 1032493 - DNA, 15 bp, Homo sapiens
aaacagttgtataaa

SEQ ID NO: 1032494 - DNA, 15 bp, Homo sapiens
aaaacagttgtataa

SEQ ID NO: 1032495 - DNA, 15 bp, Homo sapiens
gaaaacagttgtata

SEQ ID NO: 1032496 - DNA, 15 bp, Homo sapiens
ggaaaacagttgtat

SEQ ID NO: 1032497 - DNA, 15 bp, Homo sapiens
tggaaaacagttgta

SEQ ID NO: 1032498 - DNA, 15 bp, Homo sapiens
ttggaaaacagttgt

SEQ ID NO: 1032499 - DNA, 15 bp, Homo sapiens
tttggaaaacagttg

SEQ ID NO: 1032500 - DNA, 15 bp, Homo sapiens
ttttggaaaacagtt

SEQ ID NO: 1032501 - DNA, 15 bp, Homo sapiens
attttggaaaacagt

SEQ ID NO: 1032502 - DNA, 15 bp, Homo sapiens
tattttggaaaacag

SEQ ID NO: 1032503 - DNA, 15 bp, Homo sapiens
ttattttggaaaaca

SEQ ID NO: 1032504 - DNA, 15 bp, Homo sapiens
cttattttggaaaac

SEQ ID NO: 1032505 - DNA, 15 bp, Homo sapiens
acttattttggaaaa

SEQ ID NO: 1032506 - DNA, 15 bp, Homo sapiens
gacttattttggaaa

SEQ ID NO: 1032507 - DNA, 15 bp, Homo sapiens
ggacttattttggaa

SEQ ID NO: 1032508 - DNA, 15 bp, Homo sapiens
aggacttattttgga

SEQ ID NO: 1032509 - DNA, 15 bp, Homo sapiens
aaggacttattttgg

SEQ ID NO: 1032510 - DNA, 15 bp, Homo sapiens
gaaggacttattttg

SEQ ID NO: 1032511 - DNA, 15 bp, Homo sapiens
agaaggacttatttt

SEQ ID NO: 1032512 - DNA, 15 bp, Homo sapiens
aagaaggacttattt

SEQ ID NO: 1032513 - DNA, 15 bp, Homo sapiens
aaagaaggacttatt

SEQ ID NO: 1032514 - DNA, 15 bp, Homo sapiens
aaaagaaggacttat

SEQ ID NO: 1032515 - DNA, 15 bp, Homo sapiens
gaaaagaaggactta

SEQ ID NO: 1032516 - DNA, 15 bp, Homo sapiens
ggaaaagaaggactt

SEQ ID NO: 1032517 - DNA, 15 bp, Homo sapiens
tggaaaagaaggact

SEQ ID NO: 1032518 - DNA, 15 bp, Homo sapiens
ctggaaaagaaggac

SEQ ID NO: 1032519 - DNA, 15 bp, Homo sapiens
gctggaaaagaagga

SEQ ID NO: 1032520 - DNA, 15 bp, Homo sapiens
tgctggaaaagaagg

SEQ ID NO: 1032521 - DNA, 15 bp, Homo sapiens
ctgctggaaaagaag

SEQ ID NO: 1032522 - DNA, 15 bp, Homo sapiens
tctgctggaaaagaa

SEQ ID NO: 1032523 - DNA, 15 bp, Homo sapiens
gtctgctggaaaaga

SEQ ID NO: 1032524 - DNA, 15 bp, Homo sapiens
tgtctgctggaaaag

SEQ ID NO: 1032525 - DNA, 15 bp, Homo sapiens
ttgtctgctggaaaa

SEQ ID NO: 1032526 - DNA, 15 bp, Homo sapiens
tttgtctgctggaaa

SEQ ID NO: 1032527 - DNA, 15 bp, Homo sapiens
ctttgtctgctggaa

SEQ ID NO: 1032528 - DNA, 15 bp, Homo sapiens
actttgtctgctgga

SEQ ID NO: 1032529 - DNA, 15 bp, Homo sapiens
tactttgtctgctgg

SEQ ID NO: 1032530 - DNA, 15 bp, Homo sapiens
ttactttgtctgctg

SEQ ID NO: 1032531 - DNA, 15 bp, Homo sapiens
tttactttgtctgct

SEQ ID NO: 1032532 - DNA, 15 bp, Homo sapiens
gtttactttgtctgc

SEQ ID NO: 1032533 - DNA, 15 bp, Homo sapiens
tgtttactttgtctg

SEQ ID NO: 1032534 - DNA, 15 bp, Homo sapiens
ctgtttactttgtct

SEQ ID NO: 1032535 - DNA, 15 bp, Homo sapiens
actgtttactttgtc

SEQ ID NO: 1032536 - DNA, 15 bp, Homo sapiens
gactgtttactttgt

SEQ ID NO: 1032537 - DNA, 15 bp, Homo sapiens
agactgtttactttg

SEQ ID NO: 1032538 - DNA, 15 bp, Homo sapiens
gagactgtttacttt

SEQ ID NO: 1032539 - DNA, 15 bp, Homo sapiens
ggagactgtttactt

SEQ ID NO: 1032540 - DNA, 15 bp, Homo sapiens
tggagactgtttact

SEQ ID NO: 1032541 - DNA, 15 bp, Homo sapiens
atggagactgtttac

SEQ ID NO: 1032542 - DNA, 15 bp, Homo sapiens
aatggagactgttta

SEQ ID NO: 1032543 - DNA, 15 bp, Homo sapiens
taatggagactgttt

SEQ ID NO: 1032544 - DNA, 15 bp, Homo sapiens
gtaatggagactgtt

SEQ ID NO: 1032545 - DNA, 15 bp, Homo sapiens
tgtaatggagactgt

SEQ ID NO: 1032546 - DNA, 15 bp, Homo sapiens
ttgtaatggagactg

SEQ ID NO: 1032547 - DNA, 15 bp, Homo sapiens
cttgtaatggagact

SEQ ID NO: 1032548 - DNA, 15 bp, Homo sapiens
ccttgtaatggagac

SEQ ID NO: 1032549 - DNA, 15 bp, Homo sapiens
tccttgtaatggaga

SEQ ID NO: 1032550 - DNA, 15 bp, Homo sapiens
ctccttgtaatggag

SEQ ID NO: 1032551 - DNA, 15 bp, Homo sapiens
tctccttgtaatgga

SEQ ID NO: 1032552 - DNA, 15 bp, Homo sapiens
gtctccttgtaatgg

SEQ ID NO: 1032553 - DNA, 15 bp, Homo sapiens
tgtctccttgtaatg

SEQ ID NO: 1032554 - DNA, 15 bp, Homo sapiens
ttgtctccttgtaat

SEQ ID NO: 1032555 - DNA, 15 bp, Homo sapiens
gttgtctccttgtaa

SEQ ID NO: 1032556 - DNA, 15 bp, Homo sapiens
ggttgtctccttgta

SEQ ID NO: 1032557 - DNA, 15 bp, Homo sapiens
tggttgtctccttgt

SEQ ID NO: 1032558 - DNA, 15 bp, Homo sapiens
ttggttgtctccttg

SEQ ID NO: 1032559 - DNA, 15 bp, Homo sapiens
tttggttgtctcctt

SEQ ID NO: 1032560 - DNA, 15 bp, Homo sapiens
ttttggttgtctcct

SEQ ID NO: 1032561 - DNA, 15 bp, Homo sapiens
tttttggttgtctcc

SEQ ID NO: 1032562 - DNA, 15 bp, Homo sapiens
atttttggttgtctc

SEQ ID NO: 1032563 - DNA, 15 bp, Homo sapiens
tatttttggttgtct

SEQ ID NO: 1032564 - DNA, 15 bp, Homo sapiens
atatttttggttgtc

SEQ ID NO: 1032565 - DNA, 15 bp, Homo sapiens
tatatttttggttgt

SEQ ID NO: 1032566 - DNA, 15 bp, Homo sapiens
ctatatttttggttg

SEQ ID NO: 1032567 - DNA, 15 bp, Homo sapiens
actatatttttggtt

SEQ ID NO: 1032568 - DNA, 15 bp, Homo sapiens
tactatatttttggt

SEQ ID NO: 1032569 - DNA, 15 bp, Homo sapiens
ctactatatttttgg

SEQ ID NO: 1032570 - DNA, 15 bp, Homo sapiens
actactatatttttg

SEQ ID NO: 1032571 - DNA, 15 bp, Homo sapiens
aactactatattttt

SEQ ID NO: 1032572 - DNA, 15 bp, Homo sapiens
aaactactatatttt

SEQ ID NO: 1032573 - DNA, 15 bp, Homo sapiens
taaactactatattt

SEQ ID NO: 1032574 - DNA, 15 bp, Homo sapiens
gtaaactactatatt

SEQ ID NO: 1032575 - DNA, 15 bp, Homo sapiens
agtaaactactatat

SEQ ID NO: 1032576 - DNA, 15 bp, Homo sapiens
cagtaaactactata

SEQ ID NO: 1032577 - DNA, 15 bp, Homo sapiens
tcagtaaactactat

SEQ ID NO: 1032578 - DNA, 15 bp, Homo sapiens
ttcagtaaactacta

SEQ ID NO: 1032579 - DNA, 15 bp, Homo sapiens
tttcagtaaactact

SEQ ID NO: 1032580 - DNA, 15 bp, Homo sapiens
atttcagtaaactac

SEQ ID NO: 1032581 - DNA, 15 bp, Homo sapiens
tatttcagtaaacta

SEQ ID NO: 1032582 - DNA, 15 bp, Homo sapiens
gtatttcagtaaact

SEQ ID NO: 1032583 - DNA, 15 bp, Homo sapiens
ggtatttcagtaaac

SEQ ID NO: 1032584 - DNA, 15 bp, Homo sapiens
gggtatttcagtaaa

SEQ ID NO: 1032585 - DNA, 15 bp, Homo sapiens
tgggtatttcagtaa

SEQ ID NO: 1032586 - DNA, 15 bp, Homo sapiens
ctgggtatttcagta

SEQ ID NO: 1032587 - DNA, 15 bp, Homo sapiens
cctgggtatttcagt

SEQ ID NO: 1032588 - DNA, 15 bp, Homo sapiens
gcctgggtatttcag

SEQ ID NO: 1032589 - DNA, 15 bp, Homo sapiens
ggcctgggtatttca

SEQ ID NO: 1032590 - DNA, 15 bp, Homo sapiens
gggcctgggtatttc

SEQ ID NO: 1032591 - DNA, 15 bp, Homo sapiens
agggcctgggtattt

SEQ ID NO: 1032592 - DNA, 15 bp, Homo sapiens
aagggcctgggtatt

SEQ ID NO: 1032593 - DNA, 15 bp, Homo sapiens
gaagggcctgggtat

SEQ ID NO: 1032594 - DNA, 15 bp, Homo sapiens
agaagggcctgggta

SEQ ID NO: 1032595 - DNA, 15 bp, Homo sapiens
tagaagggcctgggt

SEQ ID NO: 1032596 - DNA, 15 bp, Homo sapiens
gtagaagggcctggg

SEQ ID NO: 1032597 - DNA, 15 bp, Homo sapiens
tgtagaagggcctgg

SEQ ID NO: 1032598 - DNA, 15 bp, Homo sapiens
ctgtagaagggcctg

SEQ ID NO: 1032599 - DNA, 15 bp, Homo sapiens
tctgtagaagggcct

SEQ ID NO: 1032600 - DNA, 15 bp, Homo sapiens
atctgtagaagggcc

SEQ ID NO: 1032601 - DNA, 15 bp, Homo sapiens
gatctgtagaagggc

SEQ ID NO: 1032602 - DNA, 15 bp, Homo sapiens
tgatctgtagaaggg

SEQ ID NO: 1032603 - DNA, 15 bp, Homo sapiens
atgatctgtagaagg

SEQ ID NO: 1032604 - DNA, 15 bp, Homo sapiens
catgatctgtagaag

SEQ ID NO: 1032605 - DNA, 15 bp, Homo sapiens
ccatgatctgtagaa

SEQ ID NO: 1032606 - DNA, 15 bp, Homo sapiens
cccatgatctgtaga

SEQ ID NO: 1032607 - DNA, 15 bp, Homo sapiens
gcccatgatctgtag

SEQ ID NO: 1032608 - DNA, 15 bp, Homo sapiens
tgcccatgatctgta

SEQ ID NO: 1032609 - DNA, 15 bp, Homo sapiens
ctgcccatgatctgt

SEQ ID NO: 1032610 - DNA, 15 bp, Homo sapiens
cctgcccatgatctg

SEQ ID NO: 1032611 - DNA, 15 bp, Homo sapiens
acctgcccatgatct

SEQ ID NO: 1032612 - DNA, 15 bp, Homo sapiens
tacctgcccatgatc

SEQ ID NO: 1032613 - DNA, 15 bp, Homo sapiens
ctacctgcccatgat

SEQ ID NO: 1032614 - DNA, 15 bp, Homo sapiens
tctacctgcccatga

SEQ ID NO: 1032615 - DNA, 15 bp, Homo sapiens
gtctacctgcccatg

SEQ ID NO: 1032616 - DNA, 15 bp, Homo sapiens
tgtctacctgcccat

SEQ ID NO: 1032617 - DNA, 15 bp, Homo sapiens
ctgtctacctgccca

SEQ ID NO: 1032618 - DNA, 15 bp, Homo sapiens
tctgtctacctgccc

SEQ ID NO: 1032619 - DNA, 15 bp, Homo sapiens
gtctgtctacctgcc

SEQ ID NO: 1032620 - DNA, 15 bp, Homo sapiens
cgtctgtctacctgc

SEQ ID NO: 1032621 - DNA, 15 bp, Homo sapiens
ccgtctgtctacctg

SEQ ID NO: 1032622 - DNA, 15 bp, Homo sapiens
tccgtctgtctacct

SEQ ID NO: 1032623 - DNA, 15 bp, Homo sapiens
ttccgtctgtctacc

SEQ ID NO: 1032624 - DNA, 15 bp, Homo sapiens
attccgtctgtctac

SEQ ID NO: 1032625 - DNA, 15 bp, Homo sapiens
aattccgtctgtcta

SEQ ID NO: 1032626 - DNA, 15 bp, Homo sapiens
gaattccgtctgtct

SEQ ID NO: 1032627 - DNA, 15 bp, Homo sapiens
agaattccgtctgtc

SEQ ID NO: 1032628 - DNA, 15 bp, Homo sapiens
aagaattccgtctgt

SEQ ID NO: 1032629 - DNA, 15 bp, Homo sapiens
taagaattccgtctg

SEQ ID NO: 1032630 - DNA, 15 bp, Homo sapiens
ataagaattccgtct

SEQ ID NO: 1032631 - DNA, 15 bp, Homo sapiens
aataagaattccgtc

SEQ ID NO: 1032632 - DNA, 15 bp, Homo sapiens
aaataagaattccgt

SEQ ID NO: 1032633 - DNA, 15 bp, Homo sapiens
gaaataagaattccg

SEQ ID NO: 1032634 - DNA, 15 bp, Homo sapiens
tgaaataagaattcc

SEQ ID NO: 1032635 - DNA, 15 bp, Homo sapiens
ctgaaataagaattc

SEQ ID NO: 1032636 - DNA, 15 bp, Homo sapiens
gctgaaataagaatt

SEQ ID NO: 1032637 - DNA, 15 bp, Homo sapiens
agctgaaataagaat

SEQ ID NO: 1032638 - DNA, 15 bp, Homo sapiens
gagctgaaataagaa

SEQ ID NO: 1032639 - DNA, 15 bp, Homo sapiens
ggagctgaaataaga

SEQ ID NO: 1032640 - DNA, 15 bp, Homo sapiens
aggagctgaaataag

SEQ ID NO: 1032641 - DNA, 15 bp, Homo sapiens
aaggagctgaaataa

SEQ ID NO: 1032642 - DNA, 15 bp, Homo sapiens
aaaggagctgaaata

SEQ ID NO: 1032643 - DNA, 15 bp, Homo sapiens
taaaggagctgaaat

SEQ ID NO: 1032644 - DNA, 15 bp, Homo sapiens
ttaaaggagctgaaa

SEQ ID NO: 1032645 - DNA, 15 bp, Homo sapiens
attaaaggagctgaa

SEQ ID NO: 1032646 - DNA, 15 bp, Homo sapiens
tattaaaggagctga

SEQ ID NO: 1032647 - DNA, 15 bp, Homo sapiens
ttattaaaggagctg

SEQ ID NO: 1032648 - DNA, 15 bp, Homo sapiens
attattaaaggagct

SEQ ID NO: 1032649 - DNA, 15 bp, Homo sapiens
cattattaaaggagc

SEQ ID NO: 1032650 - DNA, 15 bp, Homo sapiens
ccattattaaaggag

SEQ ID NO: 1032651 - DNA, 15 bp, Homo sapiens
tccattattaaagga

SEQ ID NO: 1032652 - DNA, 15 bp, Homo sapiens
ttccattattaaagg

SEQ ID NO: 1032653 - DNA, 15 bp, Homo sapiens
attccattattaaag

SEQ ID NO: 1032654 - DNA, 15 bp, Homo sapiens
tattccattattaaa

SEQ ID NO: 1032655 - DNA, 15 bp, Homo sapiens
atattccattattaa

SEQ ID NO: 1032656 - DNA, 15 bp, Homo sapiens
aatattccattatta

SEQ ID NO: 1032657 - DNA, 15 bp, Homo sapiens
caatattccattatt

SEQ ID NO: 1032658 - DNA, 15 bp, Homo sapiens
ccaatattccattat

SEQ ID NO: 1032659 - DNA, 15 bp, Homo sapiens
tccaatattccatta

SEQ ID NO: 1032660 - DNA, 15 bp, Homo sapiens
gtccaatattccatt

SEQ ID NO: 1032661 - DNA, 15 bp, Homo sapiens
agtccaatattccat

SEQ ID NO: 1032662 - DNA, 15 bp, Homo sapiens
tagtccaatattcca

SEQ ID NO: 1032663 - DNA, 15 bp, Homo sapiens
atagtccaatattcc

SEQ ID NO: 1032664 - DNA, 15 bp, Homo sapiens
aatagtccaatattc

SEQ ID NO: 1032665 - DNA, 15 bp, Homo sapiens
aaatagtccaatatt

SEQ ID NO: 1032666 - DNA, 15 bp, Homo sapiens
taaatagtccaatat

SEQ ID NO: 1032667 - DNA, 15 bp, Homo sapiens
ttaaatagtccaata

SEQ ID NO: 1032668 - DNA, 15 bp, Homo sapiens
tttaaatagtccaat

SEQ ID NO: 1032669 - DNA, 15 bp, Homo sapiens
atttaaatagtccaa

SEQ ID NO: 1032670 - DNA, 15 bp, Homo sapiens
tatttaaatagtcca

SEQ ID NO: 1032671 - DNA, 15 bp, Homo sapiens
ttatttaaatagtcc

SEQ ID NO: 1032672 - DNA, 15 bp, Homo sapiens
tttatttaaatagtc

SEQ ID NO: 1032673 - DNA, 15 bp, Homo sapiens
ttttatttaaatagt

SEQ ID NO: 1032674 - DNA, 15 bp, Homo sapiens
attttatttaaatag

SEQ ID NO: 1032675 - DNA, 15 bp, Homo sapiens
gattttatttaaata

SEQ ID NO: 1032676 - DNA, 15 bp, Homo sapiens
agattttatttaaat

SEQ ID NO: 1032677 - DNA, 15 bp, Homo sapiens
tagattttatttaaa

SEQ ID NO: 1032678 - DNA, 15 bp, Homo sapiens
atagattttatttaa

SEQ ID NO: 1032679 - DNA, 15 bp, Homo sapiens
aatagattttattta

SEQ ID NO: 1032680 - DNA, 15 bp, Homo sapiens
taatagattttattt

SEQ ID NO: 1032681 - DNA, 15 bp, Homo sapiens
ctaatagattttatt

SEQ ID NO: 1032682 - DNA, 15 bp, Homo sapiens
tctaatagattttat

SEQ ID NO: 1032683 - DNA, 15 bp, Homo sapiens
ttctaatagatttta

SEQ ID NO: 1032684 - DNA, 15 bp, Homo sapiens
cttctaatagatttt

SEQ ID NO: 1032685 - DNA, 15 bp, Homo sapiens
ccttctaatagattt

SEQ ID NO: 1032686 - DNA, 15 bp, Homo sapiens
gccttctaatagatt

SEQ ID NO: 1032687 - DNA, 15 bp, Homo sapiens
tgccttctaatagat

SEQ ID NO: 1032688 - DNA, 15 bp, Homo sapiens
atgccttctaataga

SEQ ID NO: 1032689 - DNA, 15 bp, Homo sapiens
gatgccttctaatag

SEQ ID NO: 1032690 - DNA, 15 bp, Homo sapiens
agatgccttctaata

SEQ ID NO: 1032691 - DNA, 15 bp, Homo sapiens
aagatgccttctaat

SEQ ID NO: 1032692 - DNA, 15 bp, Homo sapiens
taagatgccttctaa

SEQ ID NO: 1032693 - DNA, 15 bp, Homo sapiens
ataagatgccttcta

SEQ ID NO: 1032694 - DNA, 15 bp, Homo sapiens
cataagatgccttct

SEQ ID NO: 1032695 - DNA, 15 bp, Homo sapiens
ccataagatgccttc

SEQ ID NO: 1032696 - DNA, 15 bp, Homo sapiens
tccataagatgcctt

SEQ ID NO: 1032697 - DNA, 15 bp, Homo sapiens
atccataagatgcct

SEQ ID NO: 1032698 - DNA, 15 bp, Homo sapiens
gatccataagatgcc

SEQ ID NO: 1032699 - DNA, 15 bp, Homo sapiens
ggatccataagatgc

SEQ ID NO: 1032700 - DNA, 15 bp, Homo sapiens
tggatccataagatg

SEQ ID NO: 1032701 - DNA, 15 bp, Homo sapiens
atggatccataagat

SEQ ID NO: 1032702 - DNA, 15 bp, Homo sapiens
gatggatccataaga

SEQ ID NO: 1032703 - DNA, 15 bp, Homo sapiens
tgatggatccataag

SEQ ID NO: 1032704 - DNA, 15 bp, Homo sapiens
ctgatggatccataa

SEQ ID NO: 1032705 - DNA, 15 bp, Homo sapiens
tctgatggatccata

SEQ ID NO: 1032706 - DNA, 15 bp, Homo sapiens
gtctgatggatccat

SEQ ID NO: 1032707 - DNA, 15 bp, Homo sapiens
agtctgatggatcca

SEQ ID NO: 1032708 - DNA, 15 bp, Homo sapiens
cagtctgatggatcc

SEQ ID NO: 1032709 - DNA, 15 bp, Homo sapiens
acagtctgatggatc

SEQ ID NO: 1032710 - DNA, 15 bp, Homo sapiens
cacagtctgatggat

SEQ ID NO: 1032711 - DNA, 15 bp, Homo sapiens
acacagtctgatgga

SEQ ID NO: 1032712 - DNA, 15 bp, Homo sapiens
gacacagtctgatgg

SEQ ID NO: 1032713 - DNA, 15 bp, Homo sapiens
tgacacagtctgatg

SEQ ID NO: 1032714 - DNA, 15 bp, Homo sapiens
atgacacagtctgat

SEQ ID NO: 1032715 - DNA, 15 bp, Homo sapiens
tatgacacagtctga

SEQ ID NO: 1032716 - DNA, 15 bp, Homo sapiens
ttatgacacagtctg

SEQ ID NO: 1032717 - DNA, 15 bp, Homo sapiens
cttatgacacagtct

SEQ ID NO: 1032718 - DNA, 15 bp, Homo sapiens
acttatgacacagtc

SEQ ID NO: 1032719 - DNA, 15 bp, Homo sapiens
tacttatgacacagt

SEQ ID NO: 1032720 - DNA, 15 bp, Homo sapiens
ctacttatgacacag

SEQ ID NO: 1032721 - DNA, 15 bp, Homo sapiens
cctacttatgacaca

SEQ ID NO: 1032722 - DNA, 15 bp, Homo sapiens
acctacttatgacac

SEQ ID NO: 1032723 - DNA, 15 bp, Homo sapiens
gacctacttatgaca

SEQ ID NO: 1032724 - DNA, 15 bp, Homo sapiens
agacctacttatgac

SEQ ID NO: 1032725 - DNA, 15 bp, Homo sapiens
aagacctacttatga

SEQ ID NO: 1032726 - DNA, 15 bp, Homo sapiens
caagacctacttatg

SEQ ID NO: 1032727 - DNA, 15 bp, Homo sapiens
tcaagacctacttat

SEQ ID NO: 1032728 - DNA, 15 bp, Homo sapiens
ttcaagacctactta

SEQ ID NO: 1032729 - DNA, 15 bp, Homo sapiens
attcaagacctactt

SEQ ID NO: 1032730 - DNA, 15 bp, Homo sapiens
tattcaagacctact

SEQ ID NO: 1032731 - DNA, 15 bp, Homo sapiens
ttattcaagacctac

SEQ ID NO: 1032732 - DNA, 15 bp, Homo sapiens
gttattcaagaccta

SEQ ID NO: 1032733 - DNA, 15 bp, Homo sapiens
tgttattcaagacct

SEQ ID NO: 1032734 - DNA, 15 bp, Homo sapiens
ttgttattcaagacc

SEQ ID NO: 1032735 - DNA, 15 bp, Homo sapiens
attgttattcaagac

SEQ ID NO: 1032736 - DNA, 15 bp, Homo sapiens
aattgttattcaaga

SEQ ID NO: 1032737 - DNA, 15 bp, Homo sapiens
caattgttattcaag

SEQ ID NO: 1032738 - DNA, 15 bp, Homo sapiens
gcaattgttattcaa

SEQ ID NO: 1032739 - DNA, 15 bp, Homo sapiens
tgcaattgttattca

SEQ ID NO: 1032740 - DNA, 15 bp, Homo sapiens
atgcaattgttattc

SEQ ID NO: 1032741 - DNA, 15 bp, Homo sapiens
aatgcaattgttatt

SEQ ID NO: 1032742 - DNA, 15 bp, Homo sapiens
taatgcaattgttat

SEQ ID NO: 1032743 - DNA, 15 bp, Homo sapiens
ttaatgcaattgtta

SEQ ID NO: 1032744 - DNA, 15 bp, Homo sapiens
tttaatgcaattgtt

SEQ ID NO: 1032745 - DNA, 15 bp, Homo sapiens
ttttaatgcaattgt

SEQ ID NO: 1032746 - DNA, 15 bp, Homo sapiens
tttttaatgcaattg

SEQ ID NO: 1032747 - DNA, 15 bp, Homo sapiens
ttttttaatgcaatt

SEQ ID NO: 1032748 - DNA, 15 bp, Homo sapiens
cttttttaatgcaat

SEQ ID NO: 1032749 - DNA, 15 bp, Homo sapiens
tcttttttaatgcaa

SEQ ID NO: 1032750 - DNA, 15 bp, Homo sapiens
atcttttttaatgca

SEQ ID NO: 1032751 - DNA, 15 bp, Homo sapiens
aatcttttttaatgc

SEQ ID NO: 1032752 - DNA, 15 bp, Homo sapiens
aaatcttttttaatg

SEQ ID NO: 1032753 - DNA, 15 bp, Homo sapiens
caaatcttttttaat

SEQ ID NO: 1032754 - DNA, 15 bp, Homo sapiens
ccaaatcttttttaa

SEQ ID NO: 1032755 - DNA, 15 bp, Homo sapiens
cccaaatctttttta

SEQ ID NO: 1032756 - DNA, 15 bp, Homo sapiens
tcccaaatctttttt

SEQ ID NO: 1032757 - DNA, 15 bp, Homo sapiens
atcccaaatcttttt

SEQ ID NO: 1032758 - DNA, 15 bp, Homo sapiens
aatcccaaatctttt

SEQ ID NO: 1032759 - DNA, 15 bp, Homo sapiens
aaatcccaaatcttt

SEQ ID NO: 1032760 - DNA, 15 bp, Homo sapiens
aaaatcccaaatctt

SEQ ID NO: 1032761 - DNA, 15 bp, Homo sapiens
gaaaatcccaaatct

SEQ ID NO: 1032762 - DNA, 15 bp, Homo sapiens
tgaaaatcccaaatc

SEQ ID NO: 1032763 - DNA, 15 bp, Homo sapiens
atgaaaatcccaaat

SEQ ID NO: 1032764 - DNA, 15 bp, Homo sapiens
catgaaaatcccaaa

SEQ ID NO: 1032765 - DNA, 15 bp, Homo sapiens
acatgaaaatcccaa

SEQ ID NO: 1032766 - DNA, 15 bp, Homo sapiens
gacatgaaaatccca

SEQ ID NO: 1032767 - DNA, 15 bp, Homo sapiens
agacatgaaaatccc

SEQ ID NO: 1032768 - DNA, 15 bp, Homo sapiens
gagacatgaaaatcc

SEQ ID NO: 1032769 - DNA, 15 bp, Homo sapiens
agagacatgaaaatc

SEQ ID NO: 1032770 - DNA, 15 bp, Homo sapiens
aagagacatgaaaat

SEQ ID NO: 1032771 - DNA, 15 bp, Homo sapiens
aaagagacatgaaaa

SEQ ID NO: 1032772 - DNA, 15 bp, Homo sapiens
gaaagagacatgaaa

SEQ ID NO: 1032773 - DNA, 15 bp, Homo sapiens
agaaagagacatgaa

SEQ ID NO: 1032774 - DNA, 15 bp, Homo sapiens
cagaaagagacatga

SEQ ID NO: 1032775 - DNA, 15 bp, Homo sapiens
acagaaagagacatg

SEQ ID NO: 1032776 - DNA, 15 bp, Homo sapiens
aacagaaagagacat

SEQ ID NO: 1032777 - DNA, 15 bp, Homo sapiens
aaacagaaagagaca

SEQ ID NO: 1032778 - DNA, 15 bp, Homo sapiens
caaacagaaagagac

SEQ ID NO: 1032779 - DNA, 15 bp, Homo sapiens
ccaaacagaaagaga

SEQ ID NO: 1032780 - DNA, 15 bp, Homo sapiens
cccaaacagaaagag

SEQ ID NO: 1032781 - DNA, 15 bp, Homo sapiens
ccccaaacagaaaga

SEQ ID NO: 1032782 - DNA, 15 bp, Homo sapiens
accccaaacagaaag

SEQ ID NO: 1032783 - DNA, 15 bp, Homo sapiens
aaccccaaacagaaa

SEQ ID NO: 1032784 - DNA, 15 bp, Homo sapiens
taaccccaaacagaa

SEQ ID NO: 1032785 - DNA, 15 bp, Homo sapiens
ttaaccccaaacaga

SEQ ID NO: 1032786 - DNA, 15 bp, Homo sapiens
tttaaccccaaacag

SEQ ID NO: 1032787 - DNA, 15 bp, Homo sapiens
gtttaaccccaaaca

SEQ ID NO: 1032788 - DNA, 15 bp, Homo sapiens
tgtttaaccccaaac

SEQ ID NO: 1032789 - DNA, 15 bp, Homo sapiens
ctgtttaaccccaaa

SEQ ID NO: 1032790 - DNA, 15 bp, Homo sapiens
actgtttaaccccaa

SEQ ID NO: 1032791 - DNA, 15 bp, Homo sapiens
aactgtttaacccca

SEQ ID NO: 1032792 - DNA, 15 bp, Homo sapiens
taactgtttaacccc

SEQ ID NO: 1032793 - DNA, 15 bp, Homo sapiens
ttaactgtttaaccc

SEQ ID NO: 1032794 - DNA, 15 bp, Homo sapiens
gttaactgtttaacc

SEQ ID NO: 1032795 - DNA, 15 bp, Homo sapiens
agttaactgtttaac

SEQ ID NO: 1032796 - DNA, 15 bp, Homo sapiens
aagttaactgtttaa

SEQ ID NO: 1032797 - DNA, 15 bp, Homo sapiens
caagttaactgttta

SEQ ID NO: 1032798 - DNA, 15 bp, Homo sapiens
ccaagttaactgttt

SEQ ID NO: 1032799 - DNA, 15 bp, Homo sapiens
gccaagttaactgtt

SEQ ID NO: 1032800 - DNA, 15 bp, Homo sapiens
tgccaagttaactgt

SEQ ID NO: 1032801 - DNA, 15 bp, Homo sapiens
atgccaagttaactg

SEQ ID NO: 1032802 - DNA, 15 bp, Homo sapiens
aatgccaagttaact

SEQ ID NO: 1032803 - DNA, 15 bp, Homo sapiens
aaatgccaagttaac

SEQ ID NO: 1032804 - DNA, 15 bp, Homo sapiens
caaatgccaagttaa

SEQ ID NO: 1032805 - DNA, 15 bp, Homo sapiens
acaaatgccaagtta

SEQ ID NO: 1032806 - DNA, 15 bp, Homo sapiens
aacaaatgccaagtt

SEQ ID NO: 1032807 - DNA, 15 bp, Homo sapiens
aaacaaatgccaagt

SEQ ID NO: 1032808 - DNA, 15 bp, Homo sapiens
taaacaaatgccaag

SEQ ID NO: 1032809 - DNA, 15 bp, Homo sapiens
ttaaacaaatgccaa

SEQ ID NO: 1032810 - DNA, 15 bp, Homo sapiens
tttaaacaaatgcca

SEQ ID NO: 1032811 - DNA, 15 bp, Homo sapiens
ttttaaacaaatgcc

SEQ ID NO: 1032812 - DNA, 15 bp, Homo sapiens
tttttaaacaaatgc

SEQ ID NO: 1032813 - DNA, 15 bp, Homo sapiens
ttttttaaacaaatg

SEQ ID NO: 1032814 - DNA, 15 bp, Homo sapiens
gttttttaaacaaat

SEQ ID NO: 1032815 - DNA, 15 bp, Homo sapiens
tgttttttaaacaaa

SEQ ID NO: 1032816 - DNA, 15 bp, Homo sapiens
ctgttttttaaacaa

SEQ ID NO: 1032817 - DNA, 15 bp, Homo sapiens
actgttttttaaaca

SEQ ID NO: 1032818 - DNA, 15 bp, Homo sapiens
aactgttttttaaac

SEQ ID NO: 1032819 - DNA, 15 bp, Homo sapiens
caactgttttttaaa

SEQ ID NO: 1032820 - DNA, 15 bp, Homo sapiens
tcaactgttttttaa

SEQ ID NO: 1032821 - DNA, 15 bp, Homo sapiens
atcaactgtttttta

SEQ ID NO: 1032822 - DNA, 15 bp, Homo sapiens
aatcaactgtttttt

SEQ ID NO: 1032823 - DNA, 15 bp, Homo sapiens
aaatcaactgttttt

SEQ ID NO: 1032824 - DNA, 15 bp, Homo sapiens
taaatcaactgtttt

SEQ ID NO: 1032825 - DNA, 15 bp, Homo sapiens
ttaaatcaactgttt

SEQ ID NO: 1032826 - DNA, 15 bp, Homo sapiens
tttaaatcaactgtt

SEQ ID NO: 1032827 - DNA, 15 bp, Homo sapiens
gtttaaatcaactgt

SEQ ID NO: 1032828 - DNA, 15 bp, Homo sapiens
ggtttaaatcaactg

SEQ ID NO: 1032829 - DNA, 15 bp, Homo sapiens
tggtttaaatcaact

SEQ ID NO: 1032830 - DNA, 15 bp, Homo sapiens
ttggtttaaatcaac

SEQ ID NO: 1032831 - DNA, 15 bp, Homo sapiens
cttggtttaaatcaa

SEQ ID NO: 1032832 - DNA, 15 bp, Homo sapiens
gcttggtttaaatca

SEQ ID NO: 1032833 - DNA, 15 bp, Homo sapiens
ggcttggtttaaatc

SEQ ID NO: 1032834 - DNA, 15 bp, Homo sapiens
aggcttggtttaaat

SEQ ID NO: 1032835 - DNA, 15 bp, Homo sapiens
gaggcttggtttaaa

SEQ ID NO: 1032836 - DNA, 15 bp, Homo sapiens
agaggcttggtttaa

SEQ ID NO: 1032837 - DNA, 15 bp, Homo sapiens
aagaggcttggttta

SEQ ID NO: 1032838 - DNA, 15 bp, Homo sapiens
aaagaggcttggttt

SEQ ID NO: 1032839 - DNA, 15 bp, Homo sapiens
gaaagaggcttggtt

SEQ ID NO: 1032840 - DNA, 15 bp, Homo sapiens
tagaaagaggcttgg

SEQ ID NO: 1032841 - DNA, 15 bp, Homo sapiens
ctagaaagaggcttg

SEQ ID NO: 1032842 - DNA, 15 bp, Homo sapiens
cctagaaagaggctt

SEQ ID NO: 1032843 - DNA, 15 bp, Homo sapiens
acctagaaagaggct

SEQ ID NO: 1032844 - DNA, 15 bp, Homo sapiens
tacctagaaagaggc

SEQ ID NO: 1032845 - DNA, 15 bp, Homo sapiens
atacctagaaagagg

SEQ ID NO: 1032846 - DNA, 15 bp, Homo sapiens
tatacctagaaagag

SEQ ID NO: 1032847 - DNA, 15 bp, Homo sapiens
atatacctagaaaga

SEQ ID NO: 1032848 - DNA, 15 bp, Homo sapiens
tatatacctagaaag

SEQ ID NO: 1032849 - DNA, 15 bp, Homo sapiens
ctatatacctagaaa

SEQ ID NO: 1032850 - DNA, 15 bp, Homo sapiens
gctatatacctagaa

SEQ ID NO: 1032851 - DNA, 15 bp, Homo sapiens
tgctatatacctaga

SEQ ID NO: 1032852 - DNA, 15 bp, Homo sapiens
atgctatatacctag

SEQ ID NO: 1032853 - DNA, 15 bp, Homo sapiens
aatgctatataccta

SEQ ID NO: 1032854 - DNA, 15 bp, Homo sapiens
taatgctatatacct

SEQ ID NO: 1032855 - DNA, 15 bp, Homo sapiens
ctaatgctatatacc

SEQ ID NO: 1032856 - DNA, 15 bp, Homo sapiens
actaatgctatatac

SEQ ID NO: 1032857 - DNA, 15 bp, Homo sapiens
gactaatgctatata

SEQ ID NO: 1032858 - DNA, 15 bp, Homo sapiens
agactaatgctatat

SEQ ID NO: 1032859 - DNA, 15 bp, Homo sapiens
tagactaatgctata

SEQ ID NO: 1032860 - DNA, 15 bp, Homo sapiens
ttagactaatgctat

SEQ ID NO: 1032861 - DNA, 15 bp, Homo sapiens
attagactaatgcta

SEQ ID NO: 1032862 - DNA, 15 bp, Homo sapiens
cattagactaatgct

SEQ ID NO: 1032863 - DNA, 15 bp, Homo sapiens
gcattagactaatgc

SEQ ID NO: 1032864 - DNA, 15 bp, Homo sapiens
ggcattagactaatg

SEQ ID NO: 1032865 - DNA, 15 bp, Homo sapiens
tggcattagactaat

SEQ ID NO: 1032866 - DNA, 15 bp, Homo sapiens
ctggcattagactaa

SEQ ID NO: 1032867 - DNA, 15 bp, Homo sapiens
actggcattagacta

SEQ ID NO: 1032868 - DNA, 15 bp, Homo sapiens
tactggcattagact

SEQ ID NO: 1032869 - DNA, 15 bp, Homo sapiens
gtactggcattagac

SEQ ID NO: 1032870 - DNA, 15 bp, Homo sapiens
agtactggcattaga

SEQ ID NO: 1032871 - DNA, 15 bp, Homo sapiens
tagtactggcattag

SEQ ID NO: 1032872 - DNA, 15 bp, Homo sapiens
ttagtactggcatta

SEQ ID NO: 1032873 - DNA, 15 bp, Homo sapiens
cttagtactggcatt

SEQ ID NO: 1032874 - DNA, 15 bp, Homo sapiens
acttagtactggcat

SEQ ID NO: 1032875 - DNA, 15 bp, Homo sapiens
aacttagtactggca

SEQ ID NO: 1032876 - DNA, 15 bp, Homo sapiens
taacttagtactggc

SEQ ID NO: 1032877 - DNA, 15 bp, Homo sapiens
gtaacttagtactgg

SEQ ID NO: 1032878 - DNA, 15 bp, Homo sapiens
ggtaacttagtactg

SEQ ID NO: 1032879 - DNA, 15 bp, Homo sapiens
gggtaacttagtact

SEQ ID NO: 1032880 - DNA, 15 bp, Homo sapiens
ggggtaacttagtac

SEQ ID NO: 1032881 - DNA, 15 bp, Homo sapiens
gggggtaacttagta

SEQ ID NO: 1032882 - DNA, 15 bp, Homo sapiens
tgggggtaacttagt

SEQ ID NO: 1032883 - DNA, 15 bp, Homo sapiens
ctgggggtaacttag

SEQ ID NO: 1032884 - DNA, 15 bp, Homo sapiens
gctgggggtaactta

SEQ ID NO: 1032885 - DNA, 15 bp, Homo sapiens
ggctgggggtaactt

SEQ ID NO: 1032886 - DNA, 15 bp, Homo sapiens
tggctgggggtaact

SEQ ID NO: 1032887 - DNA, 15 bp, Homo sapiens
ttggctgggggtaac

SEQ ID NO: 1032888 - DNA, 15 bp, Homo sapiens
tttggctgggggtaa

SEQ ID NO: 1032889 - DNA, 15 bp, Homo sapiens
ttttggctgggggta

SEQ ID NO: 1032890 - DNA, 15 bp, Homo sapiens
tttttggctgggggt

SEQ ID NO: 1032891 - DNA, 15 bp, Homo sapiens
ttttttggctggggg

SEQ ID NO: 1032892 - DNA, 15 bp, Homo sapiens
tttttttggctgggg

SEQ ID NO: 1032893 - DNA, 15 bp, Homo sapiens
atttttttggctggg

SEQ ID NO: 1032894 - DNA, 15 bp, Homo sapiens
tatttttttggctgg

SEQ ID NO: 1032895 - DNA, 15 bp, Homo sapiens
ctatttttttggctg

SEQ ID NO: 1032896 - DNA, 15 bp, Homo sapiens
tctatttttttggct

SEQ ID NO: 1032897 - DNA, 15 bp, Homo sapiens
ttctatttttttggc

SEQ ID NO: 1032898 - DNA, 15 bp, Homo sapiens
tttctatttttttgg

SEQ ID NO: 1032899 - DNA, 15 bp, Homo sapiens
ctttctatttttttg

SEQ ID NO: 1032900 - DNA, 15 bp, Homo sapiens
tctttctattttttt

SEQ ID NO: 1032901 - DNA, 15 bp, Homo sapiens
ttctttctatttttt

SEQ ID NO: 1032902 - DNA, 15 bp, Homo sapiens
ctttctttctatttt

SEQ ID NO: 1032903 - DNA, 15 bp, Homo sapiens
tctttctttctattt

SEQ ID NO: 1032904 - DNA, 15 bp, Homo sapiens
ttctttctttctatt

SEQ ID NO: 1032905 - DNA, 15 bp, Homo sapiens
tttctttctttctat

SEQ ID NO: 1032906 - DNA, 15 bp, Homo sapiens
ttttctttctttcta

SEQ ID NO: 1032907 - DNA, 15 bp, Homo sapiens
actcttttctttctt

SEQ ID NO: 1032908 - DNA, 15 bp, Homo sapiens
aactcttttctttct

SEQ ID NO: 1032909 - DNA, 15 bp, Homo sapiens
caactcttttctttc

SEQ ID NO: 1032910 - DNA, 15 bp, Homo sapiens
ccaactcttttcttt

SEQ ID NO: 1032911 - DNA, 15 bp, Homo sapiens
cccaactcttttctt

SEQ ID NO: 1032912 - DNA, 15 bp, Homo sapiens
tcccaactcttttct

SEQ ID NO: 1032913 - DNA, 15 bp, Homo sapiens
ttcccaactcttttc

SEQ ID NO: 1032914 - DNA, 15 bp, Homo sapiens
tttcccaactctttt

SEQ ID NO: 1032915 - DNA, 15 bp, Homo sapiens
ttttcccaactcttt

SEQ ID NO: 1032916 - DNA, 15 bp, Homo sapiens
attttcccaactctt

SEQ ID NO: 1032917 - DNA, 15 bp, Homo sapiens
aattttcccaactct

SEQ ID NO: 1032918 - DNA, 15 bp, Homo sapiens
aaattttcccaactc

SEQ ID NO: 1032919 - DNA, 15 bp, Homo sapiens
aaaattttcccaact

SEQ ID NO: 1032920 - DNA, 15 bp, Homo sapiens
aaaaattttcccaac

SEQ ID NO: 1032921 - DNA, 15 bp, Homo sapiens
taaaaattttcccaa

SEQ ID NO: 1032922 - DNA, 15 bp, Homo sapiens
ataaaaattttccca

SEQ ID NO: 1032923 - DNA, 15 bp, Homo sapiens
tataaaaattttccc

SEQ ID NO: 1032924 - DNA, 15 bp, Homo sapiens
atataaaaattttcc

SEQ ID NO: 1032925 - DNA, 15 bp, Homo sapiens
aatataaaaattttc

SEQ ID NO: 1032926 - DNA, 15 bp, Homo sapiens
caatataaaaatttt

SEQ ID NO: 1032927 - DNA, 15 bp, Homo sapiens
tcaatataaaaattt

SEQ ID NO: 1032928 - DNA, 15 bp, Homo sapiens
atcaatataaaaatt

SEQ ID NO: 1032929 - DNA, 15 bp, Homo sapiens
tatcaatataaaaat

SEQ ID NO: 1032930 - DNA, 15 bp, Homo sapiens
ctatcaatataaaaa

SEQ ID NO: 1032931 - DNA, 15 bp, Homo sapiens
actatcaatataaaa

SEQ ID NO: 1032932 - DNA, 15 bp, Homo sapiens
aactatcaatataaa

SEQ ID NO: 1032933 - DNA, 15 bp, Homo sapiens
aaactatcaatataa

SEQ ID NO: 1032934 - DNA, 15 bp, Homo sapiens
aaaactatcaatata

SEQ ID NO: 1032935 - DNA, 15 bp, Homo sapiens
aaaaactatcaatat

SEQ ID NO: 1032936 - DNA, 15 bp, Homo sapiens
aaaaaactatcaata

SEQ ID NO: 1032937 - DNA, 15 bp, Homo sapiens
aaaaaaactatcaat

SEQ ID NO: 1032938 - DNA, 15 bp, Homo sapiens
caaaaaaactatcaa

SEQ ID NO: 1032939 - DNA, 15 bp, Homo sapiens
acaaaaaaactatca

SEQ ID NO: 1032940 - DNA, 15 bp, Homo sapiens
aacaaaaaaactatc

SEQ ID NO: 1032941 - DNA, 15 bp, Homo sapiens
gaacaaaaaaactat

SEQ ID NO: 1032942 - DNA, 15 bp, Homo sapiens
agaacaaaaaaacta

SEQ ID NO: 1032943 - DNA, 15 bp, Homo sapiens
cagaacaaaaaaact

SEQ ID NO: 1032944 - DNA, 15 bp, Homo sapiens
acagaacaaaaaaac

SEQ ID NO: 1032945 - DNA, 15 bp, Homo sapiens
tacagaacaaaaaaa

SEQ ID NO: 1032946 - DNA, 15 bp, Homo sapiens
gtacagaacaaaaaa

SEQ ID NO: 1032947 - DNA, 15 bp, Homo sapiens
agtacagaacaaaaa

SEQ ID NO: 1032948 - DNA, 15 bp, Homo sapiens
aagtacagaacaaaa

SEQ ID NO: 1032949 - DNA, 15 bp, Homo sapiens
taagtacagaacaaa

SEQ ID NO: 1032950 - DNA, 15 bp, Homo sapiens
ttaagtacagaacaa

SEQ ID NO: 1032951 - DNA, 15 bp, Homo sapiens
tttaagtacagaaca

SEQ ID NO: 1032952 - DNA, 15 bp, Homo sapiens
ttttaagtacagaac

SEQ ID NO: 1032953 - DNA, 15 bp, Homo sapiens
gttttaagtacagaa

SEQ ID NO: 1032954 - DNA, 15 bp, Homo sapiens
tgttttaagtacaga

SEQ ID NO: 1032955 - DNA, 15 bp, Homo sapiens
atgttttaagtacag

SEQ ID NO: 1032956 - DNA, 15 bp, Homo sapiens
aatgttttaagtaca

SEQ ID NO: 1032957 - DNA, 15 bp, Homo sapiens
gaatgttttaagtac

SEQ ID NO: 1032958 - DNA, 15 bp, Homo sapiens
ggaatgttttaagta

SEQ ID NO: 1032959 - DNA, 15 bp, Homo sapiens
aggaatgttttaagt

SEQ ID NO: 1032960 - DNA, 15 bp, Homo sapiens
aaggaatgttttaag

SEQ ID NO: 1032961 - DNA, 15 bp, Homo sapiens
aaaggaatgttttaa

SEQ ID NO: 1032962 - DNA, 15 bp, Homo sapiens
aaaaggaatgtttta

SEQ ID NO: 1032963 - DNA, 15 bp, Homo sapiens
taaaaggaatgtttt

SEQ ID NO: 1032964 - DNA, 15 bp, Homo sapiens
ttaaaaggaatgttt

SEQ ID NO: 1032965 - DNA, 15 bp, Homo sapiens
cttaaaaggaatgtt

SEQ ID NO: 1032966 - DNA, 15 bp, Homo sapiens
acttaaaaggaatgt

SEQ ID NO: 1032967 - DNA, 15 bp, Homo sapiens
gacttaaaaggaatg

SEQ ID NO: 1032968 - DNA, 15 bp, Homo sapiens
agacttaaaaggaat

SEQ ID NO: 1032969 - DNA, 15 bp, Homo sapiens
tagacttaaaaggaa

SEQ ID NO: 1032970 - DNA, 15 bp, Homo sapiens
atagacttaaaagga

SEQ ID NO: 1032971 - DNA, 15 bp, Homo sapiens
tatagacttaaaagg

SEQ ID NO: 1032972 - DNA, 15 bp, Homo sapiens
atatagacttaaaag

SEQ ID NO: 1032973 - DNA, 15 bp, Homo sapiens
aatatagacttaaaa

SEQ ID NO: 1032974 - DNA, 15 bp, Homo sapiens
aaatatagacttaaa

SEQ ID NO: 1032975 - DNA, 15 bp, Homo sapiens
aaaatatagacttaa

SEQ ID NO: 1032976 - DNA, 15 bp, Homo sapiens
caaaatatagactta

SEQ ID NO: 1032977 - DNA, 15 bp, Homo sapiens
gcaaaatatagactt

SEQ ID NO: 1032978 - DNA, 15 bp, Homo sapiens
agcaaaatatagact

SEQ ID NO: 1032979 - DNA, 15 bp, Homo sapiens
aagcaaaatatagac

SEQ ID NO: 1032980 - DNA, 15 bp, Homo sapiens
caagcaaaatataga

SEQ ID NO: 1032981 - DNA, 15 bp, Homo sapiens
acaagcaaaatatag

SEQ ID NO: 1032982 - DNA, 15 bp, Homo sapiens
aacaagcaaaatata

SEQ ID NO: 1032983 - DNA, 15 bp, Homo sapiens
caacaagcaaaatat

SEQ ID NO: 1032984 - DNA, 15 bp, Homo sapiens
acaacaagcaaaata

SEQ ID NO: 1032985 - DNA, 15 bp, Homo sapiens
aacaacaagcaaaat

SEQ ID NO: 1032986 - DNA, 15 bp, Homo sapiens
aaacaacaagcaaaa

SEQ ID NO: 1032987 - DNA, 15 bp, Homo sapiens
aaaacaacaagcaaa

SEQ ID NO: 1032988 - DNA, 15 bp, Homo sapiens
caaaacaacaagcaa

SEQ ID NO: 1032989 - DNA, 15 bp, Homo sapiens
acaaaacaacaagca

SEQ ID NO: 1032990 - DNA, 15 bp, Homo sapiens
tacaaaacaacaagc

SEQ ID NO: 1032991 - DNA, 15 bp, Homo sapiens
ttacaaaacaacaag

SEQ ID NO: 1032992 - DNA, 15 bp, Homo sapiens
gttacaaaacaacaa

SEQ ID NO: 1032993 - DNA, 15 bp, Homo sapiens
cgttacaaaacaaca

SEQ ID NO: 1032994 - DNA, 15 bp, Homo sapiens
tcgttacaaaacaac

SEQ ID NO: 1032995 - DNA, 15 bp, Homo sapiens
attcgttacaaaaca

SEQ ID NO: 1032996 - DNA, 15 bp, Homo sapiens
aattcgttacaaaac

SEQ ID NO: 1032997 - DNA, 15 bp, Homo sapiens
taattcgttacaaaa

SEQ ID NO: 1032998 - DNA, 15 bp, Homo sapiens
ttaattcgttacaaa

SEQ ID NO: 1032999 - DNA, 15 bp, Homo sapiens
cttaattcgttacaa

SEQ ID NO: 1033000 - DNA, 15 bp, Homo sapiens
acttaattcgttaca

SEQ ID NO: 1033001 - DNA, 15 bp, Homo sapiens
tacttaattcgttac

SEQ ID NO: 1033002 - DNA, 15 bp, Homo sapiens
ctacttaattcgtta

SEQ ID NO: 1033003 - DNA, 15 bp, Homo sapiens
cctacttaattcgtt

SEQ ID NO: 1033004 - DNA, 15 bp, Homo sapiens
gcctacttaattcgt

SEQ ID NO: 1033005 - DNA, 15 bp, Homo sapiens
agcctacttaattcg

SEQ ID NO: 1033006 - DNA, 15 bp, Homo sapiens
tagcctacttaattc

SEQ ID NO: 1033007 - DNA, 15 bp, Homo sapiens
ttagcctacttaatt

SEQ ID NO: 1033008 - DNA, 15 bp, Homo sapiens
cttagcctacttaat

SEQ ID NO: 1033009 - DNA, 15 bp, Homo sapiens
ccttagcctacttaa

SEQ ID NO: 1033010 - DNA, 15 bp, Homo sapiens
cccttagcctactta

SEQ ID NO: 1033011 - DNA, 15 bp, Homo sapiens
tcccttagcctactt

SEQ ID NO: 1033012 - DNA, 15 bp, Homo sapiens
gtcccttagcctact

SEQ ID NO: 1033013 - DNA, 15 bp, Homo sapiens
tgtcccttagcctac

SEQ ID NO: 1033014 - DNA, 15 bp, Homo sapiens
atgtcccttagccta

SEQ ID NO: 1033015 - DNA, 15 bp, Homo sapiens
aatgtcccttagcct

SEQ ID NO: 1033016 - DNA, 15 bp, Homo sapiens
caatgtcccttagcc

SEQ ID NO: 1033017 - DNA, 15 bp, Homo sapiens
acaatgtcccttagc

SEQ ID NO: 1033018 - DNA, 15 bp, Homo sapiens
gacaatgtcccttag

SEQ ID NO: 1033019 - DNA, 15 bp, Homo sapiens
agacaatgtccctta

SEQ ID NO: 1033020 - DNA, 15 bp, Homo sapiens
cagacaatgtccctt

SEQ ID NO: 1033021 - DNA, 15 bp, Homo sapiens
acagacaatgtccct

SEQ ID NO: 1033022 - DNA, 15 bp, Homo sapiens
aacagacaatgtccc

SEQ ID NO: 1033023 - DNA, 15 bp, Homo sapiens
taacagacaatgtcc

SEQ ID NO: 1033024 - DNA, 15 bp, Homo sapiens
gtaacagacaatgtc

SEQ ID NO: 1033025 - DNA, 15 bp, Homo sapiens
cgtaacagacaatgt

SEQ ID NO: 1033026 - DNA, 15 bp, Homo sapiens
acgtaacagacaatg

SEQ ID NO: 1033027 - DNA, 15 bp, Homo sapiens
tacgtaacagacaat

SEQ ID NO: 1033028 - DNA, 15 bp, Homo sapiens
gtacgtaacagacaa

SEQ ID NO: 1033029 - DNA, 15 bp, Homo sapiens
tgtacgtaacagaca

SEQ ID NO: 1033030 - DNA, 15 bp, Homo sapiens
gtgtacgtaacagac

SEQ ID NO: 1033031 - DNA, 15 bp, Homo sapiens
tgtgtacgtaacaga

SEQ ID NO: 1033032 - DNA, 15 bp, Homo sapiens
gtgtgtacgtaacag

SEQ ID NO: 1033033 - DNA, 15 bp, Homo sapiens
tgtgtgtacgtaaca

SEQ ID NO: 1033034 - DNA, 15 bp, Homo sapiens
ttgtgtgtacgtaac

SEQ ID NO: 1033035 - DNA, 15 bp, Homo sapiens
tttgtgtgtacgtaa

SEQ ID NO: 1033036 - DNA, 15 bp, Homo sapiens
gtttgtgtgtacgta

SEQ ID NO: 1033037 - DNA, 15 bp, Homo sapiens
tgtttgtgtgtacgt

SEQ ID NO: 1033038 - DNA, 15 bp, Homo sapiens
gtgtttgtgtgtacg

SEQ ID NO: 1033039 - DNA, 15 bp, Homo sapiens
tgtgtttgtgtgtac

SEQ ID NO: 1033040 - DNA, 15 bp, Homo sapiens
ggtgtgtgtttgtgt

SEQ ID NO: 1033041 - DNA, 15 bp, Homo sapiens
aggtgtgtgtttgtg

SEQ ID NO: 1033042 - DNA, 15 bp, Homo sapiens
taggtgtgtgtttgt

SEQ ID NO: 1033043 - DNA, 15 bp, Homo sapiens
gtaggtgtgtgtttg

SEQ ID NO: 1033044 - DNA, 15 bp, Homo sapiens
tgtaggtgtgtgttt

SEQ ID NO: 1033045 - DNA, 15 bp, Homo sapiens
gtgtaggtgtgtgtt

SEQ ID NO: 1033046 - DNA, 15 bp, Homo sapiens
tgtgtaggtgtgtgt

SEQ ID NO: 1033047 - DNA, 15 bp, Homo sapiens
gtgtgtaggtgtgtg

SEQ ID NO: 1033048 - DNA, 15 bp, Homo sapiens
tgtgtgtaggtgtgt

SEQ ID NO: 1033049 - DNA, 15 bp, Homo sapiens
gtgtgtgtaggtgtg

SEQ ID NO: 1033050 - DNA, 15 bp, Homo sapiens
tgtgtgtgtaggtgt

SEQ ID NO: 1033051 - DNA, 15 bp, Homo sapiens
ttgtgtgtgtaggtg

SEQ ID NO: 1033052 - DNA, 15 bp, Homo sapiens
attgtgtgtgtaggt

SEQ ID NO: 1033053 - DNA, 15 bp, Homo sapiens
gattgtgtgtgtagg

SEQ ID NO: 1033054 - DNA, 15 bp, Homo sapiens
agattgtgtgtgtag

SEQ ID NO: 1033055 - DNA, 15 bp, Homo sapiens
gagattgtgtgtgta

SEQ ID NO: 1033056 - DNA, 15 bp, Homo sapiens
tgagattgtgtgtgt

SEQ ID NO: 1033057 - DNA, 15 bp, Homo sapiens
atgagattgtgtgtg

SEQ ID NO: 1033058 - DNA, 15 bp, Homo sapiens
tatgagattgtgtgt

SEQ ID NO: 1033059 - DNA, 15 bp, Homo sapiens
ttatgagattgtgtg

SEQ ID NO: 1033060 - DNA, 15 bp, Homo sapiens
tttatgagattgtgt

SEQ ID NO: 1033061 - DNA, 15 bp, Homo sapiens
ttttatgagattgtg

SEQ ID NO: 1033062 - DNA, 15 bp, Homo sapiens
gttttatgagattgt

SEQ ID NO: 1033063 - DNA, 15 bp, Homo sapiens
ggttttatgagattg

SEQ ID NO: 1033064 - DNA, 15 bp, Homo sapiens
aggttttatgagatt

SEQ ID NO: 1033065 - DNA, 15 bp, Homo sapiens
aaggttttatgagat

SEQ ID NO: 1033066 - DNA, 15 bp, Homo sapiens
gaaggttttatgaga

SEQ ID NO: 1033067 - DNA, 15 bp, Homo sapiens
tgaaggttttatgag

SEQ ID NO: 1033068 - DNA, 15 bp, Homo sapiens
ttgaaggttttatga

SEQ ID NO: 1033069 - DNA, 15 bp, Homo sapiens
gttgaaggttttatg

SEQ ID NO: 1033070 - DNA, 15 bp, Homo sapiens
ggttgaaggttttat

SEQ ID NO: 1033071 - DNA, 15 bp, Homo sapiens
tggttgaaggtttta

SEQ ID NO: 1033072 - DNA, 15 bp, Homo sapiens
ctggttgaaggtttt

SEQ ID NO: 1033073 - DNA, 15 bp, Homo sapiens
gctggttgaaggttt

SEQ ID NO: 1033074 - DNA, 15 bp, Homo sapiens
ggctggttgaaggtt

SEQ ID NO: 1033075 - DNA, 15 bp, Homo sapiens
tggctggttgaaggt

SEQ ID NO: 1033076 - DNA, 15 bp, Homo sapiens
gtggctggttgaagg

SEQ ID NO: 1033077 - DNA, 15 bp, Homo sapiens
tgtggctggttgaag

SEQ ID NO: 1033078 - DNA, 15 bp, Homo sapiens
ttgtggctggttgaa

SEQ ID NO: 1033079 - DNA, 15 bp, Homo sapiens
attgtggctggttga

SEQ ID NO: 1033080 - DNA, 15 bp, Homo sapiens
tattgtggctggttg

SEQ ID NO: 1033081 - DNA, 15 bp, Homo sapiens
ctattgtggctggtt

SEQ ID NO: 1033082 - DNA, 15 bp, Homo sapiens
gctattgtggctggt

SEQ ID NO: 1033083 - DNA, 15 bp, Homo sapiens
agctattgtggctgg

SEQ ID NO: 1033084 - DNA, 15 bp, Homo sapiens
aagctattgtggctg

SEQ ID NO: 1033085 - DNA, 15 bp, Homo sapiens
aaagctattgtggct

SEQ ID NO: 1033086 - DNA, 15 bp, Homo sapiens
aaaagctattgtggc

SEQ ID NO: 1033087 - DNA, 15 bp, Homo sapiens
aaaaagctattgtgg

SEQ ID NO: 1033088 - DNA, 15 bp, Homo sapiens
aaaaaagctattgtg

SEQ ID NO: 1033089 - DNA, 15 bp, Homo sapiens
gaaaaaagctattgt

SEQ ID NO: 1033090 - DNA, 15 bp, Homo sapiens
cgaaaaaagctattg

SEQ ID NO: 1033091 - DNA, 15 bp, Homo sapiens
acgaaaaaagctatt

SEQ ID NO: 1033092 - DNA, 15 bp, Homo sapiens
tacgaaaaaagctat

SEQ ID NO: 1033093 - DNA, 15 bp, Homo sapiens
ttacgaaaaaagcta

SEQ ID NO: 1033094 - DNA, 15 bp, Homo sapiens
attacgaaaaaagct

SEQ ID NO: 1033095 - DNA, 15 bp, Homo sapiens
gattacgaaaaaagc

SEQ ID NO: 1033096 - DNA, 15 bp, Homo sapiens
agattacgaaaaaag

SEQ ID NO: 1033097 - DNA, 15 bp, Homo sapiens
gagattacgaaaaaa

SEQ ID NO: 1033098 - DNA, 15 bp, Homo sapiens
tgagattacgaaaaa

SEQ ID NO: 1033099 - DNA, 15 bp, Homo sapiens
ctgagattacgaaaa

SEQ ID NO: 1033100 - DNA, 15 bp, Homo sapiens
tctgagattacgaaa

SEQ ID NO: 1033101 - DNA, 15 bp, Homo sapiens
ctctgagattacgaa

SEQ ID NO: 1033102 - DNA, 15 bp, Homo sapiens
actctgagattacga

SEQ ID NO: 1033103 - DNA, 15 bp, Homo sapiens
aactctgagattacg

SEQ ID NO: 1033104 - DNA, 15 bp, Homo sapiens
taactctgagattac

SEQ ID NO: 1033105 - DNA, 15 bp, Homo sapiens
ataactctgagatta

SEQ ID NO: 1033106 - DNA, 15 bp, Homo sapiens
tataactctgagatt

SEQ ID NO: 1033107 - DNA, 15 bp, Homo sapiens
gtataactctgagat

SEQ ID NO: 1033108 - DNA, 15 bp, Homo sapiens
tgtataactctgaga

SEQ ID NO: 1033109 - DNA, 15 bp, Homo sapiens
ctgtataactctgag

SEQ ID NO: 1033110 - DNA, 15 bp, Homo sapiens
cctgtataactctga

SEQ ID NO: 1033111 - DNA, 15 bp, Homo sapiens
acctgtataactctg

SEQ ID NO: 1033112 - DNA, 15 bp, Homo sapiens
cacctgtataactct

SEQ ID NO: 1033113 - DNA, 15 bp, Homo sapiens
acacctgtataactc

SEQ ID NO: 1033114 - DNA, 15 bp, Homo sapiens
gacacctgtataact

SEQ ID NO: 1033115 - DNA, 15 bp, Homo sapiens
agacacctgtataac

SEQ ID NO: 1033116 - DNA, 15 bp, Homo sapiens
aagacacctgtataa

SEQ ID NO: 1033117 - DNA, 15 bp, Homo sapiens
aaagacacctgtata

SEQ ID NO: 1033118 - DNA, 15 bp, Homo sapiens
aaaagacacctgtat

SEQ ID NO: 1033119 - DNA, 15 bp, Homo sapiens
gaaaagacacctgta

SEQ ID NO: 1033120 - DNA, 15 bp, Homo sapiens
ggaaaagacacctgt

SEQ ID NO: 1033121 - DNA, 15 bp, Homo sapiens
aggaaaagacacctg

SEQ ID NO: 1033122 - DNA, 15 bp, Homo sapiens
gaggaaaagacacct

SEQ ID NO: 1033123 - DNA, 15 bp, Homo sapiens
agaggaaaagacacc

SEQ ID NO: 1033124 - DNA, 15 bp, Homo sapiens
cagaggaaaagacac

SEQ ID NO: 1033125 - DNA, 15 bp, Homo sapiens
gcagaggaaaagaca

SEQ ID NO: 1033126 - DNA, 15 bp, Homo sapiens
tgcagaggaaaagac

SEQ ID NO: 1033127 - DNA, 15 bp, Homo sapiens
ctgcagaggaaaaga

SEQ ID NO: 1033128 - DNA, 15 bp, Homo sapiens
tctgcagaggaaaag

SEQ ID NO: 1033129 - DNA, 15 bp, Homo sapiens
ttctgcagaggaaaa

SEQ ID NO: 1033130 - DNA, 15 bp, Homo sapiens
cttctgcagaggaaa

SEQ ID NO: 1033131 - DNA, 15 bp, Homo sapiens
tcttctgcagaggaa

SEQ ID NO: 1033132 - DNA, 15 bp, Homo sapiens
gtcttctgcagagga

SEQ ID NO: 1033133 - DNA, 15 bp, Homo sapiens
agtcttctgcagagg

SEQ ID NO: 1033134 - DNA, 15 bp, Homo sapiens
tagtcttctgcagag

SEQ ID NO: 1033135 - DNA, 15 bp, Homo sapiens
gtagtcttctgcaga

SEQ ID NO: 1033136 - DNA, 15 bp, Homo sapiens
tgtagtcttctgcag

SEQ ID NO: 1033137 - DNA, 15 bp, Homo sapiens
gtgtagtcttctgca

SEQ ID NO: 1033138 - DNA, 15 bp, Homo sapiens
ggtgtagtcttctgc

SEQ ID NO: 1033139 - DNA, 15 bp, Homo sapiens
gggtgtagtcttctg

SEQ ID NO: 1033140 - DNA, 15 bp, Homo sapiens
agggtgtagtcttct

SEQ ID NO: 1033141 - DNA, 15 bp, Homo sapiens
cagggtgtagtcttc

SEQ ID NO: 1033142 - DNA, 15 bp, Homo sapiens
acagggtgtagtctt

SEQ ID NO: 1033143 - DNA, 15 bp, Homo sapiens
aacagggtgtagtct

SEQ ID NO: 1033144 - DNA, 15 bp, Homo sapiens
aaacagggtgtagtc

SEQ ID NO: 1033145 - DNA, 15 bp, Homo sapiens
gaaacagggtgtagt

SEQ ID NO: 1033146 - DNA, 15 bp, Homo sapiens
tgaaacagggtgtag

SEQ ID NO: 1033147 - DNA, 15 bp, Homo sapiens
ttgaaacagggtgta

SEQ ID NO: 1033148 - DNA, 15 bp, Homo sapiens
attgaaacagggtgt

SEQ ID NO: 1033149 - DNA, 15 bp, Homo sapiens
aattgaaacagggtg

SEQ ID NO: 1033150 - DNA, 15 bp, Homo sapiens
aaattgaaacagggt

SEQ ID NO: 1033151 - DNA, 15 bp, Homo sapiens
gaaattgaaacaggg

SEQ ID NO: 1033152 - DNA, 15 bp, Homo sapiens
agaaattgaaacagg

SEQ ID NO: 1033153 - DNA, 15 bp, Homo sapiens
cagaaattgaaacag

SEQ ID NO: 1033154 - DNA, 15 bp, Homo sapiens
acagaaattgaaaca

SEQ ID NO: 1033155 - DNA, 15 bp, Homo sapiens
aacagaaattgaaac

SEQ ID NO: 1033156 - DNA, 15 bp, Homo sapiens
caacagaaattgaaa

SEQ ID NO: 1033157 - DNA, 15 bp, Homo sapiens
gcaacagaaattgaa

SEQ ID NO: 1033158 - DNA, 15 bp, Homo sapiens
agcaacagaaattga

SEQ ID NO: 1033159 - DNA, 15 bp, Homo sapiens
aagcaacagaaattg

SEQ ID NO: 1033160 - DNA, 15 bp, Homo sapiens
aaagcaacagaaatt

SEQ ID NO: 1033161 - DNA, 15 bp, Homo sapiens
taaagcaacagaaat

SEQ ID NO: 1033162 - DNA, 15 bp, Homo sapiens
ttaaagcaacagaaa

SEQ ID NO: 1033163 - DNA, 15 bp, Homo sapiens
attaaagcaacagaa

SEQ ID NO: 1033164 - DNA, 15 bp, Homo sapiens
cattaaagcaacaga

SEQ ID NO: 1033165 - DNA, 15 bp, Homo sapiens
tcattaaagcaacag

SEQ ID NO: 1033166 - DNA, 15 bp, Homo sapiens
atcattaaagcaaca

SEQ ID NO: 1033167 - DNA, 15 bp, Homo sapiens
aatcattaaagcaac

SEQ ID NO: 1033168 - DNA, 15 bp, Homo sapiens
aaatcattaaagcaa

SEQ ID NO: 1033169 - DNA, 15 bp, Homo sapiens
gaaatcattaaagca

SEQ ID NO: 1033170 - DNA, 15 bp, Homo sapiens
tgaaatcattaaagc

SEQ ID NO: 1033171 - DNA, 15 bp, Homo sapiens
atgaaatcattaaag

SEQ ID NO: 1033172 - DNA, 15 bp, Homo sapiens
tatgaaatcattaaa

SEQ ID NO: 1033173 - DNA, 15 bp, Homo sapiens
atatgaaatcattaa

SEQ ID NO: 1033174 - DNA, 15 bp, Homo sapiens
gatatgaaatcatta

SEQ ID NO: 1033175 - DNA, 15 bp, Homo sapiens
agatatgaaatcatt

SEQ ID NO: 1033176 - DNA, 15 bp, Homo sapiens
tagatatgaaatcat

SEQ ID NO: 1033177 - DNA, 15 bp, Homo sapiens
atagatatgaaatca

SEQ ID NO: 1033178 - DNA, 15 bp, Homo sapiens
tatagatatgaaatc

SEQ ID NO: 1033179 - DNA, 15 bp, Homo sapiens
ctatagatatgaaat

SEQ ID NO: 1033180 - DNA, 15 bp, Homo sapiens
gctatagatatgaaa

SEQ ID NO: 1033181 - DNA, 15 bp, Homo sapiens
cgctatagatatgaa

SEQ ID NO: 1033182 - DNA, 15 bp, Homo sapiens
acgctatagatatga

SEQ ID NO: 1033183 - DNA, 15 bp, Homo sapiens
aacgctatagatatg

SEQ ID NO: 1033184 - DNA, 15 bp, Homo sapiens
gaacgctatagatat

SEQ ID NO: 1033185 - DNA, 15 bp, Homo sapiens
agaacgctatagata

SEQ ID NO: 1033186 - DNA, 15 bp, Homo sapiens
aagaacgctatagat

SEQ ID NO: 1033187 - DNA, 15 bp, Homo sapiens
gaagaacgctataga

SEQ ID NO: 1033188 - DNA, 15 bp, Homo sapiens
ggaagaacgctatag

SEQ ID NO: 1033189 - DNA, 15 bp, Homo sapiens
gggaagaacgctata

SEQ ID NO: 1033190 - DNA, 15 bp, Homo sapiens
tgggaagaacgctat

SEQ ID NO: 1033191 - DNA, 15 bp, Homo sapiens
atgggaagaacgcta

SEQ ID NO: 1033192 - DNA, 15 bp, Homo sapiens
aatgggaagaacgct

SEQ ID NO: 1033193 - DNA, 15 bp, Homo sapiens
taatgggaagaacgc

SEQ ID NO: 1033194 - DNA, 15 bp, Homo sapiens
ataatgggaagaacg

SEQ ID NO: 1033195 - DNA, 15 bp, Homo sapiens
cataatgggaagaac

SEQ ID NO: 1033196 - DNA, 15 bp, Homo sapiens
acataatgggaagaa

SEQ ID NO: 1033197 - DNA, 15 bp, Homo sapiens
tacataatgggaaga

SEQ ID NO: 1033198 - DNA, 15 bp, Homo sapiens
atacataatgggaag

SEQ ID NO: 1033199 - DNA, 15 bp, Homo sapiens
aatacataatgggaa

SEQ ID NO: 1033200 - DNA, 15 bp, Homo sapiens
taatacataatggga

SEQ ID NO: 1033201 - DNA, 15 bp, Homo sapiens
ttaatacataatggg

SEQ ID NO: 1033202 - DNA, 15 bp, Homo sapiens
attaatacataatgg

SEQ ID NO: 1033203 - DNA, 15 bp, Homo sapiens
aattaatacataatg

SEQ ID NO: 1033204 - DNA, 15 bp, Homo sapiens
caattaatacataat

SEQ ID NO: 1033205 - DNA, 15 bp, Homo sapiens
tcaattaatacataa

SEQ ID NO: 1033206 - DNA, 15 bp, Homo sapiens
atcaattaatacata

SEQ ID NO: 1033207 - DNA, 15 bp, Homo sapiens
gatcaattaatacat

SEQ ID NO: 1033208 - DNA, 15 bp, Homo sapiens
ggatcaattaataca

SEQ ID NO: 1033209 - DNA, 15 bp, Homo sapiens
tggatcaattaatac

SEQ ID NO: 1033210 - DNA, 15 bp, Homo sapiens
atggatcaattaata

SEQ ID NO: 1033211 - DNA, 15 bp, Homo sapiens
catggatcaattaat

SEQ ID NO: 1033212 - DNA, 15 bp, Homo sapiens
ccatggatcaattaa

SEQ ID NO: 1033213 - DNA, 15 bp, Homo sapiens
cccatggatcaatta

SEQ ID NO: 1033214 - DNA, 15 bp, Homo sapiens
tcccatggatcaatt

SEQ ID NO: 1033215 - DNA, 15 bp, Homo sapiens
atcccatggatcaat

SEQ ID NO: 1033216 - DNA, 15 bp, Homo sapiens
catcccatggatcaa

SEQ ID NO: 1033217 - DNA, 15 bp, Homo sapiens
tcatcccatggatca

SEQ ID NO: 1033218 - DNA, 15 bp, Homo sapiens
atcatcccatggatc

SEQ ID NO: 1033219 - DNA, 15 bp, Homo sapiens
tatcatcccatggat

SEQ ID NO: 1033220 - DNA, 15 bp, Homo sapiens
atatcatcccatgga

SEQ ID NO: 1033221 - DNA, 15 bp, Homo sapiens
gatatcatcccatgg

SEQ ID NO: 1033222 - DNA, 15 bp, Homo sapiens
tgatatcatcccatg

SEQ ID NO: 1033223 - DNA, 15 bp, Homo sapiens
atgatatcatcccat

SEQ ID NO: 1033224 - DNA, 15 bp, Homo sapiens
aatgatatcatccca

SEQ ID NO: 1033225 - DNA, 15 bp, Homo sapiens
taatgatatcatccc

SEQ ID NO: 1033226 - DNA, 15 bp, Homo sapiens
ttaatgatatcatcc

SEQ ID NO: 1033227 - DNA, 15 bp, Homo sapiens
cttaatgatatcatc

SEQ ID NO: 1033228 - DNA, 15 bp, Homo sapiens
acttaatgatatcat

SEQ ID NO: 1033229 - DNA, 15 bp, Homo sapiens
cacttaatgatatca

SEQ ID NO: 1033230 - DNA, 15 bp, Homo sapiens
tcacttaatgatatc

SEQ ID NO: 1033231 - DNA, 15 bp, Homo sapiens
atcacttaatgatat

SEQ ID NO: 1033232 - DNA, 15 bp, Homo sapiens
catcacttaatgata

SEQ ID NO: 1033233 - DNA, 15 bp, Homo sapiens
acatcacttaatgat

SEQ ID NO: 1033234 - DNA, 15 bp, Homo sapiens
gacatcacttaatga

SEQ ID NO: 1033235 - DNA, 15 bp, Homo sapiens
tgacatcacttaatg

SEQ ID NO: 1033236 - DNA, 15 bp, Homo sapiens
gtgacatcacttaat

SEQ ID NO: 1033237 - DNA, 15 bp, Homo sapiens
agtgacatcacttaa

SEQ ID NO: 1033238 - DNA, 15 bp, Homo sapiens
gagtgacatcactta

SEQ ID NO: 1033239 - DNA, 15 bp, Homo sapiens
agagtgacatcactt

SEQ ID NO: 1033240 - DNA, 15 bp, Homo sapiens
aagagtgacatcact

SEQ ID NO: 1033241 - DNA, 15 bp, Homo sapiens
aaagagtgacatcac

SEQ ID NO: 1033242 - DNA, 15 bp, Homo sapiens
caaagagtgacatca

SEQ ID NO: 1033243 - DNA, 15 bp, Homo sapiens
acaaagagtgacatc

SEQ ID NO: 1033244 - DNA, 15 bp, Homo sapiens
cacaaagagtgacat

SEQ ID NO: 1033245 - DNA, 15 bp, Homo sapiens
acacaaagagtgaca

SEQ ID NO: 1033246 - DNA, 15 bp, Homo sapiens
tacacaaagagtgac

SEQ ID NO: 1033247 - DNA, 15 bp, Homo sapiens
atacacaaagagtga

SEQ ID NO: 1033248 - DNA, 15 bp, Homo sapiens
aatacacaaagagtg

SEQ ID NO: 1033249 - DNA, 15 bp, Homo sapiens
taatacacaaagagt

SEQ ID NO: 1033250 - DNA, 15 bp, Homo sapiens
gtaatacacaaagag

SEQ ID NO: 1033251 - DNA, 15 bp, Homo sapiens
tgtaatacacaaaga

SEQ ID NO: 1033252 - DNA, 15 bp, Homo sapiens
ctgtaatacacaaag

SEQ ID NO: 1033253 - DNA, 15 bp, Homo sapiens
actgtaatacacaaa

SEQ ID NO: 1033254 - DNA, 15 bp, Homo sapiens
aactgtaatacacaa

SEQ ID NO: 1033255 - DNA, 15 bp, Homo sapiens
gaactgtaatacaca

SEQ ID NO: 1033256 - DNA, 15 bp, Homo sapiens
agaactgtaatacac

SEQ ID NO: 1033257 - DNA, 15 bp, Homo sapiens
cagaactgtaataca

SEQ ID NO: 1033258 - DNA, 15 bp, Homo sapiens
gcagaactgtaatac

SEQ ID NO: 1033259 - DNA, 15 bp, Homo sapiens
ggcagaactgtaata

SEQ ID NO: 1033260 - DNA, 15 bp, Homo sapiens
tggcagaactgtaat

SEQ ID NO: 1033261 - DNA, 15 bp, Homo sapiens
gtggcagaactgtaa

SEQ ID NO: 1033262 - DNA, 15 bp, Homo sapiens
agtggcagaactgta

SEQ ID NO: 1033263 - DNA, 15 bp, Homo sapiens
cagtggcagaactgt

SEQ ID NO: 1033264 - DNA, 15 bp, Homo sapiens
tcagtggcagaactg

SEQ ID NO: 1033265 - DNA, 15 bp, Homo sapiens
gtcagtggcagaact

SEQ ID NO: 1033266 - DNA, 15 bp, Homo sapiens
ggtcagtggcagaac

SEQ ID NO: 1033267 - DNA, 15 bp, Homo sapiens
aggtcagtggcagaa

SEQ ID NO: 1033268 - DNA, 15 bp, Homo sapiens
caggtcagtggcaga

SEQ ID NO: 1033269 - DNA, 15 bp, Homo sapiens
tcaggtcagtggcag

SEQ ID NO: 1033270 - DNA, 15 bp, Homo sapiens
atcaggtcagtggca

SEQ ID NO: 1033271 - DNA, 15 bp, Homo sapiens
tatcaggtcagtggc

SEQ ID NO: 1033272 - DNA, 15 bp, Homo sapiens
ctatcaggtcagtgg

SEQ ID NO: 1033273 - DNA, 15 bp, Homo sapiens
tctatcaggtcagtg

SEQ ID NO: 1033274 - DNA, 15 bp, Homo sapiens
gtctatcaggtcagt

SEQ ID NO: 1033275 - DNA, 15 bp, Homo sapiens
ggtctatcaggtcag

SEQ ID NO: 1033276 - DNA, 15 bp, Homo sapiens
gggtctatcaggtca

SEQ ID NO: 1033277 - DNA, 15 bp, Homo sapiens
tgggtctatcaggtc

SEQ ID NO: 1033278 - DNA, 15 bp, Homo sapiens
gtgggtctatcaggt

SEQ ID NO: 1033279 - DNA, 15 bp, Homo sapiens
ggtgggtctatcagg

SEQ ID NO: 1033280 - DNA, 15 bp, Homo sapiens
tggtgggtctatcag

SEQ ID NO: 1033281 - DNA, 15 bp, Homo sapiens
atggtgggtctatca

SEQ ID NO: 1033282 - DNA, 15 bp, Homo sapiens
gatggtgggtctatc

SEQ ID NO: 1033283 - DNA, 15 bp, Homo sapiens
tgatggtgggtctat

SEQ ID NO: 1033284 - DNA, 15 bp, Homo sapiens
ctgatggtgggtcta

SEQ ID NO: 1033285 - DNA, 15 bp, Homo sapiens
actgatggtgggtct

SEQ ID NO: 1033286 - DNA, 15 bp, Homo sapiens
aactgatggtgggtc

SEQ ID NO: 1033287 - DNA, 15 bp, Homo sapiens
caactgatggtgggt

SEQ ID NO: 1033288 - DNA, 15 bp, Homo sapiens
gcaactgatggtggg

SEQ ID NO: 1033289 - DNA, 15 bp, Homo sapiens
ggcaactgatggtgg

SEQ ID NO: 1033290 - DNA, 15 bp, Homo sapiens
aggcaactgatggtg

SEQ ID NO: 1033291 - DNA, 15 bp, Homo sapiens
caggcaactgatggt

SEQ ID NO: 1033292 - DNA, 15 bp, Homo sapiens
acaggcaactgatgg

SEQ ID NO: 1033293 - DNA, 15 bp, Homo sapiens
cacaggcaactgatg

SEQ ID NO: 1033294 - DNA, 15 bp, Homo sapiens
gcacaggcaactgat

SEQ ID NO: 1033295 - DNA, 15 bp, Homo sapiens
tgcacaggcaactga

SEQ ID NO: 1033296 - DNA, 15 bp, Homo sapiens
gtgcacaggcaactg

SEQ ID NO: 1033297 - DNA, 15 bp, Homo sapiens
agtgcacaggcaact

SEQ ID NO: 1033298 - DNA, 15 bp, Homo sapiens
cagtgcacaggcaac

SEQ ID NO: 1033299 - DNA, 15 bp, Homo sapiens
tcagtgcacaggcaa

SEQ ID NO: 1033300 - DNA, 15 bp, Homo sapiens
ctcagtgcacaggca

SEQ ID NO: 1033301 - DNA, 15 bp, Homo sapiens
tctcagtgcacaggc

SEQ ID NO: 1033302 - DNA, 15 bp, Homo sapiens
atctcagtgcacagg

SEQ ID NO: 1033303 - DNA, 15 bp, Homo sapiens
catctcagtgcacag

SEQ ID NO: 1033304 - DNA, 15 bp, Homo sapiens
aacatctcagtgcac

SEQ ID NO: 1033305 - DNA, 15 bp, Homo sapiens
aaacatctcagtgca

SEQ ID NO: 1033306 - DNA, 15 bp, Homo sapiens
gaaacatctcagtgc

SEQ ID NO: 1033307 - DNA, 15 bp, Homo sapiens
ggaaacatctcagtg

SEQ ID NO: 1033308 - DNA, 15 bp, Homo sapiens
gggaaacatctcagt

SEQ ID NO: 1033309 - DNA, 15 bp, Homo sapiens
ggggaaacatctcag

SEQ ID NO: 1033310 - DNA, 15 bp, Homo sapiens
tggggaaacatctca

SEQ ID NO: 1033311 - DNA, 15 bp, Homo sapiens
ctggggaaacatctc

SEQ ID NO: 1033312 - DNA, 15 bp, Homo sapiens
tctggggaaacatct

SEQ ID NO: 1033313 - DNA, 15 bp, Homo sapiens
ctctggggaaacatc

SEQ ID NO: 1033314 - DNA, 15 bp, Homo sapiens
cctctggggaaacat

SEQ ID NO: 1033315 - DNA, 15 bp, Homo sapiens
gcctctggggaaaca

SEQ ID NO: 1033316 - DNA, 15 bp, Homo sapiens
agcctctggggaaac

SEQ ID NO: 1033317 - DNA, 15 bp, Homo sapiens
tagcctctggggaaa

SEQ ID NO: 1033318 - DNA, 15 bp, Homo sapiens
atagcctctggggaa

SEQ ID NO: 1033319 - DNA, 15 bp, Homo sapiens
catagcctctgggga

SEQ ID NO: 1033320 - DNA, 15 bp, Homo sapiens
ccatagcctctgggg

SEQ ID NO: 1033321 - DNA, 15 bp, Homo sapiens
tccatagcctctggg

SEQ ID NO: 1033322 - DNA, 15 bp, Homo sapiens
atccatagcctctgg

SEQ ID NO: 1033323 - DNA, 15 bp, Homo sapiens
tatccatagcctctg

SEQ ID NO: 1033324 - DNA, 15 bp, Homo sapiens
ctatccatagcctct

SEQ ID NO: 1033325 - DNA, 15 bp, Homo sapiens
cctatccatagcctc

SEQ ID NO: 1033326 - DNA, 15 bp, Homo sapiens
ccctatccatagcct

SEQ ID NO: 1033327 - DNA, 15 bp, Homo sapiens
accctatccatagcc

SEQ ID NO: 1033328 - DNA, 15 bp, Homo sapiens
aaccctatccatagc

SEQ ID NO: 1033329 - DNA, 15 bp, Homo sapiens
taaccctatccatag

SEQ ID NO: 1033330 - DNA, 15 bp, Homo sapiens
ataaccctatccata

SEQ ID NO: 1033331 - DNA, 15 bp, Homo sapiens
tataaccctatccat

SEQ ID NO: 1033332 - DNA, 15 bp, Homo sapiens
atataaccctatcca

SEQ ID NO: 1033333 - DNA, 15 bp, Homo sapiens
catataaccctatcc

SEQ ID NO: 1033334 - DNA, 15 bp, Homo sapiens
acatataaccctatc

SEQ ID NO: 1033335 - DNA, 15 bp, Homo sapiens
gacatataaccctat

SEQ ID NO: 1033336 - DNA, 15 bp, Homo sapiens
ggacatataacccta

SEQ ID NO: 1033337 - DNA, 15 bp, Homo sapiens
gggacatataaccct

SEQ ID NO: 1033338 - DNA, 15 bp, Homo sapiens
ggggacatataaccc

SEQ ID NO: 1033339 - DNA, 15 bp, Homo sapiens
tggggacatataacc

SEQ ID NO: 1033340 - DNA, 15 bp, Homo sapiens
gtggggacatataac

SEQ ID NO: 1033341 - DNA, 15 bp, Homo sapiens
tgtggggacatataa

SEQ ID NO: 1033342 - DNA, 15 bp, Homo sapiens
gtgtggggacatata

SEQ ID NO: 1033343 - DNA, 15 bp, Homo sapiens
agtgtggggacatat

SEQ ID NO: 1033344 - DNA, 15 bp, Homo sapiens
tagtgtggggacata

SEQ ID NO: 1033345 - DNA, 15 bp, Homo sapiens
atagtgtggggacat

SEQ ID NO: 1033346 - DNA, 15 bp, Homo sapiens
gatagtgtggggaca

SEQ ID NO: 1033347 - DNA, 15 bp, Homo sapiens
agatagtgtggggac

SEQ ID NO: 1033348 - DNA, 15 bp, Homo sapiens
cagatagtgtgggga

SEQ ID NO: 1033349 - DNA, 15 bp, Homo sapiens
gcagatagtgtgggg

SEQ ID NO: 1033350 - DNA, 15 bp, Homo sapiens
tgcagatagtgtggg

SEQ ID NO: 1033351 - DNA, 15 bp, Homo sapiens
ctgcagatagtgtgg

SEQ ID NO: 1033352 - DNA, 15 bp, Homo sapiens
cctgcagatagtgtg

SEQ ID NO: 1033353 - DNA, 15 bp, Homo sapiens
ccctgcagatagtgt

SEQ ID NO: 1033354 - DNA, 15 bp, Homo sapiens
gccctgcagatagtg

SEQ ID NO: 1033355 - DNA, 15 bp, Homo sapiens
ggccctgcagatagt

SEQ ID NO: 1033356 - DNA, 15 bp, Homo sapiens
tggccctgcagatag

SEQ ID NO: 1033357 - DNA, 15 bp, Homo sapiens
ttggccctgcagata

SEQ ID NO: 1033358 - DNA, 15 bp, Homo sapiens
attggccctgcagat

SEQ ID NO: 1033359 - DNA, 15 bp, Homo sapiens
tattggccctgcaga

SEQ ID NO: 1033360 - DNA, 15 bp, Homo sapiens
atattggccctgcag

SEQ ID NO: 1033361 - DNA, 15 bp, Homo sapiens
tatattggccctgca

SEQ ID NO: 1033362 - DNA, 15 bp, Homo sapiens
ctatattggccctgc

SEQ ID NO: 1033363 - DNA, 15 bp, Homo sapiens
actatattggccctg

SEQ ID NO: 1033364 - DNA, 15 bp, Homo sapiens
cactatattggccct

SEQ ID NO: 1033365 - DNA, 15 bp, Homo sapiens
gcactatattggccc

SEQ ID NO: 1033366 - DNA, 15 bp, Homo sapiens
tgcactatattggcc

SEQ ID NO: 1033367 - DNA, 15 bp, Homo sapiens
ttgcactatattggc

SEQ ID NO: 1033368 - DNA, 15 bp, Homo sapiens
tttgcactatattgg

SEQ ID NO: 1033369 - DNA, 15 bp, Homo sapiens
atttgcactatattg

SEQ ID NO: 1033370 - DNA, 15 bp, Homo sapiens
gatttgcactatatt

SEQ ID NO: 1033371 - DNA, 15 bp, Homo sapiens
agatttgcactatat

SEQ ID NO: 1033372 - DNA, 15 bp, Homo sapiens
cagatttgcactata

SEQ ID NO: 1033373 - DNA, 15 bp, Homo sapiens
tcagatttgcactat

SEQ ID NO: 1033374 - DNA, 15 bp, Homo sapiens
gtcagatttgcacta

SEQ ID NO: 1033375 - DNA, 15 bp, Homo sapiens
tgtcagatttgcact

SEQ ID NO: 1033376 - DNA, 15 bp, Homo sapiens
ttgtcagatttgcac

SEQ ID NO: 1033377 - DNA, 15 bp, Homo sapiens
tttgtcagatttgca

SEQ ID NO: 1033378 - DNA, 15 bp, Homo sapiens
ttttgtcagatttgc

SEQ ID NO: 1033379 - DNA, 15 bp, Homo sapiens
attttgtcagatttg

SEQ ID NO: 1033380 - DNA, 15 bp, Homo sapiens
aattttgtcagattt

SEQ ID NO: 1033381 - DNA, 15 bp, Homo sapiens
aaattttgtcagatt

SEQ ID NO: 1033382 - DNA, 15 bp, Homo sapiens
taaattttgtcagat

SEQ ID NO: 1033383 - DNA, 15 bp, Homo sapiens
ctaaattttgtcaga

SEQ ID NO: 1033384 - DNA, 15 bp, Homo sapiens
cctaaattttgtcag

SEQ ID NO: 1033385 - DNA, 15 bp, Homo sapiens
acctaaattttgtca

SEQ ID NO: 1033386 - DNA, 15 bp, Homo sapiens
tacctaaattttgtc

SEQ ID NO: 1033387 - DNA, 15 bp, Homo sapiens
ttacctaaattttgt

SEQ ID NO: 1033388 - DNA, 15 bp, Homo sapiens
attacctaaattttg

SEQ ID NO: 1033389 - DNA, 15 bp, Homo sapiens
gattacctaaatttt

SEQ ID NO: 1033390 - DNA, 15 bp, Homo sapiens
agattacctaaattt

SEQ ID NO: 1033391 - DNA, 15 bp, Homo sapiens
tagattacctaaatt

SEQ ID NO: 1033392 - DNA, 15 bp, Homo sapiens
atagattacctaaat

SEQ ID NO: 1033393 - DNA, 15 bp, Homo sapiens
catagattacctaaa

SEQ ID NO: 1033394 - DNA, 15 bp, Homo sapiens
ccatagattacctaa

SEQ ID NO: 1033395 - DNA, 15 bp, Homo sapiens
tccatagattaccta

SEQ ID NO: 1033396 - DNA, 15 bp, Homo sapiens
ttccatagattacct

SEQ ID NO: 1033397 - DNA, 15 bp, Homo sapiens
attccatagattacc

SEQ ID NO: 1033398 - DNA, 15 bp, Homo sapiens
tattccatagattac

SEQ ID NO: 1033399 - DNA, 15 bp, Homo sapiens
ttattccatagatta

SEQ ID NO: 1033400 - DNA, 15 bp, Homo sapiens
tttattccatagatt

SEQ ID NO: 1033401 - DNA, 15 bp, Homo sapiens
gtttattccatagat

SEQ ID NO: 1033402 - DNA, 15 bp, Homo sapiens
ggtttattccataga

SEQ ID NO: 1033403 - DNA, 15 bp, Homo sapiens
aggtttattccatag

SEQ ID NO: 1033404 - DNA, 15 bp, Homo sapiens
aaggtttattccata

SEQ ID NO: 1033405 - DNA, 15 bp, Homo sapiens
aaaggtttattccat

SEQ ID NO: 1033406 - DNA, 15 bp, Homo sapiens
gaaaggtttattcca

SEQ ID NO: 1033407 - DNA, 15 bp, Homo sapiens
ggaaaggtttattcc

SEQ ID NO: 1033408 - DNA, 15 bp, Homo sapiens
aggaaaggtttattc

SEQ ID NO: 1033409 - DNA, 15 bp, Homo sapiens
caggaaaggtttatt

SEQ ID NO: 1033410 - DNA, 15 bp, Homo sapiens
acaggaaaggtttat

SEQ ID NO: 1033411 - DNA, 15 bp, Homo sapiens
cacaggaaaggttta

SEQ ID NO: 1033412 - DNA, 15 bp, Homo sapiens
gcacaggaaaggttt

SEQ ID NO: 1033413 - DNA, 15 bp, Homo sapiens
tgcacaggaaaggtt

SEQ ID NO: 1033414 - DNA, 15 bp, Homo sapiens
ttgcacaggaaaggt

SEQ ID NO: 1033415 - DNA, 15 bp, Homo sapiens
tttgcacaggaaagg

SEQ ID NO: 1033416 - DNA, 15 bp, Homo sapiens
ctttgcacaggaaag

SEQ ID NO: 1033417 - DNA, 15 bp, Homo sapiens
gctttgcacaggaaa

SEQ ID NO: 1033418 - DNA, 15 bp, Homo sapiens
agctttgcacaggaa

SEQ ID NO: 1033419 - DNA, 15 bp, Homo sapiens
tagctttgcacagga

SEQ ID NO: 1033420 - DNA, 15 bp, Homo sapiens
ctagctttgcacagg

SEQ ID NO: 1033421 - DNA, 15 bp, Homo sapiens
gctagctttgcacag

SEQ ID NO: 1033422 - DNA, 15 bp, Homo sapiens
agctagctttgcaca

SEQ ID NO: 1033423 - DNA, 15 bp, Homo sapiens
cagctagctttgcac

SEQ ID NO: 1033424 - DNA, 15 bp, Homo sapiens
ccagctagctttgca

SEQ ID NO: 1033425 - DNA, 15 bp, Homo sapiens
gccagctagctttgc

SEQ ID NO: 1033426 - DNA, 15 bp, Homo sapiens
ggccagctagctttg

SEQ ID NO: 1033427 - DNA, 15 bp, Homo sapiens
aggccagctagcttt

SEQ ID NO: 1033428 - DNA, 15 bp, Homo sapiens
aaggccagctagctt

SEQ ID NO: 1033429 - DNA, 15 bp, Homo sapiens
taaggccagctagct

SEQ ID NO: 1033430 - DNA, 15 bp, Homo sapiens
ataaggccagctagc

SEQ ID NO: 1033431 - DNA, 15 bp, Homo sapiens
cataaggccagctag

SEQ ID NO: 1033432 - DNA, 15 bp, Homo sapiens
ccataaggccagcta

SEQ ID NO: 1033433 - DNA, 15 bp, Homo sapiens
cccataaggccagct

SEQ ID NO: 1033434 - DNA, 15 bp, Homo sapiens
tcccataaggccagc

SEQ ID NO: 1033435 - DNA, 15 bp, Homo sapiens
ttcccataaggccag

SEQ ID NO: 1033436 - DNA, 15 bp, Homo sapiens
attcccataaggcca

SEQ ID NO: 1033437 - DNA, 15 bp, Homo sapiens
aattcccataaggcc

SEQ ID NO: 1033438 - DNA, 15 bp, Homo sapiens
caattcccataaggc

SEQ ID NO: 1033439 - DNA, 15 bp, Homo sapiens
ccaattcccataagg

SEQ ID NO: 1033440 - DNA, 15 bp, Homo sapiens
accaattcccataag

SEQ ID NO: 1033441 - DNA, 15 bp, Homo sapiens
caccaattcccataa

SEQ ID NO: 1033442 - DNA, 15 bp, Homo sapiens
ccaccaattcccata

SEQ ID NO: 1033443 - DNA, 15 bp, Homo sapiens
accaccaattcccat

SEQ ID NO: 1033444 - DNA, 15 bp, Homo sapiens
taccaccaattccca

SEQ ID NO: 1033445 - DNA, 15 bp, Homo sapiens
gtaccaccaattccc

SEQ ID NO: 1033446 - DNA, 15 bp, Homo sapiens
ggtaccaccaattcc

SEQ ID NO: 1033447 - DNA, 15 bp, Homo sapiens
aggtaccaccaattc

SEQ ID NO: 1033448 - DNA, 15 bp, Homo sapiens
gaggtaccaccaatt

SEQ ID NO: 1033449 - DNA, 15 bp, Homo sapiens
tgaggtaccaccaat

SEQ ID NO: 1033450 - DNA, 15 bp, Homo sapiens
ctgaggtaccaccaa

SEQ ID NO: 1033451 - DNA, 15 bp, Homo sapiens
actgaggtaccacca

SEQ ID NO: 1033452 - DNA, 15 bp, Homo sapiens
gactgaggtaccacc

SEQ ID NO: 1033453 - DNA, 15 bp, Homo sapiens
agactgaggtaccac

SEQ ID NO: 1033454 - DNA, 15 bp, Homo sapiens
gagactgaggtacca

SEQ ID NO: 1033455 - DNA, 15 bp, Homo sapiens
tgagactgaggtacc

SEQ ID NO: 1033456 - DNA, 15 bp, Homo sapiens
ctgagactgaggtac

SEQ ID NO: 1033457 - DNA, 15 bp, Homo sapiens
cctgagactgaggta

SEQ ID NO: 1033458 - DNA, 15 bp, Homo sapiens
ccctgagactgaggt

SEQ ID NO: 1033459 - DNA, 15 bp, Homo sapiens
cccctgagactgagg

SEQ ID NO: 1033460 - DNA, 15 bp, Homo sapiens
gcccctgagactgag

SEQ ID NO: 1033461 - DNA, 15 bp, Homo sapiens
tgcccctgagactga

SEQ ID NO: 1033462 - DNA, 15 bp, Homo sapiens
atgcccctgagactg

SEQ ID NO: 1033463 - DNA, 15 bp, Homo sapiens
gatgcccctgagact

SEQ ID NO: 1033464 - DNA, 15 bp, Homo sapiens
tgatgcccctgagac

SEQ ID NO: 1033465 - DNA, 15 bp, Homo sapiens
atgatgcccctgaga

SEQ ID NO: 1033466 - DNA, 15 bp, Homo sapiens
tatgatgcccctgag

SEQ ID NO: 1033467 - DNA, 15 bp, Homo sapiens
ttatgatgcccctga

SEQ ID NO: 1033468 - DNA, 15 bp, Homo sapiens
tttatgatgcccctg

SEQ ID NO: 1033469 - DNA, 15 bp, Homo sapiens
gtttatgatgcccct

SEQ ID NO: 1033470 - DNA, 15 bp, Homo sapiens
agtttatgatgcccc

SEQ ID NO: 1033471 - DNA, 15 bp, Homo sapiens
cagtttatgatgccc

SEQ ID NO: 1033472 - DNA, 15 bp, Homo sapiens
tcagtttatgatgcc

SEQ ID NO: 1033473 - DNA, 15 bp, Homo sapiens
gtcagtttatgatgc

SEQ ID NO: 1033474 - DNA, 15 bp, Homo sapiens
ggtcagtttatgatg

SEQ ID NO: 1033475 - DNA, 15 bp, Homo sapiens
tggtcagtttatgat

SEQ ID NO: 1033476 - DNA, 15 bp, Homo sapiens
ttggtcagtttatga

SEQ ID NO: 1033477 - DNA, 15 bp, Homo sapiens
gttggtcagtttatg

SEQ ID NO: 1033478 - DNA, 15 bp, Homo sapiens
ggttggtcagtttat

SEQ ID NO: 1033479 - DNA, 15 bp, Homo sapiens
tggttggtcagttta

SEQ ID NO: 1033480 - DNA, 15 bp, Homo sapiens
atggttggtcagttt

SEQ ID NO: 1033481 - DNA, 15 bp, Homo sapiens
tatggttggtcagtt

SEQ ID NO: 1033482 - DNA, 15 bp, Homo sapiens
atatggttggtcagt

SEQ ID NO: 1033483 - DNA, 15 bp, Homo sapiens
catatggttggtcag

SEQ ID NO: 1033484 - DNA, 15 bp, Homo sapiens
tcatatggttggtca

SEQ ID NO: 1033485 - DNA, 15 bp, Homo sapiens
ttcatatggttggtc

SEQ ID NO: 1033486 - DNA, 15 bp, Homo sapiens
cttcatatggttggt

SEQ ID NO: 1033487 - DNA, 15 bp, Homo sapiens
ccttcatatggttgg

SEQ ID NO: 1033488 - DNA, 15 bp, Homo sapiens
accttcatatggttg

SEQ ID NO: 1033489 - DNA, 15 bp, Homo sapiens
caccttcatatggtt

SEQ ID NO: 1033490 - DNA, 15 bp, Homo sapiens
tcaccttcatatggt

SEQ ID NO: 1033491 - DNA, 15 bp, Homo sapiens
atcaccttcatatgg

SEQ ID NO: 1033492 - DNA, 15 bp, Homo sapiens
aatcaccttcatatg

SEQ ID NO: 1033493 - DNA, 15 bp, Homo sapiens
caatcaccttcatat

SEQ ID NO: 1033494 - DNA, 15 bp, Homo sapiens
gcaatcaccttcata

SEQ ID NO: 1033495 - DNA, 15 bp, Homo sapiens
tgcaatcaccttcat

SEQ ID NO: 1033496 - DNA, 15 bp, Homo sapiens
atgcaatcaccttca

SEQ ID NO: 1033497 - DNA, 15 bp, Homo sapiens
catgcaatcaccttc

SEQ ID NO: 1033498 - DNA, 15 bp, Homo sapiens
acatgcaatcacctt

SEQ ID NO: 1033499 - DNA, 15 bp, Homo sapiens
gacatgcaatcacct

SEQ ID NO: 1033500 - DNA, 15 bp, Homo sapiens
agacatgcaatcacc

SEQ ID NO: 1033501 - DNA, 15 bp, Homo sapiens
cagacatgcaatcac

SEQ ID NO: 1033502 - DNA, 15 bp, Homo sapiens
acagacatgcaatca

SEQ ID NO: 1033503 - DNA, 15 bp, Homo sapiens
aacagacatgcaatc

SEQ ID NO: 1033504 - DNA, 15 bp, Homo sapiens
taacagacatgcaat

SEQ ID NO: 1033505 - DNA, 15 bp, Homo sapiens
ctaacagacatgcaa

SEQ ID NO: 1033506 - DNA, 15 bp, Homo sapiens
cctaacagacatgca

SEQ ID NO: 1033507 - DNA, 15 bp, Homo sapiens
gcctaacagacatgc

SEQ ID NO: 1033508 - DNA, 15 bp, Homo sapiens
tgcctaacagacatg

SEQ ID NO: 1033509 - DNA, 15 bp, Homo sapiens
ctgcctaacagacat

SEQ ID NO: 1033510 - DNA, 15 bp, Homo sapiens
cctgcctaacagaca

SEQ ID NO: 1033511 - DNA, 15 bp, Homo sapiens
ccctgcctaacagac

SEQ ID NO: 1033512 - DNA, 15 bp, Homo sapiens
tccctgcctaacaga

SEQ ID NO: 1033513 - DNA, 15 bp, Homo sapiens
gtccctgcctaacag

SEQ ID NO: 1033514 - DNA, 15 bp, Homo sapiens
agtccctgcctaaca

SEQ ID NO: 1033515 - DNA, 15 bp, Homo sapiens
tagtccctgcctaac

SEQ ID NO: 1033516 - DNA, 15 bp, Homo sapiens
ttagtccctgcctaa

SEQ ID NO: 1033517 - DNA, 15 bp, Homo sapiens
tttagtccctgccta

SEQ ID NO: 1033518 - DNA, 15 bp, Homo sapiens
gtttagtccctgcct

SEQ ID NO: 1033519 - DNA, 15 bp, Homo sapiens
agtttagtccctgcc

SEQ ID NO: 1033520 - DNA, 15 bp, Homo sapiens
tagtttagtccctgc

SEQ ID NO: 1033521 - DNA, 15 bp, Homo sapiens
atagtttagtccctg

SEQ ID NO: 1033522 - DNA, 15 bp, Homo sapiens
catagtttagtccct

SEQ ID NO: 1033523 - DNA, 15 bp, Homo sapiens
acatagtttagtccc

SEQ ID NO: 1033524 - DNA, 15 bp, Homo sapiens
aacatagtttagtcc

SEQ ID NO: 1033525 - DNA, 15 bp, Homo sapiens
gaacatagtttagtc

SEQ ID NO: 1033526 - DNA, 15 bp, Homo sapiens
agaacatagtttagt

SEQ ID NO: 1033527 - DNA, 15 bp, Homo sapiens
cagaacatagtttag

SEQ ID NO: 1033528 - DNA, 15 bp, Homo sapiens
acagaacatagttta

SEQ ID NO: 1033529 - DNA, 15 bp, Homo sapiens
cacagaacatagttt

SEQ ID NO: 1033530 - DNA, 15 bp, Homo sapiens
tcacagaacatagtt

SEQ ID NO: 1033531 - DNA, 15 bp, Homo sapiens
ttcacagaacatagt

SEQ ID NO: 1033532 - DNA, 15 bp, Homo sapiens
cttcacagaacatag

SEQ ID NO: 1033533 - DNA, 15 bp, Homo sapiens
tcttcacagaacata

SEQ ID NO: 1033534 - DNA, 15 bp, Homo sapiens
atcttcacagaacat

SEQ ID NO: 1033535 - DNA, 15 bp, Homo sapiens
tatcttcacagaaca

SEQ ID NO: 1033536 - DNA, 15 bp, Homo sapiens
ctatcttcacagaac

SEQ ID NO: 1033537 - DNA, 15 bp, Homo sapiens
tctatcttcacagaa

SEQ ID NO: 1033538 - DNA, 15 bp, Homo sapiens
ttctatcttcacaga

SEQ ID NO: 1033539 - DNA, 15 bp, Homo sapiens
gttctatcttcacag

SEQ ID NO: 1033540 - DNA, 15 bp, Homo sapiens
ggttctatcttcaca

SEQ ID NO: 1033541 - DNA, 15 bp, Homo sapiens
gggttctatcttcac

SEQ ID NO: 1033542 - DNA, 15 bp, Homo sapiens
ggggttctatcttca

SEQ ID NO: 1033543 - DNA, 15 bp, Homo sapiens
tggggttctatcttc

SEQ ID NO: 1033544 - DNA, 15 bp, Homo sapiens
ttggggttctatctt

SEQ ID NO: 1033545 - DNA, 15 bp, Homo sapiens
attggggttctatct

SEQ ID NO: 1033546 - DNA, 15 bp, Homo sapiens
cattggggttctatc

SEQ ID NO: 1033547 - DNA, 15 bp, Homo sapiens
ccattggggttctat

SEQ ID NO: 1033548 - DNA, 15 bp, Homo sapiens
gccattggggttcta

SEQ ID NO: 1033549 - DNA, 15 bp, Homo sapiens
tgccattggggttct

SEQ ID NO: 1033550 - DNA, 15 bp, Homo sapiens
ttgccattggggttc

SEQ ID NO: 1033551 - DNA, 15 bp, Homo sapiens
tttgccattggggtt

SEQ ID NO: 1033552 - DNA, 15 bp, Homo sapiens
ttttgccattggggt

SEQ ID NO: 1033553 - DNA, 15 bp, Homo sapiens
cttttgccattgggg

SEQ ID NO: 1033554 - DNA, 15 bp, Homo sapiens
ccttttgccattggg

SEQ ID NO: 1033555 - DNA, 15 bp, Homo sapiens
cccttttgccattgg

SEQ ID NO: 1033556 - DNA, 15 bp, Homo sapiens
gcccttttgccattg

SEQ ID NO: 1033557 - DNA, 15 bp, Homo sapiens
agcccttttgccatt

SEQ ID NO: 1033558 - DNA, 15 bp, Homo sapiens
gagcccttttgccat

SEQ ID NO: 1033559 - DNA, 15 bp, Homo sapiens
agagcccttttgcca

SEQ ID NO: 1033560 - DNA, 15 bp, Homo sapiens
cagagcccttttgcc

SEQ ID NO: 1033561 - DNA, 15 bp, Homo sapiens
gcagagcccttttgc

SEQ ID NO: 1033562 - DNA, 15 bp, Homo sapiens
ggcagagcccttttg

SEQ ID NO: 1033563 - DNA, 15 bp, Homo sapiens
tggcagagccctttt

SEQ ID NO: 1033564 - DNA, 15 bp, Homo sapiens
ctggcagagcccttt

SEQ ID NO: 1033565 - DNA, 15 bp, Homo sapiens
cctggcagagccctt

SEQ ID NO: 1033566 - DNA, 15 bp, Homo sapiens
tcctggcagagccct

SEQ ID NO: 1033567 - DNA, 15 bp, Homo sapiens
ctcctggcagagccc

SEQ ID NO: 1033568 - DNA, 15 bp, Homo sapiens
tctcctggcagagcc

SEQ ID NO: 1033569 - DNA, 15 bp, Homo sapiens
atctcctggcagagc

SEQ ID NO: 1033570 - DNA, 15 bp, Homo sapiens
gatctcctggcagag

SEQ ID NO: 1033571 - DNA, 15 bp, Homo sapiens
agatctcctggcaga

SEQ ID NO: 1033572 - DNA, 15 bp, Homo sapiens
tagatctcctggcag

SEQ ID NO: 1033573 - DNA, 15 bp, Homo sapiens
ctagatctcctggca

SEQ ID NO: 1033574 - DNA, 15 bp, Homo sapiens
gctagatctcctggc

SEQ ID NO: 1033575 - DNA, 15 bp, Homo sapiens
cgctagatctcctgg

SEQ ID NO: 1033576 - DNA, 15 bp, Homo sapiens
tcgctagatctcctg

SEQ ID NO: 1033577 - DNA, 15 bp, Homo sapiens
ctcgctagatctcct

SEQ ID NO: 1033578 - DNA, 15 bp, Homo sapiens
tctcgctagatctcc

SEQ ID NO: 1033579 - DNA, 15 bp, Homo sapiens
ttctcgctagatctc

SEQ ID NO: 1033580 - DNA, 15 bp, Homo sapiens
cttctcgctagatct

SEQ ID NO: 1033581 - DNA, 15 bp, Homo sapiens
tcttctcgctagatc

SEQ ID NO: 1033582 - DNA, 15 bp, Homo sapiens
atcttctcgctagat

SEQ ID NO: 1033583 - DNA, 15 bp, Homo sapiens
tatcttctcgctaga

SEQ ID NO: 1033584 - DNA, 15 bp, Homo sapiens
ttatcttctcgctag

SEQ ID NO: 1033585 - DNA, 15 bp, Homo sapiens
cttatcttctcgcta

SEQ ID NO: 1033586 - DNA, 15 bp, Homo sapiens
gcttatcttctcgct

SEQ ID NO: 1033587 - DNA, 15 bp, Homo sapiens
ggcttatcttctcgc

SEQ ID NO: 1033588 - DNA, 15 bp, Homo sapiens
tggcttatcttctcg

SEQ ID NO: 1033589 - DNA, 15 bp, Homo sapiens
gtggcttatcttctc

SEQ ID NO: 1033590 - DNA, 15 bp, Homo sapiens
tgtggcttatcttct

SEQ ID NO: 1033591 - DNA, 15 bp, Homo sapiens
atgtggcttatcttc

SEQ ID NO: 1033592 - DNA, 15 bp, Homo sapiens
tatgtggcttatctt

SEQ ID NO: 1033593 - DNA, 15 bp, Homo sapiens
atatgtggcttatct

SEQ ID NO: 1033594 - DNA, 15 bp, Homo sapiens
catatgtggcttatc

SEQ ID NO: 1033595 - DNA, 15 bp, Homo sapiens
acatatgtggcttat

SEQ ID NO: 1033596 - DNA, 15 bp, Homo sapiens
cacatatgtggctta

SEQ ID NO: 1033597 - DNA, 15 bp, Homo sapiens
acacatatgtggctt

SEQ ID NO: 1033598 - DNA, 15 bp, Homo sapiens
cacacatatgtggct

SEQ ID NO: 1033599 - DNA, 15 bp, Homo sapiens
gcacacatatgtggc

SEQ ID NO: 1033600 - DNA, 15 bp, Homo sapiens
ggcacacatatgtgg

SEQ ID NO: 1033601 - DNA, 15 bp, Homo sapiens
gggcacacatatgtg

SEQ ID NO: 1033602 - DNA, 15 bp, Homo sapiens
agggcacacatatgt

SEQ ID NO: 1033603 - DNA, 15 bp, Homo sapiens
cagggcacacatatg

SEQ ID NO: 1033604 - DNA, 15 bp, Homo sapiens
gcagggcacacatat

SEQ ID NO: 1033605 - DNA, 15 bp, Homo sapiens
tgcagggcacacata

SEQ ID NO: 1033606 - DNA, 15 bp, Homo sapiens
ctgcagggcacacat

SEQ ID NO: 1033607 - DNA, 15 bp, Homo sapiens
tctgcagggcacaca

SEQ ID NO: 1033608 - DNA, 15 bp, Homo sapiens
ctctgcagggcacac

SEQ ID NO: 1033609 - DNA, 15 bp, Homo sapiens
gctctgcagggcaca

SEQ ID NO: 1033610 - DNA, 15 bp, Homo sapiens
tgctctgcagggcac

SEQ ID NO: 1033611 - DNA, 15 bp, Homo sapiens
gtgctctgcagggca

SEQ ID NO: 1033612 - DNA, 15 bp, Homo sapiens
tgtgctctgcagggc

SEQ ID NO: 1033613 - DNA, 15 bp, Homo sapiens
ctgtgctctgcaggg

SEQ ID NO: 1033614 - DNA, 15 bp, Homo sapiens
gctgtgctctgcagg

SEQ ID NO: 1033615 - DNA, 15 bp, Homo sapiens
tgctgtgctctgcag

SEQ ID NO: 1033616 - DNA, 15 bp, Homo sapiens
ttgctgtgctctgca

SEQ ID NO: 1033617 - DNA, 15 bp, Homo sapiens
cttgctgtgctctgc

SEQ ID NO: 1033618 - DNA, 15 bp, Homo sapiens
acttgctgtgctctg

SEQ ID NO: 1033619 - DNA, 15 bp, Homo sapiens
cacttgctgtgctct

SEQ ID NO: 1033620 - DNA, 15 bp, Homo sapiens
acacttgctgtgctc

SEQ ID NO: 1033621 - DNA, 15 bp, Homo sapiens
aacacttgctgtgct

SEQ ID NO: 1033622 - DNA, 15 bp, Homo sapiens
taacacttgctgtgc

SEQ ID NO: 1033623 - DNA, 15 bp, Homo sapiens
gtaacacttgctgtg

SEQ ID NO: 1033624 - DNA, 15 bp, Homo sapiens
ggtaacacttgctgt

SEQ ID NO: 1033625 - DNA, 15 bp, Homo sapiens
tggtaacacttgctg

SEQ ID NO: 1033626 - DNA, 15 bp, Homo sapiens
atggtaacacttgct

SEQ ID NO: 1033627 - DNA, 15 bp, Homo sapiens
tatggtaacacttgc

SEQ ID NO: 1033628 - DNA, 15 bp, Homo sapiens
ctatggtaacacttg

SEQ ID NO: 1033629 - DNA, 15 bp, Homo sapiens
gctatggtaacactt

SEQ ID NO: 1033630 - DNA, 15 bp, Homo sapiens
ggctatggtaacact

SEQ ID NO: 1033631 - DNA, 15 bp, Homo sapiens
gggctatggtaacac

SEQ ID NO: 1033632 - DNA, 15 bp, Homo sapiens
agggctatggtaaca

SEQ ID NO: 1033633 - DNA, 15 bp, Homo sapiens
cagggctatggtaac

SEQ ID NO: 1033634 - DNA, 15 bp, Homo sapiens
tcagggctatggtaa

SEQ ID NO: 1033635 - DNA, 15 bp, Homo sapiens
ctcagggctatggta

SEQ ID NO: 1033636 - DNA, 15 bp, Homo sapiens
tctcagggctatggt

SEQ ID NO: 1033637 - DNA, 15 bp, Homo sapiens
ttctcagggctatgg

SEQ ID NO: 1033638 - DNA, 15 bp, Homo sapiens
tttctcagggctatg

SEQ ID NO: 1033639 - DNA, 15 bp, Homo sapiens
ttttctcagggctat

SEQ ID NO: 1033640 - DNA, 15 bp, Homo sapiens
cttttctcagggcta

SEQ ID NO: 1033641 - DNA, 15 bp, Homo sapiens
tcttttctcagggct

SEQ ID NO: 1033642 - DNA, 15 bp, Homo sapiens
ttcttttctcagggc

SEQ ID NO: 1033643 - DNA, 15 bp, Homo sapiens
tttcttttctcaggg

SEQ ID NO: 1033644 - DNA, 15 bp, Homo sapiens
ctttcttttctcagg

SEQ ID NO: 1033645 - DNA, 15 bp, Homo sapiens
cctttcttttctcag

SEQ ID NO: 1033646 - DNA, 15 bp, Homo sapiens
tcctttcttttctca

SEQ ID NO: 1033647 - DNA, 15 bp, Homo sapiens
atcctttcttttctc

SEQ ID NO: 1033648 - DNA, 15 bp, Homo sapiens
catcctttcttttct

SEQ ID NO: 1033649 - DNA, 15 bp, Homo sapiens
tcatcctttcttttc

SEQ ID NO: 1033650 - DNA, 15 bp, Homo sapiens
atcatcctttctttt

SEQ ID NO: 1033651 - DNA, 15 bp, Homo sapiens
aatcatcctttcttt

SEQ ID NO: 1033652 - DNA, 15 bp, Homo sapiens
aaatcatcctttctt

SEQ ID NO: 1033653 - DNA, 15 bp, Homo sapiens
caaatcatcctttct

SEQ ID NO: 1033654 - DNA, 15 bp, Homo sapiens
tcaaatcatcctttc

SEQ ID NO: 1033655 - DNA, 15 bp, Homo sapiens
ttcaaatcatccttt

SEQ ID NO: 1033656 - DNA, 15 bp, Homo sapiens
gttcaaatcatcctt

SEQ ID NO: 1033657 - DNA, 15 bp, Homo sapiens
agttcaaatcatcct

SEQ ID NO: 1033658 - DNA, 15 bp, Homo sapiens
cagttcaaatcatcc

SEQ ID NO: 1033659 - DNA, 15 bp, Homo sapiens
ccagttcaaatcatc

SEQ ID NO: 1033660 - DNA, 15 bp, Homo sapiens
tccagttcaaatcat

SEQ ID NO: 1033661 - DNA, 15 bp, Homo sapiens
ctccagttcaaatca

SEQ ID NO: 1033662 - DNA, 15 bp, Homo sapiens
tctccagttcaaatc

SEQ ID NO: 1033663 - DNA, 15 bp, Homo sapiens
ctctccagttcaaat

SEQ ID NO: 1033664 - DNA, 15 bp, Homo sapiens
tctctccagttcaaa

SEQ ID NO: 1033665 - DNA, 15 bp, Homo sapiens
gtctctccagttcaa

SEQ ID NO: 1033666 - DNA, 15 bp, Homo sapiens
tgtctctccagttca

SEQ ID NO: 1033667 - DNA, 15 bp, Homo sapiens
ctgtctctccagttc

SEQ ID NO: 1033668 - DNA, 15 bp, Homo sapiens
tctgtctctccagtt

SEQ ID NO: 1033669 - DNA, 15 bp, Homo sapiens
gtctgtctctccagt

SEQ ID NO: 1033670 - DNA, 15 bp, Homo sapiens
tgtctgtctctccag

SEQ ID NO: 1033671 - DNA, 15 bp, Homo sapiens
ttgtctgtctctcca

SEQ ID NO: 1033672 - DNA, 15 bp, Homo sapiens
tttgtctgtctctcc

SEQ ID NO: 1033673 - DNA, 15 bp, Homo sapiens
ctttgtctgtctctc

SEQ ID NO: 1033674 - DNA, 15 bp, Homo sapiens
tctttgtctgtctct

SEQ ID NO: 1033675 - DNA, 15 bp, Homo sapiens
gtctttgtctgtctc

SEQ ID NO: 1033676 - DNA, 15 bp, Homo sapiens
ggtctttgtctgtct

SEQ ID NO: 1033677 - DNA, 15 bp, Homo sapiens
aggtctttgtctgtc

SEQ ID NO: 1033678 - DNA, 15 bp, Homo sapiens
gaggtctttgtctgt

SEQ ID NO: 1033679 - DNA, 15 bp, Homo sapiens
tgaggtctttgtctg

SEQ ID NO: 1033680 - DNA, 15 bp, Homo sapiens
atgaggtctttgtct

SEQ ID NO: 1033681 - DNA, 15 bp, Homo sapiens
catgaggtctttgtc

SEQ ID NO: 1033682 - DNA, 15 bp, Homo sapiens
tcatgaggtctttgt

SEQ ID NO: 1033683 - DNA, 15 bp, Homo sapiens
atcatgaggtctttg

SEQ ID NO: 1033684 - DNA, 15 bp, Homo sapiens
tatcatgaggtcttt

SEQ ID NO: 1033685 - DNA, 15 bp, Homo sapiens
ttatcatgaggtctt

SEQ ID NO: 1033686 - DNA, 15 bp, Homo sapiens
attatcatgaggtct

SEQ ID NO: 1033687 - DNA, 15 bp, Homo sapiens
tattatcatgaggtc

SEQ ID NO: 1033688 - DNA, 15 bp, Homo sapiens
ctattatcatgaggt

SEQ ID NO: 1033689 - DNA, 15 bp, Homo sapiens
actattatcatgagg

SEQ ID NO: 1033690 - DNA, 15 bp, Homo sapiens
aactattatcatgag

SEQ ID NO: 1033691 - DNA, 15 bp, Homo sapiens
caactattatcatga

SEQ ID NO: 1033692 - DNA, 15 bp, Homo sapiens
acaactattatcatg

SEQ ID NO: 1033693 - DNA, 15 bp, Homo sapiens
aacaactattatcat

SEQ ID NO: 1033694 - DNA, 15 bp, Homo sapiens
aaacaactattatca

SEQ ID NO: 1033695 - DNA, 15 bp, Homo sapiens
taaacaactattatc

SEQ ID NO: 1033696 - DNA, 15 bp, Homo sapiens
ataaacaactattat

SEQ ID NO: 1033697 - DNA, 15 bp, Homo sapiens
cataaacaactatta

SEQ ID NO: 1033698 - DNA, 15 bp, Homo sapiens
acataaacaactatt

SEQ ID NO: 1033699 - DNA, 15 bp, Homo sapiens
tacataaacaactat

SEQ ID NO: 1033700 - DNA, 15 bp, Homo sapiens
ctacataaacaacta

SEQ ID NO: 1033701 - DNA, 15 bp, Homo sapiens
actacataaacaact

SEQ ID NO: 1033702 - DNA, 15 bp, Homo sapiens
gactacataaacaac

SEQ ID NO: 1033703 - DNA, 15 bp, Homo sapiens
ggactacataaacaa

SEQ ID NO: 1033704 - DNA, 15 bp, Homo sapiens
gggactacataaaca

SEQ ID NO: 1033705 - DNA, 15 bp, Homo sapiens
agggactacataaac

SEQ ID NO: 1033706 - DNA, 15 bp, Homo sapiens
aagggactacataaa

SEQ ID NO: 1033707 - DNA, 15 bp, Homo sapiens
aaagggactacataa

SEQ ID NO: 1033708 - DNA, 15 bp, Homo sapiens
gaaagggactacata

SEQ ID NO: 1033709 - DNA, 15 bp, Homo sapiens
tgaaagggactacat

SEQ ID NO: 1033710 - DNA, 15 bp, Homo sapiens
atgaaagggactaca

SEQ ID NO: 1033711 - DNA, 15 bp, Homo sapiens
tatgaaagggactac

SEQ ID NO: 1033712 - DNA, 15 bp, Homo sapiens
ttatgaaagggacta

SEQ ID NO: 1033713 - DNA, 15 bp, Homo sapiens
tttatgaaagggact

SEQ ID NO: 1033714 - DNA, 15 bp, Homo sapiens
atttatgaaagggac

SEQ ID NO: 1033715 - DNA, 15 bp, Homo sapiens
gatttatgaaaggga

SEQ ID NO: 1033716 - DNA, 15 bp, Homo sapiens
agatttatgaaaggg

SEQ ID NO: 1033717 - DNA, 15 bp, Homo sapiens
gagatttatgaaagg

SEQ ID NO: 1033718 - DNA, 15 bp, Homo sapiens
agagatttatgaaag

SEQ ID NO: 1033719 - DNA, 15 bp, Homo sapiens
aagagatttatgaaa

SEQ ID NO: 1033720 - DNA, 15 bp, Homo sapiens
gaagagatttatgaa

SEQ ID NO: 1033721 - DNA, 15 bp, Homo sapiens
tgaagagatttatga

SEQ ID NO: 1033722 - DNA, 15 bp, Homo sapiens
gtgaagagatttatg

SEQ ID NO: 1033723 - DNA, 15 bp, Homo sapiens
tgtgaagagatttat

SEQ ID NO: 1033724 - DNA, 15 bp, Homo sapiens
ctgtgaagagattta

SEQ ID NO: 1033725 - DNA, 15 bp, Homo sapiens
tctgtgaagagattt

SEQ ID NO: 1033726 - DNA, 15 bp, Homo sapiens
atctgtgaagagatt

SEQ ID NO: 1033727 - DNA, 15 bp, Homo sapiens
gatctgtgaagagat

SEQ ID NO: 1033728 - DNA, 15 bp, Homo sapiens
tgatctgtgaagaga

SEQ ID NO: 1033729 - DNA, 15 bp, Homo sapiens
atgatctgtgaagag

SEQ ID NO: 1033730 - DNA, 15 bp, Homo sapiens
tatgatctgtgaaga

SEQ ID NO: 1033731 - DNA, 15 bp, Homo sapiens
gtatgatctgtgaag

SEQ ID NO: 1033732 - DNA, 15 bp, Homo sapiens
tgtatgatctgtgaa

SEQ ID NO: 1033733 - DNA, 15 bp, Homo sapiens
ctgtatgatctgtga

SEQ ID NO: 1033734 - DNA, 15 bp, Homo sapiens
actgtatgatctgtg

SEQ ID NO: 1033735 - DNA, 15 bp, Homo sapiens
gactgtatgatctgt

SEQ ID NO: 1033736 - DNA, 15 bp, Homo sapiens
ggactgtatgatctg

SEQ ID NO: 1033737 - DNA, 15 bp, Homo sapiens
gggactgtatgatct

SEQ ID NO: 1033738 - DNA, 15 bp, Homo sapiens
agggactgtatgatc

SEQ ID NO: 1033739 - DNA, 15 bp, Homo sapiens
gagggactgtatgat

SEQ ID NO: 1033740 - DNA, 15 bp, Homo sapiens
ggagggactgtatga

SEQ ID NO: 1033741 - DNA, 15 bp, Homo sapiens
tggagggactgtatg

SEQ ID NO: 1033742 - DNA, 15 bp, Homo sapiens
gtggagggactgtat

SEQ ID NO: 1033743 - DNA, 15 bp, Homo sapiens
tgtggagggactgta

SEQ ID NO: 1033744 - DNA, 15 bp, Homo sapiens
ctgtggagggactgt

SEQ ID NO: 1033745 - DNA, 15 bp, Homo sapiens
tctgtggagggactg

SEQ ID NO: 1033746 - DNA, 15 bp, Homo sapiens
atctgtggagggact

SEQ ID NO: 1033747 - DNA, 15 bp, Homo sapiens
gatctgtggagggac

SEQ ID NO: 1033748 - DNA, 15 bp, Homo sapiens
tgatctgtggaggga

SEQ ID NO: 1033749 - DNA, 15 bp, Homo sapiens
gtgatctgtggaggg

SEQ ID NO: 1033750 - DNA, 15 bp, Homo sapiens
agtgatctgtggagg

SEQ ID NO: 1033751 - DNA, 15 bp, Homo sapiens
cagtgatctgtggag

SEQ ID NO: 1033752 - DNA, 15 bp, Homo sapiens
gccagtgatctgtgg

SEQ ID NO: 1033753 - DNA, 15 bp, Homo sapiens
ggccagtgatctgtg

SEQ ID NO: 1033754 - DNA, 15 bp, Homo sapiens
gggccagtgatctgt

SEQ ID NO: 1033755 - DNA, 15 bp, Homo sapiens
tgggccagtgatctg

SEQ ID NO: 1033756 - DNA, 15 bp, Homo sapiens
gtgggccagtgatct

SEQ ID NO: 1033757 - DNA, 15 bp, Homo sapiens
tgtgggccagtgatc

SEQ ID NO: 1033758 - DNA, 15 bp, Homo sapiens
gtgtgggccagtgat

SEQ ID NO: 1033759 - DNA, 15 bp, Homo sapiens
tgtgtgggccagtga

SEQ ID NO: 1033760 - DNA, 15 bp, Homo sapiens
gtgtgtgggccagtg

SEQ ID NO: 1033761 - DNA, 15 bp, Homo sapiens
agtgtgtgggccagt

SEQ ID NO: 1033762 - DNA, 15 bp, Homo sapiens
gagtgtgtgggccag

SEQ ID NO: 1033763 - DNA, 15 bp, Homo sapiens
agagtgtgtgggcca

SEQ ID NO: 1033764 - DNA, 15 bp, Homo sapiens
aagagtgtgtgggcc

SEQ ID NO: 1033765 - DNA, 15 bp, Homo sapiens
caagagtgtgtgggc

SEQ ID NO: 1033766 - DNA, 15 bp, Homo sapiens
gcaagagtgtgtggg

SEQ ID NO: 1033767 - DNA, 15 bp, Homo sapiens
tgcaagagtgtgtgg

SEQ ID NO: 1033768 - DNA, 15 bp, Homo sapiens
atgcaagagtgtgtg

SEQ ID NO: 1033769 - DNA, 15 bp, Homo sapiens
gatgcaagagtgtgt

SEQ ID NO: 1033770 - DNA, 15 bp, Homo sapiens
ggatgcaagagtgtg

SEQ ID NO: 1033771 - DNA, 15 bp, Homo sapiens
gggatgcaagagtgt

SEQ ID NO: 1033772 - DNA, 15 bp, Homo sapiens
tgggatgcaagagtg

SEQ ID NO: 1033773 - DNA, 15 bp, Homo sapiens
atgggatgcaagagt

SEQ ID NO: 1033774 - DNA, 15 bp, Homo sapiens
aatgggatgcaagag

SEQ ID NO: 1033775 - DNA, 15 bp, Homo sapiens
gaatgggatgcaaga

SEQ ID NO: 1033776 - DNA, 15 bp, Homo sapiens
agaatgggatgcaag

SEQ ID NO: 1033777 - DNA, 15 bp, Homo sapiens
gagaatgggatgcaa

SEQ ID NO: 1033778 - DNA, 15 bp, Homo sapiens
tgagaatgggatgca

SEQ ID NO: 1033779 - DNA, 15 bp, Homo sapiens
gtgagaatgggatgc

SEQ ID NO: 1033780 - DNA, 15 bp, Homo sapiens
tgtgagaatgggatg

SEQ ID NO: 1033781 - DNA, 15 bp, Homo sapiens
ctgtgagaatgggat

SEQ ID NO: 1033782 - DNA, 15 bp, Homo sapiens
actgtgagaatggga

SEQ ID NO: 1033783 - DNA, 15 bp, Homo sapiens
tactgtgagaatggg

SEQ ID NO: 1033784 - DNA, 15 bp, Homo sapiens
ctactgtgagaatgg

SEQ ID NO: 1033785 - DNA, 15 bp, Homo sapiens
gctactgtgagaatg

SEQ ID NO: 1033786 - DNA, 15 bp, Homo sapiens
ggctactgtgagaat

SEQ ID NO: 1033787 - DNA, 15 bp, Homo sapiens
gggctactgtgagaa

SEQ ID NO: 1033788 - DNA, 15 bp, Homo sapiens
agggctactgtgaga

SEQ ID NO: 1033789 - DNA, 15 bp, Homo sapiens
tagggctactgtgag

SEQ ID NO: 1033790 - DNA, 15 bp, Homo sapiens
atagggctactgtga

SEQ ID NO: 1033791 - DNA, 15 bp, Homo sapiens
catagggctactgtg

SEQ ID NO: 1033792 - DNA, 15 bp, Homo sapiens
ccatagggctactgt

SEQ ID NO: 1033793 - DNA, 15 bp, Homo sapiens
cccatagggctactg

SEQ ID NO: 1033794 - DNA, 15 bp, Homo sapiens
tcccatagggctact

SEQ ID NO: 1033795 - DNA, 15 bp, Homo sapiens
ctcccatagggctac

SEQ ID NO: 1033796 - DNA, 15 bp, Homo sapiens
tctcccatagggcta

SEQ ID NO: 1033797 - DNA, 15 bp, Homo sapiens
atctcccatagggct

SEQ ID NO: 1033798 - DNA, 15 bp, Homo sapiens
tatctcccatagggc

SEQ ID NO: 1033799 - DNA, 15 bp, Homo sapiens
ttatctcccataggg

SEQ ID NO: 1033800 - DNA, 15 bp, Homo sapiens
attatctcccatagg

SEQ ID NO: 1033801 - DNA, 15 bp, Homo sapiens
tattatctcccatag

SEQ ID NO: 1033802 - DNA, 15 bp, Homo sapiens
gtattatctcccata

SEQ ID NO: 1033803 - DNA, 15 bp, Homo sapiens
ggtattatctcccat

SEQ ID NO: 1033804 - DNA, 15 bp, Homo sapiens
tggtattatctccca

SEQ ID NO: 1033805 - DNA, 15 bp, Homo sapiens
atggtattatctccc

SEQ ID NO: 1033806 - DNA, 15 bp, Homo sapiens
catggtattatctcc

SEQ ID NO: 1033807 - DNA, 15 bp, Homo sapiens
tcatggtattatctc

SEQ ID NO: 1033808 - DNA, 15 bp, Homo sapiens
atcatggtattatct

SEQ ID NO: 1033809 - DNA, 15 bp, Homo sapiens
catcatggtattatc

SEQ ID NO: 1033810 - DNA, 15 bp, Homo sapiens
acatcatggtattat

SEQ ID NO: 1033811 - DNA, 15 bp, Homo sapiens
gacatcatggtatta

SEQ ID NO: 1033812 - DNA, 15 bp, Homo sapiens
agacatcatggtatt

SEQ ID NO: 1033813 - DNA, 15 bp, Homo sapiens
gagacatcatggtat

SEQ ID NO: 1033814 - DNA, 15 bp, Homo sapiens
agagacatcatggta

SEQ ID NO: 1033815 - DNA, 15 bp, Homo sapiens
tagagacatcatggt

SEQ ID NO: 1033816 - DNA, 15 bp, Homo sapiens
gtagagacatcatgg

SEQ ID NO: 1033817 - DNA, 15 bp, Homo sapiens
agtagagacatcatg

SEQ ID NO: 1033818 - DNA, 15 bp, Homo sapiens
aagtagagacatcat

SEQ ID NO: 1033819 - DNA, 15 bp, Homo sapiens
gaagtagagacatca

SEQ ID NO: 1033820 - DNA, 15 bp, Homo sapiens
tgaagtagagacatc

SEQ ID NO: 1033821 - DNA, 15 bp, Homo sapiens
atgaagtagagacat

SEQ ID NO: 1033822 - DNA, 15 bp, Homo sapiens
tatgaagtagagaca

SEQ ID NO: 1033823 - DNA, 15 bp, Homo sapiens
atatgaagtagagac

SEQ ID NO: 1033824 - DNA, 15 bp, Homo sapiens
catatgaagtagaga

SEQ ID NO: 1033825 - DNA, 15 bp, Homo sapiens
ccatatgaagtagag

SEQ ID NO: 1033826 - DNA, 15 bp, Homo sapiens
tccatatgaagtaga

SEQ ID NO: 1033827 - DNA, 15 bp, Homo sapiens
ttccatatgaagtag

SEQ ID NO: 1033828 - DNA, 15 bp, Homo sapiens
cttccatatgaagta

SEQ ID NO: 1033829 - DNA, 15 bp, Homo sapiens
tcttccatatgaagt

SEQ ID NO: 1033830 - DNA, 15 bp, Homo sapiens
ttcttccatatgaag

SEQ ID NO: 1033831 - DNA, 15 bp, Homo sapiens
cttcttccatatgaa

SEQ ID NO: 1033832 - DNA, 15 bp, Homo sapiens
acttcttccatatga

SEQ ID NO: 1033833 - DNA, 15 bp, Homo sapiens
aacttcttccatatg

SEQ ID NO: 1033834 - DNA, 15 bp, Homo sapiens
taacttcttccatat

SEQ ID NO: 1033835 - DNA, 15 bp, Homo sapiens
ttaacttcttccata

SEQ ID NO: 1033836 - DNA, 15 bp, Homo sapiens
tttaacttcttccat

SEQ ID NO: 1033837 - DNA, 15 bp, Homo sapiens
ctttaacttcttcca

SEQ ID NO: 1033838 - DNA, 15 bp, Homo sapiens
actttaacttcttcc

SEQ ID NO: 1033839 - DNA, 15 bp, Homo sapiens
aactttaacttcttc

SEQ ID NO: 1033840 - DNA, 15 bp, Homo sapiens
gaactttaacttctt

SEQ ID NO: 1033841 - DNA, 15 bp, Homo sapiens
tgaactttaacttct

SEQ ID NO: 1033842 - DNA, 15 bp, Homo sapiens
ctgaactttaacttc

SEQ ID NO: 1033843 - DNA, 15 bp, Homo sapiens
tctgaactttaactt

SEQ ID NO: 1033844 - DNA, 15 bp, Homo sapiens
ctctgaactttaact

SEQ ID NO: 1033845 - DNA, 15 bp, Homo sapiens
cctctgaactttaac

SEQ ID NO: 1033846 - DNA, 15 bp, Homo sapiens
tcctctgaactttaa

SEQ ID NO: 1033847 - DNA, 15 bp, Homo sapiens
ctcctctgaacttta

SEQ ID NO: 1033848 - DNA, 15 bp, Homo sapiens
actcctctgaacttt

SEQ ID NO: 1033849 - DNA, 15 bp, Homo sapiens
cactcctctgaactt

SEQ ID NO: 1033850 - DNA, 15 bp, Homo sapiens
tcactcctctgaact

SEQ ID NO: 1033851 - DNA, 15 bp, Homo sapiens
ctcactcctctgaac

SEQ ID NO: 1033852 - DNA, 15 bp, Homo sapiens
cctcactcctctgaa

SEQ ID NO: 1033853 - DNA, 15 bp, Homo sapiens
acctcactcctctga

SEQ ID NO: 1033854 - DNA, 15 bp, Homo sapiens
tacctcactcctctg

SEQ ID NO: 1033855 - DNA, 15 bp, Homo sapiens
ttacctcactcctct

SEQ ID NO: 1033856 - DNA, 15 bp, Homo sapiens
gttacctcactcctc

SEQ ID NO: 1033857 - DNA, 15 bp, Homo sapiens
agttacctcactcct

SEQ ID NO: 1033858 - DNA, 15 bp, Homo sapiens
aagttacctcactcc

SEQ ID NO: 1033859 - DNA, 15 bp, Homo sapiens
caagttacctcactc

SEQ ID NO: 1033860 - DNA, 15 bp, Homo sapiens
gcaagttacctcact

SEQ ID NO: 1033861 - DNA, 15 bp, Homo sapiens
ggcaagttacctcac

SEQ ID NO: 1033862 - DNA, 15 bp, Homo sapiens
gggcaagttacctca

SEQ ID NO: 1033863 - DNA, 15 bp, Homo sapiens
tgggcaagttacctc

SEQ ID NO: 1033864 - DNA, 15 bp, Homo sapiens
ttgggcaagttacct

SEQ ID NO: 1033865 - DNA, 15 bp, Homo sapiens
cttgggcaagttacc

SEQ ID NO: 1033866 - DNA, 15 bp, Homo sapiens
tcttgggcaagttac

SEQ ID NO: 1033867 - DNA, 15 bp, Homo sapiens
ctcttgggcaagtta

SEQ ID NO: 1033868 - DNA, 15 bp, Homo sapiens
actcttgggcaagtt

SEQ ID NO: 1033869 - DNA, 15 bp, Homo sapiens
tactcttgggcaagt

SEQ ID NO: 1033870 - DNA, 15 bp, Homo sapiens
atactcttgggcaag

SEQ ID NO: 1033871 - DNA, 15 bp, Homo sapiens
tatactcttgggcaa

SEQ ID NO: 1033872 - DNA, 15 bp, Homo sapiens
ttatactcttgggca

SEQ ID NO: 1033873 - DNA, 15 bp, Homo sapiens
gttatactcttgggc

SEQ ID NO: 1033874 - DNA, 15 bp, Homo sapiens
agttatactcttggg

SEQ ID NO: 1033875 - DNA, 15 bp, Homo sapiens
tagttatactcttgg

SEQ ID NO: 1033876 - DNA, 15 bp, Homo sapiens
ttagttatactcttg

SEQ ID NO: 1033877 - DNA, 15 bp, Homo sapiens
gttagttatactctt

SEQ ID NO: 1033878 - DNA, 15 bp, Homo sapiens
tgttagttatactct

SEQ ID NO: 1033879 - DNA, 15 bp, Homo sapiens
ctgttagttatactc

SEQ ID NO: 1033880 - DNA, 15 bp, Homo sapiens
cctgttagttatact

SEQ ID NO: 1033881 - DNA, 15 bp, Homo sapiens
ccctgttagttatac

SEQ ID NO: 1033882 - DNA, 15 bp, Homo sapiens
cccctgttagttata

SEQ ID NO: 1033883 - DNA, 15 bp, Homo sapiens
tcccctgttagttat

SEQ ID NO: 1033884 - DNA, 15 bp, Homo sapiens
gtcccctgttagtta

SEQ ID NO: 1033885 - DNA, 15 bp, Homo sapiens
tgtcccctgttagtt

SEQ ID NO: 1033886 - DNA, 15 bp, Homo sapiens
ctgtcccctgttagt

SEQ ID NO: 1033887 - DNA, 15 bp, Homo sapiens
tctgtcccctgttag

SEQ ID NO: 1033888 - DNA, 15 bp, Homo sapiens
atctgtcccctgtta

SEQ ID NO: 1033889 - DNA, 15 bp, Homo sapiens
gatctgtcccctgtt

SEQ ID NO: 1033890 - DNA, 15 bp, Homo sapiens
agatctgtcccctgt

SEQ ID NO: 1033891 - DNA, 15 bp, Homo sapiens
cagatctgtcccctg

SEQ ID NO: 1033892 - DNA, 15 bp, Homo sapiens
ccagatctgtcccct

SEQ ID NO: 1033893 - DNA, 15 bp, Homo sapiens
cccagatctgtcccc

SEQ ID NO: 1033894 - DNA, 15 bp, Homo sapiens
acccagatctgtccc

SEQ ID NO: 1033895 - DNA, 15 bp, Homo sapiens
aacccagatctgtcc

SEQ ID NO: 1033896 - DNA, 15 bp, Homo sapiens
aaacccagatctgtc

SEQ ID NO: 1033897 - DNA, 15 bp, Homo sapiens
gaaacccagatctgt

SEQ ID NO: 1033898 - DNA, 15 bp, Homo sapiens
tgaaacccagatctg

SEQ ID NO: 1033899 - DNA, 15 bp, Homo sapiens
ttgaaacccagatct

SEQ ID NO: 1033900 - DNA, 15 bp, Homo sapiens
cttgaaacccagatc

SEQ ID NO: 1033901 - DNA, 15 bp, Homo sapiens
gcttgaaacccagat

SEQ ID NO: 1033902 - DNA, 15 bp, Homo sapiens
ggcttgaaacccaga

SEQ ID NO: 1033903 - DNA, 15 bp, Homo sapiens
gggcttgaaacccag

SEQ ID NO: 1033904 - DNA, 15 bp, Homo sapiens
tgggcttgaaaccca

SEQ ID NO: 1033905 - DNA, 15 bp, Homo sapiens
ctgggcttgaaaccc

SEQ ID NO: 1033906 - DNA, 15 bp, Homo sapiens
actgggcttgaaacc

SEQ ID NO: 1033907 - DNA, 15 bp, Homo sapiens
cactgggcttgaaac

SEQ ID NO: 1033908 - DNA, 15 bp, Homo sapiens
acactgggcttgaaa

SEQ ID NO: 1033909 - DNA, 15 bp, Homo sapiens
aacactgggcttgaa

SEQ ID NO: 1033910 - DNA, 15 bp, Homo sapiens
aaacactgggcttga

SEQ ID NO: 1033911 - DNA, 15 bp, Homo sapiens
gaaacactgggcttg

SEQ ID NO: 1033912 - DNA, 15 bp, Homo sapiens
agaaacactgggctt

SEQ ID NO: 1033913 - DNA, 15 bp, Homo sapiens
gagaaacactgggct

SEQ ID NO: 1033914 - DNA, 15 bp, Homo sapiens
tgagaaacactgggc

SEQ ID NO: 1033915 - DNA, 15 bp, Homo sapiens
atgagaaacactggg

SEQ ID NO: 1033916 - DNA, 15 bp, Homo sapiens
aatgagaaacactgg

SEQ ID NO: 1033917 - DNA, 15 bp, Homo sapiens
gaatgagaaacactg

SEQ ID NO: 1033918 - DNA, 15 bp, Homo sapiens
ggaatgagaaacact

SEQ ID NO: 1033919 - DNA, 15 bp, Homo sapiens
aggaatgagaaacac

SEQ ID NO: 1033920 - DNA, 15 bp, Homo sapiens
caggaatgagaaaca

SEQ ID NO: 1033921 - DNA, 15 bp, Homo sapiens
tcaggaatgagaaac

SEQ ID NO: 1033922 - DNA, 15 bp, Homo sapiens
atcaggaatgagaaa

SEQ ID NO: 1033923 - DNA, 15 bp, Homo sapiens
aatcaggaatgagaa

SEQ ID NO: 1033924 - DNA, 15 bp, Homo sapiens
gaatcaggaatgaga

SEQ ID NO: 1033925 - DNA, 15 bp, Homo sapiens
ggaatcaggaatgag

SEQ ID NO: 1033926 - DNA, 15 bp, Homo sapiens
aggaatcaggaatga

SEQ ID NO: 1033927 - DNA, 15 bp, Homo sapiens
caggaatcaggaatg

SEQ ID NO: 1033928 - DNA, 15 bp, Homo sapiens
gcaggaatcaggaat

SEQ ID NO: 1033929 - DNA, 15 bp, Homo sapiens
agcaggaatcaggaa

SEQ ID NO: 1033930 - DNA, 15 bp, Homo sapiens
aagcaggaatcagga

SEQ ID NO: 1033931 - DNA, 15 bp, Homo sapiens
aaagcaggaatcagg

SEQ ID NO: 1033932 - DNA, 15 bp, Homo sapiens
aaaagcaggaatcag

SEQ ID NO: 1033933 - DNA, 15 bp, Homo sapiens
taaaagcaggaatca

SEQ ID NO: 1033934 - DNA, 15 bp, Homo sapiens
gtaaaagcaggaatc

SEQ ID NO: 1033935 - DNA, 15 bp, Homo sapiens
agtaaaagcaggaat

SEQ ID NO: 1033936 - DNA, 15 bp, Homo sapiens
tagtaaaagcaggaa

SEQ ID NO: 1033937 - DNA, 15 bp, Homo sapiens
gtagtaaaagcagga

SEQ ID NO: 1033938 - DNA, 15 bp, Homo sapiens
tgtagtaaaagcagg

SEQ ID NO: 1033939 - DNA, 15 bp, Homo sapiens
gtgtagtaaaagcag

SEQ ID NO: 1033940 - DNA, 15 bp, Homo sapiens
tgtgtagtaaaagca

SEQ ID NO: 1033941 - DNA, 15 bp, Homo sapiens
gtgtgtagtaaaagc

SEQ ID NO: 1033942 - DNA, 15 bp, Homo sapiens
tgtgtgtagtaaaag

SEQ ID NO: 1033943 - DNA, 15 bp, Homo sapiens
gtgtgtgtagtaaaa

SEQ ID NO: 1033944 - DNA, 15 bp, Homo sapiens
agtgtgtgtagtaaa

SEQ ID NO: 1033945 - DNA, 15 bp, Homo sapiens
cagtgtgtgtagtaa

SEQ ID NO: 1033946 - DNA, 15 bp, Homo sapiens
ccagtgtgtgtagta

SEQ ID NO: 1033947 - DNA, 15 bp, Homo sapiens
gccagtgtgtgtagt

SEQ ID NO: 1033948 - DNA, 15 bp, Homo sapiens
ggccagtgtgtgtag

SEQ ID NO: 1033949 - DNA, 15 bp, Homo sapiens
tggccagtgtgtgta

SEQ ID NO: 1033950 - DNA, 15 bp, Homo sapiens
gtggccagtgtgtgt

SEQ ID NO: 1033951 - DNA, 15 bp, Homo sapiens
tgtggccagtgtgtg

SEQ ID NO: 1033952 - DNA, 15 bp, Homo sapiens
gtgtggccagtgtgt

SEQ ID NO: 1033953 - DNA, 15 bp, Homo sapiens
agtgtggccagtgtg

SEQ ID NO: 1033954 - DNA, 15 bp, Homo sapiens
cagtgtggccagtgt

SEQ ID NO: 1033955 - DNA, 15 bp, Homo sapiens
gcagtgtggccagtg

SEQ ID NO: 1033956 - DNA, 15 bp, Homo sapiens
ggcagtgtggccagt

SEQ ID NO: 1033957 - DNA, 15 bp, Homo sapiens
aggcagtgtggccag

SEQ ID NO: 1033958 - DNA, 15 bp, Homo sapiens
gaggcagtgtggcca

SEQ ID NO: 1033959 - DNA, 15 bp, Homo sapiens
agaggcagtgtggcc

SEQ ID NO: 1033960 - DNA, 15 bp, Homo sapiens
aagaggcagtgtggc

SEQ ID NO: 1033961 - DNA, 15 bp, Homo sapiens
caagaggcagtgtgg

SEQ ID NO: 1033962 - DNA, 15 bp, Homo sapiens
ccaagaggcagtgtg

SEQ ID NO: 1033963 - DNA, 15 bp, Homo sapiens
gccaagaggcagtgt

SEQ ID NO: 1033964 - DNA, 15 bp, Homo sapiens
tgccaagaggcagtg

SEQ ID NO: 1033965 - DNA, 15 bp, Homo sapiens
gtgccaagaggcagt

SEQ ID NO: 1033966 - DNA, 15 bp, Homo sapiens
tgtgccaagaggcag

SEQ ID NO: 1033967 - DNA, 15 bp, Homo sapiens
ctgtgccaagaggca

SEQ ID NO: 1033968 - DNA, 15 bp, Homo sapiens
cctgtgccaagaggc

SEQ ID NO: 1033969 - DNA, 15 bp, Homo sapiens
acctgtgccaagagg

SEQ ID NO: 1033970 - DNA, 15 bp, Homo sapiens
cacctgtgccaagag

SEQ ID NO: 1033971 - DNA, 15 bp, Homo sapiens
ccacctgtgccaaga

SEQ ID NO: 1033972 - DNA, 15 bp, Homo sapiens
tccacctgtgccaag

SEQ ID NO: 1033973 - DNA, 15 bp, Homo sapiens
atccacctgtgccaa

SEQ ID NO: 1033974 - DNA, 15 bp, Homo sapiens
gatccacctgtgcca

SEQ ID NO: 1033975 - DNA, 15 bp, Homo sapiens
agatccacctgtgcc

SEQ ID NO: 1033976 - DNA, 15 bp, Homo sapiens
tagatccacctgtgc

SEQ ID NO: 1033977 - DNA, 15 bp, Homo sapiens
ttagatccacctgtg

SEQ ID NO: 1033978 - DNA, 15 bp, Homo sapiens
cttagatccacctgt

SEQ ID NO: 1033979 - DNA, 15 bp, Homo sapiens
gcttagatccacctg

SEQ ID NO: 1033980 - DNA, 15 bp, Homo sapiens
ggcttagatccacct

SEQ ID NO: 1033981 - DNA, 15 bp, Homo sapiens
aggcttagatccacc

SEQ ID NO: 1033982 - DNA, 15 bp, Homo sapiens
caggcttagatccac

SEQ ID NO: 1033983 - DNA, 15 bp, Homo sapiens
ccaggcttagatcca

SEQ ID NO: 1033984 - DNA, 15 bp, Homo sapiens
gccaggcttagatcc

SEQ ID NO: 1033985 - DNA, 15 bp, Homo sapiens
ggccaggcttagatc

SEQ ID NO: 1033986 - DNA, 15 bp, Homo sapiens
aggccaggcttagat

SEQ ID NO: 1033987 - DNA, 15 bp, Homo sapiens
aaggccaggcttaga

SEQ ID NO: 1033988 - DNA, 15 bp, Homo sapiens
caaggccaggcttag

SEQ ID NO: 1033989 - DNA, 15 bp, Homo sapiens
tcaaggccaggctta

SEQ ID NO: 1033990 - DNA, 15 bp, Homo sapiens
ttcaaggccaggctt

SEQ ID NO: 1033991 - DNA, 15 bp, Homo sapiens
tttcaaggccaggct

SEQ ID NO: 1033992 - DNA, 15 bp, Homo sapiens
ctttcaaggccaggc

SEQ ID NO: 1033993 - DNA, 15 bp, Homo sapiens
tctttcaaggccagg

SEQ ID NO: 1033994 - DNA, 15 bp, Homo sapiens
atctttcaaggccag

SEQ ID NO: 1033995 - DNA, 15 bp, Homo sapiens
tatctttcaaggcca

SEQ ID NO: 1033996 - DNA, 15 bp, Homo sapiens
ctatctttcaaggcc

SEQ ID NO: 1033997 - DNA, 15 bp, Homo sapiens
cctatctttcaaggc

SEQ ID NO: 1033998 - DNA, 15 bp, Homo sapiens
acctatctttcaagg

SEQ ID NO: 1033999 - DNA, 15 bp, Homo sapiens
tacctatctttcaag

SEQ ID NO: 1034000 - DNA, 15 bp, Homo sapiens
ctacctatctttcaa

SEQ ID NO: 1034001 - DNA, 15 bp, Homo sapiens
cctacctatctttca

SEQ ID NO: 1034002 - DNA, 15 bp, Homo sapiens
acctacctatctttc

SEQ ID NO: 1034003 - DNA, 15 bp, Homo sapiens
gacctacctatcttt

SEQ ID NO: 1034004 - DNA, 15 bp, Homo sapiens
agacctacctatctt

SEQ ID NO: 1034005 - DNA, 15 bp, Homo sapiens
aagacctacctatct

SEQ ID NO: 1034006 - DNA, 15 bp, Homo sapiens
caagacctacctatc

SEQ ID NO: 1034007 - DNA, 15 bp, Homo sapiens
gcaagacctacctat

SEQ ID NO: 1034008 - DNA, 15 bp, Homo sapiens
tgcaagacctaccta

SEQ ID NO: 1034009 - DNA, 15 bp, Homo sapiens
atgcaagacctacct

SEQ ID NO: 1034010 - DNA, 15 bp, Homo sapiens
tatgcaagacctacc

SEQ ID NO: 1034011 - DNA, 15 bp, Homo sapiens
ctatgcaagacctac

SEQ ID NO: 1034012 - DNA, 15 bp, Homo sapiens
cctatgcaagaccta

SEQ ID NO: 1034013 - DNA, 15 bp, Homo sapiens
tcctatgcaagacct

SEQ ID NO: 1034014 - DNA, 15 bp, Homo sapiens
ttcctatgcaagacc

SEQ ID NO: 1034015 - DNA, 15 bp, Homo sapiens
tttcctatgcaagac

SEQ ID NO: 1034016 - DNA, 15 bp, Homo sapiens
gtttcctatgcaaga

SEQ ID NO: 1034017 - DNA, 15 bp, Homo sapiens
agtttcctatgcaag

SEQ ID NO: 1034018 - DNA, 15 bp, Homo sapiens
tagtttcctatgcaa

SEQ ID NO: 1034019 - DNA, 15 bp, Homo sapiens
atagtttcctatgca

SEQ ID NO: 1034020 - DNA, 15 bp, Homo sapiens
catagtttcctatgc

SEQ ID NO: 1034021 - DNA, 15 bp, Homo sapiens
ccatagtttcctatg

SEQ ID NO: 1034022 - DNA, 15 bp, Homo sapiens
accatagtttcctat

SEQ ID NO: 1034023 - DNA, 15 bp, Homo sapiens
taccatagtttccta

SEQ ID NO: 1034024 - DNA, 15 bp, Homo sapiens
ttaccatagtttcct

SEQ ID NO: 1034025 - DNA, 15 bp, Homo sapiens
tttaccatagtttcc

SEQ ID NO: 1034026 - DNA, 15 bp, Homo sapiens
ctttaccatagtttc

SEQ ID NO: 1034027 - DNA, 15 bp, Homo sapiens
cctttaccatagttt

SEQ ID NO: 1034028 - DNA, 15 bp, Homo sapiens
ccctttaccatagtt

SEQ ID NO: 1034029 - DNA, 15 bp, Homo sapiens
gccctttaccatagt

SEQ ID NO: 1034030 - DNA, 15 bp, Homo sapiens
agccctttaccatag

SEQ ID NO: 1034031 - DNA, 15 bp, Homo sapiens
aagccctttaccata

SEQ ID NO: 1034032 - DNA, 15 bp, Homo sapiens
aaagccctttaccat

SEQ ID NO: 1034033 - DNA, 15 bp, Homo sapiens
gaaagccctttacca

SEQ ID NO: 1034034 - DNA, 15 bp, Homo sapiens
agaaagccctttacc

SEQ ID NO: 1034035 - DNA, 15 bp, Homo sapiens
tagaaagccctttac

SEQ ID NO: 1034036 - DNA, 15 bp, Homo sapiens
ctagaaagcccttta

SEQ ID NO: 1034037 - DNA, 15 bp, Homo sapiens
cctagaaagcccttt

SEQ ID NO: 1034038 - DNA, 15 bp, Homo sapiens
tcctagaaagccctt

SEQ ID NO: 1034039 - DNA, 15 bp, Homo sapiens
ctcctagaaagccct

SEQ ID NO: 1034040 - DNA, 15 bp, Homo sapiens
tctcctagaaagccc

SEQ ID NO: 1034041 - DNA, 15 bp, Homo sapiens
ctctcctagaaagcc

SEQ ID NO: 1034042 - DNA, 15 bp, Homo sapiens
actctcctagaaagc

SEQ ID NO: 1034043 - DNA, 15 bp, Homo sapiens
cactctcctagaaag

SEQ ID NO: 1034044 - DNA, 15 bp, Homo sapiens
ccactctcctagaaa

SEQ ID NO: 1034045 - DNA, 15 bp, Homo sapiens
tccactctcctagaa

SEQ ID NO: 1034046 - DNA, 15 bp, Homo sapiens
ctccactctcctaga

SEQ ID NO: 1034047 - DNA, 15 bp, Homo sapiens
cctccactctcctag

SEQ ID NO: 1034048 - DNA, 15 bp, Homo sapiens
ccctccactctccta

SEQ ID NO: 1034049 - DNA, 15 bp, Homo sapiens
accctccactctcct

SEQ ID NO: 1034050 - DNA, 15 bp, Homo sapiens
taccctccactctcc

SEQ ID NO: 1034051 - DNA, 15 bp, Homo sapiens
gtaccctccactctc

SEQ ID NO: 1034052 - DNA, 15 bp, Homo sapiens
agtaccctccactct

SEQ ID NO: 1034053 - DNA, 15 bp, Homo sapiens
aagtaccctccactc

SEQ ID NO: 1034054 - DNA, 15 bp, Homo sapiens
aaagtaccctccact

SEQ ID NO: 1034055 - DNA, 15 bp, Homo sapiens
caaagtaccctccac

SEQ ID NO: 1034056 - DNA, 15 bp, Homo sapiens
ccaaagtaccctcca

SEQ ID NO: 1034057 - DNA, 15 bp, Homo sapiens
cccaaagtaccctcc

SEQ ID NO: 1034058 - DNA, 15 bp, Homo sapiens
ccccaaagtaccctc

SEQ ID NO: 1034059 - DNA, 15 bp, Homo sapiens
tccccaaagtaccct

SEQ ID NO: 1034060 - DNA, 15 bp, Homo sapiens
ctccccaaagtaccc

SEQ ID NO: 1034061 - DNA, 15 bp, Homo sapiens
cctccccaaagtacc

SEQ ID NO: 1034062 - DNA, 15 bp, Homo sapiens
tcctccccaaagtac

SEQ ID NO: 1034063 - DNA, 15 bp, Homo sapiens
ttcctccccaaagta

SEQ ID NO: 1034064 - DNA, 15 bp, Homo sapiens
tttcctccccaaagt

SEQ ID NO: 1034065 - DNA, 15 bp, Homo sapiens
ctttcctccccaaag

SEQ ID NO: 1034066 - DNA, 15 bp, Homo sapiens
actttcctccccaaa

SEQ ID NO: 1034067 - DNA, 15 bp, Homo sapiens
cactttcctccccaa

SEQ ID NO: 1034068 - DNA, 15 bp, Homo sapiens
acactttcctcccca

SEQ ID NO: 1034069 - DNA, 15 bp, Homo sapiens
tacactttcctcccc

SEQ ID NO: 1034070 - DNA, 15 bp, Homo sapiens
gtacactttcctccc

SEQ ID NO: 1034071 - DNA, 15 bp, Homo sapiens
tgtacactttcctcc

SEQ ID NO: 1034072 - DNA, 15 bp, Homo sapiens
ctgtacactttcctc

SEQ ID NO: 1034073 - DNA, 15 bp, Homo sapiens
cctgtacactttcct

SEQ ID NO: 1034074 - DNA, 15 bp, Homo sapiens
acctgtacactttcc

SEQ ID NO: 1034075 - DNA, 15 bp, Homo sapiens
cacctgtacactttc

SEQ ID NO: 1034076 - DNA, 15 bp, Homo sapiens
tcacctgtacacttt

SEQ ID NO: 1034077 - DNA, 15 bp, Homo sapiens
atcacctgtacactt

SEQ ID NO: 1034078 - DNA, 15 bp, Homo sapiens
catcacctgtacact

SEQ ID NO: 1034079 - DNA, 15 bp, Homo sapiens
ccatcacctgtacac

SEQ ID NO: 1034080 - DNA, 15 bp, Homo sapiens
tccatcacctgtaca

SEQ ID NO: 1034081 - DNA, 15 bp, Homo sapiens
ctccatcacctgtac

SEQ ID NO: 1034082 - DNA, 15 bp, Homo sapiens
tctccatcacctgta

SEQ ID NO: 1034083 - DNA, 15 bp, Homo sapiens
ctctccatcacctgt

SEQ ID NO: 1034084 - DNA, 15 bp, Homo sapiens
cctctccatcacctg

SEQ ID NO: 1034085 - DNA, 15 bp, Homo sapiens
tcctctccatcacct

SEQ ID NO: 1034086 - DNA, 15 bp, Homo sapiens
atcctctccatcacc

SEQ ID NO: 1034087 - DNA, 15 bp, Homo sapiens
catcctctccatcac

SEQ ID NO: 1034088 - DNA, 15 bp, Homo sapiens
ccatcctctccatca

SEQ ID NO: 1034089 - DNA, 15 bp, Homo sapiens
cccatcctctccatc

SEQ ID NO: 1034090 - DNA, 15 bp, Homo sapiens
tcccatcctctccat

SEQ ID NO: 1034091 - DNA, 15 bp, Homo sapiens
ctcccatcctctcca

SEQ ID NO: 1034092 - DNA, 15 bp, Homo sapiens
actcccatcctctcc

SEQ ID NO: 1034093 - DNA, 15 bp, Homo sapiens
cactcccatcctctc

SEQ ID NO: 1034094 - DNA, 15 bp, Homo sapiens
ccactcccatcctct

SEQ ID NO: 1034095 - DNA, 15 bp, Homo sapiens
tccactcccatcctc

SEQ ID NO: 1034096 - DNA, 15 bp, Homo sapiens
ttccactcccatcct

SEQ ID NO: 1034097 - DNA, 15 bp, Homo sapiens
tttccactcccatcc

SEQ ID NO: 1034098 - DNA, 15 bp, Homo sapiens
ctttccactcccatc

SEQ ID NO: 1034099 - DNA, 15 bp, Homo sapiens
tctttccactcccat

SEQ ID NO: 1034100 - DNA, 15 bp, Homo sapiens
gtctttccactccca

SEQ ID NO: 1034101 - DNA, 15 bp, Homo sapiens
agtctttccactccc

SEQ ID NO: 1034102 - DNA, 15 bp, Homo sapiens
cagtctttccactcc

SEQ ID NO: 1034103 - DNA, 15 bp, Homo sapiens
tcagtctttccactc

SEQ ID NO: 1034104 - DNA, 15 bp, Homo sapiens
ttcagtctttccact

SEQ ID NO: 1034105 - DNA, 15 bp, Homo sapiens
attcagtctttccac

SEQ ID NO: 1034106 - DNA, 15 bp, Homo sapiens
aattcagtctttcca

SEQ ID NO: 1034107 - DNA, 15 bp, Homo sapiens
caattcagtctttcc

SEQ ID NO: 1034108 - DNA, 15 bp, Homo sapiens
tcaattcagtctttc

SEQ ID NO: 1034109 - DNA, 15 bp, Homo sapiens
ttcaattcagtcttt

SEQ ID NO: 1034110 - DNA, 15 bp, Homo sapiens
gttcaattcagtctt

SEQ ID NO: 1034111 - DNA, 15 bp, Homo sapiens
agttcaattcagtct

SEQ ID NO: 1034112 - DNA, 15 bp, Homo sapiens
tagttcaattcagtc

SEQ ID NO: 1034113 - DNA, 15 bp, Homo sapiens
ctagttcaattcagt

SEQ ID NO: 1034114 - DNA, 15 bp, Homo sapiens
tctagttcaattcag

SEQ ID NO: 1034115 - DNA, 15 bp, Homo sapiens
gtctagttcaattca

SEQ ID NO: 1034116 - DNA, 15 bp, Homo sapiens
agtctagttcaattc

SEQ ID NO: 1034117 - DNA, 15 bp, Homo sapiens
tagtctagttcaatt

SEQ ID NO: 1034118 - DNA, 15 bp, Homo sapiens
gtagtctagttcaat

SEQ ID NO: 1034119 - DNA, 15 bp, Homo sapiens
tgtagtctagttcaa

SEQ ID NO: 1034120 - DNA, 15 bp, Homo sapiens
ctgtagtctagttca

SEQ ID NO: 1034121 - DNA, 15 bp, Homo sapiens
tctgtagtctagttc

SEQ ID NO: 1034122 - DNA, 15 bp, Homo sapiens
ctctgtagtctagtt

SEQ ID NO: 1034123 - DNA, 15 bp, Homo sapiens
cctctgtagtctagt

SEQ ID NO: 1034124 - DNA, 15 bp, Homo sapiens
tcctctgtagtctag

SEQ ID NO: 1034125 - DNA, 15 bp, Homo sapiens
gtcctctgtagtcta

SEQ ID NO: 1034126 - DNA, 15 bp, Homo sapiens
ggtcctctgtagtct

SEQ ID NO: 1034127 - DNA, 15 bp, Homo sapiens
aggtcctctgtagtc

SEQ ID NO: 1034128 - DNA, 15 bp, Homo sapiens
aaggtcctctgtagt

SEQ ID NO: 1034129 - DNA, 15 bp, Homo sapiens
taaggtcctctgtag

SEQ ID NO: 1034130 - DNA, 15 bp, Homo sapiens
gtaaggtcctctgta

SEQ ID NO: 1034131 - DNA, 15 bp, Homo sapiens
tgtaaggtcctctgt

SEQ ID NO: 1034132 - DNA, 15 bp, Homo sapiens
atgtaaggtcctctg

SEQ ID NO: 1034133 - DNA, 15 bp, Homo sapiens
tatgtaaggtcctct

SEQ ID NO: 1034134 - DNA, 15 bp, Homo sapiens
gtatgtaaggtcctc

SEQ ID NO: 1034135 - DNA, 15 bp, Homo sapiens
agtatgtaaggtcct

SEQ ID NO: 1034136 - DNA, 15 bp, Homo sapiens
tagtatgtaaggtcc

SEQ ID NO: 1034137 - DNA, 15 bp, Homo sapiens
atagtatgtaaggtc

SEQ ID NO: 1034138 - DNA, 15 bp, Homo sapiens
tatagtatgtaaggt

SEQ ID NO: 1034139 - DNA, 15 bp, Homo sapiens
ttatagtatgtaagg

SEQ ID NO: 1034140 - DNA, 15 bp, Homo sapiens
gttatagtatgtaag

SEQ ID NO: 1034141 - DNA, 15 bp, Homo sapiens
tgttatagtatgtaa

SEQ ID NO: 1034142 - DNA, 15 bp, Homo sapiens
ttgttatagtatgta

SEQ ID NO: 1034143 - DNA, 15 bp, Homo sapiens
tttgttatagtatgt

SEQ ID NO: 1034144 - DNA, 15 bp, Homo sapiens
ctttgttatagtatg

SEQ ID NO: 1034145 - DNA, 15 bp, Homo sapiens
tctttgttatagtat

SEQ ID NO: 1034146 - DNA, 15 bp, Homo sapiens
ttctttgttatagta

SEQ ID NO: 1034147 - DNA, 15 bp, Homo sapiens
attctttgttatagt

SEQ ID NO: 1034148 - DNA, 15 bp, Homo sapiens
aattctttgttatag

SEQ ID NO: 1034149 - DNA, 15 bp, Homo sapiens
aaattctttgttata

SEQ ID NO: 1034150 - DNA, 15 bp, Homo sapiens
caaattctttgttat

SEQ ID NO: 1034151 - DNA, 15 bp, Homo sapiens
ccaaattctttgtta

SEQ ID NO: 1034152 - DNA, 15 bp, Homo sapiens
cccaaattctttgtt

SEQ ID NO: 1034153 - DNA, 15 bp, Homo sapiens
ccccaaattctttgt

SEQ ID NO: 1034154 - DNA, 15 bp, Homo sapiens
cccccaaattctttg

SEQ ID NO: 1034155 - DNA, 15 bp, Homo sapiens
acccccaaattcttt

SEQ ID NO: 1034156 - DNA, 15 bp, Homo sapiens
cacccccaaattctt

SEQ ID NO: 1034157 - DNA, 15 bp, Homo sapiens
tcacccccaaattct

SEQ ID NO: 1034158 - DNA, 15 bp, Homo sapiens
ctcacccccaaattc

SEQ ID NO: 1034159 - DNA, 15 bp, Homo sapiens
actcacccccaaatt

SEQ ID NO: 1034160 - DNA, 15 bp, Homo sapiens
tactcacccccaaat

SEQ ID NO: 1034161 - DNA, 15 bp, Homo sapiens
atactcacccccaaa

SEQ ID NO: 1034162 - DNA, 15 bp, Homo sapiens
catactcacccccaa

SEQ ID NO: 1034163 - DNA, 15 bp, Homo sapiens
ccatactcaccccca

SEQ ID NO: 1034164 - DNA, 15 bp, Homo sapiens
accatactcaccccc

SEQ ID NO: 1034165 - DNA, 15 bp, Homo sapiens
caccatactcacccc

SEQ ID NO: 1034166 - DNA, 15 bp, Homo sapiens
ccaccatactcaccc

SEQ ID NO: 1034167 - DNA, 15 bp, Homo sapiens
gccaccatactcacc

SEQ ID NO: 1034168 - DNA, 15 bp, Homo sapiens
agccaccatactcac

SEQ ID NO: 1034169 - DNA, 15 bp, Homo sapiens
gagccaccatactca

SEQ ID NO: 1034170 - DNA, 15 bp, Homo sapiens
tgagccaccatactc

SEQ ID NO: 1034171 - DNA, 15 bp, Homo sapiens
gaactgggattacag

SEQ ID NO: 1034172 - DNA, 15 bp, Homo sapiens
agaactgggattaca

SEQ ID NO: 1034173 - DNA, 15 bp, Homo sapiens
aagaactgggattac

SEQ ID NO: 1034174 - DNA, 15 bp, Homo sapiens
aaagaactgggatta

SEQ ID NO: 1034175 - DNA, 15 bp, Homo sapiens
caaagaactgggatt

SEQ ID NO: 1034176 - DNA, 15 bp, Homo sapiens
ccaaagaactgggat

SEQ ID NO: 1034177 - DNA, 15 bp, Homo sapiens
cccaaagaactggga

SEQ ID NO: 1034178 - DNA, 15 bp, Homo sapiens
tcccaaagaactggg

SEQ ID NO: 1034179 - DNA, 15 bp, Homo sapiens
ctcccaaagaactgg

SEQ ID NO: 1034180 - DNA, 15 bp, Homo sapiens
tctcccaaagaactg

SEQ ID NO: 1034181 - DNA, 15 bp, Homo sapiens
gtctcccaaagaact

SEQ ID NO: 1034182 - DNA, 15 bp, Homo sapiens
cgtctcccaaagaac

SEQ ID NO: 1034183 - DNA, 15 bp, Homo sapiens
ccgtctcccaaagaa

SEQ ID NO: 1034184 - DNA, 15 bp, Homo sapiens
tccgtctcccaaaga

SEQ ID NO: 1034185 - DNA, 15 bp, Homo sapiens
ttccgtctcccaaag

SEQ ID NO: 1034186 - DNA, 15 bp, Homo sapiens
tttccgtctcccaaa

SEQ ID NO: 1034187 - DNA, 15 bp, Homo sapiens
atttccgtctcccaa

SEQ ID NO: 1034188 - DNA, 15 bp, Homo sapiens
catttccgtctccca

SEQ ID NO: 1034189 - DNA, 15 bp, Homo sapiens
ccatttccgtctccc

SEQ ID NO: 1034190 - DNA, 15 bp, Homo sapiens
cccatttccgtctcc

SEQ ID NO: 1034191 - DNA, 15 bp, Homo sapiens
acccatttccgtctc

SEQ ID NO: 1034192 - DNA, 15 bp, Homo sapiens
cacccatttccgtct

SEQ ID NO: 1034193 - DNA, 15 bp, Homo sapiens
ccacccatttccgtc

SEQ ID NO: 1034194 - DNA, 15 bp, Homo sapiens
tccacccatttccgt

SEQ ID NO: 1034195 - DNA, 15 bp, Homo sapiens
atccacccatttccg

SEQ ID NO: 1034196 - DNA, 15 bp, Homo sapiens
gatccacccatttcc

SEQ ID NO: 1034197 - DNA, 15 bp, Homo sapiens
tgatccacccatttc

SEQ ID NO: 1034198 - DNA, 15 bp, Homo sapiens
gtgatccacccattt

SEQ ID NO: 1034199 - DNA, 15 bp, Homo sapiens
agtgatccacccatt

SEQ ID NO: 1034200 - DNA, 15 bp, Homo sapiens
aagtgatccacccat

SEQ ID NO: 1034201 - DNA, 15 bp, Homo sapiens
gctcaagtgatccac

SEQ ID NO: 1034202 - DNA, 15 bp, Homo sapiens
ggctcaagtgatcca

SEQ ID NO: 1034203 - DNA, 15 bp, Homo sapiens
ttcctgggctcaagt

SEQ ID NO: 1034204 - DNA, 15 bp, Homo sapiens
attcctgggctcaag

SEQ ID NO: 1034205 - DNA, 15 bp, Homo sapiens
aattcctgggctcaa

SEQ ID NO: 1034206 - DNA, 15 bp, Homo sapiens
tgaattcctgggctc

SEQ ID NO: 1034207 - DNA, 15 bp, Homo sapiens
ttgaattcctgggct

SEQ ID NO: 1034208 - DNA, 15 bp, Homo sapiens
cttgaattcctgggc

SEQ ID NO: 1034209 - DNA, 15 bp, Homo sapiens
tcttgaattcctggg

SEQ ID NO: 1034210 - DNA, 15 bp, Homo sapiens
gtcttgaattcctgg

SEQ ID NO: 1034211 - DNA, 15 bp, Homo sapiens
tctggtcttgaattc

SEQ ID NO: 1034212 - DNA, 15 bp, Homo sapiens
gtctggtcttgaatt

SEQ ID NO: 1034213 - DNA, 15 bp, Homo sapiens
agtctggtcttgaat

SEQ ID NO: 1034214 - DNA, 15 bp, Homo sapiens
cagtctggtcttgaa

SEQ ID NO: 1034215 - DNA, 15 bp, Homo sapiens
ccagtctggtcttga

SEQ ID NO: 1034216 - DNA, 15 bp, Homo sapiens
cccagtctggtcttg

SEQ ID NO: 1034217 - DNA, 15 bp, Homo sapiens
gcccagtctggtctt

SEQ ID NO: 1034218 - DNA, 15 bp, Homo sapiens
tgcccagtctggtct

SEQ ID NO: 1034219 - DNA, 15 bp, Homo sapiens
ttgcccagtctggtc

SEQ ID NO: 1034220 - DNA, 15 bp, Homo sapiens
gttgcccagtctggt

SEQ ID NO: 1034221 - DNA, 15 bp, Homo sapiens
tgttgcccagtctgg

SEQ ID NO: 1034222 - DNA, 15 bp, Homo sapiens
atgttgcccagtctg

SEQ ID NO: 1034223 - DNA, 15 bp, Homo sapiens
catgttgcccagtct

SEQ ID NO: 1034224 - DNA, 15 bp, Homo sapiens
ccatgttgcccagtc

SEQ ID NO: 1034225 - DNA, 15 bp, Homo sapiens
tccatgttgcccagt

SEQ ID NO: 1034226 - DNA, 15 bp, Homo sapiens
ctccatgttgcccag

SEQ ID NO: 1034227 - DNA, 15 bp, Homo sapiens
tctccatgttgccca

SEQ ID NO: 1034228 - DNA, 15 bp, Homo sapiens
ttctccatgttgccc

SEQ ID NO: 1034229 - DNA, 15 bp, Homo sapiens
tttctccatgttgcc

SEQ ID NO: 1034230 - DNA, 15 bp, Homo sapiens
gtttctccatgttgc

SEQ ID NO: 1034231 - DNA, 15 bp, Homo sapiens
taggtttctccatgt

SEQ ID NO: 1034232 - DNA, 15 bp, Homo sapiens
ctaggtttctccatg

SEQ ID NO: 1034233 - DNA, 15 bp, Homo sapiens
actaggtttctccat

SEQ ID NO: 1034234 - DNA, 15 bp, Homo sapiens
gactaggtttctcca

SEQ ID NO: 1034235 - DNA, 15 bp, Homo sapiens
agactaggtttctcc

SEQ ID NO: 1034236 - DNA, 15 bp, Homo sapiens
gagactaggtttctc

SEQ ID NO: 1034237 - DNA, 15 bp, Homo sapiens
agagactaggtttct

SEQ ID NO: 1034238 - DNA, 15 bp, Homo sapiens
tagagactaggtttc

SEQ ID NO: 1034239 - DNA, 15 bp, Homo sapiens
gtagagactaggttt

SEQ ID NO: 1034240 - DNA, 15 bp, Homo sapiens
tgtagagactaggtt

SEQ ID NO: 1034241 - DNA, 15 bp, Homo sapiens
ttgtagagactaggt

SEQ ID NO: 1034242 - DNA, 15 bp, Homo sapiens
tttgtagagactagg

SEQ ID NO: 1034243 - DNA, 15 bp, Homo sapiens
ttttgtagagactag

SEQ ID NO: 1034244 - DNA, 15 bp, Homo sapiens
tttttgtagagacta

SEQ ID NO: 1034245 - DNA, 15 bp, Homo sapiens
gtttttgtagagact

SEQ ID NO: 1034246 - DNA, 15 bp, Homo sapiens
atttttgtagttttt

SEQ ID NO: 1034247 - DNA, 15 bp, Homo sapiens
gtgccaccatgcccg

SEQ ID NO: 1034248 - DNA, 15 bp, Homo sapiens
agtgccaccatgccc

SEQ ID NO: 1034249 - DNA, 15 bp, Homo sapiens
gagtgccaccatgcc

SEQ ID NO: 1034250 - DNA, 15 bp, Homo sapiens
tgagtgccaccatgc

SEQ ID NO: 1034251 - DNA, 15 bp, Homo sapiens
gtgagtgccaccatg

SEQ ID NO: 1034252 - DNA, 15 bp, Homo sapiens
ggtgagtgccaccat

SEQ ID NO: 1034253 - DNA, 15 bp, Homo sapiens
aggtgagtgccacca

SEQ ID NO: 1034254 - DNA, 15 bp, Homo sapiens
caggtgagtgccacc

SEQ ID NO: 1034255 - DNA, 15 bp, Homo sapiens
acaggtgagtgccac

SEQ ID NO: 1034256 - DNA, 15 bp, Homo sapiens
tacaggtgagtgcca

SEQ ID NO: 1034257 - DNA, 15 bp, Homo sapiens
ctacaggtgagtgcc

SEQ ID NO: 1034258 - DNA, 15 bp, Homo sapiens
actacaggtgagtgc

SEQ ID NO: 1034259 - DNA, 15 bp, Homo sapiens
gactacaggtgagtg

SEQ ID NO: 1034260 - DNA, 15 bp, Homo sapiens
ggactacaggtgagt

SEQ ID NO: 1034261 - DNA, 15 bp, Homo sapiens
gggactacaggtgag

SEQ ID NO: 1034262 - DNA, 15 bp, Homo sapiens
tgggactacaggtga

SEQ ID NO: 1034263 - DNA, 15 bp, Homo sapiens
ccctgagcagctggg

SEQ ID NO: 1034264 - DNA, 15 bp, Homo sapiens
tccctgagcagctgg

SEQ ID NO: 1034265 - DNA, 15 bp, Homo sapiens
ctccctgagcagctg

SEQ ID NO: 1034266 - DNA, 15 bp, Homo sapiens
gctccctgagcagct

SEQ ID NO: 1034267 - DNA, 15 bp, Homo sapiens
agctccctgagcagc

SEQ ID NO: 1034268 - DNA, 15 bp, Homo sapiens
cagctccctgagcag

SEQ ID NO: 1034269 - DNA, 15 bp, Homo sapiens
tcagctccctgagca

SEQ ID NO: 1034270 - DNA, 15 bp, Homo sapiens
ctcagctccctgagc

SEQ ID NO: 1034271 - DNA, 15 bp, Homo sapiens
cctcagctccctgag

SEQ ID NO: 1034272 - DNA, 15 bp, Homo sapiens
acctcagctccctga

SEQ ID NO: 1034273 - DNA, 15 bp, Homo sapiens
cacctcagctccctg

SEQ ID NO: 1034274 - DNA, 15 bp, Homo sapiens
ccacctcagctccct

SEQ ID NO: 1034275 - DNA, 15 bp, Homo sapiens
cccacctcagctccc

SEQ ID NO: 1034276 - DNA, 15 bp, Homo sapiens
tcccacctcagctcc

SEQ ID NO: 1034277 - DNA, 15 bp, Homo sapiens
ctcccacctcagctc

SEQ ID NO: 1034278 - DNA, 15 bp, Homo sapiens
cccttggctcaggtg

SEQ ID NO: 1034279 - DNA, 15 bp, Homo sapiens
tcccttggctcaggt

SEQ ID NO: 1034280 - DNA, 15 bp, Homo sapiens
ctcccttggctcagg

SEQ ID NO: 1034281 - DNA, 15 bp, Homo sapiens
cctcccttggctcag

SEQ ID NO: 1034282 - DNA, 15 bp, Homo sapiens
acctcccttggctca

SEQ ID NO: 1034283 - DNA, 15 bp, Homo sapiens
gacctcccttggctc

SEQ ID NO: 1034284 - DNA, 15 bp, Homo sapiens
tgacctcccttggct

SEQ ID NO: 1034285 - DNA, 15 bp, Homo sapiens
ttgacctcccttggc

SEQ ID NO: 1034286 - DNA, 15 bp, Homo sapiens
cttgacctcccttgg

SEQ ID NO: 1034287 - DNA, 15 bp, Homo sapiens
ccttgacctcccttg

SEQ ID NO: 1034288 - DNA, 15 bp, Homo sapiens
gccttgacctccctt

SEQ ID NO: 1034289 - DNA, 15 bp, Homo sapiens
agccttgacctccct

SEQ ID NO: 1034290 - DNA, 15 bp, Homo sapiens
tagccttgacctccc

SEQ ID NO: 1034291 - DNA, 15 bp, Homo sapiens
gtagccttgacctcc

SEQ ID NO: 1034292 - DNA, 15 bp, Homo sapiens
tgtagccttgacctc

SEQ ID NO: 1034293 - DNA, 15 bp, Homo sapiens
ttgtagccttgacct

SEQ ID NO: 1034294 - DNA, 15 bp, Homo sapiens
attgtagccttgacc

SEQ ID NO: 1034295 - DNA, 15 bp, Homo sapiens
gattgtagccttgac

SEQ ID NO: 1034296 - DNA, 15 bp, Homo sapiens
tgattgtagccttga

SEQ ID NO: 1034297 - DNA, 15 bp, Homo sapiens
ctgattgtagccttg

SEQ ID NO: 1034298 - DNA, 15 bp, Homo sapiens
gctgattgtagcctt

SEQ ID NO: 1034299 - DNA, 15 bp, Homo sapiens
ggctgattgtagcct

SEQ ID NO: 1034300 - DNA, 15 bp, Homo sapiens
tggctgattgtagcc

SEQ ID NO: 1034301 - DNA, 15 bp, Homo sapiens
atggctgattgtagc

SEQ ID NO: 1034302 - DNA, 15 bp, Homo sapiens
catggctgattgtag

SEQ ID NO: 1034303 - DNA, 15 bp, Homo sapiens
tcatggctgattgta

SEQ ID NO: 1034304 - DNA, 15 bp, Homo sapiens
ctcatggctgattgt

SEQ ID NO: 1034305 - DNA, 15 bp, Homo sapiens
gctcatggctgattg

SEQ ID NO: 1034306 - DNA, 15 bp, Homo sapiens
cgctcatggctgatt

SEQ ID NO: 1034307 - DNA, 15 bp, Homo sapiens
gcgctcatggctgat

SEQ ID NO: 1034308 - DNA, 15 bp, Homo sapiens
ggcgctcatggctga

SEQ ID NO: 1034309 - DNA, 15 bp, Homo sapiens
tggcgctcatggctg

SEQ ID NO: 1034310 - DNA, 15 bp, Homo sapiens
gtggcgctcatggct

SEQ ID NO: 1034311 - DNA, 15 bp, Homo sapiens
agtggcgctcatggc

SEQ ID NO: 1034312 - DNA, 15 bp, Homo sapiens
cagtggcgctcatgg

SEQ ID NO: 1034313 - DNA, 15 bp, Homo sapiens
acagtggcgctcatg

SEQ ID NO: 1034314 - DNA, 15 bp, Homo sapiens
tacagtggcgctcat

SEQ ID NO: 1034315 - DNA, 15 bp, Homo sapiens
atacagtggcgctca

SEQ ID NO: 1034316 - DNA, 15 bp, Homo sapiens
aatacagtggcgctc

SEQ ID NO: 1034317 - DNA, 15 bp, Homo sapiens
gaatacagtggcgct

SEQ ID NO: 1034318 - DNA, 15 bp, Homo sapiens
ggaatacagtggcgc

SEQ ID NO: 1034319 - DNA, 15 bp, Homo sapiens
tggaatacagtggcg

SEQ ID NO: 1034320 - DNA, 15 bp, Homo sapiens
gtggaatacagtggc

SEQ ID NO: 1034321 - DNA, 15 bp, Homo sapiens
ggtggaatacagtgg

SEQ ID NO: 1034322 - DNA, 15 bp, Homo sapiens
gggtggaatacagtg

SEQ ID NO: 1034323 - DNA, 15 bp, Homo sapiens
agggtggaatacagt

SEQ ID NO: 1034324 - DNA, 15 bp, Homo sapiens
tagggtggaatacag

SEQ ID NO: 1034325 - DNA, 15 bp, Homo sapiens
ctagggtggaataca

SEQ ID NO: 1034326 - DNA, 15 bp, Homo sapiens
tctagggtggaatac

SEQ ID NO: 1034327 - DNA, 15 bp, Homo sapiens
atctagggtggaata

SEQ ID NO: 1034328 - DNA, 15 bp, Homo sapiens
tgagtatgtccaaac

SEQ ID NO: 1034329 - DNA, 15 bp, Homo sapiens
atgagtatgtccaaa

SEQ ID NO: 1034330 - DNA, 15 bp, Homo sapiens
aatgagtatgtccaa

SEQ ID NO: 1034331 - DNA, 15 bp, Homo sapiens
caatgagtatgtcca

SEQ ID NO: 1034332 - DNA, 15 bp, Homo sapiens
acaatgagtatgtcc

SEQ ID NO: 1034333 - DNA, 15 bp, Homo sapiens
gacaatgagtatgtc

SEQ ID NO: 1034334 - DNA, 15 bp, Homo sapiens
ggacaatgagtatgt

SEQ ID NO: 1034335 - DNA, 15 bp, Homo sapiens
aggacaatgagtatg

SEQ ID NO: 1034336 - DNA, 15 bp, Homo sapiens
taggacaatgagtat

SEQ ID NO: 1034337 - DNA, 15 bp, Homo sapiens
gtaggacaatgagta

SEQ ID NO: 1034338 - DNA, 15 bp, Homo sapiens
ggtaggacaatgagt

SEQ ID NO: 1034339 - DNA, 15 bp, Homo sapiens
tggtaggacaatgag

SEQ ID NO: 1034340 - DNA, 15 bp, Homo sapiens
gtggtaggacaatga

SEQ ID NO: 1034341 - DNA, 15 bp, Homo sapiens
ggtggtaggacaatg

SEQ ID NO: 1034342 - DNA, 15 bp, Homo sapiens
aggtggtaggacaat

SEQ ID NO: 1034343 - DNA, 15 bp, Homo sapiens
aaggtggtaggacaa

SEQ ID NO: 1034344 - DNA, 15 bp, Homo sapiens
taaggtggtaggaca

SEQ ID NO: 1034345 - DNA, 15 bp, Homo sapiens
ttaaggtggtaggac

SEQ ID NO: 1034346 - DNA, 15 bp, Homo sapiens
gttaaggtggtagga

SEQ ID NO: 1034347 - DNA, 15 bp, Homo sapiens
agttaaggtggtagg

SEQ ID NO: 1034348 - DNA, 15 bp, Homo sapiens
tagttaaggtggtag

SEQ ID NO: 1034349 - DNA, 15 bp, Homo sapiens
gtagttaaggtggta

SEQ ID NO: 1034350 - DNA, 15 bp, Homo sapiens
tgtagttaaggtggt

SEQ ID NO: 1034351 - DNA, 15 bp, Homo sapiens
atgtagttaaggtgg

SEQ ID NO: 1034352 - DNA, 15 bp, Homo sapiens
tatgtagttaaggtg

SEQ ID NO: 1034353 - DNA, 15 bp, Homo sapiens
ttatgtagttaaggt

SEQ ID NO: 1034354 - DNA, 15 bp, Homo sapiens
tttatgtagttaagg

SEQ ID NO: 1034355 - DNA, 15 bp, Homo sapiens
ttttatgtagttaag

SEQ ID NO: 1034356 - DNA, 15 bp, Homo sapiens
tttttatgtagttaa

SEQ ID NO: 1034357 - DNA, 15 bp, Homo sapiens
ttttttatgtagtta

SEQ ID NO: 1034358 - DNA, 15 bp, Homo sapiens
tttttttatgtagtt

SEQ ID NO: 1034359 - DNA, 15 bp, Homo sapiens
atttttttatgtagt

SEQ ID NO: 1034360 - DNA, 15 bp, Homo sapiens
tatttttttatgtag

SEQ ID NO: 1034361 - DNA, 15 bp, Homo sapiens
atatttttttatgta

SEQ ID NO: 1034362 - DNA, 15 bp, Homo sapiens
tatatttttttatgt

SEQ ID NO: 1034363 - DNA, 15 bp, Homo sapiens
ttatatttttttatg

SEQ ID NO: 1034364 - DNA, 15 bp, Homo sapiens
attatatttttttat

SEQ ID NO: 1034365 - DNA, 15 bp, Homo sapiens
gattatattttttta

SEQ ID NO: 1034366 - DNA, 15 bp, Homo sapiens
agattatattttttt

SEQ ID NO: 1034367 - DNA, 15 bp, Homo sapiens
gagattatatttttt

SEQ ID NO: 1034368 - DNA, 15 bp, Homo sapiens
agagattatattttt

SEQ ID NO: 1034369 - DNA, 15 bp, Homo sapiens
aagagattatatttt

SEQ ID NO: 1034370 - DNA, 15 bp, Homo sapiens
gaagagattatattt

SEQ ID NO: 1034371 - DNA, 15 bp, Homo sapiens
tgaagagattatatt

SEQ ID NO: 1034372 - DNA, 15 bp, Homo sapiens
ctgaagagattatat

SEQ ID NO: 1034373 - DNA, 15 bp, Homo sapiens
gctgaagagattata

SEQ ID NO: 1034374 - DNA, 15 bp, Homo sapiens
agctgaagagattat

SEQ ID NO: 1034375 - DNA, 15 bp, Homo sapiens
tagctgaagagatta

SEQ ID NO: 1034376 - DNA, 15 bp, Homo sapiens
gtagctgaagagatt

SEQ ID NO: 1034377 - DNA, 15 bp, Homo sapiens
agtagctgaagagat

SEQ ID NO: 1034378 - DNA, 15 bp, Homo sapiens
tagtagctgaagaga

SEQ ID NO: 1034379 - DNA, 15 bp, Homo sapiens
ttagtagctgaagag

SEQ ID NO: 1034380 - DNA, 15 bp, Homo sapiens
cttagtagctgaaga

SEQ ID NO: 1034381 - DNA, 15 bp, Homo sapiens
acttagtagctgaag

SEQ ID NO: 1034382 - DNA, 15 bp, Homo sapiens
aacttagtagctgaa

SEQ ID NO: 1034383 - DNA, 15 bp, Homo sapiens
aaacttagtagctga

SEQ ID NO: 1034384 - DNA, 15 bp, Homo sapiens
gaaacttagtagctg

SEQ ID NO: 1034385 - DNA, 15 bp, Homo sapiens
agaaacttagtagct

SEQ ID NO: 1034386 - DNA, 15 bp, Homo sapiens
cagaaacttagtagc

SEQ ID NO: 1034387 - DNA, 15 bp, Homo sapiens
tcagaaacttagtag

SEQ ID NO: 1034388 - DNA, 15 bp, Homo sapiens
atcagaaacttagta

SEQ ID NO: 1034389 - DNA, 15 bp, Homo sapiens
aatcagaaacttagt

SEQ ID NO: 1034390 - DNA, 15 bp, Homo sapiens
aaatcagaaacttag

SEQ ID NO: 1034391 - DNA, 15 bp, Homo sapiens
aaaatcagaaactta

SEQ ID NO: 1034392 - DNA, 15 bp, Homo sapiens
caaaatcagaaactt

SEQ ID NO: 1034393 - DNA, 15 bp, Homo sapiens
gcaaaatcagaaact

SEQ ID NO: 1034394 - DNA, 15 bp, Homo sapiens
tgcaaaatcagaaac

SEQ ID NO: 1034395 - DNA, 15 bp, Homo sapiens
atgcaaaatcagaaa

SEQ ID NO: 1034396 - DNA, 15 bp, Homo sapiens
aatgcaaaatcagaa

SEQ ID NO: 1034397 - DNA, 15 bp, Homo sapiens
aaatgcaaaatcaga

SEQ ID NO: 1034398 - DNA, 15 bp, Homo sapiens
caaatgcaaaatcag

SEQ ID NO: 1034399 - DNA, 15 bp, Homo sapiens
tcaaatgcaaaatca

SEQ ID NO: 1034400 - DNA, 15 bp, Homo sapiens
atcaaatgcaaaatc

SEQ ID NO: 1034401 - DNA, 15 bp, Homo sapiens
tatcaaatgcaaaat

SEQ ID NO: 1034402 - DNA, 15 bp, Homo sapiens
atatcaaatgcaaaa

SEQ ID NO: 1034403 - DNA, 15 bp, Homo sapiens
catatcaaatgcaaa

SEQ ID NO: 1034404 - DNA, 15 bp, Homo sapiens
ccatatcaaatgcaa

SEQ ID NO: 1034405 - DNA, 15 bp, Homo sapiens
cccatatcaaatgca

SEQ ID NO: 1034406 - DNA, 15 bp, Homo sapiens
tcccatatcaaatgc

SEQ ID NO: 1034407 - DNA, 15 bp, Homo sapiens
ctcccatatcaaatg

SEQ ID NO: 1034408 - DNA, 15 bp, Homo sapiens
gctcccatatcaaat

SEQ ID NO: 1034409 - DNA, 15 bp, Homo sapiens
tgctcccatatcaaa

SEQ ID NO: 1034410 - DNA, 15 bp, Homo sapiens
ttgctcccatatcaa

SEQ ID NO: 1034411 - DNA, 15 bp, Homo sapiens
attgctcccatatca

SEQ ID NO: 1034412 - DNA, 15 bp, Homo sapiens
tattgctcccatatc

SEQ ID NO: 1034413 - DNA, 15 bp, Homo sapiens
ctattgctcccatat

SEQ ID NO: 1034414 - DNA, 15 bp, Homo sapiens
actattgctcccata

SEQ ID NO: 1034415 - DNA, 15 bp, Homo sapiens
tactattgctcccat

SEQ ID NO: 1034416 - DNA, 15 bp, Homo sapiens
atactattgctccca

SEQ ID NO: 1034417 - DNA, 15 bp, Homo sapiens
aatactattgctccc

SEQ ID NO: 1034418 - DNA, 15 bp, Homo sapiens
aaatactattgctcc

SEQ ID NO: 1034419 - DNA, 15 bp, Homo sapiens
aaaatactattgctc

SEQ ID NO: 1034420 - DNA, 15 bp, Homo sapiens
taaaatactattgct

SEQ ID NO: 1034421 - DNA, 15 bp, Homo sapiens
ataaaatactattgc

SEQ ID NO: 1034422 - DNA, 15 bp, Homo sapiens
aataaaatactattg

SEQ ID NO: 1034423 - DNA, 15 bp, Homo sapiens
caataaaatactatt

SEQ ID NO: 1034424 - DNA, 15 bp, Homo sapiens
ccaataaaatactat

SEQ ID NO: 1034425 - DNA, 15 bp, Homo sapiens
cccaataaaatacta

SEQ ID NO: 1034426 - DNA, 15 bp, Homo sapiens
gcccaataaaatact

SEQ ID NO: 1034427 - DNA, 15 bp, Homo sapiens
agcccaataaaatac

SEQ ID NO: 1034428 - DNA, 15 bp, Homo sapiens
tagcccaataaaata

SEQ ID NO: 1034429 - DNA, 15 bp, Homo sapiens
gtagcccaataaaat

SEQ ID NO: 1034430 - DNA, 15 bp, Homo sapiens
tgtagcccaataaaa

SEQ ID NO: 1034431 - DNA, 15 bp, Homo sapiens
gtgtagcccaataaa

SEQ ID NO: 1034432 - DNA, 15 bp, Homo sapiens
tgtgtagcccaataa

SEQ ID NO: 1034433 - DNA, 15 bp, Homo sapiens
ttgtgtagcccaata

SEQ ID NO: 1034434 - DNA, 15 bp, Homo sapiens
cttgtgtagcccaat

SEQ ID NO: 1034435 - DNA, 15 bp, Homo sapiens
ccttgtgtagcccaa

SEQ ID NO: 1034436 - DNA, 15 bp, Homo sapiens
accttgtgtagccca

SEQ ID NO: 1034437 - DNA, 15 bp, Homo sapiens
aaccttgtgtagccc

SEQ ID NO: 1034438 - DNA, 15 bp, Homo sapiens
gaaccttgtgtagcc

SEQ ID NO: 1034439 - DNA, 15 bp, Homo sapiens
ggaaccttgtgtagc

SEQ ID NO: 1034440 - DNA, 15 bp, Homo sapiens
tggaaccttgtgtag

SEQ ID NO: 1034441 - DNA, 15 bp, Homo sapiens
ttggaaccttgtgta

SEQ ID NO: 1034442 - DNA, 15 bp, Homo sapiens
tttggaaccttgtgt

SEQ ID NO: 1034443 - DNA, 15 bp, Homo sapiens
ttttggaaccttgtg

SEQ ID NO: 1034444 - DNA, 15 bp, Homo sapiens
attttggaaccttgt

SEQ ID NO: 1034445 - DNA, 15 bp, Homo sapiens
gattttggaaccttg

SEQ ID NO: 1034446 - DNA, 15 bp, Homo sapiens
agattttggaacctt

SEQ ID NO: 1034447 - DNA, 15 bp, Homo sapiens
gagattttggaacct

SEQ ID NO: 1034448 - DNA, 15 bp, Homo sapiens
agagattttggaacc

SEQ ID NO: 1034449 - DNA, 15 bp, Homo sapiens
gagagattttggaac

SEQ ID NO: 1034450 - DNA, 15 bp, Homo sapiens
agagagattttggaa

SEQ ID NO: 1034451 - DNA, 15 bp, Homo sapiens
aagagagattttgga

SEQ ID NO: 1034452 - DNA, 15 bp, Homo sapiens
aaagagagattttgg

SEQ ID NO: 1034453 - DNA, 15 bp, Homo sapiens
aaaagagagattttg

SEQ ID NO: 1034454 - DNA, 15 bp, Homo sapiens
caaaagagagatttt

SEQ ID NO: 1034455 - DNA, 15 bp, Homo sapiens
tcaaaagagagattt

SEQ ID NO: 1034456 - DNA, 15 bp, Homo sapiens
ttcaaaagagagatt

SEQ ID NO: 1034457 - DNA, 15 bp, Homo sapiens
cttcaaaagagagat

SEQ ID NO: 1034458 - DNA, 15 bp, Homo sapiens
tcttcaaaagagaga

SEQ ID NO: 1034459 - DNA, 15 bp, Homo sapiens
atcttcaaaagagag

SEQ ID NO: 1034460 - DNA, 15 bp, Homo sapiens
tatcttcaaaagaga

SEQ ID NO: 1034461 - DNA, 15 bp, Homo sapiens
atatcttcaaaagag

SEQ ID NO: 1034462 - DNA, 15 bp, Homo sapiens
aatatcttcaaaaga

SEQ ID NO: 1034463 - DNA, 15 bp, Homo sapiens
gaatatcttcaaaag

SEQ ID NO: 1034464 - DNA, 15 bp, Homo sapiens
tgaatatcttcaaaa

SEQ ID NO: 1034465 - DNA, 15 bp, Homo sapiens
atgaatatcttcaaa

SEQ ID NO: 1034466 - DNA, 15 bp, Homo sapiens
catgaatatcttcaa

SEQ ID NO: 1034467 - DNA, 15 bp, Homo sapiens
acatgaatatcttca

SEQ ID NO: 1034468 - DNA, 15 bp, Homo sapiens
cacatgaatatcttc

SEQ ID NO: 1034469 - DNA, 15 bp, Homo sapiens
acacatgaatatctt

SEQ ID NO: 1034470 - DNA, 15 bp, Homo sapiens
tacacatgaatatct

SEQ ID NO: 1034471 - DNA, 15 bp, Homo sapiens
ctacacatgaatatc

SEQ ID NO: 1034472 - DNA, 15 bp, Homo sapiens
cctacacatgaatat

SEQ ID NO: 1034473 - DNA, 15 bp, Homo sapiens
tcctacacatgaata

SEQ ID NO: 1034474 - DNA, 15 bp, Homo sapiens
ttcctacacatgaat

SEQ ID NO: 1034475 - DNA, 15 bp, Homo sapiens
tttcctacacatgaa

SEQ ID NO: 1034476 - DNA, 15 bp, Homo sapiens
gtttcctacacatga

SEQ ID NO: 1034477 - DNA, 15 bp, Homo sapiens
agtttcctacacatg

SEQ ID NO: 1034478 - DNA, 15 bp, Homo sapiens
gagtttcctacacat

SEQ ID NO: 1034479 - DNA, 15 bp, Homo sapiens
agagtttcctacaca

SEQ ID NO: 1034480 - DNA, 15 bp, Homo sapiens
cagagtttcctacac

SEQ ID NO: 1034481 - DNA, 15 bp, Homo sapiens
acagagtttcctaca

SEQ ID NO: 1034482 - DNA, 15 bp, Homo sapiens
tacagagtttcctac

SEQ ID NO: 1034483 - DNA, 15 bp, Homo sapiens
ttacagagtttccta

SEQ ID NO: 1034484 - DNA, 15 bp, Homo sapiens
gttacagagtttcct

SEQ ID NO: 1034485 - DNA, 15 bp, Homo sapiens
tgttacagagtttcc

SEQ ID NO: 1034486 - DNA, 15 bp, Homo sapiens
ctgttacagagtttc

SEQ ID NO: 1034487 - DNA, 15 bp, Homo sapiens
tctgttacagagttt

SEQ ID NO: 1034488 - DNA, 15 bp, Homo sapiens
atctgttacagagtt

SEQ ID NO: 1034489 - DNA, 15 bp, Homo sapiens
tatctgttacagagt

SEQ ID NO: 1034490 - DNA, 15 bp, Homo sapiens
atatctgttacagag

SEQ ID NO: 1034491 - DNA, 15 bp, Homo sapiens
tatatctgttacaga

SEQ ID NO: 1034492 - DNA, 15 bp, Homo sapiens
ctatatctgttacag

SEQ ID NO: 1034493 - DNA, 15 bp, Homo sapiens
gctatatctgttaca

SEQ ID NO: 1034494 - DNA, 15 bp, Homo sapiens
agctatatctgttac

SEQ ID NO: 1034495 - DNA, 15 bp, Homo sapiens
gagctatatctgtta

SEQ ID NO: 1034496 - DNA, 15 bp, Homo sapiens
agagctatatctgtt

SEQ ID NO: 1034497 - DNA, 15 bp, Homo sapiens
aagagctatatctgt

SEQ ID NO: 1034498 - DNA, 15 bp, Homo sapiens
caagagctatatctg

SEQ ID NO: 1034499 - DNA, 15 bp, Homo sapiens
gcaagagctatatct

SEQ ID NO: 1034500 - DNA, 15 bp, Homo sapiens
tgcaagagctatatc

SEQ ID NO: 1034501 - DNA, 15 bp, Homo sapiens
gtgcaagagctatat

SEQ ID NO: 1034502 - DNA, 15 bp, Homo sapiens
tgtgcaagagctata

SEQ ID NO: 1034503 - DNA, 15 bp, Homo sapiens
ttgtgcaagagctat

SEQ ID NO: 1034504 - DNA, 15 bp, Homo sapiens
attgtgcaagagcta

SEQ ID NO: 1034505 - DNA, 15 bp, Homo sapiens
aattgtgcaagagct

SEQ ID NO: 1034506 - DNA, 15 bp, Homo sapiens
aaattgtgcaagagc

SEQ ID NO: 1034507 - DNA, 15 bp, Homo sapiens
aaaattgtgcaagag

SEQ ID NO: 1034508 - DNA, 15 bp, Homo sapiens
aaaaattgtgcaaga

SEQ ID NO: 1034509 - DNA, 15 bp, Homo sapiens
taaaaattgtgcaag

SEQ ID NO: 1034510 - DNA, 15 bp, Homo sapiens
ctaaaaattgtgcaa

SEQ ID NO: 1034511 - DNA, 15 bp, Homo sapiens
cctaaaaattgtgca

SEQ ID NO: 1034512 - DNA, 15 bp, Homo sapiens
tcctaaaaattgtgc

SEQ ID NO: 1034513 - DNA, 15 bp, Homo sapiens
ctcctaaaaattgtg

SEQ ID NO: 1034514 - DNA, 15 bp, Homo sapiens
tctcctaaaaattgt

SEQ ID NO: 1034515 - DNA, 15 bp, Homo sapiens
ttctcctaaaaattg

SEQ ID NO: 1034516 - DNA, 15 bp, Homo sapiens
cttctcctaaaaatt

SEQ ID NO: 1034517 - DNA, 15 bp, Homo sapiens
tcttctcctaaaaat

SEQ ID NO: 1034518 - DNA, 15 bp, Homo sapiens
ctcttctcctaaaaa

SEQ ID NO: 1034519 - DNA, 15 bp, Homo sapiens
tctcttctcctaaaa

SEQ ID NO: 1034520 - DNA, 15 bp, Homo sapiens
atctcttctcctaaa

SEQ ID NO: 1034521 - DNA, 15 bp, Homo sapiens
aatctcttctcctaa

SEQ ID NO: 1034522 - DNA, 15 bp, Homo sapiens
aaatctcttctccta

SEQ ID NO: 1034523 - DNA, 15 bp, Homo sapiens
caaatctcttctcct

SEQ ID NO: 1034524 - DNA, 15 bp, Homo sapiens
ccaaatctcttctcc

SEQ ID NO: 1034525 - DNA, 15 bp, Homo sapiens
cccaaatctcttctc

SEQ ID NO: 1034526 - DNA, 15 bp, Homo sapiens
tcccaaatctcttct

SEQ ID NO: 1034527 - DNA, 15 bp, Homo sapiens
ttcccaaatctcttc

SEQ ID NO: 1034528 - DNA, 15 bp, Homo sapiens
tttcccaaatctctt

SEQ ID NO: 1034529 - DNA, 15 bp, Homo sapiens
gtttcccaaatctct

SEQ ID NO: 1034530 - DNA, 15 bp, Homo sapiens
agtttcccaaatctc

SEQ ID NO: 1034531 - DNA, 15 bp, Homo sapiens
aagtttcccaaatct

SEQ ID NO: 1034532 - DNA, 15 bp, Homo sapiens
aaagtttcccaaatc

SEQ ID NO: 1034533 - DNA, 15 bp, Homo sapiens
taaagtttcccaaat

SEQ ID NO: 1034534 - DNA, 15 bp, Homo sapiens
ataaagtttcccaaa

SEQ ID NO: 1034535 - DNA, 15 bp, Homo sapiens
gataaagtttcccaa

SEQ ID NO: 1034536 - DNA, 15 bp, Homo sapiens
tgataaagtttccca

SEQ ID NO: 1034537 - DNA, 15 bp, Homo sapiens
ctgataaagtttccc

SEQ ID NO: 1034538 - DNA, 15 bp, Homo sapiens
actgataaagtttcc

SEQ ID NO: 1034539 - DNA, 15 bp, Homo sapiens
aactgataaagtttc

SEQ ID NO: 1034540 - DNA, 15 bp, Homo sapiens
aaactgataaagttt

SEQ ID NO: 1034541 - DNA, 15 bp, Homo sapiens
aaaactgataaagtt

SEQ ID NO: 1034542 - DNA, 15 bp, Homo sapiens
aaaaactgataaagt

SEQ ID NO: 1034543 - DNA, 15 bp, Homo sapiens
gaaaaactgataaag

SEQ ID NO: 1034544 - DNA, 15 bp, Homo sapiens
agaaaaactgataaa

SEQ ID NO: 1034545 - DNA, 15 bp, Homo sapiens
gagaaaaactgataa

SEQ ID NO: 1034546 - DNA, 15 bp, Homo sapiens
tgagaaaaactgata

SEQ ID NO: 1034547 - DNA, 15 bp, Homo sapiens
ttgagaaaaactgat

SEQ ID NO: 1034548 - DNA, 15 bp, Homo sapiens
gttgagaaaaactga

SEQ ID NO: 1034549 - DNA, 15 bp, Homo sapiens
ggttgagaaaaactg

SEQ ID NO: 1034550 - DNA, 15 bp, Homo sapiens
aggttgagaaaaact

SEQ ID NO: 1034551 - DNA, 15 bp, Homo sapiens
aaggttgagaaaaac

SEQ ID NO: 1034552 - DNA, 15 bp, Homo sapiens
aaaggttgagaaaaa

SEQ ID NO: 1034553 - DNA, 15 bp, Homo sapiens
aaaaggttgagaaaa

SEQ ID NO: 1034554 - DNA, 15 bp, Homo sapiens
aaaaaggttgagaaa

SEQ ID NO: 1034555 - DNA, 15 bp, Homo sapiens
taaaaaggttgagaa

SEQ ID NO: 1034556 - DNA, 15 bp, Homo sapiens
ttaaaaaggttgaga

SEQ ID NO: 1034557 - DNA, 15 bp, Homo sapiens
gttaaaaaggttgag

SEQ ID NO: 1034558 - DNA, 15 bp, Homo sapiens
agttaaaaaggttga

SEQ ID NO: 1034559 - DNA, 15 bp, Homo sapiens
gagttaaaaaggttg

SEQ ID NO: 1034560 - DNA, 15 bp, Homo sapiens
agagttaaaaaggtt

SEQ ID NO: 1034561 - DNA, 15 bp, Homo sapiens
tagagttaaaaaggt

SEQ ID NO: 1034562 - DNA, 15 bp, Homo sapiens
atagagttaaaaagg

SEQ ID NO: 1034563 - DNA, 15 bp, Homo sapiens
gatagagttaaaaag

SEQ ID NO: 1034564 - DNA, 15 bp, Homo sapiens
agatagagttaaaaa

SEQ ID NO: 1034565 - DNA, 15 bp, Homo sapiens
aagatagagttaaaa

SEQ ID NO: 1034566 - DNA, 15 bp, Homo sapiens
taagatagagttaaa

SEQ ID NO: 1034567 - DNA, 15 bp, Homo sapiens
ttaagatagagttaa

SEQ ID NO: 1034568 - DNA, 15 bp, Homo sapiens
tttaagatagagtta

SEQ ID NO: 1034569 - DNA, 15 bp, Homo sapiens
ctttaagatagagtt

SEQ ID NO: 1034570 - DNA, 15 bp, Homo sapiens
actttaagatagagt

SEQ ID NO: 1034571 - DNA, 15 bp, Homo sapiens
gactttaagatagag

SEQ ID NO: 1034572 - DNA, 15 bp, Homo sapiens
ggactttaagataga

SEQ ID NO: 1034573 - DNA, 15 bp, Homo sapiens
tggactttaagatag

SEQ ID NO: 1034574 - DNA, 15 bp, Homo sapiens
ttggactttaagata

SEQ ID NO: 1034575 - DNA, 15 bp, Homo sapiens
cttggactttaagat

SEQ ID NO: 1034576 - DNA, 15 bp, Homo sapiens
ccttggactttaaga

SEQ ID NO: 1034577 - DNA, 15 bp, Homo sapiens
tccttggactttaag

SEQ ID NO: 1034578 - DNA, 15 bp, Homo sapiens
ttccttggactttaa

SEQ ID NO: 1034579 - DNA, 15 bp, Homo sapiens
tttccttggacttta

SEQ ID NO: 1034580 - DNA, 15 bp, Homo sapiens
ctttccttggacttt

SEQ ID NO: 1034581 - DNA, 15 bp, Homo sapiens
actttccttggactt

SEQ ID NO: 1034582 - DNA, 15 bp, Homo sapiens
cactttccttggact

SEQ ID NO: 1034583 - DNA, 15 bp, Homo sapiens
tcactttccttggac

SEQ ID NO: 1034584 - DNA, 15 bp, Homo sapiens
ttcactttccttgga

SEQ ID NO: 1034585 - DNA, 15 bp, Homo sapiens
tttcactttccttgg

SEQ ID NO: 1034586 - DNA, 15 bp, Homo sapiens
ctttcactttccttg

SEQ ID NO: 1034587 - DNA, 15 bp, Homo sapiens
tctttcactttcctt

SEQ ID NO: 1034588 - DNA, 15 bp, Homo sapiens
atctttcactttcct

SEQ ID NO: 1034589 - DNA, 15 bp, Homo sapiens
aatctttcactttcc

SEQ ID NO: 1034590 - DNA, 15 bp, Homo sapiens
taatctttcactttc

SEQ ID NO: 1034591 - DNA, 15 bp, Homo sapiens
ttaatctttcacttt

SEQ ID NO: 1034592 - DNA, 15 bp, Homo sapiens
cttaatctttcactt

SEQ ID NO: 1034593 - DNA, 15 bp, Homo sapiens
tcttaatctttcact

SEQ ID NO: 1034594 - DNA, 15 bp, Homo sapiens
ttcttaatctttcac

SEQ ID NO: 1034595 - DNA, 15 bp, Homo sapiens
tttcttaatctttca

SEQ ID NO: 1034596 - DNA, 15 bp, Homo sapiens
ttttcttaatctttc

SEQ ID NO: 1034597 - DNA, 15 bp, Homo sapiens
gttttcttaatcttt

SEQ ID NO: 1034598 - DNA, 15 bp, Homo sapiens
agttttcttaatctt

SEQ ID NO: 1034599 - DNA, 15 bp, Homo sapiens
aagttttcttaatct

SEQ ID NO: 1034600 - DNA, 15 bp, Homo sapiens
aaagttttcttaatc

SEQ ID NO: 1034601 - DNA, 15 bp, Homo sapiens
gaaagttttcttaat

SEQ ID NO: 1034602 - DNA, 15 bp, Homo sapiens
ggaaagttttcttaa

SEQ ID NO: 1034603 - DNA, 15 bp, Homo sapiens
aggaaagttttctta

SEQ ID NO: 1034604 - DNA, 15 bp, Homo sapiens
aaggaaagttttctt

SEQ ID NO: 1034605 - DNA, 15 bp, Homo sapiens
taaggaaagttttct

SEQ ID NO: 1034606 - DNA, 15 bp, Homo sapiens
ataaggaaagttttc

SEQ ID NO: 1034607 - DNA, 15 bp, Homo sapiens
gataaggaaagtttt

SEQ ID NO: 1034608 - DNA, 15 bp, Homo sapiens
tgataaggaaagttt

SEQ ID NO: 1034609 - DNA, 15 bp, Homo sapiens
ctgataaggaaagtt

SEQ ID NO: 1034610 - DNA, 15 bp, Homo sapiens
cctgataaggaaagt

SEQ ID NO: 1034611 - DNA, 15 bp, Homo sapiens
ccctgataaggaaag

SEQ ID NO: 1034612 - DNA, 15 bp, Homo sapiens
gccctgataaggaaa

SEQ ID NO: 1034613 - DNA, 15 bp, Homo sapiens
agccctgataaggaa

SEQ ID NO: 1034614 - DNA, 15 bp, Homo sapiens
cagccctgataagga

SEQ ID NO: 1034615 - DNA, 15 bp, Homo sapiens
acagccctgataagg

SEQ ID NO: 1034616 - DNA, 15 bp, Homo sapiens
gacagccctgataag

SEQ ID NO: 1034617 - DNA, 15 bp, Homo sapiens
ggacagccctgataa

SEQ ID NO: 1034618 - DNA, 15 bp, Homo sapiens
tggacagccctgata

SEQ ID NO: 1034619 - DNA, 15 bp, Homo sapiens
ttggacagccctgat

SEQ ID NO: 1034620 - DNA, 15 bp, Homo sapiens
gttggacagccctga

SEQ ID NO: 1034621 - DNA, 15 bp, Homo sapiens
tgttggacagccctg

SEQ ID NO: 1034622 - DNA, 15 bp, Homo sapiens
ctgttggacagccct

SEQ ID NO: 1034623 - DNA, 15 bp, Homo sapiens
tctgttggacagccc

SEQ ID NO: 1034624 - DNA, 15 bp, Homo sapiens
ttctgttggacagcc

SEQ ID NO: 1034625 - DNA, 15 bp, Homo sapiens
gttctgttggacagc

SEQ ID NO: 1034626 - DNA, 15 bp, Homo sapiens
agttctgttggacag

SEQ ID NO: 1034627 - DNA, 15 bp, Homo sapiens
aagttctgttggaca

SEQ ID NO: 1034628 - DNA, 15 bp, Homo sapiens
aaagttctgttggac

SEQ ID NO: 1034629 - DNA, 15 bp, Homo sapiens
gaaagttctgttgga

SEQ ID NO: 1034630 - DNA, 15 bp, Homo sapiens
agaaagttctgttgg

SEQ ID NO: 1034631 - DNA, 15 bp, Homo sapiens
tagaaagttctgttg

SEQ ID NO: 1034632 - DNA, 15 bp, Homo sapiens
gtagaaagttctgtt

SEQ ID NO: 1034633 - DNA, 15 bp, Homo sapiens
tgtagaaagttctgt

SEQ ID NO: 1034634 - DNA, 15 bp, Homo sapiens
ttgtagaaagttctg

SEQ ID NO: 1034635 - DNA, 15 bp, Homo sapiens
tttgtagaaagttct

SEQ ID NO: 1034636 - DNA, 15 bp, Homo sapiens
gtttgtagaaagttc

SEQ ID NO: 1034637 - DNA, 15 bp, Homo sapiens
tgtttgtagaaagtt

SEQ ID NO: 1034638 - DNA, 15 bp, Homo sapiens
atgtttgtagaaagt

SEQ ID NO: 1034639 - DNA, 15 bp, Homo sapiens
catgtttgtagaaag

SEQ ID NO: 1034640 - DNA, 15 bp, Homo sapiens
ccatgtttgtagaaa

SEQ ID NO: 1034641 - DNA, 15 bp, Homo sapiens
tccatgtttgtagaa

SEQ ID NO: 1034642 - DNA, 15 bp, Homo sapiens
ttccatgtttgtaga

SEQ ID NO: 1034643 - DNA, 15 bp, Homo sapiens
tttccatgtttgtag

SEQ ID NO: 1034644 - DNA, 15 bp, Homo sapiens
atttccatgtttgta

SEQ ID NO: 1034645 - DNA, 15 bp, Homo sapiens
catttccatgtttgt

SEQ ID NO: 1034646 - DNA, 15 bp, Homo sapiens
acatttccatgtttg

SEQ ID NO: 1034647 - DNA, 15 bp, Homo sapiens
gacatttccatgttt

SEQ ID NO: 1034648 - DNA, 15 bp, Homo sapiens
ggacatttccatgtt

SEQ ID NO: 1034649 - DNA, 15 bp, Homo sapiens
aggacatttccatgt

SEQ ID NO: 1034650 - DNA, 15 bp, Homo sapiens
caggacatttccatg

SEQ ID NO: 1034651 - DNA, 15 bp, Homo sapiens
acaggacatttccat

SEQ ID NO: 1034652 - DNA, 15 bp, Homo sapiens
aacaggacatttcca

SEQ ID NO: 1034653 - DNA, 15 bp, Homo sapiens
gaacaggacatttcc

SEQ ID NO: 1034654 - DNA, 15 bp, Homo sapiens
agaacaggacatttc

SEQ ID NO: 1034655 - DNA, 15 bp, Homo sapiens
cagaacaggacattt

SEQ ID NO: 1034656 - DNA, 15 bp, Homo sapiens
gcagaacaggacatt

SEQ ID NO: 1034657 - DNA, 15 bp, Homo sapiens
tgcagaacaggacat

SEQ ID NO: 1034658 - DNA, 15 bp, Homo sapiens
gtgcagaacaggaca

SEQ ID NO: 1034659 - DNA, 15 bp, Homo sapiens
agtgcagaacaggac

SEQ ID NO: 1034660 - DNA, 15 bp, Homo sapiens
cagtgcagaacagga

SEQ ID NO: 1034661 - DNA, 15 bp, Homo sapiens
acagtgcagaacagg

SEQ ID NO: 1034662 - DNA, 15 bp, Homo sapiens
aacagtgcagaacag

SEQ ID NO: 1034663 - DNA, 15 bp, Homo sapiens
gaacagtgcagaaca

SEQ ID NO: 1034664 - DNA, 15 bp, Homo sapiens
tgaacagtgcagaac

SEQ ID NO: 1034665 - DNA, 15 bp, Homo sapiens
gtgaacagtgcagaa

SEQ ID NO: 1034666 - DNA, 15 bp, Homo sapiens
agtgaacagtgcaga

SEQ ID NO: 1034667 - DNA, 15 bp, Homo sapiens
tagtgaacagtgcag

SEQ ID NO: 1034668 - DNA, 15 bp, Homo sapiens
atagtgaacagtgca

SEQ ID NO: 1034669 - DNA, 15 bp, Homo sapiens
catagtgaacagtgc

SEQ ID NO: 1034670 - DNA, 15 bp, Homo sapiens
ccatagtgaacagtg

SEQ ID NO: 1034671 - DNA, 15 bp, Homo sapiens
accatagtgaacagt

SEQ ID NO: 1034672 - DNA, 15 bp, Homo sapiens
taccatagtgaacag

SEQ ID NO: 1034673 - DNA, 15 bp, Homo sapiens
ctaccatagtgaaca

SEQ ID NO: 1034674 - DNA, 15 bp, Homo sapiens
gctaccatagtgaac

SEQ ID NO: 1034675 - DNA, 15 bp, Homo sapiens
ggctaccatagtgaa

SEQ ID NO: 1034676 - DNA, 15 bp, Homo sapiens
tggctaccatagtga

SEQ ID NO: 1034677 - DNA, 15 bp, Homo sapiens
gtggctaccatagtg

SEQ ID NO: 1034678 - DNA, 15 bp, Homo sapiens
agtggctaccatagt

SEQ ID NO: 1034679 - DNA, 15 bp, Homo sapiens
cagtggctaccatag

SEQ ID NO: 1034680 - DNA, 15 bp, Homo sapiens
acagtggctaccata

SEQ ID NO: 1034681 - DNA, 15 bp, Homo sapiens
tacagtggctaccat

SEQ ID NO: 1034682 - DNA, 15 bp, Homo sapiens
gtacagtggctacca

SEQ ID NO: 1034683 - DNA, 15 bp, Homo sapiens
agtacagtggctacc

SEQ ID NO: 1034684 - DNA, 15 bp, Homo sapiens
gagtacagtggctac

SEQ ID NO: 1034685 - DNA, 15 bp, Homo sapiens
agagtacagtggcta

SEQ ID NO: 1034686 - DNA, 15 bp, Homo sapiens
gagagtacagtggct

SEQ ID NO: 1034687 - DNA, 15 bp, Homo sapiens
agagagtacagtggc

SEQ ID NO: 1034688 - DNA, 15 bp, Homo sapiens
tagagagtacagtgg

SEQ ID NO: 1034689 - DNA, 15 bp, Homo sapiens
atagagagtacagtg

SEQ ID NO: 1034690 - DNA, 15 bp, Homo sapiens
aatagagagtacagt

SEQ ID NO: 1034691 - DNA, 15 bp, Homo sapiens
aaatagagagtacag

SEQ ID NO: 1034692 - DNA, 15 bp, Homo sapiens
caaatagagagtaca

SEQ ID NO: 1034693 - DNA, 15 bp, Homo sapiens
tcaaatagagagtac

SEQ ID NO: 1034694 - DNA, 15 bp, Homo sapiens
ctcaaatagagagta

SEQ ID NO: 1034695 - DNA, 15 bp, Homo sapiens
actcaaatagagagt

SEQ ID NO: 1034696 - DNA, 15 bp, Homo sapiens
cactcaaatagagag

SEQ ID NO: 1034697 - DNA, 15 bp, Homo sapiens
ccactcaaatagaga

SEQ ID NO: 1034698 - DNA, 15 bp, Homo sapiens
gccactcaaatagag

SEQ ID NO: 1034699 - DNA, 15 bp, Homo sapiens
agccactcaaataga

SEQ ID NO: 1034700 - DNA, 15 bp, Homo sapiens
tagccactcaaatag

SEQ ID NO: 1034701 - DNA, 15 bp, Homo sapiens
atagccactcaaata

SEQ ID NO: 1034702 - DNA, 15 bp, Homo sapiens
aatagccactcaaat

SEQ ID NO: 1034703 - DNA, 15 bp, Homo sapiens
caatagccactcaaa

SEQ ID NO: 1034704 - DNA, 15 bp, Homo sapiens
tcaatagccactcaa

SEQ ID NO: 1034705 - DNA, 15 bp, Homo sapiens
ctcaatagccactca

SEQ ID NO: 1034706 - DNA, 15 bp, Homo sapiens
actcaatagccactc

SEQ ID NO: 1034707 - DNA, 15 bp, Homo sapiens
tactcaatagccact

SEQ ID NO: 1034708 - DNA, 15 bp, Homo sapiens
atactcaatagccac

SEQ ID NO: 1034709 - DNA, 15 bp, Homo sapiens
aatactcaatagcca

SEQ ID NO: 1034710 - DNA, 15 bp, Homo sapiens
aaatactcaatagcc

SEQ ID NO: 1034711 - DNA, 15 bp, Homo sapiens
caaatactcaatagc

SEQ ID NO: 1034712 - DNA, 15 bp, Homo sapiens
tcaaatactcaatag

SEQ ID NO: 1034713 - DNA, 15 bp, Homo sapiens
ttcaaatactcaata

SEQ ID NO: 1034714 - DNA, 15 bp, Homo sapiens
tttcaaatactcaat

SEQ ID NO: 1034715 - DNA, 15 bp, Homo sapiens
atttcaaatactcaa

SEQ ID NO: 1034716 - DNA, 15 bp, Homo sapiens
tatttcaaatactca

SEQ ID NO: 1034717 - DNA, 15 bp, Homo sapiens
atatttcaaatactc

SEQ ID NO: 1034718 - DNA, 15 bp, Homo sapiens
catatttcaaatact

SEQ ID NO: 1034719 - DNA, 15 bp, Homo sapiens
ccatatttcaaatac

SEQ ID NO: 1034720 - DNA, 15 bp, Homo sapiens
gccatatttcaaata

SEQ ID NO: 1034721 - DNA, 15 bp, Homo sapiens
agccatatttcaaat

SEQ ID NO: 1034722 - DNA, 15 bp, Homo sapiens
tagccatatttcaaa

SEQ ID NO: 1034723 - DNA, 15 bp, Homo sapiens
tctagccatatttca

SEQ ID NO: 1034724 - DNA, 15 bp, Homo sapiens
ctctagccatatttc

SEQ ID NO: 1034725 - DNA, 15 bp, Homo sapiens
tctctagccatattt

SEQ ID NO: 1034726 - DNA, 15 bp, Homo sapiens
ttctctagccatatt

SEQ ID NO: 1034727 - DNA, 15 bp, Homo sapiens
tttctctagccatat

SEQ ID NO: 1034728 - DNA, 15 bp, Homo sapiens
ctttctctagccata

SEQ ID NO: 1034729 - DNA, 15 bp, Homo sapiens
cctttctctagccat

SEQ ID NO: 1034730 - DNA, 15 bp, Homo sapiens
tcctttctctagcca

SEQ ID NO: 1034731 - DNA, 15 bp, Homo sapiens
ttcctttctctagcc

SEQ ID NO: 1034732 - DNA, 15 bp, Homo sapiens
tttcctttctctagc

SEQ ID NO: 1034733 - DNA, 15 bp, Homo sapiens
atttcctttctctag

SEQ ID NO: 1034734 - DNA, 15 bp, Homo sapiens
catttcctttctcta

SEQ ID NO: 1034735 - DNA, 15 bp, Homo sapiens
acatttcctttctct

SEQ ID NO: 1034736 - DNA, 15 bp, Homo sapiens
tacatttcctttctc

SEQ ID NO: 1034737 - DNA, 15 bp, Homo sapiens
ttacatttcctttct

SEQ ID NO: 1034738 - DNA, 15 bp, Homo sapiens
tttacatttcctttc

SEQ ID NO: 1034739 - DNA, 15 bp, Homo sapiens
ttttacatttccttt

SEQ ID NO: 1034740 - DNA, 15 bp, Homo sapiens
attttacatttcctt

SEQ ID NO: 1034741 - DNA, 15 bp, Homo sapiens
aattttacatttcct

SEQ ID NO: 1034742 - DNA, 15 bp, Homo sapiens
caattttacatttcc

SEQ ID NO: 1034743 - DNA, 15 bp, Homo sapiens
acaattttacatttc

SEQ ID NO: 1034744 - DNA, 15 bp, Homo sapiens
cacaattttacattt

SEQ ID NO: 1034745 - DNA, 15 bp, Homo sapiens
acacaattttacatt

SEQ ID NO: 1034746 - DNA, 15 bp, Homo sapiens
aacacaattttacat

SEQ ID NO: 1034747 - DNA, 15 bp, Homo sapiens
gaacacaattttaca

SEQ ID NO: 1034748 - DNA, 15 bp, Homo sapiens
agaacacaattttac

SEQ ID NO: 1034749 - DNA, 15 bp, Homo sapiens
aagaacacaatttta

SEQ ID NO: 1034750 - DNA, 15 bp, Homo sapiens
aaagaacacaatttt

SEQ ID NO: 1034751 - DNA, 15 bp, Homo sapiens
aaaagaacacaattt

SEQ ID NO: 1034752 - DNA, 15 bp, Homo sapiens
aaaaagaacacaatt

SEQ ID NO: 1034753 - DNA, 15 bp, Homo sapiens
aaaaaagaacacaat

SEQ ID NO: 1034754 - DNA, 15 bp, Homo sapiens
gaaaaaagaacacaa

SEQ ID NO: 1034755 - DNA, 15 bp, Homo sapiens
tgaaaaaagaacaca

SEQ ID NO: 1034756 - DNA, 15 bp, Homo sapiens
atgaaaaaagaacac

SEQ ID NO: 1034757 - DNA, 15 bp, Homo sapiens
aatgaaaaaagaaca

SEQ ID NO: 1034758 - DNA, 15 bp, Homo sapiens
taatgaaaaaagaac

SEQ ID NO: 1034759 - DNA, 15 bp, Homo sapiens
ttaatgaaaaaagaa

SEQ ID NO: 1034760 - DNA, 15 bp, Homo sapiens
cttaatgaaaaaaga

SEQ ID NO: 1034761 - DNA, 15 bp, Homo sapiens
acttaatgaaaaaag

SEQ ID NO: 1034762 - DNA, 15 bp, Homo sapiens
gacttaatgaaaaaa

SEQ ID NO: 1034763 - DNA, 15 bp, Homo sapiens
tgacttaatgaaaaa

SEQ ID NO: 1034764 - DNA, 15 bp, Homo sapiens
ttgacttaatgaaaa

SEQ ID NO: 1034765 - DNA, 15 bp, Homo sapiens
attgacttaatgaaa

SEQ ID NO: 1034766 - DNA, 15 bp, Homo sapiens
aattgacttaatgaa

SEQ ID NO: 1034767 - DNA, 15 bp, Homo sapiens
taattgacttaatga

SEQ ID NO: 1034768 - DNA, 15 bp, Homo sapiens
ttaattgacttaatg

SEQ ID NO: 1034769 - DNA, 15 bp, Homo sapiens
cttaattgacttaat

SEQ ID NO: 1034770 - DNA, 15 bp, Homo sapiens
acttaattgacttaa

SEQ ID NO: 1034771 - DNA, 15 bp, Homo sapiens
aacttaattgactta

SEQ ID NO: 1034772 - DNA, 15 bp, Homo sapiens
aaacttaattgactt

SEQ ID NO: 1034773 - DNA, 15 bp, Homo sapiens
taaacttaattgact

SEQ ID NO: 1034774 - DNA, 15 bp, Homo sapiens
ttaaacttaattgac

SEQ ID NO: 1034775 - DNA, 15 bp, Homo sapiens
attaaacttaattga

SEQ ID NO: 1034776 - DNA, 15 bp, Homo sapiens
aattaaacttaattg

SEQ ID NO: 1034777 - DNA, 15 bp, Homo sapiens
taattaaacttaatt

SEQ ID NO: 1034778 - DNA, 15 bp, Homo sapiens
ctaattaaacttaat

SEQ ID NO: 1034779 - DNA, 15 bp, Homo sapiens
actaattaaacttaa

SEQ ID NO: 1034780 - DNA, 15 bp, Homo sapiens
aactaattaaactta

SEQ ID NO: 1034781 - DNA, 15 bp, Homo sapiens
caactaattaaactt

SEQ ID NO: 1034782 - DNA, 15 bp, Homo sapiens
tcaactaattaaact

SEQ ID NO: 1034783 - DNA, 15 bp, Homo sapiens
atcaactaattaaac

SEQ ID NO: 1034784 - DNA, 15 bp, Homo sapiens
aatcaactaattaaa

SEQ ID NO: 1034785 - DNA, 15 bp, Homo sapiens
taatcaactaattaa

SEQ ID NO: 1034786 - DNA, 15 bp, Homo sapiens
ttaatcaactaatta

SEQ ID NO: 1034787 - DNA, 15 bp, Homo sapiens
attaatcaactaatt

SEQ ID NO: 1034788 - DNA, 15 bp, Homo sapiens
gattaatcaactaat

SEQ ID NO: 1034789 - DNA, 15 bp, Homo sapiens
agattaatcaactaa

SEQ ID NO: 1034790 - DNA, 15 bp, Homo sapiens
tagattaatcaacta

SEQ ID NO: 1034791 - DNA, 15 bp, Homo sapiens
ttagattaatcaact

SEQ ID NO: 1034792 - DNA, 15 bp, Homo sapiens
attagattaatcaac

SEQ ID NO: 1034793 - DNA, 15 bp, Homo sapiens
aattagattaatcaa

SEQ ID NO: 1034794 - DNA, 15 bp, Homo sapiens
taattagattaatca

SEQ ID NO: 1034795 - DNA, 15 bp, Homo sapiens
ttaattagattaatc

SEQ ID NO: 1034796 - DNA, 15 bp, Homo sapiens
attaattagattaat

SEQ ID NO: 1034797 - DNA, 15 bp, Homo sapiens
aattaattagattaa

SEQ ID NO: 1034798 - DNA, 15 bp, Homo sapiens
taattaattagatta

SEQ ID NO: 1034799 - DNA, 15 bp, Homo sapiens
ttaattaattagatt

SEQ ID NO: 1034800 - DNA, 15 bp, Homo sapiens
tttaattaattagat

SEQ ID NO: 1034801 - DNA, 15 bp, Homo sapiens
atttaattaattaga

SEQ ID NO: 1034802 - DNA, 15 bp, Homo sapiens
tatttaattaattag

SEQ ID NO: 1034803 - DNA, 15 bp, Homo sapiens
atatttaattaatta

SEQ ID NO: 1034804 - DNA, 15 bp, Homo sapiens
catatttaattaatt

SEQ ID NO: 1034805 - DNA, 15 bp, Homo sapiens
ccatatttaattaat

SEQ ID NO: 1034806 - DNA, 15 bp, Homo sapiens
taaccatatttaatt

SEQ ID NO: 1034807 - DNA, 15 bp, Homo sapiens
ctaaccatatttaat

SEQ ID NO: 1034808 - DNA, 15 bp, Homo sapiens
tctaaccatatttaa

SEQ ID NO: 1034809 - DNA, 15 bp, Homo sapiens
ttctaaccatattta

SEQ ID NO: 1034810 - DNA, 15 bp, Homo sapiens
cttctaaccatattt

SEQ ID NO: 1034811 - DNA, 15 bp, Homo sapiens
gcttctaaccatatt

SEQ ID NO: 1034812 - DNA, 15 bp, Homo sapiens
agcttctaaccatat

SEQ ID NO: 1034813 - DNA, 15 bp, Homo sapiens
tagcttctaaccata

SEQ ID NO: 1034814 - DNA, 15 bp, Homo sapiens
gtagcttctaaccat

SEQ ID NO: 1034815 - DNA, 15 bp, Homo sapiens
ggtagcttctaacca

SEQ ID NO: 1034816 - DNA, 15 bp, Homo sapiens
tggtagcttctaacc

SEQ ID NO: 1034817 - DNA, 15 bp, Homo sapiens
atggtagcttctaac

SEQ ID NO: 1034818 - DNA, 15 bp, Homo sapiens
tatggtagcttctaa

SEQ ID NO: 1034819 - DNA, 15 bp, Homo sapiens
ctatggtagcttcta

SEQ ID NO: 1034820 - DNA, 15 bp, Homo sapiens
actatggtagcttct

SEQ ID NO: 1034821 - DNA, 15 bp, Homo sapiens
cactatggtagcttc

SEQ ID NO: 1034822 - DNA, 15 bp, Homo sapiens
ccactatggtagctt

SEQ ID NO: 1034823 - DNA, 15 bp, Homo sapiens
cccactatggtagct

SEQ ID NO: 1034824 - DNA, 15 bp, Homo sapiens
gcccactatggtagc

SEQ ID NO: 1034825 - DNA, 15 bp, Homo sapiens
tgcccactatggtag

SEQ ID NO: 1034826 - DNA, 15 bp, Homo sapiens
ctgcccactatggta

SEQ ID NO: 1034827 - DNA, 15 bp, Homo sapiens
actgcccactatggt

SEQ ID NO: 1034828 - DNA, 15 bp, Homo sapiens
tactgcccactatgg

SEQ ID NO: 1034829 - DNA, 15 bp, Homo sapiens
gtactgcccactatg

SEQ ID NO: 1034830 - DNA, 15 bp, Homo sapiens
tgtactgcccactat

SEQ ID NO: 1034831 - DNA, 15 bp, Homo sapiens
ttgtactgcccacta

SEQ ID NO: 1034832 - DNA, 15 bp, Homo sapiens
cttgtactgcccact

SEQ ID NO: 1034833 - DNA, 15 bp, Homo sapiens
tcttgtactgcccac

SEQ ID NO: 1034834 - DNA, 15 bp, Homo sapiens
gtcttgtactgccca

SEQ ID NO: 1034835 - DNA, 15 bp, Homo sapiens
agtcttgtactgccc

SEQ ID NO: 1034836 - DNA, 15 bp, Homo sapiens
cagtcttgtactgcc

SEQ ID NO: 1034837 - DNA, 15 bp, Homo sapiens
gcagtcttgtactgc

SEQ ID NO: 1034838 - DNA, 15 bp, Homo sapiens
tgcagtcttgtactg

SEQ ID NO: 1034839 - DNA, 15 bp, Homo sapiens
atgcagtcttgtact

SEQ ID NO: 1034840 - DNA, 15 bp, Homo sapiens
gatgcagtcttgtac

SEQ ID NO: 1034841 - DNA, 15 bp, Homo sapiens
tgatgcagtcttgta

SEQ ID NO: 1034842 - DNA, 15 bp, Homo sapiens
atgatgcagtcttgt

SEQ ID NO: 1034843 - DNA, 15 bp, Homo sapiens
aatgatgcagtcttg

SEQ ID NO: 1034844 - DNA, 15 bp, Homo sapiens
gaatgatgcagtctt

SEQ ID NO: 1034845 - DNA, 15 bp, Homo sapiens
tgaatgatgcagtct

SEQ ID NO: 1034846 - DNA, 15 bp, Homo sapiens
ttgaatgatgcagtc

SEQ ID NO: 1034847 - DNA, 15 bp, Homo sapiens
cttgaatgatgcagt

SEQ ID NO: 1034848 - DNA, 15 bp, Homo sapiens
acttgaatgatgcag

SEQ ID NO: 1034849 - DNA, 15 bp, Homo sapiens
aacttgaatgatgca

SEQ ID NO: 1034850 - DNA, 15 bp, Homo sapiens
taacttgaatgatgc

SEQ ID NO: 1034851 - DNA, 15 bp, Homo sapiens
ttaacttgaatgatg

SEQ ID NO: 1034852 - DNA, 15 bp, Homo sapiens
tttaacttgaatgat

SEQ ID NO: 1034853 - DNA, 15 bp, Homo sapiens
ttttaacttgaatga

SEQ ID NO: 1034854 - DNA, 15 bp, Homo sapiens
tttttaacttgaatg

SEQ ID NO: 1034855 - DNA, 15 bp, Homo sapiens
gtttttaacttgaat

SEQ ID NO: 1034856 - DNA, 15 bp, Homo sapiens
tgtttttaacttgaa

SEQ ID NO: 1034857 - DNA, 15 bp, Homo sapiens
atgtttttaacttga

SEQ ID NO: 1034858 - DNA, 15 bp, Homo sapiens
gatgtttttaacttg

SEQ ID NO: 1034859 - DNA, 15 bp, Homo sapiens
tgatgtttttaactt

SEQ ID NO: 1034860 - DNA, 15 bp, Homo sapiens
atgatgtttttaact

SEQ ID NO: 1034861 - DNA, 15 bp, Homo sapiens
gatgatgtttttaac

SEQ ID NO: 1034862 - DNA, 15 bp, Homo sapiens
agatgatgtttttaa

SEQ ID NO: 1034863 - DNA, 15 bp, Homo sapiens
aagatgatgttttta

SEQ ID NO: 1034864 - DNA, 15 bp, Homo sapiens
caagatgatgttttt

SEQ ID NO: 1034865 - DNA, 15 bp, Homo sapiens
tcaagatgatgtttt

SEQ ID NO: 1034866 - DNA, 15 bp, Homo sapiens
ttcaagatgatgttt

SEQ ID NO: 1034867 - DNA, 15 bp, Homo sapiens
tttcaagatgatgtt

SEQ ID NO: 1034868 - DNA, 15 bp, Homo sapiens
atttcaagatgatgt

SEQ ID NO: 1034869 - DNA, 15 bp, Homo sapiens
gatttcaagatgatg

SEQ ID NO: 1034870 - DNA, 15 bp, Homo sapiens
agatttcaagatgat

SEQ ID NO: 1034871 - DNA, 15 bp, Homo sapiens
cagatttcaagatga

SEQ ID NO: 1034872 - DNA, 15 bp, Homo sapiens
tcagatttcaagatg

SEQ ID NO: 1034873 - DNA, 15 bp, Homo sapiens
ttcagatttcaagat

SEQ ID NO: 1034874 - DNA, 15 bp, Homo sapiens
attcagatttcaaga

SEQ ID NO: 1034875 - DNA, 15 bp, Homo sapiens
aattcagatttcaag

SEQ ID NO: 1034876 - DNA, 15 bp, Homo sapiens
gaattcagatttcaa

SEQ ID NO: 1034877 - DNA, 15 bp, Homo sapiens
tgaattcagatttca

SEQ ID NO: 1034878 - DNA, 15 bp, Homo sapiens
ctgaattcagatttc

SEQ ID NO: 1034879 - DNA, 15 bp, Homo sapiens
actgaattcagattt

SEQ ID NO: 1034880 - DNA, 15 bp, Homo sapiens
gactgaattcagatt

SEQ ID NO: 1034881 - DNA, 15 bp, Homo sapiens
tgactgaattcagat

SEQ ID NO: 1034882 - DNA, 15 bp, Homo sapiens
ctgactgaattcaga

SEQ ID NO: 1034883 - DNA, 15 bp, Homo sapiens
tctgactgaattcag

SEQ ID NO: 1034884 - DNA, 15 bp, Homo sapiens
ctctgactgaattca

SEQ ID NO: 1034885 - DNA, 15 bp, Homo sapiens
cctctgactgaattc

SEQ ID NO: 1034886 - DNA, 15 bp, Homo sapiens
ccctctgactgaatt

SEQ ID NO: 1034887 - DNA, 15 bp, Homo sapiens
cccctctgactgaat

SEQ ID NO: 1034888 - DNA, 15 bp, Homo sapiens
gcccctctgactgaa

SEQ ID NO: 1034889 - DNA, 15 bp, Homo sapiens
tgcccctctgactga

SEQ ID NO: 1034890 - DNA, 15 bp, Homo sapiens
atgcccctctgactg

SEQ ID NO: 1034891 - DNA, 15 bp, Homo sapiens
tatgcccctctgact

SEQ ID NO: 1034892 - DNA, 15 bp, Homo sapiens
atatgcccctctgac

SEQ ID NO: 1034893 - DNA, 15 bp, Homo sapiens
aatatgcccctctga

SEQ ID NO: 1034894 - DNA, 15 bp, Homo sapiens
aaatatgcccctctg

SEQ ID NO: 1034895 - DNA, 15 bp, Homo sapiens
taaatatgcccctct

SEQ ID NO: 1034896 - DNA, 15 bp, Homo sapiens
gtaaatatgcccctc

SEQ ID NO: 1034897 - DNA, 15 bp, Homo sapiens
tgtaaatatgcccct

SEQ ID NO: 1034898 - DNA, 15 bp, Homo sapiens
gtgtaaatatgcccc

SEQ ID NO: 1034899 - DNA, 15 bp, Homo sapiens
cgtgtaaatatgccc

SEQ ID NO: 1034900 - DNA, 15 bp, Homo sapiens
ccgtgtaaatatgcc

SEQ ID NO: 1034901 - DNA, 15 bp, Homo sapiens
tccgtgtaaatatgc

SEQ ID NO: 1034902 - DNA, 15 bp, Homo sapiens
atccgtgtaaatatg

SEQ ID NO: 1034903 - DNA, 15 bp, Homo sapiens
aatccgtgtaaatat

SEQ ID NO: 1034904 - DNA, 15 bp, Homo sapiens
taatccgtgtaaata

SEQ ID NO: 1034905 - DNA, 15 bp, Homo sapiens
ataatccgtgtaaat

SEQ ID NO: 1034906 - DNA, 15 bp, Homo sapiens
aataatccgtgtaaa

SEQ ID NO: 1034907 - DNA, 15 bp, Homo sapiens
aaataatccgtgtaa

SEQ ID NO: 1034908 - DNA, 15 bp, Homo sapiens
aaaataatccgtgta

SEQ ID NO: 1034909 - DNA, 15 bp, Homo sapiens
caaaataatccgtgt

SEQ ID NO: 1034910 - DNA, 15 bp, Homo sapiens
tcaaaataatccgtg

SEQ ID NO: 1034911 - DNA, 15 bp, Homo sapiens
atcaaaataatccgt

SEQ ID NO: 1034912 - DNA, 15 bp, Homo sapiens
gatcaaaataatccg

SEQ ID NO: 1034913 - DNA, 15 bp, Homo sapiens
agatcaaaataatcc

SEQ ID NO: 1034914 - DNA, 15 bp, Homo sapiens
cagatcaaaataatc

SEQ ID NO: 1034915 - DNA, 15 bp, Homo sapiens
tcagatcaaaataat

SEQ ID NO: 1034916 - DNA, 15 bp, Homo sapiens
ctcagatcaaaataa

SEQ ID NO: 1034917 - DNA, 15 bp, Homo sapiens
actcagatcaaaata

SEQ ID NO: 1034918 - DNA, 15 bp, Homo sapiens
gactcagatcaaaat

SEQ ID NO: 1034919 - DNA, 15 bp, Homo sapiens
tgactcagatcaaaa

SEQ ID NO: 1034920 - DNA, 15 bp, Homo sapiens
ctgactcagatcaaa

SEQ ID NO: 1034921 - DNA, 15 bp, Homo sapiens
gctgactcagatcaa

SEQ ID NO: 1034922 - DNA, 15 bp, Homo sapiens
tgctgactcagatca

SEQ ID NO: 1034923 - DNA, 15 bp, Homo sapiens
ttgctgactcagatc

SEQ ID NO: 1034924 - DNA, 15 bp, Homo sapiens
attgctgactcagat

SEQ ID NO: 1034925 - DNA, 15 bp, Homo sapiens
cattgctgactcaga

SEQ ID NO: 1034926 - DNA, 15 bp, Homo sapiens
acattgctgactcag

SEQ ID NO: 1034927 - DNA, 15 bp, Homo sapiens
cacattgctgactca

SEQ ID NO: 1034928 - DNA, 15 bp, Homo sapiens
acacattgctgactc

SEQ ID NO: 1034929 - DNA, 15 bp, Homo sapiens
aacacattgctgact

SEQ ID NO: 1034930 - DNA, 15 bp, Homo sapiens
caacacattgctgac

SEQ ID NO: 1034931 - DNA, 15 bp, Homo sapiens
acaacacattgctga

SEQ ID NO: 1034932 - DNA, 15 bp, Homo sapiens
gacaacacattgctg

SEQ ID NO: 1034933 - DNA, 15 bp, Homo sapiens
ggacaacacattgct

SEQ ID NO: 1034934 - DNA, 15 bp, Homo sapiens
tggacaacacattgc

SEQ ID NO: 1034935 - DNA, 15 bp, Homo sapiens
gtggacaacacattg

SEQ ID NO: 1034936 - DNA, 15 bp, Homo sapiens
tgtggacaacacatt

SEQ ID NO: 1034937 - DNA, 15 bp, Homo sapiens
atgtggacaacacat

SEQ ID NO: 1034938 - DNA, 15 bp, Homo sapiens
catgtggacaacaca

SEQ ID NO: 1034939 - DNA, 15 bp, Homo sapiens
ccatgtggacaacac

SEQ ID NO: 1034940 - DNA, 15 bp, Homo sapiens
tccatgtggacaaca

SEQ ID NO: 1034941 - DNA, 15 bp, Homo sapiens
ctccatgtggacaac

SEQ ID NO: 1034942 - DNA, 15 bp, Homo sapiens
tctccatgtggacaa

SEQ ID NO: 1034943 - DNA, 15 bp, Homo sapiens
gtctccatgtggaca

SEQ ID NO: 1034944 - DNA, 15 bp, Homo sapiens
agtctccatgtggac

SEQ ID NO: 1034945 - DNA, 15 bp, Homo sapiens
tagtctccatgtgga

SEQ ID NO: 1034946 - DNA, 15 bp, Homo sapiens
ttagtctccatgtgg

SEQ ID NO: 1034947 - DNA, 15 bp, Homo sapiens
gttagtctccatgtg

SEQ ID NO: 1034948 - DNA, 15 bp, Homo sapiens
tgttagtctccatgt

SEQ ID NO: 1034949 - DNA, 15 bp, Homo sapiens
gtgttagtctccatg

SEQ ID NO: 1034950 - DNA, 15 bp, Homo sapiens
agtgttagtctccat

SEQ ID NO: 1034951 - DNA, 15 bp, Homo sapiens
aagtgttagtctcca

SEQ ID NO: 1034952 - DNA, 15 bp, Homo sapiens
gaagtgttagtctcc

SEQ ID NO: 1034953 - DNA, 15 bp, Homo sapiens
ggaagtgttagtctc

SEQ ID NO: 1034954 - DNA, 15 bp, Homo sapiens
tggaagtgttagtct

SEQ ID NO: 1034955 - DNA, 15 bp, Homo sapiens
atggaagtgttagtc

SEQ ID NO: 1034956 - DNA, 15 bp, Homo sapiens
aatggaagtgttagt

SEQ ID NO: 1034957 - DNA, 15 bp, Homo sapiens
aaatggaagtgttag

SEQ ID NO: 1034958 - DNA, 15 bp, Homo sapiens
taaatggaagtgtta

SEQ ID NO: 1034959 - DNA, 15 bp, Homo sapiens
ataaatggaagtgtt

SEQ ID NO: 1034960 - DNA, 15 bp, Homo sapiens
aataaatggaagtgt

SEQ ID NO: 1034961 - DNA, 15 bp, Homo sapiens
gaataaatggaagtg

SEQ ID NO: 1034962 - DNA, 15 bp, Homo sapiens
agaataaatggaagt

SEQ ID NO: 1034963 - DNA, 15 bp, Homo sapiens
aagaataaatggaag

SEQ ID NO: 1034964 - DNA, 15 bp, Homo sapiens
taagaataaatggaa

SEQ ID NO: 1034965 - DNA, 15 bp, Homo sapiens
ataagaataaatgga

SEQ ID NO: 1034966 - DNA, 15 bp, Homo sapiens
cataagaataaatgg

SEQ ID NO: 1034967 - DNA, 15 bp, Homo sapiens
tcataagaataaatg

SEQ ID NO: 1034968 - DNA, 15 bp, Homo sapiens
gtcataagaataaat

SEQ ID NO: 1034969 - DNA, 15 bp, Homo sapiens
agtcataagaataaa

SEQ ID NO: 1034970 - DNA, 15 bp, Homo sapiens
tagtcataagaataa

SEQ ID NO: 1034971 - DNA, 15 bp, Homo sapiens
ttagtcataagaata

SEQ ID NO: 1034972 - DNA, 15 bp, Homo sapiens
gttagtcataagaat

SEQ ID NO: 1034973 - DNA, 15 bp, Homo sapiens
tgttagtcataagaa

SEQ ID NO: 1034974 - DNA, 15 bp, Homo sapiens
atgttagtcataaga

SEQ ID NO: 1034975 - DNA, 15 bp, Homo sapiens
aatgttagtcataag

SEQ ID NO: 1034976 - DNA, 15 bp, Homo sapiens
taatgttagtcataa

SEQ ID NO: 1034977 - DNA, 15 bp, Homo sapiens
ttaatgttagtcata

SEQ ID NO: 1034978 - DNA, 15 bp, Homo sapiens
tttaatgttagtcat

SEQ ID NO: 1034979 - DNA, 15 bp, Homo sapiens
ctttaatgttagtca

SEQ ID NO: 1034980 - DNA, 15 bp, Homo sapiens
gctttaatgttagtc

SEQ ID NO: 1034981 - DNA, 15 bp, Homo sapiens
tgctttaatgttagt

SEQ ID NO: 1034982 - DNA, 15 bp, Homo sapiens
ttgctttaatgttag

SEQ ID NO: 1034983 - DNA, 15 bp, Homo sapiens
tttgctttaatgtta

SEQ ID NO: 1034984 - DNA, 15 bp, Homo sapiens
ctttgctttaatgtt

SEQ ID NO: 1034985 - DNA, 15 bp, Homo sapiens
gctttgctttaatgt

SEQ ID NO: 1034986 - DNA, 15 bp, Homo sapiens
tgctttgctttaatg

SEQ ID NO: 1034987 - DNA, 15 bp, Homo sapiens
ttgctttgctttaat

SEQ ID NO: 1034988 - DNA, 15 bp, Homo sapiens
tttgctttgctttaa

SEQ ID NO: 1034989 - DNA, 15 bp, Homo sapiens
ttttgctttgcttta

SEQ ID NO: 1034990 - DNA, 15 bp, Homo sapiens
attttgctttgcttt

SEQ ID NO: 1034991 - DNA, 15 bp, Homo sapiens
cattttgctttgctt

SEQ ID NO: 1034992 - DNA, 15 bp, Homo sapiens
tcattttgctttgct

SEQ ID NO: 1034993 - DNA, 15 bp, Homo sapiens
ttcattttgctttgc

SEQ ID NO: 1034994 - DNA, 15 bp, Homo sapiens
tttcattttgctttg

SEQ ID NO: 1034995 - DNA, 15 bp, Homo sapiens
ttttcattttgcttt

SEQ ID NO: 1034996 - DNA, 15 bp, Homo sapiens
cttttcattttgctt

SEQ ID NO: 1034997 - DNA, 15 bp, Homo sapiens
acttttcattttgct

SEQ ID NO: 1034998 - DNA, 15 bp, Homo sapiens
cacttttcattttgc

SEQ ID NO: 1034999 - DNA, 15 bp, Homo sapiens
tcacttttcattttg

SEQ ID NO: 1035000 - DNA, 15 bp, Homo sapiens
ttcacttttcatttt

SEQ ID NO: 1035001 - DNA, 15 bp, Homo sapiens
attcacttttcattt

SEQ ID NO: 1035002 - DNA, 15 bp, Homo sapiens
cattcacttttcatt

SEQ ID NO: 1035003 - DNA, 15 bp, Homo sapiens
acattcacttttcat

SEQ ID NO: 1035004 - DNA, 15 bp, Homo sapiens
aacattcacttttca

SEQ ID NO: 1035005 - DNA, 15 bp, Homo sapiens
gaacattcacttttc

SEQ ID NO: 1035006 - DNA, 15 bp, Homo sapiens
tgaacattcactttt

SEQ ID NO: 1035007 - DNA, 15 bp, Homo sapiens
ctgaacattcacttt

SEQ ID NO: 1035008 - DNA, 15 bp, Homo sapiens
gctgaacattcactt

SEQ ID NO: 1035009 - DNA, 15 bp, Homo sapiens
tgctgaacattcact

SEQ ID NO: 1035010 - DNA, 15 bp, Homo sapiens
atgctgaacattcac

SEQ ID NO: 1035011 - DNA, 15 bp, Homo sapiens
aatgctgaacattca

SEQ ID NO: 1035012 - DNA, 15 bp, Homo sapiens
taatgctgaacattc

SEQ ID NO: 1035013 - DNA, 15 bp, Homo sapiens
ataatgctgaacatt

SEQ ID NO: 1035014 - DNA, 15 bp, Homo sapiens
gataatgctgaacat

SEQ ID NO: 1035015 - DNA, 15 bp, Homo sapiens
tgataatgctgaaca

SEQ ID NO: 1035016 - DNA, 15 bp, Homo sapiens
atgataatgctgaac

SEQ ID NO: 1035017 - DNA, 15 bp, Homo sapiens
catgataatgctgaa

SEQ ID NO: 1035018 - DNA, 15 bp, Homo sapiens
acatgataatgctga

SEQ ID NO: 1035019 - DNA, 15 bp, Homo sapiens
aacatgataatgctg

SEQ ID NO: 1035020 - DNA, 15 bp, Homo sapiens
caacatgataatgct

SEQ ID NO: 1035021 - DNA, 15 bp, Homo sapiens
ccaacatgataatgc

SEQ ID NO: 1035022 - DNA, 15 bp, Homo sapiens
gccaacatgataatg

SEQ ID NO: 1035023 - DNA, 15 bp, Homo sapiens
ggccaacatgataat

SEQ ID NO: 1035024 - DNA, 15 bp, Homo sapiens
aggccaacatgataa

SEQ ID NO: 1035025 - DNA, 15 bp, Homo sapiens
caggccaacatgata

SEQ ID NO: 1035026 - DNA, 15 bp, Homo sapiens
ccaggccaacatgat

SEQ ID NO: 1035027 - DNA, 15 bp, Homo sapiens
cccaggccaacatga

SEQ ID NO: 1035028 - DNA, 15 bp, Homo sapiens
ccccaggccaacatg

SEQ ID NO: 1035029 - DNA, 15 bp, Homo sapiens
gccccaggccaacat

SEQ ID NO: 1035030 - DNA, 15 bp, Homo sapiens
agccccaggccaaca

SEQ ID NO: 1035031 - DNA, 15 bp, Homo sapiens
cagccccaggccaac

SEQ ID NO: 1035032 - DNA, 15 bp, Homo sapiens
ccagccccaggccaa

SEQ ID NO: 1035033 - DNA, 15 bp, Homo sapiens
tccagccccaggcca

SEQ ID NO: 1035034 - DNA, 15 bp, Homo sapiens
ctccagccccaggcc

SEQ ID NO: 1035035 - DNA, 15 bp, Homo sapiens
gctccagccccaggc

SEQ ID NO: 1035036 - DNA, 15 bp, Homo sapiens
agctccagccccagg

SEQ ID NO: 1035037 - DNA, 15 bp, Homo sapiens
tagctccagccccag

SEQ ID NO: 1035038 - DNA, 15 bp, Homo sapiens
ttagctccagcccca

SEQ ID NO: 1035039 - DNA, 15 bp, Homo sapiens
cttagctccagcccc

SEQ ID NO: 1035040 - DNA, 15 bp, Homo sapiens
acttagctccagccc

SEQ ID NO: 1035041 - DNA, 15 bp, Homo sapiens
aacttagctccagcc

SEQ ID NO: 1035042 - DNA, 15 bp, Homo sapiens
aaacttagctccagc

SEQ ID NO: 1035043 - DNA, 15 bp, Homo sapiens
aaaacttagctccag

SEQ ID NO: 1035044 - DNA, 15 bp, Homo sapiens
gaaaacttagctcca

SEQ ID NO: 1035045 - DNA, 15 bp, Homo sapiens
agaaaacttagctcc

SEQ ID NO: 1035046 - DNA, 15 bp, Homo sapiens
tagaaaacttagctc

SEQ ID NO: 1035047 - DNA, 15 bp, Homo sapiens
atagaaaacttagct

SEQ ID NO: 1035048 - DNA, 15 bp, Homo sapiens
gatagaaaacttagc

SEQ ID NO: 1035049 - DNA, 15 bp, Homo sapiens
ggatagaaaacttag

SEQ ID NO: 1035050 - DNA, 15 bp, Homo sapiens
gggatagaaaactta

SEQ ID NO: 1035051 - DNA, 15 bp, Homo sapiens
cgggatagaaaactt

SEQ ID NO: 1035052 - DNA, 15 bp, Homo sapiens
acgggatagaaaact

SEQ ID NO: 1035053 - DNA, 15 bp, Homo sapiens
gacgggatagaaaac

SEQ ID NO: 1035054 - DNA, 15 bp, Homo sapiens
agacgggatagaaaa

SEQ ID NO: 1035055 - DNA, 15 bp, Homo sapiens
gagacgggatagaaa

SEQ ID NO: 1035056 - DNA, 15 bp, Homo sapiens
ggagacgggatagaa

SEQ ID NO: 1035057 - DNA, 15 bp, Homo sapiens
aggagacgggataga

SEQ ID NO: 1035058 - DNA, 15 bp, Homo sapiens
caggagacgggatag

SEQ ID NO: 1035059 - DNA, 15 bp, Homo sapiens
ccaggagacgggata

SEQ ID NO: 1035060 - DNA, 15 bp, Homo sapiens
gccaggagacgggat

SEQ ID NO: 1035061 - DNA, 15 bp, Homo sapiens
agccaggagacggga

SEQ ID NO: 1035062 - DNA, 15 bp, Homo sapiens
aagccaggagacggg

SEQ ID NO: 1035063 - DNA, 15 bp, Homo sapiens
gaagccaggagacgg

SEQ ID NO: 1035064 - DNA, 15 bp, Homo sapiens
tgaagccaggagacg

SEQ ID NO: 1035065 - DNA, 15 bp, Homo sapiens
atgaagccaggagac

SEQ ID NO: 1035066 - DNA, 15 bp, Homo sapiens
gatgaagccaggaga

SEQ ID NO: 1035067 - DNA, 15 bp, Homo sapiens
tgatgaagccaggag

SEQ ID NO: 1035068 - DNA, 15 bp, Homo sapiens
atgatgaagccagga

SEQ ID NO: 1035069 - DNA, 15 bp, Homo sapiens
gatgatgaagccagg

SEQ ID NO: 1035070 - DNA, 15 bp, Homo sapiens
tgatgatgaagccag

SEQ ID NO: 1035071 - DNA, 15 bp, Homo sapiens
ttgatgatgaagcca

SEQ ID NO: 1035072 - DNA, 15 bp, Homo sapiens
attgatgatgaagcc

SEQ ID NO: 1035073 - DNA, 15 bp, Homo sapiens
aattgatgatgaagc

SEQ ID NO: 1035074 - DNA, 15 bp, Homo sapiens
gaattgatgatgaag

SEQ ID NO: 1035075 - DNA, 15 bp, Homo sapiens
agaattgatgatgaa

SEQ ID NO: 1035076 - DNA, 15 bp, Homo sapiens
gagaattgatgatga

SEQ ID NO: 1035077 - DNA, 15 bp, Homo sapiens
agagaattgatgatg

SEQ ID NO: 1035078 - DNA, 15 bp, Homo sapiens
cagagaattgatgat

SEQ ID NO: 1035079 - DNA, 15 bp, Homo sapiens
gcagagaattgatga

SEQ ID NO: 1035080 - DNA, 15 bp, Homo sapiens
agcagagaattgatg

SEQ ID NO: 1035081 - DNA, 15 bp, Homo sapiens
cagcagagaattgat

SEQ ID NO: 1035082 - DNA, 15 bp, Homo sapiens
tcagcagagaattga

SEQ ID NO: 1035083 - DNA, 15 bp, Homo sapiens
gtcagcagagaattg

SEQ ID NO: 1035084 - DNA, 15 bp, Homo sapiens
ggtcagcagagaatt

SEQ ID NO: 1035085 - DNA, 15 bp, Homo sapiens
aggtcagcagagaat

SEQ ID NO: 1035086 - DNA, 15 bp, Homo sapiens
aaggtcagcagagaa

SEQ ID NO: 1035087 - DNA, 15 bp, Homo sapiens
aaaggtcagcagaga

SEQ ID NO: 1035088 - DNA, 15 bp, Homo sapiens
taaaggtcagcagag

SEQ ID NO: 1035089 - DNA, 15 bp, Homo sapiens
ttaaaggtcagcaga

SEQ ID NO: 1035090 - DNA, 15 bp, Homo sapiens
cttaaaggtcagcag

SEQ ID NO: 1035091 - DNA, 15 bp, Homo sapiens
tcttaaaggtcagca

SEQ ID NO: 1035092 - DNA, 15 bp, Homo sapiens
ttcttaaaggtcagc

SEQ ID NO: 1035093 - DNA, 15 bp, Homo sapiens
attcttaaaggtcag

SEQ ID NO: 1035094 - DNA, 15 bp, Homo sapiens
cattcttaaaggtca

SEQ ID NO: 1035095 - DNA, 15 bp, Homo sapiens
acattcttaaaggtc

SEQ ID NO: 1035096 - DNA, 15 bp, Homo sapiens
tacattcttaaaggt

SEQ ID NO: 1035097 - DNA, 15 bp, Homo sapiens
ttacattcttaaagg

SEQ ID NO: 1035098 - DNA, 15 bp, Homo sapiens
attacattcttaaag

SEQ ID NO: 1035099 - DNA, 15 bp, Homo sapiens
tattacattcttaaa

SEQ ID NO: 1035100 - DNA, 15 bp, Homo sapiens
gtattacattcttaa

SEQ ID NO: 1035101 - DNA, 15 bp, Homo sapiens
agtattacattctta

SEQ ID NO: 1035102 - DNA, 15 bp, Homo sapiens
aagtattacattctt

SEQ ID NO: 1035103 - DNA, 15 bp, Homo sapiens
aaagtattacattct

SEQ ID NO: 1035104 - DNA, 15 bp, Homo sapiens
taaagtattacattc

SEQ ID NO: 1035105 - DNA, 15 bp, Homo sapiens
ataaagtattacatt

SEQ ID NO: 1035106 - DNA, 15 bp, Homo sapiens
aataaagtattacat

SEQ ID NO: 1035107 - DNA, 15 bp, Homo sapiens
aaataaagtattaca

SEQ ID NO: 1035108 - DNA, 15 bp, Homo sapiens
gaaataaagtattac

SEQ ID NO: 1035109 - DNA, 15 bp, Homo sapiens
ggaaataaagtatta

SEQ ID NO: 1035110 - DNA, 15 bp, Homo sapiens
gggaaataaagtatt

SEQ ID NO: 1035111 - DNA, 15 bp, Homo sapiens
agggaaataaagtat

SEQ ID NO: 1035112 - DNA, 15 bp, Homo sapiens
aagggaaataaagta

SEQ ID NO: 1035113 - DNA, 15 bp, Homo sapiens
aaagggaaataaagt

SEQ ID NO: 1035114 - DNA, 15 bp, Homo sapiens
aaaagggaaataaag

SEQ ID NO: 1035115 - DNA, 15 bp, Homo sapiens
taaaagggaaataaa

SEQ ID NO: 1035116 - DNA, 15 bp, Homo sapiens
ataaaagggaaataa

SEQ ID NO: 1035117 - DNA, 15 bp, Homo sapiens
gataaaagggaaata

SEQ ID NO: 1035118 - DNA, 15 bp, Homo sapiens
tgataaaagggaaat

SEQ ID NO: 1035119 - DNA, 15 bp, Homo sapiens
ttgataaaagggaaa

SEQ ID NO: 1035120 - DNA, 15 bp, Homo sapiens
tttgataaaagggaa

SEQ ID NO: 1035121 - DNA, 15 bp, Homo sapiens
atttgataaaaggga

SEQ ID NO: 1035122 - DNA, 15 bp, Homo sapiens
catttgataaaaggg

SEQ ID NO: 1035123 - DNA, 15 bp, Homo sapiens
tcatttgataaaagg

SEQ ID NO: 1035124 - DNA, 15 bp, Homo sapiens
ctcatttgataaaag

SEQ ID NO: 1035125 - DNA, 15 bp, Homo sapiens
cctcatttgataaaa

SEQ ID NO: 1035126 - DNA, 15 bp, Homo sapiens
ccctcatttgataaa

SEQ ID NO: 1035127 - DNA, 15 bp, Homo sapiens
gccctcatttgataa

SEQ ID NO: 1035128 - DNA, 15 bp, Homo sapiens
tgccctcatttgata

SEQ ID NO: 1035129 - DNA, 15 bp, Homo sapiens
atgccctcatttgat

SEQ ID NO: 1035130 - DNA, 15 bp, Homo sapiens
aatgccctcatttga

SEQ ID NO: 1035131 - DNA, 15 bp, Homo sapiens
aaatgccctcatttg

SEQ ID NO: 1035132 - DNA, 15 bp, Homo sapiens
caaatgccctcattt

SEQ ID NO: 1035133 - DNA, 15 bp, Homo sapiens
ccaaatgccctcatt

SEQ ID NO: 1035134 - DNA, 15 bp, Homo sapiens
tccaaatgccctcat

SEQ ID NO: 1035135 - DNA, 15 bp, Homo sapiens
ttccaaatgccctca

SEQ ID NO: 1035136 - DNA, 15 bp, Homo sapiens
attccaaatgccctc

SEQ ID NO: 1035137 - DNA, 15 bp, Homo sapiens
aattccaaatgccct

SEQ ID NO: 1035138 - DNA, 15 bp, Homo sapiens
aaattccaaatgccc

SEQ ID NO: 1035139 - DNA, 15 bp, Homo sapiens
taaattccaaatgcc

SEQ ID NO: 1035140 - DNA, 15 bp, Homo sapiens
ataaattccaaatgc

SEQ ID NO: 1035141 - DNA, 15 bp, Homo sapiens
gataaattccaaatg

SEQ ID NO: 1035142 - DNA, 15 bp, Homo sapiens
tgataaattccaaat

SEQ ID NO: 1035143 - DNA, 15 bp, Homo sapiens
ttgataaattccaaa

SEQ ID NO: 1035144 - DNA, 15 bp, Homo sapiens
tttgataaattccaa

SEQ ID NO: 1035145 - DNA, 15 bp, Homo sapiens
ttttgataaattcca

SEQ ID NO: 1035146 - DNA, 15 bp, Homo sapiens
cttttgataaattcc

SEQ ID NO: 1035147 - DNA, 15 bp, Homo sapiens
ccttttgataaattc

SEQ ID NO: 1035148 - DNA, 15 bp, Homo sapiens
tccttttgataaatt

SEQ ID NO: 1035149 - DNA, 15 bp, Homo sapiens
atccttttgataaat

SEQ ID NO: 1035150 - DNA, 15 bp, Homo sapiens
tatccttttgataaa

SEQ ID NO: 1035151 - DNA, 15 bp, Homo sapiens
ctatccttttgataa

SEQ ID NO: 1035152 - DNA, 15 bp, Homo sapiens
actatccttttgata

SEQ ID NO: 1035153 - DNA, 15 bp, Homo sapiens
gactatccttttgat

SEQ ID NO: 1035154 - DNA, 15 bp, Homo sapiens
tgactatccttttga

SEQ ID NO: 1035155 - DNA, 15 bp, Homo sapiens
gtgactatccttttg

SEQ ID NO: 1035156 - DNA, 15 bp, Homo sapiens
cgtgactatcctttt

SEQ ID NO: 1035157 - DNA, 15 bp, Homo sapiens
tcgtgactatccttt

SEQ ID NO: 1035158 - DNA, 15 bp, Homo sapiens
ttcgtgactatcctt

SEQ ID NO: 1035159 - DNA, 15 bp, Homo sapiens
attcgtgactatcct

SEQ ID NO: 1035160 - DNA, 15 bp, Homo sapiens
gattcgtgactatcc

SEQ ID NO: 1035161 - DNA, 15 bp, Homo sapiens
tgattcgtgactatc

SEQ ID NO: 1035162 - DNA, 15 bp, Homo sapiens
atgattcgtgactat

SEQ ID NO: 1035163 - DNA, 15 bp, Homo sapiens
catgattcgtgacta

SEQ ID NO: 1035164 - DNA, 15 bp, Homo sapiens
tcatgattcgtgact

SEQ ID NO: 1035165 - DNA, 15 bp, Homo sapiens
atcatgattcgtgac

SEQ ID NO: 1035166 - DNA, 15 bp, Homo sapiens
gatcatgattcgtga

SEQ ID NO: 1035167 - DNA, 15 bp, Homo sapiens
cgatcatgattcgtg

SEQ ID NO: 1035168 - DNA, 15 bp, Homo sapiens
tcgatcatgattcgt

SEQ ID NO: 1035169 - DNA, 15 bp, Homo sapiens
ttcgatcatgattcg

SEQ ID NO: 1035170 - DNA, 15 bp, Homo sapiens
attcgatcatgattc

SEQ ID NO: 1035171 - DNA, 15 bp, Homo sapiens
cattcgatcatgatt

SEQ ID NO: 1035172 - DNA, 15 bp, Homo sapiens
acattcgatcatgat

SEQ ID NO: 1035173 - DNA, 15 bp, Homo sapiens
aacattcgatcatga

SEQ ID NO: 1035174 - DNA, 15 bp, Homo sapiens
aaacattcgatcatg

SEQ ID NO: 1035175 - DNA, 15 bp, Homo sapiens
taaacattcgatcat

SEQ ID NO: 1035176 - DNA, 15 bp, Homo sapiens
ataaacattcgatca

SEQ ID NO: 1035177 - DNA, 15 bp, Homo sapiens
aataaacattcgatc

SEQ ID NO: 1035178 - DNA, 15 bp, Homo sapiens
caataaacattcgat

SEQ ID NO: 1035179 - DNA, 15 bp, Homo sapiens
ccaataaacattcga

SEQ ID NO: 1035180 - DNA, 15 bp, Homo sapiens
cccaataaacattcg

SEQ ID NO: 1035181 - DNA, 15 bp, Homo sapiens
gcccaataaacattc

SEQ ID NO: 1035182 - DNA, 15 bp, Homo sapiens
agcccaataaacatt

SEQ ID NO: 1035183 - DNA, 15 bp, Homo sapiens
aagcccaataaacat

SEQ ID NO: 1035184 - DNA, 15 bp, Homo sapiens
taagcccaataaaca

SEQ ID NO: 1035185 - DNA, 15 bp, Homo sapiens
ataagcccaataaac

SEQ ID NO: 1035186 - DNA, 15 bp, Homo sapiens
gataagcccaataaa

SEQ ID NO: 1035187 - DNA, 15 bp, Homo sapiens
tgataagcccaataa

SEQ ID NO: 1035188 - DNA, 15 bp, Homo sapiens
ttgataagcccaata

SEQ ID NO: 1035189 - DNA, 15 bp, Homo sapiens
tttgataagcccaat

SEQ ID NO: 1035190 - DNA, 15 bp, Homo sapiens
ctttgataagcccaa

SEQ ID NO: 1035191 - DNA, 15 bp, Homo sapiens
tctttgataagccca

SEQ ID NO: 1035192 - DNA, 15 bp, Homo sapiens
ttctttgataagccc

SEQ ID NO: 1035193 - DNA, 15 bp, Homo sapiens
tttctttgataagcc

SEQ ID NO: 1035194 - DNA, 15 bp, Homo sapiens
ctttctttgataagc

SEQ ID NO: 1035195 - DNA, 15 bp, Homo sapiens
cctttctttgataag

SEQ ID NO: 1035196 - DNA, 15 bp, Homo sapiens
acctttctttgataa

SEQ ID NO: 1035197 - DNA, 15 bp, Homo sapiens
tacctttctttgata

SEQ ID NO: 1035198 - DNA, 15 bp, Homo sapiens
atacctttctttgat

SEQ ID NO: 1035199 - DNA, 15 bp, Homo sapiens
catacctttctttga

SEQ ID NO: 1035200 - DNA, 15 bp, Homo sapiens
ccatacctttctttg

SEQ ID NO: 1035201 - DNA, 15 bp, Homo sapiens
cccatacctttcttt

SEQ ID NO: 1035202 - DNA, 15 bp, Homo sapiens
gcccatacctttctt

SEQ ID NO: 1035203 - DNA, 15 bp, Homo sapiens
agcccatacctttct

SEQ ID NO: 1035204 - DNA, 15 bp, Homo sapiens
aagcccatacctttc

SEQ ID NO: 1035205 - DNA, 15 bp, Homo sapiens
aaagcccataccttt

SEQ ID NO: 1035206 - DNA, 15 bp, Homo sapiens
caaagcccatacctt

SEQ ID NO: 1035207 - DNA, 15 bp, Homo sapiens
gcaaagcccatacct

SEQ ID NO: 1035208 - DNA, 15 bp, Homo sapiens
ggcaaagcccatacc

SEQ ID NO: 1035209 - DNA, 15 bp, Homo sapiens
gggcaaagcccatac

SEQ ID NO: 1035210 - DNA, 15 bp, Homo sapiens
agggcaaagcccata

SEQ ID NO: 1035211 - DNA, 15 bp, Homo sapiens
tagggcaaagcccat

SEQ ID NO: 1035212 - DNA, 15 bp, Homo sapiens
atagggcaaagccca

SEQ ID NO: 1035213 - DNA, 15 bp, Homo sapiens
tatagggcaaagccc

SEQ ID NO: 1035214 - DNA, 15 bp, Homo sapiens
gtatagggcaaagcc

SEQ ID NO: 1035215 - DNA, 15 bp, Homo sapiens
ggtatagggcaaagc

SEQ ID NO: 1035216 - DNA, 15 bp, Homo sapiens
aggtatagggcaaag

SEQ ID NO: 1035217 - DNA, 15 bp, Homo sapiens
aaggtatagggcaaa

SEQ ID NO: 1035218 - DNA, 15 bp, Homo sapiens
aaaggtatagggcaa

SEQ ID NO: 1035219 - DNA, 15 bp, Homo sapiens
aaaaggtatagggca

SEQ ID NO: 1035220 - DNA, 15 bp, Homo sapiens
gaaaaggtatagggc

SEQ ID NO: 1035221 - DNA, 15 bp, Homo sapiens
tgaaaaggtataggg

SEQ ID NO: 1035222 - DNA, 15 bp, Homo sapiens
atgaaaaggtatagg

SEQ ID NO: 1035223 - DNA, 15 bp, Homo sapiens
aatgaaaaggtatag

SEQ ID NO: 1035224 - DNA, 15 bp, Homo sapiens
caatgaaaaggtata

SEQ ID NO: 1035225 - DNA, 15 bp, Homo sapiens
tcaatgaaaaggtat

SEQ ID NO: 1035226 - DNA, 15 bp, Homo sapiens
ttcaatgaaaaggta

SEQ ID NO: 1035227 - DNA, 15 bp, Homo sapiens
tttcaatgaaaaggt

SEQ ID NO: 1035228 - DNA, 15 bp, Homo sapiens
ttttcaatgaaaagg

SEQ ID NO: 1035229 - DNA, 15 bp, Homo sapiens
tttttcaatgaaaag

SEQ ID NO: 1035230 - DNA, 15 bp, Homo sapiens
atttttcaatgaaaa

SEQ ID NO: 1035231 - DNA, 15 bp, Homo sapiens
tatttttcaatgaaa

SEQ ID NO: 1035232 - DNA, 15 bp, Homo sapiens
ttatttttcaatgaa

SEQ ID NO: 1035233 - DNA, 15 bp, Homo sapiens
attatttttcaatga

SEQ ID NO: 1035234 - DNA, 15 bp, Homo sapiens
gattatttttcaatg

SEQ ID NO: 1035235 - DNA, 15 bp, Homo sapiens
agattatttttcaat

SEQ ID NO: 1035236 - DNA, 15 bp, Homo sapiens
aagattatttttcaa

SEQ ID NO: 1035237 - DNA, 15 bp, Homo sapiens
caagattatttttca

SEQ ID NO: 1035238 - DNA, 15 bp, Homo sapiens
ccaagattatttttc

SEQ ID NO: 1035239 - DNA, 15 bp, Homo sapiens
gccaagattattttt

SEQ ID NO: 1035240 - DNA, 15 bp, Homo sapiens
ggccaagattatttt

SEQ ID NO: 1035241 - DNA, 15 bp, Homo sapiens
tggccaagattattt

SEQ ID NO: 1035242 - DNA, 15 bp, Homo sapiens
ttggccaagattatt

SEQ ID NO: 1035243 - DNA, 15 bp, Homo sapiens
tttggccaagattat

SEQ ID NO: 1035244 - DNA, 15 bp, Homo sapiens
ttttggccaagatta

SEQ ID NO: 1035245 - DNA, 15 bp, Homo sapiens
cttttggccaagatt

SEQ ID NO: 1035246 - DNA, 15 bp, Homo sapiens
ccttttggccaagat

SEQ ID NO: 1035247 - DNA, 15 bp, Homo sapiens
tccttttggccaaga

SEQ ID NO: 1035248 - DNA, 15 bp, Homo sapiens
ttccttttggccaag

SEQ ID NO: 1035249 - DNA, 15 bp, Homo sapiens
attccttttggccaa

SEQ ID NO: 1035250 - DNA, 15 bp, Homo sapiens
gattccttttggcca

SEQ ID NO: 1035251 - DNA, 15 bp, Homo sapiens
ggattccttttggcc

SEQ ID NO: 1035252 - DNA, 15 bp, Homo sapiens
gggattccttttggc

SEQ ID NO: 1035253 - DNA, 15 bp, Homo sapiens
agggattccttttgg

SEQ ID NO: 1035254 - DNA, 15 bp, Homo sapiens
tagggattccttttg

SEQ ID NO: 1035255 - DNA, 15 bp, Homo sapiens
atagggattcctttt

SEQ ID NO: 1035256 - DNA, 15 bp, Homo sapiens
aatagggattccttt

SEQ ID NO: 1035257 - DNA, 15 bp, Homo sapiens
taatagggattcctt

SEQ ID NO: 1035258 - DNA, 15 bp, Homo sapiens
ataatagggattcct

SEQ ID NO: 1035259 - DNA, 15 bp, Homo sapiens
tataatagggattcc

SEQ ID NO: 1035260 - DNA, 15 bp, Homo sapiens
gtataatagggattc

SEQ ID NO: 1035261 - DNA, 15 bp, Homo sapiens
tgtataatagggatt

SEQ ID NO: 1035262 - DNA, 15 bp, Homo sapiens
atgtataatagggat

SEQ ID NO: 1035263 - DNA, 15 bp, Homo sapiens
tatgtataataggga

SEQ ID NO: 1035264 - DNA, 15 bp, Homo sapiens
ttatgtataataggg

SEQ ID NO: 1035265 - DNA, 15 bp, Homo sapiens
attatgtataatagg

SEQ ID NO: 1035266 - DNA, 15 bp, Homo sapiens
cattatgtataatag

SEQ ID NO: 1035267 - DNA, 15 bp, Homo sapiens
ccattatgtataata

SEQ ID NO: 1035268 - DNA, 15 bp, Homo sapiens
gccattatgtataat

SEQ ID NO: 1035269 - DNA, 15 bp, Homo sapiens
cgccattatgtataa

SEQ ID NO: 1035270 - DNA, 15 bp, Homo sapiens
tcgccattatgtata

SEQ ID NO: 1035271 - DNA, 15 bp, Homo sapiens
atcgccattatgtat

SEQ ID NO: 1035272 - DNA, 15 bp, Homo sapiens
aatcgccattatgta

SEQ ID NO: 1035273 - DNA, 15 bp, Homo sapiens
aaatcgccattatgt

SEQ ID NO: 1035274 - DNA, 15 bp, Homo sapiens
gaaatcgccattatg

SEQ ID NO: 1035275 - DNA, 15 bp, Homo sapiens
tgaaatcgccattat

SEQ ID NO: 1035276 - DNA, 15 bp, Homo sapiens
ctgaaatcgccatta

SEQ ID NO: 1035277 - DNA, 15 bp, Homo sapiens
actgaaatcgccatt

SEQ ID NO: 1035278 - DNA, 15 bp, Homo sapiens
aactgaaatcgccat

SEQ ID NO: 1035279 - DNA, 15 bp, Homo sapiens
aaactgaaatcgcca

SEQ ID NO: 1035280 - DNA, 15 bp, Homo sapiens
gaaactgaaatcgcc

SEQ ID NO: 1035281 - DNA, 15 bp, Homo sapiens
agaaactgaaatcgc

SEQ ID NO: 1035282 - DNA, 15 bp, Homo sapiens
gagaaactgaaatcg

SEQ ID NO: 1035283 - DNA, 15 bp, Homo sapiens
ggagaaactgaaatc

SEQ ID NO: 1035284 - DNA, 15 bp, Homo sapiens
tggagaaactgaaat

SEQ ID NO: 1035285 - DNA, 15 bp, Homo sapiens
atggagaaactgaaa

SEQ ID NO: 1035286 - DNA, 15 bp, Homo sapiens
aatggagaaactgaa

SEQ ID NO: 1035287 - DNA, 15 bp, Homo sapiens
aaatggagaaactga

SEQ ID NO: 1035288 - DNA, 15 bp, Homo sapiens
caaatggagaaactg

SEQ ID NO: 1035289 - DNA, 15 bp, Homo sapiens
gcaaatggagaaact

SEQ ID NO: 1035290 - DNA, 15 bp, Homo sapiens
tgcaaatggagaaac

SEQ ID NO: 1035291 - DNA, 15 bp, Homo sapiens
ttgcaaatggagaaa

SEQ ID NO: 1035292 - DNA, 15 bp, Homo sapiens
tttgcaaatggagaa

SEQ ID NO: 1035293 - DNA, 15 bp, Homo sapiens
ttttgcaaatggaga

SEQ ID NO: 1035294 - DNA, 15 bp, Homo sapiens
attttgcaaatggag

SEQ ID NO: 1035295 - DNA, 15 bp, Homo sapiens
tattttgcaaatgga

SEQ ID NO: 1035296 - DNA, 15 bp, Homo sapiens
gtattttgcaaatgg

SEQ ID NO: 1035297 - DNA, 15 bp, Homo sapiens
agtattttgcaaatg

SEQ ID NO: 1035298 - DNA, 15 bp, Homo sapiens
cagtattttgcaaat

SEQ ID NO: 1035299 - DNA, 15 bp, Homo sapiens
ccagtattttgcaaa

SEQ ID NO: 1035300 - DNA, 15 bp, Homo sapiens
gccagtattttgcaa

SEQ ID NO: 1035301 - DNA, 15 bp, Homo sapiens
tgccagtattttgca

SEQ ID NO: 1035302 - DNA, 15 bp, Homo sapiens
atgccagtattttgc

SEQ ID NO: 1035303 - DNA, 15 bp, Homo sapiens
aatgccagtattttg

SEQ ID NO: 1035304 - DNA, 15 bp, Homo sapiens
caatgccagtatttt

SEQ ID NO: 1035305 - DNA, 15 bp, Homo sapiens
acaatgccagtattt

SEQ ID NO: 1035306 - DNA, 15 bp, Homo sapiens
tacaatgccagtatt

SEQ ID NO: 1035307 - DNA, 15 bp, Homo sapiens
gtacaatgccagtat

SEQ ID NO: 1035308 - DNA, 15 bp, Homo sapiens
agtacaatgccagta

SEQ ID NO: 1035309 - DNA, 15 bp, Homo sapiens
aagtacaatgccagt

SEQ ID NO: 1035310 - DNA, 15 bp, Homo sapiens
caagtacaatgccag

SEQ ID NO: 1035311 - DNA, 15 bp, Homo sapiens
gcaagtacaatgcca

SEQ ID NO: 1035312 - DNA, 15 bp, Homo sapiens
agcaagtacaatgcc

SEQ ID NO: 1035313 - DNA, 15 bp, Homo sapiens
aagcaagtacaatgc

SEQ ID NO: 1035314 - DNA, 15 bp, Homo sapiens
taagcaagtacaatg

SEQ ID NO: 1035315 - DNA, 15 bp, Homo sapiens
ataagcaagtacaat

SEQ ID NO: 1035316 - DNA, 15 bp, Homo sapiens
aataagcaagtacaa

SEQ ID NO: 1035317 - DNA, 15 bp, Homo sapiens
aaataagcaagtaca

SEQ ID NO: 1035318 - DNA, 15 bp, Homo sapiens
aaaataagcaagtac

SEQ ID NO: 1035319 - DNA, 15 bp, Homo sapiens
aaaaataagcaagta

SEQ ID NO: 1035320 - DNA, 15 bp, Homo sapiens
taaaaataagcaagt

SEQ ID NO: 1035321 - DNA, 15 bp, Homo sapiens
ttaaaaataagcaag

SEQ ID NO: 1035322 - DNA, 15 bp, Homo sapiens
cttaaaaataagcaa

SEQ ID NO: 1035323 - DNA, 15 bp, Homo sapiens
ccttaaaaataagca

SEQ ID NO: 1035324 - DNA, 15 bp, Homo sapiens
accttaaaaataagc

SEQ ID NO: 1035325 - DNA, 15 bp, Homo sapiens
gaccttaaaaataag

SEQ ID NO: 1035326 - DNA, 15 bp, Homo sapiens
tgaccttaaaaataa

SEQ ID NO: 1035327 - DNA, 15 bp, Homo sapiens
atgaccttaaaaata

SEQ ID NO: 1035328 - DNA, 15 bp, Homo sapiens
aatgaccttaaaaat

SEQ ID NO: 1035329 - DNA, 15 bp, Homo sapiens
aaatgaccttaaaaa

SEQ ID NO: 1035330 - DNA, 15 bp, Homo sapiens
aaaatgaccttaaaa

SEQ ID NO: 1035331 - DNA, 15 bp, Homo sapiens
aaaaatgaccttaaa

SEQ ID NO: 1035332 - DNA, 15 bp, Homo sapiens
taaaaatgaccttaa

SEQ ID NO: 1035333 - DNA, 15 bp, Homo sapiens
ctaaaaatgacctta

SEQ ID NO: 1035334 - DNA, 15 bp, Homo sapiens
gctaaaaatgacctt

SEQ ID NO: 1035335 - DNA, 15 bp, Homo sapiens
agctaaaaatgacct

SEQ ID NO: 1035336 - DNA, 15 bp, Homo sapiens
gagctaaaaatgacc

SEQ ID NO: 1035337 - DNA, 15 bp, Homo sapiens
agagctaaaaatgac

SEQ ID NO: 1035338 - DNA, 15 bp, Homo sapiens
tagagctaaaaatga

SEQ ID NO: 1035339 - DNA, 15 bp, Homo sapiens
ttagagctaaaaatg

SEQ ID NO: 1035340 - DNA, 15 bp, Homo sapiens
attagagctaaaaat

SEQ ID NO: 1035341 - DNA, 15 bp, Homo sapiens
cattagagctaaaaa

SEQ ID NO: 1035342 - DNA, 15 bp, Homo sapiens
gcattagagctaaaa

SEQ ID NO: 1035343 - DNA, 15 bp, Homo sapiens
agcattagagctaaa

SEQ ID NO: 1035344 - DNA, 15 bp, Homo sapiens
aagcattagagctaa

SEQ ID NO: 1035345 - DNA, 15 bp, Homo sapiens
aaagcattagagcta

SEQ ID NO: 1035346 - DNA, 15 bp, Homo sapiens
taaagcattagagct

SEQ ID NO: 1035347 - DNA, 15 bp, Homo sapiens
ataaagcattagagc

SEQ ID NO: 1035348 - DNA, 15 bp, Homo sapiens
cataaagcattagag

SEQ ID NO: 1035349 - DNA, 15 bp, Homo sapiens
gcataaagcattaga

SEQ ID NO: 1035350 - DNA, 15 bp, Homo sapiens
ggcataaagcattag

SEQ ID NO: 1035351 - DNA, 15 bp, Homo sapiens
tggcataaagcatta

SEQ ID NO: 1035352 - DNA, 15 bp, Homo sapiens
gtggcataaagcatt

SEQ ID NO: 1035353 - DNA, 15 bp, Homo sapiens
ggtggcataaagcat

SEQ ID NO: 1035354 - DNA, 15 bp, Homo sapiens
tggtggcataaagca

SEQ ID NO: 1035355 - DNA, 15 bp, Homo sapiens
atggtggcataaagc

SEQ ID NO: 1035356 - DNA, 15 bp, Homo sapiens
catggtggcataaag

SEQ ID NO: 1035357 - DNA, 15 bp, Homo sapiens
tcatggtggcataaa

SEQ ID NO: 1035358 - DNA, 15 bp, Homo sapiens
ttcatggtggcataa

SEQ ID NO: 1035359 - DNA, 15 bp, Homo sapiens
tttcatggtggcata

SEQ ID NO: 1035360 - DNA, 15 bp, Homo sapiens
ttttcatggtggcat

SEQ ID NO: 1035361 - DNA, 15 bp, Homo sapiens
attttcatggtggca

SEQ ID NO: 1035362 - DNA, 15 bp, Homo sapiens
tattttcatggtggc

SEQ ID NO: 1035363 - DNA, 15 bp, Homo sapiens
atattttcatggtgg

SEQ ID NO: 1035364 - DNA, 15 bp, Homo sapiens
catattttcatggtg

SEQ ID NO: 1035365 - DNA, 15 bp, Homo sapiens
tcatattttcatggt

SEQ ID NO: 1035366 - DNA, 15 bp, Homo sapiens
atcatattttcatgg

SEQ ID NO: 1035367 - DNA, 15 bp, Homo sapiens
aatcatattttcatg

SEQ ID NO: 1035368 - DNA, 15 bp, Homo sapiens
aaatcatattttcat

SEQ ID NO: 1035369 - DNA, 15 bp, Homo sapiens
gaaatcatattttca

SEQ ID NO: 1035370 - DNA, 15 bp, Homo sapiens
ggaaatcatattttc

SEQ ID NO: 1035371 - DNA, 15 bp, Homo sapiens
aggaaatcatatttt

SEQ ID NO: 1035372 - DNA, 15 bp, Homo sapiens
taggaaatcatattt

SEQ ID NO: 1035373 - DNA, 15 bp, Homo sapiens
ataggaaatcatatt

SEQ ID NO: 1035374 - DNA, 15 bp, Homo sapiens
aataggaaatcatat

SEQ ID NO: 1035375 - DNA, 15 bp, Homo sapiens
taataggaaatcata

SEQ ID NO: 1035376 - DNA, 15 bp, Homo sapiens
ctaataggaaatcat

SEQ ID NO: 1035377 - DNA, 15 bp, Homo sapiens
cctaataggaaatca

SEQ ID NO: 1035378 - DNA, 15 bp, Homo sapiens
acctaataggaaatc

SEQ ID NO: 1035379 - DNA, 15 bp, Homo sapiens
tacctaataggaaat

SEQ ID NO: 1035380 - DNA, 15 bp, Homo sapiens
ctacctaataggaaa

SEQ ID NO: 1035381 - DNA, 15 bp, Homo sapiens
tctacctaataggaa

SEQ ID NO: 1035382 - DNA, 15 bp, Homo sapiens
ctctacctaatagga

SEQ ID NO: 1035383 - DNA, 15 bp, Homo sapiens
gctctacctaatagg

SEQ ID NO: 1035384 - DNA, 15 bp, Homo sapiens
agctctacctaatag

SEQ ID NO: 1035385 - DNA, 15 bp, Homo sapiens
gagctctacctaata

SEQ ID NO: 1035386 - DNA, 15 bp, Homo sapiens
ggagctctacctaat

SEQ ID NO: 1035387 - DNA, 15 bp, Homo sapiens
tggagctctacctaa

SEQ ID NO: 1035388 - DNA, 15 bp, Homo sapiens
atggagctctaccta

SEQ ID NO: 1035389 - DNA, 15 bp, Homo sapiens
tatggagctctacct

SEQ ID NO: 1035390 - DNA, 15 bp, Homo sapiens
gtatggagctctacc

SEQ ID NO: 1035391 - DNA, 15 bp, Homo sapiens
agtatggagctctac

SEQ ID NO: 1035392 - DNA, 15 bp, Homo sapiens
tagtatggagctcta

SEQ ID NO: 1035393 - DNA, 15 bp, Homo sapiens
atagtatggagctct

SEQ ID NO: 1035394 - DNA, 15 bp, Homo sapiens
aatagtatggagctc

SEQ ID NO: 1035395 - DNA, 15 bp, Homo sapiens
taatagtatggagct

SEQ ID NO: 1035396 - DNA, 15 bp, Homo sapiens
ttaatagtatggagc

SEQ ID NO: 1035397 - DNA, 15 bp, Homo sapiens
gttaatagtatggag

SEQ ID NO: 1035398 - DNA, 15 bp, Homo sapiens
tgttaatagtatgga

SEQ ID NO: 1035399 - DNA, 15 bp, Homo sapiens
ctgttaatagtatgg

SEQ ID NO: 1035400 - DNA, 15 bp, Homo sapiens
tctgttaatagtatg

SEQ ID NO: 1035401 - DNA, 15 bp, Homo sapiens
atctgttaatagtat

SEQ ID NO: 1035402 - DNA, 15 bp, Homo sapiens
catctgttaatagta

SEQ ID NO: 1035403 - DNA, 15 bp, Homo sapiens
ccatctgttaatagt

SEQ ID NO: 1035404 - DNA, 15 bp, Homo sapiens
accatctgttaatag

SEQ ID NO: 1035405 - DNA, 15 bp, Homo sapiens
aaccatctgttaata

SEQ ID NO: 1035406 - DNA, 15 bp, Homo sapiens
aaaccatctgttaat

SEQ ID NO: 1035407 - DNA, 15 bp, Homo sapiens
caaaccatctgttaa

SEQ ID NO: 1035408 - DNA, 15 bp, Homo sapiens
gcaaaccatctgtta

SEQ ID NO: 1035409 - DNA, 15 bp, Homo sapiens
agcaaaccatctgtt

SEQ ID NO: 1035410 - DNA, 15 bp, Homo sapiens
aagcaaaccatctgt

SEQ ID NO: 1035411 - DNA, 15 bp, Homo sapiens
aaagcaaaccatctg

SEQ ID NO: 1035412 - DNA, 15 bp, Homo sapiens
aaaagcaaaccatct

SEQ ID NO: 1035413 - DNA, 15 bp, Homo sapiens
gaaaagcaaaccatc

SEQ ID NO: 1035414 - DNA, 15 bp, Homo sapiens
agaaaagcaaaccat

SEQ ID NO: 1035415 - DNA, 15 bp, Homo sapiens
tagaaaagcaaacca

SEQ ID NO: 1035416 - DNA, 15 bp, Homo sapiens
ctagaaaagcaaacc

SEQ ID NO: 1035417 - DNA, 15 bp, Homo sapiens
actagaaaagcaaac

SEQ ID NO: 1035418 - DNA, 15 bp, Homo sapiens
aactagaaaagcaaa

SEQ ID NO: 1035419 - DNA, 15 bp, Homo sapiens
ggaactagaaaagca

SEQ ID NO: 1035420 - DNA, 15 bp, Homo sapiens
gggaactagaaaagc

SEQ ID NO: 1035421 - DNA, 15 bp, Homo sapiens
tgggaactagaaaag

SEQ ID NO: 1035422 - DNA, 15 bp, Homo sapiens
ctgggaactagaaaa

SEQ ID NO: 1035423 - DNA, 15 bp, Homo sapiens
tctgggaactagaaa

SEQ ID NO: 1035424 - DNA, 15 bp, Homo sapiens
atctgggaactagaa

SEQ ID NO: 1035425 - DNA, 15 bp, Homo sapiens
gatctgggaactaga

SEQ ID NO: 1035426 - DNA, 15 bp, Homo sapiens
ggatctgggaactag

SEQ ID NO: 1035427 - DNA, 15 bp, Homo sapiens
gggatctgggaacta

SEQ ID NO: 1035428 - DNA, 15 bp, Homo sapiens
agggatctgggaact

SEQ ID NO: 1035429 - DNA, 15 bp, Homo sapiens
tagggatctgggaac

SEQ ID NO: 1035430 - DNA, 15 bp, Homo sapiens
atagggatctgggaa

SEQ ID NO: 1035431 - DNA, 15 bp, Homo sapiens
tatagggatctggga

SEQ ID NO: 1035432 - DNA, 15 bp, Homo sapiens
ttatagggatctggg

SEQ ID NO: 1035433 - DNA, 15 bp, Homo sapiens
gttatagggatctgg

SEQ ID NO: 1035434 - DNA, 15 bp, Homo sapiens
ggttatagggatctg

SEQ ID NO: 1035435 - DNA, 15 bp, Homo sapiens
cggttatagggatct

SEQ ID NO: 1035436 - DNA, 15 bp, Homo sapiens
acggttatagggatc

SEQ ID NO: 1035437 - DNA, 15 bp, Homo sapiens
aacggttatagggat

SEQ ID NO: 1035438 - DNA, 15 bp, Homo sapiens
aaacggttataggga

SEQ ID NO: 1035439 - DNA, 15 bp, Homo sapiens
caaacggttataggg

SEQ ID NO: 1035440 - DNA, 15 bp, Homo sapiens
acaaacggttatagg

SEQ ID NO: 1035441 - DNA, 15 bp, Homo sapiens
tacaaacggttatag

SEQ ID NO: 1035442 - DNA, 15 bp, Homo sapiens
ttacaaacggttata

SEQ ID NO: 1035443 - DNA, 15 bp, Homo sapiens
attacaaacggttat

SEQ ID NO: 1035444 - DNA, 15 bp, Homo sapiens
tattacaaacggtta

SEQ ID NO: 1035445 - DNA, 15 bp, Homo sapiens
atattacaaacggtt

SEQ ID NO: 1035446 - DNA, 15 bp, Homo sapiens
aatattacaaacggt

SEQ ID NO: 1035447 - DNA, 15 bp, Homo sapiens
aaatattacaaacgg

SEQ ID NO: 1035448 - DNA, 15 bp, Homo sapiens
gaaatattacaaacg

SEQ ID NO: 1035449 - DNA, 15 bp, Homo sapiens
agaaatattacaaac

SEQ ID NO: 1035450 - DNA, 15 bp, Homo sapiens
aagaaatattacaaa

SEQ ID NO: 1035451 - DNA, 15 bp, Homo sapiens
gaagaaatattacaa

SEQ ID NO: 1035452 - DNA, 15 bp, Homo sapiens
agaagaaatattaca

SEQ ID NO: 1035453 - DNA, 15 bp, Homo sapiens
aagaagaaatattac

SEQ ID NO: 1035454 - DNA, 15 bp, Homo sapiens
taagaagaaatatta

SEQ ID NO: 1035455 - DNA, 15 bp, Homo sapiens
ttaagaagaaatatt

SEQ ID NO: 1035456 - DNA, 15 bp, Homo sapiens
cttaagaagaaatat

SEQ ID NO: 1035457 - DNA, 15 bp, Homo sapiens
acttaagaagaaata

SEQ ID NO: 1035458 - DNA, 15 bp, Homo sapiens
tacttaagaagaaat

SEQ ID NO: 1035459 - DNA, 15 bp, Homo sapiens
atacttaagaagaaa

SEQ ID NO: 1035460 - DNA, 15 bp, Homo sapiens
tatacttaagaagaa

SEQ ID NO: 1035461 - DNA, 15 bp, Homo sapiens
ttatacttaagaaga

SEQ ID NO: 1035462 - DNA, 15 bp, Homo sapiens
tttatacttaagaag

SEQ ID NO: 1035463 - DNA, 15 bp, Homo sapiens
atttatacttaagaa

SEQ ID NO: 1035464 - DNA, 15 bp, Homo sapiens
catttatacttaaga

SEQ ID NO: 1035465 - DNA, 15 bp, Homo sapiens
acatttatacttaag

SEQ ID NO: 1035466 - DNA, 15 bp, Homo sapiens
cacatttatacttaa

SEQ ID NO: 1035467 - DNA, 15 bp, Homo sapiens
tcacatttatactta

SEQ ID NO: 1035468 - DNA, 15 bp, Homo sapiens
ttcacatttatactt

SEQ ID NO: 1035469 - DNA, 15 bp, Homo sapiens
gttcacatttatact

SEQ ID NO: 1035470 - DNA, 15 bp, Homo sapiens
tgttcacatttatac

SEQ ID NO: 1035471 - DNA, 15 bp, Homo sapiens
ttgttcacatttata

SEQ ID NO: 1035472 - DNA, 15 bp, Homo sapiens
tttgttcacatttat

SEQ ID NO: 1035473 - DNA, 15 bp, Homo sapiens
ctttgttcacattta

SEQ ID NO: 1035474 - DNA, 15 bp, Homo sapiens
gctttgttcacattt

SEQ ID NO: 1035475 - DNA, 15 bp, Homo sapiens
tgctttgttcacatt

SEQ ID NO: 1035476 - DNA, 15 bp, Homo sapiens
gtgctttgttcacat

SEQ ID NO: 1035477 - DNA, 15 bp, Homo sapiens
agtgctttgttcaca

SEQ ID NO: 1035478 - DNA, 15 bp, Homo sapiens
aagtgctttgttcac

SEQ ID NO: 1035479 - DNA, 15 bp, Homo sapiens
aaagtgctttgttca

SEQ ID NO: 1035480 - DNA, 15 bp, Homo sapiens
taaagtgctttgttc

SEQ ID NO: 1035481 - DNA, 15 bp, Homo sapiens
ttaaagtgctttgtt

SEQ ID NO: 1035482 - DNA, 15 bp, Homo sapiens
attaaagtgctttgt

SEQ ID NO: 1035483 - DNA, 15 bp, Homo sapiens
aattaaagtgctttg

SEQ ID NO: 1035484 - DNA, 15 bp, Homo sapiens
aaattaaagtgcttt

SEQ ID NO: 1035485 - DNA, 15 bp, Homo sapiens
taaattaaagtgctt

SEQ ID NO: 1035486 - DNA, 15 bp, Homo sapiens
ctaaattaaagtgct

SEQ ID NO: 1035487 - DNA, 15 bp, Homo sapiens
gctaaattaaagtgc

SEQ ID NO: 1035488 - DNA, 15 bp, Homo sapiens
tgctaaattaaagtg

SEQ ID NO: 1035489 - DNA, 15 bp, Homo sapiens
ttgctaaattaaagt

SEQ ID NO: 1035490 - DNA, 15 bp, Homo sapiens
tttgctaaattaaag

SEQ ID NO: 1035491 - DNA, 15 bp, Homo sapiens
atttgctaaattaaa

SEQ ID NO: 1035492 - DNA, 15 bp, Homo sapiens
tatttgctaaattaa

SEQ ID NO: 1035493 - DNA, 15 bp, Homo sapiens
ttatttgctaaatta

SEQ ID NO: 1035494 - DNA, 15 bp, Homo sapiens
gttatttgctaaatt

SEQ ID NO: 1035495 - DNA, 15 bp, Homo sapiens
ggttatttgctaaat

SEQ ID NO: 1035496 - DNA, 15 bp, Homo sapiens
tggttatttgctaaa

SEQ ID NO: 1035497 - DNA, 15 bp, Homo sapiens
ctggttatttgctaa

SEQ ID NO: 1035498 - DNA, 15 bp, Homo sapiens
gctggttatttgcta

SEQ ID NO: 1035499 - DNA, 15 bp, Homo sapiens
agctggttatttgct

SEQ ID NO: 1035500 - DNA, 15 bp, Homo sapiens
tagctggttatttgc

SEQ ID NO: 1035501 - DNA, 15 bp, Homo sapiens
ttagctggttatttg

SEQ ID NO: 1035502 - DNA, 15 bp, Homo sapiens
tttagctggttattt

SEQ ID NO: 1035503 - DNA, 15 bp, Homo sapiens
ctttagctggttatt

SEQ ID NO: 1035504 - DNA, 15 bp, Homo sapiens
actttagctggttat

SEQ ID NO: 1035505 - DNA, 15 bp, Homo sapiens
cactttagctggtta

SEQ ID NO: 1035506 - DNA, 15 bp, Homo sapiens
ccactttagctggtt

SEQ ID NO: 1035507 - DNA, 15 bp, Homo sapiens
accactttagctggt

SEQ ID NO: 1035508 - DNA, 15 bp, Homo sapiens
taccactttagctgg

SEQ ID NO: 1035509 - DNA, 15 bp, Homo sapiens
ctaccactttagctg

SEQ ID NO: 1035510 - DNA, 15 bp, Homo sapiens
actaccactttagct

SEQ ID NO: 1035511 - DNA, 15 bp, Homo sapiens
gactaccactttagc

SEQ ID NO: 1035512 - DNA, 15 bp, Homo sapiens
agactaccactttag

SEQ ID NO: 1035513 - DNA, 15 bp, Homo sapiens
aagactaccacttta

SEQ ID NO: 1035514 - DNA, 15 bp, Homo sapiens
aaagactaccacttt

SEQ ID NO: 1035515 - DNA, 15 bp, Homo sapiens
caaagactaccactt

SEQ ID NO: 1035516 - DNA, 15 bp, Homo sapiens
acaaagactaccact

SEQ ID NO: 1035517 - DNA, 15 bp, Homo sapiens
gacaaagactaccac

SEQ ID NO: 1035518 - DNA, 15 bp, Homo sapiens
agacaaagactacca

SEQ ID NO: 1035519 - DNA, 15 bp, Homo sapiens
aagacaaagactacc

SEQ ID NO: 1035520 - DNA, 15 bp, Homo sapiens
aaagacaaagactac

SEQ ID NO: 1035521 - DNA, 15 bp, Homo sapiens
aaaagacaaagacta

SEQ ID NO: 1035522 - DNA, 15 bp, Homo sapiens
aaaaagacaaagact

SEQ ID NO: 1035523 - DNA, 15 bp, Homo sapiens
aaaaaagacaaagac

SEQ ID NO: 1035524 - DNA, 15 bp, Homo sapiens
aaaaaaagacaaaga

SEQ ID NO: 1035525 - DNA, 15 bp, Homo sapiens
taaaaaaagacaaag

SEQ ID NO: 1035526 - DNA, 15 bp, Homo sapiens
ttaaaaaaagacaaa

SEQ ID NO: 1035527 - DNA, 15 bp, Homo sapiens
tttaaaaaaagacaa

SEQ ID NO: 1035528 - DNA, 15 bp, Homo sapiens
ttttaaaaaaagaca

SEQ ID NO: 1035529 - DNA, 15 bp, Homo sapiens
tttttaaaaaaagac

SEQ ID NO: 1035530 - DNA, 15 bp, Homo sapiens
ttttttaaaaaaaga

SEQ ID NO: 1035531 - DNA, 15 bp, Homo sapiens
tttttttaaaaaaag

SEQ ID NO: 1035532 - DNA, 15 bp, Homo sapiens
aaatttttttaaaaa

SEQ ID NO: 1035533 - DNA, 15 bp, Homo sapiens
aaaatttttttaaaa

SEQ ID NO: 1035534 - DNA, 15 bp, Homo sapiens
taaaatttttttaaa

SEQ ID NO: 1035535 - DNA, 15 bp, Homo sapiens
ataaaatttttttaa

SEQ ID NO: 1035536 - DNA, 15 bp, Homo sapiens
aataaaattttttta

SEQ ID NO: 1035537 - DNA, 15 bp, Homo sapiens
aaataaaattttttt

SEQ ID NO: 1035538 - DNA, 15 bp, Homo sapiens
aaaataaaatttttt

SEQ ID NO: 1035539 - DNA, 15 bp, Homo sapiens
taaaataaaattttt

SEQ ID NO: 1035540 - DNA, 15 bp, Homo sapiens
ttaaaataaaatttt

SEQ ID NO: 1035541 - DNA, 15 bp, Homo sapiens
tttaaaataaaattt

SEQ ID NO: 1035542 - DNA, 15 bp, Homo sapiens
ttttaaaataaaatt

SEQ ID NO: 1035543 - DNA, 15 bp, Homo sapiens
gttttaaaataaaat

SEQ ID NO: 1035544 - DNA, 15 bp, Homo sapiens
agttttaaaataaaa

SEQ ID NO: 1035545 - DNA, 15 bp, Homo sapiens
aagttttaaaataaa

SEQ ID NO: 1035546 - DNA, 15 bp, Homo sapiens
taagttttaaaataa

SEQ ID NO: 1035547 - DNA, 15 bp, Homo sapiens
gtaagttttaaaata

SEQ ID NO: 1035548 - DNA, 15 bp, Homo sapiens
agtaagttttaaaat

SEQ ID NO: 1035549 - DNA, 15 bp, Homo sapiens
tagtaagttttaaaa

SEQ ID NO: 1035550 - DNA, 15 bp, Homo sapiens
ctagtaagttttaaa

SEQ ID NO: 1035551 - DNA, 15 bp, Homo sapiens
actagtaagttttaa

SEQ ID NO: 1035552 - DNA, 15 bp, Homo sapiens
aactagtaagtttta

SEQ ID NO: 1035553 - DNA, 15 bp, Homo sapiens
taactagtaagtttt

SEQ ID NO: 1035554 - DNA, 15 bp, Homo sapiens
ctaactagtaagttt

SEQ ID NO: 1035555 - DNA, 15 bp, Homo sapiens
tctaactagtaagtt

SEQ ID NO: 1035556 - DNA, 15 bp, Homo sapiens
gtctaactagtaagt

SEQ ID NO: 1035557 - DNA, 15 bp, Homo sapiens
agtctaactagtaag

SEQ ID NO: 1035558 - DNA, 15 bp, Homo sapiens
cagtctaactagtaa

SEQ ID NO: 1035559 - DNA, 15 bp, Homo sapiens
ccagtctaactagta

SEQ ID NO: 1035560 - DNA, 15 bp, Homo sapiens
accagtctaactagt

SEQ ID NO: 1035561 - DNA, 15 bp, Homo sapiens
taccagtctaactag

SEQ ID NO: 1035562 - DNA, 15 bp, Homo sapiens
ctaccagtctaacta

SEQ ID NO: 1035563 - DNA, 15 bp, Homo sapiens
actaccagtctaact

SEQ ID NO: 1035564 - DNA, 15 bp, Homo sapiens
gactaccagtctaac

SEQ ID NO: 1035565 - DNA, 15 bp, Homo sapiens
ggactaccagtctaa

SEQ ID NO: 1035566 - DNA, 15 bp, Homo sapiens
aggactaccagtcta

SEQ ID NO: 1035567 - DNA, 15 bp, Homo sapiens
aaggactaccagtct

SEQ ID NO: 1035568 - DNA, 15 bp, Homo sapiens
caaggactaccagtc

SEQ ID NO: 1035569 - DNA, 15 bp, Homo sapiens
tcaaggactaccagt

SEQ ID NO: 1035570 - DNA, 15 bp, Homo sapiens
ttcaaggactaccag

SEQ ID NO: 1035571 - DNA, 15 bp, Homo sapiens
tttcaaggactacca

SEQ ID NO: 1035572 - DNA, 15 bp, Homo sapiens
ctttcaaggactacc

SEQ ID NO: 1035573 - DNA, 15 bp, Homo sapiens
gctttcaaggactac

SEQ ID NO: 1035574 - DNA, 15 bp, Homo sapiens
ggctttcaaggacta

SEQ ID NO: 1035575 - DNA, 15 bp, Homo sapiens
tggctttcaaggact

SEQ ID NO: 1035576 - DNA, 15 bp, Homo sapiens
ttggctttcaaggac

SEQ ID NO: 1035577 - DNA, 15 bp, Homo sapiens
attggctttcaagga

SEQ ID NO: 1035578 - DNA, 15 bp, Homo sapiens
aattggctttcaagg

SEQ ID NO: 1035579 - DNA, 15 bp, Homo sapiens
aaattggctttcaag

SEQ ID NO: 1035580 - DNA, 15 bp, Homo sapiens
gaaattggctttcaa

SEQ ID NO: 1035581 - DNA, 15 bp, Homo sapiens
agaaattggctttca

SEQ ID NO: 1035582 - DNA, 15 bp, Homo sapiens
gagaaattggctttc

SEQ ID NO: 1035583 - DNA, 15 bp, Homo sapiens
agagaaattggcttt

SEQ ID NO: 1035584 - DNA, 15 bp, Homo sapiens
gagagaaattggctt

SEQ ID NO: 1035585 - DNA, 15 bp, Homo sapiens
ggagagaaattggct

SEQ ID NO: 1035586 - DNA, 15 bp, Homo sapiens
tggagagaaattggc

SEQ ID NO: 1035587 - DNA, 15 bp, Homo sapiens
ttggagagaaattgg

SEQ ID NO: 1035588 - DNA, 15 bp, Homo sapiens
attggagagaaattg

SEQ ID NO: 1035589 - DNA, 15 bp, Homo sapiens
cattggagagaaatt

SEQ ID NO: 1035590 - DNA, 15 bp, Homo sapiens
tcattggagagaaat

SEQ ID NO: 1035591 - DNA, 15 bp, Homo sapiens
ctcattggagagaaa

SEQ ID NO: 1035592 - DNA, 15 bp, Homo sapiens
actcattggagagaa

SEQ ID NO: 1035593 - DNA, 15 bp, Homo sapiens
tactcattggagaga

SEQ ID NO: 1035594 - DNA, 15 bp, Homo sapiens
atactcattggagag

SEQ ID NO: 1035595 - DNA, 15 bp, Homo sapiens
gaatactcattggag

SEQ ID NO: 1035596 - DNA, 15 bp, Homo sapiens
ggaatactcattgga

SEQ ID NO: 1035597 - DNA, 15 bp, Homo sapiens
gggaatactcattgg

SEQ ID NO: 1035598 - DNA, 15 bp, Homo sapiens
agggaatactcattg

SEQ ID NO: 1035599 - DNA, 15 bp, Homo sapiens
tagggaatactcatt

SEQ ID NO: 1035600 - DNA, 15 bp, Homo sapiens
ctagggaatactcat

SEQ ID NO: 1035601 - DNA, 15 bp, Homo sapiens
cctagggaatactca

SEQ ID NO: 1035602 - DNA, 15 bp, Homo sapiens
acctagggaatactc

SEQ ID NO: 1035603 - DNA, 15 bp, Homo sapiens
aacctagggaatact

SEQ ID NO: 1035604 - DNA, 15 bp, Homo sapiens
aaacctagggaatac

SEQ ID NO: 1035605 - DNA, 15 bp, Homo sapiens
caaacctagggaata

SEQ ID NO: 1035606 - DNA, 15 bp, Homo sapiens
acaaacctagggaat

SEQ ID NO: 1035607 - DNA, 15 bp, Homo sapiens
tacaaacctagggaa

SEQ ID NO: 1035608 - DNA, 15 bp, Homo sapiens
atacaaacctaggga

SEQ ID NO: 1035609 - DNA, 15 bp, Homo sapiens
aatacaaacctaggg

SEQ ID NO: 1035610 - DNA, 15 bp, Homo sapiens
gaatacaaacctagg

SEQ ID NO: 1035611 - DNA, 15 bp, Homo sapiens
tgaatacaaacctag

SEQ ID NO: 1035612 - DNA, 15 bp, Homo sapiens
ttgaatacaaaccta

SEQ ID NO: 1035613 - DNA, 15 bp, Homo sapiens
gttgaatacaaacct

SEQ ID NO: 1035614 - DNA, 15 bp, Homo sapiens
tgttgaatacaaacc

SEQ ID NO: 1035615 - DNA, 15 bp, Homo sapiens
gtgttgaatacaaac

SEQ ID NO: 1035616 - DNA, 15 bp, Homo sapiens
tgtgttgaatacaaa

SEQ ID NO: 1035617 - DNA, 15 bp, Homo sapiens
ctgtgttgaatacaa

SEQ ID NO: 1035618 - DNA, 15 bp, Homo sapiens
actgtgttgaataca

SEQ ID NO: 1035619 - DNA, 15 bp, Homo sapiens
aactgtgttgaatac

SEQ ID NO: 1035620 - DNA, 15 bp, Homo sapiens
aaactgtgttgaata

SEQ ID NO: 1035621 - DNA, 15 bp, Homo sapiens
caaactgtgttgaat

SEQ ID NO: 1035622 - DNA, 15 bp, Homo sapiens
ccaaactgtgttgaa

SEQ ID NO: 1035623 - DNA, 15 bp, Homo sapiens
accaaactgtgttga

SEQ ID NO: 1035624 - DNA, 15 bp, Homo sapiens
gaccaaactgtgttg

SEQ ID NO: 1035625 - DNA, 15 bp, Homo sapiens
cgaccaaactgtgtt

SEQ ID NO: 1035626 - DNA, 15 bp, Homo sapiens
acgaccaaactgtgt

SEQ ID NO: 1035627 - DNA, 15 bp, Homo sapiens
aacgaccaaactgtg

SEQ ID NO: 1035628 - DNA, 15 bp, Homo sapiens
aaacgaccaaactgt

SEQ ID NO: 1035629 - DNA, 15 bp, Homo sapiens
caaacgaccaaactg

SEQ ID NO: 1035630 - DNA, 15 bp, Homo sapiens
acaaacgaccaaact

SEQ ID NO: 1035631 - DNA, 15 bp, Homo sapiens
gacaaacgaccaaac

SEQ ID NO: 1035632 - DNA, 15 bp, Homo sapiens
ggacaaacgaccaaa

SEQ ID NO: 1035633 - DNA, 15 bp, Homo sapiens
aggacaaacgaccaa

SEQ ID NO: 1035634 - DNA, 15 bp, Homo sapiens
gaggacaaacgacca

SEQ ID NO: 1035635 - DNA, 15 bp, Homo sapiens
agaggacaaacgacc

SEQ ID NO: 1035636 - DNA, 15 bp, Homo sapiens
gagaggacaaacgac

SEQ ID NO: 1035637 - DNA, 15 bp, Homo sapiens
ggagaggacaaacga

SEQ ID NO: 1035638 - DNA, 15 bp, Homo sapiens
tggagaggacaaacg

SEQ ID NO: 1035639 - DNA, 15 bp, Homo sapiens
ttggagaggacaaac

SEQ ID NO: 1035640 - DNA, 15 bp, Homo sapiens
tttggagaggacaaa

SEQ ID NO: 1035641 - DNA, 15 bp, Homo sapiens
atttggagaggacaa

SEQ ID NO: 1035642 - DNA, 15 bp, Homo sapiens
gatttggagaggaca

SEQ ID NO: 1035643 - DNA, 15 bp, Homo sapiens
agatttggagaggac

SEQ ID NO: 1035644 - DNA, 15 bp, Homo sapiens
gagatttggagagga

SEQ ID NO: 1035645 - DNA, 15 bp, Homo sapiens
tgagatttggagagg

SEQ ID NO: 1035646 - DNA, 15 bp, Homo sapiens
atgagatttggagag

SEQ ID NO: 1035647 - DNA, 15 bp, Homo sapiens
catgagatttggaga

SEQ ID NO: 1035648 - DNA, 15 bp, Homo sapiens
acatgagatttggag

SEQ ID NO: 1035649 - DNA, 15 bp, Homo sapiens
aacatgagatttgga

SEQ ID NO: 1035650 - DNA, 15 bp, Homo sapiens
caacatgagatttgg

SEQ ID NO: 1035651 - DNA, 15 bp, Homo sapiens
tcaacatgagatttg

SEQ ID NO: 1035652 - DNA, 15 bp, Homo sapiens
cttcaacatgagatt

SEQ ID NO: 1035653 - DNA, 15 bp, Homo sapiens
acttcaacatgagat

SEQ ID NO: 1035654 - DNA, 15 bp, Homo sapiens
tacttcaacatgaga

SEQ ID NO: 1035655 - DNA, 15 bp, Homo sapiens
atacttcaacatgag

SEQ ID NO: 1035656 - DNA, 15 bp, Homo sapiens
catacttcaacatga

SEQ ID NO: 1035657 - DNA, 15 bp, Homo sapiens
tcatacttcaacatg

SEQ ID NO: 1035658 - DNA, 15 bp, Homo sapiens
atcatacttcaacat

SEQ ID NO: 1035659 - DNA, 15 bp, Homo sapiens
aatcatacttcaaca

SEQ ID NO: 1035660 - DNA, 15 bp, Homo sapiens
gaatcatacttcaac

SEQ ID NO: 1035661 - DNA, 15 bp, Homo sapiens
cgaatcatacttcaa

SEQ ID NO: 1035662 - DNA, 15 bp, Homo sapiens
gcgaatcatacttca

SEQ ID NO: 1035663 - DNA, 15 bp, Homo sapiens
tgcgaatcatacttc

SEQ ID NO: 1035664 - DNA, 15 bp, Homo sapiens
ctgcgaatcatactt

SEQ ID NO: 1035665 - DNA, 15 bp, Homo sapiens
actgcgaatcatact

SEQ ID NO: 1035666 - DNA, 15 bp, Homo sapiens
cactgcgaatcatac

SEQ ID NO: 1035667 - DNA, 15 bp, Homo sapiens
acactgcgaatcata

SEQ ID NO: 1035668 - DNA, 15 bp, Homo sapiens
aacactgcgaatcat

SEQ ID NO: 1035669 - DNA, 15 bp, Homo sapiens
caacactgcgaatca

SEQ ID NO: 1035670 - DNA, 15 bp, Homo sapiens
ccaacactgcgaatc

SEQ ID NO: 1035671 - DNA, 15 bp, Homo sapiens
tccaacactgcgaat

SEQ ID NO: 1035672 - DNA, 15 bp, Homo sapiens
ctccaacactgcgaa

SEQ ID NO: 1035673 - DNA, 15 bp, Homo sapiens
cctccaacactgcga

SEQ ID NO: 1035674 - DNA, 15 bp, Homo sapiens
acctccaacactgcg

SEQ ID NO: 1035675 - DNA, 15 bp, Homo sapiens
cacctccaacactgc

SEQ ID NO: 1035676 - DNA, 15 bp, Homo sapiens
ccacctccaacactg

SEQ ID NO: 1035677 - DNA, 15 bp, Homo sapiens
cccacctccaacact

SEQ ID NO: 1035678 - DNA, 15 bp, Homo sapiens
ccccacctccaacac

SEQ ID NO: 1035679 - DNA, 15 bp, Homo sapiens
gccccacctccaaca

SEQ ID NO: 1035680 - DNA, 15 bp, Homo sapiens
ggccccacctccaac

SEQ ID NO: 1035681 - DNA, 15 bp, Homo sapiens
aggccccacctccaa

SEQ ID NO: 1035682 - DNA, 15 bp, Homo sapiens
caggccccacctcca

SEQ ID NO: 1035683 - DNA, 15 bp, Homo sapiens
ccaggccccacctcc

SEQ ID NO: 1035684 - DNA, 15 bp, Homo sapiens
accaggccccacctc

SEQ ID NO: 1035685 - DNA, 15 bp, Homo sapiens
caccaggccccacct

SEQ ID NO: 1035686 - DNA, 15 bp, Homo sapiens
ccaccaggccccacc

SEQ ID NO: 1035687 - DNA, 15 bp, Homo sapiens
cccaccaggccccac

SEQ ID NO: 1035688 - DNA, 15 bp, Homo sapiens
tcccaccaggcccca

SEQ ID NO: 1035689 - DNA, 15 bp, Homo sapiens
ctcccaccaggcccc

SEQ ID NO: 1035690 - DNA, 15 bp, Homo sapiens
cctcccaccaggccc

SEQ ID NO: 1035691 - DNA, 15 bp, Homo sapiens
acctcccaccaggcc

SEQ ID NO: 1035692 - DNA, 15 bp, Homo sapiens
tcacctcccaccagg

SEQ ID NO: 1035693 - DNA, 15 bp, Homo sapiens
atcacctcccaccag

SEQ ID NO: 1035694 - DNA, 15 bp, Homo sapiens
aatcacctcccacca

SEQ ID NO: 1035695 - DNA, 15 bp, Homo sapiens
taatcacctcccacc

SEQ ID NO: 1035696 - DNA, 15 bp, Homo sapiens
ctaatcacctcccac

SEQ ID NO: 1035697 - DNA, 15 bp, Homo sapiens
tctaatcacctccca

SEQ ID NO: 1035698 - DNA, 15 bp, Homo sapiens
atctaatcacctccc

SEQ ID NO: 1035699 - DNA, 15 bp, Homo sapiens
gatctaatcacctcc

SEQ ID NO: 1035700 - DNA, 15 bp, Homo sapiens
tgatctaatcacctc

SEQ ID NO: 1035701 - DNA, 15 bp, Homo sapiens
atgatctaatcacct

SEQ ID NO: 1035702 - DNA, 15 bp, Homo sapiens
catgatctaatcacc

SEQ ID NO: 1035703 - DNA, 15 bp, Homo sapiens
ccatgatctaatcac

SEQ ID NO: 1035704 - DNA, 15 bp, Homo sapiens
cccatgatctaatca

SEQ ID NO: 1035705 - DNA, 15 bp, Homo sapiens
ccccatgatctaatc

SEQ ID NO: 1035706 - DNA, 15 bp, Homo sapiens
cccccatgatctaat

SEQ ID NO: 1035707 - DNA, 15 bp, Homo sapiens
ccccccatgatctaa

SEQ ID NO: 1035708 - DNA, 15 bp, Homo sapiens
gccccccatgatcta

SEQ ID NO: 1035709 - DNA, 15 bp, Homo sapiens
tgccccccatgatct

SEQ ID NO: 1035710 - DNA, 15 bp, Homo sapiens
ctgccccccatgatc

SEQ ID NO: 1035711 - DNA, 15 bp, Homo sapiens
tctgccccccatgat

SEQ ID NO: 1035712 - DNA, 15 bp, Homo sapiens
atctgccccccatga

SEQ ID NO: 1035713 - DNA, 15 bp, Homo sapiens
gatctgccccccatg

SEQ ID NO: 1035714 - DNA, 15 bp, Homo sapiens
ggatctgccccccat

SEQ ID NO: 1035715 - DNA, 15 bp, Homo sapiens
gggatctgcccccca

SEQ ID NO: 1035716 - DNA, 15 bp, Homo sapiens
agggatctgcccccc

SEQ ID NO: 1035717 - DNA, 15 bp, Homo sapiens
cagggatctgccccc

SEQ ID NO: 1035718 - DNA, 15 bp, Homo sapiens
ccagggatctgcccc

SEQ ID NO: 1035719 - DNA, 15 bp, Homo sapiens
accagggatctgccc

SEQ ID NO: 1035720 - DNA, 15 bp, Homo sapiens
caccagggatctgcc

SEQ ID NO: 1035721 - DNA, 15 bp, Homo sapiens
tcaccagggatctgc

SEQ ID NO: 1035722 - DNA, 15 bp, Homo sapiens
ttcaccagggatctg

SEQ ID NO: 1035723 - DNA, 15 bp, Homo sapiens
cttcaccagggatct

SEQ ID NO: 1035724 - DNA, 15 bp, Homo sapiens
ccttcaccagggatc

SEQ ID NO: 1035725 - DNA, 15 bp, Homo sapiens
tccttcaccagggat

SEQ ID NO: 1035726 - DNA, 15 bp, Homo sapiens
ttccttcaccaggga

SEQ ID NO: 1035727 - DNA, 15 bp, Homo sapiens
attccttcaccaggg

SEQ ID NO: 1035728 - DNA, 15 bp, Homo sapiens
aattccttcaccagg

SEQ ID NO: 1035729 - DNA, 15 bp, Homo sapiens
taattccttcaccag

SEQ ID NO: 1035730 - DNA, 15 bp, Homo sapiens
ctaattccttcacca

SEQ ID NO: 1035731 - DNA, 15 bp, Homo sapiens
actaattccttcacc

SEQ ID NO: 1035732 - DNA, 15 bp, Homo sapiens
cactaattccttcac

SEQ ID NO: 1035733 - DNA, 15 bp, Homo sapiens
acactaattccttca

SEQ ID NO: 1035734 - DNA, 15 bp, Homo sapiens
gacactaattccttc

SEQ ID NO: 1035735 - DNA, 15 bp, Homo sapiens
tgacactaattcctt

SEQ ID NO: 1035736 - DNA, 15 bp, Homo sapiens
atgacactaattcct

SEQ ID NO: 1035737 - DNA, 15 bp, Homo sapiens
gatgacactaattcc

SEQ ID NO: 1035738 - DNA, 15 bp, Homo sapiens
agatgacactaattc

SEQ ID NO: 1035739 - DNA, 15 bp, Homo sapiens
gagatgacactaatt

SEQ ID NO: 1035740 - DNA, 15 bp, Homo sapiens
agagatgacactaat

SEQ ID NO: 1035741 - DNA, 15 bp, Homo sapiens
cagagatgacactaa

SEQ ID NO: 1035742 - DNA, 15 bp, Homo sapiens
ccagagatgacacta

SEQ ID NO: 1035743 - DNA, 15 bp, Homo sapiens
cccagagatgacact

SEQ ID NO: 1035744 - DNA, 15 bp, Homo sapiens
gcccagagatgacac

SEQ ID NO: 1035745 - DNA, 15 bp, Homo sapiens
cgcccagagatgaca

SEQ ID NO: 1035746 - DNA, 15 bp, Homo sapiens
tcgcccagagatgac

SEQ ID NO: 1035747 - DNA, 15 bp, Homo sapiens
ctcgcccagagatga

SEQ ID NO: 1035748 - DNA, 15 bp, Homo sapiens
tctcgcccagagatg

SEQ ID NO: 1035749 - DNA, 15 bp, Homo sapiens
ttctcgcccagagat

SEQ ID NO: 1035750 - DNA, 15 bp, Homo sapiens
cttctcgcccagaga

SEQ ID NO: 1035751 - DNA, 15 bp, Homo sapiens
acttctcgcccagag

SEQ ID NO: 1035752 - DNA, 15 bp, Homo sapiens
cacttctcgcccaga

SEQ ID NO: 1035753 - DNA, 15 bp, Homo sapiens
tcacttctcgcccag

SEQ ID NO: 1035754 - DNA, 15 bp, Homo sapiens
ctcacttctcgccca

SEQ ID NO: 1035755 - DNA, 15 bp, Homo sapiens
actcacttctcgccc

SEQ ID NO: 1035756 - DNA, 15 bp, Homo sapiens
aactcacttctcgcc

SEQ ID NO: 1035757 - DNA, 15 bp, Homo sapiens
gaactcacttctcgc

SEQ ID NO: 1035758 - DNA, 15 bp, Homo sapiens
agaactcacttctcg

SEQ ID NO: 1035759 - DNA, 15 bp, Homo sapiens
cagaactcacttctc

SEQ ID NO: 1035760 - DNA, 15 bp, Homo sapiens
ccagaactcacttct

SEQ ID NO: 1035761 - DNA, 15 bp, Homo sapiens
gccagaactcacttc

SEQ ID NO: 1035762 - DNA, 15 bp, Homo sapiens
agccagaactcactt

SEQ ID NO: 1035763 - DNA, 15 bp, Homo sapiens
gagccagaactcact

SEQ ID NO: 1035764 - DNA, 15 bp, Homo sapiens
tgagccagaactcac

SEQ ID NO: 1035765 - DNA, 15 bp, Homo sapiens
ctgagccagaactca

SEQ ID NO: 1035766 - DNA, 15 bp, Homo sapiens
actgagccagaactc

SEQ ID NO: 1035767 - DNA, 15 bp, Homo sapiens
aactgagccagaact

SEQ ID NO: 1035768 - DNA, 15 bp, Homo sapiens
taactgagccagaac

SEQ ID NO: 1035769 - DNA, 15 bp, Homo sapiens
ctaactgagccagaa

SEQ ID NO: 1035770 - DNA, 15 bp, Homo sapiens
gctaactgagccaga

SEQ ID NO: 1035771 - DNA, 15 bp, Homo sapiens
agctaactgagccag

SEQ ID NO: 1035772 - DNA, 15 bp, Homo sapiens
gagctaactgagcca

SEQ ID NO: 1035773 - DNA, 15 bp, Homo sapiens
cgagctaactgagcc

SEQ ID NO: 1035774 - DNA, 15 bp, Homo sapiens
gcgagctaactgagc

SEQ ID NO: 1035775 - DNA, 15 bp, Homo sapiens
ggcgagctaactgag

SEQ ID NO: 1035776 - DNA, 15 bp, Homo sapiens
aggcgagctaactga

SEQ ID NO: 1035777 - DNA, 15 bp, Homo sapiens
caggcgagctaactg

SEQ ID NO: 1035778 - DNA, 15 bp, Homo sapiens
tcaggcgagctaact

SEQ ID NO: 1035779 - DNA, 15 bp, Homo sapiens
ctcaggcgagctaac

SEQ ID NO: 1035780 - DNA, 15 bp, Homo sapiens
tctcaggcgagctaa

SEQ ID NO: 1035781 - DNA, 15 bp, Homo sapiens
atctcaggcgagcta

SEQ ID NO: 1035782 - DNA, 15 bp, Homo sapiens
gatctcaggcgagct

SEQ ID NO: 1035783 - DNA, 15 bp, Homo sapiens
agatctcaggcgagc

SEQ ID NO: 1035784 - DNA, 15 bp, Homo sapiens
cagatctcaggcgag

SEQ ID NO: 1035785 - DNA, 15 bp, Homo sapiens
ccagatctcaggcga

SEQ ID NO: 1035786 - DNA, 15 bp, Homo sapiens
accagatctcaggcg

SEQ ID NO: 1035787 - DNA, 15 bp, Homo sapiens
aaccagatctcaggc

SEQ ID NO: 1035788 - DNA, 15 bp, Homo sapiens
caaccagatctcagg

SEQ ID NO: 1035789 - DNA, 15 bp, Homo sapiens
acaaccagatctcag

SEQ ID NO: 1035790 - DNA, 15 bp, Homo sapiens
aacaaccagatctca

SEQ ID NO: 1035791 - DNA, 15 bp, Homo sapiens
taacaaccagatctc

SEQ ID NO: 1035792 - DNA, 15 bp, Homo sapiens
ttaacaaccagatct

SEQ ID NO: 1035793 - DNA, 15 bp, Homo sapiens
tttaacaaccagatc

SEQ ID NO: 1035794 - DNA, 15 bp, Homo sapiens
ttttaacaaccagat

SEQ ID NO: 1035795 - DNA, 15 bp, Homo sapiens
cttttaacaaccaga

SEQ ID NO: 1035796 - DNA, 15 bp, Homo sapiens
tcttttaacaaccag

SEQ ID NO: 1035797 - DNA, 15 bp, Homo sapiens
ctcttttaacaacca

SEQ ID NO: 1035798 - DNA, 15 bp, Homo sapiens
actcttttaacaacc

SEQ ID NO: 1035799 - DNA, 15 bp, Homo sapiens
gactcttttaacaac

SEQ ID NO: 1035800 - DNA, 15 bp, Homo sapiens
agactcttttaacaa

SEQ ID NO: 1035801 - DNA, 15 bp, Homo sapiens
cagactcttttaaca

SEQ ID NO: 1035802 - DNA, 15 bp, Homo sapiens
ccagactcttttaac

SEQ ID NO: 1035803 - DNA, 15 bp, Homo sapiens
cccagactcttttaa

SEQ ID NO: 1035804 - DNA, 15 bp, Homo sapiens
tcccagactctttta

SEQ ID NO: 1035805 - DNA, 15 bp, Homo sapiens
gtcccagactctttt

SEQ ID NO: 1035806 - DNA, 15 bp, Homo sapiens
ggtcccagactcttt

SEQ ID NO: 1035807 - DNA, 15 bp, Homo sapiens
aggtcccagactctt

SEQ ID NO: 1035808 - DNA, 15 bp, Homo sapiens
gaggtcccagactct

SEQ ID NO: 1035809 - DNA, 15 bp, Homo sapiens
ggaggtcccagactc

SEQ ID NO: 1035810 - DNA, 15 bp, Homo sapiens
aggaggtcccagact

SEQ ID NO: 1035811 - DNA, 15 bp, Homo sapiens
gaggaggtcccagac

SEQ ID NO: 1035812 - DNA, 15 bp, Homo sapiens
ggaggaggtcccaga

SEQ ID NO: 1035813 - DNA, 15 bp, Homo sapiens
aggaggaggtcccag

SEQ ID NO: 1035814 - DNA, 15 bp, Homo sapiens
aaggaggaggtccca

SEQ ID NO: 1035815 - DNA, 15 bp, Homo sapiens
gaaggaggaggtccc

SEQ ID NO: 1035816 - DNA, 15 bp, Homo sapiens
agaaggaggaggtcc

SEQ ID NO: 1035817 - DNA, 15 bp, Homo sapiens
gagaaggaggaggtc

SEQ ID NO: 1035818 - DNA, 15 bp, Homo sapiens
agagaaggaggaggt

SEQ ID NO: 1035819 - DNA, 15 bp, Homo sapiens
gagagaaggaggagg

SEQ ID NO: 1035820 - DNA, 15 bp, Homo sapiens
agagagaaggaggag

SEQ ID NO: 1035821 - DNA, 15 bp, Homo sapiens
gagagagaaggagga

SEQ ID NO: 1035822 - DNA, 15 bp, Homo sapiens
agagagagaaggagg

SEQ ID NO: 1035823 - DNA, 15 bp, Homo sapiens
aagagagagaaggag

SEQ ID NO: 1035824 - DNA, 15 bp, Homo sapiens
caagagagagaagga

SEQ ID NO: 1035825 - DNA, 15 bp, Homo sapiens
gcaagagagagaagg

SEQ ID NO: 1035826 - DNA, 15 bp, Homo sapiens
agcaagagagagaag

SEQ ID NO: 1035827 - DNA, 15 bp, Homo sapiens
gagcaagagagagaa

SEQ ID NO: 1035828 - DNA, 15 bp, Homo sapiens
ggagcaagagagaga

SEQ ID NO: 1035829 - DNA, 15 bp, Homo sapiens
gcaggagcaagagag

SEQ ID NO: 1035830 - DNA, 15 bp, Homo sapiens
agcaggagcaagaga

SEQ ID NO: 1035831 - DNA, 15 bp, Homo sapiens
gagcaggagcaagag

SEQ ID NO: 1035832 - DNA, 15 bp, Homo sapiens
agagcaggagcaaga

SEQ ID NO: 1035833 - DNA, 15 bp, Homo sapiens
aagagcaggagcaag

SEQ ID NO: 1035834 - DNA, 15 bp, Homo sapiens
caagagcaggagcaa

SEQ ID NO: 1035835 - DNA, 15 bp, Homo sapiens
gcaagagcaggagca

SEQ ID NO: 1035836 - DNA, 15 bp, Homo sapiens
agcaagagcaggagc

SEQ ID NO: 1035837 - DNA, 15 bp, Homo sapiens
tagcaagagcaggag

SEQ ID NO: 1035838 - DNA, 15 bp, Homo sapiens
atagcaagagcagga

SEQ ID NO: 1035839 - DNA, 15 bp, Homo sapiens
catagcaagagcagg

SEQ ID NO: 1035840 - DNA, 15 bp, Homo sapiens
acatagcaagagcag

SEQ ID NO: 1035841 - DNA, 15 bp, Homo sapiens
cacatagcaagagca

SEQ ID NO: 1035842 - DNA, 15 bp, Homo sapiens
tcacatagcaagagc

SEQ ID NO: 1035843 - DNA, 15 bp, Homo sapiens
gtcacatagcaagag

SEQ ID NO: 1035844 - DNA, 15 bp, Homo sapiens
tgtcacatagcaaga

SEQ ID NO: 1035845 - DNA, 15 bp, Homo sapiens
gtgtcacatagcaag

SEQ ID NO: 1035846 - DNA, 15 bp, Homo sapiens
cgtgtcacatagcaa

SEQ ID NO: 1035847 - DNA, 15 bp, Homo sapiens
gcgtgtcacatagca

SEQ ID NO: 1035848 - DNA, 15 bp, Homo sapiens
agcgtgtcacatagc

SEQ ID NO: 1035849 - DNA, 15 bp, Homo sapiens
cagcgtgtcacatag

SEQ ID NO: 1035850 - DNA, 15 bp, Homo sapiens
ccagcgtgtcacata

SEQ ID NO: 1035851 - DNA, 15 bp, Homo sapiens
gccagcgtgtcacat

SEQ ID NO: 1035852 - DNA, 15 bp, Homo sapiens
agccagcgtgtcaca

SEQ ID NO: 1035853 - DNA, 15 bp, Homo sapiens
gagccagcgtgtcac

SEQ ID NO: 1035854 - DNA, 15 bp, Homo sapiens
ggagccagcgtgtca

SEQ ID NO: 1035855 - DNA, 15 bp, Homo sapiens
gggagccagcgtgtc

SEQ ID NO: 1035856 - DNA, 15 bp, Homo sapiens
ggggagccagcgtgt

SEQ ID NO: 1035857 - DNA, 15 bp, Homo sapiens
tggggagccagcgtg

SEQ ID NO: 1035858 - DNA, 15 bp, Homo sapiens
atggggagccagcgt

SEQ ID NO: 1035859 - DNA, 15 bp, Homo sapiens
aatggggagccagcg

SEQ ID NO: 1035860 - DNA, 15 bp, Homo sapiens
gaatggggagccagc

SEQ ID NO: 1035861 - DNA, 15 bp, Homo sapiens
tgaatggggagccag

SEQ ID NO: 1035862 - DNA, 15 bp, Homo sapiens
gtgaatggggagcca

SEQ ID NO: 1035863 - DNA, 15 bp, Homo sapiens
agtgaatggggagcc

SEQ ID NO: 1035864 - DNA, 15 bp, Homo sapiens
aagtgaatggggagc

SEQ ID NO: 1035865 - DNA, 15 bp, Homo sapiens
aaagtgaatggggag

SEQ ID NO: 1035866 - DNA, 15 bp, Homo sapiens
gaaagtgaatgggga

SEQ ID NO: 1035867 - DNA, 15 bp, Homo sapiens
ggaaagtgaatgggg

SEQ ID NO: 1035868 - DNA, 15 bp, Homo sapiens
tggaaagtgaatggg

SEQ ID NO: 1035869 - DNA, 15 bp, Homo sapiens
gtggaaagtgaatgg

SEQ ID NO: 1035870 - DNA, 15 bp, Homo sapiens
ggtggaaagtgaatg

SEQ ID NO: 1035871 - DNA, 15 bp, Homo sapiens
tggtggaaagtgaat

SEQ ID NO: 1035872 - DNA, 15 bp, Homo sapiens
gtggtggaaagtgaa

SEQ ID NO: 1035873 - DNA, 15 bp, Homo sapiens
tgtggtggaaagtga

SEQ ID NO: 1035874 - DNA, 15 bp, Homo sapiens
ttgtggtggaaagtg

SEQ ID NO: 1035875 - DNA, 15 bp, Homo sapiens
attgtggtggaaagt

SEQ ID NO: 1035876 - DNA, 15 bp, Homo sapiens
aattgtggtggaaag

SEQ ID NO: 1035877 - DNA, 15 bp, Homo sapiens
caattgtggtggaaa

SEQ ID NO: 1035878 - DNA, 15 bp, Homo sapiens
acaattgtggtggaa

SEQ ID NO: 1035879 - DNA, 15 bp, Homo sapiens
tacaattgtggtgga

SEQ ID NO: 1035880 - DNA, 15 bp, Homo sapiens
atacaattgtggtgg

SEQ ID NO: 1035881 - DNA, 15 bp, Homo sapiens
catacaattgtggtg

SEQ ID NO: 1035882 - DNA, 15 bp, Homo sapiens
gcatacaattgtggt

SEQ ID NO: 1035883 - DNA, 15 bp, Homo sapiens
agcatacaattgtgg

SEQ ID NO: 1035884 - DNA, 15 bp, Homo sapiens
aagcatacaattgtg

SEQ ID NO: 1035885 - DNA, 15 bp, Homo sapiens
aaagcatacaattgt

SEQ ID NO: 1035886 - DNA, 15 bp, Homo sapiens
gaaagcatacaattg

SEQ ID NO: 1035887 - DNA, 15 bp, Homo sapiens
agaaagcatacaatt

SEQ ID NO: 1035888 - DNA, 15 bp, Homo sapiens
cagaaagcatacaat

SEQ ID NO: 1035889 - DNA, 15 bp, Homo sapiens
tcagaaagcatacaa

SEQ ID NO: 1035890 - DNA, 15 bp, Homo sapiens
ctcagaaagcataca

SEQ ID NO: 1035891 - DNA, 15 bp, Homo sapiens
cctcagaaagcatac

SEQ ID NO: 1035892 - DNA, 15 bp, Homo sapiens
gcctcagaaagcata

SEQ ID NO: 1035893 - DNA, 15 bp, Homo sapiens
ggcctcagaaagcat

SEQ ID NO: 1035894 - DNA, 15 bp, Homo sapiens
aggcctcagaaagca

SEQ ID NO: 1035895 - DNA, 15 bp, Homo sapiens
gaggcctcagaaagc

SEQ ID NO: 1035896 - DNA, 15 bp, Homo sapiens
tgaggcctcagaaag

SEQ ID NO: 1035897 - DNA, 15 bp, Homo sapiens
atgaggcctcagaaa

SEQ ID NO: 1035898 - DNA, 15 bp, Homo sapiens
gatgaggcctcagaa

SEQ ID NO: 1035899 - DNA, 15 bp, Homo sapiens
tgatgaggcctcaga

SEQ ID NO: 1035900 - DNA, 15 bp, Homo sapiens
ctgatgaggcctcag

SEQ ID NO: 1035901 - DNA, 15 bp, Homo sapiens
tctgatgaggcctca

SEQ ID NO: 1035902 - DNA, 15 bp, Homo sapiens
ttctgatgaggcctc

SEQ ID NO: 1035903 - DNA, 15 bp, Homo sapiens
cttctgatgaggcct

SEQ ID NO: 1035904 - DNA, 15 bp, Homo sapiens
gcttctgatgaggcc

SEQ ID NO: 1035905 - DNA, 15 bp, Homo sapiens
tgcttctgatgaggc

SEQ ID NO: 1035906 - DNA, 15 bp, Homo sapiens
ctgcttctgatgagg

SEQ ID NO: 1035907 - DNA, 15 bp, Homo sapiens
tctgcttctgatgag

SEQ ID NO: 1035908 - DNA, 15 bp, Homo sapiens
atctgcttctgatga

SEQ ID NO: 1035909 - DNA, 15 bp, Homo sapiens
catctgcttctgatg

SEQ ID NO: 1035910 - DNA, 15 bp, Homo sapiens
gcatctgcttctgat

SEQ ID NO: 1035911 - DNA, 15 bp, Homo sapiens
agcatctgcttctga

SEQ ID NO: 1035912 - DNA, 15 bp, Homo sapiens
cagcatctgcttctg

SEQ ID NO: 1035913 - DNA, 15 bp, Homo sapiens
ccagcatctgcttct

SEQ ID NO: 1035914 - DNA, 15 bp, Homo sapiens
gccagcatctgcttc

SEQ ID NO: 1035915 - DNA, 15 bp, Homo sapiens
tgccagcatctgctt

SEQ ID NO: 1035916 - DNA, 15 bp, Homo sapiens
gtgccagcatctgct

SEQ ID NO: 1035917 - DNA, 15 bp, Homo sapiens
ggtgccagcatctgc

SEQ ID NO: 1035918 - DNA, 15 bp, Homo sapiens
tggtgccagcatctg

SEQ ID NO: 1035919 - DNA, 15 bp, Homo sapiens
atggtgccagcatct

SEQ ID NO: 1035920 - DNA, 15 bp, Homo sapiens
catggtgccagcatc

SEQ ID NO: 1035921 - DNA, 15 bp, Homo sapiens
gcatggtgccagcat

SEQ ID NO: 1035922 - DNA, 15 bp, Homo sapiens
agcatggtgccagca

SEQ ID NO: 1035923 - DNA, 15 bp, Homo sapiens
aagcatggtgccagc

SEQ ID NO: 1035924 - DNA, 15 bp, Homo sapiens
aaagcatggtgccag

SEQ ID NO: 1035925 - DNA, 15 bp, Homo sapiens
gaaagcatggtgcca

SEQ ID NO: 1035926 - DNA, 15 bp, Homo sapiens
agaaagcatggtgcc

SEQ ID NO: 1035927 - DNA, 15 bp, Homo sapiens
cagaaagcatggtgc

SEQ ID NO: 1035928 - DNA, 15 bp, Homo sapiens
acagaaagcatggtg

SEQ ID NO: 1035929 - DNA, 15 bp, Homo sapiens
tacagaaagcatggt

SEQ ID NO: 1035930 - DNA, 15 bp, Homo sapiens
gtacagaaagcatgg

SEQ ID NO: 1035931 - DNA, 15 bp, Homo sapiens
tgtacagaaagcatg

SEQ ID NO: 1035932 - DNA, 15 bp, Homo sapiens
ctgtacagaaagcat

SEQ ID NO: 1035933 - DNA, 15 bp, Homo sapiens
gctgtacagaaagca

SEQ ID NO: 1035934 - DNA, 15 bp, Homo sapiens
ggctgtacagaaagc

SEQ ID NO: 1035935 - DNA, 15 bp, Homo sapiens
aggctgtacagaaag

SEQ ID NO: 1035936 - DNA, 15 bp, Homo sapiens
caggctgtacagaaa

SEQ ID NO: 1035937 - DNA, 15 bp, Homo sapiens
gcaggctgtacagaa

SEQ ID NO: 1035938 - DNA, 15 bp, Homo sapiens
tgcaggctgtacaga

SEQ ID NO: 1035939 - DNA, 15 bp, Homo sapiens
ctgcaggctgtacag

SEQ ID NO: 1035940 - DNA, 15 bp, Homo sapiens
tctgcaggctgtaca

SEQ ID NO: 1035941 - DNA, 15 bp, Homo sapiens
ttctgcaggctgtac

SEQ ID NO: 1035942 - DNA, 15 bp, Homo sapiens
gttctgcaggctgta

SEQ ID NO: 1035943 - DNA, 15 bp, Homo sapiens
ggttctgcaggctgt

SEQ ID NO: 1035944 - DNA, 15 bp, Homo sapiens
tggttctgcaggctg

SEQ ID NO: 1035945 - DNA, 15 bp, Homo sapiens
atggttctgcaggct

SEQ ID NO: 1035946 - DNA, 15 bp, Homo sapiens
catggttctgcaggc

SEQ ID NO: 1035947 - DNA, 15 bp, Homo sapiens
tcatggttctgcagg

SEQ ID NO: 1035948 - DNA, 15 bp, Homo sapiens
ctcatggttctgcag

SEQ ID NO: 1035949 - DNA, 15 bp, Homo sapiens
gctcatggttctgca

SEQ ID NO: 1035950 - DNA, 15 bp, Homo sapiens
tgctcatggttctgc

SEQ ID NO: 1035951 - DNA, 15 bp, Homo sapiens
gtgctcatggttctg

SEQ ID NO: 1035952 - DNA, 15 bp, Homo sapiens
ggtgctcatggttct

SEQ ID NO: 1035953 - DNA, 15 bp, Homo sapiens
tggtgctcatggttc

SEQ ID NO: 1035954 - DNA, 15 bp, Homo sapiens
atggtgctcatggtt

SEQ ID NO: 1035955 - DNA, 15 bp, Homo sapiens
catggtgctcatggt

SEQ ID NO: 1035956 - DNA, 15 bp, Homo sapiens
tcatggtgctcatgg

SEQ ID NO: 1035957 - DNA, 15 bp, Homo sapiens
ctcatggtgctcatg

SEQ ID NO: 1035958 - DNA, 15 bp, Homo sapiens
gctcatggtgctcat

SEQ ID NO: 1035959 - DNA, 15 bp, Homo sapiens
ggctcatggtgctca

SEQ ID NO: 1035960 - DNA, 15 bp, Homo sapiens
tggctcatggtgctc

SEQ ID NO: 1035961 - DNA, 15 bp, Homo sapiens
ttggctcatggtgct

SEQ ID NO: 1035962 - DNA, 15 bp, Homo sapiens
tttggctcatggtgc

SEQ ID NO: 1035963 - DNA, 15 bp, Homo sapiens
atttggctcatggtg

SEQ ID NO: 1035964 - DNA, 15 bp, Homo sapiens
tatttggctcatggt

SEQ ID NO: 1035965 - DNA, 15 bp, Homo sapiens
ttatttggctcatgg

SEQ ID NO: 1035966 - DNA, 15 bp, Homo sapiens
tttatttggctcatg

SEQ ID NO: 1035967 - DNA, 15 bp, Homo sapiens
gtttatttggctcat

SEQ ID NO: 1035968 - DNA, 15 bp, Homo sapiens
ggtttatttggctca

SEQ ID NO: 1035969 - DNA, 15 bp, Homo sapiens
aggtttatttggctc

SEQ ID NO: 1035970 - DNA, 15 bp, Homo sapiens
gaggtttatttggct

SEQ ID NO: 1035971 - DNA, 15 bp, Homo sapiens
agaggtttatttggc

SEQ ID NO: 1035972 - DNA, 15 bp, Homo sapiens
aagaggtttatttgg

SEQ ID NO: 1035973 - DNA, 15 bp, Homo sapiens
aaagaggtttatttg

SEQ ID NO: 1035974 - DNA, 15 bp, Homo sapiens
aaaagaggtttattt

SEQ ID NO: 1035975 - DNA, 15 bp, Homo sapiens
gaaaagaggtttatt

SEQ ID NO: 1035976 - DNA, 15 bp, Homo sapiens
agaaaagaggtttat

SEQ ID NO: 1035977 - DNA, 15 bp, Homo sapiens
aagaaaagaggttta

SEQ ID NO: 1035978 - DNA, 15 bp, Homo sapiens
aaagaaaagaggttt

SEQ ID NO: 1035979 - DNA, 15 bp, Homo sapiens
taaagaaaagaggtt

SEQ ID NO: 1035980 - DNA, 15 bp, Homo sapiens
ataaagaaaagaggt

SEQ ID NO: 1035981 - DNA, 15 bp, Homo sapiens
tataaagaaaagagg

SEQ ID NO: 1035982 - DNA, 15 bp, Homo sapiens
ttataaagaaaagag

SEQ ID NO: 1035983 - DNA, 15 bp, Homo sapiens
tttataaagaaaaga

SEQ ID NO: 1035984 - DNA, 15 bp, Homo sapiens
gctaggtaatttata

SEQ ID NO: 1035985 - DNA, 15 bp, Homo sapiens
ggctaggtaatttat

SEQ ID NO: 1035986 - DNA, 15 bp, Homo sapiens
aggctaggtaattta

SEQ ID NO: 1035987 - DNA, 15 bp, Homo sapiens
gaggctaggtaattt

SEQ ID NO: 1035988 - DNA, 15 bp, Homo sapiens
tgaggctaggtaatt

SEQ ID NO: 1035989 - DNA, 15 bp, Homo sapiens
ctgaggctaggtaat

SEQ ID NO: 1035990 - DNA, 15 bp, Homo sapiens
tctgaggctaggtaa

SEQ ID NO: 1035991 - DNA, 15 bp, Homo sapiens
atctgaggctaggta

SEQ ID NO: 1035992 - DNA, 15 bp, Homo sapiens
tatctgaggctaggt

SEQ ID NO: 1035993 - DNA, 15 bp, Homo sapiens
atatctgaggctagg

SEQ ID NO: 1035994 - DNA, 15 bp, Homo sapiens
aatatctgaggctag

SEQ ID NO: 1035995 - DNA, 15 bp, Homo sapiens
gaatatctgaggcta

SEQ ID NO: 1035996 - DNA, 15 bp, Homo sapiens
ggaatatctgaggct

SEQ ID NO: 1035997 - DNA, 15 bp, Homo sapiens
cggaatatctgaggc

SEQ ID NO: 1035998 - DNA, 15 bp, Homo sapiens
acggaatatctgagg

SEQ ID NO: 1035999 - DNA, 15 bp, Homo sapiens
aacggaatatctgag

SEQ ID NO: 1036000 - DNA, 15 bp, Homo sapiens
taacggaatatctga

SEQ ID NO: 1036001 - DNA, 15 bp, Homo sapiens
ataacggaatatctg

SEQ ID NO: 1036002 - DNA, 15 bp, Homo sapiens
tataacggaatatct

SEQ ID NO: 1036003 - DNA, 15 bp, Homo sapiens
ctataacggaatatc

SEQ ID NO: 1036004 - DNA, 15 bp, Homo sapiens
gctataacggaatat

SEQ ID NO: 1036005 - DNA, 15 bp, Homo sapiens
agctataacggaata

SEQ ID NO: 1036006 - DNA, 15 bp, Homo sapiens
tagctataacggaat

SEQ ID NO: 1036007 - DNA, 15 bp, Homo sapiens
gtagctataacggaa

SEQ ID NO: 1036008 - DNA, 15 bp, Homo sapiens
tgtagctataacgga

SEQ ID NO: 1036009 - DNA, 15 bp, Homo sapiens
ctgtagctataacgg

SEQ ID NO: 1036010 - DNA, 15 bp, Homo sapiens
tctgtagctataacg

SEQ ID NO: 1036011 - DNA, 15 bp, Homo sapiens
ttctgtagctataac

SEQ ID NO: 1036012 - DNA, 15 bp, Homo sapiens
tttctgtagctataa

SEQ ID NO: 1036013 - DNA, 15 bp, Homo sapiens
ttttctgtagctata

SEQ ID NO: 1036014 - DNA, 15 bp, Homo sapiens
attttctgtagctat

SEQ ID NO: 1036015 - DNA, 15 bp, Homo sapiens
cattttctgtagcta

SEQ ID NO: 1036016 - DNA, 15 bp, Homo sapiens
ccattttctgtagct

SEQ ID NO: 1036017 - DNA, 15 bp, Homo sapiens
tccattttctgtagc

SEQ ID NO: 1036018 - DNA, 15 bp, Homo sapiens
atccattttctgtag

SEQ ID NO: 1036019 - DNA, 15 bp, Homo sapiens
aatccattttctgta

SEQ ID NO: 1036020 - DNA, 15 bp, Homo sapiens
taatccattttctgt

SEQ ID NO: 1036021 - DNA, 15 bp, Homo sapiens
ttaatccattttctg

SEQ ID NO: 1036022 - DNA, 15 bp, Homo sapiens
cttaatccattttct

SEQ ID NO: 1036023 - DNA, 15 bp, Homo sapiens
gcttaatccattttc

SEQ ID NO: 1036024 - DNA, 15 bp, Homo sapiens
agcttaatccatttt

SEQ ID NO: 1036025 - DNA, 15 bp, Homo sapiens
tagcttaatccattt

SEQ ID NO: 1036026 - DNA, 15 bp, Homo sapiens
ctagcttaatccatt

SEQ ID NO: 1036027 - DNA, 15 bp, Homo sapiens
actagcttaatccat

SEQ ID NO: 1036028 - DNA, 15 bp, Homo sapiens
cactagcttaatcca

SEQ ID NO: 1036029 - DNA, 15 bp, Homo sapiens
gcactagcttaatcc

SEQ ID NO: 1036030 - DNA, 15 bp, Homo sapiens
agcactagcttaatc

SEQ ID NO: 1036031 - DNA, 15 bp, Homo sapiens
cagcactagcttaat

SEQ ID NO: 1036032 - DNA, 15 bp, Homo sapiens
acagcactagcttaa

SEQ ID NO: 1036033 - DNA, 15 bp, Homo sapiens
aacagcactagctta

SEQ ID NO: 1036034 - DNA, 15 bp, Homo sapiens
gaacagcactagctt

SEQ ID NO: 1036035 - DNA, 15 bp, Homo sapiens
agaacagcactagct

SEQ ID NO: 1036036 - DNA, 15 bp, Homo sapiens
tagaacagcactagc

SEQ ID NO: 1036037 - DNA, 15 bp, Homo sapiens
atagaacagcactag

SEQ ID NO: 1036038 - DNA, 15 bp, Homo sapiens
catagaacagcacta

SEQ ID NO: 1036039 - DNA, 15 bp, Homo sapiens
ccatagaacagcact

SEQ ID NO: 1036040 - DNA, 15 bp, Homo sapiens
accatagaacagcac

SEQ ID NO: 1036041 - DNA, 15 bp, Homo sapiens
taccatagaacagca

SEQ ID NO: 1036042 - DNA, 15 bp, Homo sapiens
gtaccatagaacagc

SEQ ID NO: 1036043 - DNA, 15 bp, Homo sapiens
tgtaccatagaacag

SEQ ID NO: 1036044 - DNA, 15 bp, Homo sapiens
gtgtaccatagaaca

SEQ ID NO: 1036045 - DNA, 15 bp, Homo sapiens
agtgtaccatagaac

SEQ ID NO: 1036046 - DNA, 15 bp, Homo sapiens
cagtgtaccatagaa

SEQ ID NO: 1036047 - DNA, 15 bp, Homo sapiens
acagtgtaccataga

SEQ ID NO: 1036048 - DNA, 15 bp, Homo sapiens
tacagtgtaccatag

SEQ ID NO: 1036049 - DNA, 15 bp, Homo sapiens
atacagtgtaccata

SEQ ID NO: 1036050 - DNA, 15 bp, Homo sapiens
aatacagtgtaccat

SEQ ID NO: 1036051 - DNA, 15 bp, Homo sapiens
taatacagtgtacca

SEQ ID NO: 1036052 - DNA, 15 bp, Homo sapiens
ctaatacagtgtacc

SEQ ID NO: 1036053 - DNA, 15 bp, Homo sapiens
actaatacagtgtac

SEQ ID NO: 1036054 - DNA, 15 bp, Homo sapiens
gactaatacagtgta

SEQ ID NO: 1036055 - DNA, 15 bp, Homo sapiens
agactaatacagtgt

SEQ ID NO: 1036056 - DNA, 15 bp, Homo sapiens
cagactaatacagtg

SEQ ID NO: 1036057 - DNA, 15 bp, Homo sapiens
acagactaatacagt

SEQ ID NO: 1036058 - DNA, 15 bp, Homo sapiens
aacagactaatacag

SEQ ID NO: 1036059 - DNA, 15 bp, Homo sapiens
aaacagactaataca

SEQ ID NO: 1036060 - DNA, 15 bp, Homo sapiens
aaaacagactaatac

SEQ ID NO: 1036061 - DNA, 15 bp, Homo sapiens
gaaaacagactaata

SEQ ID NO: 1036062 - DNA, 15 bp, Homo sapiens
tgaaaacagactaat

SEQ ID NO: 1036063 - DNA, 15 bp, Homo sapiens
gtgaaaacagactaa

SEQ ID NO: 1036064 - DNA, 15 bp, Homo sapiens
tgtgaaaacagacta

SEQ ID NO: 1036065 - DNA, 15 bp, Homo sapiens
atgtgaaaacagact

SEQ ID NO: 1036066 - DNA, 15 bp, Homo sapiens
aatgtgaaaacagac

SEQ ID NO: 1036067 - DNA, 15 bp, Homo sapiens
caatgtgaaaacaga

SEQ ID NO: 1036068 - DNA, 15 bp, Homo sapiens
gcaatgtgaaaacag

SEQ ID NO: 1036069 - DNA, 15 bp, Homo sapiens
agcaatgtgaaaaca

SEQ ID NO: 1036070 - DNA, 15 bp, Homo sapiens
cagcaatgtgaaaac

SEQ ID NO: 1036071 - DNA, 15 bp, Homo sapiens
ccagcaatgtgaaaa

SEQ ID NO: 1036072 - DNA, 15 bp, Homo sapiens
accagcaatgtgaaa

SEQ ID NO: 1036073 - DNA, 15 bp, Homo sapiens
taccagcaatgtgaa

SEQ ID NO: 1036074 - DNA, 15 bp, Homo sapiens
ttaccagcaatgtga

SEQ ID NO: 1036075 - DNA, 15 bp, Homo sapiens
tttaccagcaatgtg

SEQ ID NO: 1036076 - DNA, 15 bp, Homo sapiens
ctttaccagcaatgt

SEQ ID NO: 1036077 - DNA, 15 bp, Homo sapiens
tctttaccagcaatg

SEQ ID NO: 1036078 - DNA, 15 bp, Homo sapiens
atctttaccagcaat

SEQ ID NO: 1036079 - DNA, 15 bp, Homo sapiens
tatctttaccagcaa

SEQ ID NO: 1036080 - DNA, 15 bp, Homo sapiens
atatctttaccagca

SEQ ID NO: 1036081 - DNA, 15 bp, Homo sapiens
tatatctttaccagc

SEQ ID NO: 1036082 - DNA, 15 bp, Homo sapiens
gtatatctttaccag

SEQ ID NO: 1036083 - DNA, 15 bp, Homo sapiens
ggtatatctttacca

SEQ ID NO: 1036084 - DNA, 15 bp, Homo sapiens
gggtatatctttacc

SEQ ID NO: 1036085 - DNA, 15 bp, Homo sapiens
cgggtatatctttac

SEQ ID NO: 1036086 - DNA, 15 bp, Homo sapiens
tcgggtatatcttta

SEQ ID NO: 1036087 - DNA, 15 bp, Homo sapiens
ctcgggtatatcttt

SEQ ID NO: 1036088 - DNA, 15 bp, Homo sapiens
tctcgggtatatctt

SEQ ID NO: 1036089 - DNA, 15 bp, Homo sapiens
atctcgggtatatct

SEQ ID NO: 1036090 - DNA, 15 bp, Homo sapiens
catctcgggtatatc

SEQ ID NO: 1036091 - DNA, 15 bp, Homo sapiens
ccatctcgggtatat

SEQ ID NO: 1036092 - DNA, 15 bp, Homo sapiens
cccatctcgggtata

SEQ ID NO: 1036093 - DNA, 15 bp, Homo sapiens
ccccatctcgggtat

SEQ ID NO: 1036094 - DNA, 15 bp, Homo sapiens
gccccatctcgggta

SEQ ID NO: 1036095 - DNA, 15 bp, Homo sapiens
tgccccatctcgggt

SEQ ID NO: 1036096 - DNA, 15 bp, Homo sapiens
ttgccccatctcggg

SEQ ID NO: 1036097 - DNA, 15 bp, Homo sapiens
attgccccatctcgg

SEQ ID NO: 1036098 - DNA, 15 bp, Homo sapiens
aattgccccatctcg

SEQ ID NO: 1036099 - DNA, 15 bp, Homo sapiens
aaattgccccatctc

SEQ ID NO: 1036100 - DNA, 15 bp, Homo sapiens
taaattgccccatct

SEQ ID NO: 1036101 - DNA, 15 bp, Homo sapiens
ataaattgccccatc

SEQ ID NO: 1036102 - DNA, 15 bp, Homo sapiens
tataaattgccccat

SEQ ID NO: 1036103 - DNA, 15 bp, Homo sapiens
ttataaattgcccca

SEQ ID NO: 1036104 - DNA, 15 bp, Homo sapiens
tttataaattgcccc

SEQ ID NO: 1036105 - DNA, 15 bp, Homo sapiens
ttttataaattgccc

SEQ ID NO: 1036106 - DNA, 15 bp, Homo sapiens
cttttataaattgcc

SEQ ID NO: 1036107 - DNA, 15 bp, Homo sapiens
tcttttataaattgc

SEQ ID NO: 1036108 - DNA, 15 bp, Homo sapiens
ttcttttataaattg

SEQ ID NO: 1036109 - DNA, 15 bp, Homo sapiens
tttcttttataaatt

SEQ ID NO: 1036110 - DNA, 15 bp, Homo sapiens
ctttcttttataaat

SEQ ID NO: 1036111 - DNA, 15 bp, Homo sapiens
tctttcttttataaa

SEQ ID NO: 1036112 - DNA, 15 bp, Homo sapiens
ttctttcttttataa

SEQ ID NO: 1036113 - DNA, 15 bp, Homo sapiens
tttctttcttttata

SEQ ID NO: 1036114 - DNA, 15 bp, Homo sapiens
ctttctttcttttat

SEQ ID NO: 1036115 - DNA, 15 bp, Homo sapiens
tctttctttctttta

SEQ ID NO: 1036116 - DNA, 15 bp, Homo sapiens
ctctttctttctttt

SEQ ID NO: 1036117 - DNA, 15 bp, Homo sapiens
cctctttctttcttt

SEQ ID NO: 1036118 - DNA, 15 bp, Homo sapiens
acctctttctttctt

SEQ ID NO: 1036119 - DNA, 15 bp, Homo sapiens
aacctctttctttct

SEQ ID NO: 1036120 - DNA, 15 bp, Homo sapiens
aaacctctttctttc

SEQ ID NO: 1036121 - DNA, 15 bp, Homo sapiens
taaacctctttcttt

SEQ ID NO: 1036122 - DNA, 15 bp, Homo sapiens
ataaacctctttctt

SEQ ID NO: 1036123 - DNA, 15 bp, Homo sapiens
aataaacctctttct

SEQ ID NO: 1036124 - DNA, 15 bp, Homo sapiens
caataaacctctttc

SEQ ID NO: 1036125 - DNA, 15 bp, Homo sapiens
ccaataaacctcttt

SEQ ID NO: 1036126 - DNA, 15 bp, Homo sapiens
tccaataaacctctt

SEQ ID NO: 1036127 - DNA, 15 bp, Homo sapiens
gtccaataaacctct

SEQ ID NO: 1036128 - DNA, 15 bp, Homo sapiens
agtccaataaacctc

SEQ ID NO: 1036129 - DNA, 15 bp, Homo sapiens
aagtccaataaacct

SEQ ID NO: 1036130 - DNA, 15 bp, Homo sapiens
taagtccaataaacc

SEQ ID NO: 1036131 - DNA, 15 bp, Homo sapiens
gtaagtccaataaac

SEQ ID NO: 1036132 - DNA, 15 bp, Homo sapiens
tgtaagtccaataaa

SEQ ID NO: 1036133 - DNA, 15 bp, Homo sapiens
ctgtaagtccaataa

SEQ ID NO: 1036134 - DNA, 15 bp, Homo sapiens
actgtaagtccaata

SEQ ID NO: 1036135 - DNA, 15 bp, Homo sapiens
aactgtaagtccaat

SEQ ID NO: 1036136 - DNA, 15 bp, Homo sapiens
gaactgtaagtccaa

SEQ ID NO: 1036137 - DNA, 15 bp, Homo sapiens
ggaactgtaagtcca

SEQ ID NO: 1036138 - DNA, 15 bp, Homo sapiens
tggaactgtaagtcc

SEQ ID NO: 1036139 - DNA, 15 bp, Homo sapiens
gtggaactgtaagtc

SEQ ID NO: 1036140 - DNA, 15 bp, Homo sapiens
tgtggaactgtaagt

SEQ ID NO: 1036141 - DNA, 15 bp, Homo sapiens
atgtggaactgtaag

SEQ ID NO: 1036142 - DNA, 15 bp, Homo sapiens
catgtggaactgtaa

SEQ ID NO: 1036143 - DNA, 15 bp, Homo sapiens
ccatgtggaactgta

SEQ ID NO: 1036144 - DNA, 15 bp, Homo sapiens
gccatgtggaactgt

SEQ ID NO: 1036145 - DNA, 15 bp, Homo sapiens
agccatgtggaactg

SEQ ID NO: 1036146 - DNA, 15 bp, Homo sapiens
tagccatgtggaact

SEQ ID NO: 1036147 - DNA, 15 bp, Homo sapiens
ctagccatgtggaac

SEQ ID NO: 1036148 - DNA, 15 bp, Homo sapiens
cctagccatgtggaa

SEQ ID NO: 1036149 - DNA, 15 bp, Homo sapiens
ccctagccatgtgga

SEQ ID NO: 1036150 - DNA, 15 bp, Homo sapiens
tccctagccatgtgg

SEQ ID NO: 1036151 - DNA, 15 bp, Homo sapiens
ctccctagccatgtg

SEQ ID NO: 1036152 - DNA, 15 bp, Homo sapiens
cctccctagccatgt

SEQ ID NO: 1036153 - DNA, 15 bp, Homo sapiens
gcctccctagccatg

SEQ ID NO: 1036154 - DNA, 15 bp, Homo sapiens
agcctccctagccat

SEQ ID NO: 1036155 - DNA, 15 bp, Homo sapiens
aagcctccctagcca

SEQ ID NO: 1036156 - DNA, 15 bp, Homo sapiens
gaagcctccctagcc

SEQ ID NO: 1036157 - DNA, 15 bp, Homo sapiens
tgaagcctccctagc

SEQ ID NO: 1036158 - DNA, 15 bp, Homo sapiens
gtgaagcctccctag

SEQ ID NO: 1036159 - DNA, 15 bp, Homo sapiens
tgtgaagcctcccta

SEQ ID NO: 1036160 - DNA, 15 bp, Homo sapiens
ttgtgaagcctccct

SEQ ID NO: 1036161 - DNA, 15 bp, Homo sapiens
attgtgaagcctccc

SEQ ID NO: 1036162 - DNA, 15 bp, Homo sapiens
gattgtgaagcctcc

SEQ ID NO: 1036163 - DNA, 15 bp, Homo sapiens
tgattgtgaagcctc

SEQ ID NO: 1036164 - DNA, 15 bp, Homo sapiens
atgattgtgaagcct

SEQ ID NO: 1036165 - DNA, 15 bp, Homo sapiens
catgattgtgaagcc

SEQ ID NO: 1036166 - DNA, 15 bp, Homo sapiens
ccatgattgtgaagc

SEQ ID NO: 1036167 - DNA, 15 bp, Homo sapiens
gccatgattgtgaag

SEQ ID NO: 1036168 - DNA, 15 bp, Homo sapiens
cgccatgattgtgaa

SEQ ID NO: 1036169 - DNA, 15 bp, Homo sapiens
ccgccatgattgtga

SEQ ID NO: 1036170 - DNA, 15 bp, Homo sapiens
tccgccatgattgtg

SEQ ID NO: 1036171 - DNA, 15 bp, Homo sapiens
ttccgccatgattgt

SEQ ID NO: 1036172 - DNA, 15 bp, Homo sapiens
ttgccttccgccatg

SEQ ID NO: 1036173 - DNA, 15 bp, Homo sapiens
cttgccttccgccat

SEQ ID NO: 1036174 - DNA, 15 bp, Homo sapiens
ccttgccttccgcca

SEQ ID NO: 1036175 - DNA, 15 bp, Homo sapiens
tccttgccttccgcc

SEQ ID NO: 1036176 - DNA, 15 bp, Homo sapiens
ctccttgccttccgc

SEQ ID NO: 1036177 - DNA, 15 bp, Homo sapiens
cctccttgccttccg

SEQ ID NO: 1036178 - DNA, 15 bp, Homo sapiens
tcctccttgccttcc

SEQ ID NO: 1036179 - DNA, 15 bp, Homo sapiens
ctcctccttgccttc

SEQ ID NO: 1036180 - DNA, 15 bp, Homo sapiens
tctcctccttgcctt

SEQ ID NO: 1036181 - DNA, 15 bp, Homo sapiens
ttctcctccttgcct

SEQ ID NO: 1036182 - DNA, 15 bp, Homo sapiens
tttctcctccttgcc

SEQ ID NO: 1036183 - DNA, 15 bp, Homo sapiens
ctttctcctccttgc

SEQ ID NO: 1036184 - DNA, 15 bp, Homo sapiens
actttctcctccttg

SEQ ID NO: 1036185 - DNA, 15 bp, Homo sapiens
gactttctcctcctt

SEQ ID NO: 1036186 - DNA, 15 bp, Homo sapiens
tgactttctcctcct

SEQ ID NO: 1036187 - DNA, 15 bp, Homo sapiens
gtgactttctcctcc

SEQ ID NO: 1036188 - DNA, 15 bp, Homo sapiens
tgtgactttctcctc

SEQ ID NO: 1036189 - DNA, 15 bp, Homo sapiens
gtgtgactttctcct

SEQ ID NO: 1036190 - DNA, 15 bp, Homo sapiens
ggtgtgactttctcc

SEQ ID NO: 1036191 - DNA, 15 bp, Homo sapiens
aggtgtgactttctc

SEQ ID NO: 1036192 - DNA, 15 bp, Homo sapiens
aaggtgtgactttct

SEQ ID NO: 1036193 - DNA, 15 bp, Homo sapiens
taaggtgtgactttc

SEQ ID NO: 1036194 - DNA, 15 bp, Homo sapiens
gtaaggtgtgacttt

SEQ ID NO: 1036195 - DNA, 15 bp, Homo sapiens
tgtaaggtgtgactt

SEQ ID NO: 1036196 - DNA, 15 bp, Homo sapiens
gtgtaaggtgtgact

SEQ ID NO: 1036197 - DNA, 15 bp, Homo sapiens
cgtgtaaggtgtgac

SEQ ID NO: 1036198 - DNA, 15 bp, Homo sapiens
ccgtgtaaggtgtga

SEQ ID NO: 1036199 - DNA, 15 bp, Homo sapiens
tccgtgtaaggtgtg

SEQ ID NO: 1036200 - DNA, 15 bp, Homo sapiens
atccgtgtaaggtgt

SEQ ID NO: 1036201 - DNA, 15 bp, Homo sapiens
catccgtgtaaggtg

SEQ ID NO: 1036202 - DNA, 15 bp, Homo sapiens
ccatccgtgtaaggt

SEQ ID NO: 1036203 - DNA, 15 bp, Homo sapiens
gccatccgtgtaagg

SEQ ID NO: 1036204 - DNA, 15 bp, Homo sapiens
tgccatccgtgtaag

SEQ ID NO: 1036205 - DNA, 15 bp, Homo sapiens
ctgccatccgtgtaa

SEQ ID NO: 1036206 - DNA, 15 bp, Homo sapiens
gctgccatccgtgta

SEQ ID NO: 1036207 - DNA, 15 bp, Homo sapiens
tgctgccatccgtgt

SEQ ID NO: 1036208 - DNA, 15 bp, Homo sapiens
ctgctgccatccgtg

SEQ ID NO: 1036209 - DNA, 15 bp, Homo sapiens
cctgctgccatccgt

SEQ ID NO: 1036210 - DNA, 15 bp, Homo sapiens
gcctgctgccatccg

SEQ ID NO: 1036211 - DNA, 15 bp, Homo sapiens
tgcctgctgccatcc

SEQ ID NO: 1036212 - DNA, 15 bp, Homo sapiens
ttgcctgctgccatc

SEQ ID NO: 1036213 - DNA, 15 bp, Homo sapiens
tttgcctgctgccat

SEQ ID NO: 1036214 - DNA, 15 bp, Homo sapiens
ttttgcctgctgcca

SEQ ID NO: 1036215 - DNA, 15 bp, Homo sapiens
tttttgcctgctgcc

SEQ ID NO: 1036216 - DNA, 15 bp, Homo sapiens
ctttttgcctgctgc

SEQ ID NO: 1036217 - DNA, 15 bp, Homo sapiens
tctttttgcctgctg

SEQ ID NO: 1036218 - DNA, 15 bp, Homo sapiens
ctctttttgcctgct

SEQ ID NO: 1036219 - DNA, 15 bp, Homo sapiens
tctctttttgcctgc

SEQ ID NO: 1036220 - DNA, 15 bp, Homo sapiens
ctctctttttgcctg

SEQ ID NO: 1036221 - DNA, 15 bp, Homo sapiens
gctctctttttgcct

SEQ ID NO: 1036222 - DNA, 15 bp, Homo sapiens
agctctctttttgcc

SEQ ID NO: 1036223 - DNA, 15 bp, Homo sapiens
aagctctctttttgc

SEQ ID NO: 1036224 - DNA, 15 bp, Homo sapiens
caagctctctttttg

SEQ ID NO: 1036225 - DNA, 15 bp, Homo sapiens
acaagctctcttttt

SEQ ID NO: 1036226 - DNA, 15 bp, Homo sapiens
aacaagctctctttt

SEQ ID NO: 1036227 - DNA, 15 bp, Homo sapiens
aaacaagctctcttt

SEQ ID NO: 1036228 - DNA, 15 bp, Homo sapiens
taaacaagctctctt

SEQ ID NO: 1036229 - DNA, 15 bp, Homo sapiens
ttaaacaagctctct

SEQ ID NO: 1036230 - DNA, 15 bp, Homo sapiens
tttaaacaagctctc

SEQ ID NO: 1036231 - DNA, 15 bp, Homo sapiens
ttttaaacaagctct

SEQ ID NO: 1036232 - DNA, 15 bp, Homo sapiens
tttttaaacaagctc

SEQ ID NO: 1036233 - DNA, 15 bp, Homo sapiens
gtttttaaacaagct

SEQ ID NO: 1036234 - DNA, 15 bp, Homo sapiens
ggtttttaaacaagc

SEQ ID NO: 1036235 - DNA, 15 bp, Homo sapiens
atggtttttaaacaa

SEQ ID NO: 1036236 - DNA, 15 bp, Homo sapiens
gatggtttttaaaca

SEQ ID NO: 1036237 - DNA, 15 bp, Homo sapiens
tgatggtttttaaac

SEQ ID NO: 1036238 - DNA, 15 bp, Homo sapiens
tctgatggtttttaa

SEQ ID NO: 1036239 - DNA, 15 bp, Homo sapiens
atctgatggttttta

SEQ ID NO: 1036240 - DNA, 15 bp, Homo sapiens
catctgatggttttt

SEQ ID NO: 1036241 - DNA, 15 bp, Homo sapiens
acatctgatggtttt

SEQ ID NO: 1036242 - DNA, 15 bp, Homo sapiens
gacatctgatggttt

SEQ ID NO: 1036243 - DNA, 15 bp, Homo sapiens
tgacatctgatggtt

SEQ ID NO: 1036244 - DNA, 15 bp, Homo sapiens
atgacatctgatggt

SEQ ID NO: 1036245 - DNA, 15 bp, Homo sapiens
catgacatctgatgg

SEQ ID NO: 1036246 - DNA, 15 bp, Homo sapiens
tcatgacatctgatg

SEQ ID NO: 1036247 - DNA, 15 bp, Homo sapiens
ttcatgacatctgat

SEQ ID NO: 1036248 - DNA, 15 bp, Homo sapiens
tttcatgacatctga

SEQ ID NO: 1036249 - DNA, 15 bp, Homo sapiens
gtttcatgacatctg

SEQ ID NO: 1036250 - DNA, 15 bp, Homo sapiens
ggtttcatgacatct

SEQ ID NO: 1036251 - DNA, 15 bp, Homo sapiens
gggtttcatgacatc

SEQ ID NO: 1036252 - DNA, 15 bp, Homo sapiens
tgggtttcatgacat

SEQ ID NO: 1036253 - DNA, 15 bp, Homo sapiens
atgggtttcatgaca

SEQ ID NO: 1036254 - DNA, 15 bp, Homo sapiens
aatgggtttcatgac

SEQ ID NO: 1036255 - DNA, 15 bp, Homo sapiens
gaatgggtttcatga

SEQ ID NO: 1036256 - DNA, 15 bp, Homo sapiens
tgaatgggtttcatg

SEQ ID NO: 1036257 - DNA, 15 bp, Homo sapiens
gtgaatgggtttcat

SEQ ID NO: 1036258 - DNA, 15 bp, Homo sapiens
agtgaatgggtttca

SEQ ID NO: 1036259 - DNA, 15 bp, Homo sapiens
tagtgaatgggtttc

SEQ ID NO: 1036260 - DNA, 15 bp, Homo sapiens
atagtgaatgggttt

SEQ ID NO: 1036261 - DNA, 15 bp, Homo sapiens
gatagtgaatgggtt

SEQ ID NO: 1036262 - DNA, 15 bp, Homo sapiens
tgatagtgaatgggt

SEQ ID NO: 1036263 - DNA, 15 bp, Homo sapiens
atgatagtgaatggg

SEQ ID NO: 1036264 - DNA, 15 bp, Homo sapiens
catgatagtgaatgg

SEQ ID NO: 1036265 - DNA, 15 bp, Homo sapiens
tcatgatagtgaatg

SEQ ID NO: 1036266 - DNA, 15 bp, Homo sapiens
ctcatgatagtgaat

SEQ ID NO: 1036267 - DNA, 15 bp, Homo sapiens
tctcatgatagtgaa

SEQ ID NO: 1036268 - DNA, 15 bp, Homo sapiens
ttctcatgatagtga

SEQ ID NO: 1036269 - DNA, 15 bp, Homo sapiens
gttctcatgatagtg

SEQ ID NO: 1036270 - DNA, 15 bp, Homo sapiens
gtgctgttctcatga

SEQ ID NO: 1036271 - DNA, 15 bp, Homo sapiens
tgtgctgttctcatg

SEQ ID NO: 1036272 - DNA, 15 bp, Homo sapiens
ctgtgctgttctcat

SEQ ID NO: 1036273 - DNA, 15 bp, Homo sapiens
cctgtgctgttctca

SEQ ID NO: 1036274 - DNA, 15 bp, Homo sapiens
tcctgtgctgttctc

SEQ ID NO: 1036275 - DNA, 15 bp, Homo sapiens
ttcctgtgctgttct

SEQ ID NO: 1036276 - DNA, 15 bp, Homo sapiens
tttcctgtgctgttc

SEQ ID NO: 1036277 - DNA, 15 bp, Homo sapiens
ctttcctgtgctgtt

SEQ ID NO: 1036278 - DNA, 15 bp, Homo sapiens
tctttcctgtgctgt

SEQ ID NO: 1036279 - DNA, 15 bp, Homo sapiens
gtctttcctgtgctg

SEQ ID NO: 1036280 - DNA, 15 bp, Homo sapiens
ggtctttcctgtgct

SEQ ID NO: 1036281 - DNA, 15 bp, Homo sapiens
gggtctttcctgtgc

SEQ ID NO: 1036282 - DNA, 15 bp, Homo sapiens
tgggtctttcctgtg

SEQ ID NO: 1036283 - DNA, 15 bp, Homo sapiens
gtgggtctttcctgt

SEQ ID NO: 1036284 - DNA, 15 bp, Homo sapiens
ggtgggtctttcctg

SEQ ID NO: 1036285 - DNA, 15 bp, Homo sapiens
gggtgggtctttcct

SEQ ID NO: 1036286 - DNA, 15 bp, Homo sapiens
ggggtgggtctttcc

SEQ ID NO: 1036287 - DNA, 15 bp, Homo sapiens
gggggtgggtctttc

SEQ ID NO: 1036288 - DNA, 15 bp, Homo sapiens
tgggggtgggtcttt

SEQ ID NO: 1036289 - DNA, 15 bp, Homo sapiens
ctgggggtgggtctt

SEQ ID NO: 1036290 - DNA, 15 bp, Homo sapiens
tctgggggtgggtct

SEQ ID NO: 1036291 - DNA, 15 bp, Homo sapiens
ttctgggggtgggtc

SEQ ID NO: 1036292 - DNA, 15 bp, Homo sapiens
attctgggggtgggt

SEQ ID NO: 1036293 - DNA, 15 bp, Homo sapiens
aattctgggggtggg

SEQ ID NO: 1036294 - DNA, 15 bp, Homo sapiens
gaattctgggggtgg

SEQ ID NO: 1036295 - DNA, 15 bp, Homo sapiens
tgaattctgggggtg

SEQ ID NO: 1036296 - DNA, 15 bp, Homo sapiens
ttgaattctgggggt

SEQ ID NO: 1036297 - DNA, 15 bp, Homo sapiens
attgaattctggggg

SEQ ID NO: 1036298 - DNA, 15 bp, Homo sapiens
gattgaattctgggg

SEQ ID NO: 1036299 - DNA, 15 bp, Homo sapiens
tgattgaattctggg

SEQ ID NO: 1036300 - DNA, 15 bp, Homo sapiens
atgattgaattctgg

SEQ ID NO: 1036301 - DNA, 15 bp, Homo sapiens
gatgattgaattctg

SEQ ID NO: 1036302 - DNA, 15 bp, Homo sapiens
agatgattgaattct

SEQ ID NO: 1036303 - DNA, 15 bp, Homo sapiens
gagatgattgaattc

SEQ ID NO: 1036304 - DNA, 15 bp, Homo sapiens
ggagatgattgaatt

SEQ ID NO: 1036305 - DNA, 15 bp, Homo sapiens
gggagatgattgaat

SEQ ID NO: 1036306 - DNA, 15 bp, Homo sapiens
tgggagatgattgaa

SEQ ID NO: 1036307 - DNA, 15 bp, Homo sapiens
gtgggagatgattga

SEQ ID NO: 1036308 - DNA, 15 bp, Homo sapiens
ggtgggagatgattg

SEQ ID NO: 1036309 - DNA, 15 bp, Homo sapiens
tggtgggagatgatt

SEQ ID NO: 1036310 - DNA, 15 bp, Homo sapiens
ctggtgggagatgat

SEQ ID NO: 1036311 - DNA, 15 bp, Homo sapiens
cctggtgggagatga

SEQ ID NO: 1036312 - DNA, 15 bp, Homo sapiens
acctggtgggagatg

SEQ ID NO: 1036313 - DNA, 15 bp, Homo sapiens
gacctggtgggagat

SEQ ID NO: 1036314 - DNA, 15 bp, Homo sapiens
ggacctggtgggaga

SEQ ID NO: 1036315 - DNA, 15 bp, Homo sapiens
gggacctggtgggag

SEQ ID NO: 1036316 - DNA, 15 bp, Homo sapiens
agggacctggtggga

SEQ ID NO: 1036317 - DNA, 15 bp, Homo sapiens
gagggacctggtggg

SEQ ID NO: 1036318 - DNA, 15 bp, Homo sapiens
ggagggacctggtgg

SEQ ID NO: 1036319 - DNA, 15 bp, Homo sapiens
gggagggacctggtg

SEQ ID NO: 1036320 - DNA, 15 bp, Homo sapiens
cgggagggacctggt

SEQ ID NO: 1036321 - DNA, 15 bp, Homo sapiens
gcgggagggacctgg

SEQ ID NO: 1036322 - DNA, 15 bp, Homo sapiens
tgcgggagggacctg

SEQ ID NO: 1036323 - DNA, 15 bp, Homo sapiens
ttgcgggagggacct

SEQ ID NO: 1036324 - DNA, 15 bp, Homo sapiens
gttgcgggagggacc

SEQ ID NO: 1036325 - DNA, 15 bp, Homo sapiens
tgttgcgggagggac

SEQ ID NO: 1036326 - DNA, 15 bp, Homo sapiens
atgttgcgggaggga

SEQ ID NO: 1036327 - DNA, 15 bp, Homo sapiens
catgttgcgggaggg

SEQ ID NO: 1036328 - DNA, 15 bp, Homo sapiens
acatgttgcgggagg

SEQ ID NO: 1036329 - DNA, 15 bp, Homo sapiens
cacatgttgcgggag

SEQ ID NO: 1036330 - DNA, 15 bp, Homo sapiens
ccacatgttgcggga

SEQ ID NO: 1036331 - DNA, 15 bp, Homo sapiens
cccacatgttgcggg

SEQ ID NO: 1036332 - DNA, 15 bp, Homo sapiens
tcccacatgttgcgg

SEQ ID NO: 1036333 - DNA, 15 bp, Homo sapiens
ctcccacatgttgcg

SEQ ID NO: 1036334 - DNA, 15 bp, Homo sapiens
actcccacatgttgc

SEQ ID NO: 1036335 - DNA, 15 bp, Homo sapiens
aactcccacatgttg

SEQ ID NO: 1036336 - DNA, 15 bp, Homo sapiens
taactcccacatgtt

SEQ ID NO: 1036337 - DNA, 15 bp, Homo sapiens
ataactcccacatgt

SEQ ID NO: 1036338 - DNA, 15 bp, Homo sapiens
cataactcccacatg

SEQ ID NO: 1036339 - DNA, 15 bp, Homo sapiens
ccataactcccacat

SEQ ID NO: 1036340 - DNA, 15 bp, Homo sapiens
cccataactcccaca

SEQ ID NO: 1036341 - DNA, 15 bp, Homo sapiens
tcccataactcccac

SEQ ID NO: 1036342 - DNA, 15 bp, Homo sapiens
ctcccataactccca

SEQ ID NO: 1036343 - DNA, 15 bp, Homo sapiens
gctcccataactccc

SEQ ID NO: 1036344 - DNA, 15 bp, Homo sapiens
agctcccataactcc

SEQ ID NO: 1036345 - DNA, 15 bp, Homo sapiens
aagctcccataactc

SEQ ID NO: 1036346 - DNA, 15 bp, Homo sapiens
aaagctcccataact

SEQ ID NO: 1036347 - DNA, 15 bp, Homo sapiens
caaagctcccataac

SEQ ID NO: 1036348 - DNA, 15 bp, Homo sapiens
ccaaagctcccataa

SEQ ID NO: 1036349 - DNA, 15 bp, Homo sapiens
cccaaagctcccata

SEQ ID NO: 1036350 - DNA, 15 bp, Homo sapiens
acccaaagctcccat

SEQ ID NO: 1036351 - DNA, 15 bp, Homo sapiens
cacccaaagctccca

SEQ ID NO: 1036352 - DNA, 15 bp, Homo sapiens
ccacccaaagctccc

SEQ ID NO: 1036353 - DNA, 15 bp, Homo sapiens
cccacccaaagctcc

SEQ ID NO: 1036354 - DNA, 15 bp, Homo sapiens
ccccacccaaagctc

SEQ ID NO: 1036355 - DNA, 15 bp, Homo sapiens
tccccacccaaagct

SEQ ID NO: 1036356 - DNA, 15 bp, Homo sapiens
gtccccacccaaagc

SEQ ID NO: 1036357 - DNA, 15 bp, Homo sapiens
tgtccccacccaaag

SEQ ID NO: 1036358 - DNA, 15 bp, Homo sapiens
ctctgtgtccccacc

SEQ ID NO: 1036359 - DNA, 15 bp, Homo sapiens
gctctgtgtccccac

SEQ ID NO: 1036360 - DNA, 15 bp, Homo sapiens
ggctctgtgtcccca

SEQ ID NO: 1036361 - DNA, 15 bp, Homo sapiens
tggctctgtgtcccc

SEQ ID NO: 1036362 - DNA, 15 bp, Homo sapiens
ttggctctgtgtccc

SEQ ID NO: 1036363 - DNA, 15 bp, Homo sapiens
tttggctctgtgtcc

SEQ ID NO: 1036364 - DNA, 15 bp, Homo sapiens
ttttggctctgtgtc

SEQ ID NO: 1036365 - DNA, 15 bp, Homo sapiens
gttttggctctgtgt

SEQ ID NO: 1036366 - DNA, 15 bp, Homo sapiens
tgttttggctctgtg

SEQ ID NO: 1036367 - DNA, 15 bp, Homo sapiens
atgttttggctctgt

SEQ ID NO: 1036368 - DNA, 15 bp, Homo sapiens
tatgttttggctctg

SEQ ID NO: 1036369 - DNA, 15 bp, Homo sapiens
atatgttttggctct

SEQ ID NO: 1036370 - DNA, 15 bp, Homo sapiens
gatatgttttggctc

SEQ ID NO: 1036371 - DNA, 15 bp, Homo sapiens
tgatatgttttggct

SEQ ID NO: 1036372 - DNA, 15 bp, Homo sapiens
atgatatgttttggc

SEQ ID NO: 1036373 - DNA, 15 bp, Homo sapiens
tatgatatgttttgg

SEQ ID NO: 1036374 - DNA, 15 bp, Homo sapiens
gtatgatatgttttg

SEQ ID NO: 1036375 - DNA, 15 bp, Homo sapiens
tgtatgatatgtttt

SEQ ID NO: 1036376 - DNA, 15 bp, Homo sapiens
gtgtatgatatgttt

SEQ ID NO: 1036377 - DNA, 15 bp, Homo sapiens
agtgtatgatatgtt

SEQ ID NO: 1036378 - DNA, 15 bp, Homo sapiens
aagtgtatgatatgt

SEQ ID NO: 1036379 - DNA, 15 bp, Homo sapiens
aaagtgtatgatatg

SEQ ID NO: 1036380 - DNA, 15 bp, Homo sapiens
gaaagtgtatgatat

SEQ ID NO: 1036381 - DNA, 15 bp, Homo sapiens
ggaaagtgtatgata

SEQ ID NO: 1036382 - DNA, 15 bp, Homo sapiens
tggaaagtgtatgat

SEQ ID NO: 1036383 - DNA, 15 bp, Homo sapiens
ttggaaagtgtatga

SEQ ID NO: 1036384 - DNA, 15 bp, Homo sapiens
tttggaaagtgtatg

SEQ ID NO: 1036385 - DNA, 15 bp, Homo sapiens
ctttggaaagtgtat

SEQ ID NO: 1036386 - DNA, 15 bp, Homo sapiens
tctttggaaagtgta

SEQ ID NO: 1036387 - DNA, 15 bp, Homo sapiens
atctttggaaagtgt

SEQ ID NO: 1036388 - DNA, 15 bp, Homo sapiens
gatctttggaaagtg

SEQ ID NO: 1036389 - DNA, 15 bp, Homo sapiens
agatctttggaaagt

SEQ ID NO: 1036390 - DNA, 15 bp, Homo sapiens
tagatctttggaaag

SEQ ID NO: 1036391 - DNA, 15 bp, Homo sapiens
atagatctttggaaa

SEQ ID NO: 1036392 - DNA, 15 bp, Homo sapiens
tatagatctttggaa

SEQ ID NO: 1036393 - DNA, 15 bp, Homo sapiens
atatagatctttgga

SEQ ID NO: 1036394 - DNA, 15 bp, Homo sapiens
gatatagatctttgg

SEQ ID NO: 1036395 - DNA, 15 bp, Homo sapiens
ggatatagatctttg

SEQ ID NO: 1036396 - DNA, 15 bp, Homo sapiens
aggatatagatcttt

SEQ ID NO: 1036397 - DNA, 15 bp, Homo sapiens
aaggatatagatctt

SEQ ID NO: 1036398 - DNA, 15 bp, Homo sapiens
caaggatatagatct

SEQ ID NO: 1036399 - DNA, 15 bp, Homo sapiens
tcaaggatatagatc

SEQ ID NO: 1036400 - DNA, 15 bp, Homo sapiens
atcaaggatatagat

SEQ ID NO: 1036401 - DNA, 15 bp, Homo sapiens
tatcaaggatataga

SEQ ID NO: 1036402 - DNA, 15 bp, Homo sapiens
atatcaaggatatag

SEQ ID NO: 1036403 - DNA, 15 bp, Homo sapiens
gatatcaaggatata

SEQ ID NO: 1036404 - DNA, 15 bp, Homo sapiens
ggatatcaaggatat

SEQ ID NO: 1036405 - DNA, 15 bp, Homo sapiens
aggatatcaaggata

SEQ ID NO: 1036406 - DNA, 15 bp, Homo sapiens
caggatatcaaggat

SEQ ID NO: 1036407 - DNA, 15 bp, Homo sapiens
tcaggatatcaagga

SEQ ID NO: 1036408 - DNA, 15 bp, Homo sapiens
ctcaggatatcaagg

SEQ ID NO: 1036409 - DNA, 15 bp, Homo sapiens
tctcaggatatcaag

SEQ ID NO: 1036410 - DNA, 15 bp, Homo sapiens
gtctcaggatatcaa

SEQ ID NO: 1036411 - DNA, 15 bp, Homo sapiens
tgtctcaggatatca

SEQ ID NO: 1036412 - DNA, 15 bp, Homo sapiens
atgtctcaggatatc

SEQ ID NO: 1036413 - DNA, 15 bp, Homo sapiens
catgtctcaggatat

SEQ ID NO: 1036414 - DNA, 15 bp, Homo sapiens
tcatgtctcaggata

SEQ ID NO: 1036415 - DNA, 15 bp, Homo sapiens
ttcatgtctcaggat

SEQ ID NO: 1036416 - DNA, 15 bp, Homo sapiens
cttcatgtctcagga

SEQ ID NO: 1036417 - DNA, 15 bp, Homo sapiens
gcttcatgtctcagg

SEQ ID NO: 1036418 - DNA, 15 bp, Homo sapiens
tgcttcatgtctcag

SEQ ID NO: 1036419 - DNA, 15 bp, Homo sapiens
ttgcttcatgtctca

SEQ ID NO: 1036420 - DNA, 15 bp, Homo sapiens
attgcttcatgtctc

SEQ ID NO: 1036421 - DNA, 15 bp, Homo sapiens
aattgcttcatgtct

SEQ ID NO: 1036422 - DNA, 15 bp, Homo sapiens
aaattgcttcatgtc

SEQ ID NO: 1036423 - DNA, 15 bp, Homo sapiens
gaaattgcttcatgt

SEQ ID NO: 1036424 - DNA, 15 bp, Homo sapiens
agaaattgcttcatg

SEQ ID NO: 1036425 - DNA, 15 bp, Homo sapiens
gagaaattgcttcat

SEQ ID NO: 1036426 - DNA, 15 bp, Homo sapiens
agagaaattgcttca

SEQ ID NO: 1036427 - DNA, 15 bp, Homo sapiens
gagagaaattgcttc

SEQ ID NO: 1036428 - DNA, 15 bp, Homo sapiens
agagagaaattgctt

SEQ ID NO: 1036429 - DNA, 15 bp, Homo sapiens
tagagagaaattgct

SEQ ID NO: 1036430 - DNA, 15 bp, Homo sapiens
gtagagagaaattgc

SEQ ID NO: 1036431 - DNA, 15 bp, Homo sapiens
ggtagagagaaattg

SEQ ID NO: 1036432 - DNA, 15 bp, Homo sapiens
gggtagagagaaatt

SEQ ID NO: 1036433 - DNA, 15 bp, Homo sapiens
agggtagagagaaat

SEQ ID NO: 1036434 - DNA, 15 bp, Homo sapiens
aagggtagagagaaa

SEQ ID NO: 1036435 - DNA, 15 bp, Homo sapiens
gaagggtagagagaa

SEQ ID NO: 1036436 - DNA, 15 bp, Homo sapiens
tgaagggtagagaga

SEQ ID NO: 1036437 - DNA, 15 bp, Homo sapiens
atgaagggtagagag

SEQ ID NO: 1036438 - DNA, 15 bp, Homo sapiens
tatgaagggtagaga

SEQ ID NO: 1036439 - DNA, 15 bp, Homo sapiens
gtatgaagggtagag

SEQ ID NO: 1036440 - DNA, 15 bp, Homo sapiens
agtatgaagggtaga

SEQ ID NO: 1036441 - DNA, 15 bp, Homo sapiens
aagtatgaagggtag

SEQ ID NO: 1036442 - DNA, 15 bp, Homo sapiens
gaagtatgaagggta

SEQ ID NO: 1036443 - DNA, 15 bp, Homo sapiens
agaagtatgaagggt

SEQ ID NO: 1036444 - DNA, 15 bp, Homo sapiens
gagaagtatgaaggg

SEQ ID NO: 1036445 - DNA, 15 bp, Homo sapiens
tgagaagtatgaagg

SEQ ID NO: 1036446 - DNA, 15 bp, Homo sapiens
gtgagaagtatgaag

SEQ ID NO: 1036447 - DNA, 15 bp, Homo sapiens
ggtgagaagtatgaa

SEQ ID NO: 1036448 - DNA, 15 bp, Homo sapiens
gggtgagaagtatga

SEQ ID NO: 1036449 - DNA, 15 bp, Homo sapiens
tgggtgagaagtatg

SEQ ID NO: 1036450 - DNA, 15 bp, Homo sapiens
atgggtgagaagtat

SEQ ID NO: 1036451 - DNA, 15 bp, Homo sapiens
catgggtgagaagta

SEQ ID NO: 1036452 - DNA, 15 bp, Homo sapiens
ccatgggtgagaagt

SEQ ID NO: 1036453 - DNA, 15 bp, Homo sapiens
tccatgggtgagaag

SEQ ID NO: 1036454 - DNA, 15 bp, Homo sapiens
atccatgggtgagaa

SEQ ID NO: 1036455 - DNA, 15 bp, Homo sapiens
tatccatgggtgaga

SEQ ID NO: 1036456 - DNA, 15 bp, Homo sapiens
ttatccatgggtgag

SEQ ID NO: 1036457 - DNA, 15 bp, Homo sapiens
attatccatgggtga

SEQ ID NO: 1036458 - DNA, 15 bp, Homo sapiens
tattatccatgggtg

SEQ ID NO: 1036459 - DNA, 15 bp, Homo sapiens
ctattatccatgggt

SEQ ID NO: 1036460 - DNA, 15 bp, Homo sapiens
tctattatccatggg

SEQ ID NO: 1036461 - DNA, 15 bp, Homo sapiens
ttctattatccatgg

SEQ ID NO: 1036462 - DNA, 15 bp, Homo sapiens
tttctattatccatg

SEQ ID NO: 1036463 - DNA, 15 bp, Homo sapiens
atttctattatccat

SEQ ID NO: 1036464 - DNA, 15 bp, Homo sapiens
tatttctattatcca

SEQ ID NO: 1036465 - DNA, 15 bp, Homo sapiens
atatttctattatcc

SEQ ID NO: 1036466 - DNA, 15 bp, Homo sapiens
tatatttctattatc

SEQ ID NO: 1036467 - DNA, 15 bp, Homo sapiens
atatatttctattat

SEQ ID NO: 1036468 - DNA, 15 bp, Homo sapiens
aatatatttctatta

SEQ ID NO: 1036469 - DNA, 15 bp, Homo sapiens
caatatatttctatt

SEQ ID NO: 1036470 - DNA, 15 bp, Homo sapiens
gcaatatatttctat

SEQ ID NO: 1036471 - DNA, 15 bp, Homo sapiens
ggcaatatatttcta

SEQ ID NO: 1036472 - DNA, 15 bp, Homo sapiens
aggcaatatatttct

SEQ ID NO: 1036473 - DNA, 15 bp, Homo sapiens
caggcaatatatttc

SEQ ID NO: 1036474 - DNA, 15 bp, Homo sapiens
gcaggcaatatattt

SEQ ID NO: 1036475 - DNA, 15 bp, Homo sapiens
agcaggcaatatatt

SEQ ID NO: 1036476 - DNA, 15 bp, Homo sapiens
tagcaggcaatatat

SEQ ID NO: 1036477 - DNA, 15 bp, Homo sapiens
gtagcaggcaatata

SEQ ID NO: 1036478 - DNA, 15 bp, Homo sapiens
tgtagcaggcaatat

SEQ ID NO: 1036479 - DNA, 15 bp, Homo sapiens
gtgtagcaggcaata

SEQ ID NO: 1036480 - DNA, 15 bp, Homo sapiens
ggtgtagcaggcaat

SEQ ID NO: 1036481 - DNA, 15 bp, Homo sapiens
aggtgtagcaggcaa

SEQ ID NO: 1036482 - DNA, 15 bp, Homo sapiens
gaggtgtagcaggca

SEQ ID NO: 1036483 - DNA, 15 bp, Homo sapiens
ggaggtgtagcaggc

SEQ ID NO: 1036484 - DNA, 15 bp, Homo sapiens
aggaggtgtagcagg

SEQ ID NO: 1036485 - DNA, 15 bp, Homo sapiens
caggaggtgtagcag

SEQ ID NO: 1036486 - DNA, 15 bp, Homo sapiens
acaggaggtgtagca

SEQ ID NO: 1036487 - DNA, 15 bp, Homo sapiens
cacaggaggtgtagc

SEQ ID NO: 1036488 - DNA, 15 bp, Homo sapiens
ccacaggaggtgtag

SEQ ID NO: 1036489 - DNA, 15 bp, Homo sapiens
accacaggaggtgta

SEQ ID NO: 1036490 - DNA, 15 bp, Homo sapiens
aaccacaggaggtgt

SEQ ID NO: 1036491 - DNA, 15 bp, Homo sapiens
aaaccacaggaggtg

SEQ ID NO: 1036492 - DNA, 15 bp, Homo sapiens
aaaaccacaggaggt

SEQ ID NO: 1036493 - DNA, 15 bp, Homo sapiens
taaaaccacaggagg

SEQ ID NO: 1036494 - DNA, 15 bp, Homo sapiens
ctaaaaccacaggag

SEQ ID NO: 1036495 - DNA, 15 bp, Homo sapiens
tctaaaaccacagga

SEQ ID NO: 1036496 - DNA, 15 bp, Homo sapiens
ttctaaaaccacagg

SEQ ID NO: 1036497 - DNA, 15 bp, Homo sapiens
attctaaaaccacag

SEQ ID NO: 1036498 - DNA, 15 bp, Homo sapiens
gattctaaaaccaca

SEQ ID NO: 1036499 - DNA, 15 bp, Homo sapiens
tgattctaaaaccac

SEQ ID NO: 1036500 - DNA, 15 bp, Homo sapiens
gtgattctaaaacca

SEQ ID NO: 1036501 - DNA, 15 bp, Homo sapiens
agtgattctaaaacc

SEQ ID NO: 1036502 - DNA, 15 bp, Homo sapiens
cagtgattctaaaac

SEQ ID NO: 1036503 - DNA, 15 bp, Homo sapiens
acagtgattctaaaa

SEQ ID NO: 1036504 - DNA, 15 bp, Homo sapiens
cacagtgattctaaa

SEQ ID NO: 1036505 - DNA, 15 bp, Homo sapiens
tcacagtgattctaa

SEQ ID NO: 1036506 - DNA, 15 bp, Homo sapiens
ctcacagtgattcta

SEQ ID NO: 1036507 - DNA, 15 bp, Homo sapiens
cctcacagtgattct

SEQ ID NO: 1036508 - DNA, 15 bp, Homo sapiens
tcctcacagtgattc

SEQ ID NO: 1036509 - DNA, 15 bp, Homo sapiens
ttcctcacagtgatt

SEQ ID NO: 1036510 - DNA, 15 bp, Homo sapiens
attcctcacagtgat

SEQ ID NO: 1036511 - DNA, 15 bp, Homo sapiens
tattcctcacagtga

SEQ ID NO: 1036512 - DNA, 15 bp, Homo sapiens
ttattcctcacagtg

SEQ ID NO: 1036513 - DNA, 15 bp, Homo sapiens
tttattcctcacagt

SEQ ID NO: 1036514 - DNA, 15 bp, Homo sapiens
atttattcctcacag

SEQ ID NO: 1036515 - DNA, 15 bp, Homo sapiens
tatttattcctcaca

SEQ ID NO: 1036516 - DNA, 15 bp, Homo sapiens
gtatttattcctcac

SEQ ID NO: 1036517 - DNA, 15 bp, Homo sapiens
ggtatttattcctca

SEQ ID NO: 1036518 - DNA, 15 bp, Homo sapiens
gggtatttattcctc

SEQ ID NO: 1036519 - DNA, 15 bp, Homo sapiens
ggggtatttattcct

SEQ ID NO: 1036520 - DNA, 15 bp, Homo sapiens
tggggtatttattcc

SEQ ID NO: 1036521 - DNA, 15 bp, Homo sapiens
ctggggtatttattc

SEQ ID NO: 1036522 - DNA, 15 bp, Homo sapiens
cctggggtatttatt

SEQ ID NO: 1036523 - DNA, 15 bp, Homo sapiens
gcctggggtatttat

SEQ ID NO: 1036524 - DNA, 15 bp, Homo sapiens
agcctggggtattta

SEQ ID NO: 1036525 - DNA, 15 bp, Homo sapiens
aagcctggggtattt

SEQ ID NO: 1036526 - DNA, 15 bp, Homo sapiens
aaagcctggggtatt

SEQ ID NO: 1036527 - DNA, 15 bp, Homo sapiens
gaaagcctggggtat

SEQ ID NO: 1036528 - DNA, 15 bp, Homo sapiens
agaaagcctggggta

SEQ ID NO: 1036529 - DNA, 15 bp, Homo sapiens
gagaaagcctggggt

SEQ ID NO: 1036530 - DNA, 15 bp, Homo sapiens
tgagaaagcctgggg

SEQ ID NO: 1036531 - DNA, 15 bp, Homo sapiens
atgagaaagcctggg

SEQ ID NO: 1036532 - DNA, 15 bp, Homo sapiens
catgagaaagcctgg

SEQ ID NO: 1036533 - DNA, 15 bp, Homo sapiens
ccatgagaaagcctg

SEQ ID NO: 1036534 - DNA, 15 bp, Homo sapiens
cccatgagaaagcct

SEQ ID NO: 1036535 - DNA, 15 bp, Homo sapiens
ccccatgagaaagcc

SEQ ID NO: 1036536 - DNA, 15 bp, Homo sapiens
tccccatgagaaagc

SEQ ID NO: 1036537 - DNA, 15 bp, Homo sapiens
ctccccatgagaaag

SEQ ID NO: 1036538 - DNA, 15 bp, Homo sapiens
tctccccatgagaaa

SEQ ID NO: 1036539 - DNA, 15 bp, Homo sapiens
atctccccatgagaa

SEQ ID NO: 1036540 - DNA, 15 bp, Homo sapiens
gatctccccatgaga

SEQ ID NO: 1036541 - DNA, 15 bp, Homo sapiens
agatctccccatgag

SEQ ID NO: 1036542 - DNA, 15 bp, Homo sapiens
cagatctccccatga

SEQ ID NO: 1036543 - DNA, 15 bp, Homo sapiens
tcagatctccccatg

SEQ ID NO: 1036544 - DNA, 15 bp, Homo sapiens
gtcagatctccccat

SEQ ID NO: 1036545 - DNA, 15 bp, Homo sapiens
agtcagatctcccca

SEQ ID NO: 1036546 - DNA, 15 bp, Homo sapiens
aagtcagatctcccc

SEQ ID NO: 1036547 - DNA, 15 bp, Homo sapiens
gaagtcagatctccc

SEQ ID NO: 1036548 - DNA, 15 bp, Homo sapiens
tgaagtcagatctcc

SEQ ID NO: 1036549 - DNA, 15 bp, Homo sapiens
atgaagtcagatctc

SEQ ID NO: 1036550 - DNA, 15 bp, Homo sapiens
aatgaagtcagatct

SEQ ID NO: 1036551 - DNA, 15 bp, Homo sapiens
taatgaagtcagatc

SEQ ID NO: 1036552 - DNA, 15 bp, Homo sapiens
gtaatgaagtcagat

SEQ ID NO: 1036553 - DNA, 15 bp, Homo sapiens
agtaatgaagtcaga

SEQ ID NO: 1036554 - DNA, 15 bp, Homo sapiens
cagtaatgaagtcag

SEQ ID NO: 1036555 - DNA, 15 bp, Homo sapiens
tcagtaatgaagtca

SEQ ID NO: 1036556 - DNA, 15 bp, Homo sapiens
ctcagtaatgaagtc

SEQ ID NO: 1036557 - DNA, 15 bp, Homo sapiens
cctcagtaatgaagt

SEQ ID NO: 1036558 - DNA, 15 bp, Homo sapiens
acctcagtaatgaag

SEQ ID NO: 1036559 - DNA, 15 bp, Homo sapiens
gacctcagtaatgaa

SEQ ID NO: 1036560 - DNA, 15 bp, Homo sapiens
agacctcagtaatga

SEQ ID NO: 1036561 - DNA, 15 bp, Homo sapiens
gagacctcagtaatg

SEQ ID NO: 1036562 - DNA, 15 bp, Homo sapiens
cgagacctcagtaat

SEQ ID NO: 1036563 - DNA, 15 bp, Homo sapiens
gcgagacctcagtaa

SEQ ID NO: 1036564 - DNA, 15 bp, Homo sapiens
agcgagacctcagta

SEQ ID NO: 1036565 - DNA, 15 bp, Homo sapiens
tagcgagacctcagt

SEQ ID NO: 1036566 - DNA, 15 bp, Homo sapiens
ttagcgagacctcag

SEQ ID NO: 1036567 - DNA, 15 bp, Homo sapiens
attagcgagacctca

SEQ ID NO: 1036568 - DNA, 15 bp, Homo sapiens
cattagcgagacctc

SEQ ID NO: 1036569 - DNA, 15 bp, Homo sapiens
tcattagcgagacct

SEQ ID NO: 1036570 - DNA, 15 bp, Homo sapiens
ctcattagcgagacc

SEQ ID NO: 1036571 - DNA, 15 bp, Homo sapiens
gctcattagcgagac

SEQ ID NO: 1036572 - DNA, 15 bp, Homo sapiens
tgctcattagcgaga

SEQ ID NO: 1036573 - DNA, 15 bp, Homo sapiens
ctgctcattagcgag

SEQ ID NO: 1036574 - DNA, 15 bp, Homo sapiens
tctgctcattagcga

SEQ ID NO: 1036575 - DNA, 15 bp, Homo sapiens
gtctgctcattagcg

SEQ ID NO: 1036576 - DNA, 15 bp, Homo sapiens
ggtctgctcattagc

SEQ ID NO: 1036577 - DNA, 15 bp, Homo sapiens
aggtctgctcattag

SEQ ID NO: 1036578 - DNA, 15 bp, Homo sapiens
taggtctgctcatta

SEQ ID NO: 1036579 - DNA, 15 bp, Homo sapiens
ataggtctgctcatt

SEQ ID NO: 1036580 - DNA, 15 bp, Homo sapiens
tataggtctgctcat

SEQ ID NO: 1036581 - DNA, 15 bp, Homo sapiens
ctataggtctgctca

SEQ ID NO: 1036582 - DNA, 15 bp, Homo sapiens
gctataggtctgctc

SEQ ID NO: 1036583 - DNA, 15 bp, Homo sapiens
tgctataggtctgct

SEQ ID NO: 1036584 - DNA, 15 bp, Homo sapiens
ctgctataggtctgc

SEQ ID NO: 1036585 - DNA, 15 bp, Homo sapiens
gctgctataggtctg

SEQ ID NO: 1036586 - DNA, 15 bp, Homo sapiens
agctgctataggtct

SEQ ID NO: 1036587 - DNA, 15 bp, Homo sapiens
aagctgctataggtc

SEQ ID NO: 1036588 - DNA, 15 bp, Homo sapiens
aaagctgctataggt

SEQ ID NO: 1036589 - DNA, 15 bp, Homo sapiens
aaaagctgctatagg

SEQ ID NO: 1036590 - DNA, 15 bp, Homo sapiens
aaaaagctgctatag

SEQ ID NO: 1036591 - DNA, 15 bp, Homo sapiens
gaaaaagctgctata

SEQ ID NO: 1036592 - DNA, 15 bp, Homo sapiens
agaaaaagctgctat

SEQ ID NO: 1036593 - DNA, 15 bp, Homo sapiens
aagaaaaagctgcta

SEQ ID NO: 1036594 - DNA, 15 bp, Homo sapiens
aaagaaaaagctgct

SEQ ID NO: 1036595 - DNA, 15 bp, Homo sapiens
caaagaaaaagctgc

SEQ ID NO: 1036596 - DNA, 15 bp, Homo sapiens
ccaaagaaaaagctg

SEQ ID NO: 1036597 - DNA, 15 bp, Homo sapiens
tccaaagaaaaagct

SEQ ID NO: 1036598 - DNA, 15 bp, Homo sapiens
ttccaaagaaaaagc

SEQ ID NO: 1036599 - DNA, 15 bp, Homo sapiens
cttccaaagaaaaag

SEQ ID NO: 1036600 - DNA, 15 bp, Homo sapiens
acttccaaagaaaaa

SEQ ID NO: 1036601 - DNA, 15 bp, Homo sapiens
gacttccaaagaaaa

SEQ ID NO: 1036602 - DNA, 15 bp, Homo sapiens
agacttccaaagaaa

SEQ ID NO: 1036603 - DNA, 15 bp, Homo sapiens
aagacttccaaagaa

SEQ ID NO: 1036604 - DNA, 15 bp, Homo sapiens
gaagacttccaaaga

SEQ ID NO: 1036605 - DNA, 15 bp, Homo sapiens
tgaagacttccaaag

SEQ ID NO: 1036606 - DNA, 15 bp, Homo sapiens
ctgaagacttccaaa

SEQ ID NO: 1036607 - DNA, 15 bp, Homo sapiens
cctgaagacttccaa

SEQ ID NO: 1036608 - DNA, 15 bp, Homo sapiens
acctgaagacttcca

SEQ ID NO: 1036609 - DNA, 15 bp, Homo sapiens
tacctgaagacttcc

SEQ ID NO: 1036610 - DNA, 15 bp, Homo sapiens
gtacctgaagacttc

SEQ ID NO: 1036611 - DNA, 15 bp, Homo sapiens
tgtacctgaagactt

SEQ ID NO: 1036612 - DNA, 15 bp, Homo sapiens
gtgtacctgaagact

SEQ ID NO: 1036613 - DNA, 15 bp, Homo sapiens
tgtgtacctgaagac

SEQ ID NO: 1036614 - DNA, 15 bp, Homo sapiens
atgtgtacctgaaga

SEQ ID NO: 1036615 - DNA, 15 bp, Homo sapiens
gatgtgtacctgaag

SEQ ID NO: 1036616 - DNA, 15 bp, Homo sapiens
tgatgtgtacctgaa

SEQ ID NO: 1036617 - DNA, 15 bp, Homo sapiens
atgatgtgtacctga

SEQ ID NO: 1036618 - DNA, 15 bp, Homo sapiens
aatgatgtgtacctg

SEQ ID NO: 1036619 - DNA, 15 bp, Homo sapiens
caatgatgtgtacct

SEQ ID NO: 1036620 - DNA, 15 bp, Homo sapiens
gcaatgatgtgtacc

SEQ ID NO: 1036621 - DNA, 15 bp, Homo sapiens
cgcaatgatgtgtac

SEQ ID NO: 1036622 - DNA, 15 bp, Homo sapiens
tcgcaatgatgtgta

SEQ ID NO: 1036623 - DNA, 15 bp, Homo sapiens
ttcgcaatgatgtgt

SEQ ID NO: 1036624 - DNA, 15 bp, Homo sapiens
cttcgcaatgatgtg

SEQ ID NO: 1036625 - DNA, 15 bp, Homo sapiens
ccttcgcaatgatgt

SEQ ID NO: 1036626 - DNA, 15 bp, Homo sapiens
accttcgcaatgatg

SEQ ID NO: 1036627 - DNA, 15 bp, Homo sapiens
gaccttcgcaatgat

SEQ ID NO: 1036628 - DNA, 15 bp, Homo sapiens
tgaccttcgcaatga

SEQ ID NO: 1036629 - DNA, 15 bp, Homo sapiens
ttgaccttcgcaatg

SEQ ID NO: 1036630 - DNA, 15 bp, Homo sapiens
attgaccttcgcaat

SEQ ID NO: 1036631 - DNA, 15 bp, Homo sapiens
gattgaccttcgcaa

SEQ ID NO: 1036632 - DNA, 15 bp, Homo sapiens
ggattgaccttcgca

SEQ ID NO: 1036633 - DNA, 15 bp, Homo sapiens
aggattgaccttcgc

SEQ ID NO: 1036634 - DNA, 15 bp, Homo sapiens
caggattgaccttcg

SEQ ID NO: 1036635 - DNA, 15 bp, Homo sapiens
acaggattgaccttc

SEQ ID NO: 1036636 - DNA, 15 bp, Homo sapiens
cacaggattgacctt

SEQ ID NO: 1036637 - DNA, 15 bp, Homo sapiens
acacaggattgacct

SEQ ID NO: 1036638 - DNA, 15 bp, Homo sapiens
gacacaggattgacc

SEQ ID NO: 1036639 - DNA, 15 bp, Homo sapiens
ggacacaggattgac

SEQ ID NO: 1036640 - DNA, 15 bp, Homo sapiens
tggacacaggattga

SEQ ID NO: 1036641 - DNA, 15 bp, Homo sapiens
atggacacaggattg

SEQ ID NO: 1036642 - DNA, 15 bp, Homo sapiens
gatggacacaggatt

SEQ ID NO: 1036643 - DNA, 15 bp, Homo sapiens
tgatggacacaggat

SEQ ID NO: 1036644 - DNA, 15 bp, Homo sapiens
gtgatggacacagga

SEQ ID NO: 1036645 - DNA, 15 bp, Homo sapiens
agtgatggacacagg

SEQ ID NO: 1036646 - DNA, 15 bp, Homo sapiens
cagtgatggacacag

SEQ ID NO: 1036647 - DNA, 15 bp, Homo sapiens
tcagtgatggacaca

SEQ ID NO: 1036648 - DNA, 15 bp, Homo sapiens
ttcagtgatggacac

SEQ ID NO: 1036649 - DNA, 15 bp, Homo sapiens
attcagtgatggaca

SEQ ID NO: 1036650 - DNA, 15 bp, Homo sapiens
cattcagtgatggac

SEQ ID NO: 1036651 - DNA, 15 bp, Homo sapiens
ccattcagtgatgga

SEQ ID NO: 1036652 - DNA, 15 bp, Homo sapiens
gccattcagtgatgg

SEQ ID NO: 1036653 - DNA, 15 bp, Homo sapiens
tgccattcagtgatg

SEQ ID NO: 1036654 - DNA, 15 bp, Homo sapiens
atgccattcagtgat

SEQ ID NO: 1036655 - DNA, 15 bp, Homo sapiens
tatgccattcagtga

SEQ ID NO: 1036656 - DNA, 15 bp, Homo sapiens
ttatgccattcagtg

SEQ ID NO: 1036657 - DNA, 15 bp, Homo sapiens
tttatgccattcagt

SEQ ID NO: 1036658 - DNA, 15 bp, Homo sapiens
atttatgccattcag

SEQ ID NO: 1036659 - DNA, 15 bp, Homo sapiens
aatttatgccattca

SEQ ID NO: 1036660 - DNA, 15 bp, Homo sapiens
aaatttatgccattc

SEQ ID NO: 1036661 - DNA, 15 bp, Homo sapiens
caaatttatgccatt

SEQ ID NO: 1036662 - DNA, 15 bp, Homo sapiens
acaaatttatgccat

SEQ ID NO: 1036663 - DNA, 15 bp, Homo sapiens
cacaaatttatgcca

SEQ ID NO: 1036664 - DNA, 15 bp, Homo sapiens
tcacaaatttatgcc

SEQ ID NO: 1036665 - DNA, 15 bp, Homo sapiens
ctcacaaatttatgc

SEQ ID NO: 1036666 - DNA, 15 bp, Homo sapiens
cctcacaaatttatg

SEQ ID NO: 1036667 - DNA, 15 bp, Homo sapiens
acctcacaaatttat

SEQ ID NO: 1036668 - DNA, 15 bp, Homo sapiens
cacctcacaaattta

SEQ ID NO: 1036669 - DNA, 15 bp, Homo sapiens
tcacctcacaaattt

SEQ ID NO: 1036670 - DNA, 15 bp, Homo sapiens
ttcacctcacaaatt

SEQ ID NO: 1036671 - DNA, 15 bp, Homo sapiens
gttcacctcacaaat

SEQ ID NO: 1036672 - DNA, 15 bp, Homo sapiens
agttcacctcacaaa

SEQ ID NO: 1036673 - DNA, 15 bp, Homo sapiens
cagttcacctcacaa

SEQ ID NO: 1036674 - DNA, 15 bp, Homo sapiens
acagttcacctcaca

SEQ ID NO: 1036675 - DNA, 15 bp, Homo sapiens
aacagttcacctcac

SEQ ID NO: 1036676 - DNA, 15 bp, Homo sapiens
aaacagttcacctca

SEQ ID NO: 1036677 - DNA, 15 bp, Homo sapiens
taaacagttcacctc

SEQ ID NO: 1036678 - DNA, 15 bp, Homo sapiens
ttaaacagttcacct

SEQ ID NO: 1036679 - DNA, 15 bp, Homo sapiens
tttaaacagttcacc

SEQ ID NO: 1036680 - DNA, 15 bp, Homo sapiens
ttttaaacagttcac

SEQ ID NO: 1036681 - DNA, 15 bp, Homo sapiens
gttttaaacagttca

SEQ ID NO: 1036682 - DNA, 15 bp, Homo sapiens
tgttttaaacagttc

SEQ ID NO: 1036683 - DNA, 15 bp, Homo sapiens
ttgttttaaacagtt

SEQ ID NO: 1036684 - DNA, 15 bp, Homo sapiens
tttgttttaaacagt

SEQ ID NO: 1036685 - DNA, 15 bp, Homo sapiens
ctttgttttaaacag

SEQ ID NO: 1036686 - DNA, 15 bp, Homo sapiens
tctttgttttaaaca

SEQ ID NO: 1036687 - DNA, 15 bp, Homo sapiens
atctttgttttaaac

SEQ ID NO: 1036688 - DNA, 15 bp, Homo sapiens
catctttgttttaaa

SEQ ID NO: 1036689 - DNA, 15 bp, Homo sapiens
ccatctttgttttaa

SEQ ID NO: 1036690 - DNA, 15 bp, Homo sapiens
cccatctttgtttta

SEQ ID NO: 1036691 - DNA, 15 bp, Homo sapiens
gcccatctttgtttt

SEQ ID NO: 1036692 - DNA, 15 bp, Homo sapiens
tgcccatctttgttt

SEQ ID NO: 1036693 - DNA, 15 bp, Homo sapiens
ctgcccatctttgtt

SEQ ID NO: 1036694 - DNA, 15 bp, Homo sapiens
tctgcccatctttgt

SEQ ID NO: 1036695 - DNA, 15 bp, Homo sapiens
gtctgcccatctttg

SEQ ID NO: 1036696 - DNA, 15 bp, Homo sapiens
agtctgcccatcttt

SEQ ID NO: 1036697 - DNA, 15 bp, Homo sapiens
gagtctgcccatctt

SEQ ID NO: 1036698 - DNA, 15 bp, Homo sapiens
ggagtctgcccatct

SEQ ID NO: 1036699 - DNA, 15 bp, Homo sapiens
aggagtctgcccatc

SEQ ID NO: 1036700 - DNA, 15 bp, Homo sapiens
gaggagtctgcccat

SEQ ID NO: 1036701 - DNA, 15 bp, Homo sapiens
agaggagtctgccca

SEQ ID NO: 1036702 - DNA, 15 bp, Homo sapiens
gagaggagtctgccc

SEQ ID NO: 1036703 - DNA, 15 bp, Homo sapiens
tgagaggagtctgcc

SEQ ID NO: 1036704 - DNA, 15 bp, Homo sapiens
ctgagaggagtctgc

SEQ ID NO: 1036705 - DNA, 15 bp, Homo sapiens
tctgagaggagtctg

SEQ ID NO: 1036706 - DNA, 15 bp, Homo sapiens
ttctgagaggagtct

SEQ ID NO: 1036707 - DNA, 15 bp, Homo sapiens
tttctgagaggagtc

SEQ ID NO: 1036708 - DNA, 15 bp, Homo sapiens
ttttctgagaggagt

SEQ ID NO: 1036709 - DNA, 15 bp, Homo sapiens
attttctgagaggag

SEQ ID NO: 1036710 - DNA, 15 bp, Homo sapiens
cattttctgagagga

SEQ ID NO: 1036711 - DNA, 15 bp, Homo sapiens
tcattttctgagagg

SEQ ID NO: 1036712 - DNA, 15 bp, Homo sapiens
ctcattttctgagag

SEQ ID NO: 1036713 - DNA, 15 bp, Homo sapiens
cctcattttctgaga

SEQ ID NO: 1036714 - DNA, 15 bp, Homo sapiens
gcctcattttctgag

SEQ ID NO: 1036715 - DNA, 15 bp, Homo sapiens
ggcctcattttctga

SEQ ID NO: 1036716 - DNA, 15 bp, Homo sapiens
tggcctcattttctg

SEQ ID NO: 1036717 - DNA, 15 bp, Homo sapiens
atggcctcattttct

SEQ ID NO: 1036718 - DNA, 15 bp, Homo sapiens
catggcctcattttc

SEQ ID NO: 1036719 - DNA, 15 bp, Homo sapiens
acatggcctcatttt

SEQ ID NO: 1036720 - DNA, 15 bp, Homo sapiens
aacatggcctcattt

SEQ ID NO: 1036721 - DNA, 15 bp, Homo sapiens
gaacatggcctcatt

SEQ ID NO: 1036722 - DNA, 15 bp, Homo sapiens
ggaacatggcctcat

SEQ ID NO: 1036723 - DNA, 15 bp, Homo sapiens
aggaacatggcctca

SEQ ID NO: 1036724 - DNA, 15 bp, Homo sapiens
taggaacatggcctc

SEQ ID NO: 1036725 - DNA, 15 bp, Homo sapiens
ctaggaacatggcct

SEQ ID NO: 1036726 - DNA, 15 bp, Homo sapiens
tctaggaacatggcc

SEQ ID NO: 1036727 - DNA, 15 bp, Homo sapiens
ctctaggaacatggc

SEQ ID NO: 1036728 - DNA, 15 bp, Homo sapiens
cctctaggaacatgg

SEQ ID NO: 1036729 - DNA, 15 bp, Homo sapiens
acctctaggaacatg

SEQ ID NO: 1036730 - DNA, 15 bp, Homo sapiens
gacctctaggaacat

SEQ ID NO: 1036731 - DNA, 15 bp, Homo sapiens
ggacctctaggaaca

SEQ ID NO: 1036732 - DNA, 15 bp, Homo sapiens
tggacctctaggaac

SEQ ID NO: 1036733 - DNA, 15 bp, Homo sapiens
ttggacctctaggaa

SEQ ID NO: 1036734 - DNA, 15 bp, Homo sapiens
gttggacctctagga

SEQ ID NO: 1036735 - DNA, 15 bp, Homo sapiens
agttggacctctagg

SEQ ID NO: 1036736 - DNA, 15 bp, Homo sapiens
gagttggacctctag

SEQ ID NO: 1036737 - DNA, 15 bp, Homo sapiens
agagttggacctcta

SEQ ID NO: 1036738 - DNA, 15 bp, Homo sapiens
tagagttggacctct

SEQ ID NO: 1036739 - DNA, 15 bp, Homo sapiens
atagagttggacctc

SEQ ID NO: 1036740 - DNA, 15 bp, Homo sapiens
catagagttggacct

SEQ ID NO: 1036741 - DNA, 15 bp, Homo sapiens
acatagagttggacc

SEQ ID NO: 1036742 - DNA, 15 bp, Homo sapiens
tacatagagttggac

SEQ ID NO: 1036743 - DNA, 15 bp, Homo sapiens
ttacatagagttgga

SEQ ID NO: 1036744 - DNA, 15 bp, Homo sapiens
attacatagagttgg

SEQ ID NO: 1036745 - DNA, 15 bp, Homo sapiens
cattacatagagttg

SEQ ID NO: 1036746 - DNA, 15 bp, Homo sapiens
ccattacatagagtt

SEQ ID NO: 1036747 - DNA, 15 bp, Homo sapiens
accattacatagagt

SEQ ID NO: 1036748 - DNA, 15 bp, Homo sapiens
gaccattacatagag

SEQ ID NO: 1036749 - DNA, 15 bp, Homo sapiens
agaccattacataga

SEQ ID NO: 1036750 - DNA, 15 bp, Homo sapiens
aagaccattacatag

SEQ ID NO: 1036751 - DNA, 15 bp, Homo sapiens
taagaccattacata

SEQ ID NO: 1036752 - DNA, 15 bp, Homo sapiens
ctaagaccattacat

SEQ ID NO: 1036753 - DNA, 15 bp, Homo sapiens
cctaagaccattaca

SEQ ID NO: 1036754 - DNA, 15 bp, Homo sapiens
ccctaagaccattac

SEQ ID NO: 1036755 - DNA, 15 bp, Homo sapiens
cccctaagaccatta

SEQ ID NO: 1036756 - DNA, 15 bp, Homo sapiens
acccctaagaccatt

SEQ ID NO: 1036757 - DNA, 15 bp, Homo sapiens
cacccctaagaccat

SEQ ID NO: 1036758 - DNA, 15 bp, Homo sapiens
tcacccctaagacca

SEQ ID NO: 1036759 - DNA, 15 bp, Homo sapiens
atcacccctaagacc

SEQ ID NO: 1036760 - DNA, 15 bp, Homo sapiens
catcacccctaagac

SEQ ID NO: 1036761 - DNA, 15 bp, Homo sapiens
tcatcacccctaaga

SEQ ID NO: 1036762 - DNA, 15 bp, Homo sapiens
ttcatcacccctaag

SEQ ID NO: 1036763 - DNA, 15 bp, Homo sapiens
cttcatcacccctaa

SEQ ID NO: 1036764 - DNA, 15 bp, Homo sapiens
gcttcatcaccccta

SEQ ID NO: 1036765 - DNA, 15 bp, Homo sapiens
tgcttcatcacccct

SEQ ID NO: 1036766 - DNA, 15 bp, Homo sapiens
gtgcttcatcacccc

SEQ ID NO: 1036767 - DNA, 15 bp, Homo sapiens
agtgcttcatcaccc

SEQ ID NO: 1036768 - DNA, 15 bp, Homo sapiens
cagtgcttcatcacc

SEQ ID NO: 1036769 - DNA, 15 bp, Homo sapiens
acagtgcttcatcac

SEQ ID NO: 1036770 - DNA, 15 bp, Homo sapiens
tacagtgcttcatca

SEQ ID NO: 1036771 - DNA, 15 bp, Homo sapiens
ctacagtgcttcatc

SEQ ID NO: 1036772 - DNA, 15 bp, Homo sapiens
actacagtgcttcat

SEQ ID NO: 1036773 - DNA, 15 bp, Homo sapiens
gactacagtgcttca

SEQ ID NO: 1036774 - DNA, 15 bp, Homo sapiens
ggactacagtgcttc

SEQ ID NO: 1036775 - DNA, 15 bp, Homo sapiens
aggactacagtgctt

SEQ ID NO: 1036776 - DNA, 15 bp, Homo sapiens
caggactacagtgct

SEQ ID NO: 1036777 - DNA, 15 bp, Homo sapiens
gcaggactacagtgc

SEQ ID NO: 1036778 - DNA, 15 bp, Homo sapiens
agcaggactacagtg

SEQ ID NO: 1036779 - DNA, 15 bp, Homo sapiens
aagcaggactacagt

SEQ ID NO: 1036780 - DNA, 15 bp, Homo sapiens
gaagcaggactacag

SEQ ID NO: 1036781 - DNA, 15 bp, Homo sapiens
agaagcaggactaca

SEQ ID NO: 1036782 - DNA, 15 bp, Homo sapiens
gagaagcaggactac

SEQ ID NO: 1036783 - DNA, 15 bp, Homo sapiens
tgagaagcaggacta

SEQ ID NO: 1036784 - DNA, 15 bp, Homo sapiens
gtgagaagcaggact

SEQ ID NO: 1036785 - DNA, 15 bp, Homo sapiens
agtgagaagcaggac

SEQ ID NO: 1036786 - DNA, 15 bp, Homo sapiens
gagtgagaagcagga

SEQ ID NO: 1036787 - DNA, 15 bp, Homo sapiens
tgagtgagaagcagg

SEQ ID NO: 1036788 - DNA, 15 bp, Homo sapiens
atgagtgagaagcag

SEQ ID NO: 1036789 - DNA, 15 bp, Homo sapiens
tatgagtgagaagca

SEQ ID NO: 1036790 - DNA, 15 bp, Homo sapiens
gtatgagtgagaagc

SEQ ID NO: 1036791 - DNA, 15 bp, Homo sapiens
ggtatgagtgagaag

SEQ ID NO: 1036792 - DNA, 15 bp, Homo sapiens
aggtatgagtgagaa

SEQ ID NO: 1036793 - DNA, 15 bp, Homo sapiens
caggtatgagtgaga

SEQ ID NO: 1036794 - DNA, 15 bp, Homo sapiens
gcaggtatgagtgag

SEQ ID NO: 1036795 - DNA, 15 bp, Homo sapiens
ggcaggtatgagtga

SEQ ID NO: 1036796 - DNA, 15 bp, Homo sapiens
gggcaggtatgagtg

SEQ ID NO: 1036797 - DNA, 15 bp, Homo sapiens
agggcaggtatgagt

SEQ ID NO: 1036798 - DNA, 15 bp, Homo sapiens
gagggcaggtatgag

SEQ ID NO: 1036799 - DNA, 15 bp, Homo sapiens
ggagggcaggtatga

SEQ ID NO: 1036800 - DNA, 15 bp, Homo sapiens
tggagggcaggtatg

SEQ ID NO: 1036801 - DNA, 15 bp, Homo sapiens
ctggagggcaggtat

SEQ ID NO: 1036802 - DNA, 15 bp, Homo sapiens
tctggagggcaggta

SEQ ID NO: 1036803 - DNA, 15 bp, Homo sapiens
ttctggagggcaggt

SEQ ID NO: 1036804 - DNA, 15 bp, Homo sapiens
tttctggagggcagg

SEQ ID NO: 1036805 - DNA, 15 bp, Homo sapiens
ctttctggagggcag

SEQ ID NO: 1036806 - DNA, 15 bp, Homo sapiens
cctttctggagggca

SEQ ID NO: 1036807 - DNA, 15 bp, Homo sapiens
tcctttctggagggc

SEQ ID NO: 1036808 - DNA, 15 bp, Homo sapiens
atcctttctggaggg

SEQ ID NO: 1036809 - DNA, 15 bp, Homo sapiens
tatcctttctggagg

SEQ ID NO: 1036810 - DNA, 15 bp, Homo sapiens
ttatcctttctggag

SEQ ID NO: 1036811 - DNA, 15 bp, Homo sapiens
tttatcctttctgga

SEQ ID NO: 1036812 - DNA, 15 bp, Homo sapiens
ttttatcctttctgg

SEQ ID NO: 1036813 - DNA, 15 bp, Homo sapiens
attttatcctttctg

SEQ ID NO: 1036814 - DNA, 15 bp, Homo sapiens
aattttatcctttct

SEQ ID NO: 1036815 - DNA, 15 bp, Homo sapiens
taattttatcctttc

SEQ ID NO: 1036816 - DNA, 15 bp, Homo sapiens
ataattttatccttt

SEQ ID NO: 1036817 - DNA, 15 bp, Homo sapiens
tataattttatcctt

SEQ ID NO: 1036818 - DNA, 15 bp, Homo sapiens
ttataattttatcct

SEQ ID NO: 1036819 - DNA, 15 bp, Homo sapiens
tttataattttatcc

SEQ ID NO: 1036820 - DNA, 15 bp, Homo sapiens
atttataattttatc

SEQ ID NO: 1036821 - DNA, 15 bp, Homo sapiens
catttataattttat

SEQ ID NO: 1036822 - DNA, 15 bp, Homo sapiens
acatttataatttta

SEQ ID NO: 1036823 - DNA, 15 bp, Homo sapiens
gacatttataatttt

SEQ ID NO: 1036824 - DNA, 15 bp, Homo sapiens
ggacatttataattt

SEQ ID NO: 1036825 - DNA, 15 bp, Homo sapiens
tggacatttataatt

SEQ ID NO: 1036826 - DNA, 15 bp, Homo sapiens
ttggacatttataat

SEQ ID NO: 1036827 - DNA, 15 bp, Homo sapiens
attggacatttataa

SEQ ID NO: 1036828 - DNA, 15 bp, Homo sapiens
aattggacatttata

SEQ ID NO: 1036829 - DNA, 15 bp, Homo sapiens
taattggacatttat

SEQ ID NO: 1036830 - DNA, 15 bp, Homo sapiens
ctaattggacattta

SEQ ID NO: 1036831 - DNA, 15 bp, Homo sapiens
tctaattggacattt

SEQ ID NO: 1036832 - DNA, 15 bp, Homo sapiens
ctctaattggacatt

SEQ ID NO: 1036833 - DNA, 15 bp, Homo sapiens
actctaattggacat

SEQ ID NO: 1036834 - DNA, 15 bp, Homo sapiens
gactctaattggaca

SEQ ID NO: 1036835 - DNA, 15 bp, Homo sapiens
agactctaattggac

SEQ ID NO: 1036836 - DNA, 15 bp, Homo sapiens
aagactctaattgga

SEQ ID NO: 1036837 - DNA, 15 bp, Homo sapiens
aaagactctaattgg

SEQ ID NO: 1036838 - DNA, 15 bp, Homo sapiens
taaagactctaattg

SEQ ID NO: 1036839 - DNA, 15 bp, Homo sapiens
ataaagactctaatt

SEQ ID NO: 1036840 - DNA, 15 bp, Homo sapiens
aataaagactctaat

SEQ ID NO: 1036841 - DNA, 15 bp, Homo sapiens
taataaagactctaa

SEQ ID NO: 1036842 - DNA, 15 bp, Homo sapiens
ctaataaagactcta

SEQ ID NO: 1036843 - DNA, 15 bp, Homo sapiens
actaataaagactct

SEQ ID NO: 1036844 - DNA, 15 bp, Homo sapiens
gactaataaagactc

SEQ ID NO: 1036845 - DNA, 15 bp, Homo sapiens
agactaataaagact

SEQ ID NO: 1036846 - DNA, 15 bp, Homo sapiens
gagactaataaagac

SEQ ID NO: 1036847 - DNA, 15 bp, Homo sapiens
agagactaataaaga

SEQ ID NO: 1036848 - DNA, 15 bp, Homo sapiens
aagagactaataaag

SEQ ID NO: 1036849 - DNA, 15 bp, Homo sapiens
gaagagactaataaa

SEQ ID NO: 1036850 - DNA, 15 bp, Homo sapiens
ggaagagactaataa

SEQ ID NO: 1036851 - DNA, 15 bp, Homo sapiens
aggaagagactaata

SEQ ID NO: 1036852 - DNA, 15 bp, Homo sapiens
taggaagagactaat

SEQ ID NO: 1036853 - DNA, 15 bp, Homo sapiens
ataggaagagactaa

SEQ ID NO: 1036854 - DNA, 15 bp, Homo sapiens
cataggaagagacta

SEQ ID NO: 1036855 - DNA, 15 bp, Homo sapiens
acataggaagagact

SEQ ID NO: 1036856 - DNA, 15 bp, Homo sapiens
tacataggaagagac

SEQ ID NO: 1036857 - DNA, 15 bp, Homo sapiens
ctacataggaagaga

SEQ ID NO: 1036858 - DNA, 15 bp, Homo sapiens
tctacataggaagag

SEQ ID NO: 1036859 - DNA, 15 bp, Homo sapiens
ttctacataggaaga

SEQ ID NO: 1036860 - DNA, 15 bp, Homo sapiens
attctacataggaag

SEQ ID NO: 1036861 - DNA, 15 bp, Homo sapiens
aattctacataggaa

SEQ ID NO: 1036862 - DNA, 15 bp, Homo sapiens
aaattctacatagga

SEQ ID NO: 1036863 - DNA, 15 bp, Homo sapiens
taaattctacatagg

SEQ ID NO: 1036864 - DNA, 15 bp, Homo sapiens
ataaattctacatag

SEQ ID NO: 1036865 - DNA, 15 bp, Homo sapiens
gataaattctacata

SEQ ID NO: 1036866 - DNA, 15 bp, Homo sapiens
tgataaattctacat

SEQ ID NO: 1036867 - DNA, 15 bp, Homo sapiens
ttgataaattctaca

SEQ ID NO: 1036868 - DNA, 15 bp, Homo sapiens
attgataaattctac

SEQ ID NO: 1036869 - DNA, 15 bp, Homo sapiens
tattgataaattcta

SEQ ID NO: 1036870 - DNA, 15 bp, Homo sapiens
ctattgataaattct

SEQ ID NO: 1036871 - DNA, 15 bp, Homo sapiens
actattgataaattc

SEQ ID NO: 1036872 - DNA, 15 bp, Homo sapiens
aactattgataaatt

SEQ ID NO: 1036873 - DNA, 15 bp, Homo sapiens
aaactattgataaat

SEQ ID NO: 1036874 - DNA, 15 bp, Homo sapiens
caaactattgataaa

SEQ ID NO: 1036875 - DNA, 15 bp, Homo sapiens
tcaaactattgataa

SEQ ID NO: 1036876 - DNA, 15 bp, Homo sapiens
gtcaaactattgata

SEQ ID NO: 1036877 - DNA, 15 bp, Homo sapiens
tgtcaaactattgat

SEQ ID NO: 1036878 - DNA, 15 bp, Homo sapiens
ctgtcaaactattga

SEQ ID NO: 1036879 - DNA, 15 bp, Homo sapiens
actgtcaaactattg

SEQ ID NO: 1036880 - DNA, 15 bp, Homo sapiens
aactgtcaaactatt

SEQ ID NO: 1036881 - DNA, 15 bp, Homo sapiens
gaactgtcaaactat

SEQ ID NO: 1036882 - DNA, 15 bp, Homo sapiens
agaactgtcaaacta

SEQ ID NO: 1036883 - DNA, 15 bp, Homo sapiens
cagaactgtcaaact

SEQ ID NO: 1036884 - DNA, 15 bp, Homo sapiens
gcagaactgtcaaac

SEQ ID NO: 1036885 - DNA, 15 bp, Homo sapiens
ctgcagaactgtcaa

SEQ ID NO: 1036886 - DNA, 15 bp, Homo sapiens
gctgcagaactgtca

SEQ ID NO: 1036887 - DNA, 15 bp, Homo sapiens
agctgcagaactgtc

SEQ ID NO: 1036888 - DNA, 15 bp, Homo sapiens
gagctgcagaactgt

SEQ ID NO: 1036889 - DNA, 15 bp, Homo sapiens
tgagctgcagaactg

SEQ ID NO: 1036890 - DNA, 15 bp, Homo sapiens
atgagctgcagaact

SEQ ID NO: 1036891 - DNA, 15 bp, Homo sapiens
catgagctgcagaac

SEQ ID NO: 1036892 - DNA, 15 bp, Homo sapiens
gcatgagctgcagaa

SEQ ID NO: 1036893 - DNA, 15 bp, Homo sapiens
tgcatgagctgcaga

SEQ ID NO: 1036894 - DNA, 15 bp, Homo sapiens
atgcatgagctgcag

SEQ ID NO: 1036895 - DNA, 15 bp, Homo sapiens
aatgcatgagctgca

SEQ ID NO: 1036896 - DNA, 15 bp, Homo sapiens
aaatgcatgagctgc

SEQ ID NO: 1036897 - DNA, 15 bp, Homo sapiens
aaaatgcatgagctg

SEQ ID NO: 1036898 - DNA, 15 bp, Homo sapiens
gaaaatgcatgagct

SEQ ID NO: 1036899 - DNA, 15 bp, Homo sapiens
tgaaaatgcatgagc

SEQ ID NO: 1036900 - DNA, 15 bp, Homo sapiens
ctgaaaatgcatgag

SEQ ID NO: 1036901 - DNA, 15 bp, Homo sapiens
tctgaaaatgcatga

SEQ ID NO: 1036902 - DNA, 15 bp, Homo sapiens
ttctgaaaatgcatg

SEQ ID NO: 1036903 - DNA, 15 bp, Homo sapiens
tttctgaaaatgcat

SEQ ID NO: 1036904 - DNA, 15 bp, Homo sapiens
ttttctgaaaatgca

SEQ ID NO: 1036905 - DNA, 15 bp, Homo sapiens
tttttctgaaaatgc

SEQ ID NO: 1036906 - DNA, 15 bp, Homo sapiens
atttttctgaaaatg

SEQ ID NO: 1036907 - DNA, 15 bp, Homo sapiens
gatttttctgaaaat

SEQ ID NO: 1036908 - DNA, 15 bp, Homo sapiens
ggatttttctgaaaa

SEQ ID NO: 1036909 - DNA, 15 bp, Homo sapiens
aggatttttctgaaa

SEQ ID NO: 1036910 - DNA, 15 bp, Homo sapiens
aaggatttttctgaa

SEQ ID NO: 1036911 - DNA, 15 bp, Homo sapiens
gaaggatttttctga

SEQ ID NO: 1036912 - DNA, 15 bp, Homo sapiens
agaaggatttttctg

SEQ ID NO: 1036913 - DNA, 15 bp, Homo sapiens
aagaaggatttttct

SEQ ID NO: 1036914 - DNA, 15 bp, Homo sapiens
gaagaaggatttttc

SEQ ID NO: 1036915 - DNA, 15 bp, Homo sapiens
tgaagaaggattttt

SEQ ID NO: 1036916 - DNA, 15 bp, Homo sapiens
ctgaagaaggatttt

SEQ ID NO: 1036917 - DNA, 15 bp, Homo sapiens
actgaagaaggattt

SEQ ID NO: 1036918 - DNA, 15 bp, Homo sapiens
aactgaagaaggatt

SEQ ID NO: 1036919 - DNA, 15 bp, Homo sapiens
aaactgaagaaggat

SEQ ID NO: 1036920 - DNA, 15 bp, Homo sapiens
taaactgaagaagga

SEQ ID NO: 1036921 - DNA, 15 bp, Homo sapiens
ttaaactgaagaagg

SEQ ID NO: 1036922 - DNA, 15 bp, Homo sapiens
tttaaactgaagaag

SEQ ID NO: 1036923 - DNA, 15 bp, Homo sapiens
ttttaaactgaagaa

SEQ ID NO: 1036924 - DNA, 15 bp, Homo sapiens
gttttaaactgaaga

SEQ ID NO: 1036925 - DNA, 15 bp, Homo sapiens
tgttttaaactgaag

SEQ ID NO: 1036926 - DNA, 15 bp, Homo sapiens
atgttttaaactgaa

SEQ ID NO: 1036927 - DNA, 15 bp, Homo sapiens
aatgttttaaactga

SEQ ID NO: 1036928 - DNA, 15 bp, Homo sapiens
gaatgttttaaactg

SEQ ID NO: 1036929 - DNA, 15 bp, Homo sapiens
ggaatgttttaaact

SEQ ID NO: 1036930 - DNA, 15 bp, Homo sapiens
tggaatgttttaaac

SEQ ID NO: 1036931 - DNA, 15 bp, Homo sapiens
gtggaatgttttaaa

SEQ ID NO: 1036932 - DNA, 15 bp, Homo sapiens
ggtggaatgttttaa

SEQ ID NO: 1036933 - DNA, 15 bp, Homo sapiens
tggtggaatgtttta

SEQ ID NO: 1036934 - DNA, 15 bp, Homo sapiens
atggtggaatgtttt

SEQ ID NO: 1036935 - DNA, 15 bp, Homo sapiens
aatggtggaatgttt

SEQ ID NO: 1036936 - DNA, 15 bp, Homo sapiens
caatggtggaatgtt

SEQ ID NO: 1036937 - DNA, 15 bp, Homo sapiens
acaatggtggaatgt

SEQ ID NO: 1036938 - DNA, 15 bp, Homo sapiens
aacaatggtggaatg

SEQ ID NO: 1036939 - DNA, 15 bp, Homo sapiens
aaacaatggtggaat

SEQ ID NO: 1036940 - DNA, 15 bp, Homo sapiens
aaaacaatggtggaa

SEQ ID NO: 1036941 - DNA, 15 bp, Homo sapiens
aaaaacaatggtgga

SEQ ID NO: 1036942 - DNA, 15 bp, Homo sapiens
aaaaaacaatggtgg

SEQ ID NO: 1036943 - DNA, 15 bp, Homo sapiens
caaaaaacaatggtg

SEQ ID NO: 1036944 - DNA, 15 bp, Homo sapiens
acaaaaaacaatggt

SEQ ID NO: 1036945 - DNA, 15 bp, Homo sapiens
aacaaaaaacaatgg

SEQ ID NO: 1036946 - DNA, 15 bp, Homo sapiens
aaaacaacaacaaaa

SEQ ID NO: 1036947 - DNA, 15 bp, Homo sapiens
aaaaacaacaacaaa

SEQ ID NO: 1036948 - DNA, 15 bp, Homo sapiens
gaaaaaacaacaaca

SEQ ID NO: 1036949 - DNA, 15 bp, Homo sapiens
tgaaaaaacaacaac

SEQ ID NO: 1036950 - DNA, 15 bp, Homo sapiens
ttgaaaaaacaacaa

SEQ ID NO: 1036951 - DNA, 15 bp, Homo sapiens
tttgaaaaaacaaca

SEQ ID NO: 1036952 - DNA, 15 bp, Homo sapiens
atttgaaaaaacaac

SEQ ID NO: 1036953 - DNA, 15 bp, Homo sapiens
aatttgaaaaaacaa

SEQ ID NO: 1036954 - DNA, 15 bp, Homo sapiens
caatttgaaaaaaca

SEQ ID NO: 1036955 - DNA, 15 bp, Homo sapiens
gcaatttgaaaaaac

SEQ ID NO: 1036956 - DNA, 15 bp, Homo sapiens
tgcaatttgaaaaaa

SEQ ID NO: 1036957 - DNA, 15 bp, Homo sapiens
atgcaatttgaaaaa

SEQ ID NO: 1036958 - DNA, 15 bp, Homo sapiens
aatgcaatttgaaaa

SEQ ID NO: 1036959 - DNA, 15 bp, Homo sapiens
caatgcaatttgaaa

SEQ ID NO: 1036960 - DNA, 15 bp, Homo sapiens
ccaatgcaatttgaa

SEQ ID NO: 1036961 - DNA, 15 bp, Homo sapiens
cccaatgcaatttga

SEQ ID NO: 1036962 - DNA, 15 bp, Homo sapiens
tcccaatgcaatttg

SEQ ID NO: 1036963 - DNA, 15 bp, Homo sapiens
ttcccaatgcaattt

SEQ ID NO: 1036964 - DNA, 15 bp, Homo sapiens
cttcccaatgcaatt

SEQ ID NO: 1036965 - DNA, 15 bp, Homo sapiens
tcttcccaatgcaat

SEQ ID NO: 1036966 - DNA, 15 bp, Homo sapiens
ttcttcccaatgcaa

SEQ ID NO: 1036967 - DNA, 15 bp, Homo sapiens
cttcttcccaatgca

SEQ ID NO: 1036968 - DNA, 15 bp, Homo sapiens
ccttcttcccaatgc

SEQ ID NO: 1036969 - DNA, 15 bp, Homo sapiens
accttcttcccaatg

SEQ ID NO: 1036970 - DNA, 15 bp, Homo sapiens
taccttcttcccaat

SEQ ID NO: 1036971 - DNA, 15 bp, Homo sapiens
ttaccttcttcccaa

SEQ ID NO: 1036972 - DNA, 15 bp, Homo sapiens
cttaccttcttccca

SEQ ID NO: 1036973 - DNA, 15 bp, Homo sapiens
ccttaccttcttccc

SEQ ID NO: 1036974 - DNA, 15 bp, Homo sapiens
tccttaccttcttcc

SEQ ID NO: 1036975 - DNA, 15 bp, Homo sapiens
ctccttaccttcttc

SEQ ID NO: 1036976 - DNA, 15 bp, Homo sapiens
actccttaccttctt

SEQ ID NO: 1036977 - DNA, 15 bp, Homo sapiens
tactccttaccttct

SEQ ID NO: 1036978 - DNA, 15 bp, Homo sapiens
atactccttaccttc

SEQ ID NO: 1036979 - DNA, 15 bp, Homo sapiens
catactccttacctt

SEQ ID NO: 1036980 - DNA, 15 bp, Homo sapiens
acatactccttacct

SEQ ID NO: 1036981 - DNA, 15 bp, Homo sapiens
tacatactccttacc

SEQ ID NO: 1036982 - DNA, 15 bp, Homo sapiens
atacatactccttac

SEQ ID NO: 1036983 - DNA, 15 bp, Homo sapiens
tatacatactcctta

SEQ ID NO: 1036984 - DNA, 15 bp, Homo sapiens
ctatacatactcctt

SEQ ID NO: 1036985 - DNA, 15 bp, Homo sapiens
tctatacatactcct

SEQ ID NO: 1036986 - DNA, 15 bp, Homo sapiens
ttctatacatactcc

SEQ ID NO: 1036987 - DNA, 15 bp, Homo sapiens
attctatacatactc

SEQ ID NO: 1036988 - DNA, 15 bp, Homo sapiens
tattctatacatact

SEQ ID NO: 1036989 - DNA, 15 bp, Homo sapiens
gtattctatacatac

SEQ ID NO: 1036990 - DNA, 15 bp, Homo sapiens
tgtattctatacata

SEQ ID NO: 1036991 - DNA, 15 bp, Homo sapiens
ttgtattctatacat

SEQ ID NO: 1036992 - DNA, 15 bp, Homo sapiens
attgtattctataca

SEQ ID NO: 1036993 - DNA, 15 bp, Homo sapiens
aattgtattctatac

SEQ ID NO: 1036994 - DNA, 15 bp, Homo sapiens
gaattgtattctata

SEQ ID NO: 1036995 - DNA, 15 bp, Homo sapiens
agaattgtattctat

SEQ ID NO: 1036996 - DNA, 15 bp, Homo sapiens
cagaattgtattcta

SEQ ID NO: 1036997 - DNA, 15 bp, Homo sapiens
acagaattgtattct

SEQ ID NO: 1036998 - DNA, 15 bp, Homo sapiens
cacagaattgtattc

SEQ ID NO: 1036999 - DNA, 15 bp, Homo sapiens
tcacagaattgtatt

SEQ ID NO: 1037000 - DNA, 15 bp, Homo sapiens
ttcacagaattgtat

SEQ ID NO: 1037001 - DNA, 15 bp, Homo sapiens
gttcacagaattgta

SEQ ID NO: 1037002 - DNA, 15 bp, Homo sapiens
tgttcacagaattgt

SEQ ID NO: 1037003 - DNA, 15 bp, Homo sapiens
ttgttcacagaattg

SEQ ID NO: 1037004 - DNA, 15 bp, Homo sapiens
tttgttcacagaatt

SEQ ID NO: 1037005 - DNA, 15 bp, Homo sapiens
ctttgttcacagaat

SEQ ID NO: 1037006 - DNA, 15 bp, Homo sapiens
actttgttcacagaa

SEQ ID NO: 1037007 - DNA, 15 bp, Homo sapiens
cactttgttcacaga

SEQ ID NO: 1037008 - DNA, 15 bp, Homo sapiens
tcactttgttcacag

SEQ ID NO: 1037009 - DNA, 15 bp, Homo sapiens
ctcactttgttcaca

SEQ ID NO: 1037010 - DNA, 15 bp, Homo sapiens
actcactttgttcac

SEQ ID NO: 1037011 - DNA, 15 bp, Homo sapiens
cactcactttgttca

SEQ ID NO: 1037012 - DNA, 15 bp, Homo sapiens
tcactcactttgttc

SEQ ID NO: 1037013 - DNA, 15 bp, Homo sapiens
ctcactcactttgtt

SEQ ID NO: 1037014 - DNA, 15 bp, Homo sapiens
actcactcactttgt

SEQ ID NO: 1037015 - DNA, 15 bp, Homo sapiens
aactcactcactttg

SEQ ID NO: 1037016 - DNA, 15 bp, Homo sapiens
taactcactcacttt

SEQ ID NO: 1037017 - DNA, 15 bp, Homo sapiens
gtaactcactcactt

SEQ ID NO: 1037018 - DNA, 15 bp, Homo sapiens
agtaactcactcact

SEQ ID NO: 1037019 - DNA, 15 bp, Homo sapiens
aagtaactcactcac

SEQ ID NO: 1037020 - DNA, 15 bp, Homo sapiens
caagtaactcactca

SEQ ID NO: 1037021 - DNA, 15 bp, Homo sapiens
gcaagtaactcactc

SEQ ID NO: 1037022 - DNA, 15 bp, Homo sapiens
agcaagtaactcact

SEQ ID NO: 1037023 - DNA, 15 bp, Homo sapiens
gagcaagtaactcac

SEQ ID NO: 1037024 - DNA, 15 bp, Homo sapiens
ggagcaagtaactca

SEQ ID NO: 1037025 - DNA, 15 bp, Homo sapiens
aggagcaagtaactc

SEQ ID NO: 1037026 - DNA, 15 bp, Homo sapiens
aaggagcaagtaact

SEQ ID NO: 1037027 - DNA, 15 bp, Homo sapiens
caaggagcaagtaac

SEQ ID NO: 1037028 - DNA, 15 bp, Homo sapiens
tcaaggagcaagtaa

SEQ ID NO: 1037029 - DNA, 15 bp, Homo sapiens
ctcaaggagcaagta

SEQ ID NO: 1037030 - DNA, 15 bp, Homo sapiens
cctcaaggagcaagt

SEQ ID NO: 1037031 - DNA, 15 bp, Homo sapiens
ccctcaaggagcaag

SEQ ID NO: 1037032 - DNA, 15 bp, Homo sapiens
gccctcaaggagcaa

SEQ ID NO: 1037033 - DNA, 15 bp, Homo sapiens
tgccctcaaggagca

SEQ ID NO: 1037034 - DNA, 15 bp, Homo sapiens
ctgccctcaaggagc

SEQ ID NO: 1037035 - DNA, 15 bp, Homo sapiens
tctgccctcaaggag

SEQ ID NO: 1037036 - DNA, 15 bp, Homo sapiens
ttctgccctcaagga

SEQ ID NO: 1037037 - DNA, 15 bp, Homo sapiens
tttctgccctcaagg

SEQ ID NO: 1037038 - DNA, 15 bp, Homo sapiens
gtttctgccctcaag

SEQ ID NO: 1037039 - DNA, 15 bp, Homo sapiens
agtttctgccctcaa

SEQ ID NO: 1037040 - DNA, 15 bp, Homo sapiens
gagtttctgccctca

SEQ ID NO: 1037041 - DNA, 15 bp, Homo sapiens
agagtttctgccctc

SEQ ID NO: 1037042 - DNA, 15 bp, Homo sapiens
cagagtttctgccct

SEQ ID NO: 1037043 - DNA, 15 bp, Homo sapiens
ccagagtttctgccc

SEQ ID NO: 1037044 - DNA, 15 bp, Homo sapiens
gccagagtttctgcc

SEQ ID NO: 1037045 - DNA, 15 bp, Homo sapiens
ggccagagtttctgc

SEQ ID NO: 1037046 - DNA, 15 bp, Homo sapiens
tggccagagtttctg

SEQ ID NO: 1037047 - DNA, 15 bp, Homo sapiens
atggccagagtttct

SEQ ID NO: 1037048 - DNA, 15 bp, Homo sapiens
aatggccagagtttc

SEQ ID NO: 1037049 - DNA, 15 bp, Homo sapiens
aaatggccagagttt

SEQ ID NO: 1037050 - DNA, 15 bp, Homo sapiens
caaatggccagagtt

SEQ ID NO: 1037051 - DNA, 15 bp, Homo sapiens
acaaatggccagagt

SEQ ID NO: 1037052 - DNA, 15 bp, Homo sapiens
gacaaatggccagag

SEQ ID NO: 1037053 - DNA, 15 bp, Homo sapiens
ggacaaatggccaga

SEQ ID NO: 1037054 - DNA, 15 bp, Homo sapiens
aggacaaatggccag

SEQ ID NO: 1037055 - DNA, 15 bp, Homo sapiens
gaggacaaatggcca

SEQ ID NO: 1037056 - DNA, 15 bp, Homo sapiens
tgaggacaaatggcc

SEQ ID NO: 1037057 - DNA, 15 bp, Homo sapiens
ttgaggacaaatggc

SEQ ID NO: 1037058 - DNA, 15 bp, Homo sapiens
cttgaggacaaatgg

SEQ ID NO: 1037059 - DNA, 15 bp, Homo sapiens
acttgaggacaaatg

SEQ ID NO: 1037060 - DNA, 15 bp, Homo sapiens
gacttgaggacaaat

SEQ ID NO: 1037061 - DNA, 15 bp, Homo sapiens
ggacttgaggacaaa

SEQ ID NO: 1037062 - DNA, 15 bp, Homo sapiens
aggacttgaggacaa

SEQ ID NO: 1037063 - DNA, 15 bp, Homo sapiens
gaggacttgaggaca

SEQ ID NO: 1037064 - DNA, 15 bp, Homo sapiens
tgaggacttgaggac

SEQ ID NO: 1037065 - DNA, 15 bp, Homo sapiens
ctgaggacttgagga

SEQ ID NO: 1037066 - DNA, 15 bp, Homo sapiens
actgaggacttgagg

SEQ ID NO: 1037067 - DNA, 15 bp, Homo sapiens
cactgaggacttgag

SEQ ID NO: 1037068 - DNA, 15 bp, Homo sapiens
gcactgaggacttga

SEQ ID NO: 1037069 - DNA, 15 bp, Homo sapiens
ggcactgaggacttg

SEQ ID NO: 1037070 - DNA, 15 bp, Homo sapiens
aggcactgaggactt

SEQ ID NO: 1037071 - DNA, 15 bp, Homo sapiens
caggcactgaggact

SEQ ID NO: 1037072 - DNA, 15 bp, Homo sapiens
tcaggcactgaggac

SEQ ID NO: 1037073 - DNA, 15 bp, Homo sapiens
gtcaggcactgagga

SEQ ID NO: 1037074 - DNA, 15 bp, Homo sapiens
tgtcaggcactgagg

SEQ ID NO: 1037075 - DNA, 15 bp, Homo sapiens
gtgtcaggcactgag

SEQ ID NO: 1037076 - DNA, 15 bp, Homo sapiens
tgtgtcaggcactga

SEQ ID NO: 1037077 - DNA, 15 bp, Homo sapiens
atgtgtcaggcactg

SEQ ID NO: 1037078 - DNA, 15 bp, Homo sapiens
tatgtgtcaggcact

SEQ ID NO: 1037079 - DNA, 15 bp, Homo sapiens
atatgtgtcaggcac

SEQ ID NO: 1037080 - DNA, 15 bp, Homo sapiens
gatatgtgtcaggca

SEQ ID NO: 1037081 - DNA, 15 bp, Homo sapiens
ggatatgtgtcaggc

SEQ ID NO: 1037082 - DNA, 15 bp, Homo sapiens
tggatatgtgtcagg

SEQ ID NO: 1037083 - DNA, 15 bp, Homo sapiens
atggatatgtgtcag

SEQ ID NO: 1037084 - DNA, 15 bp, Homo sapiens
catggatatgtgtca

SEQ ID NO: 1037085 - DNA, 15 bp, Homo sapiens
acatggatatgtgtc

SEQ ID NO: 1037086 - DNA, 15 bp, Homo sapiens
tacatggatatgtgt

SEQ ID NO: 1037087 - DNA, 15 bp, Homo sapiens
atacatggatatgtg

SEQ ID NO: 1037088 - DNA, 15 bp, Homo sapiens
aatacatggatatgt

SEQ ID NO: 1037089 - DNA, 15 bp, Homo sapiens
taatacatggatatg

SEQ ID NO: 1037090 - DNA, 15 bp, Homo sapiens
ttaatacatggatat

SEQ ID NO: 1037091 - DNA, 15 bp, Homo sapiens
attaatacatggata

SEQ ID NO: 1037092 - DNA, 15 bp, Homo sapiens
aattaatacatggat

SEQ ID NO: 1037093 - DNA, 15 bp, Homo sapiens
caattaatacatgga

SEQ ID NO: 1037094 - DNA, 15 bp, Homo sapiens
tcaattaatacatgg

SEQ ID NO: 1037095 - DNA, 15 bp, Homo sapiens
ctcaattaatacatg

SEQ ID NO: 1037096 - DNA, 15 bp, Homo sapiens
gctcaattaatacat

SEQ ID NO: 1037097 - DNA, 15 bp, Homo sapiens
agctcaattaataca

SEQ ID NO: 1037098 - DNA, 15 bp, Homo sapiens
cagctcaattaatac

SEQ ID NO: 1037099 - DNA, 15 bp, Homo sapiens
gcagctcaattaata

SEQ ID NO: 1037100 - DNA, 15 bp, Homo sapiens
agcagctcaattaat

SEQ ID NO: 1037101 - DNA, 15 bp, Homo sapiens
aagcagctcaattaa

SEQ ID NO: 1037102 - DNA, 15 bp, Homo sapiens
gaagcagctcaatta

SEQ ID NO: 1037103 - DNA, 15 bp, Homo sapiens
agaagcagctcaatt

SEQ ID NO: 1037104 - DNA, 15 bp, Homo sapiens
tagaagcagctcaat

SEQ ID NO: 1037105 - DNA, 15 bp, Homo sapiens
atagaagcagctcaa

SEQ ID NO: 1037106 - DNA, 15 bp, Homo sapiens
catagaagcagctca

SEQ ID NO: 1037107 - DNA, 15 bp, Homo sapiens
acatagaagcagctc

SEQ ID NO: 1037108 - DNA, 15 bp, Homo sapiens
cacatagaagcagct

SEQ ID NO: 1037109 - DNA, 15 bp, Homo sapiens
gcacatagaagcagc

SEQ ID NO: 1037110 - DNA, 15 bp, Homo sapiens
ggcacatagaagcag

SEQ ID NO: 1037111 - DNA, 15 bp, Homo sapiens
tggcacatagaagca

SEQ ID NO: 1037112 - DNA, 15 bp, Homo sapiens
ctggcacatagaagc

SEQ ID NO: 1037113 - DNA, 15 bp, Homo sapiens
cctggcacatagaag

SEQ ID NO: 1037114 - DNA, 15 bp, Homo sapiens
acctggcacatagaa

SEQ ID NO: 1037115 - DNA, 15 bp, Homo sapiens
cacctggcacataga

SEQ ID NO: 1037116 - DNA, 15 bp, Homo sapiens
gcacctggcacatag

SEQ ID NO: 1037117 - DNA, 15 bp, Homo sapiens
agcacctggcacata

SEQ ID NO: 1037118 - DNA, 15 bp, Homo sapiens
cagcacctggcacat

SEQ ID NO: 1037119 - DNA, 15 bp, Homo sapiens
ccagcacctggcaca

SEQ ID NO: 1037120 - DNA, 15 bp, Homo sapiens
tccagcacctggcac

SEQ ID NO: 1037121 - DNA, 15 bp, Homo sapiens
ctccagcacctggca

SEQ ID NO: 1037122 - DNA, 15 bp, Homo sapiens
actccagcacctggc

SEQ ID NO: 1037123 - DNA, 15 bp, Homo sapiens
tactccagcacctgg

SEQ ID NO: 1037124 - DNA, 15 bp, Homo sapiens
gtactccagcacctg

SEQ ID NO: 1037125 - DNA, 15 bp, Homo sapiens
tgtactccagcacct

SEQ ID NO: 1037126 - DNA, 15 bp, Homo sapiens
ctgtactccagcacc

SEQ ID NO: 1037127 - DNA, 15 bp, Homo sapiens
gctgtactccagcac

SEQ ID NO: 1037128 - DNA, 15 bp, Homo sapiens
tgctgtactccagca

SEQ ID NO: 1037129 - DNA, 15 bp, Homo sapiens
ctgctgtactccagc

SEQ ID NO: 1037130 - DNA, 15 bp, Homo sapiens
actgctgtactccag

SEQ ID NO: 1037131 - DNA, 15 bp, Homo sapiens
tactgctgtactcca

SEQ ID NO: 1037132 - DNA, 15 bp, Homo sapiens
ttactgctgtactcc

SEQ ID NO: 1037133 - DNA, 15 bp, Homo sapiens
tttactgctgtactc

SEQ ID NO: 1037134 - DNA, 15 bp, Homo sapiens
ctttactgctgtact

SEQ ID NO: 1037135 - DNA, 15 bp, Homo sapiens
gctttactgctgtac

SEQ ID NO: 1037136 - DNA, 15 bp, Homo sapiens
tgctttactgctgta

SEQ ID NO: 1037137 - DNA, 15 bp, Homo sapiens
ctgctttactgctgt

SEQ ID NO: 1037138 - DNA, 15 bp, Homo sapiens
tctgctttactgctg

SEQ ID NO: 1037139 - DNA, 15 bp, Homo sapiens
gtctgctttactgct

SEQ ID NO: 1037140 - DNA, 15 bp, Homo sapiens
tgtctgctttactgc

SEQ ID NO: 1037141 - DNA, 15 bp, Homo sapiens
ctgtctgctttactg

SEQ ID NO: 1037142 - DNA, 15 bp, Homo sapiens
cctgtctgctttact

SEQ ID NO: 1037143 - DNA, 15 bp, Homo sapiens
acctgtctgctttac

SEQ ID NO: 1037144 - DNA, 15 bp, Homo sapiens
tacctgtctgcttta

SEQ ID NO: 1037145 - DNA, 15 bp, Homo sapiens
atacctgtctgcttt

SEQ ID NO: 1037146 - DNA, 15 bp, Homo sapiens
tatacctgtctgctt

SEQ ID NO: 1037147 - DNA, 15 bp, Homo sapiens
ctatacctgtctgct

SEQ ID NO: 1037148 - DNA, 15 bp, Homo sapiens
actatacctgtctgc

SEQ ID NO: 1037149 - DNA, 15 bp, Homo sapiens
aactatacctgtctg

SEQ ID NO: 1037150 - DNA, 15 bp, Homo sapiens
gaactatacctgtct

SEQ ID NO: 1037151 - DNA, 15 bp, Homo sapiens
ggaactatacctgtc

SEQ ID NO: 1037152 - DNA, 15 bp, Homo sapiens
aggaactatacctgt

SEQ ID NO: 1037153 - DNA, 15 bp, Homo sapiens
gaggaactatacctg

SEQ ID NO: 1037154 - DNA, 15 bp, Homo sapiens
ggaggaactatacct

SEQ ID NO: 1037155 - DNA, 15 bp, Homo sapiens
aggaggaactatacc

SEQ ID NO: 1037156 - DNA, 15 bp, Homo sapiens
aaggaggaactatac

SEQ ID NO: 1037157 - DNA, 15 bp, Homo sapiens
caaggaggaactata

SEQ ID NO: 1037158 - DNA, 15 bp, Homo sapiens
ccaaggaggaactat

SEQ ID NO: 1037159 - DNA, 15 bp, Homo sapiens
tccaaggaggaacta

SEQ ID NO: 1037160 - DNA, 15 bp, Homo sapiens
gtccaaggaggaact

SEQ ID NO: 1037161 - DNA, 15 bp, Homo sapiens
tgtccaaggaggaac

SEQ ID NO: 1037162 - DNA, 15 bp, Homo sapiens
ctgtccaaggaggaa

SEQ ID NO: 1037163 - DNA, 15 bp, Homo sapiens
tctgtccaaggagga

SEQ ID NO: 1037164 - DNA, 15 bp, Homo sapiens
ctctgtccaaggagg

SEQ ID NO: 1037165 - DNA, 15 bp, Homo sapiens
cctctgtccaaggag

SEQ ID NO: 1037166 - DNA, 15 bp, Homo sapiens
acctctgtccaagga

SEQ ID NO: 1037167 - DNA, 15 bp, Homo sapiens
tacctctgtccaagg

SEQ ID NO: 1037168 - DNA, 15 bp, Homo sapiens
ttacctctgtccaag

SEQ ID NO: 1037169 - DNA, 15 bp, Homo sapiens
attacctctgtccaa

SEQ ID NO: 1037170 - DNA, 15 bp, Homo sapiens
tattacctctgtcca

SEQ ID NO: 1037171 - DNA, 15 bp, Homo sapiens
ctattacctctgtcc

SEQ ID NO: 1037172 - DNA, 15 bp, Homo sapiens
actattacctctgtc

SEQ ID NO: 1037173 - DNA, 15 bp, Homo sapiens
gactattacctctgt

SEQ ID NO: 1037174 - DNA, 15 bp, Homo sapiens
tgactattacctctg

SEQ ID NO: 1037175 - DNA, 15 bp, Homo sapiens
ttgactattacctct

SEQ ID NO: 1037176 - DNA, 15 bp, Homo sapiens
cttgactattacctc

SEQ ID NO: 1037177 - DNA, 15 bp, Homo sapiens
ccttgactattacct

SEQ ID NO: 1037178 - DNA, 15 bp, Homo sapiens
gccttgactattacc

SEQ ID NO: 1037179 - DNA, 15 bp, Homo sapiens
tgccttgactattac

SEQ ID NO: 1037180 - DNA, 15 bp, Homo sapiens
ttgccttgactatta

SEQ ID NO: 1037181 - DNA, 15 bp, Homo sapiens
tttgccttgactatt

SEQ ID NO: 1037182 - DNA, 15 bp, Homo sapiens
ttttgccttgactat

SEQ ID NO: 1037183 - DNA, 15 bp, Homo sapiens
tttttgccttgacta

SEQ ID NO: 1037184 - DNA, 15 bp, Homo sapiens
ttttttgccttgact

SEQ ID NO: 1037185 - DNA, 15 bp, Homo sapiens
tttttttgccttgac

SEQ ID NO: 1037186 - DNA, 15 bp, Homo sapiens
ttttttttgccttga

SEQ ID NO: 1037187 - DNA, 15 bp, Homo sapiens
tttttttttgccttg

SEQ ID NO: 1037188 - DNA, 15 bp, Homo sapiens
ttttttttttgcctt

SEQ ID NO: 1037189 - DNA, 15 bp, Homo sapiens
tttttttttttgcct

SEQ ID NO: 1037190 - DNA, 15 bp, Homo sapiens
ttttttttttttgcc

SEQ ID NO: 1037191 - DNA, 15 bp, Homo sapiens
gttttttttttttgc

SEQ ID NO: 1037192 - DNA, 15 bp, Homo sapiens
actgttttttttttt

SEQ ID NO: 1037193 - DNA, 15 bp, Homo sapiens
aactgtttttttttt

SEQ ID NO: 1037194 - DNA, 15 bp, Homo sapiens
taactgttttttttt

SEQ ID NO: 1037195 - DNA, 15 bp, Homo sapiens
ataactgtttttttt

SEQ ID NO: 1037196 - DNA, 15 bp, Homo sapiens
aataactgttttttt

SEQ ID NO: 1037197 - DNA, 15 bp, Homo sapiens
caataactgtttttt

SEQ ID NO: 1037198 - DNA, 15 bp, Homo sapiens
tcaataactgttttt

SEQ ID NO: 1037199 - DNA, 15 bp, Homo sapiens
ctcaataactgtttt

SEQ ID NO: 1037200 - DNA, 15 bp, Homo sapiens
gctcaataactgttt

SEQ ID NO: 1037201 - DNA, 15 bp, Homo sapiens
agctcaataactgtt

SEQ ID NO: 1037202 - DNA, 15 bp, Homo sapiens
aagctcaataactgt

SEQ ID NO: 1037203 - DNA, 15 bp, Homo sapiens
caagctcaataactg

SEQ ID NO: 1037204 - DNA, 15 bp, Homo sapiens
acaagctcaataact

SEQ ID NO: 1037205 - DNA, 15 bp, Homo sapiens
aacaagctcaataac

SEQ ID NO: 1037206 - DNA, 15 bp, Homo sapiens
caacaagctcaataa

SEQ ID NO: 1037207 - DNA, 15 bp, Homo sapiens
acaacaagctcaata

SEQ ID NO: 1037208 - DNA, 15 bp, Homo sapiens
aacaacaagctcaat

SEQ ID NO: 1037209 - DNA, 15 bp, Homo sapiens
taacaacaagctcaa

SEQ ID NO: 1037210 - DNA, 15 bp, Homo sapiens
ataacaacaagctca

SEQ ID NO: 1037211 - DNA, 15 bp, Homo sapiens
tataacaacaagctc

SEQ ID NO: 1037212 - DNA, 15 bp, Homo sapiens
ttataacaacaagct

SEQ ID NO: 1037213 - DNA, 15 bp, Homo sapiens
cttataacaacaagc

SEQ ID NO: 1037214 - DNA, 15 bp, Homo sapiens
acttataacaacaag

SEQ ID NO: 1037215 - DNA, 15 bp, Homo sapiens
cacttataacaacaa

SEQ ID NO: 1037216 - DNA, 15 bp, Homo sapiens
gcacttataacaaca

SEQ ID NO: 1037217 - DNA, 15 bp, Homo sapiens
tgcacttataacaac

SEQ ID NO: 1037218 - DNA, 15 bp, Homo sapiens
ttgcacttataacaa

SEQ ID NO: 1037219 - DNA, 15 bp, Homo sapiens
tttgcacttataaca

SEQ ID NO: 1037220 - DNA, 15 bp, Homo sapiens
ctttgcacttataac

SEQ ID NO: 1037221 - DNA, 15 bp, Homo sapiens
cctttgcacttataa

SEQ ID NO: 1037222 - DNA, 15 bp, Homo sapiens
ccctttgcacttata

SEQ ID NO: 1037223 - DNA, 15 bp, Homo sapiens
accctttgcacttat

SEQ ID NO: 1037224 - DNA, 15 bp, Homo sapiens
aaccctttgcactta

SEQ ID NO: 1037225 - DNA, 15 bp, Homo sapiens
gaaccctttgcactt

SEQ ID NO: 1037226 - DNA, 15 bp, Homo sapiens
agaaccctttgcact

SEQ ID NO: 1037227 - DNA, 15 bp, Homo sapiens
tagaaccctttgcac

SEQ ID NO: 1037228 - DNA, 15 bp, Homo sapiens
atagaaccctttgca

SEQ ID NO: 1037229 - DNA, 15 bp, Homo sapiens
catagaaccctttgc

SEQ ID NO: 1037230 - DNA, 15 bp, Homo sapiens
tcatagaaccctttg

SEQ ID NO: 1037231 - DNA, 15 bp, Homo sapiens
ttcatagaacccttt

SEQ ID NO: 1037232 - DNA, 15 bp, Homo sapiens
tttcatagaaccctt

SEQ ID NO: 1037233 - DNA, 15 bp, Homo sapiens
ctttcatagaaccct

SEQ ID NO: 1037234 - DNA, 15 bp, Homo sapiens
cctttcatagaaccc

SEQ ID NO: 1037235 - DNA, 15 bp, Homo sapiens
ccctttcatagaacc

SEQ ID NO: 1037236 - DNA, 15 bp, Homo sapiens
cccctttcatagaac

SEQ ID NO: 1037237 - DNA, 15 bp, Homo sapiens
tcccctttcatagaa

SEQ ID NO: 1037238 - DNA, 15 bp, Homo sapiens
ttcccctttcataga

SEQ ID NO: 1037239 - DNA, 15 bp, Homo sapiens
cttcccctttcatag

SEQ ID NO: 1037240 - DNA, 15 bp, Homo sapiens
acttcccctttcata

SEQ ID NO: 1037241 - DNA, 15 bp, Homo sapiens
tacttcccctttcat

SEQ ID NO: 1037242 - DNA, 15 bp, Homo sapiens
atacttcccctttca

SEQ ID NO: 1037243 - DNA, 15 bp, Homo sapiens
catacttcccctttc

SEQ ID NO: 1037244 - DNA, 15 bp, Homo sapiens
ccatacttccccttt

SEQ ID NO: 1037245 - DNA, 15 bp, Homo sapiens
cccatacttcccctt

SEQ ID NO: 1037246 - DNA, 15 bp, Homo sapiens
ccccatacttcccct

SEQ ID NO: 1037247 - DNA, 15 bp, Homo sapiens
accccatacttcccc

SEQ ID NO: 1037248 - DNA, 15 bp, Homo sapiens
caccccatacttccc

SEQ ID NO: 1037249 - DNA, 15 bp, Homo sapiens
gcaccccatacttcc

SEQ ID NO: 1037250 - DNA, 15 bp, Homo sapiens
ggcaccccatacttc

SEQ ID NO: 1037251 - DNA, 15 bp, Homo sapiens
aggcaccccatactt

SEQ ID NO: 1037252 - DNA, 15 bp, Homo sapiens
gaggcaccccatact

SEQ ID NO: 1037253 - DNA, 15 bp, Homo sapiens
cgaggcaccccatac

SEQ ID NO: 1037254 - DNA, 15 bp, Homo sapiens
ccgaggcaccccata

SEQ ID NO: 1037255 - DNA, 15 bp, Homo sapiens
cccgaggcaccccat

SEQ ID NO: 1037256 - DNA, 15 bp, Homo sapiens
tcccgaggcacccca

SEQ ID NO: 1037257 - DNA, 15 bp, Homo sapiens
ctcccgaggcacccc

SEQ ID NO: 1037258 - DNA, 15 bp, Homo sapiens
cctcccgaggcaccc

SEQ ID NO: 1037259 - DNA, 15 bp, Homo sapiens
ccctcccgaggcacc

SEQ ID NO: 1037260 - DNA, 15 bp, Homo sapiens
gccctcccgaggcac

SEQ ID NO: 1037261 - DNA, 15 bp, Homo sapiens
tgccctcccgaggca

SEQ ID NO: 1037262 - DNA, 15 bp, Homo sapiens
gtgccctcccgaggc

SEQ ID NO: 1037263 - DNA, 15 bp, Homo sapiens
tgtgccctcccgagg

SEQ ID NO: 1037264 - DNA, 15 bp, Homo sapiens
ttgtgccctcccgag

SEQ ID NO: 1037265 - DNA, 15 bp, Homo sapiens
gttgtgccctcccga

SEQ ID NO: 1037266 - DNA, 15 bp, Homo sapiens
cgttgtgccctcccg

SEQ ID NO: 1037267 - DNA, 15 bp, Homo sapiens
acgttgtgccctccc

SEQ ID NO: 1037268 - DNA, 15 bp, Homo sapiens
cacgttgtgccctcc

SEQ ID NO: 1037269 - DNA, 15 bp, Homo sapiens
ccacgttgtgccctc

SEQ ID NO: 1037270 - DNA, 15 bp, Homo sapiens
cccacgttgtgccct

SEQ ID NO: 1037271 - DNA, 15 bp, Homo sapiens
ccccacgttgtgccc

SEQ ID NO: 1037272 - DNA, 15 bp, Homo sapiens
tccccacgttgtgcc

SEQ ID NO: 1037273 - DNA, 15 bp, Homo sapiens
gtccccacgttgtgc

SEQ ID NO: 1037274 - DNA, 15 bp, Homo sapiens
ggtccccacgttgtg

SEQ ID NO: 1037275 - DNA, 15 bp, Homo sapiens
aggtccccacgttgt

SEQ ID NO: 1037276 - DNA, 15 bp, Homo sapiens
taggtccccacgttg

SEQ ID NO: 1037277 - DNA, 15 bp, Homo sapiens
ttaggtccccacgtt

SEQ ID NO: 1037278 - DNA, 15 bp, Homo sapiens
gttaggtccccacgt

SEQ ID NO: 1037279 - DNA, 15 bp, Homo sapiens
ggttaggtccccacg

SEQ ID NO: 1037280 - DNA, 15 bp, Homo sapiens
aggttaggtccccac

SEQ ID NO: 1037281 - DNA, 15 bp, Homo sapiens
taggttaggtcccca

SEQ ID NO: 1037282 - DNA, 15 bp, Homo sapiens
ctaggttaggtcccc

SEQ ID NO: 1037283 - DNA, 15 bp, Homo sapiens
actaggttaggtccc

SEQ ID NO: 1037284 - DNA, 15 bp, Homo sapiens
gactaggttaggtcc

SEQ ID NO: 1037285 - DNA, 15 bp, Homo sapiens
agactaggttaggtc

SEQ ID NO: 1037286 - DNA, 15 bp, Homo sapiens
gagactaggttaggt

SEQ ID NO: 1037287 - DNA, 15 bp, Homo sapiens
tgagactaggttagg

SEQ ID NO: 1037288 - DNA, 15 bp, Homo sapiens
ctgagactaggttag

SEQ ID NO: 1037289 - DNA, 15 bp, Homo sapiens
tctgagactaggtta

SEQ ID NO: 1037290 - DNA, 15 bp, Homo sapiens
ctctgagactaggtt

SEQ ID NO: 1037291 - DNA, 15 bp, Homo sapiens
cctctgagactaggt

SEQ ID NO: 1037292 - DNA, 15 bp, Homo sapiens
acctctgagactagg

SEQ ID NO: 1037293 - DNA, 15 bp, Homo sapiens
gacctctgagactag

SEQ ID NO: 1037294 - DNA, 15 bp, Homo sapiens
tgacctctgagacta

SEQ ID NO: 1037295 - DNA, 15 bp, Homo sapiens
ttgacctctgagact

SEQ ID NO: 1037296 - DNA, 15 bp, Homo sapiens
tttgacctctgagac

SEQ ID NO: 1037297 - DNA, 15 bp, Homo sapiens
ctttgacctctgaga

SEQ ID NO: 1037298 - DNA, 15 bp, Homo sapiens
cctttgacctctgag

SEQ ID NO: 1037299 - DNA, 15 bp, Homo sapiens
gcctttgacctctga

SEQ ID NO: 1037300 - DNA, 15 bp, Homo sapiens
agcctttgacctctg

SEQ ID NO: 1037301 - DNA, 15 bp, Homo sapiens
aagcctttgacctct

SEQ ID NO: 1037302 - DNA, 15 bp, Homo sapiens
gaagcctttgacctc

SEQ ID NO: 1037303 - DNA, 15 bp, Homo sapiens
ggaagcctttgacct

SEQ ID NO: 1037304 - DNA, 15 bp, Homo sapiens
aggaagcctttgacc

SEQ ID NO: 1037305 - DNA, 15 bp, Homo sapiens
aaggaagcctttgac

SEQ ID NO: 1037306 - DNA, 15 bp, Homo sapiens
taaggaagcctttga

SEQ ID NO: 1037307 - DNA, 15 bp, Homo sapiens
ttaaggaagcctttg

SEQ ID NO: 1037308 - DNA, 15 bp, Homo sapiens
cttaaggaagccttt

SEQ ID NO: 1037309 - DNA, 15 bp, Homo sapiens
ccttaaggaagcctt

SEQ ID NO: 1037310 - DNA, 15 bp, Homo sapiens
tccttaaggaagcct

SEQ ID NO: 1037311 - DNA, 15 bp, Homo sapiens
ttccttaaggaagcc

SEQ ID NO: 1037312 - DNA, 15 bp, Homo sapiens
cttccttaaggaagc

SEQ ID NO: 1037313 - DNA, 15 bp, Homo sapiens
acttccttaaggaag

SEQ ID NO: 1037314 - DNA, 15 bp, Homo sapiens
cacttccttaaggaa

SEQ ID NO: 1037315 - DNA, 15 bp, Homo sapiens
tcacttccttaagga

SEQ ID NO: 1037316 - DNA, 15 bp, Homo sapiens
gtcacttccttaagg

SEQ ID NO: 1037317 - DNA, 15 bp, Homo sapiens
tgtcacttccttaag

SEQ ID NO: 1037318 - DNA, 15 bp, Homo sapiens
atgtcacttccttaa

SEQ ID NO: 1037319 - DNA, 15 bp, Homo sapiens
aatgtcacttcctta

SEQ ID NO: 1037320 - DNA, 15 bp, Homo sapiens
aaatgtcacttcctt

SEQ ID NO: 1037321 - DNA, 15 bp, Homo sapiens
taaatgtcacttcct

SEQ ID NO: 1037322 - DNA, 15 bp, Homo sapiens
ctaaatgtcacttcc

SEQ ID NO: 1037323 - DNA, 15 bp, Homo sapiens
cctaaatgtcacttc

SEQ ID NO: 1037324 - DNA, 15 bp, Homo sapiens
gcctaaatgtcactt

SEQ ID NO: 1037325 - DNA, 15 bp, Homo sapiens
ggcctaaatgtcact

SEQ ID NO: 1037326 - DNA, 15 bp, Homo sapiens
cggcctaaatgtcac

SEQ ID NO: 1037327 - DNA, 15 bp, Homo sapiens
tcggcctaaatgtca

SEQ ID NO: 1037328 - DNA, 15 bp, Homo sapiens
ttcggcctaaatgtc

SEQ ID NO: 1037329 - DNA, 15 bp, Homo sapiens
gttcggcctaaatgt

SEQ ID NO: 1037330 - DNA, 15 bp, Homo sapiens
ggttcggcctaaatg

SEQ ID NO: 1037331 - DNA, 15 bp, Homo sapiens
gggttcggcctaaat

SEQ ID NO: 1037332 - DNA, 15 bp, Homo sapiens
agggttcggcctaaa

SEQ ID NO: 1037333 - DNA, 15 bp, Homo sapiens
cagggttcggcctaa

SEQ ID NO: 1037334 - DNA, 15 bp, Homo sapiens
tcagggttcggccta

SEQ ID NO: 1037335 - DNA, 15 bp, Homo sapiens
ttcagggttcggcct

SEQ ID NO: 1037336 - DNA, 15 bp, Homo sapiens
tttcagggttcggcc

SEQ ID NO: 1037337 - DNA, 15 bp, Homo sapiens
ctttcagggttcggc

SEQ ID NO: 1037338 - DNA, 15 bp, Homo sapiens
tctttcagggttcgg

SEQ ID NO: 1037339 - DNA, 15 bp, Homo sapiens
atctttcagggttcg

SEQ ID NO: 1037340 - DNA, 15 bp, Homo sapiens
tatctttcagggttc

SEQ ID NO: 1037341 - DNA, 15 bp, Homo sapiens
ttatctttcagggtt

SEQ ID NO: 1037342 - DNA, 15 bp, Homo sapiens
cttatctttcagggt

SEQ ID NO: 1037343 - DNA, 15 bp, Homo sapiens
gcttatctttcaggg

SEQ ID NO: 1037344 - DNA, 15 bp, Homo sapiens
ggcttatctttcagg

SEQ ID NO: 1037345 - DNA, 15 bp, Homo sapiens
aggcttatctttcag

SEQ ID NO: 1037346 - DNA, 15 bp, Homo sapiens
gaggcttatctttca

SEQ ID NO: 1037347 - DNA, 15 bp, Homo sapiens
cgaggcttatctttc

SEQ ID NO: 1037348 - DNA, 15 bp, Homo sapiens
ccgaggcttatcttt

SEQ ID NO: 1037349 - DNA, 15 bp, Homo sapiens
tccgaggcttatctt

SEQ ID NO: 1037350 - DNA, 15 bp, Homo sapiens
ctccgaggcttatct

SEQ ID NO: 1037351 - DNA, 15 bp, Homo sapiens
actccgaggcttatc

SEQ ID NO: 1037352 - DNA, 15 bp, Homo sapiens
gactccgaggcttat

SEQ ID NO: 1037353 - DNA, 15 bp, Homo sapiens
tgactccgaggctta

SEQ ID NO: 1037354 - DNA, 15 bp, Homo sapiens
ctgactccgaggctt

SEQ ID NO: 1037355 - DNA, 15 bp, Homo sapiens
actgactccgaggct

SEQ ID NO: 1037356 - DNA, 15 bp, Homo sapiens
tactgactccgaggc

SEQ ID NO: 1037357 - DNA, 15 bp, Homo sapiens
atactgactccgagg

SEQ ID NO: 1037358 - DNA, 15 bp, Homo sapiens
catactgactccgag

SEQ ID NO: 1037359 - DNA, 15 bp, Homo sapiens
tcatactgactccga

SEQ ID NO: 1037360 - DNA, 15 bp, Homo sapiens
ttcatactgactccg

SEQ ID NO: 1037361 - DNA, 15 bp, Homo sapiens
tttcatactgactcc

SEQ ID NO: 1037362 - DNA, 15 bp, Homo sapiens
ctttcatactgactc

SEQ ID NO: 1037363 - DNA, 15 bp, Homo sapiens
tctttcatactgact

SEQ ID NO: 1037364 - DNA, 15 bp, Homo sapiens
ctctttcatactgac

SEQ ID NO: 1037365 - DNA, 15 bp, Homo sapiens
tctctttcatactga

SEQ ID NO: 1037366 - DNA, 15 bp, Homo sapiens
ttctctttcatactg

SEQ ID NO: 1037367 - DNA, 15 bp, Homo sapiens
gttctctttcatact

SEQ ID NO: 1037368 - DNA, 15 bp, Homo sapiens
tgttctctttcatac

SEQ ID NO: 1037369 - DNA, 15 bp, Homo sapiens
ctgttctctttcata

SEQ ID NO: 1037370 - DNA, 15 bp, Homo sapiens
cctgttctctttcat

SEQ ID NO: 1037371 - DNA, 15 bp, Homo sapiens
gcctgttctctttca

SEQ ID NO: 1037372 - DNA, 15 bp, Homo sapiens
ggcctgttctctttc

SEQ ID NO: 1037373 - DNA, 15 bp, Homo sapiens
aggcctgttctcttt

SEQ ID NO: 1037374 - DNA, 15 bp, Homo sapiens
aaggcctgttctctt

SEQ ID NO: 1037375 - DNA, 15 bp, Homo sapiens
gaaggcctgttctct

SEQ ID NO: 1037376 - DNA, 15 bp, Homo sapiens
ggaaggcctgttctc

SEQ ID NO: 1037377 - DNA, 15 bp, Homo sapiens
tggaaggcctgttct

SEQ ID NO: 1037378 - DNA, 15 bp, Homo sapiens
ttggaaggcctgttc

SEQ ID NO: 1037379 - DNA, 15 bp, Homo sapiens
attggaaggcctgtt

SEQ ID NO: 1037380 - DNA, 15 bp, Homo sapiens
tattggaaggcctgt

SEQ ID NO: 1037381 - DNA, 15 bp, Homo sapiens
ttattggaaggcctg

SEQ ID NO: 1037382 - DNA, 15 bp, Homo sapiens
cttattggaaggcct

SEQ ID NO: 1037383 - DNA, 15 bp, Homo sapiens
acttattggaaggcc

SEQ ID NO: 1037384 - DNA, 15 bp, Homo sapiens
gacttattggaaggc

SEQ ID NO: 1037385 - DNA, 15 bp, Homo sapiens
agacttattggaagg

SEQ ID NO: 1037386 - DNA, 15 bp, Homo sapiens
aagacttattggaag

SEQ ID NO: 1037387 - DNA, 15 bp, Homo sapiens
aaagacttattggaa

SEQ ID NO: 1037388 - DNA, 15 bp, Homo sapiens
taaagacttattgga

SEQ ID NO: 1037389 - DNA, 15 bp, Homo sapiens
gtaaagacttattgg

SEQ ID NO: 1037390 - DNA, 15 bp, Homo sapiens
agtaaagacttattg

SEQ ID NO: 1037391 - DNA, 15 bp, Homo sapiens
cagtaaagacttatt

SEQ ID NO: 1037392 - DNA, 15 bp, Homo sapiens
ccagtaaagacttat

SEQ ID NO: 1037393 - DNA, 15 bp, Homo sapiens
tccagtaaagactta

SEQ ID NO: 1037394 - DNA, 15 bp, Homo sapiens
atccagtaaagactt

SEQ ID NO: 1037395 - DNA, 15 bp, Homo sapiens
catccagtaaagact

SEQ ID NO: 1037396 - DNA, 15 bp, Homo sapiens
tcatccagtaaagac

SEQ ID NO: 1037397 - DNA, 15 bp, Homo sapiens
ctcatccagtaaaga

SEQ ID NO: 1037398 - DNA, 15 bp, Homo sapiens
actcatccagtaaag

SEQ ID NO: 1037399 - DNA, 15 bp, Homo sapiens
cactcatccagtaaa

SEQ ID NO: 1037400 - DNA, 15 bp, Homo sapiens
tcactcatccagtaa

SEQ ID NO: 1037401 - DNA, 15 bp, Homo sapiens
ttcactcatccagta

SEQ ID NO: 1037402 - DNA, 15 bp, Homo sapiens
attcactcatccagt

SEQ ID NO: 1037403 - DNA, 15 bp, Homo sapiens
cattcactcatccag

SEQ ID NO: 1037404 - DNA, 15 bp, Homo sapiens
tcattcactcatcca

SEQ ID NO: 1037405 - DNA, 15 bp, Homo sapiens
ttcattcactcatcc

SEQ ID NO: 1037406 - DNA, 15 bp, Homo sapiens
attcattcactcatc

SEQ ID NO: 1037407 - DNA, 15 bp, Homo sapiens
cattcattcactcat

SEQ ID NO: 1037408 - DNA, 15 bp, Homo sapiens
tttcattcattcact

SEQ ID NO: 1037409 - DNA, 15 bp, Homo sapiens
atttcattcattcac

SEQ ID NO: 1037410 - DNA, 15 bp, Homo sapiens
catttcattcattca

SEQ ID NO: 1037411 - DNA, 15 bp, Homo sapiens
ccatttcattcattc

SEQ ID NO: 1037412 - DNA, 15 bp, Homo sapiens
gccatttcattcatt

SEQ ID NO: 1037413 - DNA, 15 bp, Homo sapiens
ggccatttcattcat

SEQ ID NO: 1037414 - DNA, 15 bp, Homo sapiens
tggccatttcattca

SEQ ID NO: 1037415 - DNA, 15 bp, Homo sapiens
gtggccatttcattc

SEQ ID NO: 1037416 - DNA, 15 bp, Homo sapiens
ggtggccatttcatt

SEQ ID NO: 1037417 - DNA, 15 bp, Homo sapiens
gggtggccatttcat

SEQ ID NO: 1037418 - DNA, 15 bp, Homo sapiens
cgggtggccatttca

SEQ ID NO: 1037419 - DNA, 15 bp, Homo sapiens
ccgggtggccatttc

SEQ ID NO: 1037420 - DNA, 15 bp, Homo sapiens
cccgggtggccattt

SEQ ID NO: 1037421 - DNA, 15 bp, Homo sapiens
ccccgggtggccatt

SEQ ID NO: 1037422 - DNA, 15 bp, Homo sapiens
gccccgggtggccat

SEQ ID NO: 1037423 - DNA, 15 bp, Homo sapiens
tgccccgggtggcca

SEQ ID NO: 1037424 - DNA, 15 bp, Homo sapiens
atgccccgggtggcc

SEQ ID NO: 1037425 - DNA, 15 bp, Homo sapiens
aatgccccgggtggc

SEQ ID NO: 1037426 - DNA, 15 bp, Homo sapiens
caatgccccgggtgg

SEQ ID NO: 1037427 - DNA, 15 bp, Homo sapiens
gcaatgccccgggtg

SEQ ID NO: 1037428 - DNA, 15 bp, Homo sapiens
agcaatgccccgggt

SEQ ID NO: 1037429 - DNA, 15 bp, Homo sapiens
tagcaatgccccggg

SEQ ID NO: 1037430 - DNA, 15 bp, Homo sapiens
ttagcaatgccccgg

SEQ ID NO: 1037431 - DNA, 15 bp, Homo sapiens
tttagcaatgccccg

SEQ ID NO: 1037432 - DNA, 15 bp, Homo sapiens
atttagcaatgcccc

SEQ ID NO: 1037433 - DNA, 15 bp, Homo sapiens
aatttagcaatgccc

SEQ ID NO: 1037434 - DNA, 15 bp, Homo sapiens
taatttagcaatgcc

SEQ ID NO: 1037435 - DNA, 15 bp, Homo sapiens
ttaatttagcaatgc

SEQ ID NO: 1037436 - DNA, 15 bp, Homo sapiens
cttaatttagcaatg

SEQ ID NO: 1037437 - DNA, 15 bp, Homo sapiens
acttaatttagcaat

SEQ ID NO: 1037438 - DNA, 15 bp, Homo sapiens
tacttaatttagcaa

SEQ ID NO: 1037439 - DNA, 15 bp, Homo sapiens
gtacttaatttagca

SEQ ID NO: 1037440 - DNA, 15 bp, Homo sapiens
ggtacttaatttagc

SEQ ID NO: 1037441 - DNA, 15 bp, Homo sapiens
aggtacttaatttag

SEQ ID NO: 1037442 - DNA, 15 bp, Homo sapiens
aaggtacttaattta

SEQ ID NO: 1037443 - DNA, 15 bp, Homo sapiens
caaggtacttaattt

SEQ ID NO: 1037444 - DNA, 15 bp, Homo sapiens
tcaaggtacttaatt

SEQ ID NO: 1037445 - DNA, 15 bp, Homo sapiens
ctcaaggtacttaat

SEQ ID NO: 1037446 - DNA, 15 bp, Homo sapiens
gctcaaggtacttaa

SEQ ID NO: 1037447 - DNA, 15 bp, Homo sapiens
agctcaaggtactta

SEQ ID NO: 1037448 - DNA, 15 bp, Homo sapiens
aagctcaaggtactt

SEQ ID NO: 1037449 - DNA, 15 bp, Homo sapiens
taagctcaaggtact

SEQ ID NO: 1037450 - DNA, 15 bp, Homo sapiens
ctaagctcaaggtac

SEQ ID NO: 1037451 - DNA, 15 bp, Homo sapiens
actaagctcaaggta

SEQ ID NO: 1037452 - DNA, 15 bp, Homo sapiens
gactaagctcaaggt

SEQ ID NO: 1037453 - DNA, 15 bp, Homo sapiens
tgactaagctcaagg

SEQ ID NO: 1037454 - DNA, 15 bp, Homo sapiens
atgactaagctcaag

SEQ ID NO: 1037455 - DNA, 15 bp, Homo sapiens
gatgactaagctcaa

SEQ ID NO: 1037456 - DNA, 15 bp, Homo sapiens
ggatgactaagctca

SEQ ID NO: 1037457 - DNA, 15 bp, Homo sapiens
aggatgactaagctc

SEQ ID NO: 1037458 - DNA, 15 bp, Homo sapiens
taggatgactaagct

SEQ ID NO: 1037459 - DNA, 15 bp, Homo sapiens
ttaggatgactaagc

SEQ ID NO: 1037460 - DNA, 15 bp, Homo sapiens
gttaggatgactaag

SEQ ID NO: 1037461 - DNA, 15 bp, Homo sapiens
ggttaggatgactaa

SEQ ID NO: 1037462 - DNA, 15 bp, Homo sapiens
tggttaggatgacta

SEQ ID NO: 1037463 - DNA, 15 bp, Homo sapiens
atggttaggatgact

SEQ ID NO: 1037464 - DNA, 15 bp, Homo sapiens
tatggttaggatgac

SEQ ID NO: 1037465 - DNA, 15 bp, Homo sapiens
ctatggttaggatga

SEQ ID NO: 1037466 - DNA, 15 bp, Homo sapiens
actatggttaggatg

SEQ ID NO: 1037467 - DNA, 15 bp, Homo sapiens
gactatggttaggat

SEQ ID NO: 1037468 - DNA, 15 bp, Homo sapiens
ggactatggttagga

SEQ ID NO: 1037469 - DNA, 15 bp, Homo sapiens
gggactatggttagg

SEQ ID NO: 1037470 - DNA, 15 bp, Homo sapiens
ggggactatggttag

SEQ ID NO: 1037471 - DNA, 15 bp, Homo sapiens
gggggactatggtta

SEQ ID NO: 1037472 - DNA, 15 bp, Homo sapiens
ggggggactatggtt

SEQ ID NO: 1037473 - DNA, 15 bp, Homo sapiens
tggggggactatggt

SEQ ID NO: 1037474 - DNA, 15 bp, Homo sapiens
ctggggggactatgg

SEQ ID NO: 1037475 - DNA, 15 bp, Homo sapiens
cctggggggactatg

SEQ ID NO: 1037476 - DNA, 15 bp, Homo sapiens
gcctggggggactat

SEQ ID NO: 1037477 - DNA, 15 bp, Homo sapiens
tgcctggggggacta

SEQ ID NO: 1037478 - DNA, 15 bp, Homo sapiens
atgcctggggggact

SEQ ID NO: 1037479 - DNA, 15 bp, Homo sapiens
aatgcctggggggac

SEQ ID NO: 1037480 - DNA, 15 bp, Homo sapiens
taatgcctgggggga

SEQ ID NO: 1037481 - DNA, 15 bp, Homo sapiens
ataatgcctgggggg

SEQ ID NO: 1037482 - DNA, 15 bp, Homo sapiens
gataatgcctggggg

SEQ ID NO: 1037483 - DNA, 15 bp, Homo sapiens
agataatgcctgggg

SEQ ID NO: 1037484 - DNA, 15 bp, Homo sapiens
cagataatgcctggg

SEQ ID NO: 1037485 - DNA, 15 bp, Homo sapiens
acagataatgcctgg

SEQ ID NO: 1037486 - DNA, 15 bp, Homo sapiens
cacagataatgcctg

SEQ ID NO: 1037487 - DNA, 15 bp, Homo sapiens
acacagataatgcct

SEQ ID NO: 1037488 - DNA, 15 bp, Homo sapiens
cacacagataatgcc

SEQ ID NO: 1037489 - DNA, 15 bp, Homo sapiens
ccacacagataatgc

SEQ ID NO: 1037490 - DNA, 15 bp, Homo sapiens
gccacacagataatg

SEQ ID NO: 1037491 - DNA, 15 bp, Homo sapiens
ggccacacagataat

SEQ ID NO: 1037492 - DNA, 15 bp, Homo sapiens
tggccacacagataa

SEQ ID NO: 1037493 - DNA, 15 bp, Homo sapiens
atggccacacagata

SEQ ID NO: 1037494 - DNA, 15 bp, Homo sapiens
tatggccacacagat

SEQ ID NO: 1037495 - DNA, 15 bp, Homo sapiens
ttatggccacacaga

SEQ ID NO: 1037496 - DNA, 15 bp, Homo sapiens
cttatggccacacag

SEQ ID NO: 1037497 - DNA, 15 bp, Homo sapiens
gcttatggccacaca

SEQ ID NO: 1037498 - DNA, 15 bp, Homo sapiens
ggcttatggccacac

SEQ ID NO: 1037499 - DNA, 15 bp, Homo sapiens
tggcttatggccaca

SEQ ID NO: 1037500 - DNA, 15 bp, Homo sapiens
atggcttatggccac

SEQ ID NO: 1037501 - DNA, 15 bp, Homo sapiens
aatggcttatggcca

SEQ ID NO: 1037502 - DNA, 15 bp, Homo sapiens
aaatggcttatggcc

SEQ ID NO: 1037503 - DNA, 15 bp, Homo sapiens
aaaatggcttatggc

SEQ ID NO: 1037504 - DNA, 15 bp, Homo sapiens
gaaaatggcttatgg

SEQ ID NO: 1037505 - DNA, 15 bp, Homo sapiens
agaaaatggcttatg

SEQ ID NO: 1037506 - DNA, 15 bp, Homo sapiens
aagaaaatggcttat

SEQ ID NO: 1037507 - DNA, 15 bp, Homo sapiens
taagaaaatggctta

SEQ ID NO: 1037508 - DNA, 15 bp, Homo sapiens
ctaagaaaatggctt

SEQ ID NO: 1037509 - DNA, 15 bp, Homo sapiens
gctaagaaaatggct

SEQ ID NO: 1037510 - DNA, 15 bp, Homo sapiens
ggctaagaaaatggc

SEQ ID NO: 1037511 - DNA, 15 bp, Homo sapiens
tggctaagaaaatgg

SEQ ID NO: 1037512 - DNA, 15 bp, Homo sapiens
gtggctaagaaaatg

SEQ ID NO: 1037513 - DNA, 15 bp, Homo sapiens
agtggctaagaaaat

SEQ ID NO: 1037514 - DNA, 15 bp, Homo sapiens
gagtggctaagaaaa

SEQ ID NO: 1037515 - DNA, 15 bp, Homo sapiens
agagtggctaagaaa

SEQ ID NO: 1037516 - DNA, 15 bp, Homo sapiens
gagagtggctaagaa

SEQ ID NO: 1037517 - DNA, 15 bp, Homo sapiens
agagagtggctaaga

SEQ ID NO: 1037518 - DNA, 15 bp, Homo sapiens
aagagagtggctaag

SEQ ID NO: 1037519 - DNA, 15 bp, Homo sapiens
gaagagagtggctaa

SEQ ID NO: 1037520 - DNA, 15 bp, Homo sapiens
agaagagagtggcta

SEQ ID NO: 1037521 - DNA, 15 bp, Homo sapiens
aagaagagagtggct

SEQ ID NO: 1037522 - DNA, 15 bp, Homo sapiens
gaagaagagagtggc

SEQ ID NO: 1037523 - DNA, 15 bp, Homo sapiens
tgaagaagagagtgg

SEQ ID NO: 1037524 - DNA, 15 bp, Homo sapiens
ctgaagaagagagtg

SEQ ID NO: 1037525 - DNA, 15 bp, Homo sapiens
actgaagaagagagt

SEQ ID NO: 1037526 - DNA, 15 bp, Homo sapiens
tactgaagaagagag

SEQ ID NO: 1037527 - DNA, 15 bp, Homo sapiens
ttactgaagaagaga

SEQ ID NO: 1037528 - DNA, 15 bp, Homo sapiens
tttactgaagaagag

SEQ ID NO: 1037529 - DNA, 15 bp, Homo sapiens
ctttactgaagaaga

SEQ ID NO: 1037530 - DNA, 15 bp, Homo sapiens
cctttactgaagaag

SEQ ID NO: 1037531 - DNA, 15 bp, Homo sapiens
gcctttactgaagaa

SEQ ID NO: 1037532 - DNA, 15 bp, Homo sapiens
tgcctttactgaaga

SEQ ID NO: 1037533 - DNA, 15 bp, Homo sapiens
ttgcctttactgaag

SEQ ID NO: 1037534 - DNA, 15 bp, Homo sapiens
cttgcctttactgaa

SEQ ID NO: 1037535 - DNA, 15 bp, Homo sapiens
acttgcctttactga

SEQ ID NO: 1037536 - DNA, 15 bp, Homo sapiens
tacttgcctttactg

SEQ ID NO: 1037537 - DNA, 15 bp, Homo sapiens
ctacttgcctttact

SEQ ID NO: 1037538 - DNA, 15 bp, Homo sapiens
tctacttgcctttac

SEQ ID NO: 1037539 - DNA, 15 bp, Homo sapiens
ctctacttgccttta

SEQ ID NO: 1037540 - DNA, 15 bp, Homo sapiens
actctacttgccttt

SEQ ID NO: 1037541 - DNA, 15 bp, Homo sapiens
cactctacttgcctt

SEQ ID NO: 1037542 - DNA, 15 bp, Homo sapiens
acactctacttgcct

SEQ ID NO: 1037543 - DNA, 15 bp, Homo sapiens
tacactctacttgcc

SEQ ID NO: 1037544 - DNA, 15 bp, Homo sapiens
ttacactctacttgc

SEQ ID NO: 1037545 - DNA, 15 bp, Homo sapiens
attacactctacttg

SEQ ID NO: 1037546 - DNA, 15 bp, Homo sapiens
cattacactctactt

SEQ ID NO: 1037547 - DNA, 15 bp, Homo sapiens
tcattacactctact

SEQ ID NO: 1037548 - DNA, 15 bp, Homo sapiens
ttcattacactctac

SEQ ID NO: 1037549 - DNA, 15 bp, Homo sapiens
cttcattacactcta

SEQ ID NO: 1037550 - DNA, 15 bp, Homo sapiens
tcttcattacactct

SEQ ID NO: 1037551 - DNA, 15 bp, Homo sapiens
ttcttcattacactc

SEQ ID NO: 1037552 - DNA, 15 bp, Homo sapiens
attcttcattacact

SEQ ID NO: 1037553 - DNA, 15 bp, Homo sapiens
tattcttcattacac

SEQ ID NO: 1037554 - DNA, 15 bp, Homo sapiens
gtattcttcattaca

SEQ ID NO: 1037555 - DNA, 15 bp, Homo sapiens
agtattcttcattac

SEQ ID NO: 1037556 - DNA, 15 bp, Homo sapiens
cagtattcttcatta

SEQ ID NO: 1037557 - DNA, 15 bp, Homo sapiens
acagtattcttcatt

SEQ ID NO: 1037558 - DNA, 15 bp, Homo sapiens
cacagtattcttcat

SEQ ID NO: 1037559 - DNA, 15 bp, Homo sapiens
tcacagtattcttca

SEQ ID NO: 1037560 - DNA, 15 bp, Homo sapiens
ctcacagtattcttc

SEQ ID NO: 1037561 - DNA, 15 bp, Homo sapiens
tctcacagtattctt

SEQ ID NO: 1037562 - DNA, 15 bp, Homo sapiens
ctctcacagtattct

SEQ ID NO: 1037563 - DNA, 15 bp, Homo sapiens
cctctcacagtattc

SEQ ID NO: 1037564 - DNA, 15 bp, Homo sapiens
tcctctcacagtatt

SEQ ID NO: 1037565 - DNA, 15 bp, Homo sapiens
gtcctctcacagtat

SEQ ID NO: 1037566 - DNA, 15 bp, Homo sapiens
tgtcctctcacagta

SEQ ID NO: 1037567 - DNA, 15 bp, Homo sapiens
ttgtcctctcacagt

SEQ ID NO: 1037568 - DNA, 15 bp, Homo sapiens
attgtcctctcacag

SEQ ID NO: 1037569 - DNA, 15 bp, Homo sapiens
aattgtcctctcaca

SEQ ID NO: 1037570 - DNA, 15 bp, Homo sapiens
taattgtcctctcac

SEQ ID NO: 1037571 - DNA, 15 bp, Homo sapiens
gtaattgtcctctca

SEQ ID NO: 1037572 - DNA, 15 bp, Homo sapiens
ggtaattgtcctctc

SEQ ID NO: 1037573 - DNA, 15 bp, Homo sapiens
aggtaattgtcctct

SEQ ID NO: 1037574 - DNA, 15 bp, Homo sapiens
aaggtaattgtcctc

SEQ ID NO: 1037575 - DNA, 15 bp, Homo sapiens
taaggtaattgtcct

SEQ ID NO: 1037576 - DNA, 15 bp, Homo sapiens
ctaaggtaattgtcc

SEQ ID NO: 1037577 - DNA, 15 bp, Homo sapiens
tctaaggtaattgtc

SEQ ID NO: 1037578 - DNA, 15 bp, Homo sapiens
ttctaaggtaattgt

SEQ ID NO: 1037579 - DNA, 15 bp, Homo sapiens
cttctaaggtaattg

SEQ ID NO: 1037580 - DNA, 15 bp, Homo sapiens
ccttctaaggtaatt

SEQ ID NO: 1037581 - DNA, 15 bp, Homo sapiens
gccttctaaggtaat

SEQ ID NO: 1037582 - DNA, 15 bp, Homo sapiens
tgccttctaaggtaa

SEQ ID NO: 1037583 - DNA, 15 bp, Homo sapiens
atgccttctaaggta

SEQ ID NO: 1037584 - DNA, 15 bp, Homo sapiens
aatgccttctaaggt

SEQ ID NO: 1037585 - DNA, 15 bp, Homo sapiens
taatgccttctaagg

SEQ ID NO: 1037586 - DNA, 15 bp, Homo sapiens
ataatgccttctaag

SEQ ID NO: 1037587 - DNA, 15 bp, Homo sapiens
gataatgccttctaa

SEQ ID NO: 1037588 - DNA, 15 bp, Homo sapiens
tgataatgccttcta

SEQ ID NO: 1037589 - DNA, 15 bp, Homo sapiens
ctgataatgccttct

SEQ ID NO: 1037590 - DNA, 15 bp, Homo sapiens
tctgataatgccttc

SEQ ID NO: 1037591 - DNA, 15 bp, Homo sapiens
gtctgataatgcctt

SEQ ID NO: 1037592 - DNA, 15 bp, Homo sapiens
agtctgataatgcct

SEQ ID NO: 1037593 - DNA, 15 bp, Homo sapiens
tagtctgataatgcc

SEQ ID NO: 1037594 - DNA, 15 bp, Homo sapiens
ttagtctgataatgc

SEQ ID NO: 1037595 - DNA, 15 bp, Homo sapiens
attagtctgataatg

SEQ ID NO: 1037596 - DNA, 15 bp, Homo sapiens
cattagtctgataat

SEQ ID NO: 1037597 - DNA, 15 bp, Homo sapiens
acattagtctgataa

SEQ ID NO: 1037598 - DNA, 15 bp, Homo sapiens
aacattagtctgata

SEQ ID NO: 1037599 - DNA, 15 bp, Homo sapiens
aaacattagtctgat

SEQ ID NO: 1037600 - DNA, 15 bp, Homo sapiens
aaaacattagtctga

SEQ ID NO: 1037601 - DNA, 15 bp, Homo sapiens
taaaacattagtctg

SEQ ID NO: 1037602 - DNA, 15 bp, Homo sapiens
gtaaaacattagtct

SEQ ID NO: 1037603 - DNA, 15 bp, Homo sapiens
agtaaaacattagtc

SEQ ID NO: 1037604 - DNA, 15 bp, Homo sapiens
cagtaaaacattagt

SEQ ID NO: 1037605 - DNA, 15 bp, Homo sapiens
tcagtaaaacattag

SEQ ID NO: 1037606 - DNA, 15 bp, Homo sapiens
ctcagtaaaacatta

SEQ ID NO: 1037607 - DNA, 15 bp, Homo sapiens
actcagtaaaacatt

SEQ ID NO: 1037608 - DNA, 15 bp, Homo sapiens
cactcagtaaaacat

SEQ ID NO: 1037609 - DNA, 15 bp, Homo sapiens
gcactcagtaaaaca

SEQ ID NO: 1037610 - DNA, 15 bp, Homo sapiens
tgcactcagtaaaac

SEQ ID NO: 1037611 - DNA, 15 bp, Homo sapiens
atgcactcagtaaaa

SEQ ID NO: 1037612 - DNA, 15 bp, Homo sapiens
tatgcactcagtaaa

SEQ ID NO: 1037613 - DNA, 15 bp, Homo sapiens
ctatgcactcagtaa

SEQ ID NO: 1037614 - DNA, 15 bp, Homo sapiens
tctatgcactcagta

SEQ ID NO: 1037615 - DNA, 15 bp, Homo sapiens
ctctatgcactcagt

SEQ ID NO: 1037616 - DNA, 15 bp, Homo sapiens
actctatgcactcag

SEQ ID NO: 1037617 - DNA, 15 bp, Homo sapiens
tactctatgcactca

SEQ ID NO: 1037618 - DNA, 15 bp, Homo sapiens
gtactctatgcactc

SEQ ID NO: 1037619 - DNA, 15 bp, Homo sapiens
tgtactctatgcact

SEQ ID NO: 1037620 - DNA, 15 bp, Homo sapiens
atgtactctatgcac

SEQ ID NO: 1037621 - DNA, 15 bp, Homo sapiens
tatgtactctatgca

SEQ ID NO: 1037622 - DNA, 15 bp, Homo sapiens
atatgtactctatgc

SEQ ID NO: 1037623 - DNA, 15 bp, Homo sapiens
gatatgtactctatg

SEQ ID NO: 1037624 - DNA, 15 bp, Homo sapiens
agatatgtactctat

SEQ ID NO: 1037625 - DNA, 15 bp, Homo sapiens
tagatatgtactcta

SEQ ID NO: 1037626 - DNA, 15 bp, Homo sapiens
atagatatgtactct

SEQ ID NO: 1037627 - DNA, 15 bp, Homo sapiens
tatagatatgtactc

SEQ ID NO: 1037628 - DNA, 15 bp, Homo sapiens
ctatagatatgtact

SEQ ID NO: 1037629 - DNA, 15 bp, Homo sapiens
cctatagatatgtac

SEQ ID NO: 1037630 - DNA, 15 bp, Homo sapiens
acctatagatatgta

SEQ ID NO: 1037631 - DNA, 15 bp, Homo sapiens
aacctatagatatgt

SEQ ID NO: 1037632 - DNA, 15 bp, Homo sapiens
taacctatagatatg

SEQ ID NO: 1037633 - DNA, 15 bp, Homo sapiens
ttaacctatagatat

SEQ ID NO: 1037634 - DNA, 15 bp, Homo sapiens
attaacctatagata

SEQ ID NO: 1037635 - DNA, 15 bp, Homo sapiens
tattaacctatagat

SEQ ID NO: 1037636 - DNA, 15 bp, Homo sapiens
atattaacctataga

SEQ ID NO: 1037637 - DNA, 15 bp, Homo sapiens
catattaacctatag

SEQ ID NO: 1037638 - DNA, 15 bp, Homo sapiens
gcatattaacctata

SEQ ID NO: 1037639 - DNA, 15 bp, Homo sapiens
ggcatattaacctat

SEQ ID NO: 1037640 - DNA, 15 bp, Homo sapiens
aggcatattaaccta

SEQ ID NO: 1037641 - DNA, 15 bp, Homo sapiens
aaggcatattaacct

SEQ ID NO: 1037642 - DNA, 15 bp, Homo sapiens
aaaggcatattaacc

SEQ ID NO: 1037643 - DNA, 15 bp, Homo sapiens
taaaggcatattaac

SEQ ID NO: 1037644 - DNA, 15 bp, Homo sapiens
gtaaaggcatattaa

SEQ ID NO: 1037645 - DNA, 15 bp, Homo sapiens
agtaaaggcatatta

SEQ ID NO: 1037646 - DNA, 15 bp, Homo sapiens
tagtaaaggcatatt

SEQ ID NO: 1037647 - DNA, 15 bp, Homo sapiens
atagtaaaggcatat

SEQ ID NO: 1037648 - DNA, 15 bp, Homo sapiens
catagtaaaggcata

SEQ ID NO: 1037649 - DNA, 15 bp, Homo sapiens
gcatagtaaaggcat

SEQ ID NO: 1037650 - DNA, 15 bp, Homo sapiens
tgcatagtaaaggca

SEQ ID NO: 1037651 - DNA, 15 bp, Homo sapiens
ttgcatagtaaaggc

SEQ ID NO: 1037652 - DNA, 15 bp, Homo sapiens
attgcatagtaaagg

SEQ ID NO: 1037653 - DNA, 15 bp, Homo sapiens
cattgcatagtaaag

SEQ ID NO: 1037654 - DNA, 15 bp, Homo sapiens
gcattgcatagtaaa

SEQ ID NO: 1037655 - DNA, 15 bp, Homo sapiens
tgcattgcatagtaa

SEQ ID NO: 1037656 - DNA, 15 bp, Homo sapiens
atgcattgcatagta

SEQ ID NO: 1037657 - DNA, 15 bp, Homo sapiens
gatgcattgcatagt

SEQ ID NO: 1037658 - DNA, 15 bp, Homo sapiens
ggatgcattgcatag

SEQ ID NO: 1037659 - DNA, 15 bp, Homo sapiens
tggatgcattgcata

SEQ ID NO: 1037660 - DNA, 15 bp, Homo sapiens
ctggatgcattgcat

SEQ ID NO: 1037661 - DNA, 15 bp, Homo sapiens
tctggatgcattgca

SEQ ID NO: 1037662 - DNA, 15 bp, Homo sapiens
ttctggatgcattgc

SEQ ID NO: 1037663 - DNA, 15 bp, Homo sapiens
tttctggatgcattg

SEQ ID NO: 1037664 - DNA, 15 bp, Homo sapiens
atttctggatgcatt

SEQ ID NO: 1037665 - DNA, 15 bp, Homo sapiens
aatttctggatgcat

SEQ ID NO: 1037666 - DNA, 15 bp, Homo sapiens
aaatttctggatgca

SEQ ID NO: 1037667 - DNA, 15 bp, Homo sapiens
gaaatttctggatgc

SEQ ID NO: 1037668 - DNA, 15 bp, Homo sapiens
tgaaatttctggatg

SEQ ID NO: 1037669 - DNA, 15 bp, Homo sapiens
ttgaaatttctggat

SEQ ID NO: 1037670 - DNA, 15 bp, Homo sapiens
tttgaaatttctgga

SEQ ID NO: 1037671 - DNA, 15 bp, Homo sapiens
ctttgaaatttctgg

SEQ ID NO: 1037672 - DNA, 15 bp, Homo sapiens
actttgaaatttctg

SEQ ID NO: 1037673 - DNA, 15 bp, Homo sapiens
gactttgaaatttct

SEQ ID NO: 1037674 - DNA, 15 bp, Homo sapiens
tgactttgaaatttc

SEQ ID NO: 1037675 - DNA, 15 bp, Homo sapiens
ttgactttgaaattt

SEQ ID NO: 1037676 - DNA, 15 bp, Homo sapiens
cttgactttgaaatt

SEQ ID NO: 1037677 - DNA, 15 bp, Homo sapiens
tcttgactttgaaat

SEQ ID NO: 1037678 - DNA, 15 bp, Homo sapiens
ttcttgactttgaaa

SEQ ID NO: 1037679 - DNA, 15 bp, Homo sapiens
cttcttgactttgaa

SEQ ID NO: 1037680 - DNA, 15 bp, Homo sapiens
tcttcttgactttga

SEQ ID NO: 1037681 - DNA, 15 bp, Homo sapiens
atcttcttgactttg

SEQ ID NO: 1037682 - DNA, 15 bp, Homo sapiens
aatcttcttgacttt

SEQ ID NO: 1037683 - DNA, 15 bp, Homo sapiens
gaatcttcttgactt

SEQ ID NO: 1037684 - DNA, 15 bp, Homo sapiens
agaatcttcttgact

SEQ ID NO: 1037685 - DNA, 15 bp, Homo sapiens
tagaatcttcttgac

SEQ ID NO: 1037686 - DNA, 15 bp, Homo sapiens
ctagaatcttcttga

SEQ ID NO: 1037687 - DNA, 15 bp, Homo sapiens
cctagaatcttcttg

SEQ ID NO: 1037688 - DNA, 15 bp, Homo sapiens
tcctagaatcttctt

SEQ ID NO: 1037689 - DNA, 15 bp, Homo sapiens
ctcctagaatcttct

SEQ ID NO: 1037690 - DNA, 15 bp, Homo sapiens
cctcctagaatcttc

SEQ ID NO: 1037691 - DNA, 15 bp, Homo sapiens
gcctcctagaatctt

SEQ ID NO: 1037692 - DNA, 15 bp, Homo sapiens
agcctcctagaatct

SEQ ID NO: 1037693 - DNA, 15 bp, Homo sapiens
cagcctcctagaatc

SEQ ID NO: 1037694 - DNA, 15 bp, Homo sapiens
tcagcctcctagaat

SEQ ID NO: 1037695 - DNA, 15 bp, Homo sapiens
ttcagcctcctagaa

SEQ ID NO: 1037696 - DNA, 15 bp, Homo sapiens
attcagcctcctaga

SEQ ID NO: 1037697 - DNA, 15 bp, Homo sapiens
aattcagcctcctag

SEQ ID NO: 1037698 - DNA, 15 bp, Homo sapiens
gaattcagcctccta

SEQ ID NO: 1037699 - DNA, 15 bp, Homo sapiens
ggaattcagcctcct

SEQ ID NO: 1037700 - DNA, 15 bp, Homo sapiens
tggaattcagcctcc

SEQ ID NO: 1037701 - DNA, 15 bp, Homo sapiens
gtggaattcagcctc

SEQ ID NO: 1037702 - DNA, 15 bp, Homo sapiens
ggtggaattcagcct

SEQ ID NO: 1037703 - DNA, 15 bp, Homo sapiens
aggtggaattcagcc

SEQ ID NO: 1037704 - DNA, 15 bp, Homo sapiens
aaggtggaattcagc

SEQ ID NO: 1037705 - DNA, 15 bp, Homo sapiens
aaaggtggaattcag

SEQ ID NO: 1037706 - DNA, 15 bp, Homo sapiens
taaaggtggaattca

SEQ ID NO: 1037707 - DNA, 15 bp, Homo sapiens
ctaaaggtggaattc

SEQ ID NO: 1037708 - DNA, 15 bp, Homo sapiens
tctaaaggtggaatt

SEQ ID NO: 1037709 - DNA, 15 bp, Homo sapiens
ttctaaaggtggaat

SEQ ID NO: 1037710 - DNA, 15 bp, Homo sapiens
tttctaaaggtggaa

SEQ ID NO: 1037711 - DNA, 15 bp, Homo sapiens
atttctaaaggtgga

SEQ ID NO: 1037712 - DNA, 15 bp, Homo sapiens
gatttctaaaggtgg

SEQ ID NO: 1037713 - DNA, 15 bp, Homo sapiens
agatttctaaaggtg

SEQ ID NO: 1037714 - DNA, 15 bp, Homo sapiens
gagatttctaaaggt

SEQ ID NO: 1037715 - DNA, 15 bp, Homo sapiens
tgagatttctaaagg

SEQ ID NO: 1037716 - DNA, 15 bp, Homo sapiens
ctgagatttctaaag

SEQ ID NO: 1037717 - DNA, 15 bp, Homo sapiens
gctgagatttctaaa

SEQ ID NO: 1037718 - DNA, 15 bp, Homo sapiens
agctgagatttctaa

SEQ ID NO: 1037719 - DNA, 15 bp, Homo sapiens
tagctgagatttcta

SEQ ID NO: 1037720 - DNA, 15 bp, Homo sapiens
atagctgagatttct

SEQ ID NO: 1037721 - DNA, 15 bp, Homo sapiens
catagctgagatttc

SEQ ID NO: 1037722 - DNA, 15 bp, Homo sapiens
tcatagctgagattt

SEQ ID NO: 1037723 - DNA, 15 bp, Homo sapiens
ttcatagctgagatt

SEQ ID NO: 1037724 - DNA, 15 bp, Homo sapiens
tttcatagctgagat

SEQ ID NO: 1037725 - DNA, 15 bp, Homo sapiens
ctttcatagctgaga

SEQ ID NO: 1037726 - DNA, 15 bp, Homo sapiens
gctttcatagctgag

SEQ ID NO: 1037727 - DNA, 15 bp, Homo sapiens
agctttcatagctga

SEQ ID NO: 1037728 - DNA, 15 bp, Homo sapiens
gagctttcatagctg

SEQ ID NO: 1037729 - DNA, 15 bp, Homo sapiens
agagctttcatagct

SEQ ID NO: 1037730 - DNA, 15 bp, Homo sapiens
cagagctttcatagc

SEQ ID NO: 1037731 - DNA, 15 bp, Homo sapiens
ccagagctttcatag

SEQ ID NO: 1037732 - DNA, 15 bp, Homo sapiens
cccagagctttcata

SEQ ID NO: 1037733 - DNA, 15 bp, Homo sapiens
acccagagctttcat

SEQ ID NO: 1037734 - DNA, 15 bp, Homo sapiens
aacccagagctttca

SEQ ID NO: 1037735 - DNA, 15 bp, Homo sapiens
aaacccagagctttc

SEQ ID NO: 1037736 - DNA, 15 bp, Homo sapiens
gaaacccagagcttt

SEQ ID NO: 1037737 - DNA, 15 bp, Homo sapiens
tgaaacccagagctt

SEQ ID NO: 1037738 - DNA, 15 bp, Homo sapiens
ttgaaacccagagct

SEQ ID NO: 1037739 - DNA, 15 bp, Homo sapiens
gttgaaacccagagc

SEQ ID NO: 1037740 - DNA, 15 bp, Homo sapiens
agttgaaacccagag

SEQ ID NO: 1037741 - DNA, 15 bp, Homo sapiens
aagttgaaacccaga

SEQ ID NO: 1037742 - DNA, 15 bp, Homo sapiens
caagttgaaacccag

SEQ ID NO: 1037743 - DNA, 15 bp, Homo sapiens
tcaagttgaaaccca

SEQ ID NO: 1037744 - DNA, 15 bp, Homo sapiens
atcaagttgaaaccc

SEQ ID NO: 1037745 - DNA, 15 bp, Homo sapiens
tatcaagttgaaacc

SEQ ID NO: 1037746 - DNA, 15 bp, Homo sapiens
atatcaagttgaaac

SEQ ID NO: 1037747 - DNA, 15 bp, Homo sapiens
tatatcaagttgaaa

SEQ ID NO: 1037748 - DNA, 15 bp, Homo sapiens
ttatatcaagttgaa

SEQ ID NO: 1037749 - DNA, 15 bp, Homo sapiens
gttatatcaagttga

SEQ ID NO: 1037750 - DNA, 15 bp, Homo sapiens
agttatatcaagttg

SEQ ID NO: 1037751 - DNA, 15 bp, Homo sapiens
gagttatatcaagtt

SEQ ID NO: 1037752 - DNA, 15 bp, Homo sapiens
agagttatatcaagt

SEQ ID NO: 1037753 - DNA, 15 bp, Homo sapiens
aagagttatatcaag

SEQ ID NO: 1037754 - DNA, 15 bp, Homo sapiens
gaagagttatatcaa

SEQ ID NO: 1037755 - DNA, 15 bp, Homo sapiens
tgaagagttatatca

SEQ ID NO: 1037756 - DNA, 15 bp, Homo sapiens
gtgaagagttatatc

SEQ ID NO: 1037757 - DNA, 15 bp, Homo sapiens
agtgaagagttatat

SEQ ID NO: 1037758 - DNA, 15 bp, Homo sapiens
cagtgaagagttata

SEQ ID NO: 1037759 - DNA, 15 bp, Homo sapiens
ccagtgaagagttat

SEQ ID NO: 1037760 - DNA, 15 bp, Homo sapiens
gccagtgaagagtta

SEQ ID NO: 1037761 - DNA, 15 bp, Homo sapiens
ggccagtgaagagtt

SEQ ID NO: 1037762 - DNA, 15 bp, Homo sapiens
tggccagtgaagagt

SEQ ID NO: 1037763 - DNA, 15 bp, Homo sapiens
ctggccagtgaagag

SEQ ID NO: 1037764 - DNA, 15 bp, Homo sapiens
tctggccagtgaaga

SEQ ID NO: 1037765 - DNA, 15 bp, Homo sapiens
ttctggccagtgaag

SEQ ID NO: 1037766 - DNA, 15 bp, Homo sapiens
tttctggccagtgaa

SEQ ID NO: 1037767 - DNA, 15 bp, Homo sapiens
ttttctggccagtga

SEQ ID NO: 1037768 - DNA, 15 bp, Homo sapiens
tttttctggccagtg

SEQ ID NO: 1037769 - DNA, 15 bp, Homo sapiens
ttttttctggccagt

SEQ ID NO: 1037770 - DNA, 15 bp, Homo sapiens
tttttttctggccag

SEQ ID NO: 1037771 - DNA, 15 bp, Homo sapiens
ttttttttctggcca

SEQ ID NO: 1037772 - DNA, 15 bp, Homo sapiens
tttttttttctggcc

SEQ ID NO: 1037773 - DNA, 15 bp, Homo sapiens
ttttttttttctggc

SEQ ID NO: 1037774 - DNA, 15 bp, Homo sapiens
tttttttttttctgg

SEQ ID NO: 1037775 - DNA, 15 bp, Homo sapiens
ccgtttttttttttt

SEQ ID NO: 1037776 - DNA, 15 bp, Homo sapiens
gccgttttttttttt

SEQ ID NO: 1037777 - DNA, 15 bp, Homo sapiens
tgccgtttttttttt

SEQ ID NO: 1037778 - DNA, 15 bp, Homo sapiens
ttgccgttttttttt

SEQ ID NO: 1037779 - DNA, 15 bp, Homo sapiens
gttgccgtttttttt

SEQ ID NO: 1037780 - DNA, 15 bp, Homo sapiens
agttgccgttttttt

SEQ ID NO: 1037781 - DNA, 15 bp, Homo sapiens
gagttgccgtttttt

SEQ ID NO: 1037782 - DNA, 15 bp, Homo sapiens
agagttgccgttttt

SEQ ID NO: 1037783 - DNA, 15 bp, Homo sapiens
aagagttgccgtttt

SEQ ID NO: 1037784 - DNA, 15 bp, Homo sapiens
aaagagttgccgttt

SEQ ID NO: 1037785 - DNA, 15 bp, Homo sapiens
caaagagttgccgtt

SEQ ID NO: 1037786 - DNA, 15 bp, Homo sapiens
ccaaagagttgccgt

SEQ ID NO: 1037787 - DNA, 15 bp, Homo sapiens
gccaaagagttgccg

SEQ ID NO: 1037788 - DNA, 15 bp, Homo sapiens
tgccaaagagttgcc

SEQ ID NO: 1037789 - DNA, 15 bp, Homo sapiens
ttgccaaagagttgc

SEQ ID NO: 1037790 - DNA, 15 bp, Homo sapiens
tttgccaaagagttg

SEQ ID NO: 1037791 - DNA, 15 bp, Homo sapiens
atttgccaaagagtt

SEQ ID NO: 1037792 - DNA, 15 bp, Homo sapiens
tatttgccaaagagt

SEQ ID NO: 1037793 - DNA, 15 bp, Homo sapiens
ctatttgccaaagag

SEQ ID NO: 1037794 - DNA, 15 bp, Homo sapiens
tctatttgccaaaga

SEQ ID NO: 1037795 - DNA, 15 bp, Homo sapiens
ctctatttgccaaag

SEQ ID NO: 1037796 - DNA, 15 bp, Homo sapiens
gctctatttgccaaa

SEQ ID NO: 1037797 - DNA, 15 bp, Homo sapiens
agctctatttgccaa

SEQ ID NO: 1037798 - DNA, 15 bp, Homo sapiens
gagctctatttgcca

SEQ ID NO: 1037799 - DNA, 15 bp, Homo sapiens
agagctctatttgcc

SEQ ID NO: 1037800 - DNA, 15 bp, Homo sapiens
cagagctctatttgc

SEQ ID NO: 1037801 - DNA, 15 bp, Homo sapiens
ccagagctctatttg

SEQ ID NO: 1037802 - DNA, 15 bp, Homo sapiens
tccagagctctattt

SEQ ID NO: 1037803 - DNA, 15 bp, Homo sapiens
ttccagagctctatt

SEQ ID NO: 1037804 - DNA, 15 bp, Homo sapiens
cttccagagctctat

SEQ ID NO: 1037805 - DNA, 15 bp, Homo sapiens
tcttccagagctcta

SEQ ID NO: 1037806 - DNA, 15 bp, Homo sapiens
atcttccagagctct

SEQ ID NO: 1037807 - DNA, 15 bp, Homo sapiens
catcttccagagctc

SEQ ID NO: 1037808 - DNA, 15 bp, Homo sapiens
gcatcttccagagct

SEQ ID NO: 1037809 - DNA, 15 bp, Homo sapiens
cgcatcttccagagc

SEQ ID NO: 1037810 - DNA, 15 bp, Homo sapiens
gcgcatcttccagag

SEQ ID NO: 1037811 - DNA, 15 bp, Homo sapiens
agcgcatcttccaga

SEQ ID NO: 1037812 - DNA, 15 bp, Homo sapiens
cagcgcatcttccag

SEQ ID NO: 1037813 - DNA, 15 bp, Homo sapiens
ccagcgcatcttcca

SEQ ID NO: 1037814 - DNA, 15 bp, Homo sapiens
gccagcgcatcttcc

SEQ ID NO: 1037815 - DNA, 15 bp, Homo sapiens
agccagcgcatcttc

SEQ ID NO: 1037816 - DNA, 15 bp, Homo sapiens
cagccagcgcatctt

SEQ ID NO: 1037817 - DNA, 15 bp, Homo sapiens
ccagccagcgcatct

SEQ ID NO: 1037818 - DNA, 15 bp, Homo sapiens
gccagccagcgcatc

SEQ ID NO: 1037819 - DNA, 15 bp, Homo sapiens
cgccagccagcgcat

SEQ ID NO: 1037820 - DNA, 15 bp, Homo sapiens
gcgccagccagcgca

SEQ ID NO: 1037821 - DNA, 15 bp, Homo sapiens
ggcgccagccagcgc

SEQ ID NO: 1037822 - DNA, 15 bp, Homo sapiens
cggcgccagccagcg

SEQ ID NO: 1037823 - DNA, 15 bp, Homo sapiens
tcggcgccagccagc

SEQ ID NO: 1037824 - DNA, 15 bp, Homo sapiens
gtcggcgccagccag

SEQ ID NO: 1037825 - DNA, 15 bp, Homo sapiens
tgtcggcgccagcca

SEQ ID NO: 1037826 - DNA, 15 bp, Homo sapiens
atgtcggcgccagcc

SEQ ID NO: 1037827 - DNA, 15 bp, Homo sapiens
tatgtcggcgccagc

SEQ ID NO: 1037828 - DNA, 15 bp, Homo sapiens
ttatgtcggcgccag

SEQ ID NO: 1037829 - DNA, 15 bp, Homo sapiens
tttatgtcggcgcca

SEQ ID NO: 1037830 - DNA, 15 bp, Homo sapiens
gtttatgtcggcgcc

SEQ ID NO: 1037831 - DNA, 15 bp, Homo sapiens
agtttatgtcggcgc

SEQ ID NO: 1037832 - DNA, 15 bp, Homo sapiens
cagtttatgtcggcg

SEQ ID NO: 1037833 - DNA, 15 bp, Homo sapiens
gcagtttatgtcggc

SEQ ID NO: 1037834 - DNA, 15 bp, Homo sapiens
agcagtttatgtcgg

SEQ ID NO: 1037835 - DNA, 15 bp, Homo sapiens
tagcagtttatgtcg

SEQ ID NO: 1037836 - DNA, 15 bp, Homo sapiens
atagcagtttatgtc

SEQ ID NO: 1037837 - DNA, 15 bp, Homo sapiens
gatagcagtttatgt

SEQ ID NO: 1037838 - DNA, 15 bp, Homo sapiens
ggatagcagtttatg

SEQ ID NO: 1037839 - DNA, 15 bp, Homo sapiens
aggatagcagtttat

SEQ ID NO: 1037840 - DNA, 15 bp, Homo sapiens
caggatagcagttta

SEQ ID NO: 1037841 - DNA, 15 bp, Homo sapiens
tcaggatagcagttt

SEQ ID NO: 1037842 - DNA, 15 bp, Homo sapiens
atcaggatagcagtt

SEQ ID NO: 1037843 - DNA, 15 bp, Homo sapiens
gatcaggatagcagt

SEQ ID NO: 1037844 - DNA, 15 bp, Homo sapiens
agatcaggatagcag

SEQ ID NO: 1037845 - DNA, 15 bp, Homo sapiens
gagatcaggatagca

SEQ ID NO: 1037846 - DNA, 15 bp, Homo sapiens
ggagatcaggatagc

SEQ ID NO: 1037847 - DNA, 15 bp, Homo sapiens
tggagatcaggatag

SEQ ID NO: 1037848 - DNA, 15 bp, Homo sapiens
atggagatcaggata

SEQ ID NO: 1037849 - DNA, 15 bp, Homo sapiens
gatggagatcaggat

SEQ ID NO: 1037850 - DNA, 15 bp, Homo sapiens
tgatggagatcagga

SEQ ID NO: 1037851 - DNA, 15 bp, Homo sapiens
ttgatggagatcagg

SEQ ID NO: 1037852 - DNA, 15 bp, Homo sapiens
tttgatggagatcag

SEQ ID NO: 1037853 - DNA, 15 bp, Homo sapiens
ctttgatggagatca

SEQ ID NO: 1037854 - DNA, 15 bp, Homo sapiens
tctttgatggagatc

SEQ ID NO: 1037855 - DNA, 15 bp, Homo sapiens
atctttgatggagat

SEQ ID NO: 1037856 - DNA, 15 bp, Homo sapiens
catctttgatggaga

SEQ ID NO: 1037857 - DNA, 15 bp, Homo sapiens
acatctttgatggag

SEQ ID NO: 1037858 - DNA, 15 bp, Homo sapiens
cacatctttgatgga

SEQ ID NO: 1037859 - DNA, 15 bp, Homo sapiens
ccacatctttgatgg

SEQ ID NO: 1037860 - DNA, 15 bp, Homo sapiens
cccacatctttgatg

SEQ ID NO: 1037861 - DNA, 15 bp, Homo sapiens
gcccacatctttgat

SEQ ID NO: 1037862 - DNA, 15 bp, Homo sapiens
ggcccacatctttga

SEQ ID NO: 1037863 - DNA, 15 bp, Homo sapiens
aggcccacatctttg

SEQ ID NO: 1037864 - DNA, 15 bp, Homo sapiens
aaggcccacatcttt

SEQ ID NO: 1037865 - DNA, 15 bp, Homo sapiens
gaaggcccacatctt

SEQ ID NO: 1037866 - DNA, 15 bp, Homo sapiens
agaaggcccacatct

SEQ ID NO: 1037867 - DNA, 15 bp, Homo sapiens
gagaaggcccacatc

SEQ ID NO: 1037868 - DNA, 15 bp, Homo sapiens
tgagaaggcccacat

SEQ ID NO: 1037869 - DNA, 15 bp, Homo sapiens
atgagaaggcccaca

SEQ ID NO: 1037870 - DNA, 15 bp, Homo sapiens
catgagaaggcccac

SEQ ID NO: 1037871 - DNA, 15 bp, Homo sapiens
gcatgagaaggccca

SEQ ID NO: 1037872 - DNA, 15 bp, Homo sapiens
agcatgagaaggccc

SEQ ID NO: 1037873 - DNA, 15 bp, Homo sapiens
cagcatgagaaggcc

SEQ ID NO: 1037874 - DNA, 15 bp, Homo sapiens
gcagcatgagaaggc

SEQ ID NO: 1037875 - DNA, 15 bp, Homo sapiens
tgcagcatgagaagg

SEQ ID NO: 1037876 - DNA, 15 bp, Homo sapiens
ctgcagcatgagaag

SEQ ID NO: 1037877 - DNA, 15 bp, Homo sapiens
actgcagcatgagaa

SEQ ID NO: 1037878 - DNA, 15 bp, Homo sapiens
aactgcagcatgaga

SEQ ID NO: 1037879 - DNA, 15 bp, Homo sapiens
aaactgcagcatgag

SEQ ID NO: 1037880 - DNA, 15 bp, Homo sapiens
gaaactgcagcatga

SEQ ID NO: 1037881 - DNA, 15 bp, Homo sapiens
ggaaactgcagcatg

SEQ ID NO: 1037882 - DNA, 15 bp, Homo sapiens
aggaaactgcagcat

SEQ ID NO: 1037883 - DNA, 15 bp, Homo sapiens
gaggaaactgcagca

SEQ ID NO: 1037884 - DNA, 15 bp, Homo sapiens
tgaggaaactgcagc

SEQ ID NO: 1037885 - DNA, 15 bp, Homo sapiens
ttgaggaaactgcag

SEQ ID NO: 1037886 - DNA, 15 bp, Homo sapiens
gttgaggaaactgca

SEQ ID NO: 1037887 - DNA, 15 bp, Homo sapiens
agttgaggaaactgc

SEQ ID NO: 1037888 - DNA, 15 bp, Homo sapiens
cagttgaggaaactg

SEQ ID NO: 1037889 - DNA, 15 bp, Homo sapiens
gcagttgaggaaact

SEQ ID NO: 1037890 - DNA, 15 bp, Homo sapiens
tgcagttgaggaaac

SEQ ID NO: 1037891 - DNA, 15 bp, Homo sapiens
ctgcagttgaggaaa

SEQ ID NO: 1037892 - DNA, 15 bp, Homo sapiens
tctgcagttgaggaa

SEQ ID NO: 1037893 - DNA, 15 bp, Homo sapiens
ttctgcagttgagga

SEQ ID NO: 1037894 - DNA, 15 bp, Homo sapiens
gttctgcagttgagg

SEQ ID NO: 1037895 - DNA, 15 bp, Homo sapiens
tgttctgcagttgag

SEQ ID NO: 1037896 - DNA, 15 bp, Homo sapiens
ctgttctgcagttga

SEQ ID NO: 1037897 - DNA, 15 bp, Homo sapiens
cctgttctgcagttg

SEQ ID NO: 1037898 - DNA, 15 bp, Homo sapiens
ccctgttctgcagtt

SEQ ID NO: 1037899 - DNA, 15 bp, Homo sapiens
tccctgttctgcagt

SEQ ID NO: 1037900 - DNA, 15 bp, Homo sapiens
ctccctgttctgcag

SEQ ID NO: 1037901 - DNA, 15 bp, Homo sapiens
tctccctgttctgca

SEQ ID NO: 1037902 - DNA, 15 bp, Homo sapiens
atctccctgttctgc

SEQ ID NO: 1037903 - DNA, 15 bp, Homo sapiens
aatctccctgttctg

SEQ ID NO: 1037904 - DNA, 15 bp, Homo sapiens
gaatctccctgttct

SEQ ID NO: 1037905 - DNA, 15 bp, Homo sapiens
agaatctccctgttc

SEQ ID NO: 1037906 - DNA, 15 bp, Homo sapiens
aagaatctccctgtt

SEQ ID NO: 1037907 - DNA, 15 bp, Homo sapiens
gaagaatctccctgt

SEQ ID NO: 1037908 - DNA, 15 bp, Homo sapiens
ggaagaatctccctg

SEQ ID NO: 1037909 - DNA, 15 bp, Homo sapiens
tggaagaatctccct

SEQ ID NO: 1037910 - DNA, 15 bp, Homo sapiens
ttggaagaatctccc

SEQ ID NO: 1037911 - DNA, 15 bp, Homo sapiens
attggaagaatctcc

SEQ ID NO: 1037912 - DNA, 15 bp, Homo sapiens
cattggaagaatctc

SEQ ID NO: 1037913 - DNA, 15 bp, Homo sapiens
tcattggaagaatct

SEQ ID NO: 1037914 - DNA, 15 bp, Homo sapiens
atcattggaagaatc

SEQ ID NO: 1037915 - DNA, 15 bp, Homo sapiens
tatcattggaagaat

SEQ ID NO: 1037916 - DNA, 15 bp, Homo sapiens
ttatcattggaagaa

SEQ ID NO: 1037917 - DNA, 15 bp, Homo sapiens
attatcattggaaga

SEQ ID NO: 1037918 - DNA, 15 bp, Homo sapiens
aattatcattggaag

SEQ ID NO: 1037919 - DNA, 15 bp, Homo sapiens
aaattatcattggaa

SEQ ID NO: 1037920 - DNA, 15 bp, Homo sapiens
aaaattatcattgga

SEQ ID NO: 1037921 - DNA, 15 bp, Homo sapiens
taaaattatcattgg

SEQ ID NO: 1037922 - DNA, 15 bp, Homo sapiens
gtaaaattatcattg

SEQ ID NO: 1037923 - DNA, 15 bp, Homo sapiens
ggtaaaattatcatt

SEQ ID NO: 1037924 - DNA, 15 bp, Homo sapiens
aggtaaaattatcat

SEQ ID NO: 1037925 - DNA, 15 bp, Homo sapiens
gaggtaaaattatca

SEQ ID NO: 1037926 - DNA, 15 bp, Homo sapiens
cgaggtaaaattatc

SEQ ID NO: 1037927 - DNA, 15 bp, Homo sapiens
tcgaggtaaaattat

SEQ ID NO: 1037928 - DNA, 15 bp, Homo sapiens
ttcgaggtaaaatta

SEQ ID NO: 1037929 - DNA, 15 bp, Homo sapiens
cttcgaggtaaaatt

SEQ ID NO: 1037930 - DNA, 15 bp, Homo sapiens
acttcgaggtaaaat

SEQ ID NO: 1037931 - DNA, 15 bp, Homo sapiens
cacttcgaggtaaaa

SEQ ID NO: 1037932 - DNA, 15 bp, Homo sapiens
tcacttcgaggtaaa

SEQ ID NO: 1037933 - DNA, 15 bp, Homo sapiens
atcacttcgaggtaa

SEQ ID NO: 1037934 - DNA, 15 bp, Homo sapiens
catcacttcgaggta

SEQ ID NO: 1037935 - DNA, 15 bp, Homo sapiens
acatcacttcgaggt

SEQ ID NO: 1037936 - DNA, 15 bp, Homo sapiens
aacatcacttcgagg

SEQ ID NO: 1037937 - DNA, 15 bp, Homo sapiens
caacatcacttcgag

SEQ ID NO: 1037938 - DNA, 15 bp, Homo sapiens
acaacatcacttcga

SEQ ID NO: 1037939 - DNA, 15 bp, Homo sapiens
tacaacatcacttcg

SEQ ID NO: 1037940 - DNA, 15 bp, Homo sapiens
ttacaacatcacttc

SEQ ID NO: 1037941 - DNA, 15 bp, Homo sapiens
attacaacatcactt

SEQ ID NO: 1037942 - DNA, 15 bp, Homo sapiens
tattacaacatcact

SEQ ID NO: 1037943 - DNA, 15 bp, Homo sapiens
ttattacaacatcac

SEQ ID NO: 1037944 - DNA, 15 bp, Homo sapiens
tttattacaacatca

SEQ ID NO: 1037945 - DNA, 15 bp, Homo sapiens
ctttattacaacatc

SEQ ID NO: 1037946 - DNA, 15 bp, Homo sapiens
tctttattacaacat

SEQ ID NO: 1037947 - DNA, 15 bp, Homo sapiens
atctttattacaaca

SEQ ID NO: 1037948 - DNA, 15 bp, Homo sapiens
catctttattacaac

SEQ ID NO: 1037949 - DNA, 15 bp, Homo sapiens
ccatctttattacaa

SEQ ID NO: 1037950 - DNA, 15 bp, Homo sapiens
accatctttattaca

SEQ ID NO: 1037951 - DNA, 15 bp, Homo sapiens
caccatctttattac

SEQ ID NO: 1037952 - DNA, 15 bp, Homo sapiens
ccaccatctttatta

SEQ ID NO: 1037953 - DNA, 15 bp, Homo sapiens
accaccatctttatt

SEQ ID NO: 1037954 - DNA, 15 bp, Homo sapiens
taccaccatctttat

SEQ ID NO: 1037955 - DNA, 15 bp, Homo sapiens
ttaccaccatcttta

SEQ ID NO: 1037956 - DNA, 15 bp, Homo sapiens
tttaccaccatcttt

SEQ ID NO: 1037957 - DNA, 15 bp, Homo sapiens
ttttaccaccatctt

SEQ ID NO: 1037958 - DNA, 15 bp, Homo sapiens
cttttaccaccatct

SEQ ID NO: 1037959 - DNA, 15 bp, Homo sapiens
gcttttaccaccatc

SEQ ID NO: 1037960 - DNA, 15 bp, Homo sapiens
tgcttttaccaccat

SEQ ID NO: 1037961 - DNA, 15 bp, Homo sapiens
atgcttttaccacca

SEQ ID NO: 1037962 - DNA, 15 bp, Homo sapiens
aatgcttttaccacc

SEQ ID NO: 1037963 - DNA, 15 bp, Homo sapiens
aaatgcttttaccac

SEQ ID NO: 1037964 - DNA, 15 bp, Homo sapiens
aaaatgcttttacca

SEQ ID NO: 1037965 - DNA, 15 bp, Homo sapiens
caaaatgcttttacc

SEQ ID NO: 1037966 - DNA, 15 bp, Homo sapiens
gcaaaatgcttttac

SEQ ID NO: 1037967 - DNA, 15 bp, Homo sapiens
tgcaaaatgctttta

SEQ ID NO: 1037968 - DNA, 15 bp, Homo sapiens
ttgcaaaatgctttt

SEQ ID NO: 1037969 - DNA, 15 bp, Homo sapiens
cttgcaaaatgcttt

SEQ ID NO: 1037970 - DNA, 15 bp, Homo sapiens
tcttgcaaaatgctt

SEQ ID NO: 1037971 - DNA, 15 bp, Homo sapiens
gtcttgcaaaatgct

SEQ ID NO: 1037972 - DNA, 15 bp, Homo sapiens
ggtcttgcaaaatgc

SEQ ID NO: 1037973 - DNA, 15 bp, Homo sapiens
tggtcttgcaaaatg

SEQ ID NO: 1037974 - DNA, 15 bp, Homo sapiens
ttggtcttgcaaaat

SEQ ID NO: 1037975 - DNA, 15 bp, Homo sapiens
tttggtcttgcaaaa

SEQ ID NO: 1037976 - DNA, 15 bp, Homo sapiens
ttttggtcttgcaaa

SEQ ID NO: 1037977 - DNA, 15 bp, Homo sapiens
tttttggtcttgcaa

SEQ ID NO: 1037978 - DNA, 15 bp, Homo sapiens
ttttttggtcttgca

SEQ ID NO: 1037979 - DNA, 15 bp, Homo sapiens
tttttttggtcttgc

SEQ ID NO: 1037980 - DNA, 15 bp, Homo sapiens
ctttttttggtcttg

SEQ ID NO: 1037981 - DNA, 15 bp, Homo sapiens
tctttttttggtctt

SEQ ID NO: 1037982 - DNA, 15 bp, Homo sapiens
ttctttttttggtct

SEQ ID NO: 1037983 - DNA, 15 bp, Homo sapiens
tttctttttttggtc

SEQ ID NO: 1037984 - DNA, 15 bp, Homo sapiens
gtttctttttttggt

SEQ ID NO: 1037985 - DNA, 15 bp, Homo sapiens
tgtttctttttttgg

SEQ ID NO: 1037986 - DNA, 15 bp, Homo sapiens
gtgtttctttttttg

SEQ ID NO: 1037987 - DNA, 15 bp, Homo sapiens
ggtgtttcttttttt

SEQ ID NO: 1037988 - DNA, 15 bp, Homo sapiens
aggtgtttctttttt

SEQ ID NO: 1037989 - DNA, 15 bp, Homo sapiens
taggtgtttcttttt

SEQ ID NO: 1037990 - DNA, 15 bp, Homo sapiens
gtaggtgtttctttt

SEQ ID NO: 1037991 - DNA, 15 bp, Homo sapiens
agtaggtgtttcttt

SEQ ID NO: 1037992 - DNA, 15 bp, Homo sapiens
tagtaggtgtttctt

SEQ ID NO: 1037993 - DNA, 15 bp, Homo sapiens
ttagtaggtgtttct

SEQ ID NO: 1037994 - DNA, 15 bp, Homo sapiens
tttagtaggtgtttc

SEQ ID NO: 1037995 - DNA, 15 bp, Homo sapiens
gtttagtaggtgttt

SEQ ID NO: 1037996 - DNA, 15 bp, Homo sapiens
tgtttagtaggtgtt

SEQ ID NO: 1037997 - DNA, 15 bp, Homo sapiens
ctgtttagtaggtgt

SEQ ID NO: 1037998 - DNA, 15 bp, Homo sapiens
cctgtttagtaggtg

SEQ ID NO: 1037999 - DNA, 15 bp, Homo sapiens
gcctgtttagtaggt

SEQ ID NO: 1038000 - DNA, 15 bp, Homo sapiens
tgcctgtttagtagg

SEQ ID NO: 1038001 - DNA, 15 bp, Homo sapiens
atgcctgtttagtag

SEQ ID NO: 1038002 - DNA, 15 bp, Homo sapiens
catgcctgtttagta

SEQ ID NO: 1038003 - DNA, 15 bp, Homo sapiens
gcatgcctgtttagt

SEQ ID NO: 1038004 - DNA, 15 bp, Homo sapiens
agcatgcctgtttag

SEQ ID NO: 1038005 - DNA, 15 bp, Homo sapiens
cagcatgcctgttta

SEQ ID NO: 1038006 - DNA, 15 bp, Homo sapiens
acagcatgcctgttt

SEQ ID NO: 1038007 - DNA, 15 bp, Homo sapiens
gacagcatgcctgtt

SEQ ID NO: 1038008 - DNA, 15 bp, Homo sapiens
agacagcatgcctgt

SEQ ID NO: 1038009 - DNA, 15 bp, Homo sapiens
tagacagcatgcctg

SEQ ID NO: 1038010 - DNA, 15 bp, Homo sapiens
atagacagcatgcct

SEQ ID NO: 1038011 - DNA, 15 bp, Homo sapiens
tatagacagcatgcc

SEQ ID NO: 1038012 - DNA, 15 bp, Homo sapiens
atatagacagcatgc

SEQ ID NO: 1038013 - DNA, 15 bp, Homo sapiens
gatatagacagcatg

SEQ ID NO: 1038014 - DNA, 15 bp, Homo sapiens
agatatagacagcat

SEQ ID NO: 1038015 - DNA, 15 bp, Homo sapiens
cagatatagacagca

SEQ ID NO: 1038016 - DNA, 15 bp, Homo sapiens
ccagatatagacagc

SEQ ID NO: 1038017 - DNA, 15 bp, Homo sapiens
accagatatagacag

SEQ ID NO: 1038018 - DNA, 15 bp, Homo sapiens
caccagatatagaca

SEQ ID NO: 1038019 - DNA, 15 bp, Homo sapiens
acaccagatatagac

SEQ ID NO: 1038020 - DNA, 15 bp, Homo sapiens
aacaccagatataga

SEQ ID NO: 1038021 - DNA, 15 bp, Homo sapiens
aaacaccagatatag

SEQ ID NO: 1038022 - DNA, 15 bp, Homo sapiens
caaacaccagatata

SEQ ID NO: 1038023 - DNA, 15 bp, Homo sapiens
acaaacaccagatat

SEQ ID NO: 1038024 - DNA, 15 bp, Homo sapiens
aacaaacaccagata

SEQ ID NO: 1038025 - DNA, 15 bp, Homo sapiens
taacaaacaccagat

SEQ ID NO: 1038026 - DNA, 15 bp, Homo sapiens
ctaacaaacaccaga

SEQ ID NO: 1038027 - DNA, 15 bp, Homo sapiens
tctaacaaacaccag

SEQ ID NO: 1038028 - DNA, 15 bp, Homo sapiens
ttctaacaaacacca

SEQ ID NO: 1038029 - DNA, 15 bp, Homo sapiens
attctaacaaacacc

SEQ ID NO: 1038030 - DNA, 15 bp, Homo sapiens
aattctaacaaacac

SEQ ID NO: 1038031 - DNA, 15 bp, Homo sapiens
aaattctaacaaaca

SEQ ID NO: 1038032 - DNA, 15 bp, Homo sapiens
gaaattctaacaaac

SEQ ID NO: 1038033 - DNA, 15 bp, Homo sapiens
agaaattctaacaaa

SEQ ID NO: 1038034 - DNA, 15 bp, Homo sapiens
cagaaattctaacaa

SEQ ID NO: 1038035 - DNA, 15 bp, Homo sapiens
tcagaaattctaaca

SEQ ID NO: 1038036 - DNA, 15 bp, Homo sapiens
ctcagaaattctaac

SEQ ID NO: 1038037 - DNA, 15 bp, Homo sapiens
cctcagaaattctaa

SEQ ID NO: 1038038 - DNA, 15 bp, Homo sapiens
tcctcagaaattcta

SEQ ID NO: 1038039 - DNA, 15 bp, Homo sapiens
ttcctcagaaattct

SEQ ID NO: 1038040 - DNA, 15 bp, Homo sapiens
tttcctcagaaattc

SEQ ID NO: 1038041 - DNA, 15 bp, Homo sapiens
gtttcctcagaaatt

SEQ ID NO: 1038042 - DNA, 15 bp, Homo sapiens
ggtttcctcagaaat

SEQ ID NO: 1038043 - DNA, 15 bp, Homo sapiens
gggtttcctcagaaa

SEQ ID NO: 1038044 - DNA, 15 bp, Homo sapiens
agggtttcctcagaa

SEQ ID NO: 1038045 - DNA, 15 bp, Homo sapiens
gagggtttcctcaga

SEQ ID NO: 1038046 - DNA, 15 bp, Homo sapiens
agagggtttcctcag

SEQ ID NO: 1038047 - DNA, 15 bp, Homo sapiens
cagagggtttcctca

SEQ ID NO: 1038048 - DNA, 15 bp, Homo sapiens
ccagagggtttcctc

SEQ ID NO: 1038049 - DNA, 15 bp, Homo sapiens
accagagggtttcct

SEQ ID NO: 1038050 - DNA, 15 bp, Homo sapiens
gaccagagggtttcc

SEQ ID NO: 1038051 - DNA, 15 bp, Homo sapiens
agaccagagggtttc

SEQ ID NO: 1038052 - DNA, 15 bp, Homo sapiens
tagaccagagggttt

SEQ ID NO: 1038053 - DNA, 15 bp, Homo sapiens
ttagaccagagggtt

SEQ ID NO: 1038054 - DNA, 15 bp, Homo sapiens
cttagaccagagggt

SEQ ID NO: 1038055 - DNA, 15 bp, Homo sapiens
tcttagaccagaggg

SEQ ID NO: 1038056 - DNA, 15 bp, Homo sapiens
atcttagaccagagg

SEQ ID NO: 1038057 - DNA, 15 bp, Homo sapiens
aatcttagaccagag

SEQ ID NO: 1038058 - DNA, 15 bp, Homo sapiens
gaatcttagaccaga

SEQ ID NO: 1038059 - DNA, 15 bp, Homo sapiens
agaatcttagaccag

SEQ ID NO: 1038060 - DNA, 15 bp, Homo sapiens
tagaatcttagacca

SEQ ID NO: 1038061 - DNA, 15 bp, Homo sapiens
ctagaatcttagacc

SEQ ID NO: 1038062 - DNA, 15 bp, Homo sapiens
tctagaatcttagac

SEQ ID NO: 1038063 - DNA, 15 bp, Homo sapiens
ctctagaatcttaga

SEQ ID NO: 1038064 - DNA, 15 bp, Homo sapiens
tctctagaatcttag

SEQ ID NO: 1038065 - DNA, 15 bp, Homo sapiens
ctctctagaatctta

SEQ ID NO: 1038066 - DNA, 15 bp, Homo sapiens
actctctagaatctt

SEQ ID NO: 1038067 - DNA, 15 bp, Homo sapiens
gactctctagaatct

SEQ ID NO: 1038068 - DNA, 15 bp, Homo sapiens
agactctctagaatc

SEQ ID NO: 1038069 - DNA, 15 bp, Homo sapiens
tagactctctagaat

SEQ ID NO: 1038070 - DNA, 15 bp, Homo sapiens
gtagactctctagaa

SEQ ID NO: 1038071 - DNA, 15 bp, Homo sapiens
tgtagactctctaga

SEQ ID NO: 1038072 - DNA, 15 bp, Homo sapiens
ctgtagactctctag

SEQ ID NO: 1038073 - DNA, 15 bp, Homo sapiens
tctgtagactctcta

SEQ ID NO: 1038074 - DNA, 15 bp, Homo sapiens
ctctgtagactctct

SEQ ID NO: 1038075 - DNA, 15 bp, Homo sapiens
cctctgtagactctc

SEQ ID NO: 1038076 - DNA, 15 bp, Homo sapiens
acctctgtagactct

SEQ ID NO: 1038077 - DNA, 15 bp, Homo sapiens
aacctctgtagactc

SEQ ID NO: 1038078 - DNA, 15 bp, Homo sapiens
caacctctgtagact

SEQ ID NO: 1038079 - DNA, 15 bp, Homo sapiens
tcaacctctgtagac

SEQ ID NO: 1038080 - DNA, 15 bp, Homo sapiens
atcaacctctgtaga

SEQ ID NO: 1038081 - DNA, 15 bp, Homo sapiens
tatcaacctctgtag

SEQ ID NO: 1038082 - DNA, 15 bp, Homo sapiens
ttatcaacctctgta

SEQ ID NO: 1038083 - DNA, 15 bp, Homo sapiens
gttatcaacctctgt

SEQ ID NO: 1038084 - DNA, 15 bp, Homo sapiens
agttatcaacctctg

SEQ ID NO: 1038085 - DNA, 15 bp, Homo sapiens
cagttatcaacctct

SEQ ID NO: 1038086 - DNA, 15 bp, Homo sapiens
ccagttatcaacctc

SEQ ID NO: 1038087 - DNA, 15 bp, Homo sapiens
cccagttatcaacct

SEQ ID NO: 1038088 - DNA, 15 bp, Homo sapiens
tcccagttatcaacc

SEQ ID NO: 1038089 - DNA, 15 bp, Homo sapiens
atcccagttatcaac

SEQ ID NO: 1038090 - DNA, 15 bp, Homo sapiens
aatcccagttatcaa

SEQ ID NO: 1038091 - DNA, 15 bp, Homo sapiens
caatcccagttatca

SEQ ID NO: 1038092 - DNA, 15 bp, Homo sapiens
ccaatcccagttatc

SEQ ID NO: 1038093 - DNA, 15 bp, Homo sapiens
gccaatcccagttat

SEQ ID NO: 1038094 - DNA, 15 bp, Homo sapiens
agccaatcccagtta

SEQ ID NO: 1038095 - DNA, 15 bp, Homo sapiens
aagccaatcccagtt

SEQ ID NO: 1038096 - DNA, 15 bp, Homo sapiens
aaagccaatcccagt

SEQ ID NO: 1038097 - DNA, 15 bp, Homo sapiens
aaaagccaatcccag

SEQ ID NO: 1038098 - DNA, 15 bp, Homo sapiens
taaaagccaatccca

SEQ ID NO: 1038099 - DNA, 15 bp, Homo sapiens
ttaaaagccaatccc

SEQ ID NO: 1038100 - DNA, 15 bp, Homo sapiens
cttaaaagccaatcc

SEQ ID NO: 1038101 - DNA, 15 bp, Homo sapiens
tcttaaaagccaatc

SEQ ID NO: 1038102 - DNA, 15 bp, Homo sapiens
atcttaaaagccaat

SEQ ID NO: 1038103 - DNA, 15 bp, Homo sapiens
gatcttaaaagccaa

SEQ ID NO: 1038104 - DNA, 15 bp, Homo sapiens
agatcttaaaagcca

SEQ ID NO: 1038105 - DNA, 15 bp, Homo sapiens
aagatcttaaaagcc

SEQ ID NO: 1038106 - DNA, 15 bp, Homo sapiens
aaagatcttaaaagc

SEQ ID NO: 1038107 - DNA, 15 bp, Homo sapiens
aaaagatcttaaaag

SEQ ID NO: 1038108 - DNA, 15 bp, Homo sapiens
gaaaagatcttaaaa

SEQ ID NO: 1038109 - DNA, 15 bp, Homo sapiens
agaaaagatcttaaa

SEQ ID NO: 1038110 - DNA, 15 bp, Homo sapiens
cagaaaagatcttaa

SEQ ID NO: 1038111 - DNA, 15 bp, Homo sapiens
ccagaaaagatctta

SEQ ID NO: 1038112 - DNA, 15 bp, Homo sapiens
tccagaaaagatctt

SEQ ID NO: 1038113 - DNA, 15 bp, Homo sapiens
ttccagaaaagatct

SEQ ID NO: 1038114 - DNA, 15 bp, Homo sapiens
attccagaaaagatc

SEQ ID NO: 1038115 - DNA, 15 bp, Homo sapiens
cattccagaaaagat

SEQ ID NO: 1038116 - DNA, 15 bp, Homo sapiens
ccattccagaaaaga

SEQ ID NO: 1038117 - DNA, 15 bp, Homo sapiens
gccattccagaaaag

SEQ ID NO: 1038118 - DNA, 15 bp, Homo sapiens
agccattccagaaaa

SEQ ID NO: 1038119 - DNA, 15 bp, Homo sapiens
cagccattccagaaa

SEQ ID NO: 1038120 - DNA, 15 bp, Homo sapiens
acagccattccagaa

SEQ ID NO: 1038121 - DNA, 15 bp, Homo sapiens
aacagccattccaga

SEQ ID NO: 1038122 - DNA, 15 bp, Homo sapiens
gaacagccattccag

SEQ ID NO: 1038123 - DNA, 15 bp, Homo sapiens
ggaacagccattcca

SEQ ID NO: 1038124 - DNA, 15 bp, Homo sapiens
gggaacagccattcc

SEQ ID NO: 1038125 - DNA, 15 bp, Homo sapiens
agggaacagccattc

SEQ ID NO: 1038126 - DNA, 15 bp, Homo sapiens
aagggaacagccatt

SEQ ID NO: 1038127 - DNA, 15 bp, Homo sapiens
aaagggaacagccat

SEQ ID NO: 1038128 - DNA, 15 bp, Homo sapiens
taaagggaacagcca

SEQ ID NO: 1038129 - DNA, 15 bp, Homo sapiens
gtaaagggaacagcc

SEQ ID NO: 1038130 - DNA, 15 bp, Homo sapiens
ggtaaagggaacagc

SEQ ID NO: 1038131 - DNA, 15 bp, Homo sapiens
aggtaaagggaacag

SEQ ID NO: 1038132 - DNA, 15 bp, Homo sapiens
gaggtaaagggaaca

SEQ ID NO: 1038133 - DNA, 15 bp, Homo sapiens
tgaggtaaagggaac

SEQ ID NO: 1038134 - DNA, 15 bp, Homo sapiens
atgaggtaaagggaa

SEQ ID NO: 1038135 - DNA, 15 bp, Homo sapiens
aatgaggtaaaggga

SEQ ID NO: 1038136 - DNA, 15 bp, Homo sapiens
taatgaggtaaaggg

SEQ ID NO: 1038137 - DNA, 15 bp, Homo sapiens
ataatgaggtaaagg

SEQ ID NO: 1038138 - DNA, 15 bp, Homo sapiens
aataatgaggtaaag

SEQ ID NO: 1038139 - DNA, 15 bp, Homo sapiens
taataatgaggtaaa

SEQ ID NO: 1038140 - DNA, 15 bp, Homo sapiens
gtaataatgaggtaa

SEQ ID NO: 1038141 - DNA, 15 bp, Homo sapiens
agtaataatgaggta

SEQ ID NO: 1038142 - DNA, 15 bp, Homo sapiens
aagtaataatgaggt

SEQ ID NO: 1038143 - DNA, 15 bp, Homo sapiens
aaagtaataatgagg

SEQ ID NO: 1038144 - DNA, 15 bp, Homo sapiens
taaagtaataatgag

SEQ ID NO: 1038145 - DNA, 15 bp, Homo sapiens
ttaaagtaataatga

SEQ ID NO: 1038146 - DNA, 15 bp, Homo sapiens
tttaaagtaataatg

SEQ ID NO: 1038147 - DNA, 15 bp, Homo sapiens
gtttaaagtaataat

SEQ ID NO: 1038148 - DNA, 15 bp, Homo sapiens
tgtttaaagtaataa

SEQ ID NO: 1038149 - DNA, 15 bp, Homo sapiens
ttgtttaaagtaata

SEQ ID NO: 1038150 - DNA, 15 bp, Homo sapiens
gttgtttaaagtaat

SEQ ID NO: 1038151 - DNA, 15 bp, Homo sapiens
agttgtttaaagtaa

SEQ ID NO: 1038152 - DNA, 15 bp, Homo sapiens
aagttgtttaaagta

SEQ ID NO: 1038153 - DNA, 15 bp, Homo sapiens
aaagttgtttaaagt

SEQ ID NO: 1038154 - DNA, 15 bp, Homo sapiens
caaagttgtttaaag

SEQ ID NO: 1038155 - DNA, 15 bp, Homo sapiens
ccaaagttgtttaaa

SEQ ID NO: 1038156 - DNA, 15 bp, Homo sapiens
gccaaagttgtttaa

SEQ ID NO: 1038157 - DNA, 15 bp, Homo sapiens
tgccaaagttgttta

SEQ ID NO: 1038158 - DNA, 15 bp, Homo sapiens
ctgccaaagttgttt

SEQ ID NO: 1038159 - DNA, 15 bp, Homo sapiens
cctgccaaagttgtt

SEQ ID NO: 1038160 - DNA, 15 bp, Homo sapiens
tcctgccaaagttgt

SEQ ID NO: 1038161 - DNA, 15 bp, Homo sapiens
ctcctgccaaagttg

SEQ ID NO: 1038162 - DNA, 15 bp, Homo sapiens
tctcctgccaaagtt

SEQ ID NO: 1038163 - DNA, 15 bp, Homo sapiens
atctcctgccaaagt

SEQ ID NO: 1038164 - DNA, 15 bp, Homo sapiens
tatctcctgccaaag

SEQ ID NO: 1038165 - DNA, 15 bp, Homo sapiens
atatctcctgccaaa

SEQ ID NO: 1038166 - DNA, 15 bp, Homo sapiens
gatatctcctgccaa

SEQ ID NO: 1038167 - DNA, 15 bp, Homo sapiens
tgatatctcctgcca

SEQ ID NO: 1038168 - DNA, 15 bp, Homo sapiens
ctgatatctcctgcc

SEQ ID NO: 1038169 - DNA, 15 bp, Homo sapiens
actgatatctcctgc

SEQ ID NO: 1038170 - DNA, 15 bp, Homo sapiens
tactgatatctcctg

SEQ ID NO: 1038171 - DNA, 15 bp, Homo sapiens
ttactgatatctcct

SEQ ID NO: 1038172 - DNA, 15 bp, Homo sapiens
attactgatatctcc

SEQ ID NO: 1038173 - DNA, 15 bp, Homo sapiens
cattactgatatctc

SEQ ID NO: 1038174 - DNA, 15 bp, Homo sapiens
gcattactgatatct

SEQ ID NO: 1038175 - DNA, 15 bp, Homo sapiens
ggcattactgatatc

SEQ ID NO: 1038176 - DNA, 15 bp, Homo sapiens
tggcattactgatat

SEQ ID NO: 1038177 - DNA, 15 bp, Homo sapiens
ttggcattactgata

SEQ ID NO: 1038178 - DNA, 15 bp, Homo sapiens
attggcattactgat

SEQ ID NO: 1038179 - DNA, 15 bp, Homo sapiens
tattggcattactga

SEQ ID NO: 1038180 - DNA, 15 bp, Homo sapiens
ttattggcattactg

SEQ ID NO: 1038181 - DNA, 15 bp, Homo sapiens
gttattggcattact

SEQ ID NO: 1038182 - DNA, 15 bp, Homo sapiens
tgttattggcattac

SEQ ID NO: 1038183 - DNA, 15 bp, Homo sapiens
ttgttattggcatta

SEQ ID NO: 1038184 - DNA, 15 bp, Homo sapiens
attgttattggcatt

SEQ ID NO: 1038185 - DNA, 15 bp, Homo sapiens
tattgttattggcat

SEQ ID NO: 1038186 - DNA, 15 bp, Homo sapiens
ttattgttattggca

SEQ ID NO: 1038187 - DNA, 15 bp, Homo sapiens
attattgttattggc

SEQ ID NO: 1038188 - DNA, 15 bp, Homo sapiens
cattattgttattgg

SEQ ID NO: 1038189 - DNA, 15 bp, Homo sapiens
tcattattgttattg

SEQ ID NO: 1038190 - DNA, 15 bp, Homo sapiens
atcattattgttatt

SEQ ID NO: 1038191 - DNA, 15 bp, Homo sapiens
catcattattgttat

SEQ ID NO: 1038192 - DNA, 15 bp, Homo sapiens
tcatcattattgtta

SEQ ID NO: 1038193 - DNA, 15 bp, Homo sapiens
atcatcattattgtt

SEQ ID NO: 1038194 - DNA, 15 bp, Homo sapiens
catcatcattattgt

SEQ ID NO: 1038195 - DNA, 15 bp, Homo sapiens
tcatcatcattattg

SEQ ID NO: 1038196 - DNA, 15 bp, Homo sapiens
atcatcatcattatt

SEQ ID NO: 1038197 - DNA, 15 bp, Homo sapiens
catcatcatcattat

SEQ ID NO: 1038198 - DNA, 15 bp, Homo sapiens
tcatcatcatcatta

SEQ ID NO: 1038199 - DNA, 15 bp, Homo sapiens
atcatcatcatcatt

SEQ ID NO: 1038200 - DNA, 15 bp, Homo sapiens
tcatcatcatcatca

SEQ ID NO: 1038201 - DNA, 15 bp, Homo sapiens
atcatcatcatcatc

SEQ ID NO: 1038202 - DNA, 15 bp, Homo sapiens
ccatcatcatcatca

SEQ ID NO: 1038203 - DNA, 15 bp, Homo sapiens
accatcatcatcatc

SEQ ID NO: 1038204 - DNA, 15 bp, Homo sapiens
aaccatcatcatcat

SEQ ID NO: 1038205 - DNA, 15 bp, Homo sapiens
taaccatcatcatca

SEQ ID NO: 1038206 - DNA, 15 bp, Homo sapiens
gtaaccatcatcatc

SEQ ID NO: 1038207 - DNA, 15 bp, Homo sapiens
agtaaccatcatcat

SEQ ID NO: 1038208 - DNA, 15 bp, Homo sapiens
cagtaaccatcatca

SEQ ID NO: 1038209 - DNA, 15 bp, Homo sapiens
tcagtaaccatcatc

SEQ ID NO: 1038210 - DNA, 15 bp, Homo sapiens
ctcagtaaccatcat

SEQ ID NO: 1038211 - DNA, 15 bp, Homo sapiens
actcagtaaccatca

SEQ ID NO: 1038212 - DNA, 15 bp, Homo sapiens
tactcagtaaccatc

SEQ ID NO: 1038213 - DNA, 15 bp, Homo sapiens
ctactcagtaaccat

SEQ ID NO: 1038214 - DNA, 15 bp, Homo sapiens
actactcagtaacca

SEQ ID NO: 1038215 - DNA, 15 bp, Homo sapiens
aactactcagtaacc

SEQ ID NO: 1038216 - DNA, 15 bp, Homo sapiens
taactactcagtaac

SEQ ID NO: 1038217 - DNA, 15 bp, Homo sapiens
gtaactactcagtaa

SEQ ID NO: 1038218 - DNA, 15 bp, Homo sapiens
agtaactactcagta

SEQ ID NO: 1038219 - DNA, 15 bp, Homo sapiens
cagtaactactcagt

SEQ ID NO: 1038220 - DNA, 15 bp, Homo sapiens
tcagtaactactcag

SEQ ID NO: 1038221 - DNA, 15 bp, Homo sapiens
atcagtaactactca

SEQ ID NO: 1038222 - DNA, 15 bp, Homo sapiens
catcagtaactactc

SEQ ID NO: 1038223 - DNA, 15 bp, Homo sapiens
tcatcagtaactact

SEQ ID NO: 1038224 - DNA, 15 bp, Homo sapiens
ctcatcagtaactac

SEQ ID NO: 1038225 - DNA, 15 bp, Homo sapiens
gctcatcagtaacta

SEQ ID NO: 1038226 - DNA, 15 bp, Homo sapiens
ggctcatcagtaact

SEQ ID NO: 1038227 - DNA, 15 bp, Homo sapiens
gggctcatcagtaac

SEQ ID NO: 1038228 - DNA, 15 bp, Homo sapiens
tgggctcatcagtaa

SEQ ID NO: 1038229 - DNA, 15 bp, Homo sapiens
ctgggctcatcagta

SEQ ID NO: 1038230 - DNA, 15 bp, Homo sapiens
gctgggctcatcagt

SEQ ID NO: 1038231 - DNA, 15 bp, Homo sapiens
tgctgggctcatcag

SEQ ID NO: 1038232 - DNA, 15 bp, Homo sapiens
gtgctgggctcatca

SEQ ID NO: 1038233 - DNA, 15 bp, Homo sapiens
agtgctgggctcatc

SEQ ID NO: 1038234 - DNA, 15 bp, Homo sapiens
cagtgctgggctcat

SEQ ID NO: 1038235 - DNA, 15 bp, Homo sapiens
acagtgctgggctca

SEQ ID NO: 1038236 - DNA, 15 bp, Homo sapiens
cacagtgctgggctc

SEQ ID NO: 1038237 - DNA, 15 bp, Homo sapiens
gcacagtgctgggct

SEQ ID NO: 1038238 - DNA, 15 bp, Homo sapiens
agcacagtgctgggc

SEQ ID NO: 1038239 - DNA, 15 bp, Homo sapiens
tagcacagtgctggg

SEQ ID NO: 1038240 - DNA, 15 bp, Homo sapiens
ttagcacagtgctgg

SEQ ID NO: 1038241 - DNA, 15 bp, Homo sapiens
tttagcacagtgctg

SEQ ID NO: 1038242 - DNA, 15 bp, Homo sapiens
gtttagcacagtgct

SEQ ID NO: 1038243 - DNA, 15 bp, Homo sapiens
tgtttagcacagtgc

SEQ ID NO: 1038244 - DNA, 15 bp, Homo sapiens
gtgtttagcacagtg

SEQ ID NO: 1038245 - DNA, 15 bp, Homo sapiens
agtgtttagcacagt

SEQ ID NO: 1038246 - DNA, 15 bp, Homo sapiens
aagtgtttagcacag

SEQ ID NO: 1038247 - DNA, 15 bp, Homo sapiens
caagtgtttagcaca

SEQ ID NO: 1038248 - DNA, 15 bp, Homo sapiens
tcaagtgtttagcac

SEQ ID NO: 1038249 - DNA, 15 bp, Homo sapiens
ttcaagtgtttagca

SEQ ID NO: 1038250 - DNA, 15 bp, Homo sapiens
cttcaagtgtttagc

SEQ ID NO: 1038251 - DNA, 15 bp, Homo sapiens
ccttcaagtgtttag

SEQ ID NO: 1038252 - DNA, 15 bp, Homo sapiens
tccttcaagtgttta

SEQ ID NO: 1038253 - DNA, 15 bp, Homo sapiens
gtccttcaagtgttt

SEQ ID NO: 1038254 - DNA, 15 bp, Homo sapiens
ggtccttcaagtgtt

SEQ ID NO: 1038255 - DNA, 15 bp, Homo sapiens
aggtccttcaagtgt

SEQ ID NO: 1038256 - DNA, 15 bp, Homo sapiens
aaggtccttcaagtg

SEQ ID NO: 1038257 - DNA, 15 bp, Homo sapiens
aaaggtccttcaagt

SEQ ID NO: 1038258 - DNA, 15 bp, Homo sapiens
aaaaggtccttcaag

SEQ ID NO: 1038259 - DNA, 15 bp, Homo sapiens
aaaaaggtccttcaa

SEQ ID NO: 1038260 - DNA, 15 bp, Homo sapiens
aaaaaaggtccttca

SEQ ID NO: 1038261 - DNA, 15 bp, Homo sapiens
aaaaaaaggtccttc

SEQ ID NO: 1038262 - DNA, 15 bp, Homo sapiens
aaaaaaaaggtcctt

SEQ ID NO: 1038263 - DNA, 15 bp, Homo sapiens
aaaaaaaaaggtcct

SEQ ID NO: 1038264 - DNA, 15 bp, Homo sapiens
aaaaaaaaaaggtcc

SEQ ID NO: 1038265 - DNA, 15 bp, Homo sapiens
aaaaaaaaaaaggtc

SEQ ID NO: 1038266 - DNA, 15 bp, Homo sapiens
gactctgtcaaaaaa

SEQ ID NO: 1038267 - DNA, 15 bp, Homo sapiens
agactctgtcaaaaa

SEQ ID NO: 1038268 - DNA, 15 bp, Homo sapiens
aagactctgtcaaaa

SEQ ID NO: 1038269 - DNA, 15 bp, Homo sapiens
caagactctgtcaaa

SEQ ID NO: 1038270 - DNA, 15 bp, Homo sapiens
ttacaccactgcact

SEQ ID NO: 1038271 - DNA, 15 bp, Homo sapiens
attacaccactgcac

SEQ ID NO: 1038272 - DNA, 15 bp, Homo sapiens
gattacaccactgca

SEQ ID NO: 1038273 - DNA, 15 bp, Homo sapiens
agattacaccactgc

SEQ ID NO: 1038274 - DNA, 15 bp, Homo sapiens
gagattacaccactg

SEQ ID NO: 1038275 - DNA, 15 bp, Homo sapiens
tgagattacaccact

SEQ ID NO: 1038276 - DNA, 15 bp, Homo sapiens
ctgagattacaccac

SEQ ID NO: 1038277 - DNA, 15 bp, Homo sapiens
gctgagattacacca

SEQ ID NO: 1038278 - DNA, 15 bp, Homo sapiens
agctgagattacacc

SEQ ID NO: 1038279 - DNA, 15 bp, Homo sapiens
gagctgagattacac

SEQ ID NO: 1038280 - DNA, 15 bp, Homo sapiens
tgagctgagattaca

SEQ ID NO: 1038281 - DNA, 15 bp, Homo sapiens
gtgagctgagattac

SEQ ID NO: 1038282 - DNA, 15 bp, Homo sapiens
tgtgagctgagatta

SEQ ID NO: 1038283 - DNA, 15 bp, Homo sapiens
ctgtgagctgagatt

SEQ ID NO: 1038284 - DNA, 15 bp, Homo sapiens
cacgctagttttggc

SEQ ID NO: 1038285 - DNA, 15 bp, Homo sapiens
gcacgctagttttgg

SEQ ID NO: 1038286 - DNA, 15 bp, Homo sapiens
agcacgctagttttg

SEQ ID NO: 1038287 - DNA, 15 bp, Homo sapiens
gagcacgctagtttt

SEQ ID NO: 1038288 - DNA, 15 bp, Homo sapiens
ggagcacgctagttt

SEQ ID NO: 1038289 - DNA, 15 bp, Homo sapiens
gggagcacgctagtt

SEQ ID NO: 1038290 - DNA, 15 bp, Homo sapiens
agggagcacgctagt

SEQ ID NO: 1038291 - DNA, 15 bp, Homo sapiens
cagggagcacgctag

SEQ ID NO: 1038292 - DNA, 15 bp, Homo sapiens
acagggagcacgcta

SEQ ID NO: 1038293 - DNA, 15 bp, Homo sapiens
cacagggagcacgct

SEQ ID NO: 1038294 - DNA, 15 bp, Homo sapiens
ccacagggagcacgc

SEQ ID NO: 1038295 - DNA, 15 bp, Homo sapiens
accacagggagcacg

SEQ ID NO: 1038296 - DNA, 15 bp, Homo sapiens
caccacagggagcac

SEQ ID NO: 1038297 - DNA, 15 bp, Homo sapiens
tcaccacagggagca

SEQ ID NO: 1038298 - DNA, 15 bp, Homo sapiens
gtcaccacagggagc

SEQ ID NO: 1038299 - DNA, 15 bp, Homo sapiens
ggtcaccacagggag

SEQ ID NO: 1038300 - DNA, 15 bp, Homo sapiens
gggtcaccacaggga

SEQ ID NO: 1038301 - DNA, 15 bp, Homo sapiens
agggtcaccacaggg

SEQ ID NO: 1038302 - DNA, 15 bp, Homo sapiens
cagggtcaccacagg

SEQ ID NO: 1038303 - DNA, 15 bp, Homo sapiens
ccagggtcaccacag

SEQ ID NO: 1038304 - DNA, 15 bp, Homo sapiens
cccagggtcaccaca

SEQ ID NO: 1038305 - DNA, 15 bp, Homo sapiens
acccagggtcaccac

SEQ ID NO: 1038306 - DNA, 15 bp, Homo sapiens
tacccagggtcacca

SEQ ID NO: 1038307 - DNA, 15 bp, Homo sapiens
ttacccagggtcacc

SEQ ID NO: 1038308 - DNA, 15 bp, Homo sapiens
attacccagggtcac

SEQ ID NO: 1038309 - DNA, 15 bp, Homo sapiens
cattacccagggtca

SEQ ID NO: 1038310 - DNA, 15 bp, Homo sapiens
ccattacccagggtc

SEQ ID NO: 1038311 - DNA, 15 bp, Homo sapiens
tccattacccagggt

SEQ ID NO: 1038312 - DNA, 15 bp, Homo sapiens
atccattacccaggg

SEQ ID NO: 1038313 - DNA, 15 bp, Homo sapiens
tatccattacccagg

SEQ ID NO: 1038314 - DNA, 15 bp, Homo sapiens
atatccattacccag

SEQ ID NO: 1038315 - DNA, 15 bp, Homo sapiens
catatccattaccca

SEQ ID NO: 1038316 - DNA, 15 bp, Homo sapiens
gcatatccattaccc

SEQ ID NO: 1038317 - DNA, 15 bp, Homo sapiens
ggcatatccattacc

SEQ ID NO: 1038318 - DNA, 15 bp, Homo sapiens
tggcatatccattac

SEQ ID NO: 1038319 - DNA, 15 bp, Homo sapiens
ctggcatatccatta

SEQ ID NO: 1038320 - DNA, 15 bp, Homo sapiens
tctggcatatccatt

SEQ ID NO: 1038321 - DNA, 15 bp, Homo sapiens
ctctggcatatccat

SEQ ID NO: 1038322 - DNA, 15 bp, Homo sapiens
tctctggcatatcca

SEQ ID NO: 1038323 - DNA, 15 bp, Homo sapiens
atctctggcatatcc

SEQ ID NO: 1038324 - DNA, 15 bp, Homo sapiens
aatctctggcatatc

SEQ ID NO: 1038325 - DNA, 15 bp, Homo sapiens
taatctctggcatat

SEQ ID NO: 1038326 - DNA, 15 bp, Homo sapiens
ctaatctctggcata

SEQ ID NO: 1038327 - DNA, 15 bp, Homo sapiens
gctaatctctggcat

SEQ ID NO: 1038328 - DNA, 15 bp, Homo sapiens
ggctaatctctggca

SEQ ID NO: 1038329 - DNA, 15 bp, Homo sapiens
aggctaatctctggc

SEQ ID NO: 1038330 - DNA, 15 bp, Homo sapiens
aaggctaatctctgg

SEQ ID NO: 1038331 - DNA, 15 bp, Homo sapiens
gaaggctaatctctg

SEQ ID NO: 1038332 - DNA, 15 bp, Homo sapiens
ggaaggctaatctct

SEQ ID NO: 1038333 - DNA, 15 bp, Homo sapiens
tggaaggctaatctc

SEQ ID NO: 1038334 - DNA, 15 bp, Homo sapiens
ctggaaggctaatct

SEQ ID NO: 1038335 - DNA, 15 bp, Homo sapiens
tctggaaggctaatc

SEQ ID NO: 1038336 - DNA, 15 bp, Homo sapiens
ctctggaaggctaat

SEQ ID NO: 1038337 - DNA, 15 bp, Homo sapiens
gctctggaaggctaa

SEQ ID NO: 1038338 - DNA, 15 bp, Homo sapiens
ggctctggaaggcta

SEQ ID NO: 1038339 - DNA, 15 bp, Homo sapiens
gggctctggaaggct

SEQ ID NO: 1038340 - DNA, 15 bp, Homo sapiens
agggctctggaaggc

SEQ ID NO: 1038341 - DNA, 15 bp, Homo sapiens
cagggctctggaagg

SEQ ID NO: 1038342 - DNA, 15 bp, Homo sapiens
gcagggctctggaag

SEQ ID NO: 1038343 - DNA, 15 bp, Homo sapiens
tgcagggctctggaa

SEQ ID NO: 1038344 - DNA, 15 bp, Homo sapiens
gtgcagggctctgga

SEQ ID NO: 1038345 - DNA, 15 bp, Homo sapiens
agtgcagggctctgg

SEQ ID NO: 1038346 - DNA, 15 bp, Homo sapiens
cagtgcagggctctg

SEQ ID NO: 1038347 - DNA, 15 bp, Homo sapiens
ccagtgcagggctct

SEQ ID NO: 1038348 - DNA, 15 bp, Homo sapiens
cccagtgcagggctc

SEQ ID NO: 1038349 - DNA, 15 bp, Homo sapiens
tcccagtgcagggct

SEQ ID NO: 1038350 - DNA, 15 bp, Homo sapiens
ctcccagtgcagggc

SEQ ID NO: 1038351 - DNA, 15 bp, Homo sapiens
gctcccagtgcaggg

SEQ ID NO: 1038352 - DNA, 15 bp, Homo sapiens
cgctcccagtgcagg

SEQ ID NO: 1038353 - DNA, 15 bp, Homo sapiens
ccgctcccagtgcag

SEQ ID NO: 1038354 - DNA, 15 bp, Homo sapiens
gccgctcccagtgca

SEQ ID NO: 1038355 - DNA, 15 bp, Homo sapiens
cgccgctcccagtgc

SEQ ID NO: 1038356 - DNA, 15 bp, Homo sapiens
ccgccgctcccagtg

SEQ ID NO: 1038357 - DNA, 15 bp, Homo sapiens
tccgccgctcccagt

SEQ ID NO: 1038358 - DNA, 15 bp, Homo sapiens
ctccgccgctcccag

SEQ ID NO: 1038359 - DNA, 15 bp, Homo sapiens
actccgccgctccca

SEQ ID NO: 1038360 - DNA, 15 bp, Homo sapiens
cactccgccgctccc

SEQ ID NO: 1038361 - DNA, 15 bp, Homo sapiens
ccactccgccgctcc

SEQ ID NO: 1038362 - DNA, 15 bp, Homo sapiens
cccactccgccgctc

SEQ ID NO: 1038363 - DNA, 15 bp, Homo sapiens
gcccactccgccgct

SEQ ID NO: 1038364 - DNA, 15 bp, Homo sapiens
ggcccactccgccgc

SEQ ID NO: 1038365 - DNA, 15 bp, Homo sapiens
gggcccactccgccg

SEQ ID NO: 1038366 - DNA, 15 bp, Homo sapiens
tgggcccactccgcc

SEQ ID NO: 1038367 - DNA, 15 bp, Homo sapiens
gtgggcccactccgc

SEQ ID NO: 1038368 - DNA, 15 bp, Homo sapiens
agtgggcccactccg

SEQ ID NO: 1038369 - DNA, 15 bp, Homo sapiens
cagtgggcccactcc

SEQ ID NO: 1038370 - DNA, 15 bp, Homo sapiens
tcagtgggcccactc

SEQ ID NO: 1038371 - DNA, 15 bp, Homo sapiens
ctcagtgggcccact

SEQ ID NO: 1038372 - DNA, 15 bp, Homo sapiens
gctcagtgggcccac

SEQ ID NO: 1038373 - DNA, 15 bp, Homo sapiens
tgctcagtgggccca

SEQ ID NO: 1038374 - DNA, 15 bp, Homo sapiens
ctgctcagtgggccc

SEQ ID NO: 1038375 - DNA, 15 bp, Homo sapiens
cctgctcagtgggcc

SEQ ID NO: 1038376 - DNA, 15 bp, Homo sapiens
ccctgctcagtgggc

SEQ ID NO: 1038377 - DNA, 15 bp, Homo sapiens
gccctgctcagtggg

SEQ ID NO: 1038378 - DNA, 15 bp, Homo sapiens
tgccctgctcagtgg

SEQ ID NO: 1038379 - DNA, 15 bp, Homo sapiens
ctgccctgctcagtg

SEQ ID NO: 1038380 - DNA, 15 bp, Homo sapiens
gctgccctgctcagt

SEQ ID NO: 1038381 - DNA, 15 bp, Homo sapiens
ggctgccctgctcag

SEQ ID NO: 1038382 - DNA, 15 bp, Homo sapiens
tggctgccctgctca

SEQ ID NO: 1038383 - DNA, 15 bp, Homo sapiens
tgtggctgccctgct

SEQ ID NO: 1038384 - DNA, 15 bp, Homo sapiens
ctgtggctgccctgc

SEQ ID NO: 1038385 - DNA, 15 bp, Homo sapiens
cctgtggctgccctg

SEQ ID NO: 1038386 - DNA, 15 bp, Homo sapiens
ccctgtggctgccct

SEQ ID NO: 1038387 - DNA, 15 bp, Homo sapiens
tccctgtggctgccc

SEQ ID NO: 1038388 - DNA, 15 bp, Homo sapiens
ttccctgtggctgcc

SEQ ID NO: 1038389 - DNA, 15 bp, Homo sapiens
gttccctgtggctgc

SEQ ID NO: 1038390 - DNA, 15 bp, Homo sapiens
agttccctgtggctg

SEQ ID NO: 1038391 - DNA, 15 bp, Homo sapiens
aagttccctgtggct

SEQ ID NO: 1038392 - DNA, 15 bp, Homo sapiens
caagttccctgtggc

SEQ ID NO: 1038393 - DNA, 15 bp, Homo sapiens
ccaagttccctgtgg

SEQ ID NO: 1038394 - DNA, 15 bp, Homo sapiens
accaagttccctgtg

SEQ ID NO: 1038395 - DNA, 15 bp, Homo sapiens
gaccaagttccctgt

SEQ ID NO: 1038396 - DNA, 15 bp, Homo sapiens
agaccaagttccctg

SEQ ID NO: 1038397 - DNA, 15 bp, Homo sapiens
cagaccaagttccct

SEQ ID NO: 1038398 - DNA, 15 bp, Homo sapiens
ccagaccaagttccc

SEQ ID NO: 1038399 - DNA, 15 bp, Homo sapiens
accagaccaagttcc

SEQ ID NO: 1038400 - DNA, 15 bp, Homo sapiens
aaccagaccaagttc

SEQ ID NO: 1038401 - DNA, 15 bp, Homo sapiens
caaccagaccaagtt

SEQ ID NO: 1038402 - DNA, 15 bp, Homo sapiens
gcaaccagaccaagt

SEQ ID NO: 1038403 - DNA, 15 bp, Homo sapiens
agcaaccagaccaag

SEQ ID NO: 1038404 - DNA, 15 bp, Homo sapiens
aagcaaccagaccaa

SEQ ID NO: 1038405 - DNA, 15 bp, Homo sapiens
aaagcaaccagacca

SEQ ID NO: 1038406 - DNA, 15 bp, Homo sapiens
aaaagcaaccagacc

SEQ ID NO: 1038407 - DNA, 15 bp, Homo sapiens
caaaagcaaccagac

SEQ ID NO: 1038408 - DNA, 15 bp, Homo sapiens
tcaaaagcaaccaga

SEQ ID NO: 1038409 - DNA, 15 bp, Homo sapiens
gtcaaaagcaaccag

SEQ ID NO: 1038410 - DNA, 15 bp, Homo sapiens
tgtcaaaagcaacca

SEQ ID NO: 1038411 - DNA, 15 bp, Homo sapiens
atgtcaaaagcaacc

SEQ ID NO: 1038412 - DNA, 15 bp, Homo sapiens
aatgtcaaaagcaac

SEQ ID NO: 1038413 - DNA, 15 bp, Homo sapiens
gaatgtcaaaagcaa

SEQ ID NO: 1038414 - DNA, 15 bp, Homo sapiens
ggaatgtcaaaagca

SEQ ID NO: 1038415 - DNA, 15 bp, Homo sapiens
aggaatgtcaaaagc

SEQ ID NO: 1038416 - DNA, 15 bp, Homo sapiens
aaggaatgtcaaaag

SEQ ID NO: 1038417 - DNA, 15 bp, Homo sapiens
aaaggaatgtcaaaa

SEQ ID NO: 1038418 - DNA, 15 bp, Homo sapiens
gaaaggaatgtcaaa

SEQ ID NO: 1038419 - DNA, 15 bp, Homo sapiens
tgaaaggaatgtcaa

SEQ ID NO: 1038420 - DNA, 15 bp, Homo sapiens
gtgaaaggaatgtca

SEQ ID NO: 1038421 - DNA, 15 bp, Homo sapiens
ggtgaaaggaatgtc

SEQ ID NO: 1038422 - DNA, 15 bp, Homo sapiens
tggtgaaaggaatgt

SEQ ID NO: 1038423 - DNA, 15 bp, Homo sapiens
ctggtgaaaggaatg

SEQ ID NO: 1038424 - DNA, 15 bp, Homo sapiens
tctggtgaaaggaat

SEQ ID NO: 1038425 - DNA, 15 bp, Homo sapiens
gtctggtgaaaggaa

SEQ ID NO: 1038426 - DNA, 15 bp, Homo sapiens
tgtctggtgaaagga

SEQ ID NO: 1038427 - DNA, 15 bp, Homo sapiens
gtgtctggtgaaagg

SEQ ID NO: 1038428 - DNA, 15 bp, Homo sapiens
ggtgtctggtgaaag

SEQ ID NO: 1038429 - DNA, 15 bp, Homo sapiens
aggtgtctggtgaaa

SEQ ID NO: 1038430 - DNA, 15 bp, Homo sapiens
gaggtgtctggtgaa

SEQ ID NO: 1038431 - DNA, 15 bp, Homo sapiens
ggaggtgtctggtga

SEQ ID NO: 1038432 - DNA, 15 bp, Homo sapiens
tggaggtgtctggtg

SEQ ID NO: 1038433 - DNA, 15 bp, Homo sapiens
ctggaggtgtctggt

SEQ ID NO: 1038434 - DNA, 15 bp, Homo sapiens
gctggaggtgtctgg

SEQ ID NO: 1038435 - DNA, 15 bp, Homo sapiens
ggctggaggtgtctg

SEQ ID NO: 1038436 - DNA, 15 bp, Homo sapiens
tggctggaggtgtct

SEQ ID NO: 1038437 - DNA, 15 bp, Homo sapiens
ttggctggaggtgtc

SEQ ID NO: 1038438 - DNA, 15 bp, Homo sapiens
cttggctggaggtgt

SEQ ID NO: 1038439 - DNA, 15 bp, Homo sapiens
gcttggctggaggtg

SEQ ID NO: 1038440 - DNA, 15 bp, Homo sapiens
agcttggctggaggt

SEQ ID NO: 1038441 - DNA, 15 bp, Homo sapiens
cagcttggctggagg

SEQ ID NO: 1038442 - DNA, 15 bp, Homo sapiens
ccagcttggctggag

SEQ ID NO: 1038443 - DNA, 15 bp, Homo sapiens
accagcttggctgga

SEQ ID NO: 1038444 - DNA, 15 bp, Homo sapiens
gaccagcttggctgg

SEQ ID NO: 1038445 - DNA, 15 bp, Homo sapiens
tgaccagcttggctg

SEQ ID NO: 1038446 - DNA, 15 bp, Homo sapiens
ctgaccagcttggct

SEQ ID NO: 1038447 - DNA, 15 bp, Homo sapiens
gctgaccagcttggc

SEQ ID NO: 1038448 - DNA, 15 bp, Homo sapiens
ggctgaccagcttgg

SEQ ID NO: 1038449 - DNA, 15 bp, Homo sapiens
gggctgaccagcttg

SEQ ID NO: 1038450 - DNA, 15 bp, Homo sapiens
ggggctgaccagctt

SEQ ID NO: 1038451 - DNA, 15 bp, Homo sapiens
tggggctgaccagct

SEQ ID NO: 1038452 - DNA, 15 bp, Homo sapiens
ctggggctgaccagc

SEQ ID NO: 1038453 - DNA, 15 bp, Homo sapiens
tctggggctgaccag

SEQ ID NO: 1038454 - DNA, 15 bp, Homo sapiens
gtctggggctgacca

SEQ ID NO: 1038455 - DNA, 15 bp, Homo sapiens
tgtctggggctgacc

SEQ ID NO: 1038456 - DNA, 15 bp, Homo sapiens
ttgtctggggctgac

SEQ ID NO: 1038457 - DNA, 15 bp, Homo sapiens
gttgtctggggctga

SEQ ID NO: 1038458 - DNA, 15 bp, Homo sapiens
agttgtctggggctg

SEQ ID NO: 1038459 - DNA, 15 bp, Homo sapiens
cagttgtctggggct

SEQ ID NO: 1038460 - DNA, 15 bp, Homo sapiens
acagttgtctggggc

SEQ ID NO: 1038461 - DNA, 15 bp, Homo sapiens
gacagttgtctgggg

SEQ ID NO: 1038462 - DNA, 15 bp, Homo sapiens
ggacagttgtctggg

SEQ ID NO: 1038463 - DNA, 15 bp, Homo sapiens
aggacagttgtctgg

SEQ ID NO: 1038464 - DNA, 15 bp, Homo sapiens
aaggacagttgtctg

SEQ ID NO: 1038465 - DNA, 15 bp, Homo sapiens
taaggacagttgtct

SEQ ID NO: 1038466 - DNA, 15 bp, Homo sapiens
ctaaggacagttgtc

SEQ ID NO: 1038467 - DNA, 15 bp, Homo sapiens
cctaaggacagttgt

SEQ ID NO: 1038468 - DNA, 15 bp, Homo sapiens
tcctaaggacagttg

SEQ ID NO: 1038469 - DNA, 15 bp, Homo sapiens
ctcctaaggacagtt

SEQ ID NO: 1038470 - DNA, 15 bp, Homo sapiens
tctcctaaggacagt

SEQ ID NO: 1038471 - DNA, 15 bp, Homo sapiens
atctcctaaggacag

SEQ ID NO: 1038472 - DNA, 15 bp, Homo sapiens
aatctcctaaggaca

SEQ ID NO: 1038473 - DNA, 15 bp, Homo sapiens
gaatctcctaaggac

SEQ ID NO: 1038474 - DNA, 15 bp, Homo sapiens
tgaatctcctaagga

SEQ ID NO: 1038475 - DNA, 15 bp, Homo sapiens
ctgaatctcctaagg

SEQ ID NO: 1038476 - DNA, 15 bp, Homo sapiens
cctgaatctcctaag

SEQ ID NO: 1038477 - DNA, 15 bp, Homo sapiens
ccctgaatctcctaa

SEQ ID NO: 1038478 - DNA, 15 bp, Homo sapiens
gccctgaatctccta

SEQ ID NO: 1038479 - DNA, 15 bp, Homo sapiens
tgccctgaatctcct

SEQ ID NO: 1038480 - DNA, 15 bp, Homo sapiens
ctgccctgaatctcc

SEQ ID NO: 1038481 - DNA, 15 bp, Homo sapiens
tctgccctgaatctc

SEQ ID NO: 1038482 - DNA, 15 bp, Homo sapiens
ttctgccctgaatct

SEQ ID NO: 1038483 - DNA, 15 bp, Homo sapiens
gttctgccctgaatc

SEQ ID NO: 1038484 - DNA, 15 bp, Homo sapiens
tgttctgccctgaat

SEQ ID NO: 1038485 - DNA, 15 bp, Homo sapiens
ctgttctgccctgaa

SEQ ID NO: 1038486 - DNA, 15 bp, Homo sapiens
tctgttctgccctga

SEQ ID NO: 1038487 - DNA, 15 bp, Homo sapiens
ctctgttctgccctg

SEQ ID NO: 1038488 - DNA, 15 bp, Homo sapiens
cctctgttctgccct

SEQ ID NO: 1038489 - DNA, 15 bp, Homo sapiens
ccctctgttctgccc

SEQ ID NO: 1038490 - DNA, 15 bp, Homo sapiens
tccctctgttctgcc

SEQ ID NO: 1038491 - DNA, 15 bp, Homo sapiens
ttccctctgttctgc

SEQ ID NO: 1038492 - DNA, 15 bp, Homo sapiens
tttccctctgttctg

SEQ ID NO: 1038493 - DNA, 15 bp, Homo sapiens
ctttccctctgttct

SEQ ID NO: 1038494 - DNA, 15 bp, Homo sapiens
cctttccctctgttc

SEQ ID NO: 1038495 - DNA, 15 bp, Homo sapiens
tcctttccctctgtt

SEQ ID NO: 1038496 - DNA, 15 bp, Homo sapiens
ttcctttccctctgt

SEQ ID NO: 1038497 - DNA, 15 bp, Homo sapiens
attcctttccctctg

SEQ ID NO: 1038498 - DNA, 15 bp, Homo sapiens
cattcctttccctct

SEQ ID NO: 1038499 - DNA, 15 bp, Homo sapiens
ccattcctttccctc

SEQ ID NO: 1038500 - DNA, 15 bp, Homo sapiens
cccattcctttccct

SEQ ID NO: 1038501 - DNA, 15 bp, Homo sapiens
tcccattcctttccc

SEQ ID NO: 1038502 - DNA, 15 bp, Homo sapiens
ttcccattcctttcc

SEQ ID NO: 1038503 - DNA, 15 bp, Homo sapiens
cttcccattcctttc

SEQ ID NO: 1038504 - DNA, 15 bp, Homo sapiens
ccttcccattccttt

SEQ ID NO: 1038505 - DNA, 15 bp, Homo sapiens
tccttcccattcctt

SEQ ID NO: 1038506 - DNA, 15 bp, Homo sapiens
gtccttcccattcct

SEQ ID NO: 1038507 - DNA, 15 bp, Homo sapiens
tgtccttcccattcc

SEQ ID NO: 1038508 - DNA, 15 bp, Homo sapiens
gtgtccttcccattc

SEQ ID NO: 1038509 - DNA, 15 bp, Homo sapiens
tgtgtccttcccatt

SEQ ID NO: 1038510 - DNA, 15 bp, Homo sapiens
ttgtgtccttcccat

SEQ ID NO: 1038511 - DNA, 15 bp, Homo sapiens
attgtgtccttccca

SEQ ID NO: 1038512 - DNA, 15 bp, Homo sapiens
cattgtgtccttccc

SEQ ID NO: 1038513 - DNA, 15 bp, Homo sapiens
ccattgtgtccttcc

SEQ ID NO: 1038514 - DNA, 15 bp, Homo sapiens
cccattgtgtccttc

SEQ ID NO: 1038515 - DNA, 15 bp, Homo sapiens
tcccattgtgtcctt

SEQ ID NO: 1038516 - DNA, 15 bp, Homo sapiens
gtcccattgtgtcct

SEQ ID NO: 1038517 - DNA, 15 bp, Homo sapiens
tgtcccattgtgtcc

SEQ ID NO: 1038518 - DNA, 15 bp, Homo sapiens
atgtcccattgtgtc

SEQ ID NO: 1038519 - DNA, 15 bp, Homo sapiens
aatgtcccattgtgt

SEQ ID NO: 1038520 - DNA, 15 bp, Homo sapiens
caatgtcccattgtg

SEQ ID NO: 1038521 - DNA, 15 bp, Homo sapiens
ccaatgtcccattgt

SEQ ID NO: 1038522 - DNA, 15 bp, Homo sapiens
accaatgtcccattg

SEQ ID NO: 1038523 - DNA, 15 bp, Homo sapiens
caccaatgtcccatt

SEQ ID NO: 1038524 - DNA, 15 bp, Homo sapiens
gcaccaatgtcccat

SEQ ID NO: 1038525 - DNA, 15 bp, Homo sapiens
agcaccaatgtccca

SEQ ID NO: 1038526 - DNA, 15 bp, Homo sapiens
aagcaccaatgtccc

SEQ ID NO: 1038527 - DNA, 15 bp, Homo sapiens
gaagcaccaatgtcc

SEQ ID NO: 1038528 - DNA, 15 bp, Homo sapiens
agaagcaccaatgtc

SEQ ID NO: 1038529 - DNA, 15 bp, Homo sapiens
gagaagcaccaatgt

SEQ ID NO: 1038530 - DNA, 15 bp, Homo sapiens
tgagaagcaccaatg

SEQ ID NO: 1038531 - DNA, 15 bp, Homo sapiens
ctgagaagcaccaat

SEQ ID NO: 1038532 - DNA, 15 bp, Homo sapiens
cctgagaagcaccaa

SEQ ID NO: 1038533 - DNA, 15 bp, Homo sapiens
gcctgagaagcacca

SEQ ID NO: 1038534 - DNA, 15 bp, Homo sapiens
ggcctgagaagcacc

SEQ ID NO: 1038535 - DNA, 15 bp, Homo sapiens
gggcctgagaagcac

SEQ ID NO: 1038536 - DNA, 15 bp, Homo sapiens
ggggcctgagaagca

SEQ ID NO: 1038537 - DNA, 15 bp, Homo sapiens
tggggcctgagaagc

SEQ ID NO: 1038538 - DNA, 15 bp, Homo sapiens
atggggcctgagaag

SEQ ID NO: 1038539 - DNA, 15 bp, Homo sapiens
catggggcctgagaa

SEQ ID NO: 1038540 - DNA, 15 bp, Homo sapiens
acatggggcctgaga

SEQ ID NO: 1038541 - DNA, 15 bp, Homo sapiens
gacatggggcctgag

SEQ ID NO: 1038542 - DNA, 15 bp, Homo sapiens
agacatggggcctga

SEQ ID NO: 1038543 - DNA, 15 bp, Homo sapiens
aagacatggggcctg

SEQ ID NO: 1038544 - DNA, 15 bp, Homo sapiens
caagacatggggcct

SEQ ID NO: 1038545 - DNA, 15 bp, Homo sapiens
ccaagacatggggcc

SEQ ID NO: 1038546 - DNA, 15 bp, Homo sapiens
cccaagacatggggc

SEQ ID NO: 1038547 - DNA, 15 bp, Homo sapiens
acccaagacatgggg

SEQ ID NO: 1038548 - DNA, 15 bp, Homo sapiens
gacccaagacatggg

SEQ ID NO: 1038549 - DNA, 15 bp, Homo sapiens
tgacccaagacatgg

SEQ ID NO: 1038550 - DNA, 15 bp, Homo sapiens
atgacccaagacatg

SEQ ID NO: 1038551 - DNA, 15 bp, Homo sapiens
aatgacccaagacat

SEQ ID NO: 1038552 - DNA, 15 bp, Homo sapiens
gaatgacccaagaca

SEQ ID NO: 1038553 - DNA, 15 bp, Homo sapiens
agaatgacccaagac

SEQ ID NO: 1038554 - DNA, 15 bp, Homo sapiens
cagaatgacccaaga

SEQ ID NO: 1038555 - DNA, 15 bp, Homo sapiens
acagaatgacccaag

SEQ ID NO: 1038556 - DNA, 15 bp, Homo sapiens
cacagaatgacccaa

SEQ ID NO: 1038557 - DNA, 15 bp, Homo sapiens
acacagaatgaccca

SEQ ID NO: 1038558 - DNA, 15 bp, Homo sapiens
aacacagaatgaccc

SEQ ID NO: 1038559 - DNA, 15 bp, Homo sapiens
taacacagaatgacc

SEQ ID NO: 1038560 - DNA, 15 bp, Homo sapiens
ctaacacagaatgac

SEQ ID NO: 1038561 - DNA, 15 bp, Homo sapiens
tctaacacagaatga

SEQ ID NO: 1038562 - DNA, 15 bp, Homo sapiens
ttctaacacagaatg

SEQ ID NO: 1038563 - DNA, 15 bp, Homo sapiens
tttctaacacagaat

SEQ ID NO: 1038564 - DNA, 15 bp, Homo sapiens
atttctaacacagaa

SEQ ID NO: 1038565 - DNA, 15 bp, Homo sapiens
tatttctaacacaga

SEQ ID NO: 1038566 - DNA, 15 bp, Homo sapiens
ttatttctaacacag

SEQ ID NO: 1038567 - DNA, 15 bp, Homo sapiens
tttatttctaacaca

SEQ ID NO: 1038568 - DNA, 15 bp, Homo sapiens
ctttatttctaacac

SEQ ID NO: 1038569 - DNA, 15 bp, Homo sapiens
gctttatttctaaca

SEQ ID NO: 1038570 - DNA, 15 bp, Homo sapiens
agctttatttctaac

SEQ ID NO: 1038571 - DNA, 15 bp, Homo sapiens
gagctttatttctaa

SEQ ID NO: 1038572 - DNA, 15 bp, Homo sapiens
tgagctttatttcta

SEQ ID NO: 1038573 - DNA, 15 bp, Homo sapiens
ctgagctttatttct

SEQ ID NO: 1038574 - DNA, 15 bp, Homo sapiens
gctgagctttatttc

SEQ ID NO: 1038575 - DNA, 15 bp, Homo sapiens
ggctgagctttattt

SEQ ID NO: 1038576 - DNA, 15 bp, Homo sapiens
aggctgagctttatt

SEQ ID NO: 1038577 - DNA, 15 bp, Homo sapiens
taggctgagctttat

SEQ ID NO: 1038578 - DNA, 15 bp, Homo sapiens
gtaggctgagcttta

SEQ ID NO: 1038579 - DNA, 15 bp, Homo sapiens
cgtaggctgagcttt

SEQ ID NO: 1038580 - DNA, 15 bp, Homo sapiens
acgtaggctgagctt

SEQ ID NO: 1038581 - DNA, 15 bp, Homo sapiens
tacgtaggctgagct

SEQ ID NO: 1038582 - DNA, 15 bp, Homo sapiens
atacgtaggctgagc

SEQ ID NO: 1038583 - DNA, 15 bp, Homo sapiens
tatacgtaggctgag

SEQ ID NO: 1038584 - DNA, 15 bp, Homo sapiens
ttatacgtaggctga

SEQ ID NO: 1038585 - DNA, 15 bp, Homo sapiens
cttatacgtaggctg

SEQ ID NO: 1038586 - DNA, 15 bp, Homo sapiens
ccttatacgtaggct

SEQ ID NO: 1038587 - DNA, 15 bp, Homo sapiens
tccttatacgtaggc

SEQ ID NO: 1038588 - DNA, 15 bp, Homo sapiens
ttccttatacgtagg

SEQ ID NO: 1038589 - DNA, 15 bp, Homo sapiens
cttccttatacgtag

SEQ ID NO: 1038590 - DNA, 15 bp, Homo sapiens
tcttccttatacgta

SEQ ID NO: 1038591 - DNA, 15 bp, Homo sapiens
ttcttccttatacgt

SEQ ID NO: 1038592 - DNA, 15 bp, Homo sapiens
gttcttccttatacg

SEQ ID NO: 1038593 - DNA, 15 bp, Homo sapiens
tgttcttccttatac

SEQ ID NO: 1038594 - DNA, 15 bp, Homo sapiens
ctgttcttccttata

SEQ ID NO: 1038595 - DNA, 15 bp, Homo sapiens
tctgttcttccttat

SEQ ID NO: 1038596 - DNA, 15 bp, Homo sapiens
ctctgttcttcctta

SEQ ID NO: 1038597 - DNA, 15 bp, Homo sapiens
cctctgttcttcctt

SEQ ID NO: 1038598 - DNA, 15 bp, Homo sapiens
ccctctgttcttcct

SEQ ID NO: 1038599 - DNA, 15 bp, Homo sapiens
tccctctgttcttcc

SEQ ID NO: 1038600 - DNA, 15 bp, Homo sapiens
ttccctctgttcttc

SEQ ID NO: 1038601 - DNA, 15 bp, Homo sapiens
tttccctctgttctt

SEQ ID NO: 1038602 - DNA, 15 bp, Homo sapiens
ccctttccctctgtt

SEQ ID NO: 1038603 - DNA, 15 bp, Homo sapiens
accctttccctctgt

SEQ ID NO: 1038604 - DNA, 15 bp, Homo sapiens
gaccctttccctctg

SEQ ID NO: 1038605 - DNA, 15 bp, Homo sapiens
agaccctttccctct

SEQ ID NO: 1038606 - DNA, 15 bp, Homo sapiens
gagaccctttccctc

SEQ ID NO: 1038607 - DNA, 15 bp, Homo sapiens
ggagaccctttccct

SEQ ID NO: 1038608 - DNA, 15 bp, Homo sapiens
gggagaccctttccc

SEQ ID NO: 1038609 - DNA, 15 bp, Homo sapiens
tgggagaccctttcc

SEQ ID NO: 1038610 - DNA, 15 bp, Homo sapiens
gtgggagaccctttc

SEQ ID NO: 1038611 - DNA, 15 bp, Homo sapiens
agtgggagacccttt

SEQ ID NO: 1038612 - DNA, 15 bp, Homo sapiens
gagtgggagaccctt

SEQ ID NO: 1038613 - DNA, 15 bp, Homo sapiens
tgagtgggagaccct

SEQ ID NO: 1038614 - DNA, 15 bp, Homo sapiens
atgagtgggagaccc

SEQ ID NO: 1038615 - DNA, 15 bp, Homo sapiens
catgagtgggagacc

SEQ ID NO: 1038616 - DNA, 15 bp, Homo sapiens
acatgagtgggagac

SEQ ID NO: 1038617 - DNA, 15 bp, Homo sapiens
gacatgagtgggaga

SEQ ID NO: 1038618 - DNA, 15 bp, Homo sapiens
ggacatgagtgggag

SEQ ID NO: 1038619 - DNA, 15 bp, Homo sapiens
tggacatgagtggga

SEQ ID NO: 1038620 - DNA, 15 bp, Homo sapiens
gtggacatgagtggg

SEQ ID NO: 1038621 - DNA, 15 bp, Homo sapiens
agtggacatgagtgg

SEQ ID NO: 1038622 - DNA, 15 bp, Homo sapiens
aagtggacatgagtg

SEQ ID NO: 1038623 - DNA, 15 bp, Homo sapiens
gaagtggacatgagt

SEQ ID NO: 1038624 - DNA, 15 bp, Homo sapiens
agaagtggacatgag

SEQ ID NO: 1038625 - DNA, 15 bp, Homo sapiens
cagaagtggacatga

SEQ ID NO: 1038626 - DNA, 15 bp, Homo sapiens
ccagaagtggacatg

SEQ ID NO: 1038627 - DNA, 15 bp, Homo sapiens
gccagaagtggacat

SEQ ID NO: 1038628 - DNA, 15 bp, Homo sapiens
tgccagaagtggaca

SEQ ID NO: 1038629 - DNA, 15 bp, Homo sapiens
atgccagaagtggac

SEQ ID NO: 1038630 - DNA, 15 bp, Homo sapiens
aatgccagaagtgga

SEQ ID NO: 1038631 - DNA, 15 bp, Homo sapiens
aaatgccagaagtgg

SEQ ID NO: 1038632 - DNA, 15 bp, Homo sapiens
aaaatgccagaagtg

SEQ ID NO: 1038633 - DNA, 15 bp, Homo sapiens
aaaaatgccagaagt

SEQ ID NO: 1038634 - DNA, 15 bp, Homo sapiens
gaaaaatgccagaag

SEQ ID NO: 1038635 - DNA, 15 bp, Homo sapiens
ggaaaaatgccagaa

SEQ ID NO: 1038636 - DNA, 15 bp, Homo sapiens
aggaaaaatgccaga

SEQ ID NO: 1038637 - DNA, 15 bp, Homo sapiens
gaggaaaaatgccag

SEQ ID NO: 1038638 - DNA, 15 bp, Homo sapiens
ggaggaaaaatgcca

SEQ ID NO: 1038639 - DNA, 15 bp, Homo sapiens
aggaggaaaaatgcc

SEQ ID NO: 1038640 - DNA, 15 bp, Homo sapiens
gaggaggaaaaatgc

SEQ ID NO: 1038641 - DNA, 15 bp, Homo sapiens
agaggaggaaaaatg

SEQ ID NO: 1038642 - DNA, 15 bp, Homo sapiens
tagaggaggaaaaat

SEQ ID NO: 1038643 - DNA, 15 bp, Homo sapiens
ttagaggaggaaaaa

SEQ ID NO: 1038644 - DNA, 15 bp, Homo sapiens
gttagaggaggaaaa

SEQ ID NO: 1038645 - DNA, 15 bp, Homo sapiens
agttagaggaggaaa

SEQ ID NO: 1038646 - DNA, 15 bp, Homo sapiens
gagttagaggaggaa

SEQ ID NO: 1038647 - DNA, 15 bp, Homo sapiens
ggagttagaggagga

SEQ ID NO: 1038648 - DNA, 15 bp, Homo sapiens
tggagttagaggagg

SEQ ID NO: 1038649 - DNA, 15 bp, Homo sapiens
gtggagttagaggag

SEQ ID NO: 1038650 - DNA, 15 bp, Homo sapiens
agtggagttagagga

SEQ ID NO: 1038651 - DNA, 15 bp, Homo sapiens
cagtggagttagagg

SEQ ID NO: 1038652 - DNA, 15 bp, Homo sapiens
ccagtggagttagag

SEQ ID NO: 1038653 - DNA, 15 bp, Homo sapiens
tccagtggagttaga

SEQ ID NO: 1038654 - DNA, 15 bp, Homo sapiens
gtccagtggagttag

SEQ ID NO: 1038655 - DNA, 15 bp, Homo sapiens
agtccagtggagtta

SEQ ID NO: 1038656 - DNA, 15 bp, Homo sapiens
gagtccagtggagtt

SEQ ID NO: 1038657 - DNA, 15 bp, Homo sapiens
tgagtccagtggagt

SEQ ID NO: 1038658 - DNA, 15 bp, Homo sapiens
atgagtccagtggag

SEQ ID NO: 1038659 - DNA, 15 bp, Homo sapiens
tatgagtccagtgga

SEQ ID NO: 1038660 - DNA, 15 bp, Homo sapiens
ttatgagtccagtgg

SEQ ID NO: 1038661 - DNA, 15 bp, Homo sapiens
gttatgagtccagtg

SEQ ID NO: 1038662 - DNA, 15 bp, Homo sapiens
agttatgagtccagt

SEQ ID NO: 1038663 - DNA, 15 bp, Homo sapiens
cagttatgagtccag

SEQ ID NO: 1038664 - DNA, 15 bp, Homo sapiens
acagttatgagtcca

SEQ ID NO: 1038665 - DNA, 15 bp, Homo sapiens
cacagttatgagtcc

SEQ ID NO: 1038666 - DNA, 15 bp, Homo sapiens
tcacagttatgagtc

SEQ ID NO: 1038667 - DNA, 15 bp, Homo sapiens
ttcacagttatgagt

SEQ ID NO: 1038668 - DNA, 15 bp, Homo sapiens
tttcacagttatgag

SEQ ID NO: 1038669 - DNA, 15 bp, Homo sapiens
atttcacagttatga

SEQ ID NO: 1038670 - DNA, 15 bp, Homo sapiens
tatttcacagttatg

SEQ ID NO: 1038671 - DNA, 15 bp, Homo sapiens
caaatatttcacagt

SEQ ID NO: 1038672 - DNA, 15 bp, Homo sapiens
acaaatatttcacag

SEQ ID NO: 1038673 - DNA, 15 bp, Homo sapiens
aacaaatatttcaca

SEQ ID NO: 1038674 - DNA, 15 bp, Homo sapiens
gaacaaatatttcac

SEQ ID NO: 1038675 - DNA, 15 bp, Homo sapiens
ggaacaaatatttca

SEQ ID NO: 1038676 - DNA, 15 bp, Homo sapiens
aggaacaaatatttc

SEQ ID NO: 1038677 - DNA, 15 bp, Homo sapiens
aaggaacaaatattt

SEQ ID NO: 1038678 - DNA, 15 bp, Homo sapiens
gaaggaacaaatatt

SEQ ID NO: 1038679 - DNA, 15 bp, Homo sapiens
ggaaggaacaaatat

SEQ ID NO: 1038680 - DNA, 15 bp, Homo sapiens
gggaaggaacaaata

SEQ ID NO: 1038681 - DNA, 15 bp, Homo sapiens
tgggaaggaacaaat

SEQ ID NO: 1038682 - DNA, 15 bp, Homo sapiens
gtgggaaggaacaaa

SEQ ID NO: 1038683 - DNA, 15 bp, Homo sapiens
tgtgggaaggaacaa

SEQ ID NO: 1038684 - DNA, 15 bp, Homo sapiens
gtgtgggaaggaaca

SEQ ID NO: 1038685 - DNA, 15 bp, Homo sapiens
tgtgtgggaaggaac

SEQ ID NO: 1038686 - DNA, 15 bp, Homo sapiens
gtgtgtgggaaggaa

SEQ ID NO: 1038687 - DNA, 15 bp, Homo sapiens
tgtgtgtgggaagga

SEQ ID NO: 1038688 - DNA, 15 bp, Homo sapiens
ctgtgtgtgggaagg

SEQ ID NO: 1038689 - DNA, 15 bp, Homo sapiens
cctgtgtgtgggaag

SEQ ID NO: 1038690 - DNA, 15 bp, Homo sapiens
tcctgtgtgtgggaa

SEQ ID NO: 1038691 - DNA, 15 bp, Homo sapiens
atcctgtgtgtggga

SEQ ID NO: 1038692 - DNA, 15 bp, Homo sapiens
tatcctgtgtgtggg

SEQ ID NO: 1038693 - DNA, 15 bp, Homo sapiens
ttatcctgtgtgtgg

SEQ ID NO: 1038694 - DNA, 15 bp, Homo sapiens
attatcctgtgtgtg

SEQ ID NO: 1038695 - DNA, 15 bp, Homo sapiens
cattatcctgtgtgt

SEQ ID NO: 1038696 - DNA, 15 bp, Homo sapiens
ccattatcctgtgtg

SEQ ID NO: 1038697 - DNA, 15 bp, Homo sapiens
gccattatcctgtgt

SEQ ID NO: 1038698 - DNA, 15 bp, Homo sapiens
tgccattatcctgtg

SEQ ID NO: 1038699 - DNA, 15 bp, Homo sapiens
ctgccattatcctgt

SEQ ID NO: 1038700 - DNA, 15 bp, Homo sapiens
tctgccattatcctg

SEQ ID NO: 1038701 - DNA, 15 bp, Homo sapiens
ttctgccattatcct

SEQ ID NO: 1038702 - DNA, 15 bp, Homo sapiens
tttctgccattatcc

SEQ ID NO: 1038703 - DNA, 15 bp, Homo sapiens
atttctgccattatc

SEQ ID NO: 1038704 - DNA, 15 bp, Homo sapiens
aatttctgccattat

SEQ ID NO: 1038705 - DNA, 15 bp, Homo sapiens
aaatttctgccatta

SEQ ID NO: 1038706 - DNA, 15 bp, Homo sapiens
gaaatttctgccatt

SEQ ID NO: 1038707 - DNA, 15 bp, Homo sapiens
agaaatttctgccat

SEQ ID NO: 1038708 - DNA, 15 bp, Homo sapiens
cagaaatttctgcca

SEQ ID NO: 1038709 - DNA, 15 bp, Homo sapiens
acagaaatttctgcc

SEQ ID NO: 1038710 - DNA, 15 bp, Homo sapiens
aacagaaatttctgc

SEQ ID NO: 1038711 - DNA, 15 bp, Homo sapiens
taacagaaatttctg

SEQ ID NO: 1038712 - DNA, 15 bp, Homo sapiens
ataacagaaatttct

SEQ ID NO: 1038713 - DNA, 15 bp, Homo sapiens
cataacagaaatttc

SEQ ID NO: 1038714 - DNA, 15 bp, Homo sapiens
acataacagaaattt

SEQ ID NO: 1038715 - DNA, 15 bp, Homo sapiens
gacataacagaaatt

SEQ ID NO: 1038716 - DNA, 15 bp, Homo sapiens
agacataacagaaat

SEQ ID NO: 1038717 - DNA, 15 bp, Homo sapiens
aagacataacagaaa

SEQ ID NO: 1038718 - DNA, 15 bp, Homo sapiens
gaagacataacagaa

SEQ ID NO: 1038719 - DNA, 15 bp, Homo sapiens
ggaagacataacaga

SEQ ID NO: 1038720 - DNA, 15 bp, Homo sapiens
gggaagacataacag

SEQ ID NO: 1038721 - DNA, 15 bp, Homo sapiens
cgggaagacataaca

SEQ ID NO: 1038722 - DNA, 15 bp, Homo sapiens
tcgggaagacataac

SEQ ID NO: 1038723 - DNA, 15 bp, Homo sapiens
ctcgggaagacataa

SEQ ID NO: 1038724 - DNA, 15 bp, Homo sapiens
actcgggaagacata

SEQ ID NO: 1038725 - DNA, 15 bp, Homo sapiens
cactcgggaagacat

SEQ ID NO: 1038726 - DNA, 15 bp, Homo sapiens
tcactcgggaagaca

SEQ ID NO: 1038727 - DNA, 15 bp, Homo sapiens
ttcactcgggaagac

SEQ ID NO: 1038728 - DNA, 15 bp, Homo sapiens
tttcactcgggaaga

SEQ ID NO: 1038729 - DNA, 15 bp, Homo sapiens
atttcactcgggaag

SEQ ID NO: 1038730 - DNA, 15 bp, Homo sapiens
catttcactcgggaa

SEQ ID NO: 1038731 - DNA, 15 bp, Homo sapiens
ccatttcactcggga

SEQ ID NO: 1038732 - DNA, 15 bp, Homo sapiens
cccatttcactcggg

SEQ ID NO: 1038733 - DNA, 15 bp, Homo sapiens
ccccatttcactcgg

SEQ ID NO: 1038734 - DNA, 15 bp, Homo sapiens
tccccatttcactcg

SEQ ID NO: 1038735 - DNA, 15 bp, Homo sapiens
ctccccatttcactc

SEQ ID NO: 1038736 - DNA, 15 bp, Homo sapiens
tctccccatttcact

SEQ ID NO: 1038737 - DNA, 15 bp, Homo sapiens
atctccccatttcac

SEQ ID NO: 1038738 - DNA, 15 bp, Homo sapiens
tatctccccatttca

SEQ ID NO: 1038739 - DNA, 15 bp, Homo sapiens
gtatctccccatttc

SEQ ID NO: 1038740 - DNA, 15 bp, Homo sapiens
agtatctccccattt

SEQ ID NO: 1038741 - DNA, 15 bp, Homo sapiens
gagtatctccccatt

SEQ ID NO: 1038742 - DNA, 15 bp, Homo sapiens
tgagtatctccccat

SEQ ID NO: 1038743 - DNA, 15 bp, Homo sapiens
ttgagtatctcccca

SEQ ID NO: 1038744 - DNA, 15 bp, Homo sapiens
tttgagtatctcccc

SEQ ID NO: 1038745 - DNA, 15 bp, Homo sapiens
gtttgagtatctccc

SEQ ID NO: 1038746 - DNA, 15 bp, Homo sapiens
ggtttgagtatctcc

SEQ ID NO: 1038747 - DNA, 15 bp, Homo sapiens
tggtttgagtatctc

SEQ ID NO: 1038748 - DNA, 15 bp, Homo sapiens
gtggtttgagtatct

SEQ ID NO: 1038749 - DNA, 15 bp, Homo sapiens
ggtggtttgagtatc

SEQ ID NO: 1038750 - DNA, 15 bp, Homo sapiens
gggtggtttgagtat

SEQ ID NO: 1038751 - DNA, 15 bp, Homo sapiens
agggtggtttgagta

SEQ ID NO: 1038752 - DNA, 15 bp, Homo sapiens
gagggtggtttgagt

SEQ ID NO: 1038753 - DNA, 15 bp, Homo sapiens
agagggtggtttgag

SEQ ID NO: 1038754 - DNA, 15 bp, Homo sapiens
aagagggtggtttga

SEQ ID NO: 1038755 - DNA, 15 bp, Homo sapiens
gaagagggtggtttg

SEQ ID NO: 1038756 - DNA, 15 bp, Homo sapiens
agaagagggtggttt

SEQ ID NO: 1038757 - DNA, 15 bp, Homo sapiens
aagaagagggtggtt

SEQ ID NO: 1038758 - DNA, 15 bp, Homo sapiens
gaagaagagggtggt

SEQ ID NO: 1038759 - DNA, 15 bp, Homo sapiens
agaagaagagggtgg

SEQ ID NO: 1038760 - DNA, 15 bp, Homo sapiens
aagaagaagagggtg

SEQ ID NO: 1038761 - DNA, 15 bp, Homo sapiens
aaagaagaagagggt

SEQ ID NO: 1038762 - DNA, 15 bp, Homo sapiens
gaaagaagaagaggg

SEQ ID NO: 1038763 - DNA, 15 bp, Homo sapiens
ggaaagaagaagagg

SEQ ID NO: 1038764 - DNA, 15 bp, Homo sapiens
aggaaagaagaagag

SEQ ID NO: 1038765 - DNA, 15 bp, Homo sapiens
aaggaaagaagaaga

SEQ ID NO: 1038766 - DNA, 15 bp, Homo sapiens
caaggaaagaagaag

SEQ ID NO: 1038767 - DNA, 15 bp, Homo sapiens
gcaaggaaagaagaa

SEQ ID NO: 1038768 - DNA, 15 bp, Homo sapiens
ggcaaggaaagaaga

SEQ ID NO: 1038769 - DNA, 15 bp, Homo sapiens
gggcaaggaaagaag

SEQ ID NO: 1038770 - DNA, 15 bp, Homo sapiens
ggggcaaggaaagaa

SEQ ID NO: 1038771 - DNA, 15 bp, Homo sapiens
aggggcaaggaaaga

SEQ ID NO: 1038772 - DNA, 15 bp, Homo sapiens
gaggggcaaggaaag

SEQ ID NO: 1038773 - DNA, 15 bp, Homo sapiens
agaggggcaaggaaa

SEQ ID NO: 1038774 - DNA, 15 bp, Homo sapiens
cagaggggcaaggaa

SEQ ID NO: 1038775 - DNA, 15 bp, Homo sapiens
ccagaggggcaagga

SEQ ID NO: 1038776 - DNA, 15 bp, Homo sapiens
tccagaggggcaagg

SEQ ID NO: 1038777 - DNA, 15 bp, Homo sapiens
ctccagaggggcaag

SEQ ID NO: 1038778 - DNA, 15 bp, Homo sapiens
cctccagaggggcaa

SEQ ID NO: 1038779 - DNA, 15 bp, Homo sapiens
gcctccagaggggca

SEQ ID NO: 1038780 - DNA, 15 bp, Homo sapiens
agcctccagaggggc

SEQ ID NO: 1038781 - DNA, 15 bp, Homo sapiens
aagcctccagagggg

SEQ ID NO: 1038782 - DNA, 15 bp, Homo sapiens
aaagcctccagaggg

SEQ ID NO: 1038783 - DNA, 15 bp, Homo sapiens
aaaagcctccagagg

SEQ ID NO: 1038784 - DNA, 15 bp, Homo sapiens
gaaaagcctccagag

SEQ ID NO: 1038785 - DNA, 15 bp, Homo sapiens
ggaaaagcctccaga

SEQ ID NO: 1038786 - DNA, 15 bp, Homo sapiens
tggaaaagcctccag

SEQ ID NO: 1038787 - DNA, 15 bp, Homo sapiens
atggaaaagcctcca

SEQ ID NO: 1038788 - DNA, 15 bp, Homo sapiens
gatggaaaagcctcc

SEQ ID NO: 1038789 - DNA, 15 bp, Homo sapiens
agatggaaaagcctc

SEQ ID NO: 1038790 - DNA, 15 bp, Homo sapiens
gagatggaaaagcct

SEQ ID NO: 1038791 - DNA, 15 bp, Homo sapiens
cgagatggaaaagcc

SEQ ID NO: 1038792 - DNA, 15 bp, Homo sapiens
ccgagatggaaaagc

SEQ ID NO: 1038793 - DNA, 15 bp, Homo sapiens
gccgagatggaaaag

SEQ ID NO: 1038794 - DNA, 15 bp, Homo sapiens
ggccgagatggaaaa

SEQ ID NO: 1038795 - DNA, 15 bp, Homo sapiens
aggccgagatggaaa

SEQ ID NO: 1038796 - DNA, 15 bp, Homo sapiens
aaggccgagatggaa

SEQ ID NO: 1038797 - DNA, 15 bp, Homo sapiens
taaggccgagatgga

SEQ ID NO: 1038798 - DNA, 15 bp, Homo sapiens
ctaaggccgagatgg

SEQ ID NO: 1038799 - DNA, 15 bp, Homo sapiens
gctaaggccgagatg

SEQ ID NO: 1038800 - DNA, 15 bp, Homo sapiens
agctaaggccgagat

SEQ ID NO: 1038801 - DNA, 15 bp, Homo sapiens
tagctaaggccgaga

SEQ ID NO: 1038802 - DNA, 15 bp, Homo sapiens
ctagctaaggccgag

SEQ ID NO: 1038803 - DNA, 15 bp, Homo sapiens
tctagctaaggccga

SEQ ID NO: 1038804 - DNA, 15 bp, Homo sapiens
gtctagctaaggccg

SEQ ID NO: 1038805 - DNA, 15 bp, Homo sapiens
agtctagctaaggcc

SEQ ID NO: 1038806 - DNA, 15 bp, Homo sapiens
cagtctagctaaggc

SEQ ID NO: 1038807 - DNA, 15 bp, Homo sapiens
acagtctagctaagg

SEQ ID NO: 1038808 - DNA, 15 bp, Homo sapiens
aacagtctagctaag

SEQ ID NO: 1038809 - DNA, 15 bp, Homo sapiens
aaacagtctagctaa

SEQ ID NO: 1038810 - DNA, 15 bp, Homo sapiens
caaacagtctagcta

SEQ ID NO: 1038811 - DNA, 15 bp, Homo sapiens
tcaaacagtctagct

SEQ ID NO: 1038812 - DNA, 15 bp, Homo sapiens
ttcaaacagtctagc

SEQ ID NO: 1038813 - DNA, 15 bp, Homo sapiens
cttcaaacagtctag

SEQ ID NO: 1038814 - DNA, 15 bp, Homo sapiens
tcttcaaacagtcta

SEQ ID NO: 1038815 - DNA, 15 bp, Homo sapiens
atcttcaaacagtct

SEQ ID NO: 1038816 - DNA, 15 bp, Homo sapiens
catcttcaaacagtc

SEQ ID NO: 1038817 - DNA, 15 bp, Homo sapiens
gcatcttcaaacagt

SEQ ID NO: 1038818 - DNA, 15 bp, Homo sapiens
tgcatcttcaaacag

SEQ ID NO: 1038819 - DNA, 15 bp, Homo sapiens
ttgcatcttcaaaca

SEQ ID NO: 1038820 - DNA, 15 bp, Homo sapiens
attgcatcttcaaac

SEQ ID NO: 1038821 - DNA, 15 bp, Homo sapiens
cattgcatcttcaaa

SEQ ID NO: 1038822 - DNA, 15 bp, Homo sapiens
ccattgcatcttcaa

SEQ ID NO: 1038823 - DNA, 15 bp, Homo sapiens
accattgcatcttca

SEQ ID NO: 1038824 - DNA, 15 bp, Homo sapiens
aaccattgcatcttc

SEQ ID NO: 1038825 - DNA, 15 bp, Homo sapiens
aaaccattgcatctt

SEQ ID NO: 1038826 - DNA, 15 bp, Homo sapiens
caaaccattgcatct

SEQ ID NO: 1038827 - DNA, 15 bp, Homo sapiens
gcaaaccattgcatc

SEQ ID NO: 1038828 - DNA, 15 bp, Homo sapiens
agcaaaccattgcat

SEQ ID NO: 1038829 - DNA, 15 bp, Homo sapiens
gagcaaaccattgca

SEQ ID NO: 1038830 - DNA, 15 bp, Homo sapiens
tgagcaaaccattgc

SEQ ID NO: 1038831 - DNA, 15 bp, Homo sapiens
atgagcaaaccattg

SEQ ID NO: 1038832 - DNA, 15 bp, Homo sapiens
gatgagcaaaccatt

SEQ ID NO: 1038833 - DNA, 15 bp, Homo sapiens
cgatgagcaaaccat

SEQ ID NO: 1038834 - DNA, 15 bp, Homo sapiens
acgatgagcaaacca

SEQ ID NO: 1038835 - DNA, 15 bp, Homo sapiens
aacgatgagcaaacc

SEQ ID NO: 1038836 - DNA, 15 bp, Homo sapiens
gaacgatgagcaaac

SEQ ID NO: 1038837 - DNA, 15 bp, Homo sapiens
tgaacgatgagcaaa

SEQ ID NO: 1038838 - DNA, 15 bp, Homo sapiens
atgaacgatgagcaa

SEQ ID NO: 1038839 - DNA, 15 bp, Homo sapiens
tatgaacgatgagca

SEQ ID NO: 1038840 - DNA, 15 bp, Homo sapiens
atatgaacgatgagc

SEQ ID NO: 1038841 - DNA, 15 bp, Homo sapiens
gatatgaacgatgag

SEQ ID NO: 1038842 - DNA, 15 bp, Homo sapiens
cgatatgaacgatga

SEQ ID NO: 1038843 - DNA, 15 bp, Homo sapiens
ccgatatgaacgatg

SEQ ID NO: 1038844 - DNA, 15 bp, Homo sapiens
gccgatatgaacgat

SEQ ID NO: 1038845 - DNA, 15 bp, Homo sapiens
ggccgatatgaacga

SEQ ID NO: 1038846 - DNA, 15 bp, Homo sapiens
tggccgatatgaacg

SEQ ID NO: 1038847 - DNA, 15 bp, Homo sapiens
ctggccgatatgaac

SEQ ID NO: 1038848 - DNA, 15 bp, Homo sapiens
cctggccgatatgaa

SEQ ID NO: 1038849 - DNA, 15 bp, Homo sapiens
gcctggccgatatga

SEQ ID NO: 1038850 - DNA, 15 bp, Homo sapiens
ggcctggccgatatg

SEQ ID NO: 1038851 - DNA, 15 bp, Homo sapiens
tggcctggccgatat

SEQ ID NO: 1038852 - DNA, 15 bp, Homo sapiens
gtggcctggccgata

SEQ ID NO: 1038853 - DNA, 15 bp, Homo sapiens
agtggcctggccgat

SEQ ID NO: 1038854 - DNA, 15 bp, Homo sapiens
cagtggcctggccga

SEQ ID NO: 1038855 - DNA, 15 bp, Homo sapiens
acagtggcctggccg

SEQ ID NO: 1038856 - DNA, 15 bp, Homo sapiens
cacagtggcctggcc

SEQ ID NO: 1038857 - DNA, 15 bp, Homo sapiens
gcacagtggcctggc

SEQ ID NO: 1038858 - DNA, 15 bp, Homo sapiens
cgcacagtggcctgg

SEQ ID NO: 1038859 - DNA, 15 bp, Homo sapiens
ccgcacagtggcctg

SEQ ID NO: 1038860 - DNA, 15 bp, Homo sapiens
gccgcacagtggcct

SEQ ID NO: 1038861 - DNA, 15 bp, Homo sapiens
ggccgcacagtggcc

SEQ ID NO: 1038862 - DNA, 15 bp, Homo sapiens
tggccgcacagtggc

SEQ ID NO: 1038863 - DNA, 15 bp, Homo sapiens
atggccgcacagtgg

SEQ ID NO: 1038864 - DNA, 15 bp, Homo sapiens
catggccgcacagtg

SEQ ID NO: 1038865 - DNA, 15 bp, Homo sapiens
gcatggccgcacagt

SEQ ID NO: 1038866 - DNA, 15 bp, Homo sapiens
agcatggccgcacag

SEQ ID NO: 1038867 - DNA, 15 bp, Homo sapiens
gagcatggccgcaca

SEQ ID NO: 1038868 - DNA, 15 bp, Homo sapiens
agagcatggccgcac

SEQ ID NO: 1038869 - DNA, 15 bp, Homo sapiens
cagagcatggccgca

SEQ ID NO: 1038870 - DNA, 15 bp, Homo sapiens
tcagagcatggccgc

SEQ ID NO: 1038871 - DNA, 15 bp, Homo sapiens
atcagagcatggccg

SEQ ID NO: 1038872 - DNA, 15 bp, Homo sapiens
gatcagagcatggcc

SEQ ID NO: 1038873 - DNA, 15 bp, Homo sapiens
tgatcagagcatggc

SEQ ID NO: 1038874 - DNA, 15 bp, Homo sapiens
gtgatcagagcatgg

SEQ ID NO: 1038875 - DNA, 15 bp, Homo sapiens
tgtgatcagagcatg

SEQ ID NO: 1038876 - DNA, 15 bp, Homo sapiens
atgtgatcagagcat

SEQ ID NO: 1038877 - DNA, 15 bp, Homo sapiens
gatgtgatcagagca

SEQ ID NO: 1038878 - DNA, 15 bp, Homo sapiens
ggatgtgatcagagc

SEQ ID NO: 1038879 - DNA, 15 bp, Homo sapiens
gggatgtgatcagag

SEQ ID NO: 1038880 - DNA, 15 bp, Homo sapiens
tgggatgtgatcaga

SEQ ID NO: 1038881 - DNA, 15 bp, Homo sapiens
atgggatgtgatcag

SEQ ID NO: 1038882 - DNA, 15 bp, Homo sapiens
gatgggatgtgatca

SEQ ID NO: 1038883 - DNA, 15 bp, Homo sapiens
tgatgggatgtgatc

SEQ ID NO: 1038884 - DNA, 15 bp, Homo sapiens
gtgatgggatgtgat

SEQ ID NO: 1038885 - DNA, 15 bp, Homo sapiens
agtgatgggatgtga

SEQ ID NO: 1038886 - DNA, 15 bp, Homo sapiens
gagtgatgggatgtg

SEQ ID NO: 1038887 - DNA, 15 bp, Homo sapiens
tgagtgatgggatgt

SEQ ID NO: 1038888 - DNA, 15 bp, Homo sapiens
ttgagtgatgggatg

SEQ ID NO: 1038889 - DNA, 15 bp, Homo sapiens
gttgagtgatgggat

SEQ ID NO: 1038890 - DNA, 15 bp, Homo sapiens
agttgagtgatggga

SEQ ID NO: 1038891 - DNA, 15 bp, Homo sapiens
gagttgagtgatggg

SEQ ID NO: 1038892 - DNA, 15 bp, Homo sapiens
tgagttgagtgatgg

SEQ ID NO: 1038893 - DNA, 15 bp, Homo sapiens
atgagttgagtgatg

SEQ ID NO: 1038894 - DNA, 15 bp, Homo sapiens
catgagttgagtgat

SEQ ID NO: 1038895 - DNA, 15 bp, Homo sapiens
acatgagttgagtga

SEQ ID NO: 1038896 - DNA, 15 bp, Homo sapiens
cacatgagttgagtg

SEQ ID NO: 1038897 - DNA, 15 bp, Homo sapiens
gcacatgagttgagt

SEQ ID NO: 1038898 - DNA, 15 bp, Homo sapiens
tgcacatgagttgag

SEQ ID NO: 1038899 - DNA, 15 bp, Homo sapiens
gtgcacatgagttga

SEQ ID NO: 1038900 - DNA, 15 bp, Homo sapiens
tgtgcacatgagttg

SEQ ID NO: 1038901 - DNA, 15 bp, Homo sapiens
atgtgcacatgagtt

SEQ ID NO: 1038902 - DNA, 15 bp, Homo sapiens
catgtgcacatgagt

SEQ ID NO: 1038903 - DNA, 15 bp, Homo sapiens
tcatgtgcacatgag

SEQ ID NO: 1038904 - DNA, 15 bp, Homo sapiens
ttcatgtgcacatga

SEQ ID NO: 1038905 - DNA, 15 bp, Homo sapiens
tttcatgtgcacatg

SEQ ID NO: 1038906 - DNA, 15 bp, Homo sapiens
ttttcatgtgcacat

SEQ ID NO: 1038907 - DNA, 15 bp, Homo sapiens
cttttcatgtgcaca

SEQ ID NO: 1038908 - DNA, 15 bp, Homo sapiens
acttttcatgtgcac

SEQ ID NO: 1038909 - DNA, 15 bp, Homo sapiens
tacttttcatgtgca

SEQ ID NO: 1038910 - DNA, 15 bp, Homo sapiens
ttacttttcatgtgc

SEQ ID NO: 1038911 - DNA, 15 bp, Homo sapiens
gttacttttcatgtg

SEQ ID NO: 1038912 - DNA, 15 bp, Homo sapiens
tgttacttttcatgt

SEQ ID NO: 1038913 - DNA, 15 bp, Homo sapiens
atgttacttttcatg

SEQ ID NO: 1038914 - DNA, 15 bp, Homo sapiens
aatgttacttttcat

SEQ ID NO: 1038915 - DNA, 15 bp, Homo sapiens
aaatgttacttttca

SEQ ID NO: 1038916 - DNA, 15 bp, Homo sapiens
caaatgttacttttc

SEQ ID NO: 1038917 - DNA, 15 bp, Homo sapiens
tcaaatgttactttt

SEQ ID NO: 1038918 - DNA, 15 bp, Homo sapiens
gtcaaatgttacttt

SEQ ID NO: 1038919 - DNA, 15 bp, Homo sapiens
agtcaaatgttactt

SEQ ID NO: 1038920 - DNA, 15 bp, Homo sapiens
aagtcaaatgttact

SEQ ID NO: 1038921 - DNA, 15 bp, Homo sapiens
taagtcaaatgttac

SEQ ID NO: 1038922 - DNA, 15 bp, Homo sapiens
ttaagtcaaatgtta

SEQ ID NO: 1038923 - DNA, 15 bp, Homo sapiens
attaagtcaaatgtt

SEQ ID NO: 1038924 - DNA, 15 bp, Homo sapiens
gattaagtcaaatgt

SEQ ID NO: 1038925 - DNA, 15 bp, Homo sapiens
agattaagtcaaatg

SEQ ID NO: 1038926 - DNA, 15 bp, Homo sapiens
tagattaagtcaaat

SEQ ID NO: 1038927 - DNA, 15 bp, Homo sapiens
ttagattaagtcaaa

SEQ ID NO: 1038928 - DNA, 15 bp, Homo sapiens
cttagattaagtcaa

SEQ ID NO: 1038929 - DNA, 15 bp, Homo sapiens
ccttagattaagtca

SEQ ID NO: 1038930 - DNA, 15 bp, Homo sapiens
tccttagattaagtc

SEQ ID NO: 1038931 - DNA, 15 bp, Homo sapiens
ttccttagattaagt

SEQ ID NO: 1038932 - DNA, 15 bp, Homo sapiens
tttccttagattaag

SEQ ID NO: 1038933 - DNA, 15 bp, Homo sapiens
ttttccttagattaa

SEQ ID NO: 1038934 - DNA, 15 bp, Homo sapiens
gttttccttagatta

SEQ ID NO: 1038935 - DNA, 15 bp, Homo sapiens
tgttttccttagatt

SEQ ID NO: 1038936 - DNA, 15 bp, Homo sapiens
ttgttttccttagat

SEQ ID NO: 1038937 - DNA, 15 bp, Homo sapiens
tttgttttccttaga

SEQ ID NO: 1038938 - DNA, 15 bp, Homo sapiens
atttgttttccttag

SEQ ID NO: 1038939 - DNA, 15 bp, Homo sapiens
catttgttttcctta

SEQ ID NO: 1038940 - DNA, 15 bp, Homo sapiens
acatttgttttcctt

SEQ ID NO: 1038941 - DNA, 15 bp, Homo sapiens
aacatttgttttcct

SEQ ID NO: 1038942 - DNA, 15 bp, Homo sapiens
caacatttgttttcc

SEQ ID NO: 1038943 - DNA, 15 bp, Homo sapiens
ccaacatttgttttc

SEQ ID NO: 1038944 - DNA, 15 bp, Homo sapiens
tccaacatttgtttt

SEQ ID NO: 1038945 - DNA, 15 bp, Homo sapiens
ttccaacatttgttt

SEQ ID NO: 1038946 - DNA, 15 bp, Homo sapiens
cttccaacatttgtt

SEQ ID NO: 1038947 - DNA, 15 bp, Homo sapiens
tcttccaacatttgt

SEQ ID NO: 1038948 - DNA, 15 bp, Homo sapiens
gtcttccaacatttg

SEQ ID NO: 1038949 - DNA, 15 bp, Homo sapiens
tgtcttccaacattt

SEQ ID NO: 1038950 - DNA, 15 bp, Homo sapiens
gtgtcttccaacatt

SEQ ID NO: 1038951 - DNA, 15 bp, Homo sapiens
tgtgtcttccaacat

SEQ ID NO: 1038952 - DNA, 15 bp, Homo sapiens
atgtgtcttccaaca

SEQ ID NO: 1038953 - DNA, 15 bp, Homo sapiens
aatgtgtcttccaac

SEQ ID NO: 1038954 - DNA, 15 bp, Homo sapiens
aaatgtgtcttccaa

SEQ ID NO: 1038955 - DNA, 15 bp, Homo sapiens
caaatgtgtcttcca

SEQ ID NO: 1038956 - DNA, 15 bp, Homo sapiens
acaaatgtgtcttcc

SEQ ID NO: 1038957 - DNA, 15 bp, Homo sapiens
tacaaatgtgtcttc

SEQ ID NO: 1038958 - DNA, 15 bp, Homo sapiens
ttacaaatgtgtctt

SEQ ID NO: 1038959 - DNA, 15 bp, Homo sapiens
cttacaaatgtgtct

SEQ ID NO: 1038960 - DNA, 15 bp, Homo sapiens
acttacaaatgtgtc

SEQ ID NO: 1038961 - DNA, 15 bp, Homo sapiens
tacttacaaatgtgt

SEQ ID NO: 1038962 - DNA, 15 bp, Homo sapiens
atacttacaaatgtg

SEQ ID NO: 1038963 - DNA, 15 bp, Homo sapiens
tatacttacaaatgt

SEQ ID NO: 1038964 - DNA, 15 bp, Homo sapiens
ttatacttacaaatg

SEQ ID NO: 1038965 - DNA, 15 bp, Homo sapiens
gttatacttacaaat

SEQ ID NO: 1038966 - DNA, 15 bp, Homo sapiens
tgttatacttacaaa

SEQ ID NO: 1038967 - DNA, 15 bp, Homo sapiens
ttgttatacttacaa

SEQ ID NO: 1038968 - DNA, 15 bp, Homo sapiens
cttgttatacttaca

SEQ ID NO: 1038969 - DNA, 15 bp, Homo sapiens
tcttgttatacttac

SEQ ID NO: 1038970 - DNA, 15 bp, Homo sapiens
ttcttgttatactta

SEQ ID NO: 1038971 - DNA, 15 bp, Homo sapiens
tttcttgttatactt

SEQ ID NO: 1038972 - DNA, 15 bp, Homo sapiens
ttttcttgttatact

SEQ ID NO: 1038973 - DNA, 15 bp, Homo sapiens
cttttcttgttatac

SEQ ID NO: 1038974 - DNA, 15 bp, Homo sapiens
tcttttcttgttata

SEQ ID NO: 1038975 - DNA, 15 bp, Homo sapiens
atcttttcttgttat

SEQ ID NO: 1038976 - DNA, 15 bp, Homo sapiens
catcttttcttgtta

SEQ ID NO: 1038977 - DNA, 15 bp, Homo sapiens
gcatcttttcttgtt

SEQ ID NO: 1038978 - DNA, 15 bp, Homo sapiens
tgcatcttttcttgt

SEQ ID NO: 1038979 - DNA, 15 bp, Homo sapiens
atgcatcttttcttg

SEQ ID NO: 1038980 - DNA, 15 bp, Homo sapiens
tatgcatcttttctt

SEQ ID NO: 1038981 - DNA, 15 bp, Homo sapiens
atatgcatcttttct

SEQ ID NO: 1038982 - DNA, 15 bp, Homo sapiens
tatatgcatcttttc

SEQ ID NO: 1038983 - DNA, 15 bp, Homo sapiens
ctatatgcatctttt

SEQ ID NO: 1038984 - DNA, 15 bp, Homo sapiens
cctatatgcatcttt

SEQ ID NO: 1038985 - DNA, 15 bp, Homo sapiens
gcctatatgcatctt

SEQ ID NO: 1038986 - DNA, 15 bp, Homo sapiens
tgcctatatgcatct

SEQ ID NO: 1038987 - DNA, 15 bp, Homo sapiens
gtgcctatatgcatc

SEQ ID NO: 1038988 - DNA, 15 bp, Homo sapiens
tgtgcctatatgcat

SEQ ID NO: 1038989 - DNA, 15 bp, Homo sapiens
gtgtgcctatatgca

SEQ ID NO: 1038990 - DNA, 15 bp, Homo sapiens
tgtgtgcctatatgc

SEQ ID NO: 1038991 - DNA, 15 bp, Homo sapiens
atgtgtgcctatatg

SEQ ID NO: 1038992 - DNA, 15 bp, Homo sapiens
tatgtgtgcctatat

SEQ ID NO: 1038993 - DNA, 15 bp, Homo sapiens
atatgtgtgcctata

SEQ ID NO: 1038994 - DNA, 15 bp, Homo sapiens
catatgtgtgcctat

SEQ ID NO: 1038995 - DNA, 15 bp, Homo sapiens
acatatgtgtgccta

SEQ ID NO: 1038996 - DNA, 15 bp, Homo sapiens
cacatatgtgtgcct

SEQ ID NO: 1038997 - DNA, 15 bp, Homo sapiens
tcacatatgtgtgcc

SEQ ID NO: 1038998 - DNA, 15 bp, Homo sapiens
gtcacatatgtgtgc

SEQ ID NO: 1038999 - DNA, 15 bp, Homo sapiens
tgtcacatatgtgtg

SEQ ID NO: 1039000 - DNA, 15 bp, Homo sapiens
ttgtcacatatgtgt

SEQ ID NO: 1039001 - DNA, 15 bp, Homo sapiens
tttgtcacatatgtg

SEQ ID NO: 1039002 - DNA, 15 bp, Homo sapiens
atttgtcacatatgt

SEQ ID NO: 1039003 - DNA, 15 bp, Homo sapiens
aatttgtcacatatg

SEQ ID NO: 1039004 - DNA, 15 bp, Homo sapiens
gaatttgtcacatat

SEQ ID NO: 1039005 - DNA, 15 bp, Homo sapiens
ggaatttgtcacata

SEQ ID NO: 1039006 - DNA, 15 bp, Homo sapiens
tggaatttgtcacat

SEQ ID NO: 1039007 - DNA, 15 bp, Homo sapiens
ttggaatttgtcaca

SEQ ID NO: 1039008 - DNA, 15 bp, Homo sapiens
tttggaatttgtcac

SEQ ID NO: 1039009 - DNA, 15 bp, Homo sapiens
ttttggaatttgtca

SEQ ID NO: 1039010 - DNA, 15 bp, Homo sapiens
attttggaatttgtc

SEQ ID NO: 1039011 - DNA, 15 bp, Homo sapiens
tattttggaatttgt

SEQ ID NO: 1039012 - DNA, 15 bp, Homo sapiens
ttattttggaatttg

SEQ ID NO: 1039013 - DNA, 15 bp, Homo sapiens
cttattttggaattt

SEQ ID NO: 1039014 - DNA, 15 bp, Homo sapiens
acttattttggaatt

SEQ ID NO: 1039015 - DNA, 15 bp, Homo sapiens
cacttattttggaat

SEQ ID NO: 1039016 - DNA, 15 bp, Homo sapiens
tcacttattttggaa

SEQ ID NO: 1039017 - DNA, 15 bp, Homo sapiens
ttcacttattttgga

SEQ ID NO: 1039018 - DNA, 15 bp, Homo sapiens
tttcacttattttgg

SEQ ID NO: 1039019 - DNA, 15 bp, Homo sapiens
atttcacttattttg

SEQ ID NO: 1039020 - DNA, 15 bp, Homo sapiens
aatttcacttatttt

SEQ ID NO: 1039021 - DNA, 15 bp, Homo sapiens
aaatttcacttattt

SEQ ID NO: 1039022 - DNA, 15 bp, Homo sapiens
aaaatttcacttatt

SEQ ID NO: 1039023 - DNA, 15 bp, Homo sapiens
aaaaatttcacttat

SEQ ID NO: 1039024 - DNA, 15 bp, Homo sapiens
taaaaatttcactta

SEQ ID NO: 1039025 - DNA, 15 bp, Homo sapiens
ttaaaaatttcactt

SEQ ID NO: 1039026 - DNA, 15 bp, Homo sapiens
tttaaaaatttcact

SEQ ID NO: 1039027 - DNA, 15 bp, Homo sapiens
atttaaaaatttcac

SEQ ID NO: 1039028 - DNA, 15 bp, Homo sapiens
aatttaaaaatttca

SEQ ID NO: 1039029 - DNA, 15 bp, Homo sapiens
gaatttaaaaatttc

SEQ ID NO: 1039030 - DNA, 15 bp, Homo sapiens
cgaatttaaaaattt

SEQ ID NO: 1039031 - DNA, 15 bp, Homo sapiens
acgaatttaaaaatt

SEQ ID NO: 1039032 - DNA, 15 bp, Homo sapiens
cacgaatttaaaaat

SEQ ID NO: 1039033 - DNA, 15 bp, Homo sapiens
tcacgaatttaaaaa

SEQ ID NO: 1039034 - DNA, 15 bp, Homo sapiens
ttcacgaatttaaaa

SEQ ID NO: 1039035 - DNA, 15 bp, Homo sapiens
attcacgaatttaaa

SEQ ID NO: 1039036 - DNA, 15 bp, Homo sapiens
cattcacgaatttaa

SEQ ID NO: 1039037 - DNA, 15 bp, Homo sapiens
gcattcacgaattta

SEQ ID NO: 1039038 - DNA, 15 bp, Homo sapiens
tgcattcacgaattt

SEQ ID NO: 1039039 - DNA, 15 bp, Homo sapiens
gtgcattcacgaatt

SEQ ID NO: 1039040 - DNA, 15 bp, Homo sapiens
tgtgcattcacgaat

SEQ ID NO: 1039041 - DNA, 15 bp, Homo sapiens
ctgtgcattcacgaa

SEQ ID NO: 1039042 - DNA, 15 bp, Homo sapiens
tctgtgcattcacga

SEQ ID NO: 1039043 - DNA, 15 bp, Homo sapiens
atctgtgcattcacg

SEQ ID NO: 1039044 - DNA, 15 bp, Homo sapiens
catctgtgcattcac

SEQ ID NO: 1039045 - DNA, 15 bp, Homo sapiens
acatctgtgcattca

SEQ ID NO: 1039046 - DNA, 15 bp, Homo sapiens
tacatctgtgcattc

SEQ ID NO: 1039047 - DNA, 15 bp, Homo sapiens
gtacatctgtgcatt

SEQ ID NO: 1039048 - DNA, 15 bp, Homo sapiens
ggtacatctgtgcat

SEQ ID NO: 1039049 - DNA, 15 bp, Homo sapiens
gggtacatctgtgca

SEQ ID NO: 1039050 - DNA, 15 bp, Homo sapiens
tgggtacatctgtgc

SEQ ID NO: 1039051 - DNA, 15 bp, Homo sapiens
gtgggtacatctgtg

SEQ ID NO: 1039052 - DNA, 15 bp, Homo sapiens
cgtgggtacatctgt

SEQ ID NO: 1039053 - DNA, 15 bp, Homo sapiens
gcgtgggtacatctg

SEQ ID NO: 1039054 - DNA, 15 bp, Homo sapiens
ggcgtgggtacatct

SEQ ID NO: 1039055 - DNA, 15 bp, Homo sapiens
tggcgtgggtacatc

SEQ ID NO: 1039056 - DNA, 15 bp, Homo sapiens
atggcgtgggtacat

SEQ ID NO: 1039057 - DNA, 15 bp, Homo sapiens
aatggcgtgggtaca

SEQ ID NO: 1039058 - DNA, 15 bp, Homo sapiens
gaatggcgtgggtac

SEQ ID NO: 1039059 - DNA, 15 bp, Homo sapiens
agaatggcgtgggta

SEQ ID NO: 1039060 - DNA, 15 bp, Homo sapiens
aagaatggcgtgggt

SEQ ID NO: 1039061 - DNA, 15 bp, Homo sapiens
gaagaatggcgtggg

SEQ ID NO: 1039062 - DNA, 15 bp, Homo sapiens
agaagaatggcgtgg

SEQ ID NO: 1039063 - DNA, 15 bp, Homo sapiens
cagaagaatggcgtg

SEQ ID NO: 1039064 - DNA, 15 bp, Homo sapiens
tcagaagaatggcgt

SEQ ID NO: 1039065 - DNA, 15 bp, Homo sapiens
atcagaagaatggcg

SEQ ID NO: 1039066 - DNA, 15 bp, Homo sapiens
tatcagaagaatggc

SEQ ID NO: 1039067 - DNA, 15 bp, Homo sapiens
atatcagaagaatgg

SEQ ID NO: 1039068 - DNA, 15 bp, Homo sapiens
aatatcagaagaatg

SEQ ID NO: 1039069 - DNA, 15 bp, Homo sapiens
gaatatcagaagaat

SEQ ID NO: 1039070 - DNA, 15 bp, Homo sapiens
tgaatatcagaagaa

SEQ ID NO: 1039071 - DNA, 15 bp, Homo sapiens
gtgaatatcagaaga

SEQ ID NO: 1039072 - DNA, 15 bp, Homo sapiens
agtgaatatcagaag

SEQ ID NO: 1039073 - DNA, 15 bp, Homo sapiens
cagtgaatatcagaa

SEQ ID NO: 1039074 - DNA, 15 bp, Homo sapiens
tcagtgaatatcaga

SEQ ID NO: 1039075 - DNA, 15 bp, Homo sapiens
ctcagtgaatatcag

SEQ ID NO: 1039076 - DNA, 15 bp, Homo sapiens
actcagtgaatatca

SEQ ID NO: 1039077 - DNA, 15 bp, Homo sapiens
tactcagtgaatatc

SEQ ID NO: 1039078 - DNA, 15 bp, Homo sapiens
atactcagtgaatat

SEQ ID NO: 1039079 - DNA, 15 bp, Homo sapiens
catactcagtgaata

SEQ ID NO: 1039080 - DNA, 15 bp, Homo sapiens
acatactcagtgaat

SEQ ID NO: 1039081 - DNA, 15 bp, Homo sapiens
cacatactcagtgaa

SEQ ID NO: 1039082 - DNA, 15 bp, Homo sapiens
ccacatactcagtga

SEQ ID NO: 1039083 - DNA, 15 bp, Homo sapiens
accacatactcagtg

SEQ ID NO: 1039084 - DNA, 15 bp, Homo sapiens
caccacatactcagt

SEQ ID NO: 1039085 - DNA, 15 bp, Homo sapiens
acaccacatactcag

SEQ ID NO: 1039086 - DNA, 15 bp, Homo sapiens
tacaccacatactca

SEQ ID NO: 1039087 - DNA, 15 bp, Homo sapiens
gtacaccacatactc

SEQ ID NO: 1039088 - DNA, 15 bp, Homo sapiens
cgtacaccacatact

SEQ ID NO: 1039089 - DNA, 15 bp, Homo sapiens
tcgtacaccacatac

SEQ ID NO: 1039090 - DNA, 15 bp, Homo sapiens
ttcgtacaccacata

SEQ ID NO: 1039091 - DNA, 15 bp, Homo sapiens
gttcgtacaccacat

SEQ ID NO: 1039092 - DNA, 15 bp, Homo sapiens
tgttcgtacaccaca

SEQ ID NO: 1039093 - DNA, 15 bp, Homo sapiens
ttgttcgtacaccac

SEQ ID NO: 1039094 - DNA, 15 bp, Homo sapiens
gttgttcgtacacca

SEQ ID NO: 1039095 - DNA, 15 bp, Homo sapiens
tgttgttcgtacacc

SEQ ID NO: 1039096 - DNA, 15 bp, Homo sapiens
ctgttgttcgtacac

SEQ ID NO: 1039097 - DNA, 15 bp, Homo sapiens
actgttgttcgtaca

SEQ ID NO: 1039098 - DNA, 15 bp, Homo sapiens
tactgttgttcgtac

SEQ ID NO: 1039099 - DNA, 15 bp, Homo sapiens
atactgttgttcgta

SEQ ID NO: 1039100 - DNA, 15 bp, Homo sapiens
tatactgttgttcgt

SEQ ID NO: 1039101 - DNA, 15 bp, Homo sapiens
ttatactgttgttcg

SEQ ID NO: 1039102 - DNA, 15 bp, Homo sapiens
tttatactgttgttc

SEQ ID NO: 1039103 - DNA, 15 bp, Homo sapiens
atttatactgttgtt

SEQ ID NO: 1039104 - DNA, 15 bp, Homo sapiens
tatttatactgttgt

SEQ ID NO: 1039105 - DNA, 15 bp, Homo sapiens
ctatttatactgttg

SEQ ID NO: 1039106 - DNA, 15 bp, Homo sapiens
cctatttatactgtt

SEQ ID NO: 1039107 - DNA, 15 bp, Homo sapiens
acctatttatactgt

SEQ ID NO: 1039108 - DNA, 15 bp, Homo sapiens
cacctatttatactg

SEQ ID NO: 1039109 - DNA, 15 bp, Homo sapiens
gcacctatttatact

SEQ ID NO: 1039110 - DNA, 15 bp, Homo sapiens
agcacctatttatac

SEQ ID NO: 1039111 - DNA, 15 bp, Homo sapiens
tagcacctatttata

SEQ ID NO: 1039112 - DNA, 15 bp, Homo sapiens
ctagcacctatttat

SEQ ID NO: 1039113 - DNA, 15 bp, Homo sapiens
gctagcacctattta

SEQ ID NO: 1039114 - DNA, 15 bp, Homo sapiens
ggctagcacctattt

SEQ ID NO: 1039115 - DNA, 15 bp, Homo sapiens
tggctagcacctatt

SEQ ID NO: 1039116 - DNA, 15 bp, Homo sapiens
gtggctagcacctat

SEQ ID NO: 1039117 - DNA, 15 bp, Homo sapiens
ggtggctagcaccta

SEQ ID NO: 1039118 - DNA, 15 bp, Homo sapiens
aggtggctagcacct

SEQ ID NO: 1039119 - DNA, 15 bp, Homo sapiens
taggtggctagcacc

SEQ ID NO: 1039120 - DNA, 15 bp, Homo sapiens
gtaggtggctagcac

SEQ ID NO: 1039121 - DNA, 15 bp, Homo sapiens
ggtaggtggctagca

SEQ ID NO: 1039122 - DNA, 15 bp, Homo sapiens
tggtaggtggctagc

SEQ ID NO: 1039123 - DNA, 15 bp, Homo sapiens
atggtaggtggctag

SEQ ID NO: 1039124 - DNA, 15 bp, Homo sapiens
aatggtaggtggcta

SEQ ID NO: 1039125 - DNA, 15 bp, Homo sapiens
aaatggtaggtggct

SEQ ID NO: 1039126 - DNA, 15 bp, Homo sapiens
aaaatggtaggtggc

SEQ ID NO: 1039127 - DNA, 15 bp, Homo sapiens
gaaaatggtaggtgg

SEQ ID NO: 1039128 - DNA, 15 bp, Homo sapiens
tgaaaatggtaggtg

SEQ ID NO: 1039129 - DNA, 15 bp, Homo sapiens
atgaaaatggtaggt

SEQ ID NO: 1039130 - DNA, 15 bp, Homo sapiens
aatgaaaatggtagg

SEQ ID NO: 1039131 - DNA, 15 bp, Homo sapiens
taatgaaaatggtag

SEQ ID NO: 1039132 - DNA, 15 bp, Homo sapiens
ataatgaaaatggta

SEQ ID NO: 1039133 - DNA, 15 bp, Homo sapiens
gataatgaaaatggt

SEQ ID NO: 1039134 - DNA, 15 bp, Homo sapiens
agataatgaaaatgg

SEQ ID NO: 1039135 - DNA, 15 bp, Homo sapiens
gagataatgaaaatg

SEQ ID NO: 1039136 - DNA, 15 bp, Homo sapiens
tgagataatgaaaat

SEQ ID NO: 1039137 - DNA, 15 bp, Homo sapiens
gtgagataatgaaaa

SEQ ID NO: 1039138 - DNA, 15 bp, Homo sapiens
tgtgagataatgaaa

SEQ ID NO: 1039139 - DNA, 15 bp, Homo sapiens
ttgtgagataatgaa

SEQ ID NO: 1039140 - DNA, 15 bp, Homo sapiens
gttgtgagataatga

SEQ ID NO: 1039141 - DNA, 15 bp, Homo sapiens
tgttgtgagataatg

SEQ ID NO: 1039142 - DNA, 15 bp, Homo sapiens
ctgttgtgagataat

SEQ ID NO: 1039143 - DNA, 15 bp, Homo sapiens
tctgttgtgagataa

SEQ ID NO: 1039144 - DNA, 15 bp, Homo sapiens
atctgttgtgagata

SEQ ID NO: 1039145 - DNA, 15 bp, Homo sapiens
catctgttgtgagat

SEQ ID NO: 1039146 - DNA, 15 bp, Homo sapiens
gcatctgttgtgaga

SEQ ID NO: 1039147 - DNA, 15 bp, Homo sapiens
ggcatctgttgtgag

SEQ ID NO: 1039148 - DNA, 15 bp, Homo sapiens
aggcatctgttgtga

SEQ ID NO: 1039149 - DNA, 15 bp, Homo sapiens
gaggcatctgttgtg

SEQ ID NO: 1039150 - DNA, 15 bp, Homo sapiens
ggaggcatctgttgt

SEQ ID NO: 1039151 - DNA, 15 bp, Homo sapiens
aggaggcatctgttg

SEQ ID NO: 1039152 - DNA, 15 bp, Homo sapiens
gaggaggcatctgtt

SEQ ID NO: 1039153 - DNA, 15 bp, Homo sapiens
agaggaggcatctgt

SEQ ID NO: 1039154 - DNA, 15 bp, Homo sapiens
gagaggaggcatctg

SEQ ID NO: 1039155 - DNA, 15 bp, Homo sapiens
ggagaggaggcatct

SEQ ID NO: 1039156 - DNA, 15 bp, Homo sapiens
aggagaggaggcatc

SEQ ID NO: 1039157 - DNA, 15 bp, Homo sapiens
gaggagaggaggcat

SEQ ID NO: 1039158 - DNA, 15 bp, Homo sapiens
tgaggagaggaggca

SEQ ID NO: 1039159 - DNA, 15 bp, Homo sapiens
atgaggagaggaggc

SEQ ID NO: 1039160 - DNA, 15 bp, Homo sapiens
aatgaggagaggagg

SEQ ID NO: 1039161 - DNA, 15 bp, Homo sapiens
gaatgaggagaggag

SEQ ID NO: 1039162 - DNA, 15 bp, Homo sapiens
tgaatgaggagagga

SEQ ID NO: 1039163 - DNA, 15 bp, Homo sapiens
gtgaatgaggagagg

SEQ ID NO: 1039164 - DNA, 15 bp, Homo sapiens
tgtgaatgaggagag

SEQ ID NO: 1039165 - DNA, 15 bp, Homo sapiens
ctgtgaatgaggaga

SEQ ID NO: 1039166 - DNA, 15 bp, Homo sapiens
cctgtgaatgaggag

SEQ ID NO: 1039167 - DNA, 15 bp, Homo sapiens
ccctgtgaatgagga

SEQ ID NO: 1039168 - DNA, 15 bp, Homo sapiens
gccctgtgaatgagg

SEQ ID NO: 1039169 - DNA, 15 bp, Homo sapiens
agccctgtgaatgag

SEQ ID NO: 1039170 - DNA, 15 bp, Homo sapiens
tagccctgtgaatga

SEQ ID NO: 1039171 - DNA, 15 bp, Homo sapiens
atagccctgtgaatg

SEQ ID NO: 1039172 - DNA, 15 bp, Homo sapiens
aatagccctgtgaat

SEQ ID NO: 1039173 - DNA, 15 bp, Homo sapiens
gaatagccctgtgaa

SEQ ID NO: 1039174 - DNA, 15 bp, Homo sapiens
tgaatagccctgtga

SEQ ID NO: 1039175 - DNA, 15 bp, Homo sapiens
ctgaatagccctgtg

SEQ ID NO: 1039176 - DNA, 15 bp, Homo sapiens
cctgaatagccctgt

SEQ ID NO: 1039177 - DNA, 15 bp, Homo sapiens
gcctgaatagccctg

SEQ ID NO: 1039178 - DNA, 15 bp, Homo sapiens
agcctgaatagccct

SEQ ID NO: 1039179 - DNA, 15 bp, Homo sapiens
tagcctgaatagccc

SEQ ID NO: 1039180 - DNA, 15 bp, Homo sapiens
atagcctgaatagcc

SEQ ID NO: 1039181 - DNA, 15 bp, Homo sapiens
catagcctgaatagc

SEQ ID NO: 1039182 - DNA, 15 bp, Homo sapiens
acatagcctgaatag

SEQ ID NO: 1039183 - DNA, 15 bp, Homo sapiens
tacatagcctgaata

SEQ ID NO: 1039184 - DNA, 15 bp, Homo sapiens
ttacatagcctgaat

SEQ ID NO: 1039185 - DNA, 15 bp, Homo sapiens
gttacatagcctgaa

SEQ ID NO: 1039186 - DNA, 15 bp, Homo sapiens
tgttacatagcctga

SEQ ID NO: 1039187 - DNA, 15 bp, Homo sapiens
ctgttacatagcctg

SEQ ID NO: 1039188 - DNA, 15 bp, Homo sapiens
tctgttacatagcct

SEQ ID NO: 1039189 - DNA, 15 bp, Homo sapiens
ctctgttacatagcc

SEQ ID NO: 1039190 - DNA, 15 bp, Homo sapiens
gctctgttacatagc

SEQ ID NO: 1039191 - DNA, 15 bp, Homo sapiens
ggctctgttacatag

SEQ ID NO: 1039192 - DNA, 15 bp, Homo sapiens
aggctctgttacata

SEQ ID NO: 1039193 - DNA, 15 bp, Homo sapiens
aaggctctgttacat

SEQ ID NO: 1039194 - DNA, 15 bp, Homo sapiens
taaggctctgttaca

SEQ ID NO: 1039195 - DNA, 15 bp, Homo sapiens
ataaggctctgttac

SEQ ID NO: 1039196 - DNA, 15 bp, Homo sapiens
gataaggctctgtta

SEQ ID NO: 1039197 - DNA, 15 bp, Homo sapiens
agataaggctctgtt

SEQ ID NO: 1039198 - DNA, 15 bp, Homo sapiens
tagataaggctctgt

SEQ ID NO: 1039199 - DNA, 15 bp, Homo sapiens
atagataaggctctg

SEQ ID NO: 1039200 - DNA, 15 bp, Homo sapiens
catagataaggctct

SEQ ID NO: 1039201 - DNA, 15 bp, Homo sapiens
ccatagataaggctc

SEQ ID NO: 1039202 - DNA, 15 bp, Homo sapiens
gccatagataaggct

SEQ ID NO: 1039203 - DNA, 15 bp, Homo sapiens
tgccatagataaggc

SEQ ID NO: 1039204 - DNA, 15 bp, Homo sapiens
gtgccatagataagg

SEQ ID NO: 1039205 - DNA, 15 bp, Homo sapiens
ggtgccatagataag

SEQ ID NO: 1039206 - DNA, 15 bp, Homo sapiens
aggtgccatagataa

SEQ ID NO: 1039207 - DNA, 15 bp, Homo sapiens
taggtgccatagata

SEQ ID NO: 1039208 - DNA, 15 bp, Homo sapiens
ctaggtgccatagat

SEQ ID NO: 1039209 - DNA, 15 bp, Homo sapiens
tctaggtgccataga

SEQ ID NO: 1039210 - DNA, 15 bp, Homo sapiens
ctctaggtgccatag

SEQ ID NO: 1039211 - DNA, 15 bp, Homo sapiens
cctctaggtgccata

SEQ ID NO: 1039212 - DNA, 15 bp, Homo sapiens
gcctctaggtgccat

SEQ ID NO: 1039213 - DNA, 15 bp, Homo sapiens
ggcctctaggtgcca

SEQ ID NO: 1039214 - DNA, 15 bp, Homo sapiens
aggcctctaggtgcc

SEQ ID NO: 1039215 - DNA, 15 bp, Homo sapiens
caggcctctaggtgc

SEQ ID NO: 1039216 - DNA, 15 bp, Homo sapiens
ccaggcctctaggtg

SEQ ID NO: 1039217 - DNA, 15 bp, Homo sapiens
tccaggcctctaggt

SEQ ID NO: 1039218 - DNA, 15 bp, Homo sapiens
gtccaggcctctagg

SEQ ID NO: 1039219 - DNA, 15 bp, Homo sapiens
agtccaggcctctag

SEQ ID NO: 1039220 - DNA, 15 bp, Homo sapiens
gagtccaggcctcta

SEQ ID NO: 1039221 - DNA, 15 bp, Homo sapiens
tgagtccaggcctct

SEQ ID NO: 1039222 - DNA, 15 bp, Homo sapiens
ctgagtccaggcctc

SEQ ID NO: 1039223 - DNA, 15 bp, Homo sapiens
tctgagtccaggcct

SEQ ID NO: 1039224 - DNA, 15 bp, Homo sapiens
ttctgagtccaggcc

SEQ ID NO: 1039225 - DNA, 15 bp, Homo sapiens
tttctgagtccaggc

SEQ ID NO: 1039226 - DNA, 15 bp, Homo sapiens
gtttctgagtccagg

SEQ ID NO: 1039227 - DNA, 15 bp, Homo sapiens
ggtttctgagtccag

SEQ ID NO: 1039228 - DNA, 15 bp, Homo sapiens
tggtttctgagtcca

SEQ ID NO: 1039229 - DNA, 15 bp, Homo sapiens
ctggtttctgagtcc

SEQ ID NO: 1039230 - DNA, 15 bp, Homo sapiens
tctggtttctgagtc

SEQ ID NO: 1039231 - DNA, 15 bp, Homo sapiens
ctctggtttctgagt

SEQ ID NO: 1039232 - DNA, 15 bp, Homo sapiens
tctctggtttctgag

SEQ ID NO: 1039233 - DNA, 15 bp, Homo sapiens
gtctctggtttctga

SEQ ID NO: 1039234 - DNA, 15 bp, Homo sapiens
tgtctctggtttctg

SEQ ID NO: 1039235 - DNA, 15 bp, Homo sapiens
ctgtctctggtttct

SEQ ID NO: 1039236 - DNA, 15 bp, Homo sapiens
cctgtctctggtttc

SEQ ID NO: 1039237 - DNA, 15 bp, Homo sapiens
gcctgtctctggttt

SEQ ID NO: 1039238 - DNA, 15 bp, Homo sapiens
tgcctgtctctggtt

SEQ ID NO: 1039239 - DNA, 15 bp, Homo sapiens
ctgcctgtctctggt

SEQ ID NO: 1039240 - DNA, 15 bp, Homo sapiens
tctgcctgtctctgg

SEQ ID NO: 1039241 - DNA, 15 bp, Homo sapiens
ctctgcctgtctctg

SEQ ID NO: 1039242 - DNA, 15 bp, Homo sapiens
cctctgcctgtctct

SEQ ID NO: 1039243 - DNA, 15 bp, Homo sapiens
tcctctgcctgtctc

SEQ ID NO: 1039244 - DNA, 15 bp, Homo sapiens
gtcctctgcctgtct

SEQ ID NO: 1039245 - DNA, 15 bp, Homo sapiens
agtcctctgcctgtc

SEQ ID NO: 1039246 - DNA, 15 bp, Homo sapiens
cagtcctctgcctgt

SEQ ID NO: 1039247 - DNA, 15 bp, Homo sapiens
tcagtcctctgcctg

SEQ ID NO: 1039248 - DNA, 15 bp, Homo sapiens
ctcagtcctctgcct

SEQ ID NO: 1039249 - DNA, 15 bp, Homo sapiens
gctcagtcctctgcc

SEQ ID NO: 1039250 - DNA, 15 bp, Homo sapiens
ggctcagtcctctgc

SEQ ID NO: 1039251 - DNA, 15 bp, Homo sapiens
aggctcagtcctctg

SEQ ID NO: 1039252 - DNA, 15 bp, Homo sapiens
caggctcagtcctct

SEQ ID NO: 1039253 - DNA, 15 bp, Homo sapiens
gcaggctcagtcctc

SEQ ID NO: 1039254 - DNA, 15 bp, Homo sapiens
tgcaggctcagtcct

SEQ ID NO: 1039255 - DNA, 15 bp, Homo sapiens
ttgcaggctcagtcc

SEQ ID NO: 1039256 - DNA, 15 bp, Homo sapiens
attgcaggctcagtc

SEQ ID NO: 1039257 - DNA, 15 bp, Homo sapiens
cattgcaggctcagt

SEQ ID NO: 1039258 - DNA, 15 bp, Homo sapiens
ccattgcaggctcag

SEQ ID NO: 1039259 - DNA, 15 bp, Homo sapiens
tccattgcaggctca

SEQ ID NO: 1039260 - DNA, 15 bp, Homo sapiens
ttccattgcaggctc

SEQ ID NO: 1039261 - DNA, 15 bp, Homo sapiens
attccattgcaggct

SEQ ID NO: 1039262 - DNA, 15 bp, Homo sapiens
cattccattgcaggc

SEQ ID NO: 1039263 - DNA, 15 bp, Homo sapiens
tcattccattgcagg

SEQ ID NO: 1039264 - DNA, 15 bp, Homo sapiens
gtcattccattgcag

SEQ ID NO: 1039265 - DNA, 15 bp, Homo sapiens
tgtcattccattgca

SEQ ID NO: 1039266 - DNA, 15 bp, Homo sapiens
gtgtcattccattgc

SEQ ID NO: 1039267 - DNA, 15 bp, Homo sapiens
ggtgtcattccattg

SEQ ID NO: 1039268 - DNA, 15 bp, Homo sapiens
gggtgtcattccatt

SEQ ID NO: 1039269 - DNA, 15 bp, Homo sapiens
tgggtgtcattccat

SEQ ID NO: 1039270 - DNA, 15 bp, Homo sapiens
atgggtgtcattcca

SEQ ID NO: 1039271 - DNA, 15 bp, Homo sapiens
catgggtgtcattcc

SEQ ID NO: 1039272 - DNA, 15 bp, Homo sapiens
ccatgggtgtcattc

SEQ ID NO: 1039273 - DNA, 15 bp, Homo sapiens
accatgggtgtcatt

SEQ ID NO: 1039274 - DNA, 15 bp, Homo sapiens
aaccatgggtgtcat

SEQ ID NO: 1039275 - DNA, 15 bp, Homo sapiens
aaaccatgggtgtca

SEQ ID NO: 1039276 - DNA, 15 bp, Homo sapiens
aaaaccatgggtgtc

SEQ ID NO: 1039277 - DNA, 15 bp, Homo sapiens
taaaaccatgggtgt

SEQ ID NO: 1039278 - DNA, 15 bp, Homo sapiens
ttaaaaccatgggtg

SEQ ID NO: 1039279 - DNA, 15 bp, Homo sapiens
tttaaaaccatgggt

SEQ ID NO: 1039280 - DNA, 15 bp, Homo sapiens
ctttaaaaccatggg

SEQ ID NO: 1039281 - DNA, 15 bp, Homo sapiens
cctttaaaaccatgg

SEQ ID NO: 1039282 - DNA, 15 bp, Homo sapiens
tcctttaaaaccatg

SEQ ID NO: 1039283 - DNA, 15 bp, Homo sapiens
ttcctttaaaaccat

SEQ ID NO: 1039284 - DNA, 15 bp, Homo sapiens
cttcctttaaaacca

SEQ ID NO: 1039285 - DNA, 15 bp, Homo sapiens
tcttcctttaaaacc

SEQ ID NO: 1039286 - DNA, 15 bp, Homo sapiens
ctcttcctttaaaac

SEQ ID NO: 1039287 - DNA, 15 bp, Homo sapiens
actcttcctttaaaa

SEQ ID NO: 1039288 - DNA, 15 bp, Homo sapiens
cactcttcctttaaa

SEQ ID NO: 1039289 - DNA, 15 bp, Homo sapiens
ccactcttcctttaa

SEQ ID NO: 1039290 - DNA, 15 bp, Homo sapiens
tccactcttccttta

SEQ ID NO: 1039291 - DNA, 15 bp, Homo sapiens
gtccactcttccttt

SEQ ID NO: 1039292 - DNA, 15 bp, Homo sapiens
tgtccactcttcctt

SEQ ID NO: 1039293 - DNA, 15 bp, Homo sapiens
gtgtccactcttcct

SEQ ID NO: 1039294 - DNA, 15 bp, Homo sapiens
cgtgtccactcttcc

SEQ ID NO: 1039295 - DNA, 15 bp, Homo sapiens
gcgtgtccactcttc

SEQ ID NO: 1039296 - DNA, 15 bp, Homo sapiens
tgcgtgtccactctt

SEQ ID NO: 1039297 - DNA, 15 bp, Homo sapiens
ctgcgtgtccactct

SEQ ID NO: 1039298 - DNA, 15 bp, Homo sapiens
tctgcgtgtccactc

SEQ ID NO: 1039299 - DNA, 15 bp, Homo sapiens
atctgcgtgtccact

SEQ ID NO: 1039300 - DNA, 15 bp, Homo sapiens
aatctgcgtgtccac

SEQ ID NO: 1039301 - DNA, 15 bp, Homo sapiens
taatctgcgtgtcca

SEQ ID NO: 1039302 - DNA, 15 bp, Homo sapiens
ctaatctgcgtgtcc

SEQ ID NO: 1039303 - DNA, 15 bp, Homo sapiens
actaatctgcgtgtc

SEQ ID NO: 1039304 - DNA, 15 bp, Homo sapiens
cactaatctgcgtgt

SEQ ID NO: 1039305 - DNA, 15 bp, Homo sapiens
tcactaatctgcgtg

SEQ ID NO: 1039306 - DNA, 15 bp, Homo sapiens
ttcactaatctgcgt

SEQ ID NO: 1039307 - DNA, 15 bp, Homo sapiens
tttcactaatctgcg

SEQ ID NO: 1039308 - DNA, 15 bp, Homo sapiens
atttcactaatctgc

SEQ ID NO: 1039309 - DNA, 15 bp, Homo sapiens
gatttcactaatctg

SEQ ID NO: 1039310 - DNA, 15 bp, Homo sapiens
cgatttcactaatct

SEQ ID NO: 1039311 - DNA, 15 bp, Homo sapiens
ccgatttcactaatc

SEQ ID NO: 1039312 - DNA, 15 bp, Homo sapiens
gccgatttcactaat

SEQ ID NO: 1039313 - DNA, 15 bp, Homo sapiens
agccgatttcactaa

SEQ ID NO: 1039314 - DNA, 15 bp, Homo sapiens
gagccgatttcacta

SEQ ID NO: 1039315 - DNA, 15 bp, Homo sapiens
agagccgatttcact

SEQ ID NO: 1039316 - DNA, 15 bp, Homo sapiens
cagagccgatttcac

SEQ ID NO: 1039317 - DNA, 15 bp, Homo sapiens
acagagccgatttca

SEQ ID NO: 1039318 - DNA, 15 bp, Homo sapiens
tacagagccgatttc

SEQ ID NO: 1039319 - DNA, 15 bp, Homo sapiens
gtacagagccgattt

SEQ ID NO: 1039320 - DNA, 15 bp, Homo sapiens
agtacagagccgatt

SEQ ID NO: 1039321 - DNA, 15 bp, Homo sapiens
gagtacagagccgat

SEQ ID NO: 1039322 - DNA, 15 bp, Homo sapiens
agagtacagagccga

SEQ ID NO: 1039323 - DNA, 15 bp, Homo sapiens
tagagtacagagccg

SEQ ID NO: 1039324 - DNA, 15 bp, Homo sapiens
ctagagtacagagcc

SEQ ID NO: 1039325 - DNA, 15 bp, Homo sapiens
cctagagtacagagc

SEQ ID NO: 1039326 - DNA, 15 bp, Homo sapiens
tcctagagtacagag

SEQ ID NO: 1039327 - DNA, 15 bp, Homo sapiens
ctcctagagtacaga

SEQ ID NO: 1039328 - DNA, 15 bp, Homo sapiens
gctcctagagtacag

SEQ ID NO: 1039329 - DNA, 15 bp, Homo sapiens
ggctcctagagtaca

SEQ ID NO: 1039330 - DNA, 15 bp, Homo sapiens
gggctcctagagtac

SEQ ID NO: 1039331 - DNA, 15 bp, Homo sapiens
tgggctcctagagta

SEQ ID NO: 1039332 - DNA, 15 bp, Homo sapiens
atgggctcctagagt

SEQ ID NO: 1039333 - DNA, 15 bp, Homo sapiens
catgggctcctagag

SEQ ID NO: 1039334 - DNA, 15 bp, Homo sapiens
ccatgggctcctaga

SEQ ID NO: 1039335 - DNA, 15 bp, Homo sapiens
cccatgggctcctag

SEQ ID NO: 1039336 - DNA, 15 bp, Homo sapiens
tcccatgggctccta

SEQ ID NO: 1039337 - DNA, 15 bp, Homo sapiens
atcccatgggctcct

SEQ ID NO: 1039338 - DNA, 15 bp, Homo sapiens
aatcccatgggctcc

SEQ ID NO: 1039339 - DNA, 15 bp, Homo sapiens
aaatcccatgggctc

SEQ ID NO: 1039340 - DNA, 15 bp, Homo sapiens
caaatcccatgggct

SEQ ID NO: 1039341 - DNA, 15 bp, Homo sapiens
gcaaatcccatgggc

SEQ ID NO: 1039342 - DNA, 15 bp, Homo sapiens
tgcaaatcccatggg

SEQ ID NO: 1039343 - DNA, 15 bp, Homo sapiens
atgcaaatcccatgg

SEQ ID NO: 1039344 - DNA, 15 bp, Homo sapiens
aatgcaaatcccatg

SEQ ID NO: 1039345 - DNA, 15 bp, Homo sapiens
aaatgcaaatcccat

SEQ ID NO: 1039346 - DNA, 15 bp, Homo sapiens
gaaatgcaaatccca

SEQ ID NO: 1039347 - DNA, 15 bp, Homo sapiens
tgaaatgcaaatccc

SEQ ID NO: 1039348 - DNA, 15 bp, Homo sapiens
ctgaaatgcaaatcc

SEQ ID NO: 1039349 - DNA, 15 bp, Homo sapiens
cctgaaatgcaaatc

SEQ ID NO: 1039350 - DNA, 15 bp, Homo sapiens
gcctgaaatgcaaat

SEQ ID NO: 1039351 - DNA, 15 bp, Homo sapiens
agagcctgaaatgca

SEQ ID NO: 1039352 - DNA, 15 bp, Homo sapiens
tagagcctgaaatgc

SEQ ID NO: 1039353 - DNA, 15 bp, Homo sapiens
atagagcctgaaatg

SEQ ID NO: 1039354 - DNA, 15 bp, Homo sapiens
gatagagcctgaaat

SEQ ID NO: 1039355 - DNA, 15 bp, Homo sapiens
tgatagagcctgaaa

SEQ ID NO: 1039356 - DNA, 15 bp, Homo sapiens
atgatagagcctgaa

SEQ ID NO: 1039357 - DNA, 15 bp, Homo sapiens
gatgatagagcctga

SEQ ID NO: 1039358 - DNA, 15 bp, Homo sapiens
tgatgatagagcctg

SEQ ID NO: 1039359 - DNA, 15 bp, Homo sapiens
gtgatgatagagcct

SEQ ID NO: 1039360 - DNA, 15 bp, Homo sapiens
ggtgatgatagagcc

SEQ ID NO: 1039361 - DNA, 15 bp, Homo sapiens
tggtgatgatagagc

SEQ ID NO: 1039362 - DNA, 15 bp, Homo sapiens
ttggtgatgatagag

SEQ ID NO: 1039363 - DNA, 15 bp, Homo sapiens
tttggtgatgataga

SEQ ID NO: 1039364 - DNA, 15 bp, Homo sapiens
atttggtgatgatag

SEQ ID NO: 1039365 - DNA, 15 bp, Homo sapiens
gatttggtgatgata

SEQ ID NO: 1039366 - DNA, 15 bp, Homo sapiens
agatttggtgatgat

SEQ ID NO: 1039367 - DNA, 15 bp, Homo sapiens
tagatttggtgatga

SEQ ID NO: 1039368 - DNA, 15 bp, Homo sapiens
gtagatttggtgatg

SEQ ID NO: 1039369 - DNA, 15 bp, Homo sapiens
agtagatttggtgat

SEQ ID NO: 1039370 - DNA, 15 bp, Homo sapiens
aagtagatttggtga

SEQ ID NO: 1039371 - DNA, 15 bp, Homo sapiens
taagtagatttggtg

SEQ ID NO: 1039372 - DNA, 15 bp, Homo sapiens
ataagtagatttggt

SEQ ID NO: 1039373 - DNA, 15 bp, Homo sapiens
aataagtagatttgg

SEQ ID NO: 1039374 - DNA, 15 bp, Homo sapiens
taataagtagatttg

SEQ ID NO: 1039375 - DNA, 15 bp, Homo sapiens
ctaataagtagattt

SEQ ID NO: 1039376 - DNA, 15 bp, Homo sapiens
actaataagtagatt

SEQ ID NO: 1039377 - DNA, 15 bp, Homo sapiens
tactaataagtagat

SEQ ID NO: 1039378 - DNA, 15 bp, Homo sapiens
ctactaataagtaga

SEQ ID NO: 1039379 - DNA, 15 bp, Homo sapiens
actactaataagtag

SEQ ID NO: 1039380 - DNA, 15 bp, Homo sapiens
aactactaataagta

SEQ ID NO: 1039381 - DNA, 15 bp, Homo sapiens
aaactactaataagt

SEQ ID NO: 1039382 - DNA, 15 bp, Homo sapiens
taaactactaataag

SEQ ID NO: 1039383 - DNA, 15 bp, Homo sapiens
ctaaactactaataa

SEQ ID NO: 1039384 - DNA, 15 bp, Homo sapiens
cctaaactactaata

SEQ ID NO: 1039385 - DNA, 15 bp, Homo sapiens
gcctaaactactaat

SEQ ID NO: 1039386 - DNA, 15 bp, Homo sapiens
tgcctaaactactaa

SEQ ID NO: 1039387 - DNA, 15 bp, Homo sapiens
ttgcctaaactacta

SEQ ID NO: 1039388 - DNA, 15 bp, Homo sapiens
gttgcctaaactact

SEQ ID NO: 1039389 - DNA, 15 bp, Homo sapiens
agttgcctaaactac

SEQ ID NO: 1039390 - DNA, 15 bp, Homo sapiens
tagttgcctaaacta

SEQ ID NO: 1039391 - DNA, 15 bp, Homo sapiens
ttagttgcctaaact

SEQ ID NO: 1039392 - DNA, 15 bp, Homo sapiens
attagttgcctaaac

SEQ ID NO: 1039393 - DNA, 15 bp, Homo sapiens
gattagttgcctaaa

SEQ ID NO: 1039394 - DNA, 15 bp, Homo sapiens
agattagttgcctaa

SEQ ID NO: 1039395 - DNA, 15 bp, Homo sapiens
aagattagttgccta

SEQ ID NO: 1039396 - DNA, 15 bp, Homo sapiens
aaagattagttgcct

SEQ ID NO: 1039397 - DNA, 15 bp, Homo sapiens
aaaagattagttgcc

SEQ ID NO: 1039398 - DNA, 15 bp, Homo sapiens
taaaagattagttgc

SEQ ID NO: 1039399 - DNA, 15 bp, Homo sapiens
ttaaaagattagttg

SEQ ID NO: 1039400 - DNA, 15 bp, Homo sapiens
gtttaaaagattagt

SEQ ID NO: 1039401 - DNA, 15 bp, Homo sapiens
tgtttaaaagattag

SEQ ID NO: 1039402 - DNA, 15 bp, Homo sapiens
ttgtttaaaagatta

SEQ ID NO: 1039403 - DNA, 15 bp, Homo sapiens
attgtttaaaagatt

SEQ ID NO: 1039404 - DNA, 15 bp, Homo sapiens
gattgtttaaaagat

SEQ ID NO: 1039405 - DNA, 15 bp, Homo sapiens
tgattgtttaaaaga

SEQ ID NO: 1039406 - DNA, 15 bp, Homo sapiens
ttgattgtttaaaag

SEQ ID NO: 1039407 - DNA, 15 bp, Homo sapiens
gttgattgtttaaaa

SEQ ID NO: 1039408 - DNA, 15 bp, Homo sapiens
tgttgattgtttaaa

SEQ ID NO: 1039409 - DNA, 15 bp, Homo sapiens
atgttgattgtttaa

SEQ ID NO: 1039410 - DNA, 15 bp, Homo sapiens
aatgttgattgttta

SEQ ID NO: 1039411 - DNA, 15 bp, Homo sapiens
gaatgttgattgttt

SEQ ID NO: 1039412 - DNA, 15 bp, Homo sapiens
cgaatgttgattgtt

SEQ ID NO: 1039413 - DNA, 15 bp, Homo sapiens
ccgaatgttgattgt

SEQ ID NO: 1039414 - DNA, 15 bp, Homo sapiens
tccgaatgttgattg

SEQ ID NO: 1039415 - DNA, 15 bp, Homo sapiens
ctccgaatgttgatt

SEQ ID NO: 1039416 - DNA, 15 bp, Homo sapiens
tctccgaatgttgat

SEQ ID NO: 1039417 - DNA, 15 bp, Homo sapiens
ttctccgaatgttga

SEQ ID NO: 1039418 - DNA, 15 bp, Homo sapiens
cttctccgaatgttg

SEQ ID NO: 1039419 - DNA, 15 bp, Homo sapiens
acttctccgaatgtt

SEQ ID NO: 1039420 - DNA, 15 bp, Homo sapiens
tacttctccgaatgt

SEQ ID NO: 1039421 - DNA, 15 bp, Homo sapiens
ctacttctccgaatg

SEQ ID NO: 1039422 - DNA, 15 bp, Homo sapiens
cctacttctccgaat

SEQ ID NO: 1039423 - DNA, 15 bp, Homo sapiens
acctacttctccgaa

SEQ ID NO: 1039424 - DNA, 15 bp, Homo sapiens
tacctacttctccga

SEQ ID NO: 1039425 - DNA, 15 bp, Homo sapiens
atacctacttctccg

SEQ ID NO: 1039426 - DNA, 15 bp, Homo sapiens
gatacctacttctcc

SEQ ID NO: 1039427 - DNA, 15 bp, Homo sapiens
cgatacctacttctc

SEQ ID NO: 1039428 - DNA, 15 bp, Homo sapiens
gcgatacctacttct

SEQ ID NO: 1039429 - DNA, 15 bp, Homo sapiens
agcgatacctacttc

SEQ ID NO: 1039430 - DNA, 15 bp, Homo sapiens
gagcgatacctactt

SEQ ID NO: 1039431 - DNA, 15 bp, Homo sapiens
agagcgatacctact

SEQ ID NO: 1039432 - DNA, 15 bp, Homo sapiens
cagagcgatacctac

SEQ ID NO: 1039433 - DNA, 15 bp, Homo sapiens
ccagagcgataccta

SEQ ID NO: 1039434 - DNA, 15 bp, Homo sapiens
gccagagcgatacct

SEQ ID NO: 1039435 - DNA, 15 bp, Homo sapiens
agccagagcgatacc

SEQ ID NO: 1039436 - DNA, 15 bp, Homo sapiens
aagccagagcgatac

SEQ ID NO: 1039437 - DNA, 15 bp, Homo sapiens
aaagccagagcgata

SEQ ID NO: 1039438 - DNA, 15 bp, Homo sapiens
taaagccagagcgat

SEQ ID NO: 1039439 - DNA, 15 bp, Homo sapiens
ataaagccagagcga

SEQ ID NO: 1039440 - DNA, 15 bp, Homo sapiens
gataaagccagagcg

SEQ ID NO: 1039441 - DNA, 15 bp, Homo sapiens
agataaagccagagc

SEQ ID NO: 1039442 - DNA, 15 bp, Homo sapiens
cagataaagccagag

SEQ ID NO: 1039443 - DNA, 15 bp, Homo sapiens
tcagataaagccaga

SEQ ID NO: 1039444 - DNA, 15 bp, Homo sapiens
ttcagataaagccag

SEQ ID NO: 1039445 - DNA, 15 bp, Homo sapiens
gttcagataaagcca

SEQ ID NO: 1039446 - DNA, 15 bp, Homo sapiens
agttcagataaagcc

SEQ ID NO: 1039447 - DNA, 15 bp, Homo sapiens
gagttcagataaagc

SEQ ID NO: 1039448 - DNA, 15 bp, Homo sapiens
ggagttcagataaag

SEQ ID NO: 1039449 - DNA, 15 bp, Homo sapiens
gggagttcagataaa

SEQ ID NO: 1039450 - DNA, 15 bp, Homo sapiens
agggagttcagataa

SEQ ID NO: 1039451 - DNA, 15 bp, Homo sapiens
gagggagttcagata

SEQ ID NO: 1039452 - DNA, 15 bp, Homo sapiens
agagggagttcagat

SEQ ID NO: 1039453 - DNA, 15 bp, Homo sapiens
aagagggagttcaga

SEQ ID NO: 1039454 - DNA, 15 bp, Homo sapiens
caagagggagttcag

SEQ ID NO: 1039455 - DNA, 15 bp, Homo sapiens
tcaagagggagttca

SEQ ID NO: 1039456 - DNA, 15 bp, Homo sapiens
gtcaagagggagttc

SEQ ID NO: 1039457 - DNA, 15 bp, Homo sapiens
ggtcaagagggagtt

SEQ ID NO: 1039458 - DNA, 15 bp, Homo sapiens
gggtcaagagggagt

SEQ ID NO: 1039459 - DNA, 15 bp, Homo sapiens
tgggtcaagagggag

SEQ ID NO: 1039460 - DNA, 15 bp, Homo sapiens
atgggtcaagaggga

SEQ ID NO: 1039461 - DNA, 15 bp, Homo sapiens
gatgggtcaagaggg

SEQ ID NO: 1039462 - DNA, 15 bp, Homo sapiens
agatgggtcaagagg

SEQ ID NO: 1039463 - DNA, 15 bp, Homo sapiens
gagatgggtcaagag

SEQ ID NO: 1039464 - DNA, 15 bp, Homo sapiens
ggagatgggtcaaga

SEQ ID NO: 1039465 - DNA, 15 bp, Homo sapiens
tggagatgggtcaag

SEQ ID NO: 1039466 - DNA, 15 bp, Homo sapiens
ttggagatgggtcaa

SEQ ID NO: 1039467 - DNA, 15 bp, Homo sapiens
gttggagatgggtca

SEQ ID NO: 1039468 - DNA, 15 bp, Homo sapiens
ggttggagatgggtc

SEQ ID NO: 1039469 - DNA, 15 bp, Homo sapiens
gggttggagatgggt

SEQ ID NO: 1039470 - DNA, 15 bp, Homo sapiens
tgggttggagatggg

SEQ ID NO: 1039471 - DNA, 15 bp, Homo sapiens
ttgggttggagatgg

SEQ ID NO: 1039472 - DNA, 15 bp, Homo sapiens
attgggttggagatg

SEQ ID NO: 1039473 - DNA, 15 bp, Homo sapiens
cattgggttggagat

SEQ ID NO: 1039474 - DNA, 15 bp, Homo sapiens
ccattgggttggaga

SEQ ID NO: 1039475 - DNA, 15 bp, Homo sapiens
accattgggttggag

SEQ ID NO: 1039476 - DNA, 15 bp, Homo sapiens
aaccattgggttgga

SEQ ID NO: 1039477 - DNA, 15 bp, Homo sapiens
gaaccattgggttgg

SEQ ID NO: 1039478 - DNA, 15 bp, Homo sapiens
agaaccattgggttg

SEQ ID NO: 1039479 - DNA, 15 bp, Homo sapiens
gagaaccattgggtt

SEQ ID NO: 1039480 - DNA, 15 bp, Homo sapiens
tgagaaccattgggt

SEQ ID NO: 1039481 - DNA, 15 bp, Homo sapiens
gtgagaaccattggg

SEQ ID NO: 1039482 - DNA, 15 bp, Homo sapiens
cgtgagaaccattgg

SEQ ID NO: 1039483 - DNA, 15 bp, Homo sapiens
gcgtgagaaccattg

SEQ ID NO: 1039484 - DNA, 15 bp, Homo sapiens
ggcgtgagaaccatt

SEQ ID NO: 1039485 - DNA, 15 bp, Homo sapiens
tggcgtgagaaccat

SEQ ID NO: 1039486 - DNA, 15 bp, Homo sapiens
atggcgtgagaacca

SEQ ID NO: 1039487 - DNA, 15 bp, Homo sapiens
aatggcgtgagaacc

SEQ ID NO: 1039488 - DNA, 15 bp, Homo sapiens
aaatggcgtgagaac

SEQ ID NO: 1039489 - DNA, 15 bp, Homo sapiens
gaaatggcgtgagaa

SEQ ID NO: 1039490 - DNA, 15 bp, Homo sapiens
agaaatggcgtgaga

SEQ ID NO: 1039491 - DNA, 15 bp, Homo sapiens
gagaaatggcgtgag

SEQ ID NO: 1039492 - DNA, 15 bp, Homo sapiens
tgagaaatggcgtga

SEQ ID NO: 1039493 - DNA, 15 bp, Homo sapiens
ctgagaaatggcgtg

SEQ ID NO: 1039494 - DNA, 15 bp, Homo sapiens
gctgagaaatggcgt

SEQ ID NO: 1039495 - DNA, 15 bp, Homo sapiens
tgctgagaaatggcg

SEQ ID NO: 1039496 - DNA, 15 bp, Homo sapiens
atgctgagaaatggc

SEQ ID NO: 1039497 - DNA, 15 bp, Homo sapiens
aatgctgagaaatgg

SEQ ID NO: 1039498 - DNA, 15 bp, Homo sapiens
caatgctgagaaatg

SEQ ID NO: 1039499 - DNA, 15 bp, Homo sapiens
ccaatgctgagaaat

SEQ ID NO: 1039500 - DNA, 15 bp, Homo sapiens
gccaatgctgagaaa

SEQ ID NO: 1039501 - DNA, 15 bp, Homo sapiens
ggccaatgctgagaa

SEQ ID NO: 1039502 - DNA, 15 bp, Homo sapiens
aggccaatgctgaga

SEQ ID NO: 1039503 - DNA, 15 bp, Homo sapiens
aaggccaatgctgag

SEQ ID NO: 1039504 - DNA, 15 bp, Homo sapiens
gaaggccaatgctga

SEQ ID NO: 1039505 - DNA, 15 bp, Homo sapiens
tgaaggccaatgctg

SEQ ID NO: 1039506 - DNA, 15 bp, Homo sapiens
atgaaggccaatgct

SEQ ID NO: 1039507 - DNA, 15 bp, Homo sapiens
aatgaaggccaatgc

SEQ ID NO: 1039508 - DNA, 15 bp, Homo sapiens
taatgaaggccaatg

SEQ ID NO: 1039509 - DNA, 15 bp, Homo sapiens
ttaatgaaggccaat

SEQ ID NO: 1039510 - DNA, 15 bp, Homo sapiens
tttaatgaaggccaa

SEQ ID NO: 1039511 - DNA, 15 bp, Homo sapiens
ttttaatgaaggcca

SEQ ID NO: 1039512 - DNA, 15 bp, Homo sapiens
attttaatgaaggcc

SEQ ID NO: 1039513 - DNA, 15 bp, Homo sapiens
aattttaatgaaggc

SEQ ID NO: 1039514 - DNA, 15 bp, Homo sapiens
aaattttaatgaagg

SEQ ID NO: 1039515 - DNA, 15 bp, Homo sapiens
aaaattttaatgaag

SEQ ID NO: 1039516 - DNA, 15 bp, Homo sapiens
aaaaattttaatgaa

SEQ ID NO: 1039517 - DNA, 15 bp, Homo sapiens
aaaaaattttaatga

SEQ ID NO: 1039518 - DNA, 15 bp, Homo sapiens
aaaaaaattttaatg

SEQ ID NO: 1039519 - DNA, 15 bp, Homo sapiens
aaaaaaaattttaat

SEQ ID NO: 1039520 - DNA, 15 bp, Homo sapiens
taaaaaaaattttaa

SEQ ID NO: 1039521 - DNA, 15 bp, Homo sapiens
ttaaaaaaaatttta

SEQ ID NO: 1039522 - DNA, 15 bp, Homo sapiens
gttaaaaaaaatttt

SEQ ID NO: 1039523 - DNA, 15 bp, Homo sapiens
agttaaaaaaaattt

SEQ ID NO: 1039524 - DNA, 15 bp, Homo sapiens
aagttaaaaaaaatt

SEQ ID NO: 1039525 - DNA, 15 bp, Homo sapiens
aaagttaaaaaaaat

SEQ ID NO: 1039526 - DNA, 15 bp, Homo sapiens
aaaaagttaaaaaaa

SEQ ID NO: 1039527 - DNA, 15 bp, Homo sapiens
aaaaaagttaaaaaa

SEQ ID NO: 1039528 - DNA, 15 bp, Homo sapiens
aaaaaaagttaaaaa

SEQ ID NO: 1039529 - DNA, 15 bp, Homo sapiens
aaaaaaaagttaaaa

SEQ ID NO: 1039530 - DNA, 15 bp, Homo sapiens
aaaaaaaaagttaaa

SEQ ID NO: 1039531 - DNA, 15 bp, Homo sapiens
aaaaaaaaaagttaa

SEQ ID NO: 1039532 - DNA, 15 bp, Homo sapiens
aaaaaaaaaaagtta

SEQ ID NO: 1039533 - DNA, 15 bp, Homo sapiens
gtgtctcaaaaaaaa

SEQ ID NO: 1039534 - DNA, 15 bp, Homo sapiens
agtgtctcaaaaaaa

SEQ ID NO: 1039535 - DNA, 15 bp, Homo sapiens
cagtgtctcaaaaaa

SEQ ID NO: 1039536 - DNA, 15 bp, Homo sapiens
acagtgtctcaaaaa

SEQ ID NO: 1039537 - DNA, 15 bp, Homo sapiens
gacagtgtctcaaaa

SEQ ID NO: 1039538 - DNA, 15 bp, Homo sapiens
agacagtgtctcaaa

SEQ ID NO: 1039539 - DNA, 15 bp, Homo sapiens
aagacagtgtctcaa

SEQ ID NO: 1039540 - DNA, 15 bp, Homo sapiens
taagacagtgtctca

SEQ ID NO: 1039541 - DNA, 15 bp, Homo sapiens
gtaagacagtgtctc

SEQ ID NO: 1039542 - DNA, 15 bp, Homo sapiens
agtaagacagtgtct

SEQ ID NO: 1039543 - DNA, 15 bp, Homo sapiens
gagtaagacagtgtc

SEQ ID NO: 1039544 - DNA, 15 bp, Homo sapiens
agagtaagacagtgt

SEQ ID NO: 1039545 - DNA, 15 bp, Homo sapiens
cagagtaagacagtg

SEQ ID NO: 1039546 - DNA, 15 bp, Homo sapiens
acagagtaagacagt

SEQ ID NO: 1039547 - DNA, 15 bp, Homo sapiens
aacagagtaagacag

SEQ ID NO: 1039548 - DNA, 15 bp, Homo sapiens
caacagagtaagaca

SEQ ID NO: 1039549 - DNA, 15 bp, Homo sapiens
tcctgggcaacagag

SEQ ID NO: 1039550 - DNA, 15 bp, Homo sapiens
atcctgggcaacaga

SEQ ID NO: 1039551 - DNA, 15 bp, Homo sapiens
catcctgggcaacag

SEQ ID NO: 1039552 - DNA, 15 bp, Homo sapiens
atccatcctgggcaa

SEQ ID NO: 1039553 - DNA, 15 bp, Homo sapiens
catccatcctgggca

SEQ ID NO: 1039554 - DNA, 15 bp, Homo sapiens
ccatccatcctgggc

SEQ ID NO: 1039555 - DNA, 15 bp, Homo sapiens
accatccatcctggg

SEQ ID NO: 1039556 - DNA, 15 bp, Homo sapiens
taccatccatcctgg

SEQ ID NO: 1039557 - DNA, 15 bp, Homo sapiens
ataccatccatcctg

SEQ ID NO: 1039558 - DNA, 15 bp, Homo sapiens
cataccatccatcct

SEQ ID NO: 1039559 - DNA, 15 bp, Homo sapiens
tcataccatccatcc

SEQ ID NO: 1039560 - DNA, 15 bp, Homo sapiens
atcataccatccatc

SEQ ID NO: 1039561 - DNA, 15 bp, Homo sapiens
gatcataccatccat

SEQ ID NO: 1039562 - DNA, 15 bp, Homo sapiens
tgatcataccatcca

SEQ ID NO: 1039563 - DNA, 15 bp, Homo sapiens
atgatcataccatcc

SEQ ID NO: 1039564 - DNA, 15 bp, Homo sapiens
catgatcataccatc

SEQ ID NO: 1039565 - DNA, 15 bp, Homo sapiens
ccatgatcataccat

SEQ ID NO: 1039566 - DNA, 15 bp, Homo sapiens
gccatgatcatacca

SEQ ID NO: 1039567 - DNA, 15 bp, Homo sapiens
agccatgatcatacc

SEQ ID NO: 1039568 - DNA, 15 bp, Homo sapiens
gagccatgatcatac

SEQ ID NO: 1039569 - DNA, 15 bp, Homo sapiens
tgagccatgatcata

SEQ ID NO: 1039570 - DNA, 15 bp, Homo sapiens
gtggaggctgcagtg

SEQ ID NO: 1039571 - DNA, 15 bp, Homo sapiens
ggtggaggctgcagt

SEQ ID NO: 1039572 - DNA, 15 bp, Homo sapiens
aggtggaggctgcag

SEQ ID NO: 1039573 - DNA, 15 bp, Homo sapiens
gaggtggaggctgca

SEQ ID NO: 1039574 - DNA, 15 bp, Homo sapiens
ggaggtggaggctgc

SEQ ID NO: 1039575 - DNA, 15 bp, Homo sapiens
aggaggtggaggctg

SEQ ID NO: 1039576 - DNA, 15 bp, Homo sapiens
caggaggtggaggct

SEQ ID NO: 1039577 - DNA, 15 bp, Homo sapiens
ccaggaggtggaggc

SEQ ID NO: 1039578 - DNA, 15 bp, Homo sapiens
gcccaggaggtggag

SEQ ID NO: 1039579 - DNA, 15 bp, Homo sapiens
agcccaggaggtgga

SEQ ID NO: 1039580 - DNA, 15 bp, Homo sapiens
gagcccaggaggtgg

SEQ ID NO: 1039581 - DNA, 15 bp, Homo sapiens
tgagcccaggaggtg

SEQ ID NO: 1039582 - DNA, 15 bp, Homo sapiens
acctgagcccaggag

SEQ ID NO: 1039583 - DNA, 15 bp, Homo sapiens
cacctgagcccagga

SEQ ID NO: 1039584 - DNA, 15 bp, Homo sapiens
tcacctgagcccagg

SEQ ID NO: 1039585 - DNA, 15 bp, Homo sapiens
atcacctgagcccag

SEQ ID NO: 1039586 - DNA, 15 bp, Homo sapiens
gatcacctgagccca

SEQ ID NO: 1039587 - DNA, 15 bp, Homo sapiens
ggatcacctgagccc

SEQ ID NO: 1039588 - DNA, 15 bp, Homo sapiens
agaggatcacctgag

SEQ ID NO: 1039589 - DNA, 15 bp, Homo sapiens
gagaggatcacctga

SEQ ID NO: 1039590 - DNA, 15 bp, Homo sapiens
tgagaggatcacctg

SEQ ID NO: 1039591 - DNA, 15 bp, Homo sapiens
gtgagaggatcacct

SEQ ID NO: 1039592 - DNA, 15 bp, Homo sapiens
ggtgagaggatcacc

SEQ ID NO: 1039593 - DNA, 15 bp, Homo sapiens
aggtgagaggatcac

SEQ ID NO: 1039594 - DNA, 15 bp, Homo sapiens
gaggtgagaggatca

SEQ ID NO: 1039595 - DNA, 15 bp, Homo sapiens
tgaggtgagaggatc

SEQ ID NO: 1039596 - DNA, 15 bp, Homo sapiens
ctgaggtgagaggat

SEQ ID NO: 1039597 - DNA, 15 bp, Homo sapiens
actgaggtgagagga

SEQ ID NO: 1039598 - DNA, 15 bp, Homo sapiens
aactgaggtgagagg

SEQ ID NO: 1039599 - DNA, 15 bp, Homo sapiens
aaactgaggtgagag

SEQ ID NO: 1039600 - DNA, 15 bp, Homo sapiens
aaaactgaggtgaga

SEQ ID NO: 1039601 - DNA, 15 bp, Homo sapiens
gaaaactgaggtgag

SEQ ID NO: 1039602 - DNA, 15 bp, Homo sapiens
ggaaaactgaggtga

SEQ ID NO: 1039603 - DNA, 15 bp, Homo sapiens
tggaaaactgaggtg

SEQ ID NO: 1039604 - DNA, 15 bp, Homo sapiens
ttggaaaactgaggt

SEQ ID NO: 1039605 - DNA, 15 bp, Homo sapiens
cttggaaaactgagg

SEQ ID NO: 1039606 - DNA, 15 bp, Homo sapiens
acttggaaaactgag

SEQ ID NO: 1039607 - DNA, 15 bp, Homo sapiens
tacttggaaaactga

SEQ ID NO: 1039608 - DNA, 15 bp, Homo sapiens
ctacttggaaaactg

SEQ ID NO: 1039609 - DNA, 15 bp, Homo sapiens
gctacttggaaaact

SEQ ID NO: 1039610 - DNA, 15 bp, Homo sapiens
agctacttggaaaac

SEQ ID NO: 1039611 - DNA, 15 bp, Homo sapiens
tagctacttggaaaa

SEQ ID NO: 1039612 - DNA, 15 bp, Homo sapiens
ctagctacttggaaa

SEQ ID NO: 1039613 - DNA, 15 bp, Homo sapiens
cctagctacttggaa

SEQ ID NO: 1039614 - DNA, 15 bp, Homo sapiens
tcctagctacttgga

SEQ ID NO: 1039615 - DNA, 15 bp, Homo sapiens
ggtcctagctacttg

SEQ ID NO: 1039616 - DNA, 15 bp, Homo sapiens
tggtcctagctactt

SEQ ID NO: 1039617 - DNA, 15 bp, Homo sapiens
gtggtcctagctact

SEQ ID NO: 1039618 - DNA, 15 bp, Homo sapiens
tgtggtcctagctac

SEQ ID NO: 1039619 - DNA, 15 bp, Homo sapiens
ctgtggtcctagcta

SEQ ID NO: 1039620 - DNA, 15 bp, Homo sapiens
tctgtggtcctagct

SEQ ID NO: 1039621 - DNA, 15 bp, Homo sapiens
gtctgtggtcctagc

SEQ ID NO: 1039622 - DNA, 15 bp, Homo sapiens
tgtctgtggtcctag

SEQ ID NO: 1039623 - DNA, 15 bp, Homo sapiens
gtgtctgtggtccta

SEQ ID NO: 1039624 - DNA, 15 bp, Homo sapiens
tgtgtctgtggtcct

SEQ ID NO: 1039625 - DNA, 15 bp, Homo sapiens
gtgtgtctgtggtcc

SEQ ID NO: 1039626 - DNA, 15 bp, Homo sapiens
ggtgtgtctgtggtc

SEQ ID NO: 1039627 - DNA, 15 bp, Homo sapiens
tggtgtgtctgtggt

SEQ ID NO: 1039628 - DNA, 15 bp, Homo sapiens
gtggtgtgtctgtgg

SEQ ID NO: 1039629 - DNA, 15 bp, Homo sapiens
ggtggtgtgtctgtg

SEQ ID NO: 1039630 - DNA, 15 bp, Homo sapiens
tggtggtgtgtctgt

SEQ ID NO: 1039631 - DNA, 15 bp, Homo sapiens
gtggtggtgtgtctg

SEQ ID NO: 1039632 - DNA, 15 bp, Homo sapiens
tgtggtggtgtgtct

SEQ ID NO: 1039633 - DNA, 15 bp, Homo sapiens
gtgtggtggtgtgtc

SEQ ID NO: 1039634 - DNA, 15 bp, Homo sapiens
ggtgtggtggtgtgt

SEQ ID NO: 1039635 - DNA, 15 bp, Homo sapiens
aaggtgtggtggtgt

SEQ ID NO: 1039636 - DNA, 15 bp, Homo sapiens
aaaggtgtggtggtg

SEQ ID NO: 1039637 - DNA, 15 bp, Homo sapiens
aaaaggtgtggtggt

SEQ ID NO: 1039638 - DNA, 15 bp, Homo sapiens
aaaaaggtgtggtgg

SEQ ID NO: 1039639 - DNA, 15 bp, Homo sapiens
aaaaaaggtgtggtg

SEQ ID NO: 1039640 - DNA, 15 bp, Homo sapiens
aaaaaaaggtgtggt

SEQ ID NO: 1039641 - DNA, 15 bp, Homo sapiens
aaaaaaaaggtgtgg

SEQ ID NO: 1039642 - DNA, 15 bp, Homo sapiens
taaaaaaaaggtgtg

SEQ ID NO: 1039643 - DNA, 15 bp, Homo sapiens
ataaaaaaaaggtgt

SEQ ID NO: 1039644 - DNA, 15 bp, Homo sapiens
aataaaaaaaaggtg

SEQ ID NO: 1039645 - DNA, 15 bp, Homo sapiens
aaataaaaaaaaggt

SEQ ID NO: 1039646 - DNA, 15 bp, Homo sapiens
aaaataaaaaaaagg

SEQ ID NO: 1039647 - DNA, 15 bp, Homo sapiens
aaaaataaaaaaaag

SEQ ID NO: 1039648 - DNA, 15 bp, Homo sapiens
taaaaataaaaaata

SEQ ID NO: 1039649 - DNA, 15 bp, Homo sapiens
ataaaaataaaaaat

SEQ ID NO: 1039650 - DNA, 15 bp, Homo sapiens
aataaaaataaaaaa

SEQ ID NO: 1039651 - DNA, 15 bp, Homo sapiens
tcagcctgggcgaca

SEQ ID NO: 1039652 - DNA, 15 bp, Homo sapiens
ttcagcctgggcgac

SEQ ID NO: 1039653 - DNA, 15 bp, Homo sapiens
cttcagcctgggcga

SEQ ID NO: 1039654 - DNA, 15 bp, Homo sapiens
acttcagcctgggcg

SEQ ID NO: 1039655 - DNA, 15 bp, Homo sapiens
gggagaatggcgtga

SEQ ID NO: 1039656 - DNA, 15 bp, Homo sapiens
tgggagaatggcgtg

SEQ ID NO: 1039657 - DNA, 15 bp, Homo sapiens
gtgggagaatggcgt

SEQ ID NO: 1039658 - DNA, 15 bp, Homo sapiens
ggtgggagaatggcg

SEQ ID NO: 1039659 - DNA, 15 bp, Homo sapiens
aggtgggagaatggc

SEQ ID NO: 1039660 - DNA, 15 bp, Homo sapiens
gaggtgggagaatgg

SEQ ID NO: 1039661 - DNA, 15 bp, Homo sapiens
tgaggtgggagaatg

SEQ ID NO: 1039662 - DNA, 15 bp, Homo sapiens
aaccaggcgtggtgg

SEQ ID NO: 1039663 - DNA, 15 bp, Homo sapiens
taaccaggcgtggtg

SEQ ID NO: 1039664 - DNA, 15 bp, Homo sapiens
ttaaccaggcgtggt

SEQ ID NO: 1039665 - DNA, 15 bp, Homo sapiens
attaaccaggcgtgg

SEQ ID NO: 1039666 - DNA, 15 bp, Homo sapiens
aattaaccaggcgtg

SEQ ID NO: 1039667 - DNA, 15 bp, Homo sapiens
aaattaaccaggcgt

SEQ ID NO: 1039668 - DNA, 15 bp, Homo sapiens
aaaattaaccaggcg

SEQ ID NO: 1039669 - DNA, 15 bp, Homo sapiens
caaaaaattaaccag

SEQ ID NO: 1039670 - DNA, 15 bp, Homo sapiens
acaaaaaattaacca

SEQ ID NO: 1039671 - DNA, 15 bp, Homo sapiens
tacaaaaaattaacc

SEQ ID NO: 1039672 - DNA, 15 bp, Homo sapiens
atacaaaaaattaac

SEQ ID NO: 1039673 - DNA, 15 bp, Homo sapiens
aatacaaaaaattaa

SEQ ID NO: 1039674 - DNA, 15 bp, Homo sapiens
aaaaaatacaaaaaa

SEQ ID NO: 1039675 - DNA, 15 bp, Homo sapiens
tgggtggatcacgag

SEQ ID NO: 1039676 - DNA, 15 bp, Homo sapiens
gtgggtggatcacga

SEQ ID NO: 1039677 - DNA, 15 bp, Homo sapiens
ggtgggtggatcacg

SEQ ID NO: 1039678 - DNA, 15 bp, Homo sapiens
ccacgcctgtaatcc

SEQ ID NO: 1039679 - DNA, 15 bp, Homo sapiens
cccacgcctgtaatc

SEQ ID NO: 1039680 - DNA, 15 bp, Homo sapiens
acccacgcctgtaat

SEQ ID NO: 1039681 - DNA, 15 bp, Homo sapiens
aacccacgcctgtaa

SEQ ID NO: 1039682 - DNA, 15 bp, Homo sapiens
aaacccacgcctgta

SEQ ID NO: 1039683 - DNA, 15 bp, Homo sapiens
aaaacccacgcctgt

SEQ ID NO: 1039684 - DNA, 15 bp, Homo sapiens
aaaaacccacgcctg

SEQ ID NO: 1039685 - DNA, 15 bp, Homo sapiens
aaaaaacccacgcct

SEQ ID NO: 1039686 - DNA, 15 bp, Homo sapiens
aaaaaaacccacgcc

SEQ ID NO: 1039687 - DNA, 15 bp, Homo sapiens
aaaaaaaacccacgc

SEQ ID NO: 1039688 - DNA, 15 bp, Homo sapiens
aaaaaaaaacccacg

SEQ ID NO: 1039689 - DNA, 15 bp, Homo sapiens
aaaaaaaaaacccac

SEQ ID NO: 1039690 - DNA, 15 bp, Homo sapiens
ccaaaaaaaaaaacc

SEQ ID NO: 1039691 - DNA, 15 bp, Homo sapiens
cccaaaaaaaaaaac

SEQ ID NO: 1039692 - DNA, 15 bp, Homo sapiens
acccaaaaaaaaaaa

SEQ ID NO: 1039693 - DNA, 15 bp, Homo sapiens
aacccaaaaaaaaaa

SEQ ID NO: 1039694 - DNA, 15 bp, Homo sapiens
aaacccaaaaaaaaa

SEQ ID NO: 1039695 - DNA, 15 bp, Homo sapiens
caaacccaaaaaaaa

SEQ ID NO: 1039696 - DNA, 15 bp, Homo sapiens
acaaacccaaaaaaa

SEQ ID NO: 1039697 - DNA, 15 bp, Homo sapiens
aacaaacccaaaaaa

SEQ ID NO: 1039698 - DNA, 15 bp, Homo sapiens
aaacaaacccaaaaa

SEQ ID NO: 1039699 - DNA, 15 bp, Homo sapiens
aaaacaaacccaaaa

SEQ ID NO: 1039700 - DNA, 15 bp, Homo sapiens
aaaaacaaacccaaa

SEQ ID NO: 1039701 - DNA, 15 bp, Homo sapiens
aaaaaacaaacccaa

SEQ ID NO: 1039702 - DNA, 15 bp, Homo sapiens
aaaaaaacaaaccca

SEQ ID NO: 1039703 - DNA, 15 bp, Homo sapiens
aaaaaaaacaaaccc

SEQ ID NO: 1039704 - DNA, 15 bp, Homo sapiens
aaaaaaaaacaaacc

SEQ ID NO: 1039705 - DNA, 15 bp, Homo sapiens
ctacaaaaaaaaaaa

SEQ ID NO: 1039706 - DNA, 15 bp, Homo sapiens
tctacaaaaaaaaaa

SEQ ID NO: 1039707 - DNA, 15 bp, Homo sapiens
ctctacaaaaaaaaa

SEQ ID NO: 1039708 - DNA, 15 bp, Homo sapiens
tctctacaaaaaaaa

SEQ ID NO: 1039709 - DNA, 15 bp, Homo sapiens
ttctctacaaaaaaa

SEQ ID NO: 1039710 - DNA, 15 bp, Homo sapiens
tctttctctacaaaa

SEQ ID NO: 1039711 - DNA, 15 bp, Homo sapiens
ctctttctctacaaa

SEQ ID NO: 1039712 - DNA, 15 bp, Homo sapiens
actctttctctacaa

SEQ ID NO: 1039713 - DNA, 15 bp, Homo sapiens
aactctttctctaca

SEQ ID NO: 1039714 - DNA, 15 bp, Homo sapiens
taactctttctctac

SEQ ID NO: 1039715 - DNA, 15 bp, Homo sapiens
ataactctttctcta

SEQ ID NO: 1039716 - DNA, 15 bp, Homo sapiens
cataactctttctct

SEQ ID NO: 1039717 - DNA, 15 bp, Homo sapiens
gcataactctttctc

SEQ ID NO: 1039718 - DNA, 15 bp, Homo sapiens
ggcataactctttct

SEQ ID NO: 1039719 - DNA, 15 bp, Homo sapiens
tggcataactctttc

SEQ ID NO: 1039720 - DNA, 15 bp, Homo sapiens
gtggcataactcttt

SEQ ID NO: 1039721 - DNA, 15 bp, Homo sapiens
cgtggcataactctt

SEQ ID NO: 1039722 - DNA, 15 bp, Homo sapiens
acgtggcataactct

SEQ ID NO: 1039723 - DNA, 15 bp, Homo sapiens
aacgtggcataactc

SEQ ID NO: 1039724 - DNA, 15 bp, Homo sapiens
taacgtggcataact

SEQ ID NO: 1039725 - DNA, 15 bp, Homo sapiens
gtaacgtggcataac

SEQ ID NO: 1039726 - DNA, 15 bp, Homo sapiens
ggtaacgtggcataa

SEQ ID NO: 1039727 - DNA, 15 bp, Homo sapiens
aggtaacgtggcata

SEQ ID NO: 1039728 - DNA, 15 bp, Homo sapiens
taggtaacgtggcat

SEQ ID NO: 1039729 - DNA, 15 bp, Homo sapiens
ctaggtaacgtggca

SEQ ID NO: 1039730 - DNA, 15 bp, Homo sapiens
cctaggtaacgtggc

SEQ ID NO: 1039731 - DNA, 15 bp, Homo sapiens
gcctaggtaacgtgg

SEQ ID NO: 1039732 - DNA, 15 bp, Homo sapiens
agcctaggtaacgtg

SEQ ID NO: 1039733 - DNA, 15 bp, Homo sapiens
cagcctaggtaacgt

SEQ ID NO: 1039734 - DNA, 15 bp, Homo sapiens
ccagcctaggtaacg

SEQ ID NO: 1039735 - DNA, 15 bp, Homo sapiens
accagcctaggtaac

SEQ ID NO: 1039736 - DNA, 15 bp, Homo sapiens
gaccagcctaggtaa

SEQ ID NO: 1039737 - DNA, 15 bp, Homo sapiens
agaccagcctaggta

SEQ ID NO: 1039738 - DNA, 15 bp, Homo sapiens
aagaccagcctaggt

SEQ ID NO: 1039739 - DNA, 15 bp, Homo sapiens
caagaccagcctagg

SEQ ID NO: 1039740 - DNA, 15 bp, Homo sapiens
cattcaagaccagcc

SEQ ID NO: 1039741 - DNA, 15 bp, Homo sapiens
gcattcaagaccagc

SEQ ID NO: 1039742 - DNA, 15 bp, Homo sapiens
ggcattcaagaccag

SEQ ID NO: 1039743 - DNA, 15 bp, Homo sapiens
aggcattcaagacca

SEQ ID NO: 1039744 - DNA, 15 bp, Homo sapiens
caggcattcaagacc

SEQ ID NO: 1039745 - DNA, 15 bp, Homo sapiens
ccaggcattcaagac

SEQ ID NO: 1039746 - DNA, 15 bp, Homo sapiens
cccaggcattcaaga

SEQ ID NO: 1039747 - DNA, 15 bp, Homo sapiens
gcccaggcattcaag

SEQ ID NO: 1039748 - DNA, 15 bp, Homo sapiens
agcccaggcattcaa

SEQ ID NO: 1039749 - DNA, 15 bp, Homo sapiens
gagcccaggcattca

SEQ ID NO: 1039750 - DNA, 15 bp, Homo sapiens
tgagcccaggcattc

SEQ ID NO: 1039751 - DNA, 15 bp, Homo sapiens
ttgagcccaggcatt

SEQ ID NO: 1039752 - DNA, 15 bp, Homo sapiens
cttgagcccaggcat

SEQ ID NO: 1039753 - DNA, 15 bp, Homo sapiens
gcttgagcccaggca

SEQ ID NO: 1039754 - DNA, 15 bp, Homo sapiens
tgcttgagcccaggc

SEQ ID NO: 1039755 - DNA, 15 bp, Homo sapiens
atgcttgagcccagg

SEQ ID NO: 1039756 - DNA, 15 bp, Homo sapiens
aatgcttgagcccag

SEQ ID NO: 1039757 - DNA, 15 bp, Homo sapiens
gaatgcttgagccca

SEQ ID NO: 1039758 - DNA, 15 bp, Homo sapiens
ggaatgcttgagccc

SEQ ID NO: 1039759 - DNA, 15 bp, Homo sapiens
tggaatgcttgagcc

SEQ ID NO: 1039760 - DNA, 15 bp, Homo sapiens
gtggaatgcttgagc

SEQ ID NO: 1039761 - DNA, 15 bp, Homo sapiens
ggtggaatgcttgag

SEQ ID NO: 1039762 - DNA, 15 bp, Homo sapiens
gggtggaatgcttga

SEQ ID NO: 1039763 - DNA, 15 bp, Homo sapiens
cgggtggaatgcttg

SEQ ID NO: 1039764 - DNA, 15 bp, Homo sapiens
ccgggtggaatgctt

SEQ ID NO: 1039765 - DNA, 15 bp, Homo sapiens
accgggtggaatgct

SEQ ID NO: 1039766 - DNA, 15 bp, Homo sapiens
aaccgggtggaatgc

SEQ ID NO: 1039767 - DNA, 15 bp, Homo sapiens
gaaccgggtggaatg

SEQ ID NO: 1039768 - DNA, 15 bp, Homo sapiens
tgaaccgggtggaat

SEQ ID NO: 1039769 - DNA, 15 bp, Homo sapiens
ctgaaccgggtggaa

SEQ ID NO: 1039770 - DNA, 15 bp, Homo sapiens
gctgaaccgggtgga

SEQ ID NO: 1039771 - DNA, 15 bp, Homo sapiens
ggctgaaccgggtgg

SEQ ID NO: 1039772 - DNA, 15 bp, Homo sapiens
aggctgaaccgggtg

SEQ ID NO: 1039773 - DNA, 15 bp, Homo sapiens
gaggctgaaccgggt

SEQ ID NO: 1039774 - DNA, 15 bp, Homo sapiens
ggaggctgaaccggg

SEQ ID NO: 1039775 - DNA, 15 bp, Homo sapiens
tggaggctgaaccgg

SEQ ID NO: 1039776 - DNA, 15 bp, Homo sapiens
ttggaggctgaaccg

SEQ ID NO: 1039777 - DNA, 15 bp, Homo sapiens
tttggaggctgaacc

SEQ ID NO: 1039778 - DNA, 15 bp, Homo sapiens
ttttggaggctgaac

SEQ ID NO: 1039779 - DNA, 15 bp, Homo sapiens
cttttggaggctgaa

SEQ ID NO: 1039780 - DNA, 15 bp, Homo sapiens
acttttggaggctga

SEQ ID NO: 1039781 - DNA, 15 bp, Homo sapiens
cacttttggaggctg

SEQ ID NO: 1039782 - DNA, 15 bp, Homo sapiens
gcacttttggaggct

SEQ ID NO: 1039783 - DNA, 15 bp, Homo sapiens
ccataatcccagcac

SEQ ID NO: 1039784 - DNA, 15 bp, Homo sapiens
cccataatcccagca

SEQ ID NO: 1039785 - DNA, 15 bp, Homo sapiens
tcatgcccataatcc

SEQ ID NO: 1039786 - DNA, 15 bp, Homo sapiens
ctcatgcccataatc

SEQ ID NO: 1039787 - DNA, 15 bp, Homo sapiens
gctcatgcccataat

SEQ ID NO: 1039788 - DNA, 15 bp, Homo sapiens
ggctcatgcccataa

SEQ ID NO: 1039789 - DNA, 15 bp, Homo sapiens
tggctcatgcccata

SEQ ID NO: 1039790 - DNA, 15 bp, Homo sapiens
atggctcatgcccat

SEQ ID NO: 1039791 - DNA, 15 bp, Homo sapiens
aatggctcatgccca

SEQ ID NO: 1039792 - DNA, 15 bp, Homo sapiens
caatggctcatgccc

SEQ ID NO: 1039793 - DNA, 15 bp, Homo sapiens
acaatggctcatgcc

SEQ ID NO: 1039794 - DNA, 15 bp, Homo sapiens
cacaatggctcatgc

SEQ ID NO: 1039795 - DNA, 15 bp, Homo sapiens
gcacaatggctcatg

SEQ ID NO: 1039796 - DNA, 15 bp, Homo sapiens
ggcacaatggctcat

SEQ ID NO: 1039797 - DNA, 15 bp, Homo sapiens
gggcacaatggctca

SEQ ID NO: 1039798 - DNA, 15 bp, Homo sapiens
tgggcacaatggctc

SEQ ID NO: 1039799 - DNA, 15 bp, Homo sapiens
ctgggcacaatggct

SEQ ID NO: 1039800 - DNA, 15 bp, Homo sapiens
gctgggcacaatggc

SEQ ID NO: 1039801 - DNA, 15 bp, Homo sapiens
agctgggcacaatgg

SEQ ID NO: 1039802 - DNA, 15 bp, Homo sapiens
aagctgggcacaatg

SEQ ID NO: 1039803 - DNA, 15 bp, Homo sapiens
aaagctgggcacaat

SEQ ID NO: 1039804 - DNA, 15 bp, Homo sapiens
aaaagctgggcacaa

SEQ ID NO: 1039805 - DNA, 15 bp, Homo sapiens
aaaaagctgggcaca

SEQ ID NO: 1039806 - DNA, 15 bp, Homo sapiens
taaaaagctgggcac

SEQ ID NO: 1039807 - DNA, 15 bp, Homo sapiens
ttaaaaagctgggca

SEQ ID NO: 1039808 - DNA, 15 bp, Homo sapiens
tttaaaaagctgggc

SEQ ID NO: 1039809 - DNA, 15 bp, Homo sapiens
gtttaaaaagctggg

SEQ ID NO: 1039810 - DNA, 15 bp, Homo sapiens
tgtttaaaaagctgg

SEQ ID NO: 1039811 - DNA, 15 bp, Homo sapiens
ttgtttaaaaagctg

SEQ ID NO: 1039812 - DNA, 15 bp, Homo sapiens
attgtttaaaaagct

SEQ ID NO: 1039813 - DNA, 15 bp, Homo sapiens
aattgtttaaaaagc

SEQ ID NO: 1039814 - DNA, 15 bp, Homo sapiens
aaattgtttaaaaag

SEQ ID NO: 1039815 - DNA, 15 bp, Homo sapiens
aaaattgtttaaaaa

SEQ ID NO: 1039816 - DNA, 15 bp, Homo sapiens
aaaaattgtttaaaa

SEQ ID NO: 1039817 - DNA, 15 bp, Homo sapiens
aaaaaattgtttaaa

SEQ ID NO: 1039818 - DNA, 15 bp, Homo sapiens
aaaaaaattgtttaa

SEQ ID NO: 1039819 - DNA, 15 bp, Homo sapiens
gaaaaaaattgttta

SEQ ID NO: 1039820 - DNA, 15 bp, Homo sapiens
agaaaaaaattgttt

SEQ ID NO: 1039821 - DNA, 15 bp, Homo sapiens
aagaaaaaaattgtt

SEQ ID NO: 1039822 - DNA, 15 bp, Homo sapiens
aaagaaaaaaattgt

SEQ ID NO: 1039823 - DNA, 15 bp, Homo sapiens
aaaagaaaaaaattg

SEQ ID NO: 1039824 - DNA, 15 bp, Homo sapiens
agaaaaaaaagaaaa

SEQ ID NO: 1039825 - DNA, 15 bp, Homo sapiens
caaagaaaaaaaaga

SEQ ID NO: 1039826 - DNA, 15 bp, Homo sapiens
ccaaagaaaaaaaag

SEQ ID NO: 1039827 - DNA, 15 bp, Homo sapiens
tccaaagaaaaaaaa

SEQ ID NO: 1039828 - DNA, 15 bp, Homo sapiens
ctccaaagaaaaaaa

SEQ ID NO: 1039829 - DNA, 15 bp, Homo sapiens
tctccaaagaaaaaa

SEQ ID NO: 1039830 - DNA, 15 bp, Homo sapiens
gtctccaaagaaaaa

SEQ ID NO: 1039831 - DNA, 15 bp, Homo sapiens
tgtctccaaagaaaa

SEQ ID NO: 1039832 - DNA, 15 bp, Homo sapiens
ctgtctccaaagaaa

SEQ ID NO: 1039833 - DNA, 15 bp, Homo sapiens
tctgtctccaaagaa

SEQ ID NO: 1039834 - DNA, 15 bp, Homo sapiens
ctctgtctccaaaga

SEQ ID NO: 1039835 - DNA, 15 bp, Homo sapiens
cctctgtctccaaag

SEQ ID NO: 1039836 - DNA, 15 bp, Homo sapiens
gcctctgtctccaaa

SEQ ID NO: 1039837 - DNA, 15 bp, Homo sapiens
agcctctgtctccaa

SEQ ID NO: 1039838 - DNA, 15 bp, Homo sapiens
gagcctctgtctcca

SEQ ID NO: 1039839 - DNA, 15 bp, Homo sapiens
tgagcctctgtctcc

SEQ ID NO: 1039840 - DNA, 15 bp, Homo sapiens
gtgagcctctgtctc

SEQ ID NO: 1039841 - DNA, 15 bp, Homo sapiens
agtgagcctctgtct

SEQ ID NO: 1039842 - DNA, 15 bp, Homo sapiens
gagtgagcctctgtc

SEQ ID NO: 1039843 - DNA, 15 bp, Homo sapiens
agagtgagcctctgt

SEQ ID NO: 1039844 - DNA, 15 bp, Homo sapiens
tagagtgagcctctg

SEQ ID NO: 1039845 - DNA, 15 bp, Homo sapiens
atagagtgagcctct

SEQ ID NO: 1039846 - DNA, 15 bp, Homo sapiens
aatagagtgagcctc

SEQ ID NO: 1039847 - DNA, 15 bp, Homo sapiens
caatagagtgagcct

SEQ ID NO: 1039848 - DNA, 15 bp, Homo sapiens
gcaatagagtgagcc

SEQ ID NO: 1039849 - DNA, 15 bp, Homo sapiens
ggcaatagagtgagc

SEQ ID NO: 1039850 - DNA, 15 bp, Homo sapiens
ttgggcaatagagtg

SEQ ID NO: 1039851 - DNA, 15 bp, Homo sapiens
cttgggcaatagagt

SEQ ID NO: 1039852 - DNA, 15 bp, Homo sapiens
gcttgggcaatagag

SEQ ID NO: 1039853 - DNA, 15 bp, Homo sapiens
ggcttgggcaataga

SEQ ID NO: 1039854 - DNA, 15 bp, Homo sapiens
tggcttgggcaatag

SEQ ID NO: 1039855 - DNA, 15 bp, Homo sapiens
ctggcttgggcaata

SEQ ID NO: 1039856 - DNA, 15 bp, Homo sapiens
tctggcttgggcaat

SEQ ID NO: 1039857 - DNA, 15 bp, Homo sapiens
ctctggcttgggcaa

SEQ ID NO: 1039858 - DNA, 15 bp, Homo sapiens
actctggcttgggca

SEQ ID NO: 1039859 - DNA, 15 bp, Homo sapiens
cactctggcttgggc

SEQ ID NO: 1039860 - DNA, 15 bp, Homo sapiens
gcactctggcttggg

SEQ ID NO: 1039861 - DNA, 15 bp, Homo sapiens
agcactctggcttgg

SEQ ID NO: 1039862 - DNA, 15 bp, Homo sapiens
cagcactctggcttg

SEQ ID NO: 1039863 - DNA, 15 bp, Homo sapiens
acagcactctggctt

SEQ ID NO: 1039864 - DNA, 15 bp, Homo sapiens
cacagcactctggct

SEQ ID NO: 1039865 - DNA, 15 bp, Homo sapiens
gcacagcactctggc

SEQ ID NO: 1039866 - DNA, 15 bp, Homo sapiens
ggcacagcactctgg

SEQ ID NO: 1039867 - DNA, 15 bp, Homo sapiens
cggcacagcactctg

SEQ ID NO: 1039868 - DNA, 15 bp, Homo sapiens
gcggcacagcactct

SEQ ID NO: 1039869 - DNA, 15 bp, Homo sapiens
agcggcacagcactc

SEQ ID NO: 1039870 - DNA, 15 bp, Homo sapiens
tagcggcacagcact

SEQ ID NO: 1039871 - DNA, 15 bp, Homo sapiens
gtagcggcacagcac

SEQ ID NO: 1039872 - DNA, 15 bp, Homo sapiens
tgtagcggcacagca

SEQ ID NO: 1039873 - DNA, 15 bp, Homo sapiens
atgtagcggcacagc

SEQ ID NO: 1039874 - DNA, 15 bp, Homo sapiens
gatgtagcggcacag

SEQ ID NO: 1039875 - DNA, 15 bp, Homo sapiens
cgatgtagcggcaca

SEQ ID NO: 1039876 - DNA, 15 bp, Homo sapiens
ccgatgtagcggcac

SEQ ID NO: 1039877 - DNA, 15 bp, Homo sapiens
gccgatgtagcggca

SEQ ID NO: 1039878 - DNA, 15 bp, Homo sapiens
agccgatgtagcggc

SEQ ID NO: 1039879 - DNA, 15 bp, Homo sapiens
gagccgatgtagcgg

SEQ ID NO: 1039880 - DNA, 15 bp, Homo sapiens
tgagccgatgtagcg

SEQ ID NO: 1039881 - DNA, 15 bp, Homo sapiens
gtgagccgatgtagc

SEQ ID NO: 1039882 - DNA, 15 bp, Homo sapiens
tgtgagccgatgtag

SEQ ID NO: 1039883 - DNA, 15 bp, Homo sapiens
ctgtgagccgatgta

SEQ ID NO: 1039884 - DNA, 15 bp, Homo sapiens
gctgtgagccgatgt

SEQ ID NO: 1039885 - DNA, 15 bp, Homo sapiens
tgctgtgagccgatg

SEQ ID NO: 1039886 - DNA, 15 bp, Homo sapiens
ttgctgtgagccgat

SEQ ID NO: 1039887 - DNA, 15 bp, Homo sapiens
cttgctgtgagccga

SEQ ID NO: 1039888 - DNA, 15 bp, Homo sapiens
gcttgctgtgagccg

SEQ ID NO: 1039889 - DNA, 15 bp, Homo sapiens
agcttgctgtgagcc

SEQ ID NO: 1039890 - DNA, 15 bp, Homo sapiens
gagcttgctgtgagc

SEQ ID NO: 1039891 - DNA, 15 bp, Homo sapiens
ggagcttgctgtgag

SEQ ID NO: 1039892 - DNA, 15 bp, Homo sapiens
cggagcttgctgtga

SEQ ID NO: 1039893 - DNA, 15 bp, Homo sapiens
gcggagcttgctgtg

SEQ ID NO: 1039894 - DNA, 15 bp, Homo sapiens
ggcggagcttgctgt

SEQ ID NO: 1039895 - DNA, 15 bp, Homo sapiens
aggcggagcttgctg

SEQ ID NO: 1039896 - DNA, 15 bp, Homo sapiens
gaggcggagcttgct

SEQ ID NO: 1039897 - DNA, 15 bp, Homo sapiens
aggaggcggagcttg

SEQ ID NO: 1039898 - DNA, 15 bp, Homo sapiens
caggaggcggagctt

SEQ ID NO: 1039899 - DNA, 15 bp, Homo sapiens
ccaggaggcggagct

SEQ ID NO: 1039900 - DNA, 15 bp, Homo sapiens
cccaggaggcggagc

SEQ ID NO: 1039901 - DNA, 15 bp, Homo sapiens
attgaacccaggagg

SEQ ID NO: 1039902 - DNA, 15 bp, Homo sapiens
gattgaacccaggag

SEQ ID NO: 1039903 - DNA, 15 bp, Homo sapiens
cgattgaacccagga

SEQ ID NO: 1039904 - DNA, 15 bp, Homo sapiens
tcgattgaacccagg

SEQ ID NO: 1039905 - DNA, 15 bp, Homo sapiens
atcgattgaacccag

SEQ ID NO: 1039906 - DNA, 15 bp, Homo sapiens
aatcgattgaaccca

SEQ ID NO: 1039907 - DNA, 15 bp, Homo sapiens
gggtgcctataatcc

SEQ ID NO: 1039908 - DNA, 15 bp, Homo sapiens
tgggtgcctataatc

SEQ ID NO: 1039909 - DNA, 15 bp, Homo sapiens
gtgggtgcctataat

SEQ ID NO: 1039910 - DNA, 15 bp, Homo sapiens
ggtgggtgcctataa

SEQ ID NO: 1039911 - DNA, 15 bp, Homo sapiens
tggtgggtgcctata

SEQ ID NO: 1039912 - DNA, 15 bp, Homo sapiens
gtggtgggtgcctat

SEQ ID NO: 1039913 - DNA, 15 bp, Homo sapiens
tggtggtgggtgcct

SEQ ID NO: 1039914 - DNA, 15 bp, Homo sapiens
gtggtggtgggtgcc

SEQ ID NO: 1039915 - DNA, 15 bp, Homo sapiens
tgtggtggtgggtgc

SEQ ID NO: 1039916 - DNA, 15 bp, Homo sapiens
gtgtggtggtgggtg

SEQ ID NO: 1039917 - DNA, 15 bp, Homo sapiens
ggtgtggtggtgggt

SEQ ID NO: 1039918 - DNA, 15 bp, Homo sapiens
ctcagccaggtgtgg

SEQ ID NO: 1039919 - DNA, 15 bp, Homo sapiens
actcagccaggtgtg

SEQ ID NO: 1039920 - DNA, 15 bp, Homo sapiens
aactcagccaggtgt

SEQ ID NO: 1039921 - DNA, 15 bp, Homo sapiens
aaactcagccaggtg

SEQ ID NO: 1039922 - DNA, 15 bp, Homo sapiens
aaaactcagccaggt

SEQ ID NO: 1039923 - DNA, 15 bp, Homo sapiens
caaaactcagccagg

SEQ ID NO: 1039924 - DNA, 15 bp, Homo sapiens
acaaaactcagccag

SEQ ID NO: 1039925 - DNA, 15 bp, Homo sapiens
tacaaaactcagcca

SEQ ID NO: 1039926 - DNA, 15 bp, Homo sapiens
atacaaaactcagcc

SEQ ID NO: 1039927 - DNA, 15 bp, Homo sapiens
aatacaaaactcagc

SEQ ID NO: 1039928 - DNA, 15 bp, Homo sapiens
aaatacaaaactcag

SEQ ID NO: 1039929 - DNA, 15 bp, Homo sapiens
aaaatacaaaactca

SEQ ID NO: 1039930 - DNA, 15 bp, Homo sapiens
aaaaatacaaaactc

SEQ ID NO: 1039931 - DNA, 15 bp, Homo sapiens
taaaaatacaaaact

SEQ ID NO: 1039932 - DNA, 15 bp, Homo sapiens
ctaaaaatacaaaac

SEQ ID NO: 1039933 - DNA, 15 bp, Homo sapiens
atgaaaccctgtttc

SEQ ID NO: 1039934 - DNA, 15 bp, Homo sapiens
aatgaaaccctgttt

SEQ ID NO: 1039935 - DNA, 15 bp, Homo sapiens
taatgaaaccctgtt

SEQ ID NO: 1039936 - DNA, 15 bp, Homo sapiens
ataatgaaaccctgt

SEQ ID NO: 1039937 - DNA, 15 bp, Homo sapiens
cataatgaaaccctg

SEQ ID NO: 1039938 - DNA, 15 bp, Homo sapiens
acataatgaaaccct

SEQ ID NO: 1039939 - DNA, 15 bp, Homo sapiens
aacataatgaaaccc

SEQ ID NO: 1039940 - DNA, 15 bp, Homo sapiens
caacataatgaaacc

SEQ ID NO: 1039941 - DNA, 15 bp, Homo sapiens
ccaacataatgaaac

SEQ ID NO: 1039942 - DNA, 15 bp, Homo sapiens
gccaacataatgaaa

SEQ ID NO: 1039943 - DNA, 15 bp, Homo sapiens
ggccaacataatgaa

SEQ ID NO: 1039944 - DNA, 15 bp, Homo sapiens
tggccaacataatga

SEQ ID NO: 1039945 - DNA, 15 bp, Homo sapiens
ctggccaacataatg

SEQ ID NO: 1039946 - DNA, 15 bp, Homo sapiens
cctggccaacataat

SEQ ID NO: 1039947 - DNA, 15 bp, Homo sapiens
gcctggccaacataa

SEQ ID NO: 1039948 - DNA, 15 bp, Homo sapiens
acagcctggccaaca

SEQ ID NO: 1039949 - DNA, 15 bp, Homo sapiens
aacagcctggccaac

SEQ ID NO: 1039950 - DNA, 15 bp, Homo sapiens
gaacagcctggccaa

SEQ ID NO: 1039951 - DNA, 15 bp, Homo sapiens
tgagaacagcctggc

SEQ ID NO: 1039952 - DNA, 15 bp, Homo sapiens
ttgagaacagcctgg

SEQ ID NO: 1039953 - DNA, 15 bp, Homo sapiens
gttgagaacagcctg

SEQ ID NO: 1039954 - DNA, 15 bp, Homo sapiens
ggttgagaacagcct

SEQ ID NO: 1039955 - DNA, 15 bp, Homo sapiens
aggttgagaacagcc

SEQ ID NO: 1039956 - DNA, 15 bp, Homo sapiens
gaggttgagaacagc

SEQ ID NO: 1039957 - DNA, 15 bp, Homo sapiens
ggaggttgagaacag

SEQ ID NO: 1039958 - DNA, 15 bp, Homo sapiens
aggaggttgagaaca

SEQ ID NO: 1039959 - DNA, 15 bp, Homo sapiens
caggaggttgagaac

SEQ ID NO: 1039960 - DNA, 15 bp, Homo sapiens
ccaggaggttgagaa

SEQ ID NO: 1039961 - DNA, 15 bp, Homo sapiens
gccaggaggttgaga

SEQ ID NO: 1039962 - DNA, 15 bp, Homo sapiens
ggccaggaggttgag

SEQ ID NO: 1039963 - DNA, 15 bp, Homo sapiens
aggccaggaggttga

SEQ ID NO: 1039964 - DNA, 15 bp, Homo sapiens
gaggccaggaggttg

SEQ ID NO: 1039965 - DNA, 15 bp, Homo sapiens
tgaggccaggaggtt

SEQ ID NO: 1039966 - DNA, 15 bp, Homo sapiens
ctgaggccaggaggt

SEQ ID NO: 1039967 - DNA, 15 bp, Homo sapiens
tctgaggccaggagg

SEQ ID NO: 1039968 - DNA, 15 bp, Homo sapiens
atctgaggccaggag

SEQ ID NO: 1039969 - DNA, 15 bp, Homo sapiens
catctgaggccagga

SEQ ID NO: 1039970 - DNA, 15 bp, Homo sapiens
tcatctgaggccagg

SEQ ID NO: 1039971 - DNA, 15 bp, Homo sapiens
atcatctgaggccag

SEQ ID NO: 1039972 - DNA, 15 bp, Homo sapiens
gatcatctgaggcca

SEQ ID NO: 1039973 - DNA, 15 bp, Homo sapiens
agatcatctgaggcc

SEQ ID NO: 1039974 - DNA, 15 bp, Homo sapiens
aagatcatctgaggc

SEQ ID NO: 1039975 - DNA, 15 bp, Homo sapiens
gaagatcatctgagg

SEQ ID NO: 1039976 - DNA, 15 bp, Homo sapiens
ggaagatcatctgag

SEQ ID NO: 1039977 - DNA, 15 bp, Homo sapiens
gggaagatcatctga

SEQ ID NO: 1039978 - DNA, 15 bp, Homo sapiens
cgggaagatcatctg

SEQ ID NO: 1039979 - DNA, 15 bp, Homo sapiens
gcgggaagatcatct

SEQ ID NO: 1039980 - DNA, 15 bp, Homo sapiens
ggcgggaagatcatc

SEQ ID NO: 1039981 - DNA, 15 bp, Homo sapiens
aggcgggaagatcat

SEQ ID NO: 1039982 - DNA, 15 bp, Homo sapiens
gaggcgggaagatca

SEQ ID NO: 1039983 - DNA, 15 bp, Homo sapiens
tgaggcgggaagatc

SEQ ID NO: 1039984 - DNA, 15 bp, Homo sapiens
ctgaggcgggaagat

SEQ ID NO: 1039985 - DNA, 15 bp, Homo sapiens
gctgaggcgggaaga

SEQ ID NO: 1039986 - DNA, 15 bp, Homo sapiens
ggctgaggcgggaag

SEQ ID NO: 1039987 - DNA, 15 bp, Homo sapiens
aggctgaggcgggaa

SEQ ID NO: 1039988 - DNA, 15 bp, Homo sapiens
aaggctgaggcggga

SEQ ID NO: 1039989 - DNA, 15 bp, Homo sapiens
gaaggctgaggcggg

SEQ ID NO: 1039990 - DNA, 15 bp, Homo sapiens
ggaaggctgaggcgg

SEQ ID NO: 1039991 - DNA, 15 bp, Homo sapiens
tggaaggctgaggcg

SEQ ID NO: 1039992 - DNA, 15 bp, Homo sapiens
ttggaaggctgaggc

SEQ ID NO: 1039993 - DNA, 15 bp, Homo sapiens
ttttggaaggctgag

SEQ ID NO: 1039994 - DNA, 15 bp, Homo sapiens
attttggaaggctga

SEQ ID NO: 1039995 - DNA, 15 bp, Homo sapiens
cattttggaaggctg

SEQ ID NO: 1039996 - DNA, 15 bp, Homo sapiens
gcattttggaaggct

SEQ ID NO: 1039997 - DNA, 15 bp, Homo sapiens
agcattttggaaggc

SEQ ID NO: 1039998 - DNA, 15 bp, Homo sapiens
cagcattttggaagg

SEQ ID NO: 1039999 - DNA, 15 bp, Homo sapiens
ccagcattttggaag

SEQ ID NO: 1040000 - DNA, 15 bp, Homo sapiens
cccagcattttggaa

SEQ ID NO: 1040001 - DNA, 15 bp, Homo sapiens
tcccagcattttgga

SEQ ID NO: 1040002 - DNA, 15 bp, Homo sapiens
tggccaggcatggtg

SEQ ID NO: 1040003 - DNA, 15 bp, Homo sapiens
gtggccaggcatggt

SEQ ID NO: 1040004 - DNA, 15 bp, Homo sapiens
tgtggccaggcatgg

SEQ ID NO: 1040005 - DNA, 15 bp, Homo sapiens
atgtggccaggcatg

SEQ ID NO: 1040006 - DNA, 15 bp, Homo sapiens
aatgtggccaggcat

SEQ ID NO: 1040007 - DNA, 15 bp, Homo sapiens
aaaatgtggccaggc

SEQ ID NO: 1040008 - DNA, 15 bp, Homo sapiens
aaaaatgtggccagg

SEQ ID NO: 1040009 - DNA, 15 bp, Homo sapiens
taaaaatgtggccag

SEQ ID NO: 1040010 - DNA, 15 bp, Homo sapiens
ttaaaaatgtggcca

SEQ ID NO: 1040011 - DNA, 15 bp, Homo sapiens
cttaaaaatgtggcc

SEQ ID NO: 1040012 - DNA, 15 bp, Homo sapiens
acttaaaaatgtggc

SEQ ID NO: 1040013 - DNA, 15 bp, Homo sapiens
tacttaaaaatgtgg

SEQ ID NO: 1040014 - DNA, 15 bp, Homo sapiens
atacttaaaaatgtg

SEQ ID NO: 1040015 - DNA, 15 bp, Homo sapiens
aatacttaaaaatgt

SEQ ID NO: 1040016 - DNA, 15 bp, Homo sapiens
aaatacttaaaaatg

SEQ ID NO: 1040017 - DNA, 15 bp, Homo sapiens
taaatacttaaaaat

SEQ ID NO: 1040018 - DNA, 15 bp, Homo sapiens
gtaaatacttaaaaa

SEQ ID NO: 1040019 - DNA, 15 bp, Homo sapiens
agtaaatacttaaaa

SEQ ID NO: 1040020 - DNA, 15 bp, Homo sapiens
aagtaaatacttaaa

SEQ ID NO: 1040021 - DNA, 15 bp, Homo sapiens
aaagtaaatacttaa

SEQ ID NO: 1040022 - DNA, 15 bp, Homo sapiens
caaagtaaatactta

SEQ ID NO: 1040023 - DNA, 15 bp, Homo sapiens
acaaagtaaatactt

SEQ ID NO: 1040024 - DNA, 15 bp, Homo sapiens
gacaaagtaaatact

SEQ ID NO: 1040025 - DNA, 15 bp, Homo sapiens
ggacaaagtaaatac

SEQ ID NO: 1040026 - DNA, 15 bp, Homo sapiens
gggacaaagtaaata

SEQ ID NO: 1040027 - DNA, 15 bp, Homo sapiens
tgggacaaagtaaat

SEQ ID NO: 1040028 - DNA, 15 bp, Homo sapiens
ttgggacaaagtaaa

SEQ ID NO: 1040029 - DNA, 15 bp, Homo sapiens
cttgggacaaagtaa

SEQ ID NO: 1040030 - DNA, 15 bp, Homo sapiens
tcttgggacaaagta

SEQ ID NO: 1040031 - DNA, 15 bp, Homo sapiens
ttcttgggacaaagt

SEQ ID NO: 1040032 - DNA, 15 bp, Homo sapiens
gttcttgggacaaag

SEQ ID NO: 1040033 - DNA, 15 bp, Homo sapiens
agttcttgggacaaa

SEQ ID NO: 1040034 - DNA, 15 bp, Homo sapiens
aagttcttgggacaa

SEQ ID NO: 1040035 - DNA, 15 bp, Homo sapiens
gaagttcttgggaca

SEQ ID NO: 1040036 - DNA, 15 bp, Homo sapiens
tgaagttcttgggac

SEQ ID NO: 1040037 - DNA, 15 bp, Homo sapiens
ctgaagttcttggga

SEQ ID NO: 1040038 - DNA, 15 bp, Homo sapiens
cctgaagttcttggg

SEQ ID NO: 1040039 - DNA, 15 bp, Homo sapiens
acctgaagttcttgg

SEQ ID NO: 1040040 - DNA, 15 bp, Homo sapiens
cacctgaagttcttg

SEQ ID NO: 1040041 - DNA, 15 bp, Homo sapiens
gcacctgaagttctt

SEQ ID NO: 1040042 - DNA, 15 bp, Homo sapiens
agcacctgaagttct

SEQ ID NO: 1040043 - DNA, 15 bp, Homo sapiens
aagcacctgaagttc

SEQ ID NO: 1040044 - DNA, 15 bp, Homo sapiens
caagcacctgaagtt

SEQ ID NO: 1040045 - DNA, 15 bp, Homo sapiens
tcaagcacctgaagt

SEQ ID NO: 1040046 - DNA, 15 bp, Homo sapiens
atcaagcacctgaag

SEQ ID NO: 1040047 - DNA, 15 bp, Homo sapiens
aatcaagcacctgaa

SEQ ID NO: 1040048 - DNA, 15 bp, Homo sapiens
aaatcaagcacctga

SEQ ID NO: 1040049 - DNA, 15 bp, Homo sapiens
taaatcaagcacctg

SEQ ID NO: 1040050 - DNA, 15 bp, Homo sapiens
ctaaatcaagcacct

SEQ ID NO: 1040051 - DNA, 15 bp, Homo sapiens
cctaaatcaagcacc

SEQ ID NO: 1040052 - DNA, 15 bp, Homo sapiens
acctaaatcaagcac

SEQ ID NO: 1040053 - DNA, 15 bp, Homo sapiens
tacctaaatcaagca

SEQ ID NO: 1040054 - DNA, 15 bp, Homo sapiens
gtacctaaatcaagc

SEQ ID NO: 1040055 - DNA, 15 bp, Homo sapiens
agtacctaaatcaag

SEQ ID NO: 1040056 - DNA, 15 bp, Homo sapiens
aagtacctaaatcaa

SEQ ID NO: 1040057 - DNA, 15 bp, Homo sapiens
aaagtacctaaatca

SEQ ID NO: 1040058 - DNA, 15 bp, Homo sapiens
taaagtacctaaatc

SEQ ID NO: 1040059 - DNA, 15 bp, Homo sapiens
gtaaagtacctaaat

SEQ ID NO: 1040060 - DNA, 15 bp, Homo sapiens
agtaaagtacctaaa

SEQ ID NO: 1040061 - DNA, 15 bp, Homo sapiens
gagtaaagtacctaa

SEQ ID NO: 1040062 - DNA, 15 bp, Homo sapiens
tgagtaaagtaccta

SEQ ID NO: 1040063 - DNA, 15 bp, Homo sapiens
atgagtaaagtacct

SEQ ID NO: 1040064 - DNA, 15 bp, Homo sapiens
tatgagtaaagtacc

SEQ ID NO: 1040065 - DNA, 15 bp, Homo sapiens
atatgagtaaagtac

SEQ ID NO: 1040066 - DNA, 15 bp, Homo sapiens
aatatgagtaaagta

SEQ ID NO: 1040067 - DNA, 15 bp, Homo sapiens
taatatgagtaaagt

SEQ ID NO: 1040068 - DNA, 15 bp, Homo sapiens
ataatatgagtaaag

SEQ ID NO: 1040069 - DNA, 15 bp, Homo sapiens
gataatatgagtaaa

SEQ ID NO: 1040070 - DNA, 15 bp, Homo sapiens
agataatatgagtaa

SEQ ID NO: 1040071 - DNA, 15 bp, Homo sapiens
gagataatatgagta

SEQ ID NO: 1040072 - DNA, 15 bp, Homo sapiens
tgagataatatgagt

SEQ ID NO: 1040073 - DNA, 15 bp, Homo sapiens
atgagataatatgag

SEQ ID NO: 1040074 - DNA, 15 bp, Homo sapiens
aaatgagataatatg

SEQ ID NO: 1040075 - DNA, 15 bp, Homo sapiens
aaaatgagataatat

SEQ ID NO: 1040076 - DNA, 15 bp, Homo sapiens
taaaatgagataata

SEQ ID NO: 1040077 - DNA, 15 bp, Homo sapiens
ataaaatgagataat

SEQ ID NO: 1040078 - DNA, 15 bp, Homo sapiens
gataaaatgagataa

SEQ ID NO: 1040079 - DNA, 15 bp, Homo sapiens
agataaaatgagata

SEQ ID NO: 1040080 - DNA, 15 bp, Homo sapiens
aagataaaatgagat

SEQ ID NO: 1040081 - DNA, 15 bp, Homo sapiens
aaagataaaatgaga

SEQ ID NO: 1040082 - DNA, 15 bp, Homo sapiens
taaagataaaatgag

SEQ ID NO: 1040083 - DNA, 15 bp, Homo sapiens
ataaagataaaatga

SEQ ID NO: 1040084 - DNA, 15 bp, Homo sapiens
gataaagataaaatg

SEQ ID NO: 1040085 - DNA, 15 bp, Homo sapiens
ggataaagataaaat

SEQ ID NO: 1040086 - DNA, 15 bp, Homo sapiens
tggataaagataaaa

SEQ ID NO: 1040087 - DNA, 15 bp, Homo sapiens
ctggataaagataaa

SEQ ID NO: 1040088 - DNA, 15 bp, Homo sapiens
tctggataaagataa

SEQ ID NO: 1040089 - DNA, 15 bp, Homo sapiens
ttctggataaagata

SEQ ID NO: 1040090 - DNA, 15 bp, Homo sapiens
attctggataaagat

SEQ ID NO: 1040091 - DNA, 15 bp, Homo sapiens
aattctggataaaga

SEQ ID NO: 1040092 - DNA, 15 bp, Homo sapiens
taattctggataaag

SEQ ID NO: 1040093 - DNA, 15 bp, Homo sapiens
gtaattctggataaa

SEQ ID NO: 1040094 - DNA, 15 bp, Homo sapiens
ggtaattctggataa

SEQ ID NO: 1040095 - DNA, 15 bp, Homo sapiens
tggtaattctggata

SEQ ID NO: 1040096 - DNA, 15 bp, Homo sapiens
ctggtaattctggat

SEQ ID NO: 1040097 - DNA, 15 bp, Homo sapiens
tctggtaattctgga

SEQ ID NO: 1040098 - DNA, 15 bp, Homo sapiens
atctggtaattctgg

SEQ ID NO: 1040099 - DNA, 15 bp, Homo sapiens
gatctggtaattctg

SEQ ID NO: 1040100 - DNA, 15 bp, Homo sapiens
tgatctggtaattct

SEQ ID NO: 1040101 - DNA, 15 bp, Homo sapiens
ctgatctggtaattc

SEQ ID NO: 1040102 - DNA, 15 bp, Homo sapiens
cctgatctggtaatt

SEQ ID NO: 1040103 - DNA, 15 bp, Homo sapiens
acctgatctggtaat

SEQ ID NO: 1040104 - DNA, 15 bp, Homo sapiens
tacctgatctggtaa

SEQ ID NO: 1040105 - DNA, 15 bp, Homo sapiens
gtacctgatctggta

SEQ ID NO: 1040106 - DNA, 15 bp, Homo sapiens
agtacctgatctggt

SEQ ID NO: 1040107 - DNA, 15 bp, Homo sapiens
cagtacctgatctgg

SEQ ID NO: 1040108 - DNA, 15 bp, Homo sapiens
tcagtacctgatctg

SEQ ID NO: 1040109 - DNA, 15 bp, Homo sapiens
atcagtacctgatct

SEQ ID NO: 1040110 - DNA, 15 bp, Homo sapiens
tatcagtacctgatc

SEQ ID NO: 1040111 - DNA, 15 bp, Homo sapiens
atatcagtacctgat

SEQ ID NO: 1040112 - DNA, 15 bp, Homo sapiens
aatatcagtacctga

SEQ ID NO: 1040113 - DNA, 15 bp, Homo sapiens
taatatcagtacctg

SEQ ID NO: 1040114 - DNA, 15 bp, Homo sapiens
ataatatcagtacct

SEQ ID NO: 1040115 - DNA, 15 bp, Homo sapiens
gataatatcagtacc

SEQ ID NO: 1040116 - DNA, 15 bp, Homo sapiens
ggataatatcagtac

SEQ ID NO: 1040117 - DNA, 15 bp, Homo sapiens
gggataatatcagta

SEQ ID NO: 1040118 - DNA, 15 bp, Homo sapiens
ggggataatatcagt

SEQ ID NO: 1040119 - DNA, 15 bp, Homo sapiens
tggggataatatcag

SEQ ID NO: 1040120 - DNA, 15 bp, Homo sapiens
ttggggataatatca

SEQ ID NO: 1040121 - DNA, 15 bp, Homo sapiens
gttggggataatatc

SEQ ID NO: 1040122 - DNA, 15 bp, Homo sapiens
ggttggggataatat

SEQ ID NO: 1040123 - DNA, 15 bp, Homo sapiens
aggttggggataata

SEQ ID NO: 1040124 - DNA, 15 bp, Homo sapiens
taggttggggataat

SEQ ID NO: 1040125 - DNA, 15 bp, Homo sapiens
gtaggttggggataa

SEQ ID NO: 1040126 - DNA, 15 bp, Homo sapiens
tgtaggttggggata

SEQ ID NO: 1040127 - DNA, 15 bp, Homo sapiens
ctgtaggttggggat

SEQ ID NO: 1040128 - DNA, 15 bp, Homo sapiens
tctgtaggttgggga

SEQ ID NO: 1040129 - DNA, 15 bp, Homo sapiens
atctgtaggttgggg

SEQ ID NO: 1040130 - DNA, 15 bp, Homo sapiens
catctgtaggttggg

SEQ ID NO: 1040131 - DNA, 15 bp, Homo sapiens
tcatctgtaggttgg

SEQ ID NO: 1040132 - DNA, 15 bp, Homo sapiens
ctcatctgtaggttg

SEQ ID NO: 1040133 - DNA, 15 bp, Homo sapiens
cctcatctgtaggtt

SEQ ID NO: 1040134 - DNA, 15 bp, Homo sapiens
tcctcatctgtaggt

SEQ ID NO: 1040135 - DNA, 15 bp, Homo sapiens
ttcctcatctgtagg

SEQ ID NO: 1040136 - DNA, 15 bp, Homo sapiens
tttcctcatctgtag

SEQ ID NO: 1040137 - DNA, 15 bp, Homo sapiens
atttcctcatctgta

SEQ ID NO: 1040138 - DNA, 15 bp, Homo sapiens
catttcctcatctgt

SEQ ID NO: 1040139 - DNA, 15 bp, Homo sapiens
tcatttcctcatctg

SEQ ID NO: 1040140 - DNA, 15 bp, Homo sapiens
ttcatttcctcatct

SEQ ID NO: 1040141 - DNA, 15 bp, Homo sapiens
cttcatttcctcatc

SEQ ID NO: 1040142 - DNA, 15 bp, Homo sapiens
acttcatttcctcat

SEQ ID NO: 1040143 - DNA, 15 bp, Homo sapiens
aacttcatttcctca

SEQ ID NO: 1040144 - DNA, 15 bp, Homo sapiens
gaacttcatttcctc

SEQ ID NO: 1040145 - DNA, 15 bp, Homo sapiens
agaacttcatttcct

SEQ ID NO: 1040146 - DNA, 15 bp, Homo sapiens
aagaacttcatttcc

SEQ ID NO: 1040147 - DNA, 15 bp, Homo sapiens
caagaacttcatttc

SEQ ID NO: 1040148 - DNA, 15 bp, Homo sapiens
ccaagaacttcattt

SEQ ID NO: 1040149 - DNA, 15 bp, Homo sapiens
tccaagaacttcatt

SEQ ID NO: 1040150 - DNA, 15 bp, Homo sapiens
ttccaagaacttcat

SEQ ID NO: 1040151 - DNA, 15 bp, Homo sapiens
tttccaagaacttca

SEQ ID NO: 1040152 - DNA, 15 bp, Homo sapiens
atttccaagaacttc

SEQ ID NO: 1040153 - DNA, 15 bp, Homo sapiens
aatttccaagaactt

SEQ ID NO: 1040154 - DNA, 15 bp, Homo sapiens
caatttccaagaact

SEQ ID NO: 1040155 - DNA, 15 bp, Homo sapiens
acaatttccaagaac

SEQ ID NO: 1040156 - DNA, 15 bp, Homo sapiens
tacaatttccaagaa

SEQ ID NO: 1040157 - DNA, 15 bp, Homo sapiens
gtacaatttccaaga

SEQ ID NO: 1040158 - DNA, 15 bp, Homo sapiens
agtacaatttccaag

SEQ ID NO: 1040159 - DNA, 15 bp, Homo sapiens
tagtacaatttccaa

SEQ ID NO: 1040160 - DNA, 15 bp, Homo sapiens
ctagtacaatttcca

SEQ ID NO: 1040161 - DNA, 15 bp, Homo sapiens
tctagtacaatttcc

SEQ ID NO: 1040162 - DNA, 15 bp, Homo sapiens
atctagtacaatttc

SEQ ID NO: 1040163 - DNA, 15 bp, Homo sapiens
catctagtacaattt

SEQ ID NO: 1040164 - DNA, 15 bp, Homo sapiens
gcatctagtacaatt

SEQ ID NO: 1040165 - DNA, 15 bp, Homo sapiens
cgcatctagtacaat

SEQ ID NO: 1040166 - DNA, 15 bp, Homo sapiens
acgcatctagtacaa

SEQ ID NO: 1040167 - DNA, 15 bp, Homo sapiens
tacgcatctagtaca

SEQ ID NO: 1040168 - DNA, 15 bp, Homo sapiens
ttacgcatctagtac

SEQ ID NO: 1040169 - DNA, 15 bp, Homo sapiens
attacgcatctagta

SEQ ID NO: 1040170 - DNA, 15 bp, Homo sapiens
cattacgcatctagt

SEQ ID NO: 1040171 - DNA, 15 bp, Homo sapiens
tcattacgcatctag

SEQ ID NO: 1040172 - DNA, 15 bp, Homo sapiens
ctcattacgcatcta

SEQ ID NO: 1040173 - DNA, 15 bp, Homo sapiens
gctcattacgcatct

SEQ ID NO: 1040174 - DNA, 15 bp, Homo sapiens
tgctcattacgcatc

SEQ ID NO: 1040175 - DNA, 15 bp, Homo sapiens
ctgctcattacgcat

SEQ ID NO: 1040176 - DNA, 15 bp, Homo sapiens
gctgctcattacgca

SEQ ID NO: 1040177 - DNA, 15 bp, Homo sapiens
tgctgctcattacgc

SEQ ID NO: 1040178 - DNA, 15 bp, Homo sapiens
ctgctgctcattacg

SEQ ID NO: 1040179 - DNA, 15 bp, Homo sapiens
tctgctgctcattac

SEQ ID NO: 1040180 - DNA, 15 bp, Homo sapiens
atctgctgctcatta

SEQ ID NO: 1040181 - DNA, 15 bp, Homo sapiens
catctgctgctcatt

SEQ ID NO: 1040182 - DNA, 15 bp, Homo sapiens
tcatctgctgctcat

SEQ ID NO: 1040183 - DNA, 15 bp, Homo sapiens
ttcatctgctgctca

SEQ ID NO: 1040184 - DNA, 15 bp, Homo sapiens
cttcatctgctgctc

SEQ ID NO: 1040185 - DNA, 15 bp, Homo sapiens
gcttcatctgctgct

SEQ ID NO: 1040186 - DNA, 15 bp, Homo sapiens
agcttcatctgctgc

SEQ ID NO: 1040187 - DNA, 15 bp, Homo sapiens
aagcttcatctgctg

SEQ ID NO: 1040188 - DNA, 15 bp, Homo sapiens
caagcttcatctgct

SEQ ID NO: 1040189 - DNA, 15 bp, Homo sapiens
ccaagcttcatctgc

SEQ ID NO: 1040190 - DNA, 15 bp, Homo sapiens
tccaagcttcatctg

SEQ ID NO: 1040191 - DNA, 15 bp, Homo sapiens
atccaagcttcatct

SEQ ID NO: 1040192 - DNA, 15 bp, Homo sapiens
tatccaagcttcatc

SEQ ID NO: 1040193 - DNA, 15 bp, Homo sapiens
ctatccaagcttcat

SEQ ID NO: 1040194 - DNA, 15 bp, Homo sapiens
tctatccaagcttca

SEQ ID NO: 1040195 - DNA, 15 bp, Homo sapiens
ttctatccaagcttc

SEQ ID NO: 1040196 - DNA, 15 bp, Homo sapiens
tttctatccaagctt

SEQ ID NO: 1040197 - DNA, 15 bp, Homo sapiens
gtttctatccaagct

SEQ ID NO: 1040198 - DNA, 15 bp, Homo sapiens
agtttctatccaagc

SEQ ID NO: 1040199 - DNA, 15 bp, Homo sapiens
gagtttctatccaag

SEQ ID NO: 1040200 - DNA, 15 bp, Homo sapiens
tgagtttctatccaa

SEQ ID NO: 1040201 - DNA, 15 bp, Homo sapiens
ttgagtttctatcca

SEQ ID NO: 1040202 - DNA, 15 bp, Homo sapiens
tttgagtttctatcc

SEQ ID NO: 1040203 - DNA, 15 bp, Homo sapiens
atttgagtttctatc

SEQ ID NO: 1040204 - DNA, 15 bp, Homo sapiens
gatttgagtttctat

SEQ ID NO: 1040205 - DNA, 15 bp, Homo sapiens
agatttgagtttcta

SEQ ID NO: 1040206 - DNA, 15 bp, Homo sapiens
gagatttgagtttct

SEQ ID NO: 1040207 - DNA, 15 bp, Homo sapiens
agagatttgagtttc

SEQ ID NO: 1040208 - DNA, 15 bp, Homo sapiens
gagagatttgagttt

SEQ ID NO: 1040209 - DNA, 15 bp, Homo sapiens
agagagatttgagtt

SEQ ID NO: 1040210 - DNA, 15 bp, Homo sapiens
cagagagatttgagt

SEQ ID NO: 1040211 - DNA, 15 bp, Homo sapiens
tcagagagatttgag

SEQ ID NO: 1040212 - DNA, 15 bp, Homo sapiens
gtcagagagatttga

SEQ ID NO: 1040213 - DNA, 15 bp, Homo sapiens
agtcagagagatttg

SEQ ID NO: 1040214 - DNA, 15 bp, Homo sapiens
gagtcagagagattt

SEQ ID NO: 1040215 - DNA, 15 bp, Homo sapiens
tgagtcagagagatt

SEQ ID NO: 1040216 - DNA, 15 bp, Homo sapiens
ttgagtcagagagat

SEQ ID NO: 1040217 - DNA, 15 bp, Homo sapiens
cttgagtcagagaga

SEQ ID NO: 1040218 - DNA, 15 bp, Homo sapiens
tcttgagtcagagag

SEQ ID NO: 1040219 - DNA, 15 bp, Homo sapiens
atcttgagtcagaga

SEQ ID NO: 1040220 - DNA, 15 bp, Homo sapiens
aatcttgagtcagag

SEQ ID NO: 1040221 - DNA, 15 bp, Homo sapiens
aaatcttgagtcaga

SEQ ID NO: 1040222 - DNA, 15 bp, Homo sapiens
taaatcttgagtcag

SEQ ID NO: 1040223 - DNA, 15 bp, Homo sapiens
ataaatcttgagtca

SEQ ID NO: 1040224 - DNA, 15 bp, Homo sapiens
cataaatcttgagtc

SEQ ID NO: 1040225 - DNA, 15 bp, Homo sapiens
gcataaatcttgagt

SEQ ID NO: 1040226 - DNA, 15 bp, Homo sapiens
agcataaatcttgag

SEQ ID NO: 1040227 - DNA, 15 bp, Homo sapiens
gagcataaatcttga

SEQ ID NO: 1040228 - DNA, 15 bp, Homo sapiens
agagcataaatcttg

SEQ ID NO: 1040229 - DNA, 15 bp, Homo sapiens
tagagcataaatctt

SEQ ID NO: 1040230 - DNA, 15 bp, Homo sapiens
ttagagcataaatct

SEQ ID NO: 1040231 - DNA, 15 bp, Homo sapiens
cttagagcataaatc

SEQ ID NO: 1040232 - DNA, 15 bp, Homo sapiens
acttagagcataaat

SEQ ID NO: 1040233 - DNA, 15 bp, Homo sapiens
aacttagagcataaa

SEQ ID NO: 1040234 - DNA, 15 bp, Homo sapiens
taacttagagcataa

SEQ ID NO: 1040235 - DNA, 15 bp, Homo sapiens
gtaacttagagcata

SEQ ID NO: 1040236 - DNA, 15 bp, Homo sapiens
tgtaacttagagcat

SEQ ID NO: 1040237 - DNA, 15 bp, Homo sapiens
ttgtaacttagagca

SEQ ID NO: 1040238 - DNA, 15 bp, Homo sapiens
attgtaacttagagc

SEQ ID NO: 1040239 - DNA, 15 bp, Homo sapiens
tattgtaacttagag

SEQ ID NO: 1040240 - DNA, 15 bp, Homo sapiens
ttattgtaacttaga

SEQ ID NO: 1040241 - DNA, 15 bp, Homo sapiens
tttattgtaacttag

SEQ ID NO: 1040242 - DNA, 15 bp, Homo sapiens
gtttattgtaactta

SEQ ID NO: 1040243 - DNA, 15 bp, Homo sapiens
tgtttattgtaactt

SEQ ID NO: 1040244 - DNA, 15 bp, Homo sapiens
gtgtttattgtaact

SEQ ID NO: 1040245 - DNA, 15 bp, Homo sapiens
ggtgtttattgtaac

SEQ ID NO: 1040246 - DNA, 15 bp, Homo sapiens
cggtgtttattgtaa

SEQ ID NO: 1040247 - DNA, 15 bp, Homo sapiens
ccggtgtttattgta

SEQ ID NO: 1040248 - DNA, 15 bp, Homo sapiens
tccggtgtttattgt

SEQ ID NO: 1040249 - DNA, 15 bp, Homo sapiens
ctccggtgtttattg

SEQ ID NO: 1040250 - DNA, 15 bp, Homo sapiens
actccggtgtttatt

SEQ ID NO: 1040251 - DNA, 15 bp, Homo sapiens
aactccggtgtttat

SEQ ID NO: 1040252 - DNA, 15 bp, Homo sapiens
taactccggtgttta

SEQ ID NO: 1040253 - DNA, 15 bp, Homo sapiens
gtaactccggtgttt

SEQ ID NO: 1040254 - DNA, 15 bp, Homo sapiens
tgtaactccggtgtt

SEQ ID NO: 1040255 - DNA, 15 bp, Homo sapiens
gtgtaactccggtgt

SEQ ID NO: 1040256 - DNA, 15 bp, Homo sapiens
agtgtaactccggtg

SEQ ID NO: 1040257 - DNA, 15 bp, Homo sapiens
aagtgtaactccggt

SEQ ID NO: 1040258 - DNA, 15 bp, Homo sapiens
taagtgtaactccgg

SEQ ID NO: 1040259 - DNA, 15 bp, Homo sapiens
ttaagtgtaactccg

SEQ ID NO: 1040260 - DNA, 15 bp, Homo sapiens
tttaagtgtaactcc

SEQ ID NO: 1040261 - DNA, 15 bp, Homo sapiens
ctttaagtgtaactc

SEQ ID NO: 1040262 - DNA, 15 bp, Homo sapiens
tctttaagtgtaact

SEQ ID NO: 1040263 - DNA, 15 bp, Homo sapiens
ctctttaagtgtaac

SEQ ID NO: 1040264 - DNA, 15 bp, Homo sapiens
gctctttaagtgtaa

SEQ ID NO: 1040265 - DNA, 15 bp, Homo sapiens
agctctttaagtgta

SEQ ID NO: 1040266 - DNA, 15 bp, Homo sapiens
aagctctttaagtgt

SEQ ID NO: 1040267 - DNA, 15 bp, Homo sapiens
taagctctttaagtg

SEQ ID NO: 1040268 - DNA, 15 bp, Homo sapiens
ataagctctttaagt

SEQ ID NO: 1040269 - DNA, 15 bp, Homo sapiens
cataagctctttaag

SEQ ID NO: 1040270 - DNA, 15 bp, Homo sapiens
ccataagctctttaa

SEQ ID NO: 1040271 - DNA, 15 bp, Homo sapiens
accataagctcttta

SEQ ID NO: 1040272 - DNA, 15 bp, Homo sapiens
gaccataagctcttt

SEQ ID NO: 1040273 - DNA, 15 bp, Homo sapiens
agaccataagctctt

SEQ ID NO: 1040274 - DNA, 15 bp, Homo sapiens
tagaccataagctct

SEQ ID NO: 1040275 - DNA, 15 bp, Homo sapiens
ttagaccataagctc

SEQ ID NO: 1040276 - DNA, 15 bp, Homo sapiens
attagaccataagct

SEQ ID NO: 1040277 - DNA, 15 bp, Homo sapiens
aattagaccataagc

SEQ ID NO: 1040278 - DNA, 15 bp, Homo sapiens
caattagaccataag

SEQ ID NO: 1040279 - DNA, 15 bp, Homo sapiens
tcaattagaccataa

SEQ ID NO: 1040280 - DNA, 15 bp, Homo sapiens
ctcaattagaccata

SEQ ID NO: 1040281 - DNA, 15 bp, Homo sapiens
tctcaattagaccat

SEQ ID NO: 1040282 - DNA, 15 bp, Homo sapiens
ctctcaattagacca

SEQ ID NO: 1040283 - DNA, 15 bp, Homo sapiens
cctctcaattagacc

SEQ ID NO: 1040284 - DNA, 15 bp, Homo sapiens
tcctctcaattagac

SEQ ID NO: 1040285 - DNA, 15 bp, Homo sapiens
gtcctctcaattaga

SEQ ID NO: 1040286 - DNA, 15 bp, Homo sapiens
tgtcctctcaattag

SEQ ID NO: 1040287 - DNA, 15 bp, Homo sapiens
ctgtcctctcaatta

SEQ ID NO: 1040288 - DNA, 15 bp, Homo sapiens
tctgtcctctcaatt

SEQ ID NO: 1040289 - DNA, 15 bp, Homo sapiens
ttctgtcctctcaat

SEQ ID NO: 1040290 - DNA, 15 bp, Homo sapiens
tttctgtcctctcaa

SEQ ID NO: 1040291 - DNA, 15 bp, Homo sapiens
ttttctgtcctctca

SEQ ID NO: 1040292 - DNA, 15 bp, Homo sapiens
attttctgtcctctc

SEQ ID NO: 1040293 - DNA, 15 bp, Homo sapiens
aattttctgtcctct

SEQ ID NO: 1040294 - DNA, 15 bp, Homo sapiens
gaattttctgtcctc

SEQ ID NO: 1040295 - DNA, 15 bp, Homo sapiens
tgaattttctgtcct

SEQ ID NO: 1040296 - DNA, 15 bp, Homo sapiens
gtgaattttctgtcc

SEQ ID NO: 1040297 - DNA, 15 bp, Homo sapiens
tgtgaattttctgtc

SEQ ID NO: 1040298 - DNA, 15 bp, Homo sapiens
ttgtgaattttctgt

SEQ ID NO: 1040299 - DNA, 15 bp, Homo sapiens
cttgtgaattttctg

SEQ ID NO: 1040300 - DNA, 15 bp, Homo sapiens
tcttgtgaattttct

SEQ ID NO: 1040301 - DNA, 15 bp, Homo sapiens
ttcttgtgaattttc

SEQ ID NO: 1040302 - DNA, 15 bp, Homo sapiens
tttcttgtgaatttt

SEQ ID NO: 1040303 - DNA, 15 bp, Homo sapiens
ctttcttgtgaattt

SEQ ID NO: 1040304 - DNA, 15 bp, Homo sapiens
tctttcttgtgaatt

SEQ ID NO: 1040305 - DNA, 15 bp, Homo sapiens
ttctttcttgtgaat

SEQ ID NO: 1040306 - DNA, 15 bp, Homo sapiens
gttctttcttgtgaa

SEQ ID NO: 1040307 - DNA, 15 bp, Homo sapiens
ggttctttcttgtga

SEQ ID NO: 1040308 - DNA, 15 bp, Homo sapiens
aggttctttcttgtg

SEQ ID NO: 1040309 - DNA, 15 bp, Homo sapiens
caggttctttcttgt

SEQ ID NO: 1040310 - DNA, 15 bp, Homo sapiens
acaggttctttcttg

SEQ ID NO: 1040311 - DNA, 15 bp, Homo sapiens
cacaggttctttctt

SEQ ID NO: 1040312 - DNA, 15 bp, Homo sapiens
tcacaggttctttct

SEQ ID NO: 1040313 - DNA, 15 bp, Homo sapiens
ttcacaggttctttc

SEQ ID NO: 1040314 - DNA, 15 bp, Homo sapiens
cttcacaggttcttt

SEQ ID NO: 1040315 - DNA, 15 bp, Homo sapiens
tcttcacaggttctt

SEQ ID NO: 1040316 - DNA, 15 bp, Homo sapiens
ctcttcacaggttct

SEQ ID NO: 1040317 - DNA, 15 bp, Homo sapiens
actcttcacaggttc

SEQ ID NO: 1040318 - DNA, 15 bp, Homo sapiens
tactcttcacaggtt

SEQ ID NO: 1040319 - DNA, 15 bp, Homo sapiens
ctactcttcacaggt

SEQ ID NO: 1040320 - DNA, 15 bp, Homo sapiens
actactcttcacagg

SEQ ID NO: 1040321 - DNA, 15 bp, Homo sapiens
cactactcttcacag

SEQ ID NO: 1040322 - DNA, 15 bp, Homo sapiens
ccactactcttcaca

SEQ ID NO: 1040323 - DNA, 15 bp, Homo sapiens
accactactcttcac

SEQ ID NO: 1040324 - DNA, 15 bp, Homo sapiens
aaccactactcttca

SEQ ID NO: 1040325 - DNA, 15 bp, Homo sapiens
taaccactactcttc

SEQ ID NO: 1040326 - DNA, 15 bp, Homo sapiens
ataaccactactctt

SEQ ID NO: 1040327 - DNA, 15 bp, Homo sapiens
cataaccactactct

SEQ ID NO: 1040328 - DNA, 15 bp, Homo sapiens
acataaccactactc

SEQ ID NO: 1040329 - DNA, 15 bp, Homo sapiens
cacataaccactact

SEQ ID NO: 1040330 - DNA, 15 bp, Homo sapiens
gcacataaccactac

SEQ ID NO: 1040331 - DNA, 15 bp, Homo sapiens
agcacataaccacta

SEQ ID NO: 1040332 - DNA, 15 bp, Homo sapiens
aagcacataaccact

SEQ ID NO: 1040333 - DNA, 15 bp, Homo sapiens
taagcacataaccac

SEQ ID NO: 1040334 - DNA, 15 bp, Homo sapiens
ctaagcacataacca

SEQ ID NO: 1040335 - DNA, 15 bp, Homo sapiens
cctaagcacataacc

SEQ ID NO: 1040336 - DNA, 15 bp, Homo sapiens
gcctaagcacataac

SEQ ID NO: 1040337 - DNA, 15 bp, Homo sapiens
agcctaagcacataa

SEQ ID NO: 1040338 - DNA, 15 bp, Homo sapiens
cagcctaagcacata

SEQ ID NO: 1040339 - DNA, 15 bp, Homo sapiens
acagcctaagcacat

SEQ ID NO: 1040340 - DNA, 15 bp, Homo sapiens
tacagcctaagcaca

SEQ ID NO: 1040341 - DNA, 15 bp, Homo sapiens
ctacagcctaagcac

SEQ ID NO: 1040342 - DNA, 15 bp, Homo sapiens
tctacagcctaagca

SEQ ID NO: 1040343 - DNA, 15 bp, Homo sapiens
gtctacagcctaagc

SEQ ID NO: 1040344 - DNA, 15 bp, Homo sapiens
ggtctacagcctaag

SEQ ID NO: 1040345 - DNA, 15 bp, Homo sapiens
aggtctacagcctaa

SEQ ID NO: 1040346 - DNA, 15 bp, Homo sapiens
caggtctacagccta

SEQ ID NO: 1040347 - DNA, 15 bp, Homo sapiens
tcaggtctacagcct

SEQ ID NO: 1040348 - DNA, 15 bp, Homo sapiens
ttcaggtctacagcc

SEQ ID NO: 1040349 - DNA, 15 bp, Homo sapiens
attcaggtctacagc

SEQ ID NO: 1040350 - DNA, 15 bp, Homo sapiens
aattcaggtctacag

SEQ ID NO: 1040351 - DNA, 15 bp, Homo sapiens
aaattcaggtctaca

SEQ ID NO: 1040352 - DNA, 15 bp, Homo sapiens
caaattcaggtctac

SEQ ID NO: 1040353 - DNA, 15 bp, Homo sapiens
ccaaattcaggtcta

SEQ ID NO: 1040354 - DNA, 15 bp, Homo sapiens
tccaaattcaggtct

SEQ ID NO: 1040355 - DNA, 15 bp, Homo sapiens
atccaaattcaggtc

SEQ ID NO: 1040356 - DNA, 15 bp, Homo sapiens
gatccaaattcaggt

SEQ ID NO: 1040357 - DNA, 15 bp, Homo sapiens
ggatccaaattcagg

SEQ ID NO: 1040358 - DNA, 15 bp, Homo sapiens
gggatccaaattcag

SEQ ID NO: 1040359 - DNA, 15 bp, Homo sapiens
tgggatccaaattca

SEQ ID NO: 1040360 - DNA, 15 bp, Homo sapiens
gtgggatccaaattc

SEQ ID NO: 1040361 - DNA, 15 bp, Homo sapiens
tgtgggatccaaatt

SEQ ID NO: 1040362 - DNA, 15 bp, Homo sapiens
atgtgggatccaaat

SEQ ID NO: 1040363 - DNA, 15 bp, Homo sapiens
gatgtgggatccaaa

SEQ ID NO: 1040364 - DNA, 15 bp, Homo sapiens
tgatgtgggatccaa

SEQ ID NO: 1040365 - DNA, 15 bp, Homo sapiens
gtgatgtgggatcca

SEQ ID NO: 1040366 - DNA, 15 bp, Homo sapiens
tgtgatgtgggatcc

SEQ ID NO: 1040367 - DNA, 15 bp, Homo sapiens
gtgtgatgtgggatc

SEQ ID NO: 1040368 - DNA, 15 bp, Homo sapiens
agtgtgatgtgggat

SEQ ID NO: 1040369 - DNA, 15 bp, Homo sapiens
tagtgtgatgtggga

SEQ ID NO: 1040370 - DNA, 15 bp, Homo sapiens
ttagtgtgatgtggg

SEQ ID NO: 1040371 - DNA, 15 bp, Homo sapiens
gttagtgtgatgtgg

SEQ ID NO: 1040372 - DNA, 15 bp, Homo sapiens
agttagtgtgatgtg

SEQ ID NO: 1040373 - DNA, 15 bp, Homo sapiens
aagttagtgtgatgt

SEQ ID NO: 1040374 - DNA, 15 bp, Homo sapiens
aaagttagtgtgatg

SEQ ID NO: 1040375 - DNA, 15 bp, Homo sapiens
gaaagttagtgtgat

SEQ ID NO: 1040376 - DNA, 15 bp, Homo sapiens
agaaagttagtgtga

SEQ ID NO: 1040377 - DNA, 15 bp, Homo sapiens
cagaaagttagtgtg

SEQ ID NO: 1040378 - DNA, 15 bp, Homo sapiens
acagaaagttagtgt

SEQ ID NO: 1040379 - DNA, 15 bp, Homo sapiens
cacagaaagttagtg

SEQ ID NO: 1040380 - DNA, 15 bp, Homo sapiens
acacagaaagttagt

SEQ ID NO: 1040381 - DNA, 15 bp, Homo sapiens
cacacagaaagttag

SEQ ID NO: 1040382 - DNA, 15 bp, Homo sapiens
gcacacagaaagtta

SEQ ID NO: 1040383 - DNA, 15 bp, Homo sapiens
ggcacacagaaagtt

SEQ ID NO: 1040384 - DNA, 15 bp, Homo sapiens
aggcacacagaaagt

SEQ ID NO: 1040385 - DNA, 15 bp, Homo sapiens
caggcacacagaaag

SEQ ID NO: 1040386 - DNA, 15 bp, Homo sapiens
tcaggcacacagaaa

SEQ ID NO: 1040387 - DNA, 15 bp, Homo sapiens
ctcaggcacacagaa

SEQ ID NO: 1040388 - DNA, 15 bp, Homo sapiens
gctcaggcacacaga

SEQ ID NO: 1040389 - DNA, 15 bp, Homo sapiens
tgctcaggcacacag

SEQ ID NO: 1040390 - DNA, 15 bp, Homo sapiens
ttgctcaggcacaca

SEQ ID NO: 1040391 - DNA, 15 bp, Homo sapiens
cttgctcaggcacac

SEQ ID NO: 1040392 - DNA, 15 bp, Homo sapiens
acttgctcaggcaca

SEQ ID NO: 1040393 - DNA, 15 bp, Homo sapiens
aacttgctcaggcac

SEQ ID NO: 1040394 - DNA, 15 bp, Homo sapiens
taacttgctcaggca

SEQ ID NO: 1040395 - DNA, 15 bp, Homo sapiens
ataacttgctcaggc

SEQ ID NO: 1040396 - DNA, 15 bp, Homo sapiens
aataacttgctcagg

SEQ ID NO: 1040397 - DNA, 15 bp, Homo sapiens
aaataacttgctcag

SEQ ID NO: 1040398 - DNA, 15 bp, Homo sapiens
gaaataacttgctca

SEQ ID NO: 1040399 - DNA, 15 bp, Homo sapiens
tgaaataacttgctc

SEQ ID NO: 1040400 - DNA, 15 bp, Homo sapiens
gtgaaataacttgct

SEQ ID NO: 1040401 - DNA, 15 bp, Homo sapiens
agtgaaataacttgc

SEQ ID NO: 1040402 - DNA, 15 bp, Homo sapiens
aagtgaaataacttg

SEQ ID NO: 1040403 - DNA, 15 bp, Homo sapiens
aaagtgaaataactt

SEQ ID NO: 1040404 - DNA, 15 bp, Homo sapiens
aaaagtgaaataact

SEQ ID NO: 1040405 - DNA, 15 bp, Homo sapiens
gaaaagtgaaataac

SEQ ID NO: 1040406 - DNA, 15 bp, Homo sapiens
agaaaagtgaaataa

SEQ ID NO: 1040407 - DNA, 15 bp, Homo sapiens
cagaaaagtgaaata

SEQ ID NO: 1040408 - DNA, 15 bp, Homo sapiens
tcagaaaagtgaaat

SEQ ID NO: 1040409 - DNA, 15 bp, Homo sapiens
ttcagaaaagtgaaa

SEQ ID NO: 1040410 - DNA, 15 bp, Homo sapiens
attcagaaaagtgaa

SEQ ID NO: 1040411 - DNA, 15 bp, Homo sapiens
aattcagaaaagtga

SEQ ID NO: 1040412 - DNA, 15 bp, Homo sapiens
aaattcagaaaagtg

SEQ ID NO: 1040413 - DNA, 15 bp, Homo sapiens
gaaattcagaaaagt

SEQ ID NO: 1040414 - DNA, 15 bp, Homo sapiens
ggaaattcagaaaag

SEQ ID NO: 1040415 - DNA, 15 bp, Homo sapiens
tggaaattcagaaaa

SEQ ID NO: 1040416 - DNA, 15 bp, Homo sapiens
atggaaattcagaaa

SEQ ID NO: 1040417 - DNA, 15 bp, Homo sapiens
aatggaaattcagaa

SEQ ID NO: 1040418 - DNA, 15 bp, Homo sapiens
aaatggaaattcaga

SEQ ID NO: 1040419 - DNA, 15 bp, Homo sapiens
aaaatggaaattcag

SEQ ID NO: 1040420 - DNA, 15 bp, Homo sapiens
gaaaatggaaattca

SEQ ID NO: 1040421 - DNA, 15 bp, Homo sapiens
agaaaatggaaattc

SEQ ID NO: 1040422 - DNA, 15 bp, Homo sapiens
gagaaaatggaaatt

SEQ ID NO: 1040423 - DNA, 15 bp, Homo sapiens
tgagaaaatggaaat

SEQ ID NO: 1040424 - DNA, 15 bp, Homo sapiens
atgagaaaatggaaa

SEQ ID NO: 1040425 - DNA, 15 bp, Homo sapiens
gatgagaaaatggaa

SEQ ID NO: 1040426 - DNA, 15 bp, Homo sapiens
agatgagaaaatgga

SEQ ID NO: 1040427 - DNA, 15 bp, Homo sapiens
cagatgagaaaatgg

SEQ ID NO: 1040428 - DNA, 15 bp, Homo sapiens
tcagatgagaaaatg

SEQ ID NO: 1040429 - DNA, 15 bp, Homo sapiens
ttcagatgagaaaat

SEQ ID NO: 1040430 - DNA, 15 bp, Homo sapiens
tttcagatgagaaaa

SEQ ID NO: 1040431 - DNA, 15 bp, Homo sapiens
ttttcagatgagaaa

SEQ ID NO: 1040432 - DNA, 15 bp, Homo sapiens
tttttcagatgagaa

SEQ ID NO: 1040433 - DNA, 15 bp, Homo sapiens
ttttttcagatgaga

SEQ ID NO: 1040434 - DNA, 15 bp, Homo sapiens
attttttcagatgag

SEQ ID NO: 1040435 - DNA, 15 bp, Homo sapiens
tattttttcagatga

SEQ ID NO: 1040436 - DNA, 15 bp, Homo sapiens
ctattttttcagatg

SEQ ID NO: 1040437 - DNA, 15 bp, Homo sapiens
tctattttttcagat

SEQ ID NO: 1040438 - DNA, 15 bp, Homo sapiens
ttctattttttcaga

SEQ ID NO: 1040439 - DNA, 15 bp, Homo sapiens
attctattttttcag

SEQ ID NO: 1040440 - DNA, 15 bp, Homo sapiens
tattctattttttca

SEQ ID NO: 1040441 - DNA, 15 bp, Homo sapiens
gtattctattttttc

SEQ ID NO: 1040442 - DNA, 15 bp, Homo sapiens
tgtattctatttttt

SEQ ID NO: 1040443 - DNA, 15 bp, Homo sapiens
atgtattctattttt

SEQ ID NO: 1040444 - DNA, 15 bp, Homo sapiens
gatgtattctatttt

SEQ ID NO: 1040445 - DNA, 15 bp, Homo sapiens
ggatgtattctattt

SEQ ID NO: 1040446 - DNA, 15 bp, Homo sapiens
gggatgtattctatt

SEQ ID NO: 1040447 - DNA, 15 bp, Homo sapiens
agggatgtattctat

SEQ ID NO: 1040448 - DNA, 15 bp, Homo sapiens
gagggatgtattcta

SEQ ID NO: 1040449 - DNA, 15 bp, Homo sapiens
tgagggatgtattct

SEQ ID NO: 1040450 - DNA, 15 bp, Homo sapiens
atgagggatgtattc

SEQ ID NO: 1040451 - DNA, 15 bp, Homo sapiens
tatgagggatgtatt

SEQ ID NO: 1040452 - DNA, 15 bp, Homo sapiens
ctatgagggatgtat

SEQ ID NO: 1040453 - DNA, 15 bp, Homo sapiens
tctatgagggatgta

SEQ ID NO: 1040454 - DNA, 15 bp, Homo sapiens
ttctatgagggatgt

SEQ ID NO: 1040455 - DNA, 15 bp, Homo sapiens
attctatgagggatg

SEQ ID NO: 1040456 - DNA, 15 bp, Homo sapiens
aattctatgagggat

SEQ ID NO: 1040457 - DNA, 15 bp, Homo sapiens
caattctatgaggga

SEQ ID NO: 1040458 - DNA, 15 bp, Homo sapiens
gcaattctatgaggg

SEQ ID NO: 1040459 - DNA, 15 bp, Homo sapiens
ggcaattctatgagg

SEQ ID NO: 1040460 - DNA, 15 bp, Homo sapiens
tggcaattctatgag

SEQ ID NO: 1040461 - DNA, 15 bp, Homo sapiens
ctggcaattctatga

SEQ ID NO: 1040462 - DNA, 15 bp, Homo sapiens
cctggcaattctatg

SEQ ID NO: 1040463 - DNA, 15 bp, Homo sapiens
tcctggcaattctat

SEQ ID NO: 1040464 - DNA, 15 bp, Homo sapiens
ctcctggcaattcta

SEQ ID NO: 1040465 - DNA, 15 bp, Homo sapiens
cctcctggcaattct

SEQ ID NO: 1040466 - DNA, 15 bp, Homo sapiens
tcctcctggcaattc

SEQ ID NO: 1040467 - DNA, 15 bp, Homo sapiens
atcctcctggcaatt

SEQ ID NO: 1040468 - DNA, 15 bp, Homo sapiens
aatcctcctggcaat

SEQ ID NO: 1040469 - DNA, 15 bp, Homo sapiens
taatcctcctggcaa

SEQ ID NO: 1040470 - DNA, 15 bp, Homo sapiens
ttaatcctcctggca

SEQ ID NO: 1040471 - DNA, 15 bp, Homo sapiens
tttaatcctcctggc

SEQ ID NO: 1040472 - DNA, 15 bp, Homo sapiens
atttaatcctcctgg

SEQ ID NO: 1040473 - DNA, 15 bp, Homo sapiens
aatttaatcctcctg

SEQ ID NO: 1040474 - DNA, 15 bp, Homo sapiens
taatttaatcctcct

SEQ ID NO: 1040475 - DNA, 15 bp, Homo sapiens
ctaatttaatcctcc

SEQ ID NO: 1040476 - DNA, 15 bp, Homo sapiens
cctaatttaatcctc

SEQ ID NO: 1040477 - DNA, 15 bp, Homo sapiens
acctaatttaatcct

SEQ ID NO: 1040478 - DNA, 15 bp, Homo sapiens
aacctaatttaatcc

SEQ ID NO: 1040479 - DNA, 15 bp, Homo sapiens
taacctaatttaatc

SEQ ID NO: 1040480 - DNA, 15 bp, Homo sapiens
gtaacctaatttaat

SEQ ID NO: 1040481 - DNA, 15 bp, Homo sapiens
agtaacctaatttaa

SEQ ID NO: 1040482 - DNA, 15 bp, Homo sapiens
gagtaacctaattta

SEQ ID NO: 1040483 - DNA, 15 bp, Homo sapiens
tgagtaacctaattt

SEQ ID NO: 1040484 - DNA, 15 bp, Homo sapiens
atgagtaacctaatt

SEQ ID NO: 1040485 - DNA, 15 bp, Homo sapiens
catgagtaacctaat

SEQ ID NO: 1040486 - DNA, 15 bp, Homo sapiens
acatgagtaacctaa

SEQ ID NO: 1040487 - DNA, 15 bp, Homo sapiens
tacatgagtaaccta

SEQ ID NO: 1040488 - DNA, 15 bp, Homo sapiens
ttacatgagtaacct

SEQ ID NO: 1040489 - DNA, 15 bp, Homo sapiens
tttacatgagtaacc

SEQ ID NO: 1040490 - DNA, 15 bp, Homo sapiens
gtttacatgagtaac

SEQ ID NO: 1040491 - DNA, 15 bp, Homo sapiens
tgtttacatgagtaa

SEQ ID NO: 1040492 - DNA, 15 bp, Homo sapiens
ctgtttacatgagta

SEQ ID NO: 1040493 - DNA, 15 bp, Homo sapiens
actgtttacatgagt

SEQ ID NO: 1040494 - DNA, 15 bp, Homo sapiens
cactgtttacatgag

SEQ ID NO: 1040495 - DNA, 15 bp, Homo sapiens
acactgtttacatga

SEQ ID NO: 1040496 - DNA, 15 bp, Homo sapiens
aacactgtttacatg

SEQ ID NO: 1040497 - DNA, 15 bp, Homo sapiens
aaacactgtttacat

SEQ ID NO: 1040498 - DNA, 15 bp, Homo sapiens
aaaacactgtttaca

SEQ ID NO: 1040499 - DNA, 15 bp, Homo sapiens
caaaacactgtttac

SEQ ID NO: 1040500 - DNA, 15 bp, Homo sapiens
acaaaacactgttta

SEQ ID NO: 1040501 - DNA, 15 bp, Homo sapiens
atacaaaacactgtt

SEQ ID NO: 1040502 - DNA, 15 bp, Homo sapiens
aatacaaaacactgt

SEQ ID NO: 1040503 - DNA, 15 bp, Homo sapiens
aaatacaaaacactg

SEQ ID NO: 1040504 - DNA, 15 bp, Homo sapiens
taaatacaaaacact

SEQ ID NO: 1040505 - DNA, 15 bp, Homo sapiens
ttaaatacaaaacac

SEQ ID NO: 1040506 - DNA, 15 bp, Homo sapiens
attaaatacaaaaca

SEQ ID NO: 1040507 - DNA, 15 bp, Homo sapiens
tattaaatacaaaac

SEQ ID NO: 1040508 - DNA, 15 bp, Homo sapiens
ttattaaatacaaaa

SEQ ID NO: 1040509 - DNA, 15 bp, Homo sapiens
cttattaaatacaaa

SEQ ID NO: 1040510 - DNA, 15 bp, Homo sapiens
acttattaaatacaa

SEQ ID NO: 1040511 - DNA, 15 bp, Homo sapiens
cacttattaaataca

SEQ ID NO: 1040512 - DNA, 15 bp, Homo sapiens
gcacttattaaatac

SEQ ID NO: 1040513 - DNA, 15 bp, Homo sapiens
agcacttattaaata

SEQ ID NO: 1040514 - DNA, 15 bp, Homo sapiens
cagcacttattaaat

SEQ ID NO: 1040515 - DNA, 15 bp, Homo sapiens
acagcacttattaaa

SEQ ID NO: 1040516 - DNA, 15 bp, Homo sapiens
cacagcacttattaa

SEQ ID NO: 1040517 - DNA, 15 bp, Homo sapiens
tcacagcacttatta

SEQ ID NO: 1040518 - DNA, 15 bp, Homo sapiens
atcacagcacttatt

SEQ ID NO: 1040519 - DNA, 15 bp, Homo sapiens
aatcacagcacttat

SEQ ID NO: 1040520 - DNA, 15 bp, Homo sapiens
taatcacagcactta

SEQ ID NO: 1040521 - DNA, 15 bp, Homo sapiens
ataatcacagcactt

SEQ ID NO: 1040522 - DNA, 15 bp, Homo sapiens
aataatcacagcact

SEQ ID NO: 1040523 - DNA, 15 bp, Homo sapiens
taataatcacagcac

SEQ ID NO: 1040524 - DNA, 15 bp, Homo sapiens
gtaataatcacagca

SEQ ID NO: 1040525 - DNA, 15 bp, Homo sapiens
ggtaataatcacagc

SEQ ID NO: 1040526 - DNA, 15 bp, Homo sapiens
tggtaataatcacag

SEQ ID NO: 1040527 - DNA, 15 bp, Homo sapiens
gtggtaataatcaca

SEQ ID NO: 1040528 - DNA, 15 bp, Homo sapiens
agtggtaataatcac

SEQ ID NO: 1040529 - DNA, 15 bp, Homo sapiens
aagtggtaataatca

SEQ ID NO: 1040530 - DNA, 15 bp, Homo sapiens
aaagtggtaataatc

SEQ ID NO: 1040531 - DNA, 15 bp, Homo sapiens
aaaagtggtaataat

SEQ ID NO: 1040532 - DNA, 15 bp, Homo sapiens
taaaagtggtaataa

SEQ ID NO: 1040533 - DNA, 15 bp, Homo sapiens
ataaaagtggtaata

SEQ ID NO: 1040534 - DNA, 15 bp, Homo sapiens
gataaaagtggtaat

SEQ ID NO: 1040535 - DNA, 15 bp, Homo sapiens
agataaaagtggtaa

SEQ ID NO: 1040536 - DNA, 15 bp, Homo sapiens
cagataaaagtggta

SEQ ID NO: 1040537 - DNA, 15 bp, Homo sapiens
acagataaaagtggt

SEQ ID NO: 1040538 - DNA, 15 bp, Homo sapiens
aacagataaaagtgg

SEQ ID NO: 1040539 - DNA, 15 bp, Homo sapiens
aaacagataaaagtg

SEQ ID NO: 1040540 - DNA, 15 bp, Homo sapiens
aaaacagataaaagt

SEQ ID NO: 1040541 - DNA, 15 bp, Homo sapiens
gaaaacagataaaag

SEQ ID NO: 1040542 - DNA, 15 bp, Homo sapiens
agaaaacagataaaa

SEQ ID NO: 1040543 - DNA, 15 bp, Homo sapiens
cagaaaacagataaa

SEQ ID NO: 1040544 - DNA, 15 bp, Homo sapiens
acagaaaacagataa

SEQ ID NO: 1040545 - DNA, 15 bp, Homo sapiens
tacagaaaacagata

SEQ ID NO: 1040546 - DNA, 15 bp, Homo sapiens
ttacagaaaacagat

SEQ ID NO: 1040547 - DNA, 15 bp, Homo sapiens
gttacagaaaacaga

SEQ ID NO: 1040548 - DNA, 15 bp, Homo sapiens
cgttacagaaaacag

SEQ ID NO: 1040549 - DNA, 15 bp, Homo sapiens
tcgttacagaaaaca

SEQ ID NO: 1040550 - DNA, 15 bp, Homo sapiens
gtcgttacagaaaac

SEQ ID NO: 1040551 - DNA, 15 bp, Homo sapiens
cgtcgttacagaaaa

SEQ ID NO: 1040552 - DNA, 15 bp, Homo sapiens
tcgtcgttacagaaa

SEQ ID NO: 1040553 - DNA, 15 bp, Homo sapiens
gtcgtcgttacagaa

SEQ ID NO: 1040554 - DNA, 15 bp, Homo sapiens
tgtcgtcgttacaga

SEQ ID NO: 1040555 - DNA, 15 bp, Homo sapiens
ctgtcgtcgttacag

SEQ ID NO: 1040556 - DNA, 15 bp, Homo sapiens
tctgtcgtcgttaca

SEQ ID NO: 1040557 - DNA, 15 bp, Homo sapiens
ctctgtcgtcgttac

SEQ ID NO: 1040558 - DNA, 15 bp, Homo sapiens
cctctgtcgtcgtta

SEQ ID NO: 1040559 - DNA, 15 bp, Homo sapiens
ccctctgtcgtcgtt

SEQ ID NO: 1040560 - DNA, 15 bp, Homo sapiens
accctctgtcgtcgt

SEQ ID NO: 1040561 - DNA, 15 bp, Homo sapiens
caccctctgtcgtcg

SEQ ID NO: 1040562 - DNA, 15 bp, Homo sapiens
acaccctctgtcgtc

SEQ ID NO: 1040563 - DNA, 15 bp, Homo sapiens
tacaccctctgtcgt

SEQ ID NO: 1040564 - DNA, 15 bp, Homo sapiens
atacaccctctgtcg

SEQ ID NO: 1040565 - DNA, 15 bp, Homo sapiens
aatacaccctctgtc

SEQ ID NO: 1040566 - DNA, 15 bp, Homo sapiens
taatacaccctctgt

SEQ ID NO: 1040567 - DNA, 15 bp, Homo sapiens
ataatacaccctctg

SEQ ID NO: 1040568 - DNA, 15 bp, Homo sapiens
tataatacaccctct

SEQ ID NO: 1040569 - DNA, 15 bp, Homo sapiens
atataatacaccctc

SEQ ID NO: 1040570 - DNA, 15 bp, Homo sapiens
gatataatacaccct

SEQ ID NO: 1040571 - DNA, 15 bp, Homo sapiens
tgatataatacaccc

SEQ ID NO: 1040572 - DNA, 15 bp, Homo sapiens
atgatataatacacc

SEQ ID NO: 1040573 - DNA, 15 bp, Homo sapiens
catgatataatacac

SEQ ID NO: 1040574 - DNA, 15 bp, Homo sapiens
acatgatataataca

SEQ ID NO: 1040575 - DNA, 15 bp, Homo sapiens
tacatgatataatac

SEQ ID NO: 1040576 - DNA, 15 bp, Homo sapiens
gtacatgatataata

SEQ ID NO: 1040577 - DNA, 15 bp, Homo sapiens
agtacatgatataat

SEQ ID NO: 1040578 - DNA, 15 bp, Homo sapiens
tagtacatgatataa

SEQ ID NO: 1040579 - DNA, 15 bp, Homo sapiens
ttagtacatgatata

SEQ ID NO: 1040580 - DNA, 15 bp, Homo sapiens
tttagtacatgatat

SEQ ID NO: 1040581 - DNA, 15 bp, Homo sapiens
ctttagtacatgata

SEQ ID NO: 1040582 - DNA, 15 bp, Homo sapiens
cctttagtacatgat

SEQ ID NO: 1040583 - DNA, 15 bp, Homo sapiens
gcctttagtacatga

SEQ ID NO: 1040584 - DNA, 15 bp, Homo sapiens
tgcctttagtacatg

SEQ ID NO: 1040585 - DNA, 15 bp, Homo sapiens
gtgcctttagtacat

SEQ ID NO: 1040586 - DNA, 15 bp, Homo sapiens
ggtgcctttagtaca

SEQ ID NO: 1040587 - DNA, 15 bp, Homo sapiens
aggtgcctttagtac

SEQ ID NO: 1040588 - DNA, 15 bp, Homo sapiens
aaggtgcctttagta

SEQ ID NO: 1040589 - DNA, 15 bp, Homo sapiens
caaggtgcctttagt

SEQ ID NO: 1040590 - DNA, 15 bp, Homo sapiens
gcaaggtgcctttag

SEQ ID NO: 1040591 - DNA, 15 bp, Homo sapiens
ggcaaggtgccttta

SEQ ID NO: 1040592 - DNA, 15 bp, Homo sapiens
gggcaaggtgccttt

SEQ ID NO: 1040593 - DNA, 15 bp, Homo sapiens
tgggcaaggtgcctt

SEQ ID NO: 1040594 - DNA, 15 bp, Homo sapiens
ttgggcaaggtgcct

SEQ ID NO: 1040595 - DNA, 15 bp, Homo sapiens
tttgggcaaggtgcc

SEQ ID NO: 1040596 - DNA, 15 bp, Homo sapiens
gtttgggcaaggtgc

SEQ ID NO: 1040597 - DNA, 15 bp, Homo sapiens
agtttgggcaaggtg

SEQ ID NO: 1040598 - DNA, 15 bp, Homo sapiens
cagtttgggcaaggt

SEQ ID NO: 1040599 - DNA, 15 bp, Homo sapiens
ccagtttgggcaagg

SEQ ID NO: 1040600 - DNA, 15 bp, Homo sapiens
tccagtttgggcaag

SEQ ID NO: 1040601 - DNA, 15 bp, Homo sapiens
ctccagtttgggcaa

SEQ ID NO: 1040602 - DNA, 15 bp, Homo sapiens
cctccagtttgggca

SEQ ID NO: 1040603 - DNA, 15 bp, Homo sapiens
tcctccagtttgggc

SEQ ID NO: 1040604 - DNA, 15 bp, Homo sapiens
ctcctccagtttggg

SEQ ID NO: 1040605 - DNA, 15 bp, Homo sapiens
tctcctccagtttgg

SEQ ID NO: 1040606 - DNA, 15 bp, Homo sapiens
ttctcctccagtttg

SEQ ID NO: 1040607 - DNA, 15 bp, Homo sapiens
tttctcctccagttt

SEQ ID NO: 1040608 - DNA, 15 bp, Homo sapiens
ttttctcctccagtt

SEQ ID NO: 1040609 - DNA, 15 bp, Homo sapiens
tttttctcctccagt

SEQ ID NO: 1040610 - DNA, 15 bp, Homo sapiens
ctttttctcctccag

SEQ ID NO: 1040611 - DNA, 15 bp, Homo sapiens
actttttctcctcca

SEQ ID NO: 1040612 - DNA, 15 bp, Homo sapiens
tactttttctcctcc

SEQ ID NO: 1040613 - DNA, 15 bp, Homo sapiens
atactttttctcctc

SEQ ID NO: 1040614 - DNA, 15 bp, Homo sapiens
gatactttttctcct

SEQ ID NO: 1040615 - DNA, 15 bp, Homo sapiens
ggatactttttctcc

SEQ ID NO: 1040616 - DNA, 15 bp, Homo sapiens
gggatactttttctc

SEQ ID NO: 1040617 - DNA, 15 bp, Homo sapiens
tgggatactttttct

SEQ ID NO: 1040618 - DNA, 15 bp, Homo sapiens
gtgggatactttttc

SEQ ID NO: 1040619 - DNA, 15 bp, Homo sapiens
ggtgggatacttttt

SEQ ID NO: 1040620 - DNA, 15 bp, Homo sapiens
cggtgggatactttt

SEQ ID NO: 1040621 - DNA, 15 bp, Homo sapiens
ccggtgggatacttt

SEQ ID NO: 1040622 - DNA, 15 bp, Homo sapiens
accggtgggatactt

SEQ ID NO: 1040623 - DNA, 15 bp, Homo sapiens
aaccggtgggatact

SEQ ID NO: 1040624 - DNA, 15 bp, Homo sapiens
gaaccggtgggatac

SEQ ID NO: 1040625 - DNA, 15 bp, Homo sapiens
tgaaccggtgggata

SEQ ID NO: 1040626 - DNA, 15 bp, Homo sapiens
ttgaaccggtgggat

SEQ ID NO: 1040627 - DNA, 15 bp, Homo sapiens
cttgaaccggtggga

SEQ ID NO: 1040628 - DNA, 15 bp, Homo sapiens
acttgaaccggtggg

SEQ ID NO: 1040629 - DNA, 15 bp, Homo sapiens
cacttgaaccggtgg

SEQ ID NO: 1040630 - DNA, 15 bp, Homo sapiens
gcacttgaaccggtg

SEQ ID NO: 1040631 - DNA, 15 bp, Homo sapiens
tgcacttgaaccggt

SEQ ID NO: 1040632 - DNA, 15 bp, Homo sapiens
atgcacttgaaccgg

SEQ ID NO: 1040633 - DNA, 15 bp, Homo sapiens
aatgcacttgaaccg

SEQ ID NO: 1040634 - DNA, 15 bp, Homo sapiens
taatgcacttgaacc

SEQ ID NO: 1040635 - DNA, 15 bp, Homo sapiens
gtaatgcacttgaac

SEQ ID NO: 1040636 - DNA, 15 bp, Homo sapiens
agtaatgcacttgaa

SEQ ID NO: 1040637 - DNA, 15 bp, Homo sapiens
cagtaatgcacttga

SEQ ID NO: 1040638 - DNA, 15 bp, Homo sapiens
ccagtaatgcacttg

SEQ ID NO: 1040639 - DNA, 15 bp, Homo sapiens
accagtaatgcactt

SEQ ID NO: 1040640 - DNA, 15 bp, Homo sapiens
taccagtaatgcact

SEQ ID NO: 1040641 - DNA, 15 bp, Homo sapiens
ctaccagtaatgcac

SEQ ID NO: 1040642 - DNA, 15 bp, Homo sapiens
gctaccagtaatgca

SEQ ID NO: 1040643 - DNA, 15 bp, Homo sapiens
tgctaccagtaatgc

SEQ ID NO: 1040644 - DNA, 15 bp, Homo sapiens
ctgctaccagtaatg

SEQ ID NO: 1040645 - DNA, 15 bp, Homo sapiens
cctgctaccagtaat

SEQ ID NO: 1040646 - DNA, 15 bp, Homo sapiens
gcctgctaccagtaa

SEQ ID NO: 1040647 - DNA, 15 bp, Homo sapiens
ggcctgctaccagta

SEQ ID NO: 1040648 - DNA, 15 bp, Homo sapiens
gggcctgctaccagt

SEQ ID NO: 1040649 - DNA, 15 bp, Homo sapiens
ggggcctgctaccag

SEQ ID NO: 1040650 - DNA, 15 bp, Homo sapiens
tggggcctgctacca

SEQ ID NO: 1040651 - DNA, 15 bp, Homo sapiens
ctggggcctgctacc

SEQ ID NO: 1040652 - DNA, 15 bp, Homo sapiens
gctggggcctgctac

SEQ ID NO: 1040653 - DNA, 15 bp, Homo sapiens
agctggggcctgcta

SEQ ID NO: 1040654 - DNA, 15 bp, Homo sapiens
cagctggggcctgct

SEQ ID NO: 1040655 - DNA, 15 bp, Homo sapiens
ccagctggggcctgc

SEQ ID NO: 1040656 - DNA, 15 bp, Homo sapiens
tccagctggggcctg

SEQ ID NO: 1040657 - DNA, 15 bp, Homo sapiens
atccagctggggcct

SEQ ID NO: 1040658 - DNA, 15 bp, Homo sapiens
gatccagctggggcc

SEQ ID NO: 1040659 - DNA, 15 bp, Homo sapiens
ggatccagctggggc

SEQ ID NO: 1040660 - DNA, 15 bp, Homo sapiens
tggatccagctgggg

SEQ ID NO: 1040661 - DNA, 15 bp, Homo sapiens
ctggatccagctggg

SEQ ID NO: 1040662 - DNA, 15 bp, Homo sapiens
cctggatccagctgg

SEQ ID NO: 1040663 - DNA, 15 bp, Homo sapiens
tcctggatccagctg

SEQ ID NO: 1040664 - DNA, 15 bp, Homo sapiens
gtcctggatccagct

SEQ ID NO: 1040665 - DNA, 15 bp, Homo sapiens
ggtcctggatccagc

SEQ ID NO: 1040666 - DNA, 15 bp, Homo sapiens
tggtcctggatccag

SEQ ID NO: 1040667 - DNA, 15 bp, Homo sapiens
ctggtcctggatcca

SEQ ID NO: 1040668 - DNA, 15 bp, Homo sapiens
cctggtcctggatcc

SEQ ID NO: 1040669 - DNA, 15 bp, Homo sapiens
tcctggtcctggatc

SEQ ID NO: 1040670 - DNA, 15 bp, Homo sapiens
ctcctggtcctggat

SEQ ID NO: 1040671 - DNA, 15 bp, Homo sapiens
cctcctggtcctgga

SEQ ID NO: 1040672 - DNA, 15 bp, Homo sapiens
ccctcctggtcctgg

SEQ ID NO: 1040673 - DNA, 15 bp, Homo sapiens
cccctcctggtcctg

SEQ ID NO: 1040674 - DNA, 15 bp, Homo sapiens
ccccctcctggtcct

SEQ ID NO: 1040675 - DNA, 15 bp, Homo sapiens
accccctcctggtcc

SEQ ID NO: 1040676 - DNA, 15 bp, Homo sapiens
gaccccctcctggtc

SEQ ID NO: 1040677 - DNA, 15 bp, Homo sapiens
cgaccccctcctggt

SEQ ID NO: 1040678 - DNA, 15 bp, Homo sapiens
acgaccccctcctgg

SEQ ID NO: 1040679 - DNA, 15 bp, Homo sapiens
cacgaccccctcctg

SEQ ID NO: 1040680 - DNA, 15 bp, Homo sapiens
ccacgaccccctcct

SEQ ID NO: 1040681 - DNA, 15 bp, Homo sapiens
tccacgaccccctcc

SEQ ID NO: 1040682 - DNA, 15 bp, Homo sapiens
ttccacgaccccctc

SEQ ID NO: 1040683 - DNA, 15 bp, Homo sapiens
tttccacgaccccct

SEQ ID NO: 1040684 - DNA, 15 bp, Homo sapiens
ctttccacgaccccc

SEQ ID NO: 1040685 - DNA, 15 bp, Homo sapiens
gctttccacgacccc

SEQ ID NO: 1040686 - DNA, 15 bp, Homo sapiens
tgctttccacgaccc

SEQ ID NO: 1040687 - DNA, 15 bp, Homo sapiens
ttgctttccacgacc

SEQ ID NO: 1040688 - DNA, 15 bp, Homo sapiens
cttgctttccacgac

SEQ ID NO: 1040689 - DNA, 15 bp, Homo sapiens
gcttgctttccacga

SEQ ID NO: 1040690 - DNA, 15 bp, Homo sapiens
tgcttgctttccacg

SEQ ID NO: 1040691 - DNA, 15 bp, Homo sapiens
atgcttgctttccac

SEQ ID NO: 1040692 - DNA, 15 bp, Homo sapiens
aatgcttgctttcca

SEQ ID NO: 1040693 - DNA, 15 bp, Homo sapiens
aaatgcttgctttcc

SEQ ID NO: 1040694 - DNA, 15 bp, Homo sapiens
gaaatgcttgctttc

SEQ ID NO: 1040695 - DNA, 15 bp, Homo sapiens
agaaatgcttgcttt

SEQ ID NO: 1040696 - DNA, 15 bp, Homo sapiens
tagaaatgcttgctt

SEQ ID NO: 1040697 - DNA, 15 bp, Homo sapiens
atagaaatgcttgct

SEQ ID NO: 1040698 - DNA, 15 bp, Homo sapiens
gatagaaatgcttgc

SEQ ID NO: 1040699 - DNA, 15 bp, Homo sapiens
cgatagaaatgcttg

SEQ ID NO: 1040700 - DNA, 15 bp, Homo sapiens
ccgatagaaatgctt

SEQ ID NO: 1040701 - DNA, 15 bp, Homo sapiens
gccgatagaaatgct

SEQ ID NO: 1040702 - DNA, 15 bp, Homo sapiens
tgccgatagaaatgc

SEQ ID NO: 1040703 - DNA, 15 bp, Homo sapiens
ttgccgatagaaatg

SEQ ID NO: 1040704 - DNA, 15 bp, Homo sapiens
tttgccgatagaaat

SEQ ID NO: 1040705 - DNA, 15 bp, Homo sapiens
atttgccgatagaaa

SEQ ID NO: 1040706 - DNA, 15 bp, Homo sapiens
catttgccgatagaa

SEQ ID NO: 1040707 - DNA, 15 bp, Homo sapiens
acatttgccgataga

SEQ ID NO: 1040708 - DNA, 15 bp, Homo sapiens
cacatttgccgatag

SEQ ID NO: 1040709 - DNA, 15 bp, Homo sapiens
tcacatttgccgata

SEQ ID NO: 1040710 - DNA, 15 bp, Homo sapiens
ctcacatttgccgat

SEQ ID NO: 1040711 - DNA, 15 bp, Homo sapiens
actcacatttgccga

SEQ ID NO: 1040712 - DNA, 15 bp, Homo sapiens
cactcacatttgccg

SEQ ID NO: 1040713 - DNA, 15 bp, Homo sapiens
tcactcacatttgcc

SEQ ID NO: 1040714 - DNA, 15 bp, Homo sapiens
atcactcacatttgc

SEQ ID NO: 1040715 - DNA, 15 bp, Homo sapiens
gatcactcacatttg

SEQ ID NO: 1040716 - DNA, 15 bp, Homo sapiens
agatcactcacattt

SEQ ID NO: 1040717 - DNA, 15 bp, Homo sapiens
cagatcactcacatt

SEQ ID NO: 1040718 - DNA, 15 bp, Homo sapiens
gcagatcactcacat

SEQ ID NO: 1040719 - DNA, 15 bp, Homo sapiens
agcagatcactcaca

SEQ ID NO: 1040720 - DNA, 15 bp, Homo sapiens
cagcagatcactcac

SEQ ID NO: 1040721 - DNA, 15 bp, Homo sapiens
acagcagatcactca

SEQ ID NO: 1040722 - DNA, 15 bp, Homo sapiens
tacagcagatcactc

SEQ ID NO: 1040723 - DNA, 15 bp, Homo sapiens
ctacagcagatcact

SEQ ID NO: 1040724 - DNA, 15 bp, Homo sapiens
gctacagcagatcac

SEQ ID NO: 1040725 - DNA, 15 bp, Homo sapiens
agctacagcagatca

SEQ ID NO: 1040726 - DNA, 15 bp, Homo sapiens
gagctacagcagatc

SEQ ID NO: 1040727 - DNA, 15 bp, Homo sapiens
tgagctacagcagat

SEQ ID NO: 1040728 - DNA, 15 bp, Homo sapiens
ctgagctacagcaga

SEQ ID NO: 1040729 - DNA, 15 bp, Homo sapiens
tctgagctacagcag

SEQ ID NO: 1040730 - DNA, 15 bp, Homo sapiens
atctgagctacagca

SEQ ID NO: 1040731 - DNA, 15 bp, Homo sapiens
catctgagctacagc

SEQ ID NO: 1040732 - DNA, 15 bp, Homo sapiens
gcatctgagctacag

SEQ ID NO: 1040733 - DNA, 15 bp, Homo sapiens
ggcatctgagctaca

SEQ ID NO: 1040734 - DNA, 15 bp, Homo sapiens
tggcatctgagctac

SEQ ID NO: 1040735 - DNA, 15 bp, Homo sapiens
gtggcatctgagcta

SEQ ID NO: 1040736 - DNA, 15 bp, Homo sapiens
ggtggcatctgagct

SEQ ID NO: 1040737 - DNA, 15 bp, Homo sapiens
gggtggcatctgagc

SEQ ID NO: 1040738 - DNA, 15 bp, Homo sapiens
ggggtggcatctgag

SEQ ID NO: 1040739 - DNA, 15 bp, Homo sapiens
tggggtggcatctga

SEQ ID NO: 1040740 - DNA, 15 bp, Homo sapiens
ttggggtggcatctg

SEQ ID NO: 1040741 - DNA, 15 bp, Homo sapiens
cttggggtggcatct

SEQ ID NO: 1040742 - DNA, 15 bp, Homo sapiens
gcttggggtggcatc

SEQ ID NO: 1040743 - DNA, 15 bp, Homo sapiens
tgcttggggtggcat

SEQ ID NO: 1040744 - DNA, 15 bp, Homo sapiens
ctgcttggggtggca

SEQ ID NO: 1040745 - DNA, 15 bp, Homo sapiens
gctgcttggggtggc

SEQ ID NO: 1040746 - DNA, 15 bp, Homo sapiens
agctgcttggggtgg

SEQ ID NO: 1040747 - DNA, 15 bp, Homo sapiens
aagctgcttggggtg

SEQ ID NO: 1040748 - DNA, 15 bp, Homo sapiens
caagctgcttggggt

SEQ ID NO: 1040749 - DNA, 15 bp, Homo sapiens
gcaagctgcttgggg

SEQ ID NO: 1040750 - DNA, 15 bp, Homo sapiens
ggcaagctgcttggg

SEQ ID NO: 1040751 - DNA, 15 bp, Homo sapiens
aggcaagctgcttgg

SEQ ID NO: 1040752 - DNA, 15 bp, Homo sapiens
aaggcaagctgcttg

SEQ ID NO: 1040753 - DNA, 15 bp, Homo sapiens
caaggcaagctgctt

SEQ ID NO: 1040754 - DNA, 15 bp, Homo sapiens
gcaaggcaagctgct

SEQ ID NO: 1040755 - DNA, 15 bp, Homo sapiens
ggcaaggcaagctgc

SEQ ID NO: 1040756 - DNA, 15 bp, Homo sapiens
tggcaaggcaagctg

SEQ ID NO: 1040757 - DNA, 15 bp, Homo sapiens
ctggcaaggcaagct

SEQ ID NO: 1040758 - DNA, 15 bp, Homo sapiens
tctggcaaggcaagc

SEQ ID NO: 1040759 - DNA, 15 bp, Homo sapiens
ctctggcaaggcaag

SEQ ID NO: 1040760 - DNA, 15 bp, Homo sapiens
cctctggcaaggcaa

SEQ ID NO: 1040761 - DNA, 15 bp, Homo sapiens
acctctggcaaggca

SEQ ID NO: 1040762 - DNA, 15 bp, Homo sapiens
gacctctggcaaggc

SEQ ID NO: 1040763 - DNA, 15 bp, Homo sapiens
agacctctggcaagg

SEQ ID NO: 1040764 - DNA, 15 bp, Homo sapiens
gagacctctggcaag

SEQ ID NO: 1040765 - DNA, 15 bp, Homo sapiens
agagacctctggcaa

SEQ ID NO: 1040766 - DNA, 15 bp, Homo sapiens
cagagacctctggca

SEQ ID NO: 1040767 - DNA, 15 bp, Homo sapiens
ccagagacctctggc

SEQ ID NO: 1040768 - DNA, 15 bp, Homo sapiens
accagagacctctgg

SEQ ID NO: 1040769 - DNA, 15 bp, Homo sapiens
taccagagacctctg

SEQ ID NO: 1040770 - DNA, 15 bp, Homo sapiens
ttaccagagacctct

SEQ ID NO: 1040771 - DNA, 15 bp, Homo sapiens
tttaccagagacctc

SEQ ID NO: 1040772 - DNA, 15 bp, Homo sapiens
ctttaccagagacct

SEQ ID NO: 1040773 - DNA, 15 bp, Homo sapiens
cctttaccagagacc

SEQ ID NO: 1040774 - DNA, 15 bp, Homo sapiens
ccctttaccagagac

SEQ ID NO: 1040775 - DNA, 15 bp, Homo sapiens
cccctttaccagaga

SEQ ID NO: 1040776 - DNA, 15 bp, Homo sapiens
gcccctttaccagag

SEQ ID NO: 1040777 - DNA, 15 bp, Homo sapiens
tgcccctttaccaga

SEQ ID NO: 1040778 - DNA, 15 bp, Homo sapiens
atgcccctttaccag

SEQ ID NO: 1040779 - DNA, 15 bp, Homo sapiens
gatgcccctttacca

SEQ ID NO: 1040780 - DNA, 15 bp, Homo sapiens
tgatgcccctttacc

SEQ ID NO: 1040781 - DNA, 15 bp, Homo sapiens
atgatgcccctttac

SEQ ID NO: 1040782 - DNA, 15 bp, Homo sapiens
aatgatgccccttta

SEQ ID NO: 1040783 - DNA, 15 bp, Homo sapiens
caatgatgccccttt

SEQ ID NO: 1040784 - DNA, 15 bp, Homo sapiens
ccaatgatgcccctt

SEQ ID NO: 1040785 - DNA, 15 bp, Homo sapiens
cccaatgatgcccct

SEQ ID NO: 1040786 - DNA, 15 bp, Homo sapiens
acccaatgatgcccc

SEQ ID NO: 1040787 - DNA, 15 bp, Homo sapiens
tacccaatgatgccc

SEQ ID NO: 1040788 - DNA, 15 bp, Homo sapiens
gtacccaatgatgcc

SEQ ID NO: 1040789 - DNA, 15 bp, Homo sapiens
tgtacccaatgatgc

SEQ ID NO: 1040790 - DNA, 15 bp, Homo sapiens
ttgtacccaatgatg

SEQ ID NO: 1040791 - DNA, 15 bp, Homo sapiens
tttgtacccaatgat

SEQ ID NO: 1040792 - DNA, 15 bp, Homo sapiens
atttgtacccaatga

SEQ ID NO: 1040793 - DNA, 15 bp, Homo sapiens
catttgtacccaatg

SEQ ID NO: 1040794 - DNA, 15 bp, Homo sapiens
acatttgtacccaat

SEQ ID NO: 1040795 - DNA, 15 bp, Homo sapiens
cacatttgtacccaa

SEQ ID NO: 1040796 - DNA, 15 bp, Homo sapiens
gcacatttgtaccca

SEQ ID NO: 1040797 - DNA, 15 bp, Homo sapiens
agcacatttgtaccc

SEQ ID NO: 1040798 - DNA, 15 bp, Homo sapiens
cagcacatttgtacc

SEQ ID NO: 1040799 - DNA, 15 bp, Homo sapiens
ccagcacatttgtac

SEQ ID NO: 1040800 - DNA, 15 bp, Homo sapiens
cccagcacatttgta

SEQ ID NO: 1040801 - DNA, 15 bp, Homo sapiens
ccccagcacatttgt

SEQ ID NO: 1040802 - DNA, 15 bp, Homo sapiens
gccccagcacatttg

SEQ ID NO: 1040803 - DNA, 15 bp, Homo sapiens
tgccccagcacattt

SEQ ID NO: 1040804 - DNA, 15 bp, Homo sapiens
gtgccccagcacatt

SEQ ID NO: 1040805 - DNA, 15 bp, Homo sapiens
agtgccccagcacat

SEQ ID NO: 1040806 - DNA, 15 bp, Homo sapiens
aagtgccccagcaca

SEQ ID NO: 1040807 - DNA, 15 bp, Homo sapiens
gaagtgccccagcac

SEQ ID NO: 1040808 - DNA, 15 bp, Homo sapiens
ggaagtgccccagca

SEQ ID NO: 1040809 - DNA, 15 bp, Homo sapiens
gggaagtgccccagc

SEQ ID NO: 1040810 - DNA, 15 bp, Homo sapiens
agggaagtgccccag

SEQ ID NO: 1040811 - DNA, 15 bp, Homo sapiens
cagggaagtgcccca

SEQ ID NO: 1040812 - DNA, 15 bp, Homo sapiens
gcagggaagtgcccc

SEQ ID NO: 1040813 - DNA, 15 bp, Homo sapiens
ggcagggaagtgccc

SEQ ID NO: 1040814 - DNA, 15 bp, Homo sapiens
aggcagggaagtgcc

SEQ ID NO: 1040815 - DNA, 15 bp, Homo sapiens
caggcagggaagtgc

SEQ ID NO: 1040816 - DNA, 15 bp, Homo sapiens
ccaggcagggaagtg

SEQ ID NO: 1040817 - DNA, 15 bp, Homo sapiens
tccaggcagggaagt

SEQ ID NO: 1040818 - DNA, 15 bp, Homo sapiens
ttccaggcagggaag

SEQ ID NO: 1040819 - DNA, 15 bp, Homo sapiens
gttccaggcagggaa

SEQ ID NO: 1040820 - DNA, 15 bp, Homo sapiens
tgttccaggcaggga

SEQ ID NO: 1040821 - DNA, 15 bp, Homo sapiens
ttgttccaggcaggg

SEQ ID NO: 1040822 - DNA, 15 bp, Homo sapiens
cttgttccaggcagg

SEQ ID NO: 1040823 - DNA, 15 bp, Homo sapiens
ccttgttccaggcag

SEQ ID NO: 1040824 - DNA, 15 bp, Homo sapiens
cccttgttccaggca

SEQ ID NO: 1040825 - DNA, 15 bp, Homo sapiens
tcccttgttccaggc

SEQ ID NO: 1040826 - DNA, 15 bp, Homo sapiens
gtcccttgttccagg

SEQ ID NO: 1040827 - DNA, 15 bp, Homo sapiens
ggtcccttgttccag

SEQ ID NO: 1040828 - DNA, 15 bp, Homo sapiens
gggtcccttgttcca

SEQ ID NO: 1040829 - DNA, 15 bp, Homo sapiens
agggtcccttgttcc

SEQ ID NO: 1040830 - DNA, 15 bp, Homo sapiens
tagggtcccttgttc

SEQ ID NO: 1040831 - DNA, 15 bp, Homo sapiens
atagggtcccttgtt

SEQ ID NO: 1040832 - DNA, 15 bp, Homo sapiens
catagggtcccttgt

SEQ ID NO: 1040833 - DNA, 15 bp, Homo sapiens
gcatagggtcccttg

SEQ ID NO: 1040834 - DNA, 15 bp, Homo sapiens
ggcatagggtccctt

SEQ ID NO: 1040835 - DNA, 15 bp, Homo sapiens
tggcatagggtccct

SEQ ID NO: 1040836 - DNA, 15 bp, Homo sapiens
gtggcatagggtccc

SEQ ID NO: 1040837 - DNA, 15 bp, Homo sapiens
ggtggcatagggtcc

SEQ ID NO: 1040838 - DNA, 15 bp, Homo sapiens
gggtggcatagggtc

SEQ ID NO: 1040839 - DNA, 15 bp, Homo sapiens
agggtggcatagggt

SEQ ID NO: 1040840 - DNA, 15 bp, Homo sapiens
gagggtggcataggg

SEQ ID NO: 1040841 - DNA, 15 bp, Homo sapiens
agagggtggcatagg

SEQ ID NO: 1040842 - DNA, 15 bp, Homo sapiens
cagagggtggcatag

SEQ ID NO: 1040843 - DNA, 15 bp, Homo sapiens
ccagagggtggcata

SEQ ID NO: 1040844 - DNA, 15 bp, Homo sapiens
tccagagggtggcat

SEQ ID NO: 1040845 - DNA, 15 bp, Homo sapiens
atccagagggtggca

SEQ ID NO: 1040846 - DNA, 15 bp, Homo sapiens
gatccagagggtggc

SEQ ID NO: 1040847 - DNA, 15 bp, Homo sapiens
agatccagagggtgg

SEQ ID NO: 1040848 - DNA, 15 bp, Homo sapiens
tagatccagagggtg

SEQ ID NO: 1040849 - DNA, 15 bp, Homo sapiens
ctagatccagagggt

SEQ ID NO: 1040850 - DNA, 15 bp, Homo sapiens
cctagatccagaggg

SEQ ID NO: 1040851 - DNA, 15 bp, Homo sapiens
tcctagatccagagg

SEQ ID NO: 1040852 - DNA, 15 bp, Homo sapiens
gtcctagatccagag

SEQ ID NO: 1040853 - DNA, 15 bp, Homo sapiens
agtcctagatccaga

SEQ ID NO: 1040854 - DNA, 15 bp, Homo sapiens
gagtcctagatccag

SEQ ID NO: 1040855 - DNA, 15 bp, Homo sapiens
tgagtcctagatcca

SEQ ID NO: 1040856 - DNA, 15 bp, Homo sapiens
ctgagtcctagatcc

SEQ ID NO: 1040857 - DNA, 15 bp, Homo sapiens
actgagtcctagatc

SEQ ID NO: 1040858 - DNA, 15 bp, Homo sapiens
cactgagtcctagat

SEQ ID NO: 1040859 - DNA, 15 bp, Homo sapiens
ccactgagtcctaga

SEQ ID NO: 1040860 - DNA, 15 bp, Homo sapiens
gccactgagtcctag

SEQ ID NO: 1040861 - DNA, 15 bp, Homo sapiens
agccactgagtccta

SEQ ID NO: 1040862 - DNA, 15 bp, Homo sapiens
gagccactgagtcct

SEQ ID NO: 1040863 - DNA, 15 bp, Homo sapiens
agagccactgagtcc

SEQ ID NO: 1040864 - DNA, 15 bp, Homo sapiens
cagagccactgagtc

SEQ ID NO: 1040865 - DNA, 15 bp, Homo sapiens
ccagagccactgagt

SEQ ID NO: 1040866 - DNA, 15 bp, Homo sapiens
tccagagccactgag

SEQ ID NO: 1040867 - DNA, 15 bp, Homo sapiens
gtccagagccactga

SEQ ID NO: 1040868 - DNA, 15 bp, Homo sapiens
ggtccagagccactg

SEQ ID NO: 1040869 - DNA, 15 bp, Homo sapiens
gggtccagagccact

SEQ ID NO: 1040870 - DNA, 15 bp, Homo sapiens
tgggtccagagccac

SEQ ID NO: 1040871 - DNA, 15 bp, Homo sapiens
gtgggtccagagcca

SEQ ID NO: 1040872 - DNA, 15 bp, Homo sapiens
tgtgggtccagagcc

SEQ ID NO: 1040873 - DNA, 15 bp, Homo sapiens
ctgtgggtccagagc

SEQ ID NO: 1040874 - DNA, 15 bp, Homo sapiens
tctgtgggtccagag

SEQ ID NO: 1040875 - DNA, 15 bp, Homo sapiens
gtctgtgggtccaga

SEQ ID NO: 1040876 - DNA, 15 bp, Homo sapiens
ggtctgtgggtccag

SEQ ID NO: 1040877 - DNA, 15 bp, Homo sapiens
gggtctgtgggtcca

SEQ ID NO: 1040878 - DNA, 15 bp, Homo sapiens
tgggtctgtgggtcc

SEQ ID NO: 1040879 - DNA, 15 bp, Homo sapiens
ctgggtctgtgggtc

SEQ ID NO: 1040880 - DNA, 15 bp, Homo sapiens
gctgggtctgtgggt

SEQ ID NO: 1040881 - DNA, 15 bp, Homo sapiens
ggctgggtctgtggg

SEQ ID NO: 1040882 - DNA, 15 bp, Homo sapiens
aggctgggtctgtgg

SEQ ID NO: 1040883 - DNA, 15 bp, Homo sapiens
aaggctgggtctgtg

SEQ ID NO: 1040884 - DNA, 15 bp, Homo sapiens
aaaggctgggtctgt

SEQ ID NO: 1040885 - DNA, 15 bp, Homo sapiens
gaaaggctgggtctg

SEQ ID NO: 1040886 - DNA, 15 bp, Homo sapiens
ggaaaggctgggtct

SEQ ID NO: 1040887 - DNA, 15 bp, Homo sapiens
tggaaaggctgggtc

SEQ ID NO: 1040888 - DNA, 15 bp, Homo sapiens
ctggaaaggctgggt

SEQ ID NO: 1040889 - DNA, 15 bp, Homo sapiens
gctggaaaggctggg

SEQ ID NO: 1040890 - DNA, 15 bp, Homo sapiens
tgctggaaaggctgg

SEQ ID NO: 1040891 - DNA, 15 bp, Homo sapiens
atgctggaaaggctg

SEQ ID NO: 1040892 - DNA, 15 bp, Homo sapiens
aatgctggaaaggct

SEQ ID NO: 1040893 - DNA, 15 bp, Homo sapiens
gaatgctggaaaggc

SEQ ID NO: 1040894 - DNA, 15 bp, Homo sapiens
agaatgctggaaagg

SEQ ID NO: 1040895 - DNA, 15 bp, Homo sapiens
cagaatgctggaaag

SEQ ID NO: 1040896 - DNA, 15 bp, Homo sapiens
gcagaatgctggaaa

SEQ ID NO: 1040897 - DNA, 15 bp, Homo sapiens
tgcagaatgctggaa

SEQ ID NO: 1040898 - DNA, 15 bp, Homo sapiens
ttgcagaatgctgga

SEQ ID NO: 1040899 - DNA, 15 bp, Homo sapiens
tttgcagaatgctgg

SEQ ID NO: 1040900 - DNA, 15 bp, Homo sapiens
ctttgcagaatgctg

SEQ ID NO: 1040901 - DNA, 15 bp, Homo sapiens
cctttgcagaatgct

SEQ ID NO: 1040902 - DNA, 15 bp, Homo sapiens
tcctttgcagaatgc

SEQ ID NO: 1040903 - DNA, 15 bp, Homo sapiens
ttcctttgcagaatg

SEQ ID NO: 1040904 - DNA, 15 bp, Homo sapiens
tttcctttgcagaat

SEQ ID NO: 1040905 - DNA, 15 bp, Homo sapiens
ctttcctttgcagaa

SEQ ID NO: 1040906 - DNA, 15 bp, Homo sapiens
actttcctttgcaga

SEQ ID NO: 1040907 - DNA, 15 bp, Homo sapiens
cactttcctttgcag

SEQ ID NO: 1040908 - DNA, 15 bp, Homo sapiens
gcactttcctttgca

SEQ ID NO: 1040909 - DNA, 15 bp, Homo sapiens
agcactttcctttgc

SEQ ID NO: 1040910 - DNA, 15 bp, Homo sapiens
aagcactttcctttg

SEQ ID NO: 1040911 - DNA, 15 bp, Homo sapiens
gaagcactttccttt

SEQ ID NO: 1040912 - DNA, 15 bp, Homo sapiens
agaagcactttcctt

SEQ ID NO: 1040913 - DNA, 15 bp, Homo sapiens
gagaagcactttcct

SEQ ID NO: 1040914 - DNA, 15 bp, Homo sapiens
tgagaagcactttcc

SEQ ID NO: 1040915 - DNA, 15 bp, Homo sapiens
ctgagaagcactttc

SEQ ID NO: 1040916 - DNA, 15 bp, Homo sapiens
tctgagaagcacttt

SEQ ID NO: 1040917 - DNA, 15 bp, Homo sapiens
ttctgagaagcactt

SEQ ID NO: 1040918 - DNA, 15 bp, Homo sapiens
cttctgagaagcact

SEQ ID NO: 1040919 - DNA, 15 bp, Homo sapiens
gcttctgagaagcac

SEQ ID NO: 1040920 - DNA, 15 bp, Homo sapiens
ggcttctgagaagca

SEQ ID NO: 1040921 - DNA, 15 bp, Homo sapiens
tggcttctgagaagc

SEQ ID NO: 1040922 - DNA, 15 bp, Homo sapiens
ttggcttctgagaag

SEQ ID NO: 1040923 - DNA, 15 bp, Homo sapiens
attggcttctgagaa

SEQ ID NO: 1040924 - DNA, 15 bp, Homo sapiens
cattggcttctgaga

SEQ ID NO: 1040925 - DNA, 15 bp, Homo sapiens
tcattggcttctgag

SEQ ID NO: 1040926 - DNA, 15 bp, Homo sapiens
gtcattggcttctga

SEQ ID NO: 1040927 - DNA, 15 bp, Homo sapiens
agtcattggcttctg

SEQ ID NO: 1040928 - DNA, 15 bp, Homo sapiens
tagtcattggcttct

SEQ ID NO: 1040929 - DNA, 15 bp, Homo sapiens
ttagtcattggcttc

SEQ ID NO: 1040930 - DNA, 15 bp, Homo sapiens
cttagtcattggctt

SEQ ID NO: 1040931 - DNA, 15 bp, Homo sapiens
gcttagtcattggct

SEQ ID NO: 1040932 - DNA, 15 bp, Homo sapiens
ggcttagtcattggc

SEQ ID NO: 1040933 - DNA, 15 bp, Homo sapiens
tggcttagtcattgg

SEQ ID NO: 1040934 - DNA, 15 bp, Homo sapiens
ctggcttagtcattg

SEQ ID NO: 1040935 - DNA, 15 bp, Homo sapiens
gctggcttagtcatt

SEQ ID NO: 1040936 - DNA, 15 bp, Homo sapiens
ggctggcttagtcat

SEQ ID NO: 1040937 - DNA, 15 bp, Homo sapiens
gggctggcttagtca

SEQ ID NO: 1040938 - DNA, 15 bp, Homo sapiens
tgggctggcttagtc

SEQ ID NO: 1040939 - DNA, 15 bp, Homo sapiens
ctgggctggcttagt

SEQ ID NO: 1040940 - DNA, 15 bp, Homo sapiens
cctgggctggcttag

SEQ ID NO: 1040941 - DNA, 15 bp, Homo sapiens
ccctgggctggctta

SEQ ID NO: 1040942 - DNA, 15 bp, Homo sapiens
cccctgggctggctt

SEQ ID NO: 1040943 - DNA, 15 bp, Homo sapiens
acccctgggctggct

SEQ ID NO: 1040944 - DNA, 15 bp, Homo sapiens
aacccctgggctggc

SEQ ID NO: 1040945 - DNA, 15 bp, Homo sapiens
gaacccctgggctgg

SEQ ID NO: 1040946 - DNA, 15 bp, Homo sapiens
ggaacccctgggctg

SEQ ID NO: 1040947 - DNA, 15 bp, Homo sapiens
aggaacccctgggct

SEQ ID NO: 1040948 - DNA, 15 bp, Homo sapiens
aaggaacccctgggc

SEQ ID NO: 1040949 - DNA, 15 bp, Homo sapiens
aaaggaacccctggg

SEQ ID NO: 1040950 - DNA, 15 bp, Homo sapiens
aaaaggaacccctgg

SEQ ID NO: 1040951 - DNA, 15 bp, Homo sapiens
taaaaggaacccctg

SEQ ID NO: 1040952 - DNA, 15 bp, Homo sapiens
gtaaaaggaacccct

SEQ ID NO: 1040953 - DNA, 15 bp, Homo sapiens
tgtaaaaggaacccc

SEQ ID NO: 1040954 - DNA, 15 bp, Homo sapiens
ctgtaaaaggaaccc

SEQ ID NO: 1040955 - DNA, 15 bp, Homo sapiens
tctgtaaaaggaacc

SEQ ID NO: 1040956 - DNA, 15 bp, Homo sapiens
ctctgtaaaaggaac

SEQ ID NO: 1040957 - DNA, 15 bp, Homo sapiens
tctctgtaaaaggaa

SEQ ID NO: 1040958 - DNA, 15 bp, Homo sapiens
gtctctgtaaaagga

SEQ ID NO: 1040959 - DNA, 15 bp, Homo sapiens
tgtctctgtaaaagg

SEQ ID NO: 1040960 - DNA, 15 bp, Homo sapiens
ttgtctctgtaaaag

SEQ ID NO: 1040961 - DNA, 15 bp, Homo sapiens
attgtctctgtaaaa

SEQ ID NO: 1040962 - DNA, 15 bp, Homo sapiens
aattgtctctgtaaa

SEQ ID NO: 1040963 - DNA, 15 bp, Homo sapiens
caattgtctctgtaa

SEQ ID NO: 1040964 - DNA, 15 bp, Homo sapiens
acaattgtctctgta

SEQ ID NO: 1040965 - DNA, 15 bp, Homo sapiens
aacaattgtctctgt

SEQ ID NO: 1040966 - DNA, 15 bp, Homo sapiens
caacaattgtctctg

SEQ ID NO: 1040967 - DNA, 15 bp, Homo sapiens
ccaacaattgtctct

SEQ ID NO: 1040968 - DNA, 15 bp, Homo sapiens
cccaacaattgtctc

SEQ ID NO: 1040969 - DNA, 15 bp, Homo sapiens
acccaacaattgtct

SEQ ID NO: 1040970 - DNA, 15 bp, Homo sapiens
gacccaacaattgtc

SEQ ID NO: 1040971 - DNA, 15 bp, Homo sapiens
tgacccaacaattgt

SEQ ID NO: 1040972 - DNA, 15 bp, Homo sapiens
ttgacccaacaattg

SEQ ID NO: 1040973 - DNA, 15 bp, Homo sapiens
cttgacccaacaatt

SEQ ID NO: 1040974 - DNA, 15 bp, Homo sapiens
tcttgacccaacaat

SEQ ID NO: 1040975 - DNA, 15 bp, Homo sapiens
ttcttgacccaacaa

SEQ ID NO: 1040976 - DNA, 15 bp, Homo sapiens
cttcttgacccaaca

SEQ ID NO: 1040977 - DNA, 15 bp, Homo sapiens
ccttcttgacccaac

SEQ ID NO: 1040978 - DNA, 15 bp, Homo sapiens
tccttcttgacccaa

SEQ ID NO: 1040979 - DNA, 15 bp, Homo sapiens
ttccttcttgaccca

SEQ ID NO: 1040980 - DNA, 15 bp, Homo sapiens
gttccttcttgaccc

SEQ ID NO: 1040981 - DNA, 15 bp, Homo sapiens
ggttccttcttgacc

SEQ ID NO: 1040982 - DNA, 15 bp, Homo sapiens
gggttccttcttgac

SEQ ID NO: 1040983 - DNA, 15 bp, Homo sapiens
ggggttccttcttga

SEQ ID NO: 1040984 - DNA, 15 bp, Homo sapiens
tggggttccttcttg

SEQ ID NO: 1040985 - DNA, 15 bp, Homo sapiens
ctggggttccttctt

SEQ ID NO: 1040986 - DNA, 15 bp, Homo sapiens
tctggggttccttct

SEQ ID NO: 1040987 - DNA, 15 bp, Homo sapiens
ctctggggttccttc

SEQ ID NO: 1040988 - DNA, 15 bp, Homo sapiens
gctctggggttcctt

SEQ ID NO: 1040989 - DNA, 15 bp, Homo sapiens
agctctggggttcct

SEQ ID NO: 1040990 - DNA, 15 bp, Homo sapiens
cagctctggggttcc

SEQ ID NO: 1040991 - DNA, 15 bp, Homo sapiens
tcagctctggggttc

SEQ ID NO: 1040992 - DNA, 15 bp, Homo sapiens
ctcagctctggggtt

SEQ ID NO: 1040993 - DNA, 15 bp, Homo sapiens
gctcagctctggggt

SEQ ID NO: 1040994 - DNA, 15 bp, Homo sapiens
ggctcagctctgggg

SEQ ID NO: 1040995 - DNA, 15 bp, Homo sapiens
gggctcagctctggg

SEQ ID NO: 1040996 - DNA, 15 bp, Homo sapiens
ggggctcagctctgg

SEQ ID NO: 1040997 - DNA, 15 bp, Homo sapiens
tggggctcagctctg

SEQ ID NO: 1040998 - DNA, 15 bp, Homo sapiens
gtggggctcagctct

SEQ ID NO: 1040999 - DNA, 15 bp, Homo sapiens
tgtggggctcagctc

SEQ ID NO: 1041000 - DNA, 15 bp, Homo sapiens
atgtggggctcagct

SEQ ID NO: 1041001 - DNA, 15 bp, Homo sapiens
tatgtggggctcagc

SEQ ID NO: 1041002 - DNA, 15 bp, Homo sapiens
ctatgtggggctcag

SEQ ID NO: 1041003 - DNA, 15 bp, Homo sapiens
cctatgtggggctca

SEQ ID NO: 1041004 - DNA, 15 bp, Homo sapiens
ccctatgtggggctc

SEQ ID NO: 1041005 - DNA, 15 bp, Homo sapiens
gccctatgtggggct

SEQ ID NO: 1041006 - DNA, 15 bp, Homo sapiens
agccctatgtggggc

SEQ ID NO: 1041007 - DNA, 15 bp, Homo sapiens
tagccctatgtgggg

SEQ ID NO: 1041008 - DNA, 15 bp, Homo sapiens
ctagccctatgtggg

SEQ ID NO: 1041009 - DNA, 15 bp, Homo sapiens
cctagccctatgtgg

SEQ ID NO: 1041010 - DNA, 15 bp, Homo sapiens
tcctagccctatgtg

SEQ ID NO: 1041011 - DNA, 15 bp, Homo sapiens
ctcctagccctatgt

SEQ ID NO: 1041012 - DNA, 15 bp, Homo sapiens
gctcctagccctatg

SEQ ID NO: 1041013 - DNA, 15 bp, Homo sapiens
ggctcctagccctat

SEQ ID NO: 1041014 - DNA, 15 bp, Homo sapiens
gggctcctagcccta

SEQ ID NO: 1041015 - DNA, 15 bp, Homo sapiens
tgggctcctagccct

SEQ ID NO: 1041016 - DNA, 15 bp, Homo sapiens
gtgggctcctagccc

SEQ ID NO: 1041017 - DNA, 15 bp, Homo sapiens
cgtgggctcctagcc

SEQ ID NO: 1041018 - DNA, 15 bp, Homo sapiens
gcgtgggctcctagc

SEQ ID NO: 1041019 - DNA, 15 bp, Homo sapiens
ggcgtgggctcctag

SEQ ID NO: 1041020 - DNA, 15 bp, Homo sapiens
aggcgtgggctccta

SEQ ID NO: 1041021 - DNA, 15 bp, Homo sapiens
gaggcgtgggctcct

SEQ ID NO: 1041022 - DNA, 15 bp, Homo sapiens
ggaggcgtgggctcc

SEQ ID NO: 1041023 - DNA, 15 bp, Homo sapiens
aggaggcgtgggctc

SEQ ID NO: 1041024 - DNA, 15 bp, Homo sapiens
caggaggcgtgggct

SEQ ID NO: 1041025 - DNA, 15 bp, Homo sapiens
acaggaggcgtgggc

SEQ ID NO: 1041026 - DNA, 15 bp, Homo sapiens
gacaggaggcgtggg

SEQ ID NO: 1041027 - DNA, 15 bp, Homo sapiens
agacaggaggcgtgg

SEQ ID NO: 1041028 - DNA, 15 bp, Homo sapiens
aagacaggaggcgtg

SEQ ID NO: 1041029 - DNA, 15 bp, Homo sapiens
aaagacaggaggcgt

SEQ ID NO: 1041030 - DNA, 15 bp, Homo sapiens
gaaagacaggaggcg

SEQ ID NO: 1041031 - DNA, 15 bp, Homo sapiens
agaaagacaggaggc

SEQ ID NO: 1041032 - DNA, 15 bp, Homo sapiens
gagaaagacaggagg

SEQ ID NO: 1041033 - DNA, 15 bp, Homo sapiens
tgagaaagacaggag

SEQ ID NO: 1041034 - DNA, 15 bp, Homo sapiens
gtgagaaagacagga

SEQ ID NO: 1041035 - DNA, 15 bp, Homo sapiens
agtgagaaagacagg

SEQ ID NO: 1041036 - DNA, 15 bp, Homo sapiens
aagtgagaaagacag

SEQ ID NO: 1041037 - DNA, 15 bp, Homo sapiens
caagtgagaaagaca

SEQ ID NO: 1041038 - DNA, 15 bp, Homo sapiens
ccaagtgagaaagac

SEQ ID NO: 1041039 - DNA, 15 bp, Homo sapiens
tccaagtgagaaaga

SEQ ID NO: 1041040 - DNA, 15 bp, Homo sapiens
ttccaagtgagaaag

SEQ ID NO: 1041041 - DNA, 15 bp, Homo sapiens
cttccaagtgagaaa

SEQ ID NO: 1041042 - DNA, 15 bp, Homo sapiens
acttccaagtgagaa

SEQ ID NO: 1041043 - DNA, 15 bp, Homo sapiens
gacttccaagtgaga

SEQ ID NO: 1041044 - DNA, 15 bp, Homo sapiens
tgacttccaagtgag

SEQ ID NO: 1041045 - DNA, 15 bp, Homo sapiens
ttgacttccaagtga

SEQ ID NO: 1041046 - DNA, 15 bp, Homo sapiens
attgacttccaagtg

SEQ ID NO: 1041047 - DNA, 15 bp, Homo sapiens
aattgacttccaagt

SEQ ID NO: 1041048 - DNA, 15 bp, Homo sapiens
aaattgacttccaag

SEQ ID NO: 1041049 - DNA, 15 bp, Homo sapiens
aaaattgacttccaa

SEQ ID NO: 1041050 - DNA, 15 bp, Homo sapiens
taaaattgacttcca

SEQ ID NO: 1041051 - DNA, 15 bp, Homo sapiens
gtaaaattgacttcc

SEQ ID NO: 1041052 - DNA, 15 bp, Homo sapiens
tgtaaaattgacttc

SEQ ID NO: 1041053 - DNA, 15 bp, Homo sapiens
atgtaaaattgactt

SEQ ID NO: 1041054 - DNA, 15 bp, Homo sapiens
tatgtaaaattgact

SEQ ID NO: 1041055 - DNA, 15 bp, Homo sapiens
ctatgtaaaattgac

SEQ ID NO: 1041056 - DNA, 15 bp, Homo sapiens
gctatgtaaaattga

SEQ ID NO: 1041057 - DNA, 15 bp, Homo sapiens
tgctatgtaaaattg

SEQ ID NO: 1041058 - DNA, 15 bp, Homo sapiens
atgctatgtaaaatt

SEQ ID NO: 1041059 - DNA, 15 bp, Homo sapiens
catgctatgtaaaat

SEQ ID NO: 1041060 - DNA, 15 bp, Homo sapiens
ccatgctatgtaaaa

SEQ ID NO: 1041061 - DNA, 15 bp, Homo sapiens
accatgctatgtaaa

SEQ ID NO: 1041062 - DNA, 15 bp, Homo sapiens
gaccatgctatgtaa

SEQ ID NO: 1041063 - DNA, 15 bp, Homo sapiens
agaccatgctatgta

SEQ ID NO: 1041064 - DNA, 15 bp, Homo sapiens
tagaccatgctatgt

SEQ ID NO: 1041065 - DNA, 15 bp, Homo sapiens
ttagaccatgctatg

SEQ ID NO: 1041066 - DNA, 15 bp, Homo sapiens
tttagaccatgctat

SEQ ID NO: 1041067 - DNA, 15 bp, Homo sapiens
ctttagaccatgcta

SEQ ID NO: 1041068 - DNA, 15 bp, Homo sapiens
gctttagaccatgct

SEQ ID NO: 1041069 - DNA, 15 bp, Homo sapiens
ggctttagaccatgc

SEQ ID NO: 1041070 - DNA, 15 bp, Homo sapiens
aggctttagaccatg

SEQ ID NO: 1041071 - DNA, 15 bp, Homo sapiens
gaggctttagaccat

SEQ ID NO: 1041072 - DNA, 15 bp, Homo sapiens
tgaggctttagacca

SEQ ID NO: 1041073 - DNA, 15 bp, Homo sapiens
atgaggctttagacc

SEQ ID NO: 1041074 - DNA, 15 bp, Homo sapiens
catgaggctttagac

SEQ ID NO: 1041075 - DNA, 15 bp, Homo sapiens
ccatgaggctttaga

SEQ ID NO: 1041076 - DNA, 15 bp, Homo sapiens
tccatgaggctttag

SEQ ID NO: 1041077 - DNA, 15 bp, Homo sapiens
gtccatgaggcttta

SEQ ID NO: 1041078 - DNA, 15 bp, Homo sapiens
ggtccatgaggcttt

SEQ ID NO: 1041079 - DNA, 15 bp, Homo sapiens
gggtccatgaggctt

SEQ ID NO: 1041080 - DNA, 15 bp, Homo sapiens
ggggtccatgaggct

SEQ ID NO: 1041081 - DNA, 15 bp, Homo sapiens
tggggtccatgaggc

SEQ ID NO: 1041082 - DNA, 15 bp, Homo sapiens
gtggggtccatgagg

SEQ ID NO: 1041083 - DNA, 15 bp, Homo sapiens
tgtggggtccatgag

SEQ ID NO: 1041084 - DNA, 15 bp, Homo sapiens
ttgtggggtccatga

SEQ ID NO: 1041085 - DNA, 15 bp, Homo sapiens
cttgtggggtccatg

SEQ ID NO: 1041086 - DNA, 15 bp, Homo sapiens
acttgtggggtccat

SEQ ID NO: 1041087 - DNA, 15 bp, Homo sapiens
gacttgtggggtcca

SEQ ID NO: 1041088 - DNA, 15 bp, Homo sapiens
agacttgtggggtcc

SEQ ID NO: 1041089 - DNA, 15 bp, Homo sapiens
aagacttgtggggtc

SEQ ID NO: 1041090 - DNA, 15 bp, Homo sapiens
aaagacttgtggggt

SEQ ID NO: 1041091 - DNA, 15 bp, Homo sapiens
aaaagacttgtgggg

SEQ ID NO: 1041092 - DNA, 15 bp, Homo sapiens
taaaagacttgtggg

SEQ ID NO: 1041093 - DNA, 15 bp, Homo sapiens
ttaaaagacttgtgg

SEQ ID NO: 1041094 - DNA, 15 bp, Homo sapiens
tttaaaagacttgtg

SEQ ID NO: 1041095 - DNA, 15 bp, Homo sapiens
atttaaaagacttgt

SEQ ID NO: 1041096 - DNA, 15 bp, Homo sapiens
tatttaaaagacttg

SEQ ID NO: 1041097 - DNA, 15 bp, Homo sapiens
ttatttaaaagactt

SEQ ID NO: 1041098 - DNA, 15 bp, Homo sapiens
attatttaaaagact

SEQ ID NO: 1041099 - DNA, 15 bp, Homo sapiens
tattatttaaaagac

SEQ ID NO: 1041100 - DNA, 15 bp, Homo sapiens
ttattatttaaaaga

SEQ ID NO: 1041101 - DNA, 15 bp, Homo sapiens
gttattatttaaaag

SEQ ID NO: 1041102 - DNA, 15 bp, Homo sapiens
agttattatttaaaa

SEQ ID NO: 1041103 - DNA, 15 bp, Homo sapiens
tagttattatttaaa

SEQ ID NO: 1041104 - DNA, 15 bp, Homo sapiens
ttagttattatttaa

SEQ ID NO: 1041105 - DNA, 15 bp, Homo sapiens
gttagttattattta

SEQ ID NO: 1041106 - DNA, 15 bp, Homo sapiens
agttagttattattt

SEQ ID NO: 1041107 - DNA, 15 bp, Homo sapiens
aagttagttattatt

SEQ ID NO: 1041108 - DNA, 15 bp, Homo sapiens
gaagttagttattat

SEQ ID NO: 1041109 - DNA, 15 bp, Homo sapiens
agaagttagttatta

SEQ ID NO: 1041110 - DNA, 15 bp, Homo sapiens
gagaagttagttatt

SEQ ID NO: 1041111 - DNA, 15 bp, Homo sapiens
agagaagttagttat

SEQ ID NO: 1041112 - DNA, 15 bp, Homo sapiens
aagagaagttagtta

SEQ ID NO: 1041113 - DNA, 15 bp, Homo sapiens
gaagagaagttagtt

SEQ ID NO: 1041114 - DNA, 15 bp, Homo sapiens
ggaagagaagttagt

SEQ ID NO: 1041115 - DNA, 15 bp, Homo sapiens
gggaagagaagttag

SEQ ID NO: 1041116 - DNA, 15 bp, Homo sapiens
agggaagagaagtta

SEQ ID NO: 1041117 - DNA, 15 bp, Homo sapiens
aagggaagagaagtt

SEQ ID NO: 1041118 - DNA, 15 bp, Homo sapiens
caagggaagagaagt

SEQ ID NO: 1041119 - DNA, 15 bp, Homo sapiens
tcaagggaagagaag

SEQ ID NO: 1041120 - DNA, 15 bp, Homo sapiens
ttcaagggaagagaa

SEQ ID NO: 1041121 - DNA, 15 bp, Homo sapiens
attcaagggaagaga

SEQ ID NO: 1041122 - DNA, 15 bp, Homo sapiens
tattcaagggaagag

SEQ ID NO: 1041123 - DNA, 15 bp, Homo sapiens
ttattcaagggaaga

SEQ ID NO: 1041124 - DNA, 15 bp, Homo sapiens
tttattcaagggaag

SEQ ID NO: 1041125 - DNA, 15 bp, Homo sapiens
ttttattcaagggaa

SEQ ID NO: 1041126 - DNA, 15 bp, Homo sapiens
attttattcaaggga

SEQ ID NO: 1041127 - DNA, 15 bp, Homo sapiens
tattttattcaaggg

SEQ ID NO: 1041128 - DNA, 15 bp, Homo sapiens
ttattttattcaagg

SEQ ID NO: 1041129 - DNA, 15 bp, Homo sapiens
attattttattcaag

SEQ ID NO: 1041130 - DNA, 15 bp, Homo sapiens
gattattttattcaa

SEQ ID NO: 1041131 - DNA, 15 bp, Homo sapiens
tgattattttattca

SEQ ID NO: 1041132 - DNA, 15 bp, Homo sapiens
ctgattattttattc

SEQ ID NO: 1041133 - DNA, 15 bp, Homo sapiens
gctgattattttatt

SEQ ID NO: 1041134 - DNA, 15 bp, Homo sapiens
tgctgattattttat

SEQ ID NO: 1041135 - DNA, 15 bp, Homo sapiens
ttgctgattatttta

SEQ ID NO: 1041136 - DNA, 15 bp, Homo sapiens
gttgctgattatttt

SEQ ID NO: 1041137 - DNA, 15 bp, Homo sapiens
tgttgctgattattt

SEQ ID NO: 1041138 - DNA, 15 bp, Homo sapiens
ttgttgctgattatt

SEQ ID NO: 1041139 - DNA, 15 bp, Homo sapiens
attgttgctgattat

SEQ ID NO: 1041140 - DNA, 15 bp, Homo sapiens
tattgttgctgatta

SEQ ID NO: 1041141 - DNA, 15 bp, Homo sapiens
ctattgttgctgatt

SEQ ID NO: 1041142 - DNA, 15 bp, Homo sapiens
cctattgttgctgat

SEQ ID NO: 1041143 - DNA, 15 bp, Homo sapiens
tcctattgttgctga

SEQ ID NO: 1041144 - DNA, 15 bp, Homo sapiens
ctcctattgttgctg

SEQ ID NO: 1041145 - DNA, 15 bp, Homo sapiens
tctcctattgttgct

SEQ ID NO: 1041146 - DNA, 15 bp, Homo sapiens
ttctcctattgttgc

SEQ ID NO: 1041147 - DNA, 15 bp, Homo sapiens
cttctcctattgttg

SEQ ID NO: 1041148 - DNA, 15 bp, Homo sapiens
gcttctcctattgtt

SEQ ID NO: 1041149 - DNA, 15 bp, Homo sapiens
tgcttctcctattgt

SEQ ID NO: 1041150 - DNA, 15 bp, Homo sapiens
ttgcttctcctattg

SEQ ID NO: 1041151 - DNA, 15 bp, Homo sapiens
tttgcttctcctatt

SEQ ID NO: 1041152 - DNA, 15 bp, Homo sapiens
ctttgcttctcctat

SEQ ID NO: 1041153 - DNA, 15 bp, Homo sapiens
actttgcttctccta

SEQ ID NO: 1041154 - DNA, 15 bp, Homo sapiens
gactttgcttctcct

SEQ ID NO: 1041155 - DNA, 15 bp, Homo sapiens
tgactttgcttctcc

SEQ ID NO: 1041156 - DNA, 15 bp, Homo sapiens
atgactttgcttctc

SEQ ID NO: 1041157 - DNA, 15 bp, Homo sapiens
catgactttgcttct

SEQ ID NO: 1041158 - DNA, 15 bp, Homo sapiens
tcatgactttgcttc

SEQ ID NO: 1041159 - DNA, 15 bp, Homo sapiens
ctcatgactttgctt

SEQ ID NO: 1041160 - DNA, 15 bp, Homo sapiens
tctcatgactttgct

SEQ ID NO: 1041161 - DNA, 15 bp, Homo sapiens
ttctcatgactttgc

SEQ ID NO: 1041162 - DNA, 15 bp, Homo sapiens
tttctcatgactttg

SEQ ID NO: 1041163 - DNA, 15 bp, Homo sapiens
gtttctcatgacttt

SEQ ID NO: 1041164 - DNA, 15 bp, Homo sapiens
cgtttctcatgactt

SEQ ID NO: 1041165 - DNA, 15 bp, Homo sapiens
ccgtttctcatgact

SEQ ID NO: 1041166 - DNA, 15 bp, Homo sapiens
tccgtttctcatgac

SEQ ID NO: 1041167 - DNA, 15 bp, Homo sapiens
ttccgtttctcatga

SEQ ID NO: 1041168 - DNA, 15 bp, Homo sapiens
cttccgtttctcatg

SEQ ID NO: 1041169 - DNA, 15 bp, Homo sapiens
ccttccgtttctcat

SEQ ID NO: 1041170 - DNA, 15 bp, Homo sapiens
tccttccgtttctca

SEQ ID NO: 1041171 - DNA, 15 bp, Homo sapiens
ttccttccgtttctc

SEQ ID NO: 1041172 - DNA, 15 bp, Homo sapiens
attccttccgtttct

SEQ ID NO: 1041173 - DNA, 15 bp, Homo sapiens
cattccttccgtttc

SEQ ID NO: 1041174 - DNA, 15 bp, Homo sapiens
acattccttccgttt

SEQ ID NO: 1041175 - DNA, 15 bp, Homo sapiens
tacattccttccgtt

SEQ ID NO: 1041176 - DNA, 15 bp, Homo sapiens
ctacattccttccgt

SEQ ID NO: 1041177 - DNA, 15 bp, Homo sapiens
actacattccttccg

SEQ ID NO: 1041178 - DNA, 15 bp, Homo sapiens
gactacattccttcc

SEQ ID NO: 1041179 - DNA, 15 bp, Homo sapiens
ggactacattccttc

SEQ ID NO: 1041180 - DNA, 15 bp, Homo sapiens
gggactacattcctt

SEQ ID NO: 1041181 - DNA, 15 bp, Homo sapiens
agggactacattcct

SEQ ID NO: 1041182 - DNA, 15 bp, Homo sapiens
gagggactacattcc

SEQ ID NO: 1041183 - DNA, 15 bp, Homo sapiens
agagggactacattc

SEQ ID NO: 1041184 - DNA, 15 bp, Homo sapiens
cagagggactacatt

SEQ ID NO: 1041185 - DNA, 15 bp, Homo sapiens
tcagagggactacat

SEQ ID NO: 1041186 - DNA, 15 bp, Homo sapiens
ctcagagggactaca

SEQ ID NO: 1041187 - DNA, 15 bp, Homo sapiens
cctcagagggactac

SEQ ID NO: 1041188 - DNA, 15 bp, Homo sapiens
tcctcagagggacta

SEQ ID NO: 1041189 - DNA, 15 bp, Homo sapiens
atcctcagagggact

SEQ ID NO: 1041190 - DNA, 15 bp, Homo sapiens
catcctcagagggac

SEQ ID NO: 1041191 - DNA, 15 bp, Homo sapiens
ccatcctcagaggga

SEQ ID NO: 1041192 - DNA, 15 bp, Homo sapiens
gccatcctcagaggg

SEQ ID NO: 1041193 - DNA, 15 bp, Homo sapiens
agccatcctcagagg

SEQ ID NO: 1041194 - DNA, 15 bp, Homo sapiens
cagccatcctcagag

SEQ ID NO: 1041195 - DNA, 15 bp, Homo sapiens
ccagccatcctcaga

SEQ ID NO: 1041196 - DNA, 15 bp, Homo sapiens
accagccatcctcag

SEQ ID NO: 1041197 - DNA, 15 bp, Homo sapiens
caccagccatcctca

SEQ ID NO: 1041198 - DNA, 15 bp, Homo sapiens
tcaccagccatcctc

SEQ ID NO: 1041199 - DNA, 15 bp, Homo sapiens
ttcaccagccatcct

SEQ ID NO: 1041200 - DNA, 15 bp, Homo sapiens
attcaccagccatcc

SEQ ID NO: 1041201 - DNA, 15 bp, Homo sapiens
aattcaccagccatc

SEQ ID NO: 1041202 - DNA, 15 bp, Homo sapiens
aaattcaccagccat

SEQ ID NO: 1041203 - DNA, 15 bp, Homo sapiens
caaattcaccagcca

SEQ ID NO: 1041204 - DNA, 15 bp, Homo sapiens
gcaaattcaccagcc

SEQ ID NO: 1041205 - DNA, 15 bp, Homo sapiens
tgcaaattcaccagc

SEQ ID NO: 1041206 - DNA, 15 bp, Homo sapiens
atgcaaattcaccag

SEQ ID NO: 1041207 - DNA, 15 bp, Homo sapiens
catgcaaattcacca

SEQ ID NO: 1041208 - DNA, 15 bp, Homo sapiens
gcatgcaaattcacc

SEQ ID NO: 1041209 - DNA, 15 bp, Homo sapiens
agcatgcaaattcac

SEQ ID NO: 1041210 - DNA, 15 bp, Homo sapiens
cagcatgcaaattca

SEQ ID NO: 1041211 - DNA, 15 bp, Homo sapiens
ccagcatgcaaattc

SEQ ID NO: 1041212 - DNA, 15 bp, Homo sapiens
accagcatgcaaatt

SEQ ID NO: 1041213 - DNA, 15 bp, Homo sapiens
caccagcatgcaaat

SEQ ID NO: 1041214 - DNA, 15 bp, Homo sapiens
acaccagcatgcaaa

SEQ ID NO: 1041215 - DNA, 15 bp, Homo sapiens
aacaccagcatgcaa

SEQ ID NO: 1041216 - DNA, 15 bp, Homo sapiens
gaacaccagcatgca

SEQ ID NO: 1041217 - DNA, 15 bp, Homo sapiens
agaacaccagcatgc

SEQ ID NO: 1041218 - DNA, 15 bp, Homo sapiens
aagaacaccagcatg

SEQ ID NO: 1041219 - DNA, 15 bp, Homo sapiens
gaagaacaccagcat

SEQ ID NO: 1041220 - DNA, 15 bp, Homo sapiens
ggaagaacaccagca

SEQ ID NO: 1041221 - DNA, 15 bp, Homo sapiens
aggaagaacaccagc

SEQ ID NO: 1041222 - DNA, 15 bp, Homo sapiens
taggaagaacaccag

SEQ ID NO: 1041223 - DNA, 15 bp, Homo sapiens
gtaggaagaacacca

SEQ ID NO: 1041224 - DNA, 15 bp, Homo sapiens
tgtaggaagaacacc

SEQ ID NO: 1041225 - DNA, 15 bp, Homo sapiens
gtgtaggaagaacac

SEQ ID NO: 1041226 - DNA, 15 bp, Homo sapiens
ggtgtaggaagaaca

SEQ ID NO: 1041227 - DNA, 15 bp, Homo sapiens
gggtgtaggaagaac

SEQ ID NO: 1041228 - DNA, 15 bp, Homo sapiens
tgggtgtaggaagaa

SEQ ID NO: 1041229 - DNA, 15 bp, Homo sapiens
ctgggtgtaggaaga

SEQ ID NO: 1041230 - DNA, 15 bp, Homo sapiens
gctgggtgtaggaag

SEQ ID NO: 1041231 - DNA, 15 bp, Homo sapiens
ggctgggtgtaggaa

SEQ ID NO: 1041232 - DNA, 15 bp, Homo sapiens
aggctgggtgtagga

SEQ ID NO: 1041233 - DNA, 15 bp, Homo sapiens
taggctgggtgtagg

SEQ ID NO: 1041234 - DNA, 15 bp, Homo sapiens
ataggctgggtgtag

SEQ ID NO: 1041235 - DNA, 15 bp, Homo sapiens
gataggctgggtgta

SEQ ID NO: 1041236 - DNA, 15 bp, Homo sapiens
tgataggctgggtgt

SEQ ID NO: 1041237 - DNA, 15 bp, Homo sapiens
gtgataggctgggtg

SEQ ID NO: 1041238 - DNA, 15 bp, Homo sapiens
ggtgataggctgggt

SEQ ID NO: 1041239 - DNA, 15 bp, Homo sapiens
aggtgataggctggg

SEQ ID NO: 1041240 - DNA, 15 bp, Homo sapiens
gaggtgataggctgg

SEQ ID NO: 1041241 - DNA, 15 bp, Homo sapiens
tgaggtgataggctg

SEQ ID NO: 1041242 - DNA, 15 bp, Homo sapiens
ctgaggtgataggct

SEQ ID NO: 1041243 - DNA, 15 bp, Homo sapiens
actgaggtgataggc

SEQ ID NO: 1041244 - DNA, 15 bp, Homo sapiens
aactgaggtgatagg

SEQ ID NO: 1041245 - DNA, 15 bp, Homo sapiens
taactgaggtgatag

SEQ ID NO: 1041246 - DNA, 15 bp, Homo sapiens
ttaactgaggtgata

SEQ ID NO: 1041247 - DNA, 15 bp, Homo sapiens
cttaactgaggtgat

SEQ ID NO: 1041248 - DNA, 15 bp, Homo sapiens
acttaactgaggtga

SEQ ID NO: 1041249 - DNA, 15 bp, Homo sapiens
tacttaactgaggtg

SEQ ID NO: 1041250 - DNA, 15 bp, Homo sapiens
gtacttaactgaggt

SEQ ID NO: 1041251 - DNA, 15 bp, Homo sapiens
agtacttaactgagg

SEQ ID NO: 1041252 - DNA, 15 bp, Homo sapiens
aagtacttaactgag

SEQ ID NO: 1041253 - DNA, 15 bp, Homo sapiens
taagtacttaactga

SEQ ID NO: 1041254 - DNA, 15 bp, Homo sapiens
ataagtacttaactg

SEQ ID NO: 1041255 - DNA, 15 bp, Homo sapiens
aataagtacttaact

SEQ ID NO: 1041256 - DNA, 15 bp, Homo sapiens
caataagtacttaac

SEQ ID NO: 1041257 - DNA, 15 bp, Homo sapiens
tcaataagtacttaa

SEQ ID NO: 1041258 - DNA, 15 bp, Homo sapiens
atcaataagtactta

SEQ ID NO: 1041259 - DNA, 15 bp, Homo sapiens
catcaataagtactt

SEQ ID NO: 1041260 - DNA, 15 bp, Homo sapiens
tcatcaataagtact

SEQ ID NO: 1041261 - DNA, 15 bp, Homo sapiens
atcatcaataagtac

SEQ ID NO: 1041262 - DNA, 15 bp, Homo sapiens
aatcatcaataagta

SEQ ID NO: 1041263 - DNA, 15 bp, Homo sapiens
aaatcatcaataagt

SEQ ID NO: 1041264 - DNA, 15 bp, Homo sapiens
taaatcatcaataag

SEQ ID NO: 1041265 - DNA, 15 bp, Homo sapiens
ataaatcatcaataa

SEQ ID NO: 1041266 - DNA, 15 bp, Homo sapiens
gataaatcatcaata

SEQ ID NO: 1041267 - DNA, 15 bp, Homo sapiens
ggataaatcatcaat

SEQ ID NO: 1041268 - DNA, 15 bp, Homo sapiens
cggataaatcatcaa

SEQ ID NO: 1041269 - DNA, 15 bp, Homo sapiens
acggataaatcatca

SEQ ID NO: 1041270 - DNA, 15 bp, Homo sapiens
cacggataaatcatc

SEQ ID NO: 1041271 - DNA, 15 bp, Homo sapiens
ccacggataaatcat

SEQ ID NO: 1041272 - DNA, 15 bp, Homo sapiens
tccacggataaatca

SEQ ID NO: 1041273 - DNA, 15 bp, Homo sapiens
ttccacggataaatc

SEQ ID NO: 1041274 - DNA, 15 bp, Homo sapiens
tttccacggataaat

SEQ ID NO: 1041275 - DNA, 15 bp, Homo sapiens
ctttccacggataaa

SEQ ID NO: 1041276 - DNA, 15 bp, Homo sapiens
actttccacggataa

SEQ ID NO: 1041277 - DNA, 15 bp, Homo sapiens
aactttccacggata

SEQ ID NO: 1041278 - DNA, 15 bp, Homo sapiens
gaactttccacggat

SEQ ID NO: 1041279 - DNA, 15 bp, Homo sapiens
agaactttccacgga

SEQ ID NO: 1041280 - DNA, 15 bp, Homo sapiens
aagaactttccacgg

SEQ ID NO: 1041281 - DNA, 15 bp, Homo sapiens
caagaactttccacg

SEQ ID NO: 1041282 - DNA, 15 bp, Homo sapiens
tcaagaactttccac

SEQ ID NO: 1041283 - DNA, 15 bp, Homo sapiens
ttcaagaactttcca

SEQ ID NO: 1041284 - DNA, 15 bp, Homo sapiens
gttcaagaactttcc

SEQ ID NO: 1041285 - DNA, 15 bp, Homo sapiens
cgttcaagaactttc

SEQ ID NO: 1041286 - DNA, 15 bp, Homo sapiens
gcgttcaagaacttt

SEQ ID NO: 1041287 - DNA, 15 bp, Homo sapiens
agcgttcaagaactt

SEQ ID NO: 1041288 - DNA, 15 bp, Homo sapiens
tagcgttcaagaact

SEQ ID NO: 1041289 - DNA, 15 bp, Homo sapiens
ctagcgttcaagaac

SEQ ID NO: 1041290 - DNA, 15 bp, Homo sapiens
gctagcgttcaagaa

SEQ ID NO: 1041291 - DNA, 15 bp, Homo sapiens
tgctagcgttcaaga

SEQ ID NO: 1041292 - DNA, 15 bp, Homo sapiens
ttgctagcgttcaag

SEQ ID NO: 1041293 - DNA, 15 bp, Homo sapiens
gttgctagcgttcaa

SEQ ID NO: 1041294 - DNA, 15 bp, Homo sapiens
tgttgctagcgttca

SEQ ID NO: 1041295 - DNA, 15 bp, Homo sapiens
atgttgctagcgttc

SEQ ID NO: 1041296 - DNA, 15 bp, Homo sapiens
catgttgctagcgtt

SEQ ID NO: 1041297 - DNA, 15 bp, Homo sapiens
gcatgttgctagcgt

SEQ ID NO: 1041298 - DNA, 15 bp, Homo sapiens
agcatgttgctagcg

SEQ ID NO: 1041299 - DNA, 15 bp, Homo sapiens
gagcatgttgctagc

SEQ ID NO: 1041300 - DNA, 15 bp, Homo sapiens
tgagcatgttgctag

SEQ ID NO: 1041301 - DNA, 15 bp, Homo sapiens
atgagcatgttgcta

SEQ ID NO: 1041302 - DNA, 15 bp, Homo sapiens
aatgagcatgttgct

SEQ ID NO: 1041303 - DNA, 15 bp, Homo sapiens
aaatgagcatgttgc

SEQ ID NO: 1041304 - DNA, 15 bp, Homo sapiens
gaaatgagcatgttg

SEQ ID NO: 1041305 - DNA, 15 bp, Homo sapiens
agaaatgagcatgtt

SEQ ID NO: 1041306 - DNA, 15 bp, Homo sapiens
cagaaatgagcatgt

SEQ ID NO: 1041307 - DNA, 15 bp, Homo sapiens
acagaaatgagcatg

SEQ ID NO: 1041308 - DNA, 15 bp, Homo sapiens
tacagaaatgagcat

SEQ ID NO: 1041309 - DNA, 15 bp, Homo sapiens
ttacagaaatgagca

SEQ ID NO: 1041310 - DNA, 15 bp, Homo sapiens
tttacagaaatgagc

SEQ ID NO: 1041311 - DNA, 15 bp, Homo sapiens
ctttacagaaatgag

SEQ ID NO: 1041312 - DNA, 15 bp, Homo sapiens
tctttacagaaatga

SEQ ID NO: 1041313 - DNA, 15 bp, Homo sapiens
ctctttacagaaatg

SEQ ID NO: 1041314 - DNA, 15 bp, Homo sapiens
gctctttacagaaat

SEQ ID NO: 1041315 - DNA, 15 bp, Homo sapiens
agctctttacagaaa

SEQ ID NO: 1041316 - DNA, 15 bp, Homo sapiens
aagctctttacagaa

SEQ ID NO: 1041317 - DNA, 15 bp, Homo sapiens
caagctctttacaga

SEQ ID NO: 1041318 - DNA, 15 bp, Homo sapiens
tcaagctctttacag

SEQ ID NO: 1041319 - DNA, 15 bp, Homo sapiens
ttcaagctctttaca

SEQ ID NO: 1041320 - DNA, 15 bp, Homo sapiens
cttcaagctctttac

SEQ ID NO: 1041321 - DNA, 15 bp, Homo sapiens
acttcaagctcttta

SEQ ID NO: 1041322 - DNA, 15 bp, Homo sapiens
tacttcaagctcttt

SEQ ID NO: 1041323 - DNA, 15 bp, Homo sapiens
gtacttcaagctctt

SEQ ID NO: 1041324 - DNA, 15 bp, Homo sapiens
tgtacttcaagctct

SEQ ID NO: 1041325 - DNA, 15 bp, Homo sapiens
ttgtacttcaagctc

SEQ ID NO: 1041326 - DNA, 15 bp, Homo sapiens
cttgtacttcaagct

SEQ ID NO: 1041327 - DNA, 15 bp, Homo sapiens
ccttgtacttcaagc

SEQ ID NO: 1041328 - DNA, 15 bp, Homo sapiens
tccttgtacttcaag

SEQ ID NO: 1041329 - DNA, 15 bp, Homo sapiens
ttccttgtacttcaa

SEQ ID NO: 1041330 - DNA, 15 bp, Homo sapiens
cttccttgtacttca

SEQ ID NO: 1041331 - DNA, 15 bp, Homo sapiens
tcttccttgtacttc

SEQ ID NO: 1041332 - DNA, 15 bp, Homo sapiens
ctcttccttgtactt

SEQ ID NO: 1041333 - DNA, 15 bp, Homo sapiens
actcttccttgtact

SEQ ID NO: 1041334 - DNA, 15 bp, Homo sapiens
aactcttccttgtac

SEQ ID NO: 1041335 - DNA, 15 bp, Homo sapiens
aaactcttccttgta

SEQ ID NO: 1041336 - DNA, 15 bp, Homo sapiens
aaaactcttccttgt

SEQ ID NO: 1041337 - DNA, 15 bp, Homo sapiens
taaaactcttccttg

SEQ ID NO: 1041338 - DNA, 15 bp, Homo sapiens
ttaaaactcttcctt

SEQ ID NO: 1041339 - DNA, 15 bp, Homo sapiens
cttaaaactcttcct

SEQ ID NO: 1041340 - DNA, 15 bp, Homo sapiens
acttaaaactcttcc

SEQ ID NO: 1041341 - DNA, 15 bp, Homo sapiens
aacttaaaactcttc

SEQ ID NO: 1041342 - DNA, 15 bp, Homo sapiens
aaacttaaaactctt

SEQ ID NO: 1041343 - DNA, 15 bp, Homo sapiens
taaacttaaaactct

SEQ ID NO: 1041344 - DNA, 15 bp, Homo sapiens
ttaaacttaaaactc

SEQ ID NO: 1041345 - DNA, 15 bp, Homo sapiens
tttaaacttaaaact

SEQ ID NO: 1041346 - DNA, 15 bp, Homo sapiens
gtttaaacttaaaac

SEQ ID NO: 1041347 - DNA, 15 bp, Homo sapiens
agtttaaacttaaaa

SEQ ID NO: 1041348 - DNA, 15 bp, Homo sapiens
aagtttaaacttaaa

SEQ ID NO: 1041349 - DNA, 15 bp, Homo sapiens
aaagtttaaacttaa

SEQ ID NO: 1041350 - DNA, 15 bp, Homo sapiens
taaagtttaaactta

SEQ ID NO: 1041351 - DNA, 15 bp, Homo sapiens
ttaaagtttaaactt

SEQ ID NO: 1041352 - DNA, 15 bp, Homo sapiens
tttaaagtttaaact

SEQ ID NO: 1041353 - DNA, 15 bp, Homo sapiens
ttttaaagtttaaac

SEQ ID NO: 1041354 - DNA, 15 bp, Homo sapiens
tttttaaagtttaaa

SEQ ID NO: 1041355 - DNA, 15 bp, Homo sapiens
ctttttaaagtttaa

SEQ ID NO: 1041356 - DNA, 15 bp, Homo sapiens
actttttaaagttta

SEQ ID NO: 1041357 - DNA, 15 bp, Homo sapiens
aactttttaaagttt

SEQ ID NO: 1041358 - DNA, 15 bp, Homo sapiens
ttaaaactttttaaa

SEQ ID NO: 1041359 - DNA, 15 bp, Homo sapiens
cttaaaactttttaa

SEQ ID NO: 1041360 - DNA, 15 bp, Homo sapiens
tcttaaaacttttta

SEQ ID NO: 1041361 - DNA, 15 bp, Homo sapiens
ctcttaaaacttttt

SEQ ID NO: 1041362 - DNA, 15 bp, Homo sapiens
actcttaaaactttt

SEQ ID NO: 1041363 - DNA, 15 bp, Homo sapiens
aactcttaaaacttt

SEQ ID NO: 1041364 - DNA, 15 bp, Homo sapiens
aaactcttaaaactt

SEQ ID NO: 1041365 - DNA, 15 bp, Homo sapiens
taaactcttaaaact

SEQ ID NO: 1041366 - DNA, 15 bp, Homo sapiens
ttaaactcttaaaac

SEQ ID NO: 1041367 - DNA, 15 bp, Homo sapiens
cttaaactcttaaaa

SEQ ID NO: 1041368 - DNA, 15 bp, Homo sapiens
acttaaactcttaaa

SEQ ID NO: 1041369 - DNA, 15 bp, Homo sapiens
tacttaaactcttaa

SEQ ID NO: 1041370 - DNA, 15 bp, Homo sapiens
ttacttaaactctta

SEQ ID NO: 1041371 - DNA, 15 bp, Homo sapiens
tttacttaaactctt

SEQ ID NO: 1041372 - DNA, 15 bp, Homo sapiens
ctttacttaaactct

SEQ ID NO: 1041373 - DNA, 15 bp, Homo sapiens
tctttacttaaactc

SEQ ID NO: 1041374 - DNA, 15 bp, Homo sapiens
ctctttacttaaact

SEQ ID NO: 1041375 - DNA, 15 bp, Homo sapiens
gctctttacttaaac

SEQ ID NO: 1041376 - DNA, 15 bp, Homo sapiens
agctctttacttaaa

SEQ ID NO: 1041377 - DNA, 15 bp, Homo sapiens
aagctctttacttaa

SEQ ID NO: 1041378 - DNA, 15 bp, Homo sapiens
aaagctctttactta

SEQ ID NO: 1041379 - DNA, 15 bp, Homo sapiens
taaagctctttactt

SEQ ID NO: 1041380 - DNA, 15 bp, Homo sapiens
ataaagctctttact

SEQ ID NO: 1041381 - DNA, 15 bp, Homo sapiens
tataaagctctttac

SEQ ID NO: 1041382 - DNA, 15 bp, Homo sapiens
ttataaagctcttta

SEQ ID NO: 1041383 - DNA, 15 bp, Homo sapiens
cttataaagctcttt

SEQ ID NO: 1041384 - DNA, 15 bp, Homo sapiens
tcttataaagctctt

SEQ ID NO: 1041385 - DNA, 15 bp, Homo sapiens
gtcttataaagctct

SEQ ID NO: 1041386 - DNA, 15 bp, Homo sapiens
tgtcttataaagctc

SEQ ID NO: 1041387 - DNA, 15 bp, Homo sapiens
gtgtcttataaagct

SEQ ID NO: 1041388 - DNA, 15 bp, Homo sapiens
tgtgtcttataaagc

SEQ ID NO: 1041389 - DNA, 15 bp, Homo sapiens
gtgtgtcttataaag

SEQ ID NO: 1041390 - DNA, 15 bp, Homo sapiens
tgtgtgtcttataaa

SEQ ID NO: 1041391 - DNA, 15 bp, Homo sapiens
atgtgtgtcttataa

SEQ ID NO: 1041392 - DNA, 15 bp, Homo sapiens
catgtgtgtcttata

SEQ ID NO: 1041393 - DNA, 15 bp, Homo sapiens
tcatgtgtgtcttat

SEQ ID NO: 1041394 - DNA, 15 bp, Homo sapiens
ttcatgtgtgtctta

SEQ ID NO: 1041395 - DNA, 15 bp, Homo sapiens
cttcatgtgtgtctt

SEQ ID NO: 1041396 - DNA, 15 bp, Homo sapiens
acttcatgtgtgtct

SEQ ID NO: 1041397 - DNA, 15 bp, Homo sapiens
tacttcatgtgtgtc

SEQ ID NO: 1041398 - DNA, 15 bp, Homo sapiens
ctacttcatgtgtgt

SEQ ID NO: 1041399 - DNA, 15 bp, Homo sapiens
gctacttcatgtgtg

SEQ ID NO: 1041400 - DNA, 15 bp, Homo sapiens
tgctacttcatgtgt

SEQ ID NO: 1041401 - DNA, 15 bp, Homo sapiens
ttgctacttcatgtg

SEQ ID NO: 1041402 - DNA, 15 bp, Homo sapiens
gttgctacttcatgt

SEQ ID NO: 1041403 - DNA, 15 bp, Homo sapiens
tgttgctacttcatg

SEQ ID NO: 1041404 - DNA, 15 bp, Homo sapiens
ctgttgctacttcat

SEQ ID NO: 1041405 - DNA, 15 bp, Homo sapiens
gctgttgctacttca

SEQ ID NO: 1041406 - DNA, 15 bp, Homo sapiens
agctgttgctacttc

SEQ ID NO: 1041407 - DNA, 15 bp, Homo sapiens
gagctgttgctactt

SEQ ID NO: 1041408 - DNA, 15 bp, Homo sapiens
ggagctgttgctact

SEQ ID NO: 1041409 - DNA, 15 bp, Homo sapiens
aggagctgttgctac

SEQ ID NO: 1041410 - DNA, 15 bp, Homo sapiens
gaggagctgttgcta

SEQ ID NO: 1041411 - DNA, 15 bp, Homo sapiens
tgaggagctgttgct

SEQ ID NO: 1041412 - DNA, 15 bp, Homo sapiens
atgaggagctgttgc

SEQ ID NO: 1041413 - DNA, 15 bp, Homo sapiens
catgaggagctgttg

SEQ ID NO: 1041414 - DNA, 15 bp, Homo sapiens
acatgaggagctgtt

SEQ ID NO: 1041415 - DNA, 15 bp, Homo sapiens
cacatgaggagctgt

SEQ ID NO: 1041416 - DNA, 15 bp, Homo sapiens
acacatgaggagctg

SEQ ID NO: 1041417 - DNA, 15 bp, Homo sapiens
tacacatgaggagct

SEQ ID NO: 1041418 - DNA, 15 bp, Homo sapiens
ttacacatgaggagc

SEQ ID NO: 1041419 - DNA, 15 bp, Homo sapiens
gttacacatgaggag

SEQ ID NO: 1041420 - DNA, 15 bp, Homo sapiens
tgttacacatgagga

SEQ ID NO: 1041421 - DNA, 15 bp, Homo sapiens
ttgttacacatgagg

SEQ ID NO: 1041422 - DNA, 15 bp, Homo sapiens
cttgttacacatgag

SEQ ID NO: 1041423 - DNA, 15 bp, Homo sapiens
gcttgttacacatga

SEQ ID NO: 1041424 - DNA, 15 bp, Homo sapiens
agcttgttacacatg

SEQ ID NO: 1041425 - DNA, 15 bp, Homo sapiens
cagcttgttacacat

SEQ ID NO: 1041426 - DNA, 15 bp, Homo sapiens
gcagcttgttacaca

SEQ ID NO: 1041427 - DNA, 15 bp, Homo sapiens
tgcagcttgttacac

SEQ ID NO: 1041428 - DNA, 15 bp, Homo sapiens
ttgcagcttgttaca

SEQ ID NO: 1041429 - DNA, 15 bp, Homo sapiens
tttgcagcttgttac

SEQ ID NO: 1041430 - DNA, 15 bp, Homo sapiens
atttgcagcttgtta

SEQ ID NO: 1041431 - DNA, 15 bp, Homo sapiens
tatttgcagcttgtt

SEQ ID NO: 1041432 - DNA, 15 bp, Homo sapiens
ttatttgcagcttgt

SEQ ID NO: 1041433 - DNA, 15 bp, Homo sapiens
cttatttgcagcttg

SEQ ID NO: 1041434 - DNA, 15 bp, Homo sapiens
acttatttgcagctt

SEQ ID NO: 1041435 - DNA, 15 bp, Homo sapiens
cacttatttgcagct

SEQ ID NO: 1041436 - DNA, 15 bp, Homo sapiens
tcacttatttgcagc

SEQ ID NO: 1041437 - DNA, 15 bp, Homo sapiens
ttcacttatttgcag

SEQ ID NO: 1041438 - DNA, 15 bp, Homo sapiens
tttcacttatttgca

SEQ ID NO: 1041439 - DNA, 15 bp, Homo sapiens
atttcacttatttgc

SEQ ID NO: 1041440 - DNA, 15 bp, Homo sapiens
aatttcacttatttg

SEQ ID NO: 1041441 - DNA, 15 bp, Homo sapiens
gaaatttcacttatt

SEQ ID NO: 1041442 - DNA, 15 bp, Homo sapiens
agaaatttcacttat

SEQ ID NO: 1041443 - DNA, 15 bp, Homo sapiens
cagaaatttcactta

SEQ ID NO: 1041444 - DNA, 15 bp, Homo sapiens
gcagaaatttcactt

SEQ ID NO: 1041445 - DNA, 15 bp, Homo sapiens
ggcagaaatttcact

SEQ ID NO: 1041446 - DNA, 15 bp, Homo sapiens
tggcagaaatttcac

SEQ ID NO: 1041447 - DNA, 15 bp, Homo sapiens
ctggcagaaatttca

SEQ ID NO: 1041448 - DNA, 15 bp, Homo sapiens
gctggcagaaatttc

SEQ ID NO: 1041449 - DNA, 15 bp, Homo sapiens
agctggcagaaattt

SEQ ID NO: 1041450 - DNA, 15 bp, Homo sapiens
gagctggcagaaatt

SEQ ID NO: 1041451 - DNA, 15 bp, Homo sapiens
tgagctggcagaaat

SEQ ID NO: 1041452 - DNA, 15 bp, Homo sapiens
ctgagctggcagaaa

SEQ ID NO: 1041453 - DNA, 15 bp, Homo sapiens
gctgagctggcagaa

SEQ ID NO: 1041454 - DNA, 15 bp, Homo sapiens
tgctgagctggcaga

SEQ ID NO: 1041455 - DNA, 15 bp, Homo sapiens
ctgctgagctggcag

SEQ ID NO: 1041456 - DNA, 15 bp, Homo sapiens
gctgctgagctggca

SEQ ID NO: 1041457 - DNA, 15 bp, Homo sapiens
agctgctgagctggc

SEQ ID NO: 1041458 - DNA, 15 bp, Homo sapiens
gagctgctgagctgg

SEQ ID NO: 1041459 - DNA, 15 bp, Homo sapiens
ggagctgctgagctg

SEQ ID NO: 1041460 - DNA, 15 bp, Homo sapiens
aggagctgctgagct

SEQ ID NO: 1041461 - DNA, 15 bp, Homo sapiens
gaggagctgctgagc

SEQ ID NO: 1041462 - DNA, 15 bp, Homo sapiens
cgaggagctgctgag

SEQ ID NO: 1041463 - DNA, 15 bp, Homo sapiens
gcgaggagctgctga

SEQ ID NO: 1041464 - DNA, 15 bp, Homo sapiens
ggcgaggagctgctg

SEQ ID NO: 1041465 - DNA, 15 bp, Homo sapiens
aggcgaggagctgct

SEQ ID NO: 1041466 - DNA, 15 bp, Homo sapiens
caggcgaggagctgc

SEQ ID NO: 1041467 - DNA, 15 bp, Homo sapiens
gcaggcgaggagctg

SEQ ID NO: 1041468 - DNA, 15 bp, Homo sapiens
tgcaggcgaggagct

SEQ ID NO: 1041469 - DNA, 15 bp, Homo sapiens
ctgcaggcgaggagc

SEQ ID NO: 1041470 - DNA, 15 bp, Homo sapiens
tctgcaggcgaggag

SEQ ID NO: 1041471 - DNA, 15 bp, Homo sapiens
gtctgcaggcgagga

SEQ ID NO: 1041472 - DNA, 15 bp, Homo sapiens
tgtctgcaggcgagg

SEQ ID NO: 1041473 - DNA, 15 bp, Homo sapiens
ctgtctgcaggcgag

SEQ ID NO: 1041474 - DNA, 15 bp, Homo sapiens
gctgtctgcaggcga

SEQ ID NO: 1041475 - DNA, 15 bp, Homo sapiens
tgctgtctgcaggcg

SEQ ID NO: 1041476 - DNA, 15 bp, Homo sapiens
ctgctgtctgcaggc

SEQ ID NO: 1041477 - DNA, 15 bp, Homo sapiens
gctgctgtctgcagg

SEQ ID NO: 1041478 - DNA, 15 bp, Homo sapiens
tgctgctgtctgcag

SEQ ID NO: 1041479 - DNA, 15 bp, Homo sapiens
ctgctgctgtctgca

SEQ ID NO: 1041480 - DNA, 15 bp, Homo sapiens
gctgctgctgtctgc

SEQ ID NO: 1041481 - DNA, 15 bp, Homo sapiens
ggctgctgctgtctg

SEQ ID NO: 1041482 - DNA, 15 bp, Homo sapiens
tggctgctgctgtct

SEQ ID NO: 1041483 - DNA, 15 bp, Homo sapiens
gtggctgctgctgtc

SEQ ID NO: 1041484 - DNA, 15 bp, Homo sapiens
tgtggctgctgctgt

SEQ ID NO: 1041485 - DNA, 15 bp, Homo sapiens
atgtggctgctgctg

SEQ ID NO: 1041486 - DNA, 15 bp, Homo sapiens
gatgtggctgctgct

SEQ ID NO: 1041487 - DNA, 15 bp, Homo sapiens
tgatgtggctgctgc

SEQ ID NO: 1041488 - DNA, 15 bp, Homo sapiens
ttgatgtggctgctg

SEQ ID NO: 1041489 - DNA, 15 bp, Homo sapiens
cttgatgtggctgct

SEQ ID NO: 1041490 - DNA, 15 bp, Homo sapiens
acttgatgtggctgc

SEQ ID NO: 1041491 - DNA, 15 bp, Homo sapiens
aacttgatgtggctg

SEQ ID NO: 1041492 - DNA, 15 bp, Homo sapiens
caacttgatgtggct

SEQ ID NO: 1041493 - DNA, 15 bp, Homo sapiens
gcaacttgatgtggc

SEQ ID NO: 1041494 - DNA, 15 bp, Homo sapiens
ggcaacttgatgtgg

SEQ ID NO: 1041495 - DNA, 15 bp, Homo sapiens
gggcaacttgatgtg

SEQ ID NO: 1041496 - DNA, 15 bp, Homo sapiens
tgggcaacttgatgt

SEQ ID NO: 1041497 - DNA, 15 bp, Homo sapiens
ctgggcaacttgatg

SEQ ID NO: 1041498 - DNA, 15 bp, Homo sapiens
tctgggcaacttgat

SEQ ID NO: 1041499 - DNA, 15 bp, Homo sapiens
gtctgggcaacttga

SEQ ID NO: 1041500 - DNA, 15 bp, Homo sapiens
agtctgggcaacttg

SEQ ID NO: 1041501 - DNA, 15 bp, Homo sapiens
gagtctgggcaactt

SEQ ID NO: 1041502 - DNA, 15 bp, Homo sapiens
tgagtctgggcaact

SEQ ID NO: 1041503 - DNA, 15 bp, Homo sapiens
atgagtctgggcaac

SEQ ID NO: 1041504 - DNA, 15 bp, Homo sapiens
aatgagtctgggcaa

SEQ ID NO: 1041505 - DNA, 15 bp, Homo sapiens
gaatgagtctgggca

SEQ ID NO: 1041506 - DNA, 15 bp, Homo sapiens
ggaatgagtctgggc

SEQ ID NO: 1041507 - DNA, 15 bp, Homo sapiens
aggaatgagtctggg

SEQ ID NO: 1041508 - DNA, 15 bp, Homo sapiens
gaggaatgagtctgg

SEQ ID NO: 1041509 - DNA, 15 bp, Homo sapiens
agaggaatgagtctg

SEQ ID NO: 1041510 - DNA, 15 bp, Homo sapiens
aagaggaatgagtct

SEQ ID NO: 1041511 - DNA, 15 bp, Homo sapiens
caagaggaatgagtc

SEQ ID NO: 1041512 - DNA, 15 bp, Homo sapiens
acaagaggaatgagt

SEQ ID NO: 1041513 - DNA, 15 bp, Homo sapiens
aacaagaggaatgag

SEQ ID NO: 1041514 - DNA, 15 bp, Homo sapiens
aaacaagaggaatga

SEQ ID NO: 1041515 - DNA, 15 bp, Homo sapiens
caaacaagaggaatg

SEQ ID NO: 1041516 - DNA, 15 bp, Homo sapiens
gcaaacaagaggaat

SEQ ID NO: 1041517 - DNA, 15 bp, Homo sapiens
ggcaaacaagaggaa

SEQ ID NO: 1041518 - DNA, 15 bp, Homo sapiens
aggcaaacaagagga

SEQ ID NO: 1041519 - DNA, 15 bp, Homo sapiens
gaggcaaacaagagg

SEQ ID NO: 1041520 - DNA, 15 bp, Homo sapiens
ggaggcaaacaagag

SEQ ID NO: 1041521 - DNA, 15 bp, Homo sapiens
aggaggcaaacaaga

SEQ ID NO: 1041522 - DNA, 15 bp, Homo sapiens
gaggaggcaaacaag

SEQ ID NO: 1041523 - DNA, 15 bp, Homo sapiens
ggaggaggcaaacaa

SEQ ID NO: 1041524 - DNA, 15 bp, Homo sapiens
cggaggaggcaaaca

SEQ ID NO: 1041525 - DNA, 15 bp, Homo sapiens
acggaggaggcaaac

SEQ ID NO: 1041526 - DNA, 15 bp, Homo sapiens
gacggaggaggcaaa

SEQ ID NO: 1041527 - DNA, 15 bp, Homo sapiens
ggacggaggaggcaa

SEQ ID NO: 1041528 - DNA, 15 bp, Homo sapiens
gggacggaggaggca

SEQ ID NO: 1041529 - DNA, 15 bp, Homo sapiens
agggacggaggaggc

SEQ ID NO: 1041530 - DNA, 15 bp, Homo sapiens
tagggacggaggagg

SEQ ID NO: 1041531 - DNA, 15 bp, Homo sapiens
gtagggacggaggag

SEQ ID NO: 1041532 - DNA, 15 bp, Homo sapiens
agtagggacggagga

SEQ ID NO: 1041533 - DNA, 15 bp, Homo sapiens
gagtagggacggagg

SEQ ID NO: 1041534 - DNA, 15 bp, Homo sapiens
agagtagggacggag

SEQ ID NO: 1041535 - DNA, 15 bp, Homo sapiens
cagagtagggacgga

SEQ ID NO: 1041536 - DNA, 15 bp, Homo sapiens
ccagagtagggacgg

SEQ ID NO: 1041537 - DNA, 15 bp, Homo sapiens
accagagtagggacg

SEQ ID NO: 1041538 - DNA, 15 bp, Homo sapiens
gaccagagtagggac

SEQ ID NO: 1041539 - DNA, 15 bp, Homo sapiens
agaccagagtaggga

SEQ ID NO: 1041540 - DNA, 15 bp, Homo sapiens
aagaccagagtaggg

SEQ ID NO: 1041541 - DNA, 15 bp, Homo sapiens
gaagaccagagtagg

SEQ ID NO: 1041542 - DNA, 15 bp, Homo sapiens
ggaagaccagagtag

SEQ ID NO: 1041543 - DNA, 15 bp, Homo sapiens
gggaagaccagagta

SEQ ID NO: 1041544 - DNA, 15 bp, Homo sapiens
tgggaagaccagagt

SEQ ID NO: 1041545 - DNA, 15 bp, Homo sapiens
ctgggaagaccagag

SEQ ID NO: 1041546 - DNA, 15 bp, Homo sapiens
tctgggaagaccaga

SEQ ID NO: 1041547 - DNA, 15 bp, Homo sapiens
ctctgggaagaccag

SEQ ID NO: 1041548 - DNA, 15 bp, Homo sapiens
gctctgggaagacca

SEQ ID NO: 1041549 - DNA, 15 bp, Homo sapiens
tgctctgggaagacc

SEQ ID NO: 1041550 - DNA, 15 bp, Homo sapiens
ttgctctgggaagac

SEQ ID NO: 1041551 - DNA, 15 bp, Homo sapiens
attgctctgggaaga

SEQ ID NO: 1041552 - DNA, 15 bp, Homo sapiens
aattgctctgggaag

SEQ ID NO: 1041553 - DNA, 15 bp, Homo sapiens
aaattgctctgggaa

SEQ ID NO: 1041554 - DNA, 15 bp, Homo sapiens
caaattgctctggga

SEQ ID NO: 1041555 - DNA, 15 bp, Homo sapiens
ccaaattgctctggg

SEQ ID NO: 1041556 - DNA, 15 bp, Homo sapiens
tccaaattgctctgg

SEQ ID NO: 1041557 - DNA, 15 bp, Homo sapiens
ctccaaattgctctg

SEQ ID NO: 1041558 - DNA, 15 bp, Homo sapiens
tctccaaattgctct

SEQ ID NO: 1041559 - DNA, 15 bp, Homo sapiens
ctctccaaattgctc

SEQ ID NO: 1041560 - DNA, 15 bp, Homo sapiens
cctctccaaattgct

SEQ ID NO: 1041561 - DNA, 15 bp, Homo sapiens
ccctctccaaattgc

SEQ ID NO: 1041562 - DNA, 15 bp, Homo sapiens
gccctctccaaattg

SEQ ID NO: 1041563 - DNA, 15 bp, Homo sapiens
agccctctccaaatt

SEQ ID NO: 1041564 - DNA, 15 bp, Homo sapiens
gagccctctccaaat

SEQ ID NO: 1041565 - DNA, 15 bp, Homo sapiens
ggagccctctccaaa

SEQ ID NO: 1041566 - DNA, 15 bp, Homo sapiens
gggagccctctccaa

SEQ ID NO: 1041567 - DNA, 15 bp, Homo sapiens
agggagccctctcca

SEQ ID NO: 1041568 - DNA, 15 bp, Homo sapiens
tagggagccctctcc

SEQ ID NO: 1041569 - DNA, 15 bp, Homo sapiens
gtagggagccctctc

SEQ ID NO: 1041570 - DNA, 15 bp, Homo sapiens
agtagggagccctct

SEQ ID NO: 1041571 - DNA, 15 bp, Homo sapiens
tagtagggagccctc

SEQ ID NO: 1041572 - DNA, 15 bp, Homo sapiens
gtagtagggagccct

SEQ ID NO: 1041573 - DNA, 15 bp, Homo sapiens
ggtagtagggagccc

SEQ ID NO: 1041574 - DNA, 15 bp, Homo sapiens
tggtagtagggagcc

SEQ ID NO: 1041575 - DNA, 15 bp, Homo sapiens
ctggtagtagggagc

SEQ ID NO: 1041576 - DNA, 15 bp, Homo sapiens
actggtagtagggag

SEQ ID NO: 1041577 - DNA, 15 bp, Homo sapiens
cactggtagtaggga

SEQ ID NO: 1041578 - DNA, 15 bp, Homo sapiens
ccactggtagtaggg

SEQ ID NO: 1041579 - DNA, 15 bp, Homo sapiens
gccactggtagtagg

SEQ ID NO: 1041580 - DNA, 15 bp, Homo sapiens
tgccactggtagtag

SEQ ID NO: 1041581 - DNA, 15 bp, Homo sapiens
atgccactggtagta

SEQ ID NO: 1041582 - DNA, 15 bp, Homo sapiens
gatgccactggtagt

SEQ ID NO: 1041583 - DNA, 15 bp, Homo sapiens
tgatgccactggtag

SEQ ID NO: 1041584 - DNA, 15 bp, Homo sapiens
atgatgccactggta

SEQ ID NO: 1041585 - DNA, 15 bp, Homo sapiens
tatgatgccactggt

SEQ ID NO: 1041586 - DNA, 15 bp, Homo sapiens
ttatgatgccactgg

SEQ ID NO: 1041587 - DNA, 15 bp, Homo sapiens
tttatgatgccactg

SEQ ID NO: 1041588 - DNA, 15 bp, Homo sapiens
ttttatgatgccact

SEQ ID NO: 1041589 - DNA, 15 bp, Homo sapiens
tttttatgatgccac

SEQ ID NO: 1041590 - DNA, 15 bp, Homo sapiens
atttttatgatgcca

SEQ ID NO: 1041591 - DNA, 15 bp, Homo sapiens
catttttatgatgcc

SEQ ID NO: 1041592 - DNA, 15 bp, Homo sapiens
tcatttttatgatgc

SEQ ID NO: 1041593 - DNA, 15 bp, Homo sapiens
gtcatttttatgatg

SEQ ID NO: 1041594 - DNA, 15 bp, Homo sapiens
tgtcatttttatgat

SEQ ID NO: 1041595 - DNA, 15 bp, Homo sapiens
ctgtcatttttatga

SEQ ID NO: 1041596 - DNA, 15 bp, Homo sapiens
actgtcatttttatg

SEQ ID NO: 1041597 - DNA, 15 bp, Homo sapiens
cactgtcatttttat

SEQ ID NO: 1041598 - DNA, 15 bp, Homo sapiens
acactgtcattttta

SEQ ID NO: 1041599 - DNA, 15 bp, Homo sapiens
tacactgtcattttt

SEQ ID NO: 1041600 - DNA, 15 bp, Homo sapiens
gtacactgtcatttt

SEQ ID NO: 1041601 - DNA, 15 bp, Homo sapiens
agtacactgtcattt

SEQ ID NO: 1041602 - DNA, 15 bp, Homo sapiens
aagtacactgtcatt

SEQ ID NO: 1041603 - DNA, 15 bp, Homo sapiens
caagtacactgtcat

SEQ ID NO: 1041604 - DNA, 15 bp, Homo sapiens
gcaagtacactgtca

SEQ ID NO: 1041605 - DNA, 15 bp, Homo sapiens
ggcaagtacactgtc

SEQ ID NO: 1041606 - DNA, 15 bp, Homo sapiens
tggcaagtacactgt

SEQ ID NO: 1041607 - DNA, 15 bp, Homo sapiens
ttggcaagtacactg

SEQ ID NO: 1041608 - DNA, 15 bp, Homo sapiens
cttggcaagtacact

SEQ ID NO: 1041609 - DNA, 15 bp, Homo sapiens
ccttggcaagtacac

SEQ ID NO: 1041610 - DNA, 15 bp, Homo sapiens
cccttggcaagtaca

SEQ ID NO: 1041611 - DNA, 15 bp, Homo sapiens
gcccttggcaagtac

SEQ ID NO: 1041612 - DNA, 15 bp, Homo sapiens
tgcccttggcaagta

SEQ ID NO: 1041613 - DNA, 15 bp, Homo sapiens
atgcccttggcaagt

SEQ ID NO: 1041614 - DNA, 15 bp, Homo sapiens
catgcccttggcaag

SEQ ID NO: 1041615 - DNA, 15 bp, Homo sapiens
ccatgcccttggcaa

SEQ ID NO: 1041616 - DNA, 15 bp, Homo sapiens
accatgcccttggca

SEQ ID NO: 1041617 - DNA, 15 bp, Homo sapiens
gaccatgcccttggc

SEQ ID NO: 1041618 - DNA, 15 bp, Homo sapiens
agaccatgcccttgg

SEQ ID NO: 1041619 - DNA, 15 bp, Homo sapiens
aagaccatgcccttg

SEQ ID NO: 1041620 - DNA, 15 bp, Homo sapiens
caagaccatgccctt

SEQ ID NO: 1041621 - DNA, 15 bp, Homo sapiens
ccaagaccatgccct

SEQ ID NO: 1041622 - DNA, 15 bp, Homo sapiens
cccaagaccatgccc

SEQ ID NO: 1041623 - DNA, 15 bp, Homo sapiens
ccccaagaccatgcc

SEQ ID NO: 1041624 - DNA, 15 bp, Homo sapiens
accccaagaccatgc

SEQ ID NO: 1041625 - DNA, 15 bp, Homo sapiens
caccccaagaccatg

SEQ ID NO: 1041626 - DNA, 15 bp, Homo sapiens
gcaccccaagaccat

SEQ ID NO: 1041627 - DNA, 15 bp, Homo sapiens
agcaccccaagacca

SEQ ID NO: 1041628 - DNA, 15 bp, Homo sapiens
gagcaccccaagacc

SEQ ID NO: 1041629 - DNA, 15 bp, Homo sapiens
ggagcaccccaagac

SEQ ID NO: 1041630 - DNA, 15 bp, Homo sapiens
aggagcaccccaaga

SEQ ID NO: 1041631 - DNA, 15 bp, Homo sapiens
taggagcaccccaag

SEQ ID NO: 1041632 - DNA, 15 bp, Homo sapiens
ttaggagcaccccaa

SEQ ID NO: 1041633 - DNA, 15 bp, Homo sapiens
tttaggagcacccca

SEQ ID NO: 1041634 - DNA, 15 bp, Homo sapiens
ctttaggagcacccc

SEQ ID NO: 1041635 - DNA, 15 bp, Homo sapiens
gctttaggagcaccc

SEQ ID NO: 1041636 - DNA, 15 bp, Homo sapiens
agctttaggagcacc

SEQ ID NO: 1041637 - DNA, 15 bp, Homo sapiens
cagctttaggagcac

SEQ ID NO: 1041638 - DNA, 15 bp, Homo sapiens
acagctttaggagca

SEQ ID NO: 1041639 - DNA, 15 bp, Homo sapiens
aacagctttaggagc

SEQ ID NO: 1041640 - DNA, 15 bp, Homo sapiens
caacagctttaggag

SEQ ID NO: 1041641 - DNA, 15 bp, Homo sapiens
tcaacagctttagga

SEQ ID NO: 1041642 - DNA, 15 bp, Homo sapiens
ttcaacagctttagg

SEQ ID NO: 1041643 - DNA, 15 bp, Homo sapiens
gttcaacagctttag

SEQ ID NO: 1041644 - DNA, 15 bp, Homo sapiens
agttcaacagcttta

SEQ ID NO: 1041645 - DNA, 15 bp, Homo sapiens
cagttcaacagcttt

SEQ ID NO: 1041646 - DNA, 15 bp, Homo sapiens
gcagttcaacagctt

SEQ ID NO: 1041647 - DNA, 15 bp, Homo sapiens
tgcagttcaacagct

SEQ ID NO: 1041648 - DNA, 15 bp, Homo sapiens
ttgcagttcaacagc

SEQ ID NO: 1041649 - DNA, 15 bp, Homo sapiens
tttgcagttcaacag

SEQ ID NO: 1041650 - DNA, 15 bp, Homo sapiens
ttttgcagttcaaca

SEQ ID NO: 1041651 - DNA, 15 bp, Homo sapiens
tttttgcagttcaac

SEQ ID NO: 1041652 - DNA, 15 bp, Homo sapiens
ctttttgcagttcaa

SEQ ID NO: 1041653 - DNA, 15 bp, Homo sapiens
cctttttgcagttca

SEQ ID NO: 1041654 - DNA, 15 bp, Homo sapiens
ccctttttgcagttc

SEQ ID NO: 1041655 - DNA, 15 bp, Homo sapiens
cccctttttgcagtt

SEQ ID NO: 1041656 - DNA, 15 bp, Homo sapiens
acccctttttgcagt

SEQ ID NO: 1041657 - DNA, 15 bp, Homo sapiens
cacccctttttgcag

SEQ ID NO: 1041658 - DNA, 15 bp, Homo sapiens
gcacccctttttgca

SEQ ID NO: 1041659 - DNA, 15 bp, Homo sapiens
ggcacccctttttgc

SEQ ID NO: 1041660 - DNA, 15 bp, Homo sapiens
cggcacccctttttg

SEQ ID NO: 1041661 - DNA, 15 bp, Homo sapiens
acggcaccccttttt

SEQ ID NO: 1041662 - DNA, 15 bp, Homo sapiens
aacggcacccctttt

SEQ ID NO: 1041663 - DNA, 15 bp, Homo sapiens
aaacggcaccccttt

SEQ ID NO: 1041664 - DNA, 15 bp, Homo sapiens
taaacggcacccctt

SEQ ID NO: 1041665 - DNA, 15 bp, Homo sapiens
ataaacggcacccct

SEQ ID NO: 1041666 - DNA, 15 bp, Homo sapiens
aataaacggcacccc

SEQ ID NO: 1041667 - DNA, 15 bp, Homo sapiens
aaataaacggcaccc

SEQ ID NO: 1041668 - DNA, 15 bp, Homo sapiens
caaataaacggcacc

SEQ ID NO: 1041669 - DNA, 15 bp, Homo sapiens
gcaaataaacggcac

SEQ ID NO: 1041670 - DNA, 15 bp, Homo sapiens
tgcaaataaacggca

SEQ ID NO: 1041671 - DNA, 15 bp, Homo sapiens
ctgcaaataaacggc

SEQ ID NO: 1041672 - DNA, 15 bp, Homo sapiens
tctgcaaataaacgg

SEQ ID NO: 1041673 - DNA, 15 bp, Homo sapiens
ttctgcaaataaacg

SEQ ID NO: 1041674 - DNA, 15 bp, Homo sapiens
cttctgcaaataaac

SEQ ID NO: 1041675 - DNA, 15 bp, Homo sapiens
gcttctgcaaataaa

SEQ ID NO: 1041676 - DNA, 15 bp, Homo sapiens
ggcttctgcaaataa

SEQ ID NO: 1041677 - DNA, 15 bp, Homo sapiens
tggcttctgcaaata

SEQ ID NO: 1041678 - DNA, 15 bp, Homo sapiens
gtggcttctgcaaat

SEQ ID NO: 1041679 - DNA, 15 bp, Homo sapiens
tgtggcttctgcaaa

SEQ ID NO: 1041680 - DNA, 15 bp, Homo sapiens
ttgtggcttctgcaa

SEQ ID NO: 1041681 - DNA, 15 bp, Homo sapiens
cttgtggcttctgca

SEQ ID NO: 1041682 - DNA, 15 bp, Homo sapiens
tcttgtggcttctgc

SEQ ID NO: 1041683 - DNA, 15 bp, Homo sapiens
ttcttgtggcttctg

SEQ ID NO: 1041684 - DNA, 15 bp, Homo sapiens
attcttgtggcttct

SEQ ID NO: 1041685 - DNA, 15 bp, Homo sapiens
cattcttgtggcttc

SEQ ID NO: 1041686 - DNA, 15 bp, Homo sapiens
gcattcttgtggctt

SEQ ID NO: 1041687 - DNA, 15 bp, Homo sapiens
agcattcttgtggct

SEQ ID NO: 1041688 - DNA, 15 bp, Homo sapiens
gagcattcttgtggc

SEQ ID NO: 1041689 - DNA, 15 bp, Homo sapiens
agagcattcttgtgg

SEQ ID NO: 1041690 - DNA, 15 bp, Homo sapiens
gagagcattcttgtg

SEQ ID NO: 1041691 - DNA, 15 bp, Homo sapiens
ggagagcattcttgt

SEQ ID NO: 1041692 - DNA, 15 bp, Homo sapiens
aggagagcattcttg

SEQ ID NO: 1041693 - DNA, 15 bp, Homo sapiens
gaggagagcattctt

SEQ ID NO: 1041694 - DNA, 15 bp, Homo sapiens
ggaggagagcattct

SEQ ID NO: 1041695 - DNA, 15 bp, Homo sapiens
gggaggagagcattc

SEQ ID NO: 1041696 - DNA, 15 bp, Homo sapiens
ggggaggagagcatt

SEQ ID NO: 1041697 - DNA, 15 bp, Homo sapiens
tggggaggagagcat

SEQ ID NO: 1041698 - DNA, 15 bp, Homo sapiens
ttggggaggagagca

SEQ ID NO: 1041699 - DNA, 15 bp, Homo sapiens
gttggggaggagagc

SEQ ID NO: 1041700 - DNA, 15 bp, Homo sapiens
agttggggaggagag

SEQ ID NO: 1041701 - DNA, 15 bp, Homo sapiens
gagttggggaggaga

SEQ ID NO: 1041702 - DNA, 15 bp, Homo sapiens
agagttggggaggag

SEQ ID NO: 1041703 - DNA, 15 bp, Homo sapiens
cagagttggggagga

SEQ ID NO: 1041704 - DNA, 15 bp, Homo sapiens
gcagagttggggagg

SEQ ID NO: 1041705 - DNA, 15 bp, Homo sapiens
agcagagttggggag

SEQ ID NO: 1041706 - DNA, 15 bp, Homo sapiens
gagcagagttgggga

SEQ ID NO: 1041707 - DNA, 15 bp, Homo sapiens
agagcagagttgggg

SEQ ID NO: 1041708 - DNA, 15 bp, Homo sapiens
aagagcagagttggg

SEQ ID NO: 1041709 - DNA, 15 bp, Homo sapiens
aaagagcagagttgg

SEQ ID NO: 1041710 - DNA, 15 bp, Homo sapiens
gaaagagcagagttg

SEQ ID NO: 1041711 - DNA, 15 bp, Homo sapiens
tgaaagagcagagtt

SEQ ID NO: 1041712 - DNA, 15 bp, Homo sapiens
gtgaaagagcagagt

SEQ ID NO: 1041713 - DNA, 15 bp, Homo sapiens
agtgaaagagcagag

SEQ ID NO: 1041714 - DNA, 15 bp, Homo sapiens
aagtgaaagagcaga

SEQ ID NO: 1041715 - DNA, 15 bp, Homo sapiens
caagtgaaagagcag

SEQ ID NO: 1041716 - DNA, 15 bp, Homo sapiens
ccaagtgaaagagca

SEQ ID NO: 1041717 - DNA, 15 bp, Homo sapiens
cccaagtgaaagagc

SEQ ID NO: 1041718 - DNA, 15 bp, Homo sapiens
acccaagtgaaagag

SEQ ID NO: 1041719 - DNA, 15 bp, Homo sapiens
gacccaagtgaaaga

SEQ ID NO: 1041720 - DNA, 15 bp, Homo sapiens
agacccaagtgaaag

SEQ ID NO: 1041721 - DNA, 15 bp, Homo sapiens
gagacccaagtgaaa

SEQ ID NO: 1041722 - DNA, 15 bp, Homo sapiens
tgagacccaagtgaa

SEQ ID NO: 1041723 - DNA, 15 bp, Homo sapiens
ttgagacccaagtga

SEQ ID NO: 1041724 - DNA, 15 bp, Homo sapiens
tttgagacccaagtg

SEQ ID NO: 1041725 - DNA, 15 bp, Homo sapiens
atttgagacccaagt

SEQ ID NO: 1041726 - DNA, 15 bp, Homo sapiens
gatttgagacccaag

SEQ ID NO: 1041727 - DNA, 15 bp, Homo sapiens
tgatttgagacccaa

SEQ ID NO: 1041728 - DNA, 15 bp, Homo sapiens
ctgatttgagaccca

SEQ ID NO: 1041729 - DNA, 15 bp, Homo sapiens
gctgatttgagaccc

SEQ ID NO: 1041730 - DNA, 15 bp, Homo sapiens
agctgatttgagacc

SEQ ID NO: 1041731 - DNA, 15 bp, Homo sapiens
aagctgatttgagac

SEQ ID NO: 1041732 - DNA, 15 bp, Homo sapiens
caagctgatttgaga

SEQ ID NO: 1041733 - DNA, 15 bp, Homo sapiens
acaagctgatttgag

SEQ ID NO: 1041734 - DNA, 15 bp, Homo sapiens
gacaagctgatttga

SEQ ID NO: 1041735 - DNA, 15 bp, Homo sapiens
agacaagctgatttg

SEQ ID NO: 1041736 - DNA, 15 bp, Homo sapiens
cagacaagctgattt

SEQ ID NO: 1041737 - DNA, 15 bp, Homo sapiens
ccagacaagctgatt

SEQ ID NO: 1041738 - DNA, 15 bp, Homo sapiens
cccagacaagctgat

SEQ ID NO: 1041739 - DNA, 15 bp, Homo sapiens
ccccagacaagctga

SEQ ID NO: 1041740 - DNA, 15 bp, Homo sapiens
gccccagacaagctg

SEQ ID NO: 1041741 - DNA, 15 bp, Homo sapiens
ggccccagacaagct

SEQ ID NO: 1041742 - DNA, 15 bp, Homo sapiens
aggccccagacaagc

SEQ ID NO: 1041743 - DNA, 15 bp, Homo sapiens
aaggccccagacaag

SEQ ID NO: 1041744 - DNA, 15 bp, Homo sapiens
taaggccccagacaa

SEQ ID NO: 1041745 - DNA, 15 bp, Homo sapiens
ataaggccccagaca

SEQ ID NO: 1041746 - DNA, 15 bp, Homo sapiens
gataaggccccagac

SEQ ID NO: 1041747 - DNA, 15 bp, Homo sapiens
agataaggccccaga

SEQ ID NO: 1041748 - DNA, 15 bp, Homo sapiens
gagataaggccccag

SEQ ID NO: 1041749 - DNA, 15 bp, Homo sapiens
ggagataaggcccca

SEQ ID NO: 1041750 - DNA, 15 bp, Homo sapiens
gggagataaggcccc

SEQ ID NO: 1041751 - DNA, 15 bp, Homo sapiens
ggggagataaggccc

SEQ ID NO: 1041752 - DNA, 15 bp, Homo sapiens
tggggagataaggcc

SEQ ID NO: 1041753 - DNA, 15 bp, Homo sapiens
ttggggagataaggc

SEQ ID NO: 1041754 - DNA, 15 bp, Homo sapiens
tttggggagataagg

SEQ ID NO: 1041755 - DNA, 15 bp, Homo sapiens
atttggggagataag

SEQ ID NO: 1041756 - DNA, 15 bp, Homo sapiens
gatttggggagataa

SEQ ID NO: 1041757 - DNA, 15 bp, Homo sapiens
agatttggggagata

SEQ ID NO: 1041758 - DNA, 15 bp, Homo sapiens
aagatttggggagat

SEQ ID NO: 1041759 - DNA, 15 bp, Homo sapiens
aaagatttggggaga

SEQ ID NO: 1041760 - DNA, 15 bp, Homo sapiens
aaaagatttggggag

SEQ ID NO: 1041761 - DNA, 15 bp, Homo sapiens
taaaagatttgggga

SEQ ID NO: 1041762 - DNA, 15 bp, Homo sapiens
ataaaagatttgggg

SEQ ID NO: 1041763 - DNA, 15 bp, Homo sapiens
aataaaagatttggg

SEQ ID NO: 1041764 - DNA, 15 bp, Homo sapiens
gaataaaagatttgg

SEQ ID NO: 1041765 - DNA, 15 bp, Homo sapiens
ggaataaaagatttg

SEQ ID NO: 1041766 - DNA, 15 bp, Homo sapiens
tggaataaaagattt

SEQ ID NO: 1041767 - DNA, 15 bp, Homo sapiens
gtggaataaaagatt

SEQ ID NO: 1041768 - DNA, 15 bp, Homo sapiens
agtggaataaaagat

SEQ ID NO: 1041769 - DNA, 15 bp, Homo sapiens
ctaagtggaataaaa

SEQ ID NO: 1041770 - DNA, 15 bp, Homo sapiens
cctaagtggaataaa

SEQ ID NO: 1041771 - DNA, 15 bp, Homo sapiens
ccctaagtggaataa

SEQ ID NO: 1041772 - DNA, 15 bp, Homo sapiens
cccctaagtggaata

SEQ ID NO: 1041773 - DNA, 15 bp, Homo sapiens
gcccctaagtggaat

SEQ ID NO: 1041774 - DNA, 15 bp, Homo sapiens
ggcccctaagtggaa

SEQ ID NO: 1041775 - DNA, 15 bp, Homo sapiens
gggcccctaagtgga

SEQ ID NO: 1041776 - DNA, 15 bp, Homo sapiens
agggcccctaagtgg

SEQ ID NO: 1041777 - DNA, 15 bp, Homo sapiens
gagggcccctaagtg

SEQ ID NO: 1041778 - DNA, 15 bp, Homo sapiens
tgagggcccctaagt

SEQ ID NO: 1041779 - DNA, 15 bp, Homo sapiens
gtgagggcccctaag

SEQ ID NO: 1041780 - DNA, 15 bp, Homo sapiens
ggtgagggcccctaa

SEQ ID NO: 1041781 - DNA, 15 bp, Homo sapiens
aggtgagggccccta

SEQ ID NO: 1041782 - DNA, 15 bp, Homo sapiens
gaggtgagggcccct

SEQ ID NO: 1041783 - DNA, 15 bp, Homo sapiens
ggaggtgagggcccc

SEQ ID NO: 1041784 - DNA, 15 bp, Homo sapiens
gggaggtgagggccc

SEQ ID NO: 1041785 - DNA, 15 bp, Homo sapiens
agggaggtgagggcc

SEQ ID NO: 1041786 - DNA, 15 bp, Homo sapiens
aagggaggtgagggc

SEQ ID NO: 1041787 - DNA, 15 bp, Homo sapiens
gaagggaggtgaggg

SEQ ID NO: 1041788 - DNA, 15 bp, Homo sapiens
ggaagggaggtgagg

SEQ ID NO: 1041789 - DNA, 15 bp, Homo sapiens
gggaagggaggtgag

SEQ ID NO: 1041790 - DNA, 15 bp, Homo sapiens
agggaagggaggtga

SEQ ID NO: 1041791 - DNA, 15 bp, Homo sapiens
aagggaagggaggtg

SEQ ID NO: 1041792 - DNA, 15 bp, Homo sapiens
caagggaagggaggt

SEQ ID NO: 1041793 - DNA, 15 bp, Homo sapiens
gcaagggaagggagg

SEQ ID NO: 1041794 - DNA, 15 bp, Homo sapiens
ggcaagggaagggag

SEQ ID NO: 1041795 - DNA, 15 bp, Homo sapiens
gggcaagggaaggga

SEQ ID NO: 1041796 - DNA, 15 bp, Homo sapiens
tgggcaagggaaggg

SEQ ID NO: 1041797 - DNA, 15 bp, Homo sapiens
atgggcaagggaagg

SEQ ID NO: 1041798 - DNA, 15 bp, Homo sapiens
tatgggcaagggaag

SEQ ID NO: 1041799 - DNA, 15 bp, Homo sapiens
atatgggcaagggaa

SEQ ID NO: 1041800 - DNA, 15 bp, Homo sapiens
aatatgggcaaggga

SEQ ID NO: 1041801 - DNA, 15 bp, Homo sapiens
caatatgggcaaggg

SEQ ID NO: 1041802 - DNA, 15 bp, Homo sapiens
ccaatatgggcaagg

SEQ ID NO: 1041803 - DNA, 15 bp, Homo sapiens
gccaatatgggcaag

SEQ ID NO: 1041804 - DNA, 15 bp, Homo sapiens
agccaatatgggcaa

SEQ ID NO: 1041805 - DNA, 15 bp, Homo sapiens
aagccaatatgggca

SEQ ID NO: 1041806 - DNA, 15 bp, Homo sapiens
aaagccaatatgggc

SEQ ID NO: 1041807 - DNA, 15 bp, Homo sapiens
aaaagccaatatggg

SEQ ID NO: 1041808 - DNA, 15 bp, Homo sapiens
gaaaagccaatatgg

SEQ ID NO: 1041809 - DNA, 15 bp, Homo sapiens
tgaaaagccaatatg

SEQ ID NO: 1041810 - DNA, 15 bp, Homo sapiens
ttgaaaagccaatat

SEQ ID NO: 1041811 - DNA, 15 bp, Homo sapiens
tttgaaaagccaata

SEQ ID NO: 1041812 - DNA, 15 bp, Homo sapiens
atttgaaaagccaat

SEQ ID NO: 1041813 - DNA, 15 bp, Homo sapiens
aatttgaaaagccaa

SEQ ID NO: 1041814 - DNA, 15 bp, Homo sapiens
gaatttgaaaagcca

SEQ ID NO: 1041815 - DNA, 15 bp, Homo sapiens
tgaatttgaaaagcc

SEQ ID NO: 1041816 - DNA, 15 bp, Homo sapiens
ctgaatttgaaaagc

SEQ ID NO: 1041817 - DNA, 15 bp, Homo sapiens
gctgaatttgaaaag

SEQ ID NO: 1041818 - DNA, 15 bp, Homo sapiens
ggctgaatttgaaaa

SEQ ID NO: 1041819 - DNA, 15 bp, Homo sapiens
gggctgaatttgaaa

SEQ ID NO: 1041820 - DNA, 15 bp, Homo sapiens
tgggctgaatttgaa

SEQ ID NO: 1041821 - DNA, 15 bp, Homo sapiens
ctgggctgaatttga

SEQ ID NO: 1041822 - DNA, 15 bp, Homo sapiens
actgggctgaatttg

SEQ ID NO: 1041823 - DNA, 15 bp, Homo sapiens
cactgggctgaattt

SEQ ID NO: 1041824 - DNA, 15 bp, Homo sapiens
tcactgggctgaatt

SEQ ID NO: 1041825 - DNA, 15 bp, Homo sapiens
ctcactgggctgaat

SEQ ID NO: 1041826 - DNA, 15 bp, Homo sapiens
gctcactgggctgaa

SEQ ID NO: 1041827 - DNA, 15 bp, Homo sapiens
ggctcactgggctga

SEQ ID NO: 1041828 - DNA, 15 bp, Homo sapiens
tggctcactgggctg

SEQ ID NO: 1041829 - DNA, 15 bp, Homo sapiens
ctggctcactgggct

SEQ ID NO: 1041830 - DNA, 15 bp, Homo sapiens
tctggctcactgggc

SEQ ID NO: 1041831 - DNA, 15 bp, Homo sapiens
gtctggctcactggg

SEQ ID NO: 1041832 - DNA, 15 bp, Homo sapiens
tgtctggctcactgg

SEQ ID NO: 1041833 - DNA, 15 bp, Homo sapiens
ctgtctggctcactg

SEQ ID NO: 1041834 - DNA, 15 bp, Homo sapiens
cctgtctggctcact

SEQ ID NO: 1041835 - DNA, 15 bp, Homo sapiens
ccctgtctggctcac

SEQ ID NO: 1041836 - DNA, 15 bp, Homo sapiens
tccctgtctggctca

SEQ ID NO: 1041837 - DNA, 15 bp, Homo sapiens
ttccctgtctggctc

SEQ ID NO: 1041838 - DNA, 15 bp, Homo sapiens
gttccctgtctggct

SEQ ID NO: 1041839 - DNA, 15 bp, Homo sapiens
agttccctgtctggc

SEQ ID NO: 1041840 - DNA, 15 bp, Homo sapiens
gagttccctgtctgg

SEQ ID NO: 1041841 - DNA, 15 bp, Homo sapiens
agagttccctgtctg

SEQ ID NO: 1041842 - DNA, 15 bp, Homo sapiens
aagagttccctgtct

SEQ ID NO: 1041843 - DNA, 15 bp, Homo sapiens
gaagagttccctgtc

SEQ ID NO: 1041844 - DNA, 15 bp, Homo sapiens
agaagagttccctgt

SEQ ID NO: 1041845 - DNA, 15 bp, Homo sapiens
gagaagagttccctg

SEQ ID NO: 1041846 - DNA, 15 bp, Homo sapiens
ggagaagagttccct

SEQ ID NO: 1041847 - DNA, 15 bp, Homo sapiens
aggagaagagttccc

SEQ ID NO: 1041848 - DNA, 15 bp, Homo sapiens
aaggagaagagttcc

SEQ ID NO: 1041849 - DNA, 15 bp, Homo sapiens
gaaggagaagagttc

SEQ ID NO: 1041850 - DNA, 15 bp, Homo sapiens
tgaaggagaagagtt

SEQ ID NO: 1041851 - DNA, 15 bp, Homo sapiens
atgaaggagaagagt

SEQ ID NO: 1041852 - DNA, 15 bp, Homo sapiens
gatgaaggagaagag

SEQ ID NO: 1041853 - DNA, 15 bp, Homo sapiens
agatgaaggagaaga

SEQ ID NO: 1041854 - DNA, 15 bp, Homo sapiens
aagatgaaggagaag

SEQ ID NO: 1041855 - DNA, 15 bp, Homo sapiens
gaagatgaaggagaa

SEQ ID NO: 1041856 - DNA, 15 bp, Homo sapiens
agaagatgaaggaga

SEQ ID NO: 1041857 - DNA, 15 bp, Homo sapiens
gagaagatgaaggag

SEQ ID NO: 1041858 - DNA, 15 bp, Homo sapiens
agagaagatgaagga

SEQ ID NO: 1041859 - DNA, 15 bp, Homo sapiens
gagagaagatgaagg

SEQ ID NO: 1041860 - DNA, 15 bp, Homo sapiens
agagagaagatgaag

SEQ ID NO: 1041861 - DNA, 15 bp, Homo sapiens
gagagagaagatgaa

SEQ ID NO: 1041862 - DNA, 15 bp, Homo sapiens
agagagagaagatga

SEQ ID NO: 1041863 - DNA, 15 bp, Homo sapiens
aagagagagaagatg

SEQ ID NO: 1041864 - DNA, 15 bp, Homo sapiens
gaagagagagaagat

SEQ ID NO: 1041865 - DNA, 15 bp, Homo sapiens
tgaagagagagaaga

SEQ ID NO: 1041866 - DNA, 15 bp, Homo sapiens
gtgaagagagagaag

SEQ ID NO: 1041867 - DNA, 15 bp, Homo sapiens
tgtgaagagagagaa

SEQ ID NO: 1041868 - DNA, 15 bp, Homo sapiens
ctgtgaagagagaga

SEQ ID NO: 1041869 - DNA, 15 bp, Homo sapiens
gctgtgaagagagag

SEQ ID NO: 1041870 - DNA, 15 bp, Homo sapiens
ggctgtgaagagaga

SEQ ID NO: 1041871 - DNA, 15 bp, Homo sapiens
gggctgtgaagagag

SEQ ID NO: 1041872 - DNA, 15 bp, Homo sapiens
ggggctgtgaagaga

SEQ ID NO: 1041873 - DNA, 15 bp, Homo sapiens
gggggctgtgaagag

SEQ ID NO: 1041874 - DNA, 15 bp, Homo sapiens
tgggggctgtgaaga

SEQ ID NO: 1041875 - DNA, 15 bp, Homo sapiens
atgggggctgtgaag

SEQ ID NO: 1041876 - DNA, 15 bp, Homo sapiens
catgggggctgtgaa

SEQ ID NO: 1041877 - DNA, 15 bp, Homo sapiens
tcatgggggctgtga

SEQ ID NO: 1041878 - DNA, 15 bp, Homo sapiens
atcatgggggctgtg

SEQ ID NO: 1041879 - DNA, 15 bp, Homo sapiens
gatcatgggggctgt

SEQ ID NO: 1041880 - DNA, 15 bp, Homo sapiens
agatcatgggggctg

SEQ ID NO: 1041881 - DNA, 15 bp, Homo sapiens
tagatcatgggggct

SEQ ID NO: 1041882 - DNA, 15 bp, Homo sapiens
atagatcatgggggc

SEQ ID NO: 1041883 - DNA, 15 bp, Homo sapiens
gatagatcatggggg

SEQ ID NO: 1041884 - DNA, 15 bp, Homo sapiens
agatagatcatgggg

SEQ ID NO: 1041885 - DNA, 15 bp, Homo sapiens
gagatagatcatggg

SEQ ID NO: 1041886 - DNA, 15 bp, Homo sapiens
agagatagatcatgg

SEQ ID NO: 1041887 - DNA, 15 bp, Homo sapiens
aagagatagatcatg

SEQ ID NO: 1041888 - DNA, 15 bp, Homo sapiens
gaagagatagatcat

SEQ ID NO: 1041889 - DNA, 15 bp, Homo sapiens
agaagagatagatca

SEQ ID NO: 1041890 - DNA, 15 bp, Homo sapiens
aagaagagatagatc

SEQ ID NO: 1041891 - DNA, 15 bp, Homo sapiens
aaagaagagatagat

SEQ ID NO: 1041892 - DNA, 15 bp, Homo sapiens
aaaagaagagataga

SEQ ID NO: 1041893 - DNA, 15 bp, Homo sapiens
gaaaagaagagatag

SEQ ID NO: 1041894 - DNA, 15 bp, Homo sapiens
agaaaagaagagata

SEQ ID NO: 1041895 - DNA, 15 bp, Homo sapiens
gagaaaagaagagat

SEQ ID NO: 1041896 - DNA, 15 bp, Homo sapiens
agagaaaagaagaga

SEQ ID NO: 1041897 - DNA, 15 bp, Homo sapiens
tagagaaaagaagag

SEQ ID NO: 1041898 - DNA, 15 bp, Homo sapiens
gtagagaaaagaaga

SEQ ID NO: 1041899 - DNA, 15 bp, Homo sapiens
tgtagagaaaagaag

SEQ ID NO: 1041900 - DNA, 15 bp, Homo sapiens
atgtagagaaaagaa

SEQ ID NO: 1041901 - DNA, 15 bp, Homo sapiens
aatgtagagaaaaga

SEQ ID NO: 1041902 - DNA, 15 bp, Homo sapiens
caatgtagagaaaag

SEQ ID NO: 1041903 - DNA, 15 bp, Homo sapiens
acaatgtagagaaaa

SEQ ID NO: 1041904 - DNA, 15 bp, Homo sapiens
tacaatgtagagaaa

SEQ ID NO: 1041905 - DNA, 15 bp, Homo sapiens
ttacaatgtagagaa

SEQ ID NO: 1041906 - DNA, 15 bp, Homo sapiens
attacaatgtagaga

SEQ ID NO: 1041907 - DNA, 15 bp, Homo sapiens
cattacaatgtagag

SEQ ID NO: 1041908 - DNA, 15 bp, Homo sapiens
ccattacaatgtaga

SEQ ID NO: 1041909 - DNA, 15 bp, Homo sapiens
tccattacaatgtag

SEQ ID NO: 1041910 - DNA, 15 bp, Homo sapiens
ttccattacaatgta

SEQ ID NO: 1041911 - DNA, 15 bp, Homo sapiens
tttccattacaatgt

SEQ ID NO: 1041912 - DNA, 15 bp, Homo sapiens
ttttccattacaatg

SEQ ID NO: 1041913 - DNA, 15 bp, Homo sapiens
tttttccattacaat

SEQ ID NO: 1041914 - DNA, 15 bp, Homo sapiens
ttttttccattacaa

SEQ ID NO: 1041915 - DNA, 15 bp, Homo sapiens
tttttttccattaca

SEQ ID NO: 1041916 - DNA, 15 bp, Homo sapiens
ctttttttccattac

SEQ ID NO: 1041917 - DNA, 15 bp, Homo sapiens
gctttttttccatta

SEQ ID NO: 1041918 - DNA, 15 bp, Homo sapiens
agctttttttccatt

SEQ ID NO: 1041919 - DNA, 15 bp, Homo sapiens
aagctttttttccat

SEQ ID NO: 1041920 - DNA, 15 bp, Homo sapiens
aaagctttttttcca

SEQ ID NO: 1041921 - DNA, 15 bp, Homo sapiens
aaaagctttttttcc

SEQ ID NO: 1041922 - DNA, 15 bp, Homo sapiens
aaaaagctttttttc

SEQ ID NO: 1041923 - DNA, 15 bp, Homo sapiens
caaaaagcttttttt

SEQ ID NO: 1041924 - DNA, 15 bp, Homo sapiens
acaaaaagctttttt

SEQ ID NO: 1041925 - DNA, 15 bp, Homo sapiens
gacaaaaagcttttt

SEQ ID NO: 1041926 - DNA, 15 bp, Homo sapiens
agacaaaaagctttt

SEQ ID NO: 1041927 - DNA, 15 bp, Homo sapiens
tagacaaaaagcttt

SEQ ID NO: 1041928 - DNA, 15 bp, Homo sapiens
ctagacaaaaagctt

SEQ ID NO: 1041929 - DNA, 15 bp, Homo sapiens
gctagacaaaaagct

SEQ ID NO: 1041930 - DNA, 15 bp, Homo sapiens
ggctagacaaaaagc

SEQ ID NO: 1041931 - DNA, 15 bp, Homo sapiens
tggctagacaaaaag

SEQ ID NO: 1041932 - DNA, 15 bp, Homo sapiens
atggctagacaaaaa

SEQ ID NO: 1041933 - DNA, 15 bp, Homo sapiens
catggctagacaaaa

SEQ ID NO: 1041934 - DNA, 15 bp, Homo sapiens
tcatggctagacaaa

SEQ ID NO: 1041935 - DNA, 15 bp, Homo sapiens
atcatggctagacaa

SEQ ID NO: 1041936 - DNA, 15 bp, Homo sapiens
aatcatggctagaca

SEQ ID NO: 1041937 - DNA, 15 bp, Homo sapiens
caatcatggctagac

SEQ ID NO: 1041938 - DNA, 15 bp, Homo sapiens
gcaatcatggctaga

SEQ ID NO: 1041939 - DNA, 15 bp, Homo sapiens
tgcaatcatggctag

SEQ ID NO: 1041940 - DNA, 15 bp, Homo sapiens
ttgcaatcatggcta

SEQ ID NO: 1041941 - DNA, 15 bp, Homo sapiens
tttgcaatcatggct

SEQ ID NO: 1041942 - DNA, 15 bp, Homo sapiens
atttgcaatcatggc

SEQ ID NO: 1041943 - DNA, 15 bp, Homo sapiens
tatttgcaatcatgg

SEQ ID NO: 1041944 - DNA, 15 bp, Homo sapiens
ctatttgcaatcatg

SEQ ID NO: 1041945 - DNA, 15 bp, Homo sapiens
tctatttgcaatcat

SEQ ID NO: 1041946 - DNA, 15 bp, Homo sapiens
ttctatttgcaatca

SEQ ID NO: 1041947 - DNA, 15 bp, Homo sapiens
cttctatttgcaatc

SEQ ID NO: 1041948 - DNA, 15 bp, Homo sapiens
ccttctatttgcaat

SEQ ID NO: 1041949 - DNA, 15 bp, Homo sapiens
cccttctatttgcaa

SEQ ID NO: 1041950 - DNA, 15 bp, Homo sapiens
ccccttctatttgca

SEQ ID NO: 1041951 - DNA, 15 bp, Homo sapiens
cccccttctatttgc

SEQ ID NO: 1041952 - DNA, 15 bp, Homo sapiens
tcccccttctatttg

SEQ ID NO: 1041953 - DNA, 15 bp, Homo sapiens
atcccccttctattt

SEQ ID NO: 1041954 - DNA, 15 bp, Homo sapiens
catcccccttctatt

SEQ ID NO: 1041955 - DNA, 15 bp, Homo sapiens
acatcccccttctat

SEQ ID NO: 1041956 - DNA, 15 bp, Homo sapiens
cacatcccccttcta

SEQ ID NO: 1041957 - DNA, 15 bp, Homo sapiens
acacatcccccttct

SEQ ID NO: 1041958 - DNA, 15 bp, Homo sapiens
cacacatcccccttc

SEQ ID NO: 1041959 - DNA, 15 bp, Homo sapiens
acacacatccccctt

SEQ ID NO: 1041960 - DNA, 15 bp, Homo sapiens
cacacacatccccct

SEQ ID NO: 1041961 - DNA, 15 bp, Homo sapiens
acacacacatccccc

SEQ ID NO: 1041962 - DNA, 15 bp, Homo sapiens
cacacacacatcccc

SEQ ID NO: 1041963 - DNA, 15 bp, Homo sapiens
acacacacacatccc

SEQ ID NO: 1041964 - DNA, 15 bp, Homo sapiens
cacacacacacatcc

SEQ ID NO: 1041965 - DNA, 15 bp, Homo sapiens
acacacacacacatc

SEQ ID NO: 1041966 - DNA, 15 bp, Homo sapiens
gcacacacacacaca

SEQ ID NO: 1041967 - DNA, 15 bp, Homo sapiens
tatgtgcacacacac

SEQ ID NO: 1041968 - DNA, 15 bp, Homo sapiens
atatgtgcacacaca

SEQ ID NO: 1041969 - DNA, 15 bp, Homo sapiens
catatgtgcacacac

SEQ ID NO: 1041970 - DNA, 15 bp, Homo sapiens
gcatatgtgcacaca

SEQ ID NO: 1041971 - DNA, 15 bp, Homo sapiens
tgcatatgtgcacac

SEQ ID NO: 1041972 - DNA, 15 bp, Homo sapiens
atgcatatgtgcaca

SEQ ID NO: 1041973 - DNA, 15 bp, Homo sapiens
tatgcatatgtgcac

SEQ ID NO: 1041974 - DNA, 15 bp, Homo sapiens
gtatgcatatgtgca

SEQ ID NO: 1041975 - DNA, 15 bp, Homo sapiens
ggtatgcatatgtgc

SEQ ID NO: 1041976 - DNA, 15 bp, Homo sapiens
gggtatgcatatgtg

SEQ ID NO: 1041977 - DNA, 15 bp, Homo sapiens
tgggtatgcatatgt

SEQ ID NO: 1041978 - DNA, 15 bp, Homo sapiens
ttgggtatgcatatg

SEQ ID NO: 1041979 - DNA, 15 bp, Homo sapiens
tttgggtatgcatat

SEQ ID NO: 1041980 - DNA, 15 bp, Homo sapiens
ctttgggtatgcata

SEQ ID NO: 1041981 - DNA, 15 bp, Homo sapiens
gctttgggtatgcat

SEQ ID NO: 1041982 - DNA, 15 bp, Homo sapiens
tgctttgggtatgca

SEQ ID NO: 1041983 - DNA, 15 bp, Homo sapiens
ctgctttgggtatgc

SEQ ID NO: 1041984 - DNA, 15 bp, Homo sapiens
actgctttgggtatg

SEQ ID NO: 1041985 - DNA, 15 bp, Homo sapiens
tactgctttgggtat

SEQ ID NO: 1041986 - DNA, 15 bp, Homo sapiens
atactgctttgggta

SEQ ID NO: 1041987 - DNA, 15 bp, Homo sapiens
aatactgctttgggt

SEQ ID NO: 1041988 - DNA, 15 bp, Homo sapiens
gaatactgctttggg

SEQ ID NO: 1041989 - DNA, 15 bp, Homo sapiens
agaatactgctttgg

SEQ ID NO: 1041990 - DNA, 15 bp, Homo sapiens
gagaatactgctttg

SEQ ID NO: 1041991 - DNA, 15 bp, Homo sapiens
tgagaatactgcttt

SEQ ID NO: 1041992 - DNA, 15 bp, Homo sapiens
gtgagaatactgctt

SEQ ID NO: 1041993 - DNA, 15 bp, Homo sapiens
cgtgagaatactgct

SEQ ID NO: 1041994 - DNA, 15 bp, Homo sapiens
tcgtgagaatactgc

SEQ ID NO: 1041995 - DNA, 15 bp, Homo sapiens
ctcgtgagaatactg

SEQ ID NO: 1041996 - DNA, 15 bp, Homo sapiens
gctcgtgagaatact

SEQ ID NO: 1041997 - DNA, 15 bp, Homo sapiens
agctcgtgagaatac

SEQ ID NO: 1041998 - DNA, 15 bp, Homo sapiens
cagctcgtgagaata

SEQ ID NO: 1041999 - DNA, 15 bp, Homo sapiens
acagctcgtgagaat

SEQ ID NO: 1042000 - DNA, 15 bp, Homo sapiens
aacagctcgtgagaa

SEQ ID NO: 1042001 - DNA, 15 bp, Homo sapiens
taacagctcgtgaga

SEQ ID NO: 1042002 - DNA, 15 bp, Homo sapiens
ttaacagctcgtgag

SEQ ID NO: 1042003 - DNA, 15 bp, Homo sapiens
gttaacagctcgtga

SEQ ID NO: 1042004 - DNA, 15 bp, Homo sapiens
tgttaacagctcgtg

SEQ ID NO: 1042005 - DNA, 15 bp, Homo sapiens
ctgttaacagctcgt

SEQ ID NO: 1042006 - DNA, 15 bp, Homo sapiens
gctgttaacagctcg

SEQ ID NO: 1042007 - DNA, 15 bp, Homo sapiens
agctgttaacagctc

SEQ ID NO: 1042008 - DNA, 15 bp, Homo sapiens
gagctgttaacagct

SEQ ID NO: 1042009 - DNA, 15 bp, Homo sapiens
tgagctgttaacagc

SEQ ID NO: 1042010 - DNA, 15 bp, Homo sapiens
ttgagctgttaacag

SEQ ID NO: 1042011 - DNA, 15 bp, Homo sapiens
tttgagctgttaaca

SEQ ID NO: 1042012 - DNA, 15 bp, Homo sapiens
ctttgagctgttaac

SEQ ID NO: 1042013 - DNA, 15 bp, Homo sapiens
cctttgagctgttaa

SEQ ID NO: 1042014 - DNA, 15 bp, Homo sapiens
tcctttgagctgtta

SEQ ID NO: 1042015 - DNA, 15 bp, Homo sapiens
ctcctttgagctgtt

SEQ ID NO: 1042016 - DNA, 15 bp, Homo sapiens
actcctttgagctgt

SEQ ID NO: 1042017 - DNA, 15 bp, Homo sapiens
gactcctttgagctg

SEQ ID NO: 1042018 - DNA, 15 bp, Homo sapiens
tgactcctttgagct

SEQ ID NO: 1042019 - DNA, 15 bp, Homo sapiens
atgactcctttgagc

SEQ ID NO: 1042020 - DNA, 15 bp, Homo sapiens
tatgactcctttgag

SEQ ID NO: 1042021 - DNA, 15 bp, Homo sapiens
ctatgactcctttga

SEQ ID NO: 1042022 - DNA, 15 bp, Homo sapiens
cctatgactcctttg

SEQ ID NO: 1042023 - DNA, 15 bp, Homo sapiens
acctatgactccttt

SEQ ID NO: 1042024 - DNA, 15 bp, Homo sapiens
gacctatgactcctt

SEQ ID NO: 1042025 - DNA, 15 bp, Homo sapiens
tgacctatgactcct

SEQ ID NO: 1042026 - DNA, 15 bp, Homo sapiens
atgacctatgactcc

SEQ ID NO: 1042027 - DNA, 15 bp, Homo sapiens
gatgacctatgactc

SEQ ID NO: 1042028 - DNA, 15 bp, Homo sapiens
tgatgacctatgact

SEQ ID NO: 1042029 - DNA, 15 bp, Homo sapiens
atgatgacctatgac

SEQ ID NO: 1042030 - DNA, 15 bp, Homo sapiens
gatgatgacctatga

SEQ ID NO: 1042031 - DNA, 15 bp, Homo sapiens
tgatgatgacctatg

SEQ ID NO: 1042032 - DNA, 15 bp, Homo sapiens
ctgatgatgacctat

SEQ ID NO: 1042033 - DNA, 15 bp, Homo sapiens
tctgatgatgaccta

SEQ ID NO: 1042034 - DNA, 15 bp, Homo sapiens
ttctgatgatgacct

SEQ ID NO: 1042035 - DNA, 15 bp, Homo sapiens
tttctgatgatgacc

SEQ ID NO: 1042036 - DNA, 15 bp, Homo sapiens
ctttctgatgatgac

SEQ ID NO: 1042037 - DNA, 15 bp, Homo sapiens
cctttctgatgatga

SEQ ID NO: 1042038 - DNA, 15 bp, Homo sapiens
acctttctgatgatg

SEQ ID NO: 1042039 - DNA, 15 bp, Homo sapiens
aacctttctgatgat

SEQ ID NO: 1042040 - DNA, 15 bp, Homo sapiens
aaacctttctgatga

SEQ ID NO: 1042041 - DNA, 15 bp, Homo sapiens
gaaacctttctgatg

SEQ ID NO: 1042042 - DNA, 15 bp, Homo sapiens
tgaaacctttctgat

SEQ ID NO: 1042043 - DNA, 15 bp, Homo sapiens
atgaaacctttctga

SEQ ID NO: 1042044 - DNA, 15 bp, Homo sapiens
catgaaacctttctg

SEQ ID NO: 1042045 - DNA, 15 bp, Homo sapiens
ccatgaaacctttct

SEQ ID NO: 1042046 - DNA, 15 bp, Homo sapiens
tccatgaaacctttc

SEQ ID NO: 1042047 - DNA, 15 bp, Homo sapiens
ttccatgaaaccttt

SEQ ID NO: 1042048 - DNA, 15 bp, Homo sapiens
tttccatgaaacctt

SEQ ID NO: 1042049 - DNA, 15 bp, Homo sapiens
gtttccatgaaacct

SEQ ID NO: 1042050 - DNA, 15 bp, Homo sapiens
tgtttccatgaaacc

SEQ ID NO: 1042051 - DNA, 15 bp, Homo sapiens
ctgtttccatgaaac

SEQ ID NO: 1042052 - DNA, 15 bp, Homo sapiens
cctgtttccatgaaa

SEQ ID NO: 1042053 - DNA, 15 bp, Homo sapiens
tcctgtttccatgaa

SEQ ID NO: 1042054 - DNA, 15 bp, Homo sapiens
ttcctgtttccatga

SEQ ID NO: 1042055 - DNA, 15 bp, Homo sapiens
cttcctgtttccatg

SEQ ID NO: 1042056 - DNA, 15 bp, Homo sapiens
gcttcctgtttccat

SEQ ID NO: 1042057 - DNA, 15 bp, Homo sapiens
agcttcctgtttcca

SEQ ID NO: 1042058 - DNA, 15 bp, Homo sapiens
gagcttcctgtttcc

SEQ ID NO: 1042059 - DNA, 15 bp, Homo sapiens
agagcttcctgtttc

SEQ ID NO: 1042060 - DNA, 15 bp, Homo sapiens
gagagcttcctgttt

SEQ ID NO: 1042061 - DNA, 15 bp, Homo sapiens
tgagagcttcctgtt

SEQ ID NO: 1042062 - DNA, 15 bp, Homo sapiens
ctgagagcttcctgt

SEQ ID NO: 1042063 - DNA, 15 bp, Homo sapiens
cctgagagcttcctg

SEQ ID NO: 1042064 - DNA, 15 bp, Homo sapiens
tcctgagagcttcct

SEQ ID NO: 1042065 - DNA, 15 bp, Homo sapiens
ttcctgagagcttcc

SEQ ID NO: 1042066 - DNA, 15 bp, Homo sapiens
cttcctgagagcttc

SEQ ID NO: 1042067 - DNA, 15 bp, Homo sapiens
tcttcctgagagctt

SEQ ID NO: 1042068 - DNA, 15 bp, Homo sapiens
atcttcctgagagct

SEQ ID NO: 1042069 - DNA, 15 bp, Homo sapiens
gatcttcctgagagc

SEQ ID NO: 1042070 - DNA, 15 bp, Homo sapiens
agatcttcctgagag

SEQ ID NO: 1042071 - DNA, 15 bp, Homo sapiens
gagatcttcctgaga

SEQ ID NO: 1042072 - DNA, 15 bp, Homo sapiens
tgagatcttcctgag

SEQ ID NO: 1042073 - DNA, 15 bp, Homo sapiens
gtgagatcttcctga

SEQ ID NO: 1042074 - DNA, 15 bp, Homo sapiens
agtgagatcttcctg

SEQ ID NO: 1042075 - DNA, 15 bp, Homo sapiens
aagtgagatcttcct

SEQ ID NO: 1042076 - DNA, 15 bp, Homo sapiens
taagtgagatcttcc

SEQ ID NO: 1042077 - DNA, 15 bp, Homo sapiens
gtaagtgagatcttc

SEQ ID NO: 1042078 - DNA, 15 bp, Homo sapiens
ggtaagtgagatctt

SEQ ID NO: 1042079 - DNA, 15 bp, Homo sapiens
aggtaagtgagatct

SEQ ID NO: 1042080 - DNA, 15 bp, Homo sapiens
aaggtaagtgagatc

SEQ ID NO: 1042081 - DNA, 15 bp, Homo sapiens
taaggtaagtgagat

SEQ ID NO: 1042082 - DNA, 15 bp, Homo sapiens
gtaaggtaagtgaga

SEQ ID NO: 1042083 - DNA, 15 bp, Homo sapiens
tgtaaggtaagtgag

SEQ ID NO: 1042084 - DNA, 15 bp, Homo sapiens
gtgtaaggtaagtga

SEQ ID NO: 1042085 - DNA, 15 bp, Homo sapiens
tgtgtaaggtaagtg

SEQ ID NO: 1042086 - DNA, 15 bp, Homo sapiens
ttgtgtaaggtaagt

SEQ ID NO: 1042087 - DNA, 15 bp, Homo sapiens
attgtgtaaggtaag

SEQ ID NO: 1042088 - DNA, 15 bp, Homo sapiens
cattgtgtaaggtaa

SEQ ID NO: 1042089 - DNA, 15 bp, Homo sapiens
ccattgtgtaaggta

SEQ ID NO: 1042090 - DNA, 15 bp, Homo sapiens
gccattgtgtaaggt

SEQ ID NO: 1042091 - DNA, 15 bp, Homo sapiens
tgccattgtgtaagg

SEQ ID NO: 1042092 - DNA, 15 bp, Homo sapiens
ttgccattgtgtaag

SEQ ID NO: 1042093 - DNA, 15 bp, Homo sapiens
tttgccattgtgtaa

SEQ ID NO: 1042094 - DNA, 15 bp, Homo sapiens
ctttgccattgtgta

SEQ ID NO: 1042095 - DNA, 15 bp, Homo sapiens
tctttgccattgtgt

SEQ ID NO: 1042096 - DNA, 15 bp, Homo sapiens
atctttgccattgtg

SEQ ID NO: 1042097 - DNA, 15 bp, Homo sapiens
tatctttgccattgt

SEQ ID NO: 1042098 - DNA, 15 bp, Homo sapiens
ttatctttgccattg

SEQ ID NO: 1042099 - DNA, 15 bp, Homo sapiens
attatctttgccatt

SEQ ID NO: 1042100 - DNA, 15 bp, Homo sapiens
aattatctttgccat

SEQ ID NO: 1042101 - DNA, 15 bp, Homo sapiens
caattatctttgcca

SEQ ID NO: 1042102 - DNA, 15 bp, Homo sapiens
acaattatctttgcc

SEQ ID NO: 1042103 - DNA, 15 bp, Homo sapiens
cacaattatctttgc

SEQ ID NO: 1042104 - DNA, 15 bp, Homo sapiens
gcacaattatctttg

SEQ ID NO: 1042105 - DNA, 15 bp, Homo sapiens
tgcacaattatcttt

SEQ ID NO: 1042106 - DNA, 15 bp, Homo sapiens
atgcacaattatctt

SEQ ID NO: 1042107 - DNA, 15 bp, Homo sapiens
gatgcacaattatct

SEQ ID NO: 1042108 - DNA, 15 bp, Homo sapiens
tgatgcacaattatc

SEQ ID NO: 1042109 - DNA, 15 bp, Homo sapiens
ctgatgcacaattat

SEQ ID NO: 1042110 - DNA, 15 bp, Homo sapiens
cctgatgcacaatta

SEQ ID NO: 1042111 - DNA, 15 bp, Homo sapiens
ccctgatgcacaatt

SEQ ID NO: 1042112 - DNA, 15 bp, Homo sapiens
accctgatgcacaat

SEQ ID NO: 1042113 - DNA, 15 bp, Homo sapiens
caccctgatgcacaa

SEQ ID NO: 1042114 - DNA, 15 bp, Homo sapiens
tcaccctgatgcaca

SEQ ID NO: 1042115 - DNA, 15 bp, Homo sapiens
ttcaccctgatgcac

SEQ ID NO: 1042116 - DNA, 15 bp, Homo sapiens
tttcaccctgatgca

SEQ ID NO: 1042117 - DNA, 15 bp, Homo sapiens
ctttcaccctgatgc

SEQ ID NO: 1042118 - DNA, 15 bp, Homo sapiens
tctttcaccctgatg

SEQ ID NO: 1042119 - DNA, 15 bp, Homo sapiens
ctctttcaccctgat

SEQ ID NO: 1042120 - DNA, 15 bp, Homo sapiens
actctttcaccctga

SEQ ID NO: 1042121 - DNA, 15 bp, Homo sapiens
tactctttcaccctg

SEQ ID NO: 1042122 - DNA, 15 bp, Homo sapiens
ttactctttcaccct

SEQ ID NO: 1042123 - DNA, 15 bp, Homo sapiens
tttactctttcaccc

SEQ ID NO: 1042124 - DNA, 15 bp, Homo sapiens
ctttactctttcacc

SEQ ID NO: 1042125 - DNA, 15 bp, Homo sapiens
tctttactctttcac

SEQ ID NO: 1042126 - DNA, 15 bp, Homo sapiens
ttctttactctttca

SEQ ID NO: 1042127 - DNA, 15 bp, Homo sapiens
tttctttactctttc

SEQ ID NO: 1042128 - DNA, 15 bp, Homo sapiens
ctttctttactcttt

SEQ ID NO: 1042129 - DNA, 15 bp, Homo sapiens
cctttctttactctt

SEQ ID NO: 1042130 - DNA, 15 bp, Homo sapiens
acctttctttactct

SEQ ID NO: 1042131 - DNA, 15 bp, Homo sapiens
aacctttctttactc

SEQ ID NO: 1042132 - DNA, 15 bp, Homo sapiens
taacctttctttact

SEQ ID NO: 1042133 - DNA, 15 bp, Homo sapiens
gtaacctttctttac

SEQ ID NO: 1042134 - DNA, 15 bp, Homo sapiens
agtaacctttcttta

SEQ ID NO: 1042135 - DNA, 15 bp, Homo sapiens
aagtaacctttcttt

SEQ ID NO: 1042136 - DNA, 15 bp, Homo sapiens
caagtaacctttctt

SEQ ID NO: 1042137 - DNA, 15 bp, Homo sapiens
gcaagtaacctttct

SEQ ID NO: 1042138 - DNA, 15 bp, Homo sapiens
tgcaagtaacctttc

SEQ ID NO: 1042139 - DNA, 15 bp, Homo sapiens
ctgcaagtaaccttt

SEQ ID NO: 1042140 - DNA, 15 bp, Homo sapiens
gctgcaagtaacctt

SEQ ID NO: 1042141 - DNA, 15 bp, Homo sapiens
tgctgcaagtaacct

SEQ ID NO: 1042142 - DNA, 15 bp, Homo sapiens
ttgctgcaagtaacc

SEQ ID NO: 1042143 - DNA, 15 bp, Homo sapiens
tttgctgcaagtaac

SEQ ID NO: 1042144 - DNA, 15 bp, Homo sapiens
ttttgctgcaagtaa

SEQ ID NO: 1042145 - DNA, 15 bp, Homo sapiens
cttttgctgcaagta

SEQ ID NO: 1042146 - DNA, 15 bp, Homo sapiens
ccttttgctgcaagt

SEQ ID NO: 1042147 - DNA, 15 bp, Homo sapiens
tccttttgctgcaag

SEQ ID NO: 1042148 - DNA, 15 bp, Homo sapiens
ttccttttgctgcaa

SEQ ID NO: 1042149 - DNA, 15 bp, Homo sapiens
gttccttttgctgca

SEQ ID NO: 1042150 - DNA, 15 bp, Homo sapiens
ggttccttttgctgc

SEQ ID NO: 1042151 - DNA, 15 bp, Homo sapiens
tggttccttttgctg

SEQ ID NO: 1042152 - DNA, 15 bp, Homo sapiens
gtggttccttttgct

SEQ ID NO: 1042153 - DNA, 15 bp, Homo sapiens
tgtggttccttttgc

SEQ ID NO: 1042154 - DNA, 15 bp, Homo sapiens
ttgtggttccttttg

SEQ ID NO: 1042155 - DNA, 15 bp, Homo sapiens
tttgtggttcctttt

SEQ ID NO: 1042156 - DNA, 15 bp, Homo sapiens
ttttgtggttccttt

SEQ ID NO: 1042157 - DNA, 15 bp, Homo sapiens
attttgtggttcctt

SEQ ID NO: 1042158 - DNA, 15 bp, Homo sapiens
aattttgtggttcct

SEQ ID NO: 1042159 - DNA, 15 bp, Homo sapiens
taattttgtggttcc

SEQ ID NO: 1042160 - DNA, 15 bp, Homo sapiens
ttaattttgtggttc

SEQ ID NO: 1042161 - DNA, 15 bp, Homo sapiens
cttaattttgtggtt

SEQ ID NO: 1042162 - DNA, 15 bp, Homo sapiens
ccttaattttgtggt

SEQ ID NO: 1042163 - DNA, 15 bp, Homo sapiens
gccttaattttgtgg

SEQ ID NO: 1042164 - DNA, 15 bp, Homo sapiens
tgccttaattttgtg

SEQ ID NO: 1042165 - DNA, 15 bp, Homo sapiens
gtgccttaattttgt

SEQ ID NO: 1042166 - DNA, 15 bp, Homo sapiens
tgtgccttaattttg

SEQ ID NO: 1042167 - DNA, 15 bp, Homo sapiens
ctgtgccttaatttt

SEQ ID NO: 1042168 - DNA, 15 bp, Homo sapiens
tctgtgccttaattt

SEQ ID NO: 1042169 - DNA, 15 bp, Homo sapiens
ttctgtgccttaatt

SEQ ID NO: 1042170 - DNA, 15 bp, Homo sapiens
cttctgtgccttaat

SEQ ID NO: 1042171 - DNA, 15 bp, Homo sapiens
gcttctgtgccttaa

SEQ ID NO: 1042172 - DNA, 15 bp, Homo sapiens
tgcttctgtgcctta

SEQ ID NO: 1042173 - DNA, 15 bp, Homo sapiens
atgcttctgtgcctt

SEQ ID NO: 1042174 - DNA, 15 bp, Homo sapiens
tatgcttctgtgcct

SEQ ID NO: 1042175 - DNA, 15 bp, Homo sapiens
gtatgcttctgtgcc

SEQ ID NO: 1042176 - DNA, 15 bp, Homo sapiens
ggtatgcttctgtgc

SEQ ID NO: 1042177 - DNA, 15 bp, Homo sapiens
aggtatgcttctgtg

SEQ ID NO: 1042178 - DNA, 15 bp, Homo sapiens
caggtatgcttctgt

SEQ ID NO: 1042179 - DNA, 15 bp, Homo sapiens
tcaggtatgcttctg

SEQ ID NO: 1042180 - DNA, 15 bp, Homo sapiens
ctcaggtatgcttct

SEQ ID NO: 1042181 - DNA, 15 bp, Homo sapiens
actcaggtatgcttc

SEQ ID NO: 1042182 - DNA, 15 bp, Homo sapiens
tactcaggtatgctt

SEQ ID NO: 1042183 - DNA, 15 bp, Homo sapiens
ctactcaggtatgct

SEQ ID NO: 1042184 - DNA, 15 bp, Homo sapiens
cctactcaggtatgc

SEQ ID NO: 1042185 - DNA, 15 bp, Homo sapiens
ccctactcaggtatg

SEQ ID NO: 1042186 - DNA, 15 bp, Homo sapiens
gccctactcaggtat

SEQ ID NO: 1042187 - DNA, 15 bp, Homo sapiens
agccctactcaggta

SEQ ID NO: 1042188 - DNA, 15 bp, Homo sapiens
aagccctactcaggt

SEQ ID NO: 1042189 - DNA, 15 bp, Homo sapiens
caagccctactcagg

SEQ ID NO: 1042190 - DNA, 15 bp, Homo sapiens
acaagccctactcag

SEQ ID NO: 1042191 - DNA, 15 bp, Homo sapiens
gacaagccctactca

SEQ ID NO: 1042192 - DNA, 15 bp, Homo sapiens
agacaagccctactc

SEQ ID NO: 1042193 - DNA, 15 bp, Homo sapiens
tagacaagccctact

SEQ ID NO: 1042194 - DNA, 15 bp, Homo sapiens
ctagacaagccctac

SEQ ID NO: 1042195 - DNA, 15 bp, Homo sapiens
actagacaagcccta

SEQ ID NO: 1042196 - DNA, 15 bp, Homo sapiens
cactagacaagccct

SEQ ID NO: 1042197 - DNA, 15 bp, Homo sapiens
ccactagacaagccc

SEQ ID NO: 1042198 - DNA, 15 bp, Homo sapiens
tccactagacaagcc

SEQ ID NO: 1042199 - DNA, 15 bp, Homo sapiens
ctccactagacaagc

SEQ ID NO: 1042200 - DNA, 15 bp, Homo sapiens
gctccactagacaag

SEQ ID NO: 1042201 - DNA, 15 bp, Homo sapiens
tgctccactagacaa

SEQ ID NO: 1042202 - DNA, 15 bp, Homo sapiens
ctgctccactagaca

SEQ ID NO: 1042203 - DNA, 15 bp, Homo sapiens
actgctccactagac

SEQ ID NO: 1042204 - DNA, 15 bp, Homo sapiens
cactgctccactaga

SEQ ID NO: 1042205 - DNA, 15 bp, Homo sapiens
tcactgctccactag

SEQ ID NO: 1042206 - DNA, 15 bp, Homo sapiens
ctcactgctccacta

SEQ ID NO: 1042207 - DNA, 15 bp, Homo sapiens
tctcactgctccact

SEQ ID NO: 1042208 - DNA, 15 bp, Homo sapiens
ttctcactgctccac

SEQ ID NO: 1042209 - DNA, 15 bp, Homo sapiens
attctcactgctcca

SEQ ID NO: 1042210 - DNA, 15 bp, Homo sapiens
tattctcactgctcc

SEQ ID NO: 1042211 - DNA, 15 bp, Homo sapiens
ctattctcactgctc

SEQ ID NO: 1042212 - DNA, 15 bp, Homo sapiens
actattctcactgct

SEQ ID NO: 1042213 - DNA, 15 bp, Homo sapiens
aactattctcactgc

SEQ ID NO: 1042214 - DNA, 15 bp, Homo sapiens
taactattctcactg

SEQ ID NO: 1042215 - DNA, 15 bp, Homo sapiens
ctaactattctcact

SEQ ID NO: 1042216 - DNA, 15 bp, Homo sapiens
tctaactattctcac

SEQ ID NO: 1042217 - DNA, 15 bp, Homo sapiens
ttctaactattctca

SEQ ID NO: 1042218 - DNA, 15 bp, Homo sapiens
attctaactattctc

SEQ ID NO: 1042219 - DNA, 15 bp, Homo sapiens
aattctaactattct

SEQ ID NO: 1042220 - DNA, 15 bp, Homo sapiens
caattctaactattc

SEQ ID NO: 1042221 - DNA, 15 bp, Homo sapiens
ccaattctaactatt

SEQ ID NO: 1042222 - DNA, 15 bp, Homo sapiens
tccaattctaactat

SEQ ID NO: 1042223 - DNA, 15 bp, Homo sapiens
gtccaattctaacta

SEQ ID NO: 1042224 - DNA, 15 bp, Homo sapiens
tgtccaattctaact

SEQ ID NO: 1042225 - DNA, 15 bp, Homo sapiens
gtgtccaattctaac

SEQ ID NO: 1042226 - DNA, 15 bp, Homo sapiens
tgtgtccaattctaa

SEQ ID NO: 1042227 - DNA, 15 bp, Homo sapiens
ttgtgtccaattcta

SEQ ID NO: 1042228 - DNA, 15 bp, Homo sapiens
cttgtgtccaattct

SEQ ID NO: 1042229 - DNA, 15 bp, Homo sapiens
acttgtgtccaattc

SEQ ID NO: 1042230 - DNA, 15 bp, Homo sapiens
aacttgtgtccaatt

SEQ ID NO: 1042231 - DNA, 15 bp, Homo sapiens
caacttgtgtccaat

SEQ ID NO: 1042232 - DNA, 15 bp, Homo sapiens
gcaacttgtgtccaa

SEQ ID NO: 1042233 - DNA, 15 bp, Homo sapiens
tgcaacttgtgtcca

SEQ ID NO: 1042234 - DNA, 15 bp, Homo sapiens
ctgcaacttgtgtcc

SEQ ID NO: 1042235 - DNA, 15 bp, Homo sapiens
gctgcaacttgtgtc

SEQ ID NO: 1042236 - DNA, 15 bp, Homo sapiens
tgctgcaacttgtgt

SEQ ID NO: 1042237 - DNA, 15 bp, Homo sapiens
ttgctgcaacttgtg

SEQ ID NO: 1042238 - DNA, 15 bp, Homo sapiens
cttgctgcaacttgt

SEQ ID NO: 1042239 - DNA, 15 bp, Homo sapiens
tcttgctgcaacttg

SEQ ID NO: 1042240 - DNA, 15 bp, Homo sapiens
ctcttgctgcaactt

SEQ ID NO: 1042241 - DNA, 15 bp, Homo sapiens
cctcttgctgcaact

SEQ ID NO: 1042242 - DNA, 15 bp, Homo sapiens
ttcctcttgctgcaa

SEQ ID NO: 1042243 - DNA, 15 bp, Homo sapiens
cttcctcttgctgca

SEQ ID NO: 1042244 - DNA, 15 bp, Homo sapiens
acttcctcttgctgc

SEQ ID NO: 1042245 - DNA, 15 bp, Homo sapiens
aacttcctcttgctg

SEQ ID NO: 1042246 - DNA, 15 bp, Homo sapiens
caacttcctcttgct

SEQ ID NO: 1042247 - DNA, 15 bp, Homo sapiens
acaacttcctcttgc

SEQ ID NO: 1042248 - DNA, 15 bp, Homo sapiens
cacaacttcctcttg

SEQ ID NO: 1042249 - DNA, 15 bp, Homo sapiens
gcacaacttcctctt

SEQ ID NO: 1042250 - DNA, 15 bp, Homo sapiens
tgcacaacttcctct

SEQ ID NO: 1042251 - DNA, 15 bp, Homo sapiens
ttgcacaacttcctc

SEQ ID NO: 1042252 - DNA, 15 bp, Homo sapiens
attgcacaacttcct

SEQ ID NO: 1042253 - DNA, 15 bp, Homo sapiens
cattgcacaacttcc

SEQ ID NO: 1042254 - DNA, 15 bp, Homo sapiens
acattgcacaacttc

SEQ ID NO: 1042255 - DNA, 15 bp, Homo sapiens
tacattgcacaactt

SEQ ID NO: 1042256 - DNA, 15 bp, Homo sapiens
ttacattgcacaact

SEQ ID NO: 1042257 - DNA, 15 bp, Homo sapiens
cttacattgcacaac

SEQ ID NO: 1042258 - DNA, 15 bp, Homo sapiens
acttacattgcacaa

SEQ ID NO: 1042259 - DNA, 15 bp, Homo sapiens
cacttacattgcaca

SEQ ID NO: 1042260 - DNA, 15 bp, Homo sapiens
acacttacattgcac

SEQ ID NO: 1042261 - DNA, 15 bp, Homo sapiens
cacacttacattgca

SEQ ID NO: 1042262 - DNA, 15 bp, Homo sapiens
ccacacttacattgc

SEQ ID NO: 1042263 - DNA, 15 bp, Homo sapiens
gccacacttacattg

SEQ ID NO: 1042264 - DNA, 15 bp, Homo sapiens
tgccacacttacatt

SEQ ID NO: 1042265 - DNA, 15 bp, Homo sapiens
ctgccacacttacat

SEQ ID NO: 1042266 - DNA, 15 bp, Homo sapiens
cctgccacacttaca

SEQ ID NO: 1042267 - DNA, 15 bp, Homo sapiens
acctgccacacttac

SEQ ID NO: 1042268 - DNA, 15 bp, Homo sapiens
cacctgccacactta

SEQ ID NO: 1042269 - DNA, 15 bp, Homo sapiens
ccacctgccacactt

SEQ ID NO: 1042270 - DNA, 15 bp, Homo sapiens
cccacctgccacact

SEQ ID NO: 1042271 - DNA, 15 bp, Homo sapiens
tcccacctgccacac

SEQ ID NO: 1042272 - DNA, 15 bp, Homo sapiens
gtcccacctgccaca

SEQ ID NO: 1042273 - DNA, 15 bp, Homo sapiens
tgtcccacctgccac

SEQ ID NO: 1042274 - DNA, 15 bp, Homo sapiens
ttgtcccacctgcca

SEQ ID NO: 1042275 - DNA, 15 bp, Homo sapiens
tttgtcccacctgcc

SEQ ID NO: 1042276 - DNA, 15 bp, Homo sapiens
ctttgtcccacctgc

SEQ ID NO: 1042277 - DNA, 15 bp, Homo sapiens
tctttgtcccacctg

SEQ ID NO: 1042278 - DNA, 15 bp, Homo sapiens
atctttgtcccacct

SEQ ID NO: 1042279 - DNA, 15 bp, Homo sapiens
catctttgtcccacc

SEQ ID NO: 1042280 - DNA, 15 bp, Homo sapiens
tcatctttgtcccac

SEQ ID NO: 1042281 - DNA, 15 bp, Homo sapiens
gtcatctttgtccca

SEQ ID NO: 1042282 - DNA, 15 bp, Homo sapiens
ggtcatctttgtccc

SEQ ID NO: 1042283 - DNA, 15 bp, Homo sapiens
aggtcatctttgtcc

SEQ ID NO: 1042284 - DNA, 15 bp, Homo sapiens
aaggtcatctttgtc

SEQ ID NO: 1042285 - DNA, 15 bp, Homo sapiens
aaaggtcatctttgt

SEQ ID NO: 1042286 - DNA, 15 bp, Homo sapiens
caaaggtcatctttg

SEQ ID NO: 1042287 - DNA, 15 bp, Homo sapiens
ccaaaggtcatcttt

SEQ ID NO: 1042288 - DNA, 15 bp, Homo sapiens
tccaaaggtcatctt

SEQ ID NO: 1042289 - DNA, 15 bp, Homo sapiens
ttccaaaggtcatct

SEQ ID NO: 1042290 - DNA, 15 bp, Homo sapiens
cttccaaaggtcatc

SEQ ID NO: 1042291 - DNA, 15 bp, Homo sapiens
tcttccaaaggtcat

SEQ ID NO: 1042292 - DNA, 15 bp, Homo sapiens
gtcttccaaaggtca

SEQ ID NO: 1042293 - DNA, 15 bp, Homo sapiens
tgtcttccaaaggtc

SEQ ID NO: 1042294 - DNA, 15 bp, Homo sapiens
ttgtcttccaaaggt

SEQ ID NO: 1042295 - DNA, 15 bp, Homo sapiens
cttgtcttccaaagg

SEQ ID NO: 1042296 - DNA, 15 bp, Homo sapiens
acttgtcttccaaag

SEQ ID NO: 1042297 - DNA, 15 bp, Homo sapiens
cacttgtcttccaaa

SEQ ID NO: 1042298 - DNA, 15 bp, Homo sapiens
ccacttgtcttccaa

SEQ ID NO: 1042299 - DNA, 15 bp, Homo sapiens
gccacttgtcttcca

SEQ ID NO: 1042300 - DNA, 15 bp, Homo sapiens
agccacttgtcttcc

SEQ ID NO: 1042301 - DNA, 15 bp, Homo sapiens
cagccacttgtcttc

SEQ ID NO: 1042302 - DNA, 15 bp, Homo sapiens
tcagccacttgtctt

SEQ ID NO: 1042303 - DNA, 15 bp, Homo sapiens
ctcagccacttgtct

SEQ ID NO: 1042304 - DNA, 15 bp, Homo sapiens
tctcagccacttgtc

SEQ ID NO: 1042305 - DNA, 15 bp, Homo sapiens
ttctcagccacttgt

SEQ ID NO: 1042306 - DNA, 15 bp, Homo sapiens
cttctcagccacttg

SEQ ID NO: 1042307 - DNA, 15 bp, Homo sapiens
tcttctcagccactt

SEQ ID NO: 1042308 - DNA, 15 bp, Homo sapiens
ctcttctcagccact

SEQ ID NO: 1042309 - DNA, 15 bp, Homo sapiens
tctcttctcagccac

SEQ ID NO: 1042310 - DNA, 15 bp, Homo sapiens
atctcttctcagcca

SEQ ID NO: 1042311 - DNA, 15 bp, Homo sapiens
aatctcttctcagcc

SEQ ID NO: 1042312 - DNA, 15 bp, Homo sapiens
aaatctcttctcagc

SEQ ID NO: 1042313 - DNA, 15 bp, Homo sapiens
caaatctcttctcag

SEQ ID NO: 1042314 - DNA, 15 bp, Homo sapiens
gcaaatctcttctca

SEQ ID NO: 1042315 - DNA, 15 bp, Homo sapiens
agcaaatctcttctc

SEQ ID NO: 1042316 - DNA, 15 bp, Homo sapiens
cagcaaatctcttct

SEQ ID NO: 1042317 - DNA, 15 bp, Homo sapiens
acagcaaatctcttc

SEQ ID NO: 1042318 - DNA, 15 bp, Homo sapiens
cacagcaaatctctt

SEQ ID NO: 1042319 - DNA, 15 bp, Homo sapiens
ccacagcaaatctct

SEQ ID NO: 1042320 - DNA, 15 bp, Homo sapiens
accacagcaaatctc

SEQ ID NO: 1042321 - DNA, 15 bp, Homo sapiens
gaccacagcaaatct

SEQ ID NO: 1042322 - DNA, 15 bp, Homo sapiens
ggaccacagcaaatc

SEQ ID NO: 1042323 - DNA, 15 bp, Homo sapiens
tggaccacagcaaat

SEQ ID NO: 1042324 - DNA, 15 bp, Homo sapiens
atggaccacagcaaa

SEQ ID NO: 1042325 - DNA, 15 bp, Homo sapiens
gatggaccacagcaa

SEQ ID NO: 1042326 - DNA, 15 bp, Homo sapiens
agatggaccacagca

SEQ ID NO: 1042327 - DNA, 15 bp, Homo sapiens
gagatggaccacagc

SEQ ID NO: 1042328 - DNA, 15 bp, Homo sapiens
agagatggaccacag

SEQ ID NO: 1042329 - DNA, 15 bp, Homo sapiens
tagagatggaccaca

SEQ ID NO: 1042330 - DNA, 15 bp, Homo sapiens
ctagagatggaccac

SEQ ID NO: 1042331 - DNA, 15 bp, Homo sapiens
cctagagatggacca

SEQ ID NO: 1042332 - DNA, 15 bp, Homo sapiens
ccctagagatggacc

SEQ ID NO: 1042333 - DNA, 15 bp, Homo sapiens
tccctagagatggac

SEQ ID NO: 1042334 - DNA, 15 bp, Homo sapiens
ctccctagagatgga

SEQ ID NO: 1042335 - DNA, 15 bp, Homo sapiens
gctccctagagatgg

SEQ ID NO: 1042336 - DNA, 15 bp, Homo sapiens
agctccctagagatg

SEQ ID NO: 1042337 - DNA, 15 bp, Homo sapiens
gagctccctagagat

SEQ ID NO: 1042338 - DNA, 15 bp, Homo sapiens
agagctccctagaga

SEQ ID NO: 1042339 - DNA, 15 bp, Homo sapiens
gagagctccctagag

SEQ ID NO: 1042340 - DNA, 15 bp, Homo sapiens
agagagctccctaga

SEQ ID NO: 1042341 - DNA, 15 bp, Homo sapiens
cagagagctccctag

SEQ ID NO: 1042342 - DNA, 15 bp, Homo sapiens
tcagagagctcccta

SEQ ID NO: 1042343 - DNA, 15 bp, Homo sapiens
ctcagagagctccct

SEQ ID NO: 1042344 - DNA, 15 bp, Homo sapiens
cctcagagagctccc

SEQ ID NO: 1042345 - DNA, 15 bp, Homo sapiens
acctcagagagctcc

SEQ ID NO: 1042346 - DNA, 15 bp, Homo sapiens
aacctcagagagctc

SEQ ID NO: 1042347 - DNA, 15 bp, Homo sapiens
aaacctcagagagct

SEQ ID NO: 1042348 - DNA, 15 bp, Homo sapiens
aaaacctcagagagc

SEQ ID NO: 1042349 - DNA, 15 bp, Homo sapiens
aaaaacctcagagag

SEQ ID NO: 1042350 - DNA, 15 bp, Homo sapiens
caaaaacctcagaga

SEQ ID NO: 1042351 - DNA, 15 bp, Homo sapiens
tcaaaaacctcagag

SEQ ID NO: 1042352 - DNA, 15 bp, Homo sapiens
ctcaaaaacctcaga

SEQ ID NO: 1042353 - DNA, 15 bp, Homo sapiens
gctcaaaaacctcag

SEQ ID NO: 1042354 - DNA, 15 bp, Homo sapiens
tgctcaaaaacctca

SEQ ID NO: 1042355 - DNA, 15 bp, Homo sapiens
ctgctcaaaaacctc

SEQ ID NO: 1042356 - DNA, 15 bp, Homo sapiens
tctgctcaaaaacct

SEQ ID NO: 1042357 - DNA, 15 bp, Homo sapiens
atctgctcaaaaacc

SEQ ID NO: 1042358 - DNA, 15 bp, Homo sapiens
aatctgctcaaaaac

SEQ ID NO: 1042359 - DNA, 15 bp, Homo sapiens
caatctgctcaaaaa

SEQ ID NO: 1042360 - DNA, 15 bp, Homo sapiens
acaatctgctcaaaa

SEQ ID NO: 1042361 - DNA, 15 bp, Homo sapiens
cacaatctgctcaaa

SEQ ID NO: 1042362 - DNA, 15 bp, Homo sapiens
ccacaatctgctcaa

SEQ ID NO: 1042363 - DNA, 15 bp, Homo sapiens
gccacaatctgctca

SEQ ID NO: 1042364 - DNA, 15 bp, Homo sapiens
tgccacaatctgctc

SEQ ID NO: 1042365 - DNA, 15 bp, Homo sapiens
ctgccacaatctgct

SEQ ID NO: 1042366 - DNA, 15 bp, Homo sapiens
cctgccacaatctgc

SEQ ID NO: 1042367 - DNA, 15 bp, Homo sapiens
tcctgccacaatctg

SEQ ID NO: 1042368 - DNA, 15 bp, Homo sapiens
atcctgccacaatct

SEQ ID NO: 1042369 - DNA, 15 bp, Homo sapiens
catcctgccacaatc

SEQ ID NO: 1042370 - DNA, 15 bp, Homo sapiens
tcatcctgccacaat

SEQ ID NO: 1042371 - DNA, 15 bp, Homo sapiens
gtcatcctgccacaa

SEQ ID NO: 1042372 - DNA, 15 bp, Homo sapiens
tgtcatcctgccaca

SEQ ID NO: 1042373 - DNA, 15 bp, Homo sapiens
ctgtcatcctgccac

SEQ ID NO: 1042374 - DNA, 15 bp, Homo sapiens
gctgtcatcctgcca

SEQ ID NO: 1042375 - DNA, 15 bp, Homo sapiens
tgctgtcatcctgcc

SEQ ID NO: 1042376 - DNA, 15 bp, Homo sapiens
ctgctgtcatcctgc

SEQ ID NO: 1042377 - DNA, 15 bp, Homo sapiens
actgctgtcatcctg

SEQ ID NO: 1042378 - DNA, 15 bp, Homo sapiens
tactgctgtcatcct

SEQ ID NO: 1042379 - DNA, 15 bp, Homo sapiens
atactgctgtcatcc

SEQ ID NO: 1042380 - DNA, 15 bp, Homo sapiens
aatactgctgtcatc

SEQ ID NO: 1042381 - DNA, 15 bp, Homo sapiens
gaatactgctgtcat

SEQ ID NO: 1042382 - DNA, 15 bp, Homo sapiens
tgaatactgctgtca

SEQ ID NO: 1042383 - DNA, 15 bp, Homo sapiens
gtgaatactgctgtc

SEQ ID NO: 1042384 - DNA, 15 bp, Homo sapiens
tgtgaatactgctgt

SEQ ID NO: 1042385 - DNA, 15 bp, Homo sapiens
ttgtgaatactgctg

SEQ ID NO: 1042386 - DNA, 15 bp, Homo sapiens
gttgtgaatactgct

SEQ ID NO: 1042387 - DNA, 15 bp, Homo sapiens
agttgtgaatactgc

SEQ ID NO: 1042388 - DNA, 15 bp, Homo sapiens
aagttgtgaatactg

SEQ ID NO: 1042389 - DNA, 15 bp, Homo sapiens
caagttgtgaatact

SEQ ID NO: 1042390 - DNA, 15 bp, Homo sapiens
gcaagttgtgaatac

SEQ ID NO: 1042391 - DNA, 15 bp, Homo sapiens
tgcaagttgtgaata

SEQ ID NO: 1042392 - DNA, 15 bp, Homo sapiens
ttgcaagttgtgaat

SEQ ID NO: 1042393 - DNA, 15 bp, Homo sapiens
cttgcaagttgtgaa

SEQ ID NO: 1042394 - DNA, 15 bp, Homo sapiens
ccttgcaagttgtga

SEQ ID NO: 1042395 - DNA, 15 bp, Homo sapiens
cccttgcaagttgtg

SEQ ID NO: 1042396 - DNA, 15 bp, Homo sapiens
tcccttgcaagttgt

SEQ ID NO: 1042397 - DNA, 15 bp, Homo sapiens
ctcccttgcaagttg

SEQ ID NO: 1042398 - DNA, 15 bp, Homo sapiens
gctcccttgcaagtt

SEQ ID NO: 1042399 - DNA, 15 bp, Homo sapiens
agctcccttgcaagt

SEQ ID NO: 1042400 - DNA, 15 bp, Homo sapiens
cagctcccttgcaag

SEQ ID NO: 1042401 - DNA, 15 bp, Homo sapiens
ccagctcccttgcaa

SEQ ID NO: 1042402 - DNA, 15 bp, Homo sapiens
tccagctcccttgca

SEQ ID NO: 1042403 - DNA, 15 bp, Homo sapiens
atccagctcccttgc

SEQ ID NO: 1042404 - DNA, 15 bp, Homo sapiens
gatccagctcccttg

SEQ ID NO: 1042405 - DNA, 15 bp, Homo sapiens
ggatccagctccctt

SEQ ID NO: 1042406 - DNA, 15 bp, Homo sapiens
tggatccagctccct

SEQ ID NO: 1042407 - DNA, 15 bp, Homo sapiens
ctggatccagctccc

SEQ ID NO: 1042408 - DNA, 15 bp, Homo sapiens
gctggatccagctcc

SEQ ID NO: 1042409 - DNA, 15 bp, Homo sapiens
ggctggatccagctc

SEQ ID NO: 1042410 - DNA, 15 bp, Homo sapiens
tggctggatccagct

SEQ ID NO: 1042411 - DNA, 15 bp, Homo sapiens
ctggctggatccagc

SEQ ID NO: 1042412 - DNA, 15 bp, Homo sapiens
cctggctggatccag

SEQ ID NO: 1042413 - DNA, 15 bp, Homo sapiens
ccctggctggatcca

SEQ ID NO: 1042414 - DNA, 15 bp, Homo sapiens
tccctggctggatcc

SEQ ID NO: 1042415 - DNA, 15 bp, Homo sapiens
ctccctggctggatc

SEQ ID NO: 1042416 - DNA, 15 bp, Homo sapiens
gctccctggctggat

SEQ ID NO: 1042417 - DNA, 15 bp, Homo sapiens
cgctccctggctgga

SEQ ID NO: 1042418 - DNA, 15 bp, Homo sapiens
gcgctccctggctgg

SEQ ID NO: 1042419 - DNA, 15 bp, Homo sapiens
tgcgctccctggctg

SEQ ID NO: 1042420 - DNA, 15 bp, Homo sapiens
gtgcgctccctggct

SEQ ID NO: 1042421 - DNA, 15 bp, Homo sapiens
tgtgcgctccctggc

SEQ ID NO: 1042422 - DNA, 15 bp, Homo sapiens
ttgtgcgctccctgg

SEQ ID NO: 1042423 - DNA, 15 bp, Homo sapiens
cttgtgcgctccctg

SEQ ID NO: 1042424 - DNA, 15 bp, Homo sapiens
ccttgtgcgctccct

SEQ ID NO: 1042425 - DNA, 15 bp, Homo sapiens
accttgtgcgctccc

SEQ ID NO: 1042426 - DNA, 15 bp, Homo sapiens
caccttgtgcgctcc

SEQ ID NO: 1042427 - DNA, 15 bp, Homo sapiens
acaccttgtgcgctc

SEQ ID NO: 1042428 - DNA, 15 bp, Homo sapiens
tacaccttgtgcgct

SEQ ID NO: 1042429 - DNA, 15 bp, Homo sapiens
gtacaccttgtgcgc

SEQ ID NO: 1042430 - DNA, 15 bp, Homo sapiens
agtacaccttgtgcg

SEQ ID NO: 1042431 - DNA, 15 bp, Homo sapiens
cagtacaccttgtgc

SEQ ID NO: 1042432 - DNA, 15 bp, Homo sapiens
tcagtacaccttgtg

SEQ ID NO: 1042433 - DNA, 15 bp, Homo sapiens
ttcagtacaccttgt

SEQ ID NO: 1042434 - DNA, 15 bp, Homo sapiens
attcagtacaccttg

SEQ ID NO: 1042435 - DNA, 15 bp, Homo sapiens
cattcagtacacctt

SEQ ID NO: 1042436 - DNA, 15 bp, Homo sapiens
tcattcagtacacct

SEQ ID NO: 1042437 - DNA, 15 bp, Homo sapiens
ctcattcagtacacc

SEQ ID NO: 1042438 - DNA, 15 bp, Homo sapiens
cctcattcagtacac

SEQ ID NO: 1042439 - DNA, 15 bp, Homo sapiens
ccctcattcagtaca

SEQ ID NO: 1042440 - DNA, 15 bp, Homo sapiens
tccctcattcagtac

SEQ ID NO: 1042441 - DNA, 15 bp, Homo sapiens
ttccctcattcagta

SEQ ID NO: 1042442 - DNA, 15 bp, Homo sapiens
cttccctcattcagt

SEQ ID NO: 1042443 - DNA, 15 bp, Homo sapiens
tcttccctcattcag

SEQ ID NO: 1042444 - DNA, 15 bp, Homo sapiens
ctcttccctcattca

SEQ ID NO: 1042445 - DNA, 15 bp, Homo sapiens
gctcttccctcattc

SEQ ID NO: 1042446 - DNA, 15 bp, Homo sapiens
tgctcttccctcatt

SEQ ID NO: 1042447 - DNA, 15 bp, Homo sapiens
atgctcttccctcat

SEQ ID NO: 1042448 - DNA, 15 bp, Homo sapiens
catgctcttccctca

SEQ ID NO: 1042449 - DNA, 15 bp, Homo sapiens
acatgctcttccctc

SEQ ID NO: 1042450 - DNA, 15 bp, Homo sapiens
gacatgctcttccct

SEQ ID NO: 1042451 - DNA, 15 bp, Homo sapiens
tgacatgctcttccc

SEQ ID NO: 1042452 - DNA, 15 bp, Homo sapiens
ctgacatgctcttcc

SEQ ID NO: 1042453 - DNA, 15 bp, Homo sapiens
actgacatgctcttc

SEQ ID NO: 1042454 - DNA, 15 bp, Homo sapiens
cactgacatgctctt

SEQ ID NO: 1042455 - DNA, 15 bp, Homo sapiens
ccactgacatgctct

SEQ ID NO: 1042456 - DNA, 15 bp, Homo sapiens
cccactgacatgctc

SEQ ID NO: 1042457 - DNA, 15 bp, Homo sapiens
acccactgacatgct

SEQ ID NO: 1042458 - DNA, 15 bp, Homo sapiens
gacccactgacatgc

SEQ ID NO: 1042459 - DNA, 15 bp, Homo sapiens
cgacccactgacatg

SEQ ID NO: 1042460 - DNA, 15 bp, Homo sapiens
acgacccactgacat

SEQ ID NO: 1042461 - DNA, 15 bp, Homo sapiens
gacgacccactgaca

SEQ ID NO: 1042462 - DNA, 15 bp, Homo sapiens
tgacgacccactgac

SEQ ID NO: 1042463 - DNA, 15 bp, Homo sapiens
ctgacgacccactga

SEQ ID NO: 1042464 - DNA, 15 bp, Homo sapiens
cctgacgacccactg

SEQ ID NO: 1042465 - DNA, 15 bp, Homo sapiens
ccctgacgacccact

SEQ ID NO: 1042466 - DNA, 15 bp, Homo sapiens
tccctgacgacccac

SEQ ID NO: 1042467 - DNA, 15 bp, Homo sapiens
ctccctgacgaccca

SEQ ID NO: 1042468 - DNA, 15 bp, Homo sapiens
cctccctgacgaccc

SEQ ID NO: 1042469 - DNA, 15 bp, Homo sapiens
ccctccctgacgacc

SEQ ID NO: 1042470 - DNA, 15 bp, Homo sapiens
tccctccctgacgac

SEQ ID NO: 1042471 - DNA, 15 bp, Homo sapiens
ttccctccctgacga

SEQ ID NO: 1042472 - DNA, 15 bp, Homo sapiens
cttccctccctgacg

SEQ ID NO: 1042473 - DNA, 15 bp, Homo sapiens
tcttccctccctgac

SEQ ID NO: 1042474 - DNA, 15 bp, Homo sapiens
ctcttccctccctga

SEQ ID NO: 1042475 - DNA, 15 bp, Homo sapiens
actcttccctccctg

SEQ ID NO: 1042476 - DNA, 15 bp, Homo sapiens
gactcttccctccct

SEQ ID NO: 1042477 - DNA, 15 bp, Homo sapiens
agactcttccctccc

SEQ ID NO: 1042478 - DNA, 15 bp, Homo sapiens
gagactcttccctcc

SEQ ID NO: 1042479 - DNA, 15 bp, Homo sapiens
tgagactcttccctc

SEQ ID NO: 1042480 - DNA, 15 bp, Homo sapiens
ctgagactcttccct

SEQ ID NO: 1042481 - DNA, 15 bp, Homo sapiens
tctgagactcttccc

SEQ ID NO: 1042482 - DNA, 15 bp, Homo sapiens
ctctgagactcttcc

SEQ ID NO: 1042483 - DNA, 15 bp, Homo sapiens
tctctgagactcttc

SEQ ID NO: 1042484 - DNA, 15 bp, Homo sapiens
ctctctgagactctt

SEQ ID NO: 1042485 - DNA, 15 bp, Homo sapiens
tctctctgagactct

SEQ ID NO: 1042486 - DNA, 15 bp, Homo sapiens
ttctctctgagactc

SEQ ID NO: 1042487 - DNA, 15 bp, Homo sapiens
tttctctctgagact

SEQ ID NO: 1042488 - DNA, 15 bp, Homo sapiens
atttctctctgagac

SEQ ID NO: 1042489 - DNA, 15 bp, Homo sapiens
catttctctctgaga

SEQ ID NO: 1042490 - DNA, 15 bp, Homo sapiens
gcatttctctctgag

SEQ ID NO: 1042491 - DNA, 15 bp, Homo sapiens
ggcatttctctctga

SEQ ID NO: 1042492 - DNA, 15 bp, Homo sapiens
gggcatttctctctg

SEQ ID NO: 1042493 - DNA, 15 bp, Homo sapiens
tgggcatttctctct

SEQ ID NO: 1042494 - DNA, 15 bp, Homo sapiens
ctgggcatttctctc

SEQ ID NO: 1042495 - DNA, 15 bp, Homo sapiens
tctgggcatttctct

SEQ ID NO: 1042496 - DNA, 15 bp, Homo sapiens
gtctgggcatttctc

SEQ ID NO: 1042497 - DNA, 15 bp, Homo sapiens
agtctgggcatttct

SEQ ID NO: 1042498 - DNA, 15 bp, Homo sapiens
cagtctgggcatttc

SEQ ID NO: 1042499 - DNA, 15 bp, Homo sapiens
ccagtctgggcattt

SEQ ID NO: 1042500 - DNA, 15 bp, Homo sapiens
tccagtctgggcatt

SEQ ID NO: 1042501 - DNA, 15 bp, Homo sapiens
gtccagtctgggcat

SEQ ID NO: 1042502 - DNA, 15 bp, Homo sapiens
tgtccagtctgggca

SEQ ID NO: 1042503 - DNA, 15 bp, Homo sapiens
ctgtccagtctgggc

SEQ ID NO: 1042504 - DNA, 15 bp, Homo sapiens
tctgtccagtctggg

SEQ ID NO: 1042505 - DNA, 15 bp, Homo sapiens
ttctgtccagtctgg

SEQ ID NO: 1042506 - DNA, 15 bp, Homo sapiens
cttctgtccagtctg

SEQ ID NO: 1042507 - DNA, 15 bp, Homo sapiens
acttctgtccagtct

SEQ ID NO: 1042508 - DNA, 15 bp, Homo sapiens
cacttctgtccagtc

SEQ ID NO: 1042509 - DNA, 15 bp, Homo sapiens
acacttctgtccagt

SEQ ID NO: 1042510 - DNA, 15 bp, Homo sapiens
cacacttctgtccag

SEQ ID NO: 1042511 - DNA, 15 bp, Homo sapiens
tcacacttctgtcca

SEQ ID NO: 1042512 - DNA, 15 bp, Homo sapiens
ctcacacttctgtcc

SEQ ID NO: 1042513 - DNA, 15 bp, Homo sapiens
cctcacacttctgtc

SEQ ID NO: 1042514 - DNA, 15 bp, Homo sapiens
gcctcacacttctgt

SEQ ID NO: 1042515 - DNA, 15 bp, Homo sapiens
tgcctcacacttctg

SEQ ID NO: 1042516 - DNA, 15 bp, Homo sapiens
atgcctcacacttct

SEQ ID NO: 1042517 - DNA, 15 bp, Homo sapiens
aatgcctcacacttc

SEQ ID NO: 1042518 - DNA, 15 bp, Homo sapiens
gaatgcctcacactt

SEQ ID NO: 1042519 - DNA, 15 bp, Homo sapiens
ggaatgcctcacact

SEQ ID NO: 1042520 - DNA, 15 bp, Homo sapiens
gggaatgcctcacac

SEQ ID NO: 1042521 - DNA, 15 bp, Homo sapiens
cgggaatgcctcaca

SEQ ID NO: 1042522 - DNA, 15 bp, Homo sapiens
ccgggaatgcctcac

SEQ ID NO: 1042523 - DNA, 15 bp, Homo sapiens
accgggaatgcctca

SEQ ID NO: 1042524 - DNA, 15 bp, Homo sapiens
caccgggaatgcctc

SEQ ID NO: 1042525 - DNA, 15 bp, Homo sapiens
tcaccgggaatgcct

SEQ ID NO: 1042526 - DNA, 15 bp, Homo sapiens
ttcaccgggaatgcc

SEQ ID NO: 1042527 - DNA, 15 bp, Homo sapiens
gttcaccgggaatgc

SEQ ID NO: 1042528 - DNA, 15 bp, Homo sapiens
ggttcaccgggaatg

SEQ ID NO: 1042529 - DNA, 15 bp, Homo sapiens
cggttcaccgggaat

SEQ ID NO: 1042530 - DNA, 15 bp, Homo sapiens
ccggttcaccgggaa

SEQ ID NO: 1042531 - DNA, 15 bp, Homo sapiens
cccggttcaccggga

SEQ ID NO: 1042532 - DNA, 15 bp, Homo sapiens
tcccggttcaccggg

SEQ ID NO: 1042533 - DNA, 15 bp, Homo sapiens
gtcccggttcaccgg

SEQ ID NO: 1042534 - DNA, 15 bp, Homo sapiens
cgtcccggttcaccg

SEQ ID NO: 1042535 - DNA, 15 bp, Homo sapiens
gcgtcccggttcacc

SEQ ID NO: 1042536 - DNA, 15 bp, Homo sapiens
agcgtcccggttcac

SEQ ID NO: 1042537 - DNA, 15 bp, Homo sapiens
gagcgtcccggttca

SEQ ID NO: 1042538 - DNA, 15 bp, Homo sapiens
agagcgtcccggttc

SEQ ID NO: 1042539 - DNA, 15 bp, Homo sapiens
gagagcgtcccggtt

SEQ ID NO: 1042540 - DNA, 15 bp, Homo sapiens
ggagagcgtcccggt

SEQ ID NO: 1042541 - DNA, 15 bp, Homo sapiens
aggagagcgtcccgg

SEQ ID NO: 1042542 - DNA, 15 bp, Homo sapiens
gaggagagcgtcccg

SEQ ID NO: 1042543 - DNA, 15 bp, Homo sapiens
ggaggagagcgtccc

SEQ ID NO: 1042544 - DNA, 15 bp, Homo sapiens
aggaggagagcgtcc

SEQ ID NO: 1042545 - DNA, 15 bp, Homo sapiens
taggaggagagcgtc

SEQ ID NO: 1042546 - DNA, 15 bp, Homo sapiens
gtaggaggagagcgt

SEQ ID NO: 1042547 - DNA, 15 bp, Homo sapiens
tgtaggaggagagcg

SEQ ID NO: 1042548 - DNA, 15 bp, Homo sapiens
ttgtaggaggagagc

SEQ ID NO: 1042549 - DNA, 15 bp, Homo sapiens
attgtaggaggagag

SEQ ID NO: 1042550 - DNA, 15 bp, Homo sapiens
cattgtaggaggaga

SEQ ID NO: 1042551 - DNA, 15 bp, Homo sapiens
acattgtaggaggag

SEQ ID NO: 1042552 - DNA, 15 bp, Homo sapiens
aacattgtaggagga

SEQ ID NO: 1042553 - DNA, 15 bp, Homo sapiens
caacattgtaggagg

SEQ ID NO: 1042554 - DNA, 15 bp, Homo sapiens
gcaacattgtaggag

SEQ ID NO: 1042555 - DNA, 15 bp, Homo sapiens
ggcaacattgtagga

SEQ ID NO: 1042556 - DNA, 15 bp, Homo sapiens
tggcaacattgtagg

SEQ ID NO: 1042557 - DNA, 15 bp, Homo sapiens
gtggcaacattgtag

SEQ ID NO: 1042558 - DNA, 15 bp, Homo sapiens
agtggcaacattgta

SEQ ID NO: 1042559 - DNA, 15 bp, Homo sapiens
aagtggcaacattgt

SEQ ID NO: 1042560 - DNA, 15 bp, Homo sapiens
caagtggcaacattg

SEQ ID NO: 1042561 - DNA, 15 bp, Homo sapiens
tcaagtggcaacatt

SEQ ID NO: 1042562 - DNA, 15 bp, Homo sapiens
atcaagtggcaacat

SEQ ID NO: 1042563 - DNA, 15 bp, Homo sapiens
aatcaagtggcaaca

SEQ ID NO: 1042564 - DNA, 15 bp, Homo sapiens
caatcaagtggcaac

SEQ ID NO: 1042565 - DNA, 15 bp, Homo sapiens
ccaatcaagtggcaa

SEQ ID NO: 1042566 - DNA, 15 bp, Homo sapiens
tccaatcaagtggca

SEQ ID NO: 1042567 - DNA, 15 bp, Homo sapiens
ctccaatcaagtggc

SEQ ID NO: 1042568 - DNA, 15 bp, Homo sapiens
actccaatcaagtgg

SEQ ID NO: 1042569 - DNA, 15 bp, Homo sapiens
aactccaatcaagtg

SEQ ID NO: 1042570 - DNA, 15 bp, Homo sapiens
aaactccaatcaagt

SEQ ID NO: 1042571 - DNA, 15 bp, Homo sapiens
gaaactccaatcaag

SEQ ID NO: 1042572 - DNA, 15 bp, Homo sapiens
ggaaactccaatcaa

SEQ ID NO: 1042573 - DNA, 15 bp, Homo sapiens
aggaaactccaatca

SEQ ID NO: 1042574 - DNA, 15 bp, Homo sapiens
aaggaaactccaatc

SEQ ID NO: 1042575 - DNA, 15 bp, Homo sapiens
caaggaaactccaat

SEQ ID NO: 1042576 - DNA, 15 bp, Homo sapiens
tcaaggaaactccaa

SEQ ID NO: 1042577 - DNA, 15 bp, Homo sapiens
atcaaggaaactcca

SEQ ID NO: 1042578 - DNA, 15 bp, Homo sapiens
aatcaaggaaactcc

SEQ ID NO: 1042579 - DNA, 15 bp, Homo sapiens
caatcaaggaaactc

SEQ ID NO: 1042580 - DNA, 15 bp, Homo sapiens
acaatcaaggaaact

SEQ ID NO: 1042581 - DNA, 15 bp, Homo sapiens
cacaatcaaggaaac

SEQ ID NO: 1042582 - DNA, 15 bp, Homo sapiens
tcacaatcaaggaaa

SEQ ID NO: 1042583 - DNA, 15 bp, Homo sapiens
ttcacaatcaaggaa

SEQ ID NO: 1042584 - DNA, 15 bp, Homo sapiens
gttcacaatcaagga

SEQ ID NO: 1042585 - DNA, 15 bp, Homo sapiens
agttcacaatcaagg

SEQ ID NO: 1042586 - DNA, 15 bp, Homo sapiens
tagttcacaatcaag

SEQ ID NO: 1042587 - DNA, 15 bp, Homo sapiens
gtagttcacaatcaa

SEQ ID NO: 1042588 - DNA, 15 bp, Homo sapiens
tgtagttcacaatca

SEQ ID NO: 1042589 - DNA, 15 bp, Homo sapiens
atgtagttcacaatc

SEQ ID NO: 1042590 - DNA, 15 bp, Homo sapiens
aatgtagttcacaat

SEQ ID NO: 1042591 - DNA, 15 bp, Homo sapiens
gaatgtagttcacaa

SEQ ID NO: 1042592 - DNA, 15 bp, Homo sapiens
agaatgtagttcaca

SEQ ID NO: 1042593 - DNA, 15 bp, Homo sapiens
aagaatgtagttcac

SEQ ID NO: 1042594 - DNA, 15 bp, Homo sapiens
taagaatgtagttca

SEQ ID NO: 1042595 - DNA, 15 bp, Homo sapiens
ttaagaatgtagttc

SEQ ID NO: 1042596 - DNA, 15 bp, Homo sapiens
cttaagaatgtagtt

SEQ ID NO: 1042597 - DNA, 15 bp, Homo sapiens
ccttaagaatgtagt

SEQ ID NO: 1042598 - DNA, 15 bp, Homo sapiens
tccttaagaatgtag

SEQ ID NO: 1042599 - DNA, 15 bp, Homo sapiens
ttccttaagaatgta

SEQ ID NO: 1042600 - DNA, 15 bp, Homo sapiens
tttccttaagaatgt

SEQ ID NO: 1042601 - DNA, 15 bp, Homo sapiens
gtttccttaagaatg

SEQ ID NO: 1042602 - DNA, 15 bp, Homo sapiens
agtttccttaagaat

SEQ ID NO: 1042603 - DNA, 15 bp, Homo sapiens
aagtttccttaagaa

SEQ ID NO: 1042604 - DNA, 15 bp, Homo sapiens
gaagtttccttaaga

SEQ ID NO: 1042605 - DNA, 15 bp, Homo sapiens
agaagtttccttaag

SEQ ID NO: 1042606 - DNA, 15 bp, Homo sapiens
tagaagtttccttaa

SEQ ID NO: 1042607 - DNA, 15 bp, Homo sapiens
atagaagtttcctta

SEQ ID NO: 1042608 - DNA, 15 bp, Homo sapiens
aatagaagtttcctt

SEQ ID NO: 1042609 - DNA, 15 bp, Homo sapiens
gaatagaagtttcct

SEQ ID NO: 1042610 - DNA, 15 bp, Homo sapiens
ggaatagaagtttcc

SEQ ID NO: 1042611 - DNA, 15 bp, Homo sapiens
tggaatagaagtttc

SEQ ID NO: 1042612 - DNA, 15 bp, Homo sapiens
ttggaatagaagttt

SEQ ID NO: 1042613 - DNA, 15 bp, Homo sapiens
tttggaatagaagtt

SEQ ID NO: 1042614 - DNA, 15 bp, Homo sapiens
ttttggaatagaagt

SEQ ID NO: 1042615 - DNA, 15 bp, Homo sapiens
attttggaatagaag

SEQ ID NO: 1042616 - DNA, 15 bp, Homo sapiens
cattttggaatagaa

SEQ ID NO: 1042617 - DNA, 15 bp, Homo sapiens
tcattttggaataga

SEQ ID NO: 1042618 - DNA, 15 bp, Homo sapiens
ctcattttggaatag

SEQ ID NO: 1042619 - DNA, 15 bp, Homo sapiens
actcattttggaata

SEQ ID NO: 1042620 - DNA, 15 bp, Homo sapiens
aactcattttggaat

SEQ ID NO: 1042621 - DNA, 15 bp, Homo sapiens
gaactcattttggaa

SEQ ID NO: 1042622 - DNA, 15 bp, Homo sapiens
tgaactcattttgga

SEQ ID NO: 1042623 - DNA, 15 bp, Homo sapiens
ttgaactcattttgg

SEQ ID NO: 1042624 - DNA, 15 bp, Homo sapiens
tttgaactcattttg

SEQ ID NO: 1042625 - DNA, 15 bp, Homo sapiens
gtttgaactcatttt

SEQ ID NO: 1042626 - DNA, 15 bp, Homo sapiens
agtttgaactcattt

SEQ ID NO: 1042627 - DNA, 15 bp, Homo sapiens
cagtttgaactcatt

SEQ ID NO: 1042628 - DNA, 15 bp, Homo sapiens
ccagtttgaactcat

SEQ ID NO: 1042629 - DNA, 15 bp, Homo sapiens
accagtttgaactca

SEQ ID NO: 1042630 - DNA, 15 bp, Homo sapiens
aaccagtttgaactc

SEQ ID NO: 1042631 - DNA, 15 bp, Homo sapiens
aaaccagtttgaact

SEQ ID NO: 1042632 - DNA, 15 bp, Homo sapiens
aaaaccagtttgaac

SEQ ID NO: 1042633 - DNA, 15 bp, Homo sapiens
caaaaccagtttgaa

SEQ ID NO: 1042634 - DNA, 15 bp, Homo sapiens
acaaaaccagtttga

SEQ ID NO: 1042635 - DNA, 15 bp, Homo sapiens
cacaaaaccagtttg

SEQ ID NO: 1042636 - DNA, 15 bp, Homo sapiens
gcacaaaaccagttt

SEQ ID NO: 1042637 - DNA, 15 bp, Homo sapiens
ggcacaaaaccagtt

SEQ ID NO: 1042638 - DNA, 15 bp, Homo sapiens
gggcacaaaaccagt

SEQ ID NO: 1042639 - DNA, 15 bp, Homo sapiens
agggcacaaaaccag

SEQ ID NO: 1042640 - DNA, 15 bp, Homo sapiens
aagggcacaaaacca

SEQ ID NO: 1042641 - DNA, 15 bp, Homo sapiens
aaagggcacaaaacc

SEQ ID NO: 1042642 - DNA, 15 bp, Homo sapiens
gaaagggcacaaaac

SEQ ID NO: 1042643 - DNA, 15 bp, Homo sapiens
agaaagggcacaaaa

SEQ ID NO: 1042644 - DNA, 15 bp, Homo sapiens
tagaaagggcacaaa

SEQ ID NO: 1042645 - DNA, 15 bp, Homo sapiens
gtagaaagggcacaa

SEQ ID NO: 1042646 - DNA, 15 bp, Homo sapiens
tgtagaaagggcaca

SEQ ID NO: 1042647 - DNA, 15 bp, Homo sapiens
gtgtagaaagggcac

SEQ ID NO: 1042648 - DNA, 15 bp, Homo sapiens
ggtgtagaaagggca

SEQ ID NO: 1042649 - DNA, 15 bp, Homo sapiens
aggtgtagaaagggc

SEQ ID NO: 1042650 - DNA, 15 bp, Homo sapiens
taggtgtagaaaggg

SEQ ID NO: 1042651 - DNA, 15 bp, Homo sapiens
gtaggtgtagaaagg

SEQ ID NO: 1042652 - DNA, 15 bp, Homo sapiens
tgtaggtgtagaaag

SEQ ID NO: 1042653 - DNA, 15 bp, Homo sapiens
gtgtaggtgtagaaa

SEQ ID NO: 1042654 - DNA, 15 bp, Homo sapiens
agtgtaggtgtagaa

SEQ ID NO: 1042655 - DNA, 15 bp, Homo sapiens
gagtgtaggtgtaga

SEQ ID NO: 1042656 - DNA, 15 bp, Homo sapiens
agagtgtaggtgtag

SEQ ID NO: 1042657 - DNA, 15 bp, Homo sapiens
tagagtgtaggtgta

SEQ ID NO: 1042658 - DNA, 15 bp, Homo sapiens
atagagtgtaggtgt

SEQ ID NO: 1042659 - DNA, 15 bp, Homo sapiens
gatagagtgtaggtg

SEQ ID NO: 1042660 - DNA, 15 bp, Homo sapiens
agatagagtgtaggt

SEQ ID NO: 1042661 - DNA, 15 bp, Homo sapiens
gagatagagtgtagg

SEQ ID NO: 1042662 - DNA, 15 bp, Homo sapiens
tgagatagagtgtag

SEQ ID NO: 1042663 - DNA, 15 bp, Homo sapiens
atgagatagagtgta

SEQ ID NO: 1042664 - DNA, 15 bp, Homo sapiens
gatgagatagagtgt

SEQ ID NO: 1042665 - DNA, 15 bp, Homo sapiens
tgatgagatagagtg

SEQ ID NO: 1042666 - DNA, 15 bp, Homo sapiens
gtgatgagatagagt

SEQ ID NO: 1042667 - DNA, 15 bp, Homo sapiens
agtgatgagatagag

SEQ ID NO: 1042668 - DNA, 15 bp, Homo sapiens
aagtgatgagataga

SEQ ID NO: 1042669 - DNA, 15 bp, Homo sapiens
caagtgatgagatag

SEQ ID NO: 1042670 - DNA, 15 bp, Homo sapiens
acaagtgatgagata

SEQ ID NO: 1042671 - DNA, 15 bp, Homo sapiens
aacaagtgatgagat

SEQ ID NO: 1042672 - DNA, 15 bp, Homo sapiens
aaacaagtgatgaga

SEQ ID NO: 1042673 - DNA, 15 bp, Homo sapiens
aaaacaagtgatgag

SEQ ID NO: 1042674 - DNA, 15 bp, Homo sapiens
aaaaacaagtgatga

SEQ ID NO: 1042675 - DNA, 15 bp, Homo sapiens
aaaaaacaagtgatg

SEQ ID NO: 1042676 - DNA, 15 bp, Homo sapiens
aaaaaaacaagtgat

SEQ ID NO: 1042677 - DNA, 15 bp, Homo sapiens
gaaaaaaacaagtga

SEQ ID NO: 1042678 - DNA, 15 bp, Homo sapiens
agaaaaaaacaagtg

SEQ ID NO: 1042679 - DNA, 15 bp, Homo sapiens
tagaaaaaaacaagt

SEQ ID NO: 1042680 - DNA, 15 bp, Homo sapiens
ctagaaaaaaacaag

SEQ ID NO: 1042681 - DNA, 15 bp, Homo sapiens
gctagaaaaaaacaa

SEQ ID NO: 1042682 - DNA, 15 bp, Homo sapiens
agctagaaaaaaaca

SEQ ID NO: 1042683 - DNA, 15 bp, Homo sapiens
cagctagaaaaaaac

SEQ ID NO: 1042684 - DNA, 15 bp, Homo sapiens
acagctagaaaaaaa

SEQ ID NO: 1042685 - DNA, 15 bp, Homo sapiens
cacagctagaaaaaa

SEQ ID NO: 1042686 - DNA, 15 bp, Homo sapiens
acacagctagaaaaa

SEQ ID NO: 1042687 - DNA, 15 bp, Homo sapiens
tacacagctagaaaa

SEQ ID NO: 1042688 - DNA, 15 bp, Homo sapiens
gtacacagctagaaa

SEQ ID NO: 1042689 - DNA, 15 bp, Homo sapiens
ggtacacagctagaa

SEQ ID NO: 1042690 - DNA, 15 bp, Homo sapiens
tggtacacagctaga

SEQ ID NO: 1042691 - DNA, 15 bp, Homo sapiens
gtggtacacagctag

SEQ ID NO: 1042692 - DNA, 15 bp, Homo sapiens
agtggtacacagcta

SEQ ID NO: 1042693 - DNA, 15 bp, Homo sapiens
gagtggtacacagct

SEQ ID NO: 1042694 - DNA, 15 bp, Homo sapiens
tgagtggtacacagc

SEQ ID NO: 1042695 - DNA, 15 bp, Homo sapiens
gtgagtggtacacag

SEQ ID NO: 1042696 - DNA, 15 bp, Homo sapiens
agtgagtggtacaca

SEQ ID NO: 1042697 - DNA, 15 bp, Homo sapiens
aagtgagtggtacac

SEQ ID NO: 1042698 - DNA, 15 bp, Homo sapiens
gaagtgagtggtaca

SEQ ID NO: 1042699 - DNA, 15 bp, Homo sapiens
ggaagtgagtggtac

SEQ ID NO: 1042700 - DNA, 15 bp, Homo sapiens
aggaagtgagtggta

SEQ ID NO: 1042701 - DNA, 15 bp, Homo sapiens
aaggaagtgagtggt

SEQ ID NO: 1042702 - DNA, 15 bp, Homo sapiens
taaggaagtgagtgg

SEQ ID NO: 1042703 - DNA, 15 bp, Homo sapiens
ttaaggaagtgagtg

SEQ ID NO: 1042704 - DNA, 15 bp, Homo sapiens
cttaaggaagtgagt

SEQ ID NO: 1042705 - DNA, 15 bp, Homo sapiens
tcttaaggaagtgag

SEQ ID NO: 1042706 - DNA, 15 bp, Homo sapiens
ttcttaaggaagtga

SEQ ID NO: 1042707 - DNA, 15 bp, Homo sapiens
cttcttaaggaagtg

SEQ ID NO: 1042708 - DNA, 15 bp, Homo sapiens
acttcttaaggaagt

SEQ ID NO: 1042709 - DNA, 15 bp, Homo sapiens
gacttcttaaggaag

SEQ ID NO: 1042710 - DNA, 15 bp, Homo sapiens
agacttcttaaggaa

SEQ ID NO: 1042711 - DNA, 15 bp, Homo sapiens
gagacttcttaagga

SEQ ID NO: 1042712 - DNA, 15 bp, Homo sapiens
agagacttcttaagg

SEQ ID NO: 1042713 - DNA, 15 bp, Homo sapiens
gagagacttcttaag

SEQ ID NO: 1042714 - DNA, 15 bp, Homo sapiens
ggagagacttcttaa

SEQ ID NO: 1042715 - DNA, 15 bp, Homo sapiens
aggagagacttctta

SEQ ID NO: 1042716 - DNA, 15 bp, Homo sapiens
caggagagacttctt

SEQ ID NO: 1042717 - DNA, 15 bp, Homo sapiens
ccaggagagacttct

SEQ ID NO: 1042718 - DNA, 15 bp, Homo sapiens
cccaggagagacttc

SEQ ID NO: 1042719 - DNA, 15 bp, Homo sapiens
acccaggagagactt

SEQ ID NO: 1042720 - DNA, 15 bp, Homo sapiens
gacccaggagagact

SEQ ID NO: 1042721 - DNA, 15 bp, Homo sapiens
agacccaggagagac

SEQ ID NO: 1042722 - DNA, 15 bp, Homo sapiens
cagacccaggagaga

SEQ ID NO: 1042723 - DNA, 15 bp, Homo sapiens
gcagacccaggagag

SEQ ID NO: 1042724 - DNA, 15 bp, Homo sapiens
ggcagacccaggaga

SEQ ID NO: 1042725 - DNA, 15 bp, Homo sapiens
aggcagacccaggag

SEQ ID NO: 1042726 - DNA, 15 bp, Homo sapiens
gaggcagacccagga

SEQ ID NO: 1042727 - DNA, 15 bp, Homo sapiens
ggaggcagacccagg

SEQ ID NO: 1042728 - DNA, 15 bp, Homo sapiens
tggaggcagacccag

SEQ ID NO: 1042729 - DNA, 15 bp, Homo sapiens
ctggaggcagaccca

SEQ ID NO: 1042730 - DNA, 15 bp, Homo sapiens
tctggaggcagaccc

SEQ ID NO: 1042731 - DNA, 15 bp, Homo sapiens
ttctggaggcagacc

SEQ ID NO: 1042732 - DNA, 15 bp, Homo sapiens
gttctggaggcagac

SEQ ID NO: 1042733 - DNA, 15 bp, Homo sapiens
ggttctggaggcaga

SEQ ID NO: 1042734 - DNA, 15 bp, Homo sapiens
cggttctggaggcag

SEQ ID NO: 1042735 - DNA, 15 bp, Homo sapiens
gcggttctggaggca

SEQ ID NO: 1042736 - DNA, 15 bp, Homo sapiens
agcggttctggaggc

SEQ ID NO: 1042737 - DNA, 15 bp, Homo sapiens
cagcggttctggagg

SEQ ID NO: 1042738 - DNA, 15 bp, Homo sapiens
ccagcggttctggag

SEQ ID NO: 1042739 - DNA, 15 bp, Homo sapiens
gccagcggttctgga

SEQ ID NO: 1042740 - DNA, 15 bp, Homo sapiens
agccagcggttctgg

SEQ ID NO: 1042741 - DNA, 15 bp, Homo sapiens
aagccagcggttctg

SEQ ID NO: 1042742 - DNA, 15 bp, Homo sapiens
aaagccagcggttct

SEQ ID NO: 1042743 - DNA, 15 bp, Homo sapiens
caaagccagcggttc

SEQ ID NO: 1042744 - DNA, 15 bp, Homo sapiens
acaaagccagcggtt

SEQ ID NO: 1042745 - DNA, 15 bp, Homo sapiens
cacaaagccagcggt

SEQ ID NO: 1042746 - DNA, 15 bp, Homo sapiens
acacaaagccagcgg

SEQ ID NO: 1042747 - DNA, 15 bp, Homo sapiens
aacacaaagccagcg

SEQ ID NO: 1042748 - DNA, 15 bp, Homo sapiens
gaacacaaagccagc

SEQ ID NO: 1042749 - DNA, 15 bp, Homo sapiens
agaacacaaagccag

SEQ ID NO: 1042750 - DNA, 15 bp, Homo sapiens
gagaacacaaagcca

SEQ ID NO: 1042751 - DNA, 15 bp, Homo sapiens
agagaacacaaagcc

SEQ ID NO: 1042752 - DNA, 15 bp, Homo sapiens
cagagaacacaaagc

SEQ ID NO: 1042753 - DNA, 15 bp, Homo sapiens
acagagaacacaaag

SEQ ID NO: 1042754 - DNA, 15 bp, Homo sapiens
cacagagaacacaaa

SEQ ID NO: 1042755 - DNA, 15 bp, Homo sapiens
tacacagagaacaca

SEQ ID NO: 1042756 - DNA, 15 bp, Homo sapiens
atacacagagaacac

SEQ ID NO: 1042757 - DNA, 15 bp, Homo sapiens
aatacacagagaaca

SEQ ID NO: 1042758 - DNA, 15 bp, Homo sapiens
gaatacacagagaac

SEQ ID NO: 1042759 - DNA, 15 bp, Homo sapiens
agaatacacagagaa

SEQ ID NO: 1042760 - DNA, 15 bp, Homo sapiens
gagaatacacagaga

SEQ ID NO: 1042761 - DNA, 15 bp, Homo sapiens
agagaatacacagag

SEQ ID NO: 1042762 - DNA, 15 bp, Homo sapiens
aagagaatacacaga

SEQ ID NO: 1042763 - DNA, 15 bp, Homo sapiens
aaagagaatacacag

SEQ ID NO: 1042764 - DNA, 15 bp, Homo sapiens
caaagagaatacaca

SEQ ID NO: 1042765 - DNA, 15 bp, Homo sapiens
gcaaagagaatacac

SEQ ID NO: 1042766 - DNA, 15 bp, Homo sapiens
agcaaagagaataca

SEQ ID NO: 1042767 - DNA, 15 bp, Homo sapiens
cagcaaagagaatac

SEQ ID NO: 1042768 - DNA, 15 bp, Homo sapiens
acagcaaagagaata

SEQ ID NO: 1042769 - DNA, 15 bp, Homo sapiens
cacagcaaagagaat

SEQ ID NO: 1042770 - DNA, 15 bp, Homo sapiens
tcacagcaaagagaa

SEQ ID NO: 1042771 - DNA, 15 bp, Homo sapiens
ctcacagcaaagaga

SEQ ID NO: 1042772 - DNA, 15 bp, Homo sapiens
actcacagcaaagag

SEQ ID NO: 1042773 - DNA, 15 bp, Homo sapiens
gactcacagcaaaga

SEQ ID NO: 1042774 - DNA, 15 bp, Homo sapiens
agactcacagcaaag

SEQ ID NO: 1042775 - DNA, 15 bp, Homo sapiens
aagactcacagcaaa

SEQ ID NO: 1042776 - DNA, 15 bp, Homo sapiens
caagactcacagcaa

SEQ ID NO: 1042777 - DNA, 15 bp, Homo sapiens
tcaagactcacagca

SEQ ID NO: 1042778 - DNA, 15 bp, Homo sapiens
atcaagactcacagc

SEQ ID NO: 1042779 - DNA, 15 bp, Homo sapiens
aatcaagactcacag

SEQ ID NO: 1042780 - DNA, 15 bp, Homo sapiens
aaatcaagactcaca

SEQ ID NO: 1042781 - DNA, 15 bp, Homo sapiens
aaaatcaagactcac

SEQ ID NO: 1042782 - DNA, 15 bp, Homo sapiens
caaaatcaagactca

SEQ ID NO: 1042783 - DNA, 15 bp, Homo sapiens
gcaaaatcaagactc

SEQ ID NO: 1042784 - DNA, 15 bp, Homo sapiens
ggcaaaatcaagact

SEQ ID NO: 1042785 - DNA, 15 bp, Homo sapiens
cggcaaaatcaagac

SEQ ID NO: 1042786 - DNA, 15 bp, Homo sapiens
acggcaaaatcaaga

SEQ ID NO: 1042787 - DNA, 15 bp, Homo sapiens
gacggcaaaatcaag

SEQ ID NO: 1042788 - DNA, 15 bp, Homo sapiens
agacggcaaaatcaa

SEQ ID NO: 1042789 - DNA, 15 bp, Homo sapiens
cagacggcaaaatca

SEQ ID NO: 1042790 - DNA, 15 bp, Homo sapiens
gcagacggcaaaatc

SEQ ID NO: 1042791 - DNA, 15 bp, Homo sapiens
tgcagacggcaaaat

SEQ ID NO: 1042792 - DNA, 15 bp, Homo sapiens
atgcagacggcaaaa

SEQ ID NO: 1042793 - DNA, 15 bp, Homo sapiens
catgcagacggcaaa

SEQ ID NO: 1042794 - DNA, 15 bp, Homo sapiens
acatgcagacggcaa

SEQ ID NO: 1042795 - DNA, 15 bp, Homo sapiens
gacatgcagacggca

SEQ ID NO: 1042796 - DNA, 15 bp, Homo sapiens
ggacatgcagacggc

SEQ ID NO: 1042797 - DNA, 15 bp, Homo sapiens
gggacatgcagacgg

SEQ ID NO: 1042798 - DNA, 15 bp, Homo sapiens
ggggacatgcagacg

SEQ ID NO: 1042799 - DNA, 15 bp, Homo sapiens
aggggacatgcagac

SEQ ID NO: 1042800 - DNA, 15 bp, Homo sapiens
aaggggacatgcaga

SEQ ID NO: 1042801 - DNA, 15 bp, Homo sapiens
caaggggacatgcag

SEQ ID NO: 1042802 - DNA, 15 bp, Homo sapiens
ccaaggggacatgca

SEQ ID NO: 1042803 - DNA, 15 bp, Homo sapiens
gccaaggggacatgc

SEQ ID NO: 1042804 - DNA, 15 bp, Homo sapiens
ggccaaggggacatg

SEQ ID NO: 1042805 - DNA, 15 bp, Homo sapiens
tggccaaggggacat

SEQ ID NO: 1042806 - DNA, 15 bp, Homo sapiens
ctggccaaggggaca

SEQ ID NO: 1042807 - DNA, 15 bp, Homo sapiens
cctggccaaggggac

SEQ ID NO: 1042808 - DNA, 15 bp, Homo sapiens
tcctggccaagggga

SEQ ID NO: 1042809 - DNA, 15 bp, Homo sapiens
gtcctggccaagggg

SEQ ID NO: 1042810 - DNA, 15 bp, Homo sapiens
tgtcctggccaaggg

SEQ ID NO: 1042811 - DNA, 15 bp, Homo sapiens
ttgtcctggccaagg

SEQ ID NO: 1042812 - DNA, 15 bp, Homo sapiens
attgtcctggccaag

SEQ ID NO: 1042813 - DNA, 15 bp, Homo sapiens
gattgtcctggccaa

SEQ ID NO: 1042814 - DNA, 15 bp, Homo sapiens
ggattgtcctggcca

SEQ ID NO: 1042815 - DNA, 15 bp, Homo sapiens
aggattgtcctggcc

SEQ ID NO: 1042816 - DNA, 15 bp, Homo sapiens
caggattgtcctggc

SEQ ID NO: 1042817 - DNA, 15 bp, Homo sapiens
acaggattgtcctgg

SEQ ID NO: 1042818 - DNA, 15 bp, Homo sapiens
cacaggattgtcctg

SEQ ID NO: 1042819 - DNA, 15 bp, Homo sapiens
acacaggattgtcct

SEQ ID NO: 1042820 - DNA, 15 bp, Homo sapiens
aacacaggattgtcc

SEQ ID NO: 1042821 - DNA, 15 bp, Homo sapiens
gaacacaggattgtc

SEQ ID NO: 1042822 - DNA, 15 bp, Homo sapiens
ggaacacaggattgt

SEQ ID NO: 1042823 - DNA, 15 bp, Homo sapiens
gggaacacaggattg

SEQ ID NO: 1042824 - DNA, 15 bp, Homo sapiens
agggaacacaggatt

SEQ ID NO: 1042825 - DNA, 15 bp, Homo sapiens
cagggaacacaggat

SEQ ID NO: 1042826 - DNA, 15 bp, Homo sapiens
acagggaacacagga

SEQ ID NO: 1042827 - DNA, 15 bp, Homo sapiens
aacagggaacacagg

SEQ ID NO: 1042828 - DNA, 15 bp, Homo sapiens
caacagggaacacag

SEQ ID NO: 1042829 - DNA, 15 bp, Homo sapiens
gcaacagggaacaca

SEQ ID NO: 1042830 - DNA, 15 bp, Homo sapiens
ggcaacagggaacac

SEQ ID NO: 1042831 - DNA, 15 bp, Homo sapiens
aggcaacagggaaca

SEQ ID NO: 1042832 - DNA, 15 bp, Homo sapiens
caggcaacagggaac

SEQ ID NO: 1042833 - DNA, 15 bp, Homo sapiens
ccaggcaacagggaa

SEQ ID NO: 1042834 - DNA, 15 bp, Homo sapiens
accaggcaacaggga

SEQ ID NO: 1042835 - DNA, 15 bp, Homo sapiens
gaccaggcaacaggg

SEQ ID NO: 1042836 - DNA, 15 bp, Homo sapiens
ggaccaggcaacagg

SEQ ID NO: 1042837 - DNA, 15 bp, Homo sapiens
tggaccaggcaacag

SEQ ID NO: 1042838 - DNA, 15 bp, Homo sapiens
gtggaccaggcaaca

SEQ ID NO: 1042839 - DNA, 15 bp, Homo sapiens
ggtggaccaggcaac

SEQ ID NO: 1042840 - DNA, 15 bp, Homo sapiens
gggtggaccaggcaa

SEQ ID NO: 1042841 - DNA, 15 bp, Homo sapiens
agggtggaccaggca

SEQ ID NO: 1042842 - DNA, 15 bp, Homo sapiens
gagggtggaccaggc

SEQ ID NO: 1042843 - DNA, 15 bp, Homo sapiens
ggagggtggaccagg

SEQ ID NO: 1042844 - DNA, 15 bp, Homo sapiens
aggagggtggaccag

SEQ ID NO: 1042845 - DNA, 15 bp, Homo sapiens
aaggagggtggacca

SEQ ID NO: 1042846 - DNA, 15 bp, Homo sapiens
taaggagggtggacc

SEQ ID NO: 1042847 - DNA, 15 bp, Homo sapiens
ctaaggagggtggac

SEQ ID NO: 1042848 - DNA, 15 bp, Homo sapiens
cctaaggagggtgga

SEQ ID NO: 1042849 - DNA, 15 bp, Homo sapiens
tcctaaggagggtgg

SEQ ID NO: 1042850 - DNA, 15 bp, Homo sapiens
atcctaaggagggtg

SEQ ID NO: 1042851 - DNA, 15 bp, Homo sapiens
tatcctaaggagggt

SEQ ID NO: 1042852 - DNA, 15 bp, Homo sapiens
ttatcctaaggaggg

SEQ ID NO: 1042853 - DNA, 15 bp, Homo sapiens
attatcctaaggagg

SEQ ID NO: 1042854 - DNA, 15 bp, Homo sapiens
cattatcctaaggag

SEQ ID NO: 1042855 - DNA, 15 bp, Homo sapiens
tcattatcctaagga

SEQ ID NO: 1042856 - DNA, 15 bp, Homo sapiens
atcattatcctaagg

SEQ ID NO: 1042857 - DNA, 15 bp, Homo sapiens
catcattatcctaag

SEQ ID NO: 1042858 - DNA, 15 bp, Homo sapiens
ccatcattatcctaa

SEQ ID NO: 1042859 - DNA, 15 bp, Homo sapiens
cccatcattatccta

SEQ ID NO: 1042860 - DNA, 15 bp, Homo sapiens
tcccatcattatcct

SEQ ID NO: 1042861 - DNA, 15 bp, Homo sapiens
ctcccatcattatcc

SEQ ID NO: 1042862 - DNA, 15 bp, Homo sapiens
cctcccatcattatc

SEQ ID NO: 1042863 - DNA, 15 bp, Homo sapiens
tcctcccatcattat

SEQ ID NO: 1042864 - DNA, 15 bp, Homo sapiens
ttcctcccatcatta

SEQ ID NO: 1042865 - DNA, 15 bp, Homo sapiens
gttcctcccatcatt

SEQ ID NO: 1042866 - DNA, 15 bp, Homo sapiens
agttcctcccatcat

SEQ ID NO: 1042867 - DNA, 15 bp, Homo sapiens
aagttcctcccatca

SEQ ID NO: 1042868 - DNA, 15 bp, Homo sapiens
aaagttcctcccatc

SEQ ID NO: 1042869 - DNA, 15 bp, Homo sapiens
aaaagttcctcccat

SEQ ID NO: 1042870 - DNA, 15 bp, Homo sapiens
aaaaagttcctccca

SEQ ID NO: 1042871 - DNA, 15 bp, Homo sapiens
caaaaagttcctccc

SEQ ID NO: 1042872 - DNA, 15 bp, Homo sapiens
gcaaaaagttcctcc

SEQ ID NO: 1042873 - DNA, 15 bp, Homo sapiens
ggcaaaaagttcctc

SEQ ID NO: 1042874 - DNA, 15 bp, Homo sapiens
gggcaaaaagttcct

SEQ ID NO: 1042875 - DNA, 15 bp, Homo sapiens
tgggcaaaaagttcc

SEQ ID NO: 1042876 - DNA, 15 bp, Homo sapiens
atgggcaaaaagttc

SEQ ID NO: 1042877 - DNA, 15 bp, Homo sapiens
gatgggcaaaaagtt

SEQ ID NO: 1042878 - DNA, 15 bp, Homo sapiens
agatgggcaaaaagt

SEQ ID NO: 1042879 - DNA, 15 bp, Homo sapiens
tagatgggcaaaaag

SEQ ID NO: 1042880 - DNA, 15 bp, Homo sapiens
atagatgggcaaaaa

SEQ ID NO: 1042881 - DNA, 15 bp, Homo sapiens
catagatgggcaaaa

SEQ ID NO: 1042882 - DNA, 15 bp, Homo sapiens
ccatagatgggcaaa

SEQ ID NO: 1042883 - DNA, 15 bp, Homo sapiens
tccatagatgggcaa

SEQ ID NO: 1042884 - DNA, 15 bp, Homo sapiens
ctccatagatgggca

SEQ ID NO: 1042885 - DNA, 15 bp, Homo sapiens
gctccatagatgggc

SEQ ID NO: 1042886 - DNA, 15 bp, Homo sapiens
tgctccatagatggg

SEQ ID NO: 1042887 - DNA, 15 bp, Homo sapiens
atgctccatagatgg

SEQ ID NO: 1042888 - DNA, 15 bp, Homo sapiens
gatgctccatagatg

SEQ ID NO: 1042889 - DNA, 15 bp, Homo sapiens
tgatgctccatagat

SEQ ID NO: 1042890 - DNA, 15 bp, Homo sapiens
gtgatgctccataga

SEQ ID NO: 1042891 - DNA, 15 bp, Homo sapiens
agtgatgctccatag

SEQ ID NO: 1042892 - DNA, 15 bp, Homo sapiens
cagtgatgctccata

SEQ ID NO: 1042893 - DNA, 15 bp, Homo sapiens
acagtgatgctccat

SEQ ID NO: 1042894 - DNA, 15 bp, Homo sapiens
cacagtgatgctcca

SEQ ID NO: 1042895 - DNA, 15 bp, Homo sapiens
gcacagtgatgctcc

SEQ ID NO: 1042896 - DNA, 15 bp, Homo sapiens
ggcacagtgatgctc

SEQ ID NO: 1042897 - DNA, 15 bp, Homo sapiens
gggcacagtgatgct

SEQ ID NO: 1042898 - DNA, 15 bp, Homo sapiens
tgggcacagtgatgc

SEQ ID NO: 1042899 - DNA, 15 bp, Homo sapiens
ctgggcacagtgatg

SEQ ID NO: 1042900 - DNA, 15 bp, Homo sapiens
gctgggcacagtgat

SEQ ID NO: 1042901 - DNA, 15 bp, Homo sapiens
cagggctgggcacag

SEQ ID NO: 1042902 - DNA, 15 bp, Homo sapiens
gcagggctgggcaca

SEQ ID NO: 1042903 - DNA, 15 bp, Homo sapiens
ggcagggctgggcac

SEQ ID NO: 1042904 - DNA, 15 bp, Homo sapiens
aggcagggctgggca

SEQ ID NO: 1042905 - DNA, 15 bp, Homo sapiens
gaggcagggctgggc

SEQ ID NO: 1042906 - DNA, 15 bp, Homo sapiens
ggaggcagggctggg

SEQ ID NO: 1042907 - DNA, 15 bp, Homo sapiens
gggaggcagggctgg

SEQ ID NO: 1042908 - DNA, 15 bp, Homo sapiens
cgggaggcagggctg

SEQ ID NO: 1042909 - DNA, 15 bp, Homo sapiens
ccgggaggcagggct

SEQ ID NO: 1042910 - DNA, 15 bp, Homo sapiens
cccgggaggcagggc

SEQ ID NO: 1042911 - DNA, 15 bp, Homo sapiens
gcccgggaggcaggg

SEQ ID NO: 1042912 - DNA, 15 bp, Homo sapiens
agcccgggaggcagg

SEQ ID NO: 1042913 - DNA, 15 bp, Homo sapiens
aagcccgggaggcag

SEQ ID NO: 1042914 - DNA, 15 bp, Homo sapiens
gaagcccgggaggca

SEQ ID NO: 1042915 - DNA, 15 bp, Homo sapiens
agaagcccgggaggc

SEQ ID NO: 1042916 - DNA, 15 bp, Homo sapiens
aagaagcccgggagg

SEQ ID NO: 1042917 - DNA, 15 bp, Homo sapiens
aaagaagcccgggag

SEQ ID NO: 1042918 - DNA, 15 bp, Homo sapiens
caaagaagcccggga

SEQ ID NO: 1042919 - DNA, 15 bp, Homo sapiens
gcaaagaagcccggg

SEQ ID NO: 1042920 - DNA, 15 bp, Homo sapiens
ggcaaagaagcccgg

SEQ ID NO: 1042921 - DNA, 15 bp, Homo sapiens
aggcaaagaagcccg

SEQ ID NO: 1042922 - DNA, 15 bp, Homo sapiens
gaggcaaagaagccc

SEQ ID NO: 1042923 - DNA, 15 bp, Homo sapiens
agaggcaaagaagcc

SEQ ID NO: 1042924 - DNA, 15 bp, Homo sapiens
cagaggcaaagaagc

SEQ ID NO: 1042925 - DNA, 15 bp, Homo sapiens
tcagaggcaaagaag

SEQ ID NO: 1042926 - DNA, 15 bp, Homo sapiens
atcagaggcaaagaa

SEQ ID NO: 1042927 - DNA, 15 bp, Homo sapiens
tatcagaggcaaaga

SEQ ID NO: 1042928 - DNA, 15 bp, Homo sapiens
atatcagaggcaaag

SEQ ID NO: 1042929 - DNA, 15 bp, Homo sapiens
aatatcagaggcaaa

SEQ ID NO: 1042930 - DNA, 15 bp, Homo sapiens
gaatatcagaggcaa

SEQ ID NO: 1042931 - DNA, 15 bp, Homo sapiens
agaatatcagaggca

SEQ ID NO: 1042932 - DNA, 15 bp, Homo sapiens
cagaatatcagaggc

SEQ ID NO: 1042933 - DNA, 15 bp, Homo sapiens
acagaatatcagagg

SEQ ID NO: 1042934 - DNA, 15 bp, Homo sapiens
gacagaatatcagag

SEQ ID NO: 1042935 - DNA, 15 bp, Homo sapiens
tgacagaatatcaga

SEQ ID NO: 1042936 - DNA, 15 bp, Homo sapiens
atgacagaatatcag

SEQ ID NO: 1042937 - DNA, 15 bp, Homo sapiens
gatgacagaatatca

SEQ ID NO: 1042938 - DNA, 15 bp, Homo sapiens
agatgacagaatatc

SEQ ID NO: 1042939 - DNA, 15 bp, Homo sapiens
aagatgacagaatat

SEQ ID NO: 1042940 - DNA, 15 bp, Homo sapiens
gaagatgacagaata

SEQ ID NO: 1042941 - DNA, 15 bp, Homo sapiens
agaagatgacagaat

SEQ ID NO: 1042942 - DNA, 15 bp, Homo sapiens
gagaagatgacagaa

SEQ ID NO: 1042943 - DNA, 15 bp, Homo sapiens
ggagaagatgacaga

SEQ ID NO: 1042944 - DNA, 15 bp, Homo sapiens
gggagaagatgacag

SEQ ID NO: 1042945 - DNA, 15 bp, Homo sapiens
ggggagaagatgaca

SEQ ID NO: 1042946 - DNA, 15 bp, Homo sapiens
gggggagaagatgac

SEQ ID NO: 1042947 - DNA, 15 bp, Homo sapiens
tgggggagaagatga

SEQ ID NO: 1042948 - DNA, 15 bp, Homo sapiens
ttgggggagaagatg

SEQ ID NO: 1042949 - DNA, 15 bp, Homo sapiens
gttgggggagaagat

SEQ ID NO: 1042950 - DNA, 15 bp, Homo sapiens
ggttgggggagaaga

SEQ ID NO: 1042951 - DNA, 15 bp, Homo sapiens
aggttgggggagaag

SEQ ID NO: 1042952 - DNA, 15 bp, Homo sapiens
taggttgggggagaa

SEQ ID NO: 1042953 - DNA, 15 bp, Homo sapiens
ctaggttgggggaga

SEQ ID NO: 1042954 - DNA, 15 bp, Homo sapiens
tctaggttgggggag

SEQ ID NO: 1042955 - DNA, 15 bp, Homo sapiens
ttctaggttggggga

SEQ ID NO: 1042956 - DNA, 15 bp, Homo sapiens
cttctaggttggggg

SEQ ID NO: 1042957 - DNA, 15 bp, Homo sapiens
tcttctaggttgggg

SEQ ID NO: 1042958 - DNA, 15 bp, Homo sapiens
ctcttctaggttggg

SEQ ID NO: 1042959 - DNA, 15 bp, Homo sapiens
cctcttctaggttgg

SEQ ID NO: 1042960 - DNA, 15 bp, Homo sapiens
ccctcttctaggttg

SEQ ID NO: 1042961 - DNA, 15 bp, Homo sapiens
tccctcttctaggtt

SEQ ID NO: 1042962 - DNA, 15 bp, Homo sapiens
ttccctcttctaggt

SEQ ID NO: 1042963 - DNA, 15 bp, Homo sapiens
cttccctcttctagg

SEQ ID NO: 1042964 - DNA, 15 bp, Homo sapiens
ccttccctcttctag

SEQ ID NO: 1042965 - DNA, 15 bp, Homo sapiens
cccttccctcttcta

SEQ ID NO: 1042966 - DNA, 15 bp, Homo sapiens
tcccttccctcttct

SEQ ID NO: 1042967 - DNA, 15 bp, Homo sapiens
ttcccttccctcttc

SEQ ID NO: 1042968 - DNA, 15 bp, Homo sapiens
tttcccttccctctt

SEQ ID NO: 1042969 - DNA, 15 bp, Homo sapiens
ctttcccttccctct

SEQ ID NO: 1042970 - DNA, 15 bp, Homo sapiens
tctttcccttccctc

SEQ ID NO: 1042971 - DNA, 15 bp, Homo sapiens
ttctttcccttccct

SEQ ID NO: 1042972 - DNA, 15 bp, Homo sapiens
tttctttcccttccc

SEQ ID NO: 1042973 - DNA, 15 bp, Homo sapiens
atttctttcccttcc

SEQ ID NO: 1042974 - DNA, 15 bp, Homo sapiens
aatttctttcccttc

SEQ ID NO: 1042975 - DNA, 15 bp, Homo sapiens
taatttctttccctt

SEQ ID NO: 1042976 - DNA, 15 bp, Homo sapiens
ataatttctttccct

SEQ ID NO: 1042977 - DNA, 15 bp, Homo sapiens
aataatttctttccc

SEQ ID NO: 1042978 - DNA, 15 bp, Homo sapiens
aaataatttctttcc

SEQ ID NO: 1042979 - DNA, 15 bp, Homo sapiens
aaaataatttctttc

SEQ ID NO: 1042980 - DNA, 15 bp, Homo sapiens
taaaataatttcttt

SEQ ID NO: 1042981 - DNA, 15 bp, Homo sapiens
gtaaaataatttctt

SEQ ID NO: 1042982 - DNA, 15 bp, Homo sapiens
agtaaaataatttct

SEQ ID NO: 1042983 - DNA, 15 bp, Homo sapiens
cagtaaaataatttc

SEQ ID NO: 1042984 - DNA, 15 bp, Homo sapiens
ccagtaaaataattt

SEQ ID NO: 1042985 - DNA, 15 bp, Homo sapiens
tccagtaaaataatt

SEQ ID NO: 1042986 - DNA, 15 bp, Homo sapiens
ttccagtaaaataat

SEQ ID NO: 1042987 - DNA, 15 bp, Homo sapiens
tttccagtaaaataa

SEQ ID NO: 1042988 - DNA, 15 bp, Homo sapiens
gtttccagtaaaata

SEQ ID NO: 1042989 - DNA, 15 bp, Homo sapiens
agtttccagtaaaat

SEQ ID NO: 1042990 - DNA, 15 bp, Homo sapiens
gagtttccagtaaaa

SEQ ID NO: 1042991 - DNA, 15 bp, Homo sapiens
ggagtttccagtaaa

SEQ ID NO: 1042992 - DNA, 15 bp, Homo sapiens
tggagtttccagtaa

SEQ ID NO: 1042993 - DNA, 15 bp, Homo sapiens
ttggagtttccagta

SEQ ID NO: 1042994 - DNA, 15 bp, Homo sapiens
cttggagtttccagt

SEQ ID NO: 1042995 - DNA, 15 bp, Homo sapiens
ccttggagtttccag

SEQ ID NO: 1042996 - DNA, 15 bp, Homo sapiens
accttggagtttcca

SEQ ID NO: 1042997 - DNA, 15 bp, Homo sapiens
aaccttggagtttcc

SEQ ID NO: 1042998 - DNA, 15 bp, Homo sapiens
gaaccttggagtttc

SEQ ID NO: 1042999 - DNA, 15 bp, Homo sapiens
tgaaccttggagttt

SEQ ID NO: 1043000 - DNA, 15 bp, Homo sapiens
atgaaccttggagtt

SEQ ID NO: 1043001 - DNA, 15 bp, Homo sapiens
catgaaccttggagt

SEQ ID NO: 1043002 - DNA, 15 bp, Homo sapiens
tcatgaaccttggag

SEQ ID NO: 1043003 - DNA, 15 bp, Homo sapiens
ttcatgaaccttgga

SEQ ID NO: 1043004 - DNA, 15 bp, Homo sapiens
attcatgaaccttgg

SEQ ID NO: 1043005 - DNA, 15 bp, Homo sapiens
cattcatgaaccttg

SEQ ID NO: 1043006 - DNA, 15 bp, Homo sapiens
tcattcatgaacctt

SEQ ID NO: 1043007 - DNA, 15 bp, Homo sapiens
atcattcatgaacct

SEQ ID NO: 1043008 - DNA, 15 bp, Homo sapiens
tatcattcatgaacc

SEQ ID NO: 1043009 - DNA, 15 bp, Homo sapiens
ttatcattcatgaac

SEQ ID NO: 1043010 - DNA, 15 bp, Homo sapiens
tttatcattcatgaa

SEQ ID NO: 1043011 - DNA, 15 bp, Homo sapiens
gtttatcattcatga

SEQ ID NO: 1043012 - DNA, 15 bp, Homo sapiens
agtttatcattcatg

SEQ ID NO: 1043013 - DNA, 15 bp, Homo sapiens
tagtttatcattcat

SEQ ID NO: 1043014 - DNA, 15 bp, Homo sapiens
ttagtttatcattca

SEQ ID NO: 1043015 - DNA, 15 bp, Homo sapiens
cttagtttatcattc

SEQ ID NO: 1043016 - DNA, 15 bp, Homo sapiens
tcttagtttatcatt

SEQ ID NO: 1043017 - DNA, 15 bp, Homo sapiens
ttcttagtttatcat

SEQ ID NO: 1043018 - DNA, 15 bp, Homo sapiens
gttcttagtttatca

SEQ ID NO: 1043019 - DNA, 15 bp, Homo sapiens
cgttcttagtttatc

SEQ ID NO: 1043020 - DNA, 15 bp, Homo sapiens
acgttcttagtttat

SEQ ID NO: 1043021 - DNA, 15 bp, Homo sapiens
tacgttcttagttta

SEQ ID NO: 1043022 - DNA, 15 bp, Homo sapiens
ttacgttcttagttt

SEQ ID NO: 1043023 - DNA, 15 bp, Homo sapiens
cttacgttcttagtt

SEQ ID NO: 1043024 - DNA, 15 bp, Homo sapiens
gcttacgttcttagt

SEQ ID NO: 1043025 - DNA, 15 bp, Homo sapiens
ggcttacgttcttag

SEQ ID NO: 1043026 - DNA, 15 bp, Homo sapiens
tggcttacgttctta

SEQ ID NO: 1043027 - DNA, 15 bp, Homo sapiens
atggcttacgttctt

SEQ ID NO: 1043028 - DNA, 15 bp, Homo sapiens
aatggcttacgttct

SEQ ID NO: 1043029 - DNA, 15 bp, Homo sapiens
gaatggcttacgttc

SEQ ID NO: 1043030 - DNA, 15 bp, Homo sapiens
agaatggcttacgtt

SEQ ID NO: 1043031 - DNA, 15 bp, Homo sapiens
gagaatggcttacgt

SEQ ID NO: 1043032 - DNA, 15 bp, Homo sapiens
agagaatggcttacg

SEQ ID NO: 1043033 - DNA, 15 bp, Homo sapiens
tagagaatggcttac

SEQ ID NO: 1043034 - DNA, 15 bp, Homo sapiens
gtagagaatggctta

SEQ ID NO: 1043035 - DNA, 15 bp, Homo sapiens
tgtagagaatggctt

SEQ ID NO: 1043036 - DNA, 15 bp, Homo sapiens
ctgtagagaatggct

SEQ ID NO: 1043037 - DNA, 15 bp, Homo sapiens
gctgtagagaatggc

SEQ ID NO: 1043038 - DNA, 15 bp, Homo sapiens
tgctgtagagaatgg

SEQ ID NO: 1043039 - DNA, 15 bp, Homo sapiens
ctgctgtagagaatg

SEQ ID NO: 1043040 - DNA, 15 bp, Homo sapiens
tctgctgtagagaat

SEQ ID NO: 1043041 - DNA, 15 bp, Homo sapiens
ttctgctgtagagaa

SEQ ID NO: 1043042 - DNA, 15 bp, Homo sapiens
cttctgctgtagaga

SEQ ID NO: 1043043 - DNA, 15 bp, Homo sapiens
tcttctgctgtagag

SEQ ID NO: 1043044 - DNA, 15 bp, Homo sapiens
atcttctgctgtaga

SEQ ID NO: 1043045 - DNA, 15 bp, Homo sapiens
catcttctgctgtag

SEQ ID NO: 1043046 - DNA, 15 bp, Homo sapiens
gcatcttctgctgta

SEQ ID NO: 1043047 - DNA, 15 bp, Homo sapiens
agcatcttctgctgt

SEQ ID NO: 1043048 - DNA, 15 bp, Homo sapiens
tagcatcttctgctg

SEQ ID NO: 1043049 - DNA, 15 bp, Homo sapiens
gtagcatcttctgct

SEQ ID NO: 1043050 - DNA, 15 bp, Homo sapiens
ggtagcatcttctgc

SEQ ID NO: 1043051 - DNA, 15 bp, Homo sapiens
aggtagcatcttctg

SEQ ID NO: 1043052 - DNA, 15 bp, Homo sapiens
caggtagcatcttct

SEQ ID NO: 1043053 - DNA, 15 bp, Homo sapiens
tcaggtagcatcttc

SEQ ID NO: 1043054 - DNA, 15 bp, Homo sapiens
atcaggtagcatctt

SEQ ID NO: 1043055 - DNA, 15 bp, Homo sapiens
aatcaggtagcatct

SEQ ID NO: 1043056 - DNA, 15 bp, Homo sapiens
gaatcaggtagcatc

SEQ ID NO: 1043057 - DNA, 15 bp, Homo sapiens
ggaatcaggtagcat

SEQ ID NO: 1043058 - DNA, 15 bp, Homo sapiens
aggaatcaggtagca

SEQ ID NO: 1043059 - DNA, 15 bp, Homo sapiens
caggaatcaggtagc

SEQ ID NO: 1043060 - DNA, 15 bp, Homo sapiens
tcaggaatcaggtag

SEQ ID NO: 1043061 - DNA, 15 bp, Homo sapiens
ttcaggaatcaggta

SEQ ID NO: 1043062 - DNA, 15 bp, Homo sapiens
tttcaggaatcaggt

SEQ ID NO: 1043063 - DNA, 15 bp, Homo sapiens
atttcaggaatcagg

SEQ ID NO: 1043064 - DNA, 15 bp, Homo sapiens
catttcaggaatcag

SEQ ID NO: 1043065 - DNA, 15 bp, Homo sapiens
acatttcaggaatca

SEQ ID NO: 1043066 - DNA, 15 bp, Homo sapiens
gacatttcaggaatc

SEQ ID NO: 1043067 - DNA, 15 bp, Homo sapiens
tgacatttcaggaat

SEQ ID NO: 1043068 - DNA, 15 bp, Homo sapiens
atgacatttcaggaa

SEQ ID NO: 1043069 - DNA, 15 bp, Homo sapiens
gatgacatttcagga

SEQ ID NO: 1043070 - DNA, 15 bp, Homo sapiens
agatgacatttcagg

SEQ ID NO: 1043071 - DNA, 15 bp, Homo sapiens
cagatgacatttcag

SEQ ID NO: 1043072 - DNA, 15 bp, Homo sapiens
acagatgacatttca

SEQ ID NO: 1043073 - DNA, 15 bp, Homo sapiens
aacagatgacatttc

SEQ ID NO: 1043074 - DNA, 15 bp, Homo sapiens
aaacagatgacattt

SEQ ID NO: 1043075 - DNA, 15 bp, Homo sapiens
aaaacagatgacatt

SEQ ID NO: 1043076 - DNA, 15 bp, Homo sapiens
aaaaacagatgacat

SEQ ID NO: 1043077 - DNA, 15 bp, Homo sapiens
caaaaacagatgaca

SEQ ID NO: 1043078 - DNA, 15 bp, Homo sapiens
acaaaaacagatgac

SEQ ID NO: 1043079 - DNA, 15 bp, Homo sapiens
tacaaaaacagatga

SEQ ID NO: 1043080 - DNA, 15 bp, Homo sapiens
ctacaaaaacagatg

SEQ ID NO: 1043081 - DNA, 15 bp, Homo sapiens
gctacaaaaacagat

SEQ ID NO: 1043082 - DNA, 15 bp, Homo sapiens
tgctacaaaaacaga

SEQ ID NO: 1043083 - DNA, 15 bp, Homo sapiens
ctgctacaaaaacag

SEQ ID NO: 1043084 - DNA, 15 bp, Homo sapiens
cctgctacaaaaaca

SEQ ID NO: 1043085 - DNA, 15 bp, Homo sapiens
tcctgctacaaaaac

SEQ ID NO: 1043086 - DNA, 15 bp, Homo sapiens
gtcctgctacaaaaa

SEQ ID NO: 1043087 - DNA, 15 bp, Homo sapiens
agtcctgctacaaaa

SEQ ID NO: 1043088 - DNA, 15 bp, Homo sapiens
cagtcctgctacaaa

SEQ ID NO: 1043089 - DNA, 15 bp, Homo sapiens
acagtcctgctacaa

SEQ ID NO: 1043090 - DNA, 15 bp, Homo sapiens
cacagtcctgctaca

SEQ ID NO: 1043091 - DNA, 15 bp, Homo sapiens
ccacagtcctgctac

SEQ ID NO: 1043092 - DNA, 15 bp, Homo sapiens
accacagtcctgcta

SEQ ID NO: 1043093 - DNA, 15 bp, Homo sapiens
taccacagtcctgct

SEQ ID NO: 1043094 - DNA, 15 bp, Homo sapiens
gtaccacagtcctgc

SEQ ID NO: 1043095 - DNA, 15 bp, Homo sapiens
tgtaccacagtcctg

SEQ ID NO: 1043096 - DNA, 15 bp, Homo sapiens
atgtaccacagtcct

SEQ ID NO: 1043097 - DNA, 15 bp, Homo sapiens
catgtaccacagtcc

SEQ ID NO: 1043098 - DNA, 15 bp, Homo sapiens
acatgtaccacagtc

SEQ ID NO: 1043099 - DNA, 15 bp, Homo sapiens
aacatgtaccacagt

SEQ ID NO: 1043100 - DNA, 15 bp, Homo sapiens
gaacatgtaccacag

SEQ ID NO: 1043101 - DNA, 15 bp, Homo sapiens
agaacatgtaccaca

SEQ ID NO: 1043102 - DNA, 15 bp, Homo sapiens
aagaacatgtaccac

SEQ ID NO: 1043103 - DNA, 15 bp, Homo sapiens
gaagaacatgtacca

SEQ ID NO: 1043104 - DNA, 15 bp, Homo sapiens
tgaagaacatgtacc

SEQ ID NO: 1043105 - DNA, 15 bp, Homo sapiens
gtgaagaacatgtac

SEQ ID NO: 1043106 - DNA, 15 bp, Homo sapiens
agtgaagaacatgta

SEQ ID NO: 1043107 - DNA, 15 bp, Homo sapiens
gagtgaagaacatgt

SEQ ID NO: 1043108 - DNA, 15 bp, Homo sapiens
agagtgaagaacatg

SEQ ID NO: 1043109 - DNA, 15 bp, Homo sapiens
aagagtgaagaacat

SEQ ID NO: 1043110 - DNA, 15 bp, Homo sapiens
taagagtgaagaaca

SEQ ID NO: 1043111 - DNA, 15 bp, Homo sapiens
ataagagtgaagaac

SEQ ID NO: 1043112 - DNA, 15 bp, Homo sapiens
gataagagtgaagaa

SEQ ID NO: 1043113 - DNA, 15 bp, Homo sapiens
tgataagagtgaaga

SEQ ID NO: 1043114 - DNA, 15 bp, Homo sapiens
gtgataagagtgaag

SEQ ID NO: 1043115 - DNA, 15 bp, Homo sapiens
ggtgataagagtgaa

SEQ ID NO: 1043116 - DNA, 15 bp, Homo sapiens
tggtgataagagtga

SEQ ID NO: 1043117 - DNA, 15 bp, Homo sapiens
ttggtgataagagtg

SEQ ID NO: 1043118 - DNA, 15 bp, Homo sapiens
tttggtgataagagt

SEQ ID NO: 1043119 - DNA, 15 bp, Homo sapiens
ttttggtgataagag

SEQ ID NO: 1043120 - DNA, 15 bp, Homo sapiens
cttttggtgataaga

SEQ ID NO: 1043121 - DNA, 15 bp, Homo sapiens
tcttttggtgataag

SEQ ID NO: 1043122 - DNA, 15 bp, Homo sapiens
gtcttttggtgataa

SEQ ID NO: 1043123 - DNA, 15 bp, Homo sapiens
tgtcttttggtgata

SEQ ID NO: 1043124 - DNA, 15 bp, Homo sapiens
gtgtcttttggtgat

SEQ ID NO: 1043125 - DNA, 15 bp, Homo sapiens
agtgtcttttggtga

SEQ ID NO: 1043126 - DNA, 15 bp, Homo sapiens
aagtgtcttttggtg

SEQ ID NO: 1043127 - DNA, 15 bp, Homo sapiens
taagtgtcttttggt

SEQ ID NO: 1043128 - DNA, 15 bp, Homo sapiens
ctaagtgtcttttgg

SEQ ID NO: 1043129 - DNA, 15 bp, Homo sapiens
cctaagtgtcttttg

SEQ ID NO: 1043130 - DNA, 15 bp, Homo sapiens
ccctaagtgtctttt

SEQ ID NO: 1043131 - DNA, 15 bp, Homo sapiens
cccctaagtgtcttt

SEQ ID NO: 1043132 - DNA, 15 bp, Homo sapiens
acccctaagtgtctt

SEQ ID NO: 1043133 - DNA, 15 bp, Homo sapiens
gacccctaagtgtct

SEQ ID NO: 1043134 - DNA, 15 bp, Homo sapiens
tgacccctaagtgtc

SEQ ID NO: 1043135 - DNA, 15 bp, Homo sapiens
atgacccctaagtgt

SEQ ID NO: 1043136 - DNA, 15 bp, Homo sapiens
tatgacccctaagtg

SEQ ID NO: 1043137 - DNA, 15 bp, Homo sapiens
ctatgacccctaagt

SEQ ID NO: 1043138 - DNA, 15 bp, Homo sapiens
cctatgacccctaag

SEQ ID NO: 1043139 - DNA, 15 bp, Homo sapiens
acctatgacccctaa

SEQ ID NO: 1043140 - DNA, 15 bp, Homo sapiens
cacctatgaccccta

SEQ ID NO: 1043141 - DNA, 15 bp, Homo sapiens
ccacctatgacccct

SEQ ID NO: 1043142 - DNA, 15 bp, Homo sapiens
accacctatgacccc

SEQ ID NO: 1043143 - DNA, 15 bp, Homo sapiens
taccacctatgaccc

SEQ ID NO: 1043144 - DNA, 15 bp, Homo sapiens
ttaccacctatgacc

SEQ ID NO: 1043145 - DNA, 15 bp, Homo sapiens
attaccacctatgac

SEQ ID NO: 1043146 - DNA, 15 bp, Homo sapiens
cattaccacctatga

SEQ ID NO: 1043147 - DNA, 15 bp, Homo sapiens
acattaccacctatg

SEQ ID NO: 1043148 - DNA, 15 bp, Homo sapiens
cacattaccacctat

SEQ ID NO: 1043149 - DNA, 15 bp, Homo sapiens
acacattaccaccta

SEQ ID NO: 1043150 - DNA, 15 bp, Homo sapiens
gacacattaccacct

SEQ ID NO: 1043151 - DNA, 15 bp, Homo sapiens
ggacacattaccacc

SEQ ID NO: 1043152 - DNA, 15 bp, Homo sapiens
aggacacattaccac

SEQ ID NO: 1043153 - DNA, 15 bp, Homo sapiens
gaggacacattacca

SEQ ID NO: 1043154 - DNA, 15 bp, Homo sapiens
agaggacacattacc

SEQ ID NO: 1043155 - DNA, 15 bp, Homo sapiens
cagaggacacattac

SEQ ID NO: 1043156 - DNA, 15 bp, Homo sapiens
gcagaggacacatta

SEQ ID NO: 1043157 - DNA, 15 bp, Homo sapiens
agcagaggacacatt

SEQ ID NO: 1043158 - DNA, 15 bp, Homo sapiens
aagcagaggacacat

SEQ ID NO: 1043159 - DNA, 15 bp, Homo sapiens
gaagcagaggacaca

SEQ ID NO: 1043160 - DNA, 15 bp, Homo sapiens
ggaagcagaggacac

SEQ ID NO: 1043161 - DNA, 15 bp, Homo sapiens
tggaagcagaggaca

SEQ ID NO: 1043162 - DNA, 15 bp, Homo sapiens
ctggaagcagaggac

SEQ ID NO: 1043163 - DNA, 15 bp, Homo sapiens
actggaagcagagga

SEQ ID NO: 1043164 - DNA, 15 bp, Homo sapiens
cactggaagcagagg

SEQ ID NO: 1043165 - DNA, 15 bp, Homo sapiens
gcactggaagcagag

SEQ ID NO: 1043166 - DNA, 15 bp, Homo sapiens
cgcactggaagcaga

SEQ ID NO: 1043167 - DNA, 15 bp, Homo sapiens
ccgcactggaagcag

SEQ ID NO: 1043168 - DNA, 15 bp, Homo sapiens
tccgcactggaagca

SEQ ID NO: 1043169 - DNA, 15 bp, Homo sapiens
ctccgcactggaagc

SEQ ID NO: 1043170 - DNA, 15 bp, Homo sapiens
gctccgcactggaag

SEQ ID NO: 1043171 - DNA, 15 bp, Homo sapiens
agctccgcactggaa

SEQ ID NO: 1043172 - DNA, 15 bp, Homo sapiens
gagctccgcactgga

SEQ ID NO: 1043173 - DNA, 15 bp, Homo sapiens
tgagctccgcactgg

SEQ ID NO: 1043174 - DNA, 15 bp, Homo sapiens
ttgagctccgcactg

SEQ ID NO: 1043175 - DNA, 15 bp, Homo sapiens
cttgagctccgcact

SEQ ID NO: 1043176 - DNA, 15 bp, Homo sapiens
ccttgagctccgcac

SEQ ID NO: 1043177 - DNA, 15 bp, Homo sapiens
tccttgagctccgca

SEQ ID NO: 1043178 - DNA, 15 bp, Homo sapiens
ttccttgagctccgc

SEQ ID NO: 1043179 - DNA, 15 bp, Homo sapiens
attccttgagctccg

SEQ ID NO: 1043180 - DNA, 15 bp, Homo sapiens
aattccttgagctcc

SEQ ID NO: 1043181 - DNA, 15 bp, Homo sapiens
aaattccttgagctc

SEQ ID NO: 1043182 - DNA, 15 bp, Homo sapiens
gaaattccttgagct

SEQ ID NO: 1043183 - DNA, 15 bp, Homo sapiens
tgaaattccttgagc

SEQ ID NO: 1043184 - DNA, 15 bp, Homo sapiens
atgaaattccttgag

SEQ ID NO: 1043185 - DNA, 15 bp, Homo sapiens
catgaaattccttga

SEQ ID NO: 1043186 - DNA, 15 bp, Homo sapiens
ccatgaaattccttg

SEQ ID NO: 1043187 - DNA, 15 bp, Homo sapiens
tccatgaaattcctt

SEQ ID NO: 1043188 - DNA, 15 bp, Homo sapiens
ctccatgaaattcct

SEQ ID NO: 1043189 - DNA, 15 bp, Homo sapiens
actccatgaaattcc

SEQ ID NO: 1043190 - DNA, 15 bp, Homo sapiens
gactccatgaaattc

SEQ ID NO: 1043191 - DNA, 15 bp, Homo sapiens
tgactccatgaaatt

SEQ ID NO: 1043192 - DNA, 15 bp, Homo sapiens
ctgactccatgaaat

SEQ ID NO: 1043193 - DNA, 15 bp, Homo sapiens
cctgactccatgaaa

SEQ ID NO: 1043194 - DNA, 15 bp, Homo sapiens
ccctgactccatgaa

SEQ ID NO: 1043195 - DNA, 15 bp, Homo sapiens
tccctgactccatga

SEQ ID NO: 1043196 - DNA, 15 bp, Homo sapiens
gtccctgactccatg

SEQ ID NO: 1043197 - DNA, 15 bp, Homo sapiens
tgtccctgactccat

SEQ ID NO: 1043198 - DNA, 15 bp, Homo sapiens
ctgtccctgactcca

SEQ ID NO: 1043199 - DNA, 15 bp, Homo sapiens
gctgtccctgactcc

SEQ ID NO: 1043200 - DNA, 15 bp, Homo sapiens
agctgtccctgactc

SEQ ID NO: 1043201 - DNA, 15 bp, Homo sapiens
cagctgtccctgact

SEQ ID NO: 1043202 - DNA, 15 bp, Homo sapiens
acagctgtccctgac

SEQ ID NO: 1043203 - DNA, 15 bp, Homo sapiens
gacagctgtccctga

SEQ ID NO: 1043204 - DNA, 15 bp, Homo sapiens
agacagctgtccctg

SEQ ID NO: 1043205 - DNA, 15 bp, Homo sapiens
cagacagctgtccct

SEQ ID NO: 1043206 - DNA, 15 bp, Homo sapiens
tcagacagctgtccc

SEQ ID NO: 1043207 - DNA, 15 bp, Homo sapiens
ttcagacagctgtcc

SEQ ID NO: 1043208 - DNA, 15 bp, Homo sapiens
tttcagacagctgtc

SEQ ID NO: 1043209 - DNA, 15 bp, Homo sapiens
ctttcagacagctgt

SEQ ID NO: 1043210 - DNA, 15 bp, Homo sapiens
cctttcagacagctg

SEQ ID NO: 1043211 - DNA, 15 bp, Homo sapiens
acctttcagacagct

SEQ ID NO: 1043212 - DNA, 15 bp, Homo sapiens
aacctttcagacagc

SEQ ID NO: 1043213 - DNA, 15 bp, Homo sapiens
caacctttcagacag

SEQ ID NO: 1043214 - DNA, 15 bp, Homo sapiens
gcaacctttcagaca

SEQ ID NO: 1043215 - DNA, 15 bp, Homo sapiens
tgcaacctttcagac

SEQ ID NO: 1043216 - DNA, 15 bp, Homo sapiens
ttgcaacctttcaga

SEQ ID NO: 1043217 - DNA, 15 bp, Homo sapiens
attgcaacctttcag

SEQ ID NO: 1043218 - DNA, 15 bp, Homo sapiens
cattgcaacctttca

SEQ ID NO: 1043219 - DNA, 15 bp, Homo sapiens
acattgcaacctttc

SEQ ID NO: 1043220 - DNA, 15 bp, Homo sapiens
gacattgcaaccttt

SEQ ID NO: 1043221 - DNA, 15 bp, Homo sapiens
tgacattgcaacctt

SEQ ID NO: 1043222 - DNA, 15 bp, Homo sapiens
gtgacattgcaacct

SEQ ID NO: 1043223 - DNA, 15 bp, Homo sapiens
ggtgacattgcaacc

SEQ ID NO: 1043224 - DNA, 15 bp, Homo sapiens
gggtgacattgcaac

SEQ ID NO: 1043225 - DNA, 15 bp, Homo sapiens
agggtgacattgcaa

SEQ ID NO: 1043226 - DNA, 15 bp, Homo sapiens
aagggtgacattgca

SEQ ID NO: 1043227 - DNA, 15 bp, Homo sapiens
aaagggtgacattgc

SEQ ID NO: 1043228 - DNA, 15 bp, Homo sapiens
aaaagggtgacattg

SEQ ID NO: 1043229 - DNA, 15 bp, Homo sapiens
gaaaagggtgacatt

SEQ ID NO: 1043230 - DNA, 15 bp, Homo sapiens
tgaaaagggtgacat

SEQ ID NO: 1043231 - DNA, 15 bp, Homo sapiens
ctgaaaagggtgaca

SEQ ID NO: 1043232 - DNA, 15 bp, Homo sapiens
gctgaaaagggtgac

SEQ ID NO: 1043233 - DNA, 15 bp, Homo sapiens
agctgaaaagggtga

SEQ ID NO: 1043234 - DNA, 15 bp, Homo sapiens
gagctgaaaagggtg

SEQ ID NO: 1043235 - DNA, 15 bp, Homo sapiens
tgagctgaaaagggt

SEQ ID NO: 1043236 - DNA, 15 bp, Homo sapiens
ctgagctgaaaaggg

SEQ ID NO: 1043237 - DNA, 15 bp, Homo sapiens
tctgagctgaaaagg

SEQ ID NO: 1043238 - DNA, 15 bp, Homo sapiens
ttctgagctgaaaag

SEQ ID NO: 1043239 - DNA, 15 bp, Homo sapiens
gttctgagctgaaaa

SEQ ID NO: 1043240 - DNA, 15 bp, Homo sapiens
ggttctgagctgaaa

SEQ ID NO: 1043241 - DNA, 15 bp, Homo sapiens
tggttctgagctgaa

SEQ ID NO: 1043242 - DNA, 15 bp, Homo sapiens
atggttctgagctga

SEQ ID NO: 1043243 - DNA, 15 bp, Homo sapiens
tatggttctgagctg

SEQ ID NO: 1043244 - DNA, 15 bp, Homo sapiens
ttatggttctgagct

SEQ ID NO: 1043245 - DNA, 15 bp, Homo sapiens
attatggttctgagc

SEQ ID NO: 1043246 - DNA, 15 bp, Homo sapiens
aattatggttctgag

SEQ ID NO: 1043247 - DNA, 15 bp, Homo sapiens
gaattatggttctga

SEQ ID NO: 1043248 - DNA, 15 bp, Homo sapiens
ggaattatggttctg

SEQ ID NO: 1043249 - DNA, 15 bp, Homo sapiens
aggaattatggttct

SEQ ID NO: 1043250 - DNA, 15 bp, Homo sapiens
aaggaattatggttc

SEQ ID NO: 1043251 - DNA, 15 bp, Homo sapiens
caaggaattatggtt

SEQ ID NO: 1043252 - DNA, 15 bp, Homo sapiens
tcaaggaattatggt

SEQ ID NO: 1043253 - DNA, 15 bp, Homo sapiens
ctcaaggaattatgg

SEQ ID NO: 1043254 - DNA, 15 bp, Homo sapiens
gctcaaggaattatg

SEQ ID NO: 1043255 - DNA, 15 bp, Homo sapiens
ggctcaaggaattat

SEQ ID NO: 1043256 - DNA, 15 bp, Homo sapiens
gggctcaaggaatta

SEQ ID NO: 1043257 - DNA, 15 bp, Homo sapiens
tgggctcaaggaatt

SEQ ID NO: 1043258 - DNA, 15 bp, Homo sapiens
tctgggctcaaggaa

SEQ ID NO: 1043259 - DNA, 15 bp, Homo sapiens
atctgggctcaagga

SEQ ID NO: 1043260 - DNA, 15 bp, Homo sapiens
tatctgggctcaagg

SEQ ID NO: 1043261 - DNA, 15 bp, Homo sapiens
ttatctgggctcaag

SEQ ID NO: 1043262 - DNA, 15 bp, Homo sapiens
gttatctgggctcaa

SEQ ID NO: 1043263 - DNA, 15 bp, Homo sapiens
tgttatctgggctca

SEQ ID NO: 1043264 - DNA, 15 bp, Homo sapiens
ctgttatctgggctc

SEQ ID NO: 1043265 - DNA, 15 bp, Homo sapiens
actgttatctgggct

SEQ ID NO: 1043266 - DNA, 15 bp, Homo sapiens
aactgttatctgggc

SEQ ID NO: 1043267 - DNA, 15 bp, Homo sapiens
gaactgttatctggg

SEQ ID NO: 1043268 - DNA, 15 bp, Homo sapiens
tgaactgttatctgg

SEQ ID NO: 1043269 - DNA, 15 bp, Homo sapiens
ttgaactgttatctg

SEQ ID NO: 1043270 - DNA, 15 bp, Homo sapiens
tttgaactgttatct

SEQ ID NO: 1043271 - DNA, 15 bp, Homo sapiens
ttttgaactgttatc

SEQ ID NO: 1043272 - DNA, 15 bp, Homo sapiens
attttgaactgttat

SEQ ID NO: 1043273 - DNA, 15 bp, Homo sapiens
aattttgaactgtta

SEQ ID NO: 1043274 - DNA, 15 bp, Homo sapiens
aaattttgaactgtt

SEQ ID NO: 1043275 - DNA, 15 bp, Homo sapiens
taaattttgaactgt

SEQ ID NO: 1043276 - DNA, 15 bp, Homo sapiens
ctaaattttgaactg

SEQ ID NO: 1043277 - DNA, 15 bp, Homo sapiens
cctaaattttgaact

SEQ ID NO: 1043278 - DNA, 15 bp, Homo sapiens
tcctaaattttgaac

SEQ ID NO: 1043279 - DNA, 15 bp, Homo sapiens
atcctaaattttgaa

SEQ ID NO: 1043280 - DNA, 15 bp, Homo sapiens
tatcctaaattttga

SEQ ID NO: 1043281 - DNA, 15 bp, Homo sapiens
atatcctaaattttg

SEQ ID NO: 1043282 - DNA, 15 bp, Homo sapiens
catatcctaaatttt

SEQ ID NO: 1043283 - DNA, 15 bp, Homo sapiens
tcatatcctaaattt

SEQ ID NO: 1043284 - DNA, 15 bp, Homo sapiens
ttcatatcctaaatt

SEQ ID NO: 1043285 - DNA, 15 bp, Homo sapiens
cttcatatcctaaat

SEQ ID NO: 1043286 - DNA, 15 bp, Homo sapiens
gcttcatatcctaaa

SEQ ID NO: 1043287 - DNA, 15 bp, Homo sapiens
ggcttcatatcctaa

SEQ ID NO: 1043288 - DNA, 15 bp, Homo sapiens
tggcttcatatccta

SEQ ID NO: 1043289 - DNA, 15 bp, Homo sapiens
ttggcttcatatcct

SEQ ID NO: 1043290 - DNA, 15 bp, Homo sapiens
tttggcttcatatcc

SEQ ID NO: 1043291 - DNA, 15 bp, Homo sapiens
ctttggcttcatatc

SEQ ID NO: 1043292 - DNA, 15 bp, Homo sapiens
gctttggcttcatat

SEQ ID NO: 1043293 - DNA, 15 bp, Homo sapiens
agctttggcttcata

SEQ ID NO: 1043294 - DNA, 15 bp, Homo sapiens
cagctttggcttcat

SEQ ID NO: 1043295 - DNA, 15 bp, Homo sapiens
tcagctttggcttca

SEQ ID NO: 1043296 - DNA, 15 bp, Homo sapiens
ttcagctttggcttc

SEQ ID NO: 1043297 - DNA, 15 bp, Homo sapiens
gttcagctttggctt

SEQ ID NO: 1043298 - DNA, 15 bp, Homo sapiens
agttcagctttggct

SEQ ID NO: 1043299 - DNA, 15 bp, Homo sapiens
gagttcagctttggc

SEQ ID NO: 1043300 - DNA, 15 bp, Homo sapiens
agagttcagctttgg

SEQ ID NO: 1043301 - DNA, 15 bp, Homo sapiens
tagagttcagctttg

SEQ ID NO: 1043302 - DNA, 15 bp, Homo sapiens
ctagagttcagcttt

SEQ ID NO: 1043303 - DNA, 15 bp, Homo sapiens
gctagagttcagctt

SEQ ID NO: 1043304 - DNA, 15 bp, Homo sapiens
agctagagttcagct

SEQ ID NO: 1043305 - DNA, 15 bp, Homo sapiens
cagctagagttcagc

SEQ ID NO: 1043306 - DNA, 15 bp, Homo sapiens
tcagctagagttcag

SEQ ID NO: 1043307 - DNA, 15 bp, Homo sapiens
ttcagctagagttca

SEQ ID NO: 1043308 - DNA, 15 bp, Homo sapiens
tttcagctagagttc

SEQ ID NO: 1043309 - DNA, 15 bp, Homo sapiens
atttcagctagagtt

SEQ ID NO: 1043310 - DNA, 15 bp, Homo sapiens
gatttcagctagagt

SEQ ID NO: 1043311 - DNA, 15 bp, Homo sapiens
tgatttcagctagag

SEQ ID NO: 1043312 - DNA, 15 bp, Homo sapiens
ttgatttcagctaga

SEQ ID NO: 1043313 - DNA, 15 bp, Homo sapiens
cttgatttcagctag

SEQ ID NO: 1043314 - DNA, 15 bp, Homo sapiens
tcttgatttcagcta

SEQ ID NO: 1043315 - DNA, 15 bp, Homo sapiens
ctcttgatttcagct

SEQ ID NO: 1043316 - DNA, 15 bp, Homo sapiens
actcttgatttcagc

SEQ ID NO: 1043317 - DNA, 15 bp, Homo sapiens
cactcttgatttcag

SEQ ID NO: 1043318 - DNA, 15 bp, Homo sapiens
ccactcttgatttca

SEQ ID NO: 1043319 - DNA, 15 bp, Homo sapiens
tccactcttgatttc

SEQ ID NO: 1043320 - DNA, 15 bp, Homo sapiens
atccactcttgattt

SEQ ID NO: 1043321 - DNA, 15 bp, Homo sapiens
tatccactcttgatt

SEQ ID NO: 1043322 - DNA, 15 bp, Homo sapiens
atatccactcttgat

SEQ ID NO: 1043323 - DNA, 15 bp, Homo sapiens
tatatccactcttga

SEQ ID NO: 1043324 - DNA, 15 bp, Homo sapiens
ttatatccactcttg

SEQ ID NO: 1043325 - DNA, 15 bp, Homo sapiens
attatatccactctt

SEQ ID NO: 1043326 - DNA, 15 bp, Homo sapiens
tattatatccactct

SEQ ID NO: 1043327 - DNA, 15 bp, Homo sapiens
ttattatatccactc

SEQ ID NO: 1043328 - DNA, 15 bp, Homo sapiens
gttattatatccact

SEQ ID NO: 1043329 - DNA, 15 bp, Homo sapiens
ggttattatatccac

SEQ ID NO: 1043330 - DNA, 15 bp, Homo sapiens
tggttattatatcca

SEQ ID NO: 1043331 - DNA, 15 bp, Homo sapiens
ttggttattatatcc

SEQ ID NO: 1043332 - DNA, 15 bp, Homo sapiens
cttggttattatatc

SEQ ID NO: 1043333 - DNA, 15 bp, Homo sapiens
tcttggttattatat

SEQ ID NO: 1043334 - DNA, 15 bp, Homo sapiens
ttcttggttattata

SEQ ID NO: 1043335 - DNA, 15 bp, Homo sapiens
tttcttggttattat

SEQ ID NO: 1043336 - DNA, 15 bp, Homo sapiens
gtttcttggttatta

SEQ ID NO: 1043337 - DNA, 15 bp, Homo sapiens
tgtttcttggttatt

SEQ ID NO: 1043338 - DNA, 15 bp, Homo sapiens
ttgtttcttggttat

SEQ ID NO: 1043339 - DNA, 15 bp, Homo sapiens
tttgtttcttggtta

SEQ ID NO: 1043340 - DNA, 15 bp, Homo sapiens
atttgtttcttggtt

SEQ ID NO: 1043341 - DNA, 15 bp, Homo sapiens
catttgtttcttggt

SEQ ID NO: 1043342 - DNA, 15 bp, Homo sapiens
ccatttgtttcttgg

SEQ ID NO: 1043343 - DNA, 15 bp, Homo sapiens
accatttgtttcttg

SEQ ID NO: 1043344 - DNA, 15 bp, Homo sapiens
aaccatttgtttctt

SEQ ID NO: 1043345 - DNA, 15 bp, Homo sapiens
gaaccatttgtttct

SEQ ID NO: 1043346 - DNA, 15 bp, Homo sapiens
agaaccatttgtttc

SEQ ID NO: 1043347 - DNA, 15 bp, Homo sapiens
cagaaccatttgttt

SEQ ID NO: 1043348 - DNA, 15 bp, Homo sapiens
tcagaaccatttgtt

SEQ ID NO: 1043349 - DNA, 15 bp, Homo sapiens
gtcagaaccatttgt

SEQ ID NO: 1043350 - DNA, 15 bp, Homo sapiens
tgtcagaaccatttg

SEQ ID NO: 1043351 - DNA, 15 bp, Homo sapiens
ttgtcagaaccattt

SEQ ID NO: 1043352 - DNA, 15 bp, Homo sapiens
cttgtcagaaccatt

SEQ ID NO: 1043353 - DNA, 15 bp, Homo sapiens
gcttgtcagaaccat

SEQ ID NO: 1043354 - DNA, 15 bp, Homo sapiens
tgcttgtcagaacca

SEQ ID NO: 1043355 - DNA, 15 bp, Homo sapiens
gtgcttgtcagaacc

SEQ ID NO: 1043356 - DNA, 15 bp, Homo sapiens
tgtgcttgtcagaac

SEQ ID NO: 1043357 - DNA, 15 bp, Homo sapiens
ctgtgcttgtcagaa

SEQ ID NO: 1043358 - DNA, 15 bp, Homo sapiens
gctgtgcttgtcaga

SEQ ID NO: 1043359 - DNA, 15 bp, Homo sapiens
agctgtgcttgtcag

SEQ ID NO: 1043360 - DNA, 15 bp, Homo sapiens
aagctgtgcttgtca

SEQ ID NO: 1043361 - DNA, 15 bp, Homo sapiens
aaagctgtgcttgtc

SEQ ID NO: 1043362 - DNA, 15 bp, Homo sapiens
taaagctgtgcttgt

SEQ ID NO: 1043363 - DNA, 15 bp, Homo sapiens
gtaaagctgtgcttg

SEQ ID NO: 1043364 - DNA, 15 bp, Homo sapiens
agtaaagctgtgctt

SEQ ID NO: 1043365 - DNA, 15 bp, Homo sapiens
gagtaaagctgtgct

SEQ ID NO: 1043366 - DNA, 15 bp, Homo sapiens
agagtaaagctgtgc

SEQ ID NO: 1043367 - DNA, 15 bp, Homo sapiens
cagagtaaagctgtg

SEQ ID NO: 1043368 - DNA, 15 bp, Homo sapiens
tcagagtaaagctgt

SEQ ID NO: 1043369 - DNA, 15 bp, Homo sapiens
ctcagagtaaagctg

SEQ ID NO: 1043370 - DNA, 15 bp, Homo sapiens
gctcagagtaaagct

SEQ ID NO: 1043371 - DNA, 15 bp, Homo sapiens
tgctcagagtaaagc

SEQ ID NO: 1043372 - DNA, 15 bp, Homo sapiens
atgctcagagtaaag

SEQ ID NO: 1043373 - DNA, 15 bp, Homo sapiens
catgctcagagtaaa

SEQ ID NO: 1043374 - DNA, 15 bp, Homo sapiens
tcatgctcagagtaa

SEQ ID NO: 1043375 - DNA, 15 bp, Homo sapiens
gtcatgctcagagta

SEQ ID NO: 1043376 - DNA, 15 bp, Homo sapiens
agtcatgctcagagt

SEQ ID NO: 1043377 - DNA, 15 bp, Homo sapiens
gagtcatgctcagag

SEQ ID NO: 1043378 - DNA, 15 bp, Homo sapiens
tgagtcatgctcaga

SEQ ID NO: 1043379 - DNA, 15 bp, Homo sapiens
ttgagtcatgctcag

SEQ ID NO: 1043380 - DNA, 15 bp, Homo sapiens
cttgagtcatgctca

SEQ ID NO: 1043381 - DNA, 15 bp, Homo sapiens
ccttgagtcatgctc

SEQ ID NO: 1043382 - DNA, 15 bp, Homo sapiens
cccttgagtcatgct

SEQ ID NO: 1043383 - DNA, 15 bp, Homo sapiens
gcccttgagtcatgc

SEQ ID NO: 1043384 - DNA, 15 bp, Homo sapiens
tgcccttgagtcatg

SEQ ID NO: 1043385 - DNA, 15 bp, Homo sapiens
atgcccttgagtcat

SEQ ID NO: 1043386 - DNA, 15 bp, Homo sapiens
gatgcccttgagtca

SEQ ID NO: 1043387 - DNA, 15 bp, Homo sapiens
agatgcccttgagtc

SEQ ID NO: 1043388 - DNA, 15 bp, Homo sapiens
cagatgcccttgagt

SEQ ID NO: 1043389 - DNA, 15 bp, Homo sapiens
ccagatgcccttgag

SEQ ID NO: 1043390 - DNA, 15 bp, Homo sapiens
accagatgcccttga

SEQ ID NO: 1043391 - DNA, 15 bp, Homo sapiens
taccagatgcccttg

SEQ ID NO: 1043392 - DNA, 15 bp, Homo sapiens
ctaccagatgccctt

SEQ ID NO: 1043393 - DNA, 15 bp, Homo sapiens
tctaccagatgccct

SEQ ID NO: 1043394 - DNA, 15 bp, Homo sapiens
ttctaccagatgccc

SEQ ID NO: 1043395 - DNA, 15 bp, Homo sapiens
tttctaccagatgcc

SEQ ID NO: 1043396 - DNA, 15 bp, Homo sapiens
ttttctaccagatgc

SEQ ID NO: 1043397 - DNA, 15 bp, Homo sapiens
attttctaccagatg

SEQ ID NO: 1043398 - DNA, 15 bp, Homo sapiens
cattttctaccagat

SEQ ID NO: 1043399 - DNA, 15 bp, Homo sapiens
tcattttctaccaga

SEQ ID NO: 1043400 - DNA, 15 bp, Homo sapiens
ttcattttctaccag

SEQ ID NO: 1043401 - DNA, 15 bp, Homo sapiens
cttcattttctacca

SEQ ID NO: 1043402 - DNA, 15 bp, Homo sapiens
tcttcattttctacc

SEQ ID NO: 1043403 - DNA, 15 bp, Homo sapiens
ttcttcattttctac

SEQ ID NO: 1043404 - DNA, 15 bp, Homo sapiens
cttcttcattttcta

SEQ ID NO: 1043405 - DNA, 15 bp, Homo sapiens
ccttcttcattttct

SEQ ID NO: 1043406 - DNA, 15 bp, Homo sapiens
tccttcttcattttc

SEQ ID NO: 1043407 - DNA, 15 bp, Homo sapiens
atccttcttcatttt

SEQ ID NO: 1043408 - DNA, 15 bp, Homo sapiens
gatccttcttcattt

SEQ ID NO: 1043409 - DNA, 15 bp, Homo sapiens
ggatccttcttcatt

SEQ ID NO: 1043410 - DNA, 15 bp, Homo sapiens
gggatccttcttcat

SEQ ID NO: 1043411 - DNA, 15 bp, Homo sapiens
tgggatccttcttca

SEQ ID NO: 1043412 - DNA, 15 bp, Homo sapiens
ctgggatccttcttc

SEQ ID NO: 1043413 - DNA, 15 bp, Homo sapiens
gctgggatccttctt

SEQ ID NO: 1043414 - DNA, 15 bp, Homo sapiens
tgctgggatccttct

SEQ ID NO: 1043415 - DNA, 15 bp, Homo sapiens
ctgctgggatccttc

SEQ ID NO: 1043416 - DNA, 15 bp, Homo sapiens
tctgctgggatcctt

SEQ ID NO: 1043417 - DNA, 15 bp, Homo sapiens
atctgctgggatcct

SEQ ID NO: 1043418 - DNA, 15 bp, Homo sapiens
catctgctgggatcc

SEQ ID NO: 1043419 - DNA, 15 bp, Homo sapiens
acatctgctgggatc

SEQ ID NO: 1043420 - DNA, 15 bp, Homo sapiens
aacatctgctgggat

SEQ ID NO: 1043421 - DNA, 15 bp, Homo sapiens
taacatctgctggga

SEQ ID NO: 1043422 - DNA, 15 bp, Homo sapiens
ctaacatctgctggg

SEQ ID NO: 1043423 - DNA, 15 bp, Homo sapiens
cctaacatctgctgg

SEQ ID NO: 1043424 - DNA, 15 bp, Homo sapiens
ccctaacatctgctg

SEQ ID NO: 1043425 - DNA, 15 bp, Homo sapiens
gccctaacatctgct

SEQ ID NO: 1043426 - DNA, 15 bp, Homo sapiens
agccctaacatctgc

SEQ ID NO: 1043427 - DNA, 15 bp, Homo sapiens
tagccctaacatctg

SEQ ID NO: 1043428 - DNA, 15 bp, Homo sapiens
ctagccctaacatct

SEQ ID NO: 1043429 - DNA, 15 bp, Homo sapiens
cctagccctaacatc

SEQ ID NO: 1043430 - DNA, 15 bp, Homo sapiens
ccctagccctaacat

SEQ ID NO: 1043431 - DNA, 15 bp, Homo sapiens
tccctagccctaaca

SEQ ID NO: 1043432 - DNA, 15 bp, Homo sapiens
ctccctagccctaac

SEQ ID NO: 1043433 - DNA, 15 bp, Homo sapiens
tctccctagccctaa

SEQ ID NO: 1043434 - DNA, 15 bp, Homo sapiens
atctccctagcccta

SEQ ID NO: 1043435 - DNA, 15 bp, Homo sapiens
gatctccctagccct

SEQ ID NO: 1043436 - DNA, 15 bp, Homo sapiens
ggatctccctagccc

SEQ ID NO: 1043437 - DNA, 15 bp, Homo sapiens
gggatctccctagcc

SEQ ID NO: 1043438 - DNA, 15 bp, Homo sapiens
ggggatctccctagc

SEQ ID NO: 1043439 - DNA, 15 bp, Homo sapiens
aggggatctccctag

SEQ ID NO: 1043440 - DNA, 15 bp, Homo sapiens
gaggggatctcccta

SEQ ID NO: 1043441 - DNA, 15 bp, Homo sapiens
cgaggggatctccct

SEQ ID NO: 1043442 - DNA, 15 bp, Homo sapiens
ccgaggggatctccc

SEQ ID NO: 1043443 - DNA, 15 bp, Homo sapiens
accgaggggatctcc

SEQ ID NO: 1043444 - DNA, 15 bp, Homo sapiens
aaccgaggggatctc

SEQ ID NO: 1043445 - DNA, 15 bp, Homo sapiens
caaccgaggggatct

SEQ ID NO: 1043446 - DNA, 15 bp, Homo sapiens
ccaaccgaggggatc

SEQ ID NO: 1043447 - DNA, 15 bp, Homo sapiens
cccaaccgaggggat

SEQ ID NO: 1043448 - DNA, 15 bp, Homo sapiens
ccccaaccgagggga

SEQ ID NO: 1043449 - DNA, 15 bp, Homo sapiens
cccccaaccgagggg

SEQ ID NO: 1043450 - DNA, 15 bp, Homo sapiens
tcccccaaccgaggg

SEQ ID NO: 1043451 - DNA, 15 bp, Homo sapiens
atcccccaaccgagg

SEQ ID NO: 1043452 - DNA, 15 bp, Homo sapiens
catcccccaaccgag

SEQ ID NO: 1043453 - DNA, 15 bp, Homo sapiens
acatcccccaaccga

SEQ ID NO: 1043454 - DNA, 15 bp, Homo sapiens
tacatcccccaaccg

SEQ ID NO: 1043455 - DNA, 15 bp, Homo sapiens
ttacatcccccaacc

SEQ ID NO: 1043456 - DNA, 15 bp, Homo sapiens
cttacatcccccaac

SEQ ID NO: 1043457 - DNA, 15 bp, Homo sapiens
acttacatcccccaa

SEQ ID NO: 1043458 - DNA, 15 bp, Homo sapiens
cacttacatccccca

SEQ ID NO: 1043459 - DNA, 15 bp, Homo sapiens
acacttacatccccc

SEQ ID NO: 1043460 - DNA, 15 bp, Homo sapiens
aacacttacatcccc

SEQ ID NO: 1043461 - DNA, 15 bp, Homo sapiens
aaacacttacatccc

SEQ ID NO: 1043462 - DNA, 15 bp, Homo sapiens
aaaacacttacatcc

SEQ ID NO: 1043463 - DNA, 15 bp, Homo sapiens
taaaacacttacatc

SEQ ID NO: 1043464 - DNA, 15 bp, Homo sapiens
ttaaaacacttacat

SEQ ID NO: 1043465 - DNA, 15 bp, Homo sapiens
attaaaacacttaca

SEQ ID NO: 1043466 - DNA, 15 bp, Homo sapiens
tattaaaacacttac

SEQ ID NO: 1043467 - DNA, 15 bp, Homo sapiens
atattaaaacactta

SEQ ID NO: 1043468 - DNA, 15 bp, Homo sapiens
aatattaaaacactt

SEQ ID NO: 1043469 - DNA, 15 bp, Homo sapiens
caatattaaaacact

SEQ ID NO: 1043470 - DNA, 15 bp, Homo sapiens
acaatattaaaacac

SEQ ID NO: 1043471 - DNA, 15 bp, Homo sapiens
cacaatattaaaaca

SEQ ID NO: 1043472 - DNA, 15 bp, Homo sapiens
acacaatattaaaac

SEQ ID NO: 1043473 - DNA, 15 bp, Homo sapiens
cacacaatattaaaa

SEQ ID NO: 1043474 - DNA, 15 bp, Homo sapiens
ccacacaatattaaa

SEQ ID NO: 1043475 - DNA, 15 bp, Homo sapiens
cccacacaatattaa

SEQ ID NO: 1043476 - DNA, 15 bp, Homo sapiens
gcccacacaatatta

SEQ ID NO: 1043477 - DNA, 15 bp, Homo sapiens
tgcccacacaatatt

SEQ ID NO: 1043478 - DNA, 15 bp, Homo sapiens
ttgcccacacaatat

SEQ ID NO: 1043479 - DNA, 15 bp, Homo sapiens
gttgcccacacaata

SEQ ID NO: 1043480 - DNA, 15 bp, Homo sapiens
agttgcccacacaat

SEQ ID NO: 1043481 - DNA, 15 bp, Homo sapiens
gagttgcccacacaa

SEQ ID NO: 1043482 - DNA, 15 bp, Homo sapiens
agagttgcccacaca

SEQ ID NO: 1043483 - DNA, 15 bp, Homo sapiens
cagagttgcccacac

SEQ ID NO: 1043484 - DNA, 15 bp, Homo sapiens
gcagagttgcccaca

SEQ ID NO: 1043485 - DNA, 15 bp, Homo sapiens
agcagagttgcccac

SEQ ID NO: 1043486 - DNA, 15 bp, Homo sapiens
aagcagagttgccca

SEQ ID NO: 1043487 - DNA, 15 bp, Homo sapiens
aaagcagagttgccc

SEQ ID NO: 1043488 - DNA, 15 bp, Homo sapiens
caaagcagagttgcc

SEQ ID NO: 1043489 - DNA, 15 bp, Homo sapiens
tcaaagcagagttgc

SEQ ID NO: 1043490 - DNA, 15 bp, Homo sapiens
ttcaaagcagagttg

SEQ ID NO: 1043491 - DNA, 15 bp, Homo sapiens
attcaaagcagagtt

SEQ ID NO: 1043492 - DNA, 15 bp, Homo sapiens
cattcaaagcagagt

SEQ ID NO: 1043493 - DNA, 15 bp, Homo sapiens
acattcaaagcagag

SEQ ID NO: 1043494 - DNA, 15 bp, Homo sapiens
tacattcaaagcaga

SEQ ID NO: 1043495 - DNA, 15 bp, Homo sapiens
atacattcaaagcag

SEQ ID NO: 1043496 - DNA, 15 bp, Homo sapiens
catacattcaaagca

SEQ ID NO: 1043497 - DNA, 15 bp, Homo sapiens
acatacattcaaagc

SEQ ID NO: 1043498 - DNA, 15 bp, Homo sapiens
gacatacattcaaag

SEQ ID NO: 1043499 - DNA, 15 bp, Homo sapiens
agacatacattcaaa

SEQ ID NO: 1043500 - DNA, 15 bp, Homo sapiens
cagacatacattcaa

SEQ ID NO: 1043501 - DNA, 15 bp, Homo sapiens
ccagacatacattca

SEQ ID NO: 1043502 - DNA, 15 bp, Homo sapiens
tccagacatacattc

SEQ ID NO: 1043503 - DNA, 15 bp, Homo sapiens
ctccagacatacatt

SEQ ID NO: 1043504 - DNA, 15 bp, Homo sapiens
cctccagacatacat

SEQ ID NO: 1043505 - DNA, 15 bp, Homo sapiens
gcctccagacataca

SEQ ID NO: 1043506 - DNA, 15 bp, Homo sapiens
tgcctccagacatac

SEQ ID NO: 1043507 - DNA, 15 bp, Homo sapiens
gtgcctccagacata

SEQ ID NO: 1043508 - DNA, 15 bp, Homo sapiens
ggtgcctccagacat

SEQ ID NO: 1043509 - DNA, 15 bp, Homo sapiens
aggtgcctccagaca

SEQ ID NO: 1043510 - DNA, 15 bp, Homo sapiens
taggtgcctccagac

SEQ ID NO: 1043511 - DNA, 15 bp, Homo sapiens
gtaggtgcctccaga

SEQ ID NO: 1043512 - DNA, 15 bp, Homo sapiens
tgtaggtgcctccag

SEQ ID NO: 1043513 - DNA, 15 bp, Homo sapiens
gtgtaggtgcctcca

SEQ ID NO: 1043514 - DNA, 15 bp, Homo sapiens
ggtgtaggtgcctcc

SEQ ID NO: 1043515 - DNA, 15 bp, Homo sapiens
tggtgtaggtgcctc

SEQ ID NO: 1043516 - DNA, 15 bp, Homo sapiens
atggtgtaggtgcct

SEQ ID NO: 1043517 - DNA, 15 bp, Homo sapiens
gatggtgtaggtgcc

SEQ ID NO: 1043518 - DNA, 15 bp, Homo sapiens
ggatggtgtaggtgc

SEQ ID NO: 1043519 - DNA, 15 bp, Homo sapiens
tggatggtgtaggtg

SEQ ID NO: 1043520 - DNA, 15 bp, Homo sapiens
ttggatggtgtaggt

SEQ ID NO: 1043521 - DNA, 15 bp, Homo sapiens
tttggatggtgtagg

SEQ ID NO: 1043522 - DNA, 15 bp, Homo sapiens
ctttggatggtgtag

SEQ ID NO: 1043523 - DNA, 15 bp, Homo sapiens
gctttggatggtgta

SEQ ID NO: 1043524 - DNA, 15 bp, Homo sapiens
ggctttggatggtgt

SEQ ID NO: 1043525 - DNA, 15 bp, Homo sapiens
aggctttggatggtg

SEQ ID NO: 1043526 - DNA, 15 bp, Homo sapiens
aaggctttggatggt

SEQ ID NO: 1043527 - DNA, 15 bp, Homo sapiens
gaaggctttggatgg

SEQ ID NO: 1043528 - DNA, 15 bp, Homo sapiens
agaaggctttggatg

SEQ ID NO: 1043529 - DNA, 15 bp, Homo sapiens
cagaaggctttggat

SEQ ID NO: 1043530 - DNA, 15 bp, Homo sapiens
ccagaaggctttgga

SEQ ID NO: 1043531 - DNA, 15 bp, Homo sapiens
accagaaggctttgg

SEQ ID NO: 1043532 - DNA, 15 bp, Homo sapiens
caccagaaggctttg

SEQ ID NO: 1043533 - DNA, 15 bp, Homo sapiens
gcaccagaaggcttt

SEQ ID NO: 1043534 - DNA, 15 bp, Homo sapiens
tgcaccagaaggctt

SEQ ID NO: 1043535 - DNA, 15 bp, Homo sapiens
ttgcaccagaaggct

SEQ ID NO: 1043536 - DNA, 15 bp, Homo sapiens
tttgcaccagaaggc

SEQ ID NO: 1043537 - DNA, 15 bp, Homo sapiens
ttttgcaccagaagg

SEQ ID NO: 1043538 - DNA, 15 bp, Homo sapiens
cttttgcaccagaag

SEQ ID NO: 1043539 - DNA, 15 bp, Homo sapiens
gcttttgcaccagaa

SEQ ID NO: 1043540 - DNA, 15 bp, Homo sapiens
tgcttttgcaccaga

SEQ ID NO: 1043541 - DNA, 15 bp, Homo sapiens
ctgcttttgcaccag

SEQ ID NO: 1043542 - DNA, 15 bp, Homo sapiens
cctgcttttgcacca

SEQ ID NO: 1043543 - DNA, 15 bp, Homo sapiens
tcctgcttttgcacc

SEQ ID NO: 1043544 - DNA, 15 bp, Homo sapiens
gtcctgcttttgcac

SEQ ID NO: 1043545 - DNA, 15 bp, Homo sapiens
agtcctgcttttgca

SEQ ID NO: 1043546 - DNA, 15 bp, Homo sapiens
gagtcctgcttttgc

SEQ ID NO: 1043547 - DNA, 15 bp, Homo sapiens
ggagtcctgcttttg

SEQ ID NO: 1043548 - DNA, 15 bp, Homo sapiens
aggagtcctgctttt

SEQ ID NO: 1043549 - DNA, 15 bp, Homo sapiens
taggagtcctgcttt

SEQ ID NO: 1043550 - DNA, 15 bp, Homo sapiens
ctaggagtcctgctt

SEQ ID NO: 1043551 - DNA, 15 bp, Homo sapiens
tctaggagtcctgct

SEQ ID NO: 1043552 - DNA, 15 bp, Homo sapiens
ctctaggagtcctgc

SEQ ID NO: 1043553 - DNA, 15 bp, Homo sapiens
actctaggagtcctg

SEQ ID NO: 1043554 - DNA, 15 bp, Homo sapiens
tactctaggagtcct

SEQ ID NO: 1043555 - DNA, 15 bp, Homo sapiens
atactctaggagtcc

SEQ ID NO: 1043556 - DNA, 15 bp, Homo sapiens
tatactctaggagtc

SEQ ID NO: 1043557 - DNA, 15 bp, Homo sapiens
atatactctaggagt

SEQ ID NO: 1043558 - DNA, 15 bp, Homo sapiens
aatatactctaggag

SEQ ID NO: 1043559 - DNA, 15 bp, Homo sapiens
gaatatactctagga

SEQ ID NO: 1043560 - DNA, 15 bp, Homo sapiens
ggaatatactctagg

SEQ ID NO: 1043561 - DNA, 15 bp, Homo sapiens
tggaatatactctag

SEQ ID NO: 1043562 - DNA, 15 bp, Homo sapiens
ctggaatatactcta

SEQ ID NO: 1043563 - DNA, 15 bp, Homo sapiens
actggaatatactct

SEQ ID NO: 1043564 - DNA, 15 bp, Homo sapiens
tactggaatatactc

SEQ ID NO: 1043565 - DNA, 15 bp, Homo sapiens
atactggaatatact

SEQ ID NO: 1043566 - DNA, 15 bp, Homo sapiens
aatactggaatatac

SEQ ID NO: 1043567 - DNA, 15 bp, Homo sapiens
aaatactggaatata

SEQ ID NO: 1043568 - DNA, 15 bp, Homo sapiens
aaaatactggaatat

SEQ ID NO: 1043569 - DNA, 15 bp, Homo sapiens
aaaaatactggaata

SEQ ID NO: 1043570 - DNA, 15 bp, Homo sapiens
aaaaaatactggaat

SEQ ID NO: 1043571 - DNA, 15 bp, Homo sapiens
gaaaaaatactggaa

SEQ ID NO: 1043572 - DNA, 15 bp, Homo sapiens
ggaaaaaatactgga

SEQ ID NO: 1043573 - DNA, 15 bp, Homo sapiens
gggaaaaaatactgg

SEQ ID NO: 1043574 - DNA, 15 bp, Homo sapiens
agggaaaaaatactg

SEQ ID NO: 1043575 - DNA, 15 bp, Homo sapiens
cagggaaaaaatact

SEQ ID NO: 1043576 - DNA, 15 bp, Homo sapiens
tcagggaaaaaatac

SEQ ID NO: 1043577 - DNA, 15 bp, Homo sapiens
atcagggaaaaaata

SEQ ID NO: 1043578 - DNA, 15 bp, Homo sapiens
gatcagggaaaaaat

SEQ ID NO: 1043579 - DNA, 15 bp, Homo sapiens
ggatcagggaaaaaa

SEQ ID NO: 1043580 - DNA, 15 bp, Homo sapiens
gggatcagggaaaaa

SEQ ID NO: 1043581 - DNA, 15 bp, Homo sapiens
tgggatcagggaaaa

SEQ ID NO: 1043582 - DNA, 15 bp, Homo sapiens
ctgggatcagggaaa

SEQ ID NO: 1043583 - DNA, 15 bp, Homo sapiens
gctgggatcagggaa

SEQ ID NO: 1043584 - DNA, 15 bp, Homo sapiens
agctgggatcaggga

SEQ ID NO: 1043585 - DNA, 15 bp, Homo sapiens
cagctgggatcaggg

SEQ ID NO: 1043586 - DNA, 15 bp, Homo sapiens
tcagctgggatcagg

SEQ ID NO: 1043587 - DNA, 15 bp, Homo sapiens
ttcagctgggatcag

SEQ ID NO: 1043588 - DNA, 15 bp, Homo sapiens
tttcagctgggatca

SEQ ID NO: 1043589 - DNA, 15 bp, Homo sapiens
ttttcagctgggatc

SEQ ID NO: 1043590 - DNA, 15 bp, Homo sapiens
gttttcagctgggat

SEQ ID NO: 1043591 - DNA, 15 bp, Homo sapiens
tgttttcagctggga

SEQ ID NO: 1043592 - DNA, 15 bp, Homo sapiens
ctgttttcagctggg

SEQ ID NO: 1043593 - DNA, 15 bp, Homo sapiens
gctgttttcagctgg

SEQ ID NO: 1043594 - DNA, 15 bp, Homo sapiens
ggctgttttcagctg

SEQ ID NO: 1043595 - DNA, 15 bp, Homo sapiens
tggctgttttcagct

SEQ ID NO: 1043596 - DNA, 15 bp, Homo sapiens
atggctgttttcagc

SEQ ID NO: 1043597 - DNA, 15 bp, Homo sapiens
tatggctgttttcag

SEQ ID NO: 1043598 - DNA, 15 bp, Homo sapiens
ctatggctgttttca

SEQ ID NO: 1043599 - DNA, 15 bp, Homo sapiens
tctatggctgttttc

SEQ ID NO: 1043600 - DNA, 15 bp, Homo sapiens
ttctatggctgtttt

SEQ ID NO: 1043601 - DNA, 15 bp, Homo sapiens
cttctatggctgttt

SEQ ID NO: 1043602 - DNA, 15 bp, Homo sapiens
tcttctatggctgtt

SEQ ID NO: 1043603 - DNA, 15 bp, Homo sapiens
ctcttctatggctgt

SEQ ID NO: 1043604 - DNA, 15 bp, Homo sapiens
gctcttctatggctg

SEQ ID NO: 1043605 - DNA, 15 bp, Homo sapiens
ggctcttctatggct

SEQ ID NO: 1043606 - DNA, 15 bp, Homo sapiens
aggctcttctatggc

SEQ ID NO: 1043607 - DNA, 15 bp, Homo sapiens
gaggctcttctatgg

SEQ ID NO: 1043608 - DNA, 15 bp, Homo sapiens
ggaggctcttctatg

SEQ ID NO: 1043609 - DNA, 15 bp, Homo sapiens
gggaggctcttctat

SEQ ID NO: 1043610 - DNA, 15 bp, Homo sapiens
agggaggctcttcta

SEQ ID NO: 1043611 - DNA, 15 bp, Homo sapiens
aagggaggctcttct

SEQ ID NO: 1043612 - DNA, 15 bp, Homo sapiens
aaagggaggctcttc

SEQ ID NO: 1043613 - DNA, 15 bp, Homo sapiens
aaaagggaggctctt

SEQ ID NO: 1043614 - DNA, 15 bp, Homo sapiens
aaaaagggaggctct

SEQ ID NO: 1043615 - DNA, 15 bp, Homo sapiens
caaaaagggaggctc

SEQ ID NO: 1043616 - DNA, 15 bp, Homo sapiens
tcaaaaagggaggct

SEQ ID NO: 1043617 - DNA, 15 bp, Homo sapiens
ttcaaaaagggaggc

SEQ ID NO: 1043618 - DNA, 15 bp, Homo sapiens
attcaaaaagggagg

SEQ ID NO: 1043619 - DNA, 15 bp, Homo sapiens
aattcaaaaagggag

SEQ ID NO: 1043620 - DNA, 15 bp, Homo sapiens
taattcaaaaaggga

SEQ ID NO: 1043621 - DNA, 15 bp, Homo sapiens
ataattcaaaaaggg

SEQ ID NO: 1043622 - DNA, 15 bp, Homo sapiens
cataattcaaaaagg

SEQ ID NO: 1043623 - DNA, 15 bp, Homo sapiens
ccataattcaaaaag

SEQ ID NO: 1043624 - DNA, 15 bp, Homo sapiens
gccataattcaaaaa

SEQ ID NO: 1043625 - DNA, 15 bp, Homo sapiens
agccataattcaaaa

SEQ ID NO: 1043626 - DNA, 15 bp, Homo sapiens
cagccataattcaaa

SEQ ID NO: 1043627 - DNA, 15 bp, Homo sapiens
acagccataattcaa

SEQ ID NO: 1043628 - DNA, 15 bp, Homo sapiens
gacagccataattca

SEQ ID NO: 1043629 - DNA, 15 bp, Homo sapiens
agacagccataattc

SEQ ID NO: 1043630 - DNA, 15 bp, Homo sapiens
cagacagccataatt

SEQ ID NO: 1043631 - DNA, 15 bp, Homo sapiens
acagacagccataat

SEQ ID NO: 1043632 - DNA, 15 bp, Homo sapiens
gacagacagccataa

SEQ ID NO: 1043633 - DNA, 15 bp, Homo sapiens
ggacagacagccata

SEQ ID NO: 1043634 - DNA, 15 bp, Homo sapiens
cggacagacagccat

SEQ ID NO: 1043635 - DNA, 15 bp, Homo sapiens
gcggacagacagcca

SEQ ID NO: 1043636 - DNA, 15 bp, Homo sapiens
agcggacagacagcc

SEQ ID NO: 1043637 - DNA, 15 bp, Homo sapiens
cagcggacagacagc

SEQ ID NO: 1043638 - DNA, 15 bp, Homo sapiens
ccagcggacagacag

SEQ ID NO: 1043639 - DNA, 15 bp, Homo sapiens
cccagcggacagaca

SEQ ID NO: 1043640 - DNA, 15 bp, Homo sapiens
ccccagcggacagac

SEQ ID NO: 1043641 - DNA, 15 bp, Homo sapiens
accccagcggacaga

SEQ ID NO: 1043642 - DNA, 15 bp, Homo sapiens
caccccagcggacag

SEQ ID NO: 1043643 - DNA, 15 bp, Homo sapiens
ccaccccagcggaca

SEQ ID NO: 1043644 - DNA, 15 bp, Homo sapiens
tccaccccagcggac

SEQ ID NO: 1043645 - DNA, 15 bp, Homo sapiens
ctccaccccagcgga

SEQ ID NO: 1043646 - DNA, 15 bp, Homo sapiens
tctccaccccagcgg

SEQ ID NO: 1043647 - DNA, 15 bp, Homo sapiens
ttctccaccccagcg

SEQ ID NO: 1043648 - DNA, 15 bp, Homo sapiens
attctccaccccagc

SEQ ID NO: 1043649 - DNA, 15 bp, Homo sapiens
cattctccaccccag

SEQ ID NO: 1043650 - DNA, 15 bp, Homo sapiens
ccattctccacccca

SEQ ID NO: 1043651 - DNA, 15 bp, Homo sapiens
gccattctccacccc

SEQ ID NO: 1043652 - DNA, 15 bp, Homo sapiens
ggccattctccaccc

SEQ ID NO: 1043653 - DNA, 15 bp, Homo sapiens
gggccattctccacc

SEQ ID NO: 1043654 - DNA, 15 bp, Homo sapiens
agggccattctccac

SEQ ID NO: 1043655 - DNA, 15 bp, Homo sapiens
cagggccattctcca

SEQ ID NO: 1043656 - DNA, 15 bp, Homo sapiens
ccagggccattctcc

SEQ ID NO: 1043657 - DNA, 15 bp, Homo sapiens
cccagggccattctc

SEQ ID NO: 1043658 - DNA, 15 bp, Homo sapiens
tcccagggccattct

SEQ ID NO: 1043659 - DNA, 15 bp, Homo sapiens
ctcccagggccattc

SEQ ID NO: 1043660 - DNA, 15 bp, Homo sapiens
tctcccagggccatt

SEQ ID NO: 1043661 - DNA, 15 bp, Homo sapiens
gtctcccagggccat

SEQ ID NO: 1043662 - DNA, 15 bp, Homo sapiens
tgtctcccagggcca

SEQ ID NO: 1043663 - DNA, 15 bp, Homo sapiens
ttgtctcccagggcc

SEQ ID NO: 1043664 - DNA, 15 bp, Homo sapiens
cttgtctcccagggc

SEQ ID NO: 1043665 - DNA, 15 bp, Homo sapiens
tcttgtctcccaggg

SEQ ID NO: 1043666 - DNA, 15 bp, Homo sapiens
ctcttgtctcccagg

SEQ ID NO: 1043667 - DNA, 15 bp, Homo sapiens
tctcttgtctcccag

SEQ ID NO: 1043668 - DNA, 15 bp, Homo sapiens
gtctcttgtctccca

SEQ ID NO: 1043669 - DNA, 15 bp, Homo sapiens
tgtctcttgtctccc

SEQ ID NO: 1043670 - DNA, 15 bp, Homo sapiens
ctgtctcttgtctcc

SEQ ID NO: 1043671 - DNA, 15 bp, Homo sapiens
gctgtctcttgtctc

SEQ ID NO: 1043672 - DNA, 15 bp, Homo sapiens
ggctgtctcttgtct

SEQ ID NO: 1043673 - DNA, 15 bp, Homo sapiens
gggctgtctcttgtc

SEQ ID NO: 1043674 - DNA, 15 bp, Homo sapiens
tgggctgtctcttgt

SEQ ID NO: 1043675 - DNA, 15 bp, Homo sapiens
atgggctgtctcttg

SEQ ID NO: 1043676 - DNA, 15 bp, Homo sapiens
catgggctgtctctt

SEQ ID NO: 1043677 - DNA, 15 bp, Homo sapiens
ccatgggctgtctct

SEQ ID NO: 1043678 - DNA, 15 bp, Homo sapiens
tccatgggctgtctc

SEQ ID NO: 1043679 - DNA, 15 bp, Homo sapiens
ctccatgggctgtct

SEQ ID NO: 1043680 - DNA, 15 bp, Homo sapiens
gctccatgggctgtc

SEQ ID NO: 1043681 - DNA, 15 bp, Homo sapiens
tgctccatgggctgt

SEQ ID NO: 1043682 - DNA, 15 bp, Homo sapiens
ctgctccatgggctg

SEQ ID NO: 1043683 - DNA, 15 bp, Homo sapiens
cctgctccatgggct

SEQ ID NO: 1043684 - DNA, 15 bp, Homo sapiens
acctgctccatgggc

SEQ ID NO: 1043685 - DNA, 15 bp, Homo sapiens
aacctgctccatggg

SEQ ID NO: 1043686 - DNA, 15 bp, Homo sapiens
caacctgctccatgg

SEQ ID NO: 1043687 - DNA, 15 bp, Homo sapiens
acaacctgctccatg

SEQ ID NO: 1043688 - DNA, 15 bp, Homo sapiens
tacaacctgctccat

SEQ ID NO: 1043689 - DNA, 15 bp, Homo sapiens
ttacaacctgctcca

SEQ ID NO: 1043690 - DNA, 15 bp, Homo sapiens
attacaacctgctcc

SEQ ID NO: 1043691 - DNA, 15 bp, Homo sapiens
aattacaacctgctc

SEQ ID NO: 1043692 - DNA, 15 bp, Homo sapiens
gaattacaacctgct

SEQ ID NO: 1043693 - DNA, 15 bp, Homo sapiens
agaattacaacctgc

SEQ ID NO: 1043694 - DNA, 15 bp, Homo sapiens
tagaattacaacctg

SEQ ID NO: 1043695 - DNA, 15 bp, Homo sapiens
gtagaattacaacct

SEQ ID NO: 1043696 - DNA, 15 bp, Homo sapiens
tgtagaattacaacc

SEQ ID NO: 1043697 - DNA, 15 bp, Homo sapiens
ctgtagaattacaac

SEQ ID NO: 1043698 - DNA, 15 bp, Homo sapiens
cctgtagaattacaa

SEQ ID NO: 1043699 - DNA, 15 bp, Homo sapiens
gcctgtagaattaca

SEQ ID NO: 1043700 - DNA, 15 bp, Homo sapiens
tgcctgtagaattac

SEQ ID NO: 1043701 - DNA, 15 bp, Homo sapiens
atgcctgtagaatta

SEQ ID NO: 1043702 - DNA, 15 bp, Homo sapiens
tatgcctgtagaatt

SEQ ID NO: 1043703 - DNA, 15 bp, Homo sapiens
atatgcctgtagaat

SEQ ID NO: 1043704 - DNA, 15 bp, Homo sapiens
catatgcctgtagaa

SEQ ID NO: 1043705 - DNA, 15 bp, Homo sapiens
tcatatgcctgtaga

SEQ ID NO: 1043706 - DNA, 15 bp, Homo sapiens
ttcatatgcctgtag

SEQ ID NO: 1043707 - DNA, 15 bp, Homo sapiens
cttcatatgcctgta

SEQ ID NO: 1043708 - DNA, 15 bp, Homo sapiens
tcttcatatgcctgt

SEQ ID NO: 1043709 - DNA, 15 bp, Homo sapiens
ctcttcatatgcctg

SEQ ID NO: 1043710 - DNA, 15 bp, Homo sapiens
gctcttcatatgcct

SEQ ID NO: 1043711 - DNA, 15 bp, Homo sapiens
tgctcttcatatgcc

SEQ ID NO: 1043712 - DNA, 15 bp, Homo sapiens
atgctcttcatatgc

SEQ ID NO: 1043713 - DNA, 15 bp, Homo sapiens
aatgctcttcatatg

SEQ ID NO: 1043714 - DNA, 15 bp, Homo sapiens
gaatgctcttcatat

SEQ ID NO: 1043715 - DNA, 15 bp, Homo sapiens
tgaatgctcttcata

SEQ ID NO: 1043716 - DNA, 15 bp, Homo sapiens
atgaatgctcttcat

SEQ ID NO: 1043717 - DNA, 15 bp, Homo sapiens
aatgaatgctcttca

SEQ ID NO: 1043718 - DNA, 15 bp, Homo sapiens
gaatgaatgctcttc

SEQ ID NO: 1043719 - DNA, 15 bp, Homo sapiens
agaatgaatgctctt

SEQ ID NO: 1043720 - DNA, 15 bp, Homo sapiens
cagaatgaatgctct

SEQ ID NO: 1043721 - DNA, 15 bp, Homo sapiens
tcagaatgaatgctc

SEQ ID NO: 1043722 - DNA, 15 bp, Homo sapiens
ttcagaatgaatgct

SEQ ID NO: 1043723 - DNA, 15 bp, Homo sapiens
cttcagaatgaatgc

SEQ ID NO: 1043724 - DNA, 15 bp, Homo sapiens
tcttcagaatgaatg

SEQ ID NO: 1043725 - DNA, 15 bp, Homo sapiens
ttcttcagaatgaat

SEQ ID NO: 1043726 - DNA, 15 bp, Homo sapiens
cttcttcagaatgaa

SEQ ID NO: 1043727 - DNA, 15 bp, Homo sapiens
tcttcttcagaatga

SEQ ID NO: 1043728 - DNA, 15 bp, Homo sapiens
gtcttcttcagaatg

SEQ ID NO: 1043729 - DNA, 15 bp, Homo sapiens
tgtcttcttcagaat

SEQ ID NO: 1043730 - DNA, 15 bp, Homo sapiens
atgtcttcttcagaa

SEQ ID NO: 1043731 - DNA, 15 bp, Homo sapiens
aatgtcttcttcaga

SEQ ID NO: 1043732 - DNA, 15 bp, Homo sapiens
gaatgtcttcttcag

SEQ ID NO: 1043733 - DNA, 15 bp, Homo sapiens
tgaatgtcttcttca

SEQ ID NO: 1043734 - DNA, 15 bp, Homo sapiens
ttgaatgtcttcttc

SEQ ID NO: 1043735 - DNA, 15 bp, Homo sapiens
attgaatgtcttctt

SEQ ID NO: 1043736 - DNA, 15 bp, Homo sapiens
aattgaatgtcttct

SEQ ID NO: 1043737 - DNA, 15 bp, Homo sapiens
gaattgaatgtcttc

SEQ ID NO: 1043738 - DNA, 15 bp, Homo sapiens
tgaattgaatgtctt

SEQ ID NO: 1043739 - DNA, 15 bp, Homo sapiens
ctgaattgaatgtct

SEQ ID NO: 1043740 - DNA, 15 bp, Homo sapiens
cctgaattgaatgtc

SEQ ID NO: 1043741 - DNA, 15 bp, Homo sapiens
tcctgaattgaatgt

SEQ ID NO: 1043742 - DNA, 15 bp, Homo sapiens
ttcctgaattgaatg

SEQ ID NO: 1043743 - DNA, 15 bp, Homo sapiens
attcctgaattgaat

SEQ ID NO: 1043744 - DNA, 15 bp, Homo sapiens
cattcctgaattgaa

SEQ ID NO: 1043745 - DNA, 15 bp, Homo sapiens
acattcctgaattga

SEQ ID NO: 1043746 - DNA, 15 bp, Homo sapiens
cacattcctgaattg

SEQ ID NO: 1043747 - DNA, 15 bp, Homo sapiens
tcacattcctgaatt

SEQ ID NO: 1043748 - DNA, 15 bp, Homo sapiens
ttcacattcctgaat

SEQ ID NO: 1043749 - DNA, 15 bp, Homo sapiens
attcacattcctgaa

SEQ ID NO: 1043750 - DNA, 15 bp, Homo sapiens
aattcacattcctga

SEQ ID NO: 1043751 - DNA, 15 bp, Homo sapiens
taattcacattcctg

SEQ ID NO: 1043752 - DNA, 15 bp, Homo sapiens
gtaattcacattcct

SEQ ID NO: 1043753 - DNA, 15 bp, Homo sapiens
tgtaattcacattcc

SEQ ID NO: 1043754 - DNA, 15 bp, Homo sapiens
gtgtaattcacattc

SEQ ID NO: 1043755 - DNA, 15 bp, Homo sapiens
tgtgtaattcacatt

SEQ ID NO: 1043756 - DNA, 15 bp, Homo sapiens
ttgtgtaattcacat

SEQ ID NO: 1043757 - DNA, 15 bp, Homo sapiens
cttgtgtaattcaca

SEQ ID NO: 1043758 - DNA, 15 bp, Homo sapiens
ccttgtgtaattcac

SEQ ID NO: 1043759 - DNA, 15 bp, Homo sapiens
tccttgtgtaattca

SEQ ID NO: 1043760 - DNA, 15 bp, Homo sapiens
ttccttgtgtaattc

SEQ ID NO: 1043761 - DNA, 15 bp, Homo sapiens
cttccttgtgtaatt

SEQ ID NO: 1043762 - DNA, 15 bp, Homo sapiens
ccttccttgtgtaat

SEQ ID NO: 1043763 - DNA, 15 bp, Homo sapiens
accttccttgtgtaa

SEQ ID NO: 1043764 - DNA, 15 bp, Homo sapiens
taccttccttgtgta

SEQ ID NO: 1043765 - DNA, 15 bp, Homo sapiens
ctaccttccttgtgt

SEQ ID NO: 1043766 - DNA, 15 bp, Homo sapiens
tctaccttccttgtg

SEQ ID NO: 1043767 - DNA, 15 bp, Homo sapiens
gtctaccttccttgt

SEQ ID NO: 1043768 - DNA, 15 bp, Homo sapiens
tgtctaccttccttg

SEQ ID NO: 1043769 - DNA, 15 bp, Homo sapiens
ttgtctaccttcctt

SEQ ID NO: 1043770 - DNA, 15 bp, Homo sapiens
tttgtctaccttcct

SEQ ID NO: 1043771 - DNA, 15 bp, Homo sapiens
atttgtctaccttcc

SEQ ID NO: 1043772 - DNA, 15 bp, Homo sapiens
gatttgtctaccttc

SEQ ID NO: 1043773 - DNA, 15 bp, Homo sapiens
ggatttgtctacctt

SEQ ID NO: 1043774 - DNA, 15 bp, Homo sapiens
gggatttgtctacct

SEQ ID NO: 1043775 - DNA, 15 bp, Homo sapiens
tgggatttgtctacc

SEQ ID NO: 1043776 - DNA, 15 bp, Homo sapiens
ctgggatttgtctac

SEQ ID NO: 1043777 - DNA, 15 bp, Homo sapiens
gctgggatttgtcta

SEQ ID NO: 1043778 - DNA, 15 bp, Homo sapiens
agctgggatttgtct

SEQ ID NO: 1043779 - DNA, 15 bp, Homo sapiens
aagctgggatttgtc

SEQ ID NO: 1043780 - DNA, 15 bp, Homo sapiens
aaagctgggatttgt

SEQ ID NO: 1043781 - DNA, 15 bp, Homo sapiens
taaagctgggatttg

SEQ ID NO: 1043782 - DNA, 15 bp, Homo sapiens
ttaaagctgggattt

SEQ ID NO: 1043783 - DNA, 15 bp, Homo sapiens
gttaaagctgggatt

SEQ ID NO: 1043784 - DNA, 15 bp, Homo sapiens
tgttaaagctgggat

SEQ ID NO: 1043785 - DNA, 15 bp, Homo sapiens
ttgttaaagctggga

SEQ ID NO: 1043786 - DNA, 15 bp, Homo sapiens
cttgttaaagctggg

SEQ ID NO: 1043787 - DNA, 15 bp, Homo sapiens
acttgttaaagctgg

SEQ ID NO: 1043788 - DNA, 15 bp, Homo sapiens
cacttgttaaagctg

SEQ ID NO: 1043789 - DNA, 15 bp, Homo sapiens
gcacttgttaaagct

SEQ ID NO: 1043790 - DNA, 15 bp, Homo sapiens
agcacttgttaaagc

SEQ ID NO: 1043791 - DNA, 15 bp, Homo sapiens
cagcacttgttaaag

SEQ ID NO: 1043792 - DNA, 15 bp, Homo sapiens
acagcacttgttaaa

SEQ ID NO: 1043793 - DNA, 15 bp, Homo sapiens
aacagcacttgttaa

SEQ ID NO: 1043794 - DNA, 15 bp, Homo sapiens
gaacagcacttgtta

SEQ ID NO: 1043795 - DNA, 15 bp, Homo sapiens
tgaacagcacttgtt

SEQ ID NO: 1043796 - DNA, 15 bp, Homo sapiens
gtgaacagcacttgt

SEQ ID NO: 1043797 - DNA, 15 bp, Homo sapiens
ggtgaacagcacttg

SEQ ID NO: 1043798 - DNA, 15 bp, Homo sapiens
aggtgaacagcactt

SEQ ID NO: 1043799 - DNA, 15 bp, Homo sapiens
taggtgaacagcact

SEQ ID NO: 1043800 - DNA, 15 bp, Homo sapiens
ataggtgaacagcac

SEQ ID NO: 1043801 - DNA, 15 bp, Homo sapiens
gataggtgaacagca

SEQ ID NO: 1043802 - DNA, 15 bp, Homo sapiens
tgataggtgaacagc

SEQ ID NO: 1043803 - DNA, 15 bp, Homo sapiens
gtgataggtgaacag

SEQ ID NO: 1043804 - DNA, 15 bp, Homo sapiens
agtgataggtgaaca

SEQ ID NO: 1043805 - DNA, 15 bp, Homo sapiens
tagtgataggtgaac

SEQ ID NO: 1043806 - DNA, 15 bp, Homo sapiens
gtagtgataggtgaa

SEQ ID NO: 1043807 - DNA, 15 bp, Homo sapiens
tgtagtgataggtga

SEQ ID NO: 1043808 - DNA, 15 bp, Homo sapiens
atgtagtgataggtg

SEQ ID NO: 1043809 - DNA, 15 bp, Homo sapiens
aatgtagtgataggt

SEQ ID NO: 1043810 - DNA, 15 bp, Homo sapiens
aaatgtagtgatagg

SEQ ID NO: 1043811 - DNA, 15 bp, Homo sapiens
aaaatgtagtgatag

SEQ ID NO: 1043812 - DNA, 15 bp, Homo sapiens
gaaaatgtagtgata

SEQ ID NO: 1043813 - DNA, 15 bp, Homo sapiens
tgaaaatgtagtgat

SEQ ID NO: 1043814 - DNA, 15 bp, Homo sapiens
ttgaaaatgtagtga

SEQ ID NO: 1043815 - DNA, 15 bp, Homo sapiens
cttgaaaatgtagtg

SEQ ID NO: 1043816 - DNA, 15 bp, Homo sapiens
acttgaaaatgtagt

SEQ ID NO: 1043817 - DNA, 15 bp, Homo sapiens
tacttgaaaatgtag

SEQ ID NO: 1043818 - DNA, 15 bp, Homo sapiens
ttacttgaaaatgta

SEQ ID NO: 1043819 - DNA, 15 bp, Homo sapiens
tttacttgaaaatgt

SEQ ID NO: 1043820 - DNA, 15 bp, Homo sapiens
ctttacttgaaaatg

SEQ ID NO: 1043821 - DNA, 15 bp, Homo sapiens
cctttacttgaaaat

SEQ ID NO: 1043822 - DNA, 15 bp, Homo sapiens
acctttacttgaaaa

SEQ ID NO: 1043823 - DNA, 15 bp, Homo sapiens
cacctttacttgaaa

SEQ ID NO: 1043824 - DNA, 15 bp, Homo sapiens
ccacctttacttgaa

SEQ ID NO: 1043825 - DNA, 15 bp, Homo sapiens
accacctttacttga

SEQ ID NO: 1043826 - DNA, 15 bp, Homo sapiens
caccacctttacttg

SEQ ID NO: 1043827 - DNA, 15 bp, Homo sapiens
acaccacctttactt

SEQ ID NO: 1043828 - DNA, 15 bp, Homo sapiens
tacaccacctttact

SEQ ID NO: 1043829 - DNA, 15 bp, Homo sapiens
atacaccacctttac

SEQ ID NO: 1043830 - DNA, 15 bp, Homo sapiens
gatacaccaccttta

SEQ ID NO: 1043831 - DNA, 15 bp, Homo sapiens
ggatacaccaccttt

SEQ ID NO: 1043832 - DNA, 15 bp, Homo sapiens
tggatacaccacctt

SEQ ID NO: 1043833 - DNA, 15 bp, Homo sapiens
atggatacaccacct

SEQ ID NO: 1043834 - DNA, 15 bp, Homo sapiens
aatggatacaccacc

SEQ ID NO: 1043835 - DNA, 15 bp, Homo sapiens
aaatggatacaccac

SEQ ID NO: 1043836 - DNA, 15 bp, Homo sapiens
caaatggatacacca

SEQ ID NO: 1043837 - DNA, 15 bp, Homo sapiens
gcaaatggatacacc

SEQ ID NO: 1043838 - DNA, 15 bp, Homo sapiens
agcaaatggatacac

SEQ ID NO: 1043839 - DNA, 15 bp, Homo sapiens
tagcaaatggataca

SEQ ID NO: 1043840 - DNA, 15 bp, Homo sapiens
ctagcaaatggatac

SEQ ID NO: 1043841 - DNA, 15 bp, Homo sapiens
cctagcaaatggata

SEQ ID NO: 1043842 - DNA, 15 bp, Homo sapiens
ccctagcaaatggat

SEQ ID NO: 1043843 - DNA, 15 bp, Homo sapiens
accctagcaaatgga

SEQ ID NO: 1043844 - DNA, 15 bp, Homo sapiens
aaccctagcaaatgg

SEQ ID NO: 1043845 - DNA, 15 bp, Homo sapiens
aaaccctagcaaatg

SEQ ID NO: 1043846 - DNA, 15 bp, Homo sapiens
gaaaccctagcaaat

SEQ ID NO: 1043847 - DNA, 15 bp, Homo sapiens
ggaaaccctagcaaa

SEQ ID NO: 1043848 - DNA, 15 bp, Homo sapiens
tggaaaccctagcaa

SEQ ID NO: 1043849 - DNA, 15 bp, Homo sapiens
atggaaaccctagca

SEQ ID NO: 1043850 - DNA, 15 bp, Homo sapiens
tatggaaaccctagc

SEQ ID NO: 1043851 - DNA, 15 bp, Homo sapiens
ttatggaaaccctag

SEQ ID NO: 1043852 - DNA, 15 bp, Homo sapiens
gttatggaaacccta

SEQ ID NO: 1043853 - DNA, 15 bp, Homo sapiens
tgttatggaaaccct

SEQ ID NO: 1043854 - DNA, 15 bp, Homo sapiens
ttgttatggaaaccc

SEQ ID NO: 1043855 - DNA, 15 bp, Homo sapiens
gttgttatggaaacc

SEQ ID NO: 1043856 - DNA, 15 bp, Homo sapiens
tgttgttatggaaac

SEQ ID NO: 1043857 - DNA, 15 bp, Homo sapiens
atgttgttatggaaa

SEQ ID NO: 1043858 - DNA, 15 bp, Homo sapiens
tatgttgttatggaa

SEQ ID NO: 1043859 - DNA, 15 bp, Homo sapiens
gtatgttgttatgga

SEQ ID NO: 1043860 - DNA, 15 bp, Homo sapiens
ggtatgttgttatgg

SEQ ID NO: 1043861 - DNA, 15 bp, Homo sapiens
tggtatgttgttatg

SEQ ID NO: 1043862 - DNA, 15 bp, Homo sapiens
ctggtatgttgttat

SEQ ID NO: 1043863 - DNA, 15 bp, Homo sapiens
cctggtatgttgtta

SEQ ID NO: 1043864 - DNA, 15 bp, Homo sapiens
ccctggtatgttgtt

SEQ ID NO: 1043865 - DNA, 15 bp, Homo sapiens
gccctggtatgttgt

SEQ ID NO: 1043866 - DNA, 15 bp, Homo sapiens
agccctggtatgttg

SEQ ID NO: 1043867 - DNA, 15 bp, Homo sapiens
cagccctggtatgtt

SEQ ID NO: 1043868 - DNA, 15 bp, Homo sapiens
tcagccctggtatgt

SEQ ID NO: 1043869 - DNA, 15 bp, Homo sapiens
ctcagccctggtatg

SEQ ID NO: 1043870 - DNA, 15 bp, Homo sapiens
actcagccctggtat

SEQ ID NO: 1043871 - DNA, 15 bp, Homo sapiens
cactcagccctggta

SEQ ID NO: 1043872 - DNA, 15 bp, Homo sapiens
ccactcagccctggt

SEQ ID NO: 1043873 - DNA, 15 bp, Homo sapiens
gccactcagccctgg

SEQ ID NO: 1043874 - DNA, 15 bp, Homo sapiens
agccactcagccctg

SEQ ID NO: 1043875 - DNA, 15 bp, Homo sapiens
aagccactcagccct

SEQ ID NO: 1043876 - DNA, 15 bp, Homo sapiens
taagccactcagccc

SEQ ID NO: 1043877 - DNA, 15 bp, Homo sapiens
ttaagccactcagcc

SEQ ID NO: 1043878 - DNA, 15 bp, Homo sapiens
cttaagccactcagc

SEQ ID NO: 1043879 - DNA, 15 bp, Homo sapiens
gcttaagccactcag

SEQ ID NO: 1043880 - DNA, 15 bp, Homo sapiens
tgcttaagccactca

SEQ ID NO: 1043881 - DNA, 15 bp, Homo sapiens
ttgcttaagccactc

SEQ ID NO: 1043882 - DNA, 15 bp, Homo sapiens
tttgcttaagccact

SEQ ID NO: 1043883 - DNA, 15 bp, Homo sapiens
ttttgcttaagccac

SEQ ID NO: 1043884 - DNA, 15 bp, Homo sapiens
cttttgcttaagcca

SEQ ID NO: 1043885 - DNA, 15 bp, Homo sapiens
tcttttgcttaagcc

SEQ ID NO: 1043886 - DNA, 15 bp, Homo sapiens
ttcttttgcttaagc

SEQ ID NO: 1043887 - DNA, 15 bp, Homo sapiens
atttcttttgcttaa

SEQ ID NO: 1043888 - DNA, 15 bp, Homo sapiens
aatttcttttgctta

SEQ ID NO: 1043889 - DNA, 15 bp, Homo sapiens
aaatttcttttgctt

SEQ ID NO: 1043890 - DNA, 15 bp, Homo sapiens
taaatttcttttgct

SEQ ID NO: 1043891 - DNA, 15 bp, Homo sapiens
ataaatttcttttgc

SEQ ID NO: 1043892 - DNA, 15 bp, Homo sapiens
aataaatttcttttg

SEQ ID NO: 1043893 - DNA, 15 bp, Homo sapiens
aaataaatttctttt

SEQ ID NO: 1043894 - DNA, 15 bp, Homo sapiens
caaataaatttcttt

SEQ ID NO: 1043895 - DNA, 15 bp, Homo sapiens
gcaaataaatttctt

SEQ ID NO: 1043896 - DNA, 15 bp, Homo sapiens
agcaaataaatttct

SEQ ID NO: 1043897 - DNA, 15 bp, Homo sapiens
gagcaaataaatttc

SEQ ID NO: 1043898 - DNA, 15 bp, Homo sapiens
tgagcaaataaattt

SEQ ID NO: 1043899 - DNA, 15 bp, Homo sapiens
ctgagcaaataaatt

SEQ ID NO: 1043900 - DNA, 15 bp, Homo sapiens
tctgagcaaataaat

SEQ ID NO: 1043901 - DNA, 15 bp, Homo sapiens
ctctgagcaaataaa

SEQ ID NO: 1043902 - DNA, 15 bp, Homo sapiens
actctgagcaaataa

SEQ ID NO: 1043903 - DNA, 15 bp, Homo sapiens
aactctgagcaaata

SEQ ID NO: 1043904 - DNA, 15 bp, Homo sapiens
gaactctgagcaaat

SEQ ID NO: 1043905 - DNA, 15 bp, Homo sapiens
agaactctgagcaaa

SEQ ID NO: 1043906 - DNA, 15 bp, Homo sapiens
cagaactctgagcaa

SEQ ID NO: 1043907 - DNA, 15 bp, Homo sapiens
ccagaactctgagca

SEQ ID NO: 1043908 - DNA, 15 bp, Homo sapiens
tccagaactctgagc

SEQ ID NO: 1043909 - DNA, 15 bp, Homo sapiens
ctccagaactctgag

SEQ ID NO: 1043910 - DNA, 15 bp, Homo sapiens
tctccagaactctga

SEQ ID NO: 1043911 - DNA, 15 bp, Homo sapiens
gtctccagaactctg

SEQ ID NO: 1043912 - DNA, 15 bp, Homo sapiens
agtctccagaactct

SEQ ID NO: 1043913 - DNA, 15 bp, Homo sapiens
cagtctccagaactc

SEQ ID NO: 1043914 - DNA, 15 bp, Homo sapiens
ccagtctccagaact

SEQ ID NO: 1043915 - DNA, 15 bp, Homo sapiens
tccagtctccagaac

SEQ ID NO: 1043916 - DNA, 15 bp, Homo sapiens
ttccagtctccagaa

SEQ ID NO: 1043917 - DNA, 15 bp, Homo sapiens
cttccagtctccaga

SEQ ID NO: 1043918 - DNA, 15 bp, Homo sapiens
acttccagtctccag

SEQ ID NO: 1043919 - DNA, 15 bp, Homo sapiens
gacttccagtctcca

SEQ ID NO: 1043920 - DNA, 15 bp, Homo sapiens
ggacttccagtctcc

SEQ ID NO: 1043921 - DNA, 15 bp, Homo sapiens
tggacttccagtctc

SEQ ID NO: 1043922 - DNA, 15 bp, Homo sapiens
ttggacttccagtct

SEQ ID NO: 1043923 - DNA, 15 bp, Homo sapiens
cttggacttccagtc

SEQ ID NO: 1043924 - DNA, 15 bp, Homo sapiens
tcttggacttccagt

SEQ ID NO: 1043925 - DNA, 15 bp, Homo sapiens
atcttggacttccag

SEQ ID NO: 1043926 - DNA, 15 bp, Homo sapiens
gatcttggacttcca

SEQ ID NO: 1043927 - DNA, 15 bp, Homo sapiens
tgatcttggacttcc

SEQ ID NO: 1043928 - DNA, 15 bp, Homo sapiens
ctgatcttggacttc

SEQ ID NO: 1043929 - DNA, 15 bp, Homo sapiens
cctgatcttggactt

SEQ ID NO: 1043930 - DNA, 15 bp, Homo sapiens
ccctgatcttggact

SEQ ID NO: 1043931 - DNA, 15 bp, Homo sapiens
accctgatcttggac

SEQ ID NO: 1043932 - DNA, 15 bp, Homo sapiens
caccctgatcttgga

SEQ ID NO: 1043933 - DNA, 15 bp, Homo sapiens
gcaccctgatcttgg

SEQ ID NO: 1043934 - DNA, 15 bp, Homo sapiens
ggcaccctgatcttg

SEQ ID NO: 1043935 - DNA, 15 bp, Homo sapiens
tggcaccctgatctt

SEQ ID NO: 1043936 - DNA, 15 bp, Homo sapiens
ctggcaccctgatct

SEQ ID NO: 1043937 - DNA, 15 bp, Homo sapiens
gctggcaccctgatc

SEQ ID NO: 1043938 - DNA, 15 bp, Homo sapiens
tgctggcaccctgat

SEQ ID NO: 1043939 - DNA, 15 bp, Homo sapiens
ctgctggcaccctga

SEQ ID NO: 1043940 - DNA, 15 bp, Homo sapiens
cctgctggcaccctg

SEQ ID NO: 1043941 - DNA, 15 bp, Homo sapiens
ccctgctggcaccct

SEQ ID NO: 1043942 - DNA, 15 bp, Homo sapiens
accctgctggcaccc

SEQ ID NO: 1043943 - DNA, 15 bp, Homo sapiens
aaccctgctggcacc

SEQ ID NO: 1043944 - DNA, 15 bp, Homo sapiens
caaccctgctggcac

SEQ ID NO: 1043945 - DNA, 15 bp, Homo sapiens
ccaaccctgctggca

SEQ ID NO: 1043946 - DNA, 15 bp, Homo sapiens
accaaccctgctggc

SEQ ID NO: 1043947 - DNA, 15 bp, Homo sapiens
aaccaaccctgctgg

SEQ ID NO: 1043948 - DNA, 15 bp, Homo sapiens
aaaccaaccctgctg

SEQ ID NO: 1043949 - DNA, 15 bp, Homo sapiens
aaaaccaaccctgct

SEQ ID NO: 1043950 - DNA, 15 bp, Homo sapiens
gaaaaccaaccctgc

SEQ ID NO: 1043951 - DNA, 15 bp, Homo sapiens
ggaaaaccaaccctg

SEQ ID NO: 1043952 - DNA, 15 bp, Homo sapiens
aggaaaaccaaccct

SEQ ID NO: 1043953 - DNA, 15 bp, Homo sapiens
gaggaaaaccaaccc

SEQ ID NO: 1043954 - DNA, 15 bp, Homo sapiens
tgaggaaaaccaacc

SEQ ID NO: 1043955 - DNA, 15 bp, Homo sapiens
ctgaggaaaaccaac

SEQ ID NO: 1043956 - DNA, 15 bp, Homo sapiens
tctgaggaaaaccaa

SEQ ID NO: 1043957 - DNA, 15 bp, Homo sapiens
ctctgaggaaaacca

SEQ ID NO: 1043958 - DNA, 15 bp, Homo sapiens
cctctgaggaaaacc

SEQ ID NO: 1043959 - DNA, 15 bp, Homo sapiens
gcctctgaggaaaac

SEQ ID NO: 1043960 - DNA, 15 bp, Homo sapiens
ggcctctgaggaaaa

SEQ ID NO: 1043961 - DNA, 15 bp, Homo sapiens
aggcctctgaggaaa

SEQ ID NO: 1043962 - DNA, 15 bp, Homo sapiens
gaggcctctgaggaa

SEQ ID NO: 1043963 - DNA, 15 bp, Homo sapiens
agaggcctctgagga

SEQ ID NO: 1043964 - DNA, 15 bp, Homo sapiens
gagaggcctctgagg

SEQ ID NO: 1043965 - DNA, 15 bp, Homo sapiens
agagaggcctctgag

SEQ ID NO: 1043966 - DNA, 15 bp, Homo sapiens
gagagaggcctctga

SEQ ID NO: 1043967 - DNA, 15 bp, Homo sapiens
ggagagaggcctctg

SEQ ID NO: 1043968 - DNA, 15 bp, Homo sapiens
aggagagaggcctct

SEQ ID NO: 1043969 - DNA, 15 bp, Homo sapiens
aaggagagaggcctc

SEQ ID NO: 1043970 - DNA, 15 bp, Homo sapiens
caaggagagaggcct

SEQ ID NO: 1043971 - DNA, 15 bp, Homo sapiens
ccaaggagagaggcc

SEQ ID NO: 1043972 - DNA, 15 bp, Homo sapiens
gccaaggagagaggc

SEQ ID NO: 1043973 - DNA, 15 bp, Homo sapiens
caagccaaggagaga

SEQ ID NO: 1043974 - DNA, 15 bp, Homo sapiens
gcaagccaaggagag

SEQ ID NO: 1043975 - DNA, 15 bp, Homo sapiens
ggcaagccaaggaga

SEQ ID NO: 1043976 - DNA, 15 bp, Homo sapiens
tggcaagccaaggag

SEQ ID NO: 1043977 - DNA, 15 bp, Homo sapiens
ttggcaagccaagga

SEQ ID NO: 1043978 - DNA, 15 bp, Homo sapiens
attggcaagccaagg

SEQ ID NO: 1043979 - DNA, 15 bp, Homo sapiens
cattggcaagccaag

SEQ ID NO: 1043980 - DNA, 15 bp, Homo sapiens
tcattggcaagccaa

SEQ ID NO: 1043981 - DNA, 15 bp, Homo sapiens
gtcattggcaagcca

SEQ ID NO: 1043982 - DNA, 15 bp, Homo sapiens
agtcattggcaagcc

SEQ ID NO: 1043983 - DNA, 15 bp, Homo sapiens
cagtcattggcaagc

SEQ ID NO: 1043984 - DNA, 15 bp, Homo sapiens
gcagtcattggcaag

SEQ ID NO: 1043985 - DNA, 15 bp, Homo sapiens
agcagtcattggcaa

SEQ ID NO: 1043986 - DNA, 15 bp, Homo sapiens
cagcagtcattggca

SEQ ID NO: 1043987 - DNA, 15 bp, Homo sapiens
acagcagtcattggc

SEQ ID NO: 1043988 - DNA, 15 bp, Homo sapiens
cacagcagtcattgg

SEQ ID NO: 1043989 - DNA, 15 bp, Homo sapiens
acacagcagtcattg

SEQ ID NO: 1043990 - DNA, 15 bp, Homo sapiens
gacacagcagtcatt

SEQ ID NO: 1043991 - DNA, 15 bp, Homo sapiens
ggacacagcagtcat

SEQ ID NO: 1043992 - DNA, 15 bp, Homo sapiens
aggacacagcagtca

SEQ ID NO: 1043993 - DNA, 15 bp, Homo sapiens
gaggacacagcagtc

SEQ ID NO: 1043994 - DNA, 15 bp, Homo sapiens
tgaggacacagcagt

SEQ ID NO: 1043995 - DNA, 15 bp, Homo sapiens
gtgaggacacagcag

SEQ ID NO: 1043996 - DNA, 15 bp, Homo sapiens
tgtgaggacacagca

SEQ ID NO: 1043997 - DNA, 15 bp, Homo sapiens
atgtgaggacacagc

SEQ ID NO: 1043998 - DNA, 15 bp, Homo sapiens
catgtgaggacacag

SEQ ID NO: 1043999 - DNA, 15 bp, Homo sapiens
ccatgtgaggacaca

SEQ ID NO: 1044000 - DNA, 15 bp, Homo sapiens
gccatgtgaggacac

SEQ ID NO: 1044001 - DNA, 15 bp, Homo sapiens
tgccatgtgaggaca

SEQ ID NO: 1044002 - DNA, 15 bp, Homo sapiens
ctgccatgtgaggac

SEQ ID NO: 1044003 - DNA, 15 bp, Homo sapiens
gctgccatgtgagga

SEQ ID NO: 1044004 - DNA, 15 bp, Homo sapiens
ggctgccatgtgagg

SEQ ID NO: 1044005 - DNA, 15 bp, Homo sapiens
gggctgccatgtgag

SEQ ID NO: 1044006 - DNA, 15 bp, Homo sapiens
ggggctgccatgtga

SEQ ID NO: 1044007 - DNA, 15 bp, Homo sapiens
aggggctgccatgtg

SEQ ID NO: 1044008 - DNA, 15 bp, Homo sapiens
gaggggctgccatgt

SEQ ID NO: 1044009 - DNA, 15 bp, Homo sapiens
agaggggctgccatg

SEQ ID NO: 1044010 - DNA, 15 bp, Homo sapiens
cagaggggctgccat

SEQ ID NO: 1044011 - DNA, 15 bp, Homo sapiens
acagaggggctgcca

SEQ ID NO: 1044012 - DNA, 15 bp, Homo sapiens
cacagaggggctgcc

SEQ ID NO: 1044013 - DNA, 15 bp, Homo sapiens
gcacagaggggctgc

SEQ ID NO: 1044014 - DNA, 15 bp, Homo sapiens
tgcacagaggggctg

SEQ ID NO: 1044015 - DNA, 15 bp, Homo sapiens
gtgcacagaggggct

SEQ ID NO: 1044016 - DNA, 15 bp, Homo sapiens
tgtgcacagaggggc

SEQ ID NO: 1044017 - DNA, 15 bp, Homo sapiens
gtgtgcacagagggg

SEQ ID NO: 1044018 - DNA, 15 bp, Homo sapiens
tgtgtgcacagaggg

SEQ ID NO: 1044019 - DNA, 15 bp, Homo sapiens
gtgtgtgcacagagg

SEQ ID NO: 1044020 - DNA, 15 bp, Homo sapiens
agtgtgtgcacagag

SEQ ID NO: 1044021 - DNA, 15 bp, Homo sapiens
gagtgtgtgcacaga

SEQ ID NO: 1044022 - DNA, 15 bp, Homo sapiens
ggagtgtgtgcacag

SEQ ID NO: 1044023 - DNA, 15 bp, Homo sapiens
gggagtgtgtgcaca

SEQ ID NO: 1044024 - DNA, 15 bp, Homo sapiens
ggggagtgtgtgcac

SEQ ID NO: 1044025 - DNA, 15 bp, Homo sapiens
aggggagtgtgtgca

SEQ ID NO: 1044026 - DNA, 15 bp, Homo sapiens
caggggagtgtgtgc

SEQ ID NO: 1044027 - DNA, 15 bp, Homo sapiens
ccaggggagtgtgtg

SEQ ID NO: 1044028 - DNA, 15 bp, Homo sapiens
cccaggggagtgtgt

SEQ ID NO: 1044029 - DNA, 15 bp, Homo sapiens
ccccaggggagtgtg

SEQ ID NO: 1044030 - DNA, 15 bp, Homo sapiens
cccccaggggagtgt

SEQ ID NO: 1044031 - DNA, 15 bp, Homo sapiens
gcccccaggggagtg

SEQ ID NO: 1044032 - DNA, 15 bp, Homo sapiens
agcccccaggggagt

SEQ ID NO: 1044033 - DNA, 15 bp, Homo sapiens
gagcccccaggggag

SEQ ID NO: 1044034 - DNA, 15 bp, Homo sapiens
agagcccccagggga

SEQ ID NO: 1044035 - DNA, 15 bp, Homo sapiens
gagagcccccagggg

SEQ ID NO: 1044036 - DNA, 15 bp, Homo sapiens
agagagcccccaggg

SEQ ID NO: 1044037 - DNA, 15 bp, Homo sapiens
cagagagcccccagg

SEQ ID NO: 1044038 - DNA, 15 bp, Homo sapiens
acagagagcccccag

SEQ ID NO: 1044039 - DNA, 15 bp, Homo sapiens
cacagagagccccca

SEQ ID NO: 1044040 - DNA, 15 bp, Homo sapiens
acacagagagccccc

SEQ ID NO: 1044041 - DNA, 15 bp, Homo sapiens
cacacagagagcccc

SEQ ID NO: 1044042 - DNA, 15 bp, Homo sapiens
acacacagagagccc

SEQ ID NO: 1044043 - DNA, 15 bp, Homo sapiens
gacacacagagagcc

SEQ ID NO: 1044044 - DNA, 15 bp, Homo sapiens
ggacacacagagagc

SEQ ID NO: 1044045 - DNA, 15 bp, Homo sapiens
tggacacacagagag

SEQ ID NO: 1044046 - DNA, 15 bp, Homo sapiens
ttggacacacagaga

SEQ ID NO: 1044047 - DNA, 15 bp, Homo sapiens
tttggacacacagag

SEQ ID NO: 1044048 - DNA, 15 bp, Homo sapiens
atttggacacacaga

SEQ ID NO: 1044049 - DNA, 15 bp, Homo sapiens
aatttggacacacag

SEQ ID NO: 1044050 - DNA, 15 bp, Homo sapiens
gaatttggacacaca

SEQ ID NO: 1044051 - DNA, 15 bp, Homo sapiens
ggaatttggacacac

SEQ ID NO: 1044052 - DNA, 15 bp, Homo sapiens
gggaatttggacaca

SEQ ID NO: 1044053 - DNA, 15 bp, Homo sapiens
agggaatttggacac

SEQ ID NO: 1044054 - DNA, 15 bp, Homo sapiens
gagggaatttggaca

SEQ ID NO: 1044055 - DNA, 15 bp, Homo sapiens
agagggaatttggac

SEQ ID NO: 1044056 - DNA, 15 bp, Homo sapiens
aagagggaatttgga

SEQ ID NO: 1044057 - DNA, 15 bp, Homo sapiens
gaagagggaatttgg

SEQ ID NO: 1044058 - DNA, 15 bp, Homo sapiens
agaagagggaatttg

SEQ ID NO: 1044059 - DNA, 15 bp, Homo sapiens
aagaagagggaattt

SEQ ID NO: 1044060 - DNA, 15 bp, Homo sapiens
taagaagagggaatt

SEQ ID NO: 1044061 - DNA, 15 bp, Homo sapiens
ataagaagagggaat

SEQ ID NO: 1044062 - DNA, 15 bp, Homo sapiens
tataagaagagggaa

SEQ ID NO: 1044063 - DNA, 15 bp, Homo sapiens
ttataagaagaggga

SEQ ID NO: 1044064 - DNA, 15 bp, Homo sapiens
cttataagaagaggg

SEQ ID NO: 1044065 - DNA, 15 bp, Homo sapiens
tcttataagaagagg

SEQ ID NO: 1044066 - DNA, 15 bp, Homo sapiens
ttcttataagaagag

SEQ ID NO: 1044067 - DNA, 15 bp, Homo sapiens
gttcttataagaaga

SEQ ID NO: 1044068 - DNA, 15 bp, Homo sapiens
tgttcttataagaag

SEQ ID NO: 1044069 - DNA, 15 bp, Homo sapiens
gtgttcttataagaa

SEQ ID NO: 1044070 - DNA, 15 bp, Homo sapiens
ggtgttcttataaga

SEQ ID NO: 1044071 - DNA, 15 bp, Homo sapiens
tggtgttcttataag

SEQ ID NO: 1044072 - DNA, 15 bp, Homo sapiens
ctggtgttcttataa

SEQ ID NO: 1044073 - DNA, 15 bp, Homo sapiens
actggtgttcttata

SEQ ID NO: 1044074 - DNA, 15 bp, Homo sapiens
gactggtgttcttat

SEQ ID NO: 1044075 - DNA, 15 bp, Homo sapiens
tgactggtgttctta

SEQ ID NO: 1044076 - DNA, 15 bp, Homo sapiens
atgactggtgttctt

SEQ ID NO: 1044077 - DNA, 15 bp, Homo sapiens
tatgactggtgttct

SEQ ID NO: 1044078 - DNA, 15 bp, Homo sapiens
atatgactggtgttc

SEQ ID NO: 1044079 - DNA, 15 bp, Homo sapiens
aatatgactggtgtt

SEQ ID NO: 1044080 - DNA, 15 bp, Homo sapiens
caatatgactggtgt

SEQ ID NO: 1044081 - DNA, 15 bp, Homo sapiens
ccaatatgactggtg

SEQ ID NO: 1044082 - DNA, 15 bp, Homo sapiens
tccaatatgactggt

SEQ ID NO: 1044083 - DNA, 15 bp, Homo sapiens
atccaatatgactgg

SEQ ID NO: 1044084 - DNA, 15 bp, Homo sapiens
aatccaatatgactg

SEQ ID NO: 1044085 - DNA, 15 bp, Homo sapiens
taatccaatatgact

SEQ ID NO: 1044086 - DNA, 15 bp, Homo sapiens
ctaatccaatatgac

SEQ ID NO: 1044087 - DNA, 15 bp, Homo sapiens
tctaatccaatatga

SEQ ID NO: 1044088 - DNA, 15 bp, Homo sapiens
ttctaatccaatatg

SEQ ID NO: 1044089 - DNA, 15 bp, Homo sapiens
gttctaatccaatat

SEQ ID NO: 1044090 - DNA, 15 bp, Homo sapiens
ggttctaatccaata

SEQ ID NO: 1044091 - DNA, 15 bp, Homo sapiens
gggttctaatccaat

SEQ ID NO: 1044092 - DNA, 15 bp, Homo sapiens
tgggttctaatccaa

SEQ ID NO: 1044093 - DNA, 15 bp, Homo sapiens
gtgggttctaatcca

SEQ ID NO: 1044094 - DNA, 15 bp, Homo sapiens
ggtgggttctaatcc

SEQ ID NO: 1044095 - DNA, 15 bp, Homo sapiens
gggtgggttctaatc

SEQ ID NO: 1044096 - DNA, 15 bp, Homo sapiens
agggtgggttctaat

SEQ ID NO: 1044097 - DNA, 15 bp, Homo sapiens
tagggtgggttctaa

SEQ ID NO: 1044098 - DNA, 15 bp, Homo sapiens
atagggtgggttcta

SEQ ID NO: 1044099 - DNA, 15 bp, Homo sapiens
gatagggtgggttct

SEQ ID NO: 1044100 - DNA, 15 bp, Homo sapiens
tgatagggtgggttc

SEQ ID NO: 1044101 - DNA, 15 bp, Homo sapiens
ctgatagggtgggtt

SEQ ID NO: 1044102 - DNA, 15 bp, Homo sapiens
gctgatagggtgggt

SEQ ID NO: 1044103 - DNA, 15 bp, Homo sapiens
ggctgatagggtggg

SEQ ID NO: 1044104 - DNA, 15 bp, Homo sapiens
aggctgatagggtgg

SEQ ID NO: 1044105 - DNA, 15 bp, Homo sapiens
gaggctgatagggtg

SEQ ID NO: 1044106 - DNA, 15 bp, Homo sapiens
tgaggctgatagggt

SEQ ID NO: 1044107 - DNA, 15 bp, Homo sapiens
atgaggctgataggg

SEQ ID NO: 1044108 - DNA, 15 bp, Homo sapiens
aatgaggctgatagg

SEQ ID NO: 1044109 - DNA, 15 bp, Homo sapiens
aaatgaggctgatag

SEQ ID NO: 1044110 - DNA, 15 bp, Homo sapiens
gaaatgaggctgata

SEQ ID NO: 1044111 - DNA, 15 bp, Homo sapiens
tgaaatgaggctgat

SEQ ID NO: 1044112 - DNA, 15 bp, Homo sapiens
gtgaaatgaggctga

SEQ ID NO: 1044113 - DNA, 15 bp, Homo sapiens
ggtgaaatgaggctg

SEQ ID NO: 1044114 - DNA, 15 bp, Homo sapiens
aggtgaaatgaggct

SEQ ID NO: 1044115 - DNA, 15 bp, Homo sapiens
aaggtgaaatgaggc

SEQ ID NO: 1044116 - DNA, 15 bp, Homo sapiens
taaggtgaaatgagg

SEQ ID NO: 1044117 - DNA, 15 bp, Homo sapiens
gtaaggtgaaatgag

SEQ ID NO: 1044118 - DNA, 15 bp, Homo sapiens
ggtaaggtgaaatga

SEQ ID NO: 1044119 - DNA, 15 bp, Homo sapiens
aggtaaggtgaaatg

SEQ ID NO: 1044120 - DNA, 15 bp, Homo sapiens
gaggtaaggtgaaat

SEQ ID NO: 1044121 - DNA, 15 bp, Homo sapiens
ggaggtaaggtgaaa

SEQ ID NO: 1044122 - DNA, 15 bp, Homo sapiens
aggaggtaaggtgaa

SEQ ID NO: 1044123 - DNA, 15 bp, Homo sapiens
aaggaggtaaggtga

SEQ ID NO: 1044124 - DNA, 15 bp, Homo sapiens
taaggaggtaaggtg

SEQ ID NO: 1044125 - DNA, 15 bp, Homo sapiens
ttaaggaggtaaggt

SEQ ID NO: 1044126 - DNA, 15 bp, Homo sapiens
tttaaggaggtaagg

SEQ ID NO: 1044127 - DNA, 15 bp, Homo sapiens
ctttaaggaggtaag

SEQ ID NO: 1044128 - DNA, 15 bp, Homo sapiens
cctttaaggaggtaa

SEQ ID NO: 1044129 - DNA, 15 bp, Homo sapiens
acctttaaggaggta

SEQ ID NO: 1044130 - DNA, 15 bp, Homo sapiens
gacctttaaggaggt

SEQ ID NO: 1044131 - DNA, 15 bp, Homo sapiens
ggacctttaaggagg

SEQ ID NO: 1044132 - DNA, 15 bp, Homo sapiens
aggacctttaaggag

SEQ ID NO: 1044133 - DNA, 15 bp, Homo sapiens
taggacctttaagga

SEQ ID NO: 1044134 - DNA, 15 bp, Homo sapiens
ataggacctttaagg

SEQ ID NO: 1044135 - DNA, 15 bp, Homo sapiens
gataggacctttaag

SEQ ID NO: 1044136 - DNA, 15 bp, Homo sapiens
agataggacctttaa

SEQ ID NO: 1044137 - DNA, 15 bp, Homo sapiens
gagataggaccttta

SEQ ID NO: 1044138 - DNA, 15 bp, Homo sapiens
ggagataggaccttt

SEQ ID NO: 1044139 - DNA, 15 bp, Homo sapiens
tggagataggacctt

SEQ ID NO: 1044140 - DNA, 15 bp, Homo sapiens
ttggagataggacct

SEQ ID NO: 1044141 - DNA, 15 bp, Homo sapiens
tttggagataggacc

SEQ ID NO: 1044142 - DNA, 15 bp, Homo sapiens
atttggagataggac

SEQ ID NO: 1044143 - DNA, 15 bp, Homo sapiens
tatttggagatagga

SEQ ID NO: 1044144 - DNA, 15 bp, Homo sapiens
gtatttggagatagg

SEQ ID NO: 1044145 - DNA, 15 bp, Homo sapiens
tgtatttggagatag

SEQ ID NO: 1044146 - DNA, 15 bp, Homo sapiens
ttgtatttggagata

SEQ ID NO: 1044147 - DNA, 15 bp, Homo sapiens
attgtatttggagat

SEQ ID NO: 1044148 - DNA, 15 bp, Homo sapiens
gattgtatttggaga

SEQ ID NO: 1044149 - DNA, 15 bp, Homo sapiens
tgattgtatttggag

SEQ ID NO: 1044150 - DNA, 15 bp, Homo sapiens
gtgattgtatttgga

SEQ ID NO: 1044151 - DNA, 15 bp, Homo sapiens
tgtgattgtatttgg

SEQ ID NO: 1044152 - DNA, 15 bp, Homo sapiens
atgtgattgtatttg

SEQ ID NO: 1044153 - DNA, 15 bp, Homo sapiens
aatgtgattgtattt

SEQ ID NO: 1044154 - DNA, 15 bp, Homo sapiens
gaatgtgattgtatt

SEQ ID NO: 1044155 - DNA, 15 bp, Homo sapiens
agaatgtgattgtat

SEQ ID NO: 1044156 - DNA, 15 bp, Homo sapiens
cagaatgtgattgta

SEQ ID NO: 1044157 - DNA, 15 bp, Homo sapiens
tcagaatgtgattgt

SEQ ID NO: 1044158 - DNA, 15 bp, Homo sapiens
ctcagaatgtgattg

SEQ ID NO: 1044159 - DNA, 15 bp, Homo sapiens
actcagaatgtgatt

SEQ ID NO: 1044160 - DNA, 15 bp, Homo sapiens
tactcagaatgtgat

SEQ ID NO: 1044161 - DNA, 15 bp, Homo sapiens
gtactcagaatgtga

SEQ ID NO: 1044162 - DNA, 15 bp, Homo sapiens
agtactcagaatgtg

SEQ ID NO: 1044163 - DNA, 15 bp, Homo sapiens
cagtactcagaatgt

SEQ ID NO: 1044164 - DNA, 15 bp, Homo sapiens
gcagtactcagaatg

SEQ ID NO: 1044165 - DNA, 15 bp, Homo sapiens
cgcagtactcagaat

SEQ ID NO: 1044166 - DNA, 15 bp, Homo sapiens
ccgcagtactcagaa

SEQ ID NO: 1044167 - DNA, 15 bp, Homo sapiens
cccgcagtactcaga

SEQ ID NO: 1044168 - DNA, 15 bp, Homo sapiens
acccgcagtactcag

SEQ ID NO: 1044169 - DNA, 15 bp, Homo sapiens
tacccgcagtactca

SEQ ID NO: 1044170 - DNA, 15 bp, Homo sapiens
ttacccgcagtactc

SEQ ID NO: 1044171 - DNA, 15 bp, Homo sapiens
cttacccgcagtact

SEQ ID NO: 1044172 - DNA, 15 bp, Homo sapiens
ccttacccgcagtac

SEQ ID NO: 1044173 - DNA, 15 bp, Homo sapiens
cccttacccgcagta

SEQ ID NO: 1044174 - DNA, 15 bp, Homo sapiens
gcccttacccgcagt

SEQ ID NO: 1044175 - DNA, 15 bp, Homo sapiens
agcccttacccgcag

SEQ ID NO: 1044176 - DNA, 15 bp, Homo sapiens
aagcccttacccgca

SEQ ID NO: 1044177 - DNA, 15 bp, Homo sapiens
gaagcccttacccgc

SEQ ID NO: 1044178 - DNA, 15 bp, Homo sapiens
tgaagcccttacccg

SEQ ID NO: 1044179 - DNA, 15 bp, Homo sapiens
ctgaagcccttaccc

SEQ ID NO: 1044180 - DNA, 15 bp, Homo sapiens
gctgaagcccttacc

SEQ ID NO: 1044181 - DNA, 15 bp, Homo sapiens
tgctgaagcccttac

SEQ ID NO: 1044182 - DNA, 15 bp, Homo sapiens
atgctgaagccctta

SEQ ID NO: 1044183 - DNA, 15 bp, Homo sapiens
tatgctgaagccctt

SEQ ID NO: 1044184 - DNA, 15 bp, Homo sapiens
atatgctgaagccct

SEQ ID NO: 1044185 - DNA, 15 bp, Homo sapiens
catatgctgaagccc

SEQ ID NO: 1044186 - DNA, 15 bp, Homo sapiens
tcatatgctgaagcc

SEQ ID NO: 1044187 - DNA, 15 bp, Homo sapiens
ttcatatgctgaagc

SEQ ID NO: 1044188 - DNA, 15 bp, Homo sapiens
attcatatgctgaag

SEQ ID NO: 1044189 - DNA, 15 bp, Homo sapiens
aattcatatgctgaa

SEQ ID NO: 1044190 - DNA, 15 bp, Homo sapiens
aaattcatatgctga

SEQ ID NO: 1044191 - DNA, 15 bp, Homo sapiens
aaaattcatatgctg

SEQ ID NO: 1044192 - DNA, 15 bp, Homo sapiens
caaaattcatatgct

SEQ ID NO: 1044193 - DNA, 15 bp, Homo sapiens
acaaaattcatatgc

SEQ ID NO: 1044194 - DNA, 15 bp, Homo sapiens
cacaaaattcatatg

SEQ ID NO: 1044195 - DNA, 15 bp, Homo sapiens
tcacaaaattcatat

SEQ ID NO: 1044196 - DNA, 15 bp, Homo sapiens
ctcacaaaattcata

SEQ ID NO: 1044197 - DNA, 15 bp, Homo sapiens
cctcacaaaattcat

SEQ ID NO: 1044198 - DNA, 15 bp, Homo sapiens
tcctcacaaaattca

SEQ ID NO: 1044199 - DNA, 15 bp, Homo sapiens
gtcctcacaaaattc

SEQ ID NO: 1044200 - DNA, 15 bp, Homo sapiens
tgtcctcacaaaatt

SEQ ID NO: 1044201 - DNA, 15 bp, Homo sapiens
gtgtcctcacaaaat

SEQ ID NO: 1044202 - DNA, 15 bp, Homo sapiens
tgtgtcctcacaaaa

SEQ ID NO: 1044203 - DNA, 15 bp, Homo sapiens
ttgtgtcctcacaaa

SEQ ID NO: 1044204 - DNA, 15 bp, Homo sapiens
cttgtgtcctcacaa

SEQ ID NO: 1044205 - DNA, 15 bp, Homo sapiens
ccttgtgtcctcaca

SEQ ID NO: 1044206 - DNA, 15 bp, Homo sapiens
gccttgtgtcctcac

SEQ ID NO: 1044207 - DNA, 15 bp, Homo sapiens
tgccttgtgtcctca

SEQ ID NO: 1044208 - DNA, 15 bp, Homo sapiens
ctgccttgtgtcctc

SEQ ID NO: 1044209 - DNA, 15 bp, Homo sapiens
gctgccttgtgtcct

SEQ ID NO: 1044210 - DNA, 15 bp, Homo sapiens
ggctgccttgtgtcc

SEQ ID NO: 1044211 - DNA, 15 bp, Homo sapiens
gggctgccttgtgtc

SEQ ID NO: 1044212 - DNA, 15 bp, Homo sapiens
ggggctgccttgtgt

SEQ ID NO: 1044213 - DNA, 15 bp, Homo sapiens
aggggctgccttgtg

SEQ ID NO: 1044214 - DNA, 15 bp, Homo sapiens
taggggctgccttgt

SEQ ID NO: 1044215 - DNA, 15 bp, Homo sapiens
ttaggggctgccttg

SEQ ID NO: 1044216 - DNA, 15 bp, Homo sapiens
gttaggggctgcctt

SEQ ID NO: 1044217 - DNA, 15 bp, Homo sapiens
tgttaggggctgcct

SEQ ID NO: 1044218 - DNA, 15 bp, Homo sapiens
ctgttaggggctgcc

SEQ ID NO: 1044219 - DNA, 15 bp, Homo sapiens
cctgttaggggctgc

SEQ ID NO: 1044220 - DNA, 15 bp, Homo sapiens
acctgttaggggctg

SEQ ID NO: 1044221 - DNA, 15 bp, Homo sapiens
cacctgttaggggct

SEQ ID NO: 1044222 - DNA, 15 bp, Homo sapiens
ccacctgttaggggc

SEQ ID NO: 1044223 - DNA, 15 bp, Homo sapiens
gccacctgttagggg

SEQ ID NO: 1044224 - DNA, 15 bp, Homo sapiens
ggccacctgttaggg

SEQ ID NO: 1044225 - DNA, 15 bp, Homo sapiens
aggccacctgttagg

SEQ ID NO: 1044226 - DNA, 15 bp, Homo sapiens
taggccacctgttag

SEQ ID NO: 1044227 - DNA, 15 bp, Homo sapiens
ttaggccacctgtta

SEQ ID NO: 1044228 - DNA, 15 bp, Homo sapiens
cttaggccacctgtt

SEQ ID NO: 1044229 - DNA, 15 bp, Homo sapiens
tcttaggccacctgt

SEQ ID NO: 1044230 - DNA, 15 bp, Homo sapiens
ctcttaggccacctg

SEQ ID NO: 1044231 - DNA, 15 bp, Homo sapiens
tctcttaggccacct

SEQ ID NO: 1044232 - DNA, 15 bp, Homo sapiens
ttctcttaggccacc

SEQ ID NO: 1044233 - DNA, 15 bp, Homo sapiens
attctcttaggccac

SEQ ID NO: 1044234 - DNA, 15 bp, Homo sapiens
gattctcttaggcca

SEQ ID NO: 1044235 - DNA, 15 bp, Homo sapiens
agattctcttaggcc

SEQ ID NO: 1044236 - DNA, 15 bp, Homo sapiens
aagattctcttaggc

SEQ ID NO: 1044237 - DNA, 15 bp, Homo sapiens
aaagattctcttagg

SEQ ID NO: 1044238 - DNA, 15 bp, Homo sapiens
caaagattctcttag

SEQ ID NO: 1044239 - DNA, 15 bp, Homo sapiens
acaaagattctctta

SEQ ID NO: 1044240 - DNA, 15 bp, Homo sapiens
aacaaagattctctt

SEQ ID NO: 1044241 - DNA, 15 bp, Homo sapiens
aaacaaagattctct

SEQ ID NO: 1044242 - DNA, 15 bp, Homo sapiens
caaacaaagattctc

SEQ ID NO: 1044243 - DNA, 15 bp, Homo sapiens
tcaaacaaagattct

SEQ ID NO: 1044244 - DNA, 15 bp, Homo sapiens
ttcaaacaaagattc

SEQ ID NO: 1044245 - DNA, 15 bp, Homo sapiens
attcaaacaaagatt

SEQ ID NO: 1044246 - DNA, 15 bp, Homo sapiens
cattcaaacaaagat

SEQ ID NO: 1044247 - DNA, 15 bp, Homo sapiens
gcattcaaacaaaga

SEQ ID NO: 1044248 - DNA, 15 bp, Homo sapiens
agcattcaaacaaag

SEQ ID NO: 1044249 - DNA, 15 bp, Homo sapiens
tagcattcaaacaaa

SEQ ID NO: 1044250 - DNA, 15 bp, Homo sapiens
ttagcattcaaacaa

SEQ ID NO: 1044251 - DNA, 15 bp, Homo sapiens
attagcattcaaaca

SEQ ID NO: 1044252 - DNA, 15 bp, Homo sapiens
tattagcattcaaac

SEQ ID NO: 1044253 - DNA, 15 bp, Homo sapiens
attattagcattcaa

SEQ ID NO: 1044254 - DNA, 15 bp, Homo sapiens
gattattagcattca

SEQ ID NO: 1044255 - DNA, 15 bp, Homo sapiens
tgattattagcattc

SEQ ID NO: 1044256 - DNA, 15 bp, Homo sapiens
atgattattagcatt

SEQ ID NO: 1044257 - DNA, 15 bp, Homo sapiens
catgattattagcat

SEQ ID NO: 1044258 - DNA, 15 bp, Homo sapiens
tcatgattattagca

SEQ ID NO: 1044259 - DNA, 15 bp, Homo sapiens
atcatgattattagc

SEQ ID NO: 1044260 - DNA, 15 bp, Homo sapiens
gtatcatgattatta

SEQ ID NO: 1044261 - DNA, 15 bp, Homo sapiens
ggtatcatgattatt

SEQ ID NO: 1044262 - DNA, 15 bp, Homo sapiens
aggtatcatgattat

SEQ ID NO: 1044263 - DNA, 15 bp, Homo sapiens
taggtatcatgatta

SEQ ID NO: 1044264 - DNA, 15 bp, Homo sapiens
ttaggtatcatgatt

SEQ ID NO: 1044265 - DNA, 15 bp, Homo sapiens
gttaggtatcatgat

SEQ ID NO: 1044266 - DNA, 15 bp, Homo sapiens
tgttaggtatcatga

SEQ ID NO: 1044267 - DNA, 15 bp, Homo sapiens
atgttaggtatcatg

SEQ ID NO: 1044268 - DNA, 15 bp, Homo sapiens
catgttaggtatcat

SEQ ID NO: 1044269 - DNA, 15 bp, Homo sapiens
acatgttaggtatca

SEQ ID NO: 1044270 - DNA, 15 bp, Homo sapiens
aacatgttaggtatc

SEQ ID NO: 1044271 - DNA, 15 bp, Homo sapiens
gaacatgttaggtat

SEQ ID NO: 1044272 - DNA, 15 bp, Homo sapiens
agaacatgttaggta

SEQ ID NO: 1044273 - DNA, 15 bp, Homo sapiens
cagaacatgttaggt

SEQ ID NO: 1044274 - DNA, 15 bp, Homo sapiens
tcagaacatgttagg

SEQ ID NO: 1044275 - DNA, 15 bp, Homo sapiens
ctcagaacatgttag

SEQ ID NO: 1044276 - DNA, 15 bp, Homo sapiens
actcagaacatgtta

SEQ ID NO: 1044277 - DNA, 15 bp, Homo sapiens
cactcagaacatgtt

SEQ ID NO: 1044278 - DNA, 15 bp, Homo sapiens
acactcagaacatgt

SEQ ID NO: 1044279 - DNA, 15 bp, Homo sapiens
cacactcagaacatg

SEQ ID NO: 1044280 - DNA, 15 bp, Homo sapiens
tcacactcagaacat

SEQ ID NO: 1044281 - DNA, 15 bp, Homo sapiens
gtcacactcagaaca

SEQ ID NO: 1044282 - DNA, 15 bp, Homo sapiens
agtcacactcagaac

SEQ ID NO: 1044283 - DNA, 15 bp, Homo sapiens
gagtcacactcagaa

SEQ ID NO: 1044284 - DNA, 15 bp, Homo sapiens
tgagtcacactcaga

SEQ ID NO: 1044285 - DNA, 15 bp, Homo sapiens
gtgagtcacactcag

SEQ ID NO: 1044286 - DNA, 15 bp, Homo sapiens
agtgagtcacactca

SEQ ID NO: 1044287 - DNA, 15 bp, Homo sapiens
tagtgagtcacactc

SEQ ID NO: 1044288 - DNA, 15 bp, Homo sapiens
atagtgagtcacact

SEQ ID NO: 1044289 - DNA, 15 bp, Homo sapiens
catagtgagtcacac

SEQ ID NO: 1044290 - DNA, 15 bp, Homo sapiens
acatagtgagtcaca

SEQ ID NO: 1044291 - DNA, 15 bp, Homo sapiens
cacatagtgagtcac

SEQ ID NO: 1044292 - DNA, 15 bp, Homo sapiens
gcacatagtgagtca

SEQ ID NO: 1044293 - DNA, 15 bp, Homo sapiens
ggcacatagtgagtc

SEQ ID NO: 1044294 - DNA, 15 bp, Homo sapiens
tggcacatagtgagt

SEQ ID NO: 1044295 - DNA, 15 bp, Homo sapiens
ctggcacatagtgag

SEQ ID NO: 1044296 - DNA, 15 bp, Homo sapiens
tctggcacatagtga

SEQ ID NO: 1044297 - DNA, 15 bp, Homo sapiens
ctctggcacatagtg

SEQ ID NO: 1044298 - DNA, 15 bp, Homo sapiens
tctctggcacatagt

SEQ ID NO: 1044299 - DNA, 15 bp, Homo sapiens
gtctctggcacatag

SEQ ID NO: 1044300 - DNA, 15 bp, Homo sapiens
agtctctggcacata

SEQ ID NO: 1044301 - DNA, 15 bp, Homo sapiens
aagtctctggcacat

SEQ ID NO: 1044302 - DNA, 15 bp, Homo sapiens
gaagtctctggcaca

SEQ ID NO: 1044303 - DNA, 15 bp, Homo sapiens
agaagtctctggcac

SEQ ID NO: 1044304 - DNA, 15 bp, Homo sapiens
tagaagtctctggca

SEQ ID NO: 1044305 - DNA, 15 bp, Homo sapiens
ttagaagtctctggc

SEQ ID NO: 1044306 - DNA, 15 bp, Homo sapiens
cttagaagtctctgg

SEQ ID NO: 1044307 - DNA, 15 bp, Homo sapiens
acttagaagtctctg

SEQ ID NO: 1044308 - DNA, 15 bp, Homo sapiens
tacttagaagtctct

SEQ ID NO: 1044309 - DNA, 15 bp, Homo sapiens
gtacttagaagtctc

SEQ ID NO: 1044310 - DNA, 15 bp, Homo sapiens
agtacttagaagtct

SEQ ID NO: 1044311 - DNA, 15 bp, Homo sapiens
aagtacttagaagtc

SEQ ID NO: 1044312 - DNA, 15 bp, Homo sapiens
aaagtacttagaagt

SEQ ID NO: 1044313 - DNA, 15 bp, Homo sapiens
caaagtacttagaag

SEQ ID NO: 1044314 - DNA, 15 bp, Homo sapiens
gcaaagtacttagaa

SEQ ID NO: 1044315 - DNA, 15 bp, Homo sapiens
tgcaaagtacttaga

SEQ ID NO: 1044316 - DNA, 15 bp, Homo sapiens
atgcaaagtacttag

SEQ ID NO: 1044317 - DNA, 15 bp, Homo sapiens
catgcaaagtactta

SEQ ID NO: 1044318 - DNA, 15 bp, Homo sapiens
acatgcaaagtactt

SEQ ID NO: 1044319 - DNA, 15 bp, Homo sapiens
tacatgcaaagtact

SEQ ID NO: 1044320 - DNA, 15 bp, Homo sapiens
atacatgcaaagtac

SEQ ID NO: 1044321 - DNA, 15 bp, Homo sapiens
aatacatgcaaagta

SEQ ID NO: 1044322 - DNA, 15 bp, Homo sapiens
taatacatgcaaagt

SEQ ID NO: 1044323 - DNA, 15 bp, Homo sapiens
ataatacatgcaaag

SEQ ID NO: 1044324 - DNA, 15 bp, Homo sapiens
gataatacatgcaaa

SEQ ID NO: 1044325 - DNA, 15 bp, Homo sapiens
tgataatacatgcaa

SEQ ID NO: 1044326 - DNA, 15 bp, Homo sapiens
gtgataatacatgca

SEQ ID NO: 1044327 - DNA, 15 bp, Homo sapiens
tgtgataatacatgc

SEQ ID NO: 1044328 - DNA, 15 bp, Homo sapiens
ttgtgataatacatg

SEQ ID NO: 1044329 - DNA, 15 bp, Homo sapiens
gttgtgataatacat

SEQ ID NO: 1044330 - DNA, 15 bp, Homo sapiens
agttgtgataataca

SEQ ID NO: 1044331 - DNA, 15 bp, Homo sapiens
tagttgtgataatac

SEQ ID NO: 1044332 - DNA, 15 bp, Homo sapiens
atagttgtgataata

SEQ ID NO: 1044333 - DNA, 15 bp, Homo sapiens
aatagttgtgataat

SEQ ID NO: 1044334 - DNA, 15 bp, Homo sapiens
taatagttgtgataa

SEQ ID NO: 1044335 - DNA, 15 bp, Homo sapiens
ataatagttgtgata

SEQ ID NO: 1044336 - DNA, 15 bp, Homo sapiens
gataatagttgtgat

SEQ ID NO: 1044337 - DNA, 15 bp, Homo sapiens
tgataatagttgtga

SEQ ID NO: 1044338 - DNA, 15 bp, Homo sapiens
gtgataatagttgtg

SEQ ID NO: 1044339 - DNA, 15 bp, Homo sapiens
tgtgataatagttgt

SEQ ID NO: 1044340 - DNA, 15 bp, Homo sapiens
ttgtgataatagttg

SEQ ID NO: 1044341 - DNA, 15 bp, Homo sapiens
attgtgataatagtt

SEQ ID NO: 1044342 - DNA, 15 bp, Homo sapiens
aattgtgataatagt

SEQ ID NO: 1044343 - DNA, 15 bp, Homo sapiens
taattgtgataatag

SEQ ID NO: 1044344 - DNA, 15 bp, Homo sapiens
ataattgtgataata

SEQ ID NO: 1044345 - DNA, 15 bp, Homo sapiens
tataattgtgataat

SEQ ID NO: 1044346 - DNA, 15 bp, Homo sapiens
ctataattgtgataa

SEQ ID NO: 1044347 - DNA, 15 bp, Homo sapiens
tctataattgtgata

SEQ ID NO: 1044348 - DNA, 15 bp, Homo sapiens
atctataattgtgat

SEQ ID NO: 1044349 - DNA, 15 bp, Homo sapiens
aatctataattgtga

SEQ ID NO: 1044350 - DNA, 15 bp, Homo sapiens
taatctataattgtg

SEQ ID NO: 1044351 - DNA, 15 bp, Homo sapiens
ataatctataattgt

SEQ ID NO: 1044352 - DNA, 15 bp, Homo sapiens
tataatctataattg

SEQ ID NO: 1044353 - DNA, 15 bp, Homo sapiens
atataatctataatt

SEQ ID NO: 1044354 - DNA, 15 bp, Homo sapiens
tatataatctataat

SEQ ID NO: 1044355 - DNA, 15 bp, Homo sapiens
ttatataatctataa

SEQ ID NO: 1044356 - DNA, 15 bp, Homo sapiens
attatataatctata

SEQ ID NO: 1044357 - DNA, 15 bp, Homo sapiens
aattatataatctat

SEQ ID NO: 1044358 - DNA, 15 bp, Homo sapiens
taattatataatcta

SEQ ID NO: 1044359 - DNA, 15 bp, Homo sapiens
ataattatataatct

SEQ ID NO: 1044360 - DNA, 15 bp, Homo sapiens
aataattatataatc

SEQ ID NO: 1044361 - DNA, 15 bp, Homo sapiens
caataattatataat

SEQ ID NO: 1044362 - DNA, 15 bp, Homo sapiens
tcaataattatataa

SEQ ID NO: 1044363 - DNA, 15 bp, Homo sapiens
atcaataattatata

SEQ ID NO: 1044364 - DNA, 15 bp, Homo sapiens
aatcaataattatat

SEQ ID NO: 1044365 - DNA, 15 bp, Homo sapiens
taatcaataattata

SEQ ID NO: 1044366 - DNA, 15 bp, Homo sapiens
ataatcaataattat

SEQ ID NO: 1044367 - DNA, 15 bp, Homo sapiens
tataatcaataatta

SEQ ID NO: 1044368 - DNA, 15 bp, Homo sapiens
atataatcaataatt

SEQ ID NO: 1044369 - DNA, 15 bp, Homo sapiens
tatataatcaataat

SEQ ID NO: 1044370 - DNA, 15 bp, Homo sapiens
ctatataatcaataa

SEQ ID NO: 1044371 - DNA, 15 bp, Homo sapiens
tctatataatcaata

SEQ ID NO: 1044372 - DNA, 15 bp, Homo sapiens
atctatataatcaat

SEQ ID NO: 1044373 - DNA, 15 bp, Homo sapiens
aatctatataatcaa

SEQ ID NO: 1044374 - DNA, 15 bp, Homo sapiens
taatctatataatca

SEQ ID NO: 1044375 - DNA, 15 bp, Homo sapiens
ataatctatataatc

SEQ ID NO: 1044376 - DNA, 15 bp, Homo sapiens
tataatctatataat

SEQ ID NO: 1044377 - DNA, 15 bp, Homo sapiens
ctataatctatataa

SEQ ID NO: 1044378 - DNA, 15 bp, Homo sapiens
tctataatctatata

SEQ ID NO: 1044379 - DNA, 15 bp, Homo sapiens
atctataatctatat

SEQ ID NO: 1044380 - DNA, 15 bp, Homo sapiens
gatctataatctata

SEQ ID NO: 1044381 - DNA, 15 bp, Homo sapiens
tgatctataatctat

SEQ ID NO: 1044382 - DNA, 15 bp, Homo sapiens
ttgatctataatcta

SEQ ID NO: 1044383 - DNA, 15 bp, Homo sapiens
attgatctataatct

SEQ ID NO: 1044384 - DNA, 15 bp, Homo sapiens
aattgatctataatc

SEQ ID NO: 1044385 - DNA, 15 bp, Homo sapiens
taattgatctataat

SEQ ID NO: 1044386 - DNA, 15 bp, Homo sapiens
ataattgatctataa

SEQ ID NO: 1044387 - DNA, 15 bp, Homo sapiens
tataattgatctata

SEQ ID NO: 1044388 - DNA, 15 bp, Homo sapiens
ctataattgatctat

SEQ ID NO: 1044389 - DNA, 15 bp, Homo sapiens
tctataattgatcta

SEQ ID NO: 1044390 - DNA, 15 bp, Homo sapiens
atctataattgatct

SEQ ID NO: 1044391 - DNA, 15 bp, Homo sapiens
catctataattgatc

SEQ ID NO: 1044392 - DNA, 15 bp, Homo sapiens
tcatctataattgat

SEQ ID NO: 1044393 - DNA, 15 bp, Homo sapiens
gtcatctataattga

SEQ ID NO: 1044394 - DNA, 15 bp, Homo sapiens
agtcatctataattg

SEQ ID NO: 1044395 - DNA, 15 bp, Homo sapiens
tagtcatctataatt

SEQ ID NO: 1044396 - DNA, 15 bp, Homo sapiens
gtagtcatctataat

SEQ ID NO: 1044397 - DNA, 15 bp, Homo sapiens
ggtagtcatctataa

SEQ ID NO: 1044398 - DNA, 15 bp, Homo sapiens
tggtagtcatctata

SEQ ID NO: 1044399 - DNA, 15 bp, Homo sapiens
atggtagtcatctat

SEQ ID NO: 1044400 - DNA, 15 bp, Homo sapiens
gatggtagtcatcta

SEQ ID NO: 1044401 - DNA, 15 bp, Homo sapiens
agatggtagtcatct

SEQ ID NO: 1044402 - DNA, 15 bp, Homo sapiens
aagatggtagtcatc

SEQ ID NO: 1044403 - DNA, 15 bp, Homo sapiens
gaagatggtagtcat

SEQ ID NO: 1044404 - DNA, 15 bp, Homo sapiens
agaagatggtagtca

SEQ ID NO: 1044405 - DNA, 15 bp, Homo sapiens
gagaagatggtagtc

SEQ ID NO: 1044406 - DNA, 15 bp, Homo sapiens
agagaagatggtagt

SEQ ID NO: 1044407 - DNA, 15 bp, Homo sapiens
cagagaagatggtag

SEQ ID NO: 1044408 - DNA, 15 bp, Homo sapiens
tcagagaagatggta

SEQ ID NO: 1044409 - DNA, 15 bp, Homo sapiens
ttcagagaagatggt

SEQ ID NO: 1044410 - DNA, 15 bp, Homo sapiens
cttcagagaagatgg

SEQ ID NO: 1044411 - DNA, 15 bp, Homo sapiens
tcttcagagaagatg

SEQ ID NO: 1044412 - DNA, 15 bp, Homo sapiens
gtcttcagagaagat

SEQ ID NO: 1044413 - DNA, 15 bp, Homo sapiens
agtcttcagagaaga

SEQ ID NO: 1044414 - DNA, 15 bp, Homo sapiens
aagtcttcagagaag

SEQ ID NO: 1044415 - DNA, 15 bp, Homo sapiens
taagtcttcagagaa

SEQ ID NO: 1044416 - DNA, 15 bp, Homo sapiens
gtaagtcttcagaga

SEQ ID NO: 1044417 - DNA, 15 bp, Homo sapiens
agtaagtcttcagag

SEQ ID NO: 1044418 - DNA, 15 bp, Homo sapiens
aagtaagtcttcaga

SEQ ID NO: 1044419 - DNA, 15 bp, Homo sapiens
aaagtaagtcttcag

SEQ ID NO: 1044420 - DNA, 15 bp, Homo sapiens
caaagtaagtcttca

SEQ ID NO: 1044421 - DNA, 15 bp, Homo sapiens
ccaaagtaagtcttc

SEQ ID NO: 1044422 - DNA, 15 bp, Homo sapiens
accaaagtaagtctt

SEQ ID NO: 1044423 - DNA, 15 bp, Homo sapiens
caccaaagtaagtct

SEQ ID NO: 1044424 - DNA, 15 bp, Homo sapiens
acaccaaagtaagtc

SEQ ID NO: 1044425 - DNA, 15 bp, Homo sapiens
tacaccaaagtaagt

SEQ ID NO: 1044426 - DNA, 15 bp, Homo sapiens
ttacaccaaagtaag

SEQ ID NO: 1044427 - DNA, 15 bp, Homo sapiens
attacaccaaagtaa

SEQ ID NO: 1044428 - DNA, 15 bp, Homo sapiens
aattacaccaaagta

SEQ ID NO: 1044429 - DNA, 15 bp, Homo sapiens
taattacaccaaagt

SEQ ID NO: 1044430 - DNA, 15 bp, Homo sapiens
ataattacaccaaag

SEQ ID NO: 1044431 - DNA, 15 bp, Homo sapiens
cataattacaccaaa

SEQ ID NO: 1044432 - DNA, 15 bp, Homo sapiens
acataattacaccaa

SEQ ID NO: 1044433 - DNA, 15 bp, Homo sapiens
cacataattacacca

SEQ ID NO: 1044434 - DNA, 15 bp, Homo sapiens
tcacataattacacc

SEQ ID NO: 1044435 - DNA, 15 bp, Homo sapiens
gtcacataattacac

SEQ ID NO: 1044436 - DNA, 15 bp, Homo sapiens
agtcacataattaca

SEQ ID NO: 1044437 - DNA, 15 bp, Homo sapiens
cagtcacataattac

SEQ ID NO: 1044438 - DNA, 15 bp, Homo sapiens
acagtcacataatta

SEQ ID NO: 1044439 - DNA, 15 bp, Homo sapiens
tacagtcacataatt

SEQ ID NO: 1044440 - DNA, 15 bp, Homo sapiens
ctacagtcacataat

SEQ ID NO: 1044441 - DNA, 15 bp, Homo sapiens
actacagtcacataa

SEQ ID NO: 1044442 - DNA, 15 bp, Homo sapiens
cactacagtcacata

SEQ ID NO: 1044443 - DNA, 15 bp, Homo sapiens
tcactacagtcacat

SEQ ID NO: 1044444 - DNA, 15 bp, Homo sapiens
ttcactacagtcaca

SEQ ID NO: 1044445 - DNA, 15 bp, Homo sapiens
gttcactacagtcac

SEQ ID NO: 1044446 - DNA, 15 bp, Homo sapiens
tgttcactacagtca

SEQ ID NO: 1044447 - DNA, 15 bp, Homo sapiens
gtgttcactacagtc

SEQ ID NO: 1044448 - DNA, 15 bp, Homo sapiens
agtgttcactacagt

SEQ ID NO: 1044449 - DNA, 15 bp, Homo sapiens
tagtgttcactacag

SEQ ID NO: 1044450 - DNA, 15 bp, Homo sapiens
atagtgttcactaca

SEQ ID NO: 1044451 - DNA, 15 bp, Homo sapiens
catagtgttcactac

SEQ ID NO: 1044452 - DNA, 15 bp, Homo sapiens
gcatagtgttcacta

SEQ ID NO: 1044453 - DNA, 15 bp, Homo sapiens
ggcatagtgttcact

SEQ ID NO: 1044454 - DNA, 15 bp, Homo sapiens
gggcatagtgttcac

SEQ ID NO: 1044455 - DNA, 15 bp, Homo sapiens
agggcatagtgttca

SEQ ID NO: 1044456 - DNA, 15 bp, Homo sapiens
cagggcatagtgttc

SEQ ID NO: 1044457 - DNA, 15 bp, Homo sapiens
ccagggcatagtgtt

SEQ ID NO: 1044458 - DNA, 15 bp, Homo sapiens
accagggcatagtgt

SEQ ID NO: 1044459 - DNA, 15 bp, Homo sapiens
gaccagggcatagtg

SEQ ID NO: 1044460 - DNA, 15 bp, Homo sapiens
ggaccagggcatagt

SEQ ID NO: 1044461 - DNA, 15 bp, Homo sapiens
gggaccagggcatag

SEQ ID NO: 1044462 - DNA, 15 bp, Homo sapiens
agggaccagggcata

SEQ ID NO: 1044463 - DNA, 15 bp, Homo sapiens
cagggaccagggcat

SEQ ID NO: 1044464 - DNA, 15 bp, Homo sapiens
tcagggaccagggca

SEQ ID NO: 1044465 - DNA, 15 bp, Homo sapiens
gtcagggaccagggc

SEQ ID NO: 1044466 - DNA, 15 bp, Homo sapiens
ggtcagggaccaggg

SEQ ID NO: 1044467 - DNA, 15 bp, Homo sapiens
aggtcagggaccagg

SEQ ID NO: 1044468 - DNA, 15 bp, Homo sapiens
aaggtcagggaccag

SEQ ID NO: 1044469 - DNA, 15 bp, Homo sapiens
caaggtcagggacca

SEQ ID NO: 1044470 - DNA, 15 bp, Homo sapiens
ccaaggtcagggacc

SEQ ID NO: 1044471 - DNA, 15 bp, Homo sapiens
tccaaggtcagggac

SEQ ID NO: 1044472 - DNA, 15 bp, Homo sapiens
atccaaggtcaggga

SEQ ID NO: 1044473 - DNA, 15 bp, Homo sapiens
catccaaggtcaggg

SEQ ID NO: 1044474 - DNA, 15 bp, Homo sapiens
gcatccaaggtcagg

SEQ ID NO: 1044475 - DNA, 15 bp, Homo sapiens
ggcatccaaggtcag

SEQ ID NO: 1044476 - DNA, 15 bp, Homo sapiens
aggcatccaaggtca

SEQ ID NO: 1044477 - DNA, 15 bp, Homo sapiens
caggcatccaaggtc

SEQ ID NO: 1044478 - DNA, 15 bp, Homo sapiens
acaggcatccaaggt

SEQ ID NO: 1044479 - DNA, 15 bp, Homo sapiens
cacaggcatccaagg

SEQ ID NO: 1044480 - DNA, 15 bp, Homo sapiens
tcacaggcatccaag

SEQ ID NO: 1044481 - DNA, 15 bp, Homo sapiens
atcacaggcatccaa

SEQ ID NO: 1044482 - DNA, 15 bp, Homo sapiens
aatcacaggcatcca

SEQ ID NO: 1044483 - DNA, 15 bp, Homo sapiens
gaatcacaggcatcc

SEQ ID NO: 1044484 - DNA, 15 bp, Homo sapiens
cgaatcacaggcatc

SEQ ID NO: 1044485 - DNA, 15 bp, Homo sapiens
tcgaatcacaggcat

SEQ ID NO: 1044486 - DNA, 15 bp, Homo sapiens
atcgaatcacaggca

SEQ ID NO: 1044487 - DNA, 15 bp, Homo sapiens
catcgaatcacaggc

SEQ ID NO: 1044488 - DNA, 15 bp, Homo sapiens
tcatcgaatcacagg

SEQ ID NO: 1044489 - DNA, 15 bp, Homo sapiens
ctcatcgaatcacag

SEQ ID NO: 1044490 - DNA, 15 bp, Homo sapiens
tctcatcgaatcaca

SEQ ID NO: 1044491 - DNA, 15 bp, Homo sapiens
gtctcatcgaatcac

SEQ ID NO: 1044492 - DNA, 15 bp, Homo sapiens
tgtctcatcgaatca

SEQ ID NO: 1044493 - DNA, 15 bp, Homo sapiens
atgtctcatcgaatc

SEQ ID NO: 1044494 - DNA, 15 bp, Homo sapiens
catgtctcatcgaat

SEQ ID NO: 1044495 - DNA, 15 bp, Homo sapiens
ccatgtctcatcgaa

SEQ ID NO: 1044496 - DNA, 15 bp, Homo sapiens
tccatgtctcatcga

SEQ ID NO: 1044497 - DNA, 15 bp, Homo sapiens
ttccatgtctcatcg

SEQ ID NO: 1044498 - DNA, 15 bp, Homo sapiens
attccatgtctcatc

SEQ ID NO: 1044499 - DNA, 15 bp, Homo sapiens
tattccatgtctcat

SEQ ID NO: 1044500 - DNA, 15 bp, Homo sapiens
ttattccatgtctca

SEQ ID NO: 1044501 - DNA, 15 bp, Homo sapiens
attattccatgtctc

SEQ ID NO: 1044502 - DNA, 15 bp, Homo sapiens
cattattccatgtct

SEQ ID NO: 1044503 - DNA, 15 bp, Homo sapiens
ccattattccatgtc

SEQ ID NO: 1044504 - DNA, 15 bp, Homo sapiens
cccattattccatgt

SEQ ID NO: 1044505 - DNA, 15 bp, Homo sapiens
tcccattattccatg

SEQ ID NO: 1044506 - DNA, 15 bp, Homo sapiens
ctcccattattccat

SEQ ID NO: 1044507 - DNA, 15 bp, Homo sapiens
tctcccattattcca

SEQ ID NO: 1044508 - DNA, 15 bp, Homo sapiens
gtctcccattattcc

SEQ ID NO: 1044509 - DNA, 15 bp, Homo sapiens
agtctcccattattc

SEQ ID NO: 1044510 - DNA, 15 bp, Homo sapiens
gagtctcccattatt

SEQ ID NO: 1044511 - DNA, 15 bp, Homo sapiens
agagtctcccattat

SEQ ID NO: 1044512 - DNA, 15 bp, Homo sapiens
aagagtctcccatta

SEQ ID NO: 1044513 - DNA, 15 bp, Homo sapiens
taagagtctcccatt

SEQ ID NO: 1044514 - DNA, 15 bp, Homo sapiens
gtaagagtctcccat

SEQ ID NO: 1044515 - DNA, 15 bp, Homo sapiens
ggtaagagtctccca

SEQ ID NO: 1044516 - DNA, 15 bp, Homo sapiens
gggtaagagtctccc

SEQ ID NO: 1044517 - DNA, 15 bp, Homo sapiens
agggtaagagtctcc

SEQ ID NO: 1044518 - DNA, 15 bp, Homo sapiens
gagggtaagagtctc

SEQ ID NO: 1044519 - DNA, 15 bp, Homo sapiens
tgagggtaagagtct

SEQ ID NO: 1044520 - DNA, 15 bp, Homo sapiens
atgagggtaagagtc

SEQ ID NO: 1044521 - DNA, 15 bp, Homo sapiens
catgagggtaagagt

SEQ ID NO: 1044522 - DNA, 15 bp, Homo sapiens
acatgagggtaagag

SEQ ID NO: 1044523 - DNA, 15 bp, Homo sapiens
aacatgagggtaaga

SEQ ID NO: 1044524 - DNA, 15 bp, Homo sapiens
aaacatgagggtaag

SEQ ID NO: 1044525 - DNA, 15 bp, Homo sapiens
aaaacatgagggtaa

SEQ ID NO: 1044526 - DNA, 15 bp, Homo sapiens
caaaacatgagggta

SEQ ID NO: 1044527 - DNA, 15 bp, Homo sapiens
tcaaaacatgagggt

SEQ ID NO: 1044528 - DNA, 15 bp, Homo sapiens
atcaaaacatgaggg

SEQ ID NO: 1044529 - DNA, 15 bp, Homo sapiens
aatcaaaacatgagg

SEQ ID NO: 1044530 - DNA, 15 bp, Homo sapiens
caatcaaaacatgag

SEQ ID NO: 1044531 - DNA, 15 bp, Homo sapiens
ccaatcaaaacatga

SEQ ID NO: 1044532 - DNA, 15 bp, Homo sapiens
accaatcaaaacatg

SEQ ID NO: 1044533 - DNA, 15 bp, Homo sapiens
taccaatcaaaacat

SEQ ID NO: 1044534 - DNA, 15 bp, Homo sapiens
ctaccaatcaaaaca

SEQ ID NO: 1044535 - DNA, 15 bp, Homo sapiens
gctaccaatcaaaac

SEQ ID NO: 1044536 - DNA, 15 bp, Homo sapiens
tgctaccaatcaaaa

SEQ ID NO: 1044537 - DNA, 15 bp, Homo sapiens
ctgctaccaatcaaa

SEQ ID NO: 1044538 - DNA, 15 bp, Homo sapiens
tctgctaccaatcaa

SEQ ID NO: 1044539 - DNA, 15 bp, Homo sapiens
atctgctaccaatca

SEQ ID NO: 1044540 - DNA, 15 bp, Homo sapiens
gatctgctaccaatc

SEQ ID NO: 1044541 - DNA, 15 bp, Homo sapiens
agatctgctaccaat

SEQ ID NO: 1044542 - DNA, 15 bp, Homo sapiens
gagatctgctaccaa

SEQ ID NO: 1044543 - DNA, 15 bp, Homo sapiens
ggagatctgctacca

SEQ ID NO: 1044544 - DNA, 15 bp, Homo sapiens
cggagatctgctacc

SEQ ID NO: 1044545 - DNA, 15 bp, Homo sapiens
ccggagatctgctac

SEQ ID NO: 1044546 - DNA, 15 bp, Homo sapiens
tccggagatctgcta

SEQ ID NO: 1044547 - DNA, 15 bp, Homo sapiens
ttccggagatctgct

SEQ ID NO: 1044548 - DNA, 15 bp, Homo sapiens
attccggagatctgc

SEQ ID NO: 1044549 - DNA, 15 bp, Homo sapiens
cattccggagatctg

SEQ ID NO: 1044550 - DNA, 15 bp, Homo sapiens
acattccggagatct

SEQ ID NO: 1044551 - DNA, 15 bp, Homo sapiens
cacattccggagatc

SEQ ID NO: 1044552 - DNA, 15 bp, Homo sapiens
gcacattccggagat

SEQ ID NO: 1044553 - DNA, 15 bp, Homo sapiens
tgcacattccggaga

SEQ ID NO: 1044554 - DNA, 15 bp, Homo sapiens
ttgcacattccggag

SEQ ID NO: 1044555 - DNA, 15 bp, Homo sapiens
tttgcacattccgga

SEQ ID NO: 1044556 - DNA, 15 bp, Homo sapiens
ctttgcacattccgg

SEQ ID NO: 1044557 - DNA, 15 bp, Homo sapiens
actttgcacattccg

SEQ ID NO: 1044558 - DNA, 15 bp, Homo sapiens
aactttgcacattcc

SEQ ID NO: 1044559 - DNA, 15 bp, Homo sapiens
aaactttgcacattc

SEQ ID NO: 1044560 - DNA, 15 bp, Homo sapiens
aaaactttgcacatt

SEQ ID NO: 1044561 - DNA, 15 bp, Homo sapiens
aaaaactttgcacat

SEQ ID NO: 1044562 - DNA, 15 bp, Homo sapiens
aaaaaactttgcaca

SEQ ID NO: 1044563 - DNA, 15 bp, Homo sapiens
taaaaaactttgcac

SEQ ID NO: 1044564 - DNA, 15 bp, Homo sapiens
ctaaaaaactttgca

SEQ ID NO: 1044565 - DNA, 15 bp, Homo sapiens
actaaaaaactttgc

SEQ ID NO: 1044566 - DNA, 15 bp, Homo sapiens
aactaaaaaactttg

SEQ ID NO: 1044567 - DNA, 15 bp, Homo sapiens
caactaaaaaacttt

SEQ ID NO: 1044568 - DNA, 15 bp, Homo sapiens
acaactaaaaaactt

SEQ ID NO: 1044569 - DNA, 15 bp, Homo sapiens
gacaactaaaaaact

SEQ ID NO: 1044570 - DNA, 15 bp, Homo sapiens
cgacaactaaaaaac

SEQ ID NO: 1044571 - DNA, 15 bp, Homo sapiens
acgacaactaaaaaa

SEQ ID NO: 1044572 - DNA, 15 bp, Homo sapiens
aacgacaactaaaaa

SEQ ID NO: 1044573 - DNA, 15 bp, Homo sapiens
caacgacaactaaaa

SEQ ID NO: 1044574 - DNA, 15 bp, Homo sapiens
acaacgacaactaaa

SEQ ID NO: 1044575 - DNA, 15 bp, Homo sapiens
aacaacgacaactaa

SEQ ID NO: 1044576 - DNA, 15 bp, Homo sapiens
caacaacgacaacta

SEQ ID NO: 1044577 - DNA, 15 bp, Homo sapiens
acaacaacgacaact

SEQ ID NO: 1044578 - DNA, 15 bp, Homo sapiens
aacaacaacgacaac

SEQ ID NO: 1044579 - DNA, 15 bp, Homo sapiens
caacaacaacgacaa

SEQ ID NO: 1044580 - DNA, 15 bp, Homo sapiens
acaacaacaacgaca

SEQ ID NO: 1044581 - DNA, 15 bp, Homo sapiens
aacaacaacaacgac

SEQ ID NO: 1044582 - DNA, 15 bp, Homo sapiens
caacaacaacaacga

SEQ ID NO: 1044583 - DNA, 15 bp, Homo sapiens
acaacaacaacaacg

SEQ ID NO: 1044584 - DNA, 15 bp, Homo sapiens
gaaacaacaacaaca

SEQ ID NO: 1044585 - DNA, 15 bp, Homo sapiens
cgaaacaacaacaac

SEQ ID NO: 1044586 - DNA, 15 bp, Homo sapiens
tcgaaacaacaacaa

SEQ ID NO: 1044587 - DNA, 15 bp, Homo sapiens
ctcgaaacaacaaca

SEQ ID NO: 1044588 - DNA, 15 bp, Homo sapiens
tctcgaaacaacaac

SEQ ID NO: 1044589 - DNA, 15 bp, Homo sapiens
gtctcgaaacaacaa

SEQ ID NO: 1044590 - DNA, 15 bp, Homo sapiens
agtctcgaaacaaca

SEQ ID NO: 1044591 - DNA, 15 bp, Homo sapiens
cagtctcgaaacaac

SEQ ID NO: 1044592 - DNA, 15 bp, Homo sapiens
acagtctcgaaacaa

SEQ ID NO: 1044593 - DNA, 15 bp, Homo sapiens
gacagtctcgaaaca

SEQ ID NO: 1044594 - DNA, 15 bp, Homo sapiens
cgacagtctcgaaac

SEQ ID NO: 1044595 - DNA, 15 bp, Homo sapiens
gcgacagtctcgaaa

SEQ ID NO: 1044596 - DNA, 15 bp, Homo sapiens
ggcgacagtctcgaa

SEQ ID NO: 1044597 - DNA, 15 bp, Homo sapiens
gggcgacagtctcga

SEQ ID NO: 1044598 - DNA, 15 bp, Homo sapiens
tgggcgacagtctcg

SEQ ID NO: 1044599 - DNA, 15 bp, Homo sapiens
ctgggcgacagtctc

SEQ ID NO: 1044600 - DNA, 15 bp, Homo sapiens
gcctgggcgacagtc

SEQ ID NO: 1044601 - DNA, 15 bp, Homo sapiens
agcctgggcgacagt

SEQ ID NO: 1044602 - DNA, 15 bp, Homo sapiens
attcagcctgggcga

SEQ ID NO: 1044603 - DNA, 15 bp, Homo sapiens
cattcagcctgggcg

SEQ ID NO: 1044604 - DNA, 15 bp, Homo sapiens
gcattcagcctgggc

SEQ ID NO: 1044605 - DNA, 15 bp, Homo sapiens
tgcattcagcctggg

SEQ ID NO: 1044606 - DNA, 15 bp, Homo sapiens
ttgcattcagcctgg

SEQ ID NO: 1044607 - DNA, 15 bp, Homo sapiens
attgcattcagcctg

SEQ ID NO: 1044608 - DNA, 15 bp, Homo sapiens
cattgcattcagcct

SEQ ID NO: 1044609 - DNA, 15 bp, Homo sapiens
ccattgcattcagcc

SEQ ID NO: 1044610 - DNA, 15 bp, Homo sapiens
gccattgcattcagc

SEQ ID NO: 1044611 - DNA, 15 bp, Homo sapiens
tgccattgcattcag

SEQ ID NO: 1044612 - DNA, 15 bp, Homo sapiens
gtgccattgcattca

SEQ ID NO: 1044613 - DNA, 15 bp, Homo sapiens
cgtgccattgcattc

SEQ ID NO: 1044614 - DNA, 15 bp, Homo sapiens
tcgtgccattgcatt

SEQ ID NO: 1044615 - DNA, 15 bp, Homo sapiens
atcgtgccattgcat

SEQ ID NO: 1044616 - DNA, 15 bp, Homo sapiens
tgatcgtgccattgc

SEQ ID NO: 1044617 - DNA, 15 bp, Homo sapiens
gtgatcgtgccattg

SEQ ID NO: 1044618 - DNA, 15 bp, Homo sapiens
cgtgatcgtgccatt

SEQ ID NO: 1044619 - DNA, 15 bp, Homo sapiens
ccgtgatcgtgccat

SEQ ID NO: 1044620 - DNA, 15 bp, Homo sapiens
gccgtgatcgtgcca

SEQ ID NO: 1044621 - DNA, 15 bp, Homo sapiens
agccgtgatcgtgcc

SEQ ID NO: 1044622 - DNA, 15 bp, Homo sapiens
gagccgtgatcgtgc

SEQ ID NO: 1044623 - DNA, 15 bp, Homo sapiens
tgagccgtgatcgtg

SEQ ID NO: 1044624 - DNA, 15 bp, Homo sapiens
gtgagccgtgatcgt

SEQ ID NO: 1044625 - DNA, 15 bp, Homo sapiens
tagaggctgcagtga

SEQ ID NO: 1044626 - DNA, 15 bp, Homo sapiens
gtagaggctgcagtg

SEQ ID NO: 1044627 - DNA, 15 bp, Homo sapiens
agtagaggctgcagt

SEQ ID NO: 1044628 - DNA, 15 bp, Homo sapiens
aagtagaggctgcag

SEQ ID NO: 1044629 - DNA, 15 bp, Homo sapiens
gaagtagaggctgca

SEQ ID NO: 1044630 - DNA, 15 bp, Homo sapiens
ggaagtagaggctgc

SEQ ID NO: 1044631 - DNA, 15 bp, Homo sapiens
cggaagtagaggctg

SEQ ID NO: 1044632 - DNA, 15 bp, Homo sapiens
ccggaagtagaggct

SEQ ID NO: 1044633 - DNA, 15 bp, Homo sapiens
cccggaagtagaggc

SEQ ID NO: 1044634 - DNA, 15 bp, Homo sapiens
ccccggaagtagagg

SEQ ID NO: 1044635 - DNA, 15 bp, Homo sapiens
gccccggaagtagag

SEQ ID NO: 1044636 - DNA, 15 bp, Homo sapiens
agccccggaagtaga

SEQ ID NO: 1044637 - DNA, 15 bp, Homo sapiens
gagccccggaagtag

SEQ ID NO: 1044638 - DNA, 15 bp, Homo sapiens
tgagccccggaagta

SEQ ID NO: 1044639 - DNA, 15 bp, Homo sapiens
ttgagccccggaagt

SEQ ID NO: 1044640 - DNA, 15 bp, Homo sapiens
cttgagccccggaag

SEQ ID NO: 1044641 - DNA, 15 bp, Homo sapiens
acttgagccccggaa

SEQ ID NO: 1044642 - DNA, 15 bp, Homo sapiens
cacttgagccccgga

SEQ ID NO: 1044643 - DNA, 15 bp, Homo sapiens
tcacttgagccccgg

SEQ ID NO: 1044644 - DNA, 15 bp, Homo sapiens
atcacttgagccccg

SEQ ID NO: 1044645 - DNA, 15 bp, Homo sapiens
gatcacttgagcccc

SEQ ID NO: 1044646 - DNA, 15 bp, Homo sapiens
gcccagctacttggg

SEQ ID NO: 1044647 - DNA, 15 bp, Homo sapiens
tgcccagctacttgg

SEQ ID NO: 1044648 - DNA, 15 bp, Homo sapiens
gtgcccagctacttg

SEQ ID NO: 1044649 - DNA, 15 bp, Homo sapiens
tgtgcccagctactt

SEQ ID NO: 1044650 - DNA, 15 bp, Homo sapiens
atgtgcccagctact

SEQ ID NO: 1044651 - DNA, 15 bp, Homo sapiens
catgtgcccagctac

SEQ ID NO: 1044652 - DNA, 15 bp, Homo sapiens
gcatgtgcccagcta

SEQ ID NO: 1044653 - DNA, 15 bp, Homo sapiens
ggcatgtgcccagct

SEQ ID NO: 1044654 - DNA, 15 bp, Homo sapiens
tggcatgtgcccagc

SEQ ID NO: 1044655 - DNA, 15 bp, Homo sapiens
gtggcatgtgcccag

SEQ ID NO: 1044656 - DNA, 15 bp, Homo sapiens
ggtggcatgtgccca

SEQ ID NO: 1044657 - DNA, 15 bp, Homo sapiens
tggtggcatgtgccc

SEQ ID NO: 1044658 - DNA, 15 bp, Homo sapiens
tatggtggcatgtgc

SEQ ID NO: 1044659 - DNA, 15 bp, Homo sapiens
atatggtggcatgtg

SEQ ID NO: 1044660 - DNA, 15 bp, Homo sapiens
gatatggtggcatgt

SEQ ID NO: 1044661 - DNA, 15 bp, Homo sapiens
agatatggtggcatg

SEQ ID NO: 1044662 - DNA, 15 bp, Homo sapiens
tagatatggtggcat

SEQ ID NO: 1044663 - DNA, 15 bp, Homo sapiens
ctagatatggtggca

SEQ ID NO: 1044664 - DNA, 15 bp, Homo sapiens
gctagatatggtggc

SEQ ID NO: 1044665 - DNA, 15 bp, Homo sapiens
agctagatatggtgg

SEQ ID NO: 1044666 - DNA, 15 bp, Homo sapiens
tagctagatatggtg

SEQ ID NO: 1044667 - DNA, 15 bp, Homo sapiens
ttagctagatatggt

SEQ ID NO: 1044668 - DNA, 15 bp, Homo sapiens
attagctagatatgg

SEQ ID NO: 1044669 - DNA, 15 bp, Homo sapiens
aattagctagatatg

SEQ ID NO: 1044670 - DNA, 15 bp, Homo sapiens
aaattagctagatat

SEQ ID NO: 1044671 - DNA, 15 bp, Homo sapiens
aaaattagctagata

SEQ ID NO: 1044672 - DNA, 15 bp, Homo sapiens
aaaaattagctagat

SEQ ID NO: 1044673 - DNA, 15 bp, Homo sapiens
aaaaaattagctaga

SEQ ID NO: 1044674 - DNA, 15 bp, Homo sapiens
gaaaaaattagctag

SEQ ID NO: 1044675 - DNA, 15 bp, Homo sapiens
agaaaaaattagcta

SEQ ID NO: 1044676 - DNA, 15 bp, Homo sapiens
aagaaaaaattagct

SEQ ID NO: 1044677 - DNA, 15 bp, Homo sapiens
aaagaaaaaattagc

SEQ ID NO: 1044678 - DNA, 15 bp, Homo sapiens
gaaagaaaaaattag

SEQ ID NO: 1044679 - DNA, 15 bp, Homo sapiens
agaaagaaaaaatta

SEQ ID NO: 1044680 - DNA, 15 bp, Homo sapiens
aagaaagaaaaaatt

SEQ ID NO: 1044681 - DNA, 15 bp, Homo sapiens
aaagaaagaaaaaat

SEQ ID NO: 1044682 - DNA, 15 bp, Homo sapiens
gaaagaaagaaaaaa

SEQ ID NO: 1044683 - DNA, 15 bp, Homo sapiens
gagaaagaaagaaag

SEQ ID NO: 1044684 - DNA, 15 bp, Homo sapiens
agagaaagaaagaaa

SEQ ID NO: 1044685 - DNA, 15 bp, Homo sapiens
gagagaaagaaagaa

SEQ ID NO: 1044686 - DNA, 15 bp, Homo sapiens
agagagaaagaaaga

SEQ ID NO: 1044687 - DNA, 15 bp, Homo sapiens
aagagagaaagaaag

SEQ ID NO: 1044688 - DNA, 15 bp, Homo sapiens
aaagagagaaagaaa

SEQ ID NO: 1044689 - DNA, 15 bp, Homo sapiens
gaaagagagaaagaa

SEQ ID NO: 1044690 - DNA, 15 bp, Homo sapiens
agaaagagagaaaga

SEQ ID NO: 1044691 - DNA, 15 bp, Homo sapiens
cagaaagagagaaag

SEQ ID NO: 1044692 - DNA, 15 bp, Homo sapiens
acagaaagagagaaa

SEQ ID NO: 1044693 - DNA, 15 bp, Homo sapiens
aacagaaagagagaa

SEQ ID NO: 1044694 - DNA, 15 bp, Homo sapiens
aaacagaaagagaga

SEQ ID NO: 1044695 - DNA, 15 bp, Homo sapiens
aaaacagaaagagag

SEQ ID NO: 1044696 - DNA, 15 bp, Homo sapiens
aaaaacagaaagaga

SEQ ID NO: 1044697 - DNA, 15 bp, Homo sapiens
caaaaacagaaagag

SEQ ID NO: 1044698 - DNA, 15 bp, Homo sapiens
acaaaaacagaaaga

SEQ ID NO: 1044699 - DNA, 15 bp, Homo sapiens
tacaaaaacagaaag

SEQ ID NO: 1044700 - DNA, 15 bp, Homo sapiens
ctacaaaaacagaaa

SEQ ID NO: 1044701 - DNA, 15 bp, Homo sapiens
tctacaaaaacagaa

SEQ ID NO: 1044702 - DNA, 15 bp, Homo sapiens
ttctacaaaaacaga

SEQ ID NO: 1044703 - DNA, 15 bp, Homo sapiens
tttctacaaaaacag

SEQ ID NO: 1044704 - DNA, 15 bp, Homo sapiens
gtttctacaaaaaca

SEQ ID NO: 1044705 - DNA, 15 bp, Homo sapiens
gtgtttctacaaaaa

SEQ ID NO: 1044706 - DNA, 15 bp, Homo sapiens
tgtgtttctacaaaa

SEQ ID NO: 1044707 - DNA, 15 bp, Homo sapiens
ctgtgtttctacaaa

SEQ ID NO: 1044708 - DNA, 15 bp, Homo sapiens
actgtgtttctacaa

SEQ ID NO: 1044709 - DNA, 15 bp, Homo sapiens
aactgtgtttctaca

SEQ ID NO: 1044710 - DNA, 15 bp, Homo sapiens
aaactgtgtttctac

SEQ ID NO: 1044711 - DNA, 15 bp, Homo sapiens
aaaactgtgtttcta

SEQ ID NO: 1044712 - DNA, 15 bp, Homo sapiens
caaaactgtgtttct

SEQ ID NO: 1044713 - DNA, 15 bp, Homo sapiens
gcaaaactgtgtttc

SEQ ID NO: 1044714 - DNA, 15 bp, Homo sapiens
ggcaaaactgtgttt

SEQ ID NO: 1044715 - DNA, 15 bp, Homo sapiens
tggcaaaactgtgtt

SEQ ID NO: 1044716 - DNA, 15 bp, Homo sapiens
gtggcaaaactgtgt

SEQ ID NO: 1044717 - DNA, 15 bp, Homo sapiens
tgtggcaaaactgtg

SEQ ID NO: 1044718 - DNA, 15 bp, Homo sapiens
atgtggcaaaactgt

SEQ ID NO: 1044719 - DNA, 15 bp, Homo sapiens
aatgtggcaaaactg

SEQ ID NO: 1044720 - DNA, 15 bp, Homo sapiens
caatgtggcaaaact

SEQ ID NO: 1044721 - DNA, 15 bp, Homo sapiens
gcaatgtggcaaaac

SEQ ID NO: 1044722 - DNA, 15 bp, Homo sapiens
ggcaatgtggcaaaa

SEQ ID NO: 1044723 - DNA, 15 bp, Homo sapiens
gggcaatgtggcaaa

SEQ ID NO: 1044724 - DNA, 15 bp, Homo sapiens
tagcctgggcaatgt

SEQ ID NO: 1044725 - DNA, 15 bp, Homo sapiens
ctagcctgggcaatg

SEQ ID NO: 1044726 - DNA, 15 bp, Homo sapiens
actagcctgggcaat

SEQ ID NO: 1044727 - DNA, 15 bp, Homo sapiens
aactagcctgggcaa

SEQ ID NO: 1044728 - DNA, 15 bp, Homo sapiens
aaactagcctgggca

SEQ ID NO: 1044729 - DNA, 15 bp, Homo sapiens
taaactagcctgggc

SEQ ID NO: 1044730 - DNA, 15 bp, Homo sapiens
ctaaactagcctggg

SEQ ID NO: 1044731 - DNA, 15 bp, Homo sapiens
tctaaactagcctgg

SEQ ID NO: 1044732 - DNA, 15 bp, Homo sapiens
ttctaaactagcctg

SEQ ID NO: 1044733 - DNA, 15 bp, Homo sapiens
gttctaaactagcct

SEQ ID NO: 1044734 - DNA, 15 bp, Homo sapiens
agttctaaactagcc

SEQ ID NO: 1044735 - DNA, 15 bp, Homo sapiens
gagttctaaactagc

SEQ ID NO: 1044736 - DNA, 15 bp, Homo sapiens
ggagttctaaactag

SEQ ID NO: 1044737 - DNA, 15 bp, Homo sapiens
aggagttctaaacta

SEQ ID NO: 1044738 - DNA, 15 bp, Homo sapiens
caggagttctaaact

SEQ ID NO: 1044739 - DNA, 15 bp, Homo sapiens
ccaggagttctaaac

SEQ ID NO: 1044740 - DNA, 15 bp, Homo sapiens
tccaggagttctaaa

SEQ ID NO: 1044741 - DNA, 15 bp, Homo sapiens
gtccaggagttctaa

SEQ ID NO: 1044742 - DNA, 15 bp, Homo sapiens
agtccaggagttcta

SEQ ID NO: 1044743 - DNA, 15 bp, Homo sapiens
gagtccaggagttct

SEQ ID NO: 1044744 - DNA, 15 bp, Homo sapiens
attgagtccaggagt

SEQ ID NO: 1044745 - DNA, 15 bp, Homo sapiens
tattgagtccaggag

SEQ ID NO: 1044746 - DNA, 15 bp, Homo sapiens
ctattgagtccagga

SEQ ID NO: 1044747 - DNA, 15 bp, Homo sapiens
tctattgagtccagg

SEQ ID NO: 1044748 - DNA, 15 bp, Homo sapiens
atctattgagtccag

SEQ ID NO: 1044749 - DNA, 15 bp, Homo sapiens
aatctattgagtcca

SEQ ID NO: 1044750 - DNA, 15 bp, Homo sapiens
gaatctattgagtcc

SEQ ID NO: 1044751 - DNA, 15 bp, Homo sapiens
agaatctattgagtc

SEQ ID NO: 1044752 - DNA, 15 bp, Homo sapiens
gagaatctattgagt

SEQ ID NO: 1044753 - DNA, 15 bp, Homo sapiens
ggagaatctattgag

SEQ ID NO: 1044754 - DNA, 15 bp, Homo sapiens
gggagaatctattga

SEQ ID NO: 1044755 - DNA, 15 bp, Homo sapiens
tgggagaatctattg

SEQ ID NO: 1044756 - DNA, 15 bp, Homo sapiens
gtgggagaatctatt

SEQ ID NO: 1044757 - DNA, 15 bp, Homo sapiens
ggtgggagaatctat

SEQ ID NO: 1044758 - DNA, 15 bp, Homo sapiens
aggtgggagaatcta

SEQ ID NO: 1044759 - DNA, 15 bp, Homo sapiens
gaggtgggagaatct

SEQ ID NO: 1044760 - DNA, 15 bp, Homo sapiens
cctgaggtgggagaa

SEQ ID NO: 1044761 - DNA, 15 bp, Homo sapiens
gcctgaggtgggaga

SEQ ID NO: 1044762 - DNA, 15 bp, Homo sapiens
agcctgaggtgggag

SEQ ID NO: 1044763 - DNA, 15 bp, Homo sapiens
gagcctgaggtggga

SEQ ID NO: 1044764 - DNA, 15 bp, Homo sapiens
ggagcctgaggtggg

SEQ ID NO: 1044765 - DNA, 15 bp, Homo sapiens
gggagcctgaggtgg

SEQ ID NO: 1044766 - DNA, 15 bp, Homo sapiens
tgggagcctgaggtg

SEQ ID NO: 1044767 - DNA, 15 bp, Homo sapiens
ttgggagcctgaggt

SEQ ID NO: 1044768 - DNA, 15 bp, Homo sapiens
tttgggagcctgagg

SEQ ID NO: 1044769 - DNA, 15 bp, Homo sapiens
ttttgggagcctgag

SEQ ID NO: 1044770 - DNA, 15 bp, Homo sapiens
attttgggagcctga

SEQ ID NO: 1044771 - DNA, 15 bp, Homo sapiens
cattttgggagcctg

SEQ ID NO: 1044772 - DNA, 15 bp, Homo sapiens
gcattttgggagcct

SEQ ID NO: 1044773 - DNA, 15 bp, Homo sapiens
agcattttgggagcc

SEQ ID NO: 1044774 - DNA, 15 bp, Homo sapiens
cagcattttgggagc

SEQ ID NO: 1044775 - DNA, 15 bp, Homo sapiens
ttggccaggcatggt

SEQ ID NO: 1044776 - DNA, 15 bp, Homo sapiens
cttggccaggcatgg

SEQ ID NO: 1044777 - DNA, 15 bp, Homo sapiens
ccttggccaggcatg

SEQ ID NO: 1044778 - DNA, 15 bp, Homo sapiens
gccttggccaggcat

SEQ ID NO: 1044779 - DNA, 15 bp, Homo sapiens
agccttggccaggca

SEQ ID NO: 1044780 - DNA, 15 bp, Homo sapiens
aagccttggccaggc

SEQ ID NO: 1044781 - DNA, 15 bp, Homo sapiens
gaagccttggccagg

SEQ ID NO: 1044782 - DNA, 15 bp, Homo sapiens
agaagccttggccag

SEQ ID NO: 1044783 - DNA, 15 bp, Homo sapiens
aagaagccttggcca

SEQ ID NO: 1044784 - DNA, 15 bp, Homo sapiens
aaagaagccttggcc

SEQ ID NO: 1044785 - DNA, 15 bp, Homo sapiens
aaaagaagccttggc

SEQ ID NO: 1044786 - DNA, 15 bp, Homo sapiens
gaaaagaagccttgg

SEQ ID NO: 1044787 - DNA, 15 bp, Homo sapiens
agaaaagaagccttg

SEQ ID NO: 1044788 - DNA, 15 bp, Homo sapiens
aagaaaagaagcctt

SEQ ID NO: 1044789 - DNA, 15 bp, Homo sapiens
taagaaaagaagcct

SEQ ID NO: 1044790 - DNA, 15 bp, Homo sapiens
ttaagaaaagaagcc

SEQ ID NO: 1044791 - DNA, 15 bp, Homo sapiens
attaagaaaagaagc

SEQ ID NO: 1044792 - DNA, 15 bp, Homo sapiens
gattaagaaaagaag

SEQ ID NO: 1044793 - DNA, 15 bp, Homo sapiens
ggattaagaaaagaa

SEQ ID NO: 1044794 - DNA, 15 bp, Homo sapiens
tggattaagaaaaga

SEQ ID NO: 1044795 - DNA, 15 bp, Homo sapiens
atggattaagaaaag

SEQ ID NO: 1044796 - DNA, 15 bp, Homo sapiens
catggattaagaaaa

SEQ ID NO: 1044797 - DNA, 15 bp, Homo sapiens
tcatggattaagaaa

SEQ ID NO: 1044798 - DNA, 15 bp, Homo sapiens
atcatggattaagaa

SEQ ID NO: 1044799 - DNA, 15 bp, Homo sapiens
gatcatggattaaga

SEQ ID NO: 1044800 - DNA, 15 bp, Homo sapiens
agatcatggattaag

SEQ ID NO: 1044801 - DNA, 15 bp, Homo sapiens
gagatcatggattaa

SEQ ID NO: 1044802 - DNA, 15 bp, Homo sapiens
ggagatcatggatta

SEQ ID NO: 1044803 - DNA, 15 bp, Homo sapiens
gggagatcatggatt

SEQ ID NO: 1044804 - DNA, 15 bp, Homo sapiens
tgggagatcatggat

SEQ ID NO: 1044805 - DNA, 15 bp, Homo sapiens
ttgggagatcatgga

SEQ ID NO: 1044806 - DNA, 15 bp, Homo sapiens
tttgggagatcatgg

SEQ ID NO: 1044807 - DNA, 15 bp, Homo sapiens
ctttgggagatcatg

SEQ ID NO: 1044808 - DNA, 15 bp, Homo sapiens
actttgggagatcat

SEQ ID NO: 1044809 - DNA, 15 bp, Homo sapiens
gactttgggagatca

SEQ ID NO: 1044810 - DNA, 15 bp, Homo sapiens
tgactttgggagatc

SEQ ID NO: 1044811 - DNA, 15 bp, Homo sapiens
gtgactttgggagat

SEQ ID NO: 1044812 - DNA, 15 bp, Homo sapiens
tgtgactttgggaga

SEQ ID NO: 1044813 - DNA, 15 bp, Homo sapiens
gtgtgactttgggag

SEQ ID NO: 1044814 - DNA, 15 bp, Homo sapiens
ggtgtgactttggga

SEQ ID NO: 1044815 - DNA, 15 bp, Homo sapiens
gggtgtgactttggg

SEQ ID NO: 1044816 - DNA, 15 bp, Homo sapiens
tgggtgtgactttgg

SEQ ID NO: 1044817 - DNA, 15 bp, Homo sapiens
ttgggtgtgactttg

SEQ ID NO: 1044818 - DNA, 15 bp, Homo sapiens
cttgggtgtgacttt

SEQ ID NO: 1044819 - DNA, 15 bp, Homo sapiens
acttgggtgtgactt

SEQ ID NO: 1044820 - DNA, 15 bp, Homo sapiens
gacttgggtgtgact

SEQ ID NO: 1044821 - DNA, 15 bp, Homo sapiens
tgacttgggtgtgac

SEQ ID NO: 1044822 - DNA, 15 bp, Homo sapiens
ctgacttgggtgtga

SEQ ID NO: 1044823 - DNA, 15 bp, Homo sapiens
actgacttgggtgtg

SEQ ID NO: 1044824 - DNA, 15 bp, Homo sapiens
cactgacttgggtgt

SEQ ID NO: 1044825 - DNA, 15 bp, Homo sapiens
tcactgacttgggtg

SEQ ID NO: 1044826 - DNA, 15 bp, Homo sapiens
atcactgacttgggt

SEQ ID NO: 1044827 - DNA, 15 bp, Homo sapiens
catcactgacttggg

SEQ ID NO: 1044828 - DNA, 15 bp, Homo sapiens
ccatcactgacttgg

SEQ ID NO: 1044829 - DNA, 15 bp, Homo sapiens
cccatcactgacttg

SEQ ID NO: 1044830 - DNA, 15 bp, Homo sapiens
tcccatcactgactt

SEQ ID NO: 1044831 - DNA, 15 bp, Homo sapiens
atcccatcactgact

SEQ ID NO: 1044832 - DNA, 15 bp, Homo sapiens
tatcccatcactgac

SEQ ID NO: 1044833 - DNA, 15 bp, Homo sapiens
ttatcccatcactga

SEQ ID NO: 1044834 - DNA, 15 bp, Homo sapiens
attatcccatcactg

SEQ ID NO: 1044835 - DNA, 15 bp, Homo sapiens
tattatcccatcact

SEQ ID NO: 1044836 - DNA, 15 bp, Homo sapiens
atattatcccatcac

SEQ ID NO: 1044837 - DNA, 15 bp, Homo sapiens
catattatcccatca

SEQ ID NO: 1044838 - DNA, 15 bp, Homo sapiens
tcatattatcccatc

SEQ ID NO: 1044839 - DNA, 15 bp, Homo sapiens
ctcatattatcccat

SEQ ID NO: 1044840 - DNA, 15 bp, Homo sapiens
actcatattatccca

SEQ ID NO: 1044841 - DNA, 15 bp, Homo sapiens
cactcatattatccc

SEQ ID NO: 1044842 - DNA, 15 bp, Homo sapiens
ccactcatattatcc

SEQ ID NO: 1044843 - DNA, 15 bp, Homo sapiens
cccactcatattatc

SEQ ID NO: 1044844 - DNA, 15 bp, Homo sapiens
tcccactcatattat

SEQ ID NO: 1044845 - DNA, 15 bp, Homo sapiens
ctcccactcatatta

SEQ ID NO: 1044846 - DNA, 15 bp, Homo sapiens
cctcccactcatatt

SEQ ID NO: 1044847 - DNA, 15 bp, Homo sapiens
tcctcccactcatat

SEQ ID NO: 1044848 - DNA, 15 bp, Homo sapiens
gtcctcccactcata

SEQ ID NO: 1044849 - DNA, 15 bp, Homo sapiens
ggtcctcccactcat

SEQ ID NO: 1044850 - DNA, 15 bp, Homo sapiens
gggtcctcccactca

SEQ ID NO: 1044851 - DNA, 15 bp, Homo sapiens
tgggtcctcccactc

SEQ ID NO: 1044852 - DNA, 15 bp, Homo sapiens
ttgggtcctcccact

SEQ ID NO: 1044853 - DNA, 15 bp, Homo sapiens
gttgggtcctcccac

SEQ ID NO: 1044854 - DNA, 15 bp, Homo sapiens
tgttgggtcctccca

SEQ ID NO: 1044855 - DNA, 15 bp, Homo sapiens
ttgttgggtcctccc

SEQ ID NO: 1044856 - DNA, 15 bp, Homo sapiens
gttgttgggtcctcc

SEQ ID NO: 1044857 - DNA, 15 bp, Homo sapiens
ggttgttgggtcctc

SEQ ID NO: 1044858 - DNA, 15 bp, Homo sapiens
aggttgttgggtcct

SEQ ID NO: 1044859 - DNA, 15 bp, Homo sapiens
gaggttgttgggtcc

SEQ ID NO: 1044860 - DNA, 15 bp, Homo sapiens
agaggttgttgggtc

SEQ ID NO: 1044861 - DNA, 15 bp, Homo sapiens
aagaggttgttgggt

SEQ ID NO: 1044862 - DNA, 15 bp, Homo sapiens
aaagaggttgttggg

SEQ ID NO: 1044863 - DNA, 15 bp, Homo sapiens
aaaagaggttgttgg

SEQ ID NO: 1044864 - DNA, 15 bp, Homo sapiens
caaaagaggttgttg

SEQ ID NO: 1044865 - DNA, 15 bp, Homo sapiens
ccaaaagaggttgtt

SEQ ID NO: 1044866 - DNA, 15 bp, Homo sapiens
tccaaaagaggttgt

SEQ ID NO: 1044867 - DNA, 15 bp, Homo sapiens
ctccaaaagaggttg

SEQ ID NO: 1044868 - DNA, 15 bp, Homo sapiens
cctccaaaagaggtt

SEQ ID NO: 1044869 - DNA, 15 bp, Homo sapiens
ccctccaaaagaggt

SEQ ID NO: 1044870 - DNA, 15 bp, Homo sapiens
accctccaaaagagg

SEQ ID NO: 1044871 - DNA, 15 bp, Homo sapiens
gaccctccaaaagag

SEQ ID NO: 1044872 - DNA, 15 bp, Homo sapiens
agaccctccaaaaga

SEQ ID NO: 1044873 - DNA, 15 bp, Homo sapiens
aagaccctccaaaag

SEQ ID NO: 1044874 - DNA, 15 bp, Homo sapiens
caagaccctccaaaa

SEQ ID NO: 1044875 - DNA, 15 bp, Homo sapiens
gcaagaccctccaaa

SEQ ID NO: 1044876 - DNA, 15 bp, Homo sapiens
ggcaagaccctccaa

SEQ ID NO: 1044877 - DNA, 15 bp, Homo sapiens
gggcaagaccctcca

SEQ ID NO: 1044878 - DNA, 15 bp, Homo sapiens
agggcaagaccctcc

SEQ ID NO: 1044879 - DNA, 15 bp, Homo sapiens
cagggcaagaccctc

SEQ ID NO: 1044880 - DNA, 15 bp, Homo sapiens
tcagggcaagaccct

SEQ ID NO: 1044881 - DNA, 15 bp, Homo sapiens
gtcagggcaagaccc

SEQ ID NO: 1044882 - DNA, 15 bp, Homo sapiens
agtcagggcaagacc

SEQ ID NO: 1044883 - DNA, 15 bp, Homo sapiens
cagtcagggcaagac

SEQ ID NO: 1044884 - DNA, 15 bp, Homo sapiens
ccagtcagggcaaga

SEQ ID NO: 1044885 - DNA, 15 bp, Homo sapiens
gccagtcagggcaag

SEQ ID NO: 1044886 - DNA, 15 bp, Homo sapiens
tgccagtcagggcaa

SEQ ID NO: 1044887 - DNA, 15 bp, Homo sapiens
gtgccagtcagggca

SEQ ID NO: 1044888 - DNA, 15 bp, Homo sapiens
agtgccagtcagggc

SEQ ID NO: 1044889 - DNA, 15 bp, Homo sapiens
aagtgccagtcaggg

SEQ ID NO: 1044890 - DNA, 15 bp, Homo sapiens
gaagtgccagtcagg

SEQ ID NO: 1044891 - DNA, 15 bp, Homo sapiens
tgaagtgccagtcag

SEQ ID NO: 1044892 - DNA, 15 bp, Homo sapiens
gtgaagtgccagtca

SEQ ID NO: 1044893 - DNA, 15 bp, Homo sapiens
cgtgaagtgccagtc

SEQ ID NO: 1044894 - DNA, 15 bp, Homo sapiens
acgtgaagtgccagt

SEQ ID NO: 1044895 - DNA, 15 bp, Homo sapiens
cacgtgaagtgccag

SEQ ID NO: 1044896 - DNA, 15 bp, Homo sapiens
acacgtgaagtgcca

SEQ ID NO: 1044897 - DNA, 15 bp, Homo sapiens
gacacgtgaagtgcc

SEQ ID NO: 1044898 - DNA, 15 bp, Homo sapiens
agacacgtgaagtgc

SEQ ID NO: 1044899 - DNA, 15 bp, Homo sapiens
cagacacgtgaagtg

SEQ ID NO: 1044900 - DNA, 15 bp, Homo sapiens
tcagacacgtgaagt

SEQ ID NO: 1044901 - DNA, 15 bp, Homo sapiens
ctcagacacgtgaag

SEQ ID NO: 1044902 - DNA, 15 bp, Homo sapiens
cctcagacacgtgaa

SEQ ID NO: 1044903 - DNA, 15 bp, Homo sapiens
acctcagacacgtga

SEQ ID NO: 1044904 - DNA, 15 bp, Homo sapiens
aacctcagacacgtg

SEQ ID NO: 1044905 - DNA, 15 bp, Homo sapiens
gaacctcagacacgt

SEQ ID NO: 1044906 - DNA, 15 bp, Homo sapiens
ggaacctcagacacg

SEQ ID NO: 1044907 - DNA, 15 bp, Homo sapiens
aggaacctcagacac

SEQ ID NO: 1044908 - DNA, 15 bp, Homo sapiens
gaggaacctcagaca

SEQ ID NO: 1044909 - DNA, 15 bp, Homo sapiens
agaggaacctcagac

SEQ ID NO: 1044910 - DNA, 15 bp, Homo sapiens
aagaggaacctcaga

SEQ ID NO: 1044911 - DNA, 15 bp, Homo sapiens
aaagaggaacctcag

SEQ ID NO: 1044912 - DNA, 15 bp, Homo sapiens
gaaagaggaacctca

SEQ ID NO: 1044913 - DNA, 15 bp, Homo sapiens
cgaaagaggaacctc

SEQ ID NO: 1044914 - DNA, 15 bp, Homo sapiens
acgaaagaggaacct

SEQ ID NO: 1044915 - DNA, 15 bp, Homo sapiens
gacgaaagaggaacc

SEQ ID NO: 1044916 - DNA, 15 bp, Homo sapiens
ggacgaaagaggaac

SEQ ID NO: 1044917 - DNA, 15 bp, Homo sapiens
aggacgaaagaggaa

SEQ ID NO: 1044918 - DNA, 15 bp, Homo sapiens
aaggacgaaagagga

SEQ ID NO: 1044919 - DNA, 15 bp, Homo sapiens
aaaggacgaaagagg

SEQ ID NO: 1044920 - DNA, 15 bp, Homo sapiens
caaaggacgaaagag

SEQ ID NO: 1044921 - DNA, 15 bp, Homo sapiens
ccaaaggacgaaaga

SEQ ID NO: 1044922 - DNA, 15 bp, Homo sapiens
gccaaaggacgaaag

SEQ ID NO: 1044923 - DNA, 15 bp, Homo sapiens
agccaaaggacgaaa

SEQ ID NO: 1044924 - DNA, 15 bp, Homo sapiens
cagccaaaggacgaa

SEQ ID NO: 1044925 - DNA, 15 bp, Homo sapiens
ccagccaaaggacga

SEQ ID NO: 1044926 - DNA, 15 bp, Homo sapiens
gccagccaaaggacg

SEQ ID NO: 1044927 - DNA, 15 bp, Homo sapiens
agccagccaaaggac

SEQ ID NO: 1044928 - DNA, 15 bp, Homo sapiens
cagccagccaaagga

SEQ ID NO: 1044929 - DNA, 15 bp, Homo sapiens
tcagccagccaaagg

SEQ ID NO: 1044930 - DNA, 15 bp, Homo sapiens
ctcagccagccaaag

SEQ ID NO: 1044931 - DNA, 15 bp, Homo sapiens
actcagccagccaaa

SEQ ID NO: 1044932 - DNA, 15 bp, Homo sapiens
gactcagccagccaa

SEQ ID NO: 1044933 - DNA, 15 bp, Homo sapiens
tgactcagccagcca

SEQ ID NO: 1044934 - DNA, 15 bp, Homo sapiens
atgactcagccagcc

SEQ ID NO: 1044935 - DNA, 15 bp, Homo sapiens
gatgactcagccagc

SEQ ID NO: 1044936 - DNA, 15 bp, Homo sapiens
tgatgactcagccag

SEQ ID NO: 1044937 - DNA, 15 bp, Homo sapiens
ttgatgactcagcca

SEQ ID NO: 1044938 - DNA, 15 bp, Homo sapiens
gttgatgactcagcc

SEQ ID NO: 1044939 - DNA, 15 bp, Homo sapiens
tgttgatgactcagc

SEQ ID NO: 1044940 - DNA, 15 bp, Homo sapiens
atgttgatgactcag

SEQ ID NO: 1044941 - DNA, 15 bp, Homo sapiens
aatgttgatgactca

SEQ ID NO: 1044942 - DNA, 15 bp, Homo sapiens
caatgttgatgactc

SEQ ID NO: 1044943 - DNA, 15 bp, Homo sapiens
tcaatgttgatgact

SEQ ID NO: 1044944 - DNA, 15 bp, Homo sapiens
ctcaatgttgatgac

SEQ ID NO: 1044945 - DNA, 15 bp, Homo sapiens
tctcaatgttgatga

SEQ ID NO: 1044946 - DNA, 15 bp, Homo sapiens
atctcaatgttgatg

SEQ ID NO: 1044947 - DNA, 15 bp, Homo sapiens
gatctcaatgttgat

SEQ ID NO: 1044948 - DNA, 15 bp, Homo sapiens
agatctcaatgttga

SEQ ID NO: 1044949 - DNA, 15 bp, Homo sapiens
tagatctcaatgttg

SEQ ID NO: 1044950 - DNA, 15 bp, Homo sapiens
gtagatctcaatgtt

SEQ ID NO: 1044951 - DNA, 15 bp, Homo sapiens
tgtagatctcaatgt

SEQ ID NO: 1044952 - DNA, 15 bp, Homo sapiens
ctgtagatctcaatg

SEQ ID NO: 1044953 - DNA, 15 bp, Homo sapiens
cctgtagatctcaat

SEQ ID NO: 1044954 - DNA, 15 bp, Homo sapiens
tcctgtagatctcaa

SEQ ID NO: 1044955 - DNA, 15 bp, Homo sapiens
atcctgtagatctca

SEQ ID NO: 1044956 - DNA, 15 bp, Homo sapiens
catcctgtagatctc

SEQ ID NO: 1044957 - DNA, 15 bp, Homo sapiens
gcatcctgtagatct

SEQ ID NO: 1044958 - DNA, 15 bp, Homo sapiens
tgcatcctgtagatc

SEQ ID NO: 1044959 - DNA, 15 bp, Homo sapiens
gtgcatcctgtagat

SEQ ID NO: 1044960 - DNA, 15 bp, Homo sapiens
ggtgcatcctgtaga

SEQ ID NO: 1044961 - DNA, 15 bp, Homo sapiens
tggtgcatcctgtag

SEQ ID NO: 1044962 - DNA, 15 bp, Homo sapiens
ctggtgcatcctgta

SEQ ID NO: 1044963 - DNA, 15 bp, Homo sapiens
gctggtgcatcctgt

SEQ ID NO: 1044964 - DNA, 15 bp, Homo sapiens
tgctggtgcatcctg

SEQ ID NO: 1044965 - DNA, 15 bp, Homo sapiens
gtgctggtgcatcct

SEQ ID NO: 1044966 - DNA, 15 bp, Homo sapiens
ggtgctggtgcatcc

SEQ ID NO: 1044967 - DNA, 15 bp, Homo sapiens
aggtgctggtgcatc

SEQ ID NO: 1044968 - DNA, 15 bp, Homo sapiens
gaggtgctggtgcat

SEQ ID NO: 1044969 - DNA, 15 bp, Homo sapiens
ggaggtgctggtgca

SEQ ID NO: 1044970 - DNA, 15 bp, Homo sapiens
aggaggtgctggtgc

SEQ ID NO: 1044971 - DNA, 15 bp, Homo sapiens
taggaggtgctggtg

SEQ ID NO: 1044972 - DNA, 15 bp, Homo sapiens
ctaggaggtgctggt

SEQ ID NO: 1044973 - DNA, 15 bp, Homo sapiens
tctaggaggtgctgg

SEQ ID NO: 1044974 - DNA, 15 bp, Homo sapiens
ctctaggaggtgctg

SEQ ID NO: 1044975 - DNA, 15 bp, Homo sapiens
cctctaggaggtgct

SEQ ID NO: 1044976 - DNA, 15 bp, Homo sapiens
ccctctaggaggtgc

SEQ ID NO: 1044977 - DNA, 15 bp, Homo sapiens
gccctctaggaggtg

SEQ ID NO: 1044978 - DNA, 15 bp, Homo sapiens
ggccctctaggaggt

SEQ ID NO: 1044979 - DNA, 15 bp, Homo sapiens
gggccctctaggagg

SEQ ID NO: 1044980 - DNA, 15 bp, Homo sapiens
agggccctctaggag

SEQ ID NO: 1044981 - DNA, 15 bp, Homo sapiens
gagggccctctagga

SEQ ID NO: 1044982 - DNA, 15 bp, Homo sapiens
tgagggccctctagg

SEQ ID NO: 1044983 - DNA, 15 bp, Homo sapiens
ctgagggccctctag

SEQ ID NO: 1044984 - DNA, 15 bp, Homo sapiens
gctgagggccctcta

SEQ ID NO: 1044985 - DNA, 15 bp, Homo sapiens
tgctgagggccctct

SEQ ID NO: 1044986 - DNA, 15 bp, Homo sapiens
ttgctgagggccctc

SEQ ID NO: 1044987 - DNA, 15 bp, Homo sapiens
tttgctgagggccct

SEQ ID NO: 1044988 - DNA, 15 bp, Homo sapiens
gtttgctgagggccc

SEQ ID NO: 1044989 - DNA, 15 bp, Homo sapiens
ggtttgctgagggcc

SEQ ID NO: 1044990 - DNA, 15 bp, Homo sapiens
tggtttgctgagggc

SEQ ID NO: 1044991 - DNA, 15 bp, Homo sapiens
gtggtttgctgaggg

SEQ ID NO: 1044992 - DNA, 15 bp, Homo sapiens
agtggtttgctgagg

SEQ ID NO: 1044993 - DNA, 15 bp, Homo sapiens
cagtggtttgctgag

SEQ ID NO: 1044994 - DNA, 15 bp, Homo sapiens
tcagtggtttgctga

SEQ ID NO: 1044995 - DNA, 15 bp, Homo sapiens
ctcagtggtttgctg

SEQ ID NO: 1044996 - DNA, 15 bp, Homo sapiens
gctcagtggtttgct

SEQ ID NO: 1044997 - DNA, 15 bp, Homo sapiens
tgctcagtggtttgc

SEQ ID NO: 1044998 - DNA, 15 bp, Homo sapiens
atgctcagtggtttg

SEQ ID NO: 1044999 - DNA, 15 bp, Homo sapiens
aatgctcagtggttt

SEQ ID NO: 1045000 - DNA, 15 bp, Homo sapiens
aaatgctcagtggtt

SEQ ID NO: 1045001 - DNA, 15 bp, Homo sapiens
gaaatgctcagtggt

SEQ ID NO: 1045002 - DNA, 15 bp, Homo sapiens
agaaatgctcagtgg

SEQ ID NO: 1045003 - DNA, 15 bp, Homo sapiens
aagaaatgctcagtg

SEQ ID NO: 1045004 - DNA, 15 bp, Homo sapiens
taagaaatgctcagt

SEQ ID NO: 1045005 - DNA, 15 bp, Homo sapiens
gtaagaaatgctcag

SEQ ID NO: 1045006 - DNA, 15 bp, Homo sapiens
tgtaagaaatgctca

SEQ ID NO: 1045007 - DNA, 15 bp, Homo sapiens
ttgtaagaaatgctc

SEQ ID NO: 1045008 - DNA, 15 bp, Homo sapiens
cttgtaagaaatgct

SEQ ID NO: 1045009 - DNA, 15 bp, Homo sapiens
gcttgtaagaaatgc

SEQ ID NO: 1045010 - DNA, 15 bp, Homo sapiens
agcttgtaagaaatg

SEQ ID NO: 1045011 - DNA, 15 bp, Homo sapiens
tagcttgtaagaaat

SEQ ID NO: 1045012 - DNA, 15 bp, Homo sapiens
gtagcttgtaagaaa

SEQ ID NO: 1045013 - DNA, 15 bp, Homo sapiens
tgtagcttgtaagaa

SEQ ID NO: 1045014 - DNA, 15 bp, Homo sapiens
gtgtagcttgtaaga

SEQ ID NO: 1045015 - DNA, 15 bp, Homo sapiens
ggtgtagcttgtaag

SEQ ID NO: 1045016 - DNA, 15 bp, Homo sapiens
gggtgtagcttgtaa

SEQ ID NO: 1045017 - DNA, 15 bp, Homo sapiens
ggggtgtagcttgta

SEQ ID NO: 1045018 - DNA, 15 bp, Homo sapiens
gggggtgtagcttgt

SEQ ID NO: 1045019 - DNA, 15 bp, Homo sapiens
tgggggtgtagcttg

SEQ ID NO: 1045020 - DNA, 15 bp, Homo sapiens
gtgggggtgtagctt

SEQ ID NO: 1045021 - DNA, 15 bp, Homo sapiens
tgtgggggtgtagct

SEQ ID NO: 1045022 - DNA, 15 bp, Homo sapiens
gtgtgggggtgtagc

SEQ ID NO: 1045023 - DNA, 15 bp, Homo sapiens
ggtgtgggggtgtag

SEQ ID NO: 1045024 - DNA, 15 bp, Homo sapiens
tggtgtgggggtgta

SEQ ID NO: 1045025 - DNA, 15 bp, Homo sapiens
ctggtgtgggggtgt

SEQ ID NO: 1045026 - DNA, 15 bp, Homo sapiens
tctggtgtgggggtg

SEQ ID NO: 1045027 - DNA, 15 bp, Homo sapiens
atctggtgtgggggt

SEQ ID NO: 1045028 - DNA, 15 bp, Homo sapiens
gatctggtgtggggg

SEQ ID NO: 1045029 - DNA, 15 bp, Homo sapiens
agatctggtgtgggg

SEQ ID NO: 1045030 - DNA, 15 bp, Homo sapiens
aagatctggtgtggg

SEQ ID NO: 1045031 - DNA, 15 bp, Homo sapiens
gaagatctggtgtgg

SEQ ID NO: 1045032 - DNA, 15 bp, Homo sapiens
agaagatctggtgtg

SEQ ID NO: 1045033 - DNA, 15 bp, Homo sapiens
gagaagatctggtgt

SEQ ID NO: 1045034 - DNA, 15 bp, Homo sapiens
tgagaagatctggtg

SEQ ID NO: 1045035 - DNA, 15 bp, Homo sapiens
atgagaagatctggt

SEQ ID NO: 1045036 - DNA, 15 bp, Homo sapiens
aatgagaagatctgg

SEQ ID NO: 1045037 - DNA, 15 bp, Homo sapiens
aaatgagaagatctg

SEQ ID NO: 1045038 - DNA, 15 bp, Homo sapiens
taaatgagaagatct

SEQ ID NO: 1045039 - DNA, 15 bp, Homo sapiens
ttaaatgagaagatc

SEQ ID NO: 1045040 - DNA, 15 bp, Homo sapiens
attaaatgagaagat

SEQ ID NO: 1045041 - DNA, 15 bp, Homo sapiens
gattaaatgagaaga

SEQ ID NO: 1045042 - DNA, 15 bp, Homo sapiens
ggattaaatgagaag

SEQ ID NO: 1045043 - DNA, 15 bp, Homo sapiens
tggattaaatgagaa

SEQ ID NO: 1045044 - DNA, 15 bp, Homo sapiens
gtggattaaatgaga

SEQ ID NO: 1045045 - DNA, 15 bp, Homo sapiens
ggtggattaaatgag

SEQ ID NO: 1045046 - DNA, 15 bp, Homo sapiens
aggtggattaaatga

SEQ ID NO: 1045047 - DNA, 15 bp, Homo sapiens
taggtggattaaatg

SEQ ID NO: 1045048 - DNA, 15 bp, Homo sapiens
ataggtggattaaat

SEQ ID NO: 1045049 - DNA, 15 bp, Homo sapiens
gataggtggattaaa

SEQ ID NO: 1045050 - DNA, 15 bp, Homo sapiens
cgataggtggattaa

SEQ ID NO: 1045051 - DNA, 15 bp, Homo sapiens
tcgataggtggatta

SEQ ID NO: 1045052 - DNA, 15 bp, Homo sapiens
gtcgataggtggatt

SEQ ID NO: 1045053 - DNA, 15 bp, Homo sapiens
agtcgataggtggat

SEQ ID NO: 1045054 - DNA, 15 bp, Homo sapiens
gagtcgataggtgga

SEQ ID NO: 1045055 - DNA, 15 bp, Homo sapiens
agagtcgataggtgg

SEQ ID NO: 1045056 - DNA, 15 bp, Homo sapiens
cagagtcgataggtg

SEQ ID NO: 1045057 - DNA, 15 bp, Homo sapiens
acagagtcgataggt

SEQ ID NO: 1045058 - DNA, 15 bp, Homo sapiens
cacagagtcgatagg

SEQ ID NO: 1045059 - DNA, 15 bp, Homo sapiens
gcacagagtcgatag

SEQ ID NO: 1045060 - DNA, 15 bp, Homo sapiens
agcacagagtcgata

SEQ ID NO: 1045061 - DNA, 15 bp, Homo sapiens
tagcacagagtcgat

SEQ ID NO: 1045062 - DNA, 15 bp, Homo sapiens
ttagcacagagtcga

SEQ ID NO: 1045063 - DNA, 15 bp, Homo sapiens
tttagcacagagtcg

SEQ ID NO: 1045064 - DNA, 15 bp, Homo sapiens
ttttagcacagagtc

SEQ ID NO: 1045065 - DNA, 15 bp, Homo sapiens
gttttagcacagagt

SEQ ID NO: 1045066 - DNA, 15 bp, Homo sapiens
agttttagcacagag

SEQ ID NO: 1045067 - DNA, 15 bp, Homo sapiens
tagttttagcacaga

SEQ ID NO: 1045068 - DNA, 15 bp, Homo sapiens
atagttttagcacag

SEQ ID NO: 1045069 - DNA, 15 bp, Homo sapiens
aatagttttagcaca

SEQ ID NO: 1045070 - DNA, 15 bp, Homo sapiens
aaatagttttagcac

SEQ ID NO: 1045071 - DNA, 15 bp, Homo sapiens
aaaatagttttagca

SEQ ID NO: 1045072 - DNA, 15 bp, Homo sapiens
aaaaatagttttagc

SEQ ID NO: 1045073 - DNA, 15 bp, Homo sapiens
taaaaatagttttag

SEQ ID NO: 1045074 - DNA, 15 bp, Homo sapiens
ataaaaatagtttta

SEQ ID NO: 1045075 - DNA, 15 bp, Homo sapiens
gataaaaatagtttt

SEQ ID NO: 1045076 - DNA, 15 bp, Homo sapiens
ggataaaaatagttt

SEQ ID NO: 1045077 - DNA, 15 bp, Homo sapiens
gggataaaaatagtt

SEQ ID NO: 1045078 - DNA, 15 bp, Homo sapiens
agggataaaaatagt

SEQ ID NO: 1045079 - DNA, 15 bp, Homo sapiens
cagggataaaaatag

SEQ ID NO: 1045080 - DNA, 15 bp, Homo sapiens
acagggataaaaata

SEQ ID NO: 1045081 - DNA, 15 bp, Homo sapiens
aacagggataaaaat

SEQ ID NO: 1045082 - DNA, 15 bp, Homo sapiens
taacagggataaaaa

SEQ ID NO: 1045083 - DNA, 15 bp, Homo sapiens
gtaacagggataaaa

SEQ ID NO: 1045084 - DNA, 15 bp, Homo sapiens
tgtaacagggataaa

SEQ ID NO: 1045085 - DNA, 15 bp, Homo sapiens
ttgtaacagggataa

SEQ ID NO: 1045086 - DNA, 15 bp, Homo sapiens
tttgtaacagggata

SEQ ID NO: 1045087 - DNA, 15 bp, Homo sapiens
atttgtaacagggat

SEQ ID NO: 1045088 - DNA, 15 bp, Homo sapiens
tatttgtaacaggga

SEQ ID NO: 1045089 - DNA, 15 bp, Homo sapiens
ttatttgtaacaggg

SEQ ID NO: 1045090 - DNA, 15 bp, Homo sapiens
cttatttgtaacagg

SEQ ID NO: 1045091 - DNA, 15 bp, Homo sapiens
ccttatttgtaacag

SEQ ID NO: 1045092 - DNA, 15 bp, Homo sapiens
tccttatttgtaaca

SEQ ID NO: 1045093 - DNA, 15 bp, Homo sapiens
ttccttatttgtaac

SEQ ID NO: 1045094 - DNA, 15 bp, Homo sapiens
tttccttatttgtaa

SEQ ID NO: 1045095 - DNA, 15 bp, Homo sapiens
gtttccttatttgta

SEQ ID NO: 1045096 - DNA, 15 bp, Homo sapiens
agtttccttatttgt

SEQ ID NO: 1045097 - DNA, 15 bp, Homo sapiens
cagtttccttatttg

SEQ ID NO: 1045098 - DNA, 15 bp, Homo sapiens
tcagtttccttattt

SEQ ID NO: 1045099 - DNA, 15 bp, Homo sapiens
ttcagtttccttatt

SEQ ID NO: 1045100 - DNA, 15 bp, Homo sapiens
tttcagtttccttat

SEQ ID NO: 1045101 - DNA, 15 bp, Homo sapiens
atttcagtttcctta

SEQ ID NO: 1045102 - DNA, 15 bp, Homo sapiens
aatttcagtttcctt

SEQ ID NO: 1045103 - DNA, 15 bp, Homo sapiens
caatttcagtttcct

SEQ ID NO: 1045104 - DNA, 15 bp, Homo sapiens
ccaatttcagtttcc

SEQ ID NO: 1045105 - DNA, 15 bp, Homo sapiens
gccaatttcagtttc

SEQ ID NO: 1045106 - DNA, 15 bp, Homo sapiens
ggccaatttcagttt

SEQ ID NO: 1045107 - DNA, 15 bp, Homo sapiens
aggccaatttcagtt

SEQ ID NO: 1045108 - DNA, 15 bp, Homo sapiens
caggccaatttcagt

SEQ ID NO: 1045109 - DNA, 15 bp, Homo sapiens
ccaggccaatttcag

SEQ ID NO: 1045110 - DNA, 15 bp, Homo sapiens
gccaggccaatttca

SEQ ID NO: 1045111 - DNA, 15 bp, Homo sapiens
ggccaggccaatttc

SEQ ID NO: 1045112 - DNA, 15 bp, Homo sapiens
tggccaggccaattt

SEQ ID NO: 1045113 - DNA, 15 bp, Homo sapiens
gtggccaggccaatt

SEQ ID NO: 1045114 - DNA, 15 bp, Homo sapiens
tgtggccaggccaat

SEQ ID NO: 1045115 - DNA, 15 bp, Homo sapiens
ctgtggccaggccaa

SEQ ID NO: 1045116 - DNA, 15 bp, Homo sapiens
gctgtggccaggcca

SEQ ID NO: 1045117 - DNA, 15 bp, Homo sapiens
ggctgtggccaggcc

SEQ ID NO: 1045118 - DNA, 15 bp, Homo sapiens
tggctgtggccaggc

SEQ ID NO: 1045119 - DNA, 15 bp, Homo sapiens
atggctgtggccagg

SEQ ID NO: 1045120 - DNA, 15 bp, Homo sapiens
catggctgtggccag

SEQ ID NO: 1045121 - DNA, 15 bp, Homo sapiens
ccatggctgtggcca

SEQ ID NO: 1045122 - DNA, 15 bp, Homo sapiens
cccatggctgtggcc

SEQ ID NO: 1045123 - DNA, 15 bp, Homo sapiens
gcccatggctgtggc

SEQ ID NO: 1045124 - DNA, 15 bp, Homo sapiens
tgcccatggctgtgg

SEQ ID NO: 1045125 - DNA, 15 bp, Homo sapiens
gtgcccatggctgtg

SEQ ID NO: 1045126 - DNA, 15 bp, Homo sapiens
ggtgcccatggctgt

SEQ ID NO: 1045127 - DNA, 15 bp, Homo sapiens
tggtgcccatggctg

SEQ ID NO: 1045128 - DNA, 15 bp, Homo sapiens
gtggtgcccatggct

SEQ ID NO: 1045129 - DNA, 15 bp, Homo sapiens
ggtggtgcccatggc

SEQ ID NO: 1045130 - DNA, 15 bp, Homo sapiens
gggtggtgcccatgg

SEQ ID NO: 1045131 - DNA, 15 bp, Homo sapiens
agggtggtgcccatg

SEQ ID NO: 1045132 - DNA, 15 bp, Homo sapiens
aagggtggtgcccat

SEQ ID NO: 1045133 - DNA, 15 bp, Homo sapiens
gaagggtggtgccca

SEQ ID NO: 1045134 - DNA, 15 bp, Homo sapiens
ggaagggtggtgccc

SEQ ID NO: 1045135 - DNA, 15 bp, Homo sapiens
gggaagggtggtgcc

SEQ ID NO: 1045136 - DNA, 15 bp, Homo sapiens
agggaagggtggtgc

SEQ ID NO: 1045137 - DNA, 15 bp, Homo sapiens
aagggaagggtggtg

SEQ ID NO: 1045138 - DNA, 15 bp, Homo sapiens
caagggaagggtggt

SEQ ID NO: 1045139 - DNA, 15 bp, Homo sapiens
acaagggaagggtgg

SEQ ID NO: 1045140 - DNA, 15 bp, Homo sapiens
cacaagggaagggtg

SEQ ID NO: 1045141 - DNA, 15 bp, Homo sapiens
acacaagggaagggt

SEQ ID NO: 1045142 - DNA, 15 bp, Homo sapiens
cacacaagggaaggg

SEQ ID NO: 1045143 - DNA, 15 bp, Homo sapiens
tcacacaagggaagg

SEQ ID NO: 1045144 - DNA, 15 bp, Homo sapiens
gtcacacaagggaag

SEQ ID NO: 1045145 - DNA, 15 bp, Homo sapiens
ggtcacacaagggaa

SEQ ID NO: 1045146 - DNA, 15 bp, Homo sapiens
aggtcacacaaggga

SEQ ID NO: 1045147 - DNA, 15 bp, Homo sapiens
aaggtcacacaaggg

SEQ ID NO: 1045148 - DNA, 15 bp, Homo sapiens
caaggtcacacaagg

SEQ ID NO: 1045149 - DNA, 15 bp, Homo sapiens
tcaaggtcacacaag

SEQ ID NO: 1045150 - DNA, 15 bp, Homo sapiens
ctcaaggtcacacaa

SEQ ID NO: 1045151 - DNA, 15 bp, Homo sapiens
gctcaaggtcacaca

SEQ ID NO: 1045152 - DNA, 15 bp, Homo sapiens
tgctcaaggtcacac

SEQ ID NO: 1045153 - DNA, 15 bp, Homo sapiens
ctgctcaaggtcaca

SEQ ID NO: 1045154 - DNA, 15 bp, Homo sapiens
gctgctcaaggtcac

SEQ ID NO: 1045155 - DNA, 15 bp, Homo sapiens
tgctgctcaaggtca

SEQ ID NO: 1045156 - DNA, 15 bp, Homo sapiens
gtgctgctcaaggtc

SEQ ID NO: 1045157 - DNA, 15 bp, Homo sapiens
tgtgctgctcaaggt

SEQ ID NO: 1045158 - DNA, 15 bp, Homo sapiens
gtgtgctgctcaagg

SEQ ID NO: 1045159 - DNA, 15 bp, Homo sapiens
ggtgtgctgctcaag

SEQ ID NO: 1045160 - DNA, 15 bp, Homo sapiens
aggtgtgctgctcaa

SEQ ID NO: 1045161 - DNA, 15 bp, Homo sapiens
taggtgtgctgctca

SEQ ID NO: 1045162 - DNA, 15 bp, Homo sapiens
ctaggtgtgctgctc

SEQ ID NO: 1045163 - DNA, 15 bp, Homo sapiens
gctaggtgtgctgct

SEQ ID NO: 1045164 - DNA, 15 bp, Homo sapiens
ggctaggtgtgctgc

SEQ ID NO: 1045165 - DNA, 15 bp, Homo sapiens
aggctaggtgtgctg

SEQ ID NO: 1045166 - DNA, 15 bp, Homo sapiens
gaggctaggtgtgct

SEQ ID NO: 1045167 - DNA, 15 bp, Homo sapiens
agaggctaggtgtgc

SEQ ID NO: 1045168 - DNA, 15 bp, Homo sapiens
gagaggctaggtgtg

SEQ ID NO: 1045169 - DNA, 15 bp, Homo sapiens
agagaggctaggtgt

SEQ ID NO: 1045170 - DNA, 15 bp, Homo sapiens
cagagaggctaggtg

SEQ ID NO: 1045171 - DNA, 15 bp, Homo sapiens
ccagagaggctaggt

SEQ ID NO: 1045172 - DNA, 15 bp, Homo sapiens
cccagagaggctagg

SEQ ID NO: 1045173 - DNA, 15 bp, Homo sapiens
acccagagaggctag

SEQ ID NO: 1045174 - DNA, 15 bp, Homo sapiens
cacccagagaggcta

SEQ ID NO: 1045175 - DNA, 15 bp, Homo sapiens
ccacccagagaggct

SEQ ID NO: 1045176 - DNA, 15 bp, Homo sapiens
tccacccagagaggc

SEQ ID NO: 1045177 - DNA, 15 bp, Homo sapiens
atccacccagagagg

SEQ ID NO: 1045178 - DNA, 15 bp, Homo sapiens
gatccacccagagag

SEQ ID NO: 1045179 - DNA, 15 bp, Homo sapiens
agatccacccagaga

SEQ ID NO: 1045180 - DNA, 15 bp, Homo sapiens
gagatccacccagag

SEQ ID NO: 1045181 - DNA, 15 bp, Homo sapiens
tgagatccacccaga

SEQ ID NO: 1045182 - DNA, 15 bp, Homo sapiens
gtgagatccacccag

SEQ ID NO: 1045183 - DNA, 15 bp, Homo sapiens
agtgagatccaccca

SEQ ID NO: 1045184 - DNA, 15 bp, Homo sapiens
cagtgagatccaccc

SEQ ID NO: 1045185 - DNA, 15 bp, Homo sapiens
ccagtgagatccacc

SEQ ID NO: 1045186 - DNA, 15 bp, Homo sapiens
gccagtgagatccac

SEQ ID NO: 1045187 - DNA, 15 bp, Homo sapiens
ggccagtgagatcca

SEQ ID NO: 1045188 - DNA, 15 bp, Homo sapiens
aggccagtgagatcc

SEQ ID NO: 1045189 - DNA, 15 bp, Homo sapiens
aaggccagtgagatc

SEQ ID NO: 1045190 - DNA, 15 bp, Homo sapiens
caaggccagtgagat

SEQ ID NO: 1045191 - DNA, 15 bp, Homo sapiens
gcaaggccagtgaga

SEQ ID NO: 1045192 - DNA, 15 bp, Homo sapiens
ggcaaggccagtgag

SEQ ID NO: 1045193 - DNA, 15 bp, Homo sapiens
aggcaaggccagtga

SEQ ID NO: 1045194 - DNA, 15 bp, Homo sapiens
caggcaaggccagtg

SEQ ID NO: 1045195 - DNA, 15 bp, Homo sapiens
ccaggcaaggccagt

SEQ ID NO: 1045196 - DNA, 15 bp, Homo sapiens
tccaggcaaggccag

SEQ ID NO: 1045197 - DNA, 15 bp, Homo sapiens
ttccaggcaaggcca

SEQ ID NO: 1045198 - DNA, 15 bp, Homo sapiens
tttccaggcaaggcc

SEQ ID NO: 1045199 - DNA, 15 bp, Homo sapiens
ttttccaggcaaggc

SEQ ID NO: 1045200 - DNA, 15 bp, Homo sapiens
attttccaggcaagg

SEQ ID NO: 1045201 - DNA, 15 bp, Homo sapiens
tattttccaggcaag

SEQ ID NO: 1045202 - DNA, 15 bp, Homo sapiens
ttattttccaggcaa

SEQ ID NO: 1045203 - DNA, 15 bp, Homo sapiens
tttattttccaggca

SEQ ID NO: 1045204 - DNA, 15 bp, Homo sapiens
atttattttccaggc

SEQ ID NO: 1045205 - DNA, 15 bp, Homo sapiens
catttattttccagg

SEQ ID NO: 1045206 - DNA, 15 bp, Homo sapiens
gcatttattttccag

SEQ ID NO: 1045207 - DNA, 15 bp, Homo sapiens
agcatttattttcca

SEQ ID NO: 1045208 - DNA, 15 bp, Homo sapiens
cagcatttattttcc

SEQ ID NO: 1045209 - DNA, 15 bp, Homo sapiens
ccagcatttattttc

SEQ ID NO: 1045210 - DNA, 15 bp, Homo sapiens
tccagcatttatttt

SEQ ID NO: 1045211 - DNA, 15 bp, Homo sapiens
atccagcatttattt

SEQ ID NO: 1045212 - DNA, 15 bp, Homo sapiens
gatccagcatttatt

SEQ ID NO: 1045213 - DNA, 15 bp, Homo sapiens
agatccagcatttat

SEQ ID NO: 1045214 - DNA, 15 bp, Homo sapiens
gagatccagcattta

SEQ ID NO: 1045215 - DNA, 15 bp, Homo sapiens
tgagatccagcattt

SEQ ID NO: 1045216 - DNA, 15 bp, Homo sapiens
atgagatccagcatt

SEQ ID NO: 1045217 - DNA, 15 bp, Homo sapiens
gatgagatccagcat

SEQ ID NO: 1045218 - DNA, 15 bp, Homo sapiens
agatgagatccagca

SEQ ID NO: 1045219 - DNA, 15 bp, Homo sapiens
gagatgagatccagc

SEQ ID NO: 1045220 - DNA, 15 bp, Homo sapiens
ggagatgagatccag

SEQ ID NO: 1045221 - DNA, 15 bp, Homo sapiens
gggagatgagatcca

SEQ ID NO: 1045222 - DNA, 15 bp, Homo sapiens
ggggagatgagatcc

SEQ ID NO: 1045223 - DNA, 15 bp, Homo sapiens
aggggagatgagatc

SEQ ID NO: 1045224 - DNA, 15 bp, Homo sapiens
aaggggagatgagat

SEQ ID NO: 1045225 - DNA, 15 bp, Homo sapiens
gaaggggagatgaga

SEQ ID NO: 1045226 - DNA, 15 bp, Homo sapiens
tgaaggggagatgag

SEQ ID NO: 1045227 - DNA, 15 bp, Homo sapiens
atgaaggggagatga

SEQ ID NO: 1045228 - DNA, 15 bp, Homo sapiens
aatgaaggggagatg

SEQ ID NO: 1045229 - DNA, 15 bp, Homo sapiens
caatgaaggggagat

SEQ ID NO: 1045230 - DNA, 15 bp, Homo sapiens
gcaatgaaggggaga

SEQ ID NO: 1045231 - DNA, 15 bp, Homo sapiens
agcaatgaaggggag

SEQ ID NO: 1045232 - DNA, 15 bp, Homo sapiens
cagcaatgaagggga

SEQ ID NO: 1045233 - DNA, 15 bp, Homo sapiens
tcagcaatgaagggg

SEQ ID NO: 1045234 - DNA, 15 bp, Homo sapiens
atcagcaatgaaggg

SEQ ID NO: 1045235 - DNA, 15 bp, Homo sapiens
tcatcagcaatgaag

SEQ ID NO: 1045236 - DNA, 15 bp, Homo sapiens
gtcatcagcaatgaa

SEQ ID NO: 1045237 - DNA, 15 bp, Homo sapiens
agtcatcagcaatga

SEQ ID NO: 1045238 - DNA, 15 bp, Homo sapiens
gagtcatcagcaatg

SEQ ID NO: 1045239 - DNA, 15 bp, Homo sapiens
ggagtcatcagcaat

SEQ ID NO: 1045240 - DNA, 15 bp, Homo sapiens
tggagtcatcagcaa

SEQ ID NO: 1045241 - DNA, 15 bp, Homo sapiens
gtggagtcatcagca

SEQ ID NO: 1045242 - DNA, 15 bp, Homo sapiens
agtggagtcatcagc

SEQ ID NO: 1045243 - DNA, 15 bp, Homo sapiens
gagtggagtcatcag

SEQ ID NO: 1045244 - DNA, 15 bp, Homo sapiens
tgagtggagtcatca

SEQ ID NO: 1045245 - DNA, 15 bp, Homo sapiens
ctgagtggagtcatc

SEQ ID NO: 1045246 - DNA, 15 bp, Homo sapiens
gctgagtggagtcat

SEQ ID NO: 1045247 - DNA, 15 bp, Homo sapiens
agctgagtggagtca

SEQ ID NO: 1045248 - DNA, 15 bp, Homo sapiens
gagctgagtggagtc

SEQ ID NO: 1045249 - DNA, 15 bp, Homo sapiens
cgagctgagtggagt

SEQ ID NO: 1045250 - DNA, 15 bp, Homo sapiens
acgagctgagtggag

SEQ ID NO: 1045251 - DNA, 15 bp, Homo sapiens
tacgagctgagtgga

SEQ ID NO: 1045252 - DNA, 15 bp, Homo sapiens
ttacgagctgagtgg

SEQ ID NO: 1045253 - DNA, 15 bp, Homo sapiens
cttacgagctgagtg

SEQ ID NO: 1045254 - DNA, 15 bp, Homo sapiens
tcttacgagctgagt

SEQ ID NO: 1045255 - DNA, 15 bp, Homo sapiens
ctcttacgagctgag

SEQ ID NO: 1045256 - DNA, 15 bp, Homo sapiens
cctcttacgagctga

SEQ ID NO: 1045257 - DNA, 15 bp, Homo sapiens
gcctcttacgagctg

SEQ ID NO: 1045258 - DNA, 15 bp, Homo sapiens
tgcctcttacgagct

SEQ ID NO: 1045259 - DNA, 15 bp, Homo sapiens
atgcctcttacgagc

SEQ ID NO: 1045260 - DNA, 15 bp, Homo sapiens
aatgcctcttacgag

SEQ ID NO: 1045261 - DNA, 15 bp, Homo sapiens
aaatgcctcttacga

SEQ ID NO: 1045262 - DNA, 15 bp, Homo sapiens
gaaatgcctcttacg

SEQ ID NO: 1045263 - DNA, 15 bp, Homo sapiens
agaaatgcctcttac

SEQ ID NO: 1045264 - DNA, 15 bp, Homo sapiens
cagaaatgcctctta

SEQ ID NO: 1045265 - DNA, 15 bp, Homo sapiens
gcagaaatgcctctt

SEQ ID NO: 1045266 - DNA, 15 bp, Homo sapiens
agcagaaatgcctct

SEQ ID NO: 1045267 - DNA, 15 bp, Homo sapiens
aagcagaaatgcctc

SEQ ID NO: 1045268 - DNA, 15 bp, Homo sapiens
taagcagaaatgcct

SEQ ID NO: 1045269 - DNA, 15 bp, Homo sapiens
ataagcagaaatgcc

SEQ ID NO: 1045270 - DNA, 15 bp, Homo sapiens
cataagcagaaatgc

SEQ ID NO: 1045271 - DNA, 15 bp, Homo sapiens
gcataagcagaaatg

SEQ ID NO: 1045272 - DNA, 15 bp, Homo sapiens
ggcataagcagaaat

SEQ ID NO: 1045273 - DNA, 15 bp, Homo sapiens
aggcataagcagaaa

SEQ ID NO: 1045274 - DNA, 15 bp, Homo sapiens
caggcataagcagaa

SEQ ID NO: 1045275 - DNA, 15 bp, Homo sapiens
ccaggcataagcaga

SEQ ID NO: 1045276 - DNA, 15 bp, Homo sapiens
tccaggcataagcag

SEQ ID NO: 1045277 - DNA, 15 bp, Homo sapiens
ttccaggcataagca

SEQ ID NO: 1045278 - DNA, 15 bp, Homo sapiens
tttccaggcataagc

SEQ ID NO: 1045279 - DNA, 15 bp, Homo sapiens
ttttccaggcataag

SEQ ID NO: 1045280 - DNA, 15 bp, Homo sapiens
tttttccaggcataa

SEQ ID NO: 1045281 - DNA, 15 bp, Homo sapiens
atttttccaggcata

SEQ ID NO: 1045282 - DNA, 15 bp, Homo sapiens
gatttttccaggcat

SEQ ID NO: 1045283 - DNA, 15 bp, Homo sapiens
agatttttccaggca

SEQ ID NO: 1045284 - DNA, 15 bp, Homo sapiens
tagatttttccaggc

SEQ ID NO: 1045285 - DNA, 15 bp, Homo sapiens
ctagatttttccagg

SEQ ID NO: 1045286 - DNA, 15 bp, Homo sapiens
gctagatttttccag

SEQ ID NO: 1045287 - DNA, 15 bp, Homo sapiens
tgctagatttttcca

SEQ ID NO: 1045288 - DNA, 15 bp, Homo sapiens
atgctagatttttcc

SEQ ID NO: 1045289 - DNA, 15 bp, Homo sapiens
aatgctagatttttc

SEQ ID NO: 1045290 - DNA, 15 bp, Homo sapiens
gaatgctagattttt

SEQ ID NO: 1045291 - DNA, 15 bp, Homo sapiens
tgaatgctagatttt

SEQ ID NO: 1045292 - DNA, 15 bp, Homo sapiens
gtgaatgctagattt

SEQ ID NO: 1045293 - DNA, 15 bp, Homo sapiens
tgtgaatgctagatt

SEQ ID NO: 1045294 - DNA, 15 bp, Homo sapiens
gtgtgaatgctagat

SEQ ID NO: 1045295 - DNA, 15 bp, Homo sapiens
tgtgtgaatgctaga

SEQ ID NO: 1045296 - DNA, 15 bp, Homo sapiens
gtgtgtgaatgctag

SEQ ID NO: 1045297 - DNA, 15 bp, Homo sapiens
ggtgtgtgaatgcta

SEQ ID NO: 1045298 - DNA, 15 bp, Homo sapiens
tggtgtgtgaatgct

SEQ ID NO: 1045299 - DNA, 15 bp, Homo sapiens
gtggtgtgtgaatgc

SEQ ID NO: 1045300 - DNA, 15 bp, Homo sapiens
ggtggtgtgtgaatg

SEQ ID NO: 1045301 - DNA, 15 bp, Homo sapiens
tggtggtgtgtgaat

SEQ ID NO: 1045302 - DNA, 15 bp, Homo sapiens
gtggtggtgtgtgaa

SEQ ID NO: 1045303 - DNA, 15 bp, Homo sapiens
tgtggtggtgtgtga

SEQ ID NO: 1045304 - DNA, 15 bp, Homo sapiens
ttgtggtggtgtgtg

SEQ ID NO: 1045305 - DNA, 15 bp, Homo sapiens
attgtggtggtgtgt

SEQ ID NO: 1045306 - DNA, 15 bp, Homo sapiens
tattgtggtggtgtg

SEQ ID NO: 1045307 - DNA, 15 bp, Homo sapiens
gtattgtggtggtgt

SEQ ID NO: 1045308 - DNA, 15 bp, Homo sapiens
agtattgtggtggtg

SEQ ID NO: 1045309 - DNA, 15 bp, Homo sapiens
tagtattgtggtggt

SEQ ID NO: 1045310 - DNA, 15 bp, Homo sapiens
atagtattgtggtgg

SEQ ID NO: 1045311 - DNA, 15 bp, Homo sapiens
tatagtattgtggtg

SEQ ID NO: 1045312 - DNA, 15 bp, Homo sapiens
atatagtattgtggt

SEQ ID NO: 1045313 - DNA, 15 bp, Homo sapiens
aatatagtattgtgg

SEQ ID NO: 1045314 - DNA, 15 bp, Homo sapiens
gaatatagtattgtg

SEQ ID NO: 1045315 - DNA, 15 bp, Homo sapiens
ggaatatagtattgt

SEQ ID NO: 1045316 - DNA, 15 bp, Homo sapiens
tggaatatagtattg

SEQ ID NO: 1045317 - DNA, 15 bp, Homo sapiens
atggaatatagtatt

SEQ ID NO: 1045318 - DNA, 15 bp, Homo sapiens
catggaatatagtat

SEQ ID NO: 1045319 - DNA, 15 bp, Homo sapiens
gcatggaatatagta

SEQ ID NO: 1045320 - DNA, 15 bp, Homo sapiens
ggcatggaatatagt

SEQ ID NO: 1045321 - DNA, 15 bp, Homo sapiens
tggcatggaatatag

SEQ ID NO: 1045322 - DNA, 15 bp, Homo sapiens
ttggcatggaatata

SEQ ID NO: 1045323 - DNA, 15 bp, Homo sapiens
cttggcatggaatat

SEQ ID NO: 1045324 - DNA, 15 bp, Homo sapiens
acttggcatggaata

SEQ ID NO: 1045325 - DNA, 15 bp, Homo sapiens
gacttggcatggaat

SEQ ID NO: 1045326 - DNA, 15 bp, Homo sapiens
tgacttggcatggaa

SEQ ID NO: 1045327 - DNA, 15 bp, Homo sapiens
gtgacttggcatgga

SEQ ID NO: 1045328 - DNA, 15 bp, Homo sapiens
ggtgacttggcatgg

SEQ ID NO: 1045329 - DNA, 15 bp, Homo sapiens
tggtgacttggcatg

SEQ ID NO: 1045330 - DNA, 15 bp, Homo sapiens
gtggtgacttggcat

SEQ ID NO: 1045331 - DNA, 15 bp, Homo sapiens
agtggtgacttggca

SEQ ID NO: 1045332 - DNA, 15 bp, Homo sapiens
tagtggtgacttggc

SEQ ID NO: 1045333 - DNA, 15 bp, Homo sapiens
atagtggtgacttgg

SEQ ID NO: 1045334 - DNA, 15 bp, Homo sapiens
aatagtggtgacttg

SEQ ID NO: 1045335 - DNA, 15 bp, Homo sapiens
gaatagtggtgactt

SEQ ID NO: 1045336 - DNA, 15 bp, Homo sapiens
agaatagtggtgact

SEQ ID NO: 1045337 - DNA, 15 bp, Homo sapiens
aagaatagtggtgac

SEQ ID NO: 1045338 - DNA, 15 bp, Homo sapiens
caagaatagtggtga

SEQ ID NO: 1045339 - DNA, 15 bp, Homo sapiens
ccaagaatagtggtg

SEQ ID NO: 1045340 - DNA, 15 bp, Homo sapiens
gccaagaatagtggt

SEQ ID NO: 1045341 - DNA, 15 bp, Homo sapiens
ggccaagaatagtgg

SEQ ID NO: 1045342 - DNA, 15 bp, Homo sapiens
aggccaagaatagtg

SEQ ID NO: 1045343 - DNA, 15 bp, Homo sapiens
gaggccaagaatagt

SEQ ID NO: 1045344 - DNA, 15 bp, Homo sapiens
ggaggccaagaatag

SEQ ID NO: 1045345 - DNA, 15 bp, Homo sapiens
gggaggccaagaata

SEQ ID NO: 1045346 - DNA, 15 bp, Homo sapiens
agggaggccaagaat

SEQ ID NO: 1045347 - DNA, 15 bp, Homo sapiens
tagggaggccaagaa

SEQ ID NO: 1045348 - DNA, 15 bp, Homo sapiens
atagggaggccaaga

SEQ ID NO: 1045349 - DNA, 15 bp, Homo sapiens
gatagggaggccaag

SEQ ID NO: 1045350 - DNA, 15 bp, Homo sapiens
ggatagggaggccaa

SEQ ID NO: 1045351 - DNA, 15 bp, Homo sapiens
gggatagggaggcca

SEQ ID NO: 1045352 - DNA, 15 bp, Homo sapiens
ggggatagggaggcc

SEQ ID NO: 1045353 - DNA, 15 bp, Homo sapiens
tggggatagggaggc

SEQ ID NO: 1045354 - DNA, 15 bp, Homo sapiens
gtggggatagggagg

SEQ ID NO: 1045355 - DNA, 15 bp, Homo sapiens
ggtggggatagggag

SEQ ID NO: 1045356 - DNA, 15 bp, Homo sapiens
gggtggggataggga

SEQ ID NO: 1045357 - DNA, 15 bp, Homo sapiens
agggtggggataggg

SEQ ID NO: 1045358 - DNA, 15 bp, Homo sapiens
gagggtggggatagg

SEQ ID NO: 1045359 - DNA, 15 bp, Homo sapiens
ggagggtggggatag

SEQ ID NO: 1045360 - DNA, 15 bp, Homo sapiens
aggagggtggggata

SEQ ID NO: 1045361 - DNA, 15 bp, Homo sapiens
aaggagggtggggat

SEQ ID NO: 1045362 - DNA, 15 bp, Homo sapiens
aaaggagggtgggga

SEQ ID NO: 1045363 - DNA, 15 bp, Homo sapiens
aaaaggagggtgggg

SEQ ID NO: 1045364 - DNA, 15 bp, Homo sapiens
aaaaaggagggtggg

SEQ ID NO: 1045365 - DNA, 15 bp, Homo sapiens
caaaaaggagggtgg

SEQ ID NO: 1045366 - DNA, 15 bp, Homo sapiens
ccaaaaaggagggtg

SEQ ID NO: 1045367 - DNA, 15 bp, Homo sapiens
cccaaaaaggagggt

SEQ ID NO: 1045368 - DNA, 15 bp, Homo sapiens
ccccaaaaaggaggg

SEQ ID NO: 1045369 - DNA, 15 bp, Homo sapiens
cccccaaaaaggagg

SEQ ID NO: 1045370 - DNA, 15 bp, Homo sapiens
acccccaaaaaggag

SEQ ID NO: 1045371 - DNA, 15 bp, Homo sapiens
gacccccaaaaagga

SEQ ID NO: 1045372 - DNA, 15 bp, Homo sapiens
ggacccccaaaaagg

SEQ ID NO: 1045373 - DNA, 15 bp, Homo sapiens
gggacccccaaaaag

SEQ ID NO: 1045374 - DNA, 15 bp, Homo sapiens
tgggacccccaaaaa

SEQ ID NO: 1045375 - DNA, 15 bp, Homo sapiens
ctgggacccccaaaa

SEQ ID NO: 1045376 - DNA, 15 bp, Homo sapiens
tctgggacccccaaa

SEQ ID NO: 1045377 - DNA, 15 bp, Homo sapiens
gtctgggacccccaa

SEQ ID NO: 1045378 - DNA, 15 bp, Homo sapiens
agtctgggaccccca

SEQ ID NO: 1045379 - DNA, 15 bp, Homo sapiens
tagtctgggaccccc

SEQ ID NO: 1045380 - DNA, 15 bp, Homo sapiens
gtagtctgggacccc

SEQ ID NO: 1045381 - DNA, 15 bp, Homo sapiens
tgtagtctgggaccc

SEQ ID NO: 1045382 - DNA, 15 bp, Homo sapiens
ctgtagtctgggacc

SEQ ID NO: 1045383 - DNA, 15 bp, Homo sapiens
tctgtagtctgggac

SEQ ID NO: 1045384 - DNA, 15 bp, Homo sapiens
ttctgtagtctggga

SEQ ID NO: 1045385 - DNA, 15 bp, Homo sapiens
gttctgtagtctggg

SEQ ID NO: 1045386 - DNA, 15 bp, Homo sapiens
ggttctgtagtctgg

SEQ ID NO: 1045387 - DNA, 15 bp, Homo sapiens
tggttctgtagtctg

SEQ ID NO: 1045388 - DNA, 15 bp, Homo sapiens
ttggttctgtagtct

SEQ ID NO: 1045389 - DNA, 15 bp, Homo sapiens
attggttctgtagtc

SEQ ID NO: 1045390 - DNA, 15 bp, Homo sapiens
tattggttctgtagt

SEQ ID NO: 1045391 - DNA, 15 bp, Homo sapiens
ttattggttctgtag

SEQ ID NO: 1045392 - DNA, 15 bp, Homo sapiens
tttattggttctgta

SEQ ID NO: 1045393 - DNA, 15 bp, Homo sapiens
gtttattggttctgt

SEQ ID NO: 1045394 - DNA, 15 bp, Homo sapiens
tgtttattggttctg

SEQ ID NO: 1045395 - DNA, 15 bp, Homo sapiens
ttgtttattggttct

SEQ ID NO: 1045396 - DNA, 15 bp, Homo sapiens
tttgtttattggttc

SEQ ID NO: 1045397 - DNA, 15 bp, Homo sapiens
gtttgtttattggtt

SEQ ID NO: 1045398 - DNA, 15 bp, Homo sapiens
ggtttgtttattggt

SEQ ID NO: 1045399 - DNA, 15 bp, Homo sapiens
gggtttgtttattgg

SEQ ID NO: 1045400 - DNA, 15 bp, Homo sapiens
tgggtttgtttattg

SEQ ID NO: 1045401 - DNA, 15 bp, Homo sapiens
gtgggtttgtttatt

SEQ ID NO: 1045402 - DNA, 15 bp, Homo sapiens
agtgggtttgtttat

SEQ ID NO: 1045403 - DNA, 15 bp, Homo sapiens
aagtgggtttgttta

SEQ ID NO: 1045404 - DNA, 15 bp, Homo sapiens
aaagtgggtttgttt

SEQ ID NO: 1045405 - DNA, 15 bp, Homo sapiens
gaaagtgggtttgtt

SEQ ID NO: 1045406 - DNA, 15 bp, Homo sapiens
tgaaagtgggtttgt

SEQ ID NO: 1045407 - DNA, 15 bp, Homo sapiens
atgaaagtgggtttg

SEQ ID NO: 1045408 - DNA, 15 bp, Homo sapiens
catgaaagtgggttt

SEQ ID NO: 1045409 - DNA, 15 bp, Homo sapiens
tcatgaaagtgggtt

SEQ ID NO: 1045410 - DNA, 15 bp, Homo sapiens
atcatgaaagtgggt

SEQ ID NO: 1045411 - DNA, 15 bp, Homo sapiens
aatcatgaaagtggg

SEQ ID NO: 1045412 - DNA, 15 bp, Homo sapiens
gaatcatgaaagtgg

SEQ ID NO: 1045413 - DNA, 15 bp, Homo sapiens
ggaatcatgaaagtg

SEQ ID NO: 1045414 - DNA, 15 bp, Homo sapiens
aggaatcatgaaagt

SEQ ID NO: 1045415 - DNA, 15 bp, Homo sapiens
gaggaatcatgaaag

SEQ ID NO: 1045416 - DNA, 15 bp, Homo sapiens
ggaggaatcatgaaa

SEQ ID NO: 1045417 - DNA, 15 bp, Homo sapiens
tggaggaatcatgaa

SEQ ID NO: 1045418 - DNA, 15 bp, Homo sapiens
atggaggaatcatga

SEQ ID NO: 1045419 - DNA, 15 bp, Homo sapiens
gatggaggaatcatg

SEQ ID NO: 1045420 - DNA, 15 bp, Homo sapiens
ggatggaggaatcat

SEQ ID NO: 1045421 - DNA, 15 bp, Homo sapiens
gggatggaggaatca

SEQ ID NO: 1045422 - DNA, 15 bp, Homo sapiens
ggggatggaggaatc

SEQ ID NO: 1045423 - DNA, 15 bp, Homo sapiens
tggggatggaggaat

SEQ ID NO: 1045424 - DNA, 15 bp, Homo sapiens
gtggggatggaggaa

SEQ ID NO: 1045425 - DNA, 15 bp, Homo sapiens
agtggggatggagga

SEQ ID NO: 1045426 - DNA, 15 bp, Homo sapiens
gagtggggatggagg

SEQ ID NO: 1045427 - DNA, 15 bp, Homo sapiens
ggagtggggatggag

SEQ ID NO: 1045428 - DNA, 15 bp, Homo sapiens
tggagtggggatgga

SEQ ID NO: 1045429 - DNA, 15 bp, Homo sapiens
gtggagtggggatgg

SEQ ID NO: 1045430 - DNA, 15 bp, Homo sapiens
agtggagtggggatg

SEQ ID NO: 1045431 - DNA, 15 bp, Homo sapiens
cagtggagtggggat

SEQ ID NO: 1045432 - DNA, 15 bp, Homo sapiens
gcagtggagtgggga

SEQ ID NO: 1045433 - DNA, 15 bp, Homo sapiens
ggcagtggagtgggg

SEQ ID NO: 1045434 - DNA, 15 bp, Homo sapiens
gggcagtggagtggg

SEQ ID NO: 1045435 - DNA, 15 bp, Homo sapiens
tgggcagtggagtgg

SEQ ID NO: 1045436 - DNA, 15 bp, Homo sapiens
ttgggcagtggagtg

SEQ ID NO: 1045437 - DNA, 15 bp, Homo sapiens
tttgggcagtggagt

SEQ ID NO: 1045438 - DNA, 15 bp, Homo sapiens
ctttgggcagtggag

SEQ ID NO: 1045439 - DNA, 15 bp, Homo sapiens
actttgggcagtgga

SEQ ID NO: 1045440 - DNA, 15 bp, Homo sapiens
gactttgggcagtgg

SEQ ID NO: 1045441 - DNA, 15 bp, Homo sapiens
ggactttgggcagtg

SEQ ID NO: 1045442 - DNA, 15 bp, Homo sapiens
gggactttgggcagt
